United States Patent Application Publication US 2005/0255487 A1 - sequence listing, part 52

SEQ ID NO: 1423483 - RNA, 19 nt, Homo sapiens
  misc_RNA (1)...(19): siRNA sense strand
gaagaggaagaaguggaaa

SEQ ID NO: 1423484 - RNA, 19 nt, Homo sapiens
  misc_RNA (1)...(19): siRNA sense strand
ccuccaauguggcuuaugg

SEQ ID NO: 1423485 - RNA, 19 nt, Homo sapiens
  misc_RNA (1)...(19): siRNA sense strand
guaccugaccuccaaugug

SEQ ID NO: 1423486 - RNA, 19 nt, Homo sapiens
  misc_RNA (1)...(19): siRNA sense strand
guggaacucuggucaagcu

SEQ ID NO: 1423487 - RNA, 19 nt, Homo sapiens
  misc_RNA (1)...(19): siRNA sense strand
agaaguggaaagucuuaaa

SEQ ID NO: 1423488 - RNA, 19 nt, Homo sapiens
  misc_RNA (1)...(19): siRNA sense strand
ugaccuccaauguggcuua

SEQ ID NO: 1423489 - RNA, 19 nt, Homo sapiens
  misc_RNA (1)...(19): siRNA sense strand
agaagaggaagaaguggaa

SEQ ID NO: 1423490 - RNA, 19 nt, Homo sapiens
  misc_RNA (1)...(19): siRNA sense strand
uuaaaagcauucggaagua

SEQ ID NO: 1423491 - RNA, 19 nt, Homo sapiens
  misc_RNA (1)...(19): siRNA sense strand
ggaaagucuuaaaagcauu

SEQ ID NO: 1423492 - RNA, 19 nt, Homo sapiens
  misc_RNA (1)...(19): siRNA sense strand
uuaugggucuacaggcauu

SEQ ID NO: 1423493 - RNA, 19 nt, Homo sapiens
  misc_RNA (1)...(19): siRNA sense strand
caaagacaucacugcugaa

SEQ ID NO: 1423494 - RNA, 19 nt, Homo sapiens
  misc_RNA (1)...(19): siRNA sense strand
gaccuccaauguggcuuau

SEQ ID NO: 1423495 - RNA, 19 nt, Homo sapiens
  misc_RNA (1)...(19): siRNA sense strand
gaagaagaagaggaagaag

SEQ ID NO: 1423496 - RNA, 19 nt, Homo sapiens
  misc_RNA (1)...(19): siRNA sense strand
gacucuguguggacgcaaa

SEQ ID NO: 1423497 - RNA, 19 nt, Homo sapiens
  misc_RNA (1)...(19): siRNA sense strand
cugaaggaccugacucugu

SEQ ID NO: 1423498 - RNA, 19 nt, Homo sapiens
  misc_RNA (1)...(19): siRNA sense strand
caaaguggauaaacuagua

SEQ ID NO: 1423499 - RNA, 19 nt, Homo sapiens
  misc_RNA (1)...(19): siRNA sense strand
gcaagaaugugugcccuua

SEQ ID NO: 1423500 - RNA, 19 nt, Homo sapiens
  misc_RNA (1)...(19): siRNA sense strand
gaaguuaccauuugauuug

SEQ ID NO: 1423501 - RNA, 19 nt, Homo sapiens
  misc_RNA (1)...(19): siRNA sense strand
gaacuagauugcuugauca

SEQ ID NO: 1423502 - RNA, 19 nt, Homo sapiens
  misc_RNA (1)...(19): siRNA sense strand
ggucucugcugucuucuua

SEQ ID NO: 1423503 - RNA, 19 nt, Homo sapiens
  misc_RNA (1)...(19): siRNA sense strand
gcgagaggcugucaguaaa

SEQ ID NO: 1423504 - RNA, 19 nt, Homo sapiens
  misc_RNA (1)...(19): siRNA sense strand
gcaguauauuccaaagaua

SEQ ID NO: 1423505 - RNA, 19 nt, Homo sapiens
  misc_RNA (1)...(19): siRNA sense strand
gauaaacuaguacgagaua

SEQ ID NO: 1423506 - RNA, 19 nt, Homo sapiens
  misc_RNA (1)...(19): siRNA sense strand
caaacuggaugaacuagau

SEQ ID NO: 1423507 - RNA, 19 nt, Homo sapiens
  misc_RNA (1)...(19): siRNA sense strand
ucacagugcuauuacuuug

SEQ ID NO: 1423508 - RNA, 19 nt, Homo sapiens
  misc_RNA (1)...(19): siRNA sense strand
gcaccaaaguggauaaacu

SEQ ID NO: 1423509 - RNA, 19 nt, Homo sapiens
  misc_RNA (1)...(19): siRNA sense strand
ugucagaaguuaccauuug

SEQ ID NO: 1423510 - RNA, 19 nt, Homo sapiens
  misc_RNA (1)...(19): siRNA sense strand
uggcauaugcuuuggauua

SEQ ID NO: 1423511 - RNA, 19 nt, Homo sapiens
  misc_RNA (1)...(19): siRNA sense strand
gaaugugugcccuuaauga

SEQ ID NO: 1423512 - RNA, 19 nt, Homo sapiens
  misc_RNA (1)...(19): siRNA sense strand
cauaugcuuuggauuauug

SEQ ID NO: 1423513 - RNA, 19 nt, Homo sapiens
  misc_RNA (1)...(19): siRNA sense strand
ugaacuagauugcuugauc

SEQ ID NO: 1423514 - RNA, 19 nt, Homo sapiens
  misc_RNA (1)...(19): siRNA sense strand
gaaacaugaugagcaagga

SEQ ID NO: 1423515 - RNA, 19 nt, Homo sapiens
  misc_RNA (1)...(19): siRNA sense strand
uaggugaucuucagcuuug

SEQ ID NO: 1423516 - RNA, 19 nt, Homo sapiens
  misc_RNA (1)...(19): siRNA sense strand
gagaggcugucaguaaaga

SEQ ID NO: 1423517 - RNA, 19 nt, Homo sapiens
  misc_RNA (1)...(19): siRNA sense strand
gcauaugcuuuggauuauu

SEQ ID NO: 1423518 - RNA, 19 nt, Homo sapiens
  misc_RNA (1)...(19): siRNA sense strand
cuagauugcuugaucaaag

SEQ ID NO: 1423519 - RNA, 19 nt, Homo sapiens
  misc_RNA (1)...(19): siRNA sense strand
guuagcaucuuagcaguau

SEQ ID NO: 1423520 - RNA, 19 nt, Homo sapiens
  misc_RNA (1)...(19): siRNA sense strand
gagcacuccuugagcuguu

SEQ ID NO: 1423521 - RNA, 19 nt, Homo sapiens
  misc_RNA (1)...(19): siRNA sense strand
ugaaaagugucagaaguua

SEQ ID NO: 1423522 - RNA, 19 nt, Homo sapiens
  misc_RNA (1)...(19): siRNA sense strand
ggucacagguacuagucuu

SEQ ID NO: 1423523 - RNA, 19 nt, Homo sapiens
  misc_RNA (1)...(19): siRNA sense strand
gucagaaguuaccauuuga

SEQ ID NO: 1423524 - RNA, 19 nt, Homo sapiens
  misc_RNA (1)...(19): siRNA sense strand
ggcauaugcuuuggauuau

SEQ ID NO: 1423525 - RNA, 19 nt, Homo sapiens
  misc_RNA (1)...(19): siRNA sense strand
acagugcuauuacuuugaa

SEQ ID NO: 1423526 - RNA, 19 nt, Homo sapiens
  misc_RNA (1)...(19): siRNA sense strand
caccaaaguggauaaacua

SEQ ID NO: 1423527 - RNA, 19 nt, Homo sapiens
  misc_RNA (1)...(19): siRNA sense strand
gacggucacagugcuauua

SEQ ID NO: 1423528 - RNA, 19 nt, Homo sapiens
  misc_RNA (1)...(19): siRNA sense strand
aagaaugugugcccuuaau

SEQ ID NO: 1423529 - RNA, 19 nt, Homo sapiens
  misc_RNA (1)...(19): siRNA sense strand
uggaugaacuagauugcuu

SEQ ID NO: 1423530 - RNA, 19 nt, Homo sapiens
  misc_RNA (1)...(19): siRNA sense strand
cagaaguuaccauuugauu

SEQ ID NO: 1423531 - RNA, 19 nt, Homo sapiens
  misc_RNA (1)...(19): siRNA sense strand
gaagcgagaggcugucagu

SEQ ID NO: 1423532 - RNA, 19 nt, Homo sapiens
  misc_RNA (1)...(19): siRNA sense strand
ggucacagugcuauuacuu

SEQ ID NO: 1423533 - RNA, 19 nt, Homo sapiens
  misc_RNA (1)...(19): siRNA sense strand
ccaaagauaauuacaaacg

SEQ ID NO: 1423534 - RNA, 19 nt, Homo sapiens
  misc_RNA (1)...(19): siRNA sense strand
aaacccugcugauucugaa

SEQ ID NO: 1423535 - RNA, 19 nt, Homo sapiens
  misc_RNA (1)...(19): siRNA sense strand
gcaaacuggaugaacuaga

SEQ ID NO: 1423536 - RNA, 19 nt, Homo sapiens
  misc_RNA (1)...(19): siRNA sense strand
caagaaugugugcccuuaa

SEQ ID NO: 1423537 - RNA, 19 nt, Homo sapiens
  misc_RNA (1)...(19): siRNA sense strand
caccaucaccaacaacauu

SEQ ID NO: 1423538 - RNA, 19 nt, Homo sapiens
  misc_RNA (1)...(19): siRNA sense strand
gagcgacuuugaucaccau

SEQ ID NO: 1423539 - RNA, 19 nt, Homo sapiens
  misc_RNA (1)...(19): siRNA sense strand
gauagcaccaaaguggaua

SEQ ID NO: 1423540 - RNA, 19 nt, Homo sapiens
  misc_RNA (1)...(19): siRNA sense strand
uguuggaaauuucuugaga

SEQ ID NO: 1423541 - RNA, 19 nt, Homo sapiens
  misc_RNA (1)...(19): siRNA sense strand
uccuugagcuguugaagau

SEQ ID NO: 1423542 - RNA, 19 nt, Homo sapiens
  misc_RNA (1)...(19): siRNA sense strand
gaugaacuagauugcuuga

SEQ ID NO: 1423543 - RNA, 19 nt, Homo sapiens
  misc_RNA (1)...(19): siRNA sense strand
uuucggaacacgaggguua

SEQ ID NO: 1423544 - RNA, 19 nt, Homo sapiens
  misc_RNA (1)...(19): siRNA sense strand
ggccagagcgacuuugauc

SEQ ID NO: 1423545 - RNA, 19 nt, Homo sapiens
  misc_RNA (1)...(19): siRNA sense strand
agcaguauauuccaaagau

SEQ ID NO: 1423546 - RNA, 19 nt, Homo sapiens
  misc_RNA (1)...(19): siRNA sense strand
uuggaaacaugaugagcaa

SEQ ID NO: 1423547 - RNA, 19 nt, Homo sapiens
  misc_RNA (1)...(19): siRNA sense strand
ggauaaacuaguacgagau

SEQ ID NO: 1423548 - RNA, 19 nt, Homo sapiens
  misc_RNA (1)...(19): siRNA sense strand
cuuacuggcuguaccacuu

SEQ ID NO: 1423549 - RNA, 19 nt, Homo sapiens
  misc_RNA (1)...(19): siRNA sense strand
aaacgggucacagguacua

SEQ ID NO: 1423550 - RNA, 19 nt, Homo sapiens
  misc_RNA (1)...(19): siRNA sense strand
uacaaacgggucacaggua

SEQ ID NO: 1423551 - RNA, 19 nt, Homo sapiens
  misc_RNA (1)...(19): siRNA sense strand
gguuagcaucuuagcagua

SEQ ID NO: 1423552 - RNA, 19 nt, Homo sapiens
  misc_RNA (1)...(19): siRNA sense strand
gaacacgaggguuauuuug

SEQ ID NO: 1423553 - RNA, 19 nt, Homo sapiens
  misc_RNA (1)...(19): siRNA sense strand
uagcaucuuagcaguauau

SEQ ID NO: 1423554 - RNA, 19 nt, Homo sapiens
  misc_RNA (1)...(19): siRNA sense strand
ggaacacgaggguuauuuu

SEQ ID NO: 1423555 - RNA, 19 nt, Homo sapiens
  misc_RNA (1)...(19): siRNA sense strand
caggugguauuuguuggaa

SEQ ID NO: 1423556 - RNA, 19 nt, Homo sapiens
  misc_RNA (1)...(19): siRNA sense strand
gaucuucagcuuugcaaac

SEQ ID NO: 1423557 - RNA, 19 nt, Homo sapiens
  misc_RNA (1)...(19): siRNA sense strand
caucuuagcaguauauucc

SEQ ID NO: 1423558 - RNA, 19 nt, Homo sapiens
  misc_RNA (1)...(19): siRNA sense strand
ugaaaacccugcugauucu

SEQ ID NO: 1423559 - RNA, 19 nt, Homo sapiens
  misc_RNA (1)...(19): siRNA sense strand
aguacgagauauuuaugga

SEQ ID NO: 1423560 - RNA, 19 nt, Homo sapiens
  misc_RNA (1)...(19): siRNA sense strand
gcugggcuguggcuucaag

SEQ ID NO: 1423561 - RNA, 19 nt, Homo sapiens
  misc_RNA (1)...(19): siRNA sense strand
ggacggucacagugcuauu

SEQ ID NO: 1423562 - RNA, 19 nt, Homo sapiens
  misc_RNA (1)...(19): siRNA sense strand
uagauugcuugaucaaagg

SEQ ID NO: 1423563 - RNA, 19 nt, Homo sapiens
  misc_RNA (1)...(19): siRNA sense strand
agcgagaggcugucaguaa

SEQ ID NO: 1423564 - RNA, 19 nt, Homo sapiens
  misc_RNA (1)...(19): siRNA sense strand
uuuggucucugcugucuuc

SEQ ID NO: 1423565 - RNA, 19 nt, Homo sapiens
  misc_RNA (1)...(19): siRNA sense strand
cggaacacgaggguuauuu

SEQ ID NO: 1423566 - RNA, 19 nt, Homo sapiens
  misc_RNA (1)...(19): siRNA sense strand
ucguggagauagcaccaaa

SEQ ID NO: 1423567 - RNA, 19 nt, Homo sapiens
  misc_RNA (1)...(19): siRNA sense strand
ccaaaguggauaaacuagu

SEQ ID NO: 1423568 - RNA, 19 nt, Homo sapiens
  misc_RNA (1)...(19): siRNA sense strand
gucacagugcuauuacuuu

SEQ ID NO: 1423569 - RNA, 19 nt, Homo sapiens
  misc_RNA (1)...(19): siRNA sense strand
guggagauagcaccaaagu

SEQ ID NO: 1423570 - RNA, 19 nt, Homo sapiens
  misc_RNA (1)...(19): siRNA sense strand
gagaagcgagaggcuguca

SEQ ID NO: 1423571 - RNA, 19 nt, Homo sapiens
  misc_RNA (1)...(19): siRNA sense strand
aaugugugcccuuaaugaa

SEQ ID NO: 1423572 - RNA, 19 nt, Homo sapiens
  misc_RNA (1)...(19): siRNA sense strand
cucaauagcaagaaugugu

SEQ ID NO: 1423573 - RNA, 19 nt, Homo sapiens
  misc_RNA (1)...(19): siRNA sense strand
aaacuggaugaacuagauu

SEQ ID NO: 1423574 - RNA, 19 nt, Homo sapiens
  misc_RNA (1)...(19): siRNA sense strand
caaaguggauaaacuagua

SEQ ID NO: 1423575 - RNA, 19 nt, Homo sapiens
  misc_RNA (1)...(19): siRNA sense strand
gcaagaaugugugcccuua

SEQ ID NO: 1423576 - RNA, 19 nt, Homo sapiens
  misc_RNA (1)...(19): siRNA sense strand
gcgagaggcugucaguaaa

SEQ ID NO: 1423577 - RNA, 19 nt, Homo sapiens
  misc_RNA (1)...(19): siRNA sense strand
gauaaacuaguacgagaua

SEQ ID NO: 1423578 - RNA, 19 nt, Homo sapiens
  misc_RNA (1)...(19): siRNA sense strand
gcaccaaaguggauaaacu

SEQ ID NO: 1423579 - RNA, 19 nt, Homo sapiens
  misc_RNA (1)...(19): siRNA sense strand
uggcauaugcuuuggauua

SEQ ID NO: 1423580 - RNA, 19 nt, Homo sapiens
  misc_RNA (1)...(19): siRNA sense strand
gaaugugugcccuuaauga

SEQ ID NO: 1423581 - RNA, 19 nt, Homo sapiens
  misc_RNA (1)...(19): siRNA sense strand
cauaugcuuuggauuauug

SEQ ID NO: 1423582 - RNA, 19 nt, Homo sapiens
  misc_RNA (1)...(19): siRNA sense strand
gaaacaugaugagcaagga

SEQ ID NO: 1423583 - RNA, 19 nt, Homo sapiens
  misc_RNA (1)...(19): siRNA sense strand
gagaggcugucaguaaaga

SEQ ID NO: 1423584 - RNA, 19 nt, Homo sapiens
  misc_RNA (1)...(19): siRNA sense strand
gcauaugcuuuggauuauu

SEQ ID NO: 1423585 - RNA, 19 nt, Homo sapiens
  misc_RNA (1)...(19): siRNA sense strand
gagcacuccuugagcuguu

SEQ ID NO: 1423586 - RNA, 19 nt, Homo sapiens
  misc_RNA (1)...(19): siRNA sense strand
ggcauaugcuuuggauuau

SEQ ID NO: 1423587 - RNA, 19 nt, Homo sapiens
  misc_RNA (1)...(19): siRNA sense strand
caccaaaguggauaaacua

SEQ ID NO: 1423588 - RNA, 19 nt, Homo sapiens
  misc_RNA (1)...(19): siRNA sense strand
aagaaugugugcccuuaau

SEQ ID NO: 1423589 - RNA, 19 nt, Homo sapiens
  misc_RNA (1)...(19): siRNA sense strand
gaagcgagaggcugucagu

SEQ ID NO: 1423590 - RNA, 19 nt, Homo sapiens
  misc_RNA (1)...(19): siRNA sense strand
gagcgacuuugaucaccau

SEQ ID NO: 1423591 - RNA, 19 nt, Homo sapiens
  misc_RNA (1)...(19): siRNA sense strand
caagaaugugugcccuuaa

SEQ ID NO: 1423592 - RNA, 19 nt, Homo sapiens
  misc_RNA (1)...(19): siRNA sense strand
caccaucaccaacaacauu

SEQ ID NO: 1423593 - RNA, 19 nt, Homo sapiens
  misc_RNA (1)...(19): siRNA sense strand
gauagcaccaaaguggaua

SEQ ID NO: 1423594 - RNA, 19 nt, Homo sapiens
  misc_RNA (1)...(19): siRNA sense strand
uguuggaaauuucuugaga

SEQ ID NO: 1423595 - RNA, 19 nt, Homo sapiens
  misc_RNA (1)...(19): siRNA sense strand
uccuugagcuguugaagau

SEQ ID NO: 1423596 - RNA, 19 nt, Homo sapiens
  misc_RNA (1)...(19): siRNA sense strand
ggccagagcgacuuugauc

SEQ ID NO: 1423597 - RNA, 19 nt, Homo sapiens
  misc_RNA (1)...(19): siRNA sense strand
uuucggaacacgaggguua

SEQ ID NO: 1423598 - RNA, 19 nt, Homo sapiens
  misc_RNA (1)...(19): siRNA sense strand
uuggaaacaugaugagcaa

SEQ ID NO: 1423599 - RNA, 19 nt, Homo sapiens
  misc_RNA (1)...(19): siRNA sense strand
ggauaaacuaguacgagau

SEQ ID NO: 1423600 - RNA, 19 nt, Homo sapiens
  misc_RNA (1)...(19): siRNA sense strand
gaacacgaggguuauuuug

SEQ ID NO: 1423601 - RNA, 19 nt, Homo sapiens
  misc_RNA (1)...(19): siRNA sense strand
caggugguauuuguuggaa

SEQ ID NO: 1423602 - RNA, 19 nt, Homo sapiens
  misc_RNA (1)...(19): siRNA sense strand
ggaacacgaggguuauuuu

SEQ ID NO: 1423603 - RNA, 19 nt, Homo sapiens
  misc_RNA (1)...(19): siRNA sense strand
aguacgagauauuuaugga

SEQ ID NO: 1423604 - RNA, 19 nt, Homo sapiens
  misc_RNA (1)...(19): siRNA sense strand
gcugggcuguggcuucaag

SEQ ID NO: 1423605 - RNA, 19 nt, Homo sapiens
  misc_RNA (1)...(19): siRNA sense strand
agcgagaggcugucaguaa

SEQ ID NO: 1423606 - RNA, 19 nt, Homo sapiens
  misc_RNA (1)...(19): siRNA sense strand
ucguggagauagcaccaaa

SEQ ID NO: 1423607 - RNA, 19 nt, Homo sapiens
  misc_RNA (1)...(19): siRNA sense strand
cggaacacgaggguuauuu

SEQ ID NO: 1423608 - RNA, 19 nt, Homo sapiens
  misc_RNA (1)...(19): siRNA sense strand
ccaaaguggauaaacuagu

SEQ ID NO: 1423609 - RNA, 19 nt, Homo sapiens
  misc_RNA (1)...(19): siRNA sense strand
guggagauagcaccaaagu

SEQ ID NO: 1423610 - RNA, 19 nt, Homo sapiens
  misc_RNA (1)...(19): siRNA sense strand
gagaagcgagaggcuguca

SEQ ID NO: 1423611 - RNA, 19 nt, Homo sapiens
  misc_RNA (1)...(19): siRNA sense strand
aaugugugcccuuaaugaa

SEQ ID NO: 1423612 - RNA, 19 nt, Homo sapiens
  misc_RNA (1)...(19): siRNA sense strand
cucaauagcaagaaugugu

SEQ ID NO: 1423613 - RNA, 19 nt, Homo sapiens
  misc_RNA (1)...(19): siRNA sense strand
caaaguggauaaacuagua

SEQ ID NO: 1423614 - RNA, 19 nt, Homo sapiens
  misc_RNA (1)...(19): siRNA sense strand
gcaagaaugugugcccuua

SEQ ID NO: 1423615 - RNA, 19 nt, Homo sapiens
  misc_RNA (1)...(19): siRNA sense strand
gaaguuaccauuugauuug

SEQ ID NO: 1423616 - RNA, 19 nt, Homo sapiens
  misc_RNA (1)...(19): siRNA sense strand
gaacuagauugcuugauca

SEQ ID NO: 1423617 - RNA, 19 nt, Homo sapiens
  misc_RNA (1)...(19): siRNA sense strand
ggucucugcugucuucuua

SEQ ID NO: 1423618 - RNA, 19 nt, Homo sapiens
  misc_RNA (1)...(19): siRNA sense strand
gcgagaggcugucaguaaa

SEQ ID NO: 1423619 - RNA, 19 nt, Homo sapiens
  misc_RNA (1)...(19): siRNA sense strand
gcaguauauuccaaagaua

SEQ ID NO: 1423620 - RNA, 19 nt, Homo sapiens
  misc_RNA (1)...(19): siRNA sense strand
gauaaacuaguacgagaua

SEQ ID NO: 1423621 - RNA, 19 nt, Homo sapiens
  misc_RNA (1)...(19): siRNA sense strand
caaacuggaugaacuagau

SEQ ID NO: 1423622 - RNA, 19 nt, Homo sapiens
  misc_RNA (1)...(19): siRNA sense strand
ucacagugcuauuacuuug

SEQ ID NO: 1423623 - RNA, 19 nt, Homo sapiens
  misc_RNA (1)...(19): siRNA sense strand
gcaccaaaguggauaaacu

SEQ ID NO: 1423624 - RNA, 19 nt, Homo sapiens
  misc_RNA (1)...(19): siRNA sense strand
ugucagaaguuaccauuug

SEQ ID NO: 1423625 - RNA, 19 nt, Homo sapiens
  misc_RNA (1)...(19): siRNA sense strand
uggcauaugcuuuggauua

SEQ ID NO: 1423626 - RNA, 19 nt, Homo sapiens
  misc_RNA (1)...(19): siRNA sense strand
gaaugugugcccuuaauga

SEQ ID NO: 1423627 - RNA, 19 nt, Homo sapiens
  misc_RNA (1)...(19): siRNA sense strand
cauaugcuuuggauuauug

SEQ ID NO: 1423628 - RNA, 19 nt, Homo sapiens
  misc_RNA (1)...(19): siRNA sense strand
ugaacuagauugcuugauc

SEQ ID NO: 1423629 - RNA, 19 nt, Homo sapiens
  misc_RNA (1)...(19): siRNA sense strand
gaaacaugaugagcaagga

SEQ ID NO: 1423630 - RNA, 19 nt, Homo sapiens
  misc_RNA (1)...(19): siRNA sense strand
uaggugaucuucagcuuug

SEQ ID NO: 1423631 - RNA, 19 nt, Homo sapiens
  misc_RNA (1)...(19): siRNA sense strand
gagaggcugucaguaaaga

SEQ ID NO: 1423632 - RNA, 19 nt, Homo sapiens
  misc_RNA (1)...(19): siRNA sense strand
gcauaugcuuuggauuauu

SEQ ID NO: 1423633 - RNA, 19 nt, Homo sapiens
  misc_RNA (1)...(19): siRNA sense strand
cuagauugcuugaucaaag

SEQ ID NO: 1423634 - RNA, 19 nt, Homo sapiens
  misc_RNA (1)...(19): siRNA sense strand
guuagcaucuuagcaguau

SEQ ID NO: 1423635 - RNA, 19 nt, Homo sapiens
  misc_RNA (1)...(19): siRNA sense strand
gagcacuccuugagcuguu

SEQ ID NO: 1423636 - RNA, 19 nt, Homo sapiens
  misc_RNA (1)...(19): siRNA sense strand
ugaaaagugucagaaguua

SEQ ID NO: 1423637 - RNA, 19 nt, Homo sapiens
  misc_RNA (1)...(19): siRNA sense strand
ggucacagguacuagucuu

SEQ ID NO: 1423638 - RNA, 19 nt, Homo sapiens
  misc_RNA (1)...(19): siRNA sense strand
gucagaaguuaccauuuga

SEQ ID NO: 1423639 - RNA, 19 nt, Homo sapiens
  misc_RNA (1)...(19): siRNA sense strand
ggcauaugcuuuggauuau

SEQ ID NO: 1423640 - RNA, 19 nt, Homo sapiens
  misc_RNA (1)...(19): siRNA sense strand
acagugcuauuacuuugaa

SEQ ID NO: 1423641 - RNA, 19 nt, Homo sapiens
  misc_RNA (1)...(19): siRNA sense strand
caccaaaguggauaaacua

SEQ ID NO: 1423642 - RNA, 19 nt, Homo sapiens
  misc_RNA (1)...(19): siRNA sense strand
gacggucacagugcuauua

SEQ ID NO: 1423643 - RNA, 19 nt, Homo sapiens
  misc_RNA (1)...(19): siRNA sense strand
aagaaugugugcccuuaau

SEQ ID NO: 1423644 - RNA, 19 nt, Homo sapiens
  misc_RNA (1)...(19): siRNA sense strand
uggaugaacuagauugcuu

SEQ ID NO: 1423645 - RNA, 19 nt, Homo sapiens
  misc_RNA (1)...(19): siRNA sense strand
cagaaguuaccauuugauu

SEQ ID NO: 1423646 - RNA, 19 nt, Homo sapiens
  misc_RNA (1)...(19): siRNA sense strand
gaagcgagaggcugucagu

SEQ ID NO: 1423647 - RNA, 19 nt, Homo sapiens
  misc_RNA (1)...(19): siRNA sense strand
ggucacagugcuauuacuu

SEQ ID NO: 1423648 - RNA, 19 nt, Homo sapiens
  misc_RNA (1)...(19): siRNA sense strand
ccaaagauaauuacaaacg

SEQ ID NO: 1423649 - RNA, 19 nt, Homo sapiens
  misc_RNA (1)...(19): siRNA sense strand
aaacccugcugauucugaa

SEQ ID NO: 1423650 - RNA, 19 nt, Homo sapiens
  misc_RNA (1)...(19): siRNA sense strand
gcaaacuggaugaacuaga

SEQ ID NO: 1423651 - RNA, 19 nt, Homo sapiens
  misc_RNA (1)...(19): siRNA sense strand
caagaaugugugcccuuaa

SEQ ID NO: 1423652 - RNA, 19 nt, Homo sapiens
  misc_RNA (1)...(19): siRNA sense strand
caccaucaccaacaacauu

SEQ ID NO: 1423653 - RNA, 19 nt, Homo sapiens
  misc_RNA (1)...(19): siRNA sense strand
gagcgacuuugaucaccau

SEQ ID NO: 1423654 - RNA, 19 nt, Homo sapiens
  misc_RNA (1)...(19): siRNA sense strand
gauagcaccaaaguggaua

SEQ ID NO: 1423655 - RNA, 19 nt, Homo sapiens
  misc_RNA (1)...(19): siRNA sense strand
uguuggaaauuucuugaga

SEQ ID NO: 1423656 - RNA, 19 nt, Homo sapiens
  misc_RNA (1)...(19): siRNA sense strand
uccuugagcuguugaagau

SEQ ID NO: 1423657 - RNA, 19 nt, Homo sapiens
  misc_RNA (1)...(19): siRNA sense strand
gaugaacuagauugcuuga

SEQ ID NO: 1423658 - RNA, 19 nt, Homo sapiens
  misc_RNA (1)...(19): siRNA sense strand
uuucggaacacgaggguua

SEQ ID NO: 1423659 - RNA, 19 nt, Homo sapiens
  misc_RNA (1)...(19): siRNA sense strand
ggccagagcgacuuugauc

SEQ ID NO: 1423660 - RNA, 19 nt, Homo sapiens
  misc_RNA (1)...(19): siRNA sense strand
agcaguauauuccaaagau

SEQ ID NO: 1423661 - RNA, 19 nt, Homo sapiens
  misc_RNA (1)...(19): siRNA sense strand
uuggaaacaugaugagcaa

SEQ ID NO: 1423662 - RNA, 19 nt, Homo sapiens
  misc_RNA (1)...(19): siRNA sense strand
ggauaaacuaguacgagau

SEQ ID NO: 1423663 - RNA, 19 nt, Homo sapiens
  misc_RNA (1)...(19): siRNA sense strand
cuuacuggcuguaccacuu

SEQ ID NO: 1423664 - RNA, 19 nt, Homo sapiens
  misc_RNA (1)...(19): siRNA sense strand
aaacgggucacagguacua

SEQ ID NO: 1423665 - RNA, 19 nt, Homo sapiens
  misc_RNA (1)...(19): siRNA sense strand
uacaaacgggucacaggua

SEQ ID NO: 1423666 - RNA, 19 nt, Homo sapiens
  misc_RNA (1)...(19): siRNA sense strand
gguuagcaucuuagcagua

SEQ ID NO: 1423667 - RNA, 19 nt, Homo sapiens
  misc_RNA (1)...(19): siRNA sense strand
gaacacgaggguuauuuug

SEQ ID NO: 1423668 - RNA, 19 nt, Homo sapiens
  misc_RNA (1)...(19): siRNA sense strand
uagcaucuuagcaguauau

SEQ ID NO: 1423669 - RNA, 19 nt, Homo sapiens
  misc_RNA (1)...(19): siRNA sense strand
ggaacacgaggguuauuuu

SEQ ID NO: 1423670 - RNA, 19 nt, Homo sapiens
  misc_RNA (1)...(19): siRNA sense strand
caggugguauuuguuggaa

SEQ ID NO: 1423671 - RNA, 19 nt, Homo sapiens
  misc_RNA (1)...(19): siRNA sense strand
gaucuucagcuuugcaaac

SEQ ID NO: 1423672 - RNA, 19 nt, Homo sapiens
  misc_RNA (1)...(19): siRNA sense strand
caucuuagcaguauauucc

SEQ ID NO: 1423673 - RNA, 19 nt, Homo sapiens
  misc_RNA (1)...(19): siRNA sense strand
ugaaaacccugcugauucu

SEQ ID NO: 1423674 - RNA, 19 nt, Homo sapiens
  misc_RNA (1)...(19): siRNA sense strand
aguacgagauauuuaugga

SEQ ID NO: 1423675 - RNA, 19 nt, Homo sapiens
  misc_RNA (1)...(19): siRNA sense strand
gcugggcuguggcuucaag

SEQ ID NO: 1423676 - RNA, 19 nt, Homo sapiens
  misc_RNA (1)...(19): siRNA sense strand
ggacggucacagugcuauu

SEQ ID NO: 1423677 - RNA, 19 nt, Homo sapiens
  misc_RNA (1)...(19): siRNA sense strand
uagauugcuugaucaaagg

SEQ ID NO: 1423678 - RNA, 19 nt, Homo sapiens
  misc_RNA (1)...(19): siRNA sense strand
agcgagaggcugucaguaa

SEQ ID NO: 1423679 - RNA, 19 nt, Homo sapiens
  misc_RNA (1)...(19): siRNA sense strand
uuuggucucugcugucuuc

SEQ ID NO: 1423680 - RNA, 19 nt, Homo sapiens
  misc_RNA (1)...(19): siRNA sense strand
cggaacacgaggguuauuu

SEQ ID NO: 1423681 - RNA, 19 nt, Homo sapiens
  misc_RNA (1)...(19): siRNA sense strand
ucguggagauagcaccaaa

SEQ ID NO: 1423682 - RNA, 19 nt, Homo sapiens
  misc_RNA (1)...(19): siRNA sense strand
ccaaaguggauaaacuagu

SEQ ID NO: 1423683 - RNA, 19 nt, Homo sapiens
  misc_RNA (1)...(19): siRNA sense strand
gucacagugcuauuacuuu

SEQ ID NO: 1423684 - RNA, 19 nt, Homo sapiens
  misc_RNA (1)...(19): siRNA sense strand
guggagauagcaccaaagu

SEQ ID NO: 1423685 - RNA, 19 nt, Homo sapiens
  misc_RNA (1)...(19): siRNA sense strand
gagaagcgagaggcuguca

SEQ ID NO: 1423686 - RNA, 19 nt, Homo sapiens
  misc_RNA (1)...(19): siRNA sense strand
aaugugugcccuuaaugaa

SEQ ID NO: 1423687 - RNA, 19 nt, Homo sapiens
  misc_RNA (1)...(19): siRNA sense strand
cucaauagcaagaaugugu

SEQ ID NO: 1423688 - RNA, 19 nt, Homo sapiens
  misc_RNA (1)...(19): siRNA sense strand
aaacuggaugaacuagauu

SEQ ID NO: 1423689 - RNA, 19 nt, Homo sapiens
  misc_RNA (1)...(19): siRNA sense strand
caaaguggauaaacuagua

SEQ ID NO: 1423690 - RNA, 19 nt, Homo sapiens
  misc_RNA (1)...(19): siRNA sense strand
gcaagaaugugugcccuua

SEQ ID NO: 1423691 - RNA, 19 nt, Homo sapiens
  misc_RNA (1)...(19): siRNA sense strand
gcgagaggcugucaguaaa

SEQ ID NO: 1423692 - RNA, 19 nt, Homo sapiens
  misc_RNA (1)...(19): siRNA sense strand
gauaaacuaguacgagaua

SEQ ID NO: 1423693 - RNA, 19 nt, Homo sapiens
  misc_RNA (1)...(19): siRNA sense strand
gcaccaaaguggauaaacu

SEQ ID NO: 1423694 - RNA, 19 nt, Homo sapiens
  misc_RNA (1)...(19): siRNA sense strand
uggcauaugcuuuggauua

SEQ ID NO: 1423695 - RNA, 19 nt, Homo sapiens
  misc_RNA (1)...(19): siRNA sense strand
gaaugugugcccuuaauga

SEQ ID NO: 1423696 - RNA, 19 nt, Homo sapiens
  misc_RNA (1)...(19): siRNA sense strand
cauaugcuuuggauuauug

SEQ ID NO: 1423697 - RNA, 19 nt, Homo sapiens
  misc_RNA (1)...(19): siRNA sense strand
gaaacaugaugagcaagga

SEQ ID NO: 1423698 - RNA, 19 nt, Homo sapiens
  misc_RNA (1)...(19): siRNA sense strand
gagaggcugucaguaaaga

SEQ ID NO: 1423699 - RNA, 19 nt, Homo sapiens
  misc_RNA (1)...(19): siRNA sense strand
gcauaugcuuuggauuauu

SEQ ID NO: 1423700 - RNA, 19 nt, Homo sapiens
  misc_RNA (1)...(19): siRNA sense strand
gagcacuccuugagcuguu

SEQ ID NO: 1423701 - RNA, 19 nt, Homo sapiens
  misc_RNA (1)...(19): siRNA sense strand
ggcauaugcuuuggauuau

SEQ ID NO: 1423702 - RNA, 19 nt, Homo sapiens
  misc_RNA (1)...(19): siRNA sense strand
caccaaaguggauaaacua

SEQ ID NO: 1423703 - RNA, 19 nt, Homo sapiens
  misc_RNA (1)...(19): siRNA sense strand
aagaaugugugcccuuaau

SEQ ID NO: 1423704 - RNA, 19 nt, Homo sapiens
  misc_RNA (1)...(19): siRNA sense strand
gaagcgagaggcugucagu

SEQ ID NO: 1423705 - RNA, 19 nt, Homo sapiens
  misc_RNA (1)...(19): siRNA sense strand
gagcgacuuugaucaccau

SEQ ID NO: 1423706 - RNA, 19 nt, Homo sapiens
  misc_RNA (1)...(19): siRNA sense strand
caagaaugugugcccuuaa

SEQ ID NO: 1423707 - RNA, 19 nt, Homo sapiens
  misc_RNA (1)...(19): siRNA sense strand
caccaucaccaacaacauu

SEQ ID NO: 1423708 - RNA, 19 nt, Homo sapiens
  misc_RNA (1)...(19): siRNA sense strand
gauagcaccaaaguggaua

SEQ ID NO: 1423709 - RNA, 19 nt, Homo sapiens
  misc_RNA (1)...(19): siRNA sense strand
uguuggaaauuucuugaga

SEQ ID NO: 1423710 - RNA, 19 nt, Homo sapiens
  misc_RNA (1)...(19): siRNA sense strand
uccuugagcuguugaagau

SEQ ID NO: 1423711 - RNA, 19 nt, Homo sapiens
  misc_RNA (1)...(19): siRNA sense strand
ggccagagcgacuuugauc

SEQ ID NO: 1423712 - RNA, 19 nt, Homo sapiens
  misc_RNA (1)...(19): siRNA sense strand
uuucggaacacgaggguua

SEQ ID NO: 1423713 - RNA, 19 nt, Homo sapiens
  misc_RNA (1)...(19): siRNA sense strand
uuggaaacaugaugagcaa

SEQ ID NO: 1423714 - RNA, 19 nt, Homo sapiens
  misc_RNA (1)...(19): siRNA sense strand
ggauaaacuaguacgagau

SEQ ID NO: 1423715 - RNA, 19 nt, Homo sapiens
  misc_RNA (1)...(19): siRNA sense strand
gaacacgaggguuauuuug

SEQ ID NO: 1423716 - RNA, 19 nt, Homo sapiens
  misc_RNA (1)...(19): siRNA sense strand
caggugguauuuguuggaa

SEQ ID NO: 1423717 - RNA, 19 nt, Homo sapiens
  misc_RNA (1)...(19): siRNA sense strand
ggaacacgaggguuauuuu

SEQ ID NO: 1423718 - RNA, 19 nt, Homo sapiens
  misc_RNA (1)...(19): siRNA sense strand
aguacgagauauuuaugga

SEQ ID NO: 1423719 - RNA, 19 nt, Homo sapiens
  misc_RNA (1)...(19): siRNA sense strand
gcugggcuguggcuucaag

SEQ ID NO: 1423720 - RNA, 19 nt, Homo sapiens
  misc_RNA (1)...(19): siRNA sense strand
agcgagaggcugucaguaa

SEQ ID NO: 1423721 - RNA, 19 nt, Homo sapiens
  misc_RNA (1)...(19): siRNA sense strand
ucguggagauagcaccaaa

SEQ ID NO: 1423722 - RNA, 19 nt, Homo sapiens
  misc_RNA (1)...(19): siRNA sense strand
cggaacacgaggguuauuu

SEQ ID NO: 1423723 - RNA, 19 nt, Homo sapiens
  misc_RNA (1)...(19): siRNA sense strand
ccaaaguggauaaacuagu

SEQ ID NO: 1423724 - RNA, 19 nt, Homo sapiens
  misc_RNA (1)...(19): siRNA sense strand
guggagauagcaccaaagu

SEQ ID NO: 1423725 - RNA, 19 nt, Homo sapiens
  misc_RNA (1)...(19): siRNA sense strand
gagaagcgagaggcuguca

SEQ ID NO: 1423726 - RNA, 19 nt, Homo sapiens
  misc_RNA (1)...(19): siRNA sense strand
aaugugugcccuuaaugaa

SEQ ID NO: 1423727 - RNA, 19 nt, Homo sapiens
  misc_RNA (1)...(19): siRNA sense strand
cucaauagcaagaaugugu

SEQ ID NO: 1423728 - RNA, 19 nt, Homo sapiens
  misc_RNA (1)...(19): siRNA sense strand
caaaguggauaaacuagua

SEQ ID NO: 1423729 - RNA, 19 nt, Homo sapiens
  misc_RNA (1)...(19): siRNA sense strand
gcaagaaugugugcccuua

SEQ ID NO: 1423730 - RNA, 19 nt, Homo sapiens
  misc_RNA (1)...(19): siRNA sense strand
ggaaguaccugaccuccaa

SEQ ID NO: 1423731 - RNA, 19 nt, Homo sapiens
  misc_RNA (1)...(19): siRNA sense strand
gaaguuaccauuugauuug

SEQ ID NO: 1423732 - RNA, 19 nt, Homo sapiens
  misc_RNA (1)...(19): siRNA sense strand
gaacuagauugcuugauca

SEQ ID NO: 1423733 - RNA, 19 nt, Homo sapiens
  misc_RNA (1)...(19): siRNA sense strand
ggucucugcugucuucuua

SEQ ID NO: 1423734 - RNA, 19 nt, Homo sapiens
  misc_RNA (1)...(19): siRNA sense strand
agacaucacugcugaagaa

SEQ ID NO: 1423735 - RNA, 19 nt, Homo sapiens
  misc_RNA (1)...(19): siRNA sense strand
gcgagaggcugucaguaaa

SEQ ID NO: 1423736 - RNA, 19 nt, Homo sapiens
  misc_RNA (1)...(19): siRNA sense strand
gcaguauauuccaaagaua

SEQ ID NO: 1423737 - RNA, 19 nt, Homo sapiens
  misc_RNA (1)...(19): siRNA sense strand
gauaaacuaguacgagaua

SEQ ID NO: 1423738 - RNA, 19 nt, Homo sapiens
  misc_RNA (1)...(19): siRNA sense strand
caaacuggaugaacuagau

SEQ ID NO: 1423739 - RNA, 19 nt, Homo sapiens
  misc_RNA (1)...(19): siRNA sense strand
caucacugcugaagaagaa

SEQ ID NO: 1423740 - RNA, 19 nt, Homo sapiens
  misc_RNA (1)...(19): siRNA sense strand
ucacagugcuauuacuuug

SEQ ID NO: 1423741 - RNA, 19 nt, Homo sapiens
  misc_RNA (1)...(19): siRNA sense strand
gcaccaaaguggauaaacu

SEQ ID NO: 1423742 - RNA, 19 nt, Homo sapiens
  misc_RNA (1)...(19): siRNA sense strand
ugucagaaguuaccauuug

SEQ ID NO: 1423743 - RNA, 19 nt, Homo sapiens
  misc_RNA (1)...(19): siRNA sense strand
uggcauaugcuuuggauua

SEQ ID NO: 1423744 - RNA, 19 nt, Homo sapiens
  misc_RNA (1)...(19): siRNA sense strand
gaaugugugcccuuaauga

SEQ ID NO: 1423745 - RNA, 19 nt, Homo sapiens
  misc_RNA (1)...(19): siRNA sense strand
cauaugcuuuggauuauug

SEQ ID NO: 1423746 - RNA, 19 nt, Homo sapiens
  misc_RNA (1)...(19): siRNA sense strand
uggucaagcugguauauuu

SEQ ID NO: 1423747 - RNA, 19 nt, Homo sapiens
  misc_RNA (1)...(19): siRNA sense strand
ugaacuagauugcuugauc

SEQ ID NO: 1423748 - RNA, 19 nt, Homo sapiens
  misc_RNA (1)...(19): siRNA sense strand
gaaacaugaugagcaagga

SEQ ID NO: 1423749 - RNA, 19 nt, Homo sapiens
  misc_RNA (1)...(19): siRNA sense strand
uaggugaucuucagcuuug

SEQ ID NO: 1423750 - RNA, 19 nt, Homo sapiens
  misc_RNA (1)...(19): siRNA sense strand
gagaggcugucaguaaaga

SEQ ID NO: 1423751 - RNA, 19 nt, Homo sapiens
  misc_RNA (1)...(19): siRNA sense strand
gcauaugcuuuggauuauu

SEQ ID NO: 1423752 - RNA, 19 nt, Homo sapiens
  misc_RNA (1)...(19): siRNA sense strand
cuagauugcuugaucaaag

SEQ ID NO: 1423753 - RNA, 19 nt, Homo sapiens
  misc_RNA (1)...(19): siRNA sense strand
guuagcaucuuagcaguau

SEQ ID NO: 1423754 - RNA, 19 nt, Homo sapiens
  misc_RNA (1)...(19): siRNA sense strand
gagcacuccuugagcuguu

SEQ ID NO: 1423755 - RNA, 19 nt, Homo sapiens
  misc_RNA (1)...(19): siRNA sense strand
ugaaaagugucagaaguua

SEQ ID NO: 1423756 - RNA, 19 nt, Homo sapiens
  misc_RNA (1)...(19): siRNA sense strand
ggucacagguacuagucuu

SEQ ID NO: 1423757 - RNA, 19 nt, Homo sapiens
  misc_RNA (1)...(19): siRNA sense strand
gucagaaguuaccauuuga

SEQ ID NO: 1423758 - RNA, 19 nt, Homo sapiens
  misc_RNA (1)...(19): siRNA sense strand
ggcauaugcuuuggauuau

SEQ ID NO: 1423759 - RNA, 19 nt, Homo sapiens
  misc_RNA (1)...(19): siRNA sense strand
acagugcuauuacuuugaa

SEQ ID NO: 1423760 - RNA, 19 nt, Homo sapiens
  misc_RNA (1)...(19): siRNA sense strand
caccaaaguggauaaacua

SEQ ID NO: 1423761 - RNA, 19 nt, Homo sapiens
  misc_RNA (1)...(19): siRNA sense strand
gacggucacagugcuauua

SEQ ID NO: 1423762 - RNA, 19 nt, Homo sapiens
  misc_RNA (1)...(19): siRNA sense strand
aagaaugugugcccuuaau

SEQ ID NO: 1423763 - RNA, 19 nt, Homo sapiens
  misc_RNA (1)...(19): siRNA sense strand
uggaugaacuagauugcuu

SEQ ID NO: 1423764 - RNA, 19 nt, Homo sapiens
  misc_RNA (1)...(19): siRNA sense strand
ugaagaagaagaggaagaa

SEQ ID NO: 1423765 - RNA, 19 nt, Homo sapiens
  misc_RNA (1)...(19): siRNA sense strand
agaagaagaggaagaagug

SEQ ID NO: 1423766 - RNA, 19 nt, Homo sapiens
  misc_RNA (1)...(19): siRNA sense strand
cagaaguuaccauuugauu

SEQ ID NO: 1423767 - RNA, 19 nt, Homo sapiens
  misc_RNA (1)...(19): siRNA sense strand
gaagcgagaggcugucagu

SEQ ID NO: 1423768 - RNA, 19 nt, Homo sapiens
  misc_RNA (1)...(19): siRNA sense strand
ggucacagugcuauuacuu

SEQ ID NO: 1423769 - RNA, 19 nt, Homo sapiens
  misc_RNA (1)...(19): siRNA sense strand
ccaaagauaauuacaaacg

SEQ ID NO: 1423770 - RNA, 19 nt, Homo sapiens
  misc_RNA (1)...(19): siRNA sense strand
aaacccugcugauucugaa

SEQ ID NO: 1423771 - RNA, 19 nt, Homo sapiens
  misc_RNA (1)...(19): siRNA sense strand
gaaguggaaagucuuaaaa

SEQ ID NO: 1423772 - RNA, 19 nt, Homo sapiens
  misc_RNA (1)...(19): siRNA sense strand
caagaaugugugcccuuaa

SEQ ID NO: 1423773 - RNA, 19 nt, Homo sapiens
  misc_RNA (1)...(19): siRNA sense strand
caccaucaccaacaacauu

SEQ ID NO: 1423774 - RNA, 19 nt, Homo sapiens
  misc_RNA (1)...(19): siRNA sense strand
gagcgacuuugaucaccau

SEQ ID NO: 1423775 - RNA, 19 nt, Homo sapiens
  misc_RNA (1)...(19): siRNA sense strand
gcaaacuggaugaacuaga

SEQ ID NO: 1423776 - RNA, 19 nt, Homo sapiens
  misc_RNA (1)...(19): siRNA sense strand
gauagcaccaaaguggaua

SEQ ID NO: 1423777 - RNA, 19 nt, Homo sapiens
  misc_RNA (1)...(19): siRNA sense strand
aggaagaaguggaaagucu

SEQ ID NO: 1423778 - RNA, 19 nt, Homo sapiens
  misc_RNA (1)...(19): siRNA sense strand
uguuggaaauuucuugaga

SEQ ID NO: 1423779 - RNA, 19 nt, Homo sapiens
  misc_RNA (1)...(19): siRNA sense strand
guaccugaccuccaaugug

SEQ ID NO: 1423780 - RNA, 19 nt, Homo sapiens
  misc_RNA (1)...(19): siRNA sense strand
uccuugagcuguugaagau

SEQ ID NO: 1423781 - RNA, 19 nt, Homo sapiens
  misc_RNA (1)...(19): siRNA sense strand
gaagaggaagaaguggaaa

SEQ ID NO: 1423782 - RNA, 19 nt, Homo sapiens
  misc_RNA (1)...(19): siRNA sense strand
ccuccaauguggcuuaugg

SEQ ID NO: 1423783 - RNA, 19 nt, Homo sapiens
  misc_RNA (1)...(19): siRNA sense strand
guggaacucuggucaagcu

SEQ ID NO: 1423784 - RNA, 19 nt, Homo sapiens
  misc_RNA (1)...(19): siRNA sense strand
uuucggaacacgaggguua

SEQ ID NO: 1423785 - RNA, 19 nt, Homo sapiens
  misc_RNA (1)...(19): siRNA sense strand
ggccagagcgacuuugauc

SEQ ID NO: 1423786 - RNA, 19 nt, Homo sapiens
  misc_RNA (1)...(19): siRNA sense strand
gaugaacuagauugcuuga

SEQ ID NO: 1423787 - RNA, 19 nt, Homo sapiens
  misc_RNA (1)...(19): siRNA sense strand
agcaguauauuccaaagau

SEQ ID NO: 1423788 - RNA, 19 nt, Homo sapiens
  misc_RNA (1)...(19): siRNA sense strand
uuggaaacaugaugagcaa

SEQ ID NO: 1423789 - RNA, 19 nt, Homo sapiens
  misc_RNA (1)...(19): siRNA sense strand
ggauaaacuaguacgagau

SEQ ID NO: 1423790 - RNA, 19 nt, Homo sapiens
  misc_RNA (1)...(19): siRNA sense strand
cuuacuggcuguaccacuu

SEQ ID NO: 1423791 - RNA, 19 nt, Homo sapiens
  misc_RNA (1)...(19): siRNA sense strand
aaacgggucacagguacua

SEQ ID NO: 1423792 - RNA, 19 nt, Homo sapiens
  misc_RNA (1)...(19): siRNA sense strand
uacaaacgggucacaggua

SEQ ID NO: 1423793 - RNA, 19 nt, Homo sapiens
  misc_RNA (1)...(19): siRNA sense strand
gguuagcaucuuagcagua

SEQ ID NO: 1423794 - RNA, 19 nt, Homo sapiens
  misc_RNA (1)...(19): siRNA sense strand
gaacacgaggguuauuuug

SEQ ID NO: 1423795 - RNA, 19 nt, Homo sapiens
  misc_RNA (1)...(19): siRNA sense strand
agaaguggaaagucuuaaa

SEQ ID NO: 1423796 - RNA, 19 nt, Homo sapiens
  misc_RNA (1)...(19): siRNA sense strand
ugaccuccaauguggcuua

SEQ ID NO: 1423797 - RNA, 19 nt, Homo sapiens
  misc_RNA (1)...(19): siRNA sense strand
gaucuucagcuuugcaaac

SEQ ID NO: 1423798 - RNA, 19 nt, Homo sapiens
  misc_RNA (1)...(19): siRNA sense strand
ggaacacgaggguuauuuu

SEQ ID NO: 1423799 - RNA, 19 nt, Homo sapiens
  misc_RNA (1)...(19): siRNA sense strand
uuaaaagcauucggaagua

SEQ ID NO: 1423800 - RNA, 19 nt, Homo sapiens
  misc_RNA (1)...(19): siRNA sense strand
caggugguauuuguuggaa

SEQ ID NO: 1423801 - RNA, 19 nt, Homo sapiens
  misc_RNA (1)...(19): siRNA sense strand
agaagaggaagaaguggaa

SEQ ID NO: 1423802 - RNA, 19 nt, Homo sapiens
  misc_RNA (1)...(19): siRNA sense strand
caucuuagcaguauauucc

SEQ ID NO: 1423803 - RNA, 19 nt, Homo sapiens
  misc_RNA (1)...(19): siRNA sense strand
uagcaucuuagcaguauau

SEQ ID NO: 1423804 - RNA, 19 nt, Homo sapiens
  misc_RNA (1)...(19): siRNA sense strand
ugaaaacccugcugauucu

SEQ ID NO: 1423805 - RNA, 19 nt, Homo sapiens
  misc_RNA (1)...(19): siRNA sense strand
aguacgagauauuuaugga

SEQ ID NO: 1423806 - RNA, 19 nt, Homo sapiens
  misc_RNA (1)...(19): siRNA sense strand
ggaaagucuuaaaagcauu

SEQ ID NO: 1423807 - RNA, 19 nt, Homo sapiens
  misc_RNA (1)...(19): siRNA sense strand
uagauugcuugaucaaagg

SEQ ID NO: 1423808 - RNA, 19 nt, Homo sapiens
  misc_RNA (1)...(19): siRNA sense strand
agcgagaggcugucaguaa

SEQ ID NO: 1423809 - RNA, 19 nt, Homo sapiens
  misc_RNA (1)...(19): siRNA sense strand
gcugggcuguggcuucaag

SEQ ID NO: 1423810 - RNA, 19 nt, Homo sapiens
  misc_RNA (1)...(19): siRNA sense strand
ggacggucacagugcuauu

SEQ ID NO: 1423811 - RNA, 19 nt, Homo sapiens
  misc_RNA (1)...(19): siRNA sense strand
uuaugggucuacaggcauu

SEQ ID NO: 1423812 - RNA, 19 nt, Homo sapiens
  misc_RNA (1)...(19): siRNA sense strand
gaccuccaauguggcuuau

SEQ ID NO: 1423813 - RNA, 19 nt, Homo sapiens
  misc_RNA (1)...(19): siRNA sense strand
cggaacacgaggguuauuu

SEQ ID NO: 1423814 - RNA, 19 nt, Homo sapiens
  misc_RNA (1)...(19): siRNA sense strand
caaagacaucacugcugaa

SEQ ID NO: 1423815 - RNA, 19 nt, Homo sapiens
  misc_RNA (1)...(19): siRNA sense strand
ucguggagauagcaccaaa

SEQ ID NO: 1423816 - RNA, 19 nt, Homo sapiens
  misc_RNA (1)...(19): siRNA sense strand
uuuggucucugcugucuuc

SEQ ID NO: 1423817 - RNA, 19 nt, Homo sapiens
  misc_RNA (1)...(19): siRNA sense strand
gucacagugcuauuacuuu

SEQ ID NO: 1423818 - RNA, 19 nt, Homo sapiens
  misc_RNA (1)...(19): siRNA sense strand
ccaaaguggauaaacuagu

SEQ ID NO: 1423819 - RNA, 19 nt, Homo sapiens
  misc_RNA (1)...(19): siRNA sense strand
gaagaagaagaggaagaag

SEQ ID NO: 1423820 - RNA, 19 nt, Homo sapiens
  misc_RNA (1)...(19): siRNA sense strand
cugaaggaccugacucugu

SEQ ID NO: 1423821 - RNA, 19 nt, Homo sapiens
  misc_RNA (1)...(19): siRNA sense strand
guggagauagcaccaaagu

SEQ ID NO: 1423822 - RNA, 19 nt, Homo sapiens
  misc_RNA (1)...(19): siRNA sense strand
gacucuguguggacgcaaa

SEQ ID NO: 1423823 - RNA, 19 nt, Homo sapiens
  misc_RNA (1)...(19): siRNA sense strand
aaacuggaugaacuagauu

SEQ ID NO: 1423824 - RNA, 19 nt, Homo sapiens
  misc_RNA (1)...(19): siRNA sense strand
aaugugugcccuuaaugaa

SEQ ID NO: 1423825 - RNA, 19 nt, Homo sapiens
  misc_RNA (1)...(19): siRNA sense strand
cucaauagcaagaaugugu

SEQ ID NO: 1423826 - RNA, 19 nt, Homo sapiens
  misc_RNA (1)...(19): siRNA sense strand
gagaagcgagaggcuguca

SEQ ID NO: 1423827 - RNA, 19 nt, Homo sapiens
  misc_RNA (1)...(19): siRNA sense strand
ggaaguaccugaccuccaa

SEQ ID NO: 1423828 - RNA, 19 nt, Homo sapiens
  misc_RNA (1)...(19): siRNA sense strand
agacaucacugcugaagaa

SEQ ID NO: 1423829 - RNA, 19 nt, Homo sapiens
  misc_RNA (1)...(19): siRNA sense strand
caucacugcugaagaagaa

SEQ ID NO: 1423830 - RNA, 19 nt, Homo sapiens
  misc_RNA (1)...(19): siRNA sense strand
uggucaagcugguauauuu

SEQ ID NO: 1423831 - RNA, 19 nt, Homo sapiens
  misc_RNA (1)...(19): siRNA sense strand
ugaagaagaagaggaagaa

SEQ ID NO: 1423832 - RNA, 19 nt, Homo sapiens
  misc_RNA (1)...(19): siRNA sense strand
agaagaagaggaagaagug

SEQ ID NO: 1423833 - RNA, 19 nt, Homo sapiens
  misc_RNA (1)...(19): siRNA sense strand
gaaguggaaagucuuaaaa

SEQ ID NO: 1423834 - RNA, 19 nt, Homo sapiens
  misc_RNA (1)...(19): siRNA sense strand
aggaagaaguggaaagucu

SEQ ID NO: 1423835 - RNA, 19 nt, Homo sapiens
  misc_RNA (1)...(19): siRNA sense strand
gaagaggaagaaguggaaa

SEQ ID NO: 1423836 - RNA, 19 nt, Homo sapiens
  misc_RNA (1)...(19): siRNA sense strand
ccuccaauguggcuuaugg

SEQ ID NO: 1423837 - RNA, 19 nt, Homo sapiens
  misc_RNA (1)...(19): siRNA sense strand
guaccugaccuccaaugug

SEQ ID NO: 1423838 - RNA, 19 nt, Homo sapiens
  misc_RNA (1)...(19): siRNA sense strand
guggaacucuggucaagcu

SEQ ID NO: 1423839 - RNA, 19 nt, Homo sapiens
  misc_RNA (1)...(19): siRNA sense strand
agaaguggaaagucuuaaa

SEQ ID NO: 1423840 - RNA, 19 nt, Homo sapiens
  misc_RNA (1)...(19): siRNA sense strand
ugaccuccaauguggcuua

SEQ ID NO: 1423841 - RNA, 19 nt, Homo sapiens
  misc_RNA (1)...(19): siRNA sense strand
agaagaggaagaaguggaa

SEQ ID NO: 1423842 - RNA, 19 nt, Homo sapiens
  misc_RNA (1)...(19): siRNA sense strand
uuaaaagcauucggaagua

SEQ ID NO: 1423843 - RNA, 19 nt, Homo sapiens
  misc_RNA (1)...(19): siRNA sense strand
ggaaagucuuaaaagcauu

SEQ ID NO: 1423844 - RNA, 19 nt, Homo sapiens
  misc_RNA (1)...(19): siRNA sense strand
uuaugggucuacaggcauu

SEQ ID NO: 1423845 - RNA, 19 nt, Homo sapiens
  misc_RNA (1)...(19): siRNA sense strand
caaagacaucacugcugaa

SEQ ID NO: 1423846 - RNA, 19 nt, Homo sapiens
  misc_RNA (1)...(19): siRNA sense strand
gaccuccaauguggcuuau

SEQ ID NO: 1423847 - RNA, 19 nt, Homo sapiens
  misc_RNA (1)...(19): siRNA sense strand
gaagaagaagaggaagaag

SEQ ID NO: 1423848 - RNA, 19 nt, Homo sapiens
  misc_RNA (1)...(19): siRNA sense strand
gacucuguguggacgcaaa

SEQ ID NO: 1423849 - RNA, 19 nt, Homo sapiens
  misc_RNA (1)...(19): siRNA sense strand
cugaaggaccugacucugu

SEQ ID NO: 1423850 - RNA, 19 nt, Homo sapiens
  misc_RNA (1)...(19): siRNA sense strand
caaaguggauaaacuagua

SEQ ID NO: 1423851 - RNA, 19 nt, Homo sapiens
  misc_RNA (1)...(19): siRNA sense strand
gcaagaaugugugcccuua

SEQ ID NO: 1423852 - RNA, 19 nt, Homo sapiens
  misc_RNA (1)...(19): siRNA sense strand
gaaguuaccauuugauuug

SEQ ID NO: 1423853 - RNA, 19 nt, Homo sapiens
  misc_RNA (1)...(19): siRNA sense strand
gaacuagauugcuugauca

SEQ ID NO: 1423854 - RNA, 19 nt, Homo sapiens
  misc_RNA (1)...(19): siRNA sense strand
ggucucugcugucuucuua

SEQ ID NO: 1423855 - RNA, 19 nt, Homo sapiens
  misc_RNA (1)...(19): siRNA sense strand
gcgagaggcugucaguaaa

SEQ ID NO: 1423856 - RNA, 19 nt, Homo sapiens
  misc_RNA (1)...(19): siRNA sense strand
gcaguauauuccaaagaua

SEQ ID NO: 1423857 - RNA, 19 nt, Homo sapiens
  misc_RNA (1)...(19): siRNA sense strand
gauaaacuaguacgagaua

SEQ ID NO: 1423858 - RNA, 19 nt, Homo sapiens
  misc_RNA (1)...(19): siRNA sense strand
caaacuggaugaacuagau

SEQ ID NO: 1423859 - RNA, 19 nt, Homo sapiens
  misc_RNA (1)...(19): siRNA sense strand
ucacagugcuauuacuuug

SEQ ID NO: 1423860 - RNA, 19 nt, Homo sapiens
  misc_RNA (1)...(19): siRNA sense strand
gcaccaaaguggauaaacu

SEQ ID NO: 1423861 - RNA, 19 nt, Homo sapiens
  misc_RNA (1)...(19): siRNA sense strand
ugucagaaguuaccauuug

SEQ ID NO: 1423862 - RNA, 19 nt, Homo sapiens
  misc_RNA (1)...(19): siRNA sense strand
uggcauaugcuuuggauua

SEQ ID NO: 1423863 - RNA, 19 nt, Homo sapiens
  misc_RNA (1)...(19): siRNA sense strand
gaaugugugcccuuaauga

SEQ ID NO: 1423864 - RNA, 19 nt, Homo sapiens
  misc_RNA (1)...(19): siRNA sense strand
cauaugcuuuggauuauug

SEQ ID NO: 1423865 - RNA, 19 nt, Homo sapiens
  misc_RNA (1)...(19): siRNA sense strand
ugaacuagauugcuugauc

SEQ ID NO: 1423866 - RNA, 19 nt, Homo sapiens
  misc_RNA (1)...(19): siRNA sense strand
gaaacaugaugagcaagga

SEQ ID NO: 1423867 - RNA, 19 nt, Homo sapiens
  misc_RNA (1)...(19): siRNA sense strand
uaggugaucuucagcuuug

SEQ ID NO: 1423868 - RNA, 19 nt, Homo sapiens
  misc_RNA (1)...(19): siRNA sense strand
gagaggcugucaguaaaga

SEQ ID NO: 1423869 - RNA, 19 nt, Homo sapiens
  misc_RNA (1)...(19): siRNA sense strand
gcauaugcuuuggauuauu

SEQ ID NO: 1423870 - RNA, 19 nt, Homo sapiens
  misc_RNA (1)...(19): siRNA sense strand
cuagauugcuugaucaaag

SEQ ID NO: 1423871 - RNA, 19 nt, Homo sapiens
  misc_RNA (1)...(19): siRNA sense strand
guuagcaucuuagcaguau

SEQ ID NO: 1423872 - RNA, 19 nt, Homo sapiens
  misc_RNA (1)...(19): siRNA sense strand
gagcacuccuugagcuguu

SEQ ID NO: 1423873 - RNA, 19 nt, Homo sapiens
  misc_RNA (1)...(19): siRNA sense strand
ugaaaagugucagaaguua

SEQ ID NO: 1423874 - RNA, 19 nt, Homo sapiens
  misc_RNA (1)...(19): siRNA sense strand
ggucacagguacuagucuu

SEQ ID NO: 1423875 - RNA, 19 nt, Homo sapiens
  misc_RNA (1)...(19): siRNA sense strand
gucagaaguuaccauuuga

SEQ ID NO: 1423876 - RNA, 19 nt, Homo sapiens
  misc_RNA (1)...(19): siRNA sense strand
ggcauaugcuuuggauuau

SEQ ID NO: 1423877 - RNA, 19 nt, Homo sapiens
  misc_RNA (1)...(19): siRNA sense strand
acagugcuauuacuuugaa

SEQ ID NO: 1423878 - RNA, 19 nt, Homo sapiens
  misc_RNA (1)...(19): siRNA sense strand
caccaaaguggauaaacua

SEQ ID NO: 1423879 - RNA, 19 nt, Homo sapiens
  misc_RNA (1)...(19): siRNA sense strand
gacggucacagugcuauua

SEQ ID NO: 1423880 - RNA, 19 nt, Homo sapiens
  misc_RNA (1)...(19): siRNA sense strand
aagaaugugugcccuuaau

SEQ ID NO: 1423881 - RNA, 19 nt, Homo sapiens
  misc_RNA (1)...(19): siRNA sense strand
uggaugaacuagauugcuu

SEQ ID NO: 1423882 - RNA, 19 nt, Homo sapiens
  misc_RNA (1)...(19): siRNA sense strand
cagaaguuaccauuugauu

SEQ ID NO: 1423883 - RNA, 19 nt, Homo sapiens
  misc_RNA (1)...(19): siRNA sense strand
gaagcgagaggcugucagu

SEQ ID NO: 1423884 - RNA, 19 nt, Homo sapiens
  misc_RNA (1)...(19): siRNA sense strand
ggucacagugcuauuacuu

SEQ ID NO: 1423885 - RNA, 19 nt, Homo sapiens
  misc_RNA (1)...(19): siRNA sense strand
ccaaagauaauuacaaacg

SEQ ID NO: 1423886 - RNA, 19 nt, Homo sapiens
  misc_RNA (1)...(19): siRNA sense strand
aaacccugcugauucugaa

SEQ ID NO: 1423887 - RNA, 19 nt, Homo sapiens
  misc_RNA (1)...(19): siRNA sense strand
gcaaacuggaugaacuaga

SEQ ID NO: 1423888 - RNA, 19 nt, Homo sapiens
  misc_RNA (1)...(19): siRNA sense strand
caagaaugugugcccuuaa

SEQ ID NO: 1423889 - RNA, 19 nt, Homo sapiens
  misc_RNA (1)...(19): siRNA sense strand
caccaucaccaacaacauu

SEQ ID NO: 1423890 - RNA, 19 nt, Homo sapiens
  misc_RNA (1)...(19): siRNA sense strand
gagcgacuuugaucaccau

SEQ ID NO: 1423891 - RNA, 19 nt, Homo sapiens
  misc_RNA (1)...(19): siRNA sense strand
gauagcaccaaaguggaua

SEQ ID NO: 1423892 - RNA, 19 nt, Homo sapiens
  misc_RNA (1)...(19): siRNA sense strand
uguuggaaauuucuugaga

SEQ ID NO: 1423893 - RNA, 19 nt, Homo sapiens
  misc_RNA (1)...(19): siRNA sense strand
uccuugagcuguugaagau

SEQ ID NO: 1423894 - RNA, 19 nt, Homo sapiens
  misc_RNA (1)...(19): siRNA sense strand
gaugaacuagauugcuuga

SEQ ID NO: 1423895 - RNA, 19 nt, Homo sapiens
  misc_RNA (1)...(19): siRNA sense strand
uuucggaacacgaggguua

SEQ ID NO: 1423896 - RNA, 19 nt, Homo sapiens
  misc_RNA (1)...(19): siRNA sense strand
ggccagagcgacuuugauc

SEQ ID NO: 1423897 - RNA, 19 nt, Homo sapiens
  misc_RNA (1)...(19): siRNA sense strand
agcaguauauuccaaagau

SEQ ID NO: 1423898 - RNA, 19 nt, Homo sapiens
  misc_RNA (1)...(19): siRNA sense strand
uuggaaacaugaugagcaa

SEQ ID NO: 1423899 - RNA, 19 nt, Homo sapiens
  misc_RNA (1)...(19): siRNA sense strand
ggauaaacuaguacgagau

SEQ ID NO: 1423900 - RNA, 19 nt, Homo sapiens
  misc_RNA (1)...(19): siRNA sense strand
cuuacuggcuguaccacuu

SEQ ID NO: 1423901 - RNA, 19 nt, Homo sapiens
  misc_RNA (1)...(19): siRNA sense strand
aaacgggucacagguacua

SEQ ID NO: 1423902 - RNA, 19 nt, Homo sapiens
  misc_RNA (1)...(19): siRNA sense strand
uacaaacgggucacaggua

SEQ ID NO: 1423903 - RNA, 19 nt, Homo sapiens
  misc_RNA (1)...(19): siRNA sense strand
gguuagcaucuuagcagua

SEQ ID NO: 1423904 - RNA, 19 nt, Homo sapiens
  misc_RNA (1)...(19): siRNA sense strand
gaacacgaggguuauuuug

SEQ ID NO: 1423905 - RNA, 19 nt, Homo sapiens
  misc_RNA (1)...(19): siRNA sense strand
uagcaucuuagcaguauau

SEQ ID NO: 1423906 - RNA, 19 nt, Homo sapiens
  misc_RNA (1)...(19): siRNA sense strand
ggaacacgaggguuauuuu

SEQ ID NO: 1423907 - RNA, 19 nt, Homo sapiens
  misc_RNA (1)...(19): siRNA sense strand
caggugguauuuguuggaa

SEQ ID NO: 1423908 - RNA, 19 nt, Homo sapiens
  misc_RNA (1)...(19): siRNA sense strand
gaucuucagcuuugcaaac

SEQ ID NO: 1423909 - RNA, 19 nt, Homo sapiens
  misc_RNA (1)...(19): siRNA sense strand
caucuuagcaguauauucc

SEQ ID NO: 1423910 - RNA, 19 nt, Homo sapiens
  misc_RNA (1)...(19): siRNA sense strand
ugaaaacccugcugauucu

SEQ ID NO: 1423911 - RNA, 19 nt, Homo sapiens
  misc_RNA (1)...(19): siRNA sense strand
aguacgagauauuuaugga

SEQ ID NO: 1423912 - RNA, 19 nt, Homo sapiens
  misc_RNA (1)...(19): siRNA sense strand
gcugggcuguggcuucaag

SEQ ID NO: 1423913 - RNA, 19 nt, Homo sapiens
  misc_RNA (1)...(19): siRNA sense strand
ggacggucacagugcuauu

SEQ ID NO: 1423914 - RNA, 19 nt, Homo sapiens
  misc_RNA (1)...(19): siRNA sense strand
uagauugcuugaucaaagg

SEQ ID NO: 1423915 - RNA, 19 nt, Homo sapiens
  misc_RNA (1)...(19): siRNA sense strand
agcgagaggcugucaguaa

SEQ ID NO: 1423916 - RNA, 19 nt, Homo sapiens
  misc_RNA (1)...(19): siRNA sense strand
uuuggucucugcugucuuc

SEQ ID NO: 1423917 - RNA, 19 nt, Homo sapiens
  misc_RNA (1)...(19): siRNA sense strand
cggaacacgaggguuauuu

SEQ ID NO: 1423918 - RNA, 19 nt, Homo sapiens
  misc_RNA (1)...(19): siRNA sense strand
ucguggagauagcaccaaa

SEQ ID NO: 1423919 - RNA, 19 nt, Homo sapiens
  misc_RNA (1)...(19): siRNA sense strand
ccaaaguggauaaacuagu

SEQ ID NO: 1423920 - RNA, 19 nt, Homo sapiens
  misc_RNA (1)...(19): siRNA sense strand
gucacagugcuauuacuuu

SEQ ID NO: 1423921 - RNA, 19 nt, Homo sapiens
  misc_RNA (1)...(19): siRNA sense strand
guggagauagcaccaaagu

SEQ ID NO: 1423922 - RNA, 19 nt, Homo sapiens
  misc_RNA (1)...(19): siRNA sense strand
gagaagcgagaggcuguca

SEQ ID NO: 1423923 - RNA, 19 nt, Homo sapiens
  misc_RNA (1)...(19): siRNA sense strand
aaugugugcccuuaaugaa

SEQ ID NO: 1423924 - RNA, 19 nt, Homo sapiens
  misc_RNA (1)...(19): siRNA sense strand
cucaauagcaagaaugugu

SEQ ID NO: 1423925 - RNA, 19 nt, Homo sapiens
  misc_RNA (1)...(19): siRNA sense strand
aaacuggaugaacuagauu

SEQ ID NO: 1423926 - RNA, 19 nt, Homo sapiens
  misc_RNA (1)...(19): siRNA sense strand
caaaguggauaaacuagua

SEQ ID NO: 1423927 - RNA, 19 nt, Homo sapiens
  misc_RNA (1)...(19): siRNA sense strand
gcaagaaugugugcccuua

SEQ ID NO: 1423928 - RNA, 19 nt, Homo sapiens
  misc_RNA (1)...(19): siRNA sense strand
gcgagaggcugucaguaaa

SEQ ID NO: 1423929 - RNA, 19 nt, Homo sapiens
  misc_RNA (1)...(19): siRNA sense strand
gauaaacuaguacgagaua

SEQ ID NO: 1423930 - RNA, 19 nt, Homo sapiens
  misc_RNA (1)...(19): siRNA sense strand
gcaccaaaguggauaaacu

SEQ ID NO: 1423931 - RNA, 19 nt, Homo sapiens
  misc_RNA (1)...(19): siRNA sense strand
uggcauaugcuuuggauua

SEQ ID NO: 1423932 - RNA, 19 nt, Homo sapiens
  misc_RNA (1)...(19): siRNA sense strand
gaaugugugcccuuaauga

SEQ ID NO: 1423933 - RNA, 19 nt, Homo sapiens
  misc_RNA (1)...(19): siRNA sense strand
cauaugcuuuggauuauug

SEQ ID NO: 1423934 - RNA, 19 nt, Homo sapiens
  misc_RNA (1)...(19): siRNA sense strand
gaaacaugaugagcaagga

SEQ ID NO: 1423935 - RNA, 19 nt, Homo sapiens
  misc_RNA (1)...(19): siRNA sense strand
gagaggcugucaguaaaga

SEQ ID NO: 1423936 - RNA, 19 nt, Homo sapiens
  misc_RNA (1)...(19): siRNA sense strand
gcauaugcuuuggauuauu

SEQ ID NO: 1423937 - RNA, 19 nt, Homo sapiens
  misc_RNA (1)...(19): siRNA sense strand
gagcacuccuugagcuguu

SEQ ID NO: 1423938 - RNA, 19 nt, Homo sapiens
  misc_RNA (1)...(19): siRNA sense strand
ggcauaugcuuuggauuau

SEQ ID NO: 1423939 - RNA, 19 nt, Homo sapiens
  misc_RNA (1)...(19): siRNA sense strand
caccaaaguggauaaacua

SEQ ID NO: 1423940 - RNA, 19 nt, Homo sapiens
  misc_RNA (1)...(19): siRNA sense strand
aagaaugugugcccuuaau

SEQ ID NO: 1423941 - RNA, 19 nt, Homo sapiens
  misc_RNA (1)...(19): siRNA sense strand
gaagcgagaggcugucagu

SEQ ID NO: 1423942 - RNA, 19 nt, Homo sapiens
  misc_RNA (1)...(19): siRNA sense strand
gagcgacuuugaucaccau

SEQ ID NO: 1423943 - RNA, 19 nt, Homo sapiens
  misc_RNA (1)...(19): siRNA sense strand
caagaaugugugcccuuaa

SEQ ID NO: 1423944 - RNA, 19 nt, Homo sapiens
  misc_RNA (1)...(19): siRNA sense strand
caccaucaccaacaacauu

SEQ ID NO: 1423945 - RNA, 19 nt, Homo sapiens
  misc_RNA (1)...(19): siRNA sense strand
gauagcaccaaaguggaua

SEQ ID NO: 1423946 - RNA, 19 nt, Homo sapiens
  misc_RNA (1)...(19): siRNA sense strand
uguuggaaauuucuugaga

SEQ ID NO: 1423947 - RNA, 19 nt, Homo sapiens
  misc_RNA (1)...(19): siRNA sense strand
uccuugagcuguugaagau

SEQ ID NO: 1423948 - RNA, 19 nt, Homo sapiens
  misc_RNA (1)...(19): siRNA sense strand
ggccagagcgacuuugauc

SEQ ID NO: 1423949 - RNA, 19 nt, Homo sapiens
  misc_RNA (1)...(19): siRNA sense strand
uuucggaacacgaggguua

SEQ ID NO: 1423950 - RNA, 19 nt, Homo sapiens
  misc_RNA (1)...(19): siRNA sense strand
uuggaaacaugaugagcaa

SEQ ID NO: 1423951 - RNA, 19 nt, Homo sapiens
  misc_RNA (1)...(19): siRNA sense strand
ggauaaacuaguacgagau

SEQ ID NO: 1423952 - RNA, 19 nt, Homo sapiens
  misc_RNA (1)...(19): siRNA sense strand
gaacacgaggguuauuuug

SEQ ID NO: 1423953 - RNA, 19 nt, Homo sapiens
  misc_RNA (1)...(19): siRNA sense strand
caggugguauuuguuggaa

SEQ ID NO: 1423954 - RNA, 19 nt, Homo sapiens
  misc_RNA (1)...(19): siRNA sense strand
ggaacacgaggguuauuuu

SEQ ID NO: 1423955 - RNA, 19 nt, Homo sapiens
  misc_RNA (1)...(19): siRNA sense strand
aguacgagauauuuaugga

SEQ ID NO: 1423956 - RNA, 19 nt, Homo sapiens
  misc_RNA (1)...(19): siRNA sense strand
gcugggcuguggcuucaag

SEQ ID NO: 1423957 - RNA, 19 nt, Homo sapiens
  misc_RNA (1)...(19): siRNA sense strand
agcgagaggcugucaguaa

SEQ ID NO: 1423958 - RNA, 19 nt, Homo sapiens
  misc_RNA (1)...(19): siRNA sense strand
ucguggagauagcaccaaa

SEQ ID NO: 1423959 - RNA, 19 nt, Homo sapiens
  misc_RNA (1)...(19): siRNA sense strand
cggaacacgaggguuauuu

SEQ ID NO: 1423960 - RNA, 19 nt, Homo sapiens
  misc_RNA (1)...(19): siRNA sense strand
ccaaaguggauaaacuagu

SEQ ID NO: 1423961 - RNA, 19 nt, Homo sapiens
  misc_RNA (1)...(19): siRNA sense strand
guggagauagcaccaaagu

SEQ ID NO: 1423962 - RNA, 19 nt, Homo sapiens
  misc_RNA (1)...(19): siRNA sense strand
gagaagcgagaggcuguca

SEQ ID NO: 1423963 - RNA, 19 nt, Homo sapiens
  misc_RNA (1)...(19): siRNA sense strand
aaugugugcccuuaaugaa

SEQ ID NO: 1423964 - RNA, 19 nt, Homo sapiens
  misc_RNA (1)...(19): siRNA sense strand
cucaauagcaagaaugugu

SEQ ID NO: 1423965 - RNA, 19 nt, Homo sapiens
  misc_RNA (1)...(19): siRNA sense strand
guuaggaacugugaagaug

SEQ ID NO: 1423966 - RNA, 19 nt, Homo sapiens
  misc_RNA (1)...(19): siRNA sense strand
ccucggagcagcagcauaa

SEQ ID NO: 1423967 - RNA, 19 nt, Homo sapiens
  misc_RNA (1)...(19): siRNA sense strand
gaacaggcacugcaauacu

SEQ ID NO: 1423968 - RNA, 19 nt, Homo sapiens
  misc_RNA (1)...(19): siRNA sense strand
cgagaacggcugcuacuug

SEQ ID NO: 1423969 - RNA, 19 nt, Homo sapiens
  misc_RNA (1)...(19): siRNA sense strand
gaagauggaagggcaugaa

SEQ ID NO: 1423970 - RNA, 19 nt, Homo sapiens
  misc_RNA (1)...(19): siRNA sense strand
ugaacuccaugaacaccua

SEQ ID NO: 1423971 - RNA, 19 nt, Homo sapiens
  misc_RNA (1)...(19): siRNA sense strand
ggacuucaaggcauacgaa

SEQ ID NO: 1423972 - RNA, 19 nt, Homo sapiens
  misc_RNA (1)...(19): siRNA sense strand
agcauaagcuggacuucaa

SEQ ID NO: 1423973 - RNA, 19 nt, Homo sapiens
  misc_RNA (1)...(19): siRNA sense strand
gccacucgcuguccuucaa

SEQ ID NO: 1423974 - RNA, 19 nt, Homo sapiens
  misc_RNA (1)...(19): siRNA sense strand
guacuaccaagguguguau

SEQ ID NO: 1423975 - RNA, 19 nt, Homo sapiens
  misc_RNA (1)...(19): siRNA sense strand
uaggaacugugaagaugga

SEQ ID NO: 1423976 - RNA, 19 nt, Homo sapiens
  misc_RNA (1)...(19): siRNA sense strand
ggccugggcuccaugaacu

SEQ ID NO: 1423977 - RNA, 19 nt, Homo sapiens
  misc_RNA (1)...(19): siRNA sense strand
ggacuccggcaacauguuc

SEQ ID NO: 1423978 - RNA, 19 nt, Homo sapiens
  misc_RNA (1)...(19): siRNA sense strand
ucguacaucucgcucauca

SEQ ID NO: 1423979 - RNA, 19 nt, Homo sapiens
  misc_RNA (1)...(19): siRNA sense strand
acgaacaggcacugcaaua

SEQ ID NO: 1423980 - RNA, 19 nt, Homo sapiens
  misc_RNA (1)...(19): siRNA sense strand
ggaagaccggccagcuaga

SEQ ID NO: 1423981 - RNA, 19 nt, Homo sapiens
  misc_RNA (1)...(19): siRNA sense strand
ccggcaacauguucgagaa

SEQ ID NO: 1423982 - RNA, 19 nt, Homo sapiens
  misc_RNA (1)...(19): siRNA sense strand
gacccguccuaaacacuuc

SEQ ID NO: 1423983 - RNA, 19 nt, Homo sapiens
  misc_RNA (1)...(19): siRNA sense strand
gaagaccggccagcuagag

SEQ ID NO: 1423984 - RNA, 19 nt, Homo sapiens
  misc_RNA (1)...(19): siRNA sense strand
acuacgagcggcaacauga

SEQ ID NO: 1423985 - RNA, 19 nt, Homo sapiens
  misc_RNA (1)...(19): siRNA sense strand
agucccagcugcaccugaa

SEQ ID NO: 1423986 - RNA, 19 nt, Homo sapiens
  misc_RNA (1)...(19): siRNA sense strand
aacaggcacugcaauacuc

SEQ ID NO: 1423987 - RNA, 19 nt, Homo sapiens
  misc_RNA (1)...(19): siRNA sense strand
gaauagagccauaaagaaa

SEQ ID NO: 1423988 - RNA, 19 nt, Homo sapiens
  misc_RNA (1)...(19): siRNA sense strand
gcaaagcgcagaaauguug

SEQ ID NO: 1423989 - RNA, 19 nt, Homo sapiens
  misc_RNA (1)...(19): siRNA sense strand
gaaagugaaucuaacaaag

SEQ ID NO: 1423990 - RNA, 19 nt, Homo sapiens
  misc_RNA (1)...(19): siRNA sense strand
caagaaagacaaugaguuu

SEQ ID NO: 1423991 - RNA, 19 nt, Homo sapiens
  misc_RNA (1)...(19): siRNA sense strand
gaucugacaccuaucuuua

SEQ ID NO: 1423992 - RNA, 19 nt, Homo sapiens
  misc_RNA (1)...(19): siRNA sense strand
acaagugccucauuuaauu

SEQ ID NO: 1423993 - RNA, 19 nt, Homo sapiens
  misc_RNA (1)...(19): siRNA sense strand
gaauugggaucaagaagau

SEQ ID NO: 1423994 - RNA, 19 nt, Homo sapiens
  misc_RNA (1)...(19): siRNA sense strand
gaaggacugucgaauggaa

SEQ ID NO: 1423995 - RNA, 19 nt, Homo sapiens
  misc_RNA (1)...(19): siRNA sense strand
gagaaggaacugacagaua

SEQ ID NO: 1423996 - RNA, 19 nt, Homo sapiens
  misc_RNA (1)...(19): siRNA sense strand
gacaaugaguuuaaagaga

SEQ ID NO: 1423997 - RNA, 19 nt, Homo sapiens
  misc_RNA (1)...(19): siRNA sense strand
ucaagaagaugaagcugaa

SEQ ID NO: 1423998 - RNA, 19 nt, Homo sapiens
  misc_RNA (1)...(19): siRNA sense strand
gaaaguugauagcucuguu

SEQ ID NO: 1423999 - RNA, 19 nt, Homo sapiens
  misc_RNA (1)...(19): siRNA sense strand
gaacugacagauaggaauu

SEQ ID NO: 1424000 - RNA, 19 nt, Homo sapiens
  misc_RNA (1)...(19): siRNA sense strand
agaaggaacugacagauag

SEQ ID NO: 1424001 - RNA, 19 nt, Homo sapiens
  misc_RNA (1)...(19): siRNA sense strand
caacaaaacugaagauaca

SEQ ID NO: 1424002 - RNA, 19 nt, Homo sapiens
  misc_RNA (1)...(19): siRNA sense strand
ugaagcacgugaauacaaa

SEQ ID NO: 1424003 - RNA, 19 nt, Homo sapiens
  misc_RNA (1)...(19): siRNA sense strand
cgacaagugccucauuuaa

SEQ ID NO: 1424004 - RNA, 19 nt, Homo sapiens
  misc_RNA (1)...(19): siRNA sense strand
gaagauacaccugacaaga

SEQ ID NO: 1424005 - RNA, 19 nt, Homo sapiens
  misc_RNA (1)...(19): siRNA sense strand
cauagguacucugcauuua

SEQ ID NO: 1424006 - RNA, 19 nt, Homo sapiens
  misc_RNA (1)...(19): siRNA sense strand
ugacaguggugaaugcaaa

SEQ ID NO: 1424007 - RNA, 19 nt, Homo sapiens
  misc_RNA (1)...(19): siRNA sense strand
gcauagguacucugcauuu

SEQ ID NO: 1424008 - RNA, 19 nt, Homo sapiens
  misc_RNA (1)...(19): siRNA sense strand
uagguacucugcauuuaaa

SEQ ID NO: 1424009 - RNA, 19 nt, Homo sapiens
  misc_RNA (1)...(19): siRNA sense strand
ggaauugggaucaagaaga

SEQ ID NO: 1424010 - RNA, 19 nt, Homo sapiens
  misc_RNA (1)...(19): siRNA sense strand
gcaggaauucugaaaguga

SEQ ID NO: 1424011 - RNA, 19 nt, Homo sapiens
  misc_RNA (1)...(19): siRNA sense strand
caaaguggcagcugaaaca

SEQ ID NO: 1424012 - RNA, 19 nt, Homo sapiens
  misc_RNA (1)...(19): siRNA sense strand
gaacagggaagaauaacgu

SEQ ID NO: 1424013 - RNA, 19 nt, Homo sapiens
  misc_RNA (1)...(19): siRNA sense strand
gagaugaagaagagaauga

SEQ ID NO: 1424014 - RNA, 19 nt, Homo sapiens
  misc_RNA (1)...(19): siRNA sense strand
gaaagcaaagcgcagaaau

SEQ ID NO: 1424015 - RNA, 19 nt, Homo sapiens
  misc_RNA (1)...(19): siRNA sense strand
aaagagaaaggcauaggua

SEQ ID NO: 1424016 - RNA, 19 nt, Homo sapiens
  misc_RNA (1)...(19): siRNA sense strand
aagaauagagccauaaaga

SEQ ID NO: 1424017 - RNA, 19 nt, Homo sapiens
  misc_RNA (1)...(19): siRNA sense strand
gacaagugccucauuuaau

SEQ ID NO: 1424018 - RNA, 19 nt, Homo sapiens
  misc_RNA (1)...(19): siRNA sense strand
gcgacaagugccucauuua

SEQ ID NO: 1424019 - RNA, 19 nt, Homo sapiens
  misc_RNA (1)...(19): siRNA sense strand
caccuugguugauaaaguu

SEQ ID NO: 1424020 - RNA, 19 nt, Homo sapiens
  misc_RNA (1)...(19): siRNA sense strand
aguaguaguuaccgaagua

SEQ ID NO: 1424021 - RNA, 19 nt, Homo sapiens
  misc_RNA (1)...(19): siRNA sense strand
ucugacaccuaucuuuaaa

SEQ ID NO: 1424022 - RNA, 19 nt, Homo sapiens
  misc_RNA (1)...(19): siRNA sense strand
aaagaaaugccgagaagga

SEQ ID NO: 1424023 - RNA, 19 nt, Homo sapiens
  misc_RNA (1)...(19): siRNA sense strand
caaagauacuacccagagu

SEQ ID NO: 1424024 - RNA, 19 nt, Homo sapiens
  misc_RNA (1)...(19): siRNA sense strand
caagugccucauuuaauuu

SEQ ID NO: 1424025 - RNA, 19 nt, Homo sapiens
  misc_RNA (1)...(19): siRNA sense strand
caaauggcccuaccaccuu

SEQ ID NO: 1424026 - RNA, 19 nt, Homo sapiens
  misc_RNA (1)...(19): siRNA sense strand
caggaauucugaaagugaa

SEQ ID NO: 1424027 - RNA, 19 nt, Homo sapiens
  misc_RNA (1)...(19): siRNA sense strand
gcgggcagacaccaauuua

SEQ ID NO: 1424028 - RNA, 19 nt, Homo sapiens
  misc_RNA (1)...(19): siRNA sense strand
uaacaaaguggcagcugaa

SEQ ID NO: 1424029 - RNA, 19 nt, Homo sapiens
  misc_RNA (1)...(19): siRNA sense strand
caaaagaaaugccgagaag

SEQ ID NO: 1424030 - RNA, 19 nt, Homo sapiens
  misc_RNA (1)...(19): siRNA sense strand
uggaaggacugucgaaugg

SEQ ID NO: 1424031 - RNA, 19 nt, Homo sapiens
  misc_RNA (1)...(19): siRNA sense strand
guucugauuccacccaaua

SEQ ID NO: 1424032 - RNA, 19 nt, Homo sapiens
  misc_RNA (1)...(19): siRNA sense strand
augcaaagguggagaugaa

SEQ ID NO: 1424033 - RNA, 19 nt, Homo sapiens
  misc_RNA (1)...(19): siRNA sense strand
ucugugaucugacaccuau

SEQ ID NO: 1424034 - RNA, 19 nt, Homo sapiens
  misc_RNA (1)...(19): siRNA sense strand
gggauuggauagugaagca

SEQ ID NO: 1424035 - RNA, 19 nt, Homo sapiens
  misc_RNA (1)...(19): siRNA sense strand
caacaaaauuacagcaaga

SEQ ID NO: 1424036 - RNA, 19 nt, Homo sapiens
  misc_RNA (1)...(19): siRNA sense strand
caaagguggagaugaagaa

SEQ ID NO: 1424037 - RNA, 19 nt, Homo sapiens
  misc_RNA (1)...(19): siRNA sense strand
gcaaagguggagaugaaga

SEQ ID NO: 1424038 - RNA, 19 nt, Homo sapiens
  misc_RNA (1)...(19): siRNA sense strand
ccaccuugguugauaaagu

SEQ ID NO: 1424039 - RNA, 19 nt, Homo sapiens
  misc_RNA (1)...(19): siRNA sense strand
cagcaaaucagaagacaca

SEQ ID NO: 1424040 - RNA, 19 nt, Homo sapiens
  misc_RNA (1)...(19): siRNA sense strand
accagucucuucaccauuu

SEQ ID NO: 1424041 - RNA, 19 nt, Homo sapiens
  misc_RNA (1)...(19): siRNA sense strand
gaagaauagagccauaaag

SEQ ID NO: 1424042 - RNA, 19 nt, Homo sapiens
  misc_RNA (1)...(19): siRNA sense strand
uaucgucuguguuccaaau

SEQ ID NO: 1424043 - RNA, 19 nt, Homo sapiens
  misc_RNA (1)...(19): siRNA sense strand
gauaggaauugggaucaag

SEQ ID NO: 1424044 - RNA, 19 nt, Homo sapiens
  misc_RNA (1)...(19): siRNA sense strand
ggaggacgcuuuucuggau

SEQ ID NO: 1424045 - RNA, 19 nt, Homo sapiens
  misc_RNA (1)...(19): siRNA sense strand
agaauagagccauaaagaa

SEQ ID NO: 1424046 - RNA, 19 nt, Homo sapiens
  misc_RNA (1)...(19): siRNA sense strand
gaguaaaccagucucuuca

SEQ ID NO: 1424047 - RNA, 19 nt, Homo sapiens
  misc_RNA (1)...(19): siRNA sense strand
guucuuaucgucuguguuc

SEQ ID NO: 1424048 - RNA, 19 nt, Homo sapiens
  misc_RNA (1)...(19): siRNA sense strand
gugcgggauuggauaguga

SEQ ID NO: 1424049 - RNA, 19 nt, Homo sapiens
  misc_RNA (1)...(19): siRNA sense strand
gcagacgaguugcacaaaa

SEQ ID NO: 1424050 - RNA, 19 nt, Homo sapiens
  misc_RNA (1)...(19): siRNA sense strand
caacauauugcugaacguu

SEQ ID NO: 1424051 - RNA, 19 nt, Homo sapiens
  misc_RNA (1)...(19): siRNA sense strand
aaaccagucucuucaccau

SEQ ID NO: 1424052 - RNA, 19 nt, Homo sapiens
  misc_RNA (1)...(19): siRNA sense strand
aagauacaccugacaagaa

SEQ ID NO: 1424053 - RNA, 19 nt, Homo sapiens
  misc_RNA (1)...(19): siRNA sense strand
uggcaggaauucugaaagu

SEQ ID NO: 1424054 - RNA, 19 nt, Homo sapiens
  misc_RNA (1)...(19): siRNA sense strand
uaaagcuugugucggaaau

SEQ ID NO: 1424055 - RNA, 19 nt, Homo sapiens
  misc_RNA (1)...(19): siRNA sense strand
ugaagaauagagccauaaa

SEQ ID NO: 1424056 - RNA, 19 nt, Homo sapiens
  misc_RNA (1)...(19): siRNA sense strand
gagcgacaagugccucauu

SEQ ID NO: 1424057 - RNA, 19 nt, Homo sapiens
  misc_RNA (1)...(19): siRNA sense strand
agauacaccugacaagaag

SEQ ID NO: 1424058 - RNA, 19 nt, Homo sapiens
  misc_RNA (1)...(19): siRNA sense strand
gggaacaguggcaggaauu

SEQ ID NO: 1424059 - RNA, 19 nt, Homo sapiens
  misc_RNA (1)...(19): siRNA sense strand
ggaacugacagauaggaau

SEQ ID NO: 1424060 - RNA, 19 nt, Homo sapiens
  misc_RNA (1)...(19): siRNA sense strand
gugaagcacgugaauacaa

SEQ ID NO: 1424061 - RNA, 19 nt, Homo sapiens
  misc_RNA (1)...(19): siRNA sense strand
gaaaugccuaucacaagca

SEQ ID NO: 1424062 - RNA, 19 nt, Homo sapiens
  misc_RNA (1)...(19): siRNA sense strand
guaaagcuugugucggaaa

SEQ ID NO: 1424063 - RNA, 19 nt, Homo sapiens
  misc_RNA (1)...(19): siRNA sense strand
aaucagaagacacagcuuu

SEQ ID NO: 1424064 - RNA, 19 nt, Homo sapiens
  misc_RNA (1)...(19): siRNA sense strand
gaugagccacccaaaguag

SEQ ID NO: 1424065 - RNA, 19 nt, Homo sapiens
  misc_RNA (1)...(19): siRNA sense strand
gaaggugacaguggugaau

SEQ ID NO: 1424066 - RNA, 19 nt, Homo sapiens
  misc_RNA (1)...(19): siRNA sense strand
gguggcaucugaaaagaaa

SEQ ID NO: 1424067 - RNA, 19 nt, Homo sapiens
  misc_RNA (1)...(19): siRNA sense strand
aagcaaagcgcagaaaugu

SEQ ID NO: 1424068 - RNA, 19 nt, Homo sapiens
  misc_RNA (1)...(19): siRNA sense strand
aagugaaucuaacaaagug

SEQ ID NO: 1424069 - RNA, 19 nt, Homo sapiens
  misc_RNA (1)...(19): siRNA sense strand
cuugaagaauagagccaua

SEQ ID NO: 1424070 - RNA, 19 nt, Homo sapiens
  misc_RNA (1)...(19): siRNA sense strand
guuuaaagagaaaggcaua

SEQ ID NO: 1424071 - RNA, 19 nt, Homo sapiens
  misc_RNA (1)...(19): siRNA sense strand
acaagaaagacaaugaguu

SEQ ID NO: 1424072 - RNA, 19 nt, Homo sapiens
  misc_RNA (1)...(19): siRNA sense strand
ucgaauggaaacaacauaa

SEQ ID NO: 1424073 - RNA, 19 nt, Homo sapiens
  misc_RNA (1)...(19): siRNA sense strand
ccaauugacgagaagaaug

SEQ ID NO: 1424074 - RNA, 19 nt, Homo sapiens
  misc_RNA (1)...(19): siRNA sense strand
gagaaaggcauagguacuc

SEQ ID NO: 1424075 - RNA, 19 nt, Homo sapiens
  misc_RNA (1)...(19): siRNA sense strand
cuucaccauuucccacuaa

SEQ ID NO: 1424076 - RNA, 19 nt, Homo sapiens
  misc_RNA (1)...(19): siRNA sense strand
aaagcaaagcgcagaaaug

SEQ ID NO: 1424077 - RNA, 19 nt, Homo sapiens
  misc_RNA (1)...(19): siRNA sense strand
cagcaagagucaacguuuu

SEQ ID NO: 1424078 - RNA, 19 nt, Homo sapiens
  misc_RNA (1)...(19): siRNA sense strand
gaacagcaacacgggaaca

SEQ ID NO: 1424079 - RNA, 19 nt, Homo sapiens
  misc_RNA (1)...(19): siRNA sense strand
gauagugaagcacgugaau

SEQ ID NO: 1424080 - RNA, 19 nt, Homo sapiens
  misc_RNA (1)...(19): siRNA sense strand
gaaaugccgagaaggaacu

SEQ ID NO: 1424081 - RNA, 19 nt, Homo sapiens
  misc_RNA (1)...(19): siRNA sense strand
gggcagacaccaauuuagg

SEQ ID NO: 1424082 - RNA, 19 nt, Homo sapiens
  misc_RNA (1)...(19): siRNA sense strand
ccacccaaaguaguaguua

SEQ ID NO: 1424083 - RNA, 19 nt, Homo sapiens
  misc_RNA (1)...(19): siRNA sense strand
gaaugaugagccacccaaa

SEQ ID NO: 1424084 - RNA, 19 nt, Homo sapiens
  misc_RNA (1)...(19): siRNA sense strand
aaaccuacagcaaaucaga

SEQ ID NO: 1424085 - RNA, 19 nt, Homo sapiens
  misc_RNA (1)...(19): siRNA sense strand
ccagucaccauguugauuc

SEQ ID NO: 1424086 - RNA, 19 nt, Homo sapiens
  misc_RNA (1)...(19): siRNA sense strand
ccaauuuaggcaacauauu

SEQ ID NO: 1424087 - RNA, 19 nt, Homo sapiens
  misc_RNA (1)...(19): siRNA sense strand
gaauagagccauaaagaaa

SEQ ID NO: 1424088 - RNA, 19 nt, Homo sapiens
  misc_RNA (1)...(19): siRNA sense strand
gcaaagcgcagaaauguug

SEQ ID NO: 1424089 - RNA, 19 nt, Homo sapiens
  misc_RNA (1)...(19): siRNA sense strand
gaaagugaaucuaacaaag

SEQ ID NO: 1424090 - RNA, 19 nt, Homo sapiens
  misc_RNA (1)...(19): siRNA sense strand
caagaaagacaaugaguuu

SEQ ID NO: 1424091 - RNA, 19 nt, Homo sapiens
  misc_RNA (1)...(19): siRNA sense strand
gaucugacaccuaucuuua

SEQ ID NO: 1424092 - RNA, 19 nt, Homo sapiens
  misc_RNA (1)...(19): siRNA sense strand
acaagugccucauuuaauu

SEQ ID NO: 1424093 - RNA, 19 nt, Homo sapiens
  misc_RNA (1)...(19): siRNA sense strand
gaaggacugucgaauggaa

SEQ ID NO: 1424094 - RNA, 19 nt, Homo sapiens
  misc_RNA (1)...(19): siRNA sense strand
gacaaugaguuuaaagaga

SEQ ID NO: 1424095 - RNA, 19 nt, Homo sapiens
  misc_RNA (1)...(19): siRNA sense strand
gaaaguugauagcucuguu

SEQ ID NO: 1424096 - RNA, 19 nt, Homo sapiens
  misc_RNA (1)...(19): siRNA sense strand
caacaaaacugaagauaca

SEQ ID NO: 1424097 - RNA, 19 nt, Homo sapiens
  misc_RNA (1)...(19): siRNA sense strand
ugaagcacgugaauacaaa

SEQ ID NO: 1424098 - RNA, 19 nt, Homo sapiens
  misc_RNA (1)...(19): siRNA sense strand
cgacaagugccucauuuaa

SEQ ID NO: 1424099 - RNA, 19 nt, Homo sapiens
  misc_RNA (1)...(19): siRNA sense strand
gaagauacaccugacaaga

SEQ ID NO: 1424100 - RNA, 19 nt, Homo sapiens
  misc_RNA (1)...(19): siRNA sense strand
cauagguacucugcauuua

SEQ ID NO: 1424101 - RNA, 19 nt, Homo sapiens
  misc_RNA (1)...(19): siRNA sense strand
ugacaguggugaaugcaaa

SEQ ID NO: 1424102 - RNA, 19 nt, Homo sapiens
  misc_RNA (1)...(19): siRNA sense strand
gcauagguacucugcauuu

SEQ ID NO: 1424103 - RNA, 19 nt, Homo sapiens
  misc_RNA (1)...(19): siRNA sense strand
uagguacucugcauuuaaa

SEQ ID NO: 1424104 - RNA, 19 nt, Homo sapiens
  misc_RNA (1)...(19): siRNA sense strand
gcaggaauucugaaaguga

SEQ ID NO: 1424105 - RNA, 19 nt, Homo sapiens
  misc_RNA (1)...(19): siRNA sense strand
caaaguggcagcugaaaca

SEQ ID NO: 1424106 - RNA, 19 nt, Homo sapiens
  misc_RNA (1)...(19): siRNA sense strand
gaacagggaagaauaacgu

SEQ ID NO: 1424107 - RNA, 19 nt, Homo sapiens
  misc_RNA (1)...(19): siRNA sense strand
gagaugaagaagagaauga

SEQ ID NO: 1424108 - RNA, 19 nt, Homo sapiens
  misc_RNA (1)...(19): siRNA sense strand
gaaagcaaagcgcagaaau

SEQ ID NO: 1424109 - RNA, 19 nt, Homo sapiens
  misc_RNA (1)...(19): siRNA sense strand
aaagagaaaggcauaggua

SEQ ID NO: 1424110 - RNA, 19 nt, Homo sapiens
  misc_RNA (1)...(19): siRNA sense strand
gcgacaagugccucauuua

SEQ ID NO: 1424111 - RNA, 19 nt, Homo sapiens
  misc_RNA (1)...(19): siRNA sense strand
aagaauagagccauaaaga

SEQ ID NO: 1424112 - RNA, 19 nt, Homo sapiens
  misc_RNA (1)...(19): siRNA sense strand
gacaagugccucauuuaau

SEQ ID NO: 1424113 - RNA, 19 nt, Homo sapiens
  misc_RNA (1)...(19): siRNA sense strand
caccuugguugauaaaguu

SEQ ID NO: 1424114 - RNA, 19 nt, Homo sapiens
  misc_RNA (1)...(19): siRNA sense strand
aguaguaguuaccgaagua

SEQ ID NO: 1424115 - RNA, 19 nt, Homo sapiens
  misc_RNA (1)...(19): siRNA sense strand
ucugacaccuaucuuuaaa

SEQ ID NO: 1424116 - RNA, 19 nt, Homo sapiens
  misc_RNA (1)...(19): siRNA sense strand
caaauggcccuaccaccuu

SEQ ID NO: 1424117 - RNA, 19 nt, Homo sapiens
  misc_RNA (1)...(19): siRNA sense strand
caaagauacuacccagagu

SEQ ID NO: 1424118 - RNA, 19 nt, Homo sapiens
  misc_RNA (1)...(19): siRNA sense strand
caagugccucauuuaauuu

SEQ ID NO: 1424119 - RNA, 19 nt, Homo sapiens
  misc_RNA (1)...(19): siRNA sense strand
caggaauucugaaagugaa

SEQ ID NO: 1424120 - RNA, 19 nt, Homo sapiens
  misc_RNA (1)...(19): siRNA sense strand
gcgggcagacaccaauuua

SEQ ID NO: 1424121 - RNA, 19 nt, Homo sapiens
  misc_RNA (1)...(19): siRNA sense strand
uaacaaaguggcagcugaa

SEQ ID NO: 1424122 - RNA, 19 nt, Homo sapiens
  misc_RNA (1)...(19): siRNA sense strand
uggaaggacugucgaaugg

SEQ ID NO: 1424123 - RNA, 19 nt, Homo sapiens
  misc_RNA (1)...(19): siRNA sense strand
guucugauuccacccaaua

SEQ ID NO: 1424124 - RNA, 19 nt, Homo sapiens
  misc_RNA (1)...(19): siRNA sense strand
augcaaagguggagaugaa

SEQ ID NO: 1424125 - RNA, 19 nt, Homo sapiens
  misc_RNA (1)...(19): siRNA sense strand
ucugugaucugacaccuau

SEQ ID NO: 1424126 - RNA, 19 nt, Homo sapiens
  misc_RNA (1)...(19): siRNA sense strand
gggauuggauagugaagca

SEQ ID NO: 1424127 - RNA, 19 nt, Homo sapiens
  misc_RNA (1)...(19): siRNA sense strand
caacaaaauuacagcaaga

SEQ ID NO: 1424128 - RNA, 19 nt, Homo sapiens
  misc_RNA (1)...(19): siRNA sense strand
caaagguggagaugaagaa

SEQ ID NO: 1424129 - RNA, 19 nt, Homo sapiens
  misc_RNA (1)...(19): siRNA sense strand
gcaaagguggagaugaaga

SEQ ID NO: 1424130 - RNA, 19 nt, Homo sapiens
  misc_RNA (1)...(19): siRNA sense strand
ccaccuugguugauaaagu

SEQ ID NO: 1424131 - RNA, 19 nt, Homo sapiens
  misc_RNA (1)...(19): siRNA sense strand
cagcaaaucagaagacaca

SEQ ID NO: 1424132 - RNA, 19 nt, Homo sapiens
  misc_RNA (1)...(19): siRNA sense strand
accagucucuucaccauuu

SEQ ID NO: 1424133 - RNA, 19 nt, Homo sapiens
  misc_RNA (1)...(19): siRNA sense strand
gaagaauagagccauaaag

SEQ ID NO: 1424134 - RNA, 19 nt, Homo sapiens
  misc_RNA (1)...(19): siRNA sense strand
uaucgucuguguuccaaau

SEQ ID NO: 1424135 - RNA, 19 nt, Homo sapiens
  misc_RNA (1)...(19): siRNA sense strand
ggaggacgcuuuucuggau

SEQ ID NO: 1424136 - RNA, 19 nt, Homo sapiens
  misc_RNA (1)...(19): siRNA sense strand
agaauagagccauaaagaa

SEQ ID NO: 1424137 - RNA, 19 nt, Homo sapiens
  misc_RNA (1)...(19): siRNA sense strand
gaguaaaccagucucuuca

SEQ ID NO: 1424138 - RNA, 19 nt, Homo sapiens
  misc_RNA (1)...(19): siRNA sense strand
guucuuaucgucuguguuc

SEQ ID NO: 1424139 - RNA, 19 nt, Homo sapiens
  misc_RNA (1)...(19): siRNA sense strand
gugcgggauuggauaguga

SEQ ID NO: 1424140 - RNA, 19 nt, Homo sapiens
  misc_RNA (1)...(19): siRNA sense strand
gcagacgaguugcacaaaa

SEQ ID NO: 1424141 - RNA, 19 nt, Homo sapiens
  misc_RNA (1)...(19): siRNA sense strand
caacauauugcugaacguu

SEQ ID NO: 1424142 - RNA, 19 nt, Homo sapiens
  misc_RNA (1)...(19): siRNA sense strand
aaaccagucucuucaccau

SEQ ID NO: 1424143 - RNA, 19 nt, Homo sapiens
  misc_RNA (1)...(19): siRNA sense strand
aagauacaccugacaagaa

SEQ ID NO: 1424144 - RNA, 19 nt, Homo sapiens
  misc_RNA (1)...(19): siRNA sense strand
uggcaggaauucugaaagu

SEQ ID NO: 1424145 - RNA, 19 nt, Homo sapiens
  misc_RNA (1)...(19): siRNA sense strand
uaaagcuugugucggaaau

SEQ ID NO: 1424146 - RNA, 19 nt, Homo sapiens
  misc_RNA (1)...(19): siRNA sense strand
gagcgacaagugccucauu

SEQ ID NO: 1424147 - RNA, 19 nt, Homo sapiens
  misc_RNA (1)...(19): siRNA sense strand
agauacaccugacaagaag

SEQ ID NO: 1424148 - RNA, 19 nt, Homo sapiens
  misc_RNA (1)...(19): siRNA sense strand
ugaagaauagagccauaaa

SEQ ID NO: 1424149 - RNA, 19 nt, Homo sapiens
  misc_RNA (1)...(19): siRNA sense strand
gggaacaguggcaggaauu

SEQ ID NO: 1424150 - RNA, 19 nt, Homo sapiens
  misc_RNA (1)...(19): siRNA sense strand
gugaagcacgugaauacaa

SEQ ID NO: 1424151 - RNA, 19 nt, Homo sapiens
  misc_RNA (1)...(19): siRNA sense strand
gaaaugccuaucacaagca

SEQ ID NO: 1424152 - RNA, 19 nt, Homo sapiens
  misc_RNA (1)...(19): siRNA sense strand
guaaagcuugugucggaaa

SEQ ID NO: 1424153 - RNA, 19 nt, Homo sapiens
  misc_RNA (1)...(19): siRNA sense strand
aaucagaagacacagcuuu

SEQ ID NO: 1424154 - RNA, 19 nt, Homo sapiens
  misc_RNA (1)...(19): siRNA sense strand
gaugagccacccaaaguag

SEQ ID NO: 1424155 - RNA, 19 nt, Homo sapiens
  misc_RNA (1)...(19): siRNA sense strand
aagcaaagcgcagaaaugu

SEQ ID NO: 1424156 - RNA, 19 nt, Homo sapiens
  misc_RNA (1)...(19): siRNA sense strand
gaaggugacaguggugaau

SEQ ID NO: 1424157 - RNA, 19 nt, Homo sapiens
  misc_RNA (1)...(19): siRNA sense strand
gguggcaucugaaaagaaa

SEQ ID NO: 1424158 - RNA, 19 nt, Homo sapiens
  misc_RNA (1)...(19): siRNA sense strand
aagugaaucuaacaaagug

SEQ ID NO: 1424159 - RNA, 19 nt, Homo sapiens
  misc_RNA (1)...(19): siRNA sense strand
cuugaagaauagagccaua

SEQ ID NO: 1424160 - RNA, 19 nt, Homo sapiens
  misc_RNA (1)...(19): siRNA sense strand
guuuaaagagaaaggcaua

SEQ ID NO: 1424161 - RNA, 19 nt, Homo sapiens
  misc_RNA (1)...(19): siRNA sense strand
acaagaaagacaaugaguu

SEQ ID NO: 1424162 - RNA, 19 nt, Homo sapiens
  misc_RNA (1)...(19): siRNA sense strand
gauagugaagcacgugaau

SEQ ID NO: 1424163 - RNA, 19 nt, Homo sapiens
  misc_RNA (1)...(19): siRNA sense strand
ccaauugacgagaagaaug

SEQ ID NO: 1424164 - RNA, 19 nt, Homo sapiens
  misc_RNA (1)...(19): siRNA sense strand
gagaaaggcauagguacuc

SEQ ID NO: 1424165 - RNA, 19 nt, Homo sapiens
  misc_RNA (1)...(19): siRNA sense strand
aaagcaaagcgcagaaaug

SEQ ID NO: 1424166 - RNA, 19 nt, Homo sapiens
  misc_RNA (1)...(19): siRNA sense strand
ucgaauggaaacaacauaa

SEQ ID NO: 1424167 - RNA, 19 nt, Homo sapiens
  misc_RNA (1)...(19): siRNA sense strand
cuucaccauuucccacuaa

SEQ ID NO: 1424168 - RNA, 19 nt, Homo sapiens
  misc_RNA (1)...(19): siRNA sense strand
cagcaagagucaacguuuu

SEQ ID NO: 1424169 - RNA, 19 nt, Homo sapiens
  misc_RNA (1)...(19): siRNA sense strand
gaacagcaacacgggaaca

SEQ ID NO: 1424170 - RNA, 19 nt, Homo sapiens
  misc_RNA (1)...(19): siRNA sense strand
gaaugaugagccacccaaa

SEQ ID NO: 1424171 - RNA, 19 nt, Homo sapiens
  misc_RNA (1)...(19): siRNA sense strand
gggcagacaccaauuuagg

SEQ ID NO: 1424172 - RNA, 19 nt, Homo sapiens
  misc_RNA (1)...(19): siRNA sense strand
ccacccaaaguaguaguua

SEQ ID NO: 1424173 - RNA, 19 nt, Homo sapiens
  misc_RNA (1)...(19): siRNA sense strand
cauuuaauuucggcaagaa

SEQ ID NO: 1424174 - RNA, 19 nt, Homo sapiens
  misc_RNA (1)...(19): siRNA sense strand
ccagucaccauguugauuc

SEQ ID NO: 1424175 - RNA, 19 nt, Homo sapiens
  misc_RNA (1)...(19): siRNA sense strand
ccaauuuaggcaacauauu

SEQ ID NO: 1424176 - RNA, 19 nt, Homo sapiens
  misc_RNA (1)...(19): siRNA sense strand
aaaccuacagcaaaucaga

SEQ ID NO: 1424177 - RNA, 19 nt, Homo sapiens
  misc_RNA (1)...(19): siRNA sense strand
ugaugagccacccaaagua

SEQ ID NO: 1424178 - RNA, 19 nt, Homo sapiens
  misc_RNA (1)...(19): siRNA sense strand
ggcaggaauucugaaagug

SEQ ID NO: 1424179 - RNA, 19 nt, Homo sapiens
  misc_RNA (1)...(19): siRNA sense strand
guuccaaauccaccaauug

SEQ ID NO: 1424180 - RNA, 19 nt, Homo sapiens
  misc_RNA (1)...(19): siRNA sense strand
ugagccacccaaaguagua

SEQ ID NO: 1424181 - RNA, 19 nt, Homo sapiens
  misc_RNA (1)...(19): siRNA sense strand
gaugaagaagagaaugaug

SEQ ID NO: 1424182 - RNA, 19 nt, Homo sapiens
  misc_RNA (1)...(19): siRNA sense strand
uggccuugcuuccaguaaa

SEQ ID NO: 1424183 - RNA, 19 nt, Homo sapiens
  misc_RNA (1)...(19): siRNA sense strand
cgaggaugcagacgaguug

SEQ ID NO: 1424184 - RNA, 19 nt, Homo sapiens
  misc_RNA (1)...(19): siRNA sense strand
uaacguucuuaucgucugu

SEQ ID NO: 1424185 - RNA, 19 nt, Homo sapiens
  misc_RNA (1)...(19): siRNA sense strand
ccagugaggaagucuugaa

SEQ ID NO: 1424186 - RNA, 19 nt, Homo sapiens
  misc_RNA (1)...(19): siRNA sense strand
gcgaggaugcagacgaguu

SEQ ID NO: 1424187 - RNA, 19 nt, Homo sapiens
  misc_RNA (1)...(19): siRNA sense strand
gaauagagccauaaagaaa

SEQ ID NO: 1424188 - RNA, 19 nt, Homo sapiens
  misc_RNA (1)...(19): siRNA sense strand
gcaaagcgcagaaauguug

SEQ ID NO: 1424189 - RNA, 19 nt, Homo sapiens
  misc_RNA (1)...(19): siRNA sense strand
gaaagugaaucuaacaaag

SEQ ID NO: 1424190 - RNA, 19 nt, Homo sapiens
  misc_RNA (1)...(19): siRNA sense strand
caagaaagacaaugaguuu

SEQ ID NO: 1424191 - RNA, 19 nt, Homo sapiens
  misc_RNA (1)...(19): siRNA sense strand
gaucugacaccuaucuuua

SEQ ID NO: 1424192 - RNA, 19 nt, Homo sapiens
  misc_RNA (1)...(19): siRNA sense strand
acaagugccucauuuaauu

SEQ ID NO: 1424193 - RNA, 19 nt, Homo sapiens
  misc_RNA (1)...(19): siRNA sense strand
gaaggacugucgaauggaa

SEQ ID NO: 1424194 - RNA, 19 nt, Homo sapiens
  misc_RNA (1)...(19): siRNA sense strand
gacaaugaguuuaaagaga

SEQ ID NO: 1424195 - RNA, 19 nt, Homo sapiens
  misc_RNA (1)...(19): siRNA sense strand
gaaaguugauagcucuguu

SEQ ID NO: 1424196 - RNA, 19 nt, Homo sapiens
  misc_RNA (1)...(19): siRNA sense strand
caacaaaacugaagauaca

SEQ ID NO: 1424197 - RNA, 19 nt, Homo sapiens
  misc_RNA (1)...(19): siRNA sense strand
ugaagcacgugaauacaaa

SEQ ID NO: 1424198 - RNA, 19 nt, Homo sapiens
  misc_RNA (1)...(19): siRNA sense strand
cgacaagugccucauuuaa

SEQ ID NO: 1424199 - RNA, 19 nt, Homo sapiens
  misc_RNA (1)...(19): siRNA sense strand
gaagauacaccugacaaga

SEQ ID NO: 1424200 - RNA, 19 nt, Homo sapiens
  misc_RNA (1)...(19): siRNA sense strand
cauagguacucugcauuua

SEQ ID NO: 1424201 - RNA, 19 nt, Homo sapiens
  misc_RNA (1)...(19): siRNA sense strand
ugacaguggugaaugcaaa

SEQ ID NO: 1424202 - RNA, 19 nt, Homo sapiens
  misc_RNA (1)...(19): siRNA sense strand
gcauagguacucugcauuu

SEQ ID NO: 1424203 - RNA, 19 nt, Homo sapiens
  misc_RNA (1)...(19): siRNA sense strand
uagguacucugcauuuaaa

SEQ ID NO: 1424204 - RNA, 19 nt, Homo sapiens
  misc_RNA (1)...(19): siRNA sense strand
gcaggaauucugaaaguga

SEQ ID NO: 1424205 - RNA, 19 nt, Homo sapiens
  misc_RNA (1)...(19): siRNA sense strand
caaaguggcagcugaaaca

SEQ ID NO: 1424206 - RNA, 19 nt, Homo sapiens
  misc_RNA (1)...(19): siRNA sense strand
gaacagggaagaauaacgu

SEQ ID NO: 1424207 - RNA, 19 nt, Homo sapiens
  misc_RNA (1)...(19): siRNA sense strand
gagaugaagaagagaauga

SEQ ID NO: 1424208 - RNA, 19 nt, Homo sapiens
  misc_RNA (1)...(19): siRNA sense strand
gaaagcaaagcgcagaaau

SEQ ID NO: 1424209 - RNA, 19 nt, Homo sapiens
  misc_RNA (1)...(19): siRNA sense strand
aaagagaaaggcauaggua

SEQ ID NO: 1424210 - RNA, 19 nt, Homo sapiens
  misc_RNA (1)...(19): siRNA sense strand
gcgacaagugccucauuua

SEQ ID NO: 1424211 - RNA, 19 nt, Homo sapiens
  misc_RNA (1)...(19): siRNA sense strand
aagaauagagccauaaaga

SEQ ID NO: 1424212 - RNA, 19 nt, Homo sapiens
  misc_RNA (1)...(19): siRNA sense strand
gacaagugccucauuuaau

SEQ ID NO: 1424213 - RNA, 19 nt, Homo sapiens
  misc_RNA (1)...(19): siRNA sense strand
caccuugguugauaaaguu

SEQ ID NO: 1424214 - RNA, 19 nt, Homo sapiens
  misc_RNA (1)...(19): siRNA sense strand
aguaguaguuaccgaagua

SEQ ID NO: 1424215 - RNA, 19 nt, Homo sapiens
  misc_RNA (1)...(19): siRNA sense strand
ucugacaccuaucuuuaaa

SEQ ID NO: 1424216 - RNA, 19 nt, Homo sapiens
  misc_RNA (1)...(19): siRNA sense strand
caaauggcccuaccaccuu

SEQ ID NO: 1424217 - RNA, 19 nt, Homo sapiens
  misc_RNA (1)...(19): siRNA sense strand
caaagauacuacccagagu

SEQ ID NO: 1424218 - RNA, 19 nt, Homo sapiens
  misc_RNA (1)...(19): siRNA sense strand
caagugccucauuuaauuu

SEQ ID NO: 1424219 - RNA, 19 nt, Homo sapiens
  misc_RNA (1)...(19): siRNA sense strand
caggaauucugaaagugaa

SEQ ID NO: 1424220 - RNA, 19 nt, Homo sapiens
  misc_RNA (1)...(19): siRNA sense strand
gcgggcagacaccaauuua

SEQ ID NO: 1424221 - RNA, 19 nt, Homo sapiens
  misc_RNA (1)...(19): siRNA sense strand
uaacaaaguggcagcugaa

SEQ ID NO: 1424222 - RNA, 19 nt, Homo sapiens
  misc_RNA (1)...(19): siRNA sense strand
uggaaggacugucgaaugg

SEQ ID NO: 1424223 - RNA, 19 nt, Homo sapiens
  misc_RNA (1)...(19): siRNA sense strand
guucugauuccacccaaua

SEQ ID NO: 1424224 - RNA, 19 nt, Homo sapiens
  misc_RNA (1)...(19): siRNA sense strand
augcaaagguggagaugaa

SEQ ID NO: 1424225 - RNA, 19 nt, Homo sapiens
  misc_RNA (1)...(19): siRNA sense strand
ucugugaucugacaccuau

SEQ ID NO: 1424226 - RNA, 19 nt, Homo sapiens
  misc_RNA (1)...(19): siRNA sense strand
gggauuggauagugaagca

SEQ ID NO: 1424227 - RNA, 19 nt, Homo sapiens
  misc_RNA (1)...(19): siRNA sense strand
caacaaaauuacagcaaga

SEQ ID NO: 1424228 - RNA, 19 nt, Homo sapiens
  misc_RNA (1)...(19): siRNA sense strand
caaagguggagaugaagaa

SEQ ID NO: 1424229 - RNA, 19 nt, Homo sapiens
  misc_RNA (1)...(19): siRNA sense strand
gcaaagguggagaugaaga

SEQ ID NO: 1424230 - RNA, 19 nt, Homo sapiens
  misc_RNA (1)...(19): siRNA sense strand
ccaccuugguugauaaagu

SEQ ID NO: 1424231 - RNA, 19 nt, Homo sapiens
  misc_RNA (1)...(19): siRNA sense strand
cagcaaaucagaagacaca

SEQ ID NO: 1424232 - RNA, 19 nt, Homo sapiens
  misc_RNA (1)...(19): siRNA sense strand
accagucucuucaccauuu

SEQ ID NO: 1424233 - RNA, 19 nt, Homo sapiens
  misc_RNA (1)...(19): siRNA sense strand
gaagaauagagccauaaag

SEQ ID NO: 1424234 - RNA, 19 nt, Homo sapiens
  misc_RNA (1)...(19): siRNA sense strand
uaucgucuguguuccaaau

SEQ ID NO: 1424235 - RNA, 19 nt, Homo sapiens
  misc_RNA (1)...(19): siRNA sense strand
ggaggacgcuuuucuggau

SEQ ID NO: 1424236 - RNA, 19 nt, Homo sapiens
  misc_RNA (1)...(19): siRNA sense strand
agaauagagccauaaagaa

SEQ ID NO: 1424237 - RNA, 19 nt, Homo sapiens
  misc_RNA (1)...(19): siRNA sense strand
gaguaaaccagucucuuca

SEQ ID NO: 1424238 - RNA, 19 nt, Homo sapiens
  misc_RNA (1)...(19): siRNA sense strand
guucuuaucgucuguguuc

SEQ ID NO: 1424239 - RNA, 19 nt, Homo sapiens
  misc_RNA (1)...(19): siRNA sense strand
gugcgggauuggauaguga

SEQ ID NO: 1424240 - RNA, 19 nt, Homo sapiens
  misc_RNA (1)...(19): siRNA sense strand
gcagacgaguugcacaaaa

SEQ ID NO: 1424241 - RNA, 19 nt, Homo sapiens
  misc_RNA (1)...(19): siRNA sense strand
caacauauugcugaacguu

SEQ ID NO: 1424242 - RNA, 19 nt, Homo sapiens
  misc_RNA (1)...(19): siRNA sense strand
aaaccagucucuucaccau

SEQ ID NO: 1424243 - RNA, 19 nt, Homo sapiens
  misc_RNA (1)...(19): siRNA sense strand
aagauacaccugacaagaa

SEQ ID NO: 1424244 - RNA, 19 nt, Homo sapiens
  misc_RNA (1)...(19): siRNA sense strand
uggcaggaauucugaaagu

SEQ ID NO: 1424245 - RNA, 19 nt, Homo sapiens
  misc_RNA (1)...(19): siRNA sense strand
uaaagcuugugucggaaau

SEQ ID NO: 1424246 - RNA, 19 nt, Homo sapiens
  misc_RNA (1)...(19): siRNA sense strand
gagcgacaagugccucauu

SEQ ID NO: 1424247 - RNA, 19 nt, Homo sapiens
  misc_RNA (1)...(19): siRNA sense strand
agauacaccugacaagaag

SEQ ID NO: 1424248 - RNA, 19 nt, Homo sapiens
  misc_RNA (1)...(19): siRNA sense strand
ugaagaauagagccauaaa

SEQ ID NO: 1424249 - RNA, 19 nt, Homo sapiens
  misc_RNA (1)...(19): siRNA sense strand
gggaacaguggcaggaauu

SEQ ID NO: 1424250 - RNA, 19 nt, Homo sapiens
  misc_RNA (1)...(19): siRNA sense strand
gugaagcacgugaauacaa

SEQ ID NO: 1424251 - RNA, 19 nt, Homo sapiens
  misc_RNA (1)...(19): siRNA sense strand
gaaaugccuaucacaagca

SEQ ID NO: 1424252 - RNA, 19 nt, Homo sapiens
  misc_RNA (1)...(19): siRNA sense strand
guaaagcuugugucggaaa

SEQ ID NO: 1424253 - RNA, 19 nt, Homo sapiens
  misc_RNA (1)...(19): siRNA sense strand
aaucagaagacacagcuuu

SEQ ID NO: 1424254 - RNA, 19 nt, Homo sapiens
  misc_RNA (1)...(19): siRNA sense strand
gaugagccacccaaaguag

SEQ ID NO: 1424255 - RNA, 19 nt, Homo sapiens
  misc_RNA (1)...(19): siRNA sense strand
aagcaaagcgcagaaaugu

SEQ ID NO: 1424256 - RNA, 19 nt, Homo sapiens
  misc_RNA (1)...(19): siRNA sense strand
gaaggugacaguggugaau

SEQ ID NO: 1424257 - RNA, 19 nt, Homo sapiens
  misc_RNA (1)...(19): siRNA sense strand
gguggcaucugaaaagaaa

SEQ ID NO: 1424258 - RNA, 19 nt, Homo sapiens
  misc_RNA (1)...(19): siRNA sense strand
aagugaaucuaacaaagug

SEQ ID NO: 1424259 - RNA, 19 nt, Homo sapiens
  misc_RNA (1)...(19): siRNA sense strand
cuugaagaauagagccaua

SEQ ID NO: 1424260 - RNA, 19 nt, Homo sapiens
  misc_RNA (1)...(19): siRNA sense strand
guuuaaagagaaaggcaua

SEQ ID NO: 1424261 - RNA, 19 nt, Homo sapiens
  misc_RNA (1)...(19): siRNA sense strand
acaagaaagacaaugaguu

SEQ ID NO: 1424262 - RNA, 19 nt, Homo sapiens
  misc_RNA (1)...(19): siRNA sense strand
gauagugaagcacgugaau

SEQ ID NO: 1424263 - RNA, 19 nt, Homo sapiens
  misc_RNA (1)...(19): siRNA sense strand
ccaauugacgagaagaaug

SEQ ID NO: 1424264 - RNA, 19 nt, Homo sapiens
  misc_RNA (1)...(19): siRNA sense strand
gagaaaggcauagguacuc

SEQ ID NO: 1424265 - RNA, 19 nt, Homo sapiens
  misc_RNA (1)...(19): siRNA sense strand
aaagcaaagcgcagaaaug

SEQ ID NO: 1424266 - RNA, 19 nt, Homo sapiens
  misc_RNA (1)...(19): siRNA sense strand
ucgaauggaaacaacauaa

SEQ ID NO: 1424267 - RNA, 19 nt, Homo sapiens
  misc_RNA (1)...(19): siRNA sense strand
cuucaccauuucccacuaa

SEQ ID NO: 1424268 - RNA, 19 nt, Homo sapiens
  misc_RNA (1)...(19): siRNA sense strand
cagcaagagucaacguuuu

SEQ ID NO: 1424269 - RNA, 19 nt, Homo sapiens
  misc_RNA (1)...(19): siRNA sense strand
gaacagcaacacgggaaca

SEQ ID NO: 1424270 - RNA, 19 nt, Homo sapiens
  misc_RNA (1)...(19): siRNA sense strand
gaaugaugagccacccaaa

SEQ ID NO: 1424271 - RNA, 19 nt, Homo sapiens
  misc_RNA (1)...(19): siRNA sense strand
gggcagacaccaauuuagg

SEQ ID NO: 1424272 - RNA, 19 nt, Homo sapiens
  misc_RNA (1)...(19): siRNA sense strand
ccacccaaaguaguaguua

SEQ ID NO: 1424273 - RNA, 19 nt, Homo sapiens
  misc_RNA (1)...(19): siRNA sense strand
cauuuaauuucggcaagaa

SEQ ID NO: 1424274 - RNA, 19 nt, Homo sapiens
  misc_RNA (1)...(19): siRNA sense strand
ccagucaccauguugauuc

SEQ ID NO: 1424275 - RNA, 19 nt, Homo sapiens
  misc_RNA (1)...(19): siRNA sense strand
ccaauuuaggcaacauauu

SEQ ID NO: 1424276 - RNA, 19 nt, Homo sapiens
  misc_RNA (1)...(19): siRNA sense strand
aaaccuacagcaaaucaga

SEQ ID NO: 1424277 - RNA, 19 nt, Homo sapiens
  misc_RNA (1)...(19): siRNA sense strand
ugaugagccacccaaagua

SEQ ID NO: 1424278 - RNA, 19 nt, Homo sapiens
  misc_RNA (1)...(19): siRNA sense strand
ggcaggaauucugaaagug

SEQ ID NO: 1424279 - RNA, 19 nt, Homo sapiens
  misc_RNA (1)...(19): siRNA sense strand
guuccaaauccaccaauug

SEQ ID NO: 1424280 - RNA, 19 nt, Homo sapiens
  misc_RNA (1)...(19): siRNA sense strand
ugagccacccaaaguagua

SEQ ID NO: 1424281 - RNA, 19 nt, Homo sapiens
  misc_RNA (1)...(19): siRNA sense strand
gaugaagaagagaaugaug

SEQ ID NO: 1424282 - RNA, 19 nt, Homo sapiens
  misc_RNA (1)...(19): siRNA sense strand
uggccuugcuuccaguaaa

SEQ ID NO: 1424283 - RNA, 19 nt, Homo sapiens
  misc_RNA (1)...(19): siRNA sense strand
cgaggaugcagacgaguug

SEQ ID NO: 1424284 - RNA, 19 nt, Homo sapiens
  misc_RNA (1)...(19): siRNA sense strand
uaacguucuuaucgucugu

SEQ ID NO: 1424285 - RNA, 19 nt, Homo sapiens
  misc_RNA (1)...(19): siRNA sense strand
ccagugaggaagucuugaa

SEQ ID NO: 1424286 - RNA, 19 nt, Homo sapiens
  misc_RNA (1)...(19): siRNA sense strand
gcgaggaugcagacgaguu

SEQ ID NO: 1424287 - RNA, 19 nt, Homo sapiens
  misc_RNA (1)...(19): siRNA sense strand
caacgacuguuuccugaag

SEQ ID NO: 1424288 - RNA, 19 nt, Homo sapiens
  misc_RNA (1)...(19): siRNA sense strand
gaacaccacuacgccuuca

SEQ ID NO: 1424289 - RNA, 19 nt, Homo sapiens
  misc_RNA (1)...(19): siRNA sense strand
ugaacggcaugaacacgua

SEQ ID NO: 1424290 - RNA, 19 nt, Homo sapiens
  misc_RNA (1)...(19): siRNA sense strand
acgaacaggugaugcacua

SEQ ID NO: 1424291 - RNA, 19 nt, Homo sapiens
  misc_RNA (1)...(19): siRNA sense strand
ccgcagauaccuccuacua

SEQ ID NO: 1424292 - RNA, 19 nt, Homo sapiens
  misc_RNA (1)...(19): siRNA sense strand
gccacucgcucuccuucaa

SEQ ID NO: 1424293 - RNA, 19 nt, Homo sapiens
  misc_RNA (1)...(19): siRNA sense strand
gcagcuacacgcacgcaaa

SEQ ID NO: 1424294 - RNA, 19 nt, Homo sapiens
  misc_RNA (1)...(19): siRNA sense strand
ccauuaugaacuccucuua

SEQ ID NO: 1424295 - RNA, 19 nt, Homo sapiens
  misc_RNA (1)...(19): siRNA sense strand
gggaugaacggcaugaaca

SEQ ID NO: 1424296 - RNA, 19 nt, Homo sapiens
  misc_RNA (1)...(19): siRNA sense strand
cauuaugaacuccucuuaa

SEQ ID NO: 1424297 - RNA, 19 nt, Homo sapiens
  misc_RNA (1)...(19): siRNA sense strand
ucguacaucucgcucauca

SEQ ID NO: 1424298 - RNA, 19 nt, Homo sapiens
  misc_RNA (1)...(19): siRNA sense strand
cagcagagccccaacaaga

SEQ ID NO: 1424299 - RNA, 19 nt, Homo sapiens
  misc_RNA (1)...(19): siRNA sense strand
ggaccucaaggccuacgaa

SEQ ID NO: 1424300 - RNA, 19 nt, Homo sapiens
  misc_RNA (1)...(19): siRNA sense strand
cgggcaacauguucgagaa

SEQ ID NO: 1424301 - RNA, 19 nt, Homo sapiens
  misc_RNA (1)...(19): siRNA sense strand
ugggagcggugaagaugga

SEQ ID NO: 1424302 - RNA, 19 nt, Homo sapiens
  misc_RNA (1)...(19): siRNA sense strand
cgacuggagcagcuacuau

SEQ ID NO: 1424303 - RNA, 19 nt, Homo sapiens
  misc_RNA (1)...(19): siRNA sense strand
gcugggagcggugaagaug

SEQ ID NO: 1424304 - RNA, 19 nt, Homo sapiens
  misc_RNA (1)...(19): siRNA sense strand
gacuggagcagcuacuaug

SEQ ID NO: 1424305 - RNA, 19 nt, Homo sapiens
  misc_RNA (1)...(19): siRNA sense strand
ccucaaggccuacgaacag

SEQ ID NO: 1424306 - RNA, 19 nt, Homo sapiens
  misc_RNA (1)...(19): siRNA sense strand
ccaccaaccccacaaaaug

SEQ ID NO: 1424307 - RNA, 19 nt, Homo sapiens
  misc_RNA (1)...(19): siRNA sense strand
caacgacuguuuccugaag

SEQ ID NO: 1424308 - RNA, 19 nt, Homo sapiens
  misc_RNA (1)...(19): siRNA sense strand
gaacaccacuacgccuuca

SEQ ID NO: 1424309 - RNA, 19 nt, Homo sapiens
  misc_RNA (1)...(19): siRNA sense strand
ugaacggcaugaacacgua

SEQ ID NO: 1424310 - RNA, 19 nt, Homo sapiens
  misc_RNA (1)...(19): siRNA sense strand
acgaacaggugaugcacua

SEQ ID NO: 1424311 - RNA, 19 nt, Homo sapiens
  misc_RNA (1)...(19): siRNA sense strand
ccgcagauaccuccuacua

SEQ ID NO: 1424312 - RNA, 19 nt, Homo sapiens
  misc_RNA (1)...(19): siRNA sense strand
gccacucgcucuccuucaa

SEQ ID NO: 1424313 - RNA, 19 nt, Homo sapiens
  misc_RNA (1)...(19): siRNA sense strand
gcagcuacacgcacgcaaa

SEQ ID NO: 1424314 - RNA, 19 nt, Homo sapiens
  misc_RNA (1)...(19): siRNA sense strand
ccauuaugaacuccucuua

SEQ ID NO: 1424315 - RNA, 19 nt, Homo sapiens
  misc_RNA (1)...(19): siRNA sense strand
gggaugaacggcaugaaca

SEQ ID NO: 1424316 - RNA, 19 nt, Homo sapiens
  misc_RNA (1)...(19): siRNA sense strand
cauuaugaacuccucuuaa

SEQ ID NO: 1424317 - RNA, 19 nt, Homo sapiens
  misc_RNA (1)...(19): siRNA sense strand
ucguacaucucgcucauca

SEQ ID NO: 1424318 - RNA, 19 nt, Homo sapiens
  misc_RNA (1)...(19): siRNA sense strand
cagcagagccccaacaaga

SEQ ID NO: 1424319 - RNA, 19 nt, Homo sapiens
  misc_RNA (1)...(19): siRNA sense strand
ggaccucaaggccuacgaa

SEQ ID NO: 1424320 - RNA, 19 nt, Homo sapiens
  misc_RNA (1)...(19): siRNA sense strand
cgggcaacauguucgagaa

SEQ ID NO: 1424321 - RNA, 19 nt, Homo sapiens
  misc_RNA (1)...(19): siRNA sense strand
ugggagcggugaagaugga

SEQ ID NO: 1424322 - RNA, 19 nt, Homo sapiens
  misc_RNA (1)...(19): siRNA sense strand
cgacuggagcagcuacuau

SEQ ID NO: 1424323 - RNA, 19 nt, Homo sapiens
  misc_RNA (1)...(19): siRNA sense strand
gcugggagcggugaagaug

SEQ ID NO: 1424324 - RNA, 19 nt, Homo sapiens
  misc_RNA (1)...(19): siRNA sense strand
gacuggagcagcuacuaug

SEQ ID NO: 1424325 - RNA, 19 nt, Homo sapiens
  misc_RNA (1)...(19): siRNA sense strand
ccucaaggccuacgaacag

SEQ ID NO: 1424326 - RNA, 19 nt, Homo sapiens
  misc_RNA (1)...(19): siRNA sense strand
ccaccaaccccacaaaaug

SEQ ID NO: 1424327 - RNA, 19 nt, Homo sapiens
  misc_RNA (1)...(19): siRNA sense strand
gcacauaagucaugacaac

SEQ ID NO: 1424328 - RNA, 19 nt, Homo sapiens
  misc_RNA (1)...(19): siRNA sense strand
cauaagucaugacaacaua

SEQ ID NO: 1424329 - RNA, 19 nt, Homo sapiens
  misc_RNA (1)...(19): siRNA sense strand
gaaggaggauugaaauagc

SEQ ID NO: 1424330 - RNA, 19 nt, Homo sapiens
  misc_RNA (1)...(19): siRNA sense strand
acuaccaguugcauaauua

SEQ ID NO: 1424331 - RNA, 19 nt, Homo sapiens
  misc_RNA (1)...(19): siRNA sense strand
gcagaaggaggauugaaau

SEQ ID NO: 1424332 - RNA, 19 nt, Homo sapiens
  misc_RNA (1)...(19): siRNA sense strand
gacuaccaguugcauaauu

SEQ ID NO: 1424333 - RNA, 19 nt, Homo sapiens
  misc_RNA (1)...(19): siRNA sense strand
cagaaggaggauugaaaua

SEQ ID NO: 1424334 - RNA, 19 nt, Homo sapiens
  misc_RNA (1)...(19): siRNA sense strand
gcaagcugcacauaaguca

SEQ ID NO: 1424335 - RNA, 19 nt, Homo sapiens
  misc_RNA (1)...(19): siRNA sense strand
cggacuaccaguugcauaa

SEQ ID NO: 1424336 - RNA, 19 nt, Homo sapiens
  misc_RNA (1)...(19): siRNA sense strand
guacggcuacggcuacaau

SEQ ID NO: 1424337 - RNA, 19 nt, Homo sapiens
  misc_RNA (1)...(19): siRNA sense strand
cccuggagcuggagaagga

SEQ ID NO: 1424338 - RNA, 19 nt, Homo sapiens
  misc_RNA (1)...(19): siRNA sense strand
gauaauaagcugaaaagca

SEQ ID NO: 1424339 - RNA, 19 nt, Homo sapiens
  misc_RNA (1)...(19): siRNA sense strand
agaaggaggauugaaauag

SEQ ID NO: 1424340 - RNA, 19 nt, Homo sapiens
  misc_RNA (1)...(19): siRNA sense strand
ggacuaccaguugcauaau

SEQ ID NO: 1424341 - RNA, 19 nt, Homo sapiens
  misc_RNA (1)...(19): siRNA sense strand
uaccugacccgcagaagga

SEQ ID NO: 1424342 - RNA, 19 nt, Homo sapiens
  misc_RNA (1)...(19): siRNA sense strand
cgcagaaggaggauugaaa

SEQ ID NO: 1424343 - RNA, 19 nt, Homo sapiens
  misc_RNA (1)...(19): siRNA sense strand
ugcggucgcuauccaaaug

SEQ ID NO: 1424344 - RNA, 19 nt, Homo sapiens
  misc_RNA (1)...(19): siRNA sense strand
cggcuacaauggcauggau

SEQ ID NO: 1424345 - RNA, 19 nt, Homo sapiens
  misc_RNA (1)...(19): siRNA sense strand
aaggaggauugaaauagca

SEQ ID NO: 1424346 - RNA, 19 nt, Homo sapiens
  misc_RNA (1)...(19): siRNA sense strand
cagacaaacucuagaauuu

SEQ ID NO: 1424347 - RNA, 19 nt, Homo sapiens
  misc_RNA (1)...(19): siRNA sense strand
gaaugagaguugccuaaau

SEQ ID NO: 1424348 - RNA, 19 nt, Homo sapiens
  misc_RNA (1)...(19): siRNA sense strand
cugaagagauugaucauga

SEQ ID NO: 1424349 - RNA, 19 nt, Homo sapiens
  misc_RNA (1)...(19): siRNA sense strand
aaugagaguugccuaaauu

SEQ ID NO: 1424350 - RNA, 19 nt, Homo sapiens
  misc_RNA (1)...(19): siRNA sense strand
ggaggccuguuuaccauug

SEQ ID NO: 1424351 - RNA, 19 nt, Homo sapiens
  misc_RNA (1)...(19): siRNA sense strand
uaugaagacuugaagaugu

SEQ ID NO: 1424352 - RNA, 19 nt, Homo sapiens
  misc_RNA (1)...(19): siRNA sense strand
ucaagaccaugaaugcaaa

SEQ ID NO: 1424353 - RNA, 19 nt, Homo sapiens
  misc_RNA (1)...(19): siRNA sense strand
gaccaugaaugcaaagcuu

SEQ ID NO: 1424354 - RNA, 19 nt, Homo sapiens
  misc_RNA (1)...(19): siRNA sense strand
gaauuaaccaagaaugaga

SEQ ID NO: 1424355 - RNA, 19 nt, Homo sapiens
  misc_RNA (1)...(19): siRNA sense strand
uaaccaagaaugagaguug

SEQ ID NO: 1424356 - RNA, 19 nt, Homo sapiens
  misc_RNA (1)...(19): siRNA sense strand
ccagacaaacucuagaauu

SEQ ID NO: 1424357 - RNA, 19 nt, Homo sapiens
  misc_RNA (1)...(19): siRNA sense strand
augcaaagcuucugaugga

SEQ ID NO: 1424358 - RNA, 19 nt, Homo sapiens
  misc_RNA (1)...(19): siRNA sense strand
ugaagagauugaucaugaa

SEQ ID NO: 1424359 - RNA, 19 nt, Homo sapiens
  misc_RNA (1)...(19): siRNA sense strand
agaccucuuucauaacuaa

SEQ ID NO: 1424360 - RNA, 19 nt, Homo sapiens
  misc_RNA (1)...(19): siRNA sense strand
gcccugugccuuaguagua

SEQ ID NO: 1424361 - RNA, 19 nt, Homo sapiens
  misc_RNA (1)...(19): siRNA sense strand
agagauugaucaugaagau

SEQ ID NO: 1424362 - RNA, 19 nt, Homo sapiens
  misc_RNA (1)...(19): siRNA sense strand
augaagacuugaagaugua

SEQ ID NO: 1424363 - RNA, 19 nt, Homo sapiens
  misc_RNA (1)...(19): siRNA sense strand
gaagagauugaucaugaag

SEQ ID NO: 1424364 - RNA, 19 nt, Homo sapiens
  misc_RNA (1)...(19): siRNA sense strand
ggaauuaaccaagaaugag

SEQ ID NO: 1424365 - RNA, 19 nt, Homo sapiens
  misc_RNA (1)...(19): siRNA sense strand
cuucaugcuuucagaauuc

SEQ ID NO: 1424366 - RNA, 19 nt, Homo sapiens
  misc_RNA (1)...(19): siRNA sense strand
gaaugcaaagcuucugaug

SEQ ID NO: 1424367 - RNA, 19 nt, Homo sapiens
  misc_RNA (1)...(19): siRNA sense strand
gagaccucuuucauaacua

SEQ ID NO: 1424368 - RNA, 19 nt, Homo sapiens
  misc_RNA (1)...(19): siRNA sense strand
caaaacaugcuggcaguua

SEQ ID NO: 1424369 - RNA, 19 nt, Homo sapiens
  misc_RNA (1)...(19): siRNA sense strand
gagauugaucaugaagaua

SEQ ID NO: 1424370 - RNA, 19 nt, Homo sapiens
  misc_RNA (1)...(19): siRNA sense strand
gaucaugaagauaucacaa

SEQ ID NO: 1424371 - RNA, 19 nt, Homo sapiens
  misc_RNA (1)...(19): siRNA sense strand
aaacaugcuggcaguuauu

SEQ ID NO: 1424372 - RNA, 19 nt, Homo sapiens
  misc_RNA (1)...(19): siRNA sense strand
gaauucgggcagugacuau

SEQ ID NO: 1424373 - RNA, 19 nt, Homo sapiens
  misc_RNA (1)...(19): siRNA sense strand
guggaggccuguuuaccau

SEQ ID NO: 1424374 - RNA, 19 nt, Homo sapiens
  misc_RNA (1)...(19): siRNA sense strand
gauugaucaugaagauauc

SEQ ID NO: 1424375 - RNA, 19 nt, Homo sapiens
  misc_RNA (1)...(19): siRNA sense strand
ccagaaggccagacaaacu

SEQ ID NO: 1424376 - RNA, 19 nt, Homo sapiens
  misc_RNA (1)...(19): siRNA sense strand
cuaucugaaugcuuccuaa

SEQ ID NO: 1424377 - RNA, 19 nt, Homo sapiens
  misc_RNA (1)...(19): siRNA sense strand
gagaguugccuaaauucca

SEQ ID NO: 1424378 - RNA, 19 nt, Homo sapiens
  misc_RNA (1)...(19): siRNA sense strand
uggaauuaaccaagaauga

SEQ ID NO: 1424379 - RNA, 19 nt, Homo sapiens
  misc_RNA (1)...(19): siRNA sense strand
gaaggccagacaaacucua

SEQ ID NO: 1424380 - RNA, 19 nt, Homo sapiens
  misc_RNA (1)...(19): siRNA sense strand
ggccagacaaacucuagaa

SEQ ID NO: 1424381 - RNA, 19 nt, Homo sapiens
  misc_RNA (1)...(19): siRNA sense strand
uaaaaucaagcucugcaua

SEQ ID NO: 1424382 - RNA, 19 nt, Homo sapiens
  misc_RNA (1)...(19): siRNA sense strand
cuguuuaccauuggaauua

SEQ ID NO: 1424383 - RNA, 19 nt, Homo sapiens
  misc_RNA (1)...(19): siRNA sense strand
agaaugagaguugccuaaa

SEQ ID NO: 1424384 - RNA, 19 nt, Homo sapiens
  misc_RNA (1)...(19): siRNA sense strand
aagaaugagaguugccuaa

SEQ ID NO: 1424385 - RNA, 19 nt, Homo sapiens
  misc_RNA (1)...(19): siRNA sense strand
ugccuaaauuccagagaga

SEQ ID NO: 1424386 - RNA, 19 nt, Homo sapiens
  misc_RNA (1)...(19): siRNA sense strand
ucuucaugcuuucagaauu

SEQ ID NO: 1424387 - RNA, 19 nt, Homo sapiens
  misc_RNA (1)...(19): siRNA sense strand
aucaagcucugcauacuuc

SEQ ID NO: 1424388 - RNA, 19 nt, Homo sapiens
  misc_RNA (1)...(19): siRNA sense strand
aaaucaagcucugcauacu

SEQ ID NO: 1424389 - RNA, 19 nt, Homo sapiens
  misc_RNA (1)...(19): siRNA sense strand
uguaccagguggaguucaa

SEQ ID NO: 1424390 - RNA, 19 nt, Homo sapiens
  misc_RNA (1)...(19): siRNA sense strand
augauggcccugugccuua

SEQ ID NO: 1424391 - RNA, 19 nt, Homo sapiens
  misc_RNA (1)...(19): siRNA sense strand
aaaacaugcuggcaguuau

SEQ ID NO: 1424392 - RNA, 19 nt, Homo sapiens
  misc_RNA (1)...(19): siRNA sense strand
gccuuaguaguauuuauga

SEQ ID NO: 1424393 - RNA, 19 nt, Homo sapiens
  misc_RNA (1)...(19): siRNA sense strand
gugccuuaguaguauuuau

SEQ ID NO: 1424394 - RNA, 19 nt, Homo sapiens
  misc_RNA (1)...(19): siRNA sense strand
cagaaggccagacaaacuc

SEQ ID NO: 1424395 - RNA, 19 nt, Homo sapiens
  misc_RNA (1)...(19): siRNA sense strand
caccucaguuuggccagaa

SEQ ID NO: 1424396 - RNA, 19 nt, Homo sapiens
  misc_RNA (1)...(19): siRNA sense strand
gcaggcagaugaugaagua

SEQ ID NO: 1424397 - RNA, 19 nt, Homo sapiens
  misc_RNA (1)...(19): siRNA sense strand
cagcagagauccaagaaga

SEQ ID NO: 1424398 - RNA, 19 nt, Homo sapiens
  misc_RNA (1)...(19): siRNA sense strand
gaagacaugccgcuauuug

SEQ ID NO: 1424399 - RNA, 19 nt, Homo sapiens
  misc_RNA (1)...(19): siRNA sense strand
gcaaggauguguacaacag

SEQ ID NO: 1424400 - RNA, 19 nt, Homo sapiens
  misc_RNA (1)...(19): siRNA sense strand
gagcugguguuggccaaua

SEQ ID NO: 1424401 - RNA, 19 nt, Homo sapiens
  misc_RNA (1)...(19): siRNA sense strand
gaacuucaccuugagcauu

SEQ ID NO: 1424402 - RNA, 19 nt, Homo sapiens
  misc_RNA (1)...(19): siRNA sense strand
cagcacaagugauaagaug

SEQ ID NO: 1424403 - RNA, 19 nt, Homo sapiens
  misc_RNA (1)...(19): siRNA sense strand
uagcagagauugaagacau

SEQ ID NO: 1424404 - RNA, 19 nt, Homo sapiens
  misc_RNA (1)...(19): siRNA sense strand
ccgcagagccacaguguuu

SEQ ID NO: 1424405 - RNA, 19 nt, Homo sapiens
  misc_RNA (1)...(19): siRNA sense strand
caauauugcugaaagugau

SEQ ID NO: 1424406 - RNA, 19 nt, Homo sapiens
  misc_RNA (1)...(19): siRNA sense strand
ugaugucacuggagaagaa

SEQ ID NO: 1424407 - RNA, 19 nt, Homo sapiens
  misc_RNA (1)...(19): siRNA sense strand
gagcauagugggcuguauu

SEQ ID NO: 1424408 - RNA, 19 nt, Homo sapiens
  misc_RNA (1)...(19): siRNA sense strand
acacuucguugccacauug

SEQ ID NO: 1424409 - RNA, 19 nt, Homo sapiens
  misc_RNA (1)...(19): siRNA sense strand
gcuguggccuacaucauug

SEQ ID NO: 1424410 - RNA, 19 nt, Homo sapiens
  misc_RNA (1)...(19): siRNA sense strand
ccaagcggcugcagaagca

SEQ ID NO: 1424411 - RNA, 19 nt, Homo sapiens
  misc_RNA (1)...(19): siRNA sense strand
cagagugggugacagacaa

SEQ ID NO: 1424412 - RNA, 19 nt, Homo sapiens
  misc_RNA (1)...(19): siRNA sense strand
gagggugacuucucuacca

SEQ ID NO: 1424413 - RNA, 19 nt, Homo sapiens
  misc_RNA (1)...(19): siRNA sense strand
agccagaacuucaccuuga

SEQ ID NO: 1424414 - RNA, 19 nt, Homo sapiens
  misc_RNA (1)...(19): siRNA sense strand
gagaugacgcuggcaacua

SEQ ID NO: 1424415 - RNA, 19 nt, Homo sapiens
  misc_RNA (1)...(19): siRNA sense strand
ggacuuggcugcgcguaac

SEQ ID NO: 1424416 - RNA, 19 nt, Homo sapiens
  misc_RNA (1)...(19): siRNA sense strand
cgccacagcacaagugaua

SEQ ID NO: 1424417 - RNA, 19 nt, Homo sapiens
  misc_RNA (1)...(19): siRNA sense strand
gaggaggccauguuccauu

SEQ ID NO: 1424418 - RNA, 19 nt, Homo sapiens
  misc_RNA (1)...(19): siRNA sense strand
gguaugaggaggccauguu

SEQ ID NO: 1424419 - RNA, 19 nt, Homo sapiens
  misc_RNA (1)...(19): siRNA sense strand
caaacucuaucggcugaug

SEQ ID NO: 1424420 - RNA, 19 nt, Homo sapiens
  misc_RNA (1)...(19): siRNA sense strand
augaaguacuggcagauuu

SEQ ID NO: 1424421 - RNA, 19 nt, Homo sapiens
  misc_RNA (1)...(19): siRNA sense strand
uugaagacaugccgcuauu

SEQ ID NO: 1424422 - RNA, 19 nt, Homo sapiens
  misc_RNA (1)...(19): siRNA sense strand
ccaauauugcugaaaguga

SEQ ID NO: 1424423 - RNA, 19 nt, Homo sapiens
  misc_RNA (1)...(19): siRNA sense strand
gcugaugugggaaguguuu

SEQ ID NO: 1424424 - RNA, 19 nt, Homo sapiens
  misc_RNA (1)...(19): siRNA sense strand
gcacaagugauaagaugca

SEQ ID NO: 1424425 - RNA, 19 nt, Homo sapiens
  misc_RNA (1)...(19): siRNA sense strand
gcagagauccaagaagaag

SEQ ID NO: 1424426 - RNA, 19 nt, Homo sapiens
  misc_RNA (1)...(19): siRNA sense strand
gcgaggagccagagaugga

SEQ ID NO: 1424427 - RNA, 19 nt, Homo sapiens
  misc_RNA (1)...(19): siRNA sense strand
gccaacgccuccuucaaca

SEQ ID NO: 1424428 - RNA, 19 nt, Homo sapiens
  misc_RNA (1)...(19): siRNA sense strand
cauguuccauugccaguuc

SEQ ID NO: 1424429 - RNA, 19 nt, Homo sapiens
  misc_RNA (1)...(19): siRNA sense strand
acacuugcauugccuccaa

SEQ ID NO: 1424430 - RNA, 19 nt, Homo sapiens
  misc_RNA (1)...(19): siRNA sense strand
gaugaaguacuggcagauu

SEQ ID NO: 1424431 - RNA, 19 nt, Homo sapiens
  misc_RNA (1)...(19): siRNA sense strand
gcaagaagcgcugcaaagc

SEQ ID NO: 1424432 - RNA, 19 nt, Homo sapiens
  misc_RNA (1)...(19): siRNA sense strand
caacgccuccuucaacauc

SEQ ID NO: 1424433 - RNA, 19 nt, Homo sapiens
  misc_RNA (1)...(19): siRNA sense strand
aagaugauccagaccauug

SEQ ID NO: 1424434 - RNA, 19 nt, Homo sapiens
  misc_RNA (1)...(19): siRNA sense strand
guuuacacauggagagaug

SEQ ID NO: 1424435 - RNA, 19 nt, Homo sapiens
  misc_RNA (1)...(19): siRNA sense strand
ggcagcagccugagcuuug

SEQ ID NO: 1424436 - RNA, 19 nt, Homo sapiens
  misc_RNA (1)...(19): siRNA sense strand
ggcagaugaugaaguacug

SEQ ID NO: 1424437 - RNA, 19 nt, Homo sapiens
  misc_RNA (1)...(19): siRNA sense strand
agaugacgcuggcaacuac

SEQ ID NO: 1424438 - RNA, 19 nt, Homo sapiens
  misc_RNA (1)...(19): siRNA sense strand
ugaaguacuggcagauuug

SEQ ID NO: 1424439 - RNA, 19 nt, Homo sapiens
  misc_RNA (1)...(19): siRNA sense strand
gugcugaugugggaagugu

SEQ ID NO: 1424440 - RNA, 19 nt, Homo sapiens
  misc_RNA (1)...(19): siRNA sense strand
cagcaaggauguguacaac

SEQ ID NO: 1424441 - RNA, 19 nt, Homo sapiens
  misc_RNA (1)...(19): siRNA sense strand
ccucaacggugggccuuug

SEQ ID NO: 1424442 - RNA, 19 nt, Homo sapiens
  misc_RNA (1)...(19): siRNA sense strand
ucaccuagcagagauugaa

SEQ ID NO: 1424443 - RNA, 19 nt, Homo sapiens
  misc_RNA (1)...(19): siRNA sense strand
cagcugguccugagcauag

SEQ ID NO: 1424444 - RNA, 19 nt, Homo sapiens
  misc_RNA (1)...(19): siRNA sense strand
ggccuucggugugcugaug

SEQ ID NO: 1424445 - RNA, 19 nt, Homo sapiens
  misc_RNA (1)...(19): siRNA sense strand
ggccaauauugcugaaagu

SEQ ID NO: 1424446 - RNA, 19 nt, Homo sapiens
  misc_RNA (1)...(19): siRNA sense strand
aggaggccauguuccauug

SEQ ID NO: 1424447 - RNA, 19 nt, Homo sapiens
  misc_RNA (1)...(19): siRNA sense strand
cauugcugaugaaagcuuu

SEQ ID NO: 1424448 - RNA, 19 nt, Homo sapiens
  misc_RNA (1)...(19): siRNA sense strand
aaccagagcguacgacugu

SEQ ID NO: 1424449 - RNA, 19 nt, Homo sapiens
  misc_RNA (1)...(19): siRNA sense strand
aagaagaaguggccuugac

SEQ ID NO: 1424450 - RNA, 19 nt, Homo sapiens
  misc_RNA (1)...(19): siRNA sense strand
gggcagcagccugagcuuu

SEQ ID NO: 1424451 - RNA, 19 nt, Homo sapiens
  misc_RNA (1)...(19): siRNA sense strand
ccacagcacaagugauaag

SEQ ID NO: 1424452 - RNA, 19 nt, Homo sapiens
  misc_RNA (1)...(19): siRNA sense strand
acaagaugauccagaccau

SEQ ID NO: 1424453 - RNA, 19 nt, Homo sapiens
  misc_RNA (1)...(19): siRNA sense strand
aacuucaccuugagcauug

SEQ ID NO: 1424454 - RNA, 19 nt, Homo sapiens
  misc_RNA (1)...(19): siRNA sense strand
caagaugauccagaccauu

SEQ ID NO: 1424455 - RNA, 19 nt, Homo sapiens
  misc_RNA (1)...(19): siRNA sense strand
ucagcaaggauguguacaa

SEQ ID NO: 1424456 - RNA, 19 nt, Homo sapiens
  misc_RNA (1)...(19): siRNA sense strand
gcagaagguggcccuaugc

SEQ ID NO: 1424457 - RNA, 19 nt, Homo sapiens
  misc_RNA (1)...(19): siRNA sense strand
gcagccagaacuucaccuu

SEQ ID NO: 1424458 - RNA, 19 nt, Homo sapiens
  misc_RNA (1)...(19): siRNA sense strand
gcagcagccugagcuuugc

SEQ ID NO: 1424459 - RNA, 19 nt, Homo sapiens
  misc_RNA (1)...(19): siRNA sense strand
ggucagugcccagagacaa

SEQ ID NO: 1424460 - RNA, 19 nt, Homo sapiens
  misc_RNA (1)...(19): siRNA sense strand
ccagauucgugcccauguc

SEQ ID NO: 1424461 - RNA, 19 nt, Homo sapiens
  misc_RNA (1)...(19): siRNA sense strand
uggccaauauugcugaaag

SEQ ID NO: 1424462 - RNA, 19 nt, Homo sapiens
  misc_RNA (1)...(19): siRNA sense strand
gggaucuaccgcugcauug

SEQ ID NO: 1424463 - RNA, 19 nt, Homo sapiens
  misc_RNA (1)...(19): siRNA sense strand
gccagaacuucaccuugag

SEQ ID NO: 1424464 - RNA, 19 nt, Homo sapiens
  misc_RNA (1)...(19): siRNA sense strand
cagagcaaccacacaguca

SEQ ID NO: 1424465 - RNA, 19 nt, Homo sapiens
  misc_RNA (1)...(19): siRNA sense strand
augagacucccaucacuaa

SEQ ID NO: 1424466 - RNA, 19 nt, Homo sapiens
  misc_RNA (1)...(19): siRNA sense strand
guacccagacagccauugu

SEQ ID NO: 1424467 - RNA, 19 nt, Homo sapiens
  misc_RNA (1)...(19): siRNA sense strand
gcaguggcucuuugaggau

SEQ ID NO: 1424468 - RNA, 19 nt, Homo sapiens
  misc_RNA (1)...(19): siRNA sense strand
acgcugggacccugcauuu

SEQ ID NO: 1424469 - RNA, 19 nt, Homo sapiens
  misc_RNA (1)...(19): siRNA sense strand
aagacaugccgcuauuuga

SEQ ID NO: 1424470 - RNA, 19 nt, Homo sapiens
  misc_RNA (1)...(19): siRNA sense strand
acacuucaccuagcagaga

SEQ ID NO: 1424471 - RNA, 19 nt, Homo sapiens
  misc_RNA (1)...(19): siRNA sense strand
gcauugcugaugaaagcuu

SEQ ID NO: 1424472 - RNA, 19 nt, Homo sapiens
  misc_RNA (1)...(19): siRNA sense strand
ccuggagggugacuucucu

SEQ ID NO: 1424473 - RNA, 19 nt, Homo sapiens
  misc_RNA (1)...(19): siRNA sense strand
agcagaagguggcccuaug

SEQ ID NO: 1424474 - RNA, 19 nt, Homo sapiens
  misc_RNA (1)...(19): siRNA sense strand
aaacgccacagcacaagug

SEQ ID NO: 1424475 - RNA, 19 nt, Homo sapiens
  misc_RNA (1)...(19): siRNA sense strand
ugaagacaugccgcuauuu

SEQ ID NO: 1424476 - RNA, 19 nt, Homo sapiens
  misc_RNA (1)...(19): siRNA sense strand
guaugaggaggccauguuc

SEQ ID NO: 1424477 - RNA, 19 nt, Homo sapiens
  misc_RNA (1)...(19): siRNA sense strand
cagccauugucuucaucaa

SEQ ID NO: 1424478 - RNA, 19 nt, Homo sapiens
  misc_RNA (1)...(19): siRNA sense strand
cacacuucguugccacauu

SEQ ID NO: 1424479 - RNA, 19 nt, Homo sapiens
  misc_RNA (1)...(19): siRNA sense strand
caaccgcuuugugcauaag

SEQ ID NO: 1424480 - RNA, 19 nt, Homo sapiens
  misc_RNA (1)...(19): siRNA sense strand
gaugaugucacuggagaag

SEQ ID NO: 1424481 - RNA, 19 nt, Homo sapiens
  misc_RNA (1)...(19): siRNA sense strand
aaagugaugcuggugucua

SEQ ID NO: 1424482 - RNA, 19 nt, Homo sapiens
  misc_RNA (1)...(19): siRNA sense strand
gcaggcagaugaugaagua

SEQ ID NO: 1424483 - RNA, 19 nt, Homo sapiens
  misc_RNA (1)...(19): siRNA sense strand
cagcagagauccaagaaga

SEQ ID NO: 1424484 - RNA, 19 nt, Homo sapiens
  misc_RNA (1)...(19): siRNA sense strand
gaagacaugccgcuauuug

SEQ ID NO: 1424485 - RNA, 19 nt, Homo sapiens
  misc_RNA (1)...(19): siRNA sense strand
gcaaggauguguacaacag

SEQ ID NO: 1424486 - RNA, 19 nt, Homo sapiens
  misc_RNA (1)...(19): siRNA sense strand
gagcugguguuggccaaua

SEQ ID NO: 1424487 - RNA, 19 nt, Homo sapiens
  misc_RNA (1)...(19): siRNA sense strand
gaacuucaccuugagcauu

SEQ ID NO: 1424488 - RNA, 19 nt, Homo sapiens
  misc_RNA (1)...(19): siRNA sense strand
cagcacaagugauaagaug

SEQ ID NO: 1424489 - RNA, 19 nt, Homo sapiens
  misc_RNA (1)...(19): siRNA sense strand
uagcagagauugaagacau

SEQ ID NO: 1424490 - RNA, 19 nt, Homo sapiens
  misc_RNA (1)...(19): siRNA sense strand
ccgcagagccacaguguuu

SEQ ID NO: 1424491 - RNA, 19 nt, Homo sapiens
  misc_RNA (1)...(19): siRNA sense strand
caauauugcugaaagugau

SEQ ID NO: 1424492 - RNA, 19 nt, Homo sapiens
  misc_RNA (1)...(19): siRNA sense strand
ugaugucacuggagaagaa

SEQ ID NO: 1424493 - RNA, 19 nt, Homo sapiens
  misc_RNA (1)...(19): siRNA sense strand
gagcauagugggcuguauu

SEQ ID NO: 1424494 - RNA, 19 nt, Homo sapiens
  misc_RNA (1)...(19): siRNA sense strand
acacuucguugccacauug

SEQ ID NO: 1424495 - RNA, 19 nt, Homo sapiens
  misc_RNA (1)...(19): siRNA sense strand
gcuguggccuacaucauug

SEQ ID NO: 1424496 - RNA, 19 nt, Homo sapiens
  misc_RNA (1)...(19): siRNA sense strand
ccaagcggcugcagaagca

SEQ ID NO: 1424497 - RNA, 19 nt, Homo sapiens
  misc_RNA (1)...(19): siRNA sense strand
cagagugggugacagacaa

SEQ ID NO: 1424498 - RNA, 19 nt, Homo sapiens
  misc_RNA (1)...(19): siRNA sense strand
gagggugacuucucuacca

SEQ ID NO: 1424499 - RNA, 19 nt, Homo sapiens
  misc_RNA (1)...(19): siRNA sense strand
agccagaacuucaccuuga

SEQ ID NO: 1424500 - RNA, 19 nt, Homo sapiens
  misc_RNA (1)...(19): siRNA sense strand
gagaugacgcuggcaacua

SEQ ID NO: 1424501 - RNA, 19 nt, Homo sapiens
  misc_RNA (1)...(19): siRNA sense strand
ggacuuggcugcgcguaac

SEQ ID NO: 1424502 - RNA, 19 nt, Homo sapiens
  misc_RNA (1)...(19): siRNA sense strand
cgccacagcacaagugaua

SEQ ID NO: 1424503 - RNA, 19 nt, Homo sapiens
  misc_RNA (1)...(19): siRNA sense strand
gaggaggccauguuccauu

SEQ ID NO: 1424504 - RNA, 19 nt, Homo sapiens
  misc_RNA (1)...(19): siRNA sense strand
gguaugaggaggccauguu

SEQ ID NO: 1424505 - RNA, 19 nt, Homo sapiens
  misc_RNA (1)...(19): siRNA sense strand
caaacucuaucggcugaug

SEQ ID NO: 1424506 - RNA, 19 nt, Homo sapiens
  misc_RNA (1)...(19): siRNA sense strand
augaaguacuggcagauuu

SEQ ID NO: 1424507 - RNA, 19 nt, Homo sapiens
  misc_RNA (1)...(19): siRNA sense strand
uugaagacaugccgcuauu

SEQ ID NO: 1424508 - RNA, 19 nt, Homo sapiens
  misc_RNA (1)...(19): siRNA sense strand
ccaauauugcugaaaguga

SEQ ID NO: 1424509 - RNA, 19 nt, Homo sapiens
  misc_RNA (1)...(19): siRNA sense strand
gcugaugugggaaguguuu

SEQ ID NO: 1424510 - RNA, 19 nt, Homo sapiens
  misc_RNA (1)...(19): siRNA sense strand
gcacaagugauaagaugca

SEQ ID NO: 1424511 - RNA, 19 nt, Homo sapiens
  misc_RNA (1)...(19): siRNA sense strand
gcagagauccaagaagaag

SEQ ID NO: 1424512 - RNA, 19 nt, Homo sapiens
  misc_RNA (1)...(19): siRNA sense strand
gcgaggagccagagaugga

SEQ ID NO: 1424513 - RNA, 19 nt, Homo sapiens
  misc_RNA (1)...(19): siRNA sense strand
gccaacgccuccuucaaca

SEQ ID NO: 1424514 - RNA, 19 nt, Homo sapiens
  misc_RNA (1)...(19): siRNA sense strand
cauguuccauugccaguuc

SEQ ID NO: 1424515 - RNA, 19 nt, Homo sapiens
  misc_RNA (1)...(19): siRNA sense strand
acacuugcauugccuccaa

SEQ ID NO: 1424516 - RNA, 19 nt, Homo sapiens
  misc_RNA (1)...(19): siRNA sense strand
gaugaaguacuggcagauu

SEQ ID NO: 1424517 - RNA, 19 nt, Homo sapiens
  misc_RNA (1)...(19): siRNA sense strand
gcaagaagcgcugcaaagc

SEQ ID NO: 1424518 - RNA, 19 nt, Homo sapiens
  misc_RNA (1)...(19): siRNA sense strand
caacgccuccuucaacauc

SEQ ID NO: 1424519 - RNA, 19 nt, Homo sapiens
  misc_RNA (1)...(19): siRNA sense strand
aagaugauccagaccauug

SEQ ID NO: 1424520 - RNA, 19 nt, Homo sapiens
  misc_RNA (1)...(19): siRNA sense strand
guuuacacauggagagaug

SEQ ID NO: 1424521 - RNA, 19 nt, Homo sapiens
  misc_RNA (1)...(19): siRNA sense strand
ggcagcagccugagcuuug

SEQ ID NO: 1424522 - RNA, 19 nt, Homo sapiens
  misc_RNA (1)...(19): siRNA sense strand
ggcagaugaugaaguacug

SEQ ID NO: 1424523 - RNA, 19 nt, Homo sapiens
  misc_RNA (1)...(19): siRNA sense strand
agaugacgcuggcaacuac

SEQ ID NO: 1424524 - RNA, 19 nt, Homo sapiens
  misc_RNA (1)...(19): siRNA sense strand
ugaaguacuggcagauuug

SEQ ID NO: 1424525 - RNA, 19 nt, Homo sapiens
  misc_RNA (1)...(19): siRNA sense strand
gugcugaugugggaagugu

SEQ ID NO: 1424526 - RNA, 19 nt, Homo sapiens
  misc_RNA (1)...(19): siRNA sense strand
cagcaaggauguguacaac

SEQ ID NO: 1424527 - RNA, 19 nt, Homo sapiens
  misc_RNA (1)...(19): siRNA sense strand
ccucaacggugggccuuug

SEQ ID NO: 1424528 - RNA, 19 nt, Homo sapiens
  misc_RNA (1)...(19): siRNA sense strand
ucaccuagcagagauugaa

SEQ ID NO: 1424529 - RNA, 19 nt, Homo sapiens
  misc_RNA (1)...(19): siRNA sense strand
cagcugguccugagcauag

SEQ ID NO: 1424530 - RNA, 19 nt, Homo sapiens
  misc_RNA (1)...(19): siRNA sense strand
ggccuucggugugcugaug

SEQ ID NO: 1424531 - RNA, 19 nt, Homo sapiens
  misc_RNA (1)...(19): siRNA sense strand
ggccaauauugcugaaagu

SEQ ID NO: 1424532 - RNA, 19 nt, Homo sapiens
  misc_RNA (1)...(19): siRNA sense strand
aggaggccauguuccauug

SEQ ID NO: 1424533 - RNA, 19 nt, Homo sapiens
  misc_RNA (1)...(19): siRNA sense strand
cauugcugaugaaagcuuu

SEQ ID NO: 1424534 - RNA, 19 nt, Homo sapiens
  misc_RNA (1)...(19): siRNA sense strand
aaccagagcguacgacugu

SEQ ID NO: 1424535 - RNA, 19 nt, Homo sapiens
  misc_RNA (1)...(19): siRNA sense strand
aagaagaaguggccuugac

SEQ ID NO: 1424536 - RNA, 19 nt, Homo sapiens
  misc_RNA (1)...(19): siRNA sense strand
gggcagcagccugagcuuu

SEQ ID NO: 1424537 - RNA, 19 nt, Homo sapiens
  misc_RNA (1)...(19): siRNA sense strand
ccacagcacaagugauaag

SEQ ID NO: 1424538 - RNA, 19 nt, Homo sapiens
  misc_RNA (1)...(19): siRNA sense strand
acaagaugauccagaccau

SEQ ID NO: 1424539 - RNA, 19 nt, Homo sapiens
  misc_RNA (1)...(19): siRNA sense strand
aacuucaccuugagcauug

SEQ ID NO: 1424540 - RNA, 19 nt, Homo sapiens
  misc_RNA (1)...(19): siRNA sense strand
caagaugauccagaccauu

SEQ ID NO: 1424541 - RNA, 19 nt, Homo sapiens
  misc_RNA (1)...(19): siRNA sense strand
ucagcaaggauguguacaa

SEQ ID NO: 1424542 - RNA, 19 nt, Homo sapiens
  misc_RNA (1)...(19): siRNA sense strand
gcagaagguggcccuaugc

SEQ ID NO: 1424543 - RNA, 19 nt, Homo sapiens
  misc_RNA (1)...(19): siRNA sense strand
gcagccagaacuucaccuu

SEQ ID NO: 1424544 - RNA, 19 nt, Homo sapiens
  misc_RNA (1)...(19): siRNA sense strand
gcagcagccugagcuuugc

SEQ ID NO: 1424545 - RNA, 19 nt, Homo sapiens
  misc_RNA (1)...(19): siRNA sense strand
ggucagugcccagagacaa

SEQ ID NO: 1424546 - RNA, 19 nt, Homo sapiens
  misc_RNA (1)...(19): siRNA sense strand
ccagauucgugcccauguc

SEQ ID NO: 1424547 - RNA, 19 nt, Homo sapiens
  misc_RNA (1)...(19): siRNA sense strand
uggccaauauugcugaaag

SEQ ID NO: 1424548 - RNA, 19 nt, Homo sapiens
  misc_RNA (1)...(19): siRNA sense strand
gggaucuaccgcugcauug

SEQ ID NO: 1424549 - RNA, 19 nt, Homo sapiens
  misc_RNA (1)...(19): siRNA sense strand
gccagaacuucaccuugag

SEQ ID NO: 1424550 - RNA, 19 nt, Homo sapiens
  misc_RNA (1)...(19): siRNA sense strand
cagagcaaccacacaguca

SEQ ID NO: 1424551 - RNA, 19 nt, Homo sapiens
  misc_RNA (1)...(19): siRNA sense strand
augagacucccaucacuaa

SEQ ID NO: 1424552 - RNA, 19 nt, Homo sapiens
  misc_RNA (1)...(19): siRNA sense strand
guacccagacagccauugu

SEQ ID NO: 1424553 - RNA, 19 nt, Homo sapiens
  misc_RNA (1)...(19): siRNA sense strand
gcaguggcucuuugaggau

SEQ ID NO: 1424554 - RNA, 19 nt, Homo sapiens
  misc_RNA (1)...(19): siRNA sense strand
acgcugggacccugcauuu

SEQ ID NO: 1424555 - RNA, 19 nt, Homo sapiens
  misc_RNA (1)...(19): siRNA sense strand
aagacaugccgcuauuuga

SEQ ID NO: 1424556 - RNA, 19 nt, Homo sapiens
  misc_RNA (1)...(19): siRNA sense strand
acacuucaccuagcagaga

SEQ ID NO: 1424557 - RNA, 19 nt, Homo sapiens
  misc_RNA (1)...(19): siRNA sense strand
gcauugcugaugaaagcuu

SEQ ID NO: 1424558 - RNA, 19 nt, Homo sapiens
  misc_RNA (1)...(19): siRNA sense strand
ccuggagggugacuucucu

SEQ ID NO: 1424559 - RNA, 19 nt, Homo sapiens
  misc_RNA (1)...(19): siRNA sense strand
agcagaagguggcccuaug

SEQ ID NO: 1424560 - RNA, 19 nt, Homo sapiens
  misc_RNA (1)...(19): siRNA sense strand
aaacgccacagcacaagug

SEQ ID NO: 1424561 - RNA, 19 nt, Homo sapiens
  misc_RNA (1)...(19): siRNA sense strand
ugaagacaugccgcuauuu

SEQ ID NO: 1424562 - RNA, 19 nt, Homo sapiens
  misc_RNA (1)...(19): siRNA sense strand
guaugaggaggccauguuc

SEQ ID NO: 1424563 - RNA, 19 nt, Homo sapiens
  misc_RNA (1)...(19): siRNA sense strand
cagccauugucuucaucaa

SEQ ID NO: 1424564 - RNA, 19 nt, Homo sapiens
  misc_RNA (1)...(19): siRNA sense strand
cacacuucguugccacauu

SEQ ID NO: 1424565 - RNA, 19 nt, Homo sapiens
  misc_RNA (1)...(19): siRNA sense strand
caaccgcuuugugcauaag

SEQ ID NO: 1424566 - RNA, 19 nt, Homo sapiens
  misc_RNA (1)...(19): siRNA sense strand
gaugaugucacuggagaag

SEQ ID NO: 1424567 - RNA, 19 nt, Homo sapiens
  misc_RNA (1)...(19): siRNA sense strand
aaagugaugcuggugucua

SEQ ID NO: 1424568 - RNA, 19 nt, Homo sapiens
  misc_RNA (1)...(19): siRNA sense strand
gcaggcagaugaugaagua

SEQ ID NO: 1424569 - RNA, 19 nt, Homo sapiens
  misc_RNA (1)...(19): siRNA sense strand
cagcagagauccaagaaga

SEQ ID NO: 1424570 - RNA, 19 nt, Homo sapiens
  misc_RNA (1)...(19): siRNA sense strand
gaagacaugccgcuauuug

SEQ ID NO: 1424571 - RNA, 19 nt, Homo sapiens
  misc_RNA (1)...(19): siRNA sense strand
gcaaggauguguacaacag

SEQ ID NO: 1424572 - RNA, 19 nt, Homo sapiens
  misc_RNA (1)...(19): siRNA sense strand
gagcugguguuggccaaua

SEQ ID NO: 1424573 - RNA, 19 nt, Homo sapiens
  misc_RNA (1)...(19): siRNA sense strand
gaacuucaccuugagcauu

SEQ ID NO: 1424574 - RNA, 19 nt, Homo sapiens
  misc_RNA (1)...(19): siRNA sense strand
cagcacaagugauaagaug

SEQ ID NO: 1424575 - RNA, 19 nt, Homo sapiens
  misc_RNA (1)...(19): siRNA sense strand
uagcagagauugaagacau

SEQ ID NO: 1424576 - RNA, 19 nt, Homo sapiens
  misc_RNA (1)...(19): siRNA sense strand
ccgcagagccacaguguuu

SEQ ID NO: 1424577 - RNA, 19 nt, Homo sapiens
  misc_RNA (1)...(19): siRNA sense strand
caauauugcugaaagugau

SEQ ID NO: 1424578 - RNA, 19 nt, Homo sapiens
  misc_RNA (1)...(19): siRNA sense strand
ugaugucacuggagaagaa

SEQ ID NO: 1424579 - RNA, 19 nt, Homo sapiens
  misc_RNA (1)...(19): siRNA sense strand
gagcauagugggcuguauu

SEQ ID NO: 1424580 - RNA, 19 nt, Homo sapiens
  misc_RNA (1)...(19): siRNA sense strand
acacuucguugccacauug

SEQ ID NO: 1424581 - RNA, 19 nt, Homo sapiens
  misc_RNA (1)...(19): siRNA sense strand
gcuguggccuacaucauug

SEQ ID NO: 1424582 - RNA, 19 nt, Homo sapiens
  misc_RNA (1)...(19): siRNA sense strand
ccaagcggcugcagaagca

SEQ ID NO: 1424583 - RNA, 19 nt, Homo sapiens
  misc_RNA (1)...(19): siRNA sense strand
cagagugggugacagacaa

SEQ ID NO: 1424584 - RNA, 19 nt, Homo sapiens
  misc_RNA (1)...(19): siRNA sense strand
gagggugacuucucuacca

SEQ ID NO: 1424585 - RNA, 19 nt, Homo sapiens
  misc_RNA (1)...(19): siRNA sense strand
agccagaacuucaccuuga

SEQ ID NO: 1424586 - RNA, 19 nt, Homo sapiens
  misc_RNA (1)...(19): siRNA sense strand
gagaugacgcuggcaacua

SEQ ID NO: 1424587 - RNA, 19 nt, Homo sapiens
  misc_RNA (1)...(19): siRNA sense strand
ggacuuggcugcgcguaac

SEQ ID NO: 1424588 - RNA, 19 nt, Homo sapiens
  misc_RNA (1)...(19): siRNA sense strand
cgccacagcacaagugaua

SEQ ID NO: 1424589 - RNA, 19 nt, Homo sapiens
  misc_RNA (1)...(19): siRNA sense strand
gaggaggccauguuccauu

SEQ ID NO: 1424590 - RNA, 19 nt, Homo sapiens
  misc_RNA (1)...(19): siRNA sense strand
gguaugaggaggccauguu

SEQ ID NO: 1424591 - RNA, 19 nt, Homo sapiens
  misc_RNA (1)...(19): siRNA sense strand
caaacucuaucggcugaug

SEQ ID NO: 1424592 - RNA, 19 nt, Homo sapiens
  misc_RNA (1)...(19): siRNA sense strand
augaaguacuggcagauuu

SEQ ID NO: 1424593 - RNA, 19 nt, Homo sapiens
  misc_RNA (1)...(19): siRNA sense strand
uugaagacaugccgcuauu

SEQ ID NO: 1424594 - RNA, 19 nt, Homo sapiens
  misc_RNA (1)...(19): siRNA sense strand
ccaauauugcugaaaguga

SEQ ID NO: 1424595 - RNA, 19 nt, Homo sapiens
  misc_RNA (1)...(19): siRNA sense strand
gcugaugugggaaguguuu

SEQ ID NO: 1424596 - RNA, 19 nt, Homo sapiens
  misc_RNA (1)...(19): siRNA sense strand
gcacaagugauaagaugca

SEQ ID NO: 1424597 - RNA, 19 nt, Homo sapiens
  misc_RNA (1)...(19): siRNA sense strand
gcagagauccaagaagaag

SEQ ID NO: 1424598 - RNA, 19 nt, Homo sapiens
  misc_RNA (1)...(19): siRNA sense strand
gcgaggagccagagaugga

SEQ ID NO: 1424599 - RNA, 19 nt, Homo sapiens
  misc_RNA (1)...(19): siRNA sense strand
gccaacgccuccuucaaca

SEQ ID NO: 1424600 - RNA, 19 nt, Homo sapiens
  misc_RNA (1)...(19): siRNA sense strand
cauguuccauugccaguuc

SEQ ID NO: 1424601 - RNA, 19 nt, Homo sapiens
  misc_RNA (1)...(19): siRNA sense strand
acacuugcauugccuccaa

SEQ ID NO: 1424602 - RNA, 19 nt, Homo sapiens
  misc_RNA (1)...(19): siRNA sense strand
gaugaaguacuggcagauu

SEQ ID NO: 1424603 - RNA, 19 nt, Homo sapiens
  misc_RNA (1)...(19): siRNA sense strand
gcaagaagcgcugcaaagc

SEQ ID NO: 1424604 - RNA, 19 nt, Homo sapiens
  misc_RNA (1)...(19): siRNA sense strand
caacgccuccuucaacauc

SEQ ID NO: 1424605 - RNA, 19 nt, Homo sapiens
  misc_RNA (1)...(19): siRNA sense strand
aagaugauccagaccauug

SEQ ID NO: 1424606 - RNA, 19 nt, Homo sapiens
  misc_RNA (1)...(19): siRNA sense strand
guuuacacauggagagaug

SEQ ID NO: 1424607 - RNA, 19 nt, Homo sapiens
  misc_RNA (1)...(19): siRNA sense strand
ggcagcagccugagcuuug

SEQ ID NO: 1424608 - RNA, 19 nt, Homo sapiens
  misc_RNA (1)...(19): siRNA sense strand
ggcagaugaugaaguacug

SEQ ID NO: 1424609 - RNA, 19 nt, Homo sapiens
  misc_RNA (1)...(19): siRNA sense strand
agaugacgcuggcaacuac

SEQ ID NO: 1424610 - RNA, 19 nt, Homo sapiens
  misc_RNA (1)...(19): siRNA sense strand
ugaaguacuggcagauuug

SEQ ID NO: 1424611 - RNA, 19 nt, Homo sapiens
  misc_RNA (1)...(19): siRNA sense strand
gugcugaugugggaagugu

SEQ ID NO: 1424612 - RNA, 19 nt, Homo sapiens
  misc_RNA (1)...(19): siRNA sense strand
cagcaaggauguguacaac

SEQ ID NO: 1424613 - RNA, 19 nt, Homo sapiens
  misc_RNA (1)...(19): siRNA sense strand
ccucaacggugggccuuug

SEQ ID NO: 1424614 - RNA, 19 nt, Homo sapiens
  misc_RNA (1)...(19): siRNA sense strand
ucaccuagcagagauugaa

SEQ ID NO: 1424615 - RNA, 19 nt, Homo sapiens
  misc_RNA (1)...(19): siRNA sense strand
cagcugguccugagcauag

SEQ ID NO: 1424616 - RNA, 19 nt, Homo sapiens
  misc_RNA (1)...(19): siRNA sense strand
ggccuucggugugcugaug

SEQ ID NO: 1424617 - RNA, 19 nt, Homo sapiens
  misc_RNA (1)...(19): siRNA sense strand
ggccaauauugcugaaagu

SEQ ID NO: 1424618 - RNA, 19 nt, Homo sapiens
  misc_RNA (1)...(19): siRNA sense strand
aggaggccauguuccauug

SEQ ID NO: 1424619 - RNA, 19 nt, Homo sapiens
  misc_RNA (1)...(19): siRNA sense strand
cauugcugaugaaagcuuu

SEQ ID NO: 1424620 - RNA, 19 nt, Homo sapiens
  misc_RNA (1)...(19): siRNA sense strand
aaccagagcguacgacugu

SEQ ID NO: 1424621 - RNA, 19 nt, Homo sapiens
  misc_RNA (1)...(19): siRNA sense strand
aagaagaaguggccuugac

SEQ ID NO: 1424622 - RNA, 19 nt, Homo sapiens
  misc_RNA (1)...(19): siRNA sense strand
gggcagcagccugagcuuu

SEQ ID NO: 1424623 - RNA, 19 nt, Homo sapiens
  misc_RNA (1)...(19): siRNA sense strand
ccacagcacaagugauaag

SEQ ID NO: 1424624 - RNA, 19 nt, Homo sapiens
  misc_RNA (1)...(19): siRNA sense strand
acaagaugauccagaccau

SEQ ID NO: 1424625 - RNA, 19 nt, Homo sapiens
  misc_RNA (1)...(19): siRNA sense strand
aacuucaccuugagcauug

SEQ ID NO: 1424626 - RNA, 19 nt, Homo sapiens
  misc_RNA (1)...(19): siRNA sense strand
caagaugauccagaccauu

SEQ ID NO: 1424627 - RNA, 19 nt, Homo sapiens
  misc_RNA (1)...(19): siRNA sense strand
ucagcaaggauguguacaa

SEQ ID NO: 1424628 - RNA, 19 nt, Homo sapiens
  misc_RNA (1)...(19): siRNA sense strand
gcagaagguggcccuaugc

SEQ ID NO: 1424629 - RNA, 19 nt, Homo sapiens
  misc_RNA (1)...(19): siRNA sense strand
gcagccagaacuucaccuu

SEQ ID NO: 1424630 - RNA, 19 nt, Homo sapiens
  misc_RNA (1)...(19): siRNA sense strand
gcagcagccugagcuuugc

SEQ ID NO: 1424631 - RNA, 19 nt, Homo sapiens
  misc_RNA (1)...(19): siRNA sense strand
ggucagugcccagagacaa

SEQ ID NO: 1424632 - RNA, 19 nt, Homo sapiens
  misc_RNA (1)...(19): siRNA sense strand
ccagauucgugcccauguc

SEQ ID NO: 1424633 - RNA, 19 nt, Homo sapiens
  misc_RNA (1)...(19): siRNA sense strand
uggccaauauugcugaaag

SEQ ID NO: 1424634 - RNA, 19 nt, Homo sapiens
  misc_RNA (1)...(19): siRNA sense strand
gggaucuaccgcugcauug

SEQ ID NO: 1424635 - RNA, 19 nt, Homo sapiens
  misc_RNA (1)...(19): siRNA sense strand
gccagaacuucaccuugag

SEQ ID NO: 1424636 - RNA, 19 nt, Homo sapiens
  misc_RNA (1)...(19): siRNA sense strand
cagagcaaccacacaguca

SEQ ID NO: 1424637 - RNA, 19 nt, Homo sapiens
  misc_RNA (1)...(19): siRNA sense strand
augagacucccaucacuaa

SEQ ID NO: 1424638 - RNA, 19 nt, Homo sapiens
  misc_RNA (1)...(19): siRNA sense strand
guacccagacagccauugu

SEQ ID NO: 1424639 - RNA, 19 nt, Homo sapiens
  misc_RNA (1)...(19): siRNA sense strand
gcaguggcucuuugaggau

SEQ ID NO: 1424640 - RNA, 19 nt, Homo sapiens
  misc_RNA (1)...(19): siRNA sense strand
acgcugggacccugcauuu

SEQ ID NO: 1424641 - RNA, 19 nt, Homo sapiens
  misc_RNA (1)...(19): siRNA sense strand
aagacaugccgcuauuuga

SEQ ID NO: 1424642 - RNA, 19 nt, Homo sapiens
  misc_RNA (1)...(19): siRNA sense strand
acacuucaccuagcagaga

SEQ ID NO: 1424643 - RNA, 19 nt, Homo sapiens
  misc_RNA (1)...(19): siRNA sense strand
gcauugcugaugaaagcuu

SEQ ID NO: 1424644 - RNA, 19 nt, Homo sapiens
  misc_RNA (1)...(19): siRNA sense strand
ccuggagggugacuucucu

SEQ ID NO: 1424645 - RNA, 19 nt, Homo sapiens
  misc_RNA (1)...(19): siRNA sense strand
agcagaagguggcccuaug

SEQ ID NO: 1424646 - RNA, 19 nt, Homo sapiens
  misc_RNA (1)...(19): siRNA sense strand
aaacgccacagcacaagug

SEQ ID NO: 1424647 - RNA, 19 nt, Homo sapiens
  misc_RNA (1)...(19): siRNA sense strand
ugaagacaugccgcuauuu

SEQ ID NO: 1424648 - RNA, 19 nt, Homo sapiens
  misc_RNA (1)...(19): siRNA sense strand
guaugaggaggccauguuc

SEQ ID NO: 1424649 - RNA, 19 nt, Homo sapiens
  misc_RNA (1)...(19): siRNA sense strand
cagccauugucuucaucaa

SEQ ID NO: 1424650 - RNA, 19 nt, Homo sapiens
  misc_RNA (1)...(19): siRNA sense strand
cacacuucguugccacauu

SEQ ID NO: 1424651 - RNA, 19 nt, Homo sapiens
  misc_RNA (1)...(19): siRNA sense strand
caaccgcuuugugcauaag

SEQ ID NO: 1424652 - RNA, 19 nt, Homo sapiens
  misc_RNA (1)...(19): siRNA sense strand
gaugaugucacuggagaag

SEQ ID NO: 1424653 - RNA, 19 nt, Homo sapiens
  misc_RNA (1)...(19): siRNA sense strand
aaagugaugcuggugucua

SEQ ID NO: 1424654 - RNA, 19 nt, Homo sapiens
  misc_RNA (1)...(19): siRNA sense strand
gcaggcagaugaugaagua

SEQ ID NO: 1424655 - RNA, 19 nt, Homo sapiens
  misc_RNA (1)...(19): siRNA sense strand
cagcagagauccaagaaga

SEQ ID NO: 1424656 - RNA, 19 nt, Homo sapiens
  misc_RNA (1)...(19): siRNA sense strand
gaagacaugccgcuauuug

SEQ ID NO: 1424657 - RNA, 19 nt, Homo sapiens
  misc_RNA (1)...(19): siRNA sense strand
gcaaggauguguacaacag

SEQ ID NO: 1424658 - RNA, 19 nt, Homo sapiens
  misc_RNA (1)...(19): siRNA sense strand
gagcugguguuggccaaua

SEQ ID NO: 1424659 - RNA, 19 nt, Homo sapiens
  misc_RNA (1)...(19): siRNA sense strand
gaacuucaccuugagcauu

SEQ ID NO: 1424660 - RNA, 19 nt, Homo sapiens
  misc_RNA (1)...(19): siRNA sense strand
cagcacaagugauaagaug

SEQ ID NO: 1424661 - RNA, 19 nt, Homo sapiens
  misc_RNA (1)...(19): siRNA sense strand
uagcagagauugaagacau

SEQ ID NO: 1424662 - RNA, 19 nt, Homo sapiens
  misc_RNA (1)...(19): siRNA sense strand
ccgcagagccacaguguuu

SEQ ID NO: 1424663 - RNA, 19 nt, Homo sapiens
  misc_RNA (1)...(19): siRNA sense strand
caauauugcugaaagugau

SEQ ID NO: 1424664 - RNA, 19 nt, Homo sapiens
  misc_RNA (1)...(19): siRNA sense strand
ugaugucacuggagaagaa

SEQ ID NO: 1424665 - RNA, 19 nt, Homo sapiens
  misc_RNA (1)...(19): siRNA sense strand
gagcauagugggcuguauu

SEQ ID NO: 1424666 - RNA, 19 nt, Homo sapiens
  misc_RNA (1)...(19): siRNA sense strand
acacuucguugccacauug

SEQ ID NO: 1424667 - RNA, 19 nt, Homo sapiens
  misc_RNA (1)...(19): siRNA sense strand
gcuguggccuacaucauug

SEQ ID NO: 1424668 - RNA, 19 nt, Homo sapiens
  misc_RNA (1)...(19): siRNA sense strand
ccaagcggcugcagaagca

SEQ ID NO: 1424669 - RNA, 19 nt, Homo sapiens
  misc_RNA (1)...(19): siRNA sense strand
cagagugggugacagacaa

SEQ ID NO: 1424670 - RNA, 19 nt, Homo sapiens
  misc_RNA (1)...(19): siRNA sense strand
gagggugacuucucuacca

SEQ ID NO: 1424671 - RNA, 19 nt, Homo sapiens
  misc_RNA (1)...(19): siRNA sense strand
agccagaacuucaccuuga

SEQ ID NO: 1424672 - RNA, 19 nt, Homo sapiens
  misc_RNA (1)...(19): siRNA sense strand
gagaugacgcuggcaacua

SEQ ID NO: 1424673 - RNA, 19 nt, Homo sapiens
  misc_RNA (1)...(19): siRNA sense strand
ggacuuggcugcgcguaac

SEQ ID NO: 1424674 - RNA, 19 nt, Homo sapiens
  misc_RNA (1)...(19): siRNA sense strand
cgccacagcacaagugaua

SEQ ID NO: 1424675 - RNA, 19 nt, Homo sapiens
  misc_RNA (1)...(19): siRNA sense strand
gaggaggccauguuccauu

SEQ ID NO: 1424676 - RNA, 19 nt, Homo sapiens
  misc_RNA (1)...(19): siRNA sense strand
gguaugaggaggccauguu

SEQ ID NO: 1424677 - RNA, 19 nt, Homo sapiens
  misc_RNA (1)...(19): siRNA sense strand
caaacucuaucggcugaug

SEQ ID NO: 1424678 - RNA, 19 nt, Homo sapiens
  misc_RNA (1)...(19): siRNA sense strand
augaaguacuggcagauuu

SEQ ID NO: 1424679 - RNA, 19 nt, Homo sapiens
  misc_RNA (1)...(19): siRNA sense strand
uugaagacaugccgcuauu

SEQ ID NO: 1424680 - RNA, 19 nt, Homo sapiens
  misc_RNA (1)...(19): siRNA sense strand
ccaauauugcugaaaguga

SEQ ID NO: 1424681 - RNA, 19 nt, Homo sapiens
  misc_RNA (1)...(19): siRNA sense strand
gcugaugugggaaguguuu

SEQ ID NO: 1424682 - RNA, 19 nt, Homo sapiens
  misc_RNA (1)...(19): siRNA sense strand
gcacaagugauaagaugca

SEQ ID NO: 1424683 - RNA, 19 nt, Homo sapiens
  misc_RNA (1)...(19): siRNA sense strand
gcagagauccaagaagaag

SEQ ID NO: 1424684 - RNA, 19 nt, Homo sapiens
  misc_RNA (1)...(19): siRNA sense strand
gcgaggagccagagaugga

SEQ ID NO: 1424685 - RNA, 19 nt, Homo sapiens
  misc_RNA (1)...(19): siRNA sense strand
gccaacgccuccuucaaca

SEQ ID NO: 1424686 - RNA, 19 nt, Homo sapiens
  misc_RNA (1)...(19): siRNA sense strand
cauguuccauugccaguuc

SEQ ID NO: 1424687 - RNA, 19 nt, Homo sapiens
  misc_RNA (1)...(19): siRNA sense strand
acacuugcauugccuccaa

SEQ ID NO: 1424688 - RNA, 19 nt, Homo sapiens
  misc_RNA (1)...(19): siRNA sense strand
gaugaaguacuggcagauu

SEQ ID NO: 1424689 - RNA, 19 nt, Homo sapiens
  misc_RNA (1)...(19): siRNA sense strand
gcaagaagcgcugcaaagc

SEQ ID NO: 1424690 - RNA, 19 nt, Homo sapiens
  misc_RNA (1)...(19): siRNA sense strand
caacgccuccuucaacauc

SEQ ID NO: 1424691 - RNA, 19 nt, Homo sapiens
  misc_RNA (1)...(19): siRNA sense strand
aagaugauccagaccauug

SEQ ID NO: 1424692 - RNA, 19 nt, Homo sapiens
  misc_RNA (1)...(19): siRNA sense strand
guuuacacauggagagaug

SEQ ID NO: 1424693 - RNA, 19 nt, Homo sapiens
  misc_RNA (1)...(19): siRNA sense strand
ggcagcagccugagcuuug

SEQ ID NO: 1424694 - RNA, 19 nt, Homo sapiens
  misc_RNA (1)...(19): siRNA sense strand
ggcagaugaugaaguacug

SEQ ID NO: 1424695 - RNA, 19 nt, Homo sapiens
  misc_RNA (1)...(19): siRNA sense strand
agaugacgcuggcaacuac

SEQ ID NO: 1424696 - RNA, 19 nt, Homo sapiens
  misc_RNA (1)...(19): siRNA sense strand
ugaaguacuggcagauuug

SEQ ID NO: 1424697 - RNA, 19 nt, Homo sapiens
  misc_RNA (1)...(19): siRNA sense strand
gugcugaugugggaagugu

SEQ ID NO: 1424698 - RNA, 19 nt, Homo sapiens
  misc_RNA (1)...(19): siRNA sense strand
cagcaaggauguguacaac

SEQ ID NO: 1424699 - RNA, 19 nt, Homo sapiens
  misc_RNA (1)...(19): siRNA sense strand
ccucaacggugggccuuug

SEQ ID NO: 1424700 - RNA, 19 nt, Homo sapiens
  misc_RNA (1)...(19): siRNA sense strand
ucaccuagcagagauugaa

SEQ ID NO: 1424701 - RNA, 19 nt, Homo sapiens
  misc_RNA (1)...(19): siRNA sense strand
cagcugguccugagcauag

SEQ ID NO: 1424702 - RNA, 19 nt, Homo sapiens
  misc_RNA (1)...(19): siRNA sense strand
ggccuucggugugcugaug

SEQ ID NO: 1424703 - RNA, 19 nt, Homo sapiens
  misc_RNA (1)...(19): siRNA sense strand
ggccaauauugcugaaagu

SEQ ID NO: 1424704 - RNA, 19 nt, Homo sapiens
  misc_RNA (1)...(19): siRNA sense strand
aggaggccauguuccauug

SEQ ID NO: 1424705 - RNA, 19 nt, Homo sapiens
  misc_RNA (1)...(19): siRNA sense strand
cauugcugaugaaagcuuu

SEQ ID NO: 1424706 - RNA, 19 nt, Homo sapiens
  misc_RNA (1)...(19): siRNA sense strand
aaccagagcguacgacugu

SEQ ID NO: 1424707 - RNA, 19 nt, Homo sapiens
  misc_RNA (1)...(19): siRNA sense strand
aagaagaaguggccuugac

SEQ ID NO: 1424708 - RNA, 19 nt, Homo sapiens
  misc_RNA (1)...(19): siRNA sense strand
gggcagcagccugagcuuu

SEQ ID NO: 1424709 - RNA, 19 nt, Homo sapiens
  misc_RNA (1)...(19): siRNA sense strand
ccacagcacaagugauaag

SEQ ID NO: 1424710 - RNA, 19 nt, Homo sapiens
  misc_RNA (1)...(19): siRNA sense strand
acaagaugauccagaccau

SEQ ID NO: 1424711 - RNA, 19 nt, Homo sapiens
  misc_RNA (1)...(19): siRNA sense strand
aacuucaccuugagcauug

SEQ ID NO: 1424712 - RNA, 19 nt, Homo sapiens
  misc_RNA (1)...(19): siRNA sense strand
caagaugauccagaccauu

SEQ ID NO: 1424713 - RNA, 19 nt, Homo sapiens
  misc_RNA (1)...(19): siRNA sense strand
ucagcaaggauguguacaa

SEQ ID NO: 1424714 - RNA, 19 nt, Homo sapiens
  misc_RNA (1)...(19): siRNA sense strand
gcagaagguggcccuaugc

SEQ ID NO: 1424715 - RNA, 19 nt, Homo sapiens
  misc_RNA (1)...(19): siRNA sense strand
gcagccagaacuucaccuu

SEQ ID NO: 1424716 - RNA, 19 nt, Homo sapiens
  misc_RNA (1)...(19): siRNA sense strand
gcagcagccugagcuuugc

SEQ ID NO: 1424717 - RNA, 19 nt, Homo sapiens
  misc_RNA (1)...(19): siRNA sense strand
ggucagugcccagagacaa

SEQ ID NO: 1424718 - RNA, 19 nt, Homo sapiens
  misc_RNA (1)...(19): siRNA sense strand
ccagauucgugcccauguc

SEQ ID NO: 1424719 - RNA, 19 nt, Homo sapiens
  misc_RNA (1)...(19): siRNA sense strand
uggccaauauugcugaaag

SEQ ID NO: 1424720 - RNA, 19 nt, Homo sapiens
  misc_RNA (1)...(19): siRNA sense strand
gggaucuaccgcugcauug

SEQ ID NO: 1424721 - RNA, 19 nt, Homo sapiens
  misc_RNA (1)...(19): siRNA sense strand
gccagaacuucaccuugag

SEQ ID NO: 1424722 - RNA, 19 nt, Homo sapiens
  misc_RNA (1)...(19): siRNA sense strand
cagagcaaccacacaguca

SEQ ID NO: 1424723 - RNA, 19 nt, Homo sapiens
  misc_RNA (1)...(19): siRNA sense strand
augagacucccaucacuaa

SEQ ID NO: 1424724 - RNA, 19 nt, Homo sapiens
  misc_RNA (1)...(19): siRNA sense strand
guacccagacagccauugu

SEQ ID NO: 1424725 - RNA, 19 nt, Homo sapiens
  misc_RNA (1)...(19): siRNA sense strand
gcaguggcucuuugaggau

SEQ ID NO: 1424726 - RNA, 19 nt, Homo sapiens
  misc_RNA (1)...(19): siRNA sense strand
acgcugggacccugcauuu

SEQ ID NO: 1424727 - RNA, 19 nt, Homo sapiens
  misc_RNA (1)...(19): siRNA sense strand
aagacaugccgcuauuuga

SEQ ID NO: 1424728 - RNA, 19 nt, Homo sapiens
  misc_RNA (1)...(19): siRNA sense strand
acacuucaccuagcagaga

SEQ ID NO: 1424729 - RNA, 19 nt, Homo sapiens
  misc_RNA (1)...(19): siRNA sense strand
gcauugcugaugaaagcuu

SEQ ID NO: 1424730 - RNA, 19 nt, Homo sapiens
  misc_RNA (1)...(19): siRNA sense strand
ccuggagggugacuucucu

SEQ ID NO: 1424731 - RNA, 19 nt, Homo sapiens
  misc_RNA (1)...(19): siRNA sense strand
agcagaagguggcccuaug

SEQ ID NO: 1424732 - RNA, 19 nt, Homo sapiens
  misc_RNA (1)...(19): siRNA sense strand
aaacgccacagcacaagug

SEQ ID NO: 1424733 - RNA, 19 nt, Homo sapiens
  misc_RNA (1)...(19): siRNA sense strand
ugaagacaugccgcuauuu

SEQ ID NO: 1424734 - RNA, 19 nt, Homo sapiens
  misc_RNA (1)...(19): siRNA sense strand
guaugaggaggccauguuc

SEQ ID NO: 1424735 - RNA, 19 nt, Homo sapiens
  misc_RNA (1)...(19): siRNA sense strand
cagccauugucuucaucaa

SEQ ID NO: 1424736 - RNA, 19 nt, Homo sapiens
  misc_RNA (1)...(19): siRNA sense strand
cacacuucguugccacauu

SEQ ID NO: 1424737 - RNA, 19 nt, Homo sapiens
  misc_RNA (1)...(19): siRNA sense strand
caaccgcuuugugcauaag

SEQ ID NO: 1424738 - RNA, 19 nt, Homo sapiens
  misc_RNA (1)...(19): siRNA sense strand
gaugaugucacuggagaag

SEQ ID NO: 1424739 - RNA, 19 nt, Homo sapiens
  misc_RNA (1)...(19): siRNA sense strand
aaagugaugcuggugucua

SEQ ID NO: 1424740 - RNA, 19 nt, Homo sapiens
  misc_RNA (1)...(19): siRNA sense strand
cagcagagauccaagaaga

SEQ ID NO: 1424741 - RNA, 19 nt, Homo sapiens
  misc_RNA (1)...(19): siRNA sense strand
gaagacaugccgcuauuug

SEQ ID NO: 1424742 - RNA, 19 nt, Homo sapiens
  misc_RNA (1)...(19): siRNA sense strand
gagcugguguuggccaaua

SEQ ID NO: 1424743 - RNA, 19 nt, Homo sapiens
  misc_RNA (1)...(19): siRNA sense strand
gaacuucaccuugagcauu

SEQ ID NO: 1424744 - RNA, 19 nt, Homo sapiens
  misc_RNA (1)...(19): siRNA sense strand
cagcacaagugauaagaug

SEQ ID NO: 1424745 - RNA, 19 nt, Homo sapiens
  misc_RNA (1)...(19): siRNA sense strand
uagcagagauugaagacau

SEQ ID NO: 1424746 - RNA, 19 nt, Homo sapiens
  misc_RNA (1)...(19): siRNA sense strand
ccgcagagccacaguguuu

SEQ ID NO: 1424747 - RNA, 19 nt, Homo sapiens
  misc_RNA (1)...(19): siRNA sense strand
caauauugcugaaagugau

SEQ ID NO: 1424748 - RNA, 19 nt, Homo sapiens
  misc_RNA (1)...(19): siRNA sense strand
ugaugucacuggagaagaa

SEQ ID NO: 1424749 - RNA, 19 nt, Homo sapiens
  misc_RNA (1)...(19): siRNA sense strand
gagcauagugggcuguauu

SEQ ID NO: 1424750 - RNA, 19 nt, Homo sapiens
  misc_RNA (1)...(19): siRNA sense strand
acacuucguugccacauug

SEQ ID NO: 1424751 - RNA, 19 nt, Homo sapiens
  misc_RNA (1)...(19): siRNA sense strand
gcuguggccuacaucauug

SEQ ID NO: 1424752 - RNA, 19 nt, Homo sapiens
  misc_RNA (1)...(19): siRNA sense strand
ccaagcggcugcagaagca

SEQ ID NO: 1424753 - RNA, 19 nt, Homo sapiens
  misc_RNA (1)...(19): siRNA sense strand
cagagugggugacagacaa

SEQ ID NO: 1424754 - RNA, 19 nt, Homo sapiens
  misc_RNA (1)...(19): siRNA sense strand
agccagaacuucaccuuga

SEQ ID NO: 1424755 - RNA, 19 nt, Homo sapiens
  misc_RNA (1)...(19): siRNA sense strand
gagaugacgcuggcaacua

SEQ ID NO: 1424756 - RNA, 19 nt, Homo sapiens
  misc_RNA (1)...(19): siRNA sense strand
cgccacagcacaagugaua

SEQ ID NO: 1424757 - RNA, 19 nt, Homo sapiens
  misc_RNA (1)...(19): siRNA sense strand
gaggaggccauguuccauu

SEQ ID NO: 1424758 - RNA, 19 nt, Homo sapiens
  misc_RNA (1)...(19): siRNA sense strand
gguaugaggaggccauguu

SEQ ID NO: 1424759 - RNA, 19 nt, Homo sapiens
  misc_RNA (1)...(19): siRNA sense strand
uugaagacaugccgcuauu

SEQ ID NO: 1424760 - RNA, 19 nt, Homo sapiens
  misc_RNA (1)...(19): siRNA sense strand
ccaauauugcugaaaguga

SEQ ID NO: 1424761 - RNA, 19 nt, Homo sapiens
  misc_RNA (1)...(19): siRNA sense strand
gcacaagugauaagaugca

SEQ ID NO: 1424762 - RNA, 19 nt, Homo sapiens
  misc_RNA (1)...(19): siRNA sense strand
gcagagauccaagaagaag

SEQ ID NO: 1424763 - RNA, 19 nt, Homo sapiens
  misc_RNA (1)...(19): siRNA sense strand
gcgaggagccagagaugga

SEQ ID NO: 1424764 - RNA, 19 nt, Homo sapiens
  misc_RNA (1)...(19): siRNA sense strand
gccaacgccuccuucaaca

SEQ ID NO: 1424765 - RNA, 19 nt, Homo sapiens
  misc_RNA (1)...(19): siRNA sense strand
cauguuccauugccaguuc

SEQ ID NO: 1424766 - RNA, 19 nt, Homo sapiens
  misc_RNA (1)...(19): siRNA sense strand
acacuugcauugccuccaa

SEQ ID NO: 1424767 - RNA, 19 nt, Homo sapiens
  misc_RNA (1)...(19): siRNA sense strand
gcaagaagcgcugcaaagc

SEQ ID NO: 1424768 - RNA, 19 nt, Homo sapiens
  misc_RNA (1)...(19): siRNA sense strand
caacgccuccuucaacauc

SEQ ID NO: 1424769 - RNA, 19 nt, Homo sapiens
  misc_RNA (1)...(19): siRNA sense strand
ggcagcagccugagcuuug

SEQ ID NO: 1424770 - RNA, 19 nt, Homo sapiens
  misc_RNA (1)...(19): siRNA sense strand
aagaugauccagaccauug

SEQ ID NO: 1424771 - RNA, 19 nt, Homo sapiens
  misc_RNA (1)...(19): siRNA sense strand
agaugacgcuggcaacuac

SEQ ID NO: 1424772 - RNA, 19 nt, Homo sapiens
  misc_RNA (1)...(19): siRNA sense strand
ccucaacggugggccuuug

SEQ ID NO: 1424773 - RNA, 19 nt, Homo sapiens
  misc_RNA (1)...(19): siRNA sense strand
ucaccuagcagagauugaa

SEQ ID NO: 1424774 - RNA, 19 nt, Homo sapiens
  misc_RNA (1)...(19): siRNA sense strand
cagcugguccugagcauag

SEQ ID NO: 1424775 - RNA, 19 nt, Homo sapiens
  misc_RNA (1)...(19): siRNA sense strand
ggccaauauugcugaaagu

SEQ ID NO: 1424776 - RNA, 19 nt, Homo sapiens
  misc_RNA (1)...(19): siRNA sense strand
aggaggccauguuccauug

SEQ ID NO: 1424777 - RNA, 19 nt, Homo sapiens
  misc_RNA (1)...(19): siRNA sense strand
cauugcugaugaaagcuuu

SEQ ID NO: 1424778 - RNA, 19 nt, Homo sapiens
  misc_RNA (1)...(19): siRNA sense strand
aaccagagcguacgacugu

SEQ ID NO: 1424779 - RNA, 19 nt, Homo sapiens
  misc_RNA (1)...(19): siRNA sense strand
aagaagaaguggccuugac

SEQ ID NO: 1424780 - RNA, 19 nt, Homo sapiens
  misc_RNA (1)...(19): siRNA sense strand
aacuucaccuugagcauug

SEQ ID NO: 1424781 - RNA, 19 nt, Homo sapiens
  misc_RNA (1)...(19): siRNA sense strand
ccacagcacaagugauaag

SEQ ID NO: 1424782 - RNA, 19 nt, Homo sapiens
  misc_RNA (1)...(19): siRNA sense strand
acaagaugauccagaccau

SEQ ID NO: 1424783 - RNA, 19 nt, Homo sapiens
  misc_RNA (1)...(19): siRNA sense strand
gggcagcagccugagcuuu

SEQ ID NO: 1424784 - RNA, 19 nt, Homo sapiens
  misc_RNA (1)...(19): siRNA sense strand
caagaugauccagaccauu

SEQ ID NO: 1424785 - RNA, 19 nt, Homo sapiens
  misc_RNA (1)...(19): siRNA sense strand
cagagcaaccacacaguca

SEQ ID NO: 1424786 - RNA, 19 nt, Homo sapiens
  misc_RNA (1)...(19): siRNA sense strand
ccagauucgugcccauguc

SEQ ID NO: 1424787 - RNA, 19 nt, Homo sapiens
  misc_RNA (1)...(19): siRNA sense strand
uggccaauauugcugaaag

SEQ ID NO: 1424788 - RNA, 19 nt, Homo sapiens
  misc_RNA (1)...(19): siRNA sense strand
gggaucuaccgcugcauug

SEQ ID NO: 1424789 - RNA, 19 nt, Homo sapiens
  misc_RNA (1)...(19): siRNA sense strand
gccagaacuucaccuugag

SEQ ID NO: 1424790 - RNA, 19 nt, Homo sapiens
  misc_RNA (1)...(19): siRNA sense strand
gcagcagccugagcuuugc

SEQ ID NO: 1424791 - RNA, 19 nt, Homo sapiens
  misc_RNA (1)...(19): siRNA sense strand
gcagccagaacuucaccuu

SEQ ID NO: 1424792 - RNA, 19 nt, Homo sapiens
  misc_RNA (1)...(19): siRNA sense strand
augagacucccaucacuaa

SEQ ID NO: 1424793 - RNA, 19 nt, Homo sapiens
  misc_RNA (1)...(19): siRNA sense strand
guacccagacagccauugu

SEQ ID NO: 1424794 - RNA, 19 nt, Homo sapiens
  misc_RNA (1)...(19): siRNA sense strand
gcaguggcucuuugaggau

SEQ ID NO: 1424795 - RNA, 19 nt, Homo sapiens
  misc_RNA (1)...(19): siRNA sense strand
acgcugggacccugcauuu

SEQ ID NO: 1424796 - RNA, 19 nt, Homo sapiens
  misc_RNA (1)...(19): siRNA sense strand
aagacaugccgcuauuuga

SEQ ID NO: 1424797 - RNA, 19 nt, Homo sapiens
  misc_RNA (1)...(19): siRNA sense strand
acacuucaccuagcagaga

SEQ ID NO: 1424798 - RNA, 19 nt, Homo sapiens
  misc_RNA (1)...(19): siRNA sense strand
gcauugcugaugaaagcuu

SEQ ID NO: 1424799 - RNA, 19 nt, Homo sapiens
  misc_RNA (1)...(19): siRNA sense strand
aaacgccacagcacaagug

SEQ ID NO: 1424800 - RNA, 19 nt, Homo sapiens
  misc_RNA (1)...(19): siRNA sense strand
ugaagacaugccgcuauuu

SEQ ID NO: 1424801 - RNA, 19 nt, Homo sapiens
  misc_RNA (1)...(19): siRNA sense strand
guaugaggaggccauguuc

SEQ ID NO: 1424802 - RNA, 19 nt, Homo sapiens
  misc_RNA (1)...(19): siRNA sense strand
cacacuucguugccacauu

SEQ ID NO: 1424803 - RNA, 19 nt, Homo sapiens
  misc_RNA (1)...(19): siRNA sense strand
cagccauugucuucaucaa

SEQ ID NO: 1424804 - RNA, 19 nt, Homo sapiens
  misc_RNA (1)...(19): siRNA sense strand
gaugaugucacuggagaag

SEQ ID NO: 1424805 - RNA, 19 nt, Homo sapiens
  misc_RNA (1)...(19): siRNA sense strand
aaagugaugcuggugucua

SEQ ID NO: 1424806 - RNA, 19 nt, Homo sapiens
  misc_RNA (1)...(19): siRNA sense strand
gcaggcagaugaugaagua

SEQ ID NO: 1424807 - RNA, 19 nt, Homo sapiens
  misc_RNA (1)...(19): siRNA sense strand
cagcagagauccaagaaga

SEQ ID NO: 1424808 - RNA, 19 nt, Homo sapiens
  misc_RNA (1)...(19): siRNA sense strand
gaagacaugccgcuauuug

SEQ ID NO: 1424809 - RNA, 19 nt, Homo sapiens
  misc_RNA (1)...(19): siRNA sense strand
gcaaggauguguacaacag

SEQ ID NO: 1424810 - RNA, 19 nt, Homo sapiens
  misc_RNA (1)...(19): siRNA sense strand
gagcugguguuggccaaua

SEQ ID NO: 1424811 - RNA, 19 nt, Homo sapiens
  misc_RNA (1)...(19): siRNA sense strand
gaacuucaccuugagcauu

SEQ ID NO: 1424812 - RNA, 19 nt, Homo sapiens
  misc_RNA (1)...(19): siRNA sense strand
cagcacaagugauaagaug

SEQ ID NO: 1424813 - RNA, 19 nt, Homo sapiens
  misc_RNA (1)...(19): siRNA sense strand
uagcagagauugaagacau

SEQ ID NO: 1424814 - RNA, 19 nt, Homo sapiens
  misc_RNA (1)...(19): siRNA sense strand
ccgcagagccacaguguuu

SEQ ID NO: 1424815 - RNA, 19 nt, Homo sapiens
  misc_RNA (1)...(19): siRNA sense strand
caauauugcugaaagugau

SEQ ID NO: 1424816 - RNA, 19 nt, Homo sapiens
  misc_RNA (1)...(19): siRNA sense strand
ugaugucacuggagaagaa

SEQ ID NO: 1424817 - RNA, 19 nt, Homo sapiens
  misc_RNA (1)...(19): siRNA sense strand
gagcauagugggcuguauu

SEQ ID NO: 1424818 - RNA, 19 nt, Homo sapiens
  misc_RNA (1)...(19): siRNA sense strand
acacuucguugccacauug

SEQ ID NO: 1424819 - RNA, 19 nt, Homo sapiens
  misc_RNA (1)...(19): siRNA sense strand
gcuguggccuacaucauug

SEQ ID NO: 1424820 - RNA, 19 nt, Homo sapiens
  misc_RNA (1)...(19): siRNA sense strand
ccaagcggcugcagaagca

SEQ ID NO: 1424821 - RNA, 19 nt, Homo sapiens
  misc_RNA (1)...(19): siRNA sense strand
cagagugggugacagacaa

SEQ ID NO: 1424822 - RNA, 19 nt, Homo sapiens
  misc_RNA (1)...(19): siRNA sense strand
gagggugacuucucuacca

SEQ ID NO: 1424823 - RNA, 19 nt, Homo sapiens
  misc_RNA (1)...(19): siRNA sense strand
agccagaacuucaccuuga

SEQ ID NO: 1424824 - RNA, 19 nt, Homo sapiens
  misc_RNA (1)...(19): siRNA sense strand
gagaugacgcuggcaacua

SEQ ID NO: 1424825 - RNA, 19 nt, Homo sapiens
  misc_RNA (1)...(19): siRNA sense strand
ggacuuggcugcgcguaac

SEQ ID NO: 1424826 - RNA, 19 nt, Homo sapiens
  misc_RNA (1)...(19): siRNA sense strand
cgccacagcacaagugaua

SEQ ID NO: 1424827 - RNA, 19 nt, Homo sapiens
  misc_RNA (1)...(19): siRNA sense strand
gaggaggccauguuccauu

SEQ ID NO: 1424828 - RNA, 19 nt, Homo sapiens
  misc_RNA (1)...(19): siRNA sense strand
gguaugaggaggccauguu

SEQ ID NO: 1424829 - RNA, 19 nt, Homo sapiens
  misc_RNA (1)...(19): siRNA sense strand
caaacucuaucggcugaug

SEQ ID NO: 1424830 - RNA, 19 nt, Homo sapiens
  misc_RNA (1)...(19): siRNA sense strand
augaaguacuggcagauuu

SEQ ID NO: 1424831 - RNA, 19 nt, Homo sapiens
  misc_RNA (1)...(19): siRNA sense strand
uugaagacaugccgcuauu

SEQ ID NO: 1424832 - RNA, 19 nt, Homo sapiens
  misc_RNA (1)...(19): siRNA sense strand
ccaauauugcugaaaguga

SEQ ID NO: 1424833 - RNA, 19 nt, Homo sapiens
  misc_RNA (1)...(19): siRNA sense strand
gcugaugugggaaguguuu

SEQ ID NO: 1424834 - RNA, 19 nt, Homo sapiens
  misc_RNA (1)...(19): siRNA sense strand
gcacaagugauaagaugca

SEQ ID NO: 1424835 - RNA, 19 nt, Homo sapiens
  misc_RNA (1)...(19): siRNA sense strand
gcagagauccaagaagaag

SEQ ID NO: 1424836 - RNA, 19 nt, Homo sapiens
  misc_RNA (1)...(19): siRNA sense strand
gcgaggagccagagaugga

SEQ ID NO: 1424837 - RNA, 19 nt, Homo sapiens
  misc_RNA (1)...(19): siRNA sense strand
gccaacgccuccuucaaca

SEQ ID NO: 1424838 - RNA, 19 nt, Homo sapiens
  misc_RNA (1)...(19): siRNA sense strand
cauguuccauugccaguuc

SEQ ID NO: 1424839 - RNA, 19 nt, Homo sapiens
  misc_RNA (1)...(19): siRNA sense strand
acacuugcauugccuccaa

SEQ ID NO: 1424840 - RNA, 19 nt, Homo sapiens
  misc_RNA (1)...(19): siRNA sense strand
gaugaaguacuggcagauu

SEQ ID NO: 1424841 - RNA, 19 nt, Homo sapiens
  misc_RNA (1)...(19): siRNA sense strand
gcaagaagcgcugcaaagc

SEQ ID NO: 1424842 - RNA, 19 nt, Homo sapiens
  misc_RNA (1)...(19): siRNA sense strand
caacgccuccuucaacauc

SEQ ID NO: 1424843 - RNA, 19 nt, Homo sapiens
  misc_RNA (1)...(19): siRNA sense strand
aagaugauccagaccauug

SEQ ID NO: 1424844 - RNA, 19 nt, Homo sapiens
  misc_RNA (1)...(19): siRNA sense strand
guuuacacauggagagaug

SEQ ID NO: 1424845 - RNA, 19 nt, Homo sapiens
  misc_RNA (1)...(19): siRNA sense strand
ggcagcagccugagcuuug

SEQ ID NO: 1424846 - RNA, 19 nt, Homo sapiens
  misc_RNA (1)...(19): siRNA sense strand
ggcagaugaugaaguacug

SEQ ID NO: 1424847 - RNA, 19 nt, Homo sapiens
  misc_RNA (1)...(19): siRNA sense strand
agaugacgcuggcaacuac

SEQ ID NO: 1424848 - RNA, 19 nt, Homo sapiens
  misc_RNA (1)...(19): siRNA sense strand
ugaaguacuggcagauuug

SEQ ID NO: 1424849 - RNA, 19 nt, Homo sapiens
  misc_RNA (1)...(19): siRNA sense strand
gugcugaugugggaagugu

SEQ ID NO: 1424850 - RNA, 19 nt, Homo sapiens
  misc_RNA (1)...(19): siRNA sense strand
cagcaaggauguguacaac

SEQ ID NO: 1424851 - RNA, 19 nt, Homo sapiens
  misc_RNA (1)...(19): siRNA sense strand
ccucaacggugggccuuug

SEQ ID NO: 1424852 - RNA, 19 nt, Homo sapiens
  misc_RNA (1)...(19): siRNA sense strand
ucaccuagcagagauugaa

SEQ ID NO: 1424853 - RNA, 19 nt, Homo sapiens
  misc_RNA (1)...(19): siRNA sense strand
cagcugguccugagcauag

SEQ ID NO: 1424854 - RNA, 19 nt, Homo sapiens
  misc_RNA (1)...(19): siRNA sense strand
ggccuucggugugcugaug

SEQ ID NO: 1424855 - RNA, 19 nt, Homo sapiens
  misc_RNA (1)...(19): siRNA sense strand
ggccaauauugcugaaagu

SEQ ID NO: 1424856 - RNA, 19 nt, Homo sapiens
  misc_RNA (1)...(19): siRNA sense strand
aggaggccauguuccauug

SEQ ID NO: 1424857 - RNA, 19 nt, Homo sapiens
  misc_RNA (1)...(19): siRNA sense strand
cauugcugaugaaagcuuu

SEQ ID NO: 1424858 - RNA, 19 nt, Homo sapiens
  misc_RNA (1)...(19): siRNA sense strand
aaccagagcguacgacugu

SEQ ID NO: 1424859 - RNA, 19 nt, Homo sapiens
  misc_RNA (1)...(19): siRNA sense strand
aagaagaaguggccuugac

SEQ ID NO: 1424860 - RNA, 19 nt, Homo sapiens
  misc_RNA (1)...(19): siRNA sense strand
gggcagcagccugagcuuu

SEQ ID NO: 1424861 - RNA, 19 nt, Homo sapiens
  misc_RNA (1)...(19): siRNA sense strand
ccacagcacaagugauaag

SEQ ID NO: 1424862 - RNA, 19 nt, Homo sapiens
  misc_RNA (1)...(19): siRNA sense strand
acaagaugauccagaccau

SEQ ID NO: 1424863 - RNA, 19 nt, Homo sapiens
  misc_RNA (1)...(19): siRNA sense strand
aacuucaccuugagcauug

SEQ ID NO: 1424864 - RNA, 19 nt, Homo sapiens
  misc_RNA (1)...(19): siRNA sense strand
caagaugauccagaccauu

SEQ ID NO: 1424865 - RNA, 19 nt, Homo sapiens
  misc_RNA (1)...(19): siRNA sense strand
ucagcaaggauguguacaa

SEQ ID NO: 1424866 - RNA, 19 nt, Homo sapiens
  misc_RNA (1)...(19): siRNA sense strand
gcagaagguggcccuaugc

SEQ ID NO: 1424867 - RNA, 19 nt, Homo sapiens
  misc_RNA (1)...(19): siRNA sense strand
gcagccagaacuucaccuu

SEQ ID NO: 1424868 - RNA, 19 nt, Homo sapiens
  misc_RNA (1)...(19): siRNA sense strand
gcagcagccugagcuuugc

SEQ ID NO: 1424869 - RNA, 19 nt, Homo sapiens
  misc_RNA (1)...(19): siRNA sense strand
ggucagugcccagagacaa

SEQ ID NO: 1424870 - RNA, 19 nt, Homo sapiens
  misc_RNA (1)...(19): siRNA sense strand
ccagauucgugcccauguc

SEQ ID NO: 1424871 - RNA, 19 nt, Homo sapiens
  misc_RNA (1)...(19): siRNA sense strand
uggccaauauugcugaaag

SEQ ID NO: 1424872 - RNA, 19 nt, Homo sapiens
  misc_RNA (1)...(19): siRNA sense strand
gggaucuaccgcugcauug

SEQ ID NO: 1424873 - RNA, 19 nt, Homo sapiens
  misc_RNA (1)...(19): siRNA sense strand
gccagaacuucaccuugag

SEQ ID NO: 1424874 - RNA, 19 nt, Homo sapiens
  misc_RNA (1)...(19): siRNA sense strand
cagagcaaccacacaguca

SEQ ID NO: 1424875 - RNA, 19 nt, Homo sapiens
  misc_RNA (1)...(19): siRNA sense strand
augagacucccaucacuaa

SEQ ID NO: 1424876 - RNA, 19 nt, Homo sapiens
  misc_RNA (1)...(19): siRNA sense strand
guacccagacagccauugu

SEQ ID NO: 1424877 - RNA, 19 nt, Homo sapiens
  misc_RNA (1)...(19): siRNA sense strand
gcaguggcucuuugaggau

SEQ ID NO: 1424878 - RNA, 19 nt, Homo sapiens
  misc_RNA (1)...(19): siRNA sense strand
acgcugggacccugcauuu

SEQ ID NO: 1424879 - RNA, 19 nt, Homo sapiens
  misc_RNA (1)...(19): siRNA sense strand
aagacaugccgcuauuuga

SEQ ID NO: 1424880 - RNA, 19 nt, Homo sapiens
  misc_RNA (1)...(19): siRNA sense strand
acacuucaccuagcagaga

SEQ ID NO: 1424881 - RNA, 19 nt, Homo sapiens
  misc_RNA (1)...(19): siRNA sense strand
gcauugcugaugaaagcuu

SEQ ID NO: 1424882 - RNA, 19 nt, Homo sapiens
  misc_RNA (1)...(19): siRNA sense strand
ccuggagggugacuucucu

SEQ ID NO: 1424883 - RNA, 19 nt, Homo sapiens
  misc_RNA (1)...(19): siRNA sense strand
agcagaagguggcccuaug

SEQ ID NO: 1424884 - RNA, 19 nt, Homo sapiens
  misc_RNA (1)...(19): siRNA sense strand
aaacgccacagcacaagug

SEQ ID NO: 1424885 - RNA, 19 nt, Homo sapiens
  misc_RNA (1)...(19): siRNA sense strand
ugaagacaugccgcuauuu

SEQ ID NO: 1424886 - RNA, 19 nt, Homo sapiens
  misc_RNA (1)...(19): siRNA sense strand
guaugaggaggccauguuc

SEQ ID NO: 1424887 - RNA, 19 nt, Homo sapiens
  misc_RNA (1)...(19): siRNA sense strand
cagccauugucuucaucaa

SEQ ID NO: 1424888 - RNA, 19 nt, Homo sapiens
  misc_RNA (1)...(19): siRNA sense strand
cacacuucguugccacauu

SEQ ID NO: 1424889 - RNA, 19 nt, Homo sapiens
  misc_RNA (1)...(19): siRNA sense strand
caaccgcuuugugcauaag

SEQ ID NO: 1424890 - RNA, 19 nt, Homo sapiens
  misc_RNA (1)...(19): siRNA sense strand
gaugaugucacuggagaag

SEQ ID NO: 1424891 - RNA, 19 nt, Homo sapiens
  misc_RNA (1)...(19): siRNA sense strand
aaagugaugcuggugucua

SEQ ID NO: 1424892 - RNA, 19 nt, Homo sapiens
  misc_RNA (1)...(19): siRNA sense strand
gcaggcagaugaugaagua

SEQ ID NO: 1424893 - RNA, 19 nt, Homo sapiens
  misc_RNA (1)...(19): siRNA sense strand
cagcagagauccaagaaga

SEQ ID NO: 1424894 - RNA, 19 nt, Homo sapiens
  misc_RNA (1)...(19): siRNA sense strand
gaagacaugccgcuauuug

SEQ ID NO: 1424895 - RNA, 19 nt, Homo sapiens
  misc_RNA (1)...(19): siRNA sense strand
gcaaggauguguacaacag

SEQ ID NO: 1424896 - RNA, 19 nt, Homo sapiens
  misc_RNA (1)...(19): siRNA sense strand
gagcugguguuggccaaua

SEQ ID NO: 1424897 - RNA, 19 nt, Homo sapiens
  misc_RNA (1)...(19): siRNA sense strand
gaacuucaccuugagcauu

SEQ ID NO: 1424898 - RNA, 19 nt, Homo sapiens
  misc_RNA (1)...(19): siRNA sense strand
cagcacaagugauaagaug

SEQ ID NO: 1424899 - RNA, 19 nt, Homo sapiens
  misc_RNA (1)...(19): siRNA sense strand
uagcagagauugaagacau

SEQ ID NO: 1424900 - RNA, 19 nt, Homo sapiens
  misc_RNA (1)...(19): siRNA sense strand
ccgcagagccacaguguuu

SEQ ID NO: 1424901 - RNA, 19 nt, Homo sapiens
  misc_RNA (1)...(19): siRNA sense strand
caauauugcugaaagugau

SEQ ID NO: 1424902 - RNA, 19 nt, Homo sapiens
  misc_RNA (1)...(19): siRNA sense strand
ugaugucacuggagaagaa

SEQ ID NO: 1424903 - RNA, 19 nt, Homo sapiens
  misc_RNA (1)...(19): siRNA sense strand
gagcauagugggcuguauu

SEQ ID NO: 1424904 - RNA, 19 nt, Homo sapiens
  misc_RNA (1)...(19): siRNA sense strand
acacuucguugccacauug

SEQ ID NO: 1424905 - RNA, 19 nt, Homo sapiens
  misc_RNA (1)...(19): siRNA sense strand
gcuguggccuacaucauug

SEQ ID NO: 1424906 - RNA, 19 nt, Homo sapiens
  misc_RNA (1)...(19): siRNA sense strand
ccaagcggcugcagaagca

SEQ ID NO: 1424907 - RNA, 19 nt, Homo sapiens
  misc_RNA (1)...(19): siRNA sense strand
cagagugggugacagacaa

SEQ ID NO: 1424908 - RNA, 19 nt, Homo sapiens
  misc_RNA (1)...(19): siRNA sense strand
gagggugacuucucuacca

SEQ ID NO: 1424909 - RNA, 19 nt, Homo sapiens
  misc_RNA (1)...(19): siRNA sense strand
agccagaacuucaccuuga

SEQ ID NO: 1424910 - RNA, 19 nt, Homo sapiens
  misc_RNA (1)...(19): siRNA sense strand
gagaugacgcuggcaacua

SEQ ID NO: 1424911 - RNA, 19 nt, Homo sapiens
  misc_RNA (1)...(19): siRNA sense strand
ggacuuggcugcgcguaac

SEQ ID NO: 1424912 - RNA, 19 nt, Homo sapiens
  misc_RNA (1)...(19): siRNA sense strand
cgccacagcacaagugaua

SEQ ID NO: 1424913 - RNA, 19 nt, Homo sapiens
  misc_RNA (1)...(19): siRNA sense strand
gaggaggccauguuccauu

SEQ ID NO: 1424914 - RNA, 19 nt, Homo sapiens
  misc_RNA (1)...(19): siRNA sense strand
gguaugaggaggccauguu

SEQ ID NO: 1424915 - RNA, 19 nt, Homo sapiens
  misc_RNA (1)...(19): siRNA sense strand
caaacucuaucggcugaug

SEQ ID NO: 1424916 - RNA, 19 nt, Homo sapiens
  misc_RNA (1)...(19): siRNA sense strand
augaaguacuggcagauuu

SEQ ID NO: 1424917 - RNA, 19 nt, Homo sapiens
  misc_RNA (1)...(19): siRNA sense strand
uugaagacaugccgcuauu

SEQ ID NO: 1424918 - RNA, 19 nt, Homo sapiens
  misc_RNA (1)...(19): siRNA sense strand
ccaauauugcugaaaguga

SEQ ID NO: 1424919 - RNA, 19 nt, Homo sapiens
  misc_RNA (1)...(19): siRNA sense strand
gcugaugugggaaguguuu

SEQ ID NO: 1424920 - RNA, 19 nt, Homo sapiens
  misc_RNA (1)...(19): siRNA sense strand
gcacaagugauaagaugca

SEQ ID NO: 1424921 - RNA, 19 nt, Homo sapiens
  misc_RNA (1)...(19): siRNA sense strand
gcagagauccaagaagaag

SEQ ID NO: 1424922 - RNA, 19 nt, Homo sapiens
  misc_RNA (1)...(19): siRNA sense strand
gcgaggagccagagaugga

SEQ ID NO: 1424923 - RNA, 19 nt, Homo sapiens
  misc_RNA (1)...(19): siRNA sense strand
gccaacgccuccuucaaca

SEQ ID NO: 1424924 - RNA, 19 nt, Homo sapiens
  misc_RNA (1)...(19): siRNA sense strand
cauguuccauugccaguuc

SEQ ID NO: 1424925 - RNA, 19 nt, Homo sapiens
  misc_RNA (1)...(19): siRNA sense strand
acacuugcauugccuccaa

SEQ ID NO: 1424926 - RNA, 19 nt, Homo sapiens
  misc_RNA (1)...(19): siRNA sense strand
gaugaaguacuggcagauu

SEQ ID NO: 1424927 - RNA, 19 nt, Homo sapiens
  misc_RNA (1)...(19): siRNA sense strand
gcaagaagcgcugcaaagc

SEQ ID NO: 1424928 - RNA, 19 nt, Homo sapiens
  misc_RNA (1)...(19): siRNA sense strand
caacgccuccuucaacauc

SEQ ID NO: 1424929 - RNA, 19 nt, Homo sapiens
  misc_RNA (1)...(19): siRNA sense strand
aagaugauccagaccauug

SEQ ID NO: 1424930 - RNA, 19 nt, Homo sapiens
  misc_RNA (1)...(19): siRNA sense strand
guuuacacauggagagaug

SEQ ID NO: 1424931 - RNA, 19 nt, Homo sapiens
  misc_RNA (1)...(19): siRNA sense strand
ggcagcagccugagcuuug

SEQ ID NO: 1424932 - RNA, 19 nt, Homo sapiens
  misc_RNA (1)...(19): siRNA sense strand
ggcagaugaugaaguacug

SEQ ID NO: 1424933 - RNA, 19 nt, Homo sapiens
  misc_RNA (1)...(19): siRNA sense strand
agaugacgcuggcaacuac

SEQ ID NO: 1424934 - RNA, 19 nt, Homo sapiens
  misc_RNA (1)...(19): siRNA sense strand
ugaaguacuggcagauuug

SEQ ID NO: 1424935 - RNA, 19 nt, Homo sapiens
  misc_RNA (1)...(19): siRNA sense strand
gugcugaugugggaagugu

SEQ ID NO: 1424936 - RNA, 19 nt, Homo sapiens
  misc_RNA (1)...(19): siRNA sense strand
cagcaaggauguguacaac

SEQ ID NO: 1424937 - RNA, 19 nt, Homo sapiens
  misc_RNA (1)...(19): siRNA sense strand
ccucaacggugggccuuug

SEQ ID NO: 1424938 - RNA, 19 nt, Homo sapiens
  misc_RNA (1)...(19): siRNA sense strand
ucaccuagcagagauugaa

SEQ ID NO: 1424939 - RNA, 19 nt, Homo sapiens
  misc_RNA (1)...(19): siRNA sense strand
cagcugguccugagcauag

SEQ ID NO: 1424940 - RNA, 19 nt, Homo sapiens
  misc_RNA (1)...(19): siRNA sense strand
ggccuucggugugcugaug

SEQ ID NO: 1424941 - RNA, 19 nt, Homo sapiens
  misc_RNA (1)...(19): siRNA sense strand
ggccaauauugcugaaagu

SEQ ID NO: 1424942 - RNA, 19 nt, Homo sapiens
  misc_RNA (1)...(19): siRNA sense strand
aggaggccauguuccauug

SEQ ID NO: 1424943 - RNA, 19 nt, Homo sapiens
  misc_RNA (1)...(19): siRNA sense strand
cauugcugaugaaagcuuu

SEQ ID NO: 1424944 - RNA, 19 nt, Homo sapiens
  misc_RNA (1)...(19): siRNA sense strand
aaccagagcguacgacugu

SEQ ID NO: 1424945 - RNA, 19 nt, Homo sapiens
  misc_RNA (1)...(19): siRNA sense strand
aagaagaaguggccuugac

SEQ ID NO: 1424946 - RNA, 19 nt, Homo sapiens
  misc_RNA (1)...(19): siRNA sense strand
gggcagcagccugagcuuu

SEQ ID NO: 1424947 - RNA, 19 nt, Homo sapiens
  misc_RNA (1)...(19): siRNA sense strand
ccacagcacaagugauaag

SEQ ID NO: 1424948 - RNA, 19 nt, Homo sapiens
  misc_RNA (1)...(19): siRNA sense strand
acaagaugauccagaccau

SEQ ID NO: 1424949 - RNA, 19 nt, Homo sapiens
  misc_RNA (1)...(19): siRNA sense strand
aacuucaccuugagcauug

SEQ ID NO: 1424950 - RNA, 19 nt, Homo sapiens
  misc_RNA (1)...(19): siRNA sense strand
caagaugauccagaccauu

SEQ ID NO: 1424951 - RNA, 19 nt, Homo sapiens
  misc_RNA (1)...(19): siRNA sense strand
ucagcaaggauguguacaa

SEQ ID NO: 1424952 - RNA, 19 nt, Homo sapiens
  misc_RNA (1)...(19): siRNA sense strand
gcagaagguggcccuaugc

SEQ ID NO: 1424953 - RNA, 19 nt, Homo sapiens
  misc_RNA (1)...(19): siRNA sense strand
gcagccagaacuucaccuu

SEQ ID NO: 1424954 - RNA, 19 nt, Homo sapiens
  misc_RNA (1)...(19): siRNA sense strand
gcagcagccugagcuuugc

SEQ ID NO: 1424955 - RNA, 19 nt, Homo sapiens
  misc_RNA (1)...(19): siRNA sense strand
ggucagugcccagagacaa

SEQ ID NO: 1424956 - RNA, 19 nt, Homo sapiens
  misc_RNA (1)...(19): siRNA sense strand
ccagauucgugcccauguc

SEQ ID NO: 1424957 - RNA, 19 nt, Homo sapiens
  misc_RNA (1)...(19): siRNA sense strand
uggccaauauugcugaaag

SEQ ID NO: 1424958 - RNA, 19 nt, Homo sapiens
  misc_RNA (1)...(19): siRNA sense strand
gggaucuaccgcugcauug

SEQ ID NO: 1424959 - RNA, 19 nt, Homo sapiens
  misc_RNA (1)...(19): siRNA sense strand
gccagaacuucaccuugag

SEQ ID NO: 1424960 - RNA, 19 nt, Homo sapiens
  misc_RNA (1)...(19): siRNA sense strand
cagagcaaccacacaguca

SEQ ID NO: 1424961 - RNA, 19 nt, Homo sapiens
  misc_RNA (1)...(19): siRNA sense strand
augagacucccaucacuaa

SEQ ID NO: 1424962 - RNA, 19 nt, Homo sapiens
  misc_RNA (1)...(19): siRNA sense strand
guacccagacagccauugu

SEQ ID NO: 1424963 - RNA, 19 nt, Homo sapiens
  misc_RNA (1)...(19): siRNA sense strand
gcaguggcucuuugaggau

SEQ ID NO: 1424964 - RNA, 19 nt, Homo sapiens
  misc_RNA (1)...(19): siRNA sense strand
acgcugggacccugcauuu

SEQ ID NO: 1424965 - RNA, 19 nt, Homo sapiens
  misc_RNA (1)...(19): siRNA sense strand
aagacaugccgcuauuuga

SEQ ID NO: 1424966 - RNA, 19 nt, Homo sapiens
  misc_RNA (1)...(19): siRNA sense strand
acacuucaccuagcagaga

SEQ ID NO: 1424967 - RNA, 19 nt, Homo sapiens
  misc_RNA (1)...(19): siRNA sense strand
gcauugcugaugaaagcuu

SEQ ID NO: 1424968 - RNA, 19 nt, Homo sapiens
  misc_RNA (1)...(19): siRNA sense strand
ccuggagggugacuucucu

SEQ ID NO: 1424969 - RNA, 19 nt, Homo sapiens
  misc_RNA (1)...(19): siRNA sense strand
agcagaagguggcccuaug

SEQ ID NO: 1424970 - RNA, 19 nt, Homo sapiens
  misc_RNA (1)...(19): siRNA sense strand
aaacgccacagcacaagug

SEQ ID NO: 1424971 - RNA, 19 nt, Homo sapiens
  misc_RNA (1)...(19): siRNA sense strand
ugaagacaugccgcuauuu

SEQ ID NO: 1424972 - RNA, 19 nt, Homo sapiens
  misc_RNA (1)...(19): siRNA sense strand
guaugaggaggccauguuc

SEQ ID NO: 1424973 - RNA, 19 nt, Homo sapiens
  misc_RNA (1)...(19): siRNA sense strand
cagccauugucuucaucaa

SEQ ID NO: 1424974 - RNA, 19 nt, Homo sapiens
  misc_RNA (1)...(19): siRNA sense strand
cacacuucguugccacauu

SEQ ID NO: 1424975 - RNA, 19 nt, Homo sapiens
  misc_RNA (1)...(19): siRNA sense strand
caaccgcuuugugcauaag

SEQ ID NO: 1424976 - RNA, 19 nt, Homo sapiens
  misc_RNA (1)...(19): siRNA sense strand
gaugaugucacuggagaag

SEQ ID NO: 1424977 - RNA, 19 nt, Homo sapiens
  misc_RNA (1)...(19): siRNA sense strand
aaagugaugcuggugucua

SEQ ID NO: 1424978 - RNA, 19 nt, Homo sapiens
  misc_RNA (1)...(19): siRNA sense strand
gcaggcagaugaugaagua

SEQ ID NO: 1424979 - RNA, 19 nt, Homo sapiens
  misc_RNA (1)...(19): siRNA sense strand
cagcagagauccaagaaga

SEQ ID NO: 1424980 - RNA, 19 nt, Homo sapiens
  misc_RNA (1)...(19): siRNA sense strand
gaagacaugccgcuauuug

SEQ ID NO: 1424981 - RNA, 19 nt, Homo sapiens
  misc_RNA (1)...(19): siRNA sense strand
gcaaggauguguacaacag

SEQ ID NO: 1424982 - RNA, 19 nt, Homo sapiens
  misc_RNA (1)...(19): siRNA sense strand
gagcugguguuggccaaua

SEQ ID NO: 1424983 - RNA, 19 nt, Homo sapiens
  misc_RNA (1)...(19): siRNA sense strand
gaacuucaccuugagcauu

SEQ ID NO: 1424984 - RNA, 19 nt, Homo sapiens
  misc_RNA (1)...(19): siRNA sense strand
cagcacaagugauaagaug

SEQ ID NO: 1424985 - RNA, 19 nt, Homo sapiens
  misc_RNA (1)...(19): siRNA sense strand
uagcagagauugaagacau

SEQ ID NO: 1424986 - RNA, 19 nt, Homo sapiens
  misc_RNA (1)...(19): siRNA sense strand
ccgcagagccacaguguuu

SEQ ID NO: 1424987 - RNA, 19 nt, Homo sapiens
  misc_RNA (1)...(19): siRNA sense strand
caauauugcugaaagugau

SEQ ID NO: 1424988 - RNA, 19 nt, Homo sapiens
  misc_RNA (1)...(19): siRNA sense strand
ugaugucacuggagaagaa

SEQ ID NO: 1424989 - RNA, 19 nt, Homo sapiens
  misc_RNA (1)...(19): siRNA sense strand
gagcauagugggcuguauu

SEQ ID NO: 1424990 - RNA, 19 nt, Homo sapiens
  misc_RNA (1)...(19): siRNA sense strand
acacuucguugccacauug

SEQ ID NO: 1424991 - RNA, 19 nt, Homo sapiens
  misc_RNA (1)...(19): siRNA sense strand
gcuguggccuacaucauug

SEQ ID NO: 1424992 - RNA, 19 nt, Homo sapiens
  misc_RNA (1)...(19): siRNA sense strand
ccaagcggcugcagaagca

SEQ ID NO: 1424993 - RNA, 19 nt, Homo sapiens
  misc_RNA (1)...(19): siRNA sense strand
cagagugggugacagacaa

SEQ ID NO: 1424994 - RNA, 19 nt, Homo sapiens
  misc_RNA (1)...(19): siRNA sense strand
gagggugacuucucuacca

SEQ ID NO: 1424995 - RNA, 19 nt, Homo sapiens
  misc_RNA (1)...(19): siRNA sense strand
agccagaacuucaccuuga

SEQ ID NO: 1424996 - RNA, 19 nt, Homo sapiens
  misc_RNA (1)...(19): siRNA sense strand
gagaugacgcuggcaacua

SEQ ID NO: 1424997 - RNA, 19 nt, Homo sapiens
  misc_RNA (1)...(19): siRNA sense strand
ggacuuggcugcgcguaac

SEQ ID NO: 1424998 - RNA, 19 nt, Homo sapiens
  misc_RNA (1)...(19): siRNA sense strand
cgccacagcacaagugaua

SEQ ID NO: 1424999 - RNA, 19 nt, Homo sapiens
  misc_RNA (1)...(19): siRNA sense strand
gaggaggccauguuccauu

SEQ ID NO: 1425000 - RNA, 19 nt, Homo sapiens
  misc_RNA (1)...(19): siRNA sense strand
gguaugaggaggccauguu

SEQ ID NO: 1425001 - RNA, 19 nt, Homo sapiens
  misc_RNA (1)...(19): siRNA sense strand
caaacucuaucggcugaug

SEQ ID NO: 1425002 - RNA, 19 nt, Homo sapiens
  misc_RNA (1)...(19): siRNA sense strand
augaaguacuggcagauuu

SEQ ID NO: 1425003 - RNA, 19 nt, Homo sapiens
  misc_RNA (1)...(19): siRNA sense strand
uugaagacaugccgcuauu

SEQ ID NO: 1425004 - RNA, 19 nt, Homo sapiens
  misc_RNA (1)...(19): siRNA sense strand
ccaauauugcugaaaguga

SEQ ID NO: 1425005 - RNA, 19 nt, Homo sapiens
  misc_RNA (1)...(19): siRNA sense strand
gcugaugugggaaguguuu

SEQ ID NO: 1425006 - RNA, 19 nt, Homo sapiens
  misc_RNA (1)...(19): siRNA sense strand
gcacaagugauaagaugca

SEQ ID NO: 1425007 - RNA, 19 nt, Homo sapiens
  misc_RNA (1)...(19): siRNA sense strand
gcagagauccaagaagaag

SEQ ID NO: 1425008 - RNA, 19 nt, Homo sapiens
  misc_RNA (1)...(19): siRNA sense strand
gcgaggagccagagaugga

SEQ ID NO: 1425009 - RNA, 19 nt, Homo sapiens
  misc_RNA (1)...(19): siRNA sense strand
gccaacgccuccuucaaca

SEQ ID NO: 1425010 - RNA, 19 nt, Homo sapiens
  misc_RNA (1)...(19): siRNA sense strand
cauguuccauugccaguuc

SEQ ID NO: 1425011 - RNA, 19 nt, Homo sapiens
  misc_RNA (1)...(19): siRNA sense strand
acacuugcauugccuccaa

SEQ ID NO: 1425012 - RNA, 19 nt, Homo sapiens
  misc_RNA (1)...(19): siRNA sense strand
gaugaaguacuggcagauu

SEQ ID NO: 1425013 - RNA, 19 nt, Homo sapiens
  misc_RNA (1)...(19): siRNA sense strand
gcaagaagcgcugcaaagc

SEQ ID NO: 1425014 - RNA, 19 nt, Homo sapiens
  misc_RNA (1)...(19): siRNA sense strand
caacgccuccuucaacauc

SEQ ID NO: 1425015 - RNA, 19 nt, Homo sapiens
  misc_RNA (1)...(19): siRNA sense strand
aagaugauccagaccauug

SEQ ID NO: 1425016 - RNA, 19 nt, Homo sapiens
  misc_RNA (1)...(19): siRNA sense strand
guuuacacauggagagaug

SEQ ID NO: 1425017 - RNA, 19 nt, Homo sapiens
  misc_RNA (1)...(19): siRNA sense strand
ggcagcagccugagcuuug

SEQ ID NO: 1425018 - RNA, 19 nt, Homo sapiens
  misc_RNA (1)...(19): siRNA sense strand
ggcagaugaugaaguacug

SEQ ID NO: 1425019 - RNA, 19 nt, Homo sapiens
  misc_RNA (1)...(19): siRNA sense strand
agaugacgcuggcaacuac

SEQ ID NO: 1425020 - RNA, 19 nt, Homo sapiens
  misc_RNA (1)...(19): siRNA sense strand
ugaaguacuggcagauuug

SEQ ID NO: 1425021 - RNA, 19 nt, Homo sapiens
  misc_RNA (1)...(19): siRNA sense strand
gugcugaugugggaagugu

SEQ ID NO: 1425022 - RNA, 19 nt, Homo sapiens
  misc_RNA (1)...(19): siRNA sense strand
cagcaaggauguguacaac

SEQ ID NO: 1425023 - RNA, 19 nt, Homo sapiens
  misc_RNA (1)...(19): siRNA sense strand
ccucaacggugggccuuug

SEQ ID NO: 1425024 - RNA, 19 nt, Homo sapiens
  misc_RNA (1)...(19): siRNA sense strand
ucaccuagcagagauugaa

SEQ ID NO: 1425025 - RNA, 19 nt, Homo sapiens
  misc_RNA (1)...(19): siRNA sense strand
cagcugguccugagcauag

SEQ ID NO: 1425026 - RNA, 19 nt, Homo sapiens
  misc_RNA (1)...(19): siRNA sense strand
ggccuucggugugcugaug

SEQ ID NO: 1425027 - RNA, 19 nt, Homo sapiens
  misc_RNA (1)...(19): siRNA sense strand
ggccaauauugcugaaagu

SEQ ID NO: 1425028 - RNA, 19 nt, Homo sapiens
  misc_RNA (1)...(19): siRNA sense strand
aggaggccauguuccauug

SEQ ID NO: 1425029 - RNA, 19 nt, Homo sapiens
  misc_RNA (1)...(19): siRNA sense strand
cauugcugaugaaagcuuu

SEQ ID NO: 1425030 - RNA, 19 nt, Homo sapiens
  misc_RNA (1)...(19): siRNA sense strand
aaccagagcguacgacugu

SEQ ID NO: 1425031 - RNA, 19 nt, Homo sapiens
  misc_RNA (1)...(19): siRNA sense strand
aagaagaaguggccuugac

SEQ ID NO: 1425032 - RNA, 19 nt, Homo sapiens
  misc_RNA (1)...(19): siRNA sense strand
gggcagcagccugagcuuu

SEQ ID NO: 1425033 - RNA, 19 nt, Homo sapiens
  misc_RNA (1)...(19): siRNA sense strand
ccacagcacaagugauaag

SEQ ID NO: 1425034 - RNA, 19 nt, Homo sapiens
  misc_RNA (1)...(19): siRNA sense strand
acaagaugauccagaccau

SEQ ID NO: 1425035 - RNA, 19 nt, Homo sapiens
  misc_RNA (1)...(19): siRNA sense strand
aacuucaccuugagcauug

SEQ ID NO: 1425036 - RNA, 19 nt, Homo sapiens
  misc_RNA (1)...(19): siRNA sense strand
caagaugauccagaccauu

SEQ ID NO: 1425037 - RNA, 19 nt, Homo sapiens
  misc_RNA (1)...(19): siRNA sense strand
ucagcaaggauguguacaa

SEQ ID NO: 1425038 - RNA, 19 nt, Homo sapiens
  misc_RNA (1)...(19): siRNA sense strand
gcagaagguggcccuaugc

SEQ ID NO: 1425039 - RNA, 19 nt, Homo sapiens
  misc_RNA (1)...(19): siRNA sense strand
gcagccagaacuucaccuu

SEQ ID NO: 1425040 - RNA, 19 nt, Homo sapiens
  misc_RNA (1)...(19): siRNA sense strand
gcagcagccugagcuuugc

SEQ ID NO: 1425041 - RNA, 19 nt, Homo sapiens
  misc_RNA (1)...(19): siRNA sense strand
ggucagugcccagagacaa

SEQ ID NO: 1425042 - RNA, 19 nt, Homo sapiens
  misc_RNA (1)...(19): siRNA sense strand
ccagauucgugcccauguc

SEQ ID NO: 1425043 - RNA, 19 nt, Homo sapiens
  misc_RNA (1)...(19): siRNA sense strand
uggccaauauugcugaaag

SEQ ID NO: 1425044 - RNA, 19 nt, Homo sapiens
  misc_RNA (1)...(19): siRNA sense strand
gggaucuaccgcugcauug

SEQ ID NO: 1425045 - RNA, 19 nt, Homo sapiens
  misc_RNA (1)...(19): siRNA sense strand
gccagaacuucaccuugag

SEQ ID NO: 1425046 - RNA, 19 nt, Homo sapiens
  misc_RNA (1)...(19): siRNA sense strand
cagagcaaccacacaguca

SEQ ID NO: 1425047 - RNA, 19 nt, Homo sapiens
  misc_RNA (1)...(19): siRNA sense strand
augagacucccaucacuaa

SEQ ID NO: 1425048 - RNA, 19 nt, Homo sapiens
  misc_RNA (1)...(19): siRNA sense strand
guacccagacagccauugu

SEQ ID NO: 1425049 - RNA, 19 nt, Homo sapiens
  misc_RNA (1)...(19): siRNA sense strand
gcaguggcucuuugaggau

SEQ ID NO: 1425050 - RNA, 19 nt, Homo sapiens
  misc_RNA (1)...(19): siRNA sense strand
acgcugggacccugcauuu

SEQ ID NO: 1425051 - RNA, 19 nt, Homo sapiens
  misc_RNA (1)...(19): siRNA sense strand
aagacaugccgcuauuuga

SEQ ID NO: 1425052 - RNA, 19 nt, Homo sapiens
  misc_RNA (1)...(19): siRNA sense strand
acacuucaccuagcagaga

SEQ ID NO: 1425053 - RNA, 19 nt, Homo sapiens
  misc_RNA (1)...(19): siRNA sense strand
gcauugcugaugaaagcuu

SEQ ID NO: 1425054 - RNA, 19 nt, Homo sapiens
  misc_RNA (1)...(19): siRNA sense strand
ccuggagggugacuucucu

SEQ ID NO: 1425055 - RNA, 19 nt, Homo sapiens
  misc_RNA (1)...(19): siRNA sense strand
agcagaagguggcccuaug

SEQ ID NO: 1425056 - RNA, 19 nt, Homo sapiens
  misc_RNA (1)...(19): siRNA sense strand
aaacgccacagcacaagug

SEQ ID NO: 1425057 - RNA, 19 nt, Homo sapiens
  misc_RNA (1)...(19): siRNA sense strand
ugaagacaugccgcuauuu

SEQ ID NO: 1425058 - RNA, 19 nt, Homo sapiens
  misc_RNA (1)...(19): siRNA sense strand
guaugaggaggccauguuc

SEQ ID NO: 1425059 - RNA, 19 nt, Homo sapiens
  misc_RNA (1)...(19): siRNA sense strand
cagccauugucuucaucaa

SEQ ID NO: 1425060 - RNA, 19 nt, Homo sapiens
  misc_RNA (1)...(19): siRNA sense strand
cacacuucguugccacauu

SEQ ID NO: 1425061 - RNA, 19 nt, Homo sapiens
  misc_RNA (1)...(19): siRNA sense strand
caaccgcuuugugcauaag

SEQ ID NO: 1425062 - RNA, 19 nt, Homo sapiens
  misc_RNA (1)...(19): siRNA sense strand
gaugaugucacuggagaag

SEQ ID NO: 1425063 - RNA, 19 nt, Homo sapiens
  misc_RNA (1)...(19): siRNA sense strand
aaagugaugcuggugucua

SEQ ID NO: 1425064 - RNA, 19 nt, Homo sapiens
  misc_RNA (1)...(19): siRNA sense strand
gcaggcagaugaugaagua

SEQ ID NO: 1425065 - RNA, 19 nt, Homo sapiens
  misc_RNA (1)...(19): siRNA sense strand
cagcagagauccaagaaga

SEQ ID NO: 1425066 - RNA, 19 nt, Homo sapiens
  misc_RNA (1)...(19): siRNA sense strand
gaagacaugccgcuauuug

SEQ ID NO: 1425067 - RNA, 19 nt, Homo sapiens
  misc_RNA (1)...(19): siRNA sense strand
gcaaggauguguacaacag

SEQ ID NO: 1425068 - RNA, 19 nt, Homo sapiens
  misc_RNA (1)...(19): siRNA sense strand
gagcugguguuggccaaua

SEQ ID NO: 1425069 - RNA, 19 nt, Homo sapiens
  misc_RNA (1)...(19): siRNA sense strand
gaacuucaccuugagcauu

SEQ ID NO: 1425070 - RNA, 19 nt, Homo sapiens
  misc_RNA (1)...(19): siRNA sense strand
cagcacaagugauaagaug

SEQ ID NO: 1425071 - RNA, 19 nt, Homo sapiens
  misc_RNA (1)...(19): siRNA sense strand
uagcagagauugaagacau

SEQ ID NO: 1425072 - RNA, 19 nt, Homo sapiens
  misc_RNA (1)...(19): siRNA sense strand
ccgcagagccacaguguuu

SEQ ID NO: 1425073 - RNA, 19 nt, Homo sapiens
  misc_RNA (1)...(19): siRNA sense strand
caauauugcugaaagugau

SEQ ID NO: 1425074 - RNA, 19 nt, Homo sapiens
  misc_RNA (1)...(19): siRNA sense strand
ugaugucacuggagaagaa

SEQ ID NO: 1425075 - RNA, 19 nt, Homo sapiens
  misc_RNA (1)...(19): siRNA sense strand
gagcauagugggcuguauu

SEQ ID NO: 1425076 - RNA, 19 nt, Homo sapiens
  misc_RNA (1)...(19): siRNA sense strand
acacuucguugccacauug

SEQ ID NO: 1425077 - RNA, 19 nt, Homo sapiens
  misc_RNA (1)...(19): siRNA sense strand
gcuguggccuacaucauug

SEQ ID NO: 1425078 - RNA, 19 nt, Homo sapiens
  misc_RNA (1)...(19): siRNA sense strand
ccaagcggcugcagaagca

SEQ ID NO: 1425079 - RNA, 19 nt, Homo sapiens
  misc_RNA (1)...(19): siRNA sense strand
cagagugggugacagacaa

SEQ ID NO: 1425080 - RNA, 19 nt, Homo sapiens
  misc_RNA (1)...(19): siRNA sense strand
gagggugacuucucuacca

SEQ ID NO: 1425081 - RNA, 19 nt, Homo sapiens
  misc_RNA (1)...(19): siRNA sense strand
agccagaacuucaccuuga

SEQ ID NO: 1425082 - RNA, 19 nt, Homo sapiens
  misc_RNA (1)...(19): siRNA sense strand
gagaugacgcuggcaacua

SEQ ID NO: 1425083 - RNA, 19 nt, Homo sapiens
  misc_RNA (1)...(19): siRNA sense strand
ggacuuggcugcgcguaac

SEQ ID NO: 1425084 - RNA, 19 nt, Homo sapiens
  misc_RNA (1)...(19): siRNA sense strand
cgccacagcacaagugaua

SEQ ID NO: 1425085 - RNA, 19 nt, Homo sapiens
  misc_RNA (1)...(19): siRNA sense strand
gaggaggccauguuccauu

SEQ ID NO: 1425086 - RNA, 19 nt, Homo sapiens
  misc_RNA (1)...(19): siRNA sense strand
gguaugaggaggccauguu

SEQ ID NO: 1425087 - RNA, 19 nt, Homo sapiens
  misc_RNA (1)...(19): siRNA sense strand
caaacucuaucggcugaug

SEQ ID NO: 1425088 - RNA, 19 nt, Homo sapiens
  misc_RNA (1)...(19): siRNA sense strand
augaaguacuggcagauuu

SEQ ID NO: 1425089 - RNA, 19 nt, Homo sapiens
  misc_RNA (1)...(19): siRNA sense strand
uugaagacaugccgcuauu

SEQ ID NO: 1425090 - RNA, 19 nt, Homo sapiens
  misc_RNA (1)...(19): siRNA sense strand
ccaauauugcugaaaguga

SEQ ID NO: 1425091 - RNA, 19 nt, Homo sapiens
  misc_RNA (1)...(19): siRNA sense strand
gcugaugugggaaguguuu

SEQ ID NO: 1425092 - RNA, 19 nt, Homo sapiens
  misc_RNA (1)...(19): siRNA sense strand
gcacaagugauaagaugca

SEQ ID NO: 1425093 - RNA, 19 nt, Homo sapiens
  misc_RNA (1)...(19): siRNA sense strand
gcagagauccaagaagaag

SEQ ID NO: 1425094 - RNA, 19 nt, Homo sapiens
  misc_RNA (1)...(19): siRNA sense strand
gcgaggagccagagaugga

SEQ ID NO: 1425095 - RNA, 19 nt, Homo sapiens
  misc_RNA (1)...(19): siRNA sense strand
gccaacgccuccuucaaca

SEQ ID NO: 1425096 - RNA, 19 nt, Homo sapiens
  misc_RNA (1)...(19): siRNA sense strand
cauguuccauugccaguuc

SEQ ID NO: 1425097 - RNA, 19 nt, Homo sapiens
  misc_RNA (1)...(19): siRNA sense strand
acacuugcauugccuccaa

SEQ ID NO: 1425098 - RNA, 19 nt, Homo sapiens
  misc_RNA (1)...(19): siRNA sense strand
gaugaaguacuggcagauu

SEQ ID NO: 1425099 - RNA, 19 nt, Homo sapiens
  misc_RNA (1)...(19): siRNA sense strand
gcaagaagcgcugcaaagc

SEQ ID NO: 1425100 - RNA, 19 nt, Homo sapiens
  misc_RNA (1)...(19): siRNA sense strand
caacgccuccuucaacauc

SEQ ID NO: 1425101 - RNA, 19 nt, Homo sapiens
  misc_RNA (1)...(19): siRNA sense strand
aagaugauccagaccauug

SEQ ID NO: 1425102 - RNA, 19 nt, Homo sapiens
  misc_RNA (1)...(19): siRNA sense strand
guuuacacauggagagaug

SEQ ID NO: 1425103 - RNA, 19 nt, Homo sapiens
  misc_RNA (1)...(19): siRNA sense strand
ggcagcagccugagcuuug

SEQ ID NO: 1425104 - RNA, 19 nt, Homo sapiens
  misc_RNA (1)...(19): siRNA sense strand
ggcagaugaugaaguacug

SEQ ID NO: 1425105 - RNA, 19 nt, Homo sapiens
  misc_RNA (1)...(19): siRNA sense strand
agaugacgcuggcaacuac

SEQ ID NO: 1425106 - RNA, 19 nt, Homo sapiens
  misc_RNA (1)...(19): siRNA sense strand
ugaaguacuggcagauuug

SEQ ID NO: 1425107 - RNA, 19 nt, Homo sapiens
  misc_RNA (1)...(19): siRNA sense strand
gugcugaugugggaagugu

SEQ ID NO: 1425108 - RNA, 19 nt, Homo sapiens
  misc_RNA (1)...(19): siRNA sense strand
cagcaaggauguguacaac

SEQ ID NO: 1425109 - RNA, 19 nt, Homo sapiens
  misc_RNA (1)...(19): siRNA sense strand
ccucaacggugggccuuug

SEQ ID NO: 1425110 - RNA, 19 nt, Homo sapiens
  misc_RNA (1)...(19): siRNA sense strand
ucaccuagcagagauugaa

SEQ ID NO: 1425111 - RNA, 19 nt, Homo sapiens
  misc_RNA (1)...(19): siRNA sense strand
cagcugguccugagcauag

SEQ ID NO: 1425112 - RNA, 19 nt, Homo sapiens
  misc_RNA (1)...(19): siRNA sense strand
ggccuucggugugcugaug

SEQ ID NO: 1425113 - RNA, 19 nt, Homo sapiens
  misc_RNA (1)...(19): siRNA sense strand
ggccaauauugcugaaagu

SEQ ID NO: 1425114 - RNA, 19 nt, Homo sapiens
  misc_RNA (1)...(19): siRNA sense strand
aggaggccauguuccauug

SEQ ID NO: 1425115 - RNA, 19 nt, Homo sapiens
  misc_RNA (1)...(19): siRNA sense strand
cauugcugaugaaagcuuu

SEQ ID NO: 1425116 - RNA, 19 nt, Homo sapiens
  misc_RNA (1)...(19): siRNA sense strand
aaccagagcguacgacugu

SEQ ID NO: 1425117 - RNA, 19 nt, Homo sapiens
  misc_RNA (1)...(19): siRNA sense strand
aagaagaaguggccuugac

SEQ ID NO: 1425118 - RNA, 19 nt, Homo sapiens
  misc_RNA (1)...(19): siRNA sense strand
gggcagcagccugagcuuu

SEQ ID NO: 1425119 - RNA, 19 nt, Homo sapiens
  misc_RNA (1)...(19): siRNA sense strand
ccacagcacaagugauaag

SEQ ID NO: 1425120 - RNA, 19 nt, Homo sapiens
  misc_RNA (1)...(19): siRNA sense strand
acaagaugauccagaccau

SEQ ID NO: 1425121 - RNA, 19 nt, Homo sapiens
  misc_RNA (1)...(19): siRNA sense strand
aacuucaccuugagcauug

SEQ ID NO: 1425122 - RNA, 19 nt, Homo sapiens
  misc_RNA (1)...(19): siRNA sense strand
caagaugauccagaccauu

SEQ ID NO: 1425123 - RNA, 19 nt, Homo sapiens
  misc_RNA (1)...(19): siRNA sense strand
ucagcaaggauguguacaa

SEQ ID NO: 1425124 - RNA, 19 nt, Homo sapiens
  misc_RNA (1)...(19): siRNA sense strand
gcagaagguggcccuaugc

SEQ ID NO: 1425125 - RNA, 19 nt, Homo sapiens
  misc_RNA (1)...(19): siRNA sense strand
gcagccagaacuucaccuu

SEQ ID NO: 1425126 - RNA, 19 nt, Homo sapiens
  misc_RNA (1)...(19): siRNA sense strand
gcagcagccugagcuuugc

SEQ ID NO: 1425127 - RNA, 19 nt, Homo sapiens
  misc_RNA (1)...(19): siRNA sense strand
ggucagugcccagagacaa

SEQ ID NO: 1425128 - RNA, 19 nt, Homo sapiens
  misc_RNA (1)...(19): siRNA sense strand
ccagauucgugcccauguc

SEQ ID NO: 1425129 - RNA, 19 nt, Homo sapiens
  misc_RNA (1)...(19): siRNA sense strand
uggccaauauugcugaaag

SEQ ID NO: 1425130 - RNA, 19 nt, Homo sapiens
  misc_RNA (1)...(19): siRNA sense strand
gggaucuaccgcugcauug

SEQ ID NO: 1425131 - RNA, 19 nt, Homo sapiens
  misc_RNA (1)...(19): siRNA sense strand
gccagaacuucaccuugag

SEQ ID NO: 1425132 - RNA, 19 nt, Homo sapiens
  misc_RNA (1)...(19): siRNA sense strand
cagagcaaccacacaguca

SEQ ID NO: 1425133 - RNA, 19 nt, Homo sapiens
  misc_RNA (1)...(19): siRNA sense strand
augagacucccaucacuaa

SEQ ID NO: 1425134 - RNA, 19 nt, Homo sapiens
  misc_RNA (1)...(19): siRNA sense strand
guacccagacagccauugu

SEQ ID NO: 1425135 - RNA, 19 nt, Homo sapiens
  misc_RNA (1)...(19): siRNA sense strand
gcaguggcucuuugaggau

SEQ ID NO: 1425136 - RNA, 19 nt, Homo sapiens
  misc_RNA (1)...(19): siRNA sense strand
acgcugggacccugcauuu

SEQ ID NO: 1425137 - RNA, 19 nt, Homo sapiens
  misc_RNA (1)...(19): siRNA sense strand
aagacaugccgcuauuuga

SEQ ID NO: 1425138 - RNA, 19 nt, Homo sapiens
  misc_RNA (1)...(19): siRNA sense strand
acacuucaccuagcagaga

SEQ ID NO: 1425139 - RNA, 19 nt, Homo sapiens
  misc_RNA (1)...(19): siRNA sense strand
gcauugcugaugaaagcuu

SEQ ID NO: 1425140 - RNA, 19 nt, Homo sapiens
  misc_RNA (1)...(19): siRNA sense strand
ccuggagggugacuucucu

SEQ ID NO: 1425141 - RNA, 19 nt, Homo sapiens
  misc_RNA (1)...(19): siRNA sense strand
agcagaagguggcccuaug

SEQ ID NO: 1425142 - RNA, 19 nt, Homo sapiens
  misc_RNA (1)...(19): siRNA sense strand
aaacgccacagcacaagug

SEQ ID NO: 1425143 - RNA, 19 nt, Homo sapiens
  misc_RNA (1)...(19): siRNA sense strand
ugaagacaugccgcuauuu

SEQ ID NO: 1425144 - RNA, 19 nt, Homo sapiens
  misc_RNA (1)...(19): siRNA sense strand
guaugaggaggccauguuc

SEQ ID NO: 1425145 - RNA, 19 nt, Homo sapiens
  misc_RNA (1)...(19): siRNA sense strand
cagccauugucuucaucaa

SEQ ID NO: 1425146 - RNA, 19 nt, Homo sapiens
  misc_RNA (1)...(19): siRNA sense strand
cacacuucguugccacauu

SEQ ID NO: 1425147 - RNA, 19 nt, Homo sapiens
  misc_RNA (1)...(19): siRNA sense strand
caaccgcuuugugcauaag

SEQ ID NO: 1425148 - RNA, 19 nt, Homo sapiens
  misc_RNA (1)...(19): siRNA sense strand
gaugaugucacuggagaag

SEQ ID NO: 1425149 - RNA, 19 nt, Homo sapiens
  misc_RNA (1)...(19): siRNA sense strand
aaagugaugcuggugucua

SEQ ID NO: 1425150 - RNA, 19 nt, Homo sapiens
  misc_RNA (1)...(19): siRNA sense strand
cagcagagauccaagaaga

SEQ ID NO: 1425151 - RNA, 19 nt, Homo sapiens
  misc_RNA (1)...(19): siRNA sense strand
gaagacaugccgcuauuug

SEQ ID NO: 1425152 - RNA, 19 nt, Homo sapiens
  misc_RNA (1)...(19): siRNA sense strand
gagcugguguuggccaaua

SEQ ID NO: 1425153 - RNA, 19 nt, Homo sapiens
  misc_RNA (1)...(19): siRNA sense strand
gaacuucaccuugagcauu

SEQ ID NO: 1425154 - RNA, 19 nt, Homo sapiens
  misc_RNA (1)...(19): siRNA sense strand
cagcacaagugauaagaug

SEQ ID NO: 1425155 - RNA, 19 nt, Homo sapiens
  misc_RNA (1)...(19): siRNA sense strand
uagcagagauugaagacau

SEQ ID NO: 1425156 - RNA, 19 nt, Homo sapiens
  misc_RNA (1)...(19): siRNA sense strand
ccgcagagccacaguguuu

SEQ ID NO: 1425157 - RNA, 19 nt, Homo sapiens
  misc_RNA (1)...(19): siRNA sense strand
caauauugcugaaagugau

SEQ ID NO: 1425158 - RNA, 19 nt, Homo sapiens
  misc_RNA (1)...(19): siRNA sense strand
ugaugucacuggagaagaa

SEQ ID NO: 1425159 - RNA, 19 nt, Homo sapiens
  misc_RNA (1)...(19): siRNA sense strand
gagcauagugggcuguauu

SEQ ID NO: 1425160 - RNA, 19 nt, Homo sapiens
  misc_RNA (1)...(19): siRNA sense strand
acacuucguugccacauug

SEQ ID NO: 1425161 - RNA, 19 nt, Homo sapiens
  misc_RNA (1)...(19): siRNA sense strand
gcuguggccuacaucauug

SEQ ID NO: 1425162 - RNA, 19 nt, Homo sapiens
  misc_RNA (1)...(19): siRNA sense strand
ccaagcggcugcagaagca

SEQ ID NO: 1425163 - RNA, 19 nt, Homo sapiens
  misc_RNA (1)...(19): siRNA sense strand
cagagugggugacagacaa

SEQ ID NO: 1425164 - RNA, 19 nt, Homo sapiens
  misc_RNA (1)...(19): siRNA sense strand
agccagaacuucaccuuga

SEQ ID NO: 1425165 - RNA, 19 nt, Homo sapiens
  misc_RNA (1)...(19): siRNA sense strand
gagaugacgcuggcaacua

SEQ ID NO: 1425166 - RNA, 19 nt, Homo sapiens
  misc_RNA (1)...(19): siRNA sense strand
cgccacagcacaagugaua

SEQ ID NO: 1425167 - RNA, 19 nt, Homo sapiens
  misc_RNA (1)...(19): siRNA sense strand
gaggaggccauguuccauu

SEQ ID NO: 1425168 - RNA, 19 nt, Homo sapiens
  misc_RNA (1)...(19): siRNA sense strand
gguaugaggaggccauguu

SEQ ID NO: 1425169 - RNA, 19 nt, Homo sapiens
  misc_RNA (1)...(19): siRNA sense strand
uugaagacaugccgcuauu

SEQ ID NO: 1425170 - RNA, 19 nt, Homo sapiens
  misc_RNA (1)...(19): siRNA sense strand
ccaauauugcugaaaguga

SEQ ID NO: 1425171 - RNA, 19 nt, Homo sapiens
  misc_RNA (1)...(19): siRNA sense strand
gcacaagugauaagaugca

SEQ ID NO: 1425172 - RNA, 19 nt, Homo sapiens
  misc_RNA (1)...(19): siRNA sense strand
gcagagauccaagaagaag

SEQ ID NO: 1425173 - RNA, 19 nt, Homo sapiens
  misc_RNA (1)...(19): siRNA sense strand
gcgaggagccagagaugga

SEQ ID NO: 1425174 - RNA, 19 nt, Homo sapiens
  misc_RNA (1)...(19): siRNA sense strand
gccaacgccuccuucaaca

SEQ ID NO: 1425175 - RNA, 19 nt, Homo sapiens
  misc_RNA (1)...(19): siRNA sense strand
cauguuccauugccaguuc

SEQ ID NO: 1425176 - RNA, 19 nt, Homo sapiens
  misc_RNA (1)...(19): siRNA sense strand
acacuugcauugccuccaa

SEQ ID NO: 1425177 - RNA, 19 nt, Homo sapiens
  misc_RNA (1)...(19): siRNA sense strand
gcaagaagcgcugcaaagc

SEQ ID NO: 1425178 - RNA, 19 nt, Homo sapiens
  misc_RNA (1)...(19): siRNA sense strand
caacgccuccuucaacauc

SEQ ID NO: 1425179 - RNA, 19 nt, Homo sapiens
  misc_RNA (1)...(19): siRNA sense strand
ggcagcagccugagcuuug

SEQ ID NO: 1425180 - RNA, 19 nt, Homo sapiens
  misc_RNA (1)...(19): siRNA sense strand
aagaugauccagaccauug

SEQ ID NO: 1425181 - RNA, 19 nt, Homo sapiens
  misc_RNA (1)...(19): siRNA sense strand
agaugacgcuggcaacuac

SEQ ID NO: 1425182 - RNA, 19 nt, Homo sapiens
  misc_RNA (1)...(19): siRNA sense strand
ccucaacggugggccuuug

SEQ ID NO: 1425183 - RNA, 19 nt, Homo sapiens
  misc_RNA (1)...(19): siRNA sense strand
ucaccuagcagagauugaa

SEQ ID NO: 1425184 - RNA, 19 nt, Homo sapiens
  misc_RNA (1)...(19): siRNA sense strand
cagcugguccugagcauag

SEQ ID NO: 1425185 - RNA, 19 nt, Homo sapiens
  misc_RNA (1)...(19): siRNA sense strand
ggccaauauugcugaaagu

SEQ ID NO: 1425186 - RNA, 19 nt, Homo sapiens
  misc_RNA (1)...(19): siRNA sense strand
aggaggccauguuccauug

SEQ ID NO: 1425187 - RNA, 19 nt, Homo sapiens
  misc_RNA (1)...(19): siRNA sense strand
cauugcugaugaaagcuuu

SEQ ID NO: 1425188 - RNA, 19 nt, Homo sapiens
  misc_RNA (1)...(19): siRNA sense strand
aaccagagcguacgacugu

SEQ ID NO: 1425189 - RNA, 19 nt, Homo sapiens
  misc_RNA (1)...(19): siRNA sense strand
aagaagaaguggccuugac

SEQ ID NO: 1425190 - RNA, 19 nt, Homo sapiens
  misc_RNA (1)...(19): siRNA sense strand
aacuucaccuugagcauug

SEQ ID NO: 1425191 - RNA, 19 nt, Homo sapiens
  misc_RNA (1)...(19): siRNA sense strand
ccacagcacaagugauaag

SEQ ID NO: 1425192 - RNA, 19 nt, Homo sapiens
  misc_RNA (1)...(19): siRNA sense strand
acaagaugauccagaccau

SEQ ID NO: 1425193 - RNA, 19 nt, Homo sapiens
  misc_RNA (1)...(19): siRNA sense strand
gggcagcagccugagcuuu

SEQ ID NO: 1425194 - RNA, 19 nt, Homo sapiens
  misc_RNA (1)...(19): siRNA sense strand
caagaugauccagaccauu

SEQ ID NO: 1425195 - RNA, 19 nt, Homo sapiens
  misc_RNA (1)...(19): siRNA sense strand
cagagcaaccacacaguca

SEQ ID NO: 1425196 - RNA, 19 nt, Homo sapiens
  misc_RNA (1)...(19): siRNA sense strand
ccagauucgugcccauguc

SEQ ID NO: 1425197 - RNA, 19 nt, Homo sapiens
  misc_RNA (1)...(19): siRNA sense strand
uggccaauauugcugaaag

SEQ ID NO: 1425198 - RNA, 19 nt, Homo sapiens
  misc_RNA (1)...(19): siRNA sense strand
gggaucuaccgcugcauug

SEQ ID NO: 1425199 - RNA, 19 nt, Homo sapiens
  misc_RNA (1)...(19): siRNA sense strand
gccagaacuucaccuugag

SEQ ID NO: 1425200 - RNA, 19 nt, Homo sapiens
  misc_RNA (1)...(19): siRNA sense strand
gcagcagccugagcuuugc

SEQ ID NO: 1425201 - RNA, 19 nt, Homo sapiens
  misc_RNA (1)...(19): siRNA sense strand
gcagccagaacuucaccuu

SEQ ID NO: 1425202 - RNA, 19 nt, Homo sapiens
  misc_RNA (1)...(19): siRNA sense strand
augagacucccaucacuaa

SEQ ID NO: 1425203 - RNA, 19 nt, Homo sapiens
  misc_RNA (1)...(19): siRNA sense strand
guacccagacagccauugu

SEQ ID NO: 1425204 - RNA, 19 nt, Homo sapiens
  misc_RNA (1)...(19): siRNA sense strand
gcaguggcucuuugaggau

SEQ ID NO: 1425205 - RNA, 19 nt, Homo sapiens
  misc_RNA (1)...(19): siRNA sense strand
acgcugggacccugcauuu

SEQ ID NO: 1425206 - RNA, 19 nt, Homo sapiens
  misc_RNA (1)...(19): siRNA sense strand
aagacaugccgcuauuuga

SEQ ID NO: 1425207 - RNA, 19 nt, Homo sapiens
  misc_RNA (1)...(19): siRNA sense strand
acacuucaccuagcagaga

SEQ ID NO: 1425208 - RNA, 19 nt, Homo sapiens
  misc_RNA (1)...(19): siRNA sense strand
gcauugcugaugaaagcuu

SEQ ID NO: 1425209 - RNA, 19 nt, Homo sapiens
  misc_RNA (1)...(19): siRNA sense strand
aaacgccacagcacaagug

SEQ ID NO: 1425210 - RNA, 19 nt, Homo sapiens
  misc_RNA (1)...(19): siRNA sense strand
ugaagacaugccgcuauuu

SEQ ID NO: 1425211 - RNA, 19 nt, Homo sapiens
  misc_RNA (1)...(19): siRNA sense strand
guaugaggaggccauguuc

SEQ ID NO: 1425212 - RNA, 19 nt, Homo sapiens
  misc_RNA (1)...(19): siRNA sense strand
cacacuucguugccacauu

SEQ ID NO: 1425213 - RNA, 19 nt, Homo sapiens
  misc_RNA (1)...(19): siRNA sense strand
cagccauugucuucaucaa

SEQ ID NO: 1425214 - RNA, 19 nt, Homo sapiens
  misc_RNA (1)...(19): siRNA sense strand
gaugaugucacuggagaag

SEQ ID NO: 1425215 - RNA, 19 nt, Homo sapiens
  misc_RNA (1)...(19): siRNA sense strand
aaagugaugcuggugucua

SEQ ID NO: 1425216 - RNA, 19 nt, Homo sapiens
  misc_RNA (1)...(19): siRNA sense strand
gcaggcagaugaugaagua

SEQ ID NO: 1425217 - RNA, 19 nt, Homo sapiens
  misc_RNA (1)...(19): siRNA sense strand
cagcagagauccaagaaga

SEQ ID NO: 1425218 - RNA, 19 nt, Homo sapiens
  misc_RNA (1)...(19): siRNA sense strand
gaagacaugccgcuauuug

SEQ ID NO: 1425219 - RNA, 19 nt, Homo sapiens
  misc_RNA (1)...(19): siRNA sense strand
gcaaggauguguacaacag

SEQ ID NO: 1425220 - RNA, 19 nt, Homo sapiens
  misc_RNA (1)...(19): siRNA sense strand
gagcugguguuggccaaua

SEQ ID NO: 1425221 - RNA, 19 nt, Homo sapiens
  misc_RNA (1)...(19): siRNA sense strand
gaacuucaccuugagcauu

SEQ ID NO: 1425222 - RNA, 19 nt, Homo sapiens
  misc_RNA (1)...(19): siRNA sense strand
cagcacaagugauaagaug

SEQ ID NO: 1425223 - RNA, 19 nt, Homo sapiens
  misc_RNA (1)...(19): siRNA sense strand
uagcagagauugaagacau

SEQ ID NO: 1425224 - RNA, 19 nt, Homo sapiens
  misc_RNA (1)...(19): siRNA sense strand
ccgcagagccacaguguuu

SEQ ID NO: 1425225 - RNA, 19 nt, Homo sapiens
  misc_RNA (1)...(19): siRNA sense strand
caauauugcugaaagugau

SEQ ID NO: 1425226 - RNA, 19 nt, Homo sapiens
  misc_RNA (1)...(19): siRNA sense strand
ugaugucacuggagaagaa

SEQ ID NO: 1425227 - RNA, 19 nt, Homo sapiens
  misc_RNA (1)...(19): siRNA sense strand
gagcauagugggcuguauu

SEQ ID NO: 1425228 - RNA, 19 nt, Homo sapiens
  misc_RNA (1)...(19): siRNA sense strand
acacuucguugccacauug

SEQ ID NO: 1425229 - RNA, 19 nt, Homo sapiens
  misc_RNA (1)...(19): siRNA sense strand
gcuguggccuacaucauug

SEQ ID NO: 1425230 - RNA, 19 nt, Homo sapiens
  misc_RNA (1)...(19): siRNA sense strand
ccaagcggcugcagaagca

SEQ ID NO: 1425231 - RNA, 19 nt, Homo sapiens
  misc_RNA (1)...(19): siRNA sense strand
cagagugggugacagacaa

SEQ ID NO: 1425232 - RNA, 19 nt, Homo sapiens
  misc_RNA (1)...(19): siRNA sense strand
gagggugacuucucuacca

SEQ ID NO: 1425233 - RNA, 19 nt, Homo sapiens
  misc_RNA (1)...(19): siRNA sense strand
agccagaacuucaccuuga

SEQ ID NO: 1425234 - RNA, 19 nt, Homo sapiens
  misc_RNA (1)...(19): siRNA sense strand
gagaugacgcuggcaacua

SEQ ID NO: 1425235 - RNA, 19 nt, Homo sapiens
  misc_RNA (1)...(19): siRNA sense strand
ggacuuggcugcgcguaac

SEQ ID NO: 1425236 - RNA, 19 nt, Homo sapiens
  misc_RNA (1)...(19): siRNA sense strand
cgccacagcacaagugaua

SEQ ID NO: 1425237 - RNA, 19 nt, Homo sapiens
  misc_RNA (1)...(19): siRNA sense strand
gaggaggccauguuccauu

SEQ ID NO: 1425238 - RNA, 19 nt, Homo sapiens
  misc_RNA (1)...(19): siRNA sense strand
gguaugaggaggccauguu

SEQ ID NO: 1425239 - RNA, 19 nt, Homo sapiens
  misc_RNA (1)...(19): siRNA sense strand
caaacucuaucggcugaug

SEQ ID NO: 1425240 - RNA, 19 nt, Homo sapiens
  misc_RNA (1)...(19): siRNA sense strand
augaaguacuggcagauuu

SEQ ID NO: 1425241 - RNA, 19 nt, Homo sapiens
  misc_RNA (1)...(19): siRNA sense strand
uugaagacaugccgcuauu

SEQ ID NO: 1425242 - RNA, 19 nt, Homo sapiens
  misc_RNA (1)...(19): siRNA sense strand
ccaauauugcugaaaguga

SEQ ID NO: 1425243 - RNA, 19 nt, Homo sapiens
  misc_RNA (1)...(19): siRNA sense strand
gcugaugugggaaguguuu

SEQ ID NO: 1425244 - RNA, 19 nt, Homo sapiens
  misc_RNA (1)...(19): siRNA sense strand
gcacaagugauaagaugca

SEQ ID NO: 1425245 - RNA, 19 nt, Homo sapiens
  misc_RNA (1)...(19): siRNA sense strand
gcagagauccaagaagaag

SEQ ID NO: 1425246 - RNA, 19 nt, Homo sapiens
  misc_RNA (1)...(19): siRNA sense strand
gcgaggagccagagaugga

SEQ ID NO: 1425247 - RNA, 19 nt, Homo sapiens
  misc_RNA (1)...(19): siRNA sense strand
gccaacgccuccuucaaca

SEQ ID NO: 1425248 - RNA, 19 nt, Homo sapiens
  misc_RNA (1)...(19): siRNA sense strand
cauguuccauugccaguuc

SEQ ID NO: 1425249 - RNA, 19 nt, Homo sapiens
  misc_RNA (1)...(19): siRNA sense strand
acacuugcauugccuccaa

SEQ ID NO: 1425250 - RNA, 19 nt, Homo sapiens
  misc_RNA (1)...(19): siRNA sense strand
gaugaaguacuggcagauu

SEQ ID NO: 1425251 - RNA, 19 nt, Homo sapiens
  misc_RNA (1)...(19): siRNA sense strand
gcaagaagcgcugcaaagc

SEQ ID NO: 1425252 - RNA, 19 nt, Homo sapiens
  misc_RNA (1)...(19): siRNA sense strand
caacgccuccuucaacauc

SEQ ID NO: 1425253 - RNA, 19 nt, Homo sapiens
  misc_RNA (1)...(19): siRNA sense strand
aagaugauccagaccauug

SEQ ID NO: 1425254 - RNA, 19 nt, Homo sapiens
  misc_RNA (1)...(19): siRNA sense strand
guuuacacauggagagaug

SEQ ID NO: 1425255 - RNA, 19 nt, Homo sapiens
  misc_RNA (1)...(19): siRNA sense strand
ggcagcagccugagcuuug

SEQ ID NO: 1425256 - RNA, 19 nt, Homo sapiens
  misc_RNA (1)...(19): siRNA sense strand
ggcagaugaugaaguacug

SEQ ID NO: 1425257 - RNA, 19 nt, Homo sapiens
  misc_RNA (1)...(19): siRNA sense strand
agaugacgcuggcaacuac

SEQ ID NO: 1425258 - RNA, 19 nt, Homo sapiens
  misc_RNA (1)...(19): siRNA sense strand
ugaaguacuggcagauuug

SEQ ID NO: 1425259 - RNA, 19 nt, Homo sapiens
  misc_RNA (1)...(19): siRNA sense strand
gugcugaugugggaagugu

SEQ ID NO: 1425260 - RNA, 19 nt, Homo sapiens
  misc_RNA (1)...(19): siRNA sense strand
cagcaaggauguguacaac

SEQ ID NO: 1425261 - RNA, 19 nt, Homo sapiens
  misc_RNA (1)...(19): siRNA sense strand
ccucaacggugggccuuug

SEQ ID NO: 1425262 - RNA, 19 nt, Homo sapiens
  misc_RNA (1)...(19): siRNA sense strand
ucaccuagcagagauugaa

SEQ ID NO: 1425263 - RNA, 19 nt, Homo sapiens
  misc_RNA (1)...(19): siRNA sense strand
cagcugguccugagcauag

SEQ ID NO: 1425264 - RNA, 19 nt, Homo sapiens
  misc_RNA (1)...(19): siRNA sense strand
ggccuucggugugcugaug

SEQ ID NO: 1425265 - RNA, 19 nt, Homo sapiens
  misc_RNA (1)...(19): siRNA sense strand
ggccaauauugcugaaagu

SEQ ID NO: 1425266 - RNA, 19 nt, Homo sapiens
  misc_RNA (1)...(19): siRNA sense strand
aggaggccauguuccauug

SEQ ID NO: 1425267 - RNA, 19 nt, Homo sapiens
  misc_RNA (1)...(19): siRNA sense strand
cauugcugaugaaagcuuu

SEQ ID NO: 1425268 - RNA, 19 nt, Homo sapiens
  misc_RNA (1)...(19): siRNA sense strand
aaccagagcguacgacugu

SEQ ID NO: 1425269 - RNA, 19 nt, Homo sapiens
  misc_RNA (1)...(19): siRNA sense strand
aagaagaaguggccuugac

SEQ ID NO: 1425270 - RNA, 19 nt, Homo sapiens
  misc_RNA (1)...(19): siRNA sense strand
gggcagcagccugagcuuu

SEQ ID NO: 1425271 - RNA, 19 nt, Homo sapiens
  misc_RNA (1)...(19): siRNA sense strand
ccacagcacaagugauaag

SEQ ID NO: 1425272 - RNA, 19 nt, Homo sapiens
  misc_RNA (1)...(19): siRNA sense strand
acaagaugauccagaccau

SEQ ID NO: 1425273 - RNA, 19 nt, Homo sapiens
  misc_RNA (1)...(19): siRNA sense strand
aacuucaccuugagcauug

SEQ ID NO: 1425274 - RNA, 19 nt, Homo sapiens
  misc_RNA (1)...(19): siRNA sense strand
caagaugauccagaccauu

SEQ ID NO: 1425275 - RNA, 19 nt, Homo sapiens
  misc_RNA (1)...(19): siRNA sense strand
ucagcaaggauguguacaa

SEQ ID NO: 1425276 - RNA, 19 nt, Homo sapiens
  misc_RNA (1)...(19): siRNA sense strand
gcagaagguggcccuaugc

SEQ ID NO: 1425277 - RNA, 19 nt, Homo sapiens
  misc_RNA (1)...(19): siRNA sense strand
gcagccagaacuucaccuu

SEQ ID NO: 1425278 - RNA, 19 nt, Homo sapiens
  misc_RNA (1)...(19): siRNA sense strand
gcagcagccugagcuuugc

SEQ ID NO: 1425279 - RNA, 19 nt, Homo sapiens
  misc_RNA (1)...(19): siRNA sense strand
ggucagugcccagagacaa

SEQ ID NO: 1425280 - RNA, 19 nt, Homo sapiens
  misc_RNA (1)...(19): siRNA sense strand
ccagauucgugcccauguc

SEQ ID NO: 1425281 - RNA, 19 nt, Homo sapiens
  misc_RNA (1)...(19): siRNA sense strand
uggccaauauugcugaaag

SEQ ID NO: 1425282 - RNA, 19 nt, Homo sapiens
  misc_RNA (1)...(19): siRNA sense strand
gggaucuaccgcugcauug

SEQ ID NO: 1425283 - RNA, 19 nt, Homo sapiens
  misc_RNA (1)...(19): siRNA sense strand
gccagaacuucaccuugag

SEQ ID NO: 1425284 - RNA, 19 nt, Homo sapiens
  misc_RNA (1)...(19): siRNA sense strand
cagagcaaccacacaguca

SEQ ID NO: 1425285 - RNA, 19 nt, Homo sapiens
  misc_RNA (1)...(19): siRNA sense strand
augagacucccaucacuaa

SEQ ID NO: 1425286 - RNA, 19 nt, Homo sapiens
  misc_RNA (1)...(19): siRNA sense strand
guacccagacagccauugu

SEQ ID NO: 1425287 - RNA, 19 nt, Homo sapiens
  misc_RNA (1)...(19): siRNA sense strand
gcaguggcucuuugaggau

SEQ ID NO: 1425288 - RNA, 19 nt, Homo sapiens
  misc_RNA (1)...(19): siRNA sense strand
acgcugggacccugcauuu

SEQ ID NO: 1425289 - RNA, 19 nt, Homo sapiens
  misc_RNA (1)...(19): siRNA sense strand
aagacaugccgcuauuuga

SEQ ID NO: 1425290 - RNA, 19 nt, Homo sapiens
  misc_RNA (1)...(19): siRNA sense strand
acacuucaccuagcagaga

SEQ ID NO: 1425291 - RNA, 19 nt, Homo sapiens
  misc_RNA (1)...(19): siRNA sense strand
gcauugcugaugaaagcuu

SEQ ID NO: 1425292 - RNA, 19 nt, Homo sapiens
  misc_RNA (1)...(19): siRNA sense strand
ccuggagggugacuucucu

SEQ ID NO: 1425293 - RNA, 19 nt, Homo sapiens
  misc_RNA (1)...(19): siRNA sense strand
agcagaagguggcccuaug

SEQ ID NO: 1425294 - RNA, 19 nt, Homo sapiens
  misc_RNA (1)...(19): siRNA sense strand
aaacgccacagcacaagug

SEQ ID NO: 1425295 - RNA, 19 nt, Homo sapiens
  misc_RNA (1)...(19): siRNA sense strand
ugaagacaugccgcuauuu

SEQ ID NO: 1425296 - RNA, 19 nt, Homo sapiens
  misc_RNA (1)...(19): siRNA sense strand
guaugaggaggccauguuc

SEQ ID NO: 1425297 - RNA, 19 nt, Homo sapiens
  misc_RNA (1)...(19): siRNA sense strand
cagccauugucuucaucaa

SEQ ID NO: 1425298 - RNA, 19 nt, Homo sapiens
  misc_RNA (1)...(19): siRNA sense strand
cacacuucguugccacauu

SEQ ID NO: 1425299 - RNA, 19 nt, Homo sapiens
  misc_RNA (1)...(19): siRNA sense strand
caaccgcuuugugcauaag

SEQ ID NO: 1425300 - RNA, 19 nt, Homo sapiens
  misc_RNA (1)...(19): siRNA sense strand
gaugaugucacuggagaag

SEQ ID NO: 1425301 - RNA, 19 nt, Homo sapiens
  misc_RNA (1)...(19): siRNA sense strand
aaagugaugcuggugucua

SEQ ID NO: 1425302 - RNA, 19 nt, Homo sapiens
  misc_RNA (1)...(19): siRNA sense strand
gcaggcagaugaugaagua

SEQ ID NO: 1425303 - RNA, 19 nt, Homo sapiens
  misc_RNA (1)...(19): siRNA sense strand
cagcagagauccaagaaga

SEQ ID NO: 1425304 - RNA, 19 nt, Homo sapiens
  misc_RNA (1)...(19): siRNA sense strand
gaagacaugccgcuauuug

SEQ ID NO: 1425305 - RNA, 19 nt, Homo sapiens
  misc_RNA (1)...(19): siRNA sense strand
gcaaggauguguacaacag

SEQ ID NO: 1425306 - RNA, 19 nt, Homo sapiens
  misc_RNA (1)...(19): siRNA sense strand
gagcugguguuggccaaua

SEQ ID NO: 1425307 - RNA, 19 nt, Homo sapiens
  misc_RNA (1)...(19): siRNA sense strand
gaacuucaccuugagcauu

SEQ ID NO: 1425308 - RNA, 19 nt, Homo sapiens
  misc_RNA (1)...(19): siRNA sense strand
cagcacaagugauaagaug

SEQ ID NO: 1425309 - RNA, 19 nt, Homo sapiens
  misc_RNA (1)...(19): siRNA sense strand
uagcagagauugaagacau

SEQ ID NO: 1425310 - RNA, 19 nt, Homo sapiens
  misc_RNA (1)...(19): siRNA sense strand
ccgcagagccacaguguuu

SEQ ID NO: 1425311 - RNA, 19 nt, Homo sapiens
  misc_RNA (1)...(19): siRNA sense strand
caauauugcugaaagugau

SEQ ID NO: 1425312 - RNA, 19 nt, Homo sapiens
  misc_RNA (1)...(19): siRNA sense strand
ugaugucacuggagaagaa

SEQ ID NO: 1425313 - RNA, 19 nt, Homo sapiens
  misc_RNA (1)...(19): siRNA sense strand
gagcauagugggcuguauu

SEQ ID NO: 1425314 - RNA, 19 nt, Homo sapiens
  misc_RNA (1)...(19): siRNA sense strand
acacuucguugccacauug

SEQ ID NO: 1425315 - RNA, 19 nt, Homo sapiens
  misc_RNA (1)...(19): siRNA sense strand
gcuguggccuacaucauug

SEQ ID NO: 1425316 - RNA, 19 nt, Homo sapiens
  misc_RNA (1)...(19): siRNA sense strand
ccaagcggcugcagaagca

SEQ ID NO: 1425317 - RNA, 19 nt, Homo sapiens
  misc_RNA (1)...(19): siRNA sense strand
cagagugggugacagacaa

SEQ ID NO: 1425318 - RNA, 19 nt, Homo sapiens
  misc_RNA (1)...(19): siRNA sense strand
gagggugacuucucuacca

SEQ ID NO: 1425319 - RNA, 19 nt, Homo sapiens
  misc_RNA (1)...(19): siRNA sense strand
agccagaacuucaccuuga

SEQ ID NO: 1425320 - RNA, 19 nt, Homo sapiens
  misc_RNA (1)...(19): siRNA sense strand
gagaugacgcuggcaacua

SEQ ID NO: 1425321 - RNA, 19 nt, Homo sapiens
  misc_RNA (1)...(19): siRNA sense strand
ggacuuggcugcgcguaac

SEQ ID NO: 1425322 - RNA, 19 nt, Homo sapiens
  misc_RNA (1)...(19): siRNA sense strand
cgccacagcacaagugaua

SEQ ID NO: 1425323 - RNA, 19 nt, Homo sapiens
  misc_RNA (1)...(19): siRNA sense strand
gaggaggccauguuccauu

SEQ ID NO: 1425324 - RNA, 19 nt, Homo sapiens
  misc_RNA (1)...(19): siRNA sense strand
gguaugaggaggccauguu

SEQ ID NO: 1425325 - RNA, 19 nt, Homo sapiens
  misc_RNA (1)...(19): siRNA sense strand
caaacucuaucggcugaug

SEQ ID NO: 1425326 - RNA, 19 nt, Homo sapiens
  misc_RNA (1)...(19): siRNA sense strand
augaaguacuggcagauuu

SEQ ID NO: 1425327 - RNA, 19 nt, Homo sapiens
  misc_RNA (1)...(19): siRNA sense strand
uugaagacaugccgcuauu

SEQ ID NO: 1425328 - RNA, 19 nt, Homo sapiens
  misc_RNA (1)...(19): siRNA sense strand
ccaauauugcugaaaguga

SEQ ID NO: 1425329 - RNA, 19 nt, Homo sapiens
  misc_RNA (1)...(19): siRNA sense strand
gcugaugugggaaguguuu

SEQ ID NO: 1425330 - RNA, 19 nt, Homo sapiens
  misc_RNA (1)...(19): siRNA sense strand
gcacaagugauaagaugca

SEQ ID NO: 1425331 - RNA, 19 nt, Homo sapiens
  misc_RNA (1)...(19): siRNA sense strand
gcagagauccaagaagaag

SEQ ID NO: 1425332 - RNA, 19 nt, Homo sapiens
  misc_RNA (1)...(19): siRNA sense strand
gcgaggagccagagaugga

SEQ ID NO: 1425333 - RNA, 19 nt, Homo sapiens
  misc_RNA (1)...(19): siRNA sense strand
gccaacgccuccuucaaca

SEQ ID NO: 1425334 - RNA, 19 nt, Homo sapiens
  misc_RNA (1)...(19): siRNA sense strand
cauguuccauugccaguuc

SEQ ID NO: 1425335 - RNA, 19 nt, Homo sapiens
  misc_RNA (1)...(19): siRNA sense strand
acacuugcauugccuccaa

SEQ ID NO: 1425336 - RNA, 19 nt, Homo sapiens
  misc_RNA (1)...(19): siRNA sense strand
gaugaaguacuggcagauu

SEQ ID NO: 1425337 - RNA, 19 nt, Homo sapiens
  misc_RNA (1)...(19): siRNA sense strand
gcaagaagcgcugcaaagc

SEQ ID NO: 1425338 - RNA, 19 nt, Homo sapiens
  misc_RNA (1)...(19): siRNA sense strand
caacgccuccuucaacauc

SEQ ID NO: 1425339 - RNA, 19 nt, Homo sapiens
  misc_RNA (1)...(19): siRNA sense strand
aagaugauccagaccauug

SEQ ID NO: 1425340 - RNA, 19 nt, Homo sapiens
  misc_RNA (1)...(19): siRNA sense strand
guuuacacauggagagaug

SEQ ID NO: 1425341 - RNA, 19 nt, Homo sapiens
  misc_RNA (1)...(19): siRNA sense strand
ggcagcagccugagcuuug

SEQ ID NO: 1425342 - RNA, 19 nt, Homo sapiens
  misc_RNA (1)...(19): siRNA sense strand
ggcagaugaugaaguacug

SEQ ID NO: 1425343 - RNA, 19 nt, Homo sapiens
  misc_RNA (1)...(19): siRNA sense strand
agaugacgcuggcaacuac

SEQ ID NO: 1425344 - RNA, 19 nt, Homo sapiens
  misc_RNA (1)...(19): siRNA sense strand
ugaaguacuggcagauuug

SEQ ID NO: 1425345 - RNA, 19 nt, Homo sapiens
  misc_RNA (1)...(19): siRNA sense strand
gugcugaugugggaagugu

SEQ ID NO: 1425346 - RNA, 19 nt, Homo sapiens
  misc_RNA (1)...(19): siRNA sense strand
cagcaaggauguguacaac

SEQ ID NO: 1425347 - RNA, 19 nt, Homo sapiens
  misc_RNA (1)...(19): siRNA sense strand
ccucaacggugggccuuug

SEQ ID NO: 1425348 - RNA, 19 nt, Homo sapiens
  misc_RNA (1)...(19): siRNA sense strand
ucaccuagcagagauugaa

SEQ ID NO: 1425349 - RNA, 19 nt, Homo sapiens
  misc_RNA (1)...(19): siRNA sense strand
cagcugguccugagcauag

SEQ ID NO: 1425350 - RNA, 19 nt, Homo sapiens
  misc_RNA (1)...(19): siRNA sense strand
ggccuucggugugcugaug

SEQ ID NO: 1425351 - RNA, 19 nt, Homo sapiens
  misc_RNA (1)...(19): siRNA sense strand
ggccaauauugcugaaagu

SEQ ID NO: 1425352 - RNA, 19 nt, Homo sapiens
  misc_RNA (1)...(19): siRNA sense strand
aggaggccauguuccauug

SEQ ID NO: 1425353 - RNA, 19 nt, Homo sapiens
  misc_RNA (1)...(19): siRNA sense strand
cauugcugaugaaagcuuu

SEQ ID NO: 1425354 - RNA, 19 nt, Homo sapiens
  misc_RNA (1)...(19): siRNA sense strand
aaccagagcguacgacugu

SEQ ID NO: 1425355 - RNA, 19 nt, Homo sapiens
  misc_RNA (1)...(19): siRNA sense strand
aagaagaaguggccuugac

SEQ ID NO: 1425356 - RNA, 19 nt, Homo sapiens
  misc_RNA (1)...(19): siRNA sense strand
gggcagcagccugagcuuu

SEQ ID NO: 1425357 - RNA, 19 nt, Homo sapiens
  misc_RNA (1)...(19): siRNA sense strand
ccacagcacaagugauaag

SEQ ID NO: 1425358 - RNA, 19 nt, Homo sapiens
  misc_RNA (1)...(19): siRNA sense strand
acaagaugauccagaccau

SEQ ID NO: 1425359 - RNA, 19 nt, Homo sapiens
  misc_RNA (1)...(19): siRNA sense strand
aacuucaccuugagcauug

SEQ ID NO: 1425360 - RNA, 19 nt, Homo sapiens
  misc_RNA (1)...(19): siRNA sense strand
caagaugauccagaccauu

SEQ ID NO: 1425361 - RNA, 19 nt, Homo sapiens
  misc_RNA (1)...(19): siRNA sense strand
ucagcaaggauguguacaa

SEQ ID NO: 1425362 - RNA, 19 nt, Homo sapiens
  misc_RNA (1)...(19): siRNA sense strand
gcagaagguggcccuaugc

SEQ ID NO: 1425363 - RNA, 19 nt, Homo sapiens
  misc_RNA (1)...(19): siRNA sense strand
gcagccagaacuucaccuu

SEQ ID NO: 1425364 - RNA, 19 nt, Homo sapiens
  misc_RNA (1)...(19): siRNA sense strand
gcagcagccugagcuuugc

SEQ ID NO: 1425365 - RNA, 19 nt, Homo sapiens
  misc_RNA (1)...(19): siRNA sense strand
ggucagugcccagagacaa

SEQ ID NO: 1425366 - RNA, 19 nt, Homo sapiens
  misc_RNA (1)...(19): siRNA sense strand
ccagauucgugcccauguc

SEQ ID NO: 1425367 - RNA, 19 nt, Homo sapiens
  misc_RNA (1)...(19): siRNA sense strand
uggccaauauugcugaaag

SEQ ID NO: 1425368 - RNA, 19 nt, Homo sapiens
  misc_RNA (1)...(19): siRNA sense strand
gggaucuaccgcugcauug

SEQ ID NO: 1425369 - RNA, 19 nt, Homo sapiens
  misc_RNA (1)...(19): siRNA sense strand
gccagaacuucaccuugag

SEQ ID NO: 1425370 - RNA, 19 nt, Homo sapiens
  misc_RNA (1)...(19): siRNA sense strand
cagagcaaccacacaguca

SEQ ID NO: 1425371 - RNA, 19 nt, Homo sapiens
  misc_RNA (1)...(19): siRNA sense strand
augagacucccaucacuaa

SEQ ID NO: 1425372 - RNA, 19 nt, Homo sapiens
  misc_RNA (1)...(19): siRNA sense strand
guacccagacagccauugu

SEQ ID NO: 1425373 - RNA, 19 nt, Homo sapiens
  misc_RNA (1)...(19): siRNA sense strand
gcaguggcucuuugaggau

SEQ ID NO: 1425374 - RNA, 19 nt, Homo sapiens
  misc_RNA (1)...(19): siRNA sense strand
acgcugggacccugcauuu

SEQ ID NO: 1425375 - RNA, 19 nt, Homo sapiens
  misc_RNA (1)...(19): siRNA sense strand
aagacaugccgcuauuuga

SEQ ID NO: 1425376 - RNA, 19 nt, Homo sapiens
  misc_RNA (1)...(19): siRNA sense strand
acacuucaccuagcagaga

SEQ ID NO: 1425377 - RNA, 19 nt, Homo sapiens
  misc_RNA (1)...(19): siRNA sense strand
gcauugcugaugaaagcuu

SEQ ID NO: 1425378 - RNA, 19 nt, Homo sapiens
  misc_RNA (1)...(19): siRNA sense strand
ccuggagggugacuucucu

SEQ ID NO: 1425379 - RNA, 19 nt, Homo sapiens
  misc_RNA (1)...(19): siRNA sense strand
agcagaagguggcccuaug

SEQ ID NO: 1425380 - RNA, 19 nt, Homo sapiens
  misc_RNA (1)...(19): siRNA sense strand
aaacgccacagcacaagug

SEQ ID NO: 1425381 - RNA, 19 nt, Homo sapiens
  misc_RNA (1)...(19): siRNA sense strand
ugaagacaugccgcuauuu

SEQ ID NO: 1425382 - RNA, 19 nt, Homo sapiens
  misc_RNA (1)...(19): siRNA sense strand
guaugaggaggccauguuc

SEQ ID NO: 1425383 - RNA, 19 nt, Homo sapiens
  misc_RNA (1)...(19): siRNA sense strand
cagccauugucuucaucaa

SEQ ID NO: 1425384 - RNA, 19 nt, Homo sapiens
  misc_RNA (1)...(19): siRNA sense strand
cacacuucguugccacauu

SEQ ID NO: 1425385 - RNA, 19 nt, Homo sapiens
  misc_RNA (1)...(19): siRNA sense strand
caaccgcuuugugcauaag

SEQ ID NO: 1425386 - RNA, 19 nt, Homo sapiens
  misc_RNA (1)...(19): siRNA sense strand
gaugaugucacuggagaag

SEQ ID NO: 1425387 - RNA, 19 nt, Homo sapiens
  misc_RNA (1)...(19): siRNA sense strand
aaagugaugcuggugucua

SEQ ID NO: 1425388 - RNA, 19 nt, Homo sapiens
  misc_RNA (1)...(19): siRNA sense strand
gcaggcagaugaugaagua

SEQ ID NO: 1425389 - RNA, 19 nt, Homo sapiens
  misc_RNA (1)...(19): siRNA sense strand
cagcagagauccaagaaga

SEQ ID NO: 1425390 - RNA, 19 nt, Homo sapiens
  misc_RNA (1)...(19): siRNA sense strand
gaagacaugccgcuauuug

SEQ ID NO: 1425391 - RNA, 19 nt, Homo sapiens
  misc_RNA (1)...(19): siRNA sense strand
gcaaggauguguacaacag

SEQ ID NO: 1425392 - RNA, 19 nt, Homo sapiens
  misc_RNA (1)...(19): siRNA sense strand
gagcugguguuggccaaua

SEQ ID NO: 1425393 - RNA, 19 nt, Homo sapiens
  misc_RNA (1)...(19): siRNA sense strand
gaacuucaccuugagcauu

SEQ ID NO: 1425394 - RNA, 19 nt, Homo sapiens
  misc_RNA (1)...(19): siRNA sense strand
cagcacaagugauaagaug

SEQ ID NO: 1425395 - RNA, 19 nt, Homo sapiens
  misc_RNA (1)...(19): siRNA sense strand
uagcagagauugaagacau

SEQ ID NO: 1425396 - RNA, 19 nt, Homo sapiens
  misc_RNA (1)...(19): siRNA sense strand
ccgcagagccacaguguuu

SEQ ID NO: 1425397 - RNA, 19 nt, Homo sapiens
  misc_RNA (1)...(19): siRNA sense strand
caauauugcugaaagugau

SEQ ID NO: 1425398 - RNA, 19 nt, Homo sapiens
  misc_RNA (1)...(19): siRNA sense strand
ugaugucacuggagaagaa

SEQ ID NO: 1425399 - RNA, 19 nt, Homo sapiens
  misc_RNA (1)...(19): siRNA sense strand
gagcauagugggcuguauu

SEQ ID NO: 1425400 - RNA, 19 nt, Homo sapiens
  misc_RNA (1)...(19): siRNA sense strand
acacuucguugccacauug

SEQ ID NO: 1425401 - RNA, 19 nt, Homo sapiens
  misc_RNA (1)...(19): siRNA sense strand
gcuguggccuacaucauug

SEQ ID NO: 1425402 - RNA, 19 nt, Homo sapiens
  misc_RNA (1)...(19): siRNA sense strand
ccaagcggcugcagaagca

SEQ ID NO: 1425403 - RNA, 19 nt, Homo sapiens
  misc_RNA (1)...(19): siRNA sense strand
cagagugggugacagacaa

SEQ ID NO: 1425404 - RNA, 19 nt, Homo sapiens
  misc_RNA (1)...(19): siRNA sense strand
gagggugacuucucuacca

SEQ ID NO: 1425405 - RNA, 19 nt, Homo sapiens
  misc_RNA (1)...(19): siRNA sense strand
agccagaacuucaccuuga

SEQ ID NO: 1425406 - RNA, 19 nt, Homo sapiens
  misc_RNA (1)...(19): siRNA sense strand
gagaugacgcuggcaacua

SEQ ID NO: 1425407 - RNA, 19 nt, Homo sapiens
  misc_RNA (1)...(19): siRNA sense strand
ggacuuggcugcgcguaac

SEQ ID NO: 1425408 - RNA, 19 nt, Homo sapiens
  misc_RNA (1)...(19): siRNA sense strand
cgccacagcacaagugaua

SEQ ID NO: 1425409 - RNA, 19 nt, Homo sapiens
  misc_RNA (1)...(19): siRNA sense strand
gaggaggccauguuccauu

SEQ ID NO: 1425410 - RNA, 19 nt, Homo sapiens
  misc_RNA (1)...(19): siRNA sense strand
gguaugaggaggccauguu

SEQ ID NO: 1425411 - RNA, 19 nt, Homo sapiens
  misc_RNA (1)...(19): siRNA sense strand
caaacucuaucggcugaug

SEQ ID NO: 1425412 - RNA, 19 nt, Homo sapiens
  misc_RNA (1)...(19): siRNA sense strand
augaaguacuggcagauuu

SEQ ID NO: 1425413 - RNA, 19 nt, Homo sapiens
  misc_RNA (1)...(19): siRNA sense strand
uugaagacaugccgcuauu

SEQ ID NO: 1425414 - RNA, 19 nt, Homo sapiens
  misc_RNA (1)...(19): siRNA sense strand
ccaauauugcugaaaguga

SEQ ID NO: 1425415 - RNA, 19 nt, Homo sapiens
  misc_RNA (1)...(19): siRNA sense strand
gcugaugugggaaguguuu

SEQ ID NO: 1425416 - RNA, 19 nt, Homo sapiens
  misc_RNA (1)...(19): siRNA sense strand
gcacaagugauaagaugca

SEQ ID NO: 1425417 - RNA, 19 nt, Homo sapiens
  misc_RNA (1)...(19): siRNA sense strand
gcagagauccaagaagaag

SEQ ID NO: 1425418 - RNA, 19 nt, Homo sapiens
  misc_RNA (1)...(19): siRNA sense strand
gcgaggagccagagaugga

SEQ ID NO: 1425419 - RNA, 19 nt, Homo sapiens
  misc_RNA (1)...(19): siRNA sense strand
gccaacgccuccuucaaca

SEQ ID NO: 1425420 - RNA, 19 nt, Homo sapiens
  misc_RNA (1)...(19): siRNA sense strand
cauguuccauugccaguuc

SEQ ID NO: 1425421 - RNA, 19 nt, Homo sapiens
  misc_RNA (1)...(19): siRNA sense strand
acacuugcauugccuccaa

SEQ ID NO: 1425422 - RNA, 19 nt, Homo sapiens
  misc_RNA (1)...(19): siRNA sense strand
gaugaaguacuggcagauu

SEQ ID NO: 1425423 - RNA, 19 nt, Homo sapiens
  misc_RNA (1)...(19): siRNA sense strand
gcaagaagcgcugcaaagc

SEQ ID NO: 1425424 - RNA, 19 nt, Homo sapiens
  misc_RNA (1)...(19): siRNA sense strand
caacgccuccuucaacauc

SEQ ID NO: 1425425 - RNA, 19 nt, Homo sapiens
  misc_RNA (1)...(19): siRNA sense strand
aagaugauccagaccauug

SEQ ID NO: 1425426 - RNA, 19 nt, Homo sapiens
  misc_RNA (1)...(19): siRNA sense strand
guuuacacauggagagaug

SEQ ID NO: 1425427 - RNA, 19 nt, Homo sapiens
  misc_RNA (1)...(19): siRNA sense strand
ggcagcagccugagcuuug

SEQ ID NO: 1425428 - RNA, 19 nt, Homo sapiens
  misc_RNA (1)...(19): siRNA sense strand
ggcagaugaugaaguacug

SEQ ID NO: 1425429 - RNA, 19 nt, Homo sapiens
  misc_RNA (1)...(19): siRNA sense strand
agaugacgcuggcaacuac

SEQ ID NO: 1425430 - RNA, 19 nt, Homo sapiens
  misc_RNA (1)...(19): siRNA sense strand
ugaaguacuggcagauuug

SEQ ID NO: 1425431 - RNA, 19 nt, Homo sapiens
  misc_RNA (1)...(19): siRNA sense strand
gugcugaugugggaagugu

SEQ ID NO: 1425432 - RNA, 19 nt, Homo sapiens
  misc_RNA (1)...(19): siRNA sense strand
cagcaaggauguguacaac

SEQ ID NO: 1425433 - RNA, 19 nt, Homo sapiens
  misc_RNA (1)...(19): siRNA sense strand
ccucaacggugggccuuug

SEQ ID NO: 1425434 - RNA, 19 nt, Homo sapiens
  misc_RNA (1)...(19): siRNA sense strand
ucaccuagcagagauugaa

SEQ ID NO: 1425435 - RNA, 19 nt, Homo sapiens
  misc_RNA (1)...(19): siRNA sense strand
cagcugguccugagcauag

SEQ ID NO: 1425436 - RNA, 19 nt, Homo sapiens
  misc_RNA (1)...(19): siRNA sense strand
ggccuucggugugcugaug

SEQ ID NO: 1425437 - RNA, 19 nt, Homo sapiens
  misc_RNA (1)...(19): siRNA sense strand
ggccaauauugcugaaagu

SEQ ID NO: 1425438 - RNA, 19 nt, Homo sapiens
  misc_RNA (1)...(19): siRNA sense strand
aggaggccauguuccauug

SEQ ID NO: 1425439 - RNA, 19 nt, Homo sapiens
  misc_RNA (1)...(19): siRNA sense strand
cauugcugaugaaagcuuu

SEQ ID NO: 1425440 - RNA, 19 nt, Homo sapiens
  misc_RNA (1)...(19): siRNA sense strand
aaccagagcguacgacugu

SEQ ID NO: 1425441 - RNA, 19 nt, Homo sapiens
  misc_RNA (1)...(19): siRNA sense strand
aagaagaaguggccuugac

SEQ ID NO: 1425442 - RNA, 19 nt, Homo sapiens
  misc_RNA (1)...(19): siRNA sense strand
gggcagcagccugagcuuu

SEQ ID NO: 1425443 - RNA, 19 nt, Homo sapiens
  misc_RNA (1)...(19): siRNA sense strand
ccacagcacaagugauaag

SEQ ID NO: 1425444 - RNA, 19 nt, Homo sapiens
  misc_RNA (1)...(19): siRNA sense strand
acaagaugauccagaccau

SEQ ID NO: 1425445 - RNA, 19 nt, Homo sapiens
  misc_RNA (1)...(19): siRNA sense strand
aacuucaccuugagcauug

SEQ ID NO: 1425446 - RNA, 19 nt, Homo sapiens
  misc_RNA (1)...(19): siRNA sense strand
caagaugauccagaccauu

SEQ ID NO: 1425447 - RNA, 19 nt, Homo sapiens
  misc_RNA (1)...(19): siRNA sense strand
ucagcaaggauguguacaa

SEQ ID NO: 1425448 - RNA, 19 nt, Homo sapiens
  misc_RNA (1)...(19): siRNA sense strand
gcagaagguggcccuaugc

SEQ ID NO: 1425449 - RNA, 19 nt, Homo sapiens
  misc_RNA (1)...(19): siRNA sense strand
gcagccagaacuucaccuu

SEQ ID NO: 1425450 - RNA, 19 nt, Homo sapiens
  misc_RNA (1)...(19): siRNA sense strand
gcagcagccugagcuuugc

SEQ ID NO: 1425451 - RNA, 19 nt, Homo sapiens
  misc_RNA (1)...(19): siRNA sense strand
ggucagugcccagagacaa

SEQ ID NO: 1425452 - RNA, 19 nt, Homo sapiens
  misc_RNA (1)...(19): siRNA sense strand
ccagauucgugcccauguc

SEQ ID NO: 1425453 - RNA, 19 nt, Homo sapiens
  misc_RNA (1)...(19): siRNA sense strand
uggccaauauugcugaaag

SEQ ID NO: 1425454 - RNA, 19 nt, Homo sapiens
  misc_RNA (1)...(19): siRNA sense strand
gggaucuaccgcugcauug

SEQ ID NO: 1425455 - RNA, 19 nt, Homo sapiens
  misc_RNA (1)...(19): siRNA sense strand
gccagaacuucaccuugag

SEQ ID NO: 1425456 - RNA, 19 nt, Homo sapiens
  misc_RNA (1)...(19): siRNA sense strand
cagagcaaccacacaguca

SEQ ID NO: 1425457 - RNA, 19 nt, Homo sapiens
  misc_RNA (1)...(19): siRNA sense strand
augagacucccaucacuaa

SEQ ID NO: 1425458 - RNA, 19 nt, Homo sapiens
  misc_RNA (1)...(19): siRNA sense strand
guacccagacagccauugu

SEQ ID NO: 1425459 - RNA, 19 nt, Homo sapiens
  misc_RNA (1)...(19): siRNA sense strand
gcaguggcucuuugaggau

SEQ ID NO: 1425460 - RNA, 19 nt, Homo sapiens
  misc_RNA (1)...(19): siRNA sense strand
acgcugggacccugcauuu

SEQ ID NO: 1425461 - RNA, 19 nt, Homo sapiens
  misc_RNA (1)...(19): siRNA sense strand
aagacaugccgcuauuuga

SEQ ID NO: 1425462 - RNA, 19 nt, Homo sapiens
  misc_RNA (1)...(19): siRNA sense strand
acacuucaccuagcagaga

SEQ ID NO: 1425463 - RNA, 19 nt, Homo sapiens
  misc_RNA (1)...(19): siRNA sense strand
gcauugcugaugaaagcuu

SEQ ID NO: 1425464 - RNA, 19 nt, Homo sapiens
  misc_RNA (1)...(19): siRNA sense strand
ccuggagggugacuucucu

SEQ ID NO: 1425465 - RNA, 19 nt, Homo sapiens
  misc_RNA (1)...(19): siRNA sense strand
agcagaagguggcccuaug

SEQ ID NO: 1425466 - RNA, 19 nt, Homo sapiens
  misc_RNA (1)...(19): siRNA sense strand
aaacgccacagcacaagug

SEQ ID NO: 1425467 - RNA, 19 nt, Homo sapiens
  misc_RNA (1)...(19): siRNA sense strand
ugaagacaugccgcuauuu

SEQ ID NO: 1425468 - RNA, 19 nt, Homo sapiens
  misc_RNA (1)...(19): siRNA sense strand
guaugaggaggccauguuc

SEQ ID NO: 1425469 - RNA, 19 nt, Homo sapiens
  misc_RNA (1)...(19): siRNA sense strand
cagccauugucuucaucaa

SEQ ID NO: 1425470 - RNA, 19 nt, Homo sapiens
  misc_RNA (1)...(19): siRNA sense strand
cacacuucguugccacauu

SEQ ID NO: 1425471 - RNA, 19 nt, Homo sapiens
  misc_RNA (1)...(19): siRNA sense strand
caaccgcuuugugcauaag

SEQ ID NO: 1425472 - RNA, 19 nt, Homo sapiens
  misc_RNA (1)...(19): siRNA sense strand
gaugaugucacuggagaag

SEQ ID NO: 1425473 - RNA, 19 nt, Homo sapiens
  misc_RNA (1)...(19): siRNA sense strand
aaagugaugcuggugucua

SEQ ID NO: 1425474 - RNA, 19 nt, Homo sapiens
  misc_RNA (1)...(19): siRNA sense strand
gcaggcagaugaugaagua

SEQ ID NO: 1425475 - RNA, 19 nt, Homo sapiens
  misc_RNA (1)...(19): siRNA sense strand
cagcagagauccaagaaga

SEQ ID NO: 1425476 - RNA, 19 nt, Homo sapiens
  misc_RNA (1)...(19): siRNA sense strand
gaagacaugccgcuauuug

SEQ ID NO: 1425477 - RNA, 19 nt, Homo sapiens
  misc_RNA (1)...(19): siRNA sense strand
gcaaggauguguacaacag

SEQ ID NO: 1425478 - RNA, 19 nt, Homo sapiens
  misc_RNA (1)...(19): siRNA sense strand
gagcugguguuggccaaua

SEQ ID NO: 1425479 - RNA, 19 nt, Homo sapiens
  misc_RNA (1)...(19): siRNA sense strand
gaacuucaccuugagcauu

SEQ ID NO: 1425480 - RNA, 19 nt, Homo sapiens
  misc_RNA (1)...(19): siRNA sense strand
cagcacaagugauaagaug

SEQ ID NO: 1425481 - RNA, 19 nt, Homo sapiens
  misc_RNA (1)...(19): siRNA sense strand
uagcagagauugaagacau

SEQ ID NO: 1425482 - RNA, 19 nt, Homo sapiens
  misc_RNA (1)...(19): siRNA sense strand
ccgcagagccacaguguuu

SEQ ID NO: 1425483 - RNA, 19 nt, Homo sapiens
  misc_RNA (1)...(19): siRNA sense strand
caauauugcugaaagugau

SEQ ID NO: 1425484 - RNA, 19 nt, Homo sapiens
  misc_RNA (1)...(19): siRNA sense strand
ugaugucacuggagaagaa

SEQ ID NO: 1425485 - RNA, 19 nt, Homo sapiens
  misc_RNA (1)...(19): siRNA sense strand
gagcauagugggcuguauu

SEQ ID NO: 1425486 - RNA, 19 nt, Homo sapiens
  misc_RNA (1)...(19): siRNA sense strand
acacuucguugccacauug

SEQ ID NO: 1425487 - RNA, 19 nt, Homo sapiens
  misc_RNA (1)...(19): siRNA sense strand
gcuguggccuacaucauug

SEQ ID NO: 1425488 - RNA, 19 nt, Homo sapiens
  misc_RNA (1)...(19): siRNA sense strand
ccaagcggcugcagaagca

SEQ ID NO: 1425489 - RNA, 19 nt, Homo sapiens
  misc_RNA (1)...(19): siRNA sense strand
cagagugggugacagacaa

SEQ ID NO: 1425490 - RNA, 19 nt, Homo sapiens
  misc_RNA (1)...(19): siRNA sense strand
gagggugacuucucuacca

SEQ ID NO: 1425491 - RNA, 19 nt, Homo sapiens
  misc_RNA (1)...(19): siRNA sense strand
agccagaacuucaccuuga

SEQ ID NO: 1425492 - RNA, 19 nt, Homo sapiens
  misc_RNA (1)...(19): siRNA sense strand
gagaugacgcuggcaacua

SEQ ID NO: 1425493 - RNA, 19 nt, Homo sapiens
  misc_RNA (1)...(19): siRNA sense strand
ggacuuggcugcgcguaac

SEQ ID NO: 1425494 - RNA, 19 nt, Homo sapiens
  misc_RNA (1)...(19): siRNA sense strand
cgccacagcacaagugaua

SEQ ID NO: 1425495 - RNA, 19 nt, Homo sapiens
  misc_RNA (1)...(19): siRNA sense strand
gaggaggccauguuccauu

SEQ ID NO: 1425496 - RNA, 19 nt, Homo sapiens
  misc_RNA (1)...(19): siRNA sense strand
gguaugaggaggccauguu

SEQ ID NO: 1425497 - RNA, 19 nt, Homo sapiens
  misc_RNA (1)...(19): siRNA sense strand
caaacucuaucggcugaug

SEQ ID NO: 1425498 - RNA, 19 nt, Homo sapiens
  misc_RNA (1)...(19): siRNA sense strand
augaaguacuggcagauuu

SEQ ID NO: 1425499 - RNA, 19 nt, Homo sapiens
  misc_RNA (1)...(19): siRNA sense strand
uugaagacaugccgcuauu

SEQ ID NO: 1425500 - RNA, 19 nt, Homo sapiens
  misc_RNA (1)...(19): siRNA sense strand
ccaauauugcugaaaguga

SEQ ID NO: 1425501 - RNA, 19 nt, Homo sapiens
  misc_RNA (1)...(19): siRNA sense strand
gcugaugugggaaguguuu

SEQ ID NO: 1425502 - RNA, 19 nt, Homo sapiens
  misc_RNA (1)...(19): siRNA sense strand
gcacaagugauaagaugca

SEQ ID NO: 1425503 - RNA, 19 nt, Homo sapiens
  misc_RNA (1)...(19): siRNA sense strand
gcagagauccaagaagaag

SEQ ID NO: 1425504 - RNA, 19 nt, Homo sapiens
  misc_RNA (1)...(19): siRNA sense strand
gcgaggagccagagaugga

SEQ ID NO: 1425505 - RNA, 19 nt, Homo sapiens
  misc_RNA (1)...(19): siRNA sense strand
gccaacgccuccuucaaca

SEQ ID NO: 1425506 - RNA, 19 nt, Homo sapiens
  misc_RNA (1)...(19): siRNA sense strand
cauguuccauugccaguuc

SEQ ID NO: 1425507 - RNA, 19 nt, Homo sapiens
  misc_RNA (1)...(19): siRNA sense strand
acacuugcauugccuccaa

SEQ ID NO: 1425508 - RNA, 19 nt, Homo sapiens
  misc_RNA (1)...(19): siRNA sense strand
gaugaaguacuggcagauu

SEQ ID NO: 1425509 - RNA, 19 nt, Homo sapiens
  misc_RNA (1)...(19): siRNA sense strand
gcaagaagcgcugcaaagc

SEQ ID NO: 1425510 - RNA, 19 nt, Homo sapiens
  misc_RNA (1)...(19): siRNA sense strand
caacgccuccuucaacauc

SEQ ID NO: 1425511 - RNA, 19 nt, Homo sapiens
  misc_RNA (1)...(19): siRNA sense strand
aagaugauccagaccauug

SEQ ID NO: 1425512 - RNA, 19 nt, Homo sapiens
  misc_RNA (1)...(19): siRNA sense strand
guuuacacauggagagaug

SEQ ID NO: 1425513 - RNA, 19 nt, Homo sapiens
  misc_RNA (1)...(19): siRNA sense strand
ggcagcagccugagcuuug

SEQ ID NO: 1425514 - RNA, 19 nt, Homo sapiens
  misc_RNA (1)...(19): siRNA sense strand
ggcagaugaugaaguacug

SEQ ID NO: 1425515 - RNA, 19 nt, Homo sapiens
  misc_RNA (1)...(19): siRNA sense strand
agaugacgcuggcaacuac

SEQ ID NO: 1425516 - RNA, 19 nt, Homo sapiens
  misc_RNA (1)...(19): siRNA sense strand
ugaaguacuggcagauuug

SEQ ID NO: 1425517 - RNA, 19 nt, Homo sapiens
  misc_RNA (1)...(19): siRNA sense strand
gugcugaugugggaagugu

SEQ ID NO: 1425518 - RNA, 19 nt, Homo sapiens
  misc_RNA (1)...(19): siRNA sense strand
cagcaaggauguguacaac

SEQ ID NO: 1425519 - RNA, 19 nt, Homo sapiens
  misc_RNA (1)...(19): siRNA sense strand
ccucaacggugggccuuug

SEQ ID NO: 1425520 - RNA, 19 nt, Homo sapiens
  misc_RNA (1)...(19): siRNA sense strand
ucaccuagcagagauugaa

SEQ ID NO: 1425521 - RNA, 19 nt, Homo sapiens
  misc_RNA (1)...(19): siRNA sense strand
cagcugguccugagcauag

SEQ ID NO: 1425522 - RNA, 19 nt, Homo sapiens
  misc_RNA (1)...(19): siRNA sense strand
ggccuucggugugcugaug

SEQ ID NO: 1425523 - RNA, 19 nt, Homo sapiens
  misc_RNA (1)...(19): siRNA sense strand
ggccaauauugcugaaagu

SEQ ID NO: 1425524 - RNA, 19 nt, Homo sapiens
  misc_RNA (1)...(19): siRNA sense strand
aggaggccauguuccauug

SEQ ID NO: 1425525 - RNA, 19 nt, Homo sapiens
  misc_RNA (1)...(19): siRNA sense strand
cauugcugaugaaagcuuu

SEQ ID NO: 1425526 - RNA, 19 nt, Homo sapiens
  misc_RNA (1)...(19): siRNA sense strand
aaccagagcguacgacugu

SEQ ID NO: 1425527 - RNA, 19 nt, Homo sapiens
  misc_RNA (1)...(19): siRNA sense strand
aagaagaaguggccuugac

SEQ ID NO: 1425528 - RNA, 19 nt, Homo sapiens
  misc_RNA (1)...(19): siRNA sense strand
gggcagcagccugagcuuu

SEQ ID NO: 1425529 - RNA, 19 nt, Homo sapiens
  misc_RNA (1)...(19): siRNA sense strand
ccacagcacaagugauaag

SEQ ID NO: 1425530 - RNA, 19 nt, Homo sapiens
  misc_RNA (1)...(19): siRNA sense strand
acaagaugauccagaccau

SEQ ID NO: 1425531 - RNA, 19 nt, Homo sapiens
  misc_RNA (1)...(19): siRNA sense strand
aacuucaccuugagcauug

SEQ ID NO: 1425532 - RNA, 19 nt, Homo sapiens
  misc_RNA (1)...(19): siRNA sense strand
caagaugauccagaccauu

SEQ ID NO: 1425533 - RNA, 19 nt, Homo sapiens
  misc_RNA (1)...(19): siRNA sense strand
ucagcaaggauguguacaa

SEQ ID NO: 1425534 - RNA, 19 nt, Homo sapiens
  misc_RNA (1)...(19): siRNA sense strand
gcagaagguggcccuaugc

SEQ ID NO: 1425535 - RNA, 19 nt, Homo sapiens
  misc_RNA (1)...(19): siRNA sense strand
gcagccagaacuucaccuu

SEQ ID NO: 1425536 - RNA, 19 nt, Homo sapiens
  misc_RNA (1)...(19): siRNA sense strand
gcagcagccugagcuuugc

SEQ ID NO: 1425537 - RNA, 19 nt, Homo sapiens
  misc_RNA (1)...(19): siRNA sense strand
ggucagugcccagagacaa

SEQ ID NO: 1425538 - RNA, 19 nt, Homo sapiens
  misc_RNA (1)...(19): siRNA sense strand
ccagauucgugcccauguc

SEQ ID NO: 1425539 - RNA, 19 nt, Homo sapiens
  misc_RNA (1)...(19): siRNA sense strand
uggccaauauugcugaaag

SEQ ID NO: 1425540 - RNA, 19 nt, Homo sapiens
  misc_RNA (1)...(19): siRNA sense strand
gggaucuaccgcugcauug

SEQ ID NO: 1425541 - RNA, 19 nt, Homo sapiens
  misc_RNA (1)...(19): siRNA sense strand
gccagaacuucaccuugag

SEQ ID NO: 1425542 - RNA, 19 nt, Homo sapiens
  misc_RNA (1)...(19): siRNA sense strand
cagagcaaccacacaguca

SEQ ID NO: 1425543 - RNA, 19 nt, Homo sapiens
  misc_RNA (1)...(19): siRNA sense strand
augagacucccaucacuaa

SEQ ID NO: 1425544 - RNA, 19 nt, Homo sapiens
  misc_RNA (1)...(19): siRNA sense strand
guacccagacagccauugu

SEQ ID NO: 1425545 - RNA, 19 nt, Homo sapiens
  misc_RNA (1)...(19): siRNA sense strand
gcaguggcucuuugaggau

SEQ ID NO: 1425546 - RNA, 19 nt, Homo sapiens
  misc_RNA (1)...(19): siRNA sense strand
acgcugggacccugcauuu

SEQ ID NO: 1425547 - RNA, 19 nt, Homo sapiens
  misc_RNA (1)...(19): siRNA sense strand
aagacaugccgcuauuuga

SEQ ID NO: 1425548 - RNA, 19 nt, Homo sapiens
  misc_RNA (1)...(19): siRNA sense strand
acacuucaccuagcagaga

SEQ ID NO: 1425549 - RNA, 19 nt, Homo sapiens
  misc_RNA (1)...(19): siRNA sense strand
gcauugcugaugaaagcuu

SEQ ID NO: 1425550 - RNA, 19 nt, Homo sapiens
  misc_RNA (1)...(19): siRNA sense strand
ccuggagggugacuucucu

SEQ ID NO: 1425551 - RNA, 19 nt, Homo sapiens
  misc_RNA (1)...(19): siRNA sense strand
agcagaagguggcccuaug

SEQ ID NO: 1425552 - RNA, 19 nt, Homo sapiens
  misc_RNA (1)...(19): siRNA sense strand
aaacgccacagcacaagug

SEQ ID NO: 1425553 - RNA, 19 nt, Homo sapiens
  misc_RNA (1)...(19): siRNA sense strand
ugaagacaugccgcuauuu

SEQ ID NO: 1425554 - RNA, 19 nt, Homo sapiens
  misc_RNA (1)...(19): siRNA sense strand
guaugaggaggccauguuc

SEQ ID NO: 1425555 - RNA, 19 nt, Homo sapiens
  misc_RNA (1)...(19): siRNA sense strand
cagccauugucuucaucaa

SEQ ID NO: 1425556 - RNA, 19 nt, Homo sapiens
  misc_RNA (1)...(19): siRNA sense strand
cacacuucguugccacauu

SEQ ID NO: 1425557 - RNA, 19 nt, Homo sapiens
  misc_RNA (1)...(19): siRNA sense strand
caaccgcuuugugcauaag

SEQ ID NO: 1425558 - RNA, 19 nt, Homo sapiens
  misc_RNA (1)...(19): siRNA sense strand
gaugaugucacuggagaag

SEQ ID NO: 1425559 - RNA, 19 nt, Homo sapiens
  misc_RNA (1)...(19): siRNA sense strand
aaagugaugcuggugucua

SEQ ID NO: 1425560 - RNA, 19 nt, Homo sapiens
  misc_RNA (1)...(19): siRNA sense strand
cagcagagauccaagaaga

SEQ ID NO: 1425561 - RNA, 19 nt, Homo sapiens
  misc_RNA (1)...(19): siRNA sense strand
gaagacaugccgcuauuug

SEQ ID NO: 1425562 - RNA, 19 nt, Homo sapiens
  misc_RNA (1)...(19): siRNA sense strand
gagcugguguuggccaaua

SEQ ID NO: 1425563 - RNA, 19 nt, Homo sapiens
  misc_RNA (1)...(19): siRNA sense strand
gaacuucaccuugagcauu

SEQ ID NO: 1425564 - RNA, 19 nt, Homo sapiens
  misc_RNA (1)...(19): siRNA sense strand
cagcacaagugauaagaug

SEQ ID NO: 1425565 - RNA, 19 nt, Homo sapiens
  misc_RNA (1)...(19): siRNA sense strand
uagcagagauugaagacau

SEQ ID NO: 1425566 - RNA, 19 nt, Homo sapiens
  misc_RNA (1)...(19): siRNA sense strand
ccgcagagccacaguguuu

SEQ ID NO: 1425567 - RNA, 19 nt, Homo sapiens
  misc_RNA (1)...(19): siRNA sense strand
caauauugcugaaagugau

SEQ ID NO: 1425568 - RNA, 19 nt, Homo sapiens
  misc_RNA (1)...(19): siRNA sense strand
ugaugucacuggagaagaa

SEQ ID NO: 1425569 - RNA, 19 nt, Homo sapiens
  misc_RNA (1)...(19): siRNA sense strand
gagcauagugggcuguauu

SEQ ID NO: 1425570 - RNA, 19 nt, Homo sapiens
  misc_RNA (1)...(19): siRNA sense strand
acacuucguugccacauug

SEQ ID NO: 1425571 - RNA, 19 nt, Homo sapiens
  misc_RNA (1)...(19): siRNA sense strand
gcuguggccuacaucauug

SEQ ID NO: 1425572 - RNA, 19 nt, Homo sapiens
  misc_RNA (1)...(19): siRNA sense strand
ccaagcggcugcagaagca

SEQ ID NO: 1425573 - RNA, 19 nt, Homo sapiens
  misc_RNA (1)...(19): siRNA sense strand
cagagugggugacagacaa

SEQ ID NO: 1425574 - RNA, 19 nt, Homo sapiens
  misc_RNA (1)...(19): siRNA sense strand
agccagaacuucaccuuga

SEQ ID NO: 1425575 - RNA, 19 nt, Homo sapiens
  misc_RNA (1)...(19): siRNA sense strand
gagaugacgcuggcaacua

SEQ ID NO: 1425576 - RNA, 19 nt, Homo sapiens
  misc_RNA (1)...(19): siRNA sense strand
cgccacagcacaagugaua

SEQ ID NO: 1425577 - RNA, 19 nt, Homo sapiens
  misc_RNA (1)...(19): siRNA sense strand
gaggaggccauguuccauu

SEQ ID NO: 1425578 - RNA, 19 nt, Homo sapiens
  misc_RNA (1)...(19): siRNA sense strand
gguaugaggaggccauguu

SEQ ID NO: 1425579 - RNA, 19 nt, Homo sapiens
  misc_RNA (1)...(19): siRNA sense strand
uugaagacaugccgcuauu

SEQ ID NO: 1425580 - RNA, 19 nt, Homo sapiens
  misc_RNA (1)...(19): siRNA sense strand
ccaauauugcugaaaguga

SEQ ID NO: 1425581 - RNA, 19 nt, Homo sapiens
  misc_RNA (1)...(19): siRNA sense strand
gcacaagugauaagaugca

SEQ ID NO: 1425582 - RNA, 19 nt, Homo sapiens
  misc_RNA (1)...(19): siRNA sense strand
gcagagauccaagaagaag

SEQ ID NO: 1425583 - RNA, 19 nt, Homo sapiens
  misc_RNA (1)...(19): siRNA sense strand
gcgaggagccagagaugga

SEQ ID NO: 1425584 - RNA, 19 nt, Homo sapiens
  misc_RNA (1)...(19): siRNA sense strand
gccaacgccuccuucaaca

SEQ ID NO: 1425585 - RNA, 19 nt, Homo sapiens
  misc_RNA (1)...(19): siRNA sense strand
cauguuccauugccaguuc

SEQ ID NO: 1425586 - RNA, 19 nt, Homo sapiens
  misc_RNA (1)...(19): siRNA sense strand
acacuugcauugccuccaa

SEQ ID NO: 1425587 - RNA, 19 nt, Homo sapiens
  misc_RNA (1)...(19): siRNA sense strand
gcaagaagcgcugcaaagc

SEQ ID NO: 1425588 - RNA, 19 nt, Homo sapiens
  misc_RNA (1)...(19): siRNA sense strand
caacgccuccuucaacauc

SEQ ID NO: 1425589 - RNA, 19 nt, Homo sapiens
  misc_RNA (1)...(19): siRNA sense strand
ggcagcagccugagcuuug

SEQ ID NO: 1425590 - RNA, 19 nt, Homo sapiens
  misc_RNA (1)...(19): siRNA sense strand
aagaugauccagaccauug

SEQ ID NO: 1425591 - RNA, 19 nt, Homo sapiens
  misc_RNA (1)...(19): siRNA sense strand
agaugacgcuggcaacuac

SEQ ID NO: 1425592 - RNA, 19 nt, Homo sapiens
  misc_RNA (1)...(19): siRNA sense strand
ccucaacggugggccuuug

SEQ ID NO: 1425593 - RNA, 19 nt, Homo sapiens
  misc_RNA (1)...(19): siRNA sense strand
ucaccuagcagagauugaa

SEQ ID NO: 1425594 - RNA, 19 nt, Homo sapiens
  misc_RNA (1)...(19): siRNA sense strand
cagcugguccugagcauag

SEQ ID NO: 1425595 - RNA, 19 nt, Homo sapiens
  misc_RNA (1)...(19): siRNA sense strand
ggccaauauugcugaaagu

SEQ ID NO: 1425596 - RNA, 19 nt, Homo sapiens
  misc_RNA (1)...(19): siRNA sense strand
aggaggccauguuccauug

SEQ ID NO: 1425597 - RNA, 19 nt, Homo sapiens
  misc_RNA (1)...(19): siRNA sense strand
cauugcugaugaaagcuuu

SEQ ID NO: 1425598 - RNA, 19 nt, Homo sapiens
  misc_RNA (1)...(19): siRNA sense strand
aaccagagcguacgacugu

SEQ ID NO: 1425599 - RNA, 19 nt, Homo sapiens
  misc_RNA (1)...(19): siRNA sense strand
aagaagaaguggccuugac

SEQ ID NO: 1425600 - RNA, 19 nt, Homo sapiens
  misc_RNA (1)...(19): siRNA sense strand
aacuucaccuugagcauug

SEQ ID NO: 1425601 - RNA, 19 nt, Homo sapiens
  misc_RNA (1)...(19): siRNA sense strand
ccacagcacaagugauaag

SEQ ID NO: 1425602 - RNA, 19 nt, Homo sapiens
  misc_RNA (1)...(19): siRNA sense strand
acaagaugauccagaccau

SEQ ID NO: 1425603 - RNA, 19 nt, Homo sapiens
  misc_RNA (1)...(19): siRNA sense strand
gggcagcagccugagcuuu

SEQ ID NO: 1425604 - RNA, 19 nt, Homo sapiens
  misc_RNA (1)...(19): siRNA sense strand
caagaugauccagaccauu

SEQ ID NO: 1425605 - RNA, 19 nt, Homo sapiens
  misc_RNA (1)...(19): siRNA sense strand
cagagcaaccacacaguca

SEQ ID NO: 1425606 - RNA, 19 nt, Homo sapiens
  misc_RNA (1)...(19): siRNA sense strand
ccagauucgugcccauguc

SEQ ID NO: 1425607 - RNA, 19 nt, Homo sapiens
  misc_RNA (1)...(19): siRNA sense strand
uggccaauauugcugaaag

SEQ ID NO: 1425608 - RNA, 19 nt, Homo sapiens
  misc_RNA (1)...(19): siRNA sense strand
gggaucuaccgcugcauug

SEQ ID NO: 1425609 - RNA, 19 nt, Homo sapiens
  misc_RNA (1)...(19): siRNA sense strand
gccagaacuucaccuugag

SEQ ID NO: 1425610 - RNA, 19 nt, Homo sapiens
  misc_RNA (1)...(19): siRNA sense strand
gcagcagccugagcuuugc

SEQ ID NO: 1425611 - RNA, 19 nt, Homo sapiens
  misc_RNA (1)...(19): siRNA sense strand
gcagccagaacuucaccuu

SEQ ID NO: 1425612 - RNA, 19 nt, Homo sapiens
  misc_RNA (1)...(19): siRNA sense strand
augagacucccaucacuaa

SEQ ID NO: 1425613 - RNA, 19 nt, Homo sapiens
  misc_RNA (1)...(19): siRNA sense strand
guacccagacagccauugu

SEQ ID NO: 1425614 - RNA, 19 nt, Homo sapiens
  misc_RNA (1)...(19): siRNA sense strand
gcaguggcucuuugaggau

SEQ ID NO: 1425615 - RNA, 19 nt, Homo sapiens
  misc_RNA (1)...(19): siRNA sense strand
acgcugggacccugcauuu

SEQ ID NO: 1425616 - RNA, 19 nt, Homo sapiens
  misc_RNA (1)...(19): siRNA sense strand
aagacaugccgcuauuuga

SEQ ID NO: 1425617 - RNA, 19 nt, Homo sapiens
  misc_RNA (1)...(19): siRNA sense strand
acacuucaccuagcagaga

SEQ ID NO: 1425618 - RNA, 19 nt, Homo sapiens
  misc_RNA (1)...(19): siRNA sense strand
gcauugcugaugaaagcuu

SEQ ID NO: 1425619 - RNA, 19 nt, Homo sapiens
  misc_RNA (1)...(19): siRNA sense strand
aaacgccacagcacaagug

SEQ ID NO: 1425620 - RNA, 19 nt, Homo sapiens
  misc_RNA (1)...(19): siRNA sense strand
ugaagacaugccgcuauuu

SEQ ID NO: 1425621 - RNA, 19 nt, Homo sapiens
  misc_RNA (1)...(19): siRNA sense strand
guaugaggaggccauguuc

SEQ ID NO: 1425622 - RNA, 19 nt, Homo sapiens
  misc_RNA (1)...(19): siRNA sense strand
cacacuucguugccacauu

SEQ ID NO: 1425623 - RNA, 19 nt, Homo sapiens
  misc_RNA (1)...(19): siRNA sense strand
cagccauugucuucaucaa

SEQ ID NO: 1425624 - RNA, 19 nt, Homo sapiens
  misc_RNA (1)...(19): siRNA sense strand
gaugaugucacuggagaag

SEQ ID NO: 1425625 - RNA, 19 nt, Homo sapiens
  misc_RNA (1)...(19): siRNA sense strand
aaagugaugcuggugucua

SEQ ID NO: 1425626 - RNA, 19 nt, Homo sapiens
  misc_RNA (1)...(19): siRNA sense strand
gcaggcagaugaugaagua

SEQ ID NO: 1425627 - RNA, 19 nt, Homo sapiens
  misc_RNA (1)...(19): siRNA sense strand
cagcagagauccaagaaga

SEQ ID NO: 1425628 - RNA, 19 nt, Homo sapiens
  misc_RNA (1)...(19): siRNA sense strand
gaagacaugccgcuauuug

SEQ ID NO: 1425629 - RNA, 19 nt, Homo sapiens
  misc_RNA (1)...(19): siRNA sense strand
gcaaggauguguacaacag

SEQ ID NO: 1425630 - RNA, 19 nt, Homo sapiens
  misc_RNA (1)...(19): siRNA sense strand
gagcugguguuggccaaua

SEQ ID NO: 1425631 - RNA, 19 nt, Homo sapiens
  misc_RNA (1)...(19): siRNA sense strand
gaacuucaccuugagcauu

SEQ ID NO: 1425632 - RNA, 19 nt, Homo sapiens
  misc_RNA (1)...(19): siRNA sense strand
cagcacaagugauaagaug

SEQ ID NO: 1425633 - RNA, 19 nt, Homo sapiens
  misc_RNA (1)...(19): siRNA sense strand
uagcagagauugaagacau

SEQ ID NO: 1425634 - RNA, 19 nt, Homo sapiens
  misc_RNA (1)...(19): siRNA sense strand
ccgcagagccacaguguuu

SEQ ID NO: 1425635 - RNA, 19 nt, Homo sapiens
  misc_RNA (1)...(19): siRNA sense strand
caauauugcugaaagugau

SEQ ID NO: 1425636 - RNA, 19 nt, Homo sapiens
  misc_RNA (1)...(19): siRNA sense strand
ugaugucacuggagaagaa

SEQ ID NO: 1425637 - RNA, 19 nt, Homo sapiens
  misc_RNA (1)...(19): siRNA sense strand
gagcauagugggcuguauu

SEQ ID NO: 1425638 - RNA, 19 nt, Homo sapiens
  misc_RNA (1)...(19): siRNA sense strand
acacuucguugccacauug

SEQ ID NO: 1425639 - RNA, 19 nt, Homo sapiens
  misc_RNA (1)...(19): siRNA sense strand
gcuguggccuacaucauug

SEQ ID NO: 1425640 - RNA, 19 nt, Homo sapiens
  misc_RNA (1)...(19): siRNA sense strand
ccaagcggcugcagaagca

SEQ ID NO: 1425641 - RNA, 19 nt, Homo sapiens
  misc_RNA (1)...(19): siRNA sense strand
cagagugggugacagacaa

SEQ ID NO: 1425642 - RNA, 19 nt, Homo sapiens
  misc_RNA (1)...(19): siRNA sense strand
gagggugacuucucuacca

SEQ ID NO: 1425643 - RNA, 19 nt, Homo sapiens
  misc_RNA (1)...(19): siRNA sense strand
agccagaacuucaccuuga

SEQ ID NO: 1425644 - RNA, 19 nt, Homo sapiens
  misc_RNA (1)...(19): siRNA sense strand
gagaugacgcuggcaacua

SEQ ID NO: 1425645 - RNA, 19 nt, Homo sapiens
  misc_RNA (1)...(19): siRNA sense strand
ggacuuggcugcgcguaac

SEQ ID NO: 1425646 - RNA, 19 nt, Homo sapiens
  misc_RNA (1)...(19): siRNA sense strand
cgccacagcacaagugaua

SEQ ID NO: 1425647 - RNA, 19 nt, Homo sapiens
  misc_RNA (1)...(19): siRNA sense strand
gaggaggccauguuccauu

SEQ ID NO: 1425648 - RNA, 19 nt, Homo sapiens
  misc_RNA (1)...(19): siRNA sense strand
gguaugaggaggccauguu

SEQ ID NO: 1425649 - RNA, 19 nt, Homo sapiens
  misc_RNA (1)...(19): siRNA sense strand
caaacucuaucggcugaug

SEQ ID NO: 1425650 - RNA, 19 nt, Homo sapiens
  misc_RNA (1)...(19): siRNA sense strand
augaaguacuggcagauuu

SEQ ID NO: 1425651 - RNA, 19 nt, Homo sapiens
  misc_RNA (1)...(19): siRNA sense strand
uugaagacaugccgcuauu

SEQ ID NO: 1425652 - RNA, 19 nt, Homo sapiens
  misc_RNA (1)...(19): siRNA sense strand
ccaauauugcugaaaguga

SEQ ID NO: 1425653 - RNA, 19 nt, Homo sapiens
  misc_RNA (1)...(19): siRNA sense strand
gcugaugugggaaguguuu

SEQ ID NO: 1425654 - RNA, 19 nt, Homo sapiens
  misc_RNA (1)...(19): siRNA sense strand
gcacaagugauaagaugca

SEQ ID NO: 1425655 - RNA, 19 nt, Homo sapiens
  misc_RNA (1)...(19): siRNA sense strand
gcagagauccaagaagaag

SEQ ID NO: 1425656 - RNA, 19 nt, Homo sapiens
  misc_RNA (1)...(19): siRNA sense strand
gcgaggagccagagaugga

SEQ ID NO: 1425657 - RNA, 19 nt, Homo sapiens
  misc_RNA (1)...(19): siRNA sense strand
gccaacgccuccuucaaca

SEQ ID NO: 1425658 - RNA, 19 nt, Homo sapiens
  misc_RNA (1)...(19): siRNA sense strand
cauguuccauugccaguuc

SEQ ID NO: 1425659 - RNA, 19 nt, Homo sapiens
  misc_RNA (1)...(19): siRNA sense strand
acacuugcauugccuccaa

SEQ ID NO: 1425660 - RNA, 19 nt, Homo sapiens
  misc_RNA (1)...(19): siRNA sense strand
gaugaaguacuggcagauu

SEQ ID NO: 1425661 - RNA, 19 nt, Homo sapiens
  misc_RNA (1)...(19): siRNA sense strand
gcaagaagcgcugcaaagc

SEQ ID NO: 1425662 - RNA, 19 nt, Homo sapiens
  misc_RNA (1)...(19): siRNA sense strand
caacgccuccuucaacauc

SEQ ID NO: 1425663 - RNA, 19 nt, Homo sapiens
  misc_RNA (1)...(19): siRNA sense strand
aagaugauccagaccauug

SEQ ID NO: 1425664 - RNA, 19 nt, Homo sapiens
  misc_RNA (1)...(19): siRNA sense strand
guuuacacauggagagaug

SEQ ID NO: 1425665 - RNA, 19 nt, Homo sapiens
  misc_RNA (1)...(19): siRNA sense strand
ggcagcagccugagcuuug

SEQ ID NO: 1425666 - RNA, 19 nt, Homo sapiens
  misc_RNA (1)...(19): siRNA sense strand
ggcagaugaugaaguacug

SEQ ID NO: 1425667 - RNA, 19 nt, Homo sapiens
  misc_RNA (1)...(19): siRNA sense strand
agaugacgcuggcaacuac

SEQ ID NO: 1425668 - RNA, 19 nt, Homo sapiens
  misc_RNA (1)...(19): siRNA sense strand
ugaaguacuggcagauuug

SEQ ID NO: 1425669 - RNA, 19 nt, Homo sapiens
  misc_RNA (1)...(19): siRNA sense strand
gugcugaugugggaagugu

SEQ ID NO: 1425670 - RNA, 19 nt, Homo sapiens
  misc_RNA (1)...(19): siRNA sense strand
cagcaaggauguguacaac

SEQ ID NO: 1425671 - RNA, 19 nt, Homo sapiens
  misc_RNA (1)...(19): siRNA sense strand
ccucaacggugggccuuug

SEQ ID NO: 1425672 - RNA, 19 nt, Homo sapiens
  misc_RNA (1)...(19): siRNA sense strand
ucaccuagcagagauugaa

SEQ ID NO: 1425673 - RNA, 19 nt, Homo sapiens
  misc_RNA (1)...(19): siRNA sense strand
cagcugguccugagcauag

SEQ ID NO: 1425674 - RNA, 19 nt, Homo sapiens
  misc_RNA (1)...(19): siRNA sense strand
ggccuucggugugcugaug

SEQ ID NO: 1425675 - RNA, 19 nt, Homo sapiens
  misc_RNA (1)...(19): siRNA sense strand
ggccaauauugcugaaagu

SEQ ID NO: 1425676 - RNA, 19 nt, Homo sapiens
  misc_RNA (1)...(19): siRNA sense strand
aggaggccauguuccauug

SEQ ID NO: 1425677 - RNA, 19 nt, Homo sapiens
  misc_RNA (1)...(19): siRNA sense strand
cauugcugaugaaagcuuu

SEQ ID NO: 1425678 - RNA, 19 nt, Homo sapiens
  misc_RNA (1)...(19): siRNA sense strand
aaccagagcguacgacugu

SEQ ID NO: 1425679 - RNA, 19 nt, Homo sapiens
  misc_RNA (1)...(19): siRNA sense strand
aagaagaaguggccuugac

SEQ ID NO: 1425680 - RNA, 19 nt, Homo sapiens
  misc_RNA (1)...(19): siRNA sense strand
gggcagcagccugagcuuu

SEQ ID NO: 1425681 - RNA, 19 nt, Homo sapiens
  misc_RNA (1)...(19): siRNA sense strand
ccacagcacaagugauaag

SEQ ID NO: 1425682 - RNA, 19 nt, Homo sapiens
  misc_RNA (1)...(19): siRNA sense strand
acaagaugauccagaccau

SEQ ID NO: 1425683 - RNA, 19 nt, Homo sapiens
  misc_RNA (1)...(19): siRNA sense strand
aacuucaccuugagcauug

SEQ ID NO: 1425684 - RNA, 19 nt, Homo sapiens
  misc_RNA (1)...(19): siRNA sense strand
caagaugauccagaccauu

SEQ ID NO: 1425685 - RNA, 19 nt, Homo sapiens
  misc_RNA (1)...(19): siRNA sense strand
ucagcaaggauguguacaa

SEQ ID NO: 1425686 - RNA, 19 nt, Homo sapiens
  misc_RNA (1)...(19): siRNA sense strand
gcagaagguggcccuaugc

SEQ ID NO: 1425687 - RNA, 19 nt, Homo sapiens
  misc_RNA (1)...(19): siRNA sense strand
gcagccagaacuucaccuu

SEQ ID NO: 1425688 - RNA, 19 nt, Homo sapiens
  misc_RNA (1)...(19): siRNA sense strand
gcagcagccugagcuuugc

SEQ ID NO: 1425689 - RNA, 19 nt, Homo sapiens
  misc_RNA (1)...(19): siRNA sense strand
ggucagugcccagagacaa

SEQ ID NO: 1425690 - RNA, 19 nt, Homo sapiens
  misc_RNA (1)...(19): siRNA sense strand
ccagauucgugcccauguc

SEQ ID NO: 1425691 - RNA, 19 nt, Homo sapiens
  misc_RNA (1)...(19): siRNA sense strand
uggccaauauugcugaaag

SEQ ID NO: 1425692 - RNA, 19 nt, Homo sapiens
  misc_RNA (1)...(19): siRNA sense strand
gggaucuaccgcugcauug

SEQ ID NO: 1425693 - RNA, 19 nt, Homo sapiens
  misc_RNA (1)...(19): siRNA sense strand
gccagaacuucaccuugag

SEQ ID NO: 1425694 - RNA, 19 nt, Homo sapiens
  misc_RNA (1)...(19): siRNA sense strand
cagagcaaccacacaguca

SEQ ID NO: 1425695 - RNA, 19 nt, Homo sapiens
  misc_RNA (1)...(19): siRNA sense strand
augagacucccaucacuaa

SEQ ID NO: 1425696 - RNA, 19 nt, Homo sapiens
  misc_RNA (1)...(19): siRNA sense strand
guacccagacagccauugu

SEQ ID NO: 1425697 - RNA, 19 nt, Homo sapiens
  misc_RNA (1)...(19): siRNA sense strand
gcaguggcucuuugaggau

SEQ ID NO: 1425698 - RNA, 19 nt, Homo sapiens
  misc_RNA (1)...(19): siRNA sense strand
acgcugggacccugcauuu

SEQ ID NO: 1425699 - RNA, 19 nt, Homo sapiens
  misc_RNA (1)...(19): siRNA sense strand
aagacaugccgcuauuuga

SEQ ID NO: 1425700 - RNA, 19 nt, Homo sapiens
  misc_RNA (1)...(19): siRNA sense strand
acacuucaccuagcagaga

SEQ ID NO: 1425701 - RNA, 19 nt, Homo sapiens
  misc_RNA (1)...(19): siRNA sense strand
gcauugcugaugaaagcuu

SEQ ID NO: 1425702 - RNA, 19 nt, Homo sapiens
  misc_RNA (1)...(19): siRNA sense strand
ccuggagggugacuucucu

SEQ ID NO: 1425703 - RNA, 19 nt, Homo sapiens
  misc_RNA (1)...(19): siRNA sense strand
agcagaagguggcccuaug

SEQ ID NO: 1425704 - RNA, 19 nt, Homo sapiens
  misc_RNA (1)...(19): siRNA sense strand
aaacgccacagcacaagug

SEQ ID NO: 1425705 - RNA, 19 nt, Homo sapiens
  misc_RNA (1)...(19): siRNA sense strand
ugaagacaugccgcuauuu

SEQ ID NO: 1425706 - RNA, 19 nt, Homo sapiens
  misc_RNA (1)...(19): siRNA sense strand
guaugaggaggccauguuc

SEQ ID NO: 1425707 - RNA, 19 nt, Homo sapiens
  misc_RNA (1)...(19): siRNA sense strand
cagccauugucuucaucaa

SEQ ID NO: 1425708 - RNA, 19 nt, Homo sapiens
  misc_RNA (1)...(19): siRNA sense strand
cacacuucguugccacauu

SEQ ID NO: 1425709 - RNA, 19 nt, Homo sapiens
  misc_RNA (1)...(19): siRNA sense strand
caaccgcuuugugcauaag

SEQ ID NO: 1425710 - RNA, 19 nt, Homo sapiens
  misc_RNA (1)...(19): siRNA sense strand
gaugaugucacuggagaag

SEQ ID NO: 1425711 - RNA, 19 nt, Homo sapiens
  misc_RNA (1)...(19): siRNA sense strand
aaagugaugcuggugucua

SEQ ID NO: 1425712 - RNA, 19 nt, Homo sapiens
  misc_RNA (1)...(19): siRNA sense strand
gcaggcagaugaugaagua

SEQ ID NO: 1425713 - RNA, 19 nt, Homo sapiens
  misc_RNA (1)...(19): siRNA sense strand
cagcagagauccaagaaga

SEQ ID NO: 1425714 - RNA, 19 nt, Homo sapiens
  misc_RNA (1)...(19): siRNA sense strand
gaagacaugccgcuauuug

SEQ ID NO: 1425715 - RNA, 19 nt, Homo sapiens
  misc_RNA (1)...(19): siRNA sense strand
gcaaggauguguacaacag

SEQ ID NO: 1425716 - RNA, 19 nt, Homo sapiens
  misc_RNA (1)...(19): siRNA sense strand
gagcugguguuggccaaua

SEQ ID NO: 1425717 - RNA, 19 nt, Homo sapiens
  misc_RNA (1)...(19): siRNA sense strand
gaacuucaccuugagcauu

SEQ ID NO: 1425718 - RNA, 19 nt, Homo sapiens
  misc_RNA (1)...(19): siRNA sense strand
cagcacaagugauaagaug

SEQ ID NO: 1425719 - RNA, 19 nt, Homo sapiens
  misc_RNA (1)...(19): siRNA sense strand
uagcagagauugaagacau

SEQ ID NO: 1425720 - RNA, 19 nt, Homo sapiens
  misc_RNA (1)...(19): siRNA sense strand
ccgcagagccacaguguuu

SEQ ID NO: 1425721 - RNA, 19 nt, Homo sapiens
  misc_RNA (1)...(19): siRNA sense strand
caauauugcugaaagugau

SEQ ID NO: 1425722 - RNA, 19 nt, Homo sapiens
  misc_RNA (1)...(19): siRNA sense strand
ugaugucacuggagaagaa

SEQ ID NO: 1425723 - RNA, 19 nt, Homo sapiens
  misc_RNA (1)...(19): siRNA sense strand
gagcauagugggcuguauu

SEQ ID NO: 1425724 - RNA, 19 nt, Homo sapiens
  misc_RNA (1)...(19): siRNA sense strand
acacuucguugccacauug

SEQ ID NO: 1425725 - RNA, 19 nt, Homo sapiens
  misc_RNA (1)...(19): siRNA sense strand
gcuguggccuacaucauug

SEQ ID NO: 1425726 - RNA, 19 nt, Homo sapiens
  misc_RNA (1)...(19): siRNA sense strand
ccaagcggcugcagaagca

SEQ ID NO: 1425727 - RNA, 19 nt, Homo sapiens
  misc_RNA (1)...(19): siRNA sense strand
cagagugggugacagacaa

SEQ ID NO: 1425728 - RNA, 19 nt, Homo sapiens
  misc_RNA (1)...(19): siRNA sense strand
gagggugacuucucuacca

SEQ ID NO: 1425729 - RNA, 19 nt, Homo sapiens
  misc_RNA (1)...(19): siRNA sense strand
agccagaacuucaccuuga

SEQ ID NO: 1425730 - RNA, 19 nt, Homo sapiens
  misc_RNA (1)...(19): siRNA sense strand
gagaugacgcuggcaacua

SEQ ID NO: 1425731 - RNA, 19 nt, Homo sapiens
  misc_RNA (1)...(19): siRNA sense strand
ggacuuggcugcgcguaac

SEQ ID NO: 1425732 - RNA, 19 nt, Homo sapiens
  misc_RNA (1)...(19): siRNA sense strand
cgccacagcacaagugaua

SEQ ID NO: 1425733 - RNA, 19 nt, Homo sapiens
  misc_RNA (1)...(19): siRNA sense strand
gaggaggccauguuccauu

SEQ ID NO: 1425734 - RNA, 19 nt, Homo sapiens
  misc_RNA (1)...(19): siRNA sense strand
gguaugaggaggccauguu

SEQ ID NO: 1425735 - RNA, 19 nt, Homo sapiens
  misc_RNA (1)...(19): siRNA sense strand
caaacucuaucggcugaug

SEQ ID NO: 1425736 - RNA, 19 nt, Homo sapiens
  misc_RNA (1)...(19): siRNA sense strand
augaaguacuggcagauuu

SEQ ID NO: 1425737 - RNA, 19 nt, Homo sapiens
  misc_RNA (1)...(19): siRNA sense strand
uugaagacaugccgcuauu

SEQ ID NO: 1425738 - RNA, 19 nt, Homo sapiens
  misc_RNA (1)...(19): siRNA sense strand
ccaauauugcugaaaguga

SEQ ID NO: 1425739 - RNA, 19 nt, Homo sapiens
  misc_RNA (1)...(19): siRNA sense strand
gcugaugugggaaguguuu

SEQ ID NO: 1425740 - RNA, 19 nt, Homo sapiens
  misc_RNA (1)...(19): siRNA sense strand
gcacaagugauaagaugca

SEQ ID NO: 1425741 - RNA, 19 nt, Homo sapiens
  misc_RNA (1)...(19): siRNA sense strand
gcagagauccaagaagaag

SEQ ID NO: 1425742 - RNA, 19 nt, Homo sapiens
  misc_RNA (1)...(19): siRNA sense strand
gcgaggagccagagaugga

SEQ ID NO: 1425743 - RNA, 19 nt, Homo sapiens
  misc_RNA (1)...(19): siRNA sense strand
gccaacgccuccuucaaca

SEQ ID NO: 1425744 - RNA, 19 nt, Homo sapiens
  misc_RNA (1)...(19): siRNA sense strand
cauguuccauugccaguuc

SEQ ID NO: 1425745 - RNA, 19 nt, Homo sapiens
  misc_RNA (1)...(19): siRNA sense strand
acacuugcauugccuccaa

SEQ ID NO: 1425746 - RNA, 19 nt, Homo sapiens
  misc_RNA (1)...(19): siRNA sense strand
gaugaaguacuggcagauu

SEQ ID NO: 1425747 - RNA, 19 nt, Homo sapiens
  misc_RNA (1)...(19): siRNA sense strand
gcaagaagcgcugcaaagc

SEQ ID NO: 1425748 - RNA, 19 nt, Homo sapiens
  misc_RNA (1)...(19): siRNA sense strand
caacgccuccuucaacauc

SEQ ID NO: 1425749 - RNA, 19 nt, Homo sapiens
  misc_RNA (1)...(19): siRNA sense strand
aagaugauccagaccauug

SEQ ID NO: 1425750 - RNA, 19 nt, Homo sapiens
  misc_RNA (1)...(19): siRNA sense strand
guuuacacauggagagaug

SEQ ID NO: 1425751 - RNA, 19 nt, Homo sapiens
  misc_RNA (1)...(19): siRNA sense strand
ggcagcagccugagcuuug

SEQ ID NO: 1425752 - RNA, 19 nt, Homo sapiens
  misc_RNA (1)...(19): siRNA sense strand
ggcagaugaugaaguacug

SEQ ID NO: 1425753 - RNA, 19 nt, Homo sapiens
  misc_RNA (1)...(19): siRNA sense strand
agaugacgcuggcaacuac

SEQ ID NO: 1425754 - RNA, 19 nt, Homo sapiens
  misc_RNA (1)...(19): siRNA sense strand
ugaaguacuggcagauuug

SEQ ID NO: 1425755 - RNA, 19 nt, Homo sapiens
  misc_RNA (1)...(19): siRNA sense strand
gugcugaugugggaagugu

SEQ ID NO: 1425756 - RNA, 19 nt, Homo sapiens
  misc_RNA (1)...(19): siRNA sense strand
cagcaaggauguguacaac

SEQ ID NO: 1425757 - RNA, 19 nt, Homo sapiens
  misc_RNA (1)...(19): siRNA sense strand
ccucaacggugggccuuug

SEQ ID NO: 1425758 - RNA, 19 nt, Homo sapiens
  misc_RNA (1)...(19): siRNA sense strand
ucaccuagcagagauugaa

SEQ ID NO: 1425759 - RNA, 19 nt, Homo sapiens
  misc_RNA (1)...(19): siRNA sense strand
cagcugguccugagcauag

SEQ ID NO: 1425760 - RNA, 19 nt, Homo sapiens
  misc_RNA (1)...(19): siRNA sense strand
ggccuucggugugcugaug

SEQ ID NO: 1425761 - RNA, 19 nt, Homo sapiens
  misc_RNA (1)...(19): siRNA sense strand
ggccaauauugcugaaagu

SEQ ID NO: 1425762 - RNA, 19 nt, Homo sapiens
  misc_RNA (1)...(19): siRNA sense strand
aggaggccauguuccauug

SEQ ID NO: 1425763 - RNA, 19 nt, Homo sapiens
  misc_RNA (1)...(19): siRNA sense strand
cauugcugaugaaagcuuu

SEQ ID NO: 1425764 - RNA, 19 nt, Homo sapiens
  misc_RNA (1)...(19): siRNA sense strand
aaccagagcguacgacugu

SEQ ID NO: 1425765 - RNA, 19 nt, Homo sapiens
  misc_RNA (1)...(19): siRNA sense strand
aagaagaaguggccuugac

SEQ ID NO: 1425766 - RNA, 19 nt, Homo sapiens
  misc_RNA (1)...(19): siRNA sense strand
gggcagcagccugagcuuu

SEQ ID NO: 1425767 - RNA, 19 nt, Homo sapiens
  misc_RNA (1)...(19): siRNA sense strand
ccacagcacaagugauaag

SEQ ID NO: 1425768 - RNA, 19 nt, Homo sapiens
  misc_RNA (1)...(19): siRNA sense strand
acaagaugauccagaccau

SEQ ID NO: 1425769 - RNA, 19 nt, Homo sapiens
  misc_RNA (1)...(19): siRNA sense strand
aacuucaccuugagcauug

SEQ ID NO: 1425770 - RNA, 19 nt, Homo sapiens
  misc_RNA (1)...(19): siRNA sense strand
caagaugauccagaccauu

SEQ ID NO: 1425771 - RNA, 19 nt, Homo sapiens
  misc_RNA (1)...(19): siRNA sense strand
ucagcaaggauguguacaa

SEQ ID NO: 1425772 - RNA, 19 nt, Homo sapiens
  misc_RNA (1)...(19): siRNA sense strand
gcagaagguggcccuaugc

SEQ ID NO: 1425773 - RNA, 19 nt, Homo sapiens
  misc_RNA (1)...(19): siRNA sense strand
gcagccagaacuucaccuu

SEQ ID NO: 1425774 - RNA, 19 nt, Homo sapiens
  misc_RNA (1)...(19): siRNA sense strand
gcagcagccugagcuuugc

SEQ ID NO: 1425775 - RNA, 19 nt, Homo sapiens
  misc_RNA (1)...(19): siRNA sense strand
ggucagugcccagagacaa

SEQ ID NO: 1425776 - RNA, 19 nt, Homo sapiens
  misc_RNA (1)...(19): siRNA sense strand
ccagauucgugcccauguc

SEQ ID NO: 1425777 - RNA, 19 nt, Homo sapiens
  misc_RNA (1)...(19): siRNA sense strand
uggccaauauugcugaaag

SEQ ID NO: 1425778 - RNA, 19 nt, Homo sapiens
  misc_RNA (1)...(19): siRNA sense strand
gggaucuaccgcugcauug

SEQ ID NO: 1425779 - RNA, 19 nt, Homo sapiens
  misc_RNA (1)...(19): siRNA sense strand
gccagaacuucaccuugag

SEQ ID NO: 1425780 - RNA, 19 nt, Homo sapiens
  misc_RNA (1)...(19): siRNA sense strand
cagagcaaccacacaguca

SEQ ID NO: 1425781 - RNA, 19 nt, Homo sapiens
  misc_RNA (1)...(19): siRNA sense strand
augagacucccaucacuaa

SEQ ID NO: 1425782 - RNA, 19 nt, Homo sapiens
  misc_RNA (1)...(19): siRNA sense strand
guacccagacagccauugu

SEQ ID NO: 1425783 - RNA, 19 nt, Homo sapiens
  misc_RNA (1)...(19): siRNA sense strand
gcaguggcucuuugaggau

SEQ ID NO: 1425784 - RNA, 19 nt, Homo sapiens
  misc_RNA (1)...(19): siRNA sense strand
acgcugggacccugcauuu

SEQ ID NO: 1425785 - RNA, 19 nt, Homo sapiens
  misc_RNA (1)...(19): siRNA sense strand
aagacaugccgcuauuuga

SEQ ID NO: 1425786 - RNA, 19 nt, Homo sapiens
  misc_RNA (1)...(19): siRNA sense strand
acacuucaccuagcagaga

SEQ ID NO: 1425787 - RNA, 19 nt, Homo sapiens
  misc_RNA (1)...(19): siRNA sense strand
gcauugcugaugaaagcuu

SEQ ID NO: 1425788 - RNA, 19 nt, Homo sapiens
  misc_RNA (1)...(19): siRNA sense strand
ccuggagggugacuucucu

SEQ ID NO: 1425789 - RNA, 19 nt, Homo sapiens
  misc_RNA (1)...(19): siRNA sense strand
agcagaagguggcccuaug

SEQ ID NO: 1425790 - RNA, 19 nt, Homo sapiens
  misc_RNA (1)...(19): siRNA sense strand
aaacgccacagcacaagug

SEQ ID NO: 1425791 - RNA, 19 nt, Homo sapiens
  misc_RNA (1)...(19): siRNA sense strand
ugaagacaugccgcuauuu

SEQ ID NO: 1425792 - RNA, 19 nt, Homo sapiens
  misc_RNA (1)...(19): siRNA sense strand
guaugaggaggccauguuc

SEQ ID NO: 1425793 - RNA, 19 nt, Homo sapiens
  misc_RNA (1)...(19): siRNA sense strand
cagccauugucuucaucaa

SEQ ID NO: 1425794 - RNA, 19 nt, Homo sapiens
  misc_RNA (1)...(19): siRNA sense strand
cacacuucguugccacauu

SEQ ID NO: 1425795 - RNA, 19 nt, Homo sapiens
  misc_RNA (1)...(19): siRNA sense strand
caaccgcuuugugcauaag

SEQ ID NO: 1425796 - RNA, 19 nt, Homo sapiens
  misc_RNA (1)...(19): siRNA sense strand
gaugaugucacuggagaag

SEQ ID NO: 1425797 - RNA, 19 nt, Homo sapiens
  misc_RNA (1)...(19): siRNA sense strand
aaagugaugcuggugucua

SEQ ID NO: 1425798 - RNA, 19 nt, Homo sapiens
  misc_RNA (1)...(19): siRNA sense strand
gcaggcagaugaugaagua

SEQ ID NO: 1425799 - RNA, 19 nt, Homo sapiens
  misc_RNA (1)...(19): siRNA sense strand
cagcagagauccaagaaga

SEQ ID NO: 1425800 - RNA, 19 nt, Homo sapiens
  misc_RNA (1)...(19): siRNA sense strand
gaagacaugccgcuauuug

SEQ ID NO: 1425801 - RNA, 19 nt, Homo sapiens
  misc_RNA (1)...(19): siRNA sense strand
gcaaggauguguacaacag

SEQ ID NO: 1425802 - RNA, 19 nt, Homo sapiens
  misc_RNA (1)...(19): siRNA sense strand
gagcugguguuggccaaua

SEQ ID NO: 1425803 - RNA, 19 nt, Homo sapiens
  misc_RNA (1)...(19): siRNA sense strand
gaacuucaccuugagcauu

SEQ ID NO: 1425804 - RNA, 19 nt, Homo sapiens
  misc_RNA (1)...(19): siRNA sense strand
cagcacaagugauaagaug

SEQ ID NO: 1425805 - RNA, 19 nt, Homo sapiens
  misc_RNA (1)...(19): siRNA sense strand
uagcagagauugaagacau

SEQ ID NO: 1425806 - RNA, 19 nt, Homo sapiens
  misc_RNA (1)...(19): siRNA sense strand
ccgcagagccacaguguuu

SEQ ID NO: 1425807 - RNA, 19 nt, Homo sapiens
  misc_RNA (1)...(19): siRNA sense strand
caauauugcugaaagugau

SEQ ID NO: 1425808 - RNA, 19 nt, Homo sapiens
  misc_RNA (1)...(19): siRNA sense strand
ugaugucacuggagaagaa

SEQ ID NO: 1425809 - RNA, 19 nt, Homo sapiens
  misc_RNA (1)...(19): siRNA sense strand
gagcauagugggcuguauu

SEQ ID NO: 1425810 - RNA, 19 nt, Homo sapiens
  misc_RNA (1)...(19): siRNA sense strand
acacuucguugccacauug

SEQ ID NO: 1425811 - RNA, 19 nt, Homo sapiens
  misc_RNA (1)...(19): siRNA sense strand
gcuguggccuacaucauug

SEQ ID NO: 1425812 - RNA, 19 nt, Homo sapiens
  misc_RNA (1)...(19): siRNA sense strand
ccaagcggcugcagaagca

SEQ ID NO: 1425813 - RNA, 19 nt, Homo sapiens
  misc_RNA (1)...(19): siRNA sense strand
cagagugggugacagacaa

SEQ ID NO: 1425814 - RNA, 19 nt, Homo sapiens
  misc_RNA (1)...(19): siRNA sense strand
gagggugacuucucuacca

SEQ ID NO: 1425815 - RNA, 19 nt, Homo sapiens
  misc_RNA (1)...(19): siRNA sense strand
agccagaacuucaccuuga

SEQ ID NO: 1425816 - RNA, 19 nt, Homo sapiens
  misc_RNA (1)...(19): siRNA sense strand
gagaugacgcuggcaacua

SEQ ID NO: 1425817 - RNA, 19 nt, Homo sapiens
  misc_RNA (1)...(19): siRNA sense strand
ggacuuggcugcgcguaac

SEQ ID NO: 1425818 - RNA, 19 nt, Homo sapiens
  misc_RNA (1)...(19): siRNA sense strand
cgccacagcacaagugaua

SEQ ID NO: 1425819 - RNA, 19 nt, Homo sapiens
  misc_RNA (1)...(19): siRNA sense strand
gaggaggccauguuccauu

SEQ ID NO: 1425820 - RNA, 19 nt, Homo sapiens
  misc_RNA (1)...(19): siRNA sense strand
gguaugaggaggccauguu

SEQ ID NO: 1425821 - RNA, 19 nt, Homo sapiens
  misc_RNA (1)...(19): siRNA sense strand
caaacucuaucggcugaug

SEQ ID NO: 1425822 - RNA, 19 nt, Homo sapiens
  misc_RNA (1)...(19): siRNA sense strand
augaaguacuggcagauuu

SEQ ID NO: 1425823 - RNA, 19 nt, Homo sapiens
  misc_RNA (1)...(19): siRNA sense strand
uugaagacaugccgcuauu

SEQ ID NO: 1425824 - RNA, 19 nt, Homo sapiens
  misc_RNA (1)...(19): siRNA sense strand
ccaauauugcugaaaguga

SEQ ID NO: 1425825 - RNA, 19 nt, Homo sapiens
  misc_RNA (1)...(19): siRNA sense strand
gcugaugugggaaguguuu

SEQ ID NO: 1425826 - RNA, 19 nt, Homo sapiens
  misc_RNA (1)...(19): siRNA sense strand
gcacaagugauaagaugca

SEQ ID NO: 1425827 - RNA, 19 nt, Homo sapiens
  misc_RNA (1)...(19): siRNA sense strand
gcagagauccaagaagaag

SEQ ID NO: 1425828 - RNA, 19 nt, Homo sapiens
  misc_RNA (1)...(19): siRNA sense strand
gcgaggagccagagaugga

SEQ ID NO: 1425829 - RNA, 19 nt, Homo sapiens
  misc_RNA (1)...(19): siRNA sense strand
gccaacgccuccuucaaca

SEQ ID NO: 1425830 - RNA, 19 nt, Homo sapiens
  misc_RNA (1)...(19): siRNA sense strand
cauguuccauugccaguuc

SEQ ID NO: 1425831 - RNA, 19 nt, Homo sapiens
  misc_RNA (1)...(19): siRNA sense strand
acacuugcauugccuccaa

SEQ ID NO: 1425832 - RNA, 19 nt, Homo sapiens
  misc_RNA (1)...(19): siRNA sense strand
gaugaaguacuggcagauu

SEQ ID NO: 1425833 - RNA, 19 nt, Homo sapiens
  misc_RNA (1)...(19): siRNA sense strand
gcaagaagcgcugcaaagc

SEQ ID NO: 1425834 - RNA, 19 nt, Homo sapiens
  misc_RNA (1)...(19): siRNA sense strand
caacgccuccuucaacauc

SEQ ID NO: 1425835 - RNA, 19 nt, Homo sapiens
  misc_RNA (1)...(19): siRNA sense strand
aagaugauccagaccauug

SEQ ID NO: 1425836 - RNA, 19 nt, Homo sapiens
  misc_RNA (1)...(19): siRNA sense strand
guuuacacauggagagaug

SEQ ID NO: 1425837 - RNA, 19 nt, Homo sapiens
  misc_RNA (1)...(19): siRNA sense strand
ggcagcagccugagcuuug

SEQ ID NO: 1425838 - RNA, 19 nt, Homo sapiens
  misc_RNA (1)...(19): siRNA sense strand
ggcagaugaugaaguacug

SEQ ID NO: 1425839 - RNA, 19 nt, Homo sapiens
  misc_RNA (1)...(19): siRNA sense strand
agaugacgcuggcaacuac

SEQ ID NO: 1425840 - RNA, 19 nt, Homo sapiens
  misc_RNA (1)...(19): siRNA sense strand
ugaaguacuggcagauuug

SEQ ID NO: 1425841 - RNA, 19 nt, Homo sapiens
  misc_RNA (1)...(19): siRNA sense strand
gugcugaugugggaagugu

SEQ ID NO: 1425842 - RNA, 19 nt, Homo sapiens
  misc_RNA (1)...(19): siRNA sense strand
cagcaaggauguguacaac

SEQ ID NO: 1425843 - RNA, 19 nt, Homo sapiens
  misc_RNA (1)...(19): siRNA sense strand
ccucaacggugggccuuug

SEQ ID NO: 1425844 - RNA, 19 nt, Homo sapiens
  misc_RNA (1)...(19): siRNA sense strand
ucaccuagcagagauugaa

SEQ ID NO: 1425845 - RNA, 19 nt, Homo sapiens
  misc_RNA (1)...(19): siRNA sense strand
cagcugguccugagcauag

SEQ ID NO: 1425846 - RNA, 19 nt, Homo sapiens
  misc_RNA (1)...(19): siRNA sense strand
ggccuucggugugcugaug

SEQ ID NO: 1425847 - RNA, 19 nt, Homo sapiens
  misc_RNA (1)...(19): siRNA sense strand
ggccaauauugcugaaagu

SEQ ID NO: 1425848 - RNA, 19 nt, Homo sapiens
  misc_RNA (1)...(19): siRNA sense strand
aggaggccauguuccauug

SEQ ID NO: 1425849 - RNA, 19 nt, Homo sapiens
  misc_RNA (1)...(19): siRNA sense strand
cauugcugaugaaagcuuu

SEQ ID NO: 1425850 - RNA, 19 nt, Homo sapiens
  misc_RNA (1)...(19): siRNA sense strand
aaccagagcguacgacugu

SEQ ID NO: 1425851 - RNA, 19 nt, Homo sapiens
  misc_RNA (1)...(19): siRNA sense strand
aagaagaaguggccuugac

SEQ ID NO: 1425852 - RNA, 19 nt, Homo sapiens
  misc_RNA (1)...(19): siRNA sense strand
gggcagcagccugagcuuu

SEQ ID NO: 1425853 - RNA, 19 nt, Homo sapiens
  misc_RNA (1)...(19): siRNA sense strand
ccacagcacaagugauaag

SEQ ID NO: 1425854 - RNA, 19 nt, Homo sapiens
  misc_RNA (1)...(19): siRNA sense strand
acaagaugauccagaccau

SEQ ID NO: 1425855 - RNA, 19 nt, Homo sapiens
  misc_RNA (1)...(19): siRNA sense strand
aacuucaccuugagcauug

SEQ ID NO: 1425856 - RNA, 19 nt, Homo sapiens
  misc_RNA (1)...(19): siRNA sense strand
caagaugauccagaccauu

SEQ ID NO: 1425857 - RNA, 19 nt, Homo sapiens
  misc_RNA (1)...(19): siRNA sense strand
ucagcaaggauguguacaa

SEQ ID NO: 1425858 - RNA, 19 nt, Homo sapiens
  misc_RNA (1)...(19): siRNA sense strand
gcagaagguggcccuaugc

SEQ ID NO: 1425859 - RNA, 19 nt, Homo sapiens
  misc_RNA (1)...(19): siRNA sense strand
gcagccagaacuucaccuu

SEQ ID NO: 1425860 - RNA, 19 nt, Homo sapiens
  misc_RNA (1)...(19): siRNA sense strand
gcagcagccugagcuuugc

SEQ ID NO: 1425861 - RNA, 19 nt, Homo sapiens
  misc_RNA (1)...(19): siRNA sense strand
ggucagugcccagagacaa

SEQ ID NO: 1425862 - RNA, 19 nt, Homo sapiens
  misc_RNA (1)...(19): siRNA sense strand
ccagauucgugcccauguc

SEQ ID NO: 1425863 - RNA, 19 nt, Homo sapiens
  misc_RNA (1)...(19): siRNA sense strand
uggccaauauugcugaaag

SEQ ID NO: 1425864 - RNA, 19 nt, Homo sapiens
  misc_RNA (1)...(19): siRNA sense strand
gggaucuaccgcugcauug

SEQ ID NO: 1425865 - RNA, 19 nt, Homo sapiens
  misc_RNA (1)...(19): siRNA sense strand
gccagaacuucaccuugag

SEQ ID NO: 1425866 - RNA, 19 nt, Homo sapiens
  misc_RNA (1)...(19): siRNA sense strand
cagagcaaccacacaguca

SEQ ID NO: 1425867 - RNA, 19 nt, Homo sapiens
  misc_RNA (1)...(19): siRNA sense strand
augagacucccaucacuaa

SEQ ID NO: 1425868 - RNA, 19 nt, Homo sapiens
  misc_RNA (1)...(19): siRNA sense strand
guacccagacagccauugu

SEQ ID NO: 1425869 - RNA, 19 nt, Homo sapiens
  misc_RNA (1)...(19): siRNA sense strand
gcaguggcucuuugaggau

SEQ ID NO: 1425870 - RNA, 19 nt, Homo sapiens
  misc_RNA (1)...(19): siRNA sense strand
acgcugggacccugcauuu

SEQ ID NO: 1425871 - RNA, 19 nt, Homo sapiens
  misc_RNA (1)...(19): siRNA sense strand
aagacaugccgcuauuuga

SEQ ID NO: 1425872 - RNA, 19 nt, Homo sapiens
  misc_RNA (1)...(19): siRNA sense strand
acacuucaccuagcagaga

SEQ ID NO: 1425873 - RNA, 19 nt, Homo sapiens
  misc_RNA (1)...(19): siRNA sense strand
gcauugcugaugaaagcuu

SEQ ID NO: 1425874 - RNA, 19 nt, Homo sapiens
  misc_RNA (1)...(19): siRNA sense strand
ccuggagggugacuucucu

SEQ ID NO: 1425875 - RNA, 19 nt, Homo sapiens
  misc_RNA (1)...(19): siRNA sense strand
agcagaagguggcccuaug

SEQ ID NO: 1425876 - RNA, 19 nt, Homo sapiens
  misc_RNA (1)...(19): siRNA sense strand
aaacgccacagcacaagug

SEQ ID NO: 1425877 - RNA, 19 nt, Homo sapiens
  misc_RNA (1)...(19): siRNA sense strand
ugaagacaugccgcuauuu

SEQ ID NO: 1425878 - RNA, 19 nt, Homo sapiens
  misc_RNA (1)...(19): siRNA sense strand
guaugaggaggccauguuc

SEQ ID NO: 1425879 - RNA, 19 nt, Homo sapiens
  misc_RNA (1)...(19): siRNA sense strand
cagccauugucuucaucaa

SEQ ID NO: 1425880 - RNA, 19 nt, Homo sapiens
  misc_RNA (1)...(19): siRNA sense strand
cacacuucguugccacauu

SEQ ID NO: 1425881 - RNA, 19 nt, Homo sapiens
  misc_RNA (1)...(19): siRNA sense strand
caaccgcuuugugcauaag

SEQ ID NO: 1425882 - RNA, 19 nt, Homo sapiens
  misc_RNA (1)...(19): siRNA sense strand
gaugaugucacuggagaag

SEQ ID NO: 1425883 - RNA, 19 nt, Homo sapiens
  misc_RNA (1)...(19): siRNA sense strand
aaagugaugcuggugucua

SEQ ID NO: 1425884 - RNA, 19 nt, Homo sapiens
  misc_RNA (1)...(19): siRNA sense strand
gcaggcagaugaugaagua

SEQ ID NO: 1425885 - RNA, 19 nt, Homo sapiens
  misc_RNA (1)...(19): siRNA sense strand
cagcagagauccaagaaga

SEQ ID NO: 1425886 - RNA, 19 nt, Homo sapiens
  misc_RNA (1)...(19): siRNA sense strand
gaagacaugccgcuauuug

SEQ ID NO: 1425887 - RNA, 19 nt, Homo sapiens
  misc_RNA (1)...(19): siRNA sense strand
gcaaggauguguacaacag

SEQ ID NO: 1425888 - RNA, 19 nt, Homo sapiens
  misc_RNA (1)...(19): siRNA sense strand
gagcugguguuggccaaua

SEQ ID NO: 1425889 - RNA, 19 nt, Homo sapiens
  misc_RNA (1)...(19): siRNA sense strand
gaacuucaccuugagcauu

SEQ ID NO: 1425890 - RNA, 19 nt, Homo sapiens
  misc_RNA (1)...(19): siRNA sense strand
cagcacaagugauaagaug

SEQ ID NO: 1425891 - RNA, 19 nt, Homo sapiens
  misc_RNA (1)...(19): siRNA sense strand
uagcagagauugaagacau

SEQ ID NO: 1425892 - RNA, 19 nt, Homo sapiens
  misc_RNA (1)...(19): siRNA sense strand
ccgcagagccacaguguuu

SEQ ID NO: 1425893 - RNA, 19 nt, Homo sapiens
  misc_RNA (1)...(19): siRNA sense strand
caauauugcugaaagugau

SEQ ID NO: 1425894 - RNA, 19 nt, Homo sapiens
  misc_RNA (1)...(19): siRNA sense strand
ugaugucacuggagaagaa

SEQ ID NO: 1425895 - RNA, 19 nt, Homo sapiens
  misc_RNA (1)...(19): siRNA sense strand
gagcauagugggcuguauu

SEQ ID NO: 1425896 - RNA, 19 nt, Homo sapiens
  misc_RNA (1)...(19): siRNA sense strand
acacuucguugccacauug

SEQ ID NO: 1425897 - RNA, 19 nt, Homo sapiens
  misc_RNA (1)...(19): siRNA sense strand
gcuguggccuacaucauug

SEQ ID NO: 1425898 - RNA, 19 nt, Homo sapiens
  misc_RNA (1)...(19): siRNA sense strand
ccaagcggcugcagaagca

SEQ ID NO: 1425899 - RNA, 19 nt, Homo sapiens
  misc_RNA (1)...(19): siRNA sense strand
cagagugggugacagacaa

SEQ ID NO: 1425900 - RNA, 19 nt, Homo sapiens
  misc_RNA (1)...(19): siRNA sense strand
gagggugacuucucuacca

SEQ ID NO: 1425901 - RNA, 19 nt, Homo sapiens
  misc_RNA (1)...(19): siRNA sense strand
agccagaacuucaccuuga

SEQ ID NO: 1425902 - RNA, 19 nt, Homo sapiens
  misc_RNA (1)...(19): siRNA sense strand
gagaugacgcuggcaacua

SEQ ID NO: 1425903 - RNA, 19 nt, Homo sapiens
  misc_RNA (1)...(19): siRNA sense strand
ggacuuggcugcgcguaac

SEQ ID NO: 1425904 - RNA, 19 nt, Homo sapiens
  misc_RNA (1)...(19): siRNA sense strand
cgccacagcacaagugaua

SEQ ID NO: 1425905 - RNA, 19 nt, Homo sapiens
  misc_RNA (1)...(19): siRNA sense strand
gaggaggccauguuccauu

SEQ ID NO: 1425906 - RNA, 19 nt, Homo sapiens
  misc_RNA (1)...(19): siRNA sense strand
gguaugaggaggccauguu

SEQ ID NO: 1425907 - RNA, 19 nt, Homo sapiens
  misc_RNA (1)...(19): siRNA sense strand
caaacucuaucggcugaug

SEQ ID NO: 1425908 - RNA, 19 nt, Homo sapiens
  misc_RNA (1)...(19): siRNA sense strand
augaaguacuggcagauuu

SEQ ID NO: 1425909 - RNA, 19 nt, Homo sapiens
  misc_RNA (1)...(19): siRNA sense strand
uugaagacaugccgcuauu

SEQ ID NO: 1425910 - RNA, 19 nt, Homo sapiens
  misc_RNA (1)...(19): siRNA sense strand
ccaauauugcugaaaguga

SEQ ID NO: 1425911 - RNA, 19 nt, Homo sapiens
  misc_RNA (1)...(19): siRNA sense strand
gcugaugugggaaguguuu

SEQ ID NO: 1425912 - RNA, 19 nt, Homo sapiens
  misc_RNA (1)...(19): siRNA sense strand
gcacaagugauaagaugca

SEQ ID NO: 1425913 - RNA, 19 nt, Homo sapiens
  misc_RNA (1)...(19): siRNA sense strand
gcagagauccaagaagaag

SEQ ID NO: 1425914 - RNA, 19 nt, Homo sapiens
  misc_RNA (1)...(19): siRNA sense strand
gcgaggagccagagaugga

SEQ ID NO: 1425915 - RNA, 19 nt, Homo sapiens
  misc_RNA (1)...(19): siRNA sense strand
gccaacgccuccuucaaca

SEQ ID NO: 1425916 - RNA, 19 nt, Homo sapiens
  misc_RNA (1)...(19): siRNA sense strand
cauguuccauugccaguuc

SEQ ID NO: 1425917 - RNA, 19 nt, Homo sapiens
  misc_RNA (1)...(19): siRNA sense strand
acacuugcauugccuccaa

SEQ ID NO: 1425918 - RNA, 19 nt, Homo sapiens
  misc_RNA (1)...(19): siRNA sense strand
gaugaaguacuggcagauu

SEQ ID NO: 1425919 - RNA, 19 nt, Homo sapiens
  misc_RNA (1)...(19): siRNA sense strand
gcaagaagcgcugcaaagc

SEQ ID NO: 1425920 - RNA, 19 nt, Homo sapiens
  misc_RNA (1)...(19): siRNA sense strand
caacgccuccuucaacauc

SEQ ID NO: 1425921 - RNA, 19 nt, Homo sapiens
  misc_RNA (1)...(19): siRNA sense strand
aagaugauccagaccauug

SEQ ID NO: 1425922 - RNA, 19 nt, Homo sapiens
  misc_RNA (1)...(19): siRNA sense strand
guuuacacauggagagaug

SEQ ID NO: 1425923 - RNA, 19 nt, Homo sapiens
  misc_RNA (1)...(19): siRNA sense strand
ggcagcagccugagcuuug

SEQ ID NO: 1425924 - RNA, 19 nt, Homo sapiens
  misc_RNA (1)...(19): siRNA sense strand
ggcagaugaugaaguacug

SEQ ID NO: 1425925 - RNA, 19 nt, Homo sapiens
  misc_RNA (1)...(19): siRNA sense strand
agaugacgcuggcaacuac

SEQ ID NO: 1425926 - RNA, 19 nt, Homo sapiens
  misc_RNA (1)...(19): siRNA sense strand
ugaaguacuggcagauuug

SEQ ID NO: 1425927 - RNA, 19 nt, Homo sapiens
  misc_RNA (1)...(19): siRNA sense strand
gugcugaugugggaagugu

SEQ ID NO: 1425928 - RNA, 19 nt, Homo sapiens
  misc_RNA (1)...(19): siRNA sense strand
cagcaaggauguguacaac

SEQ ID NO: 1425929 - RNA, 19 nt, Homo sapiens
  misc_RNA (1)...(19): siRNA sense strand
ccucaacggugggccuuug

SEQ ID NO: 1425930 - RNA, 19 nt, Homo sapiens
  misc_RNA (1)...(19): siRNA sense strand
ucaccuagcagagauugaa

SEQ ID NO: 1425931 - RNA, 19 nt, Homo sapiens
  misc_RNA (1)...(19): siRNA sense strand
cagcugguccugagcauag

SEQ ID NO: 1425932 - RNA, 19 nt, Homo sapiens
  misc_RNA (1)...(19): siRNA sense strand
ggccuucggugugcugaug

SEQ ID NO: 1425933 - RNA, 19 nt, Homo sapiens
  misc_RNA (1)...(19): siRNA sense strand
ggccaauauugcugaaagu

SEQ ID NO: 1425934 - RNA, 19 nt, Homo sapiens
  misc_RNA (1)...(19): siRNA sense strand
aggaggccauguuccauug

SEQ ID NO: 1425935 - RNA, 19 nt, Homo sapiens
  misc_RNA (1)...(19): siRNA sense strand
cauugcugaugaaagcuuu

SEQ ID NO: 1425936 - RNA, 19 nt, Homo sapiens
  misc_RNA (1)...(19): siRNA sense strand
aaccagagcguacgacugu

SEQ ID NO: 1425937 - RNA, 19 nt, Homo sapiens
  misc_RNA (1)...(19): siRNA sense strand
aagaagaaguggccuugac

SEQ ID NO: 1425938 - RNA, 19 nt, Homo sapiens
  misc_RNA (1)...(19): siRNA sense strand
gggcagcagccugagcuuu

SEQ ID NO: 1425939 - RNA, 19 nt, Homo sapiens
  misc_RNA (1)...(19): siRNA sense strand
ccacagcacaagugauaag

SEQ ID NO: 1425940 - RNA, 19 nt, Homo sapiens
  misc_RNA (1)...(19): siRNA sense strand
acaagaugauccagaccau

SEQ ID NO: 1425941 - RNA, 19 nt, Homo sapiens
  misc_RNA (1)...(19): siRNA sense strand
aacuucaccuugagcauug

SEQ ID NO: 1425942 - RNA, 19 nt, Homo sapiens
  misc_RNA (1)...(19): siRNA sense strand
caagaugauccagaccauu

SEQ ID NO: 1425943 - RNA, 19 nt, Homo sapiens
  misc_RNA (1)...(19): siRNA sense strand
ucagcaaggauguguacaa

SEQ ID NO: 1425944 - RNA, 19 nt, Homo sapiens
  misc_RNA (1)...(19): siRNA sense strand
gcagaagguggcccuaugc

SEQ ID NO: 1425945 - RNA, 19 nt, Homo sapiens
  misc_RNA (1)...(19): siRNA sense strand
gcagccagaacuucaccuu

SEQ ID NO: 1425946 - RNA, 19 nt, Homo sapiens
  misc_RNA (1)...(19): siRNA sense strand
gcagcagccugagcuuugc

SEQ ID NO: 1425947 - RNA, 19 nt, Homo sapiens
  misc_RNA (1)...(19): siRNA sense strand
ggucagugcccagagacaa

SEQ ID NO: 1425948 - RNA, 19 nt, Homo sapiens
  misc_RNA (1)...(19): siRNA sense strand
ccagauucgugcccauguc

SEQ ID NO: 1425949 - RNA, 19 nt, Homo sapiens
  misc_RNA (1)...(19): siRNA sense strand
uggccaauauugcugaaag

SEQ ID NO: 1425950 - RNA, 19 nt, Homo sapiens
  misc_RNA (1)...(19): siRNA sense strand
gggaucuaccgcugcauug

SEQ ID NO: 1425951 - RNA, 19 nt, Homo sapiens
  misc_RNA (1)...(19): siRNA sense strand
gccagaacuucaccuugag

SEQ ID NO: 1425952 - RNA, 19 nt, Homo sapiens
  misc_RNA (1)...(19): siRNA sense strand
cagagcaaccacacaguca

SEQ ID NO: 1425953 - RNA, 19 nt, Homo sapiens
  misc_RNA (1)...(19): siRNA sense strand
augagacucccaucacuaa

SEQ ID NO: 1425954 - RNA, 19 nt, Homo sapiens
  misc_RNA (1)...(19): siRNA sense strand
guacccagacagccauugu

SEQ ID NO: 1425955 - RNA, 19 nt, Homo sapiens
  misc_RNA (1)...(19): siRNA sense strand
gcaguggcucuuugaggau

SEQ ID NO: 1425956 - RNA, 19 nt, Homo sapiens
  misc_RNA (1)...(19): siRNA sense strand
acgcugggacccugcauuu

SEQ ID NO: 1425957 - RNA, 19 nt, Homo sapiens
  misc_RNA (1)...(19): siRNA sense strand
aagacaugccgcuauuuga

SEQ ID NO: 1425958 - RNA, 19 nt, Homo sapiens
  misc_RNA (1)...(19): siRNA sense strand
acacuucaccuagcagaga

SEQ ID NO: 1425959 - RNA, 19 nt, Homo sapiens
  misc_RNA (1)...(19): siRNA sense strand
gcauugcugaugaaagcuu

SEQ ID NO: 1425960 - RNA, 19 nt, Homo sapiens
  misc_RNA (1)...(19): siRNA sense strand
ccuggagggugacuucucu

SEQ ID NO: 1425961 - RNA, 19 nt, Homo sapiens
  misc_RNA (1)...(19): siRNA sense strand
agcagaagguggcccuaug

SEQ ID NO: 1425962 - RNA, 19 nt, Homo sapiens
  misc_RNA (1)...(19): siRNA sense strand
aaacgccacagcacaagug

SEQ ID NO: 1425963 - RNA, 19 nt, Homo sapiens
  misc_RNA (1)...(19): siRNA sense strand
ugaagacaugccgcuauuu

SEQ ID NO: 1425964 - RNA, 19 nt, Homo sapiens
  misc_RNA (1)...(19): siRNA sense strand
guaugaggaggccauguuc

SEQ ID NO: 1425965 - RNA, 19 nt, Homo sapiens
  misc_RNA (1)...(19): siRNA sense strand
cagccauugucuucaucaa

SEQ ID NO: 1425966 - RNA, 19 nt, Homo sapiens
  misc_RNA (1)...(19): siRNA sense strand
cacacuucguugccacauu

SEQ ID NO: 1425967 - RNA, 19 nt, Homo sapiens
  misc_RNA (1)...(19): siRNA sense strand
caaccgcuuugugcauaag

SEQ ID NO: 1425968 - RNA, 19 nt, Homo sapiens
  misc_RNA (1)...(19): siRNA sense strand
gaugaugucacuggagaag

SEQ ID NO: 1425969 - RNA, 19 nt, Homo sapiens
  misc_RNA (1)...(19): siRNA sense strand
aaagugaugcuggugucua

SEQ ID NO: 1425970 - RNA, 19 nt, Homo sapiens
  misc_RNA (1)...(19): siRNA sense strand
cagcagagauccaagaaga

SEQ ID NO: 1425971 - RNA, 19 nt, Homo sapiens
  misc_RNA (1)...(19): siRNA sense strand
gaagacaugccgcuauuug

SEQ ID NO: 1425972 - RNA, 19 nt, Homo sapiens
  misc_RNA (1)...(19): siRNA sense strand
gagcugguguuggccaaua

SEQ ID NO: 1425973 - RNA, 19 nt, Homo sapiens
  misc_RNA (1)...(19): siRNA sense strand
gaacuucaccuugagcauu

SEQ ID NO: 1425974 - RNA, 19 nt, Homo sapiens
  misc_RNA (1)...(19): siRNA sense strand
cagcacaagugauaagaug

SEQ ID NO: 1425975 - RNA, 19 nt, Homo sapiens
  misc_RNA (1)...(19): siRNA sense strand
uagcagagauugaagacau

SEQ ID NO: 1425976 - RNA, 19 nt, Homo sapiens
  misc_RNA (1)...(19): siRNA sense strand
ccgcagagccacaguguuu

SEQ ID NO: 1425977 - RNA, 19 nt, Homo sapiens
  misc_RNA (1)...(19): siRNA sense strand
caauauugcugaaagugau

SEQ ID NO: 1425978 - RNA, 19 nt, Homo sapiens
  misc_RNA (1)...(19): siRNA sense strand
ugaugucacuggagaagaa

SEQ ID NO: 1425979 - RNA, 19 nt, Homo sapiens
  misc_RNA (1)...(19): siRNA sense strand
gagcauagugggcuguauu

SEQ ID NO: 1425980 - RNA, 19 nt, Homo sapiens
  misc_RNA (1)...(19): siRNA sense strand
acacuucguugccacauug

SEQ ID NO: 1425981 - RNA, 19 nt, Homo sapiens
  misc_RNA (1)...(19): siRNA sense strand
gcuguggccuacaucauug

SEQ ID NO: 1425982 - RNA, 19 nt, Homo sapiens
  misc_RNA (1)...(19): siRNA sense strand
ccaagcggcugcagaagca

SEQ ID NO: 1425983 - RNA, 19 nt, Homo sapiens
  misc_RNA (1)...(19): siRNA sense strand
cagagugggugacagacaa

SEQ ID NO: 1425984 - RNA, 19 nt, Homo sapiens
  misc_RNA (1)...(19): siRNA sense strand
agccagaacuucaccuuga

SEQ ID NO: 1425985 - RNA, 19 nt, Homo sapiens
  misc_RNA (1)...(19): siRNA sense strand
gagaugacgcuggcaacua

SEQ ID NO: 1425986 - RNA, 19 nt, Homo sapiens
  misc_RNA (1)...(19): siRNA sense strand
cgccacagcacaagugaua

SEQ ID NO: 1425987 - RNA, 19 nt, Homo sapiens
  misc_RNA (1)...(19): siRNA sense strand
gaggaggccauguuccauu

SEQ ID NO: 1425988 - RNA, 19 nt, Homo sapiens
  misc_RNA (1)...(19): siRNA sense strand
gguaugaggaggccauguu

SEQ ID NO: 1425989 - RNA, 19 nt, Homo sapiens
  misc_RNA (1)...(19): siRNA sense strand
uugaagacaugccgcuauu

SEQ ID NO: 1425990 - RNA, 19 nt, Homo sapiens
  misc_RNA (1)...(19): siRNA sense strand
ccaauauugcugaaaguga

SEQ ID NO: 1425991 - RNA, 19 nt, Homo sapiens
  misc_RNA (1)...(19): siRNA sense strand
gcacaagugauaagaugca

SEQ ID NO: 1425992 - RNA, 19 nt, Homo sapiens
  misc_RNA (1)...(19): siRNA sense strand
gcagagauccaagaagaag

SEQ ID NO: 1425993 - RNA, 19 nt, Homo sapiens
  misc_RNA (1)...(19): siRNA sense strand
gcgaggagccagagaugga

SEQ ID NO: 1425994 - RNA, 19 nt, Homo sapiens
  misc_RNA (1)...(19): siRNA sense strand
gccaacgccuccuucaaca

SEQ ID NO: 1425995 - RNA, 19 nt, Homo sapiens
  misc_RNA (1)...(19): siRNA sense strand
cauguuccauugccaguuc

SEQ ID NO: 1425996 - RNA, 19 nt, Homo sapiens
  misc_RNA (1)...(19): siRNA sense strand
acacuugcauugccuccaa

SEQ ID NO: 1425997 - RNA, 19 nt, Homo sapiens
  misc_RNA (1)...(19): siRNA sense strand
gcaagaagcgcugcaaagc

SEQ ID NO: 1425998 - RNA, 19 nt, Homo sapiens
  misc_RNA (1)...(19): siRNA sense strand
caacgccuccuucaacauc

SEQ ID NO: 1425999 - RNA, 19 nt, Homo sapiens
  misc_RNA (1)...(19): siRNA sense strand
ggcagcagccugagcuuug

SEQ ID NO: 1426000 - RNA, 19 nt, Homo sapiens
  misc_RNA (1)...(19): siRNA sense strand
aagaugauccagaccauug

SEQ ID NO: 1426001 - RNA, 19 nt, Homo sapiens
  misc_RNA (1)...(19): siRNA sense strand
agaugacgcuggcaacuac

SEQ ID NO: 1426002 - RNA, 19 nt, Homo sapiens
  misc_RNA (1)...(19): siRNA sense strand
ccucaacggugggccuuug

SEQ ID NO: 1426003 - RNA, 19 nt, Homo sapiens
  misc_RNA (1)...(19): siRNA sense strand
ucaccuagcagagauugaa

SEQ ID NO: 1426004 - RNA, 19 nt, Homo sapiens
  misc_RNA (1)...(19): siRNA sense strand
cagcugguccugagcauag

SEQ ID NO: 1426005 - RNA, 19 nt, Homo sapiens
  misc_RNA (1)...(19): siRNA sense strand
ggccaauauugcugaaagu

SEQ ID NO: 1426006 - RNA, 19 nt, Homo sapiens
  misc_RNA (1)...(19): siRNA sense strand
aggaggccauguuccauug

SEQ ID NO: 1426007 - RNA, 19 nt, Homo sapiens
  misc_RNA (1)...(19): siRNA sense strand
cauugcugaugaaagcuuu

SEQ ID NO: 1426008 - RNA, 19 nt, Homo sapiens
  misc_RNA (1)...(19): siRNA sense strand
aaccagagcguacgacugu

SEQ ID NO: 1426009 - RNA, 19 nt, Homo sapiens
  misc_RNA (1)...(19): siRNA sense strand
aagaagaaguggccuugac

SEQ ID NO: 1426010 - RNA, 19 nt, Homo sapiens
  misc_RNA (1)...(19): siRNA sense strand
aacuucaccuugagcauug

SEQ ID NO: 1426011 - RNA, 19 nt, Homo sapiens
  misc_RNA (1)...(19): siRNA sense strand
ccacagcacaagugauaag

SEQ ID NO: 1426012 - RNA, 19 nt, Homo sapiens
  misc_RNA (1)...(19): siRNA sense strand
acaagaugauccagaccau

SEQ ID NO: 1426013 - RNA, 19 nt, Homo sapiens
  misc_RNA (1)...(19): siRNA sense strand
gggcagcagccugagcuuu

SEQ ID NO: 1426014 - RNA, 19 nt, Homo sapiens
  misc_RNA (1)...(19): siRNA sense strand
caagaugauccagaccauu

SEQ ID NO: 1426015 - RNA, 19 nt, Homo sapiens
  misc_RNA (1)...(19): siRNA sense strand
cagagcaaccacacaguca

SEQ ID NO: 1426016 - RNA, 19 nt, Homo sapiens
  misc_RNA (1)...(19): siRNA sense strand
ccagauucgugcccauguc

SEQ ID NO: 1426017 - RNA, 19 nt, Homo sapiens
  misc_RNA (1)...(19): siRNA sense strand
uggccaauauugcugaaag

SEQ ID NO: 1426018 - RNA, 19 nt, Homo sapiens
  misc_RNA (1)...(19): siRNA sense strand
gggaucuaccgcugcauug

SEQ ID NO: 1426019 - RNA, 19 nt, Homo sapiens
  misc_RNA (1)...(19): siRNA sense strand
gccagaacuucaccuugag

SEQ ID NO: 1426020 - RNA, 19 nt, Homo sapiens
  misc_RNA (1)...(19): siRNA sense strand
gcagcagccugagcuuugc

SEQ ID NO: 1426021 - RNA, 19 nt, Homo sapiens
  misc_RNA (1)...(19): siRNA sense strand
gcagccagaacuucaccuu

SEQ ID NO: 1426022 - RNA, 19 nt, Homo sapiens
  misc_RNA (1)...(19): siRNA sense strand
augagacucccaucacuaa

SEQ ID NO: 1426023 - RNA, 19 nt, Homo sapiens
  misc_RNA (1)...(19): siRNA sense strand
guacccagacagccauugu

SEQ ID NO: 1426024 - RNA, 19 nt, Homo sapiens
  misc_RNA (1)...(19): siRNA sense strand
gcaguggcucuuugaggau

SEQ ID NO: 1426025 - RNA, 19 nt, Homo sapiens
  misc_RNA (1)...(19): siRNA sense strand
acgcugggacccugcauuu

SEQ ID NO: 1426026 - RNA, 19 nt, Homo sapiens
  misc_RNA (1)...(19): siRNA sense strand
aagacaugccgcuauuuga

SEQ ID NO: 1426027 - RNA, 19 nt, Homo sapiens
  misc_RNA (1)...(19): siRNA sense strand
acacuucaccuagcagaga

SEQ ID NO: 1426028 - RNA, 19 nt, Homo sapiens
  misc_RNA (1)...(19): siRNA sense strand
gcauugcugaugaaagcuu

SEQ ID NO: 1426029 - RNA, 19 nt, Homo sapiens
  misc_RNA (1)...(19): siRNA sense strand
aaacgccacagcacaagug

SEQ ID NO: 1426030 - RNA, 19 nt, Homo sapiens
  misc_RNA (1)...(19): siRNA sense strand
ugaagacaugccgcuauuu

SEQ ID NO: 1426031 - RNA, 19 nt, Homo sapiens
  misc_RNA (1)...(19): siRNA sense strand
guaugaggaggccauguuc

SEQ ID NO: 1426032 - RNA, 19 nt, Homo sapiens
  misc_RNA (1)...(19): siRNA sense strand
cacacuucguugccacauu

SEQ ID NO: 1426033 - RNA, 19 nt, Homo sapiens
  misc_RNA (1)...(19): siRNA sense strand
cagccauugucuucaucaa

SEQ ID NO: 1426034 - RNA, 19 nt, Homo sapiens
  misc_RNA (1)...(19): siRNA sense strand
gaugaugucacuggagaag

SEQ ID NO: 1426035 - RNA, 19 nt, Homo sapiens
  misc_RNA (1)...(19): siRNA sense strand
aaagugaugcuggugucua

SEQ ID NO: 1426036 - RNA, 19 nt, Homo sapiens
  misc_RNA (1)...(19): siRNA sense strand
gcuaaacccuguucuaaua

SEQ ID NO: 1426037 - RNA, 19 nt, Homo sapiens
  misc_RNA (1)...(19): siRNA sense strand
gaaaugacccugaauguga

SEQ ID NO: 1426038 - RNA, 19 nt, Homo sapiens
  misc_RNA (1)...(19): siRNA sense strand
ccaaagagaacacaaauaa

SEQ ID NO: 1426039 - RNA, 19 nt, Homo sapiens
  misc_RNA (1)...(19): siRNA sense strand
gaaauuaccacauugaaga

SEQ ID NO: 1426040 - RNA, 19 nt, Homo sapiens
  misc_RNA (1)...(19): siRNA sense strand
cuacacagauugaggcuaa

SEQ ID NO: 1426041 - RNA, 19 nt, Homo sapiens
  misc_RNA (1)...(19): siRNA sense strand
ggaucaacuuggagauuua

SEQ ID NO: 1426042 - RNA, 19 nt, Homo sapiens
  misc_RNA (1)...(19): siRNA sense strand
caaauaaauuggacagugu

SEQ ID NO: 1426043 - RNA, 19 nt, Homo sapiens
  misc_RNA (1)...(19): siRNA sense strand
gcaaagaugccgucagcua

SEQ ID NO: 1426044 - RNA, 19 nt, Homo sapiens
  misc_RNA (1)...(19): siRNA sense strand
gauccuggcuuuggaauau

SEQ ID NO: 1426045 - RNA, 19 nt, Homo sapiens
  misc_RNA (1)...(19): siRNA sense strand
uguaaaggcuggugaaaga

SEQ ID NO: 1426046 - RNA, 19 nt, Homo sapiens
  misc_RNA (1)...(19): siRNA sense strand
guacuauugucccuucuaa

SEQ ID NO: 1426047 - RNA, 19 nt, Homo sapiens
  misc_RNA (1)...(19): siRNA sense strand
gaauggcaguucuuguaaa

SEQ ID NO: 1426048 - RNA, 19 nt, Homo sapiens
  misc_RNA (1)...(19): siRNA sense strand
gauguuggacugaaugaua

SEQ ID NO: 1426049 - RNA, 19 nt, Homo sapiens
  misc_RNA (1)...(19): siRNA sense strand
gaucuuagaccacgagcua

SEQ ID NO: 1426050 - RNA, 19 nt, Homo sapiens
  misc_RNA (1)...(19): siRNA sense strand
gguauuguccuucuuguaa

SEQ ID NO: 1426051 - RNA, 19 nt, Homo sapiens
  misc_RNA (1)...(19): siRNA sense strand
ggugaaagacucaagauga

SEQ ID NO: 1426052 - RNA, 19 nt, Homo sapiens
  misc_RNA (1)...(19): siRNA sense strand
cgaagcagguguucacaga

SEQ ID NO: 1426053 - RNA, 19 nt, Homo sapiens
  misc_RNA (1)...(19): siRNA sense strand
aagcauaaauccaaagaga

SEQ ID NO: 1426054 - RNA, 19 nt, Homo sapiens
  misc_RNA (1)...(19): siRNA sense strand
gggaauggcuuguguuggu

SEQ ID NO: 1426055 - RNA, 19 nt, Homo sapiens
  misc_RNA (1)...(19): siRNA sense strand
agaaagcgguacucuagaa

SEQ ID NO: 1426056 - RNA, 19 nt, Homo sapiens
  misc_RNA (1)...(19): siRNA sense strand
gcagaaauuaccacauuga

SEQ ID NO: 1426057 - RNA, 19 nt, Homo sapiens
  misc_RNA (1)...(19): siRNA sense strand
acaaagaggauucugguuu

SEQ ID NO: 1426058 - RNA, 19 nt, Homo sapiens
  misc_RNA (1)...(19): siRNA sense strand
ggaauucauggucgaagua

SEQ ID NO: 1426059 - RNA, 19 nt, Homo sapiens
  misc_RNA (1)...(19): siRNA sense strand
uguacuggcugguggauuu

SEQ ID NO: 1426060 - RNA, 19 nt, Homo sapiens
  misc_RNA (1)...(19): siRNA sense strand
ccagaaagcgguacucuag

SEQ ID NO: 1426061 - RNA, 19 nt, Homo sapiens
  misc_RNA (1)...(19): siRNA sense strand
gagagaauguacuauuguc

SEQ ID NO: 1426062 - RNA, 19 nt, Homo sapiens
  misc_RNA (1)...(19): siRNA sense strand
acaugcagcuucuguguga

SEQ ID NO: 1426063 - RNA, 19 nt, Homo sapiens
  misc_RNA (1)...(19): siRNA sense strand
gcucgugcccgucuuauug

SEQ ID NO: 1426064 - RNA, 19 nt, Homo sapiens
  misc_RNA (1)...(19): siRNA sense strand
gaagacguuauuuaccaua

SEQ ID NO: 1426065 - RNA, 19 nt, Homo sapiens
  misc_RNA (1)...(19): siRNA sense strand
aaacuccacugaagaaugg

SEQ ID NO: 1426066 - RNA, 19 nt, Homo sapiens
  misc_RNA (1)...(19): siRNA sense strand
gaaagcgguacucuagaaa

SEQ ID NO: 1426067 - RNA, 19 nt, Homo sapiens
  misc_RNA (1)...(19): siRNA sense strand
gauacagguucgcaccauu

SEQ ID NO: 1426068 - RNA, 19 nt, Homo sapiens
  misc_RNA (1)...(19): siRNA sense strand
agaaaugaaugucaaggau

SEQ ID NO: 1426069 - RNA, 19 nt, Homo sapiens
  misc_RNA (1)...(19): siRNA sense strand
guauuguccuucuuguaaa

SEQ ID NO: 1426070 - RNA, 19 nt, Homo sapiens
  misc_RNA (1)...(19): siRNA sense strand
guaauguggcuuaucauau

SEQ ID NO: 1426071 - RNA, 19 nt, Homo sapiens
  misc_RNA (1)...(19): siRNA sense strand
gaacuucgugugaaaauuu

SEQ ID NO: 1426072 - RNA, 19 nt, Homo sapiens
  misc_RNA (1)...(19): siRNA sense strand
gcgguacucuagaaaugaa

SEQ ID NO: 1426073 - RNA, 19 nt, Homo sapiens
  misc_RNA (1)...(19): siRNA sense strand
cagaagaggaauacuggua

SEQ ID NO: 1426074 - RNA, 19 nt, Homo sapiens
  misc_RNA (1)...(19): siRNA sense strand
aauguaauguggcuuauca

SEQ ID NO: 1426075 - RNA, 19 nt, Homo sapiens
  misc_RNA (1)...(19): siRNA sense strand
gguaggaccuuccaaucag

SEQ ID NO: 1426076 - RNA, 19 nt, Homo sapiens
  misc_RNA (1)...(19): siRNA sense strand
uggaucaacuuggagauuu

SEQ ID NO: 1426077 - RNA, 19 nt, Homo sapiens
  misc_RNA (1)...(19): siRNA sense strand
cauauuuacugucugaauc

SEQ ID NO: 1426078 - RNA, 19 nt, Homo sapiens
  misc_RNA (1)...(19): siRNA sense strand
augcagaaauuaccacauu

SEQ ID NO: 1426079 - RNA, 19 nt, Homo sapiens
  misc_RNA (1)...(19): siRNA sense strand
ggugaugugguaaugguua

SEQ ID NO: 1426080 - RNA, 19 nt, Homo sapiens
  misc_RNA (1)...(19): siRNA sense strand
aaauguuggugauguggua

SEQ ID NO: 1426081 - RNA, 19 nt, Homo sapiens
  misc_RNA (1)...(19): siRNA sense strand
gaagcacacauacauagug

SEQ ID NO: 1426082 - RNA, 19 nt, Homo sapiens
  misc_RNA (1)...(19): siRNA sense strand
uacuagagcuucugaugga

SEQ ID NO: 1426083 - RNA, 19 nt, Homo sapiens
  misc_RNA (1)...(19): siRNA sense strand
uaugaugaauacccagaaa

SEQ ID NO: 1426084 - RNA, 19 nt, Homo sapiens
  misc_RNA (1)...(19): siRNA sense strand
ggaaaauggauauaccuua

SEQ ID NO: 1426085 - RNA, 19 nt, Homo sapiens
  misc_RNA (1)...(19): siRNA sense strand
uggauaaagucccagaaga

SEQ ID NO: 1426086 - RNA, 19 nt, Homo sapiens
  misc_RNA (1)...(19): siRNA sense strand
gaacuaaauguuggugaug

SEQ ID NO: 1426087 - RNA, 19 nt, Homo sapiens
  misc_RNA (1)...(19): siRNA sense strand
uaauaguccaccuaaagua

SEQ ID NO: 1426088 - RNA, 19 nt, Homo sapiens
  misc_RNA (1)...(19): siRNA sense strand
acgagagaauguacuauug

SEQ ID NO: 1426089 - RNA, 19 nt, Homo sapiens
  misc_RNA (1)...(19): siRNA sense strand
uaaagucccagaagaggaa

SEQ ID NO: 1426090 - RNA, 19 nt, Homo sapiens
  misc_RNA (1)...(19): siRNA sense strand
uccaagacgugcaccauug

SEQ ID NO: 1426091 - RNA, 19 nt, Homo sapiens
  misc_RNA (1)...(19): siRNA sense strand
gcauaaauccaaagagaac

SEQ ID NO: 1426092 - RNA, 19 nt, Homo sapiens
  misc_RNA (1)...(19): siRNA sense strand
ggauaaagucccagaagag

SEQ ID NO: 1426093 - RNA, 19 nt, Homo sapiens
  misc_RNA (1)...(19): siRNA sense strand
caacaugcagcuucugugu

SEQ ID NO: 1426094 - RNA, 19 nt, Homo sapiens
  misc_RNA (1)...(19): siRNA sense strand
gcgaaaugacccugaaugu

SEQ ID NO: 1426095 - RNA, 19 nt, Homo sapiens
  misc_RNA (1)...(19): siRNA sense strand
gugaugugguaaugguuaa

SEQ ID NO: 1426096 - RNA, 19 nt, Homo sapiens
  misc_RNA (1)...(19): siRNA sense strand
gcaaaacuccacugaagaa

SEQ ID NO: 1426097 - RNA, 19 nt, Homo sapiens
  misc_RNA (1)...(19): siRNA sense strand
aaagaggauucugguuuga

SEQ ID NO: 1426098 - RNA, 19 nt, Homo sapiens
  misc_RNA (1)...(19): siRNA sense strand
ugaacuaaauguuggugau

SEQ ID NO: 1426099 - RNA, 19 nt, Homo sapiens
  misc_RNA (1)...(19): siRNA sense strand
aagcgguacucuagaaaug

SEQ ID NO: 1426100 - RNA, 19 nt, Homo sapiens
  misc_RNA (1)...(19): siRNA sense strand
cugaugaagacguuauuua

SEQ ID NO: 1426101 - RNA, 19 nt, Homo sapiens
  misc_RNA (1)...(19): siRNA sense strand
ccaaucagccaucuacauc

SEQ ID NO: 1426102 - RNA, 19 nt, Homo sapiens
  misc_RNA (1)...(19): siRNA sense strand
gaauucauggucgaaguaa

SEQ ID NO: 1426103 - RNA, 19 nt, Homo sapiens
  misc_RNA (1)...(19): siRNA sense strand
gaaugucaaggaucuuaga

SEQ ID NO: 1426104 - RNA, 19 nt, Homo sapiens
  misc_RNA (1)...(19): siRNA sense strand
aaaugaaugucaaggaucu

SEQ ID NO: 1426105 - RNA, 19 nt, Homo sapiens
  misc_RNA (1)...(19): siRNA sense strand
guucuaauaguccaccuaa

SEQ ID NO: 1426106 - RNA, 19 nt, Homo sapiens
  misc_RNA (1)...(19): siRNA sense strand
ugauauaauucagcugcua

SEQ ID NO: 1426107 - RNA, 19 nt, Homo sapiens
  misc_RNA (1)...(19): siRNA sense strand
gcaagcaguuggaaaaugg

SEQ ID NO: 1426108 - RNA, 19 nt, Homo sapiens
  misc_RNA (1)...(19): siRNA sense strand
uguaauguggcuuaucaua

SEQ ID NO: 1426109 - RNA, 19 nt, Homo sapiens
  misc_RNA (1)...(19): siRNA sense strand
aaaagaacuucgugugaaa

SEQ ID NO: 1426110 - RNA, 19 nt, Homo sapiens
  misc_RNA (1)...(19): siRNA sense strand
guaaaaggacuaauggaaa

SEQ ID NO: 1426111 - RNA, 19 nt, Homo sapiens
  misc_RNA (1)...(19): siRNA sense strand
gaggcuaaacccuguucua

SEQ ID NO: 1426112 - RNA, 19 nt, Homo sapiens
  misc_RNA (1)...(19): siRNA sense strand
ugauuccagugaaguugua

SEQ ID NO: 1426113 - RNA, 19 nt, Homo sapiens
  misc_RNA (1)...(19): siRNA sense strand
agaggauucugguuugaug

SEQ ID NO: 1426114 - RNA, 19 nt, Homo sapiens
  misc_RNA (1)...(19): siRNA sense strand
ggguaggaccuuccaauca

SEQ ID NO: 1426115 - RNA, 19 nt, Homo sapiens
  misc_RNA (1)...(19): siRNA sense strand
aauaguccaccuaaaguaa

SEQ ID NO: 1426116 - RNA, 19 nt, Homo sapiens
  misc_RNA (1)...(19): siRNA sense strand
ggauacagguucgcaccau

SEQ ID NO: 1426117 - RNA, 19 nt, Homo sapiens
  misc_RNA (1)...(19): siRNA sense strand
aagaugccgucagcuagua

SEQ ID NO: 1426118 - RNA, 19 nt, Homo sapiens
  misc_RNA (1)...(19): siRNA sense strand
uggaaugaacuaaauguug

SEQ ID NO: 1426119 - RNA, 19 nt, Homo sapiens
  misc_RNA (1)...(19): siRNA sense strand
gcccagacccugaucaucu

SEQ ID NO: 1426120 - RNA, 19 nt, Homo sapiens
  misc_RNA (1)...(19): siRNA sense strand
gaggacgugucucgcaaag

SEQ ID NO: 1426121 - RNA, 19 nt, Homo sapiens
  misc_RNA (1)...(19): siRNA sense strand
cgaaaugacccugaaugug

SEQ ID NO: 1426122 - RNA, 19 nt, Homo sapiens
  misc_RNA (1)...(19): siRNA sense strand
uaaacccuguucuaauagu

SEQ ID NO: 1426123 - RNA, 19 nt, Homo sapiens
  misc_RNA (1)...(19): siRNA sense strand
cugguuugaugcagaaauu

SEQ ID NO: 1426124 - RNA, 19 nt, Homo sapiens
  misc_RNA (1)...(19): siRNA sense strand
ccaagacgugcaccauuga

SEQ ID NO: 1426125 - RNA, 19 nt, Homo sapiens
  misc_RNA (1)...(19): siRNA sense strand
ggaaacaugaacccaacau

SEQ ID NO: 1426126 - RNA, 19 nt, Homo sapiens
  misc_RNA (1)...(19): siRNA sense strand
ucuaauaguccaccuaaag

SEQ ID NO: 1426127 - RNA, 19 nt, Homo sapiens
  misc_RNA (1)...(19): siRNA sense strand
acuuggagauuuagaguuc

SEQ ID NO: 1426128 - RNA, 19 nt, Homo sapiens
  misc_RNA (1)...(19): siRNA sense strand
caacuuggagauuuagagu

SEQ ID NO: 1426129 - RNA, 19 nt, Homo sapiens
  misc_RNA (1)...(19): siRNA sense strand
cgagagaauguacuauugu

SEQ ID NO: 1426130 - RNA, 19 nt, Homo sapiens
  misc_RNA (1)...(19): siRNA sense strand
cagaaauuaccacauugaa

SEQ ID NO: 1426131 - RNA, 19 nt, Homo sapiens
  misc_RNA (1)...(19): siRNA sense strand
gaugugguaaugguuaauu

SEQ ID NO: 1426132 - RNA, 19 nt, Homo sapiens
  misc_RNA (1)...(19): siRNA sense strand
ccacgagcuagaaccauuu

SEQ ID NO: 1426133 - RNA, 19 nt, Homo sapiens
  misc_RNA (1)...(19): siRNA sense strand
cagcuucugugugaugaau

SEQ ID NO: 1426134 - RNA, 19 nt, Homo sapiens
  misc_RNA (1)...(19): siRNA sense strand
ggucguacgagagaaugua

SEQ ID NO: 1426135 - RNA, 19 nt, Homo sapiens
  misc_RNA (1)...(19): siRNA sense strand
gcuucugugugaugaaugu

SEQ ID NO: 1426136 - RNA, 19 nt, Homo sapiens
  misc_RNA (1)...(19): siRNA sense strand
gcuaaacccuguucuaaua

SEQ ID NO: 1426137 - RNA, 19 nt, Homo sapiens
  misc_RNA (1)...(19): siRNA sense strand
gagauuaugucuacguuua

SEQ ID NO: 1426138 - RNA, 19 nt, Homo sapiens
  misc_RNA (1)...(19): siRNA sense strand
ggaggaagaucagcaaaua

SEQ ID NO: 1426139 - RNA, 19 nt, Homo sapiens
  misc_RNA (1)...(19): siRNA sense strand
gaaaugacccugaauguga

SEQ ID NO: 1426140 - RNA, 19 nt, Homo sapiens
  misc_RNA (1)...(19): siRNA sense strand
caacagauaugauggcauu

SEQ ID NO: 1426141 - RNA, 19 nt, Homo sapiens
  misc_RNA (1)...(19): siRNA sense strand
caaauaugcuccugaagaa

SEQ ID NO: 1426142 - RNA, 19 nt, Homo sapiens
  misc_RNA (1)...(19): siRNA sense strand
ccaaagagaacacaaauaa

SEQ ID NO: 1426143 - RNA, 19 nt, Homo sapiens
  misc_RNA (1)...(19): siRNA sense strand
gaaauuaccacauugaaga

SEQ ID NO: 1426144 - RNA, 19 nt, Homo sapiens
  misc_RNA (1)...(19): siRNA sense strand
gcaaauaugcuccugaaga

SEQ ID NO: 1426145 - RNA, 19 nt, Homo sapiens
  misc_RNA (1)...(19): siRNA sense strand
guacaaagcaucagauuca

SEQ ID NO: 1426146 - RNA, 19 nt, Homo sapiens
  misc_RNA (1)...(19): siRNA sense strand
cuacacagauugaggcuaa

SEQ ID NO: 1426147 - RNA, 19 nt, Homo sapiens
  misc_RNA (1)...(19): siRNA sense strand
ggaucaacuuggagauuua

SEQ ID NO: 1426148 - RNA, 19 nt, Homo sapiens
  misc_RNA (1)...(19): siRNA sense strand
gaugaugacuguccaagug

SEQ ID NO: 1426149 - RNA, 19 nt, Homo sapiens
  misc_RNA (1)...(19): siRNA sense strand
gaagugcuuucacaucuug

SEQ ID NO: 1426150 - RNA, 19 nt, Homo sapiens
  misc_RNA (1)...(19): siRNA sense strand
caaauaaauuggacagugu

SEQ ID NO: 1426151 - RNA, 19 nt, Homo sapiens
  misc_RNA (1)...(19): siRNA sense strand
gcaaagaugccgucagcua

SEQ ID NO: 1426152 - RNA, 19 nt, Homo sapiens
  misc_RNA (1)...(19): siRNA sense strand
cacaaugucuguaaagauu

SEQ ID NO: 1426153 - RNA, 19 nt, Homo sapiens
  misc_RNA (1)...(19): siRNA sense strand
gauccuggcuuuggaauau

SEQ ID NO: 1426154 - RNA, 19 nt, Homo sapiens
  misc_RNA (1)...(19): siRNA sense strand
aagaagagaugauguugaa

SEQ ID NO: 1426155 - RNA, 19 nt, Homo sapiens
  misc_RNA (1)...(19): siRNA sense strand
uguaaaggcuggugaaaga

SEQ ID NO: 1426156 - RNA, 19 nt, Homo sapiens
  misc_RNA (1)...(19): siRNA sense strand
guacuauugucccuucuaa

SEQ ID NO: 1426157 - RNA, 19 nt, Homo sapiens
  misc_RNA (1)...(19): siRNA sense strand
gaauggcaguucuuguaaa

SEQ ID NO: 1426158 - RNA, 19 nt, Homo sapiens
  misc_RNA (1)...(19): siRNA sense strand
gauguuggacugaaugaua

SEQ ID NO: 1426159 - RNA, 19 nt, Homo sapiens
  misc_RNA (1)...(19): siRNA sense strand
gaucuuagaccacgagcua

SEQ ID NO: 1426160 - RNA, 19 nt, Homo sapiens
  misc_RNA (1)...(19): siRNA sense strand
gguauuguccuucuuguaa

SEQ ID NO: 1426161 - RNA, 19 nt, Homo sapiens
  misc_RNA (1)...(19): siRNA sense strand
ggugaaagacucaagauga

SEQ ID NO: 1426162 - RNA, 19 nt, Homo sapiens
  misc_RNA (1)...(19): siRNA sense strand
ucaaggagauuaugucuac

SEQ ID NO: 1426163 - RNA, 19 nt, Homo sapiens
  misc_RNA (1)...(19): siRNA sense strand
cgaagcagguguucacaga

SEQ ID NO: 1426164 - RNA, 19 nt, Homo sapiens
  misc_RNA (1)...(19): siRNA sense strand
gaagaaggcaacagauaug

SEQ ID NO: 1426165 - RNA, 19 nt, Homo sapiens
  misc_RNA (1)...(19): siRNA sense strand
aagcauaaauccaaagaga

SEQ ID NO: 1426166 - RNA, 19 nt, Homo sapiens
  misc_RNA (1)...(19): siRNA sense strand
ccaagugccuccaaagugu

SEQ ID NO: 1426167 - RNA, 19 nt, Homo sapiens
  misc_RNA (1)...(19): siRNA sense strand
gaaauacuggccagagauu

SEQ ID NO: 1426168 - RNA, 19 nt, Homo sapiens
  misc_RNA (1)...(19): siRNA sense strand
gggaauggcuuguguuggu

SEQ ID NO: 1426169 - RNA, 19 nt, Homo sapiens
  misc_RNA (1)...(19): siRNA sense strand
agaaagcgguacucuagaa

SEQ ID NO: 1426170 - RNA, 19 nt, Homo sapiens
  misc_RNA (1)...(19): siRNA sense strand
gcagguuacccuucagaua

SEQ ID NO: 1426171 - RNA, 19 nt, Homo sapiens
  misc_RNA (1)...(19): siRNA sense strand
ggccagagauuucaucaag

SEQ ID NO: 1426172 - RNA, 19 nt, Homo sapiens
  misc_RNA (1)...(19): siRNA sense strand
aaacugugaugcuccauug

SEQ ID NO: 1426173 - RNA, 19 nt, Homo sapiens
  misc_RNA (1)...(19): siRNA sense strand
gcagaaauuaccacauuga

SEQ ID NO: 1426174 - RNA, 19 nt, Homo sapiens
  misc_RNA (1)...(19): siRNA sense strand
cagguuacccuucagauaa

SEQ ID NO: 1426175 - RNA, 19 nt, Homo sapiens
  misc_RNA (1)...(19): siRNA sense strand
gaaggcaacagauaugaug

SEQ ID NO: 1426176 - RNA, 19 nt, Homo sapiens
  misc_RNA (1)...(19): siRNA sense strand
ggagcagagucucggaauu

SEQ ID NO: 1426177 - RNA, 19 nt, Homo sapiens
  misc_RNA (1)...(19): siRNA sense strand
gagcagagucucggaauug

SEQ ID NO: 1426178 - RNA, 19 nt, Homo sapiens
  misc_RNA (1)...(19): siRNA sense strand
acaaagaggauucugguuu

SEQ ID NO: 1426179 - RNA, 19 nt, Homo sapiens
  misc_RNA (1)...(19): siRNA sense strand
ggaauucauggucgaagua

SEQ ID NO: 1426180 - RNA, 19 nt, Homo sapiens
  misc_RNA (1)...(19): siRNA sense strand
uguacuggcugguggauuu

SEQ ID NO: 1426181 - RNA, 19 nt, Homo sapiens
  misc_RNA (1)...(19): siRNA sense strand
cagauaugauggcauuuau

SEQ ID NO: 1426182 - RNA, 19 nt, Homo sapiens
  misc_RNA (1)...(19): siRNA sense strand
ccagaaagcgguacucuag

SEQ ID NO: 1426183 - RNA, 19 nt, Homo sapiens
  misc_RNA (1)...(19): siRNA sense strand
ggccagaauuacaucauga

SEQ ID NO: 1426184 - RNA, 19 nt, Homo sapiens
  misc_RNA (1)...(19): siRNA sense strand
ggaauagaacggucaagga

SEQ ID NO: 1426185 - RNA, 19 nt, Homo sapiens
  misc_RNA (1)...(19): siRNA sense strand
gagagaauguacuauuguc

SEQ ID NO: 1426186 - RNA, 19 nt, Homo sapiens
  misc_RNA (1)...(19): siRNA sense strand
acaugcagcuucuguguga

SEQ ID NO: 1426187 - RNA, 19 nt, Homo sapiens
  misc_RNA (1)...(19): siRNA sense strand
gcucgugcccgucuuauug

SEQ ID NO: 1426188 - RNA, 19 nt, Homo sapiens
  misc_RNA (1)...(19): siRNA sense strand
gaagacguuauuuaccaua

SEQ ID NO: 1426189 - RNA, 19 nt, Homo sapiens
  misc_RNA (1)...(19): siRNA sense strand
aaacuccacugaagaaugg

SEQ ID NO: 1426190 - RNA, 19 nt, Homo sapiens
  misc_RNA (1)...(19): siRNA sense strand
gaaagcgguacucuagaaa

SEQ ID NO: 1426191 - RNA, 19 nt, Homo sapiens
  misc_RNA (1)...(19): siRNA sense strand
gauacagguucgcaccauu

SEQ ID NO: 1426192 - RNA, 19 nt, Homo sapiens
  misc_RNA (1)...(19): siRNA sense strand
ggaauuggagagcugguaa

SEQ ID NO: 1426193 - RNA, 19 nt, Homo sapiens
  misc_RNA (1)...(19): siRNA sense strand
agaaaugaaugucaaggau

SEQ ID NO: 1426194 - RNA, 19 nt, Homo sapiens
  misc_RNA (1)...(19): siRNA sense strand
gugaaauacuggccagaga

SEQ ID NO: 1426195 - RNA, 19 nt, Homo sapiens
  misc_RNA (1)...(19): siRNA sense strand
guauuguccuucuuguaaa

SEQ ID NO: 1426196 - RNA, 19 nt, Homo sapiens
  misc_RNA (1)...(19): siRNA sense strand
guaauguggcuuaucauau

SEQ ID NO: 1426197 - RNA, 19 nt, Homo sapiens
  misc_RNA (1)...(19): siRNA sense strand
gaacuucgugugaaaauuu

SEQ ID NO: 1426198 - RNA, 19 nt, Homo sapiens
  misc_RNA (1)...(19): siRNA sense strand
gcgguacucuagaaaugaa

SEQ ID NO: 1426199 - RNA, 19 nt, Homo sapiens
  misc_RNA (1)...(19): siRNA sense strand
cuaaaggacagucaaagaa

SEQ ID NO: 1426200 - RNA, 19 nt, Homo sapiens
  misc_RNA (1)...(19): siRNA sense strand
cagaagaggaauacuggua

SEQ ID NO: 1426201 - RNA, 19 nt, Homo sapiens
  misc_RNA (1)...(19): siRNA sense strand
aauguaauguggcuuauca

SEQ ID NO: 1426202 - RNA, 19 nt, Homo sapiens
  misc_RNA (1)...(19): siRNA sense strand
ugaagaaggcaacagauau

SEQ ID NO: 1426203 - RNA, 19 nt, Homo sapiens
  misc_RNA (1)...(19): siRNA sense strand
ggcaugaucuuggccagaa

SEQ ID NO: 1426204 - RNA, 19 nt, Homo sapiens
  misc_RNA (1)...(19): siRNA sense strand
gguaggaccuuccaaucag

SEQ ID NO: 1426205 - RNA, 19 nt, Homo sapiens
  misc_RNA (1)...(19): siRNA sense strand
aaaggccaauuucagauga

SEQ ID NO: 1426206 - RNA, 19 nt, Homo sapiens
  misc_RNA (1)...(19): siRNA sense strand
aaaucuugcugguaacaaa

SEQ ID NO: 1426207 - RNA, 19 nt, Homo sapiens
  misc_RNA (1)...(19): siRNA sense strand
uggaucaacuuggagauuu

SEQ ID NO: 1426208 - RNA, 19 nt, Homo sapiens
  misc_RNA (1)...(19): siRNA sense strand
cauauuuacugucugaauc

SEQ ID NO: 1426209 - RNA, 19 nt, Homo sapiens
  misc_RNA (1)...(19): siRNA sense strand
augcagaaauuaccacauu

SEQ ID NO: 1426210 - RNA, 19 nt, Homo sapiens
  misc_RNA (1)...(19): siRNA sense strand
ggugaugugguaaugguua

SEQ ID NO: 1426211 - RNA, 19 nt, Homo sapiens
  misc_RNA (1)...(19): siRNA sense strand
aaauguuggugauguggua

SEQ ID NO: 1426212 - RNA, 19 nt, Homo sapiens
  misc_RNA (1)...(19): siRNA sense strand
gaagcacacauacauagug

SEQ ID NO: 1426213 - RNA, 19 nt, Homo sapiens
  misc_RNA (1)...(19): siRNA sense strand
uacuagagcuucugaugga

SEQ ID NO: 1426214 - RNA, 19 nt, Homo sapiens
  misc_RNA (1)...(19): siRNA sense strand
gaucuuggccagaauuaca

SEQ ID NO: 1426215 - RNA, 19 nt, Homo sapiens
  misc_RNA (1)...(19): siRNA sense strand
ucaacuaacuccucaacag

SEQ ID NO: 1426216 - RNA, 19 nt, Homo sapiens
  misc_RNA (1)...(19): siRNA sense strand
uaugaugaauacccagaaa

SEQ ID NO: 1426217 - RNA, 19 nt, Homo sapiens
  misc_RNA (1)...(19): siRNA sense strand
caacagcaacaucucauca

SEQ ID NO: 1426218 - RNA, 19 nt, Homo sapiens
  misc_RNA (1)...(19): siRNA sense strand
uggauaaagucccagaaga

SEQ ID NO: 1426219 - RNA, 19 nt, Homo sapiens
  misc_RNA (1)...(19): siRNA sense strand
ggaaaauggauauaccuua

SEQ ID NO: 1426220 - RNA, 19 nt, Homo sapiens
  misc_RNA (1)...(19): siRNA sense strand
gaacuaaauguuggugaug

SEQ ID NO: 1426221 - RNA, 19 nt, Homo sapiens
  misc_RNA (1)...(19): siRNA sense strand
uaauaguccaccuaaagua

SEQ ID NO: 1426222 - RNA, 19 nt, Homo sapiens
  misc_RNA (1)...(19): siRNA sense strand
gcugugggaugaagugcuu

SEQ ID NO: 1426223 - RNA, 19 nt, Homo sapiens
  misc_RNA (1)...(19): siRNA sense strand
gaacggucaaggagauuau

SEQ ID NO: 1426224 - RNA, 19 nt, Homo sapiens
  misc_RNA (1)...(19): siRNA sense strand
acgagagaauguacuauug

SEQ ID NO: 1426225 - RNA, 19 nt, Homo sapiens
  misc_RNA (1)...(19): siRNA sense strand
uaaagucccagaagaggaa

SEQ ID NO: 1426226 - RNA, 19 nt, Homo sapiens
  misc_RNA (1)...(19): siRNA sense strand
acagauaugauggcauuua

SEQ ID NO: 1426227 - RNA, 19 nt, Homo sapiens
  misc_RNA (1)...(19): siRNA sense strand
gcugucaggagcuaguuua

SEQ ID NO: 1426228 - RNA, 19 nt, Homo sapiens
  misc_RNA (1)...(19): siRNA sense strand
uccaagacgugcaccauug

SEQ ID NO: 1426229 - RNA, 19 nt, Homo sapiens
  misc_RNA (1)...(19): siRNA sense strand
gcauaaauccaaagagaac

SEQ ID NO: 1426230 - RNA, 19 nt, Homo sapiens
  misc_RNA (1)...(19): siRNA sense strand
uacaguauccagcagguua

SEQ ID NO: 1426231 - RNA, 19 nt, Homo sapiens
  misc_RNA (1)...(19): siRNA sense strand
agccauggauucuugguuu

SEQ ID NO: 1426232 - RNA, 19 nt, Homo sapiens
  misc_RNA (1)...(19): siRNA sense strand
ggauaaagucccagaagag

SEQ ID NO: 1426233 - RNA, 19 nt, Homo sapiens
  misc_RNA (1)...(19): siRNA sense strand
caacaugcagcuucugugu

SEQ ID NO: 1426234 - RNA, 19 nt, Homo sapiens
  misc_RNA (1)...(19): siRNA sense strand
gcgaaaugacccugaaugu

SEQ ID NO: 1426235 - RNA, 19 nt, Homo sapiens
  misc_RNA (1)...(19): siRNA sense strand
gugaugugguaaugguuaa

SEQ ID NO: 1426236 - RNA, 19 nt, Homo sapiens
  misc_RNA (1)...(19): siRNA sense strand
gcgcuaacguugucaagga

SEQ ID NO: 1426237 - RNA, 19 nt, Homo sapiens
  misc_RNA (1)...(19): siRNA sense strand
gaccagcgcuaacguuguc

SEQ ID NO: 1426238 - RNA, 19 nt, Homo sapiens
  misc_RNA (1)...(19): siRNA sense strand
cgcggcagcugcaggauuu

SEQ ID NO: 1426239 - RNA, 19 nt, Homo sapiens
  misc_RNA (1)...(19): siRNA sense strand
ccagaucucucgccguuac

SEQ ID NO: 1426240 - RNA, 19 nt, Homo sapiens
  misc_RNA (1)...(19): siRNA sense strand
ccaaguacgugcucuacac

SEQ ID NO: 1426241 - RNA, 19 nt, Homo sapiens
  misc_RNA (1)...(19): siRNA sense strand
uggaagaagucccggaaca

SEQ ID NO: 1426242 - RNA, 19 nt, Homo sapiens
  misc_RNA (1)...(19): siRNA sense strand
cggcugcucuucgaaguga

SEQ ID NO: 1426243 - RNA, 19 nt, Homo sapiens
  misc_RNA (1)...(19): siRNA sense strand
gaugggacgucaggagaag

SEQ ID NO: 1426244 - RNA, 19 nt, Homo sapiens
  misc_RNA (1)...(19): siRNA sense strand
ggaugggacgucaggagaa

SEQ ID NO: 1426245 - RNA, 19 nt, Homo sapiens
  misc_RNA (1)...(19): siRNA sense strand
guccagaggccgagcaguu

SEQ ID NO: 1426246 - RNA, 19 nt, Homo sapiens
  misc_RNA (1)...(19): siRNA sense strand
cugcaggauuucuggaaga

SEQ ID NO: 1426247 - RNA, 19 nt, Homo sapiens
  misc_RNA (1)...(19): siRNA sense strand
gaagugaccagcgcuaacg

SEQ ID NO: 1426248 - RNA, 19 nt, Homo sapiens
  misc_RNA (1)...(19): siRNA sense strand
uugagcggcugcaccgaaa

SEQ ID NO: 1426249 - RNA, 19 nt, Homo sapiens
  misc_RNA (1)...(19): siRNA sense strand
gccguuacucggacuuuga

SEQ ID NO: 1426250 - RNA, 19 nt, Homo sapiens
  misc_RNA (1)...(19): siRNA sense strand
gucaggagaagacgcagaa

SEQ ID NO: 1426251 - RNA, 19 nt, Homo sapiens
  misc_RNA (1)...(19): siRNA sense strand
gcgcuaacguugucaagga

SEQ ID NO: 1426252 - RNA, 19 nt, Homo sapiens
  misc_RNA (1)...(19): siRNA sense strand
gaccagcgcuaacguuguc

SEQ ID NO: 1426253 - RNA, 19 nt, Homo sapiens
  misc_RNA (1)...(19): siRNA sense strand
cgcggcagcugcaggauuu

SEQ ID NO: 1426254 - RNA, 19 nt, Homo sapiens
  misc_RNA (1)...(19): siRNA sense strand
ccagaucucucgccguuac

SEQ ID NO: 1426255 - RNA, 19 nt, Homo sapiens
  misc_RNA (1)...(19): siRNA sense strand
ccaaguacgugcucuacac

SEQ ID NO: 1426256 - RNA, 19 nt, Homo sapiens
  misc_RNA (1)...(19): siRNA sense strand
uggaagaagucccggaaca

SEQ ID NO: 1426257 - RNA, 19 nt, Homo sapiens
  misc_RNA (1)...(19): siRNA sense strand
cggcugcucuucgaaguga

SEQ ID NO: 1426258 - RNA, 19 nt, Homo sapiens
  misc_RNA (1)...(19): siRNA sense strand
gaugggacgucaggagaag

SEQ ID NO: 1426259 - RNA, 19 nt, Homo sapiens
  misc_RNA (1)...(19): siRNA sense strand
ggaugggacgucaggagaa

SEQ ID NO: 1426260 - RNA, 19 nt, Homo sapiens
  misc_RNA (1)...(19): siRNA sense strand
guccagaggccgagcaguu

SEQ ID NO: 1426261 - RNA, 19 nt, Homo sapiens
  misc_RNA (1)...(19): siRNA sense strand
cugcaggauuucuggaaga

SEQ ID NO: 1426262 - RNA, 19 nt, Homo sapiens
  misc_RNA (1)...(19): siRNA sense strand
gaagugaccagcgcuaacg

SEQ ID NO: 1426263 - RNA, 19 nt, Homo sapiens
  misc_RNA (1)...(19): siRNA sense strand
uugagcggcugcaccgaaa

SEQ ID NO: 1426264 - RNA, 19 nt, Homo sapiens
  misc_RNA (1)...(19): siRNA sense strand
gccguuacucggacuuuga

SEQ ID NO: 1426265 - RNA, 19 nt, Homo sapiens
  misc_RNA (1)...(19): siRNA sense strand
gucaggagaagacgcagaa

SEQ ID NO: 1426266 - RNA, 19 nt, Homo sapiens
  misc_RNA (1)...(19): siRNA sense strand
gcaagaaccuuuccaaugg

SEQ ID NO: 1426267 - RNA, 19 nt, Homo sapiens
  misc_RNA (1)...(19): siRNA sense strand
ccaaugggcuguugaacuu

SEQ ID NO: 1426268 - RNA, 19 nt, Homo sapiens
  misc_RNA (1)...(19): siRNA sense strand
caucuucucugugaauuua

SEQ ID NO: 1426269 - RNA, 19 nt, Homo sapiens
  misc_RNA (1)...(19): siRNA sense strand
ccaaagggaucaggaaauu

SEQ ID NO: 1426270 - RNA, 19 nt, Homo sapiens
  misc_RNA (1)...(19): siRNA sense strand
gaauuuaguucucuuucug

SEQ ID NO: 1426271 - RNA, 19 nt, Homo sapiens
  misc_RNA (1)...(19): siRNA sense strand
gugcaacacugucgaaagu

SEQ ID NO: 1426272 - RNA, 19 nt, Homo sapiens
  misc_RNA (1)...(19): siRNA sense strand
gccagacgcuuucccgauu

SEQ ID NO: 1426273 - RNA, 19 nt, Homo sapiens
  misc_RNA (1)...(19): siRNA sense strand
ggucauggccuaccucuuc

SEQ ID NO: 1426274 - RNA, 19 nt, Homo sapiens
  misc_RNA (1)...(19): siRNA sense strand
gaugugaucucugccuuuc

SEQ ID NO: 1426275 - RNA, 19 nt, Homo sapiens
  misc_RNA (1)...(19): siRNA sense strand
ggaaucaggcacagaaauc

SEQ ID NO: 1426276 - RNA, 19 nt, Homo sapiens
  misc_RNA (1)...(19): siRNA sense strand
ccaguuaccuucaccuucu

SEQ ID NO: 1426277 - RNA, 19 nt, Homo sapiens
  misc_RNA (1)...(19): siRNA sense strand
ugaugcagcucgacuggaa

SEQ ID NO: 1426278 - RNA, 19 nt, Homo sapiens
  misc_RNA (1)...(19): siRNA sense strand
aaagggaucaggaaauuga

SEQ ID NO: 1426279 - RNA, 19 nt, Homo sapiens
  misc_RNA (1)...(19): siRNA sense strand
agacucuccucccucaaua

SEQ ID NO: 1426280 - RNA, 19 nt, Homo sapiens
  misc_RNA (1)...(19): siRNA sense strand
gagcauggccagaauggau

SEQ ID NO: 1426281 - RNA, 19 nt, Homo sapiens
  misc_RNA (1)...(19): siRNA sense strand
ucaacagauucaugaagaa

SEQ ID NO: 1426282 - RNA, 19 nt, Homo sapiens
  misc_RNA (1)...(19): siRNA sense strand
ggagcaauaugggaaaugg

SEQ ID NO: 1426283 - RNA, 19 nt, Homo sapiens
  misc_RNA (1)...(19): siRNA sense strand
acucaagcaucaacagauu

SEQ ID NO: 1426284 - RNA, 19 nt, Homo sapiens
  misc_RNA (1)...(19): siRNA sense strand
guaaagccauccagaacac

SEQ ID NO: 1426285 - RNA, 19 nt, Homo sapiens
  misc_RNA (1)...(19): siRNA sense strand
gagcaagaaccuuuccaau

SEQ ID NO: 1426286 - RNA, 19 nt, Homo sapiens
  misc_RNA (1)...(19): siRNA sense strand
gaaagugucaugcggaaaa

SEQ ID NO: 1426287 - RNA, 19 nt, Homo sapiens
  misc_RNA (1)...(19): siRNA sense strand
gcacccaccugagcagcuu

SEQ ID NO: 1426288 - RNA, 19 nt, Homo sapiens
  misc_RNA (1)...(19): siRNA sense strand
ucagugaucccgagacaga

SEQ ID NO: 1426289 - RNA, 19 nt, Homo sapiens
  misc_RNA (1)...(19): siRNA sense strand
ccuccaggccucaccuuua

SEQ ID NO: 1426290 - RNA, 19 nt, Homo sapiens
  misc_RNA (1)...(19): siRNA sense strand
ucuccucccucaauaguga

SEQ ID NO: 1426291 - RNA, 19 nt, Homo sapiens
  misc_RNA (1)...(19): siRNA sense strand
ggagacuugugacgacauc

SEQ ID NO: 1426292 - RNA, 19 nt, Homo sapiens
  misc_RNA (1)...(19): siRNA sense strand
ccgcgucuuucucgucuuu

SEQ ID NO: 1426293 - RNA, 19 nt, Homo sapiens
  misc_RNA (1)...(19): siRNA sense strand
ggccugagcaagaaccuuu

SEQ ID NO: 1426294 - RNA, 19 nt, Homo sapiens
  misc_RNA (1)...(19): siRNA sense strand
gcacaauaggcaccagaga

SEQ ID NO: 1426295 - RNA, 19 nt, Homo sapiens
  misc_RNA (1)...(19): siRNA sense strand
ggacuccucgugugucaau

SEQ ID NO: 1426296 - RNA, 19 nt, Homo sapiens
  misc_RNA (1)...(19): siRNA sense strand
ucacuuuucuccuguguaa

SEQ ID NO: 1426297 - RNA, 19 nt, Homo sapiens
  misc_RNA (1)...(19): siRNA sense strand
ggaccugucugcgccaucu

SEQ ID NO: 1426298 - RNA, 19 nt, Homo sapiens
  misc_RNA (1)...(19): siRNA sense strand
cgagaacacgugucaagau

SEQ ID NO: 1426299 - RNA, 19 nt, Homo sapiens
  misc_RNA (1)...(19): siRNA sense strand
gccgguaccuugcacuauc

SEQ ID NO: 1426300 - RNA, 19 nt, Homo sapiens
  misc_RNA (1)...(19): siRNA sense strand
guucagugaucccgagaca

SEQ ID NO: 1426301 - RNA, 19 nt, Homo sapiens
  misc_RNA (1)...(19): siRNA sense strand
cuccaggccucaccuuuau

SEQ ID NO: 1426302 - RNA, 19 nt, Homo sapiens
  misc_RNA (1)...(19): siRNA sense strand
aaccucagcuccccaguua

SEQ ID NO: 1426303 - RNA, 19 nt, Homo sapiens
  misc_RNA (1)...(19): siRNA sense strand
uaugggaaaugguccaaag

SEQ ID NO: 1426304 - RNA, 19 nt, Homo sapiens
  misc_RNA (1)...(19): siRNA sense strand
ucuggugacucucuggauu

SEQ ID NO: 1426305 - RNA, 19 nt, Homo sapiens
  misc_RNA (1)...(19): siRNA sense strand
guccacagccagacgcuuu

SEQ ID NO: 1426306 - RNA, 19 nt, Homo sapiens
  misc_RNA (1)...(19): siRNA sense strand
ccagacgcuuucccgauuc

SEQ ID NO: 1426307 - RNA, 19 nt, Homo sapiens
  misc_RNA (1)...(19): siRNA sense strand
aucaacagauucaugaaga

SEQ ID NO: 1426308 - RNA, 19 nt, Homo sapiens
  misc_RNA (1)...(19): siRNA sense strand
gucaacuacucaagcauca

SEQ ID NO: 1426309 - RNA, 19 nt, Homo sapiens
  misc_RNA (1)...(19): siRNA sense strand
ccucauggcccacuacgau

SEQ ID NO: 1426310 - RNA, 19 nt, Homo sapiens
  misc_RNA (1)...(19): siRNA sense strand
caccauccagagcaucuua

SEQ ID NO: 1426311 - RNA, 19 nt, Homo sapiens
  misc_RNA (1)...(19): siRNA sense strand
cagaauggauguggucacu

SEQ ID NO: 1426312 - RNA, 19 nt, Homo sapiens
  misc_RNA (1)...(19): siRNA sense strand
aaacugagucugagaugca

SEQ ID NO: 1426313 - RNA, 19 nt, Homo sapiens
  misc_RNA (1)...(19): siRNA sense strand
gccuaccucuucaccauca

SEQ ID NO: 1426314 - RNA, 19 nt, Homo sapiens
  misc_RNA (1)...(19): siRNA sense strand
guaccuugcacuaucucua

SEQ ID NO: 1426315 - RNA, 19 nt, Homo sapiens
  misc_RNA (1)...(19): siRNA sense strand
cagcuuugccguccucaug

SEQ ID NO: 1426316 - RNA, 19 nt, Homo sapiens
  misc_RNA (1)...(19): siRNA sense strand
gcagggugucuucaucuuc

SEQ ID NO: 1426317 - RNA, 19 nt, Homo sapiens
  misc_RNA (1)...(19): siRNA sense strand
gcgagaacacgugucaaga

SEQ ID NO: 1426318 - RNA, 19 nt, Homo sapiens
  misc_RNA (1)...(19): siRNA sense strand
caaagggaucaggaaauug

SEQ ID NO: 1426319 - RNA, 19 nt, Homo sapiens
  misc_RNA (1)...(19): siRNA sense strand
caucaacgagugugcaaca

SEQ ID NO: 1426320 - RNA, 19 nt, Homo sapiens
  misc_RNA (1)...(19): siRNA sense strand
ugugaucucugccuuucug

SEQ ID NO: 1426321 - RNA, 19 nt, Homo sapiens
  misc_RNA (1)...(19): siRNA sense strand
agcaagaaccuuuccaaug

SEQ ID NO: 1426322 - RNA, 19 nt, Homo sapiens
  misc_RNA (1)...(19): siRNA sense strand
acaauaggcaccagagaca

SEQ ID NO: 1426323 - RNA, 19 nt, Homo sapiens
  misc_RNA (1)...(19): siRNA sense strand
gccaucuucucugugaauu

SEQ ID NO: 1426324 - RNA, 19 nt, Homo sapiens
  misc_RNA (1)...(19): siRNA sense strand
ccagaaaagggauuuauau

SEQ ID NO: 1426325 - RNA, 19 nt, Homo sapiens
  misc_RNA (1)...(19): siRNA sense strand
guggucaacuacucaagca

SEQ ID NO: 1426326 - RNA, 19 nt, Homo sapiens
  misc_RNA (1)...(19): siRNA sense strand
uggauggccuagaggaugu

SEQ ID NO: 1426327 - RNA, 19 nt, Homo sapiens
  misc_RNA (1)...(19): siRNA sense strand
caacagauucaugaagaag

SEQ ID NO: 1426328 - RNA, 19 nt, Homo sapiens
  misc_RNA (1)...(19): siRNA sense strand
ucaagcaucaacagauuca

SEQ ID NO: 1426329 - RNA, 19 nt, Homo sapiens
  misc_RNA (1)...(19): siRNA sense strand
gaaucaggcacagaaaucu

SEQ ID NO: 1426330 - RNA, 19 nt, Homo sapiens
  misc_RNA (1)...(19): siRNA sense strand
ggaggugcagaagcaagua

SEQ ID NO: 1426331 - RNA, 19 nt, Homo sapiens
  misc_RNA (1)...(19): siRNA sense strand
gcagguccgggagcaauau

SEQ ID NO: 1426332 - RNA, 19 nt, Homo sapiens
  misc_RNA (1)...(19): siRNA sense strand
agucugagaugcacacacu

SEQ ID NO: 1426333 - RNA, 19 nt, Homo sapiens
  misc_RNA (1)...(19): siRNA sense strand
gguccaaagggaucaggaa

SEQ ID NO: 1426334 - RNA, 19 nt, Homo sapiens
  misc_RNA (1)...(19): siRNA sense strand
agaaggugcucugugucuu

SEQ ID NO: 1426335 - RNA, 19 nt, Homo sapiens
  misc_RNA (1)...(19): siRNA sense strand
guccaaagggaucaggaaa

SEQ ID NO: 1426336 - RNA, 19 nt, Homo sapiens
  misc_RNA (1)...(19): siRNA sense strand
gugacucucuggauuuuga

SEQ ID NO: 1426337 - RNA, 19 nt, Homo sapiens
  misc_RNA (1)...(19): siRNA sense strand
caacuacucaagcaucaac

SEQ ID NO: 1426338 - RNA, 19 nt, Homo sapiens
  misc_RNA (1)...(19): siRNA sense strand
ggaccugggcagagacuac

SEQ ID NO: 1426339 - RNA, 19 nt, Homo sapiens
  misc_RNA (1)...(19): siRNA sense strand
uggccuaccucuucaccau

SEQ ID NO: 1426340 - RNA, 19 nt, Homo sapiens
  misc_RNA (1)...(19): siRNA sense strand
gucauggccuaccucuuca

SEQ ID NO: 1426341 - RNA, 19 nt, Homo sapiens
  misc_RNA (1)...(19): siRNA sense strand
ucucgucuuucucgcauuc

SEQ ID NO: 1426342 - RNA, 19 nt, Homo sapiens
  misc_RNA (1)...(19): siRNA sense strand
caucaacagauucaugaag

SEQ ID NO: 1426343 - RNA, 19 nt, Homo sapiens
  misc_RNA (1)...(19): siRNA sense strand
gcaucaacagauucaugaa

SEQ ID NO: 1426344 - RNA, 19 nt, Homo sapiens
  misc_RNA (1)...(19): siRNA sense strand
ucaagaaugagagcgagaa

SEQ ID NO: 1426345 - RNA, 19 nt, Homo sapiens
  misc_RNA (1)...(19): siRNA sense strand
cagacucuccucccucaau

SEQ ID NO: 1426346 - RNA, 19 nt, Homo sapiens
  misc_RNA (1)...(19): siRNA sense strand
aaggugcugugcuccauca

SEQ ID NO: 1426347 - RNA, 19 nt, Homo sapiens
  misc_RNA (1)...(19): siRNA sense strand
cacaggcugcagcacaaua

SEQ ID NO: 1426348 - RNA, 19 nt, Homo sapiens
  misc_RNA (1)...(19): siRNA sense strand
gcaacaacgacacccaaaa

SEQ ID NO: 1426349 - RNA, 19 nt, Homo sapiens
  misc_RNA (1)...(19): siRNA sense strand
gaaaacugagucugagaug

SEQ ID NO: 1426350 - RNA, 19 nt, Homo sapiens
  misc_RNA (1)...(19): siRNA sense strand
cuacucaagcaucaacaga

SEQ ID NO: 1426351 - RNA, 19 nt, Homo sapiens
  misc_RNA (1)...(19): siRNA sense strand
gcaagaaccuuuccaaugg

SEQ ID NO: 1426352 - RNA, 19 nt, Homo sapiens
  misc_RNA (1)...(19): siRNA sense strand
ccaaugggcuguugaacuu

SEQ ID NO: 1426353 - RNA, 19 nt, Homo sapiens
  misc_RNA (1)...(19): siRNA sense strand
caucuucucugugaauuua

SEQ ID NO: 1426354 - RNA, 19 nt, Homo sapiens
  misc_RNA (1)...(19): siRNA sense strand
ccaaagggaucaggaaauu

SEQ ID NO: 1426355 - RNA, 19 nt, Homo sapiens
  misc_RNA (1)...(19): siRNA sense strand
gaauuuaguucucuuucug

SEQ ID NO: 1426356 - RNA, 19 nt, Homo sapiens
  misc_RNA (1)...(19): siRNA sense strand
gugcaacacugucgaaagu

SEQ ID NO: 1426357 - RNA, 19 nt, Homo sapiens
  misc_RNA (1)...(19): siRNA sense strand
gccagacgcuuucccgauu

SEQ ID NO: 1426358 - RNA, 19 nt, Homo sapiens
  misc_RNA (1)...(19): siRNA sense strand
ggucauggccuaccucuuc

SEQ ID NO: 1426359 - RNA, 19 nt, Homo sapiens
  misc_RNA (1)...(19): siRNA sense strand
gaugugaucucugccuuuc

SEQ ID NO: 1426360 - RNA, 19 nt, Homo sapiens
  misc_RNA (1)...(19): siRNA sense strand
ggaaucaggcacagaaauc

SEQ ID NO: 1426361 - RNA, 19 nt, Homo sapiens
  misc_RNA (1)...(19): siRNA sense strand
ccaguuaccuucaccuucu

SEQ ID NO: 1426362 - RNA, 19 nt, Homo sapiens
  misc_RNA (1)...(19): siRNA sense strand
ugaugcagcucgacuggaa

SEQ ID NO: 1426363 - RNA, 19 nt, Homo sapiens
  misc_RNA (1)...(19): siRNA sense strand
aaagggaucaggaaauuga

SEQ ID NO: 1426364 - RNA, 19 nt, Homo sapiens
  misc_RNA (1)...(19): siRNA sense strand
agacucuccucccucaaua

SEQ ID NO: 1426365 - RNA, 19 nt, Homo sapiens
  misc_RNA (1)...(19): siRNA sense strand
gagcauggccagaauggau

SEQ ID NO: 1426366 - RNA, 19 nt, Homo sapiens
  misc_RNA (1)...(19): siRNA sense strand
ucaacagauucaugaagaa

SEQ ID NO: 1426367 - RNA, 19 nt, Homo sapiens
  misc_RNA (1)...(19): siRNA sense strand
ggagcaauaugggaaaugg

SEQ ID NO: 1426368 - RNA, 19 nt, Homo sapiens
  misc_RNA (1)...(19): siRNA sense strand
acucaagcaucaacagauu

SEQ ID NO: 1426369 - RNA, 19 nt, Homo sapiens
  misc_RNA (1)...(19): siRNA sense strand
guaaagccauccagaacac

SEQ ID NO: 1426370 - RNA, 19 nt, Homo sapiens
  misc_RNA (1)...(19): siRNA sense strand
gagcaagaaccuuuccaau

SEQ ID NO: 1426371 - RNA, 19 nt, Homo sapiens
  misc_RNA (1)...(19): siRNA sense strand
gaaagugucaugcggaaaa

SEQ ID NO: 1426372 - RNA, 19 nt, Homo sapiens
  misc_RNA (1)...(19): siRNA sense strand
gcacccaccugagcagcuu

SEQ ID NO: 1426373 - RNA, 19 nt, Homo sapiens
  misc_RNA (1)...(19): siRNA sense strand
ucagugaucccgagacaga

SEQ ID NO: 1426374 - RNA, 19 nt, Homo sapiens
  misc_RNA (1)...(19): siRNA sense strand
ccuccaggccucaccuuua

SEQ ID NO: 1426375 - RNA, 19 nt, Homo sapiens
  misc_RNA (1)...(19): siRNA sense strand
ucuccucccucaauaguga

SEQ ID NO: 1426376 - RNA, 19 nt, Homo sapiens
  misc_RNA (1)...(19): siRNA sense strand
ggagacuugugacgacauc

SEQ ID NO: 1426377 - RNA, 19 nt, Homo sapiens
  misc_RNA (1)...(19): siRNA sense strand
ccgcgucuuucucgucuuu

SEQ ID NO: 1426378 - RNA, 19 nt, Homo sapiens
  misc_RNA (1)...(19): siRNA sense strand
ggccugagcaagaaccuuu

SEQ ID NO: 1426379 - RNA, 19 nt, Homo sapiens
  misc_RNA (1)...(19): siRNA sense strand
gcacaauaggcaccagaga

SEQ ID NO: 1426380 - RNA, 19 nt, Homo sapiens
  misc_RNA (1)...(19): siRNA sense strand
ggacuccucgugugucaau

SEQ ID NO: 1426381 - RNA, 19 nt, Homo sapiens
  misc_RNA (1)...(19): siRNA sense strand
ucacuuuucuccuguguaa

SEQ ID NO: 1426382 - RNA, 19 nt, Homo sapiens
  misc_RNA (1)...(19): siRNA sense strand
ggaccugucugcgccaucu

SEQ ID NO: 1426383 - RNA, 19 nt, Homo sapiens
  misc_RNA (1)...(19): siRNA sense strand
cgagaacacgugucaagau

SEQ ID NO: 1426384 - RNA, 19 nt, Homo sapiens
  misc_RNA (1)...(19): siRNA sense strand
gccgguaccuugcacuauc

SEQ ID NO: 1426385 - RNA, 19 nt, Homo sapiens
  misc_RNA (1)...(19): siRNA sense strand
guucagugaucccgagaca

SEQ ID NO: 1426386 - RNA, 19 nt, Homo sapiens
  misc_RNA (1)...(19): siRNA sense strand
cuccaggccucaccuuuau

SEQ ID NO: 1426387 - RNA, 19 nt, Homo sapiens
  misc_RNA (1)...(19): siRNA sense strand
aaccucagcuccccaguua

SEQ ID NO: 1426388 - RNA, 19 nt, Homo sapiens
  misc_RNA (1)...(19): siRNA sense strand
uaugggaaaugguccaaag

SEQ ID NO: 1426389 - RNA, 19 nt, Homo sapiens
  misc_RNA (1)...(19): siRNA sense strand
ucuggugacucucuggauu

SEQ ID NO: 1426390 - RNA, 19 nt, Homo sapiens
  misc_RNA (1)...(19): siRNA sense strand
guccacagccagacgcuuu

SEQ ID NO: 1426391 - RNA, 19 nt, Homo sapiens
  misc_RNA (1)...(19): siRNA sense strand
ccagacgcuuucccgauuc

SEQ ID NO: 1426392 - RNA, 19 nt, Homo sapiens
  misc_RNA (1)...(19): siRNA sense strand
aucaacagauucaugaaga

SEQ ID NO: 1426393 - RNA, 19 nt, Homo sapiens
  misc_RNA (1)...(19): siRNA sense strand
gucaacuacucaagcauca

SEQ ID NO: 1426394 - RNA, 19 nt, Homo sapiens
  misc_RNA (1)...(19): siRNA sense strand
ccucauggcccacuacgau

SEQ ID NO: 1426395 - RNA, 19 nt, Homo sapiens
  misc_RNA (1)...(19): siRNA sense strand
caccauccagagcaucuua

SEQ ID NO: 1426396 - RNA, 19 nt, Homo sapiens
  misc_RNA (1)...(19): siRNA sense strand
cagaauggauguggucacu

SEQ ID NO: 1426397 - RNA, 19 nt, Homo sapiens
  misc_RNA (1)...(19): siRNA sense strand
aaacugagucugagaugca

SEQ ID NO: 1426398 - RNA, 19 nt, Homo sapiens
  misc_RNA (1)...(19): siRNA sense strand
gccuaccucuucaccauca

SEQ ID NO: 1426399 - RNA, 19 nt, Homo sapiens
  misc_RNA (1)...(19): siRNA sense strand
guaccuugcacuaucucua

SEQ ID NO: 1426400 - RNA, 19 nt, Homo sapiens
  misc_RNA (1)...(19): siRNA sense strand
cagcuuugccguccucaug

SEQ ID NO: 1426401 - RNA, 19 nt, Homo sapiens
  misc_RNA (1)...(19): siRNA sense strand
gcagggugucuucaucuuc

SEQ ID NO: 1426402 - RNA, 19 nt, Homo sapiens
  misc_RNA (1)...(19): siRNA sense strand
gcgagaacacgugucaaga

SEQ ID NO: 1426403 - RNA, 19 nt, Homo sapiens
  misc_RNA (1)...(19): siRNA sense strand
caaagggaucaggaaauug

SEQ ID NO: 1426404 - RNA, 19 nt, Homo sapiens
  misc_RNA (1)...(19): siRNA sense strand
caucaacgagugugcaaca

SEQ ID NO: 1426405 - RNA, 19 nt, Homo sapiens
  misc_RNA (1)...(19): siRNA sense strand
ugugaucucugccuuucug

SEQ ID NO: 1426406 - RNA, 19 nt, Homo sapiens
  misc_RNA (1)...(19): siRNA sense strand
agcaagaaccuuuccaaug

SEQ ID NO: 1426407 - RNA, 19 nt, Homo sapiens
  misc_RNA (1)...(19): siRNA sense strand
acaauaggcaccagagaca

SEQ ID NO: 1426408 - RNA, 19 nt, Homo sapiens
  misc_RNA (1)...(19): siRNA sense strand
gccaucuucucugugaauu

SEQ ID NO: 1426409 - RNA, 19 nt, Homo sapiens
  misc_RNA (1)...(19): siRNA sense strand
ccagaaaagggauuuauau

SEQ ID NO: 1426410 - RNA, 19 nt, Homo sapiens
  misc_RNA (1)...(19): siRNA sense strand
guggucaacuacucaagca

SEQ ID NO: 1426411 - RNA, 19 nt, Homo sapiens
  misc_RNA (1)...(19): siRNA sense strand
uggauggccuagaggaugu

SEQ ID NO: 1426412 - RNA, 19 nt, Homo sapiens
  misc_RNA (1)...(19): siRNA sense strand
caacagauucaugaagaag

SEQ ID NO: 1426413 - RNA, 19 nt, Homo sapiens
  misc_RNA (1)...(19): siRNA sense strand
ucaagcaucaacagauuca

SEQ ID NO: 1426414 - RNA, 19 nt, Homo sapiens
  misc_RNA (1)...(19): siRNA sense strand
gaaucaggcacagaaaucu

SEQ ID NO: 1426415 - RNA, 19 nt, Homo sapiens
  misc_RNA (1)...(19): siRNA sense strand
ggaggugcagaagcaagua

SEQ ID NO: 1426416 - RNA, 19 nt, Homo sapiens
  misc_RNA (1)...(19): siRNA sense strand
gcagguccgggagcaauau

SEQ ID NO: 1426417 - RNA, 19 nt, Homo sapiens
  misc_RNA (1)...(19): siRNA sense strand
agucugagaugcacacacu

SEQ ID NO: 1426418 - RNA, 19 nt, Homo sapiens
  misc_RNA (1)...(19): siRNA sense strand
gguccaaagggaucaggaa

SEQ ID NO: 1426419 - RNA, 19 nt, Homo sapiens
  misc_RNA (1)...(19): siRNA sense strand
agaaggugcucugugucuu

SEQ ID NO: 1426420 - RNA, 19 nt, Homo sapiens
  misc_RNA (1)...(19): siRNA sense strand
guccaaagggaucaggaaa

SEQ ID NO: 1426421 - RNA, 19 nt, Homo sapiens
  misc_RNA (1)...(19): siRNA sense strand
gugacucucuggauuuuga

SEQ ID NO: 1426422 - RNA, 19 nt, Homo sapiens
  misc_RNA (1)...(19): siRNA sense strand
caacuacucaagcaucaac

SEQ ID NO: 1426423 - RNA, 19 nt, Homo sapiens
  misc_RNA (1)...(19): siRNA sense strand
ggaccugggcagagacuac

SEQ ID NO: 1426424 - RNA, 19 nt, Homo sapiens
  misc_RNA (1)...(19): siRNA sense strand
uggccuaccucuucaccau

SEQ ID NO: 1426425 - RNA, 19 nt, Homo sapiens
  misc_RNA (1)...(19): siRNA sense strand
gucauggccuaccucuuca

SEQ ID NO: 1426426 - RNA, 19 nt, Homo sapiens
  misc_RNA (1)...(19): siRNA sense strand
ucucgucuuucucgcauuc

SEQ ID NO: 1426427 - RNA, 19 nt, Homo sapiens
  misc_RNA (1)...(19): siRNA sense strand
caucaacagauucaugaag

SEQ ID NO: 1426428 - RNA, 19 nt, Homo sapiens
  misc_RNA (1)...(19): siRNA sense strand
gcaucaacagauucaugaa

SEQ ID NO: 1426429 - RNA, 19 nt, Homo sapiens
  misc_RNA (1)...(19): siRNA sense strand
ucaagaaugagagcgagaa

SEQ ID NO: 1426430 - RNA, 19 nt, Homo sapiens
  misc_RNA (1)...(19): siRNA sense strand
cagacucuccucccucaau

SEQ ID NO: 1426431 - RNA, 19 nt, Homo sapiens
  misc_RNA (1)...(19): siRNA sense strand
aaggugcugugcuccauca

SEQ ID NO: 1426432 - RNA, 19 nt, Homo sapiens
  misc_RNA (1)...(19): siRNA sense strand
cacaggcugcagcacaaua

SEQ ID NO: 1426433 - RNA, 19 nt, Homo sapiens
  misc_RNA (1)...(19): siRNA sense strand
gcaacaacgacacccaaaa

SEQ ID NO: 1426434 - RNA, 19 nt, Homo sapiens
  misc_RNA (1)...(19): siRNA sense strand
gaaaacugagucugagaug

SEQ ID NO: 1426435 - RNA, 19 nt, Homo sapiens
  misc_RNA (1)...(19): siRNA sense strand
cuacucaagcaucaacaga

SEQ ID NO: 1426436 - RNA, 19 nt, Homo sapiens
  misc_RNA (1)...(19): siRNA sense strand
gcaagaaccuuuccaaugg

SEQ ID NO: 1426437 - RNA, 19 nt, Homo sapiens
  misc_RNA (1)...(19): siRNA sense strand
ccaaugggcuguugaacuu

SEQ ID NO: 1426438 - RNA, 19 nt, Homo sapiens
  misc_RNA (1)...(19): siRNA sense strand
caucuucucugugaauuua

SEQ ID NO: 1426439 - RNA, 19 nt, Homo sapiens
  misc_RNA (1)...(19): siRNA sense strand
ccaaagggaucaggaaauu

SEQ ID NO: 1426440 - RNA, 19 nt, Homo sapiens
  misc_RNA (1)...(19): siRNA sense strand
gaauuuaguucucuuucug

SEQ ID NO: 1426441 - RNA, 19 nt, Homo sapiens
  misc_RNA (1)...(19): siRNA sense strand
gugcaacacugucgaaagu

SEQ ID NO: 1426442 - RNA, 19 nt, Homo sapiens
  misc_RNA (1)...(19): siRNA sense strand
gccagacgcuuucccgauu

SEQ ID NO: 1426443 - RNA, 19 nt, Homo sapiens
  misc_RNA (1)...(19): siRNA sense strand
ggucauggccuaccucuuc

SEQ ID NO: 1426444 - RNA, 19 nt, Homo sapiens
  misc_RNA (1)...(19): siRNA sense strand
gaugugaucucugccuuuc

SEQ ID NO: 1426445 - RNA, 19 nt, Homo sapiens
  misc_RNA (1)...(19): siRNA sense strand
ggaaucaggcacagaaauc

SEQ ID NO: 1426446 - RNA, 19 nt, Homo sapiens
  misc_RNA (1)...(19): siRNA sense strand
ccaguuaccuucaccuucu

SEQ ID NO: 1426447 - RNA, 19 nt, Homo sapiens
  misc_RNA (1)...(19): siRNA sense strand
ugaugcagcucgacuggaa

SEQ ID NO: 1426448 - RNA, 19 nt, Homo sapiens
  misc_RNA (1)...(19): siRNA sense strand
aaagggaucaggaaauuga

SEQ ID NO: 1426449 - RNA, 19 nt, Homo sapiens
  misc_RNA (1)...(19): siRNA sense strand
agacucuccucccucaaua

SEQ ID NO: 1426450 - RNA, 19 nt, Homo sapiens
  misc_RNA (1)...(19): siRNA sense strand
gagcauggccagaauggau

SEQ ID NO: 1426451 - RNA, 19 nt, Homo sapiens
  misc_RNA (1)...(19): siRNA sense strand
ucaacagauucaugaagaa

SEQ ID NO: 1426452 - RNA, 19 nt, Homo sapiens
  misc_RNA (1)...(19): siRNA sense strand
ggagcaauaugggaaaugg

SEQ ID NO: 1426453 - RNA, 19 nt, Homo sapiens
  misc_RNA (1)...(19): siRNA sense strand
acucaagcaucaacagauu

SEQ ID NO: 1426454 - RNA, 19 nt, Homo sapiens
  misc_RNA (1)...(19): siRNA sense strand
guaaagccauccagaacac

SEQ ID NO: 1426455 - RNA, 19 nt, Homo sapiens
  misc_RNA (1)...(19): siRNA sense strand
gagcaagaaccuuuccaau

SEQ ID NO: 1426456 - RNA, 19 nt, Homo sapiens
  misc_RNA (1)...(19): siRNA sense strand
gaaagugucaugcggaaaa

SEQ ID NO: 1426457 - RNA, 19 nt, Homo sapiens
  misc_RNA (1)...(19): siRNA sense strand
gcacccaccugagcagcuu

SEQ ID NO: 1426458 - RNA, 19 nt, Homo sapiens
  misc_RNA (1)...(19): siRNA sense strand
ucagugaucccgagacaga

SEQ ID NO: 1426459 - RNA, 19 nt, Homo sapiens
  misc_RNA (1)...(19): siRNA sense strand
ccuccaggccucaccuuua

SEQ ID NO: 1426460 - RNA, 19 nt, Homo sapiens
  misc_RNA (1)...(19): siRNA sense strand
ucuccucccucaauaguga

SEQ ID NO: 1426461 - RNA, 19 nt, Homo sapiens
  misc_RNA (1)...(19): siRNA sense strand
ggagacuugugacgacauc

SEQ ID NO: 1426462 - RNA, 19 nt, Homo sapiens
  misc_RNA (1)...(19): siRNA sense strand
ccgcgucuuucucgucuuu

SEQ ID NO: 1426463 - RNA, 19 nt, Homo sapiens
  misc_RNA (1)...(19): siRNA sense strand
ggccugagcaagaaccuuu

SEQ ID NO: 1426464 - RNA, 19 nt, Homo sapiens
  misc_RNA (1)...(19): siRNA sense strand
gcacaauaggcaccagaga

SEQ ID NO: 1426465 - RNA, 19 nt, Homo sapiens
  misc_RNA (1)...(19): siRNA sense strand
ggacuccucgugugucaau

SEQ ID NO: 1426466 - RNA, 19 nt, Homo sapiens
  misc_RNA (1)...(19): siRNA sense strand
ucacuuuucuccuguguaa

SEQ ID NO: 1426467 - RNA, 19 nt, Homo sapiens
  misc_RNA (1)...(19): siRNA sense strand
ggaccugucugcgccaucu

SEQ ID NO: 1426468 - RNA, 19 nt, Homo sapiens
  misc_RNA (1)...(19): siRNA sense strand
cgagaacacgugucaagau

SEQ ID NO: 1426469 - RNA, 19 nt, Homo sapiens
  misc_RNA (1)...(19): siRNA sense strand
gccgguaccuugcacuauc

SEQ ID NO: 1426470 - RNA, 19 nt, Homo sapiens
  misc_RNA (1)...(19): siRNA sense strand
guucagugaucccgagaca

SEQ ID NO: 1426471 - RNA, 19 nt, Homo sapiens
  misc_RNA (1)...(19): siRNA sense strand
cuccaggccucaccuuuau

SEQ ID NO: 1426472 - RNA, 19 nt, Homo sapiens
  misc_RNA (1)...(19): siRNA sense strand
aaccucagcuccccaguua

SEQ ID NO: 1426473 - RNA, 19 nt, Homo sapiens
  misc_RNA (1)...(19): siRNA sense strand
uaugggaaaugguccaaag

SEQ ID NO: 1426474 - RNA, 19 nt, Homo sapiens
  misc_RNA (1)...(19): siRNA sense strand
ucuggugacucucuggauu

SEQ ID NO: 1426475 - RNA, 19 nt, Homo sapiens
  misc_RNA (1)...(19): siRNA sense strand
guccacagccagacgcuuu

SEQ ID NO: 1426476 - RNA, 19 nt, Homo sapiens
  misc_RNA (1)...(19): siRNA sense strand
ccagacgcuuucccgauuc

SEQ ID NO: 1426477 - RNA, 19 nt, Homo sapiens
  misc_RNA (1)...(19): siRNA sense strand
aucaacagauucaugaaga

SEQ ID NO: 1426478 - RNA, 19 nt, Homo sapiens
  misc_RNA (1)...(19): siRNA sense strand
gucaacuacucaagcauca

SEQ ID NO: 1426479 - RNA, 19 nt, Homo sapiens
  misc_RNA (1)...(19): siRNA sense strand
ccucauggcccacuacgau

SEQ ID NO: 1426480 - RNA, 19 nt, Homo sapiens
  misc_RNA (1)...(19): siRNA sense strand
caccauccagagcaucuua

SEQ ID NO: 1426481 - RNA, 19 nt, Homo sapiens
  misc_RNA (1)...(19): siRNA sense strand
cagaauggauguggucacu

SEQ ID NO: 1426482 - RNA, 19 nt, Homo sapiens
  misc_RNA (1)...(19): siRNA sense strand
aaacugagucugagaugca

SEQ ID NO: 1426483 - RNA, 19 nt, Homo sapiens
  misc_RNA (1)...(19): siRNA sense strand
gccuaccucuucaccauca

SEQ ID NO: 1426484 - RNA, 19 nt, Homo sapiens
  misc_RNA (1)...(19): siRNA sense strand
guaccuugcacuaucucua

SEQ ID NO: 1426485 - RNA, 19 nt, Homo sapiens
  misc_RNA (1)...(19): siRNA sense strand
cagcuuugccguccucaug

SEQ ID NO: 1426486 - RNA, 19 nt, Homo sapiens
  misc_RNA (1)...(19): siRNA sense strand
gcagggugucuucaucuuc

SEQ ID NO: 1426487 - RNA, 19 nt, Homo sapiens
  misc_RNA (1)...(19): siRNA sense strand
gcgagaacacgugucaaga

SEQ ID NO: 1426488 - RNA, 19 nt, Homo sapiens
  misc_RNA (1)...(19): siRNA sense strand
caaagggaucaggaaauug

SEQ ID NO: 1426489 - RNA, 19 nt, Homo sapiens
  misc_RNA (1)...(19): siRNA sense strand
caucaacgagugugcaaca

SEQ ID NO: 1426490 - RNA, 19 nt, Homo sapiens
  misc_RNA (1)...(19): siRNA sense strand
ugugaucucugccuuucug

SEQ ID NO: 1426491 - RNA, 19 nt, Homo sapiens
  misc_RNA (1)...(19): siRNA sense strand
agcaagaaccuuuccaaug

SEQ ID NO: 1426492 - RNA, 19 nt, Homo sapiens
  misc_RNA (1)...(19): siRNA sense strand
acaauaggcaccagagaca

SEQ ID NO: 1426493 - RNA, 19 nt, Homo sapiens
  misc_RNA (1)...(19): siRNA sense strand
gccaucuucucugugaauu

SEQ ID NO: 1426494 - RNA, 19 nt, Homo sapiens
  misc_RNA (1)...(19): siRNA sense strand
ccagaaaagggauuuauau

SEQ ID NO: 1426495 - RNA, 19 nt, Homo sapiens
  misc_RNA (1)...(19): siRNA sense strand
guggucaacuacucaagca

SEQ ID NO: 1426496 - RNA, 19 nt, Homo sapiens
  misc_RNA (1)...(19): siRNA sense strand
uggauggccuagaggaugu

SEQ ID NO: 1426497 - RNA, 19 nt, Homo sapiens
  misc_RNA (1)...(19): siRNA sense strand
caacagauucaugaagaag

SEQ ID NO: 1426498 - RNA, 19 nt, Homo sapiens
  misc_RNA (1)...(19): siRNA sense strand
ucaagcaucaacagauuca

SEQ ID NO: 1426499 - RNA, 19 nt, Homo sapiens
  misc_RNA (1)...(19): siRNA sense strand
gaaucaggcacagaaaucu

SEQ ID NO: 1426500 - RNA, 19 nt, Homo sapiens
  misc_RNA (1)...(19): siRNA sense strand
ggaggugcagaagcaagua

SEQ ID NO: 1426501 - RNA, 19 nt, Homo sapiens
  misc_RNA (1)...(19): siRNA sense strand
gcagguccgggagcaauau

SEQ ID NO: 1426502 - RNA, 19 nt, Homo sapiens
  misc_RNA (1)...(19): siRNA sense strand
agucugagaugcacacacu

SEQ ID NO: 1426503 - RNA, 19 nt, Homo sapiens
  misc_RNA (1)...(19): siRNA sense strand
gguccaaagggaucaggaa

SEQ ID NO: 1426504 - RNA, 19 nt, Homo sapiens
  misc_RNA (1)...(19): siRNA sense strand
agaaggugcucugugucuu

SEQ ID NO: 1426505 - RNA, 19 nt, Homo sapiens
  misc_RNA (1)...(19): siRNA sense strand
guccaaagggaucaggaaa

SEQ ID NO: 1426506 - RNA, 19 nt, Homo sapiens
  misc_RNA (1)...(19): siRNA sense strand
gugacucucuggauuuuga

SEQ ID NO: 1426507 - RNA, 19 nt, Homo sapiens
  misc_RNA (1)...(19): siRNA sense strand
caacuacucaagcaucaac

SEQ ID NO: 1426508 - RNA, 19 nt, Homo sapiens
  misc_RNA (1)...(19): siRNA sense strand
ggaccugggcagagacuac

SEQ ID NO: 1426509 - RNA, 19 nt, Homo sapiens
  misc_RNA (1)...(19): siRNA sense strand
uggccuaccucuucaccau

SEQ ID NO: 1426510 - RNA, 19 nt, Homo sapiens
  misc_RNA (1)...(19): siRNA sense strand
gucauggccuaccucuuca

SEQ ID NO: 1426511 - RNA, 19 nt, Homo sapiens
  misc_RNA (1)...(19): siRNA sense strand
ucucgucuuucucgcauuc

SEQ ID NO: 1426512 - RNA, 19 nt, Homo sapiens
  misc_RNA (1)...(19): siRNA sense strand
caucaacagauucaugaag

SEQ ID NO: 1426513 - RNA, 19 nt, Homo sapiens
  misc_RNA (1)...(19): siRNA sense strand
gcaucaacagauucaugaa

SEQ ID NO: 1426514 - RNA, 19 nt, Homo sapiens
  misc_RNA (1)...(19): siRNA sense strand
ucaagaaugagagcgagaa

SEQ ID NO: 1426515 - RNA, 19 nt, Homo sapiens
  misc_RNA (1)...(19): siRNA sense strand
cagacucuccucccucaau

SEQ ID NO: 1426516 - RNA, 19 nt, Homo sapiens
  misc_RNA (1)...(19): siRNA sense strand
aaggugcugugcuccauca

SEQ ID NO: 1426517 - RNA, 19 nt, Homo sapiens
  misc_RNA (1)...(19): siRNA sense strand
cacaggcugcagcacaaua

SEQ ID NO: 1426518 - RNA, 19 nt, Homo sapiens
  misc_RNA (1)...(19): siRNA sense strand
gcaacaacgacacccaaaa

SEQ ID NO: 1426519 - RNA, 19 nt, Homo sapiens
  misc_RNA (1)...(19): siRNA sense strand
gaaaacugagucugagaug

SEQ ID NO: 1426520 - RNA, 19 nt, Homo sapiens
  misc_RNA (1)...(19): siRNA sense strand
cuacucaagcaucaacaga

SEQ ID NO: 1426521 - RNA, 19 nt, Homo sapiens
  misc_RNA (1)...(19): siRNA sense strand
gcaagaaccuuuccaaugg

SEQ ID NO: 1426522 - RNA, 19 nt, Homo sapiens
  misc_RNA (1)...(19): siRNA sense strand
ccaaugggcuguugaacuu

SEQ ID NO: 1426523 - RNA, 19 nt, Homo sapiens
  misc_RNA (1)...(19): siRNA sense strand
caucuucucugugaauuua

SEQ ID NO: 1426524 - RNA, 19 nt, Homo sapiens
  misc_RNA (1)...(19): siRNA sense strand
ccaaagggaucaggaaauu

SEQ ID NO: 1426525 - RNA, 19 nt, Homo sapiens
  misc_RNA (1)...(19): siRNA sense strand
gaauuuaguucucuuucug

SEQ ID NO: 1426526 - RNA, 19 nt, Homo sapiens
  misc_RNA (1)...(19): siRNA sense strand
gugcaacacugucgaaagu

SEQ ID NO: 1426527 - RNA, 19 nt, Homo sapiens
  misc_RNA (1)...(19): siRNA sense strand
gccagacgcuuucccgauu

SEQ ID NO: 1426528 - RNA, 19 nt, Homo sapiens
  misc_RNA (1)...(19): siRNA sense strand
ggucauggccuaccucuuc

SEQ ID NO: 1426529 - RNA, 19 nt, Homo sapiens
  misc_RNA (1)...(19): siRNA sense strand
gaugugaucucugccuuuc

SEQ ID NO: 1426530 - RNA, 19 nt, Homo sapiens
  misc_RNA (1)...(19): siRNA sense strand
ggaaucaggcacagaaauc

SEQ ID NO: 1426531 - RNA, 19 nt, Homo sapiens
  misc_RNA (1)...(19): siRNA sense strand
ccaguuaccuucaccuucu

SEQ ID NO: 1426532 - RNA, 19 nt, Homo sapiens
  misc_RNA (1)...(19): siRNA sense strand
ugaugcagcucgacuggaa

SEQ ID NO: 1426533 - RNA, 19 nt, Homo sapiens
  misc_RNA (1)...(19): siRNA sense strand
aaagggaucaggaaauuga

SEQ ID NO: 1426534 - RNA, 19 nt, Homo sapiens
  misc_RNA (1)...(19): siRNA sense strand
agacucuccucccucaaua

SEQ ID NO: 1426535 - RNA, 19 nt, Homo sapiens
  misc_RNA (1)...(19): siRNA sense strand
gagcauggccagaauggau

SEQ ID NO: 1426536 - RNA, 19 nt, Homo sapiens
  misc_RNA (1)...(19): siRNA sense strand
ucaacagauucaugaagaa

SEQ ID NO: 1426537 - RNA, 19 nt, Homo sapiens
  misc_RNA (1)...(19): siRNA sense strand
ggagcaauaugggaaaugg

SEQ ID NO: 1426538 - RNA, 19 nt, Homo sapiens
  misc_RNA (1)...(19): siRNA sense strand
acucaagcaucaacagauu

SEQ ID NO: 1426539 - RNA, 19 nt, Homo sapiens
  misc_RNA (1)...(19): siRNA sense strand
guaaagccauccagaacac

SEQ ID NO: 1426540 - RNA, 19 nt, Homo sapiens
  misc_RNA (1)...(19): siRNA sense strand
gagcaagaaccuuuccaau

SEQ ID NO: 1426541 - RNA, 19 nt, Homo sapiens
  misc_RNA (1)...(19): siRNA sense strand
gaaagugucaugcggaaaa

SEQ ID NO: 1426542 - RNA, 19 nt, Homo sapiens
  misc_RNA (1)...(19): siRNA sense strand
gcacccaccugagcagcuu

SEQ ID NO: 1426543 - RNA, 19 nt, Homo sapiens
  misc_RNA (1)...(19): siRNA sense strand
ucagugaucccgagacaga

SEQ ID NO: 1426544 - RNA, 19 nt, Homo sapiens
  misc_RNA (1)...(19): siRNA sense strand
ccuccaggccucaccuuua

SEQ ID NO: 1426545 - RNA, 19 nt, Homo sapiens
  misc_RNA (1)...(19): siRNA sense strand
ucuccucccucaauaguga

SEQ ID NO: 1426546 - RNA, 19 nt, Homo sapiens
  misc_RNA (1)...(19): siRNA sense strand
ggagacuugugacgacauc

SEQ ID NO: 1426547 - RNA, 19 nt, Homo sapiens
  misc_RNA (1)...(19): siRNA sense strand
ccgcgucuuucucgucuuu

SEQ ID NO: 1426548 - RNA, 19 nt, Homo sapiens
  misc_RNA (1)...(19): siRNA sense strand
ggccugagcaagaaccuuu

SEQ ID NO: 1426549 - RNA, 19 nt, Homo sapiens
  misc_RNA (1)...(19): siRNA sense strand
gcacaauaggcaccagaga

SEQ ID NO: 1426550 - RNA, 19 nt, Homo sapiens
  misc_RNA (1)...(19): siRNA sense strand
ggacuccucgugugucaau

SEQ ID NO: 1426551 - RNA, 19 nt, Homo sapiens
  misc_RNA (1)...(19): siRNA sense strand
ucacuuuucuccuguguaa

SEQ ID NO: 1426552 - RNA, 19 nt, Homo sapiens
  misc_RNA (1)...(19): siRNA sense strand
ggaccugucugcgccaucu

SEQ ID NO: 1426553 - RNA, 19 nt, Homo sapiens
  misc_RNA (1)...(19): siRNA sense strand
cgagaacacgugucaagau

SEQ ID NO: 1426554 - RNA, 19 nt, Homo sapiens
  misc_RNA (1)...(19): siRNA sense strand
gccgguaccuugcacuauc

SEQ ID NO: 1426555 - RNA, 19 nt, Homo sapiens
  misc_RNA (1)...(19): siRNA sense strand
guucagugaucccgagaca

SEQ ID NO: 1426556 - RNA, 19 nt, Homo sapiens
  misc_RNA (1)...(19): siRNA sense strand
cuccaggccucaccuuuau

SEQ ID NO: 1426557 - RNA, 19 nt, Homo sapiens
  misc_RNA (1)...(19): siRNA sense strand
aaccucagcuccccaguua

SEQ ID NO: 1426558 - RNA, 19 nt, Homo sapiens
  misc_RNA (1)...(19): siRNA sense strand
uaugggaaaugguccaaag

SEQ ID NO: 1426559 - RNA, 19 nt, Homo sapiens
  misc_RNA (1)...(19): siRNA sense strand
ucuggugacucucuggauu

SEQ ID NO: 1426560 - RNA, 19 nt, Homo sapiens
  misc_RNA (1)...(19): siRNA sense strand
guccacagccagacgcuuu

SEQ ID NO: 1426561 - RNA, 19 nt, Homo sapiens
  misc_RNA (1)...(19): siRNA sense strand
ccagacgcuuucccgauuc

SEQ ID NO: 1426562 - RNA, 19 nt, Homo sapiens
  misc_RNA (1)...(19): siRNA sense strand
aucaacagauucaugaaga

SEQ ID NO: 1426563 - RNA, 19 nt, Homo sapiens
  misc_RNA (1)...(19): siRNA sense strand
gucaacuacucaagcauca

SEQ ID NO: 1426564 - RNA, 19 nt, Homo sapiens
  misc_RNA (1)...(19): siRNA sense strand
ccucauggcccacuacgau

SEQ ID NO: 1426565 - RNA, 19 nt, Homo sapiens
  misc_RNA (1)...(19): siRNA sense strand
caccauccagagcaucuua

SEQ ID NO: 1426566 - RNA, 19 nt, Homo sapiens
  misc_RNA (1)...(19): siRNA sense strand
cagaauggauguggucacu

SEQ ID NO: 1426567 - RNA, 19 nt, Homo sapiens
  misc_RNA (1)...(19): siRNA sense strand
aaacugagucugagaugca

SEQ ID NO: 1426568 - RNA, 19 nt, Homo sapiens
  misc_RNA (1)...(19): siRNA sense strand
gccuaccucuucaccauca

SEQ ID NO: 1426569 - RNA, 19 nt, Homo sapiens
  misc_RNA (1)...(19): siRNA sense strand
guaccuugcacuaucucua

SEQ ID NO: 1426570 - RNA, 19 nt, Homo sapiens
  misc_RNA (1)...(19): siRNA sense strand
cagcuuugccguccucaug

SEQ ID NO: 1426571 - RNA, 19 nt, Homo sapiens
  misc_RNA (1)...(19): siRNA sense strand
gcagggugucuucaucuuc

SEQ ID NO: 1426572 - RNA, 19 nt, Homo sapiens
  misc_RNA (1)...(19): siRNA sense strand
gcgagaacacgugucaaga

SEQ ID NO: 1426573 - RNA, 19 nt, Homo sapiens
  misc_RNA (1)...(19): siRNA sense strand
caaagggaucaggaaauug

SEQ ID NO: 1426574 - RNA, 19 nt, Homo sapiens
  misc_RNA (1)...(19): siRNA sense strand
caucaacgagugugcaaca

SEQ ID NO: 1426575 - RNA, 19 nt, Homo sapiens
  misc_RNA (1)...(19): siRNA sense strand
ugugaucucugccuuucug

SEQ ID NO: 1426576 - RNA, 19 nt, Homo sapiens
  misc_RNA (1)...(19): siRNA sense strand
agcaagaaccuuuccaaug

SEQ ID NO: 1426577 - RNA, 19 nt, Homo sapiens
  misc_RNA (1)...(19): siRNA sense strand
acaauaggcaccagagaca

SEQ ID NO: 1426578 - RNA, 19 nt, Homo sapiens
  misc_RNA (1)...(19): siRNA sense strand
gccaucuucucugugaauu

SEQ ID NO: 1426579 - RNA, 19 nt, Homo sapiens
  misc_RNA (1)...(19): siRNA sense strand
ccagaaaagggauuuauau

SEQ ID NO: 1426580 - RNA, 19 nt, Homo sapiens
  misc_RNA (1)...(19): siRNA sense strand
guggucaacuacucaagca

SEQ ID NO: 1426581 - RNA, 19 nt, Homo sapiens
  misc_RNA (1)...(19): siRNA sense strand
uggauggccuagaggaugu

SEQ ID NO: 1426582 - RNA, 19 nt, Homo sapiens
  misc_RNA (1)...(19): siRNA sense strand
caacagauucaugaagaag

SEQ ID NO: 1426583 - RNA, 19 nt, Homo sapiens
  misc_RNA (1)...(19): siRNA sense strand
ucaagcaucaacagauuca

SEQ ID NO: 1426584 - RNA, 19 nt, Homo sapiens
  misc_RNA (1)...(19): siRNA sense strand
gaaucaggcacagaaaucu

SEQ ID NO: 1426585 - RNA, 19 nt, Homo sapiens
  misc_RNA (1)...(19): siRNA sense strand
ggaggugcagaagcaagua

SEQ ID NO: 1426586 - RNA, 19 nt, Homo sapiens
  misc_RNA (1)...(19): siRNA sense strand
gcagguccgggagcaauau

SEQ ID NO: 1426587 - RNA, 19 nt, Homo sapiens
  misc_RNA (1)...(19): siRNA sense strand
agucugagaugcacacacu

SEQ ID NO: 1426588 - RNA, 19 nt, Homo sapiens
  misc_RNA (1)...(19): siRNA sense strand
gguccaaagggaucaggaa

SEQ ID NO: 1426589 - RNA, 19 nt, Homo sapiens
  misc_RNA (1)...(19): siRNA sense strand
agaaggugcucugugucuu

SEQ ID NO: 1426590 - RNA, 19 nt, Homo sapiens
  misc_RNA (1)...(19): siRNA sense strand
guccaaagggaucaggaaa

SEQ ID NO: 1426591 - RNA, 19 nt, Homo sapiens
  misc_RNA (1)...(19): siRNA sense strand
gugacucucuggauuuuga

SEQ ID NO: 1426592 - RNA, 19 nt, Homo sapiens
  misc_RNA (1)...(19): siRNA sense strand
caacuacucaagcaucaac

SEQ ID NO: 1426593 - RNA, 19 nt, Homo sapiens
  misc_RNA (1)...(19): siRNA sense strand
ggaccugggcagagacuac

SEQ ID NO: 1426594 - RNA, 19 nt, Homo sapiens
  misc_RNA (1)...(19): siRNA sense strand
uggccuaccucuucaccau

SEQ ID NO: 1426595 - RNA, 19 nt, Homo sapiens
  misc_RNA (1)...(19): siRNA sense strand
gucauggccuaccucuuca

SEQ ID NO: 1426596 - RNA, 19 nt, Homo sapiens
  misc_RNA (1)...(19): siRNA sense strand
ucucgucuuucucgcauuc

SEQ ID NO: 1426597 - RNA, 19 nt, Homo sapiens
  misc_RNA (1)...(19): siRNA sense strand
caucaacagauucaugaag

SEQ ID NO: 1426598 - RNA, 19 nt, Homo sapiens
  misc_RNA (1)...(19): siRNA sense strand
gcaucaacagauucaugaa

SEQ ID NO: 1426599 - RNA, 19 nt, Homo sapiens
  misc_RNA (1)...(19): siRNA sense strand
ucaagaaugagagcgagaa

SEQ ID NO: 1426600 - RNA, 19 nt, Homo sapiens
  misc_RNA (1)...(19): siRNA sense strand
cagacucuccucccucaau

SEQ ID NO: 1426601 - RNA, 19 nt, Homo sapiens
  misc_RNA (1)...(19): siRNA sense strand
aaggugcugugcuccauca

SEQ ID NO: 1426602 - RNA, 19 nt, Homo sapiens
  misc_RNA (1)...(19): siRNA sense strand
cacaggcugcagcacaaua

SEQ ID NO: 1426603 - RNA, 19 nt, Homo sapiens
  misc_RNA (1)...(19): siRNA sense strand
gcaacaacgacacccaaaa

SEQ ID NO: 1426604 - RNA, 19 nt, Homo sapiens
  misc_RNA (1)...(19): siRNA sense strand
gaaaacugagucugagaug

SEQ ID NO: 1426605 - RNA, 19 nt, Homo sapiens
  misc_RNA (1)...(19): siRNA sense strand
cuacucaagcaucaacaga

SEQ ID NO: 1426606 - RNA, 19 nt, Homo sapiens
  misc_RNA (1)...(19): siRNA sense strand
gcaagaaccuuuccaaugg

SEQ ID NO: 1426607 - RNA, 19 nt, Homo sapiens
  misc_RNA (1)...(19): siRNA sense strand
ccaaugggcuguugaacuu

SEQ ID NO: 1426608 - RNA, 19 nt, Homo sapiens
  misc_RNA (1)...(19): siRNA sense strand
caucuucucugugaauuua

SEQ ID NO: 1426609 - RNA, 19 nt, Homo sapiens
  misc_RNA (1)...(19): siRNA sense strand
ccaaagggaucaggaaauu

SEQ ID NO: 1426610 - RNA, 19 nt, Homo sapiens
  misc_RNA (1)...(19): siRNA sense strand
gaauuuaguucucuuucug

SEQ ID NO: 1426611 - RNA, 19 nt, Homo sapiens
  misc_RNA (1)...(19): siRNA sense strand
gugcaacacugucgaaagu

SEQ ID NO: 1426612 - RNA, 19 nt, Homo sapiens
  misc_RNA (1)...(19): siRNA sense strand
gccagacgcuuucccgauu

SEQ ID NO: 1426613 - RNA, 19 nt, Homo sapiens
  misc_RNA (1)...(19): siRNA sense strand
ggucauggccuaccucuuc

SEQ ID NO: 1426614 - RNA, 19 nt, Homo sapiens
  misc_RNA (1)...(19): siRNA sense strand
gaugugaucucugccuuuc

SEQ ID NO: 1426615 - RNA, 19 nt, Homo sapiens
  misc_RNA (1)...(19): siRNA sense strand
ggaaucaggcacagaaauc

SEQ ID NO: 1426616 - RNA, 19 nt, Homo sapiens
  misc_RNA (1)...(19): siRNA sense strand
ccaguuaccuucaccuucu

SEQ ID NO: 1426617 - RNA, 19 nt, Homo sapiens
  misc_RNA (1)...(19): siRNA sense strand
ugaugcagcucgacuggaa

SEQ ID NO: 1426618 - RNA, 19 nt, Homo sapiens
  misc_RNA (1)...(19): siRNA sense strand
aaagggaucaggaaauuga

SEQ ID NO: 1426619 - RNA, 19 nt, Homo sapiens
  misc_RNA (1)...(19): siRNA sense strand
agacucuccucccucaaua

SEQ ID NO: 1426620 - RNA, 19 nt, Homo sapiens
  misc_RNA (1)...(19): siRNA sense strand
gagcauggccagaauggau

SEQ ID NO: 1426621 - RNA, 19 nt, Homo sapiens
  misc_RNA (1)...(19): siRNA sense strand
ucaacagauucaugaagaa

SEQ ID NO: 1426622 - RNA, 19 nt, Homo sapiens
  misc_RNA (1)...(19): siRNA sense strand
ggagcaauaugggaaaugg

SEQ ID NO: 1426623 - RNA, 19 nt, Homo sapiens
  misc_RNA (1)...(19): siRNA sense strand
acucaagcaucaacagauu

SEQ ID NO: 1426624 - RNA, 19 nt, Homo sapiens
  misc_RNA (1)...(19): siRNA sense strand
guaaagccauccagaacac

SEQ ID NO: 1426625 - RNA, 19 nt, Homo sapiens
  misc_RNA (1)...(19): siRNA sense strand
gagcaagaaccuuuccaau

SEQ ID NO: 1426626 - RNA, 19 nt, Homo sapiens
  misc_RNA (1)...(19): siRNA sense strand
gaaagugucaugcggaaaa

SEQ ID NO: 1426627 - RNA, 19 nt, Homo sapiens
  misc_RNA (1)...(19): siRNA sense strand
gcacccaccugagcagcuu

SEQ ID NO: 1426628 - RNA, 19 nt, Homo sapiens
  misc_RNA (1)...(19): siRNA sense strand
ucagugaucccgagacaga

SEQ ID NO: 1426629 - RNA, 19 nt, Homo sapiens
  misc_RNA (1)...(19): siRNA sense strand
ccuccaggccucaccuuua

SEQ ID NO: 1426630 - RNA, 19 nt, Homo sapiens
  misc_RNA (1)...(19): siRNA sense strand
ucuccucccucaauaguga

SEQ ID NO: 1426631 - RNA, 19 nt, Homo sapiens
  misc_RNA (1)...(19): siRNA sense strand
ggagacuugugacgacauc

SEQ ID NO: 1426632 - RNA, 19 nt, Homo sapiens
  misc_RNA (1)...(19): siRNA sense strand
ccgcgucuuucucgucuuu

SEQ ID NO: 1426633 - RNA, 19 nt, Homo sapiens
  misc_RNA (1)...(19): siRNA sense strand
ggccugagcaagaaccuuu

SEQ ID NO: 1426634 - RNA, 19 nt, Homo sapiens
  misc_RNA (1)...(19): siRNA sense strand
gcacaauaggcaccagaga

SEQ ID NO: 1426635 - RNA, 19 nt, Homo sapiens
  misc_RNA (1)...(19): siRNA sense strand
ggacuccucgugugucaau

SEQ ID NO: 1426636 - RNA, 19 nt, Homo sapiens
  misc_RNA (1)...(19): siRNA sense strand
ucacuuuucuccuguguaa

SEQ ID NO: 1426637 - RNA, 19 nt, Homo sapiens
  misc_RNA (1)...(19): siRNA sense strand
ggaccugucugcgccaucu

SEQ ID NO: 1426638 - RNA, 19 nt, Homo sapiens
  misc_RNA (1)...(19): siRNA sense strand
cgagaacacgugucaagau

SEQ ID NO: 1426639 - RNA, 19 nt, Homo sapiens
  misc_RNA (1)...(19): siRNA sense strand
gccgguaccuugcacuauc

SEQ ID NO: 1426640 - RNA, 19 nt, Homo sapiens
  misc_RNA (1)...(19): siRNA sense strand
guucagugaucccgagaca

SEQ ID NO: 1426641 - RNA, 19 nt, Homo sapiens
  misc_RNA (1)...(19): siRNA sense strand
cuccaggccucaccuuuau

SEQ ID NO: 1426642 - RNA, 19 nt, Homo sapiens
  misc_RNA (1)...(19): siRNA sense strand
aaccucagcuccccaguua

SEQ ID NO: 1426643 - RNA, 19 nt, Homo sapiens
  misc_RNA (1)...(19): siRNA sense strand
uaugggaaaugguccaaag

SEQ ID NO: 1426644 - RNA, 19 nt, Homo sapiens
  misc_RNA (1)...(19): siRNA sense strand
ucuggugacucucuggauu

SEQ ID NO: 1426645 - RNA, 19 nt, Homo sapiens
  misc_RNA (1)...(19): siRNA sense strand
guccacagccagacgcuuu

SEQ ID NO: 1426646 - RNA, 19 nt, Homo sapiens
  misc_RNA (1)...(19): siRNA sense strand
ccagacgcuuucccgauuc

SEQ ID NO: 1426647 - RNA, 19 nt, Homo sapiens
  misc_RNA (1)...(19): siRNA sense strand
aucaacagauucaugaaga

SEQ ID NO: 1426648 - RNA, 19 nt, Homo sapiens
  misc_RNA (1)...(19): siRNA sense strand
gucaacuacucaagcauca

SEQ ID NO: 1426649 - RNA, 19 nt, Homo sapiens
  misc_RNA (1)...(19): siRNA sense strand
ccucauggcccacuacgau

SEQ ID NO: 1426650 - RNA, 19 nt, Homo sapiens
  misc_RNA (1)...(19): siRNA sense strand
caccauccagagcaucuua

SEQ ID NO: 1426651 - RNA, 19 nt, Homo sapiens
  misc_RNA (1)...(19): siRNA sense strand
cagaauggauguggucacu

SEQ ID NO: 1426652 - RNA, 19 nt, Homo sapiens
  misc_RNA (1)...(19): siRNA sense strand
aaacugagucugagaugca

SEQ ID NO: 1426653 - RNA, 19 nt, Homo sapiens
  misc_RNA (1)...(19): siRNA sense strand
gccuaccucuucaccauca

SEQ ID NO: 1426654 - RNA, 19 nt, Homo sapiens
  misc_RNA (1)...(19): siRNA sense strand
guaccuugcacuaucucua

SEQ ID NO: 1426655 - RNA, 19 nt, Homo sapiens
  misc_RNA (1)...(19): siRNA sense strand
cagcuuugccguccucaug

SEQ ID NO: 1426656 - RNA, 19 nt, Homo sapiens
  misc_RNA (1)...(19): siRNA sense strand
gcagggugucuucaucuuc

SEQ ID NO: 1426657 - RNA, 19 nt, Homo sapiens
  misc_RNA (1)...(19): siRNA sense strand
gcgagaacacgugucaaga

SEQ ID NO: 1426658 - RNA, 19 nt, Homo sapiens
  misc_RNA (1)...(19): siRNA sense strand
caaagggaucaggaaauug

SEQ ID NO: 1426659 - RNA, 19 nt, Homo sapiens
  misc_RNA (1)...(19): siRNA sense strand
caucaacgagugugcaaca

SEQ ID NO: 1426660 - RNA, 19 nt, Homo sapiens
  misc_RNA (1)...(19): siRNA sense strand
ugugaucucugccuuucug

SEQ ID NO: 1426661 - RNA, 19 nt, Homo sapiens
  misc_RNA (1)...(19): siRNA sense strand
agcaagaaccuuuccaaug

SEQ ID NO: 1426662 - RNA, 19 nt, Homo sapiens
  misc_RNA (1)...(19): siRNA sense strand
acaauaggcaccagagaca

SEQ ID NO: 1426663 - RNA, 19 nt, Homo sapiens
  misc_RNA (1)...(19): siRNA sense strand
gccaucuucucugugaauu

SEQ ID NO: 1426664 - RNA, 19 nt, Homo sapiens
  misc_RNA (1)...(19): siRNA sense strand
ccagaaaagggauuuauau

SEQ ID NO: 1426665 - RNA, 19 nt, Homo sapiens
  misc_RNA (1)...(19): siRNA sense strand
guggucaacuacucaagca

SEQ ID NO: 1426666 - RNA, 19 nt, Homo sapiens
  misc_RNA (1)...(19): siRNA sense strand
uggauggccuagaggaugu

SEQ ID NO: 1426667 - RNA, 19 nt, Homo sapiens
  misc_RNA (1)...(19): siRNA sense strand
caacagauucaugaagaag

SEQ ID NO: 1426668 - RNA, 19 nt, Homo sapiens
  misc_RNA (1)...(19): siRNA sense strand
ucaagcaucaacagauuca

SEQ ID NO: 1426669 - RNA, 19 nt, Homo sapiens
  misc_RNA (1)...(19): siRNA sense strand
gaaucaggcacagaaaucu

SEQ ID NO: 1426670 - RNA, 19 nt, Homo sapiens
  misc_RNA (1)...(19): siRNA sense strand
ggaggugcagaagcaagua

SEQ ID NO: 1426671 - RNA, 19 nt, Homo sapiens
  misc_RNA (1)...(19): siRNA sense strand
gcagguccgggagcaauau

SEQ ID NO: 1426672 - RNA, 19 nt, Homo sapiens
  misc_RNA (1)...(19): siRNA sense strand
agucugagaugcacacacu

SEQ ID NO: 1426673 - RNA, 19 nt, Homo sapiens
  misc_RNA (1)...(19): siRNA sense strand
gguccaaagggaucaggaa

SEQ ID NO: 1426674 - RNA, 19 nt, Homo sapiens
  misc_RNA (1)...(19): siRNA sense strand
agaaggugcucugugucuu

SEQ ID NO: 1426675 - RNA, 19 nt, Homo sapiens
  misc_RNA (1)...(19): siRNA sense strand
guccaaagggaucaggaaa

SEQ ID NO: 1426676 - RNA, 19 nt, Homo sapiens
  misc_RNA (1)...(19): siRNA sense strand
gugacucucuggauuuuga

SEQ ID NO: 1426677 - RNA, 19 nt, Homo sapiens
  misc_RNA (1)...(19): siRNA sense strand
caacuacucaagcaucaac

SEQ ID NO: 1426678 - RNA, 19 nt, Homo sapiens
  misc_RNA (1)...(19): siRNA sense strand
ggaccugggcagagacuac

SEQ ID NO: 1426679 - RNA, 19 nt, Homo sapiens
  misc_RNA (1)...(19): siRNA sense strand
uggccuaccucuucaccau

SEQ ID NO: 1426680 - RNA, 19 nt, Homo sapiens
  misc_RNA (1)...(19): siRNA sense strand
gucauggccuaccucuuca

SEQ ID NO: 1426681 - RNA, 19 nt, Homo sapiens
  misc_RNA (1)...(19): siRNA sense strand
ucucgucuuucucgcauuc

SEQ ID NO: 1426682 - RNA, 19 nt, Homo sapiens
  misc_RNA (1)...(19): siRNA sense strand
caucaacagauucaugaag

SEQ ID NO: 1426683 - RNA, 19 nt, Homo sapiens
  misc_RNA (1)...(19): siRNA sense strand
gcaucaacagauucaugaa

SEQ ID NO: 1426684 - RNA, 19 nt, Homo sapiens
  misc_RNA (1)...(19): siRNA sense strand
ucaagaaugagagcgagaa

SEQ ID NO: 1426685 - RNA, 19 nt, Homo sapiens
  misc_RNA (1)...(19): siRNA sense strand
cagacucuccucccucaau

SEQ ID NO: 1426686 - RNA, 19 nt, Homo sapiens
  misc_RNA (1)...(19): siRNA sense strand
aaggugcugugcuccauca

SEQ ID NO: 1426687 - RNA, 19 nt, Homo sapiens
  misc_RNA (1)...(19): siRNA sense strand
cacaggcugcagcacaaua

SEQ ID NO: 1426688 - RNA, 19 nt, Homo sapiens
  misc_RNA (1)...(19): siRNA sense strand
gcaacaacgacacccaaaa

SEQ ID NO: 1426689 - RNA, 19 nt, Homo sapiens
  misc_RNA (1)...(19): siRNA sense strand
gaaaacugagucugagaug

SEQ ID NO: 1426690 - RNA, 19 nt, Homo sapiens
  misc_RNA (1)...(19): siRNA sense strand
cuacucaagcaucaacaga

SEQ ID NO: 1426691 - RNA, 19 nt, Homo sapiens
  misc_RNA (1)...(19): siRNA sense strand
gcaagaaccuuuccaaugg

SEQ ID NO: 1426692 - RNA, 19 nt, Homo sapiens
  misc_RNA (1)...(19): siRNA sense strand
ccaaugggcuguugaacuu

SEQ ID NO: 1426693 - RNA, 19 nt, Homo sapiens
  misc_RNA (1)...(19): siRNA sense strand
caucuucucugugaauuua

SEQ ID NO: 1426694 - RNA, 19 nt, Homo sapiens
  misc_RNA (1)...(19): siRNA sense strand
ccaaagggaucaggaaauu

SEQ ID NO: 1426695 - RNA, 19 nt, Homo sapiens
  misc_RNA (1)...(19): siRNA sense strand
gaauuuaguucucuuucug

SEQ ID NO: 1426696 - RNA, 19 nt, Homo sapiens
  misc_RNA (1)...(19): siRNA sense strand
gugcaacacugucgaaagu

SEQ ID NO: 1426697 - RNA, 19 nt, Homo sapiens
  misc_RNA (1)...(19): siRNA sense strand
gccagacgcuuucccgauu

SEQ ID NO: 1426698 - RNA, 19 nt, Homo sapiens
  misc_RNA (1)...(19): siRNA sense strand
ggucauggccuaccucuuc

SEQ ID NO: 1426699 - RNA, 19 nt, Homo sapiens
  misc_RNA (1)...(19): siRNA sense strand
gaugugaucucugccuuuc

SEQ ID NO: 1426700 - RNA, 19 nt, Homo sapiens
  misc_RNA (1)...(19): siRNA sense strand
ggaaucaggcacagaaauc

SEQ ID NO: 1426701 - RNA, 19 nt, Homo sapiens
  misc_RNA (1)...(19): siRNA sense strand
ccaguuaccuucaccuucu

SEQ ID NO: 1426702 - RNA, 19 nt, Homo sapiens
  misc_RNA (1)...(19): siRNA sense strand
ugaugcagcucgacuggaa

SEQ ID NO: 1426703 - RNA, 19 nt, Homo sapiens
  misc_RNA (1)...(19): siRNA sense strand
aaagggaucaggaaauuga

SEQ ID NO: 1426704 - RNA, 19 nt, Homo sapiens
  misc_RNA (1)...(19): siRNA sense strand
agacucuccucccucaaua

SEQ ID NO: 1426705 - RNA, 19 nt, Homo sapiens
  misc_RNA (1)...(19): siRNA sense strand
gagcauggccagaauggau

SEQ ID NO: 1426706 - RNA, 19 nt, Homo sapiens
  misc_RNA (1)...(19): siRNA sense strand
ucaacagauucaugaagaa

SEQ ID NO: 1426707 - RNA, 19 nt, Homo sapiens
  misc_RNA (1)...(19): siRNA sense strand
ggagcaauaugggaaaugg

SEQ ID NO: 1426708 - RNA, 19 nt, Homo sapiens
  misc_RNA (1)...(19): siRNA sense strand
acucaagcaucaacagauu

SEQ ID NO: 1426709 - RNA, 19 nt, Homo sapiens
  misc_RNA (1)...(19): siRNA sense strand
guaaagccauccagaacac

SEQ ID NO: 1426710 - RNA, 19 nt, Homo sapiens
  misc_RNA (1)...(19): siRNA sense strand
gagcaagaaccuuuccaau

SEQ ID NO: 1426711 - RNA, 19 nt, Homo sapiens
  misc_RNA (1)...(19): siRNA sense strand
gaaagugucaugcggaaaa

SEQ ID NO: 1426712 - RNA, 19 nt, Homo sapiens
  misc_RNA (1)...(19): siRNA sense strand
gcacccaccugagcagcuu

SEQ ID NO: 1426713 - RNA, 19 nt, Homo sapiens
  misc_RNA (1)...(19): siRNA sense strand
ucagugaucccgagacaga

SEQ ID NO: 1426714 - RNA, 19 nt, Homo sapiens
  misc_RNA (1)...(19): siRNA sense strand
ccuccaggccucaccuuua

SEQ ID NO: 1426715 - RNA, 19 nt, Homo sapiens
  misc_RNA (1)...(19): siRNA sense strand
ucuccucccucaauaguga

SEQ ID NO: 1426716 - RNA, 19 nt, Homo sapiens
  misc_RNA (1)...(19): siRNA sense strand
ggagacuugugacgacauc

SEQ ID NO: 1426717 - RNA, 19 nt, Homo sapiens
  misc_RNA (1)...(19): siRNA sense strand
ccgcgucuuucucgucuuu

SEQ ID NO: 1426718 - RNA, 19 nt, Homo sapiens
  misc_RNA (1)...(19): siRNA sense strand
ggccugagcaagaaccuuu

SEQ ID NO: 1426719 - RNA, 19 nt, Homo sapiens
  misc_RNA (1)...(19): siRNA sense strand
gcacaauaggcaccagaga

SEQ ID NO: 1426720 - RNA, 19 nt, Homo sapiens
  misc_RNA (1)...(19): siRNA sense strand
ggacuccucgugugucaau

SEQ ID NO: 1426721 - RNA, 19 nt, Homo sapiens
  misc_RNA (1)...(19): siRNA sense strand
ucacuuuucuccuguguaa

SEQ ID NO: 1426722 - RNA, 19 nt, Homo sapiens
  misc_RNA (1)...(19): siRNA sense strand
ggaccugucugcgccaucu

SEQ ID NO: 1426723 - RNA, 19 nt, Homo sapiens
  misc_RNA (1)...(19): siRNA sense strand
cgagaacacgugucaagau

SEQ ID NO: 1426724 - RNA, 19 nt, Homo sapiens
  misc_RNA (1)...(19): siRNA sense strand
gccgguaccuugcacuauc

SEQ ID NO: 1426725 - RNA, 19 nt, Homo sapiens
  misc_RNA (1)...(19): siRNA sense strand
guucagugaucccgagaca

SEQ ID NO: 1426726 - RNA, 19 nt, Homo sapiens
  misc_RNA (1)...(19): siRNA sense strand
cuccaggccucaccuuuau

SEQ ID NO: 1426727 - RNA, 19 nt, Homo sapiens
  misc_RNA (1)...(19): siRNA sense strand
aaccucagcuccccaguua

SEQ ID NO: 1426728 - RNA, 19 nt, Homo sapiens
  misc_RNA (1)...(19): siRNA sense strand
uaugggaaaugguccaaag

SEQ ID NO: 1426729 - RNA, 19 nt, Homo sapiens
  misc_RNA (1)...(19): siRNA sense strand
ucuggugacucucuggauu

SEQ ID NO: 1426730 - RNA, 19 nt, Homo sapiens
  misc_RNA (1)...(19): siRNA sense strand
guccacagccagacgcuuu

SEQ ID NO: 1426731 - RNA, 19 nt, Homo sapiens
  misc_RNA (1)...(19): siRNA sense strand
ccagacgcuuucccgauuc

SEQ ID NO: 1426732 - RNA, 19 nt, Homo sapiens
  misc_RNA (1)...(19): siRNA sense strand
aucaacagauucaugaaga

SEQ ID NO: 1426733 - RNA, 19 nt, Homo sapiens
  misc_RNA (1)...(19): siRNA sense strand
gucaacuacucaagcauca

SEQ ID NO: 1426734 - RNA, 19 nt, Homo sapiens
  misc_RNA (1)...(19): siRNA sense strand
ccucauggcccacuacgau

SEQ ID NO: 1426735 - RNA, 19 nt, Homo sapiens
  misc_RNA (1)...(19): siRNA sense strand
caccauccagagcaucuua

SEQ ID NO: 1426736 - RNA, 19 nt, Homo sapiens
  misc_RNA (1)...(19): siRNA sense strand
cagaauggauguggucacu

SEQ ID NO: 1426737 - RNA, 19 nt, Homo sapiens
  misc_RNA (1)...(19): siRNA sense strand
aaacugagucugagaugca

SEQ ID NO: 1426738 - RNA, 19 nt, Homo sapiens
  misc_RNA (1)...(19): siRNA sense strand
gccuaccucuucaccauca

SEQ ID NO: 1426739 - RNA, 19 nt, Homo sapiens
  misc_RNA (1)...(19): siRNA sense strand
guaccuugcacuaucucua

SEQ ID NO: 1426740 - RNA, 19 nt, Homo sapiens
  misc_RNA (1)...(19): siRNA sense strand
cagcuuugccguccucaug

SEQ ID NO: 1426741 - RNA, 19 nt, Homo sapiens
  misc_RNA (1)...(19): siRNA sense strand
gcagggugucuucaucuuc

SEQ ID NO: 1426742 - RNA, 19 nt, Homo sapiens
  misc_RNA (1)...(19): siRNA sense strand
gcgagaacacgugucaaga

SEQ ID NO: 1426743 - RNA, 19 nt, Homo sapiens
  misc_RNA (1)...(19): siRNA sense strand
caaagggaucaggaaauug

SEQ ID NO: 1426744 - RNA, 19 nt, Homo sapiens
  misc_RNA (1)...(19): siRNA sense strand
caucaacgagugugcaaca

SEQ ID NO: 1426745 - RNA, 19 nt, Homo sapiens
  misc_RNA (1)...(19): siRNA sense strand
ugugaucucugccuuucug

SEQ ID NO: 1426746 - RNA, 19 nt, Homo sapiens
  misc_RNA (1)...(19): siRNA sense strand
agcaagaaccuuuccaaug

SEQ ID NO: 1426747 - RNA, 19 nt, Homo sapiens
  misc_RNA (1)...(19): siRNA sense strand
acaauaggcaccagagaca

SEQ ID NO: 1426748 - RNA, 19 nt, Homo sapiens
  misc_RNA (1)...(19): siRNA sense strand
gccaucuucucugugaauu

SEQ ID NO: 1426749 - RNA, 19 nt, Homo sapiens
  misc_RNA (1)...(19): siRNA sense strand
ccagaaaagggauuuauau

SEQ ID NO: 1426750 - RNA, 19 nt, Homo sapiens
  misc_RNA (1)...(19): siRNA sense strand
guggucaacuacucaagca

SEQ ID NO: 1426751 - RNA, 19 nt, Homo sapiens
  misc_RNA (1)...(19): siRNA sense strand
uggauggccuagaggaugu

SEQ ID NO: 1426752 - RNA, 19 nt, Homo sapiens
  misc_RNA (1)...(19): siRNA sense strand
caacagauucaugaagaag

SEQ ID NO: 1426753 - RNA, 19 nt, Homo sapiens
  misc_RNA (1)...(19): siRNA sense strand
ucaagcaucaacagauuca

SEQ ID NO: 1426754 - RNA, 19 nt, Homo sapiens
  misc_RNA (1)...(19): siRNA sense strand
gaaucaggcacagaaaucu

SEQ ID NO: 1426755 - RNA, 19 nt, Homo sapiens
  misc_RNA (1)...(19): siRNA sense strand
ggaggugcagaagcaagua

SEQ ID NO: 1426756 - RNA, 19 nt, Homo sapiens
  misc_RNA (1)...(19): siRNA sense strand
gcagguccgggagcaauau

SEQ ID NO: 1426757 - RNA, 19 nt, Homo sapiens
  misc_RNA (1)...(19): siRNA sense strand
agucugagaugcacacacu

SEQ ID NO: 1426758 - RNA, 19 nt, Homo sapiens
  misc_RNA (1)...(19): siRNA sense strand
gguccaaagggaucaggaa

SEQ ID NO: 1426759 - RNA, 19 nt, Homo sapiens
  misc_RNA (1)...(19): siRNA sense strand
agaaggugcucugugucuu

SEQ ID NO: 1426760 - RNA, 19 nt, Homo sapiens
  misc_RNA (1)...(19): siRNA sense strand
guccaaagggaucaggaaa

SEQ ID NO: 1426761 - RNA, 19 nt, Homo sapiens
  misc_RNA (1)...(19): siRNA sense strand
gugacucucuggauuuuga

SEQ ID NO: 1426762 - RNA, 19 nt, Homo sapiens
  misc_RNA (1)...(19): siRNA sense strand
caacuacucaagcaucaac

SEQ ID NO: 1426763 - RNA, 19 nt, Homo sapiens
  misc_RNA (1)...(19): siRNA sense strand
ggaccugggcagagacuac

SEQ ID NO: 1426764 - RNA, 19 nt, Homo sapiens
  misc_RNA (1)...(19): siRNA sense strand
uggccuaccucuucaccau

SEQ ID NO: 1426765 - RNA, 19 nt, Homo sapiens
  misc_RNA (1)...(19): siRNA sense strand
gucauggccuaccucuuca

SEQ ID NO: 1426766 - RNA, 19 nt, Homo sapiens
  misc_RNA (1)...(19): siRNA sense strand
ucucgucuuucucgcauuc

SEQ ID NO: 1426767 - RNA, 19 nt, Homo sapiens
  misc_RNA (1)...(19): siRNA sense strand
caucaacagauucaugaag

SEQ ID NO: 1426768 - RNA, 19 nt, Homo sapiens
  misc_RNA (1)...(19): siRNA sense strand
gcaucaacagauucaugaa

SEQ ID NO: 1426769 - RNA, 19 nt, Homo sapiens
  misc_RNA (1)...(19): siRNA sense strand
ucaagaaugagagcgagaa

SEQ ID NO: 1426770 - RNA, 19 nt, Homo sapiens
  misc_RNA (1)...(19): siRNA sense strand
cagacucuccucccucaau

SEQ ID NO: 1426771 - RNA, 19 nt, Homo sapiens
  misc_RNA (1)...(19): siRNA sense strand
aaggugcugugcuccauca

SEQ ID NO: 1426772 - RNA, 19 nt, Homo sapiens
  misc_RNA (1)...(19): siRNA sense strand
cacaggcugcagcacaaua

SEQ ID NO: 1426773 - RNA, 19 nt, Homo sapiens
  misc_RNA (1)...(19): siRNA sense strand
gcaacaacgacacccaaaa

SEQ ID NO: 1426774 - RNA, 19 nt, Homo sapiens
  misc_RNA (1)...(19): siRNA sense strand
gaaaacugagucugagaug

SEQ ID NO: 1426775 - RNA, 19 nt, Homo sapiens
  misc_RNA (1)...(19): siRNA sense strand
cuacucaagcaucaacaga

SEQ ID NO: 1426776 - RNA, 19 nt, Homo sapiens
  misc_RNA (1)...(19): siRNA sense strand
gcaagaaccuuuccaaugg

SEQ ID NO: 1426777 - RNA, 19 nt, Homo sapiens
  misc_RNA (1)...(19): siRNA sense strand
ccaaugggcuguugaacuu

SEQ ID NO: 1426778 - RNA, 19 nt, Homo sapiens
  misc_RNA (1)...(19): siRNA sense strand
caucuucucugugaauuua

SEQ ID NO: 1426779 - RNA, 19 nt, Homo sapiens
  misc_RNA (1)...(19): siRNA sense strand
ccaaagggaucaggaaauu

SEQ ID NO: 1426780 - RNA, 19 nt, Homo sapiens
  misc_RNA (1)...(19): siRNA sense strand
gaauuuaguucucuuucug

SEQ ID NO: 1426781 - RNA, 19 nt, Homo sapiens
  misc_RNA (1)...(19): siRNA sense strand
gugcaacacugucgaaagu

SEQ ID NO: 1426782 - RNA, 19 nt, Homo sapiens
  misc_RNA (1)...(19): siRNA sense strand
gccagacgcuuucccgauu

SEQ ID NO: 1426783 - RNA, 19 nt, Homo sapiens
  misc_RNA (1)...(19): siRNA sense strand
ggucauggccuaccucuuc

SEQ ID NO: 1426784 - RNA, 19 nt, Homo sapiens
  misc_RNA (1)...(19): siRNA sense strand
gaugugaucucugccuuuc

SEQ ID NO: 1426785 - RNA, 19 nt, Homo sapiens
  misc_RNA (1)...(19): siRNA sense strand
ggaaucaggcacagaaauc

SEQ ID NO: 1426786 - RNA, 19 nt, Homo sapiens
  misc_RNA (1)...(19): siRNA sense strand
ccaguuaccuucaccuucu

SEQ ID NO: 1426787 - RNA, 19 nt, Homo sapiens
  misc_RNA (1)...(19): siRNA sense strand
ugaugcagcucgacuggaa

SEQ ID NO: 1426788 - RNA, 19 nt, Homo sapiens
  misc_RNA (1)...(19): siRNA sense strand
aaagggaucaggaaauuga

SEQ ID NO: 1426789 - RNA, 19 nt, Homo sapiens
  misc_RNA (1)...(19): siRNA sense strand
agacucuccucccucaaua

SEQ ID NO: 1426790 - RNA, 19 nt, Homo sapiens
  misc_RNA (1)...(19): siRNA sense strand
gagcauggccagaauggau

SEQ ID NO: 1426791 - RNA, 19 nt, Homo sapiens
  misc_RNA (1)...(19): siRNA sense strand
ucaacagauucaugaagaa

SEQ ID NO: 1426792 - RNA, 19 nt, Homo sapiens
  misc_RNA (1)...(19): siRNA sense strand
ggagcaauaugggaaaugg

SEQ ID NO: 1426793 - RNA, 19 nt, Homo sapiens
  misc_RNA (1)...(19): siRNA sense strand
acucaagcaucaacagauu

SEQ ID NO: 1426794 - RNA, 19 nt, Homo sapiens
  misc_RNA (1)...(19): siRNA sense strand
guaaagccauccagaacac

SEQ ID NO: 1426795 - RNA, 19 nt, Homo sapiens
  misc_RNA (1)...(19): siRNA sense strand
gagcaagaaccuuuccaau

SEQ ID NO: 1426796 - RNA, 19 nt, Homo sapiens
  misc_RNA (1)...(19): siRNA sense strand
gaaagugucaugcggaaaa

SEQ ID NO: 1426797 - RNA, 19 nt, Homo sapiens
  misc_RNA (1)...(19): siRNA sense strand
gcacccaccugagcagcuu

SEQ ID NO: 1426798 - RNA, 19 nt, Homo sapiens
  misc_RNA (1)...(19): siRNA sense strand
ucagugaucccgagacaga

SEQ ID NO: 1426799 - RNA, 19 nt, Homo sapiens
  misc_RNA (1)...(19): siRNA sense strand
ccuccaggccucaccuuua

SEQ ID NO: 1426800 - RNA, 19 nt, Homo sapiens
  misc_RNA (1)...(19): siRNA sense strand
ucuccucccucaauaguga

SEQ ID NO: 1426801 - RNA, 19 nt, Homo sapiens
  misc_RNA (1)...(19): siRNA sense strand
ggagacuugugacgacauc

SEQ ID NO: 1426802 - RNA, 19 nt, Homo sapiens
  misc_RNA (1)...(19): siRNA sense strand
ccgcgucuuucucgucuuu

SEQ ID NO: 1426803 - RNA, 19 nt, Homo sapiens
  misc_RNA (1)...(19): siRNA sense strand
ggccugagcaagaaccuuu

SEQ ID NO: 1426804 - RNA, 19 nt, Homo sapiens
  misc_RNA (1)...(19): siRNA sense strand
gcacaauaggcaccagaga

SEQ ID NO: 1426805 - RNA, 19 nt, Homo sapiens
  misc_RNA (1)...(19): siRNA sense strand
ggacuccucgugugucaau

SEQ ID NO: 1426806 - RNA, 19 nt, Homo sapiens
  misc_RNA (1)...(19): siRNA sense strand
ucacuuuucuccuguguaa

SEQ ID NO: 1426807 - RNA, 19 nt, Homo sapiens
  misc_RNA (1)...(19): siRNA sense strand
ggaccugucugcgccaucu

SEQ ID NO: 1426808 - RNA, 19 nt, Homo sapiens
  misc_RNA (1)...(19): siRNA sense strand
cgagaacacgugucaagau

SEQ ID NO: 1426809 - RNA, 19 nt, Homo sapiens
  misc_RNA (1)...(19): siRNA sense strand
gccgguaccuugcacuauc

SEQ ID NO: 1426810 - RNA, 19 nt, Homo sapiens
  misc_RNA (1)...(19): siRNA sense strand
guucagugaucccgagaca

SEQ ID NO: 1426811 - RNA, 19 nt, Homo sapiens
  misc_RNA (1)...(19): siRNA sense strand
cuccaggccucaccuuuau

SEQ ID NO: 1426812 - RNA, 19 nt, Homo sapiens
  misc_RNA (1)...(19): siRNA sense strand
aaccucagcuccccaguua

SEQ ID NO: 1426813 - RNA, 19 nt, Homo sapiens
  misc_RNA (1)...(19): siRNA sense strand
uaugggaaaugguccaaag

SEQ ID NO: 1426814 - RNA, 19 nt, Homo sapiens
  misc_RNA (1)...(19): siRNA sense strand
ucuggugacucucuggauu

SEQ ID NO: 1426815 - RNA, 19 nt, Homo sapiens
  misc_RNA (1)...(19): siRNA sense strand
guccacagccagacgcuuu

SEQ ID NO: 1426816 - RNA, 19 nt, Homo sapiens
  misc_RNA (1)...(19): siRNA sense strand
ccagacgcuuucccgauuc

SEQ ID NO: 1426817 - RNA, 19 nt, Homo sapiens
  misc_RNA (1)...(19): siRNA sense strand
aucaacagauucaugaaga

SEQ ID NO: 1426818 - RNA, 19 nt, Homo sapiens
  misc_RNA (1)...(19): siRNA sense strand
gucaacuacucaagcauca

SEQ ID NO: 1426819 - RNA, 19 nt, Homo sapiens
  misc_RNA (1)...(19): siRNA sense strand
ccucauggcccacuacgau

SEQ ID NO: 1426820 - RNA, 19 nt, Homo sapiens
  misc_RNA (1)...(19): siRNA sense strand
caccauccagagcaucuua

SEQ ID NO: 1426821 - RNA, 19 nt, Homo sapiens
  misc_RNA (1)...(19): siRNA sense strand
cagaauggauguggucacu

SEQ ID NO: 1426822 - RNA, 19 nt, Homo sapiens
  misc_RNA (1)...(19): siRNA sense strand
aaacugagucugagaugca

SEQ ID NO: 1426823 - RNA, 19 nt, Homo sapiens
  misc_RNA (1)...(19): siRNA sense strand
gccuaccucuucaccauca

SEQ ID NO: 1426824 - RNA, 19 nt, Homo sapiens
  misc_RNA (1)...(19): siRNA sense strand
guaccuugcacuaucucua

SEQ ID NO: 1426825 - RNA, 19 nt, Homo sapiens
  misc_RNA (1)...(19): siRNA sense strand
cagcuuugccguccucaug

SEQ ID NO: 1426826 - RNA, 19 nt, Homo sapiens
  misc_RNA (1)...(19): siRNA sense strand
gcagggugucuucaucuuc

SEQ ID NO: 1426827 - RNA, 19 nt, Homo sapiens
  misc_RNA (1)...(19): siRNA sense strand
gcgagaacacgugucaaga

SEQ ID NO: 1426828 - RNA, 19 nt, Homo sapiens
  misc_RNA (1)...(19): siRNA sense strand
caaagggaucaggaaauug

SEQ ID NO: 1426829 - RNA, 19 nt, Homo sapiens
  misc_RNA (1)...(19): siRNA sense strand
caucaacgagugugcaaca

SEQ ID NO: 1426830 - RNA, 19 nt, Homo sapiens
  misc_RNA (1)...(19): siRNA sense strand
ugugaucucugccuuucug

SEQ ID NO: 1426831 - RNA, 19 nt, Homo sapiens
  misc_RNA (1)...(19): siRNA sense strand
agcaagaaccuuuccaaug

SEQ ID NO: 1426832 - RNA, 19 nt, Homo sapiens
  misc_RNA (1)...(19): siRNA sense strand
acaauaggcaccagagaca

SEQ ID NO: 1426833 - RNA, 19 nt, Homo sapiens
  misc_RNA (1)...(19): siRNA sense strand
gccaucuucucugugaauu

SEQ ID NO: 1426834 - RNA, 19 nt, Homo sapiens
  misc_RNA (1)...(19): siRNA sense strand
ccagaaaagggauuuauau

SEQ ID NO: 1426835 - RNA, 19 nt, Homo sapiens
  misc_RNA (1)...(19): siRNA sense strand
guggucaacuacucaagca

SEQ ID NO: 1426836 - RNA, 19 nt, Homo sapiens
  misc_RNA (1)...(19): siRNA sense strand
uggauggccuagaggaugu

SEQ ID NO: 1426837 - RNA, 19 nt, Homo sapiens
  misc_RNA (1)...(19): siRNA sense strand
caacagauucaugaagaag

SEQ ID NO: 1426838 - RNA, 19 nt, Homo sapiens
  misc_RNA (1)...(19): siRNA sense strand
ucaagcaucaacagauuca

SEQ ID NO: 1426839 - RNA, 19 nt, Homo sapiens
  misc_RNA (1)...(19): siRNA sense strand
gaaucaggcacagaaaucu

SEQ ID NO: 1426840 - RNA, 19 nt, Homo sapiens
  misc_RNA (1)...(19): siRNA sense strand
ggaggugcagaagcaagua

SEQ ID NO: 1426841 - RNA, 19 nt, Homo sapiens
  misc_RNA (1)...(19): siRNA sense strand
gcagguccgggagcaauau

SEQ ID NO: 1426842 - RNA, 19 nt, Homo sapiens
  misc_RNA (1)...(19): siRNA sense strand
agucugagaugcacacacu

SEQ ID NO: 1426843 - RNA, 19 nt, Homo sapiens
  misc_RNA (1)...(19): siRNA sense strand
gguccaaagggaucaggaa

SEQ ID NO: 1426844 - RNA, 19 nt, Homo sapiens
  misc_RNA (1)...(19): siRNA sense strand
agaaggugcucugugucuu

SEQ ID NO: 1426845 - RNA, 19 nt, Homo sapiens
  misc_RNA (1)...(19): siRNA sense strand
guccaaagggaucaggaaa

SEQ ID NO: 1426846 - RNA, 19 nt, Homo sapiens
  misc_RNA (1)...(19): siRNA sense strand
gugacucucuggauuuuga

SEQ ID NO: 1426847 - RNA, 19 nt, Homo sapiens
  misc_RNA (1)...(19): siRNA sense strand
caacuacucaagcaucaac

SEQ ID NO: 1426848 - RNA, 19 nt, Homo sapiens
  misc_RNA (1)...(19): siRNA sense strand
ggaccugggcagagacuac

SEQ ID NO: 1426849 - RNA, 19 nt, Homo sapiens
  misc_RNA (1)...(19): siRNA sense strand
uggccuaccucuucaccau

SEQ ID NO: 1426850 - RNA, 19 nt, Homo sapiens
  misc_RNA (1)...(19): siRNA sense strand
gucauggccuaccucuuca

SEQ ID NO: 1426851 - RNA, 19 nt, Homo sapiens
  misc_RNA (1)...(19): siRNA sense strand
ucucgucuuucucgcauuc

SEQ ID NO: 1426852 - RNA, 19 nt, Homo sapiens
  misc_RNA (1)...(19): siRNA sense strand
caucaacagauucaugaag

SEQ ID NO: 1426853 - RNA, 19 nt, Homo sapiens
  misc_RNA (1)...(19): siRNA sense strand
gcaucaacagauucaugaa

SEQ ID NO: 1426854 - RNA, 19 nt, Homo sapiens
  misc_RNA (1)...(19): siRNA sense strand
ucaagaaugagagcgagaa

SEQ ID NO: 1426855 - RNA, 19 nt, Homo sapiens
  misc_RNA (1)...(19): siRNA sense strand
cagacucuccucccucaau

SEQ ID NO: 1426856 - RNA, 19 nt, Homo sapiens
  misc_RNA (1)...(19): siRNA sense strand
aaggugcugugcuccauca

SEQ ID NO: 1426857 - RNA, 19 nt, Homo sapiens
  misc_RNA (1)...(19): siRNA sense strand
cacaggcugcagcacaaua

SEQ ID NO: 1426858 - RNA, 19 nt, Homo sapiens
  misc_RNA (1)...(19): siRNA sense strand
gcaacaacgacacccaaaa

SEQ ID NO: 1426859 - RNA, 19 nt, Homo sapiens
  misc_RNA (1)...(19): siRNA sense strand
gaaaacugagucugagaug

SEQ ID NO: 1426860 - RNA, 19 nt, Homo sapiens
  misc_RNA (1)...(19): siRNA sense strand
cuacucaagcaucaacaga

SEQ ID NO: 1426861 - RNA, 19 nt, Homo sapiens
  misc_RNA (1)...(19): siRNA sense strand
gaaggaaccugucaucauu

SEQ ID NO: 1426862 - RNA, 19 nt, Homo sapiens
  misc_RNA (1)...(19): siRNA sense strand
gaaaagaacuucagcaauu

SEQ ID NO: 1426863 - RNA, 19 nt, Homo sapiens
  misc_RNA (1)...(19): siRNA sense strand
gaagaaugcugcaccacuu

SEQ ID NO: 1426864 - RNA, 19 nt, Homo sapiens
  misc_RNA (1)...(19): siRNA sense strand
gggcacaacuucugcaaag

SEQ ID NO: 1426865 - RNA, 19 nt, Homo sapiens
  misc_RNA (1)...(19): siRNA sense strand
cgacaguacuuugcccuaa

SEQ ID NO: 1426866 - RNA, 19 nt, Homo sapiens
  misc_RNA (1)...(19): siRNA sense strand
ccauagagcuggaaaagaa

SEQ ID NO: 1426867 - RNA, 19 nt, Homo sapiens
  misc_RNA (1)...(19): siRNA sense strand
ucacagaccgcucucauau

SEQ ID NO: 1426868 - RNA, 19 nt, Homo sapiens
  misc_RNA (1)...(19): siRNA sense strand
guacuuugcccuaaggaaa

SEQ ID NO: 1426869 - RNA, 19 nt, Homo sapiens
  misc_RNA (1)...(19): siRNA sense strand
ggaggugacuucaguaucc

SEQ ID NO: 1426870 - RNA, 19 nt, Homo sapiens
  misc_RNA (1)...(19): siRNA sense strand
gaaaauccuuaaacagcua

SEQ ID NO: 1426871 - RNA, 19 nt, Homo sapiens
  misc_RNA (1)...(19): siRNA sense strand
gaggcuguaugcuugauau

SEQ ID NO: 1426872 - RNA, 19 nt, Homo sapiens
  misc_RNA (1)...(19): siRNA sense strand
gcucucauaucuacaccuu

SEQ ID NO: 1426873 - RNA, 19 nt, Homo sapiens
  misc_RNA (1)...(19): siRNA sense strand
gcuguaugcuugauaugug

SEQ ID NO: 1426874 - RNA, 19 nt, Homo sapiens
  misc_RNA (1)...(19): siRNA sense strand
ucucauaucuacaccuuca

SEQ ID NO: 1426875 - RNA, 19 nt, Homo sapiens
  misc_RNA (1)...(19): siRNA sense strand
acagaccgcucucauaucu

SEQ ID NO: 1426876 - RNA, 19 nt, Homo sapiens
  misc_RNA (1)...(19): siRNA sense strand
gaaccugucaucauugagu

SEQ ID NO: 1426877 - RNA, 19 nt, Homo sapiens
  misc_RNA (1)...(19): siRNA sense strand
ugacuucaguauccauaga

SEQ ID NO: 1426878 - RNA, 19 nt, Homo sapiens
  misc_RNA (1)...(19): siRNA sense strand
gcuucgagaugcuuaagga

SEQ ID NO: 1426879 - RNA, 19 nt, Homo sapiens
  misc_RNA (1)...(19): siRNA sense strand
acacaggaguacaaggaaa

SEQ ID NO: 1426880 - RNA, 19 nt, Homo sapiens
  misc_RNA (1)...(19): siRNA sense strand
ccauggaggugacuucagu

SEQ ID NO: 1426881 - RNA, 19 nt, Homo sapiens
  misc_RNA (1)...(19): siRNA sense strand
gcaguaugguggaaauugc

SEQ ID NO: 1426882 - RNA, 19 nt, Homo sapiens
  misc_RNA (1)...(19): siRNA sense strand
ucaagagacuaguggaaag

SEQ ID NO: 1426883 - RNA, 19 nt, Homo sapiens
  misc_RNA (1)...(19): siRNA sense strand
aacagaagcugcaggagau

SEQ ID NO: 1426884 - RNA, 19 nt, Homo sapiens
  misc_RNA (1)...(19): siRNA sense strand
gcacacugucuuucuacaa

SEQ ID NO: 1426885 - RNA, 19 nt, Homo sapiens
  misc_RNA (1)...(19): siRNA sense strand
gagggcaagugcuuacagu

SEQ ID NO: 1426886 - RNA, 19 nt, Homo sapiens
  misc_RNA (1)...(19): siRNA sense strand
uguccugucugucgaaaga

SEQ ID NO: 1426887 - RNA, 19 nt, Homo sapiens
  misc_RNA (1)...(19): siRNA sense strand
cacacugucuuucuacaau

SEQ ID NO: 1426888 - RNA, 19 nt, Homo sapiens
  misc_RNA (1)...(19): siRNA sense strand
ucgagaugcuuaaggaugu

SEQ ID NO: 1426889 - RNA, 19 nt, Homo sapiens
  misc_RNA (1)...(19): siRNA sense strand
gggcaagugcuuacaguca

SEQ ID NO: 1426890 - RNA, 19 nt, Homo sapiens
  misc_RNA (1)...(19): siRNA sense strand
gagggaguuugaagagcuu

SEQ ID NO: 1426891 - RNA, 19 nt, Homo sapiens
  misc_RNA (1)...(19): siRNA sense strand
ugaaggaaccugucaucau

SEQ ID NO: 1426892 - RNA, 19 nt, Homo sapiens
  misc_RNA (1)...(19): siRNA sense strand
guaagagcgucaaguucgu

SEQ ID NO: 1426893 - RNA, 19 nt, Homo sapiens
  misc_RNA (1)...(19): siRNA sense strand
gaagaggaacaggacauuc

SEQ ID NO: 1426894 - RNA, 19 nt, Homo sapiens
  misc_RNA (1)...(19): siRNA sense strand
cuacacaggaguacaagga

SEQ ID NO: 1426895 - RNA, 19 nt, Homo sapiens
  misc_RNA (1)...(19): siRNA sense strand
gacaguacuuugcccuaag

SEQ ID NO: 1426896 - RNA, 19 nt, Homo sapiens
  misc_RNA (1)...(19): siRNA sense strand
gcucaagagacuaguggaa

SEQ ID NO: 1426897 - RNA, 19 nt, Homo sapiens
  misc_RNA (1)...(19): siRNA sense strand
agaccgcucucauaucuac

SEQ ID NO: 1426898 - RNA, 19 nt, Homo sapiens
  misc_RNA (1)...(19): siRNA sense strand
aggaaccugucaucauuga

SEQ ID NO: 1426899 - RNA, 19 nt, Homo sapiens
  misc_RNA (1)...(19): siRNA sense strand
ccaagcggguaggcauauu

SEQ ID NO: 1426900 - RNA, 19 nt, Homo sapiens
  misc_RNA (1)...(19): siRNA sense strand
agacaagacuccgggaucu

SEQ ID NO: 1426901 - RNA, 19 nt, Homo sapiens
  misc_RNA (1)...(19): siRNA sense strand
gacagcucauccuaaccua

SEQ ID NO: 1426902 - RNA, 19 nt, Homo sapiens
  misc_RNA (1)...(19): siRNA sense strand
uuucacgacuggaagaaga

SEQ ID NO: 1426903 - RNA, 19 nt, Homo sapiens
  misc_RNA (1)...(19): siRNA sense strand
auaggcggcuggaugaaga

SEQ ID NO: 1426904 - RNA, 19 nt, Homo sapiens
  misc_RNA (1)...(19): siRNA sense strand
aagaaugcugcaccacuua

SEQ ID NO: 1426905 - RNA, 19 nt, Homo sapiens
  misc_RNA (1)...(19): siRNA sense strand
gagccgaaagggcgaguug

SEQ ID NO: 1426906 - RNA, 19 nt, Homo sapiens
  misc_RNA (1)...(19): siRNA sense strand
gcacaacuucugcaaagcu

SEQ ID NO: 1426907 - RNA, 19 nt, Homo sapiens
  misc_RNA (1)...(19): siRNA sense strand
ccggcacacugucuuucua

SEQ ID NO: 1426908 - RNA, 19 nt, Homo sapiens
  misc_RNA (1)...(19): siRNA sense strand
cagcugcggcuuuggagaa

SEQ ID NO: 1426909 - RNA, 19 nt, Homo sapiens
  misc_RNA (1)...(19): siRNA sense strand
ggaggcuguaugcuugaua

SEQ ID NO: 1426910 - RNA, 19 nt, Homo sapiens
  misc_RNA (1)...(19): siRNA sense strand
cacaacuucugcaaagcuu

SEQ ID NO: 1426911 - RNA, 19 nt, Homo sapiens
  misc_RNA (1)...(19): siRNA sense strand
caccuucacugauacuuuu

SEQ ID NO: 1426912 - RNA, 19 nt, Homo sapiens
  misc_RNA (1)...(19): siRNA sense strand
ggugacuucaguauccaua

SEQ ID NO: 1426913 - RNA, 19 nt, Homo sapiens
  misc_RNA (1)...(19): siRNA sense strand
aucuacaccuucacugaua

SEQ ID NO: 1426914 - RNA, 19 nt, Homo sapiens
  misc_RNA (1)...(19): siRNA sense strand
gucacagaccgcucucaua

SEQ ID NO: 1426915 - RNA, 19 nt, Homo sapiens
  misc_RNA (1)...(19): siRNA sense strand
acacugucuuucuacaaug

SEQ ID NO: 1426916 - RNA, 19 nt, Homo sapiens
  misc_RNA (1)...(19): siRNA sense strand
ugcuugauaugugcaauuu

SEQ ID NO: 1426917 - RNA, 19 nt, Homo sapiens
  misc_RNA (1)...(19): siRNA sense strand
ucacugauacuuuuacuga

SEQ ID NO: 1426918 - RNA, 19 nt, Homo sapiens
  misc_RNA (1)...(19): siRNA sense strand
ucaaguucguggagacaag

SEQ ID NO: 1426919 - RNA, 19 nt, Homo sapiens
  misc_RNA (1)...(19): siRNA sense strand
cuggugagcucaagagacu

SEQ ID NO: 1426920 - RNA, 19 nt, Homo sapiens
  misc_RNA (1)...(19): siRNA sense strand
cugcagcgacuccgagaaa

SEQ ID NO: 1426921 - RNA, 19 nt, Homo sapiens
  misc_RNA (1)...(19): siRNA sense strand
ggaaaagaacuucagcaau

SEQ ID NO: 1426922 - RNA, 19 nt, Homo sapiens
  misc_RNA (1)...(19): siRNA sense strand
ggcaguaugguggaaauug

SEQ ID NO: 1426923 - RNA, 19 nt, Homo sapiens
  misc_RNA (1)...(19): siRNA sense strand
gugaaaaggugaagaccau

SEQ ID NO: 1426924 - RNA, 19 nt, Homo sapiens
  misc_RNA (1)...(19): siRNA sense strand
agaaaaugcugcucaccuu

SEQ ID NO: 1426925 - RNA, 19 nt, Homo sapiens
  misc_RNA (1)...(19): siRNA sense strand
ggaccaggaggcuguaugc

SEQ ID NO: 1426926 - RNA, 19 nt, Homo sapiens
  misc_RNA (1)...(19): siRNA sense strand
aggcauauuccuagacuau

SEQ ID NO: 1426927 - RNA, 19 nt, Homo sapiens
  misc_RNA (1)...(19): siRNA sense strand
gcuuaaggaugucaaaagu

SEQ ID NO: 1426928 - RNA, 19 nt, Homo sapiens
  misc_RNA (1)...(19): siRNA sense strand
gcagaucuugagggaguuu

SEQ ID NO: 1426929 - RNA, 19 nt, Homo sapiens
  misc_RNA (1)...(19): siRNA sense strand
gaucuugagggaguuugaa

SEQ ID NO: 1426930 - RNA, 19 nt, Homo sapiens
  misc_RNA (1)...(19): siRNA sense strand
ggaccuagagagggacuuc

SEQ ID NO: 1426931 - RNA, 19 nt, Homo sapiens
  misc_RNA (1)...(19): siRNA sense strand
gguggagggcaagugcuua

SEQ ID NO: 1426932 - RNA, 19 nt, Homo sapiens
  misc_RNA (1)...(19): siRNA sense strand
caagagacuaguggaaagu

SEQ ID NO: 1426933 - RNA, 19 nt, Homo sapiens
  misc_RNA (1)...(19): siRNA sense strand
ccacaccuuuuaccccuuu

SEQ ID NO: 1426934 - RNA, 19 nt, Homo sapiens
  misc_RNA (1)...(19): siRNA sense strand
cgaccuaaucggcaacuag

SEQ ID NO: 1426935 - RNA, 19 nt, Homo sapiens
  misc_RNA (1)...(19): siRNA sense strand
cuacagcugcggcuuugga

SEQ ID NO: 1426936 - RNA, 19 nt, Homo sapiens
  misc_RNA (1)...(19): siRNA sense strand
acagucaggcuucgagaug

SEQ ID NO: 1426937 - RNA, 19 nt, Homo sapiens
  misc_RNA (1)...(19): siRNA sense strand
ucaaaaguacccuggaaaa

SEQ ID NO: 1426938 - RNA, 19 nt, Homo sapiens
  misc_RNA (1)...(19): siRNA sense strand
acaccuucacugauacuuu

SEQ ID NO: 1426939 - RNA, 19 nt, Homo sapiens
  misc_RNA (1)...(19): siRNA sense strand
caagcggguaggcauauuc

SEQ ID NO: 1426940 - RNA, 19 nt, Homo sapiens
  misc_RNA (1)...(19): siRNA sense strand
gggacuccgugagccgaaa

SEQ ID NO: 1426941 - RNA, 19 nt, Homo sapiens
  misc_RNA (1)...(19): siRNA sense strand
cagcucauccuaaccuagu

SEQ ID NO: 1426942 - RNA, 19 nt, Homo sapiens
  misc_RNA (1)...(19): siRNA sense strand
uaggcaguaugguggaaau

SEQ ID NO: 1426943 - RNA, 19 nt, Homo sapiens
  misc_RNA (1)...(19): siRNA sense strand
ccucuacagcugcggcuuu

SEQ ID NO: 1426944 - RNA, 19 nt, Homo sapiens
  misc_RNA (1)...(19): siRNA sense strand
uaucuacaccuucacugau

SEQ ID NO: 1426945 - RNA, 19 nt, Homo sapiens
  misc_RNA (1)...(19): siRNA sense strand
gcagccaccaccacaccuu

SEQ ID NO: 1426946 - RNA, 19 nt, Homo sapiens
  misc_RNA (1)...(19): siRNA sense strand
ggugagcucaagagacuag

SEQ ID NO: 1426947 - RNA, 19 nt, Homo sapiens
  misc_RNA (1)...(19): siRNA sense strand
gagaucacucgcugcaagu

SEQ ID NO: 1426948 - RNA, 19 nt, Homo sapiens
  misc_RNA (1)...(19): siRNA sense strand
gaaggaaccugucaucauu

SEQ ID NO: 1426949 - RNA, 19 nt, Homo sapiens
  misc_RNA (1)...(19): siRNA sense strand
gaaaagaacuucagcaauu

SEQ ID NO: 1426950 - RNA, 19 nt, Homo sapiens
  misc_RNA (1)...(19): siRNA sense strand
gaagaaugcugcaccacuu

SEQ ID NO: 1426951 - RNA, 19 nt, Homo sapiens
  misc_RNA (1)...(19): siRNA sense strand
gggcacaacuucugcaaag

SEQ ID NO: 1426952 - RNA, 19 nt, Homo sapiens
  misc_RNA (1)...(19): siRNA sense strand
cgacaguacuuugcccuaa

SEQ ID NO: 1426953 - RNA, 19 nt, Homo sapiens
  misc_RNA (1)...(19): siRNA sense strand
ccauagagcuggaaaagaa

SEQ ID NO: 1426954 - RNA, 19 nt, Homo sapiens
  misc_RNA (1)...(19): siRNA sense strand
ucacagaccgcucucauau

SEQ ID NO: 1426955 - RNA, 19 nt, Homo sapiens
  misc_RNA (1)...(19): siRNA sense strand
guacuuugcccuaaggaaa

SEQ ID NO: 1426956 - RNA, 19 nt, Homo sapiens
  misc_RNA (1)...(19): siRNA sense strand
ggaggugacuucaguaucc

SEQ ID NO: 1426957 - RNA, 19 nt, Homo sapiens
  misc_RNA (1)...(19): siRNA sense strand
gaaaauccuuaaacagcua

SEQ ID NO: 1426958 - RNA, 19 nt, Homo sapiens
  misc_RNA (1)...(19): siRNA sense strand
gaggcuguaugcuugauau

SEQ ID NO: 1426959 - RNA, 19 nt, Homo sapiens
  misc_RNA (1)...(19): siRNA sense strand
gcucucauaucuacaccuu

SEQ ID NO: 1426960 - RNA, 19 nt, Homo sapiens
  misc_RNA (1)...(19): siRNA sense strand
gcuguaugcuugauaugug

SEQ ID NO: 1426961 - RNA, 19 nt, Homo sapiens
  misc_RNA (1)...(19): siRNA sense strand
ucucauaucuacaccuuca

SEQ ID NO: 1426962 - RNA, 19 nt, Homo sapiens
  misc_RNA (1)...(19): siRNA sense strand
acagaccgcucucauaucu

SEQ ID NO: 1426963 - RNA, 19 nt, Homo sapiens
  misc_RNA (1)...(19): siRNA sense strand
gaaccugucaucauugagu

SEQ ID NO: 1426964 - RNA, 19 nt, Homo sapiens
  misc_RNA (1)...(19): siRNA sense strand
ugacuucaguauccauaga

SEQ ID NO: 1426965 - RNA, 19 nt, Homo sapiens
  misc_RNA (1)...(19): siRNA sense strand
gcuucgagaugcuuaagga

SEQ ID NO: 1426966 - RNA, 19 nt, Homo sapiens
  misc_RNA (1)...(19): siRNA sense strand
acacaggaguacaaggaaa

SEQ ID NO: 1426967 - RNA, 19 nt, Homo sapiens
  misc_RNA (1)...(19): siRNA sense strand
ccauggaggugacuucagu

SEQ ID NO: 1426968 - RNA, 19 nt, Homo sapiens
  misc_RNA (1)...(19): siRNA sense strand
gcaguaugguggaaauugc

SEQ ID NO: 1426969 - RNA, 19 nt, Homo sapiens
  misc_RNA (1)...(19): siRNA sense strand
ucaagagacuaguggaaag

SEQ ID NO: 1426970 - RNA, 19 nt, Homo sapiens
  misc_RNA (1)...(19): siRNA sense strand
aacagaagcugcaggagau

SEQ ID NO: 1426971 - RNA, 19 nt, Homo sapiens
  misc_RNA (1)...(19): siRNA sense strand
gcacacugucuuucuacaa

SEQ ID NO: 1426972 - RNA, 19 nt, Homo sapiens
  misc_RNA (1)...(19): siRNA sense strand
gagggcaagugcuuacagu

SEQ ID NO: 1426973 - RNA, 19 nt, Homo sapiens
  misc_RNA (1)...(19): siRNA sense strand
uguccugucugucgaaaga

SEQ ID NO: 1426974 - RNA, 19 nt, Homo sapiens
  misc_RNA (1)...(19): siRNA sense strand
cacacugucuuucuacaau

SEQ ID NO: 1426975 - RNA, 19 nt, Homo sapiens
  misc_RNA (1)...(19): siRNA sense strand
ucgagaugcuuaaggaugu

SEQ ID NO: 1426976 - RNA, 19 nt, Homo sapiens
  misc_RNA (1)...(19): siRNA sense strand
gggcaagugcuuacaguca

SEQ ID NO: 1426977 - RNA, 19 nt, Homo sapiens
  misc_RNA (1)...(19): siRNA sense strand
gagggaguuugaagagcuu

SEQ ID NO: 1426978 - RNA, 19 nt, Homo sapiens
  misc_RNA (1)...(19): siRNA sense strand
ugaaggaaccugucaucau

SEQ ID NO: 1426979 - RNA, 19 nt, Homo sapiens
  misc_RNA (1)...(19): siRNA sense strand
guaagagcgucaaguucgu

SEQ ID NO: 1426980 - RNA, 19 nt, Homo sapiens
  misc_RNA (1)...(19): siRNA sense strand
gaagaggaacaggacauuc

SEQ ID NO: 1426981 - RNA, 19 nt, Homo sapiens
  misc_RNA (1)...(19): siRNA sense strand
cuacacaggaguacaagga

SEQ ID NO: 1426982 - RNA, 19 nt, Homo sapiens
  misc_RNA (1)...(19): siRNA sense strand
gacaguacuuugcccuaag

SEQ ID NO: 1426983 - RNA, 19 nt, Homo sapiens
  misc_RNA (1)...(19): siRNA sense strand
gcucaagagacuaguggaa

SEQ ID NO: 1426984 - RNA, 19 nt, Homo sapiens
  misc_RNA (1)...(19): siRNA sense strand
agaccgcucucauaucuac

SEQ ID NO: 1426985 - RNA, 19 nt, Homo sapiens
  misc_RNA (1)...(19): siRNA sense strand
aggaaccugucaucauuga

SEQ ID NO: 1426986 - RNA, 19 nt, Homo sapiens
  misc_RNA (1)...(19): siRNA sense strand
ccaagcggguaggcauauu

SEQ ID NO: 1426987 - RNA, 19 nt, Homo sapiens
  misc_RNA (1)...(19): siRNA sense strand
agacaagacuccgggaucu

SEQ ID NO: 1426988 - RNA, 19 nt, Homo sapiens
  misc_RNA (1)...(19): siRNA sense strand
gacagcucauccuaaccua

SEQ ID NO: 1426989 - RNA, 19 nt, Homo sapiens
  misc_RNA (1)...(19): siRNA sense strand
uuucacgacuggaagaaga

SEQ ID NO: 1426990 - RNA, 19 nt, Homo sapiens
  misc_RNA (1)...(19): siRNA sense strand
auaggcggcuggaugaaga

SEQ ID NO: 1426991 - RNA, 19 nt, Homo sapiens
  misc_RNA (1)...(19): siRNA sense strand
aagaaugcugcaccacuua

SEQ ID NO: 1426992 - RNA, 19 nt, Homo sapiens
  misc_RNA (1)...(19): siRNA sense strand
gagccgaaagggcgaguug

SEQ ID NO: 1426993 - RNA, 19 nt, Homo sapiens
  misc_RNA (1)...(19): siRNA sense strand
gcacaacuucugcaaagcu

SEQ ID NO: 1426994 - RNA, 19 nt, Homo sapiens
  misc_RNA (1)...(19): siRNA sense strand
ccggcacacugucuuucua

SEQ ID NO: 1426995 - RNA, 19 nt, Homo sapiens
  misc_RNA (1)...(19): siRNA sense strand
cagcugcggcuuuggagaa

SEQ ID NO: 1426996 - RNA, 19 nt, Homo sapiens
  misc_RNA (1)...(19): siRNA sense strand
ggaggcuguaugcuugaua

SEQ ID NO: 1426997 - RNA, 19 nt, Homo sapiens
  misc_RNA (1)...(19): siRNA sense strand
cacaacuucugcaaagcuu

SEQ ID NO: 1426998 - RNA, 19 nt, Homo sapiens
  misc_RNA (1)...(19): siRNA sense strand
caccuucacugauacuuuu

SEQ ID NO: 1426999 - RNA, 19 nt, Homo sapiens
  misc_RNA (1)...(19): siRNA sense strand
ggugacuucaguauccaua

SEQ ID NO: 1427000 - RNA, 19 nt, Homo sapiens
  misc_RNA (1)...(19): siRNA sense strand
aucuacaccuucacugaua

SEQ ID NO: 1427001 - RNA, 19 nt, Homo sapiens
  misc_RNA (1)...(19): siRNA sense strand
gucacagaccgcucucaua

SEQ ID NO: 1427002 - RNA, 19 nt, Homo sapiens
  misc_RNA (1)...(19): siRNA sense strand
acacugucuuucuacaaug

SEQ ID NO: 1427003 - RNA, 19 nt, Homo sapiens
  misc_RNA (1)...(19): siRNA sense strand
ugcuugauaugugcaauuu

SEQ ID NO: 1427004 - RNA, 19 nt, Homo sapiens
  misc_RNA (1)...(19): siRNA sense strand
ucacugauacuuuuacuga

SEQ ID NO: 1427005 - RNA, 19 nt, Homo sapiens
  misc_RNA (1)...(19): siRNA sense strand
ucaaguucguggagacaag

SEQ ID NO: 1427006 - RNA, 19 nt, Homo sapiens
  misc_RNA (1)...(19): siRNA sense strand
cuggugagcucaagagacu

SEQ ID NO: 1427007 - RNA, 19 nt, Homo sapiens
  misc_RNA (1)...(19): siRNA sense strand
cugcagcgacuccgagaaa

SEQ ID NO: 1427008 - RNA, 19 nt, Homo sapiens
  misc_RNA (1)...(19): siRNA sense strand
ggaaaagaacuucagcaau

SEQ ID NO: 1427009 - RNA, 19 nt, Homo sapiens
  misc_RNA (1)...(19): siRNA sense strand
ggcaguaugguggaaauug

SEQ ID NO: 1427010 - RNA, 19 nt, Homo sapiens
  misc_RNA (1)...(19): siRNA sense strand
gugaaaaggugaagaccau

SEQ ID NO: 1427011 - RNA, 19 nt, Homo sapiens
  misc_RNA (1)...(19): siRNA sense strand
agaaaaugcugcucaccuu

SEQ ID NO: 1427012 - RNA, 19 nt, Homo sapiens
  misc_RNA (1)...(19): siRNA sense strand
ggaccaggaggcuguaugc

SEQ ID NO: 1427013 - RNA, 19 nt, Homo sapiens
  misc_RNA (1)...(19): siRNA sense strand
aggcauauuccuagacuau

SEQ ID NO: 1427014 - RNA, 19 nt, Homo sapiens
  misc_RNA (1)...(19): siRNA sense strand
gcuuaaggaugucaaaagu

SEQ ID NO: 1427015 - RNA, 19 nt, Homo sapiens
  misc_RNA (1)...(19): siRNA sense strand
gcagaucuugagggaguuu

SEQ ID NO: 1427016 - RNA, 19 nt, Homo sapiens
  misc_RNA (1)...(19): siRNA sense strand
gaucuugagggaguuugaa

SEQ ID NO: 1427017 - RNA, 19 nt, Homo sapiens
  misc_RNA (1)...(19): siRNA sense strand
ggaccuagagagggacuuc

SEQ ID NO: 1427018 - RNA, 19 nt, Homo sapiens
  misc_RNA (1)...(19): siRNA sense strand
gguggagggcaagugcuua

SEQ ID NO: 1427019 - RNA, 19 nt, Homo sapiens
  misc_RNA (1)...(19): siRNA sense strand
caagagacuaguggaaagu

SEQ ID NO: 1427020 - RNA, 19 nt, Homo sapiens
  misc_RNA (1)...(19): siRNA sense strand
ccacaccuuuuaccccuuu

SEQ ID NO: 1427021 - RNA, 19 nt, Homo sapiens
  misc_RNA (1)...(19): siRNA sense strand
cgaccuaaucggcaacuag

SEQ ID NO: 1427022 - RNA, 19 nt, Homo sapiens
  misc_RNA (1)...(19): siRNA sense strand
cuacagcugcggcuuugga

SEQ ID NO: 1427023 - RNA, 19 nt, Homo sapiens
  misc_RNA (1)...(19): siRNA sense strand
acagucaggcuucgagaug

SEQ ID NO: 1427024 - RNA, 19 nt, Homo sapiens
  misc_RNA (1)...(19): siRNA sense strand
ucaaaaguacccuggaaaa

SEQ ID NO: 1427025 - RNA, 19 nt, Homo sapiens
  misc_RNA (1)...(19): siRNA sense strand
acaccuucacugauacuuu

SEQ ID NO: 1427026 - RNA, 19 nt, Homo sapiens
  misc_RNA (1)...(19): siRNA sense strand
caagcggguaggcauauuc

SEQ ID NO: 1427027 - RNA, 19 nt, Homo sapiens
  misc_RNA (1)...(19): siRNA sense strand
gggacuccgugagccgaaa

SEQ ID NO: 1427028 - RNA, 19 nt, Homo sapiens
  misc_RNA (1)...(19): siRNA sense strand
cagcucauccuaaccuagu

SEQ ID NO: 1427029 - RNA, 19 nt, Homo sapiens
  misc_RNA (1)...(19): siRNA sense strand
uaggcaguaugguggaaau

SEQ ID NO: 1427030 - RNA, 19 nt, Homo sapiens
  misc_RNA (1)...(19): siRNA sense strand
ccucuacagcugcggcuuu

SEQ ID NO: 1427031 - RNA, 19 nt, Homo sapiens
  misc_RNA (1)...(19): siRNA sense strand
uaucuacaccuucacugau

SEQ ID NO: 1427032 - RNA, 19 nt, Homo sapiens
  misc_RNA (1)...(19): siRNA sense strand
gcagccaccaccacaccuu

SEQ ID NO: 1427033 - RNA, 19 nt, Homo sapiens
  misc_RNA (1)...(19): siRNA sense strand
ggugagcucaagagacuag

SEQ ID NO: 1427034 - RNA, 19 nt, Homo sapiens
  misc_RNA (1)...(19): siRNA sense strand
gagaucacucgcugcaagu

SEQ ID NO: 1427035 - RNA, 19 nt, Homo sapiens
  misc_RNA (1)...(19): siRNA sense strand
ggaagaagaccaaauauuc

SEQ ID NO: 1427036 - RNA, 19 nt, Homo sapiens
  misc_RNA (1)...(19): siRNA sense strand
ggaggaagaagaccaaaua

SEQ ID NO: 1427037 - RNA, 19 nt, Homo sapiens
  misc_RNA (1)...(19): siRNA sense strand
gaccaaauauuccuugaug

SEQ ID NO: 1427038 - RNA, 19 nt, Homo sapiens
  misc_RNA (1)...(19): siRNA sense strand
uuagagagcuugaagaaga

SEQ ID NO: 1427039 - RNA, 19 nt, Homo sapiens
  misc_RNA (1)...(19): siRNA sense strand
gaugaccacuugaauaaga

SEQ ID NO: 1427040 - RNA, 19 nt, Homo sapiens
  misc_RNA (1)...(19): siRNA sense strand
gagcucagaugaccacuug

SEQ ID NO: 1427041 - RNA, 19 nt, Homo sapiens
  misc_RNA (1)...(19): siRNA sense strand
gaggagcugugucaucauu

SEQ ID NO: 1427042 - RNA, 19 nt, Homo sapiens
  misc_RNA (1)...(19): siRNA sense strand
gaagagaggccucaauucu

SEQ ID NO: 1427043 - RNA, 19 nt, Homo sapiens
  misc_RNA (1)...(19): siRNA sense strand
cagaugaccacuugaauaa

SEQ ID NO: 1427044 - RNA, 19 nt, Homo sapiens
  misc_RNA (1)...(19): siRNA sense strand
gcccauccauccuaucuuu

SEQ ID NO: 1427045 - RNA, 19 nt, Homo sapiens
  misc_RNA (1)...(19): siRNA sense strand
ucaaagagaaggagaagaa

SEQ ID NO: 1427046 - RNA, 19 nt, Homo sapiens
  misc_RNA (1)...(19): siRNA sense strand
gcacaccguuugccuucaa

SEQ ID NO: 1427047 - RNA, 19 nt, Homo sapiens
  misc_RNA (1)...(19): siRNA sense strand
ggagaggccagcaaagaaa

SEQ ID NO: 1427048 - RNA, 19 nt, Homo sapiens
  misc_RNA (1)...(19): siRNA sense strand
gagaagaggagcuguguca

SEQ ID NO: 1427049 - RNA, 19 nt, Homo sapiens
  misc_RNA (1)...(19): siRNA sense strand
auaaucagcucaacacugu

SEQ ID NO: 1427050 - RNA, 19 nt, Homo sapiens
  misc_RNA (1)...(19): siRNA sense strand
gcguuuggcuuuggcauaa

SEQ ID NO: 1427051 - RNA, 19 nt, Homo sapiens
  misc_RNA (1)...(19): siRNA sense strand
cagcuuggcuauucgauca

SEQ ID NO: 1427052 - RNA, 19 nt, Homo sapiens
  misc_RNA (1)...(19): siRNA sense strand
gacaggcgcuuacgcaagu

SEQ ID NO: 1427053 - RNA, 19 nt, Homo sapiens
  misc_RNA (1)...(19): siRNA sense strand
caguggacauucagcauuu

SEQ ID NO: 1427054 - RNA, 19 nt, Homo sapiens
  misc_RNA (1)...(19): siRNA sense strand
ucagaugaccacuugaaua

SEQ ID NO: 1427055 - RNA, 19 nt, Homo sapiens
  misc_RNA (1)...(19): siRNA sense strand
gaccuagacuuagagaaga

SEQ ID NO: 1427056 - RNA, 19 nt, Homo sapiens
  misc_RNA (1)...(19): siRNA sense strand
cagcacaacugagagcaaa

SEQ ID NO: 1427057 - RNA, 19 nt, Homo sapiens
  misc_RNA (1)...(19): siRNA sense strand
ggaccuagacuuagagaag

SEQ ID NO: 1427058 - RNA, 19 nt, Homo sapiens
  misc_RNA (1)...(19): siRNA sense strand
gaagaggagcugugucauc

SEQ ID NO: 1427059 - RNA, 19 nt, Homo sapiens
  misc_RNA (1)...(19): siRNA sense strand
gcaccaacccacuguuaga

SEQ ID NO: 1427060 - RNA, 19 nt, Homo sapiens
  misc_RNA (1)...(19): siRNA sense strand
aagaggagcugugucauca

SEQ ID NO: 1427061 - RNA, 19 nt, Homo sapiens
  misc_RNA (1)...(19): siRNA sense strand
cagccuucauuuaccuuua

SEQ ID NO: 1427062 - RNA, 19 nt, Homo sapiens
  misc_RNA (1)...(19): siRNA sense strand
ggacaguggaggaagaaga

SEQ ID NO: 1427063 - RNA, 19 nt, Homo sapiens
  misc_RNA (1)...(19): siRNA sense strand
ccgaggaccuagacuuaga

SEQ ID NO: 1427064 - RNA, 19 nt, Homo sapiens
  misc_RNA (1)...(19): siRNA sense strand
gcaguggacauucagcauu

SEQ ID NO: 1427065 - RNA, 19 nt, Homo sapiens
  misc_RNA (1)...(19): siRNA sense strand
gcaaaggagacaguacuga

SEQ ID NO: 1427066 - RNA, 19 nt, Homo sapiens
  misc_RNA (1)...(19): siRNA sense strand
gcagcagccucuccuuugg

SEQ ID NO: 1427067 - RNA, 19 nt, Homo sapiens
  misc_RNA (1)...(19): siRNA sense strand
aaaggacaguggaggaaga

SEQ ID NO: 1427068 - RNA, 19 nt, Homo sapiens
  misc_RNA (1)...(19): siRNA sense strand
ggccagagcacaccguuug

SEQ ID NO: 1427069 - RNA, 19 nt, Homo sapiens
  misc_RNA (1)...(19): siRNA sense strand
aauaagagaucccgaagcu

SEQ ID NO: 1427070 - RNA, 19 nt, Homo sapiens
  misc_RNA (1)...(19): siRNA sense strand
gcucagaugaccacuugaa

SEQ ID NO: 1427071 - RNA, 19 nt, Homo sapiens
  misc_RNA (1)...(19): siRNA sense strand
gaagaagaccaaauauucc

SEQ ID NO: 1427072 - RNA, 19 nt, Homo sapiens
  misc_RNA (1)...(19): siRNA sense strand
aaagaaggcgccaugauag

SEQ ID NO: 1427073 - RNA, 19 nt, Homo sapiens
  misc_RNA (1)...(19): siRNA sense strand
aaaagaaggcgccaugaua

SEQ ID NO: 1427074 - RNA, 19 nt, Homo sapiens
  misc_RNA (1)...(19): siRNA sense strand
cagaacaccucaccuucca

SEQ ID NO: 1427075 - RNA, 19 nt, Homo sapiens
  misc_RNA (1)...(19): siRNA sense strand
gaggaagaagaccaaauau

SEQ ID NO: 1427076 - RNA, 19 nt, Homo sapiens
  misc_RNA (1)...(19): siRNA sense strand
guucaucacccuucucuag

SEQ ID NO: 1427077 - RNA, 19 nt, Homo sapiens
  misc_RNA (1)...(19): siRNA sense strand
gcagauaaucagcucaaca

SEQ ID NO: 1427078 - RNA, 19 nt, Homo sapiens
  misc_RNA (1)...(19): siRNA sense strand
ccucucaccuccaaagaca

SEQ ID NO: 1427079 - RNA, 19 nt, Homo sapiens
  misc_RNA (1)...(19): siRNA sense strand
aaacaaaacucgaauucuc

SEQ ID NO: 1427080 - RNA, 19 nt, Homo sapiens
  misc_RNA (1)...(19): siRNA sense strand
gcaaguggcaucccuagcu

SEQ ID NO: 1427081 - RNA, 19 nt, Homo sapiens
  misc_RNA (1)...(19): siRNA sense strand
acacagaacaccucaccuu

SEQ ID NO: 1427082 - RNA, 19 nt, Homo sapiens
  misc_RNA (1)...(19): siRNA sense strand
caaagagaaggagaagaaa

SEQ ID NO: 1427083 - RNA, 19 nt, Homo sapiens
  misc_RNA (1)...(19): siRNA sense strand
ccaucacccuucacguuug

SEQ ID NO: 1427084 - RNA, 19 nt, Homo sapiens
  misc_RNA (1)...(19): siRNA sense strand
gugagcagcagcaguguga

SEQ ID NO: 1427085 - RNA, 19 nt, Homo sapiens
  misc_RNA (1)...(19): siRNA sense strand
aagcaccaacccacuguua

SEQ ID NO: 1427086 - RNA, 19 nt, Homo sapiens
  misc_RNA (1)...(19): siRNA sense strand
acacuguccucaccaucaa

SEQ ID NO: 1427087 - RNA, 19 nt, Homo sapiens
  misc_RNA (1)...(19): siRNA sense strand
ggcagcagccucuccuuug

SEQ ID NO: 1427088 - RNA, 19 nt, Homo sapiens
  misc_RNA (1)...(19): siRNA sense strand
aaacucgaauucucagucu

SEQ ID NO: 1427089 - RNA, 19 nt, Homo sapiens
  misc_RNA (1)...(19): siRNA sense strand
agaaaaggcugcagauaca

SEQ ID NO: 1427090 - RNA, 19 nt, Homo sapiens
  misc_RNA (1)...(19): siRNA sense strand
cagcguaagcggaaaguuc

SEQ ID NO: 1427091 - RNA, 19 nt, Homo sapiens
  misc_RNA (1)...(19): siRNA sense strand
gaccuuccagccugucuuu

SEQ ID NO: 1427092 - RNA, 19 nt, Homo sapiens
  misc_RNA (1)...(19): siRNA sense strand
aaagacacccagccuccua

SEQ ID NO: 1427093 - RNA, 19 nt, Homo sapiens
  misc_RNA (1)...(19): siRNA sense strand
cugaagagaggccucaauu

SEQ ID NO: 1427094 - RNA, 19 nt, Homo sapiens
  misc_RNA (1)...(19): siRNA sense strand
caccaucacccuucacguu

SEQ ID NO: 1427095 - RNA, 19 nt, Homo sapiens
  misc_RNA (1)...(19): siRNA sense strand
gcugccgacuuuagugguu

SEQ ID NO: 1427096 - RNA, 19 nt, Homo sapiens
  misc_RNA (1)...(19): siRNA sense strand
ccaccacagucaccaccuu

SEQ ID NO: 1427097 - RNA, 19 nt, Homo sapiens
  misc_RNA (1)...(19): siRNA sense strand
gaucacugccgaggaccua

SEQ ID NO: 1427098 - RNA, 19 nt, Homo sapiens
  misc_RNA (1)...(19): siRNA sense strand
uagagagcuugaagaagau

SEQ ID NO: 1427099 - RNA, 19 nt, Homo sapiens
  misc_RNA (1)...(19): siRNA sense strand
ugccgaggaccuagacuua

SEQ ID NO: 1427100 - RNA, 19 nt, Homo sapiens
  misc_RNA (1)...(19): siRNA sense strand
ggaagaaacaaaacucgaa

SEQ ID NO: 1427101 - RNA, 19 nt, Homo sapiens
  misc_RNA (1)...(19): siRNA sense strand
aagccugggucucugaaga

SEQ ID NO: 1427102 - RNA, 19 nt, Homo sapiens
  misc_RNA (1)...(19): siRNA sense strand
cggcuccacugcugucuuc

SEQ ID NO: 1427103 - RNA, 19 nt, Homo sapiens
  misc_RNA (1)...(19): siRNA sense strand
ccucacagccuuuccucuu

SEQ ID NO: 1427104 - RNA, 19 nt, Homo sapiens
  misc_RNA (1)...(19): siRNA sense strand
gcaaagaaaauaagagaag

SEQ ID NO: 1427105 - RNA, 19 nt, Homo sapiens
  misc_RNA (1)...(19): siRNA sense strand
gcgauaccagagcagauaa

SEQ ID NO: 1427106 - RNA, 19 nt, Homo sapiens
  misc_RNA (1)...(19): siRNA sense strand
cggagaggccagcaaagaa

SEQ ID NO: 1427107 - RNA, 19 nt, Homo sapiens
  misc_RNA (1)...(19): siRNA sense strand
aggaagaagaccaaauauu

SEQ ID NO: 1427108 - RNA, 19 nt, Homo sapiens
  misc_RNA (1)...(19): siRNA sense strand
agugggagcuuugggauca

SEQ ID NO: 1427109 - RNA, 19 nt, Homo sapiens
  misc_RNA (1)...(19): siRNA sense strand
cuacgcccauccauccuau

SEQ ID NO: 1427110 - RNA, 19 nt, Homo sapiens
  misc_RNA (1)...(19): siRNA sense strand
uggcagcucuuucacuuuu

SEQ ID NO: 1427111 - RNA, 19 nt, Homo sapiens
  misc_RNA (1)...(19): siRNA sense strand
gagaaaaggcugcagauac

SEQ ID NO: 1427112 - RNA, 19 nt, Homo sapiens
  misc_RNA (1)...(19): siRNA sense strand
ugaagagaggccucaauuc

SEQ ID NO: 1427113 - RNA, 19 nt, Homo sapiens
  misc_RNA (1)...(19): siRNA sense strand
uuuggcagcucuuucacuu

SEQ ID NO: 1427114 - RNA, 19 nt, Homo sapiens
  misc_RNA (1)...(19): siRNA sense strand
ugucaucauuccaguucuu

SEQ ID NO: 1427115 - RNA, 19 nt, Homo sapiens
  misc_RNA (1)...(19): siRNA sense strand
ggagaaaaggcugcagaua

SEQ ID NO: 1427116 - RNA, 19 nt, Homo sapiens
  misc_RNA (1)...(19): siRNA sense strand
gaaaaggacaguggaggaa

SEQ ID NO: 1427117 - RNA, 19 nt, Homo sapiens
  misc_RNA (1)...(19): siRNA sense strand
uguuagagagcuugaagaa

SEQ ID NO: 1427118 - RNA, 19 nt, Homo sapiens
  misc_RNA (1)...(19): siRNA sense strand
cagcaccucccauguucaa

SEQ ID NO: 1427119 - RNA, 19 nt, Homo sapiens
  misc_RNA (1)...(19): siRNA sense strand
gcagcucugggcagcguaa

SEQ ID NO: 1427120 - RNA, 19 nt, Homo sapiens
  misc_RNA (1)...(19): siRNA sense strand
gcagcacaacugagagcaa

SEQ ID NO: 1427121 - RNA, 19 nt, Homo sapiens
  misc_RNA (1)...(19): siRNA sense strand
acaacaccaucacccuuca

SEQ ID NO: 1427122 - RNA, 19 nt, Homo sapiens
  misc_RNA (1)...(19): siRNA sense strand
gcuuuggcauaaacagugu

SEQ ID NO: 1427123 - RNA, 19 nt, Homo sapiens
  misc_RNA (1)...(19): siRNA sense strand
ccgcuggguuuaucacagu

SEQ ID NO: 1427124 - RNA, 19 nt, Homo sapiens
  misc_RNA (1)...(19): siRNA sense strand
ccucgaacucugucacuga

SEQ ID NO: 1427125 - RNA, 19 nt, Homo sapiens
  misc_RNA (1)...(19): siRNA sense strand
gcaucucacagcucuggaa

SEQ ID NO: 1427126 - RNA, 19 nt, Homo sapiens
  misc_RNA (1)...(19): siRNA sense strand
ccuccugccuugcccacaa

SEQ ID NO: 1427127 - RNA, 19 nt, Homo sapiens
  misc_RNA (1)...(19): siRNA sense strand
gaucgccccuccugacaga

SEQ ID NO: 1427128 - RNA, 19 nt, Homo sapiens
  misc_RNA (1)...(19): siRNA sense strand
gagcagcagcagugugagu

SEQ ID NO: 1427129 - RNA, 19 nt, Homo sapiens
  misc_RNA (1)...(19): siRNA sense strand
gauacaaccccaaggaaga

SEQ ID NO: 1427130 - RNA, 19 nt, Homo sapiens
  misc_RNA (1)...(19): siRNA sense strand
caucauuccaguucuucaa

SEQ ID NO: 1427131 - RNA, 19 nt, Homo sapiens
  misc_RNA (1)...(19): siRNA sense strand
ggagcugugucaucauucc

SEQ ID NO: 1427132 - RNA, 19 nt, Homo sapiens
  misc_RNA (1)...(19): siRNA sense strand
caguggcaguggacauuca

SEQ ID NO: 1427133 - RNA, 19 nt, Homo sapiens
  misc_RNA (1)...(19): siRNA sense strand
aagaccaaauauuccuuga

SEQ ID NO: 1427134 - RNA, 19 nt, Homo sapiens
  misc_RNA (1)...(19): siRNA sense strand
cuucagcaccucccauguu

SEQ ID NO: 1427135 - RNA, 19 nt, Homo sapiens
  misc_RNA (1)...(19): siRNA sense strand
gaaaccaucucuacucuau

SEQ ID NO: 1427136 - RNA, 19 nt, Homo sapiens
  misc_RNA (1)...(19): siRNA sense strand
gaaaggaaguuuuaaggaa

SEQ ID NO: 1427137 - RNA, 19 nt, Homo sapiens
  misc_RNA (1)...(19): siRNA sense strand
gaacuaaaggaaagugauu

SEQ ID NO: 1427138 - RNA, 19 nt, Homo sapiens
  misc_RNA (1)...(19): siRNA sense strand
caaguugccuuauucaaag

SEQ ID NO: 1427139 - RNA, 19 nt, Homo sapiens
  misc_RNA (1)...(19): siRNA sense strand
uauaagagaccuuuggaaa

SEQ ID NO: 1427140 - RNA, 19 nt, Homo sapiens
  misc_RNA (1)...(19): siRNA sense strand
gauucaaguugccuuauuc

SEQ ID NO: 1427141 - RNA, 19 nt, Homo sapiens
  misc_RNA (1)...(19): siRNA sense strand
ucaaguugccuuauucaaa

SEQ ID NO: 1427142 - RNA, 19 nt, Homo sapiens
  misc_RNA (1)...(19): siRNA sense strand
gcacauaucaagaaaccau

SEQ ID NO: 1427143 - RNA, 19 nt, Homo sapiens
  misc_RNA (1)...(19): siRNA sense strand
caagaaaccaucucuacuc

SEQ ID NO: 1427144 - RNA, 19 nt, Homo sapiens
  misc_RNA (1)...(19): siRNA sense strand
uaaagaggcacauaucaag

SEQ ID NO: 1427145 - RNA, 19 nt, Homo sapiens
  misc_RNA (1)...(19): siRNA sense strand
ugauucaaguugccuuauu

SEQ ID NO: 1427146 - RNA, 19 nt, Homo sapiens
  misc_RNA (1)...(19): siRNA sense strand
caucucuacucuaugcauu

SEQ ID NO: 1427147 - RNA, 19 nt, Homo sapiens
  misc_RNA (1)...(19): siRNA sense strand
ggaacaccuuuaaauccau

SEQ ID NO: 1427148 - RNA, 19 nt, Homo sapiens
  misc_RNA (1)...(19): siRNA sense strand
agaggcacauaucaagaaa

SEQ ID NO: 1427149 - RNA, 19 nt, Homo sapiens
  misc_RNA (1)...(19): siRNA sense strand
guuauaaagaggcacauau

SEQ ID NO: 1427150 - RNA, 19 nt, Homo sapiens
  misc_RNA (1)...(19): siRNA sense strand
aagaaaccaucucuacucu

SEQ ID NO: 1427151 - RNA, 19 nt, Homo sapiens
  misc_RNA (1)...(19): siRNA sense strand
uauaaagaggcacauauca

SEQ ID NO: 1427152 - RNA, 19 nt, Homo sapiens
  misc_RNA (1)...(19): siRNA sense strand
caauggagaaaggaaguuu

SEQ ID NO: 1427153 - RNA, 19 nt, Homo sapiens
  misc_RNA (1)...(19): siRNA sense strand
gauauuuuguccuucacua

SEQ ID NO: 1427154 - RNA, 19 nt, Homo sapiens
  misc_RNA (1)...(19): siRNA sense strand
gcauuguggaacaccuuua

SEQ ID NO: 1427155 - RNA, 19 nt, Homo sapiens
  misc_RNA (1)...(19): siRNA sense strand
gcuauaagagaccuuugga

SEQ ID NO: 1427156 - RNA, 19 nt, Homo sapiens
  misc_RNA (1)...(19): siRNA sense strand
auaaagaggcacauaucaa

SEQ ID NO: 1427157 - RNA, 19 nt, Homo sapiens
  misc_RNA (1)...(19): siRNA sense strand
gcacugcgugucccaucuu

SEQ ID NO: 1427158 - RNA, 19 nt, Homo sapiens
  misc_RNA (1)...(19): siRNA sense strand
aaagaggcacauaucaaga

SEQ ID NO: 1427159 - RNA, 19 nt, Homo sapiens
  misc_RNA (1)...(19): siRNA sense strand
ucacuagcccacucauaau

SEQ ID NO: 1427160 - RNA, 19 nt, Homo sapiens
  misc_RNA (1)...(19): siRNA sense strand
aagaggcacauaucaagaa

SEQ ID NO: 1427161 - RNA, 19 nt, Homo sapiens
  misc_RNA (1)...(19): siRNA sense strand
cauuguggaacaccuuuaa

SEQ ID NO: 1427162 - RNA, 19 nt, Homo sapiens
  misc_RNA (1)...(19): siRNA sense strand
uucacuagcccacucauaa

SEQ ID NO: 1427163 - RNA, 19 nt, Homo sapiens
  misc_RNA (1)...(19): siRNA sense strand
uaucaagaaaccaucucua

SEQ ID NO: 1427164 - RNA, 19 nt, Homo sapiens
  misc_RNA (1)...(19): siRNA sense strand
gcgugucccaucuuugaaa

SEQ ID NO: 1427165 - RNA, 19 nt, Homo sapiens
  misc_RNA (1)...(19): siRNA sense strand
aaccaucucuacucuaugc

SEQ ID NO: 1427166 - RNA, 19 nt, Homo sapiens
  misc_RNA (1)...(19): siRNA sense strand
cugcgugucccaucuuuga

SEQ ID NO: 1427167 - RNA, 19 nt, Homo sapiens
  misc_RNA (1)...(19): siRNA sense strand
gcugauauuuuguccuuca

SEQ ID NO: 1427168 - RNA, 19 nt, Homo sapiens
  misc_RNA (1)...(19): siRNA sense strand
uuauaaagaggcacauauc

SEQ ID NO: 1427169 - RNA, 19 nt, Homo sapiens
  misc_RNA (1)...(19): siRNA sense strand
ucaagaaaccaucucuacu

SEQ ID NO: 1427170 - RNA, 19 nt, Homo sapiens
  misc_RNA (1)...(19): siRNA sense strand
uacuuuaggcuauaagaga

SEQ ID NO: 1427171 - RNA, 19 nt, Homo sapiens
  misc_RNA (1)...(19): siRNA sense strand
ucucuacucuaugcauugu

SEQ ID NO: 1427172 - RNA, 19 nt, Homo sapiens
  misc_RNA (1)...(19): siRNA sense strand
gaaaccaucucuacucuau

SEQ ID NO: 1427173 - RNA, 19 nt, Homo sapiens
  misc_RNA (1)...(19): siRNA sense strand
gaaaggaaguuuuaaggaa

SEQ ID NO: 1427174 - RNA, 19 nt, Homo sapiens
  misc_RNA (1)...(19): siRNA sense strand
gaacuaaaggaaagugauu

SEQ ID NO: 1427175 - RNA, 19 nt, Homo sapiens
  misc_RNA (1)...(19): siRNA sense strand
caaguugccuuauucaaag

SEQ ID NO: 1427176 - RNA, 19 nt, Homo sapiens
  misc_RNA (1)...(19): siRNA sense strand
uauaagagaccuuuggaaa

SEQ ID NO: 1427177 - RNA, 19 nt, Homo sapiens
  misc_RNA (1)...(19): siRNA sense strand
gauucaaguugccuuauuc

SEQ ID NO: 1427178 - RNA, 19 nt, Homo sapiens
  misc_RNA (1)...(19): siRNA sense strand
ucaaguugccuuauucaaa

SEQ ID NO: 1427179 - RNA, 19 nt, Homo sapiens
  misc_RNA (1)...(19): siRNA sense strand
gcacauaucaagaaaccau

SEQ ID NO: 1427180 - RNA, 19 nt, Homo sapiens
  misc_RNA (1)...(19): siRNA sense strand
caagaaaccaucucuacuc

SEQ ID NO: 1427181 - RNA, 19 nt, Homo sapiens
  misc_RNA (1)...(19): siRNA sense strand
uaaagaggcacauaucaag

SEQ ID NO: 1427182 - RNA, 19 nt, Homo sapiens
  misc_RNA (1)...(19): siRNA sense strand
ugauucaaguugccuuauu

SEQ ID NO: 1427183 - RNA, 19 nt, Homo sapiens
  misc_RNA (1)...(19): siRNA sense strand
caucucuacucuaugcauu

SEQ ID NO: 1427184 - RNA, 19 nt, Homo sapiens
  misc_RNA (1)...(19): siRNA sense strand
ggaacaccuuuaaauccau

SEQ ID NO: 1427185 - RNA, 19 nt, Homo sapiens
  misc_RNA (1)...(19): siRNA sense strand
agaggcacauaucaagaaa

SEQ ID NO: 1427186 - RNA, 19 nt, Homo sapiens
  misc_RNA (1)...(19): siRNA sense strand
guuauaaagaggcacauau

SEQ ID NO: 1427187 - RNA, 19 nt, Homo sapiens
  misc_RNA (1)...(19): siRNA sense strand
aagaaaccaucucuacucu

SEQ ID NO: 1427188 - RNA, 19 nt, Homo sapiens
  misc_RNA (1)...(19): siRNA sense strand
uauaaagaggcacauauca

SEQ ID NO: 1427189 - RNA, 19 nt, Homo sapiens
  misc_RNA (1)...(19): siRNA sense strand
caauggagaaaggaaguuu

SEQ ID NO: 1427190 - RNA, 19 nt, Homo sapiens
  misc_RNA (1)...(19): siRNA sense strand
gauauuuuguccuucacua

SEQ ID NO: 1427191 - RNA, 19 nt, Homo sapiens
  misc_RNA (1)...(19): siRNA sense strand
gcauuguggaacaccuuua

SEQ ID NO: 1427192 - RNA, 19 nt, Homo sapiens
  misc_RNA (1)...(19): siRNA sense strand
gcuauaagagaccuuugga

SEQ ID NO: 1427193 - RNA, 19 nt, Homo sapiens
  misc_RNA (1)...(19): siRNA sense strand
auaaagaggcacauaucaa

SEQ ID NO: 1427194 - RNA, 19 nt, Homo sapiens
  misc_RNA (1)...(19): siRNA sense strand
gcacugcgugucccaucuu

SEQ ID NO: 1427195 - RNA, 19 nt, Homo sapiens
  misc_RNA (1)...(19): siRNA sense strand
aaagaggcacauaucaaga

SEQ ID NO: 1427196 - RNA, 19 nt, Homo sapiens
  misc_RNA (1)...(19): siRNA sense strand
ucacuagcccacucauaau

SEQ ID NO: 1427197 - RNA, 19 nt, Homo sapiens
  misc_RNA (1)...(19): siRNA sense strand
aagaggcacauaucaagaa

SEQ ID NO: 1427198 - RNA, 19 nt, Homo sapiens
  misc_RNA (1)...(19): siRNA sense strand
cauuguggaacaccuuuaa

SEQ ID NO: 1427199 - RNA, 19 nt, Homo sapiens
  misc_RNA (1)...(19): siRNA sense strand
uucacuagcccacucauaa

SEQ ID NO: 1427200 - RNA, 19 nt, Homo sapiens
  misc_RNA (1)...(19): siRNA sense strand
uaucaagaaaccaucucua

SEQ ID NO: 1427201 - RNA, 19 nt, Homo sapiens
  misc_RNA (1)...(19): siRNA sense strand
gcgugucccaucuuugaaa

SEQ ID NO: 1427202 - RNA, 19 nt, Homo sapiens
  misc_RNA (1)...(19): siRNA sense strand
aaccaucucuacucuaugc

SEQ ID NO: 1427203 - RNA, 19 nt, Homo sapiens
  misc_RNA (1)...(19): siRNA sense strand
cugcgugucccaucuuuga

SEQ ID NO: 1427204 - RNA, 19 nt, Homo sapiens
  misc_RNA (1)...(19): siRNA sense strand
gcugauauuuuguccuuca

SEQ ID NO: 1427205 - RNA, 19 nt, Homo sapiens
  misc_RNA (1)...(19): siRNA sense strand
uuauaaagaggcacauauc

SEQ ID NO: 1427206 - RNA, 19 nt, Homo sapiens
  misc_RNA (1)...(19): siRNA sense strand
ucaagaaaccaucucuacu

SEQ ID NO: 1427207 - RNA, 19 nt, Homo sapiens
  misc_RNA (1)...(19): siRNA sense strand
uacuuuaggcuauaagaga

SEQ ID NO: 1427208 - RNA, 19 nt, Homo sapiens
  misc_RNA (1)...(19): siRNA sense strand
ucucuacucuaugcauugu

SEQ ID NO: 1427209 - RNA, 19 nt, Homo sapiens
  misc_RNA (1)...(19): siRNA sense strand
gaaaccaucucuacucuau

SEQ ID NO: 1427210 - RNA, 19 nt, Homo sapiens
  misc_RNA (1)...(19): siRNA sense strand
gaaaggaaguuuuaaggaa

SEQ ID NO: 1427211 - RNA, 19 nt, Homo sapiens
  misc_RNA (1)...(19): siRNA sense strand
gaacuaaaggaaagugauu

SEQ ID NO: 1427212 - RNA, 19 nt, Homo sapiens
  misc_RNA (1)...(19): siRNA sense strand
caaguugccuuauucaaag

SEQ ID NO: 1427213 - RNA, 19 nt, Homo sapiens
  misc_RNA (1)...(19): siRNA sense strand
uauaagagaccuuuggaaa

SEQ ID NO: 1427214 - RNA, 19 nt, Homo sapiens
  misc_RNA (1)...(19): siRNA sense strand
gauucaaguugccuuauuc

SEQ ID NO: 1427215 - RNA, 19 nt, Homo sapiens
  misc_RNA (1)...(19): siRNA sense strand
ucaaguugccuuauucaaa

SEQ ID NO: 1427216 - RNA, 19 nt, Homo sapiens
  misc_RNA (1)...(19): siRNA sense strand
gcacauaucaagaaaccau

SEQ ID NO: 1427217 - RNA, 19 nt, Homo sapiens
  misc_RNA (1)...(19): siRNA sense strand
caagaaaccaucucuacuc

SEQ ID NO: 1427218 - RNA, 19 nt, Homo sapiens
  misc_RNA (1)...(19): siRNA sense strand
uaaagaggcacauaucaag

SEQ ID NO: 1427219 - RNA, 19 nt, Homo sapiens
  misc_RNA (1)...(19): siRNA sense strand
ugauucaaguugccuuauu

SEQ ID NO: 1427220 - RNA, 19 nt, Homo sapiens
  misc_RNA (1)...(19): siRNA sense strand
caucucuacucuaugcauu

SEQ ID NO: 1427221 - RNA, 19 nt, Homo sapiens
  misc_RNA (1)...(19): siRNA sense strand
ggaacaccuuuaaauccau

SEQ ID NO: 1427222 - RNA, 19 nt, Homo sapiens
  misc_RNA (1)...(19): siRNA sense strand
agaggcacauaucaagaaa

SEQ ID NO: 1427223 - RNA, 19 nt, Homo sapiens
  misc_RNA (1)...(19): siRNA sense strand
guuauaaagaggcacauau

SEQ ID NO: 1427224 - RNA, 19 nt, Homo sapiens
  misc_RNA (1)...(19): siRNA sense strand
aagaaaccaucucuacucu

SEQ ID NO: 1427225 - RNA, 19 nt, Homo sapiens
  misc_RNA (1)...(19): siRNA sense strand
uauaaagaggcacauauca

SEQ ID NO: 1427226 - RNA, 19 nt, Homo sapiens
  misc_RNA (1)...(19): siRNA sense strand
caauggagaaaggaaguuu

SEQ ID NO: 1427227 - RNA, 19 nt, Homo sapiens
  misc_RNA (1)...(19): siRNA sense strand
gauauuuuguccuucacua

SEQ ID NO: 1427228 - RNA, 19 nt, Homo sapiens
  misc_RNA (1)...(19): siRNA sense strand
gcauuguggaacaccuuua

SEQ ID NO: 1427229 - RNA, 19 nt, Homo sapiens
  misc_RNA (1)...(19): siRNA sense strand
gcuauaagagaccuuugga

SEQ ID NO: 1427230 - RNA, 19 nt, Homo sapiens
  misc_RNA (1)...(19): siRNA sense strand
auaaagaggcacauaucaa

SEQ ID NO: 1427231 - RNA, 19 nt, Homo sapiens
  misc_RNA (1)...(19): siRNA sense strand
gcacugcgugucccaucuu

SEQ ID NO: 1427232 - RNA, 19 nt, Homo sapiens
  misc_RNA (1)...(19): siRNA sense strand
aaagaggcacauaucaaga

SEQ ID NO: 1427233 - RNA, 19 nt, Homo sapiens
  misc_RNA (1)...(19): siRNA sense strand
ucacuagcccacucauaau

SEQ ID NO: 1427234 - RNA, 19 nt, Homo sapiens
  misc_RNA (1)...(19): siRNA sense strand
aagaggcacauaucaagaa

SEQ ID NO: 1427235 - RNA, 19 nt, Homo sapiens
  misc_RNA (1)...(19): siRNA sense strand
cauuguggaacaccuuuaa

SEQ ID NO: 1427236 - RNA, 19 nt, Homo sapiens
  misc_RNA (1)...(19): siRNA sense strand
uucacuagcccacucauaa

SEQ ID NO: 1427237 - RNA, 19 nt, Homo sapiens
  misc_RNA (1)...(19): siRNA sense strand
uaucaagaaaccaucucua

SEQ ID NO: 1427238 - RNA, 19 nt, Homo sapiens
  misc_RNA (1)...(19): siRNA sense strand
gcgugucccaucuuugaaa

SEQ ID NO: 1427239 - RNA, 19 nt, Homo sapiens
  misc_RNA (1)...(19): siRNA sense strand
aaccaucucuacucuaugc

SEQ ID NO: 1427240 - RNA, 19 nt, Homo sapiens
  misc_RNA (1)...(19): siRNA sense strand
cugcgugucccaucuuuga

SEQ ID NO: 1427241 - RNA, 19 nt, Homo sapiens
  misc_RNA (1)...(19): siRNA sense strand
gcugauauuuuguccuuca

SEQ ID NO: 1427242 - RNA, 19 nt, Homo sapiens
  misc_RNA (1)...(19): siRNA sense strand
uuauaaagaggcacauauc

SEQ ID NO: 1427243 - RNA, 19 nt, Homo sapiens
  misc_RNA (1)...(19): siRNA sense strand
ucaagaaaccaucucuacu

SEQ ID NO: 1427244 - RNA, 19 nt, Homo sapiens
  misc_RNA (1)...(19): siRNA sense strand
uacuuuaggcuauaagaga

SEQ ID NO: 1427245 - RNA, 19 nt, Homo sapiens
  misc_RNA (1)...(19): siRNA sense strand
ucucuacucuaugcauugu

SEQ ID NO: 1427246 - RNA, 19 nt, Homo sapiens
  misc_RNA (1)...(19): siRNA sense strand
gaaaccaucucuacucuau

SEQ ID NO: 1427247 - RNA, 19 nt, Homo sapiens
  misc_RNA (1)...(19): siRNA sense strand
gaaaggaaguuuuaaggaa

SEQ ID NO: 1427248 - RNA, 19 nt, Homo sapiens
  misc_RNA (1)...(19): siRNA sense strand
gaacuaaaggaaagugauu

SEQ ID NO: 1427249 - RNA, 19 nt, Homo sapiens
  misc_RNA (1)...(19): siRNA sense strand
caaguugccuuauucaaag

SEQ ID NO: 1427250 - RNA, 19 nt, Homo sapiens
  misc_RNA (1)...(19): siRNA sense strand
uauaagagaccuuuggaaa

SEQ ID NO: 1427251 - RNA, 19 nt, Homo sapiens
  misc_RNA (1)...(19): siRNA sense strand
gauucaaguugccuuauuc

SEQ ID NO: 1427252 - RNA, 19 nt, Homo sapiens
  misc_RNA (1)...(19): siRNA sense strand
ucaaguugccuuauucaaa

SEQ ID NO: 1427253 - RNA, 19 nt, Homo sapiens
  misc_RNA (1)...(19): siRNA sense strand
gcacauaucaagaaaccau

SEQ ID NO: 1427254 - RNA, 19 nt, Homo sapiens
  misc_RNA (1)...(19): siRNA sense strand
caagaaaccaucucuacuc

SEQ ID NO: 1427255 - RNA, 19 nt, Homo sapiens
  misc_RNA (1)...(19): siRNA sense strand
uaaagaggcacauaucaag

SEQ ID NO: 1427256 - RNA, 19 nt, Homo sapiens
  misc_RNA (1)...(19): siRNA sense strand
ugauucaaguugccuuauu

SEQ ID NO: 1427257 - RNA, 19 nt, Homo sapiens
  misc_RNA (1)...(19): siRNA sense strand
caucucuacucuaugcauu

SEQ ID NO: 1427258 - RNA, 19 nt, Homo sapiens
  misc_RNA (1)...(19): siRNA sense strand
ggaacaccuuuaaauccau

SEQ ID NO: 1427259 - RNA, 19 nt, Homo sapiens
  misc_RNA (1)...(19): siRNA sense strand
agaggcacauaucaagaaa

SEQ ID NO: 1427260 - RNA, 19 nt, Homo sapiens
  misc_RNA (1)...(19): siRNA sense strand
guuauaaagaggcacauau

SEQ ID NO: 1427261 - RNA, 19 nt, Homo sapiens
  misc_RNA (1)...(19): siRNA sense strand
aagaaaccaucucuacucu

SEQ ID NO: 1427262 - RNA, 19 nt, Homo sapiens
  misc_RNA (1)...(19): siRNA sense strand
uauaaagaggcacauauca

SEQ ID NO: 1427263 - RNA, 19 nt, Homo sapiens
  misc_RNA (1)...(19): siRNA sense strand
caauggagaaaggaaguuu

SEQ ID NO: 1427264 - RNA, 19 nt, Homo sapiens
  misc_RNA (1)...(19): siRNA sense strand
gauauuuuguccuucacua

SEQ ID NO: 1427265 - RNA, 19 nt, Homo sapiens
  misc_RNA (1)...(19): siRNA sense strand
gcauuguggaacaccuuua

SEQ ID NO: 1427266 - RNA, 19 nt, Homo sapiens
  misc_RNA (1)...(19): siRNA sense strand
gcuauaagagaccuuugga

SEQ ID NO: 1427267 - RNA, 19 nt, Homo sapiens
  misc_RNA (1)...(19): siRNA sense strand
auaaagaggcacauaucaa

SEQ ID NO: 1427268 - RNA, 19 nt, Homo sapiens
  misc_RNA (1)...(19): siRNA sense strand
gcacugcgugucccaucuu

SEQ ID NO: 1427269 - RNA, 19 nt, Homo sapiens
  misc_RNA (1)...(19): siRNA sense strand
aaagaggcacauaucaaga

SEQ ID NO: 1427270 - RNA, 19 nt, Homo sapiens
  misc_RNA (1)...(19): siRNA sense strand
ucacuagcccacucauaau

SEQ ID NO: 1427271 - RNA, 19 nt, Homo sapiens
  misc_RNA (1)...(19): siRNA sense strand
aagaggcacauaucaagaa

SEQ ID NO: 1427272 - RNA, 19 nt, Homo sapiens
  misc_RNA (1)...(19): siRNA sense strand
cauuguggaacaccuuuaa

SEQ ID NO: 1427273 - RNA, 19 nt, Homo sapiens
  misc_RNA (1)...(19): siRNA sense strand
uucacuagcccacucauaa

SEQ ID NO: 1427274 - RNA, 19 nt, Homo sapiens
  misc_RNA (1)...(19): siRNA sense strand
uaucaagaaaccaucucua

SEQ ID NO: 1427275 - RNA, 19 nt, Homo sapiens
  misc_RNA (1)...(19): siRNA sense strand
gcgugucccaucuuugaaa

SEQ ID NO: 1427276 - RNA, 19 nt, Homo sapiens
  misc_RNA (1)...(19): siRNA sense strand
aaccaucucuacucuaugc

SEQ ID NO: 1427277 - RNA, 19 nt, Homo sapiens
  misc_RNA (1)...(19): siRNA sense strand
cugcgugucccaucuuuga

SEQ ID NO: 1427278 - RNA, 19 nt, Homo sapiens
  misc_RNA (1)...(19): siRNA sense strand
gcugauauuuuguccuuca

SEQ ID NO: 1427279 - RNA, 19 nt, Homo sapiens
  misc_RNA (1)...(19): siRNA sense strand
uuauaaagaggcacauauc

SEQ ID NO: 1427280 - RNA, 19 nt, Homo sapiens
  misc_RNA (1)...(19): siRNA sense strand
ucaagaaaccaucucuacu

SEQ ID NO: 1427281 - RNA, 19 nt, Homo sapiens
  misc_RNA (1)...(19): siRNA sense strand
uacuuuaggcuauaagaga

SEQ ID NO: 1427282 - RNA, 19 nt, Homo sapiens
  misc_RNA (1)...(19): siRNA sense strand
ucucuacucuaugcauugu

SEQ ID NO: 1427283 - RNA, 19 nt, Homo sapiens
  misc_RNA (1)...(19): siRNA sense strand
gaaaccaucucuacucuau

SEQ ID NO: 1427284 - RNA, 19 nt, Homo sapiens
  misc_RNA (1)...(19): siRNA sense strand
gaaaggaaguuuuaaggaa

SEQ ID NO: 1427285 - RNA, 19 nt, Homo sapiens
  misc_RNA (1)...(19): siRNA sense strand
gaacuaaaggaaagugauu

SEQ ID NO: 1427286 - RNA, 19 nt, Homo sapiens
  misc_RNA (1)...(19): siRNA sense strand
caaguugccuuauucaaag

SEQ ID NO: 1427287 - RNA, 19 nt, Homo sapiens
  misc_RNA (1)...(19): siRNA sense strand
uauaagagaccuuuggaaa

SEQ ID NO: 1427288 - RNA, 19 nt, Homo sapiens
  misc_RNA (1)...(19): siRNA sense strand
gauucaaguugccuuauuc

SEQ ID NO: 1427289 - RNA, 19 nt, Homo sapiens
  misc_RNA (1)...(19): siRNA sense strand
ucaaguugccuuauucaaa

SEQ ID NO: 1427290 - RNA, 19 nt, Homo sapiens
  misc_RNA (1)...(19): siRNA sense strand
gcacauaucaagaaaccau

SEQ ID NO: 1427291 - RNA, 19 nt, Homo sapiens
  misc_RNA (1)...(19): siRNA sense strand
caagaaaccaucucuacuc

SEQ ID NO: 1427292 - RNA, 19 nt, Homo sapiens
  misc_RNA (1)...(19): siRNA sense strand
uaaagaggcacauaucaag

SEQ ID NO: 1427293 - RNA, 19 nt, Homo sapiens
  misc_RNA (1)...(19): siRNA sense strand
ugauucaaguugccuuauu

SEQ ID NO: 1427294 - RNA, 19 nt, Homo sapiens
  misc_RNA (1)...(19): siRNA sense strand
caucucuacucuaugcauu

SEQ ID NO: 1427295 - RNA, 19 nt, Homo sapiens
  misc_RNA (1)...(19): siRNA sense strand
ggaacaccuuuaaauccau

SEQ ID NO: 1427296 - RNA, 19 nt, Homo sapiens
  misc_RNA (1)...(19): siRNA sense strand
agaggcacauaucaagaaa

SEQ ID NO: 1427297 - RNA, 19 nt, Homo sapiens
  misc_RNA (1)...(19): siRNA sense strand
guuauaaagaggcacauau

SEQ ID NO: 1427298 - RNA, 19 nt, Homo sapiens
  misc_RNA (1)...(19): siRNA sense strand
aagaaaccaucucuacucu

SEQ ID NO: 1427299 - RNA, 19 nt, Homo sapiens
  misc_RNA (1)...(19): siRNA sense strand
uauaaagaggcacauauca

SEQ ID NO: 1427300 - RNA, 19 nt, Homo sapiens
  misc_RNA (1)...(19): siRNA sense strand
caauggagaaaggaaguuu

SEQ ID NO: 1427301 - RNA, 19 nt, Homo sapiens
  misc_RNA (1)...(19): siRNA sense strand
gauauuuuguccuucacua

SEQ ID NO: 1427302 - RNA, 19 nt, Homo sapiens
  misc_RNA (1)...(19): siRNA sense strand
gcauuguggaacaccuuua

SEQ ID NO: 1427303 - RNA, 19 nt, Homo sapiens
  misc_RNA (1)...(19): siRNA sense strand
gcuauaagagaccuuugga

SEQ ID NO: 1427304 - RNA, 19 nt, Homo sapiens
  misc_RNA (1)...(19): siRNA sense strand
auaaagaggcacauaucaa

SEQ ID NO: 1427305 - RNA, 19 nt, Homo sapiens
  misc_RNA (1)...(19): siRNA sense strand
gcacugcgugucccaucuu

SEQ ID NO: 1427306 - RNA, 19 nt, Homo sapiens
  misc_RNA (1)...(19): siRNA sense strand
aaagaggcacauaucaaga

SEQ ID NO: 1427307 - RNA, 19 nt, Homo sapiens
  misc_RNA (1)...(19): siRNA sense strand
ucacuagcccacucauaau

SEQ ID NO: 1427308 - RNA, 19 nt, Homo sapiens
  misc_RNA (1)...(19): siRNA sense strand
aagaggcacauaucaagaa

SEQ ID NO: 1427309 - RNA, 19 nt, Homo sapiens
  misc_RNA (1)...(19): siRNA sense strand
cauuguggaacaccuuuaa

SEQ ID NO: 1427310 - RNA, 19 nt, Homo sapiens
  misc_RNA (1)...(19): siRNA sense strand
uucacuagcccacucauaa

SEQ ID NO: 1427311 - RNA, 19 nt, Homo sapiens
  misc_RNA (1)...(19): siRNA sense strand
uaucaagaaaccaucucua

SEQ ID NO: 1427312 - RNA, 19 nt, Homo sapiens
  misc_RNA (1)...(19): siRNA sense strand
gcgugucccaucuuugaaa

SEQ ID NO: 1427313 - RNA, 19 nt, Homo sapiens
  misc_RNA (1)...(19): siRNA sense strand
aaccaucucuacucuaugc

SEQ ID NO: 1427314 - RNA, 19 nt, Homo sapiens
  misc_RNA (1)...(19): siRNA sense strand
cugcgugucccaucuuuga

SEQ ID NO: 1427315 - RNA, 19 nt, Homo sapiens
  misc_RNA (1)...(19): siRNA sense strand
gcugauauuuuguccuuca

SEQ ID NO: 1427316 - RNA, 19 nt, Homo sapiens
  misc_RNA (1)...(19): siRNA sense strand
uuauaaagaggcacauauc

SEQ ID NO: 1427317 - RNA, 19 nt, Homo sapiens
  misc_RNA (1)...(19): siRNA sense strand
ucaagaaaccaucucuacu

SEQ ID NO: 1427318 - RNA, 19 nt, Homo sapiens
  misc_RNA (1)...(19): siRNA sense strand
uacuuuaggcuauaagaga

SEQ ID NO: 1427319 - RNA, 19 nt, Homo sapiens
  misc_RNA (1)...(19): siRNA sense strand
ucucuacucuaugcauugu

SEQ ID NO: 1427320 - RNA, 19 nt, Homo sapiens
  misc_RNA (1)...(19): siRNA sense strand
gaaaccaucucuacucuau

SEQ ID NO: 1427321 - RNA, 19 nt, Homo sapiens
  misc_RNA (1)...(19): siRNA sense strand
gaaaggaaguuuuaaggaa

SEQ ID NO: 1427322 - RNA, 19 nt, Homo sapiens
  misc_RNA (1)...(19): siRNA sense strand
gaacuaaaggaaagugauu

SEQ ID NO: 1427323 - RNA, 19 nt, Homo sapiens
  misc_RNA (1)...(19): siRNA sense strand
caaguugccuuauucaaag

SEQ ID NO: 1427324 - RNA, 19 nt, Homo sapiens
  misc_RNA (1)...(19): siRNA sense strand
uauaagagaccuuuggaaa

SEQ ID NO: 1427325 - RNA, 19 nt, Homo sapiens
  misc_RNA (1)...(19): siRNA sense strand
gauucaaguugccuuauuc

SEQ ID NO: 1427326 - RNA, 19 nt, Homo sapiens
  misc_RNA (1)...(19): siRNA sense strand
ucaaguugccuuauucaaa

SEQ ID NO: 1427327 - RNA, 19 nt, Homo sapiens
  misc_RNA (1)...(19): siRNA sense strand
gcacauaucaagaaaccau

SEQ ID NO: 1427328 - RNA, 19 nt, Homo sapiens
  misc_RNA (1)...(19): siRNA sense strand
caagaaaccaucucuacuc

SEQ ID NO: 1427329 - RNA, 19 nt, Homo sapiens
  misc_RNA (1)...(19): siRNA sense strand
uaaagaggcacauaucaag

SEQ ID NO: 1427330 - RNA, 19 nt, Homo sapiens
  misc_RNA (1)...(19): siRNA sense strand
ugauucaaguugccuuauu

SEQ ID NO: 1427331 - RNA, 19 nt, Homo sapiens
  misc_RNA (1)...(19): siRNA sense strand
caucucuacucuaugcauu

SEQ ID NO: 1427332 - RNA, 19 nt, Homo sapiens
  misc_RNA (1)...(19): siRNA sense strand
ggaacaccuuuaaauccau

SEQ ID NO: 1427333 - RNA, 19 nt, Homo sapiens
  misc_RNA (1)...(19): siRNA sense strand
agaggcacauaucaagaaa

SEQ ID NO: 1427334 - RNA, 19 nt, Homo sapiens
  misc_RNA (1)...(19): siRNA sense strand
guuauaaagaggcacauau

SEQ ID NO: 1427335 - RNA, 19 nt, Homo sapiens
  misc_RNA (1)...(19): siRNA sense strand
aagaaaccaucucuacucu

SEQ ID NO: 1427336 - RNA, 19 nt, Homo sapiens
  misc_RNA (1)...(19): siRNA sense strand
uauaaagaggcacauauca

SEQ ID NO: 1427337 - RNA, 19 nt, Homo sapiens
  misc_RNA (1)...(19): siRNA sense strand
caauggagaaaggaaguuu

SEQ ID NO: 1427338 - RNA, 19 nt, Homo sapiens
  misc_RNA (1)...(19): siRNA sense strand
gauauuuuguccuucacua

SEQ ID NO: 1427339 - RNA, 19 nt, Homo sapiens
  misc_RNA (1)...(19): siRNA sense strand
gcauuguggaacaccuuua

SEQ ID NO: 1427340 - RNA, 19 nt, Homo sapiens
  misc_RNA (1)...(19): siRNA sense strand
gcuauaagagaccuuugga

SEQ ID NO: 1427341 - RNA, 19 nt, Homo sapiens
  misc_RNA (1)...(19): siRNA sense strand
auaaagaggcacauaucaa

SEQ ID NO: 1427342 - RNA, 19 nt, Homo sapiens
  misc_RNA (1)...(19): siRNA sense strand
gcacugcgugucccaucuu

SEQ ID NO: 1427343 - RNA, 19 nt, Homo sapiens
  misc_RNA (1)...(19): siRNA sense strand
aaagaggcacauaucaaga

SEQ ID NO: 1427344 - RNA, 19 nt, Homo sapiens
  misc_RNA (1)...(19): siRNA sense strand
ucacuagcccacucauaau

SEQ ID NO: 1427345 - RNA, 19 nt, Homo sapiens
  misc_RNA (1)...(19): siRNA sense strand
aagaggcacauaucaagaa

SEQ ID NO: 1427346 - RNA, 19 nt, Homo sapiens
  misc_RNA (1)...(19): siRNA sense strand
cauuguggaacaccuuuaa

SEQ ID NO: 1427347 - RNA, 19 nt, Homo sapiens
  misc_RNA (1)...(19): siRNA sense strand
uucacuagcccacucauaa

SEQ ID NO: 1427348 - RNA, 19 nt, Homo sapiens
  misc_RNA (1)...(19): siRNA sense strand
uaucaagaaaccaucucua

SEQ ID NO: 1427349 - RNA, 19 nt, Homo sapiens
  misc_RNA (1)...(19): siRNA sense strand
gcgugucccaucuuugaaa

SEQ ID NO: 1427350 - RNA, 19 nt, Homo sapiens
  misc_RNA (1)...(19): siRNA sense strand
aaccaucucuacucuaugc

SEQ ID NO: 1427351 - RNA, 19 nt, Homo sapiens
  misc_RNA (1)...(19): siRNA sense strand
cugcgugucccaucuuuga

SEQ ID NO: 1427352 - RNA, 19 nt, Homo sapiens
  misc_RNA (1)...(19): siRNA sense strand
gcugauauuuuguccuuca

SEQ ID NO: 1427353 - RNA, 19 nt, Homo sapiens
  misc_RNA (1)...(19): siRNA sense strand
uuauaaagaggcacauauc

SEQ ID NO: 1427354 - RNA, 19 nt, Homo sapiens
  misc_RNA (1)...(19): siRNA sense strand
ucaagaaaccaucucuacu

SEQ ID NO: 1427355 - RNA, 19 nt, Homo sapiens
  misc_RNA (1)...(19): siRNA sense strand
uacuuuaggcuauaagaga

SEQ ID NO: 1427356 - RNA, 19 nt, Homo sapiens
  misc_RNA (1)...(19): siRNA sense strand
ucucuacucuaugcauugu

SEQ ID NO: 1427357 - RNA, 19 nt, Homo sapiens
  misc_RNA (1)...(19): siRNA sense strand
gaaaccaucucuacucuau

SEQ ID NO: 1427358 - RNA, 19 nt, Homo sapiens
  misc_RNA (1)...(19): siRNA sense strand
gaaaggaaguuuuaaggaa

SEQ ID NO: 1427359 - RNA, 19 nt, Homo sapiens
  misc_RNA (1)...(19): siRNA sense strand
gaacuaaaggaaagugauu

SEQ ID NO: 1427360 - RNA, 19 nt, Homo sapiens
  misc_RNA (1)...(19): siRNA sense strand
caaguugccuuauucaaag

SEQ ID NO: 1427361 - RNA, 19 nt, Homo sapiens
  misc_RNA (1)...(19): siRNA sense strand
uauaagagaccuuuggaaa

SEQ ID NO: 1427362 - RNA, 19 nt, Homo sapiens
  misc_RNA (1)...(19): siRNA sense strand
gauucaaguugccuuauuc

SEQ ID NO: 1427363 - RNA, 19 nt, Homo sapiens
  misc_RNA (1)...(19): siRNA sense strand
ucaaguugccuuauucaaa

SEQ ID NO: 1427364 - RNA, 19 nt, Homo sapiens
  misc_RNA (1)...(19): siRNA sense strand
gcacauaucaagaaaccau

SEQ ID NO: 1427365 - RNA, 19 nt, Homo sapiens
  misc_RNA (1)...(19): siRNA sense strand
caagaaaccaucucuacuc

SEQ ID NO: 1427366 - RNA, 19 nt, Homo sapiens
  misc_RNA (1)...(19): siRNA sense strand
uaaagaggcacauaucaag

SEQ ID NO: 1427367 - RNA, 19 nt, Homo sapiens
  misc_RNA (1)...(19): siRNA sense strand
ugauucaaguugccuuauu

SEQ ID NO: 1427368 - RNA, 19 nt, Homo sapiens
  misc_RNA (1)...(19): siRNA sense strand
caucucuacucuaugcauu

SEQ ID NO: 1427369 - RNA, 19 nt, Homo sapiens
  misc_RNA (1)...(19): siRNA sense strand
ggaacaccuuuaaauccau

SEQ ID NO: 1427370 - RNA, 19 nt, Homo sapiens
  misc_RNA (1)...(19): siRNA sense strand
agaggcacauaucaagaaa

SEQ ID NO: 1427371 - RNA, 19 nt, Homo sapiens
  misc_RNA (1)...(19): siRNA sense strand
guuauaaagaggcacauau

SEQ ID NO: 1427372 - RNA, 19 nt, Homo sapiens
  misc_RNA (1)...(19): siRNA sense strand
aagaaaccaucucuacucu

SEQ ID NO: 1427373 - RNA, 19 nt, Homo sapiens
  misc_RNA (1)...(19): siRNA sense strand
uauaaagaggcacauauca

SEQ ID NO: 1427374 - RNA, 19 nt, Homo sapiens
  misc_RNA (1)...(19): siRNA sense strand
caauggagaaaggaaguuu

SEQ ID NO: 1427375 - RNA, 19 nt, Homo sapiens
  misc_RNA (1)...(19): siRNA sense strand
gauauuuuguccuucacua

SEQ ID NO: 1427376 - RNA, 19 nt, Homo sapiens
  misc_RNA (1)...(19): siRNA sense strand
gcauuguggaacaccuuua

SEQ ID NO: 1427377 - RNA, 19 nt, Homo sapiens
  misc_RNA (1)...(19): siRNA sense strand
gcuauaagagaccuuugga

SEQ ID NO: 1427378 - RNA, 19 nt, Homo sapiens
  misc_RNA (1)...(19): siRNA sense strand
auaaagaggcacauaucaa

SEQ ID NO: 1427379 - RNA, 19 nt, Homo sapiens
  misc_RNA (1)...(19): siRNA sense strand
gcacugcgugucccaucuu

SEQ ID NO: 1427380 - RNA, 19 nt, Homo sapiens
  misc_RNA (1)...(19): siRNA sense strand
aaagaggcacauaucaaga

SEQ ID NO: 1427381 - RNA, 19 nt, Homo sapiens
  misc_RNA (1)...(19): siRNA sense strand
ucacuagcccacucauaau

SEQ ID NO: 1427382 - RNA, 19 nt, Homo sapiens
  misc_RNA (1)...(19): siRNA sense strand
aagaggcacauaucaagaa

SEQ ID NO: 1427383 - RNA, 19 nt, Homo sapiens
  misc_RNA (1)...(19): siRNA sense strand
cauuguggaacaccuuuaa

SEQ ID NO: 1427384 - RNA, 19 nt, Homo sapiens
  misc_RNA (1)...(19): siRNA sense strand
uucacuagcccacucauaa

SEQ ID NO: 1427385 - RNA, 19 nt, Homo sapiens
  misc_RNA (1)...(19): siRNA sense strand
uaucaagaaaccaucucua

SEQ ID NO: 1427386 - RNA, 19 nt, Homo sapiens
  misc_RNA (1)...(19): siRNA sense strand
gcgugucccaucuuugaaa

SEQ ID NO: 1427387 - RNA, 19 nt, Homo sapiens
  misc_RNA (1)...(19): siRNA sense strand
aaccaucucuacucuaugc

SEQ ID NO: 1427388 - RNA, 19 nt, Homo sapiens
  misc_RNA (1)...(19): siRNA sense strand
cugcgugucccaucuuuga

SEQ ID NO: 1427389 - RNA, 19 nt, Homo sapiens
  misc_RNA (1)...(19): siRNA sense strand
gcugauauuuuguccuuca

SEQ ID NO: 1427390 - RNA, 19 nt, Homo sapiens
  misc_RNA (1)...(19): siRNA sense strand
uuauaaagaggcacauauc

SEQ ID NO: 1427391 - RNA, 19 nt, Homo sapiens
  misc_RNA (1)...(19): siRNA sense strand
ucaagaaaccaucucuacu

SEQ ID NO: 1427392 - RNA, 19 nt, Homo sapiens
  misc_RNA (1)...(19): siRNA sense strand
uacuuuaggcuauaagaga

SEQ ID NO: 1427393 - RNA, 19 nt, Homo sapiens
  misc_RNA (1)...(19): siRNA sense strand
ucucuacucuaugcauugu

SEQ ID NO: 1427394 - RNA, 19 nt, Homo sapiens
  misc_RNA (1)...(19): siRNA sense strand
gaaaccaucucuacucuau

SEQ ID NO: 1427395 - RNA, 19 nt, Homo sapiens
  misc_RNA (1)...(19): siRNA sense strand
gaaaggaaguuuuaaggaa

SEQ ID NO: 1427396 - RNA, 19 nt, Homo sapiens
  misc_RNA (1)...(19): siRNA sense strand
gaacuaaaggaaagugauu

SEQ ID NO: 1427397 - RNA, 19 nt, Homo sapiens
  misc_RNA (1)...(19): siRNA sense strand
caaguugccuuauucaaag

SEQ ID NO: 1427398 - RNA, 19 nt, Homo sapiens
  misc_RNA (1)...(19): siRNA sense strand
uauaagagaccuuuggaaa

SEQ ID NO: 1427399 - RNA, 19 nt, Homo sapiens
  misc_RNA (1)...(19): siRNA sense strand
gauucaaguugccuuauuc

SEQ ID NO: 1427400 - RNA, 19 nt, Homo sapiens
  misc_RNA (1)...(19): siRNA sense strand
ucaaguugccuuauucaaa

SEQ ID NO: 1427401 - RNA, 19 nt, Homo sapiens
  misc_RNA (1)...(19): siRNA sense strand
gcacauaucaagaaaccau

SEQ ID NO: 1427402 - RNA, 19 nt, Homo sapiens
  misc_RNA (1)...(19): siRNA sense strand
caagaaaccaucucuacuc

SEQ ID NO: 1427403 - RNA, 19 nt, Homo sapiens
  misc_RNA (1)...(19): siRNA sense strand
uaaagaggcacauaucaag

SEQ ID NO: 1427404 - RNA, 19 nt, Homo sapiens
  misc_RNA (1)...(19): siRNA sense strand
ugauucaaguugccuuauu

SEQ ID NO: 1427405 - RNA, 19 nt, Homo sapiens
  misc_RNA (1)...(19): siRNA sense strand
caucucuacucuaugcauu

SEQ ID NO: 1427406 - RNA, 19 nt, Homo sapiens
  misc_RNA (1)...(19): siRNA sense strand
ggaacaccuuuaaauccau

SEQ ID NO: 1427407 - RNA, 19 nt, Homo sapiens
  misc_RNA (1)...(19): siRNA sense strand
agaggcacauaucaagaaa

SEQ ID NO: 1427408 - RNA, 19 nt, Homo sapiens
  misc_RNA (1)...(19): siRNA sense strand
guuauaaagaggcacauau

SEQ ID NO: 1427409 - RNA, 19 nt, Homo sapiens
  misc_RNA (1)...(19): siRNA sense strand
aagaaaccaucucuacucu

SEQ ID NO: 1427410 - RNA, 19 nt, Homo sapiens
  misc_RNA (1)...(19): siRNA sense strand
uauaaagaggcacauauca

SEQ ID NO: 1427411 - RNA, 19 nt, Homo sapiens
  misc_RNA (1)...(19): siRNA sense strand
caauggagaaaggaaguuu

SEQ ID NO: 1427412 - RNA, 19 nt, Homo sapiens
  misc_RNA (1)...(19): siRNA sense strand
gauauuuuguccuucacua

SEQ ID NO: 1427413 - RNA, 19 nt, Homo sapiens
  misc_RNA (1)...(19): siRNA sense strand
gcauuguggaacaccuuua

SEQ ID NO: 1427414 - RNA, 19 nt, Homo sapiens
  misc_RNA (1)...(19): siRNA sense strand
gcuauaagagaccuuugga

SEQ ID NO: 1427415 - RNA, 19 nt, Homo sapiens
  misc_RNA (1)...(19): siRNA sense strand
auaaagaggcacauaucaa

SEQ ID NO: 1427416 - RNA, 19 nt, Homo sapiens
  misc_RNA (1)...(19): siRNA sense strand
gcacugcgugucccaucuu

SEQ ID NO: 1427417 - RNA, 19 nt, Homo sapiens
  misc_RNA (1)...(19): siRNA sense strand
aaagaggcacauaucaaga

SEQ ID NO: 1427418 - RNA, 19 nt, Homo sapiens
  misc_RNA (1)...(19): siRNA sense strand
ucacuagcccacucauaau

SEQ ID NO: 1427419 - RNA, 19 nt, Homo sapiens
  misc_RNA (1)...(19): siRNA sense strand
aagaggcacauaucaagaa

SEQ ID NO: 1427420 - RNA, 19 nt, Homo sapiens
  misc_RNA (1)...(19): siRNA sense strand
cauuguggaacaccuuuaa

SEQ ID NO: 1427421 - RNA, 19 nt, Homo sapiens
  misc_RNA (1)...(19): siRNA sense strand
uucacuagcccacucauaa

SEQ ID NO: 1427422 - RNA, 19 nt, Homo sapiens
  misc_RNA (1)...(19): siRNA sense strand
uaucaagaaaccaucucua

SEQ ID NO: 1427423 - RNA, 19 nt, Homo sapiens
  misc_RNA (1)...(19): siRNA sense strand
gcgugucccaucuuugaaa

SEQ ID NO: 1427424 - RNA, 19 nt, Homo sapiens
  misc_RNA (1)...(19): siRNA sense strand
aaccaucucuacucuaugc

SEQ ID NO: 1427425 - RNA, 19 nt, Homo sapiens
  misc_RNA (1)...(19): siRNA sense strand
cugcgugucccaucuuuga

SEQ ID NO: 1427426 - RNA, 19 nt, Homo sapiens
  misc_RNA (1)...(19): siRNA sense strand
gcugauauuuuguccuuca

SEQ ID NO: 1427427 - RNA, 19 nt, Homo sapiens
  misc_RNA (1)...(19): siRNA sense strand
uuauaaagaggcacauauc

SEQ ID NO: 1427428 - RNA, 19 nt, Homo sapiens
  misc_RNA (1)...(19): siRNA sense strand
ucaagaaaccaucucuacu

SEQ ID NO: 1427429 - RNA, 19 nt, Homo sapiens
  misc_RNA (1)...(19): siRNA sense strand
uacuuuaggcuauaagaga

SEQ ID NO: 1427430 - RNA, 19 nt, Homo sapiens
  misc_RNA (1)...(19): siRNA sense strand
ucucuacucuaugcauugu

SEQ ID NO: 1427431 - RNA, 19 nt, Homo sapiens
  misc_RNA (1)...(19): siRNA sense strand
gaaaccaucucuacucuau

SEQ ID NO: 1427432 - RNA, 19 nt, Homo sapiens
  misc_RNA (1)...(19): siRNA sense strand
gaaaggaaguuuuaaggaa

SEQ ID NO: 1427433 - RNA, 19 nt, Homo sapiens
  misc_RNA (1)...(19): siRNA sense strand
gaacuaaaggaaagugauu

SEQ ID NO: 1427434 - RNA, 19 nt, Homo sapiens
  misc_RNA (1)...(19): siRNA sense strand
caaguugccuuauucaaag

SEQ ID NO: 1427435 - RNA, 19 nt, Homo sapiens
  misc_RNA (1)...(19): siRNA sense strand
uauaagagaccuuuggaaa

SEQ ID NO: 1427436 - RNA, 19 nt, Homo sapiens
  misc_RNA (1)...(19): siRNA sense strand
gauucaaguugccuuauuc

SEQ ID NO: 1427437 - RNA, 19 nt, Homo sapiens
  misc_RNA (1)...(19): siRNA sense strand
ucaaguugccuuauucaaa

SEQ ID NO: 1427438 - RNA, 19 nt, Homo sapiens
  misc_RNA (1)...(19): siRNA sense strand
gcacauaucaagaaaccau

SEQ ID NO: 1427439 - RNA, 19 nt, Homo sapiens
  misc_RNA (1)...(19): siRNA sense strand
caagaaaccaucucuacuc

SEQ ID NO: 1427440 - RNA, 19 nt, Homo sapiens
  misc_RNA (1)...(19): siRNA sense strand
uaaagaggcacauaucaag

SEQ ID NO: 1427441 - RNA, 19 nt, Homo sapiens
  misc_RNA (1)...(19): siRNA sense strand
ugauucaaguugccuuauu

SEQ ID NO: 1427442 - RNA, 19 nt, Homo sapiens
  misc_RNA (1)...(19): siRNA sense strand
caucucuacucuaugcauu

SEQ ID NO: 1427443 - RNA, 19 nt, Homo sapiens
  misc_RNA (1)...(19): siRNA sense strand
ggaacaccuuuaaauccau

SEQ ID NO: 1427444 - RNA, 19 nt, Homo sapiens
  misc_RNA (1)...(19): siRNA sense strand
agaggcacauaucaagaaa

SEQ ID NO: 1427445 - RNA, 19 nt, Homo sapiens
  misc_RNA (1)...(19): siRNA sense strand
guuauaaagaggcacauau

SEQ ID NO: 1427446 - RNA, 19 nt, Homo sapiens
  misc_RNA (1)...(19): siRNA sense strand
aagaaaccaucucuacucu

SEQ ID NO: 1427447 - RNA, 19 nt, Homo sapiens
  misc_RNA (1)...(19): siRNA sense strand
uauaaagaggcacauauca

SEQ ID NO: 1427448 - RNA, 19 nt, Homo sapiens
  misc_RNA (1)...(19): siRNA sense strand
caauggagaaaggaaguuu

SEQ ID NO: 1427449 - RNA, 19 nt, Homo sapiens
  misc_RNA (1)...(19): siRNA sense strand
gauauuuuguccuucacua

SEQ ID NO: 1427450 - RNA, 19 nt, Homo sapiens
  misc_RNA (1)...(19): siRNA sense strand
gcauuguggaacaccuuua

SEQ ID NO: 1427451 - RNA, 19 nt, Homo sapiens
  misc_RNA (1)...(19): siRNA sense strand
gcuauaagagaccuuugga

SEQ ID NO: 1427452 - RNA, 19 nt, Homo sapiens
  misc_RNA (1)...(19): siRNA sense strand
auaaagaggcacauaucaa

SEQ ID NO: 1427453 - RNA, 19 nt, Homo sapiens
  misc_RNA (1)...(19): siRNA sense strand
gcacugcgugucccaucuu

SEQ ID NO: 1427454 - RNA, 19 nt, Homo sapiens
  misc_RNA (1)...(19): siRNA sense strand
aaagaggcacauaucaaga

SEQ ID NO: 1427455 - RNA, 19 nt, Homo sapiens
  misc_RNA (1)...(19): siRNA sense strand
ucacuagcccacucauaau

SEQ ID NO: 1427456 - RNA, 19 nt, Homo sapiens
  misc_RNA (1)...(19): siRNA sense strand
aagaggcacauaucaagaa

SEQ ID NO: 1427457 - RNA, 19 nt, Homo sapiens
  misc_RNA (1)...(19): siRNA sense strand
cauuguggaacaccuuuaa

SEQ ID NO: 1427458 - RNA, 19 nt, Homo sapiens
  misc_RNA (1)...(19): siRNA sense strand
uucacuagcccacucauaa

SEQ ID NO: 1427459 - RNA, 19 nt, Homo sapiens
  misc_RNA (1)...(19): siRNA sense strand
uaucaagaaaccaucucua

SEQ ID NO: 1427460 - RNA, 19 nt, Homo sapiens
  misc_RNA (1)...(19): siRNA sense strand
gcgugucccaucuuugaaa

SEQ ID NO: 1427461 - RNA, 19 nt, Homo sapiens
  misc_RNA (1)...(19): siRNA sense strand
aaccaucucuacucuaugc

SEQ ID NO: 1427462 - RNA, 19 nt, Homo sapiens
  misc_RNA (1)...(19): siRNA sense strand
cugcgugucccaucuuuga

SEQ ID NO: 1427463 - RNA, 19 nt, Homo sapiens
  misc_RNA (1)...(19): siRNA sense strand
gcugauauuuuguccuuca

SEQ ID NO: 1427464 - RNA, 19 nt, Homo sapiens
  misc_RNA (1)...(19): siRNA sense strand
uuauaaagaggcacauauc

SEQ ID NO: 1427465 - RNA, 19 nt, Homo sapiens
  misc_RNA (1)...(19): siRNA sense strand
ucaagaaaccaucucuacu

SEQ ID NO: 1427466 - RNA, 19 nt, Homo sapiens
  misc_RNA (1)...(19): siRNA sense strand
uacuuuaggcuauaagaga

SEQ ID NO: 1427467 - RNA, 19 nt, Homo sapiens
  misc_RNA (1)...(19): siRNA sense strand
ucucuacucuaugcauugu

SEQ ID NO: 1427468 - RNA, 19 nt, Homo sapiens
  misc_RNA (1)...(19): siRNA sense strand
gaaaccaucucuacucuau

SEQ ID NO: 1427469 - RNA, 19 nt, Homo sapiens
  misc_RNA (1)...(19): siRNA sense strand
gaaaggaaguuuuaaggaa

SEQ ID NO: 1427470 - RNA, 19 nt, Homo sapiens
  misc_RNA (1)...(19): siRNA sense strand
gaacuaaaggaaagugauu

SEQ ID NO: 1427471 - RNA, 19 nt, Homo sapiens
  misc_RNA (1)...(19): siRNA sense strand
caaguugccuuauucaaag

SEQ ID NO: 1427472 - RNA, 19 nt, Homo sapiens
  misc_RNA (1)...(19): siRNA sense strand
uauaagagaccuuuggaaa

SEQ ID NO: 1427473 - RNA, 19 nt, Homo sapiens
  misc_RNA (1)...(19): siRNA sense strand
gauucaaguugccuuauuc

SEQ ID NO: 1427474 - RNA, 19 nt, Homo sapiens
  misc_RNA (1)...(19): siRNA sense strand
ucaaguugccuuauucaaa

SEQ ID NO: 1427475 - RNA, 19 nt, Homo sapiens
  misc_RNA (1)...(19): siRNA sense strand
gcacauaucaagaaaccau

SEQ ID NO: 1427476 - RNA, 19 nt, Homo sapiens
  misc_RNA (1)...(19): siRNA sense strand
caagaaaccaucucuacuc

SEQ ID NO: 1427477 - RNA, 19 nt, Homo sapiens
  misc_RNA (1)...(19): siRNA sense strand
uaaagaggcacauaucaag

SEQ ID NO: 1427478 - RNA, 19 nt, Homo sapiens
  misc_RNA (1)...(19): siRNA sense strand
ugauucaaguugccuuauu

SEQ ID NO: 1427479 - RNA, 19 nt, Homo sapiens
  misc_RNA (1)...(19): siRNA sense strand
caucucuacucuaugcauu

SEQ ID NO: 1427480 - RNA, 19 nt, Homo sapiens
  misc_RNA (1)...(19): siRNA sense strand
ggaacaccuuuaaauccau

SEQ ID NO: 1427481 - RNA, 19 nt, Homo sapiens
  misc_RNA (1)...(19): siRNA sense strand
agaggcacauaucaagaaa

SEQ ID NO: 1427482 - RNA, 19 nt, Homo sapiens
  misc_RNA (1)...(19): siRNA sense strand
guuauaaagaggcacauau

SEQ ID NO: 1427483 - RNA, 19 nt, Homo sapiens
  misc_RNA (1)...(19): siRNA sense strand
aagaaaccaucucuacucu

SEQ ID NO: 1427484 - RNA, 19 nt, Homo sapiens
  misc_RNA (1)...(19): siRNA sense strand
uauaaagaggcacauauca

SEQ ID NO: 1427485 - RNA, 19 nt, Homo sapiens
  misc_RNA (1)...(19): siRNA sense strand
caauggagaaaggaaguuu

SEQ ID NO: 1427486 - RNA, 19 nt, Homo sapiens
  misc_RNA (1)...(19): siRNA sense strand
gauauuuuguccuucacua

SEQ ID NO: 1427487 - RNA, 19 nt, Homo sapiens
  misc_RNA (1)...(19): siRNA sense strand
gcauuguggaacaccuuua

SEQ ID NO: 1427488 - RNA, 19 nt, Homo sapiens
  misc_RNA (1)...(19): siRNA sense strand
gcuauaagagaccuuugga

SEQ ID NO: 1427489 - RNA, 19 nt, Homo sapiens
  misc_RNA (1)...(19): siRNA sense strand
auaaagaggcacauaucaa

SEQ ID NO: 1427490 - RNA, 19 nt, Homo sapiens
  misc_RNA (1)...(19): siRNA sense strand
gcacugcgugucccaucuu

SEQ ID NO: 1427491 - RNA, 19 nt, Homo sapiens
  misc_RNA (1)...(19): siRNA sense strand
aaagaggcacauaucaaga

SEQ ID NO: 1427492 - RNA, 19 nt, Homo sapiens
  misc_RNA (1)...(19): siRNA sense strand
ucacuagcccacucauaau

SEQ ID NO: 1427493 - RNA, 19 nt, Homo sapiens
  misc_RNA (1)...(19): siRNA sense strand
aagaggcacauaucaagaa

SEQ ID NO: 1427494 - RNA, 19 nt, Homo sapiens
  misc_RNA (1)...(19): siRNA sense strand
cauuguggaacaccuuuaa

SEQ ID NO: 1427495 - RNA, 19 nt, Homo sapiens
  misc_RNA (1)...(19): siRNA sense strand
uucacuagcccacucauaa

SEQ ID NO: 1427496 - RNA, 19 nt, Homo sapiens
  misc_RNA (1)...(19): siRNA sense strand
uaucaagaaaccaucucua

SEQ ID NO: 1427497 - RNA, 19 nt, Homo sapiens
  misc_RNA (1)...(19): siRNA sense strand
gcgugucccaucuuugaaa

SEQ ID NO: 1427498 - RNA, 19 nt, Homo sapiens
  misc_RNA (1)...(19): siRNA sense strand
aaccaucucuacucuaugc

SEQ ID NO: 1427499 - RNA, 19 nt, Homo sapiens
  misc_RNA (1)...(19): siRNA sense strand
cugcgugucccaucuuuga

SEQ ID NO: 1427500 - RNA, 19 nt, Homo sapiens
  misc_RNA (1)...(19): siRNA sense strand
gcugauauuuuguccuuca

SEQ ID NO: 1427501 - RNA, 19 nt, Homo sapiens
  misc_RNA (1)...(19): siRNA sense strand
uuauaaagaggcacauauc

SEQ ID NO: 1427502 - RNA, 19 nt, Homo sapiens
  misc_RNA (1)...(19): siRNA sense strand
ucaagaaaccaucucuacu

SEQ ID NO: 1427503 - RNA, 19 nt, Homo sapiens
  misc_RNA (1)...(19): siRNA sense strand
uacuuuaggcuauaagaga

SEQ ID NO: 1427504 - RNA, 19 nt, Homo sapiens
  misc_RNA (1)...(19): siRNA sense strand
ucucuacucuaugcauugu

SEQ ID NO: 1427505 - RNA, 19 nt, Homo sapiens
  misc_RNA (1)...(19): siRNA sense strand
gaaaccaucucuacucuau

SEQ ID NO: 1427506 - RNA, 19 nt, Homo sapiens
  misc_RNA (1)...(19): siRNA sense strand
gaaaggaaguuuuaaggaa

SEQ ID NO: 1427507 - RNA, 19 nt, Homo sapiens
  misc_RNA (1)...(19): siRNA sense strand
gaacuaaaggaaagugauu

SEQ ID NO: 1427508 - RNA, 19 nt, Homo sapiens
  misc_RNA (1)...(19): siRNA sense strand
caaguugccuuauucaaag

SEQ ID NO: 1427509 - RNA, 19 nt, Homo sapiens
  misc_RNA (1)...(19): siRNA sense strand
uauaagagaccuuuggaaa

SEQ ID NO: 1427510 - RNA, 19 nt, Homo sapiens
  misc_RNA (1)...(19): siRNA sense strand
gauucaaguugccuuauuc

SEQ ID NO: 1427511 - RNA, 19 nt, Homo sapiens
  misc_RNA (1)...(19): siRNA sense strand
ucaaguugccuuauucaaa

SEQ ID NO: 1427512 - RNA, 19 nt, Homo sapiens
  misc_RNA (1)...(19): siRNA sense strand
gcacauaucaagaaaccau

SEQ ID NO: 1427513 - RNA, 19 nt, Homo sapiens
  misc_RNA (1)...(19): siRNA sense strand
caagaaaccaucucuacuc

SEQ ID NO: 1427514 - RNA, 19 nt, Homo sapiens
  misc_RNA (1)...(19): siRNA sense strand
uaaagaggcacauaucaag

SEQ ID NO: 1427515 - RNA, 19 nt, Homo sapiens
  misc_RNA (1)...(19): siRNA sense strand
ugauucaaguugccuuauu

SEQ ID NO: 1427516 - RNA, 19 nt, Homo sapiens
  misc_RNA (1)...(19): siRNA sense strand
caucucuacucuaugcauu

SEQ ID NO: 1427517 - RNA, 19 nt, Homo sapiens
  misc_RNA (1)...(19): siRNA sense strand
ggaacaccuuuaaauccau

SEQ ID NO: 1427518 - RNA, 19 nt, Homo sapiens
  misc_RNA (1)...(19): siRNA sense strand
agaggcacauaucaagaaa

SEQ ID NO: 1427519 - RNA, 19 nt, Homo sapiens
  misc_RNA (1)...(19): siRNA sense strand
guuauaaagaggcacauau

SEQ ID NO: 1427520 - RNA, 19 nt, Homo sapiens
  misc_RNA (1)...(19): siRNA sense strand
aagaaaccaucucuacucu

SEQ ID NO: 1427521 - RNA, 19 nt, Homo sapiens
  misc_RNA (1)...(19): siRNA sense strand
uauaaagaggcacauauca

SEQ ID NO: 1427522 - RNA, 19 nt, Homo sapiens
  misc_RNA (1)...(19): siRNA sense strand
caauggagaaaggaaguuu

SEQ ID NO: 1427523 - RNA, 19 nt, Homo sapiens
  misc_RNA (1)...(19): siRNA sense strand
gauauuuuguccuucacua

SEQ ID NO: 1427524 - RNA, 19 nt, Homo sapiens
  misc_RNA (1)...(19): siRNA sense strand
gcauuguggaacaccuuua

SEQ ID NO: 1427525 - RNA, 19 nt, Homo sapiens
  misc_RNA (1)...(19): siRNA sense strand
gcuauaagagaccuuugga

SEQ ID NO: 1427526 - RNA, 19 nt, Homo sapiens
  misc_RNA (1)...(19): siRNA sense strand
auaaagaggcacauaucaa

SEQ ID NO: 1427527 - RNA, 19 nt, Homo sapiens
  misc_RNA (1)...(19): siRNA sense strand
gcacugcgugucccaucuu

SEQ ID NO: 1427528 - RNA, 19 nt, Homo sapiens
  misc_RNA (1)...(19): siRNA sense strand
aaagaggcacauaucaaga

SEQ ID NO: 1427529 - RNA, 19 nt, Homo sapiens
  misc_RNA (1)...(19): siRNA sense strand
ucacuagcccacucauaau

SEQ ID NO: 1427530 - RNA, 19 nt, Homo sapiens
  misc_RNA (1)...(19): siRNA sense strand
aagaggcacauaucaagaa

SEQ ID NO: 1427531 - RNA, 19 nt, Homo sapiens
  misc_RNA (1)...(19): siRNA sense strand
cauuguggaacaccuuuaa

SEQ ID NO: 1427532 - RNA, 19 nt, Homo sapiens
  misc_RNA (1)...(19): siRNA sense strand
uucacuagcccacucauaa

SEQ ID NO: 1427533 - RNA, 19 nt, Homo sapiens
  misc_RNA (1)...(19): siRNA sense strand
uaucaagaaaccaucucua

SEQ ID NO: 1427534 - RNA, 19 nt, Homo sapiens
  misc_RNA (1)...(19): siRNA sense strand
gcgugucccaucuuugaaa

SEQ ID NO: 1427535 - RNA, 19 nt, Homo sapiens
  misc_RNA (1)...(19): siRNA sense strand
aaccaucucuacucuaugc

SEQ ID NO: 1427536 - RNA, 19 nt, Homo sapiens
  misc_RNA (1)...(19): siRNA sense strand
cugcgugucccaucuuuga

SEQ ID NO: 1427537 - RNA, 19 nt, Homo sapiens
  misc_RNA (1)...(19): siRNA sense strand
gcugauauuuuguccuuca

SEQ ID NO: 1427538 - RNA, 19 nt, Homo sapiens
  misc_RNA (1)...(19): siRNA sense strand
uuauaaagaggcacauauc

SEQ ID NO: 1427539 - RNA, 19 nt, Homo sapiens
  misc_RNA (1)...(19): siRNA sense strand
ucaagaaaccaucucuacu

SEQ ID NO: 1427540 - RNA, 19 nt, Homo sapiens
  misc_RNA (1)...(19): siRNA sense strand
uacuuuaggcuauaagaga

SEQ ID NO: 1427541 - RNA, 19 nt, Homo sapiens
  misc_RNA (1)...(19): siRNA sense strand
ucucuacucuaugcauugu

SEQ ID NO: 1427542 - RNA, 19 nt, Homo sapiens
  misc_RNA (1)...(19): siRNA sense strand
gaaaccaucucuacucuau

SEQ ID NO: 1427543 - RNA, 19 nt, Homo sapiens
  misc_RNA (1)...(19): siRNA sense strand
gaaaggaaguuuuaaggaa

SEQ ID NO: 1427544 - RNA, 19 nt, Homo sapiens
  misc_RNA (1)...(19): siRNA sense strand
gaacuaaaggaaagugauu

SEQ ID NO: 1427545 - RNA, 19 nt, Homo sapiens
  misc_RNA (1)...(19): siRNA sense strand
caaguugccuuauucaaag

SEQ ID NO: 1427546 - RNA, 19 nt, Homo sapiens
  misc_RNA (1)...(19): siRNA sense strand
uauaagagaccuuuggaaa

SEQ ID NO: 1427547 - RNA, 19 nt, Homo sapiens
  misc_RNA (1)...(19): siRNA sense strand
gauucaaguugccuuauuc

SEQ ID NO: 1427548 - RNA, 19 nt, Homo sapiens
  misc_RNA (1)...(19): siRNA sense strand
ucaaguugccuuauucaaa

SEQ ID NO: 1427549 - RNA, 19 nt, Homo sapiens
  misc_RNA (1)...(19): siRNA sense strand
gcacauaucaagaaaccau

SEQ ID NO: 1427550 - RNA, 19 nt, Homo sapiens
  misc_RNA (1)...(19): siRNA sense strand
caagaaaccaucucuacuc

SEQ ID NO: 1427551 - RNA, 19 nt, Homo sapiens
  misc_RNA (1)...(19): siRNA sense strand
uaaagaggcacauaucaag

SEQ ID NO: 1427552 - RNA, 19 nt, Homo sapiens
  misc_RNA (1)...(19): siRNA sense strand
ugauucaaguugccuuauu

SEQ ID NO: 1427553 - RNA, 19 nt, Homo sapiens
  misc_RNA (1)...(19): siRNA sense strand
caucucuacucuaugcauu

SEQ ID NO: 1427554 - RNA, 19 nt, Homo sapiens
  misc_RNA (1)...(19): siRNA sense strand
ggaacaccuuuaaauccau

SEQ ID NO: 1427555 - RNA, 19 nt, Homo sapiens
  misc_RNA (1)...(19): siRNA sense strand
agaggcacauaucaagaaa

SEQ ID NO: 1427556 - RNA, 19 nt, Homo sapiens
  misc_RNA (1)...(19): siRNA sense strand
guuauaaagaggcacauau

SEQ ID NO: 1427557 - RNA, 19 nt, Homo sapiens
  misc_RNA (1)...(19): siRNA sense strand
aagaaaccaucucuacucu

SEQ ID NO: 1427558 - RNA, 19 nt, Homo sapiens
  misc_RNA (1)...(19): siRNA sense strand
uauaaagaggcacauauca

SEQ ID NO: 1427559 - RNA, 19 nt, Homo sapiens
  misc_RNA (1)...(19): siRNA sense strand
caauggagaaaggaaguuu

SEQ ID NO: 1427560 - RNA, 19 nt, Homo sapiens
  misc_RNA (1)...(19): siRNA sense strand
gauauuuuguccuucacua

SEQ ID NO: 1427561 - RNA, 19 nt, Homo sapiens
  misc_RNA (1)...(19): siRNA sense strand
gcauuguggaacaccuuua

SEQ ID NO: 1427562 - RNA, 19 nt, Homo sapiens
  misc_RNA (1)...(19): siRNA sense strand
gcuauaagagaccuuugga

SEQ ID NO: 1427563 - RNA, 19 nt, Homo sapiens
  misc_RNA (1)...(19): siRNA sense strand
auaaagaggcacauaucaa

SEQ ID NO: 1427564 - RNA, 19 nt, Homo sapiens
  misc_RNA (1)...(19): siRNA sense strand
gcacugcgugucccaucuu

SEQ ID NO: 1427565 - RNA, 19 nt, Homo sapiens
  misc_RNA (1)...(19): siRNA sense strand
aaagaggcacauaucaaga

SEQ ID NO: 1427566 - RNA, 19 nt, Homo sapiens
  misc_RNA (1)...(19): siRNA sense strand
ucacuagcccacucauaau

SEQ ID NO: 1427567 - RNA, 19 nt, Homo sapiens
  misc_RNA (1)...(19): siRNA sense strand
aagaggcacauaucaagaa

SEQ ID NO: 1427568 - RNA, 19 nt, Homo sapiens
  misc_RNA (1)...(19): siRNA sense strand
cauuguggaacaccuuuaa

SEQ ID NO: 1427569 - RNA, 19 nt, Homo sapiens
  misc_RNA (1)...(19): siRNA sense strand
uucacuagcccacucauaa

SEQ ID NO: 1427570 - RNA, 19 nt, Homo sapiens
  misc_RNA (1)...(19): siRNA sense strand
uaucaagaaaccaucucua

SEQ ID NO: 1427571 - RNA, 19 nt, Homo sapiens
  misc_RNA (1)...(19): siRNA sense strand
gcgugucccaucuuugaaa

SEQ ID NO: 1427572 - RNA, 19 nt, Homo sapiens
  misc_RNA (1)...(19): siRNA sense strand
aaccaucucuacucuaugc

SEQ ID NO: 1427573 - RNA, 19 nt, Homo sapiens
  misc_RNA (1)...(19): siRNA sense strand
cugcgugucccaucuuuga

SEQ ID NO: 1427574 - RNA, 19 nt, Homo sapiens
  misc_RNA (1)...(19): siRNA sense strand
gcugauauuuuguccuuca

SEQ ID NO: 1427575 - RNA, 19 nt, Homo sapiens
  misc_RNA (1)...(19): siRNA sense strand
uuauaaagaggcacauauc

SEQ ID NO: 1427576 - RNA, 19 nt, Homo sapiens
  misc_RNA (1)...(19): siRNA sense strand
ucaagaaaccaucucuacu

SEQ ID NO: 1427577 - RNA, 19 nt, Homo sapiens
  misc_RNA (1)...(19): siRNA sense strand
uacuuuaggcuauaagaga

SEQ ID NO: 1427578 - RNA, 19 nt, Homo sapiens
  misc_RNA (1)...(19): siRNA sense strand
ucucuacucuaugcauugu

SEQ ID NO: 1427579 - RNA, 19 nt, Homo sapiens
  misc_RNA (1)...(19): siRNA sense strand
gcaagaaccuuuccaaugg

SEQ ID NO: 1427580 - RNA, 19 nt, Homo sapiens
  misc_RNA (1)...(19): siRNA sense strand
ccaaugggcuguugaacuu

SEQ ID NO: 1427581 - RNA, 19 nt, Homo sapiens
  misc_RNA (1)...(19): siRNA sense strand
caucuucucugugaauuua

SEQ ID NO: 1427582 - RNA, 19 nt, Homo sapiens
  misc_RNA (1)...(19): siRNA sense strand
ccaaagggaucaggaaauu

SEQ ID NO: 1427583 - RNA, 19 nt, Homo sapiens
  misc_RNA (1)...(19): siRNA sense strand
gaauuuaguucucuuucug

SEQ ID NO: 1427584 - RNA, 19 nt, Homo sapiens
  misc_RNA (1)...(19): siRNA sense strand
gugcaacacugucgaaagu

SEQ ID NO: 1427585 - RNA, 19 nt, Homo sapiens
  misc_RNA (1)...(19): siRNA sense strand
gccagacgcuuucccgauu

SEQ ID NO: 1427586 - RNA, 19 nt, Homo sapiens
  misc_RNA (1)...(19): siRNA sense strand
ggucauggccuaccucuuc

SEQ ID NO: 1427587 - RNA, 19 nt, Homo sapiens
  misc_RNA (1)...(19): siRNA sense strand
gaugugaucucugccuuuc

SEQ ID NO: 1427588 - RNA, 19 nt, Homo sapiens
  misc_RNA (1)...(19): siRNA sense strand
ggaaucaggcacagaaauc

SEQ ID NO: 1427589 - RNA, 19 nt, Homo sapiens
  misc_RNA (1)...(19): siRNA sense strand
ccaguuaccuucaccuucu

SEQ ID NO: 1427590 - RNA, 19 nt, Homo sapiens
  misc_RNA (1)...(19): siRNA sense strand
ugaugcagcucgacuggaa

SEQ ID NO: 1427591 - RNA, 19 nt, Homo sapiens
  misc_RNA (1)...(19): siRNA sense strand
aaagggaucaggaaauuga

SEQ ID NO: 1427592 - RNA, 19 nt, Homo sapiens
  misc_RNA (1)...(19): siRNA sense strand
agacucuccucccucaaua

SEQ ID NO: 1427593 - RNA, 19 nt, Homo sapiens
  misc_RNA (1)...(19): siRNA sense strand
gagcauggccagaauggau

SEQ ID NO: 1427594 - RNA, 19 nt, Homo sapiens
  misc_RNA (1)...(19): siRNA sense strand
ucaacagauucaugaagaa

SEQ ID NO: 1427595 - RNA, 19 nt, Homo sapiens
  misc_RNA (1)...(19): siRNA sense strand
ggagcaauaugggaaaugg

SEQ ID NO: 1427596 - RNA, 19 nt, Homo sapiens
  misc_RNA (1)...(19): siRNA sense strand
acucaagcaucaacagauu

SEQ ID NO: 1427597 - RNA, 19 nt, Homo sapiens
  misc_RNA (1)...(19): siRNA sense strand
guaaagccauccagaacac

SEQ ID NO: 1427598 - RNA, 19 nt, Homo sapiens
  misc_RNA (1)...(19): siRNA sense strand
gagcaagaaccuuuccaau

SEQ ID NO: 1427599 - RNA, 19 nt, Homo sapiens
  misc_RNA (1)...(19): siRNA sense strand
gaaagugucaugcggaaaa

SEQ ID NO: 1427600 - RNA, 19 nt, Homo sapiens
  misc_RNA (1)...(19): siRNA sense strand
gcacccaccugagcagcuu

SEQ ID NO: 1427601 - RNA, 19 nt, Homo sapiens
  misc_RNA (1)...(19): siRNA sense strand
ucagugaucccgagacaga

SEQ ID NO: 1427602 - RNA, 19 nt, Homo sapiens
  misc_RNA (1)...(19): siRNA sense strand
ccuccaggccucaccuuua

SEQ ID NO: 1427603 - RNA, 19 nt, Homo sapiens
  misc_RNA (1)...(19): siRNA sense strand
ucuccucccucaauaguga

SEQ ID NO: 1427604 - RNA, 19 nt, Homo sapiens
  misc_RNA (1)...(19): siRNA sense strand
ggagacuugugacgacauc

SEQ ID NO: 1427605 - RNA, 19 nt, Homo sapiens
  misc_RNA (1)...(19): siRNA sense strand
ccgcgucuuucucgucuuu

SEQ ID NO: 1427606 - RNA, 19 nt, Homo sapiens
  misc_RNA (1)...(19): siRNA sense strand
ggccugagcaagaaccuuu

SEQ ID NO: 1427607 - RNA, 19 nt, Homo sapiens
  misc_RNA (1)...(19): siRNA sense strand
gcacaauaggcaccagaga

SEQ ID NO: 1427608 - RNA, 19 nt, Homo sapiens
  misc_RNA (1)...(19): siRNA sense strand
ggacuccucgugugucaau

SEQ ID NO: 1427609 - RNA, 19 nt, Homo sapiens
  misc_RNA (1)...(19): siRNA sense strand
ucacuuuucuccuguguaa

SEQ ID NO: 1427610 - RNA, 19 nt, Homo sapiens
  misc_RNA (1)...(19): siRNA sense strand
ggaccugucugcgccaucu

SEQ ID NO: 1427611 - RNA, 19 nt, Homo sapiens
  misc_RNA (1)...(19): siRNA sense strand
cgagaacacgugucaagau

SEQ ID NO: 1427612 - RNA, 19 nt, Homo sapiens
  misc_RNA (1)...(19): siRNA sense strand
gccgguaccuugcacuauc

SEQ ID NO: 1427613 - RNA, 19 nt, Homo sapiens
  misc_RNA (1)...(19): siRNA sense strand
guucagugaucccgagaca

SEQ ID NO: 1427614 - RNA, 19 nt, Homo sapiens
  misc_RNA (1)...(19): siRNA sense strand
cuccaggccucaccuuuau

SEQ ID NO: 1427615 - RNA, 19 nt, Homo sapiens
  misc_RNA (1)...(19): siRNA sense strand
aaccucagcuccccaguua

SEQ ID NO: 1427616 - RNA, 19 nt, Homo sapiens
  misc_RNA (1)...(19): siRNA sense strand
uaugggaaaugguccaaag

SEQ ID NO: 1427617 - RNA, 19 nt, Homo sapiens
  misc_RNA (1)...(19): siRNA sense strand
ucuggugacucucuggauu

SEQ ID NO: 1427618 - RNA, 19 nt, Homo sapiens
  misc_RNA (1)...(19): siRNA sense strand
guccacagccagacgcuuu

SEQ ID NO: 1427619 - RNA, 19 nt, Homo sapiens
  misc_RNA (1)...(19): siRNA sense strand
ccagacgcuuucccgauuc

SEQ ID NO: 1427620 - RNA, 19 nt, Homo sapiens
  misc_RNA (1)...(19): siRNA sense strand
aucaacagauucaugaaga

SEQ ID NO: 1427621 - RNA, 19 nt, Homo sapiens
  misc_RNA (1)...(19): siRNA sense strand
gucaacuacucaagcauca

SEQ ID NO: 1427622 - RNA, 19 nt, Homo sapiens
  misc_RNA (1)...(19): siRNA sense strand
ccucauggcccacuacgau

SEQ ID NO: 1427623 - RNA, 19 nt, Homo sapiens
  misc_RNA (1)...(19): siRNA sense strand
caccauccagagcaucuua

SEQ ID NO: 1427624 - RNA, 19 nt, Homo sapiens
  misc_RNA (1)...(19): siRNA sense strand
cagaauggauguggucacu

SEQ ID NO: 1427625 - RNA, 19 nt, Homo sapiens
  misc_RNA (1)...(19): siRNA sense strand
aaacugagucugagaugca

SEQ ID NO: 1427626 - RNA, 19 nt, Homo sapiens
  misc_RNA (1)...(19): siRNA sense strand
gccuaccucuucaccauca

SEQ ID NO: 1427627 - RNA, 19 nt, Homo sapiens
  misc_RNA (1)...(19): siRNA sense strand
guaccuugcacuaucucua

SEQ ID NO: 1427628 - RNA, 19 nt, Homo sapiens
  misc_RNA (1)...(19): siRNA sense strand
cagcuuugccguccucaug

SEQ ID NO: 1427629 - RNA, 19 nt, Homo sapiens
  misc_RNA (1)...(19): siRNA sense strand
gcagggugucuucaucuuc

SEQ ID NO: 1427630 - RNA, 19 nt, Homo sapiens
  misc_RNA (1)...(19): siRNA sense strand
gcgagaacacgugucaaga

SEQ ID NO: 1427631 - RNA, 19 nt, Homo sapiens
  misc_RNA (1)...(19): siRNA sense strand
caaagggaucaggaaauug

SEQ ID NO: 1427632 - RNA, 19 nt, Homo sapiens
  misc_RNA (1)...(19): siRNA sense strand
caucaacgagugugcaaca

SEQ ID NO: 1427633 - RNA, 19 nt, Homo sapiens
  misc_RNA (1)...(19): siRNA sense strand
ugugaucucugccuuucug

SEQ ID NO: 1427634 - RNA, 19 nt, Homo sapiens
  misc_RNA (1)...(19): siRNA sense strand
agcaagaaccuuuccaaug

SEQ ID NO: 1427635 - RNA, 19 nt, Homo sapiens
  misc_RNA (1)...(19): siRNA sense strand
acaauaggcaccagagaca

SEQ ID NO: 1427636 - RNA, 19 nt, Homo sapiens
  misc_RNA (1)...(19): siRNA sense strand
gccaucuucucugugaauu

SEQ ID NO: 1427637 - RNA, 19 nt, Homo sapiens
  misc_RNA (1)...(19): siRNA sense strand
ccagaaaagggauuuauau

SEQ ID NO: 1427638 - RNA, 19 nt, Homo sapiens
  misc_RNA (1)...(19): siRNA sense strand
guggucaacuacucaagca

SEQ ID NO: 1427639 - RNA, 19 nt, Homo sapiens
  misc_RNA (1)...(19): siRNA sense strand
uggauggccuagaggaugu

SEQ ID NO: 1427640 - RNA, 19 nt, Homo sapiens
  misc_RNA (1)...(19): siRNA sense strand
caacagauucaugaagaag

SEQ ID NO: 1427641 - RNA, 19 nt, Homo sapiens
  misc_RNA (1)...(19): siRNA sense strand
ucaagcaucaacagauuca

SEQ ID NO: 1427642 - RNA, 19 nt, Homo sapiens
  misc_RNA (1)...(19): siRNA sense strand
gaaucaggcacagaaaucu

SEQ ID NO: 1427643 - RNA, 19 nt, Homo sapiens
  misc_RNA (1)...(19): siRNA sense strand
ggaggugcagaagcaagua

SEQ ID NO: 1427644 - RNA, 19 nt, Homo sapiens
  misc_RNA (1)...(19): siRNA sense strand
gcagguccgggagcaauau

SEQ ID NO: 1427645 - RNA, 19 nt, Homo sapiens
  misc_RNA (1)...(19): siRNA sense strand
agucugagaugcacacacu

SEQ ID NO: 1427646 - RNA, 19 nt, Homo sapiens
  misc_RNA (1)...(19): siRNA sense strand
gguccaaagggaucaggaa

SEQ ID NO: 1427647 - RNA, 19 nt, Homo sapiens
  misc_RNA (1)...(19): siRNA sense strand
agaaggugcucugugucuu

SEQ ID NO: 1427648 - RNA, 19 nt, Homo sapiens
  misc_RNA (1)...(19): siRNA sense strand
guccaaagggaucaggaaa

SEQ ID NO: 1427649 - RNA, 19 nt, Homo sapiens
  misc_RNA (1)...(19): siRNA sense strand
gugacucucuggauuuuga

SEQ ID NO: 1427650 - RNA, 19 nt, Homo sapiens
  misc_RNA (1)...(19): siRNA sense strand
caacuacucaagcaucaac

SEQ ID NO: 1427651 - RNA, 19 nt, Homo sapiens
  misc_RNA (1)...(19): siRNA sense strand
ggaccugggcagagacuac

SEQ ID NO: 1427652 - RNA, 19 nt, Homo sapiens
  misc_RNA (1)...(19): siRNA sense strand
uggccuaccucuucaccau

SEQ ID NO: 1427653 - RNA, 19 nt, Homo sapiens
  misc_RNA (1)...(19): siRNA sense strand
gucauggccuaccucuuca

SEQ ID NO: 1427654 - RNA, 19 nt, Homo sapiens
  misc_RNA (1)...(19): siRNA sense strand
ucucgucuuucucgcauuc

SEQ ID NO: 1427655 - RNA, 19 nt, Homo sapiens
  misc_RNA (1)...(19): siRNA sense strand
caucaacagauucaugaag

SEQ ID NO: 1427656 - RNA, 19 nt, Homo sapiens
  misc_RNA (1)...(19): siRNA sense strand
gcaucaacagauucaugaa

SEQ ID NO: 1427657 - RNA, 19 nt, Homo sapiens
  misc_RNA (1)...(19): siRNA sense strand
ucaagaaugagagcgagaa

SEQ ID NO: 1427658 - RNA, 19 nt, Homo sapiens
  misc_RNA (1)...(19): siRNA sense strand
cagacucuccucccucaau

SEQ ID NO: 1427659 - RNA, 19 nt, Homo sapiens
  misc_RNA (1)...(19): siRNA sense strand
aaggugcugugcuccauca

SEQ ID NO: 1427660 - RNA, 19 nt, Homo sapiens
  misc_RNA (1)...(19): siRNA sense strand
cacaggcugcagcacaaua

SEQ ID NO: 1427661 - RNA, 19 nt, Homo sapiens
  misc_RNA (1)...(19): siRNA sense strand
gcaacaacgacacccaaaa

SEQ ID NO: 1427662 - RNA, 19 nt, Homo sapiens
  misc_RNA (1)...(19): siRNA sense strand
gaaaacugagucugagaug

SEQ ID NO: 1427663 - RNA, 19 nt, Homo sapiens
  misc_RNA (1)...(19): siRNA sense strand
cuacucaagcaucaacaga

SEQ ID NO: 1427664 - RNA, 19 nt, Homo sapiens
  misc_RNA (1)...(19): siRNA sense strand
gcaagaaccuuuccaaugg

SEQ ID NO: 1427665 - RNA, 19 nt, Homo sapiens
  misc_RNA (1)...(19): siRNA sense strand
ccaaugggcuguugaacuu

SEQ ID NO: 1427666 - RNA, 19 nt, Homo sapiens
  misc_RNA (1)...(19): siRNA sense strand
caucuucucugugaauuua

SEQ ID NO: 1427667 - RNA, 19 nt, Homo sapiens
  misc_RNA (1)...(19): siRNA sense strand
ccaaagggaucaggaaauu

SEQ ID NO: 1427668 - RNA, 19 nt, Homo sapiens
  misc_RNA (1)...(19): siRNA sense strand
gaauuuaguucucuuucug

SEQ ID NO: 1427669 - RNA, 19 nt, Homo sapiens
  misc_RNA (1)...(19): siRNA sense strand
gugcaacacugucgaaagu

SEQ ID NO: 1427670 - RNA, 19 nt, Homo sapiens
  misc_RNA (1)...(19): siRNA sense strand
gccagacgcuuucccgauu

SEQ ID NO: 1427671 - RNA, 19 nt, Homo sapiens
  misc_RNA (1)...(19): siRNA sense strand
ggucauggccuaccucuuc

SEQ ID NO: 1427672 - RNA, 19 nt, Homo sapiens
  misc_RNA (1)...(19): siRNA sense strand
gaugugaucucugccuuuc

SEQ ID NO: 1427673 - RNA, 19 nt, Homo sapiens
  misc_RNA (1)...(19): siRNA sense strand
ggaaucaggcacagaaauc

SEQ ID NO: 1427674 - RNA, 19 nt, Homo sapiens
  misc_RNA (1)...(19): siRNA sense strand
ccaguuaccuucaccuucu

SEQ ID NO: 1427675 - RNA, 19 nt, Homo sapiens
  misc_RNA (1)...(19): siRNA sense strand
ugaugcagcucgacuggaa

SEQ ID NO: 1427676 - RNA, 19 nt, Homo sapiens
  misc_RNA (1)...(19): siRNA sense strand
aaagggaucaggaaauuga

SEQ ID NO: 1427677 - RNA, 19 nt, Homo sapiens
  misc_RNA (1)...(19): siRNA sense strand
agacucuccucccucaaua

SEQ ID NO: 1427678 - RNA, 19 nt, Homo sapiens
  misc_RNA (1)...(19): siRNA sense strand
gagcauggccagaauggau

SEQ ID NO: 1427679 - RNA, 19 nt, Homo sapiens
  misc_RNA (1)...(19): siRNA sense strand
ucaacagauucaugaagaa

SEQ ID NO: 1427680 - RNA, 19 nt, Homo sapiens
  misc_RNA (1)...(19): siRNA sense strand
ggagcaauaugggaaaugg

SEQ ID NO: 1427681 - RNA, 19 nt, Homo sapiens
  misc_RNA (1)...(19): siRNA sense strand
acucaagcaucaacagauu

SEQ ID NO: 1427682 - RNA, 19 nt, Homo sapiens
  misc_RNA (1)...(19): siRNA sense strand
guaaagccauccagaacac

SEQ ID NO: 1427683 - RNA, 19 nt, Homo sapiens
  misc_RNA (1)...(19): siRNA sense strand
gagcaagaaccuuuccaau

SEQ ID NO: 1427684 - RNA, 19 nt, Homo sapiens
  misc_RNA (1)...(19): siRNA sense strand
gaaagugucaugcggaaaa

SEQ ID NO: 1427685 - RNA, 19 nt, Homo sapiens
  misc_RNA (1)...(19): siRNA sense strand
gcacccaccugagcagcuu

SEQ ID NO: 1427686 - RNA, 19 nt, Homo sapiens
  misc_RNA (1)...(19): siRNA sense strand
ucagugaucccgagacaga

SEQ ID NO: 1427687 - RNA, 19 nt, Homo sapiens
  misc_RNA (1)...(19): siRNA sense strand
ccuccaggccucaccuuua

SEQ ID NO: 1427688 - RNA, 19 nt, Homo sapiens
  misc_RNA (1)...(19): siRNA sense strand
ucuccucccucaauaguga

SEQ ID NO: 1427689 - RNA, 19 nt, Homo sapiens
  misc_RNA (1)...(19): siRNA sense strand
ggagacuugugacgacauc

SEQ ID NO: 1427690 - RNA, 19 nt, Homo sapiens
  misc_RNA (1)...(19): siRNA sense strand
ccgcgucuuucucgucuuu

SEQ ID NO: 1427691 - RNA, 19 nt, Homo sapiens
  misc_RNA (1)...(19): siRNA sense strand
ggccugagcaagaaccuuu

SEQ ID NO: 1427692 - RNA, 19 nt, Homo sapiens
  misc_RNA (1)...(19): siRNA sense strand
gcacaauaggcaccagaga

SEQ ID NO: 1427693 - RNA, 19 nt, Homo sapiens
  misc_RNA (1)...(19): siRNA sense strand
ggacuccucgugugucaau

SEQ ID NO: 1427694 - RNA, 19 nt, Homo sapiens
  misc_RNA (1)...(19): siRNA sense strand
ucacuuuucuccuguguaa

SEQ ID NO: 1427695 - RNA, 19 nt, Homo sapiens
  misc_RNA (1)...(19): siRNA sense strand
ggaccugucugcgccaucu

SEQ ID NO: 1427696 - RNA, 19 nt, Homo sapiens
  misc_RNA (1)...(19): siRNA sense strand
cgagaacacgugucaagau

SEQ ID NO: 1427697 - RNA, 19 nt, Homo sapiens
  misc_RNA (1)...(19): siRNA sense strand
gccgguaccuugcacuauc

SEQ ID NO: 1427698 - RNA, 19 nt, Homo sapiens
  misc_RNA (1)...(19): siRNA sense strand
guucagugaucccgagaca

SEQ ID NO: 1427699 - RNA, 19 nt, Homo sapiens
  misc_RNA (1)...(19): siRNA sense strand
cuccaggccucaccuuuau

SEQ ID NO: 1427700 - RNA, 19 nt, Homo sapiens
  misc_RNA (1)...(19): siRNA sense strand
aaccucagcuccccaguua

SEQ ID NO: 1427701 - RNA, 19 nt, Homo sapiens
  misc_RNA (1)...(19): siRNA sense strand
uaugggaaaugguccaaag

SEQ ID NO: 1427702 - RNA, 19 nt, Homo sapiens
  misc_RNA (1)...(19): siRNA sense strand
ucuggugacucucuggauu

SEQ ID NO: 1427703 - RNA, 19 nt, Homo sapiens
  misc_RNA (1)...(19): siRNA sense strand
guccacagccagacgcuuu

SEQ ID NO: 1427704 - RNA, 19 nt, Homo sapiens
  misc_RNA (1)...(19): siRNA sense strand
ccagacgcuuucccgauuc

SEQ ID NO: 1427705 - RNA, 19 nt, Homo sapiens
  misc_RNA (1)...(19): siRNA sense strand
aucaacagauucaugaaga

SEQ ID NO: 1427706 - RNA, 19 nt, Homo sapiens
  misc_RNA (1)...(19): siRNA sense strand
gucaacuacucaagcauca

SEQ ID NO: 1427707 - RNA, 19 nt, Homo sapiens
  misc_RNA (1)...(19): siRNA sense strand
ccucauggcccacuacgau

SEQ ID NO: 1427708 - RNA, 19 nt, Homo sapiens
  misc_RNA (1)...(19): siRNA sense strand
caccauccagagcaucuua

SEQ ID NO: 1427709 - RNA, 19 nt, Homo sapiens
  misc_RNA (1)...(19): siRNA sense strand
cagaauggauguggucacu

SEQ ID NO: 1427710 - RNA, 19 nt, Homo sapiens
  misc_RNA (1)...(19): siRNA sense strand
aaacugagucugagaugca

SEQ ID NO: 1427711 - RNA, 19 nt, Homo sapiens
  misc_RNA (1)...(19): siRNA sense strand
gccuaccucuucaccauca

SEQ ID NO: 1427712 - RNA, 19 nt, Homo sapiens
  misc_RNA (1)...(19): siRNA sense strand
guaccuugcacuaucucua

SEQ ID NO: 1427713 - RNA, 19 nt, Homo sapiens
  misc_RNA (1)...(19): siRNA sense strand
cagcuuugccguccucaug

SEQ ID NO: 1427714 - RNA, 19 nt, Homo sapiens
  misc_RNA (1)...(19): siRNA sense strand
gcagggugucuucaucuuc

SEQ ID NO: 1427715 - RNA, 19 nt, Homo sapiens
  misc_RNA (1)...(19): siRNA sense strand
gcgagaacacgugucaaga

SEQ ID NO: 1427716 - RNA, 19 nt, Homo sapiens
  misc_RNA (1)...(19): siRNA sense strand
caaagggaucaggaaauug

SEQ ID NO: 1427717 - RNA, 19 nt, Homo sapiens
  misc_RNA (1)...(19): siRNA sense strand
caucaacgagugugcaaca

SEQ ID NO: 1427718 - RNA, 19 nt, Homo sapiens
  misc_RNA (1)...(19): siRNA sense strand
ugugaucucugccuuucug

SEQ ID NO: 1427719 - RNA, 19 nt, Homo sapiens
  misc_RNA (1)...(19): siRNA sense strand
agcaagaaccuuuccaaug

SEQ ID NO: 1427720 - RNA, 19 nt, Homo sapiens
  misc_RNA (1)...(19): siRNA sense strand
acaauaggcaccagagaca

SEQ ID NO: 1427721 - RNA, 19 nt, Homo sapiens
  misc_RNA (1)...(19): siRNA sense strand
gccaucuucucugugaauu

SEQ ID NO: 1427722 - RNA, 19 nt, Homo sapiens
  misc_RNA (1)...(19): siRNA sense strand
ccagaaaagggauuuauau

SEQ ID NO: 1427723 - RNA, 19 nt, Homo sapiens
  misc_RNA (1)...(19): siRNA sense strand
guggucaacuacucaagca

SEQ ID NO: 1427724 - RNA, 19 nt, Homo sapiens
  misc_RNA (1)...(19): siRNA sense strand
uggauggccuagaggaugu

SEQ ID NO: 1427725 - RNA, 19 nt, Homo sapiens
  misc_RNA (1)...(19): siRNA sense strand
caacagauucaugaagaag

SEQ ID NO: 1427726 - RNA, 19 nt, Homo sapiens
  misc_RNA (1)...(19): siRNA sense strand
ucaagcaucaacagauuca

SEQ ID NO: 1427727 - RNA, 19 nt, Homo sapiens
  misc_RNA (1)...(19): siRNA sense strand
gaaucaggcacagaaaucu

SEQ ID NO: 1427728 - RNA, 19 nt, Homo sapiens
  misc_RNA (1)...(19): siRNA sense strand
ggaggugcagaagcaagua

SEQ ID NO: 1427729 - RNA, 19 nt, Homo sapiens
  misc_RNA (1)...(19): siRNA sense strand
gcagguccgggagcaauau

SEQ ID NO: 1427730 - RNA, 19 nt, Homo sapiens
  misc_RNA (1)...(19): siRNA sense strand
agucugagaugcacacacu

SEQ ID NO: 1427731 - RNA, 19 nt, Homo sapiens
  misc_RNA (1)...(19): siRNA sense strand
gguccaaagggaucaggaa

SEQ ID NO: 1427732 - RNA, 19 nt, Homo sapiens
  misc_RNA (1)...(19): siRNA sense strand
agaaggugcucugugucuu

SEQ ID NO: 1427733 - RNA, 19 nt, Homo sapiens
  misc_RNA (1)...(19): siRNA sense strand
guccaaagggaucaggaaa

SEQ ID NO: 1427734 - RNA, 19 nt, Homo sapiens
  misc_RNA (1)...(19): siRNA sense strand
gugacucucuggauuuuga

SEQ ID NO: 1427735 - RNA, 19 nt, Homo sapiens
  misc_RNA (1)...(19): siRNA sense strand
caacuacucaagcaucaac

SEQ ID NO: 1427736 - RNA, 19 nt, Homo sapiens
  misc_RNA (1)...(19): siRNA sense strand
ggaccugggcagagacuac

SEQ ID NO: 1427737 - RNA, 19 nt, Homo sapiens
  misc_RNA (1)...(19): siRNA sense strand
uggccuaccucuucaccau

SEQ ID NO: 1427738 - RNA, 19 nt, Homo sapiens
  misc_RNA (1)...(19): siRNA sense strand
gucauggccuaccucuuca

SEQ ID NO: 1427739 - RNA, 19 nt, Homo sapiens
  misc_RNA (1)...(19): siRNA sense strand
ucucgucuuucucgcauuc

SEQ ID NO: 1427740 - RNA, 19 nt, Homo sapiens
  misc_RNA (1)...(19): siRNA sense strand
caucaacagauucaugaag

SEQ ID NO: 1427741 - RNA, 19 nt, Homo sapiens
  misc_RNA (1)...(19): siRNA sense strand
gcaucaacagauucaugaa

SEQ ID NO: 1427742 - RNA, 19 nt, Homo sapiens
  misc_RNA (1)...(19): siRNA sense strand
ucaagaaugagagcgagaa

SEQ ID NO: 1427743 - RNA, 19 nt, Homo sapiens
  misc_RNA (1)...(19): siRNA sense strand
cagacucuccucccucaau

SEQ ID NO: 1427744 - RNA, 19 nt, Homo sapiens
  misc_RNA (1)...(19): siRNA sense strand
aaggugcugugcuccauca

SEQ ID NO: 1427745 - RNA, 19 nt, Homo sapiens
  misc_RNA (1)...(19): siRNA sense strand
cacaggcugcagcacaaua

SEQ ID NO: 1427746 - RNA, 19 nt, Homo sapiens
  misc_RNA (1)...(19): siRNA sense strand
gcaacaacgacacccaaaa

SEQ ID NO: 1427747 - RNA, 19 nt, Homo sapiens
  misc_RNA (1)...(19): siRNA sense strand
gaaaacugagucugagaug

SEQ ID NO: 1427748 - RNA, 19 nt, Homo sapiens
  misc_RNA (1)...(19): siRNA sense strand
cuacucaagcaucaacaga

SEQ ID NO: 1427749 - RNA, 19 nt, Homo sapiens
  misc_RNA (1)...(19): siRNA sense strand
gcaagaaccuuuccaaugg

SEQ ID NO: 1427750 - RNA, 19 nt, Homo sapiens
  misc_RNA (1)...(19): siRNA sense strand
ccaaugggcuguugaacuu

SEQ ID NO: 1427751 - RNA, 19 nt, Homo sapiens
  misc_RNA (1)...(19): siRNA sense strand
caucuucucugugaauuua

SEQ ID NO: 1427752 - RNA, 19 nt, Homo sapiens
  misc_RNA (1)...(19): siRNA sense strand
ccaaagggaucaggaaauu

SEQ ID NO: 1427753 - RNA, 19 nt, Homo sapiens
  misc_RNA (1)...(19): siRNA sense strand
gaauuuaguucucuuucug

SEQ ID NO: 1427754 - RNA, 19 nt, Homo sapiens
  misc_RNA (1)...(19): siRNA sense strand
gugcaacacugucgaaagu

SEQ ID NO: 1427755 - RNA, 19 nt, Homo sapiens
  misc_RNA (1)...(19): siRNA sense strand
gccagacgcuuucccgauu

SEQ ID NO: 1427756 - RNA, 19 nt, Homo sapiens
  misc_RNA (1)...(19): siRNA sense strand
ggucauggccuaccucuuc

SEQ ID NO: 1427757 - RNA, 19 nt, Homo sapiens
  misc_RNA (1)...(19): siRNA sense strand
gaugugaucucugccuuuc

SEQ ID NO: 1427758 - RNA, 19 nt, Homo sapiens
  misc_RNA (1)...(19): siRNA sense strand
ggaaucaggcacagaaauc

SEQ ID NO: 1427759 - RNA, 19 nt, Homo sapiens
  misc_RNA (1)...(19): siRNA sense strand
ccaguuaccuucaccuucu

SEQ ID NO: 1427760 - RNA, 19 nt, Homo sapiens
  misc_RNA (1)...(19): siRNA sense strand
ugaugcagcucgacuggaa

SEQ ID NO: 1427761 - RNA, 19 nt, Homo sapiens
  misc_RNA (1)...(19): siRNA sense strand
aaagggaucaggaaauuga

SEQ ID NO: 1427762 - RNA, 19 nt, Homo sapiens
  misc_RNA (1)...(19): siRNA sense strand
agacucuccucccucaaua

SEQ ID NO: 1427763 - RNA, 19 nt, Homo sapiens
  misc_RNA (1)...(19): siRNA sense strand
gagcauggccagaauggau

SEQ ID NO: 1427764 - RNA, 19 nt, Homo sapiens
  misc_RNA (1)...(19): siRNA sense strand
ucaacagauucaugaagaa

SEQ ID NO: 1427765 - RNA, 19 nt, Homo sapiens
  misc_RNA (1)...(19): siRNA sense strand
ggagcaauaugggaaaugg

SEQ ID NO: 1427766 - RNA, 19 nt, Homo sapiens
  misc_RNA (1)...(19): siRNA sense strand
acucaagcaucaacagauu

SEQ ID NO: 1427767 - RNA, 19 nt, Homo sapiens
  misc_RNA (1)...(19): siRNA sense strand
guaaagccauccagaacac

SEQ ID NO: 1427768 - RNA, 19 nt, Homo sapiens
  misc_RNA (1)...(19): siRNA sense strand
gagcaagaaccuuuccaau

SEQ ID NO: 1427769 - RNA, 19 nt, Homo sapiens
  misc_RNA (1)...(19): siRNA sense strand
gaaagugucaugcggaaaa

SEQ ID NO: 1427770 - RNA, 19 nt, Homo sapiens
  misc_RNA (1)...(19): siRNA sense strand
gcacccaccugagcagcuu

SEQ ID NO: 1427771 - RNA, 19 nt, Homo sapiens
  misc_RNA (1)...(19): siRNA sense strand
ucagugaucccgagacaga

SEQ ID NO: 1427772 - RNA, 19 nt, Homo sapiens
  misc_RNA (1)...(19): siRNA sense strand
ccuccaggccucaccuuua

SEQ ID NO: 1427773 - RNA, 19 nt, Homo sapiens
  misc_RNA (1)...(19): siRNA sense strand
ucuccucccucaauaguga

SEQ ID NO: 1427774 - RNA, 19 nt, Homo sapiens
  misc_RNA (1)...(19): siRNA sense strand
ggagacuugugacgacauc

SEQ ID NO: 1427775 - RNA, 19 nt, Homo sapiens
  misc_RNA (1)...(19): siRNA sense strand
ccgcgucuuucucgucuuu

SEQ ID NO: 1427776 - RNA, 19 nt, Homo sapiens
  misc_RNA (1)...(19): siRNA sense strand
ggccugagcaagaaccuuu

SEQ ID NO: 1427777 - RNA, 19 nt, Homo sapiens
  misc_RNA (1)...(19): siRNA sense strand
gcacaauaggcaccagaga

SEQ ID NO: 1427778 - RNA, 19 nt, Homo sapiens
  misc_RNA (1)...(19): siRNA sense strand
ggacuccucgugugucaau

SEQ ID NO: 1427779 - RNA, 19 nt, Homo sapiens
  misc_RNA (1)...(19): siRNA sense strand
ucacuuuucuccuguguaa

SEQ ID NO: 1427780 - RNA, 19 nt, Homo sapiens
  misc_RNA (1)...(19): siRNA sense strand
ggaccugucugcgccaucu

SEQ ID NO: 1427781 - RNA, 19 nt, Homo sapiens
  misc_RNA (1)...(19): siRNA sense strand
cgagaacacgugucaagau

SEQ ID NO: 1427782 - RNA, 19 nt, Homo sapiens
  misc_RNA (1)...(19): siRNA sense strand
gccgguaccuugcacuauc

SEQ ID NO: 1427783 - RNA, 19 nt, Homo sapiens
  misc_RNA (1)...(19): siRNA sense strand
guucagugaucccgagaca

SEQ ID NO: 1427784 - RNA, 19 nt, Homo sapiens
  misc_RNA (1)...(19): siRNA sense strand
cuccaggccucaccuuuau

SEQ ID NO: 1427785 - RNA, 19 nt, Homo sapiens
  misc_RNA (1)...(19): siRNA sense strand
aaccucagcuccccaguua

SEQ ID NO: 1427786 - RNA, 19 nt, Homo sapiens
  misc_RNA (1)...(19): siRNA sense strand
uaugggaaaugguccaaag

SEQ ID NO: 1427787 - RNA, 19 nt, Homo sapiens
  misc_RNA (1)...(19): siRNA sense strand
ucuggugacucucuggauu

SEQ ID NO: 1427788 - RNA, 19 nt, Homo sapiens
  misc_RNA (1)...(19): siRNA sense strand
guccacagccagacgcuuu

SEQ ID NO: 1427789 - RNA, 19 nt, Homo sapiens
  misc_RNA (1)...(19): siRNA sense strand
ccagacgcuuucccgauuc

SEQ ID NO: 1427790 - RNA, 19 nt, Homo sapiens
  misc_RNA (1)...(19): siRNA sense strand
aucaacagauucaugaaga

SEQ ID NO: 1427791 - RNA, 19 nt, Homo sapiens
  misc_RNA (1)...(19): siRNA sense strand
gucaacuacucaagcauca

SEQ ID NO: 1427792 - RNA, 19 nt, Homo sapiens
  misc_RNA (1)...(19): siRNA sense strand
ccucauggcccacuacgau

SEQ ID NO: 1427793 - RNA, 19 nt, Homo sapiens
  misc_RNA (1)...(19): siRNA sense strand
caccauccagagcaucuua

SEQ ID NO: 1427794 - RNA, 19 nt, Homo sapiens
  misc_RNA (1)...(19): siRNA sense strand
cagaauggauguggucacu

SEQ ID NO: 1427795 - RNA, 19 nt, Homo sapiens
  misc_RNA (1)...(19): siRNA sense strand
aaacugagucugagaugca

SEQ ID NO: 1427796 - RNA, 19 nt, Homo sapiens
  misc_RNA (1)...(19): siRNA sense strand
gccuaccucuucaccauca

SEQ ID NO: 1427797 - RNA, 19 nt, Homo sapiens
  misc_RNA (1)...(19): siRNA sense strand
guaccuugcacuaucucua

SEQ ID NO: 1427798 - RNA, 19 nt, Homo sapiens
  misc_RNA (1)...(19): siRNA sense strand
cagcuuugccguccucaug

SEQ ID NO: 1427799 - RNA, 19 nt, Homo sapiens
  misc_RNA (1)...(19): siRNA sense strand
gcagggugucuucaucuuc

SEQ ID NO: 1427800 - RNA, 19 nt, Homo sapiens
  misc_RNA (1)...(19): siRNA sense strand
gcgagaacacgugucaaga

SEQ ID NO: 1427801 - RNA, 19 nt, Homo sapiens
  misc_RNA (1)...(19): siRNA sense strand
caaagggaucaggaaauug

SEQ ID NO: 1427802 - RNA, 19 nt, Homo sapiens
  misc_RNA (1)...(19): siRNA sense strand
caucaacgagugugcaaca

SEQ ID NO: 1427803 - RNA, 19 nt, Homo sapiens
  misc_RNA (1)...(19): siRNA sense strand
ugugaucucugccuuucug

SEQ ID NO: 1427804 - RNA, 19 nt, Homo sapiens
  misc_RNA (1)...(19): siRNA sense strand
agcaagaaccuuuccaaug

SEQ ID NO: 1427805 - RNA, 19 nt, Homo sapiens
  misc_RNA (1)...(19): siRNA sense strand
acaauaggcaccagagaca

SEQ ID NO: 1427806 - RNA, 19 nt, Homo sapiens
  misc_RNA (1)...(19): siRNA sense strand
gccaucuucucugugaauu

SEQ ID NO: 1427807 - RNA, 19 nt, Homo sapiens
  misc_RNA (1)...(19): siRNA sense strand
ccagaaaagggauuuauau

SEQ ID NO: 1427808 - RNA, 19 nt, Homo sapiens
  misc_RNA (1)...(19): siRNA sense strand
guggucaacuacucaagca

SEQ ID NO: 1427809 - RNA, 19 nt, Homo sapiens
  misc_RNA (1)...(19): siRNA sense strand
uggauggccuagaggaugu

SEQ ID NO: 1427810 - RNA, 19 nt, Homo sapiens
  misc_RNA (1)...(19): siRNA sense strand
caacagauucaugaagaag

SEQ ID NO: 1427811 - RNA, 19 nt, Homo sapiens
  misc_RNA (1)...(19): siRNA sense strand
ucaagcaucaacagauuca

SEQ ID NO: 1427812 - RNA, 19 nt, Homo sapiens
  misc_RNA (1)...(19): siRNA sense strand
gaaucaggcacagaaaucu

SEQ ID NO: 1427813 - RNA, 19 nt, Homo sapiens
  misc_RNA (1)...(19): siRNA sense strand
ggaggugcagaagcaagua

SEQ ID NO: 1427814 - RNA, 19 nt, Homo sapiens
  misc_RNA (1)...(19): siRNA sense strand
gcagguccgggagcaauau

SEQ ID NO: 1427815 - RNA, 19 nt, Homo sapiens
  misc_RNA (1)...(19): siRNA sense strand
agucugagaugcacacacu

SEQ ID NO: 1427816 - RNA, 19 nt, Homo sapiens
  misc_RNA (1)...(19): siRNA sense strand
gguccaaagggaucaggaa

SEQ ID NO: 1427817 - RNA, 19 nt, Homo sapiens
  misc_RNA (1)...(19): siRNA sense strand
agaaggugcucugugucuu

SEQ ID NO: 1427818 - RNA, 19 nt, Homo sapiens
  misc_RNA (1)...(19): siRNA sense strand
guccaaagggaucaggaaa

SEQ ID NO: 1427819 - RNA, 19 nt, Homo sapiens
  misc_RNA (1)...(19): siRNA sense strand
gugacucucuggauuuuga

SEQ ID NO: 1427820 - RNA, 19 nt, Homo sapiens
  misc_RNA (1)...(19): siRNA sense strand
caacuacucaagcaucaac

SEQ ID NO: 1427821 - RNA, 19 nt, Homo sapiens
  misc_RNA (1)...(19): siRNA sense strand
ggaccugggcagagacuac

SEQ ID NO: 1427822 - RNA, 19 nt, Homo sapiens
  misc_RNA (1)...(19): siRNA sense strand
uggccuaccucuucaccau

SEQ ID NO: 1427823 - RNA, 19 nt, Homo sapiens
  misc_RNA (1)...(19): siRNA sense strand
gucauggccuaccucuuca

SEQ ID NO: 1427824 - RNA, 19 nt, Homo sapiens
  misc_RNA (1)...(19): siRNA sense strand
ucucgucuuucucgcauuc

SEQ ID NO: 1427825 - RNA, 19 nt, Homo sapiens
  misc_RNA (1)...(19): siRNA sense strand
caucaacagauucaugaag

SEQ ID NO: 1427826 - RNA, 19 nt, Homo sapiens
  misc_RNA (1)...(19): siRNA sense strand
gcaucaacagauucaugaa

SEQ ID NO: 1427827 - RNA, 19 nt, Homo sapiens
  misc_RNA (1)...(19): siRNA sense strand
ucaagaaugagagcgagaa

SEQ ID NO: 1427828 - RNA, 19 nt, Homo sapiens
  misc_RNA (1)...(19): siRNA sense strand
cagacucuccucccucaau

SEQ ID NO: 1427829 - RNA, 19 nt, Homo sapiens
  misc_RNA (1)...(19): siRNA sense strand
aaggugcugugcuccauca

SEQ ID NO: 1427830 - RNA, 19 nt, Homo sapiens
  misc_RNA (1)...(19): siRNA sense strand
cacaggcugcagcacaaua

SEQ ID NO: 1427831 - RNA, 19 nt, Homo sapiens
  misc_RNA (1)...(19): siRNA sense strand
gcaacaacgacacccaaaa

SEQ ID NO: 1427832 - RNA, 19 nt, Homo sapiens
  misc_RNA (1)...(19): siRNA sense strand
gaaaacugagucugagaug

SEQ ID NO: 1427833 - RNA, 19 nt, Homo sapiens
  misc_RNA (1)...(19): siRNA sense strand
cuacucaagcaucaacaga

SEQ ID NO: 1427834 - RNA, 19 nt, Homo sapiens
  misc_RNA (1)...(19): siRNA sense strand
gcaagaaccuuuccaaugg

SEQ ID NO: 1427835 - RNA, 19 nt, Homo sapiens
  misc_RNA (1)...(19): siRNA sense strand
ccaaugggcuguugaacuu

SEQ ID NO: 1427836 - RNA, 19 nt, Homo sapiens
  misc_RNA (1)...(19): siRNA sense strand
caucuucucugugaauuua

SEQ ID NO: 1427837 - RNA, 19 nt, Homo sapiens
  misc_RNA (1)...(19): siRNA sense strand
ccaaagggaucaggaaauu

SEQ ID NO: 1427838 - RNA, 19 nt, Homo sapiens
  misc_RNA (1)...(19): siRNA sense strand
gaauuuaguucucuuucug

SEQ ID NO: 1427839 - RNA, 19 nt, Homo sapiens
  misc_RNA (1)...(19): siRNA sense strand
gugcaacacugucgaaagu

SEQ ID NO: 1427840 - RNA, 19 nt, Homo sapiens
  misc_RNA (1)...(19): siRNA sense strand
gccagacgcuuucccgauu

SEQ ID NO: 1427841 - RNA, 19 nt, Homo sapiens
  misc_RNA (1)...(19): siRNA sense strand
ggucauggccuaccucuuc

SEQ ID NO: 1427842 - RNA, 19 nt, Homo sapiens
  misc_RNA (1)...(19): siRNA sense strand
gaugugaucucugccuuuc

SEQ ID NO: 1427843 - RNA, 19 nt, Homo sapiens
  misc_RNA (1)...(19): siRNA sense strand
ggaaucaggcacagaaauc

SEQ ID NO: 1427844 - RNA, 19 nt, Homo sapiens
  misc_RNA (1)...(19): siRNA sense strand
ccaguuaccuucaccuucu

SEQ ID NO: 1427845 - RNA, 19 nt, Homo sapiens
  misc_RNA (1)...(19): siRNA sense strand
ugaugcagcucgacuggaa

SEQ ID NO: 1427846 - RNA, 19 nt, Homo sapiens
  misc_RNA (1)...(19): siRNA sense strand
aaagggaucaggaaauuga

SEQ ID NO: 1427847 - RNA, 19 nt, Homo sapiens
  misc_RNA (1)...(19): siRNA sense strand
agacucuccucccucaaua

SEQ ID NO: 1427848 - RNA, 19 nt, Homo sapiens
  misc_RNA (1)...(19): siRNA sense strand
gagcauggccagaauggau

SEQ ID NO: 1427849 - RNA, 19 nt, Homo sapiens
  misc_RNA (1)...(19): siRNA sense strand
ucaacagauucaugaagaa

SEQ ID NO: 1427850 - RNA, 19 nt, Homo sapiens
  misc_RNA (1)...(19): siRNA sense strand
ggagcaauaugggaaaugg

SEQ ID NO: 1427851 - RNA, 19 nt, Homo sapiens
  misc_RNA (1)...(19): siRNA sense strand
acucaagcaucaacagauu

SEQ ID NO: 1427852 - RNA, 19 nt, Homo sapiens
  misc_RNA (1)...(19): siRNA sense strand
guaaagccauccagaacac

SEQ ID NO: 1427853 - RNA, 19 nt, Homo sapiens
  misc_RNA (1)...(19): siRNA sense strand
gagcaagaaccuuuccaau

SEQ ID NO: 1427854 - RNA, 19 nt, Homo sapiens
  misc_RNA (1)...(19): siRNA sense strand
gaaagugucaugcggaaaa

SEQ ID NO: 1427855 - RNA, 19 nt, Homo sapiens
  misc_RNA (1)...(19): siRNA sense strand
gcacccaccugagcagcuu

SEQ ID NO: 1427856 - RNA, 19 nt, Homo sapiens
  misc_RNA (1)...(19): siRNA sense strand
ucagugaucccgagacaga

SEQ ID NO: 1427857 - RNA, 19 nt, Homo sapiens
  misc_RNA (1)...(19): siRNA sense strand
ccuccaggccucaccuuua

SEQ ID NO: 1427858 - RNA, 19 nt, Homo sapiens
  misc_RNA (1)...(19): siRNA sense strand
ucuccucccucaauaguga

SEQ ID NO: 1427859 - RNA, 19 nt, Homo sapiens
  misc_RNA (1)...(19): siRNA sense strand
ggagacuugugacgacauc

SEQ ID NO: 1427860 - RNA, 19 nt, Homo sapiens
  misc_RNA (1)...(19): siRNA sense strand
ccgcgucuuucucgucuuu

SEQ ID NO: 1427861 - RNA, 19 nt, Homo sapiens
  misc_RNA (1)...(19): siRNA sense strand
ggccugagcaagaaccuuu

SEQ ID NO: 1427862 - RNA, 19 nt, Homo sapiens
  misc_RNA (1)...(19): siRNA sense strand
gcacaauaggcaccagaga

SEQ ID NO: 1427863 - RNA, 19 nt, Homo sapiens
  misc_RNA (1)...(19): siRNA sense strand
ggacuccucgugugucaau

SEQ ID NO: 1427864 - RNA, 19 nt, Homo sapiens
  misc_RNA (1)...(19): siRNA sense strand
ucacuuuucuccuguguaa

SEQ ID NO: 1427865 - RNA, 19 nt, Homo sapiens
  misc_RNA (1)...(19): siRNA sense strand
ggaccugucugcgccaucu

SEQ ID NO: 1427866 - RNA, 19 nt, Homo sapiens
  misc_RNA (1)...(19): siRNA sense strand
cgagaacacgugucaagau

SEQ ID NO: 1427867 - RNA, 19 nt, Homo sapiens
  misc_RNA (1)...(19): siRNA sense strand
gccgguaccuugcacuauc

SEQ ID NO: 1427868 - RNA, 19 nt, Homo sapiens
  misc_RNA (1)...(19): siRNA sense strand
guucagugaucccgagaca

SEQ ID NO: 1427869 - RNA, 19 nt, Homo sapiens
  misc_RNA (1)...(19): siRNA sense strand
cuccaggccucaccuuuau

SEQ ID NO: 1427870 - RNA, 19 nt, Homo sapiens
  misc_RNA (1)...(19): siRNA sense strand
aaccucagcuccccaguua

SEQ ID NO: 1427871 - RNA, 19 nt, Homo sapiens
  misc_RNA (1)...(19): siRNA sense strand
uaugggaaaugguccaaag

SEQ ID NO: 1427872 - RNA, 19 nt, Homo sapiens
  misc_RNA (1)...(19): siRNA sense strand
ucuggugacucucuggauu

SEQ ID NO: 1427873 - RNA, 19 nt, Homo sapiens
  misc_RNA (1)...(19): siRNA sense strand
guccacagccagacgcuuu

SEQ ID NO: 1427874 - RNA, 19 nt, Homo sapiens
  misc_RNA (1)...(19): siRNA sense strand
ccagacgcuuucccgauuc

SEQ ID NO: 1427875 - RNA, 19 nt, Homo sapiens
  misc_RNA (1)...(19): siRNA sense strand
aucaacagauucaugaaga

SEQ ID NO: 1427876 - RNA, 19 nt, Homo sapiens
  misc_RNA (1)...(19): siRNA sense strand
gucaacuacucaagcauca

SEQ ID NO: 1427877 - RNA, 19 nt, Homo sapiens
  misc_RNA (1)...(19): siRNA sense strand
ccucauggcccacuacgau

SEQ ID NO: 1427878 - RNA, 19 nt, Homo sapiens
  misc_RNA (1)...(19): siRNA sense strand
caccauccagagcaucuua

SEQ ID NO: 1427879 - RNA, 19 nt, Homo sapiens
  misc_RNA (1)...(19): siRNA sense strand
cagaauggauguggucacu

SEQ ID NO: 1427880 - RNA, 19 nt, Homo sapiens
  misc_RNA (1)...(19): siRNA sense strand
aaacugagucugagaugca

SEQ ID NO: 1427881 - RNA, 19 nt, Homo sapiens
  misc_RNA (1)...(19): siRNA sense strand
gccuaccucuucaccauca

SEQ ID NO: 1427882 - RNA, 19 nt, Homo sapiens
  misc_RNA (1)...(19): siRNA sense strand
guaccuugcacuaucucua

SEQ ID NO: 1427883 - RNA, 19 nt, Homo sapiens
  misc_RNA (1)...(19): siRNA sense strand
cagcuuugccguccucaug

SEQ ID NO: 1427884 - RNA, 19 nt, Homo sapiens
  misc_RNA (1)...(19): siRNA sense strand
gcagggugucuucaucuuc

SEQ ID NO: 1427885 - RNA, 19 nt, Homo sapiens
  misc_RNA (1)...(19): siRNA sense strand
gcgagaacacgugucaaga

SEQ ID NO: 1427886 - RNA, 19 nt, Homo sapiens
  misc_RNA (1)...(19): siRNA sense strand
caaagggaucaggaaauug

SEQ ID NO: 1427887 - RNA, 19 nt, Homo sapiens
  misc_RNA (1)...(19): siRNA sense strand
caucaacgagugugcaaca

SEQ ID NO: 1427888 - RNA, 19 nt, Homo sapiens
  misc_RNA (1)...(19): siRNA sense strand
ugugaucucugccuuucug

SEQ ID NO: 1427889 - RNA, 19 nt, Homo sapiens
  misc_RNA (1)...(19): siRNA sense strand
agcaagaaccuuuccaaug

SEQ ID NO: 1427890 - RNA, 19 nt, Homo sapiens
  misc_RNA (1)...(19): siRNA sense strand
acaauaggcaccagagaca

SEQ ID NO: 1427891 - RNA, 19 nt, Homo sapiens
  misc_RNA (1)...(19): siRNA sense strand
gccaucuucucugugaauu

SEQ ID NO: 1427892 - RNA, 19 nt, Homo sapiens
  misc_RNA (1)...(19): siRNA sense strand
ccagaaaagggauuuauau

SEQ ID NO: 1427893 - RNA, 19 nt, Homo sapiens
  misc_RNA (1)...(19): siRNA sense strand
guggucaacuacucaagca

SEQ ID NO: 1427894 - RNA, 19 nt, Homo sapiens
  misc_RNA (1)...(19): siRNA sense strand
uggauggccuagaggaugu

SEQ ID NO: 1427895 - RNA, 19 nt, Homo sapiens
  misc_RNA (1)...(19): siRNA sense strand
caacagauucaugaagaag

SEQ ID NO: 1427896 - RNA, 19 nt, Homo sapiens
  misc_RNA (1)...(19): siRNA sense strand
ucaagcaucaacagauuca

SEQ ID NO: 1427897 - RNA, 19 nt, Homo sapiens
  misc_RNA (1)...(19): siRNA sense strand
gaaucaggcacagaaaucu

SEQ ID NO: 1427898 - RNA, 19 nt, Homo sapiens
  misc_RNA (1)...(19): siRNA sense strand
ggaggugcagaagcaagua

SEQ ID NO: 1427899 - RNA, 19 nt, Homo sapiens
  misc_RNA (1)...(19): siRNA sense strand
gcagguccgggagcaauau

SEQ ID NO: 1427900 - RNA, 19 nt, Homo sapiens
  misc_RNA (1)...(19): siRNA sense strand
agucugagaugcacacacu

SEQ ID NO: 1427901 - RNA, 19 nt, Homo sapiens
  misc_RNA (1)...(19): siRNA sense strand
gguccaaagggaucaggaa

SEQ ID NO: 1427902 - RNA, 19 nt, Homo sapiens
  misc_RNA (1)...(19): siRNA sense strand
agaaggugcucugugucuu

SEQ ID NO: 1427903 - RNA, 19 nt, Homo sapiens
  misc_RNA (1)...(19): siRNA sense strand
guccaaagggaucaggaaa

SEQ ID NO: 1427904 - RNA, 19 nt, Homo sapiens
  misc_RNA (1)...(19): siRNA sense strand
gugacucucuggauuuuga

SEQ ID NO: 1427905 - RNA, 19 nt, Homo sapiens
  misc_RNA (1)...(19): siRNA sense strand
caacuacucaagcaucaac

SEQ ID NO: 1427906 - RNA, 19 nt, Homo sapiens
  misc_RNA (1)...(19): siRNA sense strand
ggaccugggcagagacuac

SEQ ID NO: 1427907 - RNA, 19 nt, Homo sapiens
  misc_RNA (1)...(19): siRNA sense strand
uggccuaccucuucaccau

SEQ ID NO: 1427908 - RNA, 19 nt, Homo sapiens
  misc_RNA (1)...(19): siRNA sense strand
gucauggccuaccucuuca

SEQ ID NO: 1427909 - RNA, 19 nt, Homo sapiens
  misc_RNA (1)...(19): siRNA sense strand
ucucgucuuucucgcauuc

SEQ ID NO: 1427910 - RNA, 19 nt, Homo sapiens
  misc_RNA (1)...(19): siRNA sense strand
caucaacagauucaugaag

SEQ ID NO: 1427911 - RNA, 19 nt, Homo sapiens
  misc_RNA (1)...(19): siRNA sense strand
gcaucaacagauucaugaa

SEQ ID NO: 1427912 - RNA, 19 nt, Homo sapiens
  misc_RNA (1)...(19): siRNA sense strand
ucaagaaugagagcgagaa

SEQ ID NO: 1427913 - RNA, 19 nt, Homo sapiens
  misc_RNA (1)...(19): siRNA sense strand
cagacucuccucccucaau

SEQ ID NO: 1427914 - RNA, 19 nt, Homo sapiens
  misc_RNA (1)...(19): siRNA sense strand
aaggugcugugcuccauca

SEQ ID NO: 1427915 - RNA, 19 nt, Homo sapiens
  misc_RNA (1)...(19): siRNA sense strand
cacaggcugcagcacaaua

SEQ ID NO: 1427916 - RNA, 19 nt, Homo sapiens
  misc_RNA (1)...(19): siRNA sense strand
gcaacaacgacacccaaaa

SEQ ID NO: 1427917 - RNA, 19 nt, Homo sapiens
  misc_RNA (1)...(19): siRNA sense strand
gaaaacugagucugagaug

SEQ ID NO: 1427918 - RNA, 19 nt, Homo sapiens
  misc_RNA (1)...(19): siRNA sense strand
cuacucaagcaucaacaga

SEQ ID NO: 1427919 - RNA, 19 nt, Homo sapiens
  misc_RNA (1)...(19): siRNA sense strand
gcaagaaccuuuccaaugg

SEQ ID NO: 1427920 - RNA, 19 nt, Homo sapiens
  misc_RNA (1)...(19): siRNA sense strand
ccaaugggcuguugaacuu

SEQ ID NO: 1427921 - RNA, 19 nt, Homo sapiens
  misc_RNA (1)...(19): siRNA sense strand
caucuucucugugaauuua

SEQ ID NO: 1427922 - RNA, 19 nt, Homo sapiens
  misc_RNA (1)...(19): siRNA sense strand
ccaaagggaucaggaaauu

SEQ ID NO: 1427923 - RNA, 19 nt, Homo sapiens
  misc_RNA (1)...(19): siRNA sense strand
gaauuuaguucucuuucug

SEQ ID NO: 1427924 - RNA, 19 nt, Homo sapiens
  misc_RNA (1)...(19): siRNA sense strand
gugcaacacugucgaaagu

SEQ ID NO: 1427925 - RNA, 19 nt, Homo sapiens
  misc_RNA (1)...(19): siRNA sense strand
gccagacgcuuucccgauu

SEQ ID NO: 1427926 - RNA, 19 nt, Homo sapiens
  misc_RNA (1)...(19): siRNA sense strand
ggucauggccuaccucuuc

SEQ ID NO: 1427927 - RNA, 19 nt, Homo sapiens
  misc_RNA (1)...(19): siRNA sense strand
gaugugaucucugccuuuc

SEQ ID NO: 1427928 - RNA, 19 nt, Homo sapiens
  misc_RNA (1)...(19): siRNA sense strand
ggaaucaggcacagaaauc

SEQ ID NO: 1427929 - RNA, 19 nt, Homo sapiens
  misc_RNA (1)...(19): siRNA sense strand
ccaguuaccuucaccuucu

SEQ ID NO: 1427930 - RNA, 19 nt, Homo sapiens
  misc_RNA (1)...(19): siRNA sense strand
ugaugcagcucgacuggaa

SEQ ID NO: 1427931 - RNA, 19 nt, Homo sapiens
  misc_RNA (1)...(19): siRNA sense strand
aaagggaucaggaaauuga

SEQ ID NO: 1427932 - RNA, 19 nt, Homo sapiens
  misc_RNA (1)...(19): siRNA sense strand
agacucuccucccucaaua

SEQ ID NO: 1427933 - RNA, 19 nt, Homo sapiens
  misc_RNA (1)...(19): siRNA sense strand
gagcauggccagaauggau

SEQ ID NO: 1427934 - RNA, 19 nt, Homo sapiens
  misc_RNA (1)...(19): siRNA sense strand
ucaacagauucaugaagaa

SEQ ID NO: 1427935 - RNA, 19 nt, Homo sapiens
  misc_RNA (1)...(19): siRNA sense strand
ggagcaauaugggaaaugg

SEQ ID NO: 1427936 - RNA, 19 nt, Homo sapiens
  misc_RNA (1)...(19): siRNA sense strand
acucaagcaucaacagauu

SEQ ID NO: 1427937 - RNA, 19 nt, Homo sapiens
  misc_RNA (1)...(19): siRNA sense strand
guaaagccauccagaacac

SEQ ID NO: 1427938 - RNA, 19 nt, Homo sapiens
  misc_RNA (1)...(19): siRNA sense strand
gagcaagaaccuuuccaau

SEQ ID NO: 1427939 - RNA, 19 nt, Homo sapiens
  misc_RNA (1)...(19): siRNA sense strand
gaaagugucaugcggaaaa

SEQ ID NO: 1427940 - RNA, 19 nt, Homo sapiens
  misc_RNA (1)...(19): siRNA sense strand
gcacccaccugagcagcuu

SEQ ID NO: 1427941 - RNA, 19 nt, Homo sapiens
  misc_RNA (1)...(19): siRNA sense strand
ucagugaucccgagacaga

SEQ ID NO: 1427942 - RNA, 19 nt, Homo sapiens
  misc_RNA (1)...(19): siRNA sense strand
ccuccaggccucaccuuua

SEQ ID NO: 1427943 - RNA, 19 nt, Homo sapiens
  misc_RNA (1)...(19): siRNA sense strand
ucuccucccucaauaguga

SEQ ID NO: 1427944 - RNA, 19 nt, Homo sapiens
  misc_RNA (1)...(19): siRNA sense strand
ggagacuugugacgacauc

SEQ ID NO: 1427945 - RNA, 19 nt, Homo sapiens
  misc_RNA (1)...(19): siRNA sense strand
ccgcgucuuucucgucuuu

SEQ ID NO: 1427946 - RNA, 19 nt, Homo sapiens
  misc_RNA (1)...(19): siRNA sense strand
ggccugagcaagaaccuuu

SEQ ID NO: 1427947 - RNA, 19 nt, Homo sapiens
  misc_RNA (1)...(19): siRNA sense strand
gcacaauaggcaccagaga

SEQ ID NO: 1427948 - RNA, 19 nt, Homo sapiens
  misc_RNA (1)...(19): siRNA sense strand
ggacuccucgugugucaau

SEQ ID NO: 1427949 - RNA, 19 nt, Homo sapiens
  misc_RNA (1)...(19): siRNA sense strand
ucacuuuucuccuguguaa

SEQ ID NO: 1427950 - RNA, 19 nt, Homo sapiens
  misc_RNA (1)...(19): siRNA sense strand
ggaccugucugcgccaucu

SEQ ID NO: 1427951 - RNA, 19 nt, Homo sapiens
  misc_RNA (1)...(19): siRNA sense strand
cgagaacacgugucaagau

SEQ ID NO: 1427952 - RNA, 19 nt, Homo sapiens
  misc_RNA (1)...(19): siRNA sense strand
gccgguaccuugcacuauc

SEQ ID NO: 1427953 - RNA, 19 nt, Homo sapiens
  misc_RNA (1)...(19): siRNA sense strand
guucagugaucccgagaca

SEQ ID NO: 1427954 - RNA, 19 nt, Homo sapiens
  misc_RNA (1)...(19): siRNA sense strand
cuccaggccucaccuuuau

SEQ ID NO: 1427955 - RNA, 19 nt, Homo sapiens
  misc_RNA (1)...(19): siRNA sense strand
aaccucagcuccccaguua

SEQ ID NO: 1427956 - RNA, 19 nt, Homo sapiens
  misc_RNA (1)...(19): siRNA sense strand
uaugggaaaugguccaaag

SEQ ID NO: 1427957 - RNA, 19 nt, Homo sapiens
  misc_RNA (1)...(19): siRNA sense strand
ucuggugacucucuggauu

SEQ ID NO: 1427958 - RNA, 19 nt, Homo sapiens
  misc_RNA (1)...(19): siRNA sense strand
guccacagccagacgcuuu

SEQ ID NO: 1427959 - RNA, 19 nt, Homo sapiens
  misc_RNA (1)...(19): siRNA sense strand
ccagacgcuuucccgauuc

SEQ ID NO: 1427960 - RNA, 19 nt, Homo sapiens
  misc_RNA (1)...(19): siRNA sense strand
aucaacagauucaugaaga

SEQ ID NO: 1427961 - RNA, 19 nt, Homo sapiens
  misc_RNA (1)...(19): siRNA sense strand
gucaacuacucaagcauca

SEQ ID NO: 1427962 - RNA, 19 nt, Homo sapiens
  misc_RNA (1)...(19): siRNA sense strand
ccucauggcccacuacgau

SEQ ID NO: 1427963 - RNA, 19 nt, Homo sapiens
  misc_RNA (1)...(19): siRNA sense strand
caccauccagagcaucuua

SEQ ID NO: 1427964 - RNA, 19 nt, Homo sapiens
  misc_RNA (1)...(19): siRNA sense strand
cagaauggauguggucacu

SEQ ID NO: 1427965 - RNA, 19 nt, Homo sapiens
  misc_RNA (1)...(19): siRNA sense strand
aaacugagucugagaugca

SEQ ID NO: 1427966 - RNA, 19 nt, Homo sapiens
  misc_RNA (1)...(19): siRNA sense strand
gccuaccucuucaccauca

SEQ ID NO: 1427967 - RNA, 19 nt, Homo sapiens
  misc_RNA (1)...(19): siRNA sense strand
guaccuugcacuaucucua

SEQ ID NO: 1427968 - RNA, 19 nt, Homo sapiens
  misc_RNA (1)...(19): siRNA sense strand
cagcuuugccguccucaug

SEQ ID NO: 1427969 - RNA, 19 nt, Homo sapiens
  misc_RNA (1)...(19): siRNA sense strand
gcagggugucuucaucuuc

SEQ ID NO: 1427970 - RNA, 19 nt, Homo sapiens
  misc_RNA (1)...(19): siRNA sense strand
gcgagaacacgugucaaga

SEQ ID NO: 1427971 - RNA, 19 nt, Homo sapiens
  misc_RNA (1)...(19): siRNA sense strand
caaagggaucaggaaauug

SEQ ID NO: 1427972 - RNA, 19 nt, Homo sapiens
  misc_RNA (1)...(19): siRNA sense strand
caucaacgagugugcaaca

SEQ ID NO: 1427973 - RNA, 19 nt, Homo sapiens
  misc_RNA (1)...(19): siRNA sense strand
ugugaucucugccuuucug

SEQ ID NO: 1427974 - RNA, 19 nt, Homo sapiens
  misc_RNA (1)...(19): siRNA sense strand
agcaagaaccuuuccaaug

SEQ ID NO: 1427975 - RNA, 19 nt, Homo sapiens
  misc_RNA (1)...(19): siRNA sense strand
acaauaggcaccagagaca

SEQ ID NO: 1427976 - RNA, 19 nt, Homo sapiens
  misc_RNA (1)...(19): siRNA sense strand
gccaucuucucugugaauu

SEQ ID NO: 1427977 - RNA, 19 nt, Homo sapiens
  misc_RNA (1)...(19): siRNA sense strand
ccagaaaagggauuuauau

SEQ ID NO: 1427978 - RNA, 19 nt, Homo sapiens
  misc_RNA (1)...(19): siRNA sense strand
guggucaacuacucaagca

SEQ ID NO: 1427979 - RNA, 19 nt, Homo sapiens
  misc_RNA (1)...(19): siRNA sense strand
uggauggccuagaggaugu

SEQ ID NO: 1427980 - RNA, 19 nt, Homo sapiens
  misc_RNA (1)...(19): siRNA sense strand
caacagauucaugaagaag

SEQ ID NO: 1427981 - RNA, 19 nt, Homo sapiens
  misc_RNA (1)...(19): siRNA sense strand
ucaagcaucaacagauuca

SEQ ID NO: 1427982 - RNA, 19 nt, Homo sapiens
  misc_RNA (1)...(19): siRNA sense strand
gaaucaggcacagaaaucu

SEQ ID NO: 1427983 - RNA, 19 nt, Homo sapiens
  misc_RNA (1)...(19): siRNA sense strand
ggaggugcagaagcaagua

SEQ ID NO: 1427984 - RNA, 19 nt, Homo sapiens
  misc_RNA (1)...(19): siRNA sense strand
gcagguccgggagcaauau

SEQ ID NO: 1427985 - RNA, 19 nt, Homo sapiens
  misc_RNA (1)...(19): siRNA sense strand
agucugagaugcacacacu

SEQ ID NO: 1427986 - RNA, 19 nt, Homo sapiens
  misc_RNA (1)...(19): siRNA sense strand
gguccaaagggaucaggaa

SEQ ID NO: 1427987 - RNA, 19 nt, Homo sapiens
  misc_RNA (1)...(19): siRNA sense strand
agaaggugcucugugucuu

SEQ ID NO: 1427988 - RNA, 19 nt, Homo sapiens
  misc_RNA (1)...(19): siRNA sense strand
guccaaagggaucaggaaa

SEQ ID NO: 1427989 - RNA, 19 nt, Homo sapiens
  misc_RNA (1)...(19): siRNA sense strand
gugacucucuggauuuuga

SEQ ID NO: 1427990 - RNA, 19 nt, Homo sapiens
  misc_RNA (1)...(19): siRNA sense strand
caacuacucaagcaucaac

SEQ ID NO: 1427991 - RNA, 19 nt, Homo sapiens
  misc_RNA (1)...(19): siRNA sense strand
ggaccugggcagagacuac

SEQ ID NO: 1427992 - RNA, 19 nt, Homo sapiens
  misc_RNA (1)...(19): siRNA sense strand
uggccuaccucuucaccau

SEQ ID NO: 1427993 - RNA, 19 nt, Homo sapiens
  misc_RNA (1)...(19): siRNA sense strand
gucauggccuaccucuuca

SEQ ID NO: 1427994 - RNA, 19 nt, Homo sapiens
  misc_RNA (1)...(19): siRNA sense strand
ucucgucuuucucgcauuc

SEQ ID NO: 1427995 - RNA, 19 nt, Homo sapiens
  misc_RNA (1)...(19): siRNA sense strand
caucaacagauucaugaag

SEQ ID NO: 1427996 - RNA, 19 nt, Homo sapiens
  misc_RNA (1)...(19): siRNA sense strand
gcaucaacagauucaugaa

SEQ ID NO: 1427997 - RNA, 19 nt, Homo sapiens
  misc_RNA (1)...(19): siRNA sense strand
ucaagaaugagagcgagaa

SEQ ID NO: 1427998 - RNA, 19 nt, Homo sapiens
  misc_RNA (1)...(19): siRNA sense strand
cagacucuccucccucaau

SEQ ID NO: 1427999 - RNA, 19 nt, Homo sapiens
  misc_RNA (1)...(19): siRNA sense strand
aaggugcugugcuccauca

SEQ ID NO: 1428000 - RNA, 19 nt, Homo sapiens
  misc_RNA (1)...(19): siRNA sense strand
cacaggcugcagcacaaua

SEQ ID NO: 1428001 - RNA, 19 nt, Homo sapiens
  misc_RNA (1)...(19): siRNA sense strand
gcaacaacgacacccaaaa

SEQ ID NO: 1428002 - RNA, 19 nt, Homo sapiens
  misc_RNA (1)...(19): siRNA sense strand
gaaaacugagucugagaug

SEQ ID NO: 1428003 - RNA, 19 nt, Homo sapiens
  misc_RNA (1)...(19): siRNA sense strand
cuacucaagcaucaacaga

SEQ ID NO: 1428004 - RNA, 19 nt, Homo sapiens
  misc_RNA (1)...(19): siRNA sense strand
gcaagaaccuuuccaaugg

SEQ ID NO: 1428005 - RNA, 19 nt, Homo sapiens
  misc_RNA (1)...(19): siRNA sense strand
ccaaugggcuguugaacuu

SEQ ID NO: 1428006 - RNA, 19 nt, Homo sapiens
  misc_RNA (1)...(19): siRNA sense strand
caucuucucugugaauuua

SEQ ID NO: 1428007 - RNA, 19 nt, Homo sapiens
  misc_RNA (1)...(19): siRNA sense strand
ccaaagggaucaggaaauu

SEQ ID NO: 1428008 - RNA, 19 nt, Homo sapiens
  misc_RNA (1)...(19): siRNA sense strand
gaauuuaguucucuuucug

SEQ ID NO: 1428009 - RNA, 19 nt, Homo sapiens
  misc_RNA (1)...(19): siRNA sense strand
gugcaacacugucgaaagu

SEQ ID NO: 1428010 - RNA, 19 nt, Homo sapiens
  misc_RNA (1)...(19): siRNA sense strand
gccagacgcuuucccgauu

SEQ ID NO: 1428011 - RNA, 19 nt, Homo sapiens
  misc_RNA (1)...(19): siRNA sense strand
ggucauggccuaccucuuc

SEQ ID NO: 1428012 - RNA, 19 nt, Homo sapiens
  misc_RNA (1)...(19): siRNA sense strand
gaugugaucucugccuuuc

SEQ ID NO: 1428013 - RNA, 19 nt, Homo sapiens
  misc_RNA (1)...(19): siRNA sense strand
ggaaucaggcacagaaauc

SEQ ID NO: 1428014 - RNA, 19 nt, Homo sapiens
  misc_RNA (1)...(19): siRNA sense strand
ccaguuaccuucaccuucu

SEQ ID NO: 1428015 - RNA, 19 nt, Homo sapiens
  misc_RNA (1)...(19): siRNA sense strand
ugaugcagcucgacuggaa

SEQ ID NO: 1428016 - RNA, 19 nt, Homo sapiens
  misc_RNA (1)...(19): siRNA sense strand
aaagggaucaggaaauuga

SEQ ID NO: 1428017 - RNA, 19 nt, Homo sapiens
  misc_RNA (1)...(19): siRNA sense strand
agacucuccucccucaaua

SEQ ID NO: 1428018 - RNA, 19 nt, Homo sapiens
  misc_RNA (1)...(19): siRNA sense strand
gagcauggccagaauggau

SEQ ID NO: 1428019 - RNA, 19 nt, Homo sapiens
  misc_RNA (1)...(19): siRNA sense strand
ucaacagauucaugaagaa

SEQ ID NO: 1428020 - RNA, 19 nt, Homo sapiens
  misc_RNA (1)...(19): siRNA sense strand
ggagcaauaugggaaaugg

SEQ ID NO: 1428021 - RNA, 19 nt, Homo sapiens
  misc_RNA (1)...(19): siRNA sense strand
acucaagcaucaacagauu

SEQ ID NO: 1428022 - RNA, 19 nt, Homo sapiens
  misc_RNA (1)...(19): siRNA sense strand
guaaagccauccagaacac

SEQ ID NO: 1428023 - RNA, 19 nt, Homo sapiens
  misc_RNA (1)...(19): siRNA sense strand
gagcaagaaccuuuccaau

SEQ ID NO: 1428024 - RNA, 19 nt, Homo sapiens
  misc_RNA (1)...(19): siRNA sense strand
gaaagugucaugcggaaaa

SEQ ID NO: 1428025 - RNA, 19 nt, Homo sapiens
  misc_RNA (1)...(19): siRNA sense strand
gcacccaccugagcagcuu

SEQ ID NO: 1428026 - RNA, 19 nt, Homo sapiens
  misc_RNA (1)...(19): siRNA sense strand
ucagugaucccgagacaga

SEQ ID NO: 1428027 - RNA, 19 nt, Homo sapiens
  misc_RNA (1)...(19): siRNA sense strand
ccuccaggccucaccuuua

SEQ ID NO: 1428028 - RNA, 19 nt, Homo sapiens
  misc_RNA (1)...(19): siRNA sense strand
ucuccucccucaauaguga

SEQ ID NO: 1428029 - RNA, 19 nt, Homo sapiens
  misc_RNA (1)...(19): siRNA sense strand
ggagacuugugacgacauc

SEQ ID NO: 1428030 - RNA, 19 nt, Homo sapiens
  misc_RNA (1)...(19): siRNA sense strand
ccgcgucuuucucgucuuu

SEQ ID NO: 1428031 - RNA, 19 nt, Homo sapiens
  misc_RNA (1)...(19): siRNA sense strand
ggccugagcaagaaccuuu

SEQ ID NO: 1428032 - RNA, 19 nt, Homo sapiens
  misc_RNA (1)...(19): siRNA sense strand
gcacaauaggcaccagaga

SEQ ID NO: 1428033 - RNA, 19 nt, Homo sapiens
  misc_RNA (1)...(19): siRNA sense strand
ggacuccucgugugucaau

SEQ ID NO: 1428034 - RNA, 19 nt, Homo sapiens
  misc_RNA (1)...(19): siRNA sense strand
ucacuuuucuccuguguaa

SEQ ID NO: 1428035 - RNA, 19 nt, Homo sapiens
  misc_RNA (1)...(19): siRNA sense strand
ggaccugucugcgccaucu

SEQ ID NO: 1428036 - RNA, 19 nt, Homo sapiens
  misc_RNA (1)...(19): siRNA sense strand
cgagaacacgugucaagau

SEQ ID NO: 1428037 - RNA, 19 nt, Homo sapiens
  misc_RNA (1)...(19): siRNA sense strand
gccgguaccuugcacuauc

SEQ ID NO: 1428038 - RNA, 19 nt, Homo sapiens
  misc_RNA (1)...(19): siRNA sense strand
guucagugaucccgagaca

SEQ ID NO: 1428039 - RNA, 19 nt, Homo sapiens
  misc_RNA (1)...(19): siRNA sense strand
cuccaggccucaccuuuau

SEQ ID NO: 1428040 - RNA, 19 nt, Homo sapiens
  misc_RNA (1)...(19): siRNA sense strand
aaccucagcuccccaguua

SEQ ID NO: 1428041 - RNA, 19 nt, Homo sapiens
  misc_RNA (1)...(19): siRNA sense strand
uaugggaaaugguccaaag

SEQ ID NO: 1428042 - RNA, 19 nt, Homo sapiens
  misc_RNA (1)...(19): siRNA sense strand
ucuggugacucucuggauu

SEQ ID NO: 1428043 - RNA, 19 nt, Homo sapiens
  misc_RNA (1)...(19): siRNA sense strand
guccacagccagacgcuuu

SEQ ID NO: 1428044 - RNA, 19 nt, Homo sapiens
  misc_RNA (1)...(19): siRNA sense strand
ccagacgcuuucccgauuc

SEQ ID NO: 1428045 - RNA, 19 nt, Homo sapiens
  misc_RNA (1)...(19): siRNA sense strand
aucaacagauucaugaaga

SEQ ID NO: 1428046 - RNA, 19 nt, Homo sapiens
  misc_RNA (1)...(19): siRNA sense strand
gucaacuacucaagcauca

SEQ ID NO: 1428047 - RNA, 19 nt, Homo sapiens
  misc_RNA (1)...(19): siRNA sense strand
ccucauggcccacuacgau

SEQ ID NO: 1428048 - RNA, 19 nt, Homo sapiens
  misc_RNA (1)...(19): siRNA sense strand
caccauccagagcaucuua

SEQ ID NO: 1428049 - RNA, 19 nt, Homo sapiens
  misc_RNA (1)...(19): siRNA sense strand
cagaauggauguggucacu

SEQ ID NO: 1428050 - RNA, 19 nt, Homo sapiens
  misc_RNA (1)...(19): siRNA sense strand
aaacugagucugagaugca

SEQ ID NO: 1428051 - RNA, 19 nt, Homo sapiens
  misc_RNA (1)...(19): siRNA sense strand
gccuaccucuucaccauca

SEQ ID NO: 1428052 - RNA, 19 nt, Homo sapiens
  misc_RNA (1)...(19): siRNA sense strand
guaccuugcacuaucucua

SEQ ID NO: 1428053 - RNA, 19 nt, Homo sapiens
  misc_RNA (1)...(19): siRNA sense strand
cagcuuugccguccucaug

SEQ ID NO: 1428054 - RNA, 19 nt, Homo sapiens
  misc_RNA (1)...(19): siRNA sense strand
gcagggugucuucaucuuc

SEQ ID NO: 1428055 - RNA, 19 nt, Homo sapiens
  misc_RNA (1)...(19): siRNA sense strand
gcgagaacacgugucaaga

SEQ ID NO: 1428056 - RNA, 19 nt, Homo sapiens
  misc_RNA (1)...(19): siRNA sense strand
caaagggaucaggaaauug

SEQ ID NO: 1428057 - RNA, 19 nt, Homo sapiens
  misc_RNA (1)...(19): siRNA sense strand
caucaacgagugugcaaca

SEQ ID NO: 1428058 - RNA, 19 nt, Homo sapiens
  misc_RNA (1)...(19): siRNA sense strand
ugugaucucugccuuucug

SEQ ID NO: 1428059 - RNA, 19 nt, Homo sapiens
  misc_RNA (1)...(19): siRNA sense strand
agcaagaaccuuuccaaug

SEQ ID NO: 1428060 - RNA, 19 nt, Homo sapiens
  misc_RNA (1)...(19): siRNA sense strand
acaauaggcaccagagaca

SEQ ID NO: 1428061 - RNA, 19 nt, Homo sapiens
  misc_RNA (1)...(19): siRNA sense strand
gccaucuucucugugaauu

SEQ ID NO: 1428062 - RNA, 19 nt, Homo sapiens
  misc_RNA (1)...(19): siRNA sense strand
ccagaaaagggauuuauau

SEQ ID NO: 1428063 - RNA, 19 nt, Homo sapiens
  misc_RNA (1)...(19): siRNA sense strand
guggucaacuacucaagca

SEQ ID NO: 1428064 - RNA, 19 nt, Homo sapiens
  misc_RNA (1)...(19): siRNA sense strand
uggauggccuagaggaugu

SEQ ID NO: 1428065 - RNA, 19 nt, Homo sapiens
  misc_RNA (1)...(19): siRNA sense strand
caacagauucaugaagaag

SEQ ID NO: 1428066 - RNA, 19 nt, Homo sapiens
  misc_RNA (1)...(19): siRNA sense strand
ucaagcaucaacagauuca

SEQ ID NO: 1428067 - RNA, 19 nt, Homo sapiens
  misc_RNA (1)...(19): siRNA sense strand
gaaucaggcacagaaaucu

SEQ ID NO: 1428068 - RNA, 19 nt, Homo sapiens
  misc_RNA (1)...(19): siRNA sense strand
ggaggugcagaagcaagua

SEQ ID NO: 1428069 - RNA, 19 nt, Homo sapiens
  misc_RNA (1)...(19): siRNA sense strand
gcagguccgggagcaauau

SEQ ID NO: 1428070 - RNA, 19 nt, Homo sapiens
  misc_RNA (1)...(19): siRNA sense strand
agucugagaugcacacacu

SEQ ID NO: 1428071 - RNA, 19 nt, Homo sapiens
  misc_RNA (1)...(19): siRNA sense strand
gguccaaagggaucaggaa

SEQ ID NO: 1428072 - RNA, 19 nt, Homo sapiens
  misc_RNA (1)...(19): siRNA sense strand
agaaggugcucugugucuu

SEQ ID NO: 1428073 - RNA, 19 nt, Homo sapiens
  misc_RNA (1)...(19): siRNA sense strand
guccaaagggaucaggaaa

SEQ ID NO: 1428074 - RNA, 19 nt, Homo sapiens
  misc_RNA (1)...(19): siRNA sense strand
gugacucucuggauuuuga

SEQ ID NO: 1428075 - RNA, 19 nt, Homo sapiens
  misc_RNA (1)...(19): siRNA sense strand
caacuacucaagcaucaac

SEQ ID NO: 1428076 - RNA, 19 nt, Homo sapiens
  misc_RNA (1)...(19): siRNA sense strand
ggaccugggcagagacuac

SEQ ID NO: 1428077 - RNA, 19 nt, Homo sapiens
  misc_RNA (1)...(19): siRNA sense strand
uggccuaccucuucaccau

SEQ ID NO: 1428078 - RNA, 19 nt, Homo sapiens
  misc_RNA (1)...(19): siRNA sense strand
gucauggccuaccucuuca

SEQ ID NO: 1428079 - RNA, 19 nt, Homo sapiens
  misc_RNA (1)...(19): siRNA sense strand
ucucgucuuucucgcauuc

SEQ ID NO: 1428080 - RNA, 19 nt, Homo sapiens
  misc_RNA (1)...(19): siRNA sense strand
caucaacagauucaugaag

SEQ ID NO: 1428081 - RNA, 19 nt, Homo sapiens
  misc_RNA (1)...(19): siRNA sense strand
gcaucaacagauucaugaa

SEQ ID NO: 1428082 - RNA, 19 nt, Homo sapiens
  misc_RNA (1)...(19): siRNA sense strand
ucaagaaugagagcgagaa

SEQ ID NO: 1428083 - RNA, 19 nt, Homo sapiens
  misc_RNA (1)...(19): siRNA sense strand
cagacucuccucccucaau

SEQ ID NO: 1428084 - RNA, 19 nt, Homo sapiens
  misc_RNA (1)...(19): siRNA sense strand
aaggugcugugcuccauca

SEQ ID NO: 1428085 - RNA, 19 nt, Homo sapiens
  misc_RNA (1)...(19): siRNA sense strand
cacaggcugcagcacaaua

SEQ ID NO: 1428086 - RNA, 19 nt, Homo sapiens
  misc_RNA (1)...(19): siRNA sense strand
gcaacaacgacacccaaaa

SEQ ID NO: 1428087 - RNA, 19 nt, Homo sapiens
  misc_RNA (1)...(19): siRNA sense strand
gaaaacugagucugagaug

SEQ ID NO: 1428088 - RNA, 19 nt, Homo sapiens
  misc_RNA (1)...(19): siRNA sense strand
cuacucaagcaucaacaga

SEQ ID NO: 1428089 - RNA, 19 nt, Homo sapiens
  misc_RNA (1)...(19): siRNA sense strand
gcaagaaccuuuccaaugg

SEQ ID NO: 1428090 - RNA, 19 nt, Homo sapiens
  misc_RNA (1)...(19): siRNA sense strand
ccaaugggcuguugaacuu

SEQ ID NO: 1428091 - RNA, 19 nt, Homo sapiens
  misc_RNA (1)...(19): siRNA sense strand
caucuucucugugaauuua

SEQ ID NO: 1428092 - RNA, 19 nt, Homo sapiens
  misc_RNA (1)...(19): siRNA sense strand
ccaaagggaucaggaaauu

SEQ ID NO: 1428093 - RNA, 19 nt, Homo sapiens
  misc_RNA (1)...(19): siRNA sense strand
gaauuuaguucucuuucug

SEQ ID NO: 1428094 - RNA, 19 nt, Homo sapiens
  misc_RNA (1)...(19): siRNA sense strand
gugcaacacugucgaaagu

SEQ ID NO: 1428095 - RNA, 19 nt, Homo sapiens
  misc_RNA (1)...(19): siRNA sense strand
gccagacgcuuucccgauu

SEQ ID NO: 1428096 - RNA, 19 nt, Homo sapiens
  misc_RNA (1)...(19): siRNA sense strand
ggucauggccuaccucuuc

SEQ ID NO: 1428097 - RNA, 19 nt, Homo sapiens
  misc_RNA (1)...(19): siRNA sense strand
gaugugaucucugccuuuc

SEQ ID NO: 1428098 - RNA, 19 nt, Homo sapiens
  misc_RNA (1)...(19): siRNA sense strand
ggaaucaggcacagaaauc

SEQ ID NO: 1428099 - RNA, 19 nt, Homo sapiens
  misc_RNA (1)...(19): siRNA sense strand
ccaguuaccuucaccuucu

SEQ ID NO: 1428100 - RNA, 19 nt, Homo sapiens
  misc_RNA (1)...(19): siRNA sense strand
ugaugcagcucgacuggaa

SEQ ID NO: 1428101 - RNA, 19 nt, Homo sapiens
  misc_RNA (1)...(19): siRNA sense strand
aaagggaucaggaaauuga

SEQ ID NO: 1428102 - RNA, 19 nt, Homo sapiens
  misc_RNA (1)...(19): siRNA sense strand
agacucuccucccucaaua

SEQ ID NO: 1428103 - RNA, 19 nt, Homo sapiens
  misc_RNA (1)...(19): siRNA sense strand
gagcauggccagaauggau

SEQ ID NO: 1428104 - RNA, 19 nt, Homo sapiens
  misc_RNA (1)...(19): siRNA sense strand
ucaacagauucaugaagaa

SEQ ID NO: 1428105 - RNA, 19 nt, Homo sapiens
  misc_RNA (1)...(19): siRNA sense strand
ggagcaauaugggaaaugg

SEQ ID NO: 1428106 - RNA, 19 nt, Homo sapiens
  misc_RNA (1)...(19): siRNA sense strand
acucaagcaucaacagauu

SEQ ID NO: 1428107 - RNA, 19 nt, Homo sapiens
  misc_RNA (1)...(19): siRNA sense strand
guaaagccauccagaacac

SEQ ID NO: 1428108 - RNA, 19 nt, Homo sapiens
  misc_RNA (1)...(19): siRNA sense strand
gagcaagaaccuuuccaau

SEQ ID NO: 1428109 - RNA, 19 nt, Homo sapiens
  misc_RNA (1)...(19): siRNA sense strand
gaaagugucaugcggaaaa

SEQ ID NO: 1428110 - RNA, 19 nt, Homo sapiens
  misc_RNA (1)...(19): siRNA sense strand
gcacccaccugagcagcuu

SEQ ID NO: 1428111 - RNA, 19 nt, Homo sapiens
  misc_RNA (1)...(19): siRNA sense strand
ucagugaucccgagacaga

SEQ ID NO: 1428112 - RNA, 19 nt, Homo sapiens
  misc_RNA (1)...(19): siRNA sense strand
ccuccaggccucaccuuua

SEQ ID NO: 1428113 - RNA, 19 nt, Homo sapiens
  misc_RNA (1)...(19): siRNA sense strand
ucuccucccucaauaguga

SEQ ID NO: 1428114 - RNA, 19 nt, Homo sapiens
  misc_RNA (1)...(19): siRNA sense strand
ggagacuugugacgacauc

SEQ ID NO: 1428115 - RNA, 19 nt, Homo sapiens
  misc_RNA (1)...(19): siRNA sense strand
ccgcgucuuucucgucuuu

SEQ ID NO: 1428116 - RNA, 19 nt, Homo sapiens
  misc_RNA (1)...(19): siRNA sense strand
ggccugagcaagaaccuuu

SEQ ID NO: 1428117 - RNA, 19 nt, Homo sapiens
  misc_RNA (1)...(19): siRNA sense strand
gcacaauaggcaccagaga

SEQ ID NO: 1428118 - RNA, 19 nt, Homo sapiens
  misc_RNA (1)...(19): siRNA sense strand
ggacuccucgugugucaau

SEQ ID NO: 1428119 - RNA, 19 nt, Homo sapiens
  misc_RNA (1)...(19): siRNA sense strand
ucacuuuucuccuguguaa

SEQ ID NO: 1428120 - RNA, 19 nt, Homo sapiens
  misc_RNA (1)...(19): siRNA sense strand
ggaccugucugcgccaucu

SEQ ID NO: 1428121 - RNA, 19 nt, Homo sapiens
  misc_RNA (1)...(19): siRNA sense strand
cgagaacacgugucaagau

SEQ ID NO: 1428122 - RNA, 19 nt, Homo sapiens
  misc_RNA (1)...(19): siRNA sense strand
gccgguaccuugcacuauc

SEQ ID NO: 1428123 - RNA, 19 nt, Homo sapiens
  misc_RNA (1)...(19): siRNA sense strand
guucagugaucccgagaca

SEQ ID NO: 1428124 - RNA, 19 nt, Homo sapiens
  misc_RNA (1)...(19): siRNA sense strand
cuccaggccucaccuuuau

SEQ ID NO: 1428125 - RNA, 19 nt, Homo sapiens
  misc_RNA (1)...(19): siRNA sense strand
aaccucagcuccccaguua

SEQ ID NO: 1428126 - RNA, 19 nt, Homo sapiens
  misc_RNA (1)...(19): siRNA sense strand
uaugggaaaugguccaaag

SEQ ID NO: 1428127 - RNA, 19 nt, Homo sapiens
  misc_RNA (1)...(19): siRNA sense strand
ucuggugacucucuggauu

SEQ ID NO: 1428128 - RNA, 19 nt, Homo sapiens
  misc_RNA (1)...(19): siRNA sense strand
guccacagccagacgcuuu

SEQ ID NO: 1428129 - RNA, 19 nt, Homo sapiens
  misc_RNA (1)...(19): siRNA sense strand
ccagacgcuuucccgauuc

SEQ ID NO: 1428130 - RNA, 19 nt, Homo sapiens
  misc_RNA (1)...(19): siRNA sense strand
aucaacagauucaugaaga

SEQ ID NO: 1428131 - RNA, 19 nt, Homo sapiens
  misc_RNA (1)...(19): siRNA sense strand
gucaacuacucaagcauca

SEQ ID NO: 1428132 - RNA, 19 nt, Homo sapiens
  misc_RNA (1)...(19): siRNA sense strand
ccucauggcccacuacgau

SEQ ID NO: 1428133 - RNA, 19 nt, Homo sapiens
  misc_RNA (1)...(19): siRNA sense strand
caccauccagagcaucuua

SEQ ID NO: 1428134 - RNA, 19 nt, Homo sapiens
  misc_RNA (1)...(19): siRNA sense strand
cagaauggauguggucacu

SEQ ID NO: 1428135 - RNA, 19 nt, Homo sapiens
  misc_RNA (1)...(19): siRNA sense strand
aaacugagucugagaugca

SEQ ID NO: 1428136 - RNA, 19 nt, Homo sapiens
  misc_RNA (1)...(19): siRNA sense strand
gccuaccucuucaccauca

SEQ ID NO: 1428137 - RNA, 19 nt, Homo sapiens
  misc_RNA (1)...(19): siRNA sense strand
guaccuugcacuaucucua

SEQ ID NO: 1428138 - RNA, 19 nt, Homo sapiens
  misc_RNA (1)...(19): siRNA sense strand
cagcuuugccguccucaug

SEQ ID NO: 1428139 - RNA, 19 nt, Homo sapiens
  misc_RNA (1)...(19): siRNA sense strand
gcagggugucuucaucuuc

SEQ ID NO: 1428140 - RNA, 19 nt, Homo sapiens
  misc_RNA (1)...(19): siRNA sense strand
gcgagaacacgugucaaga

SEQ ID NO: 1428141 - RNA, 19 nt, Homo sapiens
  misc_RNA (1)...(19): siRNA sense strand
caaagggaucaggaaauug

SEQ ID NO: 1428142 - RNA, 19 nt, Homo sapiens
  misc_RNA (1)...(19): siRNA sense strand
caucaacgagugugcaaca

SEQ ID NO: 1428143 - RNA, 19 nt, Homo sapiens
  misc_RNA (1)...(19): siRNA sense strand
ugugaucucugccuuucug

SEQ ID NO: 1428144 - RNA, 19 nt, Homo sapiens
  misc_RNA (1)...(19): siRNA sense strand
agcaagaaccuuuccaaug

SEQ ID NO: 1428145 - RNA, 19 nt, Homo sapiens
  misc_RNA (1)...(19): siRNA sense strand
acaauaggcaccagagaca

SEQ ID NO: 1428146 - RNA, 19 nt, Homo sapiens
  misc_RNA (1)...(19): siRNA sense strand
gccaucuucucugugaauu

SEQ ID NO: 1428147 - RNA, 19 nt, Homo sapiens
  misc_RNA (1)...(19): siRNA sense strand
ccagaaaagggauuuauau

SEQ ID NO: 1428148 - RNA, 19 nt, Homo sapiens
  misc_RNA (1)...(19): siRNA sense strand
guggucaacuacucaagca

SEQ ID NO: 1428149 - RNA, 19 nt, Homo sapiens
  misc_RNA (1)...(19): siRNA sense strand
uggauggccuagaggaugu

SEQ ID NO: 1428150 - RNA, 19 nt, Homo sapiens
  misc_RNA (1)...(19): siRNA sense strand
caacagauucaugaagaag

SEQ ID NO: 1428151 - RNA, 19 nt, Homo sapiens
  misc_RNA (1)...(19): siRNA sense strand
ucaagcaucaacagauuca

SEQ ID NO: 1428152 - RNA, 19 nt, Homo sapiens
  misc_RNA (1)...(19): siRNA sense strand
gaaucaggcacagaaaucu

SEQ ID NO: 1428153 - RNA, 19 nt, Homo sapiens
  misc_RNA (1)...(19): siRNA sense strand
ggaggugcagaagcaagua

SEQ ID NO: 1428154 - RNA, 19 nt, Homo sapiens
  misc_RNA (1)...(19): siRNA sense strand
gcagguccgggagcaauau

SEQ ID NO: 1428155 - RNA, 19 nt, Homo sapiens
  misc_RNA (1)...(19): siRNA sense strand
agucugagaugcacacacu

SEQ ID NO: 1428156 - RNA, 19 nt, Homo sapiens
  misc_RNA (1)...(19): siRNA sense strand
gguccaaagggaucaggaa

SEQ ID NO: 1428157 - RNA, 19 nt, Homo sapiens
  misc_RNA (1)...(19): siRNA sense strand
agaaggugcucugugucuu

SEQ ID NO: 1428158 - RNA, 19 nt, Homo sapiens
  misc_RNA (1)...(19): siRNA sense strand
guccaaagggaucaggaaa

SEQ ID NO: 1428159 - RNA, 19 nt, Homo sapiens
  misc_RNA (1)...(19): siRNA sense strand
gugacucucuggauuuuga

SEQ ID NO: 1428160 - RNA, 19 nt, Homo sapiens
  misc_RNA (1)...(19): siRNA sense strand
caacuacucaagcaucaac

SEQ ID NO: 1428161 - RNA, 19 nt, Homo sapiens
  misc_RNA (1)...(19): siRNA sense strand
ggaccugggcagagacuac

SEQ ID NO: 1428162 - RNA, 19 nt, Homo sapiens
  misc_RNA (1)...(19): siRNA sense strand
uggccuaccucuucaccau

SEQ ID NO: 1428163 - RNA, 19 nt, Homo sapiens
  misc_RNA (1)...(19): siRNA sense strand
gucauggccuaccucuuca

SEQ ID NO: 1428164 - RNA, 19 nt, Homo sapiens
  misc_RNA (1)...(19): siRNA sense strand
ucucgucuuucucgcauuc

SEQ ID NO: 1428165 - RNA, 19 nt, Homo sapiens
  misc_RNA (1)...(19): siRNA sense strand
caucaacagauucaugaag

SEQ ID NO: 1428166 - RNA, 19 nt, Homo sapiens
  misc_RNA (1)...(19): siRNA sense strand
gcaucaacagauucaugaa

SEQ ID NO: 1428167 - RNA, 19 nt, Homo sapiens
  misc_RNA (1)...(19): siRNA sense strand
ucaagaaugagagcgagaa

SEQ ID NO: 1428168 - RNA, 19 nt, Homo sapiens
  misc_RNA (1)...(19): siRNA sense strand
cagacucuccucccucaau

SEQ ID NO: 1428169 - RNA, 19 nt, Homo sapiens
  misc_RNA (1)...(19): siRNA sense strand
aaggugcugugcuccauca

SEQ ID NO: 1428170 - RNA, 19 nt, Homo sapiens
  misc_RNA (1)...(19): siRNA sense strand
cacaggcugcagcacaaua

SEQ ID NO: 1428171 - RNA, 19 nt, Homo sapiens
  misc_RNA (1)...(19): siRNA sense strand
gcaacaacgacacccaaaa

SEQ ID NO: 1428172 - RNA, 19 nt, Homo sapiens
  misc_RNA (1)...(19): siRNA sense strand
gaaaacugagucugagaug

SEQ ID NO: 1428173 - RNA, 19 nt, Homo sapiens
  misc_RNA (1)...(19): siRNA sense strand
cuacucaagcaucaacaga

SEQ ID NO: 1428174 - RNA, 19 nt, Homo sapiens
  misc_RNA (1)...(19): siRNA sense strand
gcaagaaccuuuccaaugg

SEQ ID NO: 1428175 - RNA, 19 nt, Homo sapiens
  misc_RNA (1)...(19): siRNA sense strand
ccaaugggcuguugaacuu

SEQ ID NO: 1428176 - RNA, 19 nt, Homo sapiens
  misc_RNA (1)...(19): siRNA sense strand
caucuucucugugaauuua

SEQ ID NO: 1428177 - RNA, 19 nt, Homo sapiens
  misc_RNA (1)...(19): siRNA sense strand
ccaaagggaucaggaaauu

SEQ ID NO: 1428178 - RNA, 19 nt, Homo sapiens
  misc_RNA (1)...(19): siRNA sense strand
gaauuuaguucucuuucug

SEQ ID NO: 1428179 - RNA, 19 nt, Homo sapiens
  misc_RNA (1)...(19): siRNA sense strand
gugcaacacugucgaaagu

SEQ ID NO: 1428180 - RNA, 19 nt, Homo sapiens
  misc_RNA (1)...(19): siRNA sense strand
gccagacgcuuucccgauu

SEQ ID NO: 1428181 - RNA, 19 nt, Homo sapiens
  misc_RNA (1)...(19): siRNA sense strand
ggucauggccuaccucuuc

SEQ ID NO: 1428182 - RNA, 19 nt, Homo sapiens
  misc_RNA (1)...(19): siRNA sense strand
gaugugaucucugccuuuc

SEQ ID NO: 1428183 - RNA, 19 nt, Homo sapiens
  misc_RNA (1)...(19): siRNA sense strand
ggaaucaggcacagaaauc

SEQ ID NO: 1428184 - RNA, 19 nt, Homo sapiens
  misc_RNA (1)...(19): siRNA sense strand
ccaguuaccuucaccuucu

SEQ ID NO: 1428185 - RNA, 19 nt, Homo sapiens
  misc_RNA (1)...(19): siRNA sense strand
ugaugcagcucgacuggaa

SEQ ID NO: 1428186 - RNA, 19 nt, Homo sapiens
  misc_RNA (1)...(19): siRNA sense strand
aaagggaucaggaaauuga

SEQ ID NO: 1428187 - RNA, 19 nt, Homo sapiens
  misc_RNA (1)...(19): siRNA sense strand
agacucuccucccucaaua

SEQ ID NO: 1428188 - RNA, 19 nt, Homo sapiens
  misc_RNA (1)...(19): siRNA sense strand
gagcauggccagaauggau

SEQ ID NO: 1428189 - RNA, 19 nt, Homo sapiens
  misc_RNA (1)...(19): siRNA sense strand
ucaacagauucaugaagaa

SEQ ID NO: 1428190 - RNA, 19 nt, Homo sapiens
  misc_RNA (1)...(19): siRNA sense strand
ggagcaauaugggaaaugg

SEQ ID NO: 1428191 - RNA, 19 nt, Homo sapiens
  misc_RNA (1)...(19): siRNA sense strand
acucaagcaucaacagauu

SEQ ID NO: 1428192 - RNA, 19 nt, Homo sapiens
  misc_RNA (1)...(19): siRNA sense strand
guaaagccauccagaacac

SEQ ID NO: 1428193 - RNA, 19 nt, Homo sapiens
  misc_RNA (1)...(19): siRNA sense strand
gagcaagaaccuuuccaau

SEQ ID NO: 1428194 - RNA, 19 nt, Homo sapiens
  misc_RNA (1)...(19): siRNA sense strand
gaaagugucaugcggaaaa

SEQ ID NO: 1428195 - RNA, 19 nt, Homo sapiens
  misc_RNA (1)...(19): siRNA sense strand
gcacccaccugagcagcuu

SEQ ID NO: 1428196 - RNA, 19 nt, Homo sapiens
  misc_RNA (1)...(19): siRNA sense strand
ucagugaucccgagacaga

SEQ ID NO: 1428197 - RNA, 19 nt, Homo sapiens
  misc_RNA (1)...(19): siRNA sense strand
ccuccaggccucaccuuua

SEQ ID NO: 1428198 - RNA, 19 nt, Homo sapiens
  misc_RNA (1)...(19): siRNA sense strand
ucuccucccucaauaguga

SEQ ID NO: 1428199 - RNA, 19 nt, Homo sapiens
  misc_RNA (1)...(19): siRNA sense strand
ggagacuugugacgacauc

SEQ ID NO: 1428200 - RNA, 19 nt, Homo sapiens
  misc_RNA (1)...(19): siRNA sense strand
ccgcgucuuucucgucuuu

SEQ ID NO: 1428201 - RNA, 19 nt, Homo sapiens
  misc_RNA (1)...(19): siRNA sense strand
ggccugagcaagaaccuuu

SEQ ID NO: 1428202 - RNA, 19 nt, Homo sapiens
  misc_RNA (1)...(19): siRNA sense strand
gcacaauaggcaccagaga

SEQ ID NO: 1428203 - RNA, 19 nt, Homo sapiens
  misc_RNA (1)...(19): siRNA sense strand
ggacuccucgugugucaau

SEQ ID NO: 1428204 - RNA, 19 nt, Homo sapiens
  misc_RNA (1)...(19): siRNA sense strand
ucacuuuucuccuguguaa

SEQ ID NO: 1428205 - RNA, 19 nt, Homo sapiens
  misc_RNA (1)...(19): siRNA sense strand
ggaccugucugcgccaucu

SEQ ID NO: 1428206 - RNA, 19 nt, Homo sapiens
  misc_RNA (1)...(19): siRNA sense strand
cgagaacacgugucaagau

SEQ ID NO: 1428207 - RNA, 19 nt, Homo sapiens
  misc_RNA (1)...(19): siRNA sense strand
gccgguaccuugcacuauc

SEQ ID NO: 1428208 - RNA, 19 nt, Homo sapiens
  misc_RNA (1)...(19): siRNA sense strand
guucagugaucccgagaca

SEQ ID NO: 1428209 - RNA, 19 nt, Homo sapiens
  misc_RNA (1)...(19): siRNA sense strand
cuccaggccucaccuuuau

SEQ ID NO: 1428210 - RNA, 19 nt, Homo sapiens
  misc_RNA (1)...(19): siRNA sense strand
aaccucagcuccccaguua

SEQ ID NO: 1428211 - RNA, 19 nt, Homo sapiens
  misc_RNA (1)...(19): siRNA sense strand
uaugggaaaugguccaaag

SEQ ID NO: 1428212 - RNA, 19 nt, Homo sapiens
  misc_RNA (1)...(19): siRNA sense strand
ucuggugacucucuggauu

SEQ ID NO: 1428213 - RNA, 19 nt, Homo sapiens
  misc_RNA (1)...(19): siRNA sense strand
guccacagccagacgcuuu

SEQ ID NO: 1428214 - RNA, 19 nt, Homo sapiens
  misc_RNA (1)...(19): siRNA sense strand
ccagacgcuuucccgauuc

SEQ ID NO: 1428215 - RNA, 19 nt, Homo sapiens
  misc_RNA (1)...(19): siRNA sense strand
aucaacagauucaugaaga

SEQ ID NO: 1428216 - RNA, 19 nt, Homo sapiens
  misc_RNA (1)...(19): siRNA sense strand
gucaacuacucaagcauca

SEQ ID NO: 1428217 - RNA, 19 nt, Homo sapiens
  misc_RNA (1)...(19): siRNA sense strand
ccucauggcccacuacgau

SEQ ID NO: 1428218 - RNA, 19 nt, Homo sapiens
  misc_RNA (1)...(19): siRNA sense strand
caccauccagagcaucuua

SEQ ID NO: 1428219 - RNA, 19 nt, Homo sapiens
  misc_RNA (1)...(19): siRNA sense strand
cagaauggauguggucacu

SEQ ID NO: 1428220 - RNA, 19 nt, Homo sapiens
  misc_RNA (1)...(19): siRNA sense strand
aaacugagucugagaugca

SEQ ID NO: 1428221 - RNA, 19 nt, Homo sapiens
  misc_RNA (1)...(19): siRNA sense strand
gccuaccucuucaccauca

SEQ ID NO: 1428222 - RNA, 19 nt, Homo sapiens
  misc_RNA (1)...(19): siRNA sense strand
guaccuugcacuaucucua

SEQ ID NO: 1428223 - RNA, 19 nt, Homo sapiens
  misc_RNA (1)...(19): siRNA sense strand
cagcuuugccguccucaug

SEQ ID NO: 1428224 - RNA, 19 nt, Homo sapiens
  misc_RNA (1)...(19): siRNA sense strand
gcagggugucuucaucuuc

SEQ ID NO: 1428225 - RNA, 19 nt, Homo sapiens
  misc_RNA (1)...(19): siRNA sense strand
gcgagaacacgugucaaga

SEQ ID NO: 1428226 - RNA, 19 nt, Homo sapiens
  misc_RNA (1)...(19): siRNA sense strand
caaagggaucaggaaauug

SEQ ID NO: 1428227 - RNA, 19 nt, Homo sapiens
  misc_RNA (1)...(19): siRNA sense strand
caucaacgagugugcaaca

SEQ ID NO: 1428228 - RNA, 19 nt, Homo sapiens
  misc_RNA (1)...(19): siRNA sense strand
ugugaucucugccuuucug

SEQ ID NO: 1428229 - RNA, 19 nt, Homo sapiens
  misc_RNA (1)...(19): siRNA sense strand
agcaagaaccuuuccaaug

SEQ ID NO: 1428230 - RNA, 19 nt, Homo sapiens
  misc_RNA (1)...(19): siRNA sense strand
acaauaggcaccagagaca

SEQ ID NO: 1428231 - RNA, 19 nt, Homo sapiens
  misc_RNA (1)...(19): siRNA sense strand
gccaucuucucugugaauu

SEQ ID NO: 1428232 - RNA, 19 nt, Homo sapiens
  misc_RNA (1)...(19): siRNA sense strand
ccagaaaagggauuuauau

SEQ ID NO: 1428233 - RNA, 19 nt, Homo sapiens
  misc_RNA (1)...(19): siRNA sense strand
guggucaacuacucaagca

SEQ ID NO: 1428234 - RNA, 19 nt, Homo sapiens
  misc_RNA (1)...(19): siRNA sense strand
uggauggccuagaggaugu

SEQ ID NO: 1428235 - RNA, 19 nt, Homo sapiens
  misc_RNA (1)...(19): siRNA sense strand
caacagauucaugaagaag

SEQ ID NO: 1428236 - RNA, 19 nt, Homo sapiens
  misc_RNA (1)...(19): siRNA sense strand
ucaagcaucaacagauuca

SEQ ID NO: 1428237 - RNA, 19 nt, Homo sapiens
  misc_RNA (1)...(19): siRNA sense strand
gaaucaggcacagaaaucu

SEQ ID NO: 1428238 - RNA, 19 nt, Homo sapiens
  misc_RNA (1)...(19): siRNA sense strand
ggaggugcagaagcaagua

SEQ ID NO: 1428239 - RNA, 19 nt, Homo sapiens
  misc_RNA (1)...(19): siRNA sense strand
gcagguccgggagcaauau

SEQ ID NO: 1428240 - RNA, 19 nt, Homo sapiens
  misc_RNA (1)...(19): siRNA sense strand
agucugagaugcacacacu

SEQ ID NO: 1428241 - RNA, 19 nt, Homo sapiens
  misc_RNA (1)...(19): siRNA sense strand
gguccaaagggaucaggaa

SEQ ID NO: 1428242 - RNA, 19 nt, Homo sapiens
  misc_RNA (1)...(19): siRNA sense strand
agaaggugcucugugucuu

SEQ ID NO: 1428243 - RNA, 19 nt, Homo sapiens
  misc_RNA (1)...(19): siRNA sense strand
guccaaagggaucaggaaa

SEQ ID NO: 1428244 - RNA, 19 nt, Homo sapiens
  misc_RNA (1)...(19): siRNA sense strand
gugacucucuggauuuuga

SEQ ID NO: 1428245 - RNA, 19 nt, Homo sapiens
  misc_RNA (1)...(19): siRNA sense strand
caacuacucaagcaucaac

SEQ ID NO: 1428246 - RNA, 19 nt, Homo sapiens
  misc_RNA (1)...(19): siRNA sense strand
ggaccugggcagagacuac

SEQ ID NO: 1428247 - RNA, 19 nt, Homo sapiens
  misc_RNA (1)...(19): siRNA sense strand
uggccuaccucuucaccau

SEQ ID NO: 1428248 - RNA, 19 nt, Homo sapiens
  misc_RNA (1)...(19): siRNA sense strand
gucauggccuaccucuuca

SEQ ID NO: 1428249 - RNA, 19 nt, Homo sapiens
  misc_RNA (1)...(19): siRNA sense strand
ucucgucuuucucgcauuc

SEQ ID NO: 1428250 - RNA, 19 nt, Homo sapiens
  misc_RNA (1)...(19): siRNA sense strand
caucaacagauucaugaag

SEQ ID NO: 1428251 - RNA, 19 nt, Homo sapiens
  misc_RNA (1)...(19): siRNA sense strand
gcaucaacagauucaugaa

SEQ ID NO: 1428252 - RNA, 19 nt, Homo sapiens
  misc_RNA (1)...(19): siRNA sense strand
ucaagaaugagagcgagaa

SEQ ID NO: 1428253 - RNA, 19 nt, Homo sapiens
  misc_RNA (1)...(19): siRNA sense strand
cagacucuccucccucaau

SEQ ID NO: 1428254 - RNA, 19 nt, Homo sapiens
  misc_RNA (1)...(19): siRNA sense strand
aaggugcugugcuccauca

SEQ ID NO: 1428255 - RNA, 19 nt, Homo sapiens
  misc_RNA (1)...(19): siRNA sense strand
cacaggcugcagcacaaua

SEQ ID NO: 1428256 - RNA, 19 nt, Homo sapiens
  misc_RNA (1)...(19): siRNA sense strand
gcaacaacgacacccaaaa

SEQ ID NO: 1428257 - RNA, 19 nt, Homo sapiens
  misc_RNA (1)...(19): siRNA sense strand
gaaaacugagucugagaug

SEQ ID NO: 1428258 - RNA, 19 nt, Homo sapiens
  misc_RNA (1)...(19): siRNA sense strand
cuacucaagcaucaacaga

SEQ ID NO: 1428259 - RNA, 19 nt, Homo sapiens
  misc_RNA (1)...(19): siRNA sense strand
gcaagaaccuuuccaaugg

SEQ ID NO: 1428260 - RNA, 19 nt, Homo sapiens
  misc_RNA (1)...(19): siRNA sense strand
ccaaugggcuguugaacuu

SEQ ID NO: 1428261 - RNA, 19 nt, Homo sapiens
  misc_RNA (1)...(19): siRNA sense strand
caucuucucugugaauuua

SEQ ID NO: 1428262 - RNA, 19 nt, Homo sapiens
  misc_RNA (1)...(19): siRNA sense strand
ccaaagggaucaggaaauu

SEQ ID NO: 1428263 - RNA, 19 nt, Homo sapiens
  misc_RNA (1)...(19): siRNA sense strand
gaauuuaguucucuuucug

SEQ ID NO: 1428264 - RNA, 19 nt, Homo sapiens
  misc_RNA (1)...(19): siRNA sense strand
gugcaacacugucgaaagu

SEQ ID NO: 1428265 - RNA, 19 nt, Homo sapiens
  misc_RNA (1)...(19): siRNA sense strand
gccagacgcuuucccgauu

SEQ ID NO: 1428266 - RNA, 19 nt, Homo sapiens
  misc_RNA (1)...(19): siRNA sense strand
ggucauggccuaccucuuc

SEQ ID NO: 1428267 - RNA, 19 nt, Homo sapiens
  misc_RNA (1)...(19): siRNA sense strand
gaugugaucucugccuuuc

SEQ ID NO: 1428268 - RNA, 19 nt, Homo sapiens
  misc_RNA (1)...(19): siRNA sense strand
ggaaucaggcacagaaauc

SEQ ID NO: 1428269 - RNA, 19 nt, Homo sapiens
  misc_RNA (1)...(19): siRNA sense strand
ccaguuaccuucaccuucu

SEQ ID NO: 1428270 - RNA, 19 nt, Homo sapiens
  misc_RNA (1)...(19): siRNA sense strand
ugaugcagcucgacuggaa

SEQ ID NO: 1428271 - RNA, 19 nt, Homo sapiens
  misc_RNA (1)...(19): siRNA sense strand
aaagggaucaggaaauuga

SEQ ID NO: 1428272 - RNA, 19 nt, Homo sapiens
  misc_RNA (1)...(19): siRNA sense strand
agacucuccucccucaaua

SEQ ID NO: 1428273 - RNA, 19 nt, Homo sapiens
  misc_RNA (1)...(19): siRNA sense strand
gagcauggccagaauggau

SEQ ID NO: 1428274 - RNA, 19 nt, Homo sapiens
  misc_RNA (1)...(19): siRNA sense strand
ucaacagauucaugaagaa

SEQ ID NO: 1428275 - RNA, 19 nt, Homo sapiens
  misc_RNA (1)...(19): siRNA sense strand
ggagcaauaugggaaaugg

SEQ ID NO: 1428276 - RNA, 19 nt, Homo sapiens
  misc_RNA (1)...(19): siRNA sense strand
acucaagcaucaacagauu

SEQ ID NO: 1428277 - RNA, 19 nt, Homo sapiens
  misc_RNA (1)...(19): siRNA sense strand
guaaagccauccagaacac

SEQ ID NO: 1428278 - RNA, 19 nt, Homo sapiens
  misc_RNA (1)...(19): siRNA sense strand
gagcaagaaccuuuccaau

SEQ ID NO: 1428279 - RNA, 19 nt, Homo sapiens
  misc_RNA (1)...(19): siRNA sense strand
gaaagugucaugcggaaaa

SEQ ID NO: 1428280 - RNA, 19 nt, Homo sapiens
  misc_RNA (1)...(19): siRNA sense strand
gcacccaccugagcagcuu

SEQ ID NO: 1428281 - RNA, 19 nt, Homo sapiens
  misc_RNA (1)...(19): siRNA sense strand
ucagugaucccgagacaga

SEQ ID NO: 1428282 - RNA, 19 nt, Homo sapiens
  misc_RNA (1)...(19): siRNA sense strand
ccuccaggccucaccuuua

SEQ ID NO: 1428283 - RNA, 19 nt, Homo sapiens
  misc_RNA (1)...(19): siRNA sense strand
ucuccucccucaauaguga

SEQ ID NO: 1428284 - RNA, 19 nt, Homo sapiens
  misc_RNA (1)...(19): siRNA sense strand
ggagacuugugacgacauc

SEQ ID NO: 1428285 - RNA, 19 nt, Homo sapiens
  misc_RNA (1)...(19): siRNA sense strand
ccgcgucuuucucgucuuu

SEQ ID NO: 1428286 - RNA, 19 nt, Homo sapiens
  misc_RNA (1)...(19): siRNA sense strand
ggccugagcaagaaccuuu

SEQ ID NO: 1428287 - RNA, 19 nt, Homo sapiens
  misc_RNA (1)...(19): siRNA sense strand
gcacaauaggcaccagaga

SEQ ID NO: 1428288 - RNA, 19 nt, Homo sapiens
  misc_RNA (1)...(19): siRNA sense strand
ggacuccucgugugucaau

SEQ ID NO: 1428289 - RNA, 19 nt, Homo sapiens
  misc_RNA (1)...(19): siRNA sense strand
ucacuuuucuccuguguaa

SEQ ID NO: 1428290 - RNA, 19 nt, Homo sapiens
  misc_RNA (1)...(19): siRNA sense strand
ggaccugucugcgccaucu

SEQ ID NO: 1428291 - RNA, 19 nt, Homo sapiens
  misc_RNA (1)...(19): siRNA sense strand
cgagaacacgugucaagau

SEQ ID NO: 1428292 - RNA, 19 nt, Homo sapiens
  misc_RNA (1)...(19): siRNA sense strand
gccgguaccuugcacuauc

SEQ ID NO: 1428293 - RNA, 19 nt, Homo sapiens
  misc_RNA (1)...(19): siRNA sense strand
guucagugaucccgagaca

SEQ ID NO: 1428294 - RNA, 19 nt, Homo sapiens
  misc_RNA (1)...(19): siRNA sense strand
cuccaggccucaccuuuau

SEQ ID NO: 1428295 - RNA, 19 nt, Homo sapiens
  misc_RNA (1)...(19): siRNA sense strand
aaccucagcuccccaguua

SEQ ID NO: 1428296 - RNA, 19 nt, Homo sapiens
  misc_RNA (1)...(19): siRNA sense strand
uaugggaaaugguccaaag

SEQ ID NO: 1428297 - RNA, 19 nt, Homo sapiens
  misc_RNA (1)...(19): siRNA sense strand
ucuggugacucucuggauu

SEQ ID NO: 1428298 - RNA, 19 nt, Homo sapiens
  misc_RNA (1)...(19): siRNA sense strand
guccacagccagacgcuuu

SEQ ID NO: 1428299 - RNA, 19 nt, Homo sapiens
  misc_RNA (1)...(19): siRNA sense strand
ccagacgcuuucccgauuc

SEQ ID NO: 1428300 - RNA, 19 nt, Homo sapiens
  misc_RNA (1)...(19): siRNA sense strand
aucaacagauucaugaaga

SEQ ID NO: 1428301 - RNA, 19 nt, Homo sapiens
  misc_RNA (1)...(19): siRNA sense strand
gucaacuacucaagcauca

SEQ ID NO: 1428302 - RNA, 19 nt, Homo sapiens
  misc_RNA (1)...(19): siRNA sense strand
ccucauggcccacuacgau

SEQ ID NO: 1428303 - RNA, 19 nt, Homo sapiens
  misc_RNA (1)...(19): siRNA sense strand
caccauccagagcaucuua

SEQ ID NO: 1428304 - RNA, 19 nt, Homo sapiens
  misc_RNA (1)...(19): siRNA sense strand
cagaauggauguggucacu

SEQ ID NO: 1428305 - RNA, 19 nt, Homo sapiens
  misc_RNA (1)...(19): siRNA sense strand
aaacugagucugagaugca

SEQ ID NO: 1428306 - RNA, 19 nt, Homo sapiens
  misc_RNA (1)...(19): siRNA sense strand
gccuaccucuucaccauca

SEQ ID NO: 1428307 - RNA, 19 nt, Homo sapiens
  misc_RNA (1)...(19): siRNA sense strand
guaccuugcacuaucucua

SEQ ID NO: 1428308 - RNA, 19 nt, Homo sapiens
  misc_RNA (1)...(19): siRNA sense strand
cagcuuugccguccucaug

SEQ ID NO: 1428309 - RNA, 19 nt, Homo sapiens
  misc_RNA (1)...(19): siRNA sense strand
gcagggugucuucaucuuc

SEQ ID NO: 1428310 - RNA, 19 nt, Homo sapiens
  misc_RNA (1)...(19): siRNA sense strand
gcgagaacacgugucaaga

SEQ ID NO: 1428311 - RNA, 19 nt, Homo sapiens
  misc_RNA (1)...(19): siRNA sense strand
caaagggaucaggaaauug

SEQ ID NO: 1428312 - RNA, 19 nt, Homo sapiens
  misc_RNA (1)...(19): siRNA sense strand
caucaacgagugugcaaca

SEQ ID NO: 1428313 - RNA, 19 nt, Homo sapiens
  misc_RNA (1)...(19): siRNA sense strand
ugugaucucugccuuucug

SEQ ID NO: 1428314 - RNA, 19 nt, Homo sapiens
  misc_RNA (1)...(19): siRNA sense strand
agcaagaaccuuuccaaug

SEQ ID NO: 1428315 - RNA, 19 nt, Homo sapiens
  misc_RNA (1)...(19): siRNA sense strand
acaauaggcaccagagaca

SEQ ID NO: 1428316 - RNA, 19 nt, Homo sapiens
  misc_RNA (1)...(19): siRNA sense strand
gccaucuucucugugaauu

SEQ ID NO: 1428317 - RNA, 19 nt, Homo sapiens
  misc_RNA (1)...(19): siRNA sense strand
ccagaaaagggauuuauau

SEQ ID NO: 1428318 - RNA, 19 nt, Homo sapiens
  misc_RNA (1)...(19): siRNA sense strand
guggucaacuacucaagca

SEQ ID NO: 1428319 - RNA, 19 nt, Homo sapiens
  misc_RNA (1)...(19): siRNA sense strand
uggauggccuagaggaugu

SEQ ID NO: 1428320 - RNA, 19 nt, Homo sapiens
  misc_RNA (1)...(19): siRNA sense strand
caacagauucaugaagaag

SEQ ID NO: 1428321 - RNA, 19 nt, Homo sapiens
  misc_RNA (1)...(19): siRNA sense strand
ucaagcaucaacagauuca

SEQ ID NO: 1428322 - RNA, 19 nt, Homo sapiens
  misc_RNA (1)...(19): siRNA sense strand
gaaucaggcacagaaaucu

SEQ ID NO: 1428323 - RNA, 19 nt, Homo sapiens
  misc_RNA (1)...(19): siRNA sense strand
ggaggugcagaagcaagua

SEQ ID NO: 1428324 - RNA, 19 nt, Homo sapiens
  misc_RNA (1)...(19): siRNA sense strand
gcagguccgggagcaauau

SEQ ID NO: 1428325 - RNA, 19 nt, Homo sapiens
  misc_RNA (1)...(19): siRNA sense strand
agucugagaugcacacacu

SEQ ID NO: 1428326 - RNA, 19 nt, Homo sapiens
  misc_RNA (1)...(19): siRNA sense strand
gguccaaagggaucaggaa

SEQ ID NO: 1428327 - RNA, 19 nt, Homo sapiens
  misc_RNA (1)...(19): siRNA sense strand
agaaggugcucugugucuu

SEQ ID NO: 1428328 - RNA, 19 nt, Homo sapiens
  misc_RNA (1)...(19): siRNA sense strand
guccaaagggaucaggaaa

SEQ ID NO: 1428329 - RNA, 19 nt, Homo sapiens
  misc_RNA (1)...(19): siRNA sense strand
gugacucucuggauuuuga

SEQ ID NO: 1428330 - RNA, 19 nt, Homo sapiens
  misc_RNA (1)...(19): siRNA sense strand
caacuacucaagcaucaac

SEQ ID NO: 1428331 - RNA, 19 nt, Homo sapiens
  misc_RNA (1)...(19): siRNA sense strand
ggaccugggcagagacuac

SEQ ID NO: 1428332 - RNA, 19 nt, Homo sapiens
  misc_RNA (1)...(19): siRNA sense strand
uggccuaccucuucaccau

SEQ ID NO: 1428333 - RNA, 19 nt, Homo sapiens
  misc_RNA (1)...(19): siRNA sense strand
gucauggccuaccucuuca

SEQ ID NO: 1428334 - RNA, 19 nt, Homo sapiens
  misc_RNA (1)...(19): siRNA sense strand
ucucgucuuucucgcauuc

SEQ ID NO: 1428335 - RNA, 19 nt, Homo sapiens
  misc_RNA (1)...(19): siRNA sense strand
caucaacagauucaugaag

SEQ ID NO: 1428336 - RNA, 19 nt, Homo sapiens
  misc_RNA (1)...(19): siRNA sense strand
gcaucaacagauucaugaa

SEQ ID NO: 1428337 - RNA, 19 nt, Homo sapiens
  misc_RNA (1)...(19): siRNA sense strand
ucaagaaugagagcgagaa

SEQ ID NO: 1428338 - RNA, 19 nt, Homo sapiens
  misc_RNA (1)...(19): siRNA sense strand
cagacucuccucccucaau

SEQ ID NO: 1428339 - RNA, 19 nt, Homo sapiens
  misc_RNA (1)...(19): siRNA sense strand
aaggugcugugcuccauca

SEQ ID NO: 1428340 - RNA, 19 nt, Homo sapiens
  misc_RNA (1)...(19): siRNA sense strand
cacaggcugcagcacaaua

SEQ ID NO: 1428341 - RNA, 19 nt, Homo sapiens
  misc_RNA (1)...(19): siRNA sense strand
gcaacaacgacacccaaaa

SEQ ID NO: 1428342 - RNA, 19 nt, Homo sapiens
  misc_RNA (1)...(19): siRNA sense strand
gaaaacugagucugagaug

SEQ ID NO: 1428343 - RNA, 19 nt, Homo sapiens
  misc_RNA (1)...(19): siRNA sense strand
cuacucaagcaucaacaga

SEQ ID NO: 1428344 - RNA, 19 nt, Homo sapiens
  misc_RNA (1)...(19): siRNA sense strand
gcaagaaccuuuccaaugg

SEQ ID NO: 1428345 - RNA, 19 nt, Homo sapiens
  misc_RNA (1)...(19): siRNA sense strand
ccaaugggcuguugaacuu

SEQ ID NO: 1428346 - RNA, 19 nt, Homo sapiens
  misc_RNA (1)...(19): siRNA sense strand
caucuucucugugaauuua

SEQ ID NO: 1428347 - RNA, 19 nt, Homo sapiens
  misc_RNA (1)...(19): siRNA sense strand
ccaaagggaucaggaaauu

SEQ ID NO: 1428348 - RNA, 19 nt, Homo sapiens
  misc_RNA (1)...(19): siRNA sense strand
gaauuuaguucucuuucug

SEQ ID NO: 1428349 - RNA, 19 nt, Homo sapiens
  misc_RNA (1)...(19): siRNA sense strand
gugcaacacugucgaaagu

SEQ ID NO: 1428350 - RNA, 19 nt, Homo sapiens
  misc_RNA (1)...(19): siRNA sense strand
gccagacgcuuucccgauu

SEQ ID NO: 1428351 - RNA, 19 nt, Homo sapiens
  misc_RNA (1)...(19): siRNA sense strand
ggucauggccuaccucuuc

SEQ ID NO: 1428352 - RNA, 19 nt, Homo sapiens
  misc_RNA (1)...(19): siRNA sense strand
gaugugaucucugccuuuc

SEQ ID NO: 1428353 - RNA, 19 nt, Homo sapiens
  misc_RNA (1)...(19): siRNA sense strand
ggaaucaggcacagaaauc

SEQ ID NO: 1428354 - RNA, 19 nt, Homo sapiens
  misc_RNA (1)...(19): siRNA sense strand
ccaguuaccuucaccuucu

SEQ ID NO: 1428355 - RNA, 19 nt, Homo sapiens
  misc_RNA (1)...(19): siRNA sense strand
ugaugcagcucgacuggaa

SEQ ID NO: 1428356 - RNA, 19 nt, Homo sapiens
  misc_RNA (1)...(19): siRNA sense strand
aaagggaucaggaaauuga

SEQ ID NO: 1428357 - RNA, 19 nt, Homo sapiens
  misc_RNA (1)...(19): siRNA sense strand
agacucuccucccucaaua

SEQ ID NO: 1428358 - RNA, 19 nt, Homo sapiens
  misc_RNA (1)...(19): siRNA sense strand
gagcauggccagaauggau

SEQ ID NO: 1428359 - RNA, 19 nt, Homo sapiens
  misc_RNA (1)...(19): siRNA sense strand
ucaacagauucaugaagaa

SEQ ID NO: 1428360 - RNA, 19 nt, Homo sapiens
  misc_RNA (1)...(19): siRNA sense strand
ggagcaauaugggaaaugg

SEQ ID NO: 1428361 - RNA, 19 nt, Homo sapiens
  misc_RNA (1)...(19): siRNA sense strand
acucaagcaucaacagauu

SEQ ID NO: 1428362 - RNA, 19 nt, Homo sapiens
  misc_RNA (1)...(19): siRNA sense strand
guaaagccauccagaacac

SEQ ID NO: 1428363 - RNA, 19 nt, Homo sapiens
  misc_RNA (1)...(19): siRNA sense strand
gagcaagaaccuuuccaau

SEQ ID NO: 1428364 - RNA, 19 nt, Homo sapiens
  misc_RNA (1)...(19): siRNA sense strand
gaaagugucaugcggaaaa

SEQ ID NO: 1428365 - RNA, 19 nt, Homo sapiens
  misc_RNA (1)...(19): siRNA sense strand
gcacccaccugagcagcuu

SEQ ID NO: 1428366 - RNA, 19 nt, Homo sapiens
  misc_RNA (1)...(19): siRNA sense strand
ucagugaucccgagacaga

SEQ ID NO: 1428367 - RNA, 19 nt, Homo sapiens
  misc_RNA (1)...(19): siRNA sense strand
ccuccaggccucaccuuua

SEQ ID NO: 1428368 - RNA, 19 nt, Homo sapiens
  misc_RNA (1)...(19): siRNA sense strand
ucuccucccucaauaguga

SEQ ID NO: 1428369 - RNA, 19 nt, Homo sapiens
  misc_RNA (1)...(19): siRNA sense strand
ggagacuugugacgacauc

SEQ ID NO: 1428370 - RNA, 19 nt, Homo sapiens
  misc_RNA (1)...(19): siRNA sense strand
ccgcgucuuucucgucuuu

SEQ ID NO: 1428371 - RNA, 19 nt, Homo sapiens
  misc_RNA (1)...(19): siRNA sense strand
ggccugagcaagaaccuuu

SEQ ID NO: 1428372 - RNA, 19 nt, Homo sapiens
  misc_RNA (1)...(19): siRNA sense strand
gcacaauaggcaccagaga

SEQ ID NO: 1428373 - RNA, 19 nt, Homo sapiens
  misc_RNA (1)...(19): siRNA sense strand
ggacuccucgugugucaau

SEQ ID NO: 1428374 - RNA, 19 nt, Homo sapiens
  misc_RNA (1)...(19): siRNA sense strand
ucacuuuucuccuguguaa

SEQ ID NO: 1428375 - RNA, 19 nt, Homo sapiens
  misc_RNA (1)...(19): siRNA sense strand
ggaccugucugcgccaucu

SEQ ID NO: 1428376 - RNA, 19 nt, Homo sapiens
  misc_RNA (1)...(19): siRNA sense strand
cgagaacacgugucaagau

SEQ ID NO: 1428377 - RNA, 19 nt, Homo sapiens
  misc_RNA (1)...(19): siRNA sense strand
gccgguaccuugcacuauc

SEQ ID NO: 1428378 - RNA, 19 nt, Homo sapiens
  misc_RNA (1)...(19): siRNA sense strand
guucagugaucccgagaca

SEQ ID NO: 1428379 - RNA, 19 nt, Homo sapiens
  misc_RNA (1)...(19): siRNA sense strand
cuccaggccucaccuuuau

SEQ ID NO: 1428380 - RNA, 19 nt, Homo sapiens
  misc_RNA (1)...(19): siRNA sense strand
aaccucagcuccccaguua

SEQ ID NO: 1428381 - RNA, 19 nt, Homo sapiens
  misc_RNA (1)...(19): siRNA sense strand
uaugggaaaugguccaaag

SEQ ID NO: 1428382 - RNA, 19 nt, Homo sapiens
  misc_RNA (1)...(19): siRNA sense strand
ucuggugacucucuggauu

SEQ ID NO: 1428383 - RNA, 19 nt, Homo sapiens
  misc_RNA (1)...(19): siRNA sense strand
guccacagccagacgcuuu

SEQ ID NO: 1428384 - RNA, 19 nt, Homo sapiens
  misc_RNA (1)...(19): siRNA sense strand
ccagacgcuuucccgauuc

SEQ ID NO: 1428385 - RNA, 19 nt, Homo sapiens
  misc_RNA (1)...(19): siRNA sense strand
aucaacagauucaugaaga

SEQ ID NO: 1428386 - RNA, 19 nt, Homo sapiens
  misc_RNA (1)...(19): siRNA sense strand
gucaacuacucaagcauca

SEQ ID NO: 1428387 - RNA, 19 nt, Homo sapiens
  misc_RNA (1)...(19): siRNA sense strand
ccucauggcccacuacgau

SEQ ID NO: 1428388 - RNA, 19 nt, Homo sapiens
  misc_RNA (1)...(19): siRNA sense strand
caccauccagagcaucuua

SEQ ID NO: 1428389 - RNA, 19 nt, Homo sapiens
  misc_RNA (1)...(19): siRNA sense strand
cagaauggauguggucacu

SEQ ID NO: 1428390 - RNA, 19 nt, Homo sapiens
  misc_RNA (1)...(19): siRNA sense strand
aaacugagucugagaugca

SEQ ID NO: 1428391 - RNA, 19 nt, Homo sapiens
  misc_RNA (1)...(19): siRNA sense strand
gccuaccucuucaccauca

SEQ ID NO: 1428392 - RNA, 19 nt, Homo sapiens
  misc_RNA (1)...(19): siRNA sense strand
guaccuugcacuaucucua

SEQ ID NO: 1428393 - RNA, 19 nt, Homo sapiens
  misc_RNA (1)...(19): siRNA sense strand
cagcuuugccguccucaug

SEQ ID NO: 1428394 - RNA, 19 nt, Homo sapiens
  misc_RNA (1)...(19): siRNA sense strand
gcagggugucuucaucuuc

SEQ ID NO: 1428395 - RNA, 19 nt, Homo sapiens
  misc_RNA (1)...(19): siRNA sense strand
gcgagaacacgugucaaga

SEQ ID NO: 1428396 - RNA, 19 nt, Homo sapiens
  misc_RNA (1)...(19): siRNA sense strand
caaagggaucaggaaauug

SEQ ID NO: 1428397 - RNA, 19 nt, Homo sapiens
  misc_RNA (1)...(19): siRNA sense strand
caucaacgagugugcaaca

SEQ ID NO: 1428398 - RNA, 19 nt, Homo sapiens
  misc_RNA (1)...(19): siRNA sense strand
ugugaucucugccuuucug

SEQ ID NO: 1428399 - RNA, 19 nt, Homo sapiens
  misc_RNA (1)...(19): siRNA sense strand
agcaagaaccuuuccaaug

SEQ ID NO: 1428400 - RNA, 19 nt, Homo sapiens
  misc_RNA (1)...(19): siRNA sense strand
acaauaggcaccagagaca

SEQ ID NO: 1428401 - RNA, 19 nt, Homo sapiens
  misc_RNA (1)...(19): siRNA sense strand
gccaucuucucugugaauu

SEQ ID NO: 1428402 - RNA, 19 nt, Homo sapiens
  misc_RNA (1)...(19): siRNA sense strand
ccagaaaagggauuuauau

SEQ ID NO: 1428403 - RNA, 19 nt, Homo sapiens
  misc_RNA (1)...(19): siRNA sense strand
guggucaacuacucaagca

SEQ ID NO: 1428404 - RNA, 19 nt, Homo sapiens
  misc_RNA (1)...(19): siRNA sense strand
uggauggccuagaggaugu

SEQ ID NO: 1428405 - RNA, 19 nt, Homo sapiens
  misc_RNA (1)...(19): siRNA sense strand
caacagauucaugaagaag

SEQ ID NO: 1428406 - RNA, 19 nt, Homo sapiens
  misc_RNA (1)...(19): siRNA sense strand
ucaagcaucaacagauuca

SEQ ID NO: 1428407 - RNA, 19 nt, Homo sapiens
  misc_RNA (1)...(19): siRNA sense strand
gaaucaggcacagaaaucu

SEQ ID NO: 1428408 - RNA, 19 nt, Homo sapiens
  misc_RNA (1)...(19): siRNA sense strand
ggaggugcagaagcaagua

SEQ ID NO: 1428409 - RNA, 19 nt, Homo sapiens
  misc_RNA (1)...(19): siRNA sense strand
gcagguccgggagcaauau

SEQ ID NO: 1428410 - RNA, 19 nt, Homo sapiens
  misc_RNA (1)...(19): siRNA sense strand
agucugagaugcacacacu

SEQ ID NO: 1428411 - RNA, 19 nt, Homo sapiens
  misc_RNA (1)...(19): siRNA sense strand
gguccaaagggaucaggaa

SEQ ID NO: 1428412 - RNA, 19 nt, Homo sapiens
  misc_RNA (1)...(19): siRNA sense strand
agaaggugcucugugucuu

SEQ ID NO: 1428413 - RNA, 19 nt, Homo sapiens
  misc_RNA (1)...(19): siRNA sense strand
guccaaagggaucaggaaa

SEQ ID NO: 1428414 - RNA, 19 nt, Homo sapiens
  misc_RNA (1)...(19): siRNA sense strand
gugacucucuggauuuuga

SEQ ID NO: 1428415 - RNA, 19 nt, Homo sapiens
  misc_RNA (1)...(19): siRNA sense strand
caacuacucaagcaucaac

SEQ ID NO: 1428416 - RNA, 19 nt, Homo sapiens
  misc_RNA (1)...(19): siRNA sense strand
ggaccugggcagagacuac

SEQ ID NO: 1428417 - RNA, 19 nt, Homo sapiens
  misc_RNA (1)...(19): siRNA sense strand
uggccuaccucuucaccau

SEQ ID NO: 1428418 - RNA, 19 nt, Homo sapiens
  misc_RNA (1)...(19): siRNA sense strand
gucauggccuaccucuuca

SEQ ID NO: 1428419 - RNA, 19 nt, Homo sapiens
  misc_RNA (1)...(19): siRNA sense strand
ucucgucuuucucgcauuc

SEQ ID NO: 1428420 - RNA, 19 nt, Homo sapiens
  misc_RNA (1)...(19): siRNA sense strand
caucaacagauucaugaag

SEQ ID NO: 1428421 - RNA, 19 nt, Homo sapiens
  misc_RNA (1)...(19): siRNA sense strand
gcaucaacagauucaugaa

SEQ ID NO: 1428422 - RNA, 19 nt, Homo sapiens
  misc_RNA (1)...(19): siRNA sense strand
ucaagaaugagagcgagaa

SEQ ID NO: 1428423 - RNA, 19 nt, Homo sapiens
  misc_RNA (1)...(19): siRNA sense strand
cagacucuccucccucaau

SEQ ID NO: 1428424 - RNA, 19 nt, Homo sapiens
  misc_RNA (1)...(19): siRNA sense strand
aaggugcugugcuccauca

SEQ ID NO: 1428425 - RNA, 19 nt, Homo sapiens
  misc_RNA (1)...(19): siRNA sense strand
cacaggcugcagcacaaua

SEQ ID NO: 1428426 - RNA, 19 nt, Homo sapiens
  misc_RNA (1)...(19): siRNA sense strand
gcaacaacgacacccaaaa

SEQ ID NO: 1428427 - RNA, 19 nt, Homo sapiens
  misc_RNA (1)...(19): siRNA sense strand
gaaaacugagucugagaug

SEQ ID NO: 1428428 - RNA, 19 nt, Homo sapiens
  misc_RNA (1)...(19): siRNA sense strand
cuacucaagcaucaacaga

SEQ ID NO: 1428429 - RNA, 19 nt, Homo sapiens
  misc_RNA (1)...(19): siRNA sense strand
gcaagaaccuuuccaaugg

SEQ ID NO: 1428430 - RNA, 19 nt, Homo sapiens
  misc_RNA (1)...(19): siRNA sense strand
ccaaugggcuguugaacuu

SEQ ID NO: 1428431 - RNA, 19 nt, Homo sapiens
  misc_RNA (1)...(19): siRNA sense strand
caucuucucugugaauuua

SEQ ID NO: 1428432 - RNA, 19 nt, Homo sapiens
  misc_RNA (1)...(19): siRNA sense strand
ccaaagggaucaggaaauu

SEQ ID NO: 1428433 - RNA, 19 nt, Homo sapiens
  misc_RNA (1)...(19): siRNA sense strand
gaauuuaguucucuuucug

SEQ ID NO: 1428434 - RNA, 19 nt, Homo sapiens
  misc_RNA (1)...(19): siRNA sense strand
gugcaacacugucgaaagu

SEQ ID NO: 1428435 - RNA, 19 nt, Homo sapiens
  misc_RNA (1)...(19): siRNA sense strand
gccagacgcuuucccgauu

SEQ ID NO: 1428436 - RNA, 19 nt, Homo sapiens
  misc_RNA (1)...(19): siRNA sense strand
ggucauggccuaccucuuc

SEQ ID NO: 1428437 - RNA, 19 nt, Homo sapiens
  misc_RNA (1)...(19): siRNA sense strand
gaugugaucucugccuuuc

SEQ ID NO: 1428438 - RNA, 19 nt, Homo sapiens
  misc_RNA (1)...(19): siRNA sense strand
ggaaucaggcacagaaauc

SEQ ID NO: 1428439 - RNA, 19 nt, Homo sapiens
  misc_RNA (1)...(19): siRNA sense strand
ccaguuaccuucaccuucu

SEQ ID NO: 1428440 - RNA, 19 nt, Homo sapiens
  misc_RNA (1)...(19): siRNA sense strand
ugaugcagcucgacuggaa

SEQ ID NO: 1428441 - RNA, 19 nt, Homo sapiens
  misc_RNA (1)...(19): siRNA sense strand
aaagggaucaggaaauuga

SEQ ID NO: 1428442 - RNA, 19 nt, Homo sapiens
  misc_RNA (1)...(19): siRNA sense strand
agacucuccucccucaaua

SEQ ID NO: 1428443 - RNA, 19 nt, Homo sapiens
  misc_RNA (1)...(19): siRNA sense strand
gagcauggccagaauggau

SEQ ID NO: 1428444 - RNA, 19 nt, Homo sapiens
  misc_RNA (1)...(19): siRNA sense strand
ucaacagauucaugaagaa

SEQ ID NO: 1428445 - RNA, 19 nt, Homo sapiens
  misc_RNA (1)...(19): siRNA sense strand
ggagcaauaugggaaaugg

SEQ ID NO: 1428446 - RNA, 19 nt, Homo sapiens
  misc_RNA (1)...(19): siRNA sense strand
acucaagcaucaacagauu

SEQ ID NO: 1428447 - RNA, 19 nt, Homo sapiens
  misc_RNA (1)...(19): siRNA sense strand
guaaagccauccagaacac

SEQ ID NO: 1428448 - RNA, 19 nt, Homo sapiens
  misc_RNA (1)...(19): siRNA sense strand
gagcaagaaccuuuccaau

SEQ ID NO: 1428449 - RNA, 19 nt, Homo sapiens
  misc_RNA (1)...(19): siRNA sense strand
gaaagugucaugcggaaaa

SEQ ID NO: 1428450 - RNA, 19 nt, Homo sapiens
  misc_RNA (1)...(19): siRNA sense strand
gcacccaccugagcagcuu

SEQ ID NO: 1428451 - RNA, 19 nt, Homo sapiens
  misc_RNA (1)...(19): siRNA sense strand
ucagugaucccgagacaga

SEQ ID NO: 1428452 - RNA, 19 nt, Homo sapiens
  misc_RNA (1)...(19): siRNA sense strand
ccuccaggccucaccuuua

SEQ ID NO: 1428453 - RNA, 19 nt, Homo sapiens
  misc_RNA (1)...(19): siRNA sense strand
ucuccucccucaauaguga

SEQ ID NO: 1428454 - RNA, 19 nt, Homo sapiens
  misc_RNA (1)...(19): siRNA sense strand
ggagacuugugacgacauc

SEQ ID NO: 1428455 - RNA, 19 nt, Homo sapiens
  misc_RNA (1)...(19): siRNA sense strand
ccgcgucuuucucgucuuu

SEQ ID NO: 1428456 - RNA, 19 nt, Homo sapiens
  misc_RNA (1)...(19): siRNA sense strand
ggccugagcaagaaccuuu

SEQ ID NO: 1428457 - RNA, 19 nt, Homo sapiens
  misc_RNA (1)...(19): siRNA sense strand
gcacaauaggcaccagaga

SEQ ID NO: 1428458 - RNA, 19 nt, Homo sapiens
  misc_RNA (1)...(19): siRNA sense strand
ggacuccucgugugucaau

SEQ ID NO: 1428459 - RNA, 19 nt, Homo sapiens
  misc_RNA (1)...(19): siRNA sense strand
ucacuuuucuccuguguaa

SEQ ID NO: 1428460 - RNA, 19 nt, Homo sapiens
  misc_RNA (1)...(19): siRNA sense strand
ggaccugucugcgccaucu

SEQ ID NO: 1428461 - RNA, 19 nt, Homo sapiens
  misc_RNA (1)...(19): siRNA sense strand
cgagaacacgugucaagau

SEQ ID NO: 1428462 - RNA, 19 nt, Homo sapiens
  misc_RNA (1)...(19): siRNA sense strand
gccgguaccuugcacuauc

SEQ ID NO: 1428463 - RNA, 19 nt, Homo sapiens
  misc_RNA (1)...(19): siRNA sense strand
guucagugaucccgagaca

SEQ ID NO: 1428464 - RNA, 19 nt, Homo sapiens
  misc_RNA (1)...(19): siRNA sense strand
cuccaggccucaccuuuau

SEQ ID NO: 1428465 - RNA, 19 nt, Homo sapiens
  misc_RNA (1)...(19): siRNA sense strand
aaccucagcuccccaguua

SEQ ID NO: 1428466 - RNA, 19 nt, Homo sapiens
  misc_RNA (1)...(19): siRNA sense strand
uaugggaaaugguccaaag

SEQ ID NO: 1428467 - RNA, 19 nt, Homo sapiens
  misc_RNA (1)...(19): siRNA sense strand
ucuggugacucucuggauu

SEQ ID NO: 1428468 - RNA, 19 nt, Homo sapiens
  misc_RNA (1)...(19): siRNA sense strand
guccacagccagacgcuuu

SEQ ID NO: 1428469 - RNA, 19 nt, Homo sapiens
  misc_RNA (1)...(19): siRNA sense strand
ccagacgcuuucccgauuc

SEQ ID NO: 1428470 - RNA, 19 nt, Homo sapiens
  misc_RNA (1)...(19): siRNA sense strand
aucaacagauucaugaaga

SEQ ID NO: 1428471 - RNA, 19 nt, Homo sapiens
  misc_RNA (1)...(19): siRNA sense strand
gucaacuacucaagcauca

SEQ ID NO: 1428472 - RNA, 19 nt, Homo sapiens
  misc_RNA (1)...(19): siRNA sense strand
ccucauggcccacuacgau

SEQ ID NO: 1428473 - RNA, 19 nt, Homo sapiens
  misc_RNA (1)...(19): siRNA sense strand
caccauccagagcaucuua

SEQ ID NO: 1428474 - RNA, 19 nt, Homo sapiens
  misc_RNA (1)...(19): siRNA sense strand
cagaauggauguggucacu

SEQ ID NO: 1428475 - RNA, 19 nt, Homo sapiens
  misc_RNA (1)...(19): siRNA sense strand
aaacugagucugagaugca

SEQ ID NO: 1428476 - RNA, 19 nt, Homo sapiens
  misc_RNA (1)...(19): siRNA sense strand
gccuaccucuucaccauca

SEQ ID NO: 1428477 - RNA, 19 nt, Homo sapiens
  misc_RNA (1)...(19): siRNA sense strand
guaccuugcacuaucucua

SEQ ID NO: 1428478 - RNA, 19 nt, Homo sapiens
  misc_RNA (1)...(19): siRNA sense strand
cagcuuugccguccucaug

SEQ ID NO: 1428479 - RNA, 19 nt, Homo sapiens
  misc_RNA (1)...(19): siRNA sense strand
gcagggugucuucaucuuc

SEQ ID NO: 1428480 - RNA, 19 nt, Homo sapiens
  misc_RNA (1)...(19): siRNA sense strand
gcgagaacacgugucaaga

SEQ ID NO: 1428481 - RNA, 19 nt, Homo sapiens
  misc_RNA (1)...(19): siRNA sense strand
caaagggaucaggaaauug

SEQ ID NO: 1428482 - RNA, 19 nt, Homo sapiens
  misc_RNA (1)...(19): siRNA sense strand
caucaacgagugugcaaca

SEQ ID NO: 1428483 - RNA, 19 nt, Homo sapiens
  misc_RNA (1)...(19): siRNA sense strand
ugugaucucugccuuucug

SEQ ID NO: 1428484 - RNA, 19 nt, Homo sapiens
  misc_RNA (1)...(19): siRNA sense strand
agcaagaaccuuuccaaug

SEQ ID NO: 1428485 - RNA, 19 nt, Homo sapiens
  misc_RNA (1)...(19): siRNA sense strand
acaauaggcaccagagaca

SEQ ID NO: 1428486 - RNA, 19 nt, Homo sapiens
  misc_RNA (1)...(19): siRNA sense strand
gccaucuucucugugaauu

SEQ ID NO: 1428487 - RNA, 19 nt, Homo sapiens
  misc_RNA (1)...(19): siRNA sense strand
ccagaaaagggauuuauau

SEQ ID NO: 1428488 - RNA, 19 nt, Homo sapiens
  misc_RNA (1)...(19): siRNA sense strand
guggucaacuacucaagca

SEQ ID NO: 1428489 - RNA, 19 nt, Homo sapiens
  misc_RNA (1)...(19): siRNA sense strand
uggauggccuagaggaugu

SEQ ID NO: 1428490 - RNA, 19 nt, Homo sapiens
  misc_RNA (1)...(19): siRNA sense strand
caacagauucaugaagaag

SEQ ID NO: 1428491 - RNA, 19 nt, Homo sapiens
  misc_RNA (1)...(19): siRNA sense strand
ucaagcaucaacagauuca

SEQ ID NO: 1428492 - RNA, 19 nt, Homo sapiens
  misc_RNA (1)...(19): siRNA sense strand
gaaucaggcacagaaaucu

SEQ ID NO: 1428493 - RNA, 19 nt, Homo sapiens
  misc_RNA (1)...(19): siRNA sense strand
ggaggugcagaagcaagua

SEQ ID NO: 1428494 - RNA, 19 nt, Homo sapiens
  misc_RNA (1)...(19): siRNA sense strand
gcagguccgggagcaauau

SEQ ID NO: 1428495 - RNA, 19 nt, Homo sapiens
  misc_RNA (1)...(19): siRNA sense strand
agucugagaugcacacacu

SEQ ID NO: 1428496 - RNA, 19 nt, Homo sapiens
  misc_RNA (1)...(19): siRNA sense strand
gguccaaagggaucaggaa

SEQ ID NO: 1428497 - RNA, 19 nt, Homo sapiens
  misc_RNA (1)...(19): siRNA sense strand
agaaggugcucugugucuu

SEQ ID NO: 1428498 - RNA, 19 nt, Homo sapiens
  misc_RNA (1)...(19): siRNA sense strand
guccaaagggaucaggaaa

SEQ ID NO: 1428499 - RNA, 19 nt, Homo sapiens
  misc_RNA (1)...(19): siRNA sense strand
gugacucucuggauuuuga

SEQ ID NO: 1428500 - RNA, 19 nt, Homo sapiens
  misc_RNA (1)...(19): siRNA sense strand
caacuacucaagcaucaac

SEQ ID NO: 1428501 - RNA, 19 nt, Homo sapiens
  misc_RNA (1)...(19): siRNA sense strand
ggaccugggcagagacuac

SEQ ID NO: 1428502 - RNA, 19 nt, Homo sapiens
  misc_RNA (1)...(19): siRNA sense strand
uggccuaccucuucaccau

SEQ ID NO: 1428503 - RNA, 19 nt, Homo sapiens
  misc_RNA (1)...(19): siRNA sense strand
gucauggccuaccucuuca

SEQ ID NO: 1428504 - RNA, 19 nt, Homo sapiens
  misc_RNA (1)...(19): siRNA sense strand
ucucgucuuucucgcauuc

SEQ ID NO: 1428505 - RNA, 19 nt, Homo sapiens
  misc_RNA (1)...(19): siRNA sense strand
caucaacagauucaugaag

SEQ ID NO: 1428506 - RNA, 19 nt, Homo sapiens
  misc_RNA (1)...(19): siRNA sense strand
gcaucaacagauucaugaa

SEQ ID NO: 1428507 - RNA, 19 nt, Homo sapiens
  misc_RNA (1)...(19): siRNA sense strand
ucaagaaugagagcgagaa

SEQ ID NO: 1428508 - RNA, 19 nt, Homo sapiens
  misc_RNA (1)...(19): siRNA sense strand
cagacucuccucccucaau

SEQ ID NO: 1428509 - RNA, 19 nt, Homo sapiens
  misc_RNA (1)...(19): siRNA sense strand
aaggugcugugcuccauca

SEQ ID NO: 1428510 - RNA, 19 nt, Homo sapiens
  misc_RNA (1)...(19): siRNA sense strand
cacaggcugcagcacaaua

SEQ ID NO: 1428511 - RNA, 19 nt, Homo sapiens
  misc_RNA (1)...(19): siRNA sense strand
gcaacaacgacacccaaaa

SEQ ID NO: 1428512 - RNA, 19 nt, Homo sapiens
  misc_RNA (1)...(19): siRNA sense strand
gaaaacugagucugagaug

SEQ ID NO: 1428513 - RNA, 19 nt, Homo sapiens
  misc_RNA (1)...(19): siRNA sense strand
cuacucaagcaucaacaga

SEQ ID NO: 1428514 - RNA, 19 nt, Homo sapiens
  misc_RNA (1)...(19): siRNA sense strand
gcaagaaccuuuccaaugg

SEQ ID NO: 1428515 - RNA, 19 nt, Homo sapiens
  misc_RNA (1)...(19): siRNA sense strand
ccaaugggcuguugaacuu

SEQ ID NO: 1428516 - RNA, 19 nt, Homo sapiens
  misc_RNA (1)...(19): siRNA sense strand
caucuucucugugaauuua

SEQ ID NO: 1428517 - RNA, 19 nt, Homo sapiens
  misc_RNA (1)...(19): siRNA sense strand
ccaaagggaucaggaaauu

SEQ ID NO: 1428518 - RNA, 19 nt, Homo sapiens
  misc_RNA (1)...(19): siRNA sense strand
gaauuuaguucucuuucug

SEQ ID NO: 1428519 - RNA, 19 nt, Homo sapiens
  misc_RNA (1)...(19): siRNA sense strand
gugcaacacugucgaaagu

SEQ ID NO: 1428520 - RNA, 19 nt, Homo sapiens
  misc_RNA (1)...(19): siRNA sense strand
gccagacgcuuucccgauu

SEQ ID NO: 1428521 - RNA, 19 nt, Homo sapiens
  misc_RNA (1)...(19): siRNA sense strand
ggucauggccuaccucuuc

SEQ ID NO: 1428522 - RNA, 19 nt, Homo sapiens
  misc_RNA (1)...(19): siRNA sense strand
gaugugaucucugccuuuc

SEQ ID NO: 1428523 - RNA, 19 nt, Homo sapiens
  misc_RNA (1)...(19): siRNA sense strand
ggaaucaggcacagaaauc

SEQ ID NO: 1428524 - RNA, 19 nt, Homo sapiens
  misc_RNA (1)...(19): siRNA sense strand
ccaguuaccuucaccuucu

SEQ ID NO: 1428525 - RNA, 19 nt, Homo sapiens
  misc_RNA (1)...(19): siRNA sense strand
ugaugcagcucgacuggaa

SEQ ID NO: 1428526 - RNA, 19 nt, Homo sapiens
  misc_RNA (1)...(19): siRNA sense strand
aaagggaucaggaaauuga

SEQ ID NO: 1428527 - RNA, 19 nt, Homo sapiens
  misc_RNA (1)...(19): siRNA sense strand
agacucuccucccucaaua

SEQ ID NO: 1428528 - RNA, 19 nt, Homo sapiens
  misc_RNA (1)...(19): siRNA sense strand
gagcauggccagaauggau

SEQ ID NO: 1428529 - RNA, 19 nt, Homo sapiens
  misc_RNA (1)...(19): siRNA sense strand
ucaacagauucaugaagaa

SEQ ID NO: 1428530 - RNA, 19 nt, Homo sapiens
  misc_RNA (1)...(19): siRNA sense strand
ggagcaauaugggaaaugg

SEQ ID NO: 1428531 - RNA, 19 nt, Homo sapiens
  misc_RNA (1)...(19): siRNA sense strand
acucaagcaucaacagauu

SEQ ID NO: 1428532 - RNA, 19 nt, Homo sapiens
  misc_RNA (1)...(19): siRNA sense strand
guaaagccauccagaacac

SEQ ID NO: 1428533 - RNA, 19 nt, Homo sapiens
  misc_RNA (1)...(19): siRNA sense strand
gagcaagaaccuuuccaau

SEQ ID NO: 1428534 - RNA, 19 nt, Homo sapiens
  misc_RNA (1)...(19): siRNA sense strand
gaaagugucaugcggaaaa

SEQ ID NO: 1428535 - RNA, 19 nt, Homo sapiens
  misc_RNA (1)...(19): siRNA sense strand
gcacccaccugagcagcuu

SEQ ID NO: 1428536 - RNA, 19 nt, Homo sapiens
  misc_RNA (1)...(19): siRNA sense strand
ucagugaucccgagacaga

SEQ ID NO: 1428537 - RNA, 19 nt, Homo sapiens
  misc_RNA (1)...(19): siRNA sense strand
ccuccaggccucaccuuua

SEQ ID NO: 1428538 - RNA, 19 nt, Homo sapiens
  misc_RNA (1)...(19): siRNA sense strand
ucuccucccucaauaguga

SEQ ID NO: 1428539 - RNA, 19 nt, Homo sapiens
  misc_RNA (1)...(19): siRNA sense strand
ggagacuugugacgacauc

SEQ ID NO: 1428540 - RNA, 19 nt, Homo sapiens
  misc_RNA (1)...(19): siRNA sense strand
ccgcgucuuucucgucuuu

SEQ ID NO: 1428541 - RNA, 19 nt, Homo sapiens
  misc_RNA (1)...(19): siRNA sense strand
ggccugagcaagaaccuuu

SEQ ID NO: 1428542 - RNA, 19 nt, Homo sapiens
  misc_RNA (1)...(19): siRNA sense strand
gcacaauaggcaccagaga

SEQ ID NO: 1428543 - RNA, 19 nt, Homo sapiens
  misc_RNA (1)...(19): siRNA sense strand
ggacuccucgugugucaau

SEQ ID NO: 1428544 - RNA, 19 nt, Homo sapiens
  misc_RNA (1)...(19): siRNA sense strand
ucacuuuucuccuguguaa

SEQ ID NO: 1428545 - RNA, 19 nt, Homo sapiens
  misc_RNA (1)...(19): siRNA sense strand
ggaccugucugcgccaucu

SEQ ID NO: 1428546 - RNA, 19 nt, Homo sapiens
  misc_RNA (1)...(19): siRNA sense strand
cgagaacacgugucaagau

SEQ ID NO: 1428547 - RNA, 19 nt, Homo sapiens
  misc_RNA (1)...(19): siRNA sense strand
gccgguaccuugcacuauc

SEQ ID NO: 1428548 - RNA, 19 nt, Homo sapiens
  misc_RNA (1)...(19): siRNA sense strand
guucagugaucccgagaca

SEQ ID NO: 1428549 - RNA, 19 nt, Homo sapiens
  misc_RNA (1)...(19): siRNA sense strand
cuccaggccucaccuuuau

SEQ ID NO: 1428550 - RNA, 19 nt, Homo sapiens
  misc_RNA (1)...(19): siRNA sense strand
aaccucagcuccccaguua

SEQ ID NO: 1428551 - RNA, 19 nt, Homo sapiens
  misc_RNA (1)...(19): siRNA sense strand
uaugggaaaugguccaaag

SEQ ID NO: 1428552 - RNA, 19 nt, Homo sapiens
  misc_RNA (1)...(19): siRNA sense strand
ucuggugacucucuggauu

SEQ ID NO: 1428553 - RNA, 19 nt, Homo sapiens
  misc_RNA (1)...(19): siRNA sense strand
guccacagccagacgcuuu

SEQ ID NO: 1428554 - RNA, 19 nt, Homo sapiens
  misc_RNA (1)...(19): siRNA sense strand
ccagacgcuuucccgauuc

SEQ ID NO: 1428555 - RNA, 19 nt, Homo sapiens
  misc_RNA (1)...(19): siRNA sense strand
aucaacagauucaugaaga

SEQ ID NO: 1428556 - RNA, 19 nt, Homo sapiens
  misc_RNA (1)...(19): siRNA sense strand
gucaacuacucaagcauca

SEQ ID NO: 1428557 - RNA, 19 nt, Homo sapiens
  misc_RNA (1)...(19): siRNA sense strand
ccucauggcccacuacgau

SEQ ID NO: 1428558 - RNA, 19 nt, Homo sapiens
  misc_RNA (1)...(19): siRNA sense strand
caccauccagagcaucuua

SEQ ID NO: 1428559 - RNA, 19 nt, Homo sapiens
  misc_RNA (1)...(19): siRNA sense strand
cagaauggauguggucacu

SEQ ID NO: 1428560 - RNA, 19 nt, Homo sapiens
  misc_RNA (1)...(19): siRNA sense strand
aaacugagucugagaugca

SEQ ID NO: 1428561 - RNA, 19 nt, Homo sapiens
  misc_RNA (1)...(19): siRNA sense strand
gccuaccucuucaccauca

SEQ ID NO: 1428562 - RNA, 19 nt, Homo sapiens
  misc_RNA (1)...(19): siRNA sense strand
guaccuugcacuaucucua

SEQ ID NO: 1428563 - RNA, 19 nt, Homo sapiens
  misc_RNA (1)...(19): siRNA sense strand
cagcuuugccguccucaug

SEQ ID NO: 1428564 - RNA, 19 nt, Homo sapiens
  misc_RNA (1)...(19): siRNA sense strand
gcagggugucuucaucuuc

SEQ ID NO: 1428565 - RNA, 19 nt, Homo sapiens
  misc_RNA (1)...(19): siRNA sense strand
gcgagaacacgugucaaga

SEQ ID NO: 1428566 - RNA, 19 nt, Homo sapiens
  misc_RNA (1)...(19): siRNA sense strand
caaagggaucaggaaauug

SEQ ID NO: 1428567 - RNA, 19 nt, Homo sapiens
  misc_RNA (1)...(19): siRNA sense strand
caucaacgagugugcaaca

SEQ ID NO: 1428568 - RNA, 19 nt, Homo sapiens
  misc_RNA (1)...(19): siRNA sense strand
ugugaucucugccuuucug

SEQ ID NO: 1428569 - RNA, 19 nt, Homo sapiens
  misc_RNA (1)...(19): siRNA sense strand
agcaagaaccuuuccaaug

SEQ ID NO: 1428570 - RNA, 19 nt, Homo sapiens
  misc_RNA (1)...(19): siRNA sense strand
acaauaggcaccagagaca

SEQ ID NO: 1428571 - RNA, 19 nt, Homo sapiens
  misc_RNA (1)...(19): siRNA sense strand
gccaucuucucugugaauu

SEQ ID NO: 1428572 - RNA, 19 nt, Homo sapiens
  misc_RNA (1)...(19): siRNA sense strand
ccagaaaagggauuuauau

SEQ ID NO: 1428573 - RNA, 19 nt, Homo sapiens
  misc_RNA (1)...(19): siRNA sense strand
guggucaacuacucaagca

SEQ ID NO: 1428574 - RNA, 19 nt, Homo sapiens
  misc_RNA (1)...(19): siRNA sense strand
uggauggccuagaggaugu

SEQ ID NO: 1428575 - RNA, 19 nt, Homo sapiens
  misc_RNA (1)...(19): siRNA sense strand
caacagauucaugaagaag

SEQ ID NO: 1428576 - RNA, 19 nt, Homo sapiens
  misc_RNA (1)...(19): siRNA sense strand
ucaagcaucaacagauuca

SEQ ID NO: 1428577 - RNA, 19 nt, Homo sapiens
  misc_RNA (1)...(19): siRNA sense strand
gaaucaggcacagaaaucu

SEQ ID NO: 1428578 - RNA, 19 nt, Homo sapiens
  misc_RNA (1)...(19): siRNA sense strand
ggaggugcagaagcaagua

SEQ ID NO: 1428579 - RNA, 19 nt, Homo sapiens
  misc_RNA (1)...(19): siRNA sense strand
gcagguccgggagcaauau

SEQ ID NO: 1428580 - RNA, 19 nt, Homo sapiens
  misc_RNA (1)...(19): siRNA sense strand
agucugagaugcacacacu

SEQ ID NO: 1428581 - RNA, 19 nt, Homo sapiens
  misc_RNA (1)...(19): siRNA sense strand
gguccaaagggaucaggaa

SEQ ID NO: 1428582 - RNA, 19 nt, Homo sapiens
  misc_RNA (1)...(19): siRNA sense strand
agaaggugcucugugucuu

SEQ ID NO: 1428583 - RNA, 19 nt, Homo sapiens
  misc_RNA (1)...(19): siRNA sense strand
guccaaagggaucaggaaa

SEQ ID NO: 1428584 - RNA, 19 nt, Homo sapiens
  misc_RNA (1)...(19): siRNA sense strand
gugacucucuggauuuuga

SEQ ID NO: 1428585 - RNA, 19 nt, Homo sapiens
  misc_RNA (1)...(19): siRNA sense strand
caacuacucaagcaucaac

SEQ ID NO: 1428586 - RNA, 19 nt, Homo sapiens
  misc_RNA (1)...(19): siRNA sense strand
ggaccugggcagagacuac

SEQ ID NO: 1428587 - RNA, 19 nt, Homo sapiens
  misc_RNA (1)...(19): siRNA sense strand
uggccuaccucuucaccau

SEQ ID NO: 1428588 - RNA, 19 nt, Homo sapiens
  misc_RNA (1)...(19): siRNA sense strand
gucauggccuaccucuuca

SEQ ID NO: 1428589 - RNA, 19 nt, Homo sapiens
  misc_RNA (1)...(19): siRNA sense strand
ucucgucuuucucgcauuc

SEQ ID NO: 1428590 - RNA, 19 nt, Homo sapiens
  misc_RNA (1)...(19): siRNA sense strand
caucaacagauucaugaag

SEQ ID NO: 1428591 - RNA, 19 nt, Homo sapiens
  misc_RNA (1)...(19): siRNA sense strand
gcaucaacagauucaugaa

SEQ ID NO: 1428592 - RNA, 19 nt, Homo sapiens
  misc_RNA (1)...(19): siRNA sense strand
ucaagaaugagagcgagaa

SEQ ID NO: 1428593 - RNA, 19 nt, Homo sapiens
  misc_RNA (1)...(19): siRNA sense strand
cagacucuccucccucaau

SEQ ID NO: 1428594 - RNA, 19 nt, Homo sapiens
  misc_RNA (1)...(19): siRNA sense strand
aaggugcugugcuccauca

SEQ ID NO: 1428595 - RNA, 19 nt, Homo sapiens
  misc_RNA (1)...(19): siRNA sense strand
cacaggcugcagcacaaua

SEQ ID NO: 1428596 - RNA, 19 nt, Homo sapiens
  misc_RNA (1)...(19): siRNA sense strand
gcaacaacgacacccaaaa

SEQ ID NO: 1428597 - RNA, 19 nt, Homo sapiens
  misc_RNA (1)...(19): siRNA sense strand
gaaaacugagucugagaug

SEQ ID NO: 1428598 - RNA, 19 nt, Homo sapiens
  misc_RNA (1)...(19): siRNA sense strand
cuacucaagcaucaacaga

SEQ ID NO: 1428599 - RNA, 19 nt, Homo sapiens
  misc_RNA (1)...(19): siRNA sense strand
gcaagaaccuuuccaaugg

SEQ ID NO: 1428600 - RNA, 19 nt, Homo sapiens
  misc_RNA (1)...(19): siRNA sense strand
ccaaugggcuguugaacuu

SEQ ID NO: 1428601 - RNA, 19 nt, Homo sapiens
  misc_RNA (1)...(19): siRNA sense strand
caucuucucugugaauuua

SEQ ID NO: 1428602 - RNA, 19 nt, Homo sapiens
  misc_RNA (1)...(19): siRNA sense strand
ccaaagggaucaggaaauu

SEQ ID NO: 1428603 - RNA, 19 nt, Homo sapiens
  misc_RNA (1)...(19): siRNA sense strand
gaauuuaguucucuuucug

SEQ ID NO: 1428604 - RNA, 19 nt, Homo sapiens
  misc_RNA (1)...(19): siRNA sense strand
gugcaacacugucgaaagu

SEQ ID NO: 1428605 - RNA, 19 nt, Homo sapiens
  misc_RNA (1)...(19): siRNA sense strand
gccagacgcuuucccgauu

SEQ ID NO: 1428606 - RNA, 19 nt, Homo sapiens
  misc_RNA (1)...(19): siRNA sense strand
ggucauggccuaccucuuc

SEQ ID NO: 1428607 - RNA, 19 nt, Homo sapiens
  misc_RNA (1)...(19): siRNA sense strand
gaugugaucucugccuuuc

SEQ ID NO: 1428608 - RNA, 19 nt, Homo sapiens
  misc_RNA (1)...(19): siRNA sense strand
ggaaucaggcacagaaauc

SEQ ID NO: 1428609 - RNA, 19 nt, Homo sapiens
  misc_RNA (1)...(19): siRNA sense strand
ccaguuaccuucaccuucu

SEQ ID NO: 1428610 - RNA, 19 nt, Homo sapiens
  misc_RNA (1)...(19): siRNA sense strand
ugaugcagcucgacuggaa

SEQ ID NO: 1428611 - RNA, 19 nt, Homo sapiens
  misc_RNA (1)...(19): siRNA sense strand
aaagggaucaggaaauuga

SEQ ID NO: 1428612 - RNA, 19 nt, Homo sapiens
  misc_RNA (1)...(19): siRNA sense strand
agacucuccucccucaaua

SEQ ID NO: 1428613 - RNA, 19 nt, Homo sapiens
  misc_RNA (1)...(19): siRNA sense strand
gagcauggccagaauggau

SEQ ID NO: 1428614 - RNA, 19 nt, Homo sapiens
  misc_RNA (1)...(19): siRNA sense strand
ucaacagauucaugaagaa

SEQ ID NO: 1428615 - RNA, 19 nt, Homo sapiens
  misc_RNA (1)...(19): siRNA sense strand
ggagcaauaugggaaaugg

SEQ ID NO: 1428616 - RNA, 19 nt, Homo sapiens
  misc_RNA (1)...(19): siRNA sense strand
acucaagcaucaacagauu

SEQ ID NO: 1428617 - RNA, 19 nt, Homo sapiens
  misc_RNA (1)...(19): siRNA sense strand
guaaagccauccagaacac

SEQ ID NO: 1428618 - RNA, 19 nt, Homo sapiens
  misc_RNA (1)...(19): siRNA sense strand
gagcaagaaccuuuccaau

SEQ ID NO: 1428619 - RNA, 19 nt, Homo sapiens
  misc_RNA (1)...(19): siRNA sense strand
gaaagugucaugcggaaaa

SEQ ID NO: 1428620 - RNA, 19 nt, Homo sapiens
  misc_RNA (1)...(19): siRNA sense strand
gcacccaccugagcagcuu

SEQ ID NO: 1428621 - RNA, 19 nt, Homo sapiens
  misc_RNA (1)...(19): siRNA sense strand
ucagugaucccgagacaga

SEQ ID NO: 1428622 - RNA, 19 nt, Homo sapiens
  misc_RNA (1)...(19): siRNA sense strand
ccuccaggccucaccuuua

SEQ ID NO: 1428623 - RNA, 19 nt, Homo sapiens
  misc_RNA (1)...(19): siRNA sense strand
ucuccucccucaauaguga

SEQ ID NO: 1428624 - RNA, 19 nt, Homo sapiens
  misc_RNA (1)...(19): siRNA sense strand
ggagacuugugacgacauc

SEQ ID NO: 1428625 - RNA, 19 nt, Homo sapiens
  misc_RNA (1)...(19): siRNA sense strand
ccgcgucuuucucgucuuu

SEQ ID NO: 1428626 - RNA, 19 nt, Homo sapiens
  misc_RNA (1)...(19): siRNA sense strand
ggccugagcaagaaccuuu

SEQ ID NO: 1428627 - RNA, 19 nt, Homo sapiens
  misc_RNA (1)...(19): siRNA sense strand
gcacaauaggcaccagaga

SEQ ID NO: 1428628 - RNA, 19 nt, Homo sapiens
  misc_RNA (1)...(19): siRNA sense strand
ggacuccucgugugucaau

SEQ ID NO: 1428629 - RNA, 19 nt, Homo sapiens
  misc_RNA (1)...(19): siRNA sense strand
ucacuuuucuccuguguaa

SEQ ID NO: 1428630 - RNA, 19 nt, Homo sapiens
  misc_RNA (1)...(19): siRNA sense strand
ggaccugucugcgccaucu

SEQ ID NO: 1428631 - RNA, 19 nt, Homo sapiens
  misc_RNA (1)...(19): siRNA sense strand
cgagaacacgugucaagau

SEQ ID NO: 1428632 - RNA, 19 nt, Homo sapiens
  misc_RNA (1)...(19): siRNA sense strand
gccgguaccuugcacuauc

SEQ ID NO: 1428633 - RNA, 19 nt, Homo sapiens
  misc_RNA (1)...(19): siRNA sense strand
guucagugaucccgagaca

SEQ ID NO: 1428634 - RNA, 19 nt, Homo sapiens
  misc_RNA (1)...(19): siRNA sense strand
cuccaggccucaccuuuau

SEQ ID NO: 1428635 - RNA, 19 nt, Homo sapiens
  misc_RNA (1)...(19): siRNA sense strand
aaccucagcuccccaguua

SEQ ID NO: 1428636 - RNA, 19 nt, Homo sapiens
  misc_RNA (1)...(19): siRNA sense strand
uaugggaaaugguccaaag

SEQ ID NO: 1428637 - RNA, 19 nt, Homo sapiens
  misc_RNA (1)...(19): siRNA sense strand
ucuggugacucucuggauu

SEQ ID NO: 1428638 - RNA, 19 nt, Homo sapiens
  misc_RNA (1)...(19): siRNA sense strand
guccacagccagacgcuuu

SEQ ID NO: 1428639 - RNA, 19 nt, Homo sapiens
  misc_RNA (1)...(19): siRNA sense strand
ccagacgcuuucccgauuc

SEQ ID NO: 1428640 - RNA, 19 nt, Homo sapiens
  misc_RNA (1)...(19): siRNA sense strand
aucaacagauucaugaaga

SEQ ID NO: 1428641 - RNA, 19 nt, Homo sapiens
  misc_RNA (1)...(19): siRNA sense strand
gucaacuacucaagcauca

SEQ ID NO: 1428642 - RNA, 19 nt, Homo sapiens
  misc_RNA (1)...(19): siRNA sense strand
ccucauggcccacuacgau

SEQ ID NO: 1428643 - RNA, 19 nt, Homo sapiens
  misc_RNA (1)...(19): siRNA sense strand
caccauccagagcaucuua

SEQ ID NO: 1428644 - RNA, 19 nt, Homo sapiens
  misc_RNA (1)...(19): siRNA sense strand
cagaauggauguggucacu

SEQ ID NO: 1428645 - RNA, 19 nt, Homo sapiens
  misc_RNA (1)...(19): siRNA sense strand
aaacugagucugagaugca

SEQ ID NO: 1428646 - RNA, 19 nt, Homo sapiens
  misc_RNA (1)...(19): siRNA sense strand
gccuaccucuucaccauca

SEQ ID NO: 1428647 - RNA, 19 nt, Homo sapiens
  misc_RNA (1)...(19): siRNA sense strand
guaccuugcacuaucucua

SEQ ID NO: 1428648 - RNA, 19 nt, Homo sapiens
  misc_RNA (1)...(19): siRNA sense strand
cagcuuugccguccucaug

SEQ ID NO: 1428649 - RNA, 19 nt, Homo sapiens
  misc_RNA (1)...(19): siRNA sense strand
gcagggugucuucaucuuc

SEQ ID NO: 1428650 - RNA, 19 nt, Homo sapiens
  misc_RNA (1)...(19): siRNA sense strand
gcgagaacacgugucaaga

SEQ ID NO: 1428651 - RNA, 19 nt, Homo sapiens
  misc_RNA (1)...(19): siRNA sense strand
caaagggaucaggaaauug

SEQ ID NO: 1428652 - RNA, 19 nt, Homo sapiens
  misc_RNA (1)...(19): siRNA sense strand
caucaacgagugugcaaca

SEQ ID NO: 1428653 - RNA, 19 nt, Homo sapiens
  misc_RNA (1)...(19): siRNA sense strand
ugugaucucugccuuucug

SEQ ID NO: 1428654 - RNA, 19 nt, Homo sapiens
  misc_RNA (1)...(19): siRNA sense strand
agcaagaaccuuuccaaug

SEQ ID NO: 1428655 - RNA, 19 nt, Homo sapiens
  misc_RNA (1)...(19): siRNA sense strand
acaauaggcaccagagaca

SEQ ID NO: 1428656 - RNA, 19 nt, Homo sapiens
  misc_RNA (1)...(19): siRNA sense strand
gccaucuucucugugaauu

SEQ ID NO: 1428657 - RNA, 19 nt, Homo sapiens
  misc_RNA (1)...(19): siRNA sense strand
ccagaaaagggauuuauau

SEQ ID NO: 1428658 - RNA, 19 nt, Homo sapiens
  misc_RNA (1)...(19): siRNA sense strand
guggucaacuacucaagca

SEQ ID NO: 1428659 - RNA, 19 nt, Homo sapiens
  misc_RNA (1)...(19): siRNA sense strand
uggauggccuagaggaugu

SEQ ID NO: 1428660 - RNA, 19 nt, Homo sapiens
  misc_RNA (1)...(19): siRNA sense strand
caacagauucaugaagaag

SEQ ID NO: 1428661 - RNA, 19 nt, Homo sapiens
  misc_RNA (1)...(19): siRNA sense strand
ucaagcaucaacagauuca

SEQ ID NO: 1428662 - RNA, 19 nt, Homo sapiens
  misc_RNA (1)...(19): siRNA sense strand
gaaucaggcacagaaaucu

SEQ ID NO: 1428663 - RNA, 19 nt, Homo sapiens
  misc_RNA (1)...(19): siRNA sense strand
ggaggugcagaagcaagua

SEQ ID NO: 1428664 - RNA, 19 nt, Homo sapiens
  misc_RNA (1)...(19): siRNA sense strand
gcagguccgggagcaauau

SEQ ID NO: 1428665 - RNA, 19 nt, Homo sapiens
  misc_RNA (1)...(19): siRNA sense strand
agucugagaugcacacacu

SEQ ID NO: 1428666 - RNA, 19 nt, Homo sapiens
  misc_RNA (1)...(19): siRNA sense strand
gguccaaagggaucaggaa

SEQ ID NO: 1428667 - RNA, 19 nt, Homo sapiens
  misc_RNA (1)...(19): siRNA sense strand
agaaggugcucugugucuu

SEQ ID NO: 1428668 - RNA, 19 nt, Homo sapiens
  misc_RNA (1)...(19): siRNA sense strand
guccaaagggaucaggaaa

SEQ ID NO: 1428669 - RNA, 19 nt, Homo sapiens
  misc_RNA (1)...(19): siRNA sense strand
gugacucucuggauuuuga

SEQ ID NO: 1428670 - RNA, 19 nt, Homo sapiens
  misc_RNA (1)...(19): siRNA sense strand
caacuacucaagcaucaac

SEQ ID NO: 1428671 - RNA, 19 nt, Homo sapiens
  misc_RNA (1)...(19): siRNA sense strand
ggaccugggcagagacuac

SEQ ID NO: 1428672 - RNA, 19 nt, Homo sapiens
  misc_RNA (1)...(19): siRNA sense strand
uggccuaccucuucaccau

SEQ ID NO: 1428673 - RNA, 19 nt, Homo sapiens
  misc_RNA (1)...(19): siRNA sense strand
gucauggccuaccucuuca

SEQ ID NO: 1428674 - RNA, 19 nt, Homo sapiens
  misc_RNA (1)...(19): siRNA sense strand
ucucgucuuucucgcauuc

SEQ ID NO: 1428675 - RNA, 19 nt, Homo sapiens
  misc_RNA (1)...(19): siRNA sense strand
caucaacagauucaugaag

SEQ ID NO: 1428676 - RNA, 19 nt, Homo sapiens
  misc_RNA (1)...(19): siRNA sense strand
gcaucaacagauucaugaa

SEQ ID NO: 1428677 - RNA, 19 nt, Homo sapiens
  misc_RNA (1)...(19): siRNA sense strand
ucaagaaugagagcgagaa

SEQ ID NO: 1428678 - RNA, 19 nt, Homo sapiens
  misc_RNA (1)...(19): siRNA sense strand
cagacucuccucccucaau

SEQ ID NO: 1428679 - RNA, 19 nt, Homo sapiens
  misc_RNA (1)...(19): siRNA sense strand
aaggugcugugcuccauca

SEQ ID NO: 1428680 - RNA, 19 nt, Homo sapiens
  misc_RNA (1)...(19): siRNA sense strand
cacaggcugcagcacaaua

SEQ ID NO: 1428681 - RNA, 19 nt, Homo sapiens
  misc_RNA (1)...(19): siRNA sense strand
gcaacaacgacacccaaaa

SEQ ID NO: 1428682 - RNA, 19 nt, Homo sapiens
  misc_RNA (1)...(19): siRNA sense strand
gaaaacugagucugagaug

SEQ ID NO: 1428683 - RNA, 19 nt, Homo sapiens
  misc_RNA (1)...(19): siRNA sense strand
cuacucaagcaucaacaga

SEQ ID NO: 1428684 - RNA, 19 nt, Homo sapiens
  misc_RNA (1)...(19): siRNA sense strand
gcaagaaccuuuccaaugg

SEQ ID NO: 1428685 - RNA, 19 nt, Homo sapiens
  misc_RNA (1)...(19): siRNA sense strand
ccaaugggcuguugaacuu

SEQ ID NO: 1428686 - RNA, 19 nt, Homo sapiens
  misc_RNA (1)...(19): siRNA sense strand
caucuucucugugaauuua

SEQ ID NO: 1428687 - RNA, 19 nt, Homo sapiens
  misc_RNA (1)...(19): siRNA sense strand
ccaaagggaucaggaaauu

SEQ ID NO: 1428688 - RNA, 19 nt, Homo sapiens
  misc_RNA (1)...(19): siRNA sense strand
gaauuuaguucucuuucug

SEQ ID NO: 1428689 - RNA, 19 nt, Homo sapiens
  misc_RNA (1)...(19): siRNA sense strand
gugcaacacugucgaaagu

SEQ ID NO: 1428690 - RNA, 19 nt, Homo sapiens
  misc_RNA (1)...(19): siRNA sense strand
gccagacgcuuucccgauu

SEQ ID NO: 1428691 - RNA, 19 nt, Homo sapiens
  misc_RNA (1)...(19): siRNA sense strand
ggucauggccuaccucuuc

SEQ ID NO: 1428692 - RNA, 19 nt, Homo sapiens
  misc_RNA (1)...(19): siRNA sense strand
gaugugaucucugccuuuc

SEQ ID NO: 1428693 - RNA, 19 nt, Homo sapiens
  misc_RNA (1)...(19): siRNA sense strand
ggaaucaggcacagaaauc

SEQ ID NO: 1428694 - RNA, 19 nt, Homo sapiens
  misc_RNA (1)...(19): siRNA sense strand
ccaguuaccuucaccuucu

SEQ ID NO: 1428695 - RNA, 19 nt, Homo sapiens
  misc_RNA (1)...(19): siRNA sense strand
ugaugcagcucgacuggaa

SEQ ID NO: 1428696 - RNA, 19 nt, Homo sapiens
  misc_RNA (1)...(19): siRNA sense strand
aaagggaucaggaaauuga

SEQ ID NO: 1428697 - RNA, 19 nt, Homo sapiens
  misc_RNA (1)...(19): siRNA sense strand
agacucuccucccucaaua

SEQ ID NO: 1428698 - RNA, 19 nt, Homo sapiens
  misc_RNA (1)...(19): siRNA sense strand
gagcauggccagaauggau

SEQ ID NO: 1428699 - RNA, 19 nt, Homo sapiens
  misc_RNA (1)...(19): siRNA sense strand
ucaacagauucaugaagaa

SEQ ID NO: 1428700 - RNA, 19 nt, Homo sapiens
  misc_RNA (1)...(19): siRNA sense strand
ggagcaauaugggaaaugg

SEQ ID NO: 1428701 - RNA, 19 nt, Homo sapiens
  misc_RNA (1)...(19): siRNA sense strand
acucaagcaucaacagauu

SEQ ID NO: 1428702 - RNA, 19 nt, Homo sapiens
  misc_RNA (1)...(19): siRNA sense strand
guaaagccauccagaacac

SEQ ID NO: 1428703 - RNA, 19 nt, Homo sapiens
  misc_RNA (1)...(19): siRNA sense strand
gagcaagaaccuuuccaau

SEQ ID NO: 1428704 - RNA, 19 nt, Homo sapiens
  misc_RNA (1)...(19): siRNA sense strand
gaaagugucaugcggaaaa

SEQ ID NO: 1428705 - RNA, 19 nt, Homo sapiens
  misc_RNA (1)...(19): siRNA sense strand
gcacccaccugagcagcuu

SEQ ID NO: 1428706 - RNA, 19 nt, Homo sapiens
  misc_RNA (1)...(19): siRNA sense strand
ucagugaucccgagacaga

SEQ ID NO: 1428707 - RNA, 19 nt, Homo sapiens
  misc_RNA (1)...(19): siRNA sense strand
ccuccaggccucaccuuua

SEQ ID NO: 1428708 - RNA, 19 nt, Homo sapiens
  misc_RNA (1)...(19): siRNA sense strand
ucuccucccucaauaguga

SEQ ID NO: 1428709 - RNA, 19 nt, Homo sapiens
  misc_RNA (1)...(19): siRNA sense strand
ggagacuugugacgacauc

SEQ ID NO: 1428710 - RNA, 19 nt, Homo sapiens
  misc_RNA (1)...(19): siRNA sense strand
ccgcgucuuucucgucuuu

SEQ ID NO: 1428711 - RNA, 19 nt, Homo sapiens
  misc_RNA (1)...(19): siRNA sense strand
ggccugagcaagaaccuuu

SEQ ID NO: 1428712 - RNA, 19 nt, Homo sapiens
  misc_RNA (1)...(19): siRNA sense strand
gcacaauaggcaccagaga

SEQ ID NO: 1428713 - RNA, 19 nt, Homo sapiens
  misc_RNA (1)...(19): siRNA sense strand
ggacuccucgugugucaau

SEQ ID NO: 1428714 - RNA, 19 nt, Homo sapiens
  misc_RNA (1)...(19): siRNA sense strand
ucacuuuucuccuguguaa

SEQ ID NO: 1428715 - RNA, 19 nt, Homo sapiens
  misc_RNA (1)...(19): siRNA sense strand
ggaccugucugcgccaucu

SEQ ID NO: 1428716 - RNA, 19 nt, Homo sapiens
  misc_RNA (1)...(19): siRNA sense strand
cgagaacacgugucaagau

SEQ ID NO: 1428717 - RNA, 19 nt, Homo sapiens
  misc_RNA (1)...(19): siRNA sense strand
gccgguaccuugcacuauc

SEQ ID NO: 1428718 - RNA, 19 nt, Homo sapiens
  misc_RNA (1)...(19): siRNA sense strand
guucagugaucccgagaca

SEQ ID NO: 1428719 - RNA, 19 nt, Homo sapiens
  misc_RNA (1)...(19): siRNA sense strand
cuccaggccucaccuuuau

SEQ ID NO: 1428720 - RNA, 19 nt, Homo sapiens
  misc_RNA (1)...(19): siRNA sense strand
aaccucagcuccccaguua

SEQ ID NO: 1428721 - RNA, 19 nt, Homo sapiens
  misc_RNA (1)...(19): siRNA sense strand
uaugggaaaugguccaaag

SEQ ID NO: 1428722 - RNA, 19 nt, Homo sapiens
  misc_RNA (1)...(19): siRNA sense strand
ucuggugacucucuggauu

SEQ ID NO: 1428723 - RNA, 19 nt, Homo sapiens
  misc_RNA (1)...(19): siRNA sense strand
guccacagccagacgcuuu

SEQ ID NO: 1428724 - RNA, 19 nt, Homo sapiens
  misc_RNA (1)...(19): siRNA sense strand
ccagacgcuuucccgauuc

SEQ ID NO: 1428725 - RNA, 19 nt, Homo sapiens
  misc_RNA (1)...(19): siRNA sense strand
aucaacagauucaugaaga

SEQ ID NO: 1428726 - RNA, 19 nt, Homo sapiens
  misc_RNA (1)...(19): siRNA sense strand
gucaacuacucaagcauca

SEQ ID NO: 1428727 - RNA, 19 nt, Homo sapiens
  misc_RNA (1)...(19): siRNA sense strand
ccucauggcccacuacgau

SEQ ID NO: 1428728 - RNA, 19 nt, Homo sapiens
  misc_RNA (1)...(19): siRNA sense strand
caccauccagagcaucuua

SEQ ID NO: 1428729 - RNA, 19 nt, Homo sapiens
  misc_RNA (1)...(19): siRNA sense strand
cagaauggauguggucacu

SEQ ID NO: 1428730 - RNA, 19 nt, Homo sapiens
  misc_RNA (1)...(19): siRNA sense strand
aaacugagucugagaugca

SEQ ID NO: 1428731 - RNA, 19 nt, Homo sapiens
  misc_RNA (1)...(19): siRNA sense strand
gccuaccucuucaccauca

SEQ ID NO: 1428732 - RNA, 19 nt, Homo sapiens
  misc_RNA (1)...(19): siRNA sense strand
guaccuugcacuaucucua

SEQ ID NO: 1428733 - RNA, 19 nt, Homo sapiens
  misc_RNA (1)...(19): siRNA sense strand
cagcuuugccguccucaug

SEQ ID NO: 1428734 - RNA, 19 nt, Homo sapiens
  misc_RNA (1)...(19): siRNA sense strand
gcagggugucuucaucuuc

SEQ ID NO: 1428735 - RNA, 19 nt, Homo sapiens
  misc_RNA (1)...(19): siRNA sense strand
gcgagaacacgugucaaga

SEQ ID NO: 1428736 - RNA, 19 nt, Homo sapiens
  misc_RNA (1)...(19): siRNA sense strand
caaagggaucaggaaauug

SEQ ID NO: 1428737 - RNA, 19 nt, Homo sapiens
  misc_RNA (1)...(19): siRNA sense strand
caucaacgagugugcaaca

SEQ ID NO: 1428738 - RNA, 19 nt, Homo sapiens
  misc_RNA (1)...(19): siRNA sense strand
ugugaucucugccuuucug

SEQ ID NO: 1428739 - RNA, 19 nt, Homo sapiens
  misc_RNA (1)...(19): siRNA sense strand
agcaagaaccuuuccaaug

SEQ ID NO: 1428740 - RNA, 19 nt, Homo sapiens
  misc_RNA (1)...(19): siRNA sense strand
acaauaggcaccagagaca

SEQ ID NO: 1428741 - RNA, 19 nt, Homo sapiens
  misc_RNA (1)...(19): siRNA sense strand
gccaucuucucugugaauu

SEQ ID NO: 1428742 - RNA, 19 nt, Homo sapiens
  misc_RNA (1)...(19): siRNA sense strand
ccagaaaagggauuuauau

SEQ ID NO: 1428743 - RNA, 19 nt, Homo sapiens
  misc_RNA (1)...(19): siRNA sense strand
guggucaacuacucaagca

SEQ ID NO: 1428744 - RNA, 19 nt, Homo sapiens
  misc_RNA (1)...(19): siRNA sense strand
uggauggccuagaggaugu

SEQ ID NO: 1428745 - RNA, 19 nt, Homo sapiens
  misc_RNA (1)...(19): siRNA sense strand
caacagauucaugaagaag

SEQ ID NO: 1428746 - RNA, 19 nt, Homo sapiens
  misc_RNA (1)...(19): siRNA sense strand
ucaagcaucaacagauuca

SEQ ID NO: 1428747 - RNA, 19 nt, Homo sapiens
  misc_RNA (1)...(19): siRNA sense strand
gaaucaggcacagaaaucu

SEQ ID NO: 1428748 - RNA, 19 nt, Homo sapiens
  misc_RNA (1)...(19): siRNA sense strand
ggaggugcagaagcaagua

SEQ ID NO: 1428749 - RNA, 19 nt, Homo sapiens
  misc_RNA (1)...(19): siRNA sense strand
gcagguccgggagcaauau

SEQ ID NO: 1428750 - RNA, 19 nt, Homo sapiens
  misc_RNA (1)...(19): siRNA sense strand
agucugagaugcacacacu

SEQ ID NO: 1428751 - RNA, 19 nt, Homo sapiens
  misc_RNA (1)...(19): siRNA sense strand
gguccaaagggaucaggaa

SEQ ID NO: 1428752 - RNA, 19 nt, Homo sapiens
  misc_RNA (1)...(19): siRNA sense strand
agaaggugcucugugucuu

SEQ ID NO: 1428753 - RNA, 19 nt, Homo sapiens
  misc_RNA (1)...(19): siRNA sense strand
guccaaagggaucaggaaa

SEQ ID NO: 1428754 - RNA, 19 nt, Homo sapiens
  misc_RNA (1)...(19): siRNA sense strand
gugacucucuggauuuuga

SEQ ID NO: 1428755 - RNA, 19 nt, Homo sapiens
  misc_RNA (1)...(19): siRNA sense strand
caacuacucaagcaucaac

SEQ ID NO: 1428756 - RNA, 19 nt, Homo sapiens
  misc_RNA (1)...(19): siRNA sense strand
ggaccugggcagagacuac

SEQ ID NO: 1428757 - RNA, 19 nt, Homo sapiens
  misc_RNA (1)...(19): siRNA sense strand
uggccuaccucuucaccau

SEQ ID NO: 1428758 - RNA, 19 nt, Homo sapiens
  misc_RNA (1)...(19): siRNA sense strand
gucauggccuaccucuuca

SEQ ID NO: 1428759 - RNA, 19 nt, Homo sapiens
  misc_RNA (1)...(19): siRNA sense strand
ucucgucuuucucgcauuc

SEQ ID NO: 1428760 - RNA, 19 nt, Homo sapiens
  misc_RNA (1)...(19): siRNA sense strand
caucaacagauucaugaag

SEQ ID NO: 1428761 - RNA, 19 nt, Homo sapiens
  misc_RNA (1)...(19): siRNA sense strand
gcaucaacagauucaugaa

SEQ ID NO: 1428762 - RNA, 19 nt, Homo sapiens
  misc_RNA (1)...(19): siRNA sense strand
ucaagaaugagagcgagaa

SEQ ID NO: 1428763 - RNA, 19 nt, Homo sapiens
  misc_RNA (1)...(19): siRNA sense strand
cagacucuccucccucaau

SEQ ID NO: 1428764 - RNA, 19 nt, Homo sapiens
  misc_RNA (1)...(19): siRNA sense strand
aaggugcugugcuccauca

SEQ ID NO: 1428765 - RNA, 19 nt, Homo sapiens
  misc_RNA (1)...(19): siRNA sense strand
cacaggcugcagcacaaua

SEQ ID NO: 1428766 - RNA, 19 nt, Homo sapiens
  misc_RNA (1)...(19): siRNA sense strand
gcaacaacgacacccaaaa

SEQ ID NO: 1428767 - RNA, 19 nt, Homo sapiens
  misc_RNA (1)...(19): siRNA sense strand
gaaaacugagucugagaug

SEQ ID NO: 1428768 - RNA, 19 nt, Homo sapiens
  misc_RNA (1)...(19): siRNA sense strand
cuacucaagcaucaacaga

SEQ ID NO: 1428769 - RNA, 19 nt, Homo sapiens
  misc_RNA (1)...(19): siRNA sense strand
gcaagaaccuuuccaaugg

SEQ ID NO: 1428770 - RNA, 19 nt, Homo sapiens
  misc_RNA (1)...(19): siRNA sense strand
ccaaugggcuguugaacuu

SEQ ID NO: 1428771 - RNA, 19 nt, Homo sapiens
  misc_RNA (1)...(19): siRNA sense strand
caucuucucugugaauuua

SEQ ID NO: 1428772 - RNA, 19 nt, Homo sapiens
  misc_RNA (1)...(19): siRNA sense strand
ccaaagggaucaggaaauu

SEQ ID NO: 1428773 - RNA, 19 nt, Homo sapiens
  misc_RNA (1)...(19): siRNA sense strand
gaauuuaguucucuuucug

SEQ ID NO: 1428774 - RNA, 19 nt, Homo sapiens
  misc_RNA (1)...(19): siRNA sense strand
gugcaacacugucgaaagu

SEQ ID NO: 1428775 - RNA, 19 nt, Homo sapiens
  misc_RNA (1)...(19): siRNA sense strand
gccagacgcuuucccgauu

SEQ ID NO: 1428776 - RNA, 19 nt, Homo sapiens
  misc_RNA (1)...(19): siRNA sense strand
ggucauggccuaccucuuc

SEQ ID NO: 1428777 - RNA, 19 nt, Homo sapiens
  misc_RNA (1)...(19): siRNA sense strand
gaugugaucucugccuuuc

SEQ ID NO: 1428778 - RNA, 19 nt, Homo sapiens
  misc_RNA (1)...(19): siRNA sense strand
ggaaucaggcacagaaauc

SEQ ID NO: 1428779 - RNA, 19 nt, Homo sapiens
  misc_RNA (1)...(19): siRNA sense strand
ccaguuaccuucaccuucu

SEQ ID NO: 1428780 - RNA, 19 nt, Homo sapiens
  misc_RNA (1)...(19): siRNA sense strand
ugaugcagcucgacuggaa

SEQ ID NO: 1428781 - RNA, 19 nt, Homo sapiens
  misc_RNA (1)...(19): siRNA sense strand
aaagggaucaggaaauuga

SEQ ID NO: 1428782 - RNA, 19 nt, Homo sapiens
  misc_RNA (1)...(19): siRNA sense strand
agacucuccucccucaaua

SEQ ID NO: 1428783 - RNA, 19 nt, Homo sapiens
  misc_RNA (1)...(19): siRNA sense strand
gagcauggccagaauggau

SEQ ID NO: 1428784 - RNA, 19 nt, Homo sapiens
  misc_RNA (1)...(19): siRNA sense strand
ucaacagauucaugaagaa

SEQ ID NO: 1428785 - RNA, 19 nt, Homo sapiens
  misc_RNA (1)...(19): siRNA sense strand
ggagcaauaugggaaaugg

SEQ ID NO: 1428786 - RNA, 19 nt, Homo sapiens
  misc_RNA (1)...(19): siRNA sense strand
acucaagcaucaacagauu

SEQ ID NO: 1428787 - RNA, 19 nt, Homo sapiens
  misc_RNA (1)...(19): siRNA sense strand
guaaagccauccagaacac

SEQ ID NO: 1428788 - RNA, 19 nt, Homo sapiens
  misc_RNA (1)...(19): siRNA sense strand
gagcaagaaccuuuccaau

SEQ ID NO: 1428789 - RNA, 19 nt, Homo sapiens
  misc_RNA (1)...(19): siRNA sense strand
gaaagugucaugcggaaaa

SEQ ID NO: 1428790 - RNA, 19 nt, Homo sapiens
  misc_RNA (1)...(19): siRNA sense strand
gcacccaccugagcagcuu

SEQ ID NO: 1428791 - RNA, 19 nt, Homo sapiens
  misc_RNA (1)...(19): siRNA sense strand
ucagugaucccgagacaga

SEQ ID NO: 1428792 - RNA, 19 nt, Homo sapiens
  misc_RNA (1)...(19): siRNA sense strand
ccuccaggccucaccuuua

SEQ ID NO: 1428793 - RNA, 19 nt, Homo sapiens
  misc_RNA (1)...(19): siRNA sense strand
ucuccucccucaauaguga

SEQ ID NO: 1428794 - RNA, 19 nt, Homo sapiens
  misc_RNA (1)...(19): siRNA sense strand
ggagacuugugacgacauc

SEQ ID NO: 1428795 - RNA, 19 nt, Homo sapiens
  misc_RNA (1)...(19): siRNA sense strand
ccgcgucuuucucgucuuu

SEQ ID NO: 1428796 - RNA, 19 nt, Homo sapiens
  misc_RNA (1)...(19): siRNA sense strand
ggccugagcaagaaccuuu

SEQ ID NO: 1428797 - RNA, 19 nt, Homo sapiens
  misc_RNA (1)...(19): siRNA sense strand
gcacaauaggcaccagaga

SEQ ID NO: 1428798 - RNA, 19 nt, Homo sapiens
  misc_RNA (1)...(19): siRNA sense strand
ggacuccucgugugucaau

SEQ ID NO: 1428799 - RNA, 19 nt, Homo sapiens
  misc_RNA (1)...(19): siRNA sense strand
ucacuuuucuccuguguaa

SEQ ID NO: 1428800 - RNA, 19 nt, Homo sapiens
  misc_RNA (1)...(19): siRNA sense strand
ggaccugucugcgccaucu

SEQ ID NO: 1428801 - RNA, 19 nt, Homo sapiens
  misc_RNA (1)...(19): siRNA sense strand
cgagaacacgugucaagau

SEQ ID NO: 1428802 - RNA, 19 nt, Homo sapiens
  misc_RNA (1)...(19): siRNA sense strand
gccgguaccuugcacuauc

SEQ ID NO: 1428803 - RNA, 19 nt, Homo sapiens
  misc_RNA (1)...(19): siRNA sense strand
guucagugaucccgagaca

SEQ ID NO: 1428804 - RNA, 19 nt, Homo sapiens
  misc_RNA (1)...(19): siRNA sense strand
cuccaggccucaccuuuau

SEQ ID NO: 1428805 - RNA, 19 nt, Homo sapiens
  misc_RNA (1)...(19): siRNA sense strand
aaccucagcuccccaguua

SEQ ID NO: 1428806 - RNA, 19 nt, Homo sapiens
  misc_RNA (1)...(19): siRNA sense strand
uaugggaaaugguccaaag

SEQ ID NO: 1428807 - RNA, 19 nt, Homo sapiens
  misc_RNA (1)...(19): siRNA sense strand
ucuggugacucucuggauu

SEQ ID NO: 1428808 - RNA, 19 nt, Homo sapiens
  misc_RNA (1)...(19): siRNA sense strand
guccacagccagacgcuuu

SEQ ID NO: 1428809 - RNA, 19 nt, Homo sapiens
  misc_RNA (1)...(19): siRNA sense strand
ccagacgcuuucccgauuc

SEQ ID NO: 1428810 - RNA, 19 nt, Homo sapiens
  misc_RNA (1)...(19): siRNA sense strand
aucaacagauucaugaaga

SEQ ID NO: 1428811 - RNA, 19 nt, Homo sapiens
  misc_RNA (1)...(19): siRNA sense strand
gucaacuacucaagcauca

SEQ ID NO: 1428812 - RNA, 19 nt, Homo sapiens
  misc_RNA (1)...(19): siRNA sense strand
ccucauggcccacuacgau

SEQ ID NO: 1428813 - RNA, 19 nt, Homo sapiens
  misc_RNA (1)...(19): siRNA sense strand
caccauccagagcaucuua

SEQ ID NO: 1428814 - RNA, 19 nt, Homo sapiens
  misc_RNA (1)...(19): siRNA sense strand
cagaauggauguggucacu

SEQ ID NO: 1428815 - RNA, 19 nt, Homo sapiens
  misc_RNA (1)...(19): siRNA sense strand
aaacugagucugagaugca

SEQ ID NO: 1428816 - RNA, 19 nt, Homo sapiens
  misc_RNA (1)...(19): siRNA sense strand
gccuaccucuucaccauca

SEQ ID NO: 1428817 - RNA, 19 nt, Homo sapiens
  misc_RNA (1)...(19): siRNA sense strand
guaccuugcacuaucucua

SEQ ID NO: 1428818 - RNA, 19 nt, Homo sapiens
  misc_RNA (1)...(19): siRNA sense strand
cagcuuugccguccucaug

SEQ ID NO: 1428819 - RNA, 19 nt, Homo sapiens
  misc_RNA (1)...(19): siRNA sense strand
gcagggugucuucaucuuc

SEQ ID NO: 1428820 - RNA, 19 nt, Homo sapiens
  misc_RNA (1)...(19): siRNA sense strand
gcgagaacacgugucaaga

SEQ ID NO: 1428821 - RNA, 19 nt, Homo sapiens
  misc_RNA (1)...(19): siRNA sense strand
caaagggaucaggaaauug

SEQ ID NO: 1428822 - RNA, 19 nt, Homo sapiens
  misc_RNA (1)...(19): siRNA sense strand
caucaacgagugugcaaca

SEQ ID NO: 1428823 - RNA, 19 nt, Homo sapiens
  misc_RNA (1)...(19): siRNA sense strand
ugugaucucugccuuucug

SEQ ID NO: 1428824 - RNA, 19 nt, Homo sapiens
  misc_RNA (1)...(19): siRNA sense strand
agcaagaaccuuuccaaug

SEQ ID NO: 1428825 - RNA, 19 nt, Homo sapiens
  misc_RNA (1)...(19): siRNA sense strand
acaauaggcaccagagaca

SEQ ID NO: 1428826 - RNA, 19 nt, Homo sapiens
  misc_RNA (1)...(19): siRNA sense strand
gccaucuucucugugaauu

SEQ ID NO: 1428827 - RNA, 19 nt, Homo sapiens
  misc_RNA (1)...(19): siRNA sense strand
ccagaaaagggauuuauau

SEQ ID NO: 1428828 - RNA, 19 nt, Homo sapiens
  misc_RNA (1)...(19): siRNA sense strand
guggucaacuacucaagca

SEQ ID NO: 1428829 - RNA, 19 nt, Homo sapiens
  misc_RNA (1)...(19): siRNA sense strand
uggauggccuagaggaugu

SEQ ID NO: 1428830 - RNA, 19 nt, Homo sapiens
  misc_RNA (1)...(19): siRNA sense strand
caacagauucaugaagaag

SEQ ID NO: 1428831 - RNA, 19 nt, Homo sapiens
  misc_RNA (1)...(19): siRNA sense strand
ucaagcaucaacagauuca

SEQ ID NO: 1428832 - RNA, 19 nt, Homo sapiens
  misc_RNA (1)...(19): siRNA sense strand
gaaucaggcacagaaaucu

SEQ ID NO: 1428833 - RNA, 19 nt, Homo sapiens
  misc_RNA (1)...(19): siRNA sense strand
ggaggugcagaagcaagua

SEQ ID NO: 1428834 - RNA, 19 nt, Homo sapiens
  misc_RNA (1)...(19): siRNA sense strand
gcagguccgggagcaauau

SEQ ID NO: 1428835 - RNA, 19 nt, Homo sapiens
  misc_RNA (1)...(19): siRNA sense strand
agucugagaugcacacacu

SEQ ID NO: 1428836 - RNA, 19 nt, Homo sapiens
  misc_RNA (1)...(19): siRNA sense strand
gguccaaagggaucaggaa

SEQ ID NO: 1428837 - RNA, 19 nt, Homo sapiens
  misc_RNA (1)...(19): siRNA sense strand
agaaggugcucugugucuu

SEQ ID NO: 1428838 - RNA, 19 nt, Homo sapiens
  misc_RNA (1)...(19): siRNA sense strand
guccaaagggaucaggaaa

SEQ ID NO: 1428839 - RNA, 19 nt, Homo sapiens
  misc_RNA (1)...(19): siRNA sense strand
gugacucucuggauuuuga

SEQ ID NO: 1428840 - RNA, 19 nt, Homo sapiens
  misc_RNA (1)...(19): siRNA sense strand
caacuacucaagcaucaac

SEQ ID NO: 1428841 - RNA, 19 nt, Homo sapiens
  misc_RNA (1)...(19): siRNA sense strand
ggaccugggcagagacuac

SEQ ID NO: 1428842 - RNA, 19 nt, Homo sapiens
  misc_RNA (1)...(19): siRNA sense strand
uggccuaccucuucaccau

SEQ ID NO: 1428843 - RNA, 19 nt, Homo sapiens
  misc_RNA (1)...(19): siRNA sense strand
gucauggccuaccucuuca

SEQ ID NO: 1428844 - RNA, 19 nt, Homo sapiens
  misc_RNA (1)...(19): siRNA sense strand
ucucgucuuucucgcauuc

SEQ ID NO: 1428845 - RNA, 19 nt, Homo sapiens
  misc_RNA (1)...(19): siRNA sense strand
caucaacagauucaugaag

SEQ ID NO: 1428846 - RNA, 19 nt, Homo sapiens
  misc_RNA (1)...(19): siRNA sense strand
gcaucaacagauucaugaa

SEQ ID NO: 1428847 - RNA, 19 nt, Homo sapiens
  misc_RNA (1)...(19): siRNA sense strand
ucaagaaugagagcgagaa

SEQ ID NO: 1428848 - RNA, 19 nt, Homo sapiens
  misc_RNA (1)...(19): siRNA sense strand
cagacucuccucccucaau

SEQ ID NO: 1428849 - RNA, 19 nt, Homo sapiens
  misc_RNA (1)...(19): siRNA sense strand
aaggugcugugcuccauca

SEQ ID NO: 1428850 - RNA, 19 nt, Homo sapiens
  misc_RNA (1)...(19): siRNA sense strand
cacaggcugcagcacaaua

SEQ ID NO: 1428851 - RNA, 19 nt, Homo sapiens
  misc_RNA (1)...(19): siRNA sense strand
gcaacaacgacacccaaaa

SEQ ID NO: 1428852 - RNA, 19 nt, Homo sapiens
  misc_RNA (1)...(19): siRNA sense strand
gaaaacugagucugagaug

SEQ ID NO: 1428853 - RNA, 19 nt, Homo sapiens
  misc_RNA (1)...(19): siRNA sense strand
cuacucaagcaucaacaga

SEQ ID NO: 1428854 - RNA, 19 nt, Homo sapiens
  misc_RNA (1)...(19): siRNA sense strand
gcaagaaccuuuccaaugg

SEQ ID NO: 1428855 - RNA, 19 nt, Homo sapiens
  misc_RNA (1)...(19): siRNA sense strand
ccaaugggcuguugaacuu

SEQ ID NO: 1428856 - RNA, 19 nt, Homo sapiens
  misc_RNA (1)...(19): siRNA sense strand
caucuucucugugaauuua

SEQ ID NO: 1428857 - RNA, 19 nt, Homo sapiens
  misc_RNA (1)...(19): siRNA sense strand
ccaaagggaucaggaaauu

SEQ ID NO: 1428858 - RNA, 19 nt, Homo sapiens
  misc_RNA (1)...(19): siRNA sense strand
gaauuuaguucucuuucug

SEQ ID NO: 1428859 - RNA, 19 nt, Homo sapiens
  misc_RNA (1)...(19): siRNA sense strand
gugcaacacugucgaaagu

SEQ ID NO: 1428860 - RNA, 19 nt, Homo sapiens
  misc_RNA (1)...(19): siRNA sense strand
gccagacgcuuucccgauu

SEQ ID NO: 1428861 - RNA, 19 nt, Homo sapiens
  misc_RNA (1)...(19): siRNA sense strand
ggucauggccuaccucuuc

SEQ ID NO: 1428862 - RNA, 19 nt, Homo sapiens
  misc_RNA (1)...(19): siRNA sense strand
gaugugaucucugccuuuc

SEQ ID NO: 1428863 - RNA, 19 nt, Homo sapiens
  misc_RNA (1)...(19): siRNA sense strand
ggaaucaggcacagaaauc

SEQ ID NO: 1428864 - RNA, 19 nt, Homo sapiens
  misc_RNA (1)...(19): siRNA sense strand
ccaguuaccuucaccuucu

SEQ ID NO: 1428865 - RNA, 19 nt, Homo sapiens
  misc_RNA (1)...(19): siRNA sense strand
ugaugcagcucgacuggaa

SEQ ID NO: 1428866 - RNA, 19 nt, Homo sapiens
  misc_RNA (1)...(19): siRNA sense strand
aaagggaucaggaaauuga

SEQ ID NO: 1428867 - RNA, 19 nt, Homo sapiens
  misc_RNA (1)...(19): siRNA sense strand
agacucuccucccucaaua

SEQ ID NO: 1428868 - RNA, 19 nt, Homo sapiens
  misc_RNA (1)...(19): siRNA sense strand
gagcauggccagaauggau

SEQ ID NO: 1428869 - RNA, 19 nt, Homo sapiens
  misc_RNA (1)...(19): siRNA sense strand
ucaacagauucaugaagaa

SEQ ID NO: 1428870 - RNA, 19 nt, Homo sapiens
  misc_RNA (1)...(19): siRNA sense strand
ggagcaauaugggaaaugg

SEQ ID NO: 1428871 - RNA, 19 nt, Homo sapiens
  misc_RNA (1)...(19): siRNA sense strand
acucaagcaucaacagauu

SEQ ID NO: 1428872 - RNA, 19 nt, Homo sapiens
  misc_RNA (1)...(19): siRNA sense strand
guaaagccauccagaacac

SEQ ID NO: 1428873 - RNA, 19 nt, Homo sapiens
  misc_RNA (1)...(19): siRNA sense strand
gagcaagaaccuuuccaau

SEQ ID NO: 1428874 - RNA, 19 nt, Homo sapiens
  misc_RNA (1)...(19): siRNA sense strand
gaaagugucaugcggaaaa

SEQ ID NO: 1428875 - RNA, 19 nt, Homo sapiens
  misc_RNA (1)...(19): siRNA sense strand
gcacccaccugagcagcuu

SEQ ID NO: 1428876 - RNA, 19 nt, Homo sapiens
  misc_RNA (1)...(19): siRNA sense strand
ucagugaucccgagacaga

SEQ ID NO: 1428877 - RNA, 19 nt, Homo sapiens
  misc_RNA (1)...(19): siRNA sense strand
ccuccaggccucaccuuua

SEQ ID NO: 1428878 - RNA, 19 nt, Homo sapiens
  misc_RNA (1)...(19): siRNA sense strand
ucuccucccucaauaguga

SEQ ID NO: 1428879 - RNA, 19 nt, Homo sapiens
  misc_RNA (1)...(19): siRNA sense strand
ggagacuugugacgacauc

SEQ ID NO: 1428880 - RNA, 19 nt, Homo sapiens
  misc_RNA (1)...(19): siRNA sense strand
ccgcgucuuucucgucuuu

SEQ ID NO: 1428881 - RNA, 19 nt, Homo sapiens
  misc_RNA (1)...(19): siRNA sense strand
ggccugagcaagaaccuuu

SEQ ID NO: 1428882 - RNA, 19 nt, Homo sapiens
  misc_RNA (1)...(19): siRNA sense strand
gcacaauaggcaccagaga

SEQ ID NO: 1428883 - RNA, 19 nt, Homo sapiens
  misc_RNA (1)...(19): siRNA sense strand
ggacuccucgugugucaau

SEQ ID NO: 1428884 - RNA, 19 nt, Homo sapiens
  misc_RNA (1)...(19): siRNA sense strand
ucacuuuucuccuguguaa

SEQ ID NO: 1428885 - RNA, 19 nt, Homo sapiens
  misc_RNA (1)...(19): siRNA sense strand
ggaccugucugcgccaucu

SEQ ID NO: 1428886 - RNA, 19 nt, Homo sapiens
  misc_RNA (1)...(19): siRNA sense strand
cgagaacacgugucaagau

SEQ ID NO: 1428887 - RNA, 19 nt, Homo sapiens
  misc_RNA (1)...(19): siRNA sense strand
gccgguaccuugcacuauc

SEQ ID NO: 1428888 - RNA, 19 nt, Homo sapiens
  misc_RNA (1)...(19): siRNA sense strand
guucagugaucccgagaca

SEQ ID NO: 1428889 - RNA, 19 nt, Homo sapiens
  misc_RNA (1)...(19): siRNA sense strand
cuccaggccucaccuuuau

SEQ ID NO: 1428890 - RNA, 19 nt, Homo sapiens
  misc_RNA (1)...(19): siRNA sense strand
aaccucagcuccccaguua

SEQ ID NO: 1428891 - RNA, 19 nt, Homo sapiens
  misc_RNA (1)...(19): siRNA sense strand
uaugggaaaugguccaaag

SEQ ID NO: 1428892 - RNA, 19 nt, Homo sapiens
  misc_RNA (1)...(19): siRNA sense strand
ucuggugacucucuggauu

SEQ ID NO: 1428893 - RNA, 19 nt, Homo sapiens
  misc_RNA (1)...(19): siRNA sense strand
guccacagccagacgcuuu

SEQ ID NO: 1428894 - RNA, 19 nt, Homo sapiens
  misc_RNA (1)...(19): siRNA sense strand
ccagacgcuuucccgauuc

SEQ ID NO: 1428895 - RNA, 19 nt, Homo sapiens
  misc_RNA (1)...(19): siRNA sense strand
aucaacagauucaugaaga

SEQ ID NO: 1428896 - RNA, 19 nt, Homo sapiens
  misc_RNA (1)...(19): siRNA sense strand
gucaacuacucaagcauca

SEQ ID NO: 1428897 - RNA, 19 nt, Homo sapiens
  misc_RNA (1)...(19): siRNA sense strand
ccucauggcccacuacgau

SEQ ID NO: 1428898 - RNA, 19 nt, Homo sapiens
  misc_RNA (1)...(19): siRNA sense strand
caccauccagagcaucuua

SEQ ID NO: 1428899 - RNA, 19 nt, Homo sapiens
  misc_RNA (1)...(19): siRNA sense strand
cagaauggauguggucacu

SEQ ID NO: 1428900 - RNA, 19 nt, Homo sapiens
  misc_RNA (1)...(19): siRNA sense strand
aaacugagucugagaugca

SEQ ID NO: 1428901 - RNA, 19 nt, Homo sapiens
  misc_RNA (1)...(19): siRNA sense strand
gccuaccucuucaccauca

SEQ ID NO: 1428902 - RNA, 19 nt, Homo sapiens
  misc_RNA (1)...(19): siRNA sense strand
guaccuugcacuaucucua

SEQ ID NO: 1428903 - RNA, 19 nt, Homo sapiens
  misc_RNA (1)...(19): siRNA sense strand
cagcuuugccguccucaug

SEQ ID NO: 1428904 - RNA, 19 nt, Homo sapiens
  misc_RNA (1)...(19): siRNA sense strand
gcagggugucuucaucuuc

SEQ ID NO: 1428905 - RNA, 19 nt, Homo sapiens
  misc_RNA (1)...(19): siRNA sense strand
gcgagaacacgugucaaga

SEQ ID NO: 1428906 - RNA, 19 nt, Homo sapiens
  misc_RNA (1)...(19): siRNA sense strand
caaagggaucaggaaauug

SEQ ID NO: 1428907 - RNA, 19 nt, Homo sapiens
  misc_RNA (1)...(19): siRNA sense strand
caucaacgagugugcaaca

SEQ ID NO: 1428908 - RNA, 19 nt, Homo sapiens
  misc_RNA (1)...(19): siRNA sense strand
ugugaucucugccuuucug

SEQ ID NO: 1428909 - RNA, 19 nt, Homo sapiens
  misc_RNA (1)...(19): siRNA sense strand
agcaagaaccuuuccaaug

SEQ ID NO: 1428910 - RNA, 19 nt, Homo sapiens
  misc_RNA (1)...(19): siRNA sense strand
acaauaggcaccagagaca

SEQ ID NO: 1428911 - RNA, 19 nt, Homo sapiens
  misc_RNA (1)...(19): siRNA sense strand
gccaucuucucugugaauu

SEQ ID NO: 1428912 - RNA, 19 nt, Homo sapiens
  misc_RNA (1)...(19): siRNA sense strand
ccagaaaagggauuuauau

SEQ ID NO: 1428913 - RNA, 19 nt, Homo sapiens
  misc_RNA (1)...(19): siRNA sense strand
guggucaacuacucaagca

SEQ ID NO: 1428914 - RNA, 19 nt, Homo sapiens
  misc_RNA (1)...(19): siRNA sense strand
uggauggccuagaggaugu

SEQ ID NO: 1428915 - RNA, 19 nt, Homo sapiens
  misc_RNA (1)...(19): siRNA sense strand
caacagauucaugaagaag

SEQ ID NO: 1428916 - RNA, 19 nt, Homo sapiens
  misc_RNA (1)...(19): siRNA sense strand
ucaagcaucaacagauuca

SEQ ID NO: 1428917 - RNA, 19 nt, Homo sapiens
  misc_RNA (1)...(19): siRNA sense strand
gaaucaggcacagaaaucu

SEQ ID NO: 1428918 - RNA, 19 nt, Homo sapiens
  misc_RNA (1)...(19): siRNA sense strand
ggaggugcagaagcaagua

SEQ ID NO: 1428919 - RNA, 19 nt, Homo sapiens
  misc_RNA (1)...(19): siRNA sense strand
gcagguccgggagcaauau

SEQ ID NO: 1428920 - RNA, 19 nt, Homo sapiens
  misc_RNA (1)...(19): siRNA sense strand
agucugagaugcacacacu

SEQ ID NO: 1428921 - RNA, 19 nt, Homo sapiens
  misc_RNA (1)...(19): siRNA sense strand
gguccaaagggaucaggaa

SEQ ID NO: 1428922 - RNA, 19 nt, Homo sapiens
  misc_RNA (1)...(19): siRNA sense strand
agaaggugcucugugucuu

SEQ ID NO: 1428923 - RNA, 19 nt, Homo sapiens
  misc_RNA (1)...(19): siRNA sense strand
guccaaagggaucaggaaa

SEQ ID NO: 1428924 - RNA, 19 nt, Homo sapiens
  misc_RNA (1)...(19): siRNA sense strand
gugacucucuggauuuuga

SEQ ID NO: 1428925 - RNA, 19 nt, Homo sapiens
  misc_RNA (1)...(19): siRNA sense strand
caacuacucaagcaucaac

SEQ ID NO: 1428926 - RNA, 19 nt, Homo sapiens
  misc_RNA (1)...(19): siRNA sense strand
ggaccugggcagagacuac

SEQ ID NO: 1428927 - RNA, 19 nt, Homo sapiens
  misc_RNA (1)...(19): siRNA sense strand
uggccuaccucuucaccau

SEQ ID NO: 1428928 - RNA, 19 nt, Homo sapiens
  misc_RNA (1)...(19): siRNA sense strand
gucauggccuaccucuuca

SEQ ID NO: 1428929 - RNA, 19 nt, Homo sapiens
  misc_RNA (1)...(19): siRNA sense strand
ucucgucuuucucgcauuc

SEQ ID NO: 1428930 - RNA, 19 nt, Homo sapiens
  misc_RNA (1)...(19): siRNA sense strand
caucaacagauucaugaag

SEQ ID NO: 1428931 - RNA, 19 nt, Homo sapiens
  misc_RNA (1)...(19): siRNA sense strand
gcaucaacagauucaugaa

SEQ ID NO: 1428932 - RNA, 19 nt, Homo sapiens
  misc_RNA (1)...(19): siRNA sense strand
ucaagaaugagagcgagaa

SEQ ID NO: 1428933 - RNA, 19 nt, Homo sapiens
  misc_RNA (1)...(19): siRNA sense strand
cagacucuccucccucaau

SEQ ID NO: 1428934 - RNA, 19 nt, Homo sapiens
  misc_RNA (1)...(19): siRNA sense strand
aaggugcugugcuccauca

SEQ ID NO: 1428935 - RNA, 19 nt, Homo sapiens
  misc_RNA (1)...(19): siRNA sense strand
cacaggcugcagcacaaua

SEQ ID NO: 1428936 - RNA, 19 nt, Homo sapiens
  misc_RNA (1)...(19): siRNA sense strand
gcaacaacgacacccaaaa

SEQ ID NO: 1428937 - RNA, 19 nt, Homo sapiens
  misc_RNA (1)...(19): siRNA sense strand
gaaaacugagucugagaug

SEQ ID NO: 1428938 - RNA, 19 nt, Homo sapiens
  misc_RNA (1)...(19): siRNA sense strand
cuacucaagcaucaacaga

SEQ ID NO: 1428939 - RNA, 19 nt, Homo sapiens
  misc_RNA (1)...(19): siRNA sense strand
gcaagaaccuuuccaaugg

SEQ ID NO: 1428940 - RNA, 19 nt, Homo sapiens
  misc_RNA (1)...(19): siRNA sense strand
ccaaugggcuguugaacuu

SEQ ID NO: 1428941 - RNA, 19 nt, Homo sapiens
  misc_RNA (1)...(19): siRNA sense strand
caucuucucugugaauuua

SEQ ID NO: 1428942 - RNA, 19 nt, Homo sapiens
  misc_RNA (1)...(19): siRNA sense strand
ccaaagggaucaggaaauu

SEQ ID NO: 1428943 - RNA, 19 nt, Homo sapiens
  misc_RNA (1)...(19): siRNA sense strand
gaauuuaguucucuuucug

SEQ ID NO: 1428944 - RNA, 19 nt, Homo sapiens
  misc_RNA (1)...(19): siRNA sense strand
gugcaacacugucgaaagu

SEQ ID NO: 1428945 - RNA, 19 nt, Homo sapiens
  misc_RNA (1)...(19): siRNA sense strand
gccagacgcuuucccgauu

SEQ ID NO: 1428946 - RNA, 19 nt, Homo sapiens
  misc_RNA (1)...(19): siRNA sense strand
ggucauggccuaccucuuc

SEQ ID NO: 1428947 - RNA, 19 nt, Homo sapiens
  misc_RNA (1)...(19): siRNA sense strand
gaugugaucucugccuuuc

SEQ ID NO: 1428948 - RNA, 19 nt, Homo sapiens
  misc_RNA (1)...(19): siRNA sense strand
ggaaucaggcacagaaauc

SEQ ID NO: 1428949 - RNA, 19 nt, Homo sapiens
  misc_RNA (1)...(19): siRNA sense strand
ccaguuaccuucaccuucu

SEQ ID NO: 1428950 - RNA, 19 nt, Homo sapiens
  misc_RNA (1)...(19): siRNA sense strand
ugaugcagcucgacuggaa

SEQ ID NO: 1428951 - RNA, 19 nt, Homo sapiens
  misc_RNA (1)...(19): siRNA sense strand
aaagggaucaggaaauuga

SEQ ID NO: 1428952 - RNA, 19 nt, Homo sapiens
  misc_RNA (1)...(19): siRNA sense strand
agacucuccucccucaaua

SEQ ID NO: 1428953 - RNA, 19 nt, Homo sapiens
  misc_RNA (1)...(19): siRNA sense strand
gagcauggccagaauggau

SEQ ID NO: 1428954 - RNA, 19 nt, Homo sapiens
  misc_RNA (1)...(19): siRNA sense strand
ucaacagauucaugaagaa

SEQ ID NO: 1428955 - RNA, 19 nt, Homo sapiens
  misc_RNA (1)...(19): siRNA sense strand
ggagcaauaugggaaaugg

SEQ ID NO: 1428956 - RNA, 19 nt, Homo sapiens
  misc_RNA (1)...(19): siRNA sense strand
acucaagcaucaacagauu

SEQ ID NO: 1428957 - RNA, 19 nt, Homo sapiens
  misc_RNA (1)...(19): siRNA sense strand
guaaagccauccagaacac

SEQ ID NO: 1428958 - RNA, 19 nt, Homo sapiens
  misc_RNA (1)...(19): siRNA sense strand
gagcaagaaccuuuccaau

SEQ ID NO: 1428959 - RNA, 19 nt, Homo sapiens
  misc_RNA (1)...(19): siRNA sense strand
gaaagugucaugcggaaaa

SEQ ID NO: 1428960 - RNA, 19 nt, Homo sapiens
  misc_RNA (1)...(19): siRNA sense strand
gcacccaccugagcagcuu

SEQ ID NO: 1428961 - RNA, 19 nt, Homo sapiens
  misc_RNA (1)...(19): siRNA sense strand
ucagugaucccgagacaga

SEQ ID NO: 1428962 - RNA, 19 nt, Homo sapiens
  misc_RNA (1)...(19): siRNA sense strand
ccuccaggccucaccuuua

SEQ ID NO: 1428963 - RNA, 19 nt, Homo sapiens
  misc_RNA (1)...(19): siRNA sense strand
ucuccucccucaauaguga

SEQ ID NO: 1428964 - RNA, 19 nt, Homo sapiens
  misc_RNA (1)...(19): siRNA sense strand
ggagacuugugacgacauc

SEQ ID NO: 1428965 - RNA, 19 nt, Homo sapiens
  misc_RNA (1)...(19): siRNA sense strand
ccgcgucuuucucgucuuu

SEQ ID NO: 1428966 - RNA, 19 nt, Homo sapiens
  misc_RNA (1)...(19): siRNA sense strand
ggccugagcaagaaccuuu

SEQ ID NO: 1428967 - RNA, 19 nt, Homo sapiens
  misc_RNA (1)...(19): siRNA sense strand
gcacaauaggcaccagaga

SEQ ID NO: 1428968 - RNA, 19 nt, Homo sapiens
  misc_RNA (1)...(19): siRNA sense strand
ggacuccucgugugucaau

SEQ ID NO: 1428969 - RNA, 19 nt, Homo sapiens
  misc_RNA (1)...(19): siRNA sense strand
ucacuuuucuccuguguaa

SEQ ID NO: 1428970 - RNA, 19 nt, Homo sapiens
  misc_RNA (1)...(19): siRNA sense strand
ggaccugucugcgccaucu

SEQ ID NO: 1428971 - RNA, 19 nt, Homo sapiens
  misc_RNA (1)...(19): siRNA sense strand
cgagaacacgugucaagau

SEQ ID NO: 1428972 - RNA, 19 nt, Homo sapiens
  misc_RNA (1)...(19): siRNA sense strand
gccgguaccuugcacuauc

SEQ ID NO: 1428973 - RNA, 19 nt, Homo sapiens
  misc_RNA (1)...(19): siRNA sense strand
guucagugaucccgagaca

SEQ ID NO: 1428974 - RNA, 19 nt, Homo sapiens
  misc_RNA (1)...(19): siRNA sense strand
cuccaggccucaccuuuau

SEQ ID NO: 1428975 - RNA, 19 nt, Homo sapiens
  misc_RNA (1)...(19): siRNA sense strand
aaccucagcuccccaguua

SEQ ID NO: 1428976 - RNA, 19 nt, Homo sapiens
  misc_RNA (1)...(19): siRNA sense strand
uaugggaaaugguccaaag

SEQ ID NO: 1428977 - RNA, 19 nt, Homo sapiens
  misc_RNA (1)...(19): siRNA sense strand
ucuggugacucucuggauu

SEQ ID NO: 1428978 - RNA, 19 nt, Homo sapiens
  misc_RNA (1)...(19): siRNA sense strand
guccacagccagacgcuuu

SEQ ID NO: 1428979 - RNA, 19 nt, Homo sapiens
  misc_RNA (1)...(19): siRNA sense strand
ccagacgcuuucccgauuc

SEQ ID NO: 1428980 - RNA, 19 nt, Homo sapiens
  misc_RNA (1)...(19): siRNA sense strand
aucaacagauucaugaaga

SEQ ID NO: 1428981 - RNA, 19 nt, Homo sapiens
  misc_RNA (1)...(19): siRNA sense strand
gucaacuacucaagcauca

SEQ ID NO: 1428982 - RNA, 19 nt, Homo sapiens
  misc_RNA (1)...(19): siRNA sense strand
ccucauggcccacuacgau

SEQ ID NO: 1428983 - RNA, 19 nt, Homo sapiens
  misc_RNA (1)...(19): siRNA sense strand
caccauccagagcaucuua

SEQ ID NO: 1428984 - RNA, 19 nt, Homo sapiens
  misc_RNA (1)...(19): siRNA sense strand
cagaauggauguggucacu

SEQ ID NO: 1428985 - RNA, 19 nt, Homo sapiens
  misc_RNA (1)...(19): siRNA sense strand
aaacugagucugagaugca

SEQ ID NO: 1428986 - RNA, 19 nt, Homo sapiens
  misc_RNA (1)...(19): siRNA sense strand
gccuaccucuucaccauca

SEQ ID NO: 1428987 - RNA, 19 nt, Homo sapiens
  misc_RNA (1)...(19): siRNA sense strand
guaccuugcacuaucucua

SEQ ID NO: 1428988 - RNA, 19 nt, Homo sapiens
  misc_RNA (1)...(19): siRNA sense strand
cagcuuugccguccucaug

SEQ ID NO: 1428989 - RNA, 19 nt, Homo sapiens
  misc_RNA (1)...(19): siRNA sense strand
gcagggugucuucaucuuc

SEQ ID NO: 1428990 - RNA, 19 nt, Homo sapiens
  misc_RNA (1)...(19): siRNA sense strand
gcgagaacacgugucaaga

SEQ ID NO: 1428991 - RNA, 19 nt, Homo sapiens
  misc_RNA (1)...(19): siRNA sense strand
caaagggaucaggaaauug

SEQ ID NO: 1428992 - RNA, 19 nt, Homo sapiens
  misc_RNA (1)...(19): siRNA sense strand
caucaacgagugugcaaca

SEQ ID NO: 1428993 - RNA, 19 nt, Homo sapiens
  misc_RNA (1)...(19): siRNA sense strand
ugugaucucugccuuucug

SEQ ID NO: 1428994 - RNA, 19 nt, Homo sapiens
  misc_RNA (1)...(19): siRNA sense strand
agcaagaaccuuuccaaug

SEQ ID NO: 1428995 - RNA, 19 nt, Homo sapiens
  misc_RNA (1)...(19): siRNA sense strand
acaauaggcaccagagaca

SEQ ID NO: 1428996 - RNA, 19 nt, Homo sapiens
  misc_RNA (1)...(19): siRNA sense strand
gccaucuucucugugaauu

SEQ ID NO: 1428997 - RNA, 19 nt, Homo sapiens
  misc_RNA (1)...(19): siRNA sense strand
ccagaaaagggauuuauau

SEQ ID NO: 1428998 - RNA, 19 nt, Homo sapiens
  misc_RNA (1)...(19): siRNA sense strand
guggucaacuacucaagca

SEQ ID NO: 1428999 - RNA, 19 nt, Homo sapiens
  misc_RNA (1)...(19): siRNA sense strand
uggauggccuagaggaugu

SEQ ID NO: 1429000 - RNA, 19 nt, Homo sapiens
  misc_RNA (1)...(19): siRNA sense strand
caacagauucaugaagaag

SEQ ID NO: 1429001 - RNA, 19 nt, Homo sapiens
  misc_RNA (1)...(19): siRNA sense strand
ucaagcaucaacagauuca

SEQ ID NO: 1429002 - RNA, 19 nt, Homo sapiens
  misc_RNA (1)...(19): siRNA sense strand
gaaucaggcacagaaaucu

SEQ ID NO: 1429003 - RNA, 19 nt, Homo sapiens
  misc_RNA (1)...(19): siRNA sense strand
ggaggugcagaagcaagua

SEQ ID NO: 1429004 - RNA, 19 nt, Homo sapiens
  misc_RNA (1)...(19): siRNA sense strand
gcagguccgggagcaauau

SEQ ID NO: 1429005 - RNA, 19 nt, Homo sapiens
  misc_RNA (1)...(19): siRNA sense strand
agucugagaugcacacacu

SEQ ID NO: 1429006 - RNA, 19 nt, Homo sapiens
  misc_RNA (1)...(19): siRNA sense strand
gguccaaagggaucaggaa

SEQ ID NO: 1429007 - RNA, 19 nt, Homo sapiens
  misc_RNA (1)...(19): siRNA sense strand
agaaggugcucugugucuu

SEQ ID NO: 1429008 - RNA, 19 nt, Homo sapiens
  misc_RNA (1)...(19): siRNA sense strand
guccaaagggaucaggaaa

SEQ ID NO: 1429009 - RNA, 19 nt, Homo sapiens
  misc_RNA (1)...(19): siRNA sense strand
gugacucucuggauuuuga

SEQ ID NO: 1429010 - RNA, 19 nt, Homo sapiens
  misc_RNA (1)...(19): siRNA sense strand
caacuacucaagcaucaac

SEQ ID NO: 1429011 - RNA, 19 nt, Homo sapiens
  misc_RNA (1)...(19): siRNA sense strand
ggaccugggcagagacuac

SEQ ID NO: 1429012 - RNA, 19 nt, Homo sapiens
  misc_RNA (1)...(19): siRNA sense strand
uggccuaccucuucaccau

SEQ ID NO: 1429013 - RNA, 19 nt, Homo sapiens
  misc_RNA (1)...(19): siRNA sense strand
gucauggccuaccucuuca

SEQ ID NO: 1429014 - RNA, 19 nt, Homo sapiens
  misc_RNA (1)...(19): siRNA sense strand
ucucgucuuucucgcauuc

SEQ ID NO: 1429015 - RNA, 19 nt, Homo sapiens
  misc_RNA (1)...(19): siRNA sense strand
caucaacagauucaugaag

SEQ ID NO: 1429016 - RNA, 19 nt, Homo sapiens
  misc_RNA (1)...(19): siRNA sense strand
gcaucaacagauucaugaa

SEQ ID NO: 1429017 - RNA, 19 nt, Homo sapiens
  misc_RNA (1)...(19): siRNA sense strand
ucaagaaugagagcgagaa

SEQ ID NO: 1429018 - RNA, 19 nt, Homo sapiens
  misc_RNA (1)...(19): siRNA sense strand
cagacucuccucccucaau

SEQ ID NO: 1429019 - RNA, 19 nt, Homo sapiens
  misc_RNA (1)...(19): siRNA sense strand
aaggugcugugcuccauca

SEQ ID NO: 1429020 - RNA, 19 nt, Homo sapiens
  misc_RNA (1)...(19): siRNA sense strand
cacaggcugcagcacaaua

SEQ ID NO: 1429021 - RNA, 19 nt, Homo sapiens
  misc_RNA (1)...(19): siRNA sense strand
gcaacaacgacacccaaaa

SEQ ID NO: 1429022 - RNA, 19 nt, Homo sapiens
  misc_RNA (1)...(19): siRNA sense strand
gaaaacugagucugagaug

SEQ ID NO: 1429023 - RNA, 19 nt, Homo sapiens
  misc_RNA (1)...(19): siRNA sense strand
cuacucaagcaucaacaga

SEQ ID NO: 1429024 - RNA, 19 nt, Homo sapiens
  misc_RNA (1)...(19): siRNA sense strand
gcaagaaccuuuccaaugg

SEQ ID NO: 1429025 - RNA, 19 nt, Homo sapiens
  misc_RNA (1)...(19): siRNA sense strand
ccaaugggcuguugaacuu

SEQ ID NO: 1429026 - RNA, 19 nt, Homo sapiens
  misc_RNA (1)...(19): siRNA sense strand
caucuucucugugaauuua

SEQ ID NO: 1429027 - RNA, 19 nt, Homo sapiens
  misc_RNA (1)...(19): siRNA sense strand
ccaaagggaucaggaaauu

SEQ ID NO: 1429028 - RNA, 19 nt, Homo sapiens
  misc_RNA (1)...(19): siRNA sense strand
gaauuuaguucucuuucug

SEQ ID NO: 1429029 - RNA, 19 nt, Homo sapiens
  misc_RNA (1)...(19): siRNA sense strand
gugcaacacugucgaaagu

SEQ ID NO: 1429030 - RNA, 19 nt, Homo sapiens
  misc_RNA (1)...(19): siRNA sense strand
gccagacgcuuucccgauu

SEQ ID NO: 1429031 - RNA, 19 nt, Homo sapiens
  misc_RNA (1)...(19): siRNA sense strand
ggucauggccuaccucuuc

SEQ ID NO: 1429032 - RNA, 19 nt, Homo sapiens
  misc_RNA (1)...(19): siRNA sense strand
gaugugaucucugccuuuc

SEQ ID NO: 1429033 - RNA, 19 nt, Homo sapiens
  misc_RNA (1)...(19): siRNA sense strand
ggaaucaggcacagaaauc

SEQ ID NO: 1429034 - RNA, 19 nt, Homo sapiens
  misc_RNA (1)...(19): siRNA sense strand
ccaguuaccuucaccuucu

SEQ ID NO: 1429035 - RNA, 19 nt, Homo sapiens
  misc_RNA (1)...(19): siRNA sense strand
ugaugcagcucgacuggaa

SEQ ID NO: 1429036 - RNA, 19 nt, Homo sapiens
  misc_RNA (1)...(19): siRNA sense strand
aaagggaucaggaaauuga

SEQ ID NO: 1429037 - RNA, 19 nt, Homo sapiens
  misc_RNA (1)...(19): siRNA sense strand
agacucuccucccucaaua

SEQ ID NO: 1429038 - RNA, 19 nt, Homo sapiens
  misc_RNA (1)...(19): siRNA sense strand
gagcauggccagaauggau

SEQ ID NO: 1429039 - RNA, 19 nt, Homo sapiens
  misc_RNA (1)...(19): siRNA sense strand
ucaacagauucaugaagaa

SEQ ID NO: 1429040 - RNA, 19 nt, Homo sapiens
  misc_RNA (1)...(19): siRNA sense strand
ggagcaauaugggaaaugg

SEQ ID NO: 1429041 - RNA, 19 nt, Homo sapiens
  misc_RNA (1)...(19): siRNA sense strand
acucaagcaucaacagauu

SEQ ID NO: 1429042 - RNA, 19 nt, Homo sapiens
  misc_RNA (1)...(19): siRNA sense strand
guaaagccauccagaacac

SEQ ID NO: 1429043 - RNA, 19 nt, Homo sapiens
  misc_RNA (1)...(19): siRNA sense strand
gagcaagaaccuuuccaau

SEQ ID NO: 1429044 - RNA, 19 nt, Homo sapiens
  misc_RNA (1)...(19): siRNA sense strand
gaaagugucaugcggaaaa

SEQ ID NO: 1429045 - RNA, 19 nt, Homo sapiens
  misc_RNA (1)...(19): siRNA sense strand
gcacccaccugagcagcuu

SEQ ID NO: 1429046 - RNA, 19 nt, Homo sapiens
  misc_RNA (1)...(19): siRNA sense strand
ucagugaucccgagacaga

SEQ ID NO: 1429047 - RNA, 19 nt, Homo sapiens
  misc_RNA (1)...(19): siRNA sense strand
ccuccaggccucaccuuua

SEQ ID NO: 1429048 - RNA, 19 nt, Homo sapiens
  misc_RNA (1)...(19): siRNA sense strand
ucuccucccucaauaguga

SEQ ID NO: 1429049 - RNA, 19 nt, Homo sapiens
  misc_RNA (1)...(19): siRNA sense strand
ggagacuugugacgacauc

SEQ ID NO: 1429050 - RNA, 19 nt, Homo sapiens
  misc_RNA (1)...(19): siRNA sense strand
ccgcgucuuucucgucuuu

SEQ ID NO: 1429051 - RNA, 19 nt, Homo sapiens
  misc_RNA (1)...(19): siRNA sense strand
ggccugagcaagaaccuuu

SEQ ID NO: 1429052 - RNA, 19 nt, Homo sapiens
  misc_RNA (1)...(19): siRNA sense strand
gcacaauaggcaccagaga

SEQ ID NO: 1429053 - RNA, 19 nt, Homo sapiens
  misc_RNA (1)...(19): siRNA sense strand
ggacuccucgugugucaau

SEQ ID NO: 1429054 - RNA, 19 nt, Homo sapiens
  misc_RNA (1)...(19): siRNA sense strand
ucacuuuucuccuguguaa

SEQ ID NO: 1429055 - RNA, 19 nt, Homo sapiens
  misc_RNA (1)...(19): siRNA sense strand
ggaccugucugcgccaucu

SEQ ID NO: 1429056 - RNA, 19 nt, Homo sapiens
  misc_RNA (1)...(19): siRNA sense strand
cgagaacacgugucaagau

SEQ ID NO: 1429057 - RNA, 19 nt, Homo sapiens
  misc_RNA (1)...(19): siRNA sense strand
gccgguaccuugcacuauc

SEQ ID NO: 1429058 - RNA, 19 nt, Homo sapiens
  misc_RNA (1)...(19): siRNA sense strand
guucagugaucccgagaca

SEQ ID NO: 1429059 - RNA, 19 nt, Homo sapiens
  misc_RNA (1)...(19): siRNA sense strand
cuccaggccucaccuuuau

SEQ ID NO: 1429060 - RNA, 19 nt, Homo sapiens
  misc_RNA (1)...(19): siRNA sense strand
aaccucagcuccccaguua

SEQ ID NO: 1429061 - RNA, 19 nt, Homo sapiens
  misc_RNA (1)...(19): siRNA sense strand
uaugggaaaugguccaaag

SEQ ID NO: 1429062 - RNA, 19 nt, Homo sapiens
  misc_RNA (1)...(19): siRNA sense strand
ucuggugacucucuggauu

SEQ ID NO: 1429063 - RNA, 19 nt, Homo sapiens
  misc_RNA (1)...(19): siRNA sense strand
guccacagccagacgcuuu

SEQ ID NO: 1429064 - RNA, 19 nt, Homo sapiens
  misc_RNA (1)...(19): siRNA sense strand
ccagacgcuuucccgauuc

SEQ ID NO: 1429065 - RNA, 19 nt, Homo sapiens
  misc_RNA (1)...(19): siRNA sense strand
aucaacagauucaugaaga

SEQ ID NO: 1429066 - RNA, 19 nt, Homo sapiens
  misc_RNA (1)...(19): siRNA sense strand
gucaacuacucaagcauca

SEQ ID NO: 1429067 - RNA, 19 nt, Homo sapiens
  misc_RNA (1)...(19): siRNA sense strand
ccucauggcccacuacgau

SEQ ID NO: 1429068 - RNA, 19 nt, Homo sapiens
  misc_RNA (1)...(19): siRNA sense strand
caccauccagagcaucuua

SEQ ID NO: 1429069 - RNA, 19 nt, Homo sapiens
  misc_RNA (1)...(19): siRNA sense strand
cagaauggauguggucacu

SEQ ID NO: 1429070 - RNA, 19 nt, Homo sapiens
  misc_RNA (1)...(19): siRNA sense strand
aaacugagucugagaugca

SEQ ID NO: 1429071 - RNA, 19 nt, Homo sapiens
  misc_RNA (1)...(19): siRNA sense strand
gccuaccucuucaccauca

SEQ ID NO: 1429072 - RNA, 19 nt, Homo sapiens
  misc_RNA (1)...(19): siRNA sense strand
guaccuugcacuaucucua

SEQ ID NO: 1429073 - RNA, 19 nt, Homo sapiens
  misc_RNA (1)...(19): siRNA sense strand
cagcuuugccguccucaug

SEQ ID NO: 1429074 - RNA, 19 nt, Homo sapiens
  misc_RNA (1)...(19): siRNA sense strand
gcagggugucuucaucuuc

SEQ ID NO: 1429075 - RNA, 19 nt, Homo sapiens
  misc_RNA (1)...(19): siRNA sense strand
gcgagaacacgugucaaga

SEQ ID NO: 1429076 - RNA, 19 nt, Homo sapiens
  misc_RNA (1)...(19): siRNA sense strand
caaagggaucaggaaauug

SEQ ID NO: 1429077 - RNA, 19 nt, Homo sapiens
  misc_RNA (1)...(19): siRNA sense strand
caucaacgagugugcaaca

SEQ ID NO: 1429078 - RNA, 19 nt, Homo sapiens
  misc_RNA (1)...(19): siRNA sense strand
ugugaucucugccuuucug

SEQ ID NO: 1429079 - RNA, 19 nt, Homo sapiens
  misc_RNA (1)...(19): siRNA sense strand
agcaagaaccuuuccaaug

SEQ ID NO: 1429080 - RNA, 19 nt, Homo sapiens
  misc_RNA (1)...(19): siRNA sense strand
acaauaggcaccagagaca

SEQ ID NO: 1429081 - RNA, 19 nt, Homo sapiens
  misc_RNA (1)...(19): siRNA sense strand
gccaucuucucugugaauu

SEQ ID NO: 1429082 - RNA, 19 nt, Homo sapiens
  misc_RNA (1)...(19): siRNA sense strand
ccagaaaagggauuuauau

SEQ ID NO: 1429083 - RNA, 19 nt, Homo sapiens
  misc_RNA (1)...(19): siRNA sense strand
guggucaacuacucaagca

SEQ ID NO: 1429084 - RNA, 19 nt, Homo sapiens
  misc_RNA (1)...(19): siRNA sense strand
uggauggccuagaggaugu

SEQ ID NO: 1429085 - RNA, 19 nt, Homo sapiens
  misc_RNA (1)...(19): siRNA sense strand
caacagauucaugaagaag

SEQ ID NO: 1429086 - RNA, 19 nt, Homo sapiens
  misc_RNA (1)...(19): siRNA sense strand
ucaagcaucaacagauuca

SEQ ID NO: 1429087 - RNA, 19 nt, Homo sapiens
  misc_RNA (1)...(19): siRNA sense strand
gaaucaggcacagaaaucu

SEQ ID NO: 1429088 - RNA, 19 nt, Homo sapiens
  misc_RNA (1)...(19): siRNA sense strand
ggaggugcagaagcaagua

SEQ ID NO: 1429089 - RNA, 19 nt, Homo sapiens
  misc_RNA (1)...(19): siRNA sense strand
gcagguccgggagcaauau

SEQ ID NO: 1429090 - RNA, 19 nt, Homo sapiens
  misc_RNA (1)...(19): siRNA sense strand
agucugagaugcacacacu

SEQ ID NO: 1429091 - RNA, 19 nt, Homo sapiens
  misc_RNA (1)...(19): siRNA sense strand
gguccaaagggaucaggaa

SEQ ID NO: 1429092 - RNA, 19 nt, Homo sapiens
  misc_RNA (1)...(19): siRNA sense strand
agaaggugcucugugucuu

SEQ ID NO: 1429093 - RNA, 19 nt, Homo sapiens
  misc_RNA (1)...(19): siRNA sense strand
guccaaagggaucaggaaa

SEQ ID NO: 1429094 - RNA, 19 nt, Homo sapiens
  misc_RNA (1)...(19): siRNA sense strand
gugacucucuggauuuuga

SEQ ID NO: 1429095 - RNA, 19 nt, Homo sapiens
  misc_RNA (1)...(19): siRNA sense strand
caacuacucaagcaucaac

SEQ ID NO: 1429096 - RNA, 19 nt, Homo sapiens
  misc_RNA (1)...(19): siRNA sense strand
ggaccugggcagagacuac

SEQ ID NO: 1429097 - RNA, 19 nt, Homo sapiens
  misc_RNA (1)...(19): siRNA sense strand
uggccuaccucuucaccau

SEQ ID NO: 1429098 - RNA, 19 nt, Homo sapiens
  misc_RNA (1)...(19): siRNA sense strand
gucauggccuaccucuuca

SEQ ID NO: 1429099 - RNA, 19 nt, Homo sapiens
  misc_RNA (1)...(19): siRNA sense strand
ucucgucuuucucgcauuc

SEQ ID NO: 1429100 - RNA, 19 nt, Homo sapiens
  misc_RNA (1)...(19): siRNA sense strand
caucaacagauucaugaag

SEQ ID NO: 1429101 - RNA, 19 nt, Homo sapiens
  misc_RNA (1)...(19): siRNA sense strand
gcaucaacagauucaugaa

SEQ ID NO: 1429102 - RNA, 19 nt, Homo sapiens
  misc_RNA (1)...(19): siRNA sense strand
ucaagaaugagagcgagaa

SEQ ID NO: 1429103 - RNA, 19 nt, Homo sapiens
  misc_RNA (1)...(19): siRNA sense strand
cagacucuccucccucaau

SEQ ID NO: 1429104 - RNA, 19 nt, Homo sapiens
  misc_RNA (1)...(19): siRNA sense strand
aaggugcugugcuccauca

SEQ ID NO: 1429105 - RNA, 19 nt, Homo sapiens
  misc_RNA (1)...(19): siRNA sense strand
cacaggcugcagcacaaua

SEQ ID NO: 1429106 - RNA, 19 nt, Homo sapiens
  misc_RNA (1)...(19): siRNA sense strand
gcaacaacgacacccaaaa

SEQ ID NO: 1429107 - RNA, 19 nt, Homo sapiens
  misc_RNA (1)...(19): siRNA sense strand
gaaaacugagucugagaug

SEQ ID NO: 1429108 - RNA, 19 nt, Homo sapiens
  misc_RNA (1)...(19): siRNA sense strand
cuacucaagcaucaacaga

SEQ ID NO: 1429109 - RNA, 19 nt, Homo sapiens
  misc_RNA (1)...(19): siRNA sense strand
gcaagaaccuuuccaaugg

SEQ ID NO: 1429110 - RNA, 19 nt, Homo sapiens
  misc_RNA (1)...(19): siRNA sense strand
ccaaugggcuguugaacuu

SEQ ID NO: 1429111 - RNA, 19 nt, Homo sapiens
  misc_RNA (1)...(19): siRNA sense strand
caucuucucugugaauuua

SEQ ID NO: 1429112 - RNA, 19 nt, Homo sapiens
  misc_RNA (1)...(19): siRNA sense strand
ccaaagggaucaggaaauu

SEQ ID NO: 1429113 - RNA, 19 nt, Homo sapiens
  misc_RNA (1)...(19): siRNA sense strand
gaauuuaguucucuuucug

SEQ ID NO: 1429114 - RNA, 19 nt, Homo sapiens
  misc_RNA (1)...(19): siRNA sense strand
gugcaacacugucgaaagu

SEQ ID NO: 1429115 - RNA, 19 nt, Homo sapiens
  misc_RNA (1)...(19): siRNA sense strand
gccagacgcuuucccgauu

SEQ ID NO: 1429116 - RNA, 19 nt, Homo sapiens
  misc_RNA (1)...(19): siRNA sense strand
ggucauggccuaccucuuc

SEQ ID NO: 1429117 - RNA, 19 nt, Homo sapiens
  misc_RNA (1)...(19): siRNA sense strand
gaugugaucucugccuuuc

SEQ ID NO: 1429118 - RNA, 19 nt, Homo sapiens
  misc_RNA (1)...(19): siRNA sense strand
ggaaucaggcacagaaauc

SEQ ID NO: 1429119 - RNA, 19 nt, Homo sapiens
  misc_RNA (1)...(19): siRNA sense strand
ccaguuaccuucaccuucu

SEQ ID NO: 1429120 - RNA, 19 nt, Homo sapiens
  misc_RNA (1)...(19): siRNA sense strand
ugaugcagcucgacuggaa

SEQ ID NO: 1429121 - RNA, 19 nt, Homo sapiens
  misc_RNA (1)...(19): siRNA sense strand
aaagggaucaggaaauuga

SEQ ID NO: 1429122 - RNA, 19 nt, Homo sapiens
  misc_RNA (1)...(19): siRNA sense strand
agacucuccucccucaaua

SEQ ID NO: 1429123 - RNA, 19 nt, Homo sapiens
  misc_RNA (1)...(19): siRNA sense strand
gagcauggccagaauggau

SEQ ID NO: 1429124 - RNA, 19 nt, Homo sapiens
  misc_RNA (1)...(19): siRNA sense strand
ucaacagauucaugaagaa

SEQ ID NO: 1429125 - RNA, 19 nt, Homo sapiens
  misc_RNA (1)...(19): siRNA sense strand
ggagcaauaugggaaaugg

SEQ ID NO: 1429126 - RNA, 19 nt, Homo sapiens
  misc_RNA (1)...(19): siRNA sense strand
acucaagcaucaacagauu

SEQ ID NO: 1429127 - RNA, 19 nt, Homo sapiens
  misc_RNA (1)...(19): siRNA sense strand
guaaagccauccagaacac

SEQ ID NO: 1429128 - RNA, 19 nt, Homo sapiens
  misc_RNA (1)...(19): siRNA sense strand
gagcaagaaccuuuccaau

SEQ ID NO: 1429129 - RNA, 19 nt, Homo sapiens
  misc_RNA (1)...(19): siRNA sense strand
gaaagugucaugcggaaaa

SEQ ID NO: 1429130 - RNA, 19 nt, Homo sapiens
  misc_RNA (1)...(19): siRNA sense strand
gcacccaccugagcagcuu

SEQ ID NO: 1429131 - RNA, 19 nt, Homo sapiens
  misc_RNA (1)...(19): siRNA sense strand
ucagugaucccgagacaga

SEQ ID NO: 1429132 - RNA, 19 nt, Homo sapiens
  misc_RNA (1)...(19): siRNA sense strand
ccuccaggccucaccuuua

SEQ ID NO: 1429133 - RNA, 19 nt, Homo sapiens
  misc_RNA (1)...(19): siRNA sense strand
ucuccucccucaauaguga

SEQ ID NO: 1429134 - RNA, 19 nt, Homo sapiens
  misc_RNA (1)...(19): siRNA sense strand
ggagacuugugacgacauc

SEQ ID NO: 1429135 - RNA, 19 nt, Homo sapiens
  misc_RNA (1)...(19): siRNA sense strand
ccgcgucuuucucgucuuu

SEQ ID NO: 1429136 - RNA, 19 nt, Homo sapiens
  misc_RNA (1)...(19): siRNA sense strand
ggccugagcaagaaccuuu

SEQ ID NO: 1429137 - RNA, 19 nt, Homo sapiens
  misc_RNA (1)...(19): siRNA sense strand
gcacaauaggcaccagaga

SEQ ID NO: 1429138 - RNA, 19 nt, Homo sapiens
  misc_RNA (1)...(19): siRNA sense strand
ggacuccucgugugucaau

SEQ ID NO: 1429139 - RNA, 19 nt, Homo sapiens
  misc_RNA (1)...(19): siRNA sense strand
ucacuuuucuccuguguaa

SEQ ID NO: 1429140 - RNA, 19 nt, Homo sapiens
  misc_RNA (1)...(19): siRNA sense strand
ggaccugucugcgccaucu

SEQ ID NO: 1429141 - RNA, 19 nt, Homo sapiens
  misc_RNA (1)...(19): siRNA sense strand
cgagaacacgugucaagau

SEQ ID NO: 1429142 - RNA, 19 nt, Homo sapiens
  misc_RNA (1)...(19): siRNA sense strand
gccgguaccuugcacuauc

SEQ ID NO: 1429143 - RNA, 19 nt, Homo sapiens
  misc_RNA (1)...(19): siRNA sense strand
guucagugaucccgagaca

SEQ ID NO: 1429144 - RNA, 19 nt, Homo sapiens
  misc_RNA (1)...(19): siRNA sense strand
cuccaggccucaccuuuau

SEQ ID NO: 1429145 - RNA, 19 nt, Homo sapiens
  misc_RNA (1)...(19): siRNA sense strand
aaccucagcuccccaguua

SEQ ID NO: 1429146 - RNA, 19 nt, Homo sapiens
  misc_RNA (1)...(19): siRNA sense strand
uaugggaaaugguccaaag

SEQ ID NO: 1429147 - RNA, 19 nt, Homo sapiens
  misc_RNA (1)...(19): siRNA sense strand
ucuggugacucucuggauu

SEQ ID NO: 1429148 - RNA, 19 nt, Homo sapiens
  misc_RNA (1)...(19): siRNA sense strand
guccacagccagacgcuuu

SEQ ID NO: 1429149 - RNA, 19 nt, Homo sapiens
  misc_RNA (1)...(19): siRNA sense strand
ccagacgcuuucccgauuc

SEQ ID NO: 1429150 - RNA, 19 nt, Homo sapiens
  misc_RNA (1)...(19): siRNA sense strand
aucaacagauucaugaaga

SEQ ID NO: 1429151 - RNA, 19 nt, Homo sapiens
  misc_RNA (1)...(19): siRNA sense strand
gucaacuacucaagcauca

SEQ ID NO: 1429152 - RNA, 19 nt, Homo sapiens
  misc_RNA (1)...(19): siRNA sense strand
ccucauggcccacuacgau

SEQ ID NO: 1429153 - RNA, 19 nt, Homo sapiens
  misc_RNA (1)...(19): siRNA sense strand
caccauccagagcaucuua

SEQ ID NO: 1429154 - RNA, 19 nt, Homo sapiens
  misc_RNA (1)...(19): siRNA sense strand
cagaauggauguggucacu

SEQ ID NO: 1429155 - RNA, 19 nt, Homo sapiens
  misc_RNA (1)...(19): siRNA sense strand
aaacugagucugagaugca

SEQ ID NO: 1429156 - RNA, 19 nt, Homo sapiens
  misc_RNA (1)...(19): siRNA sense strand
gccuaccucuucaccauca

SEQ ID NO: 1429157 - RNA, 19 nt, Homo sapiens
  misc_RNA (1)...(19): siRNA sense strand
guaccuugcacuaucucua

SEQ ID NO: 1429158 - RNA, 19 nt, Homo sapiens
  misc_RNA (1)...(19): siRNA sense strand
cagcuuugccguccucaug

SEQ ID NO: 1429159 - RNA, 19 nt, Homo sapiens
  misc_RNA (1)...(19): siRNA sense strand
gcagggugucuucaucuuc

SEQ ID NO: 1429160 - RNA, 19 nt, Homo sapiens
  misc_RNA (1)...(19): siRNA sense strand
gcgagaacacgugucaaga

SEQ ID NO: 1429161 - RNA, 19 nt, Homo sapiens
  misc_RNA (1)...(19): siRNA sense strand
caaagggaucaggaaauug

SEQ ID NO: 1429162 - RNA, 19 nt, Homo sapiens
  misc_RNA (1)...(19): siRNA sense strand
caucaacgagugugcaaca

SEQ ID NO: 1429163 - RNA, 19 nt, Homo sapiens
  misc_RNA (1)...(19): siRNA sense strand
ugugaucucugccuuucug

SEQ ID NO: 1429164 - RNA, 19 nt, Homo sapiens
  misc_RNA (1)...(19): siRNA sense strand
agcaagaaccuuuccaaug

SEQ ID NO: 1429165 - RNA, 19 nt, Homo sapiens
  misc_RNA (1)...(19): siRNA sense strand
acaauaggcaccagagaca

SEQ ID NO: 1429166 - RNA, 19 nt, Homo sapiens
  misc_RNA (1)...(19): siRNA sense strand
gccaucuucucugugaauu

SEQ ID NO: 1429167 - RNA, 19 nt, Homo sapiens
  misc_RNA (1)...(19): siRNA sense strand
ccagaaaagggauuuauau

SEQ ID NO: 1429168 - RNA, 19 nt, Homo sapiens
  misc_RNA (1)...(19): siRNA sense strand
guggucaacuacucaagca

SEQ ID NO: 1429169 - RNA, 19 nt, Homo sapiens
  misc_RNA (1)...(19): siRNA sense strand
uggauggccuagaggaugu

SEQ ID NO: 1429170 - RNA, 19 nt, Homo sapiens
  misc_RNA (1)...(19): siRNA sense strand
caacagauucaugaagaag

SEQ ID NO: 1429171 - RNA, 19 nt, Homo sapiens
  misc_RNA (1)...(19): siRNA sense strand
ucaagcaucaacagauuca

SEQ ID NO: 1429172 - RNA, 19 nt, Homo sapiens
  misc_RNA (1)...(19): siRNA sense strand
gaaucaggcacagaaaucu

SEQ ID NO: 1429173 - RNA, 19 nt, Homo sapiens
  misc_RNA (1)...(19): siRNA sense strand
ggaggugcagaagcaagua

SEQ ID NO: 1429174 - RNA, 19 nt, Homo sapiens
  misc_RNA (1)...(19): siRNA sense strand
gcagguccgggagcaauau

SEQ ID NO: 1429175 - RNA, 19 nt, Homo sapiens
  misc_RNA (1)...(19): siRNA sense strand
agucugagaugcacacacu

SEQ ID NO: 1429176 - RNA, 19 nt, Homo sapiens
  misc_RNA (1)...(19): siRNA sense strand
gguccaaagggaucaggaa

SEQ ID NO: 1429177 - RNA, 19 nt, Homo sapiens
  misc_RNA (1)...(19): siRNA sense strand
agaaggugcucugugucuu

SEQ ID NO: 1429178 - RNA, 19 nt, Homo sapiens
  misc_RNA (1)...(19): siRNA sense strand
guccaaagggaucaggaaa

SEQ ID NO: 1429179 - RNA, 19 nt, Homo sapiens
  misc_RNA (1)...(19): siRNA sense strand
gugacucucuggauuuuga

SEQ ID NO: 1429180 - RNA, 19 nt, Homo sapiens
  misc_RNA (1)...(19): siRNA sense strand
caacuacucaagcaucaac

SEQ ID NO: 1429181 - RNA, 19 nt, Homo sapiens
  misc_RNA (1)...(19): siRNA sense strand
ggaccugggcagagacuac

SEQ ID NO: 1429182 - RNA, 19 nt, Homo sapiens
  misc_RNA (1)...(19): siRNA sense strand
uggccuaccucuucaccau

SEQ ID NO: 1429183 - RNA, 19 nt, Homo sapiens
  misc_RNA (1)...(19): siRNA sense strand
gucauggccuaccucuuca

SEQ ID NO: 1429184 - RNA, 19 nt, Homo sapiens
  misc_RNA (1)...(19): siRNA sense strand
ucucgucuuucucgcauuc

SEQ ID NO: 1429185 - RNA, 19 nt, Homo sapiens
  misc_RNA (1)...(19): siRNA sense strand
caucaacagauucaugaag

SEQ ID NO: 1429186 - RNA, 19 nt, Homo sapiens
  misc_RNA (1)...(19): siRNA sense strand
gcaucaacagauucaugaa

SEQ ID NO: 1429187 - RNA, 19 nt, Homo sapiens
  misc_RNA (1)...(19): siRNA sense strand
ucaagaaugagagcgagaa

SEQ ID NO: 1429188 - RNA, 19 nt, Homo sapiens
  misc_RNA (1)...(19): siRNA sense strand
cagacucuccucccucaau

SEQ ID NO: 1429189 - RNA, 19 nt, Homo sapiens
  misc_RNA (1)...(19): siRNA sense strand
aaggugcugugcuccauca

SEQ ID NO: 1429190 - RNA, 19 nt, Homo sapiens
  misc_RNA (1)...(19): siRNA sense strand
cacaggcugcagcacaaua

SEQ ID NO: 1429191 - RNA, 19 nt, Homo sapiens
  misc_RNA (1)...(19): siRNA sense strand
gcaacaacgacacccaaaa

SEQ ID NO: 1429192 - RNA, 19 nt, Homo sapiens
  misc_RNA (1)...(19): siRNA sense strand
gaaaacugagucugagaug

SEQ ID NO: 1429193 - RNA, 19 nt, Homo sapiens
  misc_RNA (1)...(19): siRNA sense strand
cuacucaagcaucaacaga

SEQ ID NO: 1429194 - RNA, 19 nt, Homo sapiens
  misc_RNA (1)...(19): siRNA sense strand
gcaagaaccuuuccaaugg

SEQ ID NO: 1429195 - RNA, 19 nt, Homo sapiens
  misc_RNA (1)...(19): siRNA sense strand
ccaaugggcuguugaacuu

SEQ ID NO: 1429196 - RNA, 19 nt, Homo sapiens
  misc_RNA (1)...(19): siRNA sense strand
caucuucucugugaauuua

SEQ ID NO: 1429197 - RNA, 19 nt, Homo sapiens
  misc_RNA (1)...(19): siRNA sense strand
ccaaagggaucaggaaauu

SEQ ID NO: 1429198 - RNA, 19 nt, Homo sapiens
  misc_RNA (1)...(19): siRNA sense strand
gaauuuaguucucuuucug

SEQ ID NO: 1429199 - RNA, 19 nt, Homo sapiens
  misc_RNA (1)...(19): siRNA sense strand
gugcaacacugucgaaagu

SEQ ID NO: 1429200 - RNA, 19 nt, Homo sapiens
  misc_RNA (1)...(19): siRNA sense strand
gccagacgcuuucccgauu

SEQ ID NO: 1429201 - RNA, 19 nt, Homo sapiens
  misc_RNA (1)...(19): siRNA sense strand
ggucauggccuaccucuuc

SEQ ID NO: 1429202 - RNA, 19 nt, Homo sapiens
  misc_RNA (1)...(19): siRNA sense strand
gaugugaucucugccuuuc

SEQ ID NO: 1429203 - RNA, 19 nt, Homo sapiens
  misc_RNA (1)...(19): siRNA sense strand
ggaaucaggcacagaaauc

SEQ ID NO: 1429204 - RNA, 19 nt, Homo sapiens
  misc_RNA (1)...(19): siRNA sense strand
ccaguuaccuucaccuucu

SEQ ID NO: 1429205 - RNA, 19 nt, Homo sapiens
  misc_RNA (1)...(19): siRNA sense strand
ugaugcagcucgacuggaa

SEQ ID NO: 1429206 - RNA, 19 nt, Homo sapiens
  misc_RNA (1)...(19): siRNA sense strand
aaagggaucaggaaauuga

SEQ ID NO: 1429207 - RNA, 19 nt, Homo sapiens
  misc_RNA (1)...(19): siRNA sense strand
agacucuccucccucaaua

SEQ ID NO: 1429208 - RNA, 19 nt, Homo sapiens
  misc_RNA (1)...(19): siRNA sense strand
gagcauggccagaauggau

SEQ ID NO: 1429209 - RNA, 19 nt, Homo sapiens
  misc_RNA (1)...(19): siRNA sense strand
ucaacagauucaugaagaa

SEQ ID NO: 1429210 - RNA, 19 nt, Homo sapiens
  misc_RNA (1)...(19): siRNA sense strand
ggagcaauaugggaaaugg

SEQ ID NO: 1429211 - RNA, 19 nt, Homo sapiens
  misc_RNA (1)...(19): siRNA sense strand
acucaagcaucaacagauu

SEQ ID NO: 1429212 - RNA, 19 nt, Homo sapiens
  misc_RNA (1)...(19): siRNA sense strand
guaaagccauccagaacac

SEQ ID NO: 1429213 - RNA, 19 nt, Homo sapiens
  misc_RNA (1)...(19): siRNA sense strand
gagcaagaaccuuuccaau

SEQ ID NO: 1429214 - RNA, 19 nt, Homo sapiens
  misc_RNA (1)...(19): siRNA sense strand
gaaagugucaugcggaaaa

SEQ ID NO: 1429215 - RNA, 19 nt, Homo sapiens
  misc_RNA (1)...(19): siRNA sense strand
gcacccaccugagcagcuu

SEQ ID NO: 1429216 - RNA, 19 nt, Homo sapiens
  misc_RNA (1)...(19): siRNA sense strand
ucagugaucccgagacaga

SEQ ID NO: 1429217 - RNA, 19 nt, Homo sapiens
  misc_RNA (1)...(19): siRNA sense strand
ccuccaggccucaccuuua

SEQ ID NO: 1429218 - RNA, 19 nt, Homo sapiens
  misc_RNA (1)...(19): siRNA sense strand
ucuccucccucaauaguga

SEQ ID NO: 1429219 - RNA, 19 nt, Homo sapiens
  misc_RNA (1)...(19): siRNA sense strand
ggagacuugugacgacauc

SEQ ID NO: 1429220 - RNA, 19 nt, Homo sapiens
  misc_RNA (1)...(19): siRNA sense strand
ccgcgucuuucucgucuuu

SEQ ID NO: 1429221 - RNA, 19 nt, Homo sapiens
  misc_RNA (1)...(19): siRNA sense strand
ggccugagcaagaaccuuu

SEQ ID NO: 1429222 - RNA, 19 nt, Homo sapiens
  misc_RNA (1)...(19): siRNA sense strand
gcacaauaggcaccagaga

SEQ ID NO: 1429223 - RNA, 19 nt, Homo sapiens
  misc_RNA (1)...(19): siRNA sense strand
ggacuccucgugugucaau

SEQ ID NO: 1429224 - RNA, 19 nt, Homo sapiens
  misc_RNA (1)...(19): siRNA sense strand
ucacuuuucuccuguguaa

SEQ ID NO: 1429225 - RNA, 19 nt, Homo sapiens
  misc_RNA (1)...(19): siRNA sense strand
ggaccugucugcgccaucu

SEQ ID NO: 1429226 - RNA, 19 nt, Homo sapiens
  misc_RNA (1)...(19): siRNA sense strand
cgagaacacgugucaagau

SEQ ID NO: 1429227 - RNA, 19 nt, Homo sapiens
  misc_RNA (1)...(19): siRNA sense strand
gccgguaccuugcacuauc

SEQ ID NO: 1429228 - RNA, 19 nt, Homo sapiens
  misc_RNA (1)...(19): siRNA sense strand
guucagugaucccgagaca

SEQ ID NO: 1429229 - RNA, 19 nt, Homo sapiens
  misc_RNA (1)...(19): siRNA sense strand
cuccaggccucaccuuuau

SEQ ID NO: 1429230 - RNA, 19 nt, Homo sapiens
  misc_RNA (1)...(19): siRNA sense strand
aaccucagcuccccaguua

SEQ ID NO: 1429231 - RNA, 19 nt, Homo sapiens
  misc_RNA (1)...(19): siRNA sense strand
uaugggaaaugguccaaag

SEQ ID NO: 1429232 - RNA, 19 nt, Homo sapiens
  misc_RNA (1)...(19): siRNA sense strand
ucuggugacucucuggauu

SEQ ID NO: 1429233 - RNA, 19 nt, Homo sapiens
  misc_RNA (1)...(19): siRNA sense strand
guccacagccagacgcuuu

SEQ ID NO: 1429234 - RNA, 19 nt, Homo sapiens
  misc_RNA (1)...(19): siRNA sense strand
ccagacgcuuucccgauuc

SEQ ID NO: 1429235 - RNA, 19 nt, Homo sapiens
  misc_RNA (1)...(19): siRNA sense strand
aucaacagauucaugaaga

SEQ ID NO: 1429236 - RNA, 19 nt, Homo sapiens
  misc_RNA (1)...(19): siRNA sense strand
gucaacuacucaagcauca

SEQ ID NO: 1429237 - RNA, 19 nt, Homo sapiens
  misc_RNA (1)...(19): siRNA sense strand
ccucauggcccacuacgau

SEQ ID NO: 1429238 - RNA, 19 nt, Homo sapiens
  misc_RNA (1)...(19): siRNA sense strand
caccauccagagcaucuua

SEQ ID NO: 1429239 - RNA, 19 nt, Homo sapiens
  misc_RNA (1)...(19): siRNA sense strand
cagaauggauguggucacu

SEQ ID NO: 1429240 - RNA, 19 nt, Homo sapiens
  misc_RNA (1)...(19): siRNA sense strand
aaacugagucugagaugca

SEQ ID NO: 1429241 - RNA, 19 nt, Homo sapiens
  misc_RNA (1)...(19): siRNA sense strand
gccuaccucuucaccauca

SEQ ID NO: 1429242 - RNA, 19 nt, Homo sapiens
  misc_RNA (1)...(19): siRNA sense strand
guaccuugcacuaucucua

SEQ ID NO: 1429243 - RNA, 19 nt, Homo sapiens
  misc_RNA (1)...(19): siRNA sense strand
cagcuuugccguccucaug

SEQ ID NO: 1429244 - RNA, 19 nt, Homo sapiens
  misc_RNA (1)...(19): siRNA sense strand
gcagggugucuucaucuuc

SEQ ID NO: 1429245 - RNA, 19 nt, Homo sapiens
  misc_RNA (1)...(19): siRNA sense strand
gcgagaacacgugucaaga

SEQ ID NO: 1429246 - RNA, 19 nt, Homo sapiens
  misc_RNA (1)...(19): siRNA sense strand
caaagggaucaggaaauug

SEQ ID NO: 1429247 - RNA, 19 nt, Homo sapiens
  misc_RNA (1)...(19): siRNA sense strand
caucaacgagugugcaaca

SEQ ID NO: 1429248 - RNA, 19 nt, Homo sapiens
  misc_RNA (1)...(19): siRNA sense strand
ugugaucucugccuuucug

SEQ ID NO: 1429249 - RNA, 19 nt, Homo sapiens
  misc_RNA (1)...(19): siRNA sense strand
agcaagaaccuuuccaaug

SEQ ID NO: 1429250 - RNA, 19 nt, Homo sapiens
  misc_RNA (1)...(19): siRNA sense strand
acaauaggcaccagagaca

SEQ ID NO: 1429251 - RNA, 19 nt, Homo sapiens
  misc_RNA (1)...(19): siRNA sense strand
gccaucuucucugugaauu

SEQ ID NO: 1429252 - RNA, 19 nt, Homo sapiens
  misc_RNA (1)...(19): siRNA sense strand
ccagaaaagggauuuauau

SEQ ID NO: 1429253 - RNA, 19 nt, Homo sapiens
  misc_RNA (1)...(19): siRNA sense strand
guggucaacuacucaagca

SEQ ID NO: 1429254 - RNA, 19 nt, Homo sapiens
  misc_RNA (1)...(19): siRNA sense strand
uggauggccuagaggaugu

SEQ ID NO: 1429255 - RNA, 19 nt, Homo sapiens
  misc_RNA (1)...(19): siRNA sense strand
caacagauucaugaagaag

SEQ ID NO: 1429256 - RNA, 19 nt, Homo sapiens
  misc_RNA (1)...(19): siRNA sense strand
ucaagcaucaacagauuca

SEQ ID NO: 1429257 - RNA, 19 nt, Homo sapiens
  misc_RNA (1)...(19): siRNA sense strand
gaaucaggcacagaaaucu

SEQ ID NO: 1429258 - RNA, 19 nt, Homo sapiens
  misc_RNA (1)...(19): siRNA sense strand
ggaggugcagaagcaagua

SEQ ID NO: 1429259 - RNA, 19 nt, Homo sapiens
  misc_RNA (1)...(19): siRNA sense strand
gcagguccgggagcaauau

SEQ ID NO: 1429260 - RNA, 19 nt, Homo sapiens
  misc_RNA (1)...(19): siRNA sense strand
agucugagaugcacacacu

SEQ ID NO: 1429261 - RNA, 19 nt, Homo sapiens
  misc_RNA (1)...(19): siRNA sense strand
gguccaaagggaucaggaa

SEQ ID NO: 1429262 - RNA, 19 nt, Homo sapiens
  misc_RNA (1)...(19): siRNA sense strand
agaaggugcucugugucuu

SEQ ID NO: 1429263 - RNA, 19 nt, Homo sapiens
  misc_RNA (1)...(19): siRNA sense strand
guccaaagggaucaggaaa

SEQ ID NO: 1429264 - RNA, 19 nt, Homo sapiens
  misc_RNA (1)...(19): siRNA sense strand
gugacucucuggauuuuga

SEQ ID NO: 1429265 - RNA, 19 nt, Homo sapiens
  misc_RNA (1)...(19): siRNA sense strand
caacuacucaagcaucaac

SEQ ID NO: 1429266 - RNA, 19 nt, Homo sapiens
  misc_RNA (1)...(19): siRNA sense strand
ggaccugggcagagacuac

SEQ ID NO: 1429267 - RNA, 19 nt, Homo sapiens
  misc_RNA (1)...(19): siRNA sense strand
uggccuaccucuucaccau

SEQ ID NO: 1429268 - RNA, 19 nt, Homo sapiens
  misc_RNA (1)...(19): siRNA sense strand
gucauggccuaccucuuca

SEQ ID NO: 1429269 - RNA, 19 nt, Homo sapiens
  misc_RNA (1)...(19): siRNA sense strand
ucucgucuuucucgcauuc

SEQ ID NO: 1429270 - RNA, 19 nt, Homo sapiens
  misc_RNA (1)...(19): siRNA sense strand
caucaacagauucaugaag

SEQ ID NO: 1429271 - RNA, 19 nt, Homo sapiens
  misc_RNA (1)...(19): siRNA sense strand
gcaucaacagauucaugaa

SEQ ID NO: 1429272 - RNA, 19 nt, Homo sapiens
  misc_RNA (1)...(19): siRNA sense strand
ucaagaaugagagcgagaa

SEQ ID NO: 1429273 - RNA, 19 nt, Homo sapiens
  misc_RNA (1)...(19): siRNA sense strand
cagacucuccucccucaau

SEQ ID NO: 1429274 - RNA, 19 nt, Homo sapiens
  misc_RNA (1)...(19): siRNA sense strand
aaggugcugugcuccauca

SEQ ID NO: 1429275 - RNA, 19 nt, Homo sapiens
  misc_RNA (1)...(19): siRNA sense strand
cacaggcugcagcacaaua

SEQ ID NO: 1429276 - RNA, 19 nt, Homo sapiens
  misc_RNA (1)...(19): siRNA sense strand
gcaacaacgacacccaaaa

SEQ ID NO: 1429277 - RNA, 19 nt, Homo sapiens
  misc_RNA (1)...(19): siRNA sense strand
gaaaacugagucugagaug

SEQ ID NO: 1429278 - RNA, 19 nt, Homo sapiens
  misc_RNA (1)...(19): siRNA sense strand
cuacucaagcaucaacaga

SEQ ID NO: 1429279 - RNA, 19 nt, Homo sapiens
  misc_RNA (1)...(19): siRNA sense strand
gcaagaaccuuuccaaugg

SEQ ID NO: 1429280 - RNA, 19 nt, Homo sapiens
  misc_RNA (1)...(19): siRNA sense strand
ccaaugggcuguugaacuu

SEQ ID NO: 1429281 - RNA, 19 nt, Homo sapiens
  misc_RNA (1)...(19): siRNA sense strand
caucuucucugugaauuua

SEQ ID NO: 1429282 - RNA, 19 nt, Homo sapiens
  misc_RNA (1)...(19): siRNA sense strand
ccaaagggaucaggaaauu

SEQ ID NO: 1429283 - RNA, 19 nt, Homo sapiens
  misc_RNA (1)...(19): siRNA sense strand
gaauuuaguucucuuucug

SEQ ID NO: 1429284 - RNA, 19 nt, Homo sapiens
  misc_RNA (1)...(19): siRNA sense strand
gugcaacacugucgaaagu

SEQ ID NO: 1429285 - RNA, 19 nt, Homo sapiens
  misc_RNA (1)...(19): siRNA sense strand
gccagacgcuuucccgauu

SEQ ID NO: 1429286 - RNA, 19 nt, Homo sapiens
  misc_RNA (1)...(19): siRNA sense strand
ggucauggccuaccucuuc

SEQ ID NO: 1429287 - RNA, 19 nt, Homo sapiens
  misc_RNA (1)...(19): siRNA sense strand
gaugugaucucugccuuuc

SEQ ID NO: 1429288 - RNA, 19 nt, Homo sapiens
  misc_RNA (1)...(19): siRNA sense strand
ggaaucaggcacagaaauc

SEQ ID NO: 1429289 - RNA, 19 nt, Homo sapiens
  misc_RNA (1)...(19): siRNA sense strand
ccaguuaccuucaccuucu

SEQ ID NO: 1429290 - RNA, 19 nt, Homo sapiens
  misc_RNA (1)...(19): siRNA sense strand
ugaugcagcucgacuggaa

SEQ ID NO: 1429291 - RNA, 19 nt, Homo sapiens
  misc_RNA (1)...(19): siRNA sense strand
aaagggaucaggaaauuga

SEQ ID NO: 1429292 - RNA, 19 nt, Homo sapiens
  misc_RNA (1)...(19): siRNA sense strand
agacucuccucccucaaua

SEQ ID NO: 1429293 - RNA, 19 nt, Homo sapiens
  misc_RNA (1)...(19): siRNA sense strand
gagcauggccagaauggau

SEQ ID NO: 1429294 - RNA, 19 nt, Homo sapiens
  misc_RNA (1)...(19): siRNA sense strand
ucaacagauucaugaagaa

SEQ ID NO: 1429295 - RNA, 19 nt, Homo sapiens
  misc_RNA (1)...(19): siRNA sense strand
ggagcaauaugggaaaugg

SEQ ID NO: 1429296 - RNA, 19 nt, Homo sapiens
  misc_RNA (1)...(19): siRNA sense strand
acucaagcaucaacagauu

SEQ ID NO: 1429297 - RNA, 19 nt, Homo sapiens
  misc_RNA (1)...(19): siRNA sense strand
guaaagccauccagaacac

SEQ ID NO: 1429298 - RNA, 19 nt, Homo sapiens
  misc_RNA (1)...(19): siRNA sense strand
gagcaagaaccuuuccaau

SEQ ID NO: 1429299 - RNA, 19 nt, Homo sapiens
  misc_RNA (1)...(19): siRNA sense strand
gaaagugucaugcggaaaa

SEQ ID NO: 1429300 - RNA, 19 nt, Homo sapiens
  misc_RNA (1)...(19): siRNA sense strand
gcacccaccugagcagcuu

SEQ ID NO: 1429301 - RNA, 19 nt, Homo sapiens
  misc_RNA (1)...(19): siRNA sense strand
ucagugaucccgagacaga

SEQ ID NO: 1429302 - RNA, 19 nt, Homo sapiens
  misc_RNA (1)...(19): siRNA sense strand
ccuccaggccucaccuuua

SEQ ID NO: 1429303 - RNA, 19 nt, Homo sapiens
  misc_RNA (1)...(19): siRNA sense strand
ucuccucccucaauaguga

SEQ ID NO: 1429304 - RNA, 19 nt, Homo sapiens
  misc_RNA (1)...(19): siRNA sense strand
ggagacuugugacgacauc

SEQ ID NO: 1429305 - RNA, 19 nt, Homo sapiens
  misc_RNA (1)...(19): siRNA sense strand
ccgcgucuuucucgucuuu

SEQ ID NO: 1429306 - RNA, 19 nt, Homo sapiens
  misc_RNA (1)...(19): siRNA sense strand
ggccugagcaagaaccuuu

SEQ ID NO: 1429307 - RNA, 19 nt, Homo sapiens
  misc_RNA (1)...(19): siRNA sense strand
gcacaauaggcaccagaga

SEQ ID NO: 1429308 - RNA, 19 nt, Homo sapiens
  misc_RNA (1)...(19): siRNA sense strand
ggacuccucgugugucaau

SEQ ID NO: 1429309 - RNA, 19 nt, Homo sapiens
  misc_RNA (1)...(19): siRNA sense strand
ucacuuuucuccuguguaa

SEQ ID NO: 1429310 - RNA, 19 nt, Homo sapiens
  misc_RNA (1)...(19): siRNA sense strand
ggaccugucugcgccaucu

SEQ ID NO: 1429311 - RNA, 19 nt, Homo sapiens
  misc_RNA (1)...(19): siRNA sense strand
cgagaacacgugucaagau

SEQ ID NO: 1429312 - RNA, 19 nt, Homo sapiens
  misc_RNA (1)...(19): siRNA sense strand
gccgguaccuugcacuauc

SEQ ID NO: 1429313 - RNA, 19 nt, Homo sapiens
  misc_RNA (1)...(19): siRNA sense strand
guucagugaucccgagaca

SEQ ID NO: 1429314 - RNA, 19 nt, Homo sapiens
  misc_RNA (1)...(19): siRNA sense strand
cuccaggccucaccuuuau

SEQ ID NO: 1429315 - RNA, 19 nt, Homo sapiens
  misc_RNA (1)...(19): siRNA sense strand
aaccucagcuccccaguua

SEQ ID NO: 1429316 - RNA, 19 nt, Homo sapiens
  misc_RNA (1)...(19): siRNA sense strand
uaugggaaaugguccaaag

SEQ ID NO: 1429317 - RNA, 19 nt, Homo sapiens
  misc_RNA (1)...(19): siRNA sense strand
ucuggugacucucuggauu

SEQ ID NO: 1429318 - RNA, 19 nt, Homo sapiens
  misc_RNA (1)...(19): siRNA sense strand
guccacagccagacgcuuu

SEQ ID NO: 1429319 - RNA, 19 nt, Homo sapiens
  misc_RNA (1)...(19): siRNA sense strand
ccagacgcuuucccgauuc

SEQ ID NO: 1429320 - RNA, 19 nt, Homo sapiens
  misc_RNA (1)...(19): siRNA sense strand
aucaacagauucaugaaga

SEQ ID NO: 1429321 - RNA, 19 nt, Homo sapiens
  misc_RNA (1)...(19): siRNA sense strand
gucaacuacucaagcauca

SEQ ID NO: 1429322 - RNA, 19 nt, Homo sapiens
  misc_RNA (1)...(19): siRNA sense strand
ccucauggcccacuacgau

SEQ ID NO: 1429323 - RNA, 19 nt, Homo sapiens
  misc_RNA (1)...(19): siRNA sense strand
caccauccagagcaucuua

SEQ ID NO: 1429324 - RNA, 19 nt, Homo sapiens
  misc_RNA (1)...(19): siRNA sense strand
cagaauggauguggucacu

SEQ ID NO: 1429325 - RNA, 19 nt, Homo sapiens
  misc_RNA (1)...(19): siRNA sense strand
aaacugagucugagaugca

SEQ ID NO: 1429326 - RNA, 19 nt, Homo sapiens
  misc_RNA (1)...(19): siRNA sense strand
gccuaccucuucaccauca

SEQ ID NO: 1429327 - RNA, 19 nt, Homo sapiens
  misc_RNA (1)...(19): siRNA sense strand
guaccuugcacuaucucua

SEQ ID NO: 1429328 - RNA, 19 nt, Homo sapiens
  misc_RNA (1)...(19): siRNA sense strand
cagcuuugccguccucaug

SEQ ID NO: 1429329 - RNA, 19 nt, Homo sapiens
  misc_RNA (1)...(19): siRNA sense strand
gcagggugucuucaucuuc

SEQ ID NO: 1429330 - RNA, 19 nt, Homo sapiens
  misc_RNA (1)...(19): siRNA sense strand
gcgagaacacgugucaaga

SEQ ID NO: 1429331 - RNA, 19 nt, Homo sapiens
  misc_RNA (1)...(19): siRNA sense strand
caaagggaucaggaaauug

SEQ ID NO: 1429332 - RNA, 19 nt, Homo sapiens
  misc_RNA (1)...(19): siRNA sense strand
caucaacgagugugcaaca

SEQ ID NO: 1429333 - RNA, 19 nt, Homo sapiens
  misc_RNA (1)...(19): siRNA sense strand
ugugaucucugccuuucug

SEQ ID NO: 1429334 - RNA, 19 nt, Homo sapiens
  misc_RNA (1)...(19): siRNA sense strand
agcaagaaccuuuccaaug

SEQ ID NO: 1429335 - RNA, 19 nt, Homo sapiens
  misc_RNA (1)...(19): siRNA sense strand
acaauaggcaccagagaca

SEQ ID NO: 1429336 - RNA, 19 nt, Homo sapiens
  misc_RNA (1)...(19): siRNA sense strand
gccaucuucucugugaauu

SEQ ID NO: 1429337 - RNA, 19 nt, Homo sapiens
  misc_RNA (1)...(19): siRNA sense strand
ccagaaaagggauuuauau

SEQ ID NO: 1429338 - RNA, 19 nt, Homo sapiens
  misc_RNA (1)...(19): siRNA sense strand
guggucaacuacucaagca

SEQ ID NO: 1429339 - RNA, 19 nt, Homo sapiens
  misc_RNA (1)...(19): siRNA sense strand
uggauggccuagaggaugu

SEQ ID NO: 1429340 - RNA, 19 nt, Homo sapiens
  misc_RNA (1)...(19): siRNA sense strand
caacagauucaugaagaag

SEQ ID NO: 1429341 - RNA, 19 nt, Homo sapiens
  misc_RNA (1)...(19): siRNA sense strand
ucaagcaucaacagauuca

SEQ ID NO: 1429342 - RNA, 19 nt, Homo sapiens
  misc_RNA (1)...(19): siRNA sense strand
gaaucaggcacagaaaucu

SEQ ID NO: 1429343 - RNA, 19 nt, Homo sapiens
  misc_RNA (1)...(19): siRNA sense strand
ggaggugcagaagcaagua

SEQ ID NO: 1429344 - RNA, 19 nt, Homo sapiens
  misc_RNA (1)...(19): siRNA sense strand
gcagguccgggagcaauau

SEQ ID NO: 1429345 - RNA, 19 nt, Homo sapiens
  misc_RNA (1)...(19): siRNA sense strand
agucugagaugcacacacu

SEQ ID NO: 1429346 - RNA, 19 nt, Homo sapiens
  misc_RNA (1)...(19): siRNA sense strand
gguccaaagggaucaggaa

SEQ ID NO: 1429347 - RNA, 19 nt, Homo sapiens
  misc_RNA (1)...(19): siRNA sense strand
agaaggugcucugugucuu

SEQ ID NO: 1429348 - RNA, 19 nt, Homo sapiens
  misc_RNA (1)...(19): siRNA sense strand
guccaaagggaucaggaaa

SEQ ID NO: 1429349 - RNA, 19 nt, Homo sapiens
  misc_RNA (1)...(19): siRNA sense strand
gugacucucuggauuuuga

SEQ ID NO: 1429350 - RNA, 19 nt, Homo sapiens
  misc_RNA (1)...(19): siRNA sense strand
caacuacucaagcaucaac

SEQ ID NO: 1429351 - RNA, 19 nt, Homo sapiens
  misc_RNA (1)...(19): siRNA sense strand
ggaccugggcagagacuac

SEQ ID NO: 1429352 - RNA, 19 nt, Homo sapiens
  misc_RNA (1)...(19): siRNA sense strand
uggccuaccucuucaccau

SEQ ID NO: 1429353 - RNA, 19 nt, Homo sapiens
  misc_RNA (1)...(19): siRNA sense strand
gucauggccuaccucuuca

SEQ ID NO: 1429354 - RNA, 19 nt, Homo sapiens
  misc_RNA (1)...(19): siRNA sense strand
ucucgucuuucucgcauuc

SEQ ID NO: 1429355 - RNA, 19 nt, Homo sapiens
  misc_RNA (1)...(19): siRNA sense strand
caucaacagauucaugaag

SEQ ID NO: 1429356 - RNA, 19 nt, Homo sapiens
  misc_RNA (1)...(19): siRNA sense strand
gcaucaacagauucaugaa

SEQ ID NO: 1429357 - RNA, 19 nt, Homo sapiens
  misc_RNA (1)...(19): siRNA sense strand
ucaagaaugagagcgagaa

SEQ ID NO: 1429358 - RNA, 19 nt, Homo sapiens
  misc_RNA (1)...(19): siRNA sense strand
cagacucuccucccucaau

SEQ ID NO: 1429359 - RNA, 19 nt, Homo sapiens
  misc_RNA (1)...(19): siRNA sense strand
aaggugcugugcuccauca

SEQ ID NO: 1429360 - RNA, 19 nt, Homo sapiens
  misc_RNA (1)...(19): siRNA sense strand
cacaggcugcagcacaaua

SEQ ID NO: 1429361 - RNA, 19 nt, Homo sapiens
  misc_RNA (1)...(19): siRNA sense strand
gcaacaacgacacccaaaa

SEQ ID NO: 1429362 - RNA, 19 nt, Homo sapiens
  misc_RNA (1)...(19): siRNA sense strand
gaaaacugagucugagaug

SEQ ID NO: 1429363 - RNA, 19 nt, Homo sapiens
  misc_RNA (1)...(19): siRNA sense strand
cuacucaagcaucaacaga

SEQ ID NO: 1429364 - RNA, 19 nt, Homo sapiens
  misc_RNA (1)...(19): siRNA sense strand
gcaagaaccuuuccaaugg

SEQ ID NO: 1429365 - RNA, 19 nt, Homo sapiens
  misc_RNA (1)...(19): siRNA sense strand
ccaaugggcuguugaacuu

SEQ ID NO: 1429366 - RNA, 19 nt, Homo sapiens
  misc_RNA (1)...(19): siRNA sense strand
caucuucucugugaauuua

SEQ ID NO: 1429367 - RNA, 19 nt, Homo sapiens
  misc_RNA (1)...(19): siRNA sense strand
ccaaagggaucaggaaauu

SEQ ID NO: 1429368 - RNA, 19 nt, Homo sapiens
  misc_RNA (1)...(19): siRNA sense strand
gaauuuaguucucuuucug

SEQ ID NO: 1429369 - RNA, 19 nt, Homo sapiens
  misc_RNA (1)...(19): siRNA sense strand
gugcaacacugucgaaagu

SEQ ID NO: 1429370 - RNA, 19 nt, Homo sapiens
  misc_RNA (1)...(19): siRNA sense strand
gccagacgcuuucccgauu

SEQ ID NO: 1429371 - RNA, 19 nt, Homo sapiens
  misc_RNA (1)...(19): siRNA sense strand
ggucauggccuaccucuuc

SEQ ID NO: 1429372 - RNA, 19 nt, Homo sapiens
  misc_RNA (1)...(19): siRNA sense strand
gaugugaucucugccuuuc

SEQ ID NO: 1429373 - RNA, 19 nt, Homo sapiens
  misc_RNA (1)...(19): siRNA sense strand
ggaaucaggcacagaaauc

SEQ ID NO: 1429374 - RNA, 19 nt, Homo sapiens
  misc_RNA (1)...(19): siRNA sense strand
ccaguuaccuucaccuucu

SEQ ID NO: 1429375 - RNA, 19 nt, Homo sapiens
  misc_RNA (1)...(19): siRNA sense strand
ugaugcagcucgacuggaa

SEQ ID NO: 1429376 - RNA, 19 nt, Homo sapiens
  misc_RNA (1)...(19): siRNA sense strand
aaagggaucaggaaauuga

SEQ ID NO: 1429377 - RNA, 19 nt, Homo sapiens
  misc_RNA (1)...(19): siRNA sense strand
agacucuccucccucaaua

SEQ ID NO: 1429378 - RNA, 19 nt, Homo sapiens
  misc_RNA (1)...(19): siRNA sense strand
gagcauggccagaauggau

SEQ ID NO: 1429379 - RNA, 19 nt, Homo sapiens
  misc_RNA (1)...(19): siRNA sense strand
ucaacagauucaugaagaa

SEQ ID NO: 1429380 - RNA, 19 nt, Homo sapiens
  misc_RNA (1)...(19): siRNA sense strand
ggagcaauaugggaaaugg

SEQ ID NO: 1429381 - RNA, 19 nt, Homo sapiens
  misc_RNA (1)...(19): siRNA sense strand
acucaagcaucaacagauu

SEQ ID NO: 1429382 - RNA, 19 nt, Homo sapiens
  misc_RNA (1)...(19): siRNA sense strand
guaaagccauccagaacac

SEQ ID NO: 1429383 - RNA, 19 nt, Homo sapiens
  misc_RNA (1)...(19): siRNA sense strand
gagcaagaaccuuuccaau

SEQ ID NO: 1429384 - RNA, 19 nt, Homo sapiens
  misc_RNA (1)...(19): siRNA sense strand
gaaagugucaugcggaaaa

SEQ ID NO: 1429385 - RNA, 19 nt, Homo sapiens
  misc_RNA (1)...(19): siRNA sense strand
gcacccaccugagcagcuu

SEQ ID NO: 1429386 - RNA, 19 nt, Homo sapiens
  misc_RNA (1)...(19): siRNA sense strand
ucagugaucccgagacaga

SEQ ID NO: 1429387 - RNA, 19 nt, Homo sapiens
  misc_RNA (1)...(19): siRNA sense strand
ccuccaggccucaccuuua

SEQ ID NO: 1429388 - RNA, 19 nt, Homo sapiens
  misc_RNA (1)...(19): siRNA sense strand
ucuccucccucaauaguga

SEQ ID NO: 1429389 - RNA, 19 nt, Homo sapiens
  misc_RNA (1)...(19): siRNA sense strand
ggagacuugugacgacauc

SEQ ID NO: 1429390 - RNA, 19 nt, Homo sapiens
  misc_RNA (1)...(19): siRNA sense strand
ccgcgucuuucucgucuuu

SEQ ID NO: 1429391 - RNA, 19 nt, Homo sapiens
  misc_RNA (1)...(19): siRNA sense strand
ggccugagcaagaaccuuu

SEQ ID NO: 1429392 - RNA, 19 nt, Homo sapiens
  misc_RNA (1)...(19): siRNA sense strand
gcacaauaggcaccagaga

SEQ ID NO: 1429393 - RNA, 19 nt, Homo sapiens
  misc_RNA (1)...(19): siRNA sense strand
ggacuccucgugugucaau

SEQ ID NO: 1429394 - RNA, 19 nt, Homo sapiens
  misc_RNA (1)...(19): siRNA sense strand
ucacuuuucuccuguguaa

SEQ ID NO: 1429395 - RNA, 19 nt, Homo sapiens
  misc_RNA (1)...(19): siRNA sense strand
ggaccugucugcgccaucu

SEQ ID NO: 1429396 - RNA, 19 nt, Homo sapiens
  misc_RNA (1)...(19): siRNA sense strand
cgagaacacgugucaagau

SEQ ID NO: 1429397 - RNA, 19 nt, Homo sapiens
  misc_RNA (1)...(19): siRNA sense strand
gccgguaccuugcacuauc

SEQ ID NO: 1429398 - RNA, 19 nt, Homo sapiens
  misc_RNA (1)...(19): siRNA sense strand
guucagugaucccgagaca

SEQ ID NO: 1429399 - RNA, 19 nt, Homo sapiens
  misc_RNA (1)...(19): siRNA sense strand
cuccaggccucaccuuuau

SEQ ID NO: 1429400 - RNA, 19 nt, Homo sapiens
  misc_RNA (1)...(19): siRNA sense strand
aaccucagcuccccaguua

SEQ ID NO: 1429401 - RNA, 19 nt, Homo sapiens
  misc_RNA (1)...(19): siRNA sense strand
uaugggaaaugguccaaag

SEQ ID NO: 1429402 - RNA, 19 nt, Homo sapiens
  misc_RNA (1)...(19): siRNA sense strand
ucuggugacucucuggauu

SEQ ID NO: 1429403 - RNA, 19 nt, Homo sapiens
  misc_RNA (1)...(19): siRNA sense strand
guccacagccagacgcuuu

SEQ ID NO: 1429404 - RNA, 19 nt, Homo sapiens
  misc_RNA (1)...(19): siRNA sense strand
ccagacgcuuucccgauuc

SEQ ID NO: 1429405 - RNA, 19 nt, Homo sapiens
  misc_RNA (1)...(19): siRNA sense strand
aucaacagauucaugaaga

SEQ ID NO: 1429406 - RNA, 19 nt, Homo sapiens
  misc_RNA (1)...(19): siRNA sense strand
gucaacuacucaagcauca

SEQ ID NO: 1429407 - RNA, 19 nt, Homo sapiens
  misc_RNA (1)...(19): siRNA sense strand
ccucauggcccacuacgau

SEQ ID NO: 1429408 - RNA, 19 nt, Homo sapiens
  misc_RNA (1)...(19): siRNA sense strand
caccauccagagcaucuua

SEQ ID NO: 1429409 - RNA, 19 nt, Homo sapiens
  misc_RNA (1)...(19): siRNA sense strand
cagaauggauguggucacu

SEQ ID NO: 1429410 - RNA, 19 nt, Homo sapiens
  misc_RNA (1)...(19): siRNA sense strand
aaacugagucugagaugca

SEQ ID NO: 1429411 - RNA, 19 nt, Homo sapiens
  misc_RNA (1)...(19): siRNA sense strand
gccuaccucuucaccauca

SEQ ID NO: 1429412 - RNA, 19 nt, Homo sapiens
  misc_RNA (1)...(19): siRNA sense strand
guaccuugcacuaucucua

SEQ ID NO: 1429413 - RNA, 19 nt, Homo sapiens
  misc_RNA (1)...(19): siRNA sense strand
cagcuuugccguccucaug

SEQ ID NO: 1429414 - RNA, 19 nt, Homo sapiens
  misc_RNA (1)...(19): siRNA sense strand
gcagggugucuucaucuuc

SEQ ID NO: 1429415 - RNA, 19 nt, Homo sapiens
  misc_RNA (1)...(19): siRNA sense strand
gcgagaacacgugucaaga

SEQ ID NO: 1429416 - RNA, 19 nt, Homo sapiens
  misc_RNA (1)...(19): siRNA sense strand
caaagggaucaggaaauug

SEQ ID NO: 1429417 - RNA, 19 nt, Homo sapiens
  misc_RNA (1)...(19): siRNA sense strand
caucaacgagugugcaaca

SEQ ID NO: 1429418 - RNA, 19 nt, Homo sapiens
  misc_RNA (1)...(19): siRNA sense strand
ugugaucucugccuuucug

SEQ ID NO: 1429419 - RNA, 19 nt, Homo sapiens
  misc_RNA (1)...(19): siRNA sense strand
agcaagaaccuuuccaaug

SEQ ID NO: 1429420 - RNA, 19 nt, Homo sapiens
  misc_RNA (1)...(19): siRNA sense strand
acaauaggcaccagagaca

SEQ ID NO: 1429421 - RNA, 19 nt, Homo sapiens
  misc_RNA (1)...(19): siRNA sense strand
gccaucuucucugugaauu

SEQ ID NO: 1429422 - RNA, 19 nt, Homo sapiens
  misc_RNA (1)...(19): siRNA sense strand
ccagaaaagggauuuauau

SEQ ID NO: 1429423 - RNA, 19 nt, Homo sapiens
  misc_RNA (1)...(19): siRNA sense strand
guggucaacuacucaagca

SEQ ID NO: 1429424 - RNA, 19 nt, Homo sapiens
  misc_RNA (1)...(19): siRNA sense strand
uggauggccuagaggaugu

SEQ ID NO: 1429425 - RNA, 19 nt, Homo sapiens
  misc_RNA (1)...(19): siRNA sense strand
caacagauucaugaagaag

SEQ ID NO: 1429426 - RNA, 19 nt, Homo sapiens
  misc_RNA (1)...(19): siRNA sense strand
ucaagcaucaacagauuca

SEQ ID NO: 1429427 - RNA, 19 nt, Homo sapiens
  misc_RNA (1)...(19): siRNA sense strand
gaaucaggcacagaaaucu

SEQ ID NO: 1429428 - RNA, 19 nt, Homo sapiens
  misc_RNA (1)...(19): siRNA sense strand
ggaggugcagaagcaagua

SEQ ID NO: 1429429 - RNA, 19 nt, Homo sapiens
  misc_RNA (1)...(19): siRNA sense strand
gcagguccgggagcaauau

SEQ ID NO: 1429430 - RNA, 19 nt, Homo sapiens
  misc_RNA (1)...(19): siRNA sense strand
agucugagaugcacacacu

SEQ ID NO: 1429431 - RNA, 19 nt, Homo sapiens
  misc_RNA (1)...(19): siRNA sense strand
gguccaaagggaucaggaa

SEQ ID NO: 1429432 - RNA, 19 nt, Homo sapiens
  misc_RNA (1)...(19): siRNA sense strand
agaaggugcucugugucuu

SEQ ID NO: 1429433 - RNA, 19 nt, Homo sapiens
  misc_RNA (1)...(19): siRNA sense strand
guccaaagggaucaggaaa

SEQ ID NO: 1429434 - RNA, 19 nt, Homo sapiens
  misc_RNA (1)...(19): siRNA sense strand
gugacucucuggauuuuga

SEQ ID NO: 1429435 - RNA, 19 nt, Homo sapiens
  misc_RNA (1)...(19): siRNA sense strand
caacuacucaagcaucaac

SEQ ID NO: 1429436 - RNA, 19 nt, Homo sapiens
  misc_RNA (1)...(19): siRNA sense strand
ggaccugggcagagacuac

SEQ ID NO: 1429437 - RNA, 19 nt, Homo sapiens
  misc_RNA (1)...(19): siRNA sense strand
uggccuaccucuucaccau

SEQ ID NO: 1429438 - RNA, 19 nt, Homo sapiens
  misc_RNA (1)...(19): siRNA sense strand
gucauggccuaccucuuca

SEQ ID NO: 1429439 - RNA, 19 nt, Homo sapiens
  misc_RNA (1)...(19): siRNA sense strand
ucucgucuuucucgcauuc

SEQ ID NO: 1429440 - RNA, 19 nt, Homo sapiens
  misc_RNA (1)...(19): siRNA sense strand
caucaacagauucaugaag

SEQ ID NO: 1429441 - RNA, 19 nt, Homo sapiens
  misc_RNA (1)...(19): siRNA sense strand
gcaucaacagauucaugaa

SEQ ID NO: 1429442 - RNA, 19 nt, Homo sapiens
  misc_RNA (1)...(19): siRNA sense strand
ucaagaaugagagcgagaa

SEQ ID NO: 1429443 - RNA, 19 nt, Homo sapiens
  misc_RNA (1)...(19): siRNA sense strand
cagacucuccucccucaau

SEQ ID NO: 1429444 - RNA, 19 nt, Homo sapiens
  misc_RNA (1)...(19): siRNA sense strand
aaggugcugugcuccauca

SEQ ID NO: 1429445 - RNA, 19 nt, Homo sapiens
  misc_RNA (1)...(19): siRNA sense strand
cacaggcugcagcacaaua

SEQ ID NO: 1429446 - RNA, 19 nt, Homo sapiens
  misc_RNA (1)...(19): siRNA sense strand
gcaacaacgacacccaaaa

SEQ ID NO: 1429447 - RNA, 19 nt, Homo sapiens
  misc_RNA (1)...(19): siRNA sense strand
gaaaacugagucugagaug

SEQ ID NO: 1429448 - RNA, 19 nt, Homo sapiens
  misc_RNA (1)...(19): siRNA sense strand
cuacucaagcaucaacaga

SEQ ID NO: 1429449 - RNA, 19 nt, Homo sapiens
  misc_RNA (1)...(19): siRNA sense strand
gcaagaaccuuuccaaugg

SEQ ID NO: 1429450 - RNA, 19 nt, Homo sapiens
  misc_RNA (1)...(19): siRNA sense strand
ccaaugggcuguugaacuu

SEQ ID NO: 1429451 - RNA, 19 nt, Homo sapiens
  misc_RNA (1)...(19): siRNA sense strand
caucuucucugugaauuua

SEQ ID NO: 1429452 - RNA, 19 nt, Homo sapiens
  misc_RNA (1)...(19): siRNA sense strand
ccaaagggaucaggaaauu

SEQ ID NO: 1429453 - RNA, 19 nt, Homo sapiens
  misc_RNA (1)...(19): siRNA sense strand
gaauuuaguucucuuucug

SEQ ID NO: 1429454 - RNA, 19 nt, Homo sapiens
  misc_RNA (1)...(19): siRNA sense strand
gugcaacacugucgaaagu

SEQ ID NO: 1429455 - RNA, 19 nt, Homo sapiens
  misc_RNA (1)...(19): siRNA sense strand
gccagacgcuuucccgauu

SEQ ID NO: 1429456 - RNA, 19 nt, Homo sapiens
  misc_RNA (1)...(19): siRNA sense strand
ggucauggccuaccucuuc

SEQ ID NO: 1429457 - RNA, 19 nt, Homo sapiens
  misc_RNA (1)...(19): siRNA sense strand
gaugugaucucugccuuuc

SEQ ID NO: 1429458 - RNA, 19 nt, Homo sapiens
  misc_RNA (1)...(19): siRNA sense strand
ggaaucaggcacagaaauc

SEQ ID NO: 1429459 - RNA, 19 nt, Homo sapiens
  misc_RNA (1)...(19): siRNA sense strand
ccaguuaccuucaccuucu

SEQ ID NO: 1429460 - RNA, 19 nt, Homo sapiens
  misc_RNA (1)...(19): siRNA sense strand
ugaugcagcucgacuggaa

SEQ ID NO: 1429461 - RNA, 19 nt, Homo sapiens
  misc_RNA (1)...(19): siRNA sense strand
aaagggaucaggaaauuga

SEQ ID NO: 1429462 - RNA, 19 nt, Homo sapiens
  misc_RNA (1)...(19): siRNA sense strand
agacucuccucccucaaua

SEQ ID NO: 1429463 - RNA, 19 nt, Homo sapiens
  misc_RNA (1)...(19): siRNA sense strand
gagcauggccagaauggau

SEQ ID NO: 1429464 - RNA, 19 nt, Homo sapiens
  misc_RNA (1)...(19): siRNA sense strand
ucaacagauucaugaagaa

SEQ ID NO: 1429465 - RNA, 19 nt, Homo sapiens
  misc_RNA (1)...(19): siRNA sense strand
ggagcaauaugggaaaugg

SEQ ID NO: 1429466 - RNA, 19 nt, Homo sapiens
  misc_RNA (1)...(19): siRNA sense strand
acucaagcaucaacagauu

SEQ ID NO: 1429467 - RNA, 19 nt, Homo sapiens
  misc_RNA (1)...(19): siRNA sense strand
guaaagccauccagaacac

SEQ ID NO: 1429468 - RNA, 19 nt, Homo sapiens
  misc_RNA (1)...(19): siRNA sense strand
gagcaagaaccuuuccaau

SEQ ID NO: 1429469 - RNA, 19 nt, Homo sapiens
  misc_RNA (1)...(19): siRNA sense strand
gaaagugucaugcggaaaa

SEQ ID NO: 1429470 - RNA, 19 nt, Homo sapiens
  misc_RNA (1)...(19): siRNA sense strand
gcacccaccugagcagcuu

SEQ ID NO: 1429471 - RNA, 19 nt, Homo sapiens
  misc_RNA (1)...(19): siRNA sense strand
ucagugaucccgagacaga

SEQ ID NO: 1429472 - RNA, 19 nt, Homo sapiens
  misc_RNA (1)...(19): siRNA sense strand
ccuccaggccucaccuuua

SEQ ID NO: 1429473 - RNA, 19 nt, Homo sapiens
  misc_RNA (1)...(19): siRNA sense strand
ucuccucccucaauaguga

SEQ ID NO: 1429474 - RNA, 19 nt, Homo sapiens
  misc_RNA (1)...(19): siRNA sense strand
ggagacuugugacgacauc

SEQ ID NO: 1429475 - RNA, 19 nt, Homo sapiens
  misc_RNA (1)...(19): siRNA sense strand
ccgcgucuuucucgucuuu

SEQ ID NO: 1429476 - RNA, 19 nt, Homo sapiens
  misc_RNA (1)...(19): siRNA sense strand
ggccugagcaagaaccuuu

SEQ ID NO: 1429477 - RNA, 19 nt, Homo sapiens
  misc_RNA (1)...(19): siRNA sense strand
gcacaauaggcaccagaga

SEQ ID NO: 1429478 - RNA, 19 nt, Homo sapiens
  misc_RNA (1)...(19): siRNA sense strand
ggacuccucgugugucaau

SEQ ID NO: 1429479 - RNA, 19 nt, Homo sapiens
  misc_RNA (1)...(19): siRNA sense strand
ucacuuuucuccuguguaa

SEQ ID NO: 1429480 - RNA, 19 nt, Homo sapiens
  misc_RNA (1)...(19): siRNA sense strand
ggaccugucugcgccaucu

SEQ ID NO: 1429481 - RNA, 19 nt, Homo sapiens
  misc_RNA (1)...(19): siRNA sense strand
cgagaacacgugucaagau

SEQ ID NO: 1429482 - RNA, 19 nt, Homo sapiens
  misc_RNA (1)...(19): siRNA sense strand
gccgguaccuugcacuauc

SEQ ID NO: 1429483 - RNA, 19 nt, Homo sapiens
  misc_RNA (1)...(19): siRNA sense strand
guucagugaucccgagaca

SEQ ID NO: 1429484 - RNA, 19 nt, Homo sapiens
  misc_RNA (1)...(19): siRNA sense strand
cuccaggccucaccuuuau

SEQ ID NO: 1429485 - RNA, 19 nt, Homo sapiens
  misc_RNA (1)...(19): siRNA sense strand
aaccucagcuccccaguua

SEQ ID NO: 1429486 - RNA, 19 nt, Homo sapiens
  misc_RNA (1)...(19): siRNA sense strand
uaugggaaaugguccaaag

SEQ ID NO: 1429487 - RNA, 19 nt, Homo sapiens
  misc_RNA (1)...(19): siRNA sense strand
ucuggugacucucuggauu

SEQ ID NO: 1429488 - RNA, 19 nt, Homo sapiens
  misc_RNA (1)...(19): siRNA sense strand
guccacagccagacgcuuu

SEQ ID NO: 1429489 - RNA, 19 nt, Homo sapiens
  misc_RNA (1)...(19): siRNA sense strand
ccagacgcuuucccgauuc

SEQ ID NO: 1429490 - RNA, 19 nt, Homo sapiens
  misc_RNA (1)...(19): siRNA sense strand
aucaacagauucaugaaga

SEQ ID NO: 1429491 - RNA, 19 nt, Homo sapiens
  misc_RNA (1)...(19): siRNA sense strand
gucaacuacucaagcauca

SEQ ID NO: 1429492 - RNA, 19 nt, Homo sapiens
  misc_RNA (1)...(19): siRNA sense strand
ccucauggcccacuacgau

SEQ ID NO: 1429493 - RNA, 19 nt, Homo sapiens
  misc_RNA (1)...(19): siRNA sense strand
caccauccagagcaucuua

SEQ ID NO: 1429494 - RNA, 19 nt, Homo sapiens
  misc_RNA (1)...(19): siRNA sense strand
cagaauggauguggucacu

SEQ ID NO: 1429495 - RNA, 19 nt, Homo sapiens
  misc_RNA (1)...(19): siRNA sense strand
aaacugagucugagaugca

SEQ ID NO: 1429496 - RNA, 19 nt, Homo sapiens
  misc_RNA (1)...(19): siRNA sense strand
gccuaccucuucaccauca

SEQ ID NO: 1429497 - RNA, 19 nt, Homo sapiens
  misc_RNA (1)...(19): siRNA sense strand
guaccuugcacuaucucua

SEQ ID NO: 1429498 - RNA, 19 nt, Homo sapiens
  misc_RNA (1)...(19): siRNA sense strand
cagcuuugccguccucaug

SEQ ID NO: 1429499 - RNA, 19 nt, Homo sapiens
  misc_RNA (1)...(19): siRNA sense strand
gcagggugucuucaucuuc

SEQ ID NO: 1429500 - RNA, 19 nt, Homo sapiens
  misc_RNA (1)...(19): siRNA sense strand
gcgagaacacgugucaaga

SEQ ID NO: 1429501 - RNA, 19 nt, Homo sapiens
  misc_RNA (1)...(19): siRNA sense strand
caaagggaucaggaaauug

SEQ ID NO: 1429502 - RNA, 19 nt, Homo sapiens
  misc_RNA (1)...(19): siRNA sense strand
caucaacgagugugcaaca

SEQ ID NO: 1429503 - RNA, 19 nt, Homo sapiens
  misc_RNA (1)...(19): siRNA sense strand
ugugaucucugccuuucug

SEQ ID NO: 1429504 - RNA, 19 nt, Homo sapiens
  misc_RNA (1)...(19): siRNA sense strand
agcaagaaccuuuccaaug

SEQ ID NO: 1429505 - RNA, 19 nt, Homo sapiens
  misc_RNA (1)...(19): siRNA sense strand
acaauaggcaccagagaca

SEQ ID NO: 1429506 - RNA, 19 nt, Homo sapiens
  misc_RNA (1)...(19): siRNA sense strand
gccaucuucucugugaauu

SEQ ID NO: 1429507 - RNA, 19 nt, Homo sapiens
  misc_RNA (1)...(19): siRNA sense strand
ccagaaaagggauuuauau

SEQ ID NO: 1429508 - RNA, 19 nt, Homo sapiens
  misc_RNA (1)...(19): siRNA sense strand
guggucaacuacucaagca

SEQ ID NO: 1429509 - RNA, 19 nt, Homo sapiens
  misc_RNA (1)...(19): siRNA sense strand
uggauggccuagaggaugu

SEQ ID NO: 1429510 - RNA, 19 nt, Homo sapiens
  misc_RNA (1)...(19): siRNA sense strand
caacagauucaugaagaag

SEQ ID NO: 1429511 - RNA, 19 nt, Homo sapiens
  misc_RNA (1)...(19): siRNA sense strand
ucaagcaucaacagauuca

SEQ ID NO: 1429512 - RNA, 19 nt, Homo sapiens
  misc_RNA (1)...(19): siRNA sense strand
gaaucaggcacagaaaucu

SEQ ID NO: 1429513 - RNA, 19 nt, Homo sapiens
  misc_RNA (1)...(19): siRNA sense strand
ggaggugcagaagcaagua

SEQ ID NO: 1429514 - RNA, 19 nt, Homo sapiens
  misc_RNA (1)...(19): siRNA sense strand
gcagguccgggagcaauau

SEQ ID NO: 1429515 - RNA, 19 nt, Homo sapiens
  misc_RNA (1)...(19): siRNA sense strand
agucugagaugcacacacu

SEQ ID NO: 1429516 - RNA, 19 nt, Homo sapiens
  misc_RNA (1)...(19): siRNA sense strand
gguccaaagggaucaggaa

SEQ ID NO: 1429517 - RNA, 19 nt, Homo sapiens
  misc_RNA (1)...(19): siRNA sense strand
agaaggugcucugugucuu

SEQ ID NO: 1429518 - RNA, 19 nt, Homo sapiens
  misc_RNA (1)...(19): siRNA sense strand
guccaaagggaucaggaaa

SEQ ID NO: 1429519 - RNA, 19 nt, Homo sapiens
  misc_RNA (1)...(19): siRNA sense strand
gugacucucuggauuuuga

SEQ ID NO: 1429520 - RNA, 19 nt, Homo sapiens
  misc_RNA (1)...(19): siRNA sense strand
caacuacucaagcaucaac

SEQ ID NO: 1429521 - RNA, 19 nt, Homo sapiens
  misc_RNA (1)...(19): siRNA sense strand
ggaccugggcagagacuac

SEQ ID NO: 1429522 - RNA, 19 nt, Homo sapiens
  misc_RNA (1)...(19): siRNA sense strand
uggccuaccucuucaccau

SEQ ID NO: 1429523 - RNA, 19 nt, Homo sapiens
  misc_RNA (1)...(19): siRNA sense strand
gucauggccuaccucuuca

SEQ ID NO: 1429524 - RNA, 19 nt, Homo sapiens
  misc_RNA (1)...(19): siRNA sense strand
ucucgucuuucucgcauuc

SEQ ID NO: 1429525 - RNA, 19 nt, Homo sapiens
  misc_RNA (1)...(19): siRNA sense strand
caucaacagauucaugaag

SEQ ID NO: 1429526 - RNA, 19 nt, Homo sapiens
  misc_RNA (1)...(19): siRNA sense strand
gcaucaacagauucaugaa

SEQ ID NO: 1429527 - RNA, 19 nt, Homo sapiens
  misc_RNA (1)...(19): siRNA sense strand
ucaagaaugagagcgagaa

SEQ ID NO: 1429528 - RNA, 19 nt, Homo sapiens
  misc_RNA (1)...(19): siRNA sense strand
cagacucuccucccucaau

SEQ ID NO: 1429529 - RNA, 19 nt, Homo sapiens
  misc_RNA (1)...(19): siRNA sense strand
aaggugcugugcuccauca

SEQ ID NO: 1429530 - RNA, 19 nt, Homo sapiens
  misc_RNA (1)...(19): siRNA sense strand
cacaggcugcagcacaaua

SEQ ID NO: 1429531 - RNA, 19 nt, Homo sapiens
  misc_RNA (1)...(19): siRNA sense strand
gcaacaacgacacccaaaa

SEQ ID NO: 1429532 - RNA, 19 nt, Homo sapiens
  misc_RNA (1)...(19): siRNA sense strand
gaaaacugagucugagaug

SEQ ID NO: 1429533 - RNA, 19 nt, Homo sapiens
  misc_RNA (1)...(19): siRNA sense strand
cuacucaagcaucaacaga

SEQ ID NO: 1429534 - RNA, 19 nt, Homo sapiens
  misc_RNA (1)...(19): siRNA sense strand
gcaagaaccuuuccaaugg

SEQ ID NO: 1429535 - RNA, 19 nt, Homo sapiens
  misc_RNA (1)...(19): siRNA sense strand
ccaaugggcuguugaacuu

SEQ ID NO: 1429536 - RNA, 19 nt, Homo sapiens
  misc_RNA (1)...(19): siRNA sense strand
caucuucucugugaauuua

SEQ ID NO: 1429537 - RNA, 19 nt, Homo sapiens
  misc_RNA (1)...(19): siRNA sense strand
ccaaagggaucaggaaauu

SEQ ID NO: 1429538 - RNA, 19 nt, Homo sapiens
  misc_RNA (1)...(19): siRNA sense strand
gaauuuaguucucuuucug

SEQ ID NO: 1429539 - RNA, 19 nt, Homo sapiens
  misc_RNA (1)...(19): siRNA sense strand
gugcaacacugucgaaagu

SEQ ID NO: 1429540 - RNA, 19 nt, Homo sapiens
  misc_RNA (1)...(19): siRNA sense strand
gccagacgcuuucccgauu

SEQ ID NO: 1429541 - RNA, 19 nt, Homo sapiens
  misc_RNA (1)...(19): siRNA sense strand
ggucauggccuaccucuuc

SEQ ID NO: 1429542 - RNA, 19 nt, Homo sapiens
  misc_RNA (1)...(19): siRNA sense strand
gaugugaucucugccuuuc

SEQ ID NO: 1429543 - RNA, 19 nt, Homo sapiens
  misc_RNA (1)...(19): siRNA sense strand
ggaaucaggcacagaaauc

SEQ ID NO: 1429544 - RNA, 19 nt, Homo sapiens
  misc_RNA (1)...(19): siRNA sense strand
ccaguuaccuucaccuucu

SEQ ID NO: 1429545 - RNA, 19 nt, Homo sapiens
  misc_RNA (1)...(19): siRNA sense strand
ugaugcagcucgacuggaa

SEQ ID NO: 1429546 - RNA, 19 nt, Homo sapiens
  misc_RNA (1)...(19): siRNA sense strand
aaagggaucaggaaauuga

SEQ ID NO: 1429547 - RNA, 19 nt, Homo sapiens
  misc_RNA (1)...(19): siRNA sense strand
agacucuccucccucaaua

SEQ ID NO: 1429548 - RNA, 19 nt, Homo sapiens
  misc_RNA (1)...(19): siRNA sense strand
gagcauggccagaauggau

SEQ ID NO: 1429549 - RNA, 19 nt, Homo sapiens
  misc_RNA (1)...(19): siRNA sense strand
ucaacagauucaugaagaa

SEQ ID NO: 1429550 - RNA, 19 nt, Homo sapiens
  misc_RNA (1)...(19): siRNA sense strand
ggagcaauaugggaaaugg

SEQ ID NO: 1429551 - RNA, 19 nt, Homo sapiens
  misc_RNA (1)...(19): siRNA sense strand
acucaagcaucaacagauu

SEQ ID NO: 1429552 - RNA, 19 nt, Homo sapiens
  misc_RNA (1)...(19): siRNA sense strand
guaaagccauccagaacac

SEQ ID NO: 1429553 - RNA, 19 nt, Homo sapiens
  misc_RNA (1)...(19): siRNA sense strand
gagcaagaaccuuuccaau

SEQ ID NO: 1429554 - RNA, 19 nt, Homo sapiens
  misc_RNA (1)...(19): siRNA sense strand
gaaagugucaugcggaaaa

SEQ ID NO: 1429555 - RNA, 19 nt, Homo sapiens
  misc_RNA (1)...(19): siRNA sense strand
gcacccaccugagcagcuu

SEQ ID NO: 1429556 - RNA, 19 nt, Homo sapiens
  misc_RNA (1)...(19): siRNA sense strand
ucagugaucccgagacaga

SEQ ID NO: 1429557 - RNA, 19 nt, Homo sapiens
  misc_RNA (1)...(19): siRNA sense strand
ccuccaggccucaccuuua

SEQ ID NO: 1429558 - RNA, 19 nt, Homo sapiens
  misc_RNA (1)...(19): siRNA sense strand
ucuccucccucaauaguga

SEQ ID NO: 1429559 - RNA, 19 nt, Homo sapiens
  misc_RNA (1)...(19): siRNA sense strand
ggagacuugugacgacauc

SEQ ID NO: 1429560 - RNA, 19 nt, Homo sapiens
  misc_RNA (1)...(19): siRNA sense strand
ccgcgucuuucucgucuuu

SEQ ID NO: 1429561 - RNA, 19 nt, Homo sapiens
  misc_RNA (1)...(19): siRNA sense strand
ggccugagcaagaaccuuu

SEQ ID NO: 1429562 - RNA, 19 nt, Homo sapiens
  misc_RNA (1)...(19): siRNA sense strand
gcacaauaggcaccagaga

SEQ ID NO: 1429563 - RNA, 19 nt, Homo sapiens
  misc_RNA (1)...(19): siRNA sense strand
ggacuccucgugugucaau

SEQ ID NO: 1429564 - RNA, 19 nt, Homo sapiens
  misc_RNA (1)...(19): siRNA sense strand
ucacuuuucuccuguguaa

SEQ ID NO: 1429565 - RNA, 19 nt, Homo sapiens
  misc_RNA (1)...(19): siRNA sense strand
ggaccugucugcgccaucu

SEQ ID NO: 1429566 - RNA, 19 nt, Homo sapiens
  misc_RNA (1)...(19): siRNA sense strand
cgagaacacgugucaagau

SEQ ID NO: 1429567 - RNA, 19 nt, Homo sapiens
  misc_RNA (1)...(19): siRNA sense strand
gccgguaccuugcacuauc

SEQ ID NO: 1429568 - RNA, 19 nt, Homo sapiens
  misc_RNA (1)...(19): siRNA sense strand
guucagugaucccgagaca

SEQ ID NO: 1429569 - RNA, 19 nt, Homo sapiens
  misc_RNA (1)...(19): siRNA sense strand
cuccaggccucaccuuuau

SEQ ID NO: 1429570 - RNA, 19 nt, Homo sapiens
  misc_RNA (1)...(19): siRNA sense strand
aaccucagcuccccaguua

SEQ ID NO: 1429571 - RNA, 19 nt, Homo sapiens
  misc_RNA (1)...(19): siRNA sense strand
uaugggaaaugguccaaag

SEQ ID NO: 1429572 - RNA, 19 nt, Homo sapiens
  misc_RNA (1)...(19): siRNA sense strand
ucuggugacucucuggauu

SEQ ID NO: 1429573 - RNA, 19 nt, Homo sapiens
  misc_RNA (1)...(19): siRNA sense strand
guccacagccagacgcuuu

SEQ ID NO: 1429574 - RNA, 19 nt, Homo sapiens
  misc_RNA (1)...(19): siRNA sense strand
ccagacgcuuucccgauuc

SEQ ID NO: 1429575 - RNA, 19 nt, Homo sapiens
  misc_RNA (1)...(19): siRNA sense strand
aucaacagauucaugaaga

SEQ ID NO: 1429576 - RNA, 19 nt, Homo sapiens
  misc_RNA (1)...(19): siRNA sense strand
gucaacuacucaagcauca

SEQ ID NO: 1429577 - RNA, 19 nt, Homo sapiens
  misc_RNA (1)...(19): siRNA sense strand
ccucauggcccacuacgau

SEQ ID NO: 1429578 - RNA, 19 nt, Homo sapiens
  misc_RNA (1)...(19): siRNA sense strand
caccauccagagcaucuua

SEQ ID NO: 1429579 - RNA, 19 nt, Homo sapiens
  misc_RNA (1)...(19): siRNA sense strand
cagaauggauguggucacu

SEQ ID NO: 1429580 - RNA, 19 nt, Homo sapiens
  misc_RNA (1)...(19): siRNA sense strand
aaacugagucugagaugca

SEQ ID NO: 1429581 - RNA, 19 nt, Homo sapiens
  misc_RNA (1)...(19): siRNA sense strand
gccuaccucuucaccauca

SEQ ID NO: 1429582 - RNA, 19 nt, Homo sapiens
  misc_RNA (1)...(19): siRNA sense strand
guaccuugcacuaucucua

SEQ ID NO: 1429583 - RNA, 19 nt, Homo sapiens
  misc_RNA (1)...(19): siRNA sense strand
cagcuuugccguccucaug

SEQ ID NO: 1429584 - RNA, 19 nt, Homo sapiens
  misc_RNA (1)...(19): siRNA sense strand
gcagggugucuucaucuuc

SEQ ID NO: 1429585 - RNA, 19 nt, Homo sapiens
  misc_RNA (1)...(19): siRNA sense strand
gcgagaacacgugucaaga

SEQ ID NO: 1429586 - RNA, 19 nt, Homo sapiens
  misc_RNA (1)...(19): siRNA sense strand
caaagggaucaggaaauug

SEQ ID NO: 1429587 - RNA, 19 nt, Homo sapiens
  misc_RNA (1)...(19): siRNA sense strand
caucaacgagugugcaaca

SEQ ID NO: 1429588 - RNA, 19 nt, Homo sapiens
  misc_RNA (1)...(19): siRNA sense strand
ugugaucucugccuuucug

SEQ ID NO: 1429589 - RNA, 19 nt, Homo sapiens
  misc_RNA (1)...(19): siRNA sense strand
agcaagaaccuuuccaaug

SEQ ID NO: 1429590 - RNA, 19 nt, Homo sapiens
  misc_RNA (1)...(19): siRNA sense strand
acaauaggcaccagagaca

SEQ ID NO: 1429591 - RNA, 19 nt, Homo sapiens
  misc_RNA (1)...(19): siRNA sense strand
gccaucuucucugugaauu

SEQ ID NO: 1429592 - RNA, 19 nt, Homo sapiens
  misc_RNA (1)...(19): siRNA sense strand
ccagaaaagggauuuauau

SEQ ID NO: 1429593 - RNA, 19 nt, Homo sapiens
  misc_RNA (1)...(19): siRNA sense strand
guggucaacuacucaagca

SEQ ID NO: 1429594 - RNA, 19 nt, Homo sapiens
  misc_RNA (1)...(19): siRNA sense strand
uggauggccuagaggaugu

SEQ ID NO: 1429595 - RNA, 19 nt, Homo sapiens
  misc_RNA (1)...(19): siRNA sense strand
caacagauucaugaagaag

SEQ ID NO: 1429596 - RNA, 19 nt, Homo sapiens
  misc_RNA (1)...(19): siRNA sense strand
ucaagcaucaacagauuca

SEQ ID NO: 1429597 - RNA, 19 nt, Homo sapiens
  misc_RNA (1)...(19): siRNA sense strand
gaaucaggcacagaaaucu

SEQ ID NO: 1429598 - RNA, 19 nt, Homo sapiens
  misc_RNA (1)...(19): siRNA sense strand
ggaggugcagaagcaagua

SEQ ID NO: 1429599 - RNA, 19 nt, Homo sapiens
  misc_RNA (1)...(19): siRNA sense strand
gcagguccgggagcaauau

SEQ ID NO: 1429600 - RNA, 19 nt, Homo sapiens
  misc_RNA (1)...(19): siRNA sense strand
agucugagaugcacacacu

SEQ ID NO: 1429601 - RNA, 19 nt, Homo sapiens
  misc_RNA (1)...(19): siRNA sense strand
gguccaaagggaucaggaa

SEQ ID NO: 1429602 - RNA, 19 nt, Homo sapiens
  misc_RNA (1)...(19): siRNA sense strand
agaaggugcucugugucuu

SEQ ID NO: 1429603 - RNA, 19 nt, Homo sapiens
  misc_RNA (1)...(19): siRNA sense strand
guccaaagggaucaggaaa

SEQ ID NO: 1429604 - RNA, 19 nt, Homo sapiens
  misc_RNA (1)...(19): siRNA sense strand
gugacucucuggauuuuga

SEQ ID NO: 1429605 - RNA, 19 nt, Homo sapiens
  misc_RNA (1)...(19): siRNA sense strand
caacuacucaagcaucaac

SEQ ID NO: 1429606 - RNA, 19 nt, Homo sapiens
  misc_RNA (1)...(19): siRNA sense strand
ggaccugggcagagacuac

SEQ ID NO: 1429607 - RNA, 19 nt, Homo sapiens
  misc_RNA (1)...(19): siRNA sense strand
uggccuaccucuucaccau

SEQ ID NO: 1429608 - RNA, 19 nt, Homo sapiens
  misc_RNA (1)...(19): siRNA sense strand
gucauggccuaccucuuca

SEQ ID NO: 1429609 - RNA, 19 nt, Homo sapiens
  misc_RNA (1)...(19): siRNA sense strand
ucucgucuuucucgcauuc

SEQ ID NO: 1429610 - RNA, 19 nt, Homo sapiens
  misc_RNA (1)...(19): siRNA sense strand
caucaacagauucaugaag

SEQ ID NO: 1429611 - RNA, 19 nt, Homo sapiens
  misc_RNA (1)...(19): siRNA sense strand
gcaucaacagauucaugaa

SEQ ID NO: 1429612 - RNA, 19 nt, Homo sapiens
  misc_RNA (1)...(19): siRNA sense strand
ucaagaaugagagcgagaa

SEQ ID NO: 1429613 - RNA, 19 nt, Homo sapiens
  misc_RNA (1)...(19): siRNA sense strand
cagacucuccucccucaau

SEQ ID NO: 1429614 - RNA, 19 nt, Homo sapiens
  misc_RNA (1)...(19): siRNA sense strand
aaggugcugugcuccauca

SEQ ID NO: 1429615 - RNA, 19 nt, Homo sapiens
  misc_RNA (1)...(19): siRNA sense strand
cacaggcugcagcacaaua

SEQ ID NO: 1429616 - RNA, 19 nt, Homo sapiens
  misc_RNA (1)...(19): siRNA sense strand
gcaacaacgacacccaaaa

SEQ ID NO: 1429617 - RNA, 19 nt, Homo sapiens
  misc_RNA (1)...(19): siRNA sense strand
gaaaacugagucugagaug

SEQ ID NO: 1429618 - RNA, 19 nt, Homo sapiens
  misc_RNA (1)...(19): siRNA sense strand
cuacucaagcaucaacaga

SEQ ID NO: 1429619 - RNA, 19 nt, Homo sapiens
  misc_RNA (1)...(19): siRNA sense strand
gcaagaaccuuuccaaugg

SEQ ID NO: 1429620 - RNA, 19 nt, Homo sapiens
  misc_RNA (1)...(19): siRNA sense strand
ccaaugggcuguugaacuu

SEQ ID NO: 1429621 - RNA, 19 nt, Homo sapiens
  misc_RNA (1)...(19): siRNA sense strand
caucuucucugugaauuua

SEQ ID NO: 1429622 - RNA, 19 nt, Homo sapiens
  misc_RNA (1)...(19): siRNA sense strand
ccaaagggaucaggaaauu

SEQ ID NO: 1429623 - RNA, 19 nt, Homo sapiens
  misc_RNA (1)...(19): siRNA sense strand
gaauuuaguucucuuucug

SEQ ID NO: 1429624 - RNA, 19 nt, Homo sapiens
  misc_RNA (1)...(19): siRNA sense strand
gugcaacacugucgaaagu

SEQ ID NO: 1429625 - RNA, 19 nt, Homo sapiens
  misc_RNA (1)...(19): siRNA sense strand
gccagacgcuuucccgauu

SEQ ID NO: 1429626 - RNA, 19 nt, Homo sapiens
  misc_RNA (1)...(19): siRNA sense strand
ggucauggccuaccucuuc

SEQ ID NO: 1429627 - RNA, 19 nt, Homo sapiens
  misc_RNA (1)...(19): siRNA sense strand
gaugugaucucugccuuuc

SEQ ID NO: 1429628 - RNA, 19 nt, Homo sapiens
  misc_RNA (1)...(19): siRNA sense strand
ggaaucaggcacagaaauc

SEQ ID NO: 1429629 - RNA, 19 nt, Homo sapiens
  misc_RNA (1)...(19): siRNA sense strand
ccaguuaccuucaccuucu

SEQ ID NO: 1429630 - RNA, 19 nt, Homo sapiens
  misc_RNA (1)...(19): siRNA sense strand
ugaugcagcucgacuggaa

SEQ ID NO: 1429631 - RNA, 19 nt, Homo sapiens
  misc_RNA (1)...(19): siRNA sense strand
aaagggaucaggaaauuga

SEQ ID NO: 1429632 - RNA, 19 nt, Homo sapiens
  misc_RNA (1)...(19): siRNA sense strand
agacucuccucccucaaua

SEQ ID NO: 1429633 - RNA, 19 nt, Homo sapiens
  misc_RNA (1)...(19): siRNA sense strand
gagcauggccagaauggau

SEQ ID NO: 1429634 - RNA, 19 nt, Homo sapiens
  misc_RNA (1)...(19): siRNA sense strand
ucaacagauucaugaagaa

SEQ ID NO: 1429635 - RNA, 19 nt, Homo sapiens
  misc_RNA (1)...(19): siRNA sense strand
ggagcaauaugggaaaugg

SEQ ID NO: 1429636 - RNA, 19 nt, Homo sapiens
  misc_RNA (1)...(19): siRNA sense strand
acucaagcaucaacagauu

SEQ ID NO: 1429637 - RNA, 19 nt, Homo sapiens
  misc_RNA (1)...(19): siRNA sense strand
guaaagccauccagaacac

SEQ ID NO: 1429638 - RNA, 19 nt, Homo sapiens
  misc_RNA (1)...(19): siRNA sense strand
gagcaagaaccuuuccaau

SEQ ID NO: 1429639 - RNA, 19 nt, Homo sapiens
  misc_RNA (1)...(19): siRNA sense strand
gaaagugucaugcggaaaa

SEQ ID NO: 1429640 - RNA, 19 nt, Homo sapiens
  misc_RNA (1)...(19): siRNA sense strand
gcacccaccugagcagcuu

SEQ ID NO: 1429641 - RNA, 19 nt, Homo sapiens
  misc_RNA (1)...(19): siRNA sense strand
ucagugaucccgagacaga

SEQ ID NO: 1429642 - RNA, 19 nt, Homo sapiens
  misc_RNA (1)...(19): siRNA sense strand
ccuccaggccucaccuuua

SEQ ID NO: 1429643 - RNA, 19 nt, Homo sapiens
  misc_RNA (1)...(19): siRNA sense strand
ucuccucccucaauaguga

SEQ ID NO: 1429644 - RNA, 19 nt, Homo sapiens
  misc_RNA (1)...(19): siRNA sense strand
ggagacuugugacgacauc

SEQ ID NO: 1429645 - RNA, 19 nt, Homo sapiens
  misc_RNA (1)...(19): siRNA sense strand
ccgcgucuuucucgucuuu

SEQ ID NO: 1429646 - RNA, 19 nt, Homo sapiens
  misc_RNA (1)...(19): siRNA sense strand
ggccugagcaagaaccuuu

SEQ ID NO: 1429647 - RNA, 19 nt, Homo sapiens
  misc_RNA (1)...(19): siRNA sense strand
gcacaauaggcaccagaga

SEQ ID NO: 1429648 - RNA, 19 nt, Homo sapiens
  misc_RNA (1)...(19): siRNA sense strand
ggacuccucgugugucaau

SEQ ID NO: 1429649 - RNA, 19 nt, Homo sapiens
  misc_RNA (1)...(19): siRNA sense strand
ucacuuuucuccuguguaa

SEQ ID NO: 1429650 - RNA, 19 nt, Homo sapiens
  misc_RNA (1)...(19): siRNA sense strand
ggaccugucugcgccaucu

SEQ ID NO: 1429651 - RNA, 19 nt, Homo sapiens
  misc_RNA (1)...(19): siRNA sense strand
cgagaacacgugucaagau

SEQ ID NO: 1429652 - RNA, 19 nt, Homo sapiens
  misc_RNA (1)...(19): siRNA sense strand
gccgguaccuugcacuauc

SEQ ID NO: 1429653 - RNA, 19 nt, Homo sapiens
  misc_RNA (1)...(19): siRNA sense strand
guucagugaucccgagaca

SEQ ID NO: 1429654 - RNA, 19 nt, Homo sapiens
  misc_RNA (1)...(19): siRNA sense strand
cuccaggccucaccuuuau

SEQ ID NO: 1429655 - RNA, 19 nt, Homo sapiens
  misc_RNA (1)...(19): siRNA sense strand
aaccucagcuccccaguua

SEQ ID NO: 1429656 - RNA, 19 nt, Homo sapiens
  misc_RNA (1)...(19): siRNA sense strand
uaugggaaaugguccaaag

SEQ ID NO: 1429657 - RNA, 19 nt, Homo sapiens
  misc_RNA (1)...(19): siRNA sense strand
ucuggugacucucuggauu

SEQ ID NO: 1429658 - RNA, 19 nt, Homo sapiens
  misc_RNA (1)...(19): siRNA sense strand
guccacagccagacgcuuu

SEQ ID NO: 1429659 - RNA, 19 nt, Homo sapiens
  misc_RNA (1)...(19): siRNA sense strand
ccagacgcuuucccgauuc

SEQ ID NO: 1429660 - RNA, 19 nt, Homo sapiens
  misc_RNA (1)...(19): siRNA sense strand
aucaacagauucaugaaga

SEQ ID NO: 1429661 - RNA, 19 nt, Homo sapiens
  misc_RNA (1)...(19): siRNA sense strand
gucaacuacucaagcauca

SEQ ID NO: 1429662 - RNA, 19 nt, Homo sapiens
  misc_RNA (1)...(19): siRNA sense strand
ccucauggcccacuacgau

SEQ ID NO: 1429663 - RNA, 19 nt, Homo sapiens
  misc_RNA (1)...(19): siRNA sense strand
caccauccagagcaucuua

SEQ ID NO: 1429664 - RNA, 19 nt, Homo sapiens
  misc_RNA (1)...(19): siRNA sense strand
cagaauggauguggucacu

SEQ ID NO: 1429665 - RNA, 19 nt, Homo sapiens
  misc_RNA (1)...(19): siRNA sense strand
aaacugagucugagaugca

SEQ ID NO: 1429666 - RNA, 19 nt, Homo sapiens
  misc_RNA (1)...(19): siRNA sense strand
gccuaccucuucaccauca

SEQ ID NO: 1429667 - RNA, 19 nt, Homo sapiens
  misc_RNA (1)...(19): siRNA sense strand
guaccuugcacuaucucua

SEQ ID NO: 1429668 - RNA, 19 nt, Homo sapiens
  misc_RNA (1)...(19): siRNA sense strand
cagcuuugccguccucaug

SEQ ID NO: 1429669 - RNA, 19 nt, Homo sapiens
  misc_RNA (1)...(19): siRNA sense strand
gcagggugucuucaucuuc

SEQ ID NO: 1429670 - RNA, 19 nt, Homo sapiens
  misc_RNA (1)...(19): siRNA sense strand
gcgagaacacgugucaaga

SEQ ID NO: 1429671 - RNA, 19 nt, Homo sapiens
  misc_RNA (1)...(19): siRNA sense strand
caaagggaucaggaaauug

SEQ ID NO: 1429672 - RNA, 19 nt, Homo sapiens
  misc_RNA (1)...(19): siRNA sense strand
caucaacgagugugcaaca

SEQ ID NO: 1429673 - RNA, 19 nt, Homo sapiens
  misc_RNA (1)...(19): siRNA sense strand
ugugaucucugccuuucug

SEQ ID NO: 1429674 - RNA, 19 nt, Homo sapiens
  misc_RNA (1)...(19): siRNA sense strand
agcaagaaccuuuccaaug

SEQ ID NO: 1429675 - RNA, 19 nt, Homo sapiens
  misc_RNA (1)...(19): siRNA sense strand
acaauaggcaccagagaca

SEQ ID NO: 1429676 - RNA, 19 nt, Homo sapiens
  misc_RNA (1)...(19): siRNA sense strand
gccaucuucucugugaauu

SEQ ID NO: 1429677 - RNA, 19 nt, Homo sapiens
  misc_RNA (1)...(19): siRNA sense strand
ccagaaaagggauuuauau

SEQ ID NO: 1429678 - RNA, 19 nt, Homo sapiens
  misc_RNA (1)...(19): siRNA sense strand
guggucaacuacucaagca

SEQ ID NO: 1429679 - RNA, 19 nt, Homo sapiens
  misc_RNA (1)...(19): siRNA sense strand
uggauggccuagaggaugu

SEQ ID NO: 1429680 - RNA, 19 nt, Homo sapiens
  misc_RNA (1)...(19): siRNA sense strand
caacagauucaugaagaag

SEQ ID NO: 1429681 - RNA, 19 nt, Homo sapiens
  misc_RNA (1)...(19): siRNA sense strand
ucaagcaucaacagauuca

SEQ ID NO: 1429682 - RNA, 19 nt, Homo sapiens
  misc_RNA (1)...(19): siRNA sense strand
gaaucaggcacagaaaucu

SEQ ID NO: 1429683 - RNA, 19 nt, Homo sapiens
  misc_RNA (1)...(19): siRNA sense strand
ggaggugcagaagcaagua

SEQ ID NO: 1429684 - RNA, 19 nt, Homo sapiens
  misc_RNA (1)...(19): siRNA sense strand
gcagguccgggagcaauau

SEQ ID NO: 1429685 - RNA, 19 nt, Homo sapiens
  misc_RNA (1)...(19): siRNA sense strand
agucugagaugcacacacu

SEQ ID NO: 1429686 - RNA, 19 nt, Homo sapiens
  misc_RNA (1)...(19): siRNA sense strand
gguccaaagggaucaggaa

SEQ ID NO: 1429687 - RNA, 19 nt, Homo sapiens
  misc_RNA (1)...(19): siRNA sense strand
agaaggugcucugugucuu

SEQ ID NO: 1429688 - RNA, 19 nt, Homo sapiens
  misc_RNA (1)...(19): siRNA sense strand
guccaaagggaucaggaaa

SEQ ID NO: 1429689 - RNA, 19 nt, Homo sapiens
  misc_RNA (1)...(19): siRNA sense strand
gugacucucuggauuuuga

SEQ ID NO: 1429690 - RNA, 19 nt, Homo sapiens
  misc_RNA (1)...(19): siRNA sense strand
caacuacucaagcaucaac

SEQ ID NO: 1429691 - RNA, 19 nt, Homo sapiens
  misc_RNA (1)...(19): siRNA sense strand
ggaccugggcagagacuac

SEQ ID NO: 1429692 - RNA, 19 nt, Homo sapiens
  misc_RNA (1)...(19): siRNA sense strand
uggccuaccucuucaccau

SEQ ID NO: 1429693 - RNA, 19 nt, Homo sapiens
  misc_RNA (1)...(19): siRNA sense strand
gucauggccuaccucuuca

SEQ ID NO: 1429694 - RNA, 19 nt, Homo sapiens
  misc_RNA (1)...(19): siRNA sense strand
ucucgucuuucucgcauuc

SEQ ID NO: 1429695 - RNA, 19 nt, Homo sapiens
  misc_RNA (1)...(19): siRNA sense strand
caucaacagauucaugaag

SEQ ID NO: 1429696 - RNA, 19 nt, Homo sapiens
  misc_RNA (1)...(19): siRNA sense strand
gcaucaacagauucaugaa

SEQ ID NO: 1429697 - RNA, 19 nt, Homo sapiens
  misc_RNA (1)...(19): siRNA sense strand
ucaagaaugagagcgagaa

SEQ ID NO: 1429698 - RNA, 19 nt, Homo sapiens
  misc_RNA (1)...(19): siRNA sense strand
cagacucuccucccucaau

SEQ ID NO: 1429699 - RNA, 19 nt, Homo sapiens
  misc_RNA (1)...(19): siRNA sense strand
aaggugcugugcuccauca

SEQ ID NO: 1429700 - RNA, 19 nt, Homo sapiens
  misc_RNA (1)...(19): siRNA sense strand
cacaggcugcagcacaaua

SEQ ID NO: 1429701 - RNA, 19 nt, Homo sapiens
  misc_RNA (1)...(19): siRNA sense strand
gcaacaacgacacccaaaa

SEQ ID NO: 1429702 - RNA, 19 nt, Homo sapiens
  misc_RNA (1)...(19): siRNA sense strand
gaaaacugagucugagaug

SEQ ID NO: 1429703 - RNA, 19 nt, Homo sapiens
  misc_RNA (1)...(19): siRNA sense strand
cuacucaagcaucaacaga

SEQ ID NO: 1429704 - RNA, 19 nt, Homo sapiens
  misc_RNA (1)...(19): siRNA sense strand
gcaagaaccuuuccaaugg

SEQ ID NO: 1429705 - RNA, 19 nt, Homo sapiens
  misc_RNA (1)...(19): siRNA sense strand
ccaaugggcuguugaacuu

SEQ ID NO: 1429706 - RNA, 19 nt, Homo sapiens
  misc_RNA (1)...(19): siRNA sense strand
caucuucucugugaauuua

SEQ ID NO: 1429707 - RNA, 19 nt, Homo sapiens
  misc_RNA (1)...(19): siRNA sense strand
ccaaagggaucaggaaauu

SEQ ID NO: 1429708 - RNA, 19 nt, Homo sapiens
  misc_RNA (1)...(19): siRNA sense strand
gaauuuaguucucuuucug

SEQ ID NO: 1429709 - RNA, 19 nt, Homo sapiens
  misc_RNA (1)...(19): siRNA sense strand
gugcaacacugucgaaagu

SEQ ID NO: 1429710 - RNA, 19 nt, Homo sapiens
  misc_RNA (1)...(19): siRNA sense strand
gccagacgcuuucccgauu

SEQ ID NO: 1429711 - RNA, 19 nt, Homo sapiens
  misc_RNA (1)...(19): siRNA sense strand
ggucauggccuaccucuuc

SEQ ID NO: 1429712 - RNA, 19 nt, Homo sapiens
  misc_RNA (1)...(19): siRNA sense strand
gaugugaucucugccuuuc

SEQ ID NO: 1429713 - RNA, 19 nt, Homo sapiens
  misc_RNA (1)...(19): siRNA sense strand
ggaaucaggcacagaaauc

SEQ ID NO: 1429714 - RNA, 19 nt, Homo sapiens
  misc_RNA (1)...(19): siRNA sense strand
ccaguuaccuucaccuucu

SEQ ID NO: 1429715 - RNA, 19 nt, Homo sapiens
  misc_RNA (1)...(19): siRNA sense strand
ugaugcagcucgacuggaa

SEQ ID NO: 1429716 - RNA, 19 nt, Homo sapiens
  misc_RNA (1)...(19): siRNA sense strand
aaagggaucaggaaauuga

SEQ ID NO: 1429717 - RNA, 19 nt, Homo sapiens
  misc_RNA (1)...(19): siRNA sense strand
agacucuccucccucaaua

SEQ ID NO: 1429718 - RNA, 19 nt, Homo sapiens
  misc_RNA (1)...(19): siRNA sense strand
gagcauggccagaauggau

SEQ ID NO: 1429719 - RNA, 19 nt, Homo sapiens
  misc_RNA (1)...(19): siRNA sense strand
ucaacagauucaugaagaa

SEQ ID NO: 1429720 - RNA, 19 nt, Homo sapiens
  misc_RNA (1)...(19): siRNA sense strand
ggagcaauaugggaaaugg

SEQ ID NO: 1429721 - RNA, 19 nt, Homo sapiens
  misc_RNA (1)...(19): siRNA sense strand
acucaagcaucaacagauu

SEQ ID NO: 1429722 - RNA, 19 nt, Homo sapiens
  misc_RNA (1)...(19): siRNA sense strand
guaaagccauccagaacac

SEQ ID NO: 1429723 - RNA, 19 nt, Homo sapiens
  misc_RNA (1)...(19): siRNA sense strand
gagcaagaaccuuuccaau

SEQ ID NO: 1429724 - RNA, 19 nt, Homo sapiens
  misc_RNA (1)...(19): siRNA sense strand
gaaagugucaugcggaaaa

SEQ ID NO: 1429725 - RNA, 19 nt, Homo sapiens
  misc_RNA (1)...(19): siRNA sense strand
gcacccaccugagcagcuu

SEQ ID NO: 1429726 - RNA, 19 nt, Homo sapiens
  misc_RNA (1)...(19): siRNA sense strand
ucagugaucccgagacaga

SEQ ID NO: 1429727 - RNA, 19 nt, Homo sapiens
  misc_RNA (1)...(19): siRNA sense strand
ccuccaggccucaccuuua

SEQ ID NO: 1429728 - RNA, 19 nt, Homo sapiens
  misc_RNA (1)...(19): siRNA sense strand
ucuccucccucaauaguga

SEQ ID NO: 1429729 - RNA, 19 nt, Homo sapiens
  misc_RNA (1)...(19): siRNA sense strand
ggagacuugugacgacauc

SEQ ID NO: 1429730 - RNA, 19 nt, Homo sapiens
  misc_RNA (1)...(19): siRNA sense strand
ccgcgucuuucucgucuuu

SEQ ID NO: 1429731 - RNA, 19 nt, Homo sapiens
  misc_RNA (1)...(19): siRNA sense strand
ggccugagcaagaaccuuu

SEQ ID NO: 1429732 - RNA, 19 nt, Homo sapiens
  misc_RNA (1)...(19): siRNA sense strand
gcacaauaggcaccagaga

SEQ ID NO: 1429733 - RNA, 19 nt, Homo sapiens
  misc_RNA (1)...(19): siRNA sense strand
ggacuccucgugugucaau

SEQ ID NO: 1429734 - RNA, 19 nt, Homo sapiens
  misc_RNA (1)...(19): siRNA sense strand
ucacuuuucuccuguguaa

SEQ ID NO: 1429735 - RNA, 19 nt, Homo sapiens
  misc_RNA (1)...(19): siRNA sense strand
ggaccugucugcgccaucu

SEQ ID NO: 1429736 - RNA, 19 nt, Homo sapiens
  misc_RNA (1)...(19): siRNA sense strand
cgagaacacgugucaagau

SEQ ID NO: 1429737 - RNA, 19 nt, Homo sapiens
  misc_RNA (1)...(19): siRNA sense strand
gccgguaccuugcacuauc

SEQ ID NO: 1429738 - RNA, 19 nt, Homo sapiens
  misc_RNA (1)...(19): siRNA sense strand
guucagugaucccgagaca

SEQ ID NO: 1429739 - RNA, 19 nt, Homo sapiens
  misc_RNA (1)...(19): siRNA sense strand
cuccaggccucaccuuuau

SEQ ID NO: 1429740 - RNA, 19 nt, Homo sapiens
  misc_RNA (1)...(19): siRNA sense strand
aaccucagcuccccaguua

SEQ ID NO: 1429741 - RNA, 19 nt, Homo sapiens
  misc_RNA (1)...(19): siRNA sense strand
uaugggaaaugguccaaag

SEQ ID NO: 1429742 - RNA, 19 nt, Homo sapiens
  misc_RNA (1)...(19): siRNA sense strand
ucuggugacucucuggauu

SEQ ID NO: 1429743 - RNA, 19 nt, Homo sapiens
  misc_RNA (1)...(19): siRNA sense strand
guccacagccagacgcuuu

SEQ ID NO: 1429744 - RNA, 19 nt, Homo sapiens
  misc_RNA (1)...(19): siRNA sense strand
ccagacgcuuucccgauuc

SEQ ID NO: 1429745 - RNA, 19 nt, Homo sapiens
  misc_RNA (1)...(19): siRNA sense strand
aucaacagauucaugaaga

SEQ ID NO: 1429746 - RNA, 19 nt, Homo sapiens
  misc_RNA (1)...(19): siRNA sense strand
gucaacuacucaagcauca

SEQ ID NO: 1429747 - RNA, 19 nt, Homo sapiens
  misc_RNA (1)...(19): siRNA sense strand
ccucauggcccacuacgau

SEQ ID NO: 1429748 - RNA, 19 nt, Homo sapiens
  misc_RNA (1)...(19): siRNA sense strand
caccauccagagcaucuua

SEQ ID NO: 1429749 - RNA, 19 nt, Homo sapiens
  misc_RNA (1)...(19): siRNA sense strand
cagaauggauguggucacu

SEQ ID NO: 1429750 - RNA, 19 nt, Homo sapiens
  misc_RNA (1)...(19): siRNA sense strand
aaacugagucugagaugca

SEQ ID NO: 1429751 - RNA, 19 nt, Homo sapiens
  misc_RNA (1)...(19): siRNA sense strand
gccuaccucuucaccauca

SEQ ID NO: 1429752 - RNA, 19 nt, Homo sapiens
  misc_RNA (1)...(19): siRNA sense strand
guaccuugcacuaucucua

SEQ ID NO: 1429753 - RNA, 19 nt, Homo sapiens
  misc_RNA (1)...(19): siRNA sense strand
cagcuuugccguccucaug

SEQ ID NO: 1429754 - RNA, 19 nt, Homo sapiens
  misc_RNA (1)...(19): siRNA sense strand
gcagggugucuucaucuuc

SEQ ID NO: 1429755 - RNA, 19 nt, Homo sapiens
  misc_RNA (1)...(19): siRNA sense strand
gcgagaacacgugucaaga

SEQ ID NO: 1429756 - RNA, 19 nt, Homo sapiens
  misc_RNA (1)...(19): siRNA sense strand
caaagggaucaggaaauug

SEQ ID NO: 1429757 - RNA, 19 nt, Homo sapiens
  misc_RNA (1)...(19): siRNA sense strand
caucaacgagugugcaaca

SEQ ID NO: 1429758 - RNA, 19 nt, Homo sapiens
  misc_RNA (1)...(19): siRNA sense strand
ugugaucucugccuuucug

SEQ ID NO: 1429759 - RNA, 19 nt, Homo sapiens
  misc_RNA (1)...(19): siRNA sense strand
agcaagaaccuuuccaaug

SEQ ID NO: 1429760 - RNA, 19 nt, Homo sapiens
  misc_RNA (1)...(19): siRNA sense strand
acaauaggcaccagagaca

SEQ ID NO: 1429761 - RNA, 19 nt, Homo sapiens
  misc_RNA (1)...(19): siRNA sense strand
gccaucuucucugugaauu

SEQ ID NO: 1429762 - RNA, 19 nt, Homo sapiens
  misc_RNA (1)...(19): siRNA sense strand
ccagaaaagggauuuauau

SEQ ID NO: 1429763 - RNA, 19 nt, Homo sapiens
  misc_RNA (1)...(19): siRNA sense strand
guggucaacuacucaagca

SEQ ID NO: 1429764 - RNA, 19 nt, Homo sapiens
  misc_RNA (1)...(19): siRNA sense strand
uggauggccuagaggaugu

SEQ ID NO: 1429765 - RNA, 19 nt, Homo sapiens
  misc_RNA (1)...(19): siRNA sense strand
caacagauucaugaagaag

SEQ ID NO: 1429766 - RNA, 19 nt, Homo sapiens
  misc_RNA (1)...(19): siRNA sense strand
ucaagcaucaacagauuca

SEQ ID NO: 1429767 - RNA, 19 nt, Homo sapiens
  misc_RNA (1)...(19): siRNA sense strand
gaaucaggcacagaaaucu

SEQ ID NO: 1429768 - RNA, 19 nt, Homo sapiens
  misc_RNA (1)...(19): siRNA sense strand
ggaggugcagaagcaagua

SEQ ID NO: 1429769 - RNA, 19 nt, Homo sapiens
  misc_RNA (1)...(19): siRNA sense strand
gcagguccgggagcaauau

SEQ ID NO: 1429770 - RNA, 19 nt, Homo sapiens
  misc_RNA (1)...(19): siRNA sense strand
agucugagaugcacacacu

SEQ ID NO: 1429771 - RNA, 19 nt, Homo sapiens
  misc_RNA (1)...(19): siRNA sense strand
gguccaaagggaucaggaa

SEQ ID NO: 1429772 - RNA, 19 nt, Homo sapiens
  misc_RNA (1)...(19): siRNA sense strand
agaaggugcucugugucuu

SEQ ID NO: 1429773 - RNA, 19 nt, Homo sapiens
  misc_RNA (1)...(19): siRNA sense strand
guccaaagggaucaggaaa

SEQ ID NO: 1429774 - RNA, 19 nt, Homo sapiens
  misc_RNA (1)...(19): siRNA sense strand
gugacucucuggauuuuga

SEQ ID NO: 1429775 - RNA, 19 nt, Homo sapiens
  misc_RNA (1)...(19): siRNA sense strand
caacuacucaagcaucaac

SEQ ID NO: 1429776 - RNA, 19 nt, Homo sapiens
  misc_RNA (1)...(19): siRNA sense strand
ggaccugggcagagacuac

SEQ ID NO: 1429777 - RNA, 19 nt, Homo sapiens
  misc_RNA (1)...(19): siRNA sense strand
uggccuaccucuucaccau

SEQ ID NO: 1429778 - RNA, 19 nt, Homo sapiens
  misc_RNA (1)...(19): siRNA sense strand
gucauggccuaccucuuca

SEQ ID NO: 1429779 - RNA, 19 nt, Homo sapiens
  misc_RNA (1)...(19): siRNA sense strand
ucucgucuuucucgcauuc

SEQ ID NO: 1429780 - RNA, 19 nt, Homo sapiens
  misc_RNA (1)...(19): siRNA sense strand
caucaacagauucaugaag

SEQ ID NO: 1429781 - RNA, 19 nt, Homo sapiens
  misc_RNA (1)...(19): siRNA sense strand
gcaucaacagauucaugaa

SEQ ID NO: 1429782 - RNA, 19 nt, Homo sapiens
  misc_RNA (1)...(19): siRNA sense strand
ucaagaaugagagcgagaa

SEQ ID NO: 1429783 - RNA, 19 nt, Homo sapiens
  misc_RNA (1)...(19): siRNA sense strand
cagacucuccucccucaau

SEQ ID NO: 1429784 - RNA, 19 nt, Homo sapiens
  misc_RNA (1)...(19): siRNA sense strand
aaggugcugugcuccauca

SEQ ID NO: 1429785 - RNA, 19 nt, Homo sapiens
  misc_RNA (1)...(19): siRNA sense strand
cacaggcugcagcacaaua

SEQ ID NO: 1429786 - RNA, 19 nt, Homo sapiens
  misc_RNA (1)...(19): siRNA sense strand
gcaacaacgacacccaaaa

SEQ ID NO: 1429787 - RNA, 19 nt, Homo sapiens
  misc_RNA (1)...(19): siRNA sense strand
gaaaacugagucugagaug

SEQ ID NO: 1429788 - RNA, 19 nt, Homo sapiens
  misc_RNA (1)...(19): siRNA sense strand
cuacucaagcaucaacaga

SEQ ID NO: 1429789 - RNA, 19 nt, Homo sapiens
  misc_RNA (1)...(19): siRNA sense strand
gcaagaaccuuuccaaugg

SEQ ID NO: 1429790 - RNA, 19 nt, Homo sapiens
  misc_RNA (1)...(19): siRNA sense strand
ccaaugggcuguugaacuu

SEQ ID NO: 1429791 - RNA, 19 nt, Homo sapiens
  misc_RNA (1)...(19): siRNA sense strand
caucuucucugugaauuua

SEQ ID NO: 1429792 - RNA, 19 nt, Homo sapiens
  misc_RNA (1)...(19): siRNA sense strand
ccaaagggaucaggaaauu

SEQ ID NO: 1429793 - RNA, 19 nt, Homo sapiens
  misc_RNA (1)...(19): siRNA sense strand
gaauuuaguucucuuucug

SEQ ID NO: 1429794 - RNA, 19 nt, Homo sapiens
  misc_RNA (1)...(19): siRNA sense strand
gugcaacacugucgaaagu

SEQ ID NO: 1429795 - RNA, 19 nt, Homo sapiens
  misc_RNA (1)...(19): siRNA sense strand
gccagacgcuuucccgauu

SEQ ID NO: 1429796 - RNA, 19 nt, Homo sapiens
  misc_RNA (1)...(19): siRNA sense strand
ggucauggccuaccucuuc

SEQ ID NO: 1429797 - RNA, 19 nt, Homo sapiens
  misc_RNA (1)...(19): siRNA sense strand
gaugugaucucugccuuuc

SEQ ID NO: 1429798 - RNA, 19 nt, Homo sapiens
  misc_RNA (1)...(19): siRNA sense strand
ggaaucaggcacagaaauc

SEQ ID NO: 1429799 - RNA, 19 nt, Homo sapiens
  misc_RNA (1)...(19): siRNA sense strand
ccaguuaccuucaccuucu

SEQ ID NO: 1429800 - RNA, 19 nt, Homo sapiens
  misc_RNA (1)...(19): siRNA sense strand
ugaugcagcucgacuggaa

SEQ ID NO: 1429801 - RNA, 19 nt, Homo sapiens
  misc_RNA (1)...(19): siRNA sense strand
aaagggaucaggaaauuga

SEQ ID NO: 1429802 - RNA, 19 nt, Homo sapiens
  misc_RNA (1)...(19): siRNA sense strand
agacucuccucccucaaua

SEQ ID NO: 1429803 - RNA, 19 nt, Homo sapiens
  misc_RNA (1)...(19): siRNA sense strand
gagcauggccagaauggau

SEQ ID NO: 1429804 - RNA, 19 nt, Homo sapiens
  misc_RNA (1)...(19): siRNA sense strand
ucaacagauucaugaagaa

SEQ ID NO: 1429805 - RNA, 19 nt, Homo sapiens
  misc_RNA (1)...(19): siRNA sense strand
ggagcaauaugggaaaugg

SEQ ID NO: 1429806 - RNA, 19 nt, Homo sapiens
  misc_RNA (1)...(19): siRNA sense strand
acucaagcaucaacagauu

SEQ ID NO: 1429807 - RNA, 19 nt, Homo sapiens
  misc_RNA (1)...(19): siRNA sense strand
guaaagccauccagaacac

SEQ ID NO: 1429808 - RNA, 19 nt, Homo sapiens
  misc_RNA (1)...(19): siRNA sense strand
gagcaagaaccuuuccaau

SEQ ID NO: 1429809 - RNA, 19 nt, Homo sapiens
  misc_RNA (1)...(19): siRNA sense strand
gaaagugucaugcggaaaa

SEQ ID NO: 1429810 - RNA, 19 nt, Homo sapiens
  misc_RNA (1)...(19): siRNA sense strand
gcacccaccugagcagcuu

SEQ ID NO: 1429811 - RNA, 19 nt, Homo sapiens
  misc_RNA (1)...(19): siRNA sense strand
ucagugaucccgagacaga

SEQ ID NO: 1429812 - RNA, 19 nt, Homo sapiens
  misc_RNA (1)...(19): siRNA sense strand
ccuccaggccucaccuuua

SEQ ID NO: 1429813 - RNA, 19 nt, Homo sapiens
  misc_RNA (1)...(19): siRNA sense strand
ucuccucccucaauaguga

SEQ ID NO: 1429814 - RNA, 19 nt, Homo sapiens
  misc_RNA (1)...(19): siRNA sense strand
ggagacuugugacgacauc

SEQ ID NO: 1429815 - RNA, 19 nt, Homo sapiens
  misc_RNA (1)...(19): siRNA sense strand
ccgcgucuuucucgucuuu

SEQ ID NO: 1429816 - RNA, 19 nt, Homo sapiens
  misc_RNA (1)...(19): siRNA sense strand
ggccugagcaagaaccuuu

SEQ ID NO: 1429817 - RNA, 19 nt, Homo sapiens
  misc_RNA (1)...(19): siRNA sense strand
gcacaauaggcaccagaga

SEQ ID NO: 1429818 - RNA, 19 nt, Homo sapiens
  misc_RNA (1)...(19): siRNA sense strand
ggacuccucgugugucaau

SEQ ID NO: 1429819 - RNA, 19 nt, Homo sapiens
  misc_RNA (1)...(19): siRNA sense strand
ucacuuuucuccuguguaa

SEQ ID NO: 1429820 - RNA, 19 nt, Homo sapiens
  misc_RNA (1)...(19): siRNA sense strand
ggaccugucugcgccaucu

SEQ ID NO: 1429821 - RNA, 19 nt, Homo sapiens
  misc_RNA (1)...(19): siRNA sense strand
cgagaacacgugucaagau

SEQ ID NO: 1429822 - RNA, 19 nt, Homo sapiens
  misc_RNA (1)...(19): siRNA sense strand
gccgguaccuugcacuauc

SEQ ID NO: 1429823 - RNA, 19 nt, Homo sapiens
  misc_RNA (1)...(19): siRNA sense strand
guucagugaucccgagaca

SEQ ID NO: 1429824 - RNA, 19 nt, Homo sapiens
  misc_RNA (1)...(19): siRNA sense strand
cuccaggccucaccuuuau

SEQ ID NO: 1429825 - RNA, 19 nt, Homo sapiens
  misc_RNA (1)...(19): siRNA sense strand
aaccucagcuccccaguua

SEQ ID NO: 1429826 - RNA, 19 nt, Homo sapiens
  misc_RNA (1)...(19): siRNA sense strand
uaugggaaaugguccaaag

SEQ ID NO: 1429827 - RNA, 19 nt, Homo sapiens
  misc_RNA (1)...(19): siRNA sense strand
ucuggugacucucuggauu

SEQ ID NO: 1429828 - RNA, 19 nt, Homo sapiens
  misc_RNA (1)...(19): siRNA sense strand
guccacagccagacgcuuu

SEQ ID NO: 1429829 - RNA, 19 nt, Homo sapiens
  misc_RNA (1)...(19): siRNA sense strand
ccagacgcuuucccgauuc

SEQ ID NO: 1429830 - RNA, 19 nt, Homo sapiens
  misc_RNA (1)...(19): siRNA sense strand
aucaacagauucaugaaga

SEQ ID NO: 1429831 - RNA, 19 nt, Homo sapiens
  misc_RNA (1)...(19): siRNA sense strand
gucaacuacucaagcauca

SEQ ID NO: 1429832 - RNA, 19 nt, Homo sapiens
  misc_RNA (1)...(19): siRNA sense strand
ccucauggcccacuacgau

SEQ ID NO: 1429833 - RNA, 19 nt, Homo sapiens
  misc_RNA (1)...(19): siRNA sense strand
caccauccagagcaucuua

SEQ ID NO: 1429834 - RNA, 19 nt, Homo sapiens
  misc_RNA (1)...(19): siRNA sense strand
cagaauggauguggucacu

SEQ ID NO: 1429835 - RNA, 19 nt, Homo sapiens
  misc_RNA (1)...(19): siRNA sense strand
aaacugagucugagaugca

SEQ ID NO: 1429836 - RNA, 19 nt, Homo sapiens
  misc_RNA (1)...(19): siRNA sense strand
gccuaccucuucaccauca

SEQ ID NO: 1429837 - RNA, 19 nt, Homo sapiens
  misc_RNA (1)...(19): siRNA sense strand
guaccuugcacuaucucua

SEQ ID NO: 1429838 - RNA, 19 nt, Homo sapiens
  misc_RNA (1)...(19): siRNA sense strand
cagcuuugccguccucaug

SEQ ID NO: 1429839 - RNA, 19 nt, Homo sapiens
  misc_RNA (1)...(19): siRNA sense strand
gcagggugucuucaucuuc

SEQ ID NO: 1429840 - RNA, 19 nt, Homo sapiens
  misc_RNA (1)...(19): siRNA sense strand
gcgagaacacgugucaaga

SEQ ID NO: 1429841 - RNA, 19 nt, Homo sapiens
  misc_RNA (1)...(19): siRNA sense strand
caaagggaucaggaaauug

SEQ ID NO: 1429842 - RNA, 19 nt, Homo sapiens
  misc_RNA (1)...(19): siRNA sense strand
caucaacgagugugcaaca

SEQ ID NO: 1429843 - RNA, 19 nt, Homo sapiens
  misc_RNA (1)...(19): siRNA sense strand
ugugaucucugccuuucug

SEQ ID NO: 1429844 - RNA, 19 nt, Homo sapiens
  misc_RNA (1)...(19): siRNA sense strand
agcaagaaccuuuccaaug

SEQ ID NO: 1429845 - RNA, 19 nt, Homo sapiens
  misc_RNA (1)...(19): siRNA sense strand
acaauaggcaccagagaca

SEQ ID NO: 1429846 - RNA, 19 nt, Homo sapiens
  misc_RNA (1)...(19): siRNA sense strand
gccaucuucucugugaauu

SEQ ID NO: 1429847 - RNA, 19 nt, Homo sapiens
  misc_RNA (1)...(19): siRNA sense strand
ccagaaaagggauuuauau

SEQ ID NO: 1429848 - RNA, 19 nt, Homo sapiens
  misc_RNA (1)...(19): siRNA sense strand
guggucaacuacucaagca

SEQ ID NO: 1429849 - RNA, 19 nt, Homo sapiens
  misc_RNA (1)...(19): siRNA sense strand
uggauggccuagaggaugu

SEQ ID NO: 1429850 - RNA, 19 nt, Homo sapiens
  misc_RNA (1)...(19): siRNA sense strand
caacagauucaugaagaag

SEQ ID NO: 1429851 - RNA, 19 nt, Homo sapiens
  misc_RNA (1)...(19): siRNA sense strand
ucaagcaucaacagauuca

SEQ ID NO: 1429852 - RNA, 19 nt, Homo sapiens
  misc_RNA (1)...(19): siRNA sense strand
gaaucaggcacagaaaucu

SEQ ID NO: 1429853 - RNA, 19 nt, Homo sapiens
  misc_RNA (1)...(19): siRNA sense strand
ggaggugcagaagcaagua

SEQ ID NO: 1429854 - RNA, 19 nt, Homo sapiens
  misc_RNA (1)...(19): siRNA sense strand
gcagguccgggagcaauau

SEQ ID NO: 1429855 - RNA, 19 nt, Homo sapiens
  misc_RNA (1)...(19): siRNA sense strand
agucugagaugcacacacu

SEQ ID NO: 1429856 - RNA, 19 nt, Homo sapiens
  misc_RNA (1)...(19): siRNA sense strand
gguccaaagggaucaggaa

SEQ ID NO: 1429857 - RNA, 19 nt, Homo sapiens
  misc_RNA (1)...(19): siRNA sense strand
agaaggugcucugugucuu

SEQ ID NO: 1429858 - RNA, 19 nt, Homo sapiens
  misc_RNA (1)...(19): siRNA sense strand
guccaaagggaucaggaaa

SEQ ID NO: 1429859 - RNA, 19 nt, Homo sapiens
  misc_RNA (1)...(19): siRNA sense strand
gugacucucuggauuuuga

SEQ ID NO: 1429860 - RNA, 19 nt, Homo sapiens
  misc_RNA (1)...(19): siRNA sense strand
caacuacucaagcaucaac

SEQ ID NO: 1429861 - RNA, 19 nt, Homo sapiens
  misc_RNA (1)...(19): siRNA sense strand
ggaccugggcagagacuac

SEQ ID NO: 1429862 - RNA, 19 nt, Homo sapiens
  misc_RNA (1)...(19): siRNA sense strand
uggccuaccucuucaccau

SEQ ID NO: 1429863 - RNA, 19 nt, Homo sapiens
  misc_RNA (1)...(19): siRNA sense strand
gucauggccuaccucuuca

SEQ ID NO: 1429864 - RNA, 19 nt, Homo sapiens
  misc_RNA (1)...(19): siRNA sense strand
ucucgucuuucucgcauuc

SEQ ID NO: 1429865 - RNA, 19 nt, Homo sapiens
  misc_RNA (1)...(19): siRNA sense strand
caucaacagauucaugaag

SEQ ID NO: 1429866 - RNA, 19 nt, Homo sapiens
  misc_RNA (1)...(19): siRNA sense strand
gcaucaacagauucaugaa

SEQ ID NO: 1429867 - RNA, 19 nt, Homo sapiens
  misc_RNA (1)...(19): siRNA sense strand
ucaagaaugagagcgagaa

SEQ ID NO: 1429868 - RNA, 19 nt, Homo sapiens
  misc_RNA (1)...(19): siRNA sense strand
cagacucuccucccucaau

SEQ ID NO: 1429869 - RNA, 19 nt, Homo sapiens
  misc_RNA (1)...(19): siRNA sense strand
aaggugcugugcuccauca

SEQ ID NO: 1429870 - RNA, 19 nt, Homo sapiens
  misc_RNA (1)...(19): siRNA sense strand
cacaggcugcagcacaaua

SEQ ID NO: 1429871 - RNA, 19 nt, Homo sapiens
  misc_RNA (1)...(19): siRNA sense strand
gcaacaacgacacccaaaa

SEQ ID NO: 1429872 - RNA, 19 nt, Homo sapiens
  misc_RNA (1)...(19): siRNA sense strand
gaaaacugagucugagaug

SEQ ID NO: 1429873 - RNA, 19 nt, Homo sapiens
  misc_RNA (1)...(19): siRNA sense strand
cuacucaagcaucaacaga

SEQ ID NO: 1429874 - RNA, 19 nt, Homo sapiens
  misc_RNA (1)...(19): siRNA sense strand
gcaagaaccuuuccaaugg

SEQ ID NO: 1429875 - RNA, 19 nt, Homo sapiens
  misc_RNA (1)...(19): siRNA sense strand
ccaaugggcuguugaacuu

SEQ ID NO: 1429876 - RNA, 19 nt, Homo sapiens
  misc_RNA (1)...(19): siRNA sense strand
caucuucucugugaauuua

SEQ ID NO: 1429877 - RNA, 19 nt, Homo sapiens
  misc_RNA (1)...(19): siRNA sense strand
ccaaagggaucaggaaauu

SEQ ID NO: 1429878 - RNA, 19 nt, Homo sapiens
  misc_RNA (1)...(19): siRNA sense strand
gaauuuaguucucuuucug

SEQ ID NO: 1429879 - RNA, 19 nt, Homo sapiens
  misc_RNA (1)...(19): siRNA sense strand
gugcaacacugucgaaagu

SEQ ID NO: 1429880 - RNA, 19 nt, Homo sapiens
  misc_RNA (1)...(19): siRNA sense strand
gccagacgcuuucccgauu

SEQ ID NO: 1429881 - RNA, 19 nt, Homo sapiens
  misc_RNA (1)...(19): siRNA sense strand
ggucauggccuaccucuuc

SEQ ID NO: 1429882 - RNA, 19 nt, Homo sapiens
  misc_RNA (1)...(19): siRNA sense strand
gaugugaucucugccuuuc

SEQ ID NO: 1429883 - RNA, 19 nt, Homo sapiens
  misc_RNA (1)...(19): siRNA sense strand
ggaaucaggcacagaaauc

SEQ ID NO: 1429884 - RNA, 19 nt, Homo sapiens
  misc_RNA (1)...(19): siRNA sense strand
ccaguuaccuucaccuucu

SEQ ID NO: 1429885 - RNA, 19 nt, Homo sapiens
  misc_RNA (1)...(19): siRNA sense strand
ugaugcagcucgacuggaa

SEQ ID NO: 1429886 - RNA, 19 nt, Homo sapiens
  misc_RNA (1)...(19): siRNA sense strand
aaagggaucaggaaauuga

SEQ ID NO: 1429887 - RNA, 19 nt, Homo sapiens
  misc_RNA (1)...(19): siRNA sense strand
agacucuccucccucaaua

SEQ ID NO: 1429888 - RNA, 19 nt, Homo sapiens
  misc_RNA (1)...(19): siRNA sense strand
gagcauggccagaauggau

SEQ ID NO: 1429889 - RNA, 19 nt, Homo sapiens
  misc_RNA (1)...(19): siRNA sense strand
ucaacagauucaugaagaa

SEQ ID NO: 1429890 - RNA, 19 nt, Homo sapiens
  misc_RNA (1)...(19): siRNA sense strand
ggagcaauaugggaaaugg

SEQ ID NO: 1429891 - RNA, 19 nt, Homo sapiens
  misc_RNA (1)...(19): siRNA sense strand
acucaagcaucaacagauu

SEQ ID NO: 1429892 - RNA, 19 nt, Homo sapiens
  misc_RNA (1)...(19): siRNA sense strand
guaaagccauccagaacac

SEQ ID NO: 1429893 - RNA, 19 nt, Homo sapiens
  misc_RNA (1)...(19): siRNA sense strand
gagcaagaaccuuuccaau

SEQ ID NO: 1429894 - RNA, 19 nt, Homo sapiens
  misc_RNA (1)...(19): siRNA sense strand
gaaagugucaugcggaaaa

SEQ ID NO: 1429895 - RNA, 19 nt, Homo sapiens
  misc_RNA (1)...(19): siRNA sense strand
gcacccaccugagcagcuu

SEQ ID NO: 1429896 - RNA, 19 nt, Homo sapiens
  misc_RNA (1)...(19): siRNA sense strand
ucagugaucccgagacaga

SEQ ID NO: 1429897 - RNA, 19 nt, Homo sapiens
  misc_RNA (1)...(19): siRNA sense strand
ccuccaggccucaccuuua

SEQ ID NO: 1429898 - RNA, 19 nt, Homo sapiens
  misc_RNA (1)...(19): siRNA sense strand
ucuccucccucaauaguga

SEQ ID NO: 1429899 - RNA, 19 nt, Homo sapiens
  misc_RNA (1)...(19): siRNA sense strand
ggagacuugugacgacauc

SEQ ID NO: 1429900 - RNA, 19 nt, Homo sapiens
  misc_RNA (1)...(19): siRNA sense strand
ccgcgucuuucucgucuuu

SEQ ID NO: 1429901 - RNA, 19 nt, Homo sapiens
  misc_RNA (1)...(19): siRNA sense strand
ggccugagcaagaaccuuu

SEQ ID NO: 1429902 - RNA, 19 nt, Homo sapiens
  misc_RNA (1)...(19): siRNA sense strand
gcacaauaggcaccagaga

SEQ ID NO: 1429903 - RNA, 19 nt, Homo sapiens
  misc_RNA (1)...(19): siRNA sense strand
ggacuccucgugugucaau

SEQ ID NO: 1429904 - RNA, 19 nt, Homo sapiens
  misc_RNA (1)...(19): siRNA sense strand
ucacuuuucuccuguguaa

SEQ ID NO: 1429905 - RNA, 19 nt, Homo sapiens
  misc_RNA (1)...(19): siRNA sense strand
ggaccugucugcgccaucu

SEQ ID NO: 1429906 - RNA, 19 nt, Homo sapiens
  misc_RNA (1)...(19): siRNA sense strand
cgagaacacgugucaagau

SEQ ID NO: 1429907 - RNA, 19 nt, Homo sapiens
  misc_RNA (1)...(19): siRNA sense strand
gccgguaccuugcacuauc

SEQ ID NO: 1429908 - RNA, 19 nt, Homo sapiens
  misc_RNA (1)...(19): siRNA sense strand
guucagugaucccgagaca

SEQ ID NO: 1429909 - RNA, 19 nt, Homo sapiens
  misc_RNA (1)...(19): siRNA sense strand
cuccaggccucaccuuuau

SEQ ID NO: 1429910 - RNA, 19 nt, Homo sapiens
  misc_RNA (1)...(19): siRNA sense strand
aaccucagcuccccaguua

SEQ ID NO: 1429911 - RNA, 19 nt, Homo sapiens
  misc_RNA (1)...(19): siRNA sense strand
uaugggaaaugguccaaag

SEQ ID NO: 1429912 - RNA, 19 nt, Homo sapiens
  misc_RNA (1)...(19): siRNA sense strand
ucuggugacucucuggauu

SEQ ID NO: 1429913 - RNA, 19 nt, Homo sapiens
  misc_RNA (1)...(19): siRNA sense strand
guccacagccagacgcuuu

SEQ ID NO: 1429914 - RNA, 19 nt, Homo sapiens
  misc_RNA (1)...(19): siRNA sense strand
ccagacgcuuucccgauuc

SEQ ID NO: 1429915 - RNA, 19 nt, Homo sapiens
  misc_RNA (1)...(19): siRNA sense strand
aucaacagauucaugaaga

SEQ ID NO: 1429916 - RNA, 19 nt, Homo sapiens
  misc_RNA (1)...(19): siRNA sense strand
gucaacuacucaagcauca

SEQ ID NO: 1429917 - RNA, 19 nt, Homo sapiens
  misc_RNA (1)...(19): siRNA sense strand
ccucauggcccacuacgau

SEQ ID NO: 1429918 - RNA, 19 nt, Homo sapiens
  misc_RNA (1)...(19): siRNA sense strand
caccauccagagcaucuua

SEQ ID NO: 1429919 - RNA, 19 nt, Homo sapiens
  misc_RNA (1)...(19): siRNA sense strand
cagaauggauguggucacu

SEQ ID NO: 1429920 - RNA, 19 nt, Homo sapiens
  misc_RNA (1)...(19): siRNA sense strand
aaacugagucugagaugca

SEQ ID NO: 1429921 - RNA, 19 nt, Homo sapiens
  misc_RNA (1)...(19): siRNA sense strand
gccuaccucuucaccauca

SEQ ID NO: 1429922 - RNA, 19 nt, Homo sapiens
  misc_RNA (1)...(19): siRNA sense strand
guaccuugcacuaucucua

SEQ ID NO: 1429923 - RNA, 19 nt, Homo sapiens
  misc_RNA (1)...(19): siRNA sense strand
cagcuuugccguccucaug

SEQ ID NO: 1429924 - RNA, 19 nt, Homo sapiens
  misc_RNA (1)...(19): siRNA sense strand
gcagggugucuucaucuuc

SEQ ID NO: 1429925 - RNA, 19 nt, Homo sapiens
  misc_RNA (1)...(19): siRNA sense strand
gcgagaacacgugucaaga

SEQ ID NO: 1429926 - RNA, 19 nt, Homo sapiens
  misc_RNA (1)...(19): siRNA sense strand
caaagggaucaggaaauug

SEQ ID NO: 1429927 - RNA, 19 nt, Homo sapiens
  misc_RNA (1)...(19): siRNA sense strand
caucaacgagugugcaaca

SEQ ID NO: 1429928 - RNA, 19 nt, Homo sapiens
  misc_RNA (1)...(19): siRNA sense strand
ugugaucucugccuuucug

SEQ ID NO: 1429929 - RNA, 19 nt, Homo sapiens
  misc_RNA (1)...(19): siRNA sense strand
agcaagaaccuuuccaaug

SEQ ID NO: 1429930 - RNA, 19 nt, Homo sapiens
  misc_RNA (1)...(19): siRNA sense strand
acaauaggcaccagagaca

SEQ ID NO: 1429931 - RNA, 19 nt, Homo sapiens
  misc_RNA (1)...(19): siRNA sense strand
gccaucuucucugugaauu

SEQ ID NO: 1429932 - RNA, 19 nt, Homo sapiens
  misc_RNA (1)...(19): siRNA sense strand
ccagaaaagggauuuauau

SEQ ID NO: 1429933 - RNA, 19 nt, Homo sapiens
  misc_RNA (1)...(19): siRNA sense strand
guggucaacuacucaagca

SEQ ID NO: 1429934 - RNA, 19 nt, Homo sapiens
  misc_RNA (1)...(19): siRNA sense strand
uggauggccuagaggaugu

SEQ ID NO: 1429935 - RNA, 19 nt, Homo sapiens
  misc_RNA (1)...(19): siRNA sense strand
caacagauucaugaagaag

SEQ ID NO: 1429936 - RNA, 19 nt, Homo sapiens
  misc_RNA (1)...(19): siRNA sense strand
ucaagcaucaacagauuca

SEQ ID NO: 1429937 - RNA, 19 nt, Homo sapiens
  misc_RNA (1)...(19): siRNA sense strand
gaaucaggcacagaaaucu

SEQ ID NO: 1429938 - RNA, 19 nt, Homo sapiens
  misc_RNA (1)...(19): siRNA sense strand
ggaggugcagaagcaagua

SEQ ID NO: 1429939 - RNA, 19 nt, Homo sapiens
  misc_RNA (1)...(19): siRNA sense strand
gcagguccgggagcaauau

SEQ ID NO: 1429940 - RNA, 19 nt, Homo sapiens
  misc_RNA (1)...(19): siRNA sense strand
agucugagaugcacacacu

SEQ ID NO: 1429941 - RNA, 19 nt, Homo sapiens
  misc_RNA (1)...(19): siRNA sense strand
gguccaaagggaucaggaa

SEQ ID NO: 1429942 - RNA, 19 nt, Homo sapiens
  misc_RNA (1)...(19): siRNA sense strand
agaaggugcucugugucuu

SEQ ID NO: 1429943 - RNA, 19 nt, Homo sapiens
  misc_RNA (1)...(19): siRNA sense strand
guccaaagggaucaggaaa

SEQ ID NO: 1429944 - RNA, 19 nt, Homo sapiens
  misc_RNA (1)...(19): siRNA sense strand
gugacucucuggauuuuga

SEQ ID NO: 1429945 - RNA, 19 nt, Homo sapiens
  misc_RNA (1)...(19): siRNA sense strand
caacuacucaagcaucaac

SEQ ID NO: 1429946 - RNA, 19 nt, Homo sapiens
  misc_RNA (1)...(19): siRNA sense strand
ggaccugggcagagacuac

SEQ ID NO: 1429947 - RNA, 19 nt, Homo sapiens
  misc_RNA (1)...(19): siRNA sense strand
uggccuaccucuucaccau

SEQ ID NO: 1429948 - RNA, 19 nt, Homo sapiens
  misc_RNA (1)...(19): siRNA sense strand
gucauggccuaccucuuca

SEQ ID NO: 1429949 - RNA, 19 nt, Homo sapiens
  misc_RNA (1)...(19): siRNA sense strand
ucucgucuuucucgcauuc

SEQ ID NO: 1429950 - RNA, 19 nt, Homo sapiens
  misc_RNA (1)...(19): siRNA sense strand
caucaacagauucaugaag

SEQ ID NO: 1429951 - RNA, 19 nt, Homo sapiens
  misc_RNA (1)...(19): siRNA sense strand
gcaucaacagauucaugaa

SEQ ID NO: 1429952 - RNA, 19 nt, Homo sapiens
  misc_RNA (1)...(19): siRNA sense strand
ucaagaaugagagcgagaa

SEQ ID NO: 1429953 - RNA, 19 nt, Homo sapiens
  misc_RNA (1)...(19): siRNA sense strand
cagacucuccucccucaau

SEQ ID NO: 1429954 - RNA, 19 nt, Homo sapiens
  misc_RNA (1)...(19): siRNA sense strand
aaggugcugugcuccauca

SEQ ID NO: 1429955 - RNA, 19 nt, Homo sapiens
  misc_RNA (1)...(19): siRNA sense strand
cacaggcugcagcacaaua

SEQ ID NO: 1429956 - RNA, 19 nt, Homo sapiens
  misc_RNA (1)...(19): siRNA sense strand
gcaacaacgacacccaaaa

SEQ ID NO: 1429957 - RNA, 19 nt, Homo sapiens
  misc_RNA (1)...(19): siRNA sense strand
gaaaacugagucugagaug

SEQ ID NO: 1429958 - RNA, 19 nt, Homo sapiens
  misc_RNA (1)...(19): siRNA sense strand
cuacucaagcaucaacaga

SEQ ID NO: 1429959 - RNA, 19 nt, Homo sapiens
  misc_RNA (1)...(19): siRNA sense strand
gcaagaaccuuuccaaugg

SEQ ID NO: 1429960 - RNA, 19 nt, Homo sapiens
  misc_RNA (1)...(19): siRNA sense strand
ccaaugggcuguugaacuu

SEQ ID NO: 1429961 - RNA, 19 nt, Homo sapiens
  misc_RNA (1)...(19): siRNA sense strand
caucuucucugugaauuua

SEQ ID NO: 1429962 - RNA, 19 nt, Homo sapiens
  misc_RNA (1)...(19): siRNA sense strand
ccaaagggaucaggaaauu

SEQ ID NO: 1429963 - RNA, 19 nt, Homo sapiens
  misc_RNA (1)...(19): siRNA sense strand
gaauuuaguucucuuucug

SEQ ID NO: 1429964 - RNA, 19 nt, Homo sapiens
  misc_RNA (1)...(19): siRNA sense strand
gugcaacacugucgaaagu

SEQ ID NO: 1429965 - RNA, 19 nt, Homo sapiens
  misc_RNA (1)...(19): siRNA sense strand
gccagacgcuuucccgauu

SEQ ID NO: 1429966 - RNA, 19 nt, Homo sapiens
  misc_RNA (1)...(19): siRNA sense strand
ggucauggccuaccucuuc

SEQ ID NO: 1429967 - RNA, 19 nt, Homo sapiens
  misc_RNA (1)...(19): siRNA sense strand
gaugugaucucugccuuuc

SEQ ID NO: 1429968 - RNA, 19 nt, Homo sapiens
  misc_RNA (1)...(19): siRNA sense strand
ggaaucaggcacagaaauc

SEQ ID NO: 1429969 - RNA, 19 nt, Homo sapiens
  misc_RNA (1)...(19): siRNA sense strand
ccaguuaccuucaccuucu

SEQ ID NO: 1429970 - RNA, 19 nt, Homo sapiens
  misc_RNA (1)...(19): siRNA sense strand
ugaugcagcucgacuggaa

SEQ ID NO: 1429971 - RNA, 19 nt, Homo sapiens
  misc_RNA (1)...(19): siRNA sense strand
aaagggaucaggaaauuga

SEQ ID NO: 1429972 - RNA, 19 nt, Homo sapiens
  misc_RNA (1)...(19): siRNA sense strand
agacucuccucccucaaua

SEQ ID NO: 1429973 - RNA, 19 nt, Homo sapiens
  misc_RNA (1)...(19): siRNA sense strand
gagcauggccagaauggau

SEQ ID NO: 1429974 - RNA, 19 nt, Homo sapiens
  misc_RNA (1)...(19): siRNA sense strand
ucaacagauucaugaagaa

SEQ ID NO: 1429975 - RNA, 19 nt, Homo sapiens
  misc_RNA (1)...(19): siRNA sense strand
ggagcaauaugggaaaugg

SEQ ID NO: 1429976 - RNA, 19 nt, Homo sapiens
  misc_RNA (1)...(19): siRNA sense strand
acucaagcaucaacagauu

SEQ ID NO: 1429977 - RNA, 19 nt, Homo sapiens
  misc_RNA (1)...(19): siRNA sense strand
guaaagccauccagaacac

SEQ ID NO: 1429978 - RNA, 19 nt, Homo sapiens
  misc_RNA (1)...(19): siRNA sense strand
gagcaagaaccuuuccaau

SEQ ID NO: 1429979 - RNA, 19 nt, Homo sapiens
  misc_RNA (1)...(19): siRNA sense strand
gaaagugucaugcggaaaa

SEQ ID NO: 1429980 - RNA, 19 nt, Homo sapiens
  misc_RNA (1)...(19): siRNA sense strand
gcacccaccugagcagcuu

SEQ ID NO: 1429981 - RNA, 19 nt, Homo sapiens
  misc_RNA (1)...(19): siRNA sense strand
ucagugaucccgagacaga

SEQ ID NO: 1429982 - RNA, 19 nt, Homo sapiens
  misc_RNA (1)...(19): siRNA sense strand
ccuccaggccucaccuuua

SEQ ID NO: 1429983 - RNA, 19 nt, Homo sapiens
  misc_RNA (1)...(19): siRNA sense strand
ucuccucccucaauaguga

SEQ ID NO: 1429984 - RNA, 19 nt, Homo sapiens
  misc_RNA (1)...(19): siRNA sense strand
ggagacuugugacgacauc

SEQ ID NO: 1429985 - RNA, 19 nt, Homo sapiens
  misc_RNA (1)...(19): siRNA sense strand
ccgcgucuuucucgucuuu

SEQ ID NO: 1429986 - RNA, 19 nt, Homo sapiens
  misc_RNA (1)...(19): siRNA sense strand
ggccugagcaagaaccuuu

SEQ ID NO: 1429987 - RNA, 19 nt, Homo sapiens
  misc_RNA (1)...(19): siRNA sense strand
gcacaauaggcaccagaga

SEQ ID NO: 1429988 - RNA, 19 nt, Homo sapiens
  misc_RNA (1)...(19): siRNA sense strand
ggacuccucgugugucaau

SEQ ID NO: 1429989 - RNA, 19 nt, Homo sapiens
  misc_RNA (1)...(19): siRNA sense strand
ucacuuuucuccuguguaa

SEQ ID NO: 1429990 - RNA, 19 nt, Homo sapiens
  misc_RNA (1)...(19): siRNA sense strand
ggaccugucugcgccaucu

SEQ ID NO: 1429991 - RNA, 19 nt, Homo sapiens
  misc_RNA (1)...(19): siRNA sense strand
cgagaacacgugucaagau

SEQ ID NO: 1429992 - RNA, 19 nt, Homo sapiens
  misc_RNA (1)...(19): siRNA sense strand
gccgguaccuugcacuauc

SEQ ID NO: 1429993 - RNA, 19 nt, Homo sapiens
  misc_RNA (1)...(19): siRNA sense strand
guucagugaucccgagaca

SEQ ID NO: 1429994 - RNA, 19 nt, Homo sapiens
  misc_RNA (1)...(19): siRNA sense strand
cuccaggccucaccuuuau

SEQ ID NO: 1429995 - RNA, 19 nt, Homo sapiens
  misc_RNA (1)...(19): siRNA sense strand
aaccucagcuccccaguua

SEQ ID NO: 1429996 - RNA, 19 nt, Homo sapiens
  misc_RNA (1)...(19): siRNA sense strand
uaugggaaaugguccaaag

SEQ ID NO: 1429997 - RNA, 19 nt, Homo sapiens
  misc_RNA (1)...(19): siRNA sense strand
ucuggugacucucuggauu

SEQ ID NO: 1429998 - RNA, 19 nt, Homo sapiens
  misc_RNA (1)...(19): siRNA sense strand
guccacagccagacgcuuu

SEQ ID NO: 1429999 - RNA, 19 nt, Homo sapiens
  misc_RNA (1)...(19): siRNA sense strand
ccagacgcuuucccgauuc

SEQ ID NO: 1430000 - RNA, 19 nt, Homo sapiens
  misc_RNA (1)...(19): siRNA sense strand
aucaacagauucaugaaga

SEQ ID NO: 1430001 - RNA, 19 nt, Homo sapiens
  misc_RNA (1)...(19): siRNA sense strand
gucaacuacucaagcauca

SEQ ID NO: 1430002 - RNA, 19 nt, Homo sapiens
  misc_RNA (1)...(19): siRNA sense strand
ccucauggcccacuacgau

SEQ ID NO: 1430003 - RNA, 19 nt, Homo sapiens
  misc_RNA (1)...(19): siRNA sense strand
caccauccagagcaucuua

SEQ ID NO: 1430004 - RNA, 19 nt, Homo sapiens
  misc_RNA (1)...(19): siRNA sense strand
cagaauggauguggucacu

SEQ ID NO: 1430005 - RNA, 19 nt, Homo sapiens
  misc_RNA (1)...(19): siRNA sense strand
aaacugagucugagaugca

SEQ ID NO: 1430006 - RNA, 19 nt, Homo sapiens
  misc_RNA (1)...(19): siRNA sense strand
gccuaccucuucaccauca

SEQ ID NO: 1430007 - RNA, 19 nt, Homo sapiens
  misc_RNA (1)...(19): siRNA sense strand
guaccuugcacuaucucua

SEQ ID NO: 1430008 - RNA, 19 nt, Homo sapiens
  misc_RNA (1)...(19): siRNA sense strand
cagcuuugccguccucaug

SEQ ID NO: 1430009 - RNA, 19 nt, Homo sapiens
  misc_RNA (1)...(19): siRNA sense strand
gcagggugucuucaucuuc

SEQ ID NO: 1430010 - RNA, 19 nt, Homo sapiens
  misc_RNA (1)...(19): siRNA sense strand
gcgagaacacgugucaaga

SEQ ID NO: 1430011 - RNA, 19 nt, Homo sapiens
  misc_RNA (1)...(19): siRNA sense strand
caaagggaucaggaaauug

SEQ ID NO: 1430012 - RNA, 19 nt, Homo sapiens
  misc_RNA (1)...(19): siRNA sense strand
caucaacgagugugcaaca

SEQ ID NO: 1430013 - RNA, 19 nt, Homo sapiens
  misc_RNA (1)...(19): siRNA sense strand
ugugaucucugccuuucug

SEQ ID NO: 1430014 - RNA, 19 nt, Homo sapiens
  misc_RNA (1)...(19): siRNA sense strand
agcaagaaccuuuccaaug

SEQ ID NO: 1430015 - RNA, 19 nt, Homo sapiens
  misc_RNA (1)...(19): siRNA sense strand
acaauaggcaccagagaca

SEQ ID NO: 1430016 - RNA, 19 nt, Homo sapiens
  misc_RNA (1)...(19): siRNA sense strand
gccaucuucucugugaauu

SEQ ID NO: 1430017 - RNA, 19 nt, Homo sapiens
  misc_RNA (1)...(19): siRNA sense strand
ccagaaaagggauuuauau

SEQ ID NO: 1430018 - RNA, 19 nt, Homo sapiens
  misc_RNA (1)...(19): siRNA sense strand
guggucaacuacucaagca

SEQ ID NO: 1430019 - RNA, 19 nt, Homo sapiens
  misc_RNA (1)...(19): siRNA sense strand
uggauggccuagaggaugu

SEQ ID NO: 1430020 - RNA, 19 nt, Homo sapiens
  misc_RNA (1)...(19): siRNA sense strand
caacagauucaugaagaag

SEQ ID NO: 1430021 - RNA, 19 nt, Homo sapiens
  misc_RNA (1)...(19): siRNA sense strand
ucaagcaucaacagauuca

SEQ ID NO: 1430022 - RNA, 19 nt, Homo sapiens
  misc_RNA (1)...(19): siRNA sense strand
gaaucaggcacagaaaucu

SEQ ID NO: 1430023 - RNA, 19 nt, Homo sapiens
  misc_RNA (1)...(19): siRNA sense strand
ggaggugcagaagcaagua

SEQ ID NO: 1430024 - RNA, 19 nt, Homo sapiens
  misc_RNA (1)...(19): siRNA sense strand
gcagguccgggagcaauau

SEQ ID NO: 1430025 - RNA, 19 nt, Homo sapiens
  misc_RNA (1)...(19): siRNA sense strand
agucugagaugcacacacu

SEQ ID NO: 1430026 - RNA, 19 nt, Homo sapiens
  misc_RNA (1)...(19): siRNA sense strand
gguccaaagggaucaggaa

SEQ ID NO: 1430027 - RNA, 19 nt, Homo sapiens
  misc_RNA (1)...(19): siRNA sense strand
agaaggugcucugugucuu

SEQ ID NO: 1430028 - RNA, 19 nt, Homo sapiens
  misc_RNA (1)...(19): siRNA sense strand
guccaaagggaucaggaaa

SEQ ID NO: 1430029 - RNA, 19 nt, Homo sapiens
  misc_RNA (1)...(19): siRNA sense strand
gugacucucuggauuuuga

SEQ ID NO: 1430030 - RNA, 19 nt, Homo sapiens
  misc_RNA (1)...(19): siRNA sense strand
caacuacucaagcaucaac

SEQ ID NO: 1430031 - RNA, 19 nt, Homo sapiens
  misc_RNA (1)...(19): siRNA sense strand
ggaccugggcagagacuac

SEQ ID NO: 1430032 - RNA, 19 nt, Homo sapiens
  misc_RNA (1)...(19): siRNA sense strand
uggccuaccucuucaccau

SEQ ID NO: 1430033 - RNA, 19 nt, Homo sapiens
  misc_RNA (1)...(19): siRNA sense strand
gucauggccuaccucuuca

SEQ ID NO: 1430034 - RNA, 19 nt, Homo sapiens
  misc_RNA (1)...(19): siRNA sense strand
ucucgucuuucucgcauuc

SEQ ID NO: 1430035 - RNA, 19 nt, Homo sapiens
  misc_RNA (1)...(19): siRNA sense strand
caucaacagauucaugaag

SEQ ID NO: 1430036 - RNA, 19 nt, Homo sapiens
  misc_RNA (1)...(19): siRNA sense strand
gcaucaacagauucaugaa

SEQ ID NO: 1430037 - RNA, 19 nt, Homo sapiens
  misc_RNA (1)...(19): siRNA sense strand
ucaagaaugagagcgagaa

SEQ ID NO: 1430038 - RNA, 19 nt, Homo sapiens
  misc_RNA (1)...(19): siRNA sense strand
cagacucuccucccucaau

SEQ ID NO: 1430039 - RNA, 19 nt, Homo sapiens
  misc_RNA (1)...(19): siRNA sense strand
aaggugcugugcuccauca

SEQ ID NO: 1430040 - RNA, 19 nt, Homo sapiens
  misc_RNA (1)...(19): siRNA sense strand
cacaggcugcagcacaaua

SEQ ID NO: 1430041 - RNA, 19 nt, Homo sapiens
  misc_RNA (1)...(19): siRNA sense strand
gcaacaacgacacccaaaa

SEQ ID NO: 1430042 - RNA, 19 nt, Homo sapiens
  misc_RNA (1)...(19): siRNA sense strand
gaaaacugagucugagaug

SEQ ID NO: 1430043 - RNA, 19 nt, Homo sapiens
  misc_RNA (1)...(19): siRNA sense strand
cuacucaagcaucaacaga

SEQ ID NO: 1430044 - RNA, 19 nt, Homo sapiens
  misc_RNA (1)...(19): siRNA sense strand
gcaagaaccuuuccaaugg

SEQ ID NO: 1430045 - RNA, 19 nt, Homo sapiens
  misc_RNA (1)...(19): siRNA sense strand
ccaaugggcuguugaacuu

SEQ ID NO: 1430046 - RNA, 19 nt, Homo sapiens
  misc_RNA (1)...(19): siRNA sense strand
caucuucucugugaauuua

SEQ ID NO: 1430047 - RNA, 19 nt, Homo sapiens
  misc_RNA (1)...(19): siRNA sense strand
ccaaagggaucaggaaauu

SEQ ID NO: 1430048 - RNA, 19 nt, Homo sapiens
  misc_RNA (1)...(19): siRNA sense strand
gaauuuaguucucuuucug

SEQ ID NO: 1430049 - RNA, 19 nt, Homo sapiens
  misc_RNA (1)...(19): siRNA sense strand
gugcaacacugucgaaagu

SEQ ID NO: 1430050 - RNA, 19 nt, Homo sapiens
  misc_RNA (1)...(19): siRNA sense strand
gccagacgcuuucccgauu

SEQ ID NO: 1430051 - RNA, 19 nt, Homo sapiens
  misc_RNA (1)...(19): siRNA sense strand
ggucauggccuaccucuuc

SEQ ID NO: 1430052 - RNA, 19 nt, Homo sapiens
  misc_RNA (1)...(19): siRNA sense strand
gaugugaucucugccuuuc

SEQ ID NO: 1430053 - RNA, 19 nt, Homo sapiens
  misc_RNA (1)...(19): siRNA sense strand
ggaaucaggcacagaaauc

SEQ ID NO: 1430054 - RNA, 19 nt, Homo sapiens
  misc_RNA (1)...(19): siRNA sense strand
ccaguuaccuucaccuucu

SEQ ID NO: 1430055 - RNA, 19 nt, Homo sapiens
  misc_RNA (1)...(19): siRNA sense strand
ugaugcagcucgacuggaa

SEQ ID NO: 1430056 - RNA, 19 nt, Homo sapiens
  misc_RNA (1)...(19): siRNA sense strand
aaagggaucaggaaauuga

SEQ ID NO: 1430057 - RNA, 19 nt, Homo sapiens
  misc_RNA (1)...(19): siRNA sense strand
agacucuccucccucaaua

SEQ ID NO: 1430058 - RNA, 19 nt, Homo sapiens
  misc_RNA (1)...(19): siRNA sense strand
gagcauggccagaauggau

SEQ ID NO: 1430059 - RNA, 19 nt, Homo sapiens
  misc_RNA (1)...(19): siRNA sense strand
ucaacagauucaugaagaa

SEQ ID NO: 1430060 - RNA, 19 nt, Homo sapiens
  misc_RNA (1)...(19): siRNA sense strand
ggagcaauaugggaaaugg

SEQ ID NO: 1430061 - RNA, 19 nt, Homo sapiens
  misc_RNA (1)...(19): siRNA sense strand
acucaagcaucaacagauu

SEQ ID NO: 1430062 - RNA, 19 nt, Homo sapiens
  misc_RNA (1)...(19): siRNA sense strand
guaaagccauccagaacac

SEQ ID NO: 1430063 - RNA, 19 nt, Homo sapiens
  misc_RNA (1)...(19): siRNA sense strand
gagcaagaaccuuuccaau

SEQ ID NO: 1430064 - RNA, 19 nt, Homo sapiens
  misc_RNA (1)...(19): siRNA sense strand
gaaagugucaugcggaaaa

SEQ ID NO: 1430065 - RNA, 19 nt, Homo sapiens
  misc_RNA (1)...(19): siRNA sense strand
gcacccaccugagcagcuu

SEQ ID NO: 1430066 - RNA, 19 nt, Homo sapiens
  misc_RNA (1)...(19): siRNA sense strand
ucagugaucccgagacaga

SEQ ID NO: 1430067 - RNA, 19 nt, Homo sapiens
  misc_RNA (1)...(19): siRNA sense strand
ccuccaggccucaccuuua

SEQ ID NO: 1430068 - RNA, 19 nt, Homo sapiens
  misc_RNA (1)...(19): siRNA sense strand
ucuccucccucaauaguga

SEQ ID NO: 1430069 - RNA, 19 nt, Homo sapiens
  misc_RNA (1)...(19): siRNA sense strand
ggagacuugugacgacauc

SEQ ID NO: 1430070 - RNA, 19 nt, Homo sapiens
  misc_RNA (1)...(19): siRNA sense strand
ccgcgucuuucucgucuuu

SEQ ID NO: 1430071 - RNA, 19 nt, Homo sapiens
  misc_RNA (1)...(19): siRNA sense strand
ggccugagcaagaaccuuu

SEQ ID NO: 1430072 - RNA, 19 nt, Homo sapiens
  misc_RNA (1)...(19): siRNA sense strand
gcacaauaggcaccagaga

SEQ ID NO: 1430073 - RNA, 19 nt, Homo sapiens
  misc_RNA (1)...(19): siRNA sense strand
ggacuccucgugugucaau

SEQ ID NO: 1430074 - RNA, 19 nt, Homo sapiens
  misc_RNA (1)...(19): siRNA sense strand
ucacuuuucuccuguguaa

SEQ ID NO: 1430075 - RNA, 19 nt, Homo sapiens
  misc_RNA (1)...(19): siRNA sense strand
ggaccugucugcgccaucu

SEQ ID NO: 1430076 - RNA, 19 nt, Homo sapiens
  misc_RNA (1)...(19): siRNA sense strand
cgagaacacgugucaagau

SEQ ID NO: 1430077 - RNA, 19 nt, Homo sapiens
  misc_RNA (1)...(19): siRNA sense strand
gccgguaccuugcacuauc

SEQ ID NO: 1430078 - RNA, 19 nt, Homo sapiens
  misc_RNA (1)...(19): siRNA sense strand
guucagugaucccgagaca

SEQ ID NO: 1430079 - RNA, 19 nt, Homo sapiens
  misc_RNA (1)...(19): siRNA sense strand
cuccaggccucaccuuuau

SEQ ID NO: 1430080 - RNA, 19 nt, Homo sapiens
  misc_RNA (1)...(19): siRNA sense strand
aaccucagcuccccaguua

SEQ ID NO: 1430081 - RNA, 19 nt, Homo sapiens
  misc_RNA (1)...(19): siRNA sense strand
uaugggaaaugguccaaag

SEQ ID NO: 1430082 - RNA, 19 nt, Homo sapiens
  misc_RNA (1)...(19): siRNA sense strand
ucuggugacucucuggauu

SEQ ID NO: 1430083 - RNA, 19 nt, Homo sapiens
  misc_RNA (1)...(19): siRNA sense strand
guccacagccagacgcuuu

SEQ ID NO: 1430084 - RNA, 19 nt, Homo sapiens
  misc_RNA (1)...(19): siRNA sense strand
ccagacgcuuucccgauuc

SEQ ID NO: 1430085 - RNA, 19 nt, Homo sapiens
  misc_RNA (1)...(19): siRNA sense strand
aucaacagauucaugaaga

SEQ ID NO: 1430086 - RNA, 19 nt, Homo sapiens
  misc_RNA (1)...(19): siRNA sense strand
gucaacuacucaagcauca

SEQ ID NO: 1430087 - RNA, 19 nt, Homo sapiens
  misc_RNA (1)...(19): siRNA sense strand
ccucauggcccacuacgau

SEQ ID NO: 1430088 - RNA, 19 nt, Homo sapiens
  misc_RNA (1)...(19): siRNA sense strand
caccauccagagcaucuua

SEQ ID NO: 1430089 - RNA, 19 nt, Homo sapiens
  misc_RNA (1)...(19): siRNA sense strand
cagaauggauguggucacu

SEQ ID NO: 1430090 - RNA, 19 nt, Homo sapiens
  misc_RNA (1)...(19): siRNA sense strand
aaacugagucugagaugca

SEQ ID NO: 1430091 - RNA, 19 nt, Homo sapiens
  misc_RNA (1)...(19): siRNA sense strand
gccuaccucuucaccauca

SEQ ID NO: 1430092 - RNA, 19 nt, Homo sapiens
  misc_RNA (1)...(19): siRNA sense strand
guaccuugcacuaucucua

SEQ ID NO: 1430093 - RNA, 19 nt, Homo sapiens
  misc_RNA (1)...(19): siRNA sense strand
cagcuuugccguccucaug

SEQ ID NO: 1430094 - RNA, 19 nt, Homo sapiens
  misc_RNA (1)...(19): siRNA sense strand
gcagggugucuucaucuuc

SEQ ID NO: 1430095 - RNA, 19 nt, Homo sapiens
  misc_RNA (1)...(19): siRNA sense strand
gcgagaacacgugucaaga

SEQ ID NO: 1430096 - RNA, 19 nt, Homo sapiens
  misc_RNA (1)...(19): siRNA sense strand
caaagggaucaggaaauug

SEQ ID NO: 1430097 - RNA, 19 nt, Homo sapiens
  misc_RNA (1)...(19): siRNA sense strand
caucaacgagugugcaaca

SEQ ID NO: 1430098 - RNA, 19 nt, Homo sapiens
  misc_RNA (1)...(19): siRNA sense strand
ugugaucucugccuuucug

SEQ ID NO: 1430099 - RNA, 19 nt, Homo sapiens
  misc_RNA (1)...(19): siRNA sense strand
agcaagaaccuuuccaaug

SEQ ID NO: 1430100 - RNA, 19 nt, Homo sapiens
  misc_RNA (1)...(19): siRNA sense strand
acaauaggcaccagagaca

SEQ ID NO: 1430101 - RNA, 19 nt, Homo sapiens
  misc_RNA (1)...(19): siRNA sense strand
gccaucuucucugugaauu

SEQ ID NO: 1430102 - RNA, 19 nt, Homo sapiens
  misc_RNA (1)...(19): siRNA sense strand
ccagaaaagggauuuauau

SEQ ID NO: 1430103 - RNA, 19 nt, Homo sapiens
  misc_RNA (1)...(19): siRNA sense strand
guggucaacuacucaagca

SEQ ID NO: 1430104 - RNA, 19 nt, Homo sapiens
  misc_RNA (1)...(19): siRNA sense strand
uggauggccuagaggaugu

SEQ ID NO: 1430105 - RNA, 19 nt, Homo sapiens
  misc_RNA (1)...(19): siRNA sense strand
caacagauucaugaagaag

SEQ ID NO: 1430106 - RNA, 19 nt, Homo sapiens
  misc_RNA (1)...(19): siRNA sense strand
ucaagcaucaacagauuca

SEQ ID NO: 1430107 - RNA, 19 nt, Homo sapiens
  misc_RNA (1)...(19): siRNA sense strand
gaaucaggcacagaaaucu

SEQ ID NO: 1430108 - RNA, 19 nt, Homo sapiens
  misc_RNA (1)...(19): siRNA sense strand
ggaggugcagaagcaagua

SEQ ID NO: 1430109 - RNA, 19 nt, Homo sapiens
  misc_RNA (1)...(19): siRNA sense strand
gcagguccgggagcaauau

SEQ ID NO: 1430110 - RNA, 19 nt, Homo sapiens
  misc_RNA (1)...(19): siRNA sense strand
agucugagaugcacacacu

SEQ ID NO: 1430111 - RNA, 19 nt, Homo sapiens
  misc_RNA (1)...(19): siRNA sense strand
gguccaaagggaucaggaa

SEQ ID NO: 1430112 - RNA, 19 nt, Homo sapiens
  misc_RNA (1)...(19): siRNA sense strand
agaaggugcucugugucuu

SEQ ID NO: 1430113 - RNA, 19 nt, Homo sapiens
  misc_RNA (1)...(19): siRNA sense strand
guccaaagggaucaggaaa

SEQ ID NO: 1430114 - RNA, 19 nt, Homo sapiens
  misc_RNA (1)...(19): siRNA sense strand
gugacucucuggauuuuga

SEQ ID NO: 1430115 - RNA, 19 nt, Homo sapiens
  misc_RNA (1)...(19): siRNA sense strand
caacuacucaagcaucaac

SEQ ID NO: 1430116 - RNA, 19 nt, Homo sapiens
  misc_RNA (1)...(19): siRNA sense strand
ggaccugggcagagacuac

SEQ ID NO: 1430117 - RNA, 19 nt, Homo sapiens
  misc_RNA (1)...(19): siRNA sense strand
uggccuaccucuucaccau

SEQ ID NO: 1430118 - RNA, 19 nt, Homo sapiens
  misc_RNA (1)...(19): siRNA sense strand
gucauggccuaccucuuca

SEQ ID NO: 1430119 - RNA, 19 nt, Homo sapiens
  misc_RNA (1)...(19): siRNA sense strand
ucucgucuuucucgcauuc

SEQ ID NO: 1430120 - RNA, 19 nt, Homo sapiens
  misc_RNA (1)...(19): siRNA sense strand
caucaacagauucaugaag

SEQ ID NO: 1430121 - RNA, 19 nt, Homo sapiens
  misc_RNA (1)...(19): siRNA sense strand
gcaucaacagauucaugaa

SEQ ID NO: 1430122 - RNA, 19 nt, Homo sapiens
  misc_RNA (1)...(19): siRNA sense strand
ucaagaaugagagcgagaa

SEQ ID NO: 1430123 - RNA, 19 nt, Homo sapiens
  misc_RNA (1)...(19): siRNA sense strand
cagacucuccucccucaau

SEQ ID NO: 1430124 - RNA, 19 nt, Homo sapiens
  misc_RNA (1)...(19): siRNA sense strand
aaggugcugugcuccauca

SEQ ID NO: 1430125 - RNA, 19 nt, Homo sapiens
  misc_RNA (1)...(19): siRNA sense strand
cacaggcugcagcacaaua

SEQ ID NO: 1430126 - RNA, 19 nt, Homo sapiens
  misc_RNA (1)...(19): siRNA sense strand
gcaacaacgacacccaaaa

SEQ ID NO: 1430127 - RNA, 19 nt, Homo sapiens
  misc_RNA (1)...(19): siRNA sense strand
gaaaacugagucugagaug

SEQ ID NO: 1430128 - RNA, 19 nt, Homo sapiens
  misc_RNA (1)...(19): siRNA sense strand
cuacucaagcaucaacaga

SEQ ID NO: 1430129 - RNA, 19 nt, Homo sapiens
  misc_RNA (1)...(19): siRNA sense strand
gcaagaaccuuuccaaugg

SEQ ID NO: 1430130 - RNA, 19 nt, Homo sapiens
  misc_RNA (1)...(19): siRNA sense strand
ccaaugggcuguugaacuu

SEQ ID NO: 1430131 - RNA, 19 nt, Homo sapiens
  misc_RNA (1)...(19): siRNA sense strand
caucuucucugugaauuua

SEQ ID NO: 1430132 - RNA, 19 nt, Homo sapiens
  misc_RNA (1)...(19): siRNA sense strand
ccaaagggaucaggaaauu

SEQ ID NO: 1430133 - RNA, 19 nt, Homo sapiens
  misc_RNA (1)...(19): siRNA sense strand
gaauuuaguucucuuucug

SEQ ID NO: 1430134 - RNA, 19 nt, Homo sapiens
  misc_RNA (1)...(19): siRNA sense strand
gugcaacacugucgaaagu

SEQ ID NO: 1430135 - RNA, 19 nt, Homo sapiens
  misc_RNA (1)...(19): siRNA sense strand
gccagacgcuuucccgauu

SEQ ID NO: 1430136 - RNA, 19 nt, Homo sapiens
  misc_RNA (1)...(19): siRNA sense strand
ggucauggccuaccucuuc

SEQ ID NO: 1430137 - RNA, 19 nt, Homo sapiens
  misc_RNA (1)...(19): siRNA sense strand
gaugugaucucugccuuuc

SEQ ID NO: 1430138 - RNA, 19 nt, Homo sapiens
  misc_RNA (1)...(19): siRNA sense strand
ggaaucaggcacagaaauc

SEQ ID NO: 1430139 - RNA, 19 nt, Homo sapiens
  misc_RNA (1)...(19): siRNA sense strand
ccaguuaccuucaccuucu

SEQ ID NO: 1430140 - RNA, 19 nt, Homo sapiens
  misc_RNA (1)...(19): siRNA sense strand
ugaugcagcucgacuggaa

SEQ ID NO: 1430141 - RNA, 19 nt, Homo sapiens
  misc_RNA (1)...(19): siRNA sense strand
aaagggaucaggaaauuga

SEQ ID NO: 1430142 - RNA, 19 nt, Homo sapiens
  misc_RNA (1)...(19): siRNA sense strand
agacucuccucccucaaua

SEQ ID NO: 1430143 - RNA, 19 nt, Homo sapiens
  misc_RNA (1)...(19): siRNA sense strand
gagcauggccagaauggau

SEQ ID NO: 1430144 - RNA, 19 nt, Homo sapiens
  misc_RNA (1)...(19): siRNA sense strand
ucaacagauucaugaagaa

SEQ ID NO: 1430145 - RNA, 19 nt, Homo sapiens
  misc_RNA (1)...(19): siRNA sense strand
ggagcaauaugggaaaugg

SEQ ID NO: 1430146 - RNA, 19 nt, Homo sapiens
  misc_RNA (1)...(19): siRNA sense strand
acucaagcaucaacagauu

SEQ ID NO: 1430147 - RNA, 19 nt, Homo sapiens
  misc_RNA (1)...(19): siRNA sense strand
guaaagccauccagaacac

SEQ ID NO: 1430148 - RNA, 19 nt, Homo sapiens
  misc_RNA (1)...(19): siRNA sense strand
gagcaagaaccuuuccaau

SEQ ID NO: 1430149 - RNA, 19 nt, Homo sapiens
  misc_RNA (1)...(19): siRNA sense strand
gaaagugucaugcggaaaa

SEQ ID NO: 1430150 - RNA, 19 nt, Homo sapiens
  misc_RNA (1)...(19): siRNA sense strand
gcacccaccugagcagcuu

SEQ ID NO: 1430151 - RNA, 19 nt, Homo sapiens
  misc_RNA (1)...(19): siRNA sense strand
ucagugaucccgagacaga

SEQ ID NO: 1430152 - RNA, 19 nt, Homo sapiens
  misc_RNA (1)...(19): siRNA sense strand
ccuccaggccucaccuuua

SEQ ID NO: 1430153 - RNA, 19 nt, Homo sapiens
  misc_RNA (1)...(19): siRNA sense strand
ucuccucccucaauaguga

SEQ ID NO: 1430154 - RNA, 19 nt, Homo sapiens
  misc_RNA (1)...(19): siRNA sense strand
ggagacuugugacgacauc

SEQ ID NO: 1430155 - RNA, 19 nt, Homo sapiens
  misc_RNA (1)...(19): siRNA sense strand
ccgcgucuuucucgucuuu

SEQ ID NO: 1430156 - RNA, 19 nt, Homo sapiens
  misc_RNA (1)...(19): siRNA sense strand
ggccugagcaagaaccuuu

SEQ ID NO: 1430157 - RNA, 19 nt, Homo sapiens
  misc_RNA (1)...(19): siRNA sense strand
gcacaauaggcaccagaga

SEQ ID NO: 1430158 - RNA, 19 nt, Homo sapiens
  misc_RNA (1)...(19): siRNA sense strand
ggacuccucgugugucaau

SEQ ID NO: 1430159 - RNA, 19 nt, Homo sapiens
  misc_RNA (1)...(19): siRNA sense strand
ucacuuuucuccuguguaa

SEQ ID NO: 1430160 - RNA, 19 nt, Homo sapiens
  misc_RNA (1)...(19): siRNA sense strand
ggaccugucugcgccaucu

SEQ ID NO: 1430161 - RNA, 19 nt, Homo sapiens
  misc_RNA (1)...(19): siRNA sense strand
cgagaacacgugucaagau

SEQ ID NO: 1430162 - RNA, 19 nt, Homo sapiens
  misc_RNA (1)...(19): siRNA sense strand
gccgguaccuugcacuauc

SEQ ID NO: 1430163 - RNA, 19 nt, Homo sapiens
  misc_RNA (1)...(19): siRNA sense strand
guucagugaucccgagaca

SEQ ID NO: 1430164 - RNA, 19 nt, Homo sapiens
  misc_RNA (1)...(19): siRNA sense strand
cuccaggccucaccuuuau

SEQ ID NO: 1430165 - RNA, 19 nt, Homo sapiens
  misc_RNA (1)...(19): siRNA sense strand
aaccucagcuccccaguua

SEQ ID NO: 1430166 - RNA, 19 nt, Homo sapiens
  misc_RNA (1)...(19): siRNA sense strand
uaugggaaaugguccaaag

SEQ ID NO: 1430167 - RNA, 19 nt, Homo sapiens
  misc_RNA (1)...(19): siRNA sense strand
ucuggugacucucuggauu

SEQ ID NO: 1430168 - RNA, 19 nt, Homo sapiens
  misc_RNA (1)...(19): siRNA sense strand
guccacagccagacgcuuu

SEQ ID NO: 1430169 - RNA, 19 nt, Homo sapiens
  misc_RNA (1)...(19): siRNA sense strand
ccagacgcuuucccgauuc

SEQ ID NO: 1430170 - RNA, 19 nt, Homo sapiens
  misc_RNA (1)...(19): siRNA sense strand
aucaacagauucaugaaga

SEQ ID NO: 1430171 - RNA, 19 nt, Homo sapiens
  misc_RNA (1)...(19): siRNA sense strand
gucaacuacucaagcauca

SEQ ID NO: 1430172 - RNA, 19 nt, Homo sapiens
  misc_RNA (1)...(19): siRNA sense strand
ccucauggcccacuacgau

SEQ ID NO: 1430173 - RNA, 19 nt, Homo sapiens
  misc_RNA (1)...(19): siRNA sense strand
caccauccagagcaucuua

SEQ ID NO: 1430174 - RNA, 19 nt, Homo sapiens
  misc_RNA (1)...(19): siRNA sense strand
cagaauggauguggucacu

SEQ ID NO: 1430175 - RNA, 19 nt, Homo sapiens
  misc_RNA (1)...(19): siRNA sense strand
aaacugagucugagaugca

SEQ ID NO: 1430176 - RNA, 19 nt, Homo sapiens
  misc_RNA (1)...(19): siRNA sense strand
gccuaccucuucaccauca

SEQ ID NO: 1430177 - RNA, 19 nt, Homo sapiens
  misc_RNA (1)...(19): siRNA sense strand
guaccuugcacuaucucua

SEQ ID NO: 1430178 - RNA, 19 nt, Homo sapiens
  misc_RNA (1)...(19): siRNA sense strand
cagcuuugccguccucaug

SEQ ID NO: 1430179 - RNA, 19 nt, Homo sapiens
  misc_RNA (1)...(19): siRNA sense strand
gcagggugucuucaucuuc

SEQ ID NO: 1430180 - RNA, 19 nt, Homo sapiens
  misc_RNA (1)...(19): siRNA sense strand
gcgagaacacgugucaaga

SEQ ID NO: 1430181 - RNA, 19 nt, Homo sapiens
  misc_RNA (1)...(19): siRNA sense strand
caaagggaucaggaaauug

SEQ ID NO: 1430182 - RNA, 19 nt, Homo sapiens
  misc_RNA (1)...(19): siRNA sense strand
caucaacgagugugcaaca

SEQ ID NO: 1430183 - RNA, 19 nt, Homo sapiens
  misc_RNA (1)...(19): siRNA sense strand
ugugaucucugccuuucug

SEQ ID NO: 1430184 - RNA, 19 nt, Homo sapiens
  misc_RNA (1)...(19): siRNA sense strand
agcaagaaccuuuccaaug

SEQ ID NO: 1430185 - RNA, 19 nt, Homo sapiens
  misc_RNA (1)...(19): siRNA sense strand
acaauaggcaccagagaca

SEQ ID NO: 1430186 - RNA, 19 nt, Homo sapiens
  misc_RNA (1)...(19): siRNA sense strand
gccaucuucucugugaauu

SEQ ID NO: 1430187 - RNA, 19 nt, Homo sapiens
  misc_RNA (1)...(19): siRNA sense strand
ccagaaaagggauuuauau

SEQ ID NO: 1430188 - RNA, 19 nt, Homo sapiens
  misc_RNA (1)...(19): siRNA sense strand
guggucaacuacucaagca

SEQ ID NO: 1430189 - RNA, 19 nt, Homo sapiens
  misc_RNA (1)...(19): siRNA sense strand
uggauggccuagaggaugu

SEQ ID NO: 1430190 - RNA, 19 nt, Homo sapiens
  misc_RNA (1)...(19): siRNA sense strand
caacagauucaugaagaag

SEQ ID NO: 1430191 - RNA, 19 nt, Homo sapiens
  misc_RNA (1)...(19): siRNA sense strand
ucaagcaucaacagauuca

SEQ ID NO: 1430192 - RNA, 19 nt, Homo sapiens
  misc_RNA (1)...(19): siRNA sense strand
gaaucaggcacagaaaucu

SEQ ID NO: 1430193 - RNA, 19 nt, Homo sapiens
  misc_RNA (1)...(19): siRNA sense strand
ggaggugcagaagcaagua

SEQ ID NO: 1430194 - RNA, 19 nt, Homo sapiens
  misc_RNA (1)...(19): siRNA sense strand
gcagguccgggagcaauau

SEQ ID NO: 1430195 - RNA, 19 nt, Homo sapiens
  misc_RNA (1)...(19): siRNA sense strand
agucugagaugcacacacu

SEQ ID NO: 1430196 - RNA, 19 nt, Homo sapiens
  misc_RNA (1)...(19): siRNA sense strand
gguccaaagggaucaggaa

SEQ ID NO: 1430197 - RNA, 19 nt, Homo sapiens
  misc_RNA (1)...(19): siRNA sense strand
agaaggugcucugugucuu

SEQ ID NO: 1430198 - RNA, 19 nt, Homo sapiens
  misc_RNA (1)...(19): siRNA sense strand
guccaaagggaucaggaaa

SEQ ID NO: 1430199 - RNA, 19 nt, Homo sapiens
  misc_RNA (1)...(19): siRNA sense strand
gugacucucuggauuuuga

SEQ ID NO: 1430200 - RNA, 19 nt, Homo sapiens
  misc_RNA (1)...(19): siRNA sense strand
caacuacucaagcaucaac

SEQ ID NO: 1430201 - RNA, 19 nt, Homo sapiens
  misc_RNA (1)...(19): siRNA sense strand
ggaccugggcagagacuac

SEQ ID NO: 1430202 - RNA, 19 nt, Homo sapiens
  misc_RNA (1)...(19): siRNA sense strand
uggccuaccucuucaccau

SEQ ID NO: 1430203 - RNA, 19 nt, Homo sapiens
  misc_RNA (1)...(19): siRNA sense strand
gucauggccuaccucuuca

SEQ ID NO: 1430204 - RNA, 19 nt, Homo sapiens
  misc_RNA (1)...(19): siRNA sense strand
ucucgucuuucucgcauuc

SEQ ID NO: 1430205 - RNA, 19 nt, Homo sapiens
  misc_RNA (1)...(19): siRNA sense strand
caucaacagauucaugaag

SEQ ID NO: 1430206 - RNA, 19 nt, Homo sapiens
  misc_RNA (1)...(19): siRNA sense strand
gcaucaacagauucaugaa

SEQ ID NO: 1430207 - RNA, 19 nt, Homo sapiens
  misc_RNA (1)...(19): siRNA sense strand
ucaagaaugagagcgagaa

SEQ ID NO: 1430208 - RNA, 19 nt, Homo sapiens
  misc_RNA (1)...(19): siRNA sense strand
cagacucuccucccucaau

SEQ ID NO: 1430209 - RNA, 19 nt, Homo sapiens
  misc_RNA (1)...(19): siRNA sense strand
aaggugcugugcuccauca

SEQ ID NO: 1430210 - RNA, 19 nt, Homo sapiens
  misc_RNA (1)...(19): siRNA sense strand
cacaggcugcagcacaaua

SEQ ID NO: 1430211 - RNA, 19 nt, Homo sapiens
  misc_RNA (1)...(19): siRNA sense strand
gcaacaacgacacccaaaa

SEQ ID NO: 1430212 - RNA, 19 nt, Homo sapiens
  misc_RNA (1)...(19): siRNA sense strand
gaaaacugagucugagaug

SEQ ID NO: 1430213 - RNA, 19 nt, Homo sapiens
  misc_RNA (1)...(19): siRNA sense strand
cuacucaagcaucaacaga

SEQ ID NO: 1430214 - RNA, 19 nt, Homo sapiens
  misc_RNA (1)...(19): siRNA sense strand
gcaagaaccuuuccaaugg

SEQ ID NO: 1430215 - RNA, 19 nt, Homo sapiens
  misc_RNA (1)...(19): siRNA sense strand
ccaaugggcuguugaacuu

SEQ ID NO: 1430216 - RNA, 19 nt, Homo sapiens
  misc_RNA (1)...(19): siRNA sense strand
caucuucucugugaauuua

SEQ ID NO: 1430217 - RNA, 19 nt, Homo sapiens
  misc_RNA (1)...(19): siRNA sense strand
ccaaagggaucaggaaauu

SEQ ID NO: 1430218 - RNA, 19 nt, Homo sapiens
  misc_RNA (1)...(19): siRNA sense strand
gaauuuaguucucuuucug

SEQ ID NO: 1430219 - RNA, 19 nt, Homo sapiens
  misc_RNA (1)...(19): siRNA sense strand
gugcaacacugucgaaagu

SEQ ID NO: 1430220 - RNA, 19 nt, Homo sapiens
  misc_RNA (1)...(19): siRNA sense strand
gccagacgcuuucccgauu

SEQ ID NO: 1430221 - RNA, 19 nt, Homo sapiens
  misc_RNA (1)...(19): siRNA sense strand
ggucauggccuaccucuuc

SEQ ID NO: 1430222 - RNA, 19 nt, Homo sapiens
  misc_RNA (1)...(19): siRNA sense strand
gaugugaucucugccuuuc

SEQ ID NO: 1430223 - RNA, 19 nt, Homo sapiens
  misc_RNA (1)...(19): siRNA sense strand
ggaaucaggcacagaaauc

SEQ ID NO: 1430224 - RNA, 19 nt, Homo sapiens
  misc_RNA (1)...(19): siRNA sense strand
ccaguuaccuucaccuucu

SEQ ID NO: 1430225 - RNA, 19 nt, Homo sapiens
  misc_RNA (1)...(19): siRNA sense strand
ugaugcagcucgacuggaa

SEQ ID NO: 1430226 - RNA, 19 nt, Homo sapiens
  misc_RNA (1)...(19): siRNA sense strand
aaagggaucaggaaauuga

SEQ ID NO: 1430227 - RNA, 19 nt, Homo sapiens
  misc_RNA (1)...(19): siRNA sense strand
agacucuccucccucaaua

SEQ ID NO: 1430228 - RNA, 19 nt, Homo sapiens
  misc_RNA (1)...(19): siRNA sense strand
gagcauggccagaauggau

SEQ ID NO: 1430229 - RNA, 19 nt, Homo sapiens
  misc_RNA (1)...(19): siRNA sense strand
ucaacagauucaugaagaa

SEQ ID NO: 1430230 - RNA, 19 nt, Homo sapiens
  misc_RNA (1)...(19): siRNA sense strand
ggagcaauaugggaaaugg

SEQ ID NO: 1430231 - RNA, 19 nt, Homo sapiens
  misc_RNA (1)...(19): siRNA sense strand
acucaagcaucaacagauu

SEQ ID NO: 1430232 - RNA, 19 nt, Homo sapiens
  misc_RNA (1)...(19): siRNA sense strand
guaaagccauccagaacac

SEQ ID NO: 1430233 - RNA, 19 nt, Homo sapiens
  misc_RNA (1)...(19): siRNA sense strand
gagcaagaaccuuuccaau

SEQ ID NO: 1430234 - RNA, 19 nt, Homo sapiens
  misc_RNA (1)...(19): siRNA sense strand
gaaagugucaugcggaaaa

SEQ ID NO: 1430235 - RNA, 19 nt, Homo sapiens
  misc_RNA (1)...(19): siRNA sense strand
gcacccaccugagcagcuu

SEQ ID NO: 1430236 - RNA, 19 nt, Homo sapiens
  misc_RNA (1)...(19): siRNA sense strand
ucagugaucccgagacaga

SEQ ID NO: 1430237 - RNA, 19 nt, Homo sapiens
  misc_RNA (1)...(19): siRNA sense strand
ccuccaggccucaccuuua

SEQ ID NO: 1430238 - RNA, 19 nt, Homo sapiens
  misc_RNA (1)...(19): siRNA sense strand
ucuccucccucaauaguga

SEQ ID NO: 1430239 - RNA, 19 nt, Homo sapiens
  misc_RNA (1)...(19): siRNA sense strand
ggagacuugugacgacauc

SEQ ID NO: 1430240 - RNA, 19 nt, Homo sapiens
  misc_RNA (1)...(19): siRNA sense strand
ccgcgucuuucucgucuuu

SEQ ID NO: 1430241 - RNA, 19 nt, Homo sapiens
  misc_RNA (1)...(19): siRNA sense strand
ggccugagcaagaaccuuu

SEQ ID NO: 1430242 - RNA, 19 nt, Homo sapiens
  misc_RNA (1)...(19): siRNA sense strand
gcacaauaggcaccagaga

SEQ ID NO: 1430243 - RNA, 19 nt, Homo sapiens
  misc_RNA (1)...(19): siRNA sense strand
ggacuccucgugugucaau

SEQ ID NO: 1430244 - RNA, 19 nt, Homo sapiens
  misc_RNA (1)...(19): siRNA sense strand
ucacuuuucuccuguguaa

SEQ ID NO: 1430245 - RNA, 19 nt, Homo sapiens
  misc_RNA (1)...(19): siRNA sense strand
ggaccugucugcgccaucu

SEQ ID NO: 1430246 - RNA, 19 nt, Homo sapiens
  misc_RNA (1)...(19): siRNA sense strand
cgagaacacgugucaagau

SEQ ID NO: 1430247 - RNA, 19 nt, Homo sapiens
  misc_RNA (1)...(19): siRNA sense strand
gccgguaccuugcacuauc

SEQ ID NO: 1430248 - RNA, 19 nt, Homo sapiens
  misc_RNA (1)...(19): siRNA sense strand
guucagugaucccgagaca

SEQ ID NO: 1430249 - RNA, 19 nt, Homo sapiens
  misc_RNA (1)...(19): siRNA sense strand
cuccaggccucaccuuuau

SEQ ID NO: 1430250 - RNA, 19 nt, Homo sapiens
  misc_RNA (1)...(19): siRNA sense strand
aaccucagcuccccaguua

SEQ ID NO: 1430251 - RNA, 19 nt, Homo sapiens
  misc_RNA (1)...(19): siRNA sense strand
uaugggaaaugguccaaag

SEQ ID NO: 1430252 - RNA, 19 nt, Homo sapiens
  misc_RNA (1)...(19): siRNA sense strand
ucuggugacucucuggauu

SEQ ID NO: 1430253 - RNA, 19 nt, Homo sapiens
  misc_RNA (1)...(19): siRNA sense strand
guccacagccagacgcuuu

SEQ ID NO: 1430254 - RNA, 19 nt, Homo sapiens
  misc_RNA (1)...(19): siRNA sense strand
ccagacgcuuucccgauuc

SEQ ID NO: 1430255 - RNA, 19 nt, Homo sapiens
  misc_RNA (1)...(19): siRNA sense strand
aucaacagauucaugaaga

SEQ ID NO: 1430256 - RNA, 19 nt, Homo sapiens
  misc_RNA (1)...(19): siRNA sense strand
gucaacuacucaagcauca

SEQ ID NO: 1430257 - RNA, 19 nt, Homo sapiens
  misc_RNA (1)...(19): siRNA sense strand
ccucauggcccacuacgau

SEQ ID NO: 1430258 - RNA, 19 nt, Homo sapiens
  misc_RNA (1)...(19): siRNA sense strand
caccauccagagcaucuua

SEQ ID NO: 1430259 - RNA, 19 nt, Homo sapiens
  misc_RNA (1)...(19): siRNA sense strand
cagaauggauguggucacu

SEQ ID NO: 1430260 - RNA, 19 nt, Homo sapiens
  misc_RNA (1)...(19): siRNA sense strand
aaacugagucugagaugca

SEQ ID NO: 1430261 - RNA, 19 nt, Homo sapiens
  misc_RNA (1)...(19): siRNA sense strand
gccuaccucuucaccauca

SEQ ID NO: 1430262 - RNA, 19 nt, Homo sapiens
  misc_RNA (1)...(19): siRNA sense strand
guaccuugcacuaucucua

SEQ ID NO: 1430263 - RNA, 19 nt, Homo sapiens
  misc_RNA (1)...(19): siRNA sense strand
cagcuuugccguccucaug

SEQ ID NO: 1430264 - RNA, 19 nt, Homo sapiens
  misc_RNA (1)...(19): siRNA sense strand
gcagggugucuucaucuuc

SEQ ID NO: 1430265 - RNA, 19 nt, Homo sapiens
  misc_RNA (1)...(19): siRNA sense strand
gcgagaacacgugucaaga

SEQ ID NO: 1430266 - RNA, 19 nt, Homo sapiens
  misc_RNA (1)...(19): siRNA sense strand
caaagggaucaggaaauug

SEQ ID NO: 1430267 - RNA, 19 nt, Homo sapiens
  misc_RNA (1)...(19): siRNA sense strand
caucaacgagugugcaaca

SEQ ID NO: 1430268 - RNA, 19 nt, Homo sapiens
  misc_RNA (1)...(19): siRNA sense strand
ugugaucucugccuuucug

SEQ ID NO: 1430269 - RNA, 19 nt, Homo sapiens
  misc_RNA (1)...(19): siRNA sense strand
agcaagaaccuuuccaaug

SEQ ID NO: 1430270 - RNA, 19 nt, Homo sapiens
  misc_RNA (1)...(19): siRNA sense strand
acaauaggcaccagagaca

SEQ ID NO: 1430271 - RNA, 19 nt, Homo sapiens
  misc_RNA (1)...(19): siRNA sense strand
gccaucuucucugugaauu

SEQ ID NO: 1430272 - RNA, 19 nt, Homo sapiens
  misc_RNA (1)...(19): siRNA sense strand
ccagaaaagggauuuauau

SEQ ID NO: 1430273 - RNA, 19 nt, Homo sapiens
  misc_RNA (1)...(19): siRNA sense strand
guggucaacuacucaagca

SEQ ID NO: 1430274 - RNA, 19 nt, Homo sapiens
  misc_RNA (1)...(19): siRNA sense strand
uggauggccuagaggaugu

SEQ ID NO: 1430275 - RNA, 19 nt, Homo sapiens
  misc_RNA (1)...(19): siRNA sense strand
caacagauucaugaagaag

SEQ ID NO: 1430276 - RNA, 19 nt, Homo sapiens
  misc_RNA (1)...(19): siRNA sense strand
ucaagcaucaacagauuca

SEQ ID NO: 1430277 - RNA, 19 nt, Homo sapiens
  misc_RNA (1)...(19): siRNA sense strand
gaaucaggcacagaaaucu

SEQ ID NO: 1430278 - RNA, 19 nt, Homo sapiens
  misc_RNA (1)...(19): siRNA sense strand
ggaggugcagaagcaagua

SEQ ID NO: 1430279 - RNA, 19 nt, Homo sapiens
  misc_RNA (1)...(19): siRNA sense strand
gcagguccgggagcaauau

SEQ ID NO: 1430280 - RNA, 19 nt, Homo sapiens
  misc_RNA (1)...(19): siRNA sense strand
agucugagaugcacacacu

SEQ ID NO: 1430281 - RNA, 19 nt, Homo sapiens
  misc_RNA (1)...(19): siRNA sense strand
gguccaaagggaucaggaa

SEQ ID NO: 1430282 - RNA, 19 nt, Homo sapiens
  misc_RNA (1)...(19): siRNA sense strand
agaaggugcucugugucuu

SEQ ID NO: 1430283 - RNA, 19 nt, Homo sapiens
  misc_RNA (1)...(19): siRNA sense strand
guccaaagggaucaggaaa

SEQ ID NO: 1430284 - RNA, 19 nt, Homo sapiens
  misc_RNA (1)...(19): siRNA sense strand
gugacucucuggauuuuga

SEQ ID NO: 1430285 - RNA, 19 nt, Homo sapiens
  misc_RNA (1)...(19): siRNA sense strand
caacuacucaagcaucaac

SEQ ID NO: 1430286 - RNA, 19 nt, Homo sapiens
  misc_RNA (1)...(19): siRNA sense strand
ggaccugggcagagacuac

SEQ ID NO: 1430287 - RNA, 19 nt, Homo sapiens
  misc_RNA (1)...(19): siRNA sense strand
uggccuaccucuucaccau

SEQ ID NO: 1430288 - RNA, 19 nt, Homo sapiens
  misc_RNA (1)...(19): siRNA sense strand
gucauggccuaccucuuca

SEQ ID NO: 1430289 - RNA, 19 nt, Homo sapiens
  misc_RNA (1)...(19): siRNA sense strand
ucucgucuuucucgcauuc

SEQ ID NO: 1430290 - RNA, 19 nt, Homo sapiens
  misc_RNA (1)...(19): siRNA sense strand
caucaacagauucaugaag

SEQ ID NO: 1430291 - RNA, 19 nt, Homo sapiens
  misc_RNA (1)...(19): siRNA sense strand
gcaucaacagauucaugaa

SEQ ID NO: 1430292 - RNA, 19 nt, Homo sapiens
  misc_RNA (1)...(19): siRNA sense strand
ucaagaaugagagcgagaa

SEQ ID NO: 1430293 - RNA, 19 nt, Homo sapiens
  misc_RNA (1)...(19): siRNA sense strand
cagacucuccucccucaau

SEQ ID NO: 1430294 - RNA, 19 nt, Homo sapiens
  misc_RNA (1)...(19): siRNA sense strand
aaggugcugugcuccauca

SEQ ID NO: 1430295 - RNA, 19 nt, Homo sapiens
  misc_RNA (1)...(19): siRNA sense strand
cacaggcugcagcacaaua

SEQ ID NO: 1430296 - RNA, 19 nt, Homo sapiens
  misc_RNA (1)...(19): siRNA sense strand
gcaacaacgacacccaaaa

SEQ ID NO: 1430297 - RNA, 19 nt, Homo sapiens
  misc_RNA (1)...(19): siRNA sense strand
gaaaacugagucugagaug

SEQ ID NO: 1430298 - RNA, 19 nt, Homo sapiens
  misc_RNA (1)...(19): siRNA sense strand
cuacucaagcaucaacaga

SEQ ID NO: 1430299 - RNA, 19 nt, Homo sapiens
  misc_RNA (1)...(19): siRNA sense strand
gcaagaaccuuuccaaugg

SEQ ID NO: 1430300 - RNA, 19 nt, Homo sapiens
  misc_RNA (1)...(19): siRNA sense strand
ccaaugggcuguugaacuu

SEQ ID NO: 1430301 - RNA, 19 nt, Homo sapiens
  misc_RNA (1)...(19): siRNA sense strand
caucuucucugugaauuua

SEQ ID NO: 1430302 - RNA, 19 nt, Homo sapiens
  misc_RNA (1)...(19): siRNA sense strand
ccaaagggaucaggaaauu

SEQ ID NO: 1430303 - RNA, 19 nt, Homo sapiens
  misc_RNA (1)...(19): siRNA sense strand
gaauuuaguucucuuucug

SEQ ID NO: 1430304 - RNA, 19 nt, Homo sapiens
  misc_RNA (1)...(19): siRNA sense strand
gugcaacacugucgaaagu

SEQ ID NO: 1430305 - RNA, 19 nt, Homo sapiens
  misc_RNA (1)...(19): siRNA sense strand
gccagacgcuuucccgauu

SEQ ID NO: 1430306 - RNA, 19 nt, Homo sapiens
  misc_RNA (1)...(19): siRNA sense strand
ggucauggccuaccucuuc

SEQ ID NO: 1430307 - RNA, 19 nt, Homo sapiens
  misc_RNA (1)...(19): siRNA sense strand
gaugugaucucugccuuuc

SEQ ID NO: 1430308 - RNA, 19 nt, Homo sapiens
  misc_RNA (1)...(19): siRNA sense strand
ggaaucaggcacagaaauc

SEQ ID NO: 1430309 - RNA, 19 nt, Homo sapiens
  misc_RNA (1)...(19): siRNA sense strand
ccaguuaccuucaccuucu

SEQ ID NO: 1430310 - RNA, 19 nt, Homo sapiens
  misc_RNA (1)...(19): siRNA sense strand
ugaugcagcucgacuggaa

SEQ ID NO: 1430311 - RNA, 19 nt, Homo sapiens
  misc_RNA (1)...(19): siRNA sense strand
aaagggaucaggaaauuga

SEQ ID NO: 1430312 - RNA, 19 nt, Homo sapiens
  misc_RNA (1)...(19): siRNA sense strand
agacucuccucccucaaua

SEQ ID NO: 1430313 - RNA, 19 nt, Homo sapiens
  misc_RNA (1)...(19): siRNA sense strand
gagcauggccagaauggau

SEQ ID NO: 1430314 - RNA, 19 nt, Homo sapiens
  misc_RNA (1)...(19): siRNA sense strand
ucaacagauucaugaagaa

SEQ ID NO: 1430315 - RNA, 19 nt, Homo sapiens
  misc_RNA (1)...(19): siRNA sense strand
ggagcaauaugggaaaugg

SEQ ID NO: 1430316 - RNA, 19 nt, Homo sapiens
  misc_RNA (1)...(19): siRNA sense strand
acucaagcaucaacagauu

SEQ ID NO: 1430317 - RNA, 19 nt, Homo sapiens
  misc_RNA (1)...(19): siRNA sense strand
guaaagccauccagaacac

SEQ ID NO: 1430318 - RNA, 19 nt, Homo sapiens
  misc_RNA (1)...(19): siRNA sense strand
gagcaagaaccuuuccaau

SEQ ID NO: 1430319 - RNA, 19 nt, Homo sapiens
  misc_RNA (1)...(19): siRNA sense strand
gaaagugucaugcggaaaa

SEQ ID NO: 1430320 - RNA, 19 nt, Homo sapiens
  misc_RNA (1)...(19): siRNA sense strand
gcacccaccugagcagcuu

SEQ ID NO: 1430321 - RNA, 19 nt, Homo sapiens
  misc_RNA (1)...(19): siRNA sense strand
ucagugaucccgagacaga

SEQ ID NO: 1430322 - RNA, 19 nt, Homo sapiens
  misc_RNA (1)...(19): siRNA sense strand
ccuccaggccucaccuuua

SEQ ID NO: 1430323 - RNA, 19 nt, Homo sapiens
  misc_RNA (1)...(19): siRNA sense strand
ucuccucccucaauaguga

SEQ ID NO: 1430324 - RNA, 19 nt, Homo sapiens
  misc_RNA (1)...(19): siRNA sense strand
ggagacuugugacgacauc

SEQ ID NO: 1430325 - RNA, 19 nt, Homo sapiens
  misc_RNA (1)...(19): siRNA sense strand
ccgcgucuuucucgucuuu

SEQ ID NO: 1430326 - RNA, 19 nt, Homo sapiens
  misc_RNA (1)...(19): siRNA sense strand
ggccugagcaagaaccuuu

SEQ ID NO: 1430327 - RNA, 19 nt, Homo sapiens
  misc_RNA (1)...(19): siRNA sense strand
gcacaauaggcaccagaga

SEQ ID NO: 1430328 - RNA, 19 nt, Homo sapiens
  misc_RNA (1)...(19): siRNA sense strand
ggacuccucgugugucaau

SEQ ID NO: 1430329 - RNA, 19 nt, Homo sapiens
  misc_RNA (1)...(19): siRNA sense strand
ucacuuuucuccuguguaa

SEQ ID NO: 1430330 - RNA, 19 nt, Homo sapiens
  misc_RNA (1)...(19): siRNA sense strand
ggaccugucugcgccaucu

SEQ ID NO: 1430331 - RNA, 19 nt, Homo sapiens
  misc_RNA (1)...(19): siRNA sense strand
cgagaacacgugucaagau

SEQ ID NO: 1430332 - RNA, 19 nt, Homo sapiens
  misc_RNA (1)...(19): siRNA sense strand
gccgguaccuugcacuauc

SEQ ID NO: 1430333 - RNA, 19 nt, Homo sapiens
  misc_RNA (1)...(19): siRNA sense strand
guucagugaucccgagaca

SEQ ID NO: 1430334 - RNA, 19 nt, Homo sapiens
  misc_RNA (1)...(19): siRNA sense strand
cuccaggccucaccuuuau

SEQ ID NO: 1430335 - RNA, 19 nt, Homo sapiens
  misc_RNA (1)...(19): siRNA sense strand
aaccucagcuccccaguua

SEQ ID NO: 1430336 - RNA, 19 nt, Homo sapiens
  misc_RNA (1)...(19): siRNA sense strand
uaugggaaaugguccaaag

SEQ ID NO: 1430337 - RNA, 19 nt, Homo sapiens
  misc_RNA (1)...(19): siRNA sense strand
ucuggugacucucuggauu

SEQ ID NO: 1430338 - RNA, 19 nt, Homo sapiens
  misc_RNA (1)...(19): siRNA sense strand
guccacagccagacgcuuu

SEQ ID NO: 1430339 - RNA, 19 nt, Homo sapiens
  misc_RNA (1)...(19): siRNA sense strand
ccagacgcuuucccgauuc

SEQ ID NO: 1430340 - RNA, 19 nt, Homo sapiens
  misc_RNA (1)...(19): siRNA sense strand
aucaacagauucaugaaga

SEQ ID NO: 1430341 - RNA, 19 nt, Homo sapiens
  misc_RNA (1)...(19): siRNA sense strand
gucaacuacucaagcauca

SEQ ID NO: 1430342 - RNA, 19 nt, Homo sapiens
  misc_RNA (1)...(19): siRNA sense strand
ccucauggcccacuacgau

SEQ ID NO: 1430343 - RNA, 19 nt, Homo sapiens
  misc_RNA (1)...(19): siRNA sense strand
caccauccagagcaucuua

SEQ ID NO: 1430344 - RNA, 19 nt, Homo sapiens
  misc_RNA (1)...(19): siRNA sense strand
cagaauggauguggucacu

SEQ ID NO: 1430345 - RNA, 19 nt, Homo sapiens
  misc_RNA (1)...(19): siRNA sense strand
aaacugagucugagaugca

SEQ ID NO: 1430346 - RNA, 19 nt, Homo sapiens
  misc_RNA (1)...(19): siRNA sense strand
gccuaccucuucaccauca

SEQ ID NO: 1430347 - RNA, 19 nt, Homo sapiens
  misc_RNA (1)...(19): siRNA sense strand
guaccuugcacuaucucua

SEQ ID NO: 1430348 - RNA, 19 nt, Homo sapiens
  misc_RNA (1)...(19): siRNA sense strand
cagcuuugccguccucaug

SEQ ID NO: 1430349 - RNA, 19 nt, Homo sapiens
  misc_RNA (1)...(19): siRNA sense strand
gcagggugucuucaucuuc

SEQ ID NO: 1430350 - RNA, 19 nt, Homo sapiens
  misc_RNA (1)...(19): siRNA sense strand
gcgagaacacgugucaaga

SEQ ID NO: 1430351 - RNA, 19 nt, Homo sapiens
  misc_RNA (1)...(19): siRNA sense strand
caaagggaucaggaaauug

SEQ ID NO: 1430352 - RNA, 19 nt, Homo sapiens
  misc_RNA (1)...(19): siRNA sense strand
caucaacgagugugcaaca

SEQ ID NO: 1430353 - RNA, 19 nt, Homo sapiens
  misc_RNA (1)...(19): siRNA sense strand
ugugaucucugccuuucug

SEQ ID NO: 1430354 - RNA, 19 nt, Homo sapiens
  misc_RNA (1)...(19): siRNA sense strand
agcaagaaccuuuccaaug

SEQ ID NO: 1430355 - RNA, 19 nt, Homo sapiens
  misc_RNA (1)...(19): siRNA sense strand
acaauaggcaccagagaca

SEQ ID NO: 1430356 - RNA, 19 nt, Homo sapiens
  misc_RNA (1)...(19): siRNA sense strand
gccaucuucucugugaauu

SEQ ID NO: 1430357 - RNA, 19 nt, Homo sapiens
  misc_RNA (1)...(19): siRNA sense strand
ccagaaaagggauuuauau

SEQ ID NO: 1430358 - RNA, 19 nt, Homo sapiens
  misc_RNA (1)...(19): siRNA sense strand
guggucaacuacucaagca

SEQ ID NO: 1430359 - RNA, 19 nt, Homo sapiens
  misc_RNA (1)...(19): siRNA sense strand
uggauggccuagaggaugu

SEQ ID NO: 1430360 - RNA, 19 nt, Homo sapiens
  misc_RNA (1)...(19): siRNA sense strand
caacagauucaugaagaag

SEQ ID NO: 1430361 - RNA, 19 nt, Homo sapiens
  misc_RNA (1)...(19): siRNA sense strand
ucaagcaucaacagauuca

SEQ ID NO: 1430362 - RNA, 19 nt, Homo sapiens
  misc_RNA (1)...(19): siRNA sense strand
gaaucaggcacagaaaucu

SEQ ID NO: 1430363 - RNA, 19 nt, Homo sapiens
  misc_RNA (1)...(19): siRNA sense strand
ggaggugcagaagcaagua

SEQ ID NO: 1430364 - RNA, 19 nt, Homo sapiens
  misc_RNA (1)...(19): siRNA sense strand
gcagguccgggagcaauau

SEQ ID NO: 1430365 - RNA, 19 nt, Homo sapiens
  misc_RNA (1)...(19): siRNA sense strand
agucugagaugcacacacu

SEQ ID NO: 1430366 - RNA, 19 nt, Homo sapiens
  misc_RNA (1)...(19): siRNA sense strand
gguccaaagggaucaggaa

SEQ ID NO: 1430367 - RNA, 19 nt, Homo sapiens
  misc_RNA (1)...(19): siRNA sense strand
agaaggugcucugugucuu

SEQ ID NO: 1430368 - RNA, 19 nt, Homo sapiens
  misc_RNA (1)...(19): siRNA sense strand
guccaaagggaucaggaaa

SEQ ID NO: 1430369 - RNA, 19 nt, Homo sapiens
  misc_RNA (1)...(19): siRNA sense strand
gugacucucuggauuuuga

SEQ ID NO: 1430370 - RNA, 19 nt, Homo sapiens
  misc_RNA (1)...(19): siRNA sense strand
caacuacucaagcaucaac

SEQ ID NO: 1430371 - RNA, 19 nt, Homo sapiens
  misc_RNA (1)...(19): siRNA sense strand
ggaccugggcagagacuac

SEQ ID NO: 1430372 - RNA, 19 nt, Homo sapiens
  misc_RNA (1)...(19): siRNA sense strand
uggccuaccucuucaccau

SEQ ID NO: 1430373 - RNA, 19 nt, Homo sapiens
  misc_RNA (1)...(19): siRNA sense strand
gucauggccuaccucuuca

SEQ ID NO: 1430374 - RNA, 19 nt, Homo sapiens
  misc_RNA (1)...(19): siRNA sense strand
ucucgucuuucucgcauuc

SEQ ID NO: 1430375 - RNA, 19 nt, Homo sapiens
  misc_RNA (1)...(19): siRNA sense strand
caucaacagauucaugaag

SEQ ID NO: 1430376 - RNA, 19 nt, Homo sapiens
  misc_RNA (1)...(19): siRNA sense strand
gcaucaacagauucaugaa

SEQ ID NO: 1430377 - RNA, 19 nt, Homo sapiens
  misc_RNA (1)...(19): siRNA sense strand
ucaagaaugagagcgagaa

SEQ ID NO: 1430378 - RNA, 19 nt, Homo sapiens
  misc_RNA (1)...(19): siRNA sense strand
cagacucuccucccucaau

SEQ ID NO: 1430379 - RNA, 19 nt, Homo sapiens
  misc_RNA (1)...(19): siRNA sense strand
aaggugcugugcuccauca

SEQ ID NO: 1430380 - RNA, 19 nt, Homo sapiens
  misc_RNA (1)...(19): siRNA sense strand
cacaggcugcagcacaaua

SEQ ID NO: 1430381 - RNA, 19 nt, Homo sapiens
  misc_RNA (1)...(19): siRNA sense strand
gcaacaacgacacccaaaa

SEQ ID NO: 1430382 - RNA, 19 nt, Homo sapiens
  misc_RNA (1)...(19): siRNA sense strand
gaaaacugagucugagaug

SEQ ID NO: 1430383 - RNA, 19 nt, Homo sapiens
  misc_RNA (1)...(19): siRNA sense strand
cuacucaagcaucaacaga

SEQ ID NO: 1430384 - RNA, 19 nt, Homo sapiens
  misc_RNA (1)...(19): siRNA sense strand
gcaagaaccuuuccaaugg

SEQ ID NO: 1430385 - RNA, 19 nt, Homo sapiens
  misc_RNA (1)...(19): siRNA sense strand
ccaaugggcuguugaacuu

SEQ ID NO: 1430386 - RNA, 19 nt, Homo sapiens
  misc_RNA (1)...(19): siRNA sense strand
caucuucucugugaauuua

SEQ ID NO: 1430387 - RNA, 19 nt, Homo sapiens
  misc_RNA (1)...(19): siRNA sense strand
ccaaagggaucaggaaauu

SEQ ID NO: 1430388 - RNA, 19 nt, Homo sapiens
  misc_RNA (1)...(19): siRNA sense strand
gaauuuaguucucuuucug

SEQ ID NO: 1430389 - RNA, 19 nt, Homo sapiens
  misc_RNA (1)...(19): siRNA sense strand
gugcaacacugucgaaagu

SEQ ID NO: 1430390 - RNA, 19 nt, Homo sapiens
  misc_RNA (1)...(19): siRNA sense strand
gccagacgcuuucccgauu

SEQ ID NO: 1430391 - RNA, 19 nt, Homo sapiens
  misc_RNA (1)...(19): siRNA sense strand
ggucauggccuaccucuuc

SEQ ID NO: 1430392 - RNA, 19 nt, Homo sapiens
  misc_RNA (1)...(19): siRNA sense strand
gaugugaucucugccuuuc

SEQ ID NO: 1430393 - RNA, 19 nt, Homo sapiens
  misc_RNA (1)...(19): siRNA sense strand
ggaaucaggcacagaaauc

SEQ ID NO: 1430394 - RNA, 19 nt, Homo sapiens
  misc_RNA (1)...(19): siRNA sense strand
ccaguuaccuucaccuucu

SEQ ID NO: 1430395 - RNA, 19 nt, Homo sapiens
  misc_RNA (1)...(19): siRNA sense strand
ugaugcagcucgacuggaa

SEQ ID NO: 1430396 - RNA, 19 nt, Homo sapiens
  misc_RNA (1)...(19): siRNA sense strand
aaagggaucaggaaauuga

SEQ ID NO: 1430397 - RNA, 19 nt, Homo sapiens
  misc_RNA (1)...(19): siRNA sense strand
agacucuccucccucaaua

SEQ ID NO: 1430398 - RNA, 19 nt, Homo sapiens
  misc_RNA (1)...(19): siRNA sense strand
gagcauggccagaauggau

SEQ ID NO: 1430399 - RNA, 19 nt, Homo sapiens
  misc_RNA (1)...(19): siRNA sense strand
ucaacagauucaugaagaa

SEQ ID NO: 1430400 - RNA, 19 nt, Homo sapiens
  misc_RNA (1)...(19): siRNA sense strand
ggagcaauaugggaaaugg

SEQ ID NO: 1430401 - RNA, 19 nt, Homo sapiens
  misc_RNA (1)...(19): siRNA sense strand
acucaagcaucaacagauu

SEQ ID NO: 1430402 - RNA, 19 nt, Homo sapiens
  misc_RNA (1)...(19): siRNA sense strand
guaaagccauccagaacac

SEQ ID NO: 1430403 - RNA, 19 nt, Homo sapiens
  misc_RNA (1)...(19): siRNA sense strand
gagcaagaaccuuuccaau

SEQ ID NO: 1430404 - RNA, 19 nt, Homo sapiens
  misc_RNA (1)...(19): siRNA sense strand
gaaagugucaugcggaaaa

SEQ ID NO: 1430405 - RNA, 19 nt, Homo sapiens
  misc_RNA (1)...(19): siRNA sense strand
gcacccaccugagcagcuu

SEQ ID NO: 1430406 - RNA, 19 nt, Homo sapiens
  misc_RNA (1)...(19): siRNA sense strand
ucagugaucccgagacaga

SEQ ID NO: 1430407 - RNA, 19 nt, Homo sapiens
  misc_RNA (1)...(19): siRNA sense strand
ccuccaggccucaccuuua

SEQ ID NO: 1430408 - RNA, 19 nt, Homo sapiens
  misc_RNA (1)...(19): siRNA sense strand
ucuccucccucaauaguga

SEQ ID NO: 1430409 - RNA, 19 nt, Homo sapiens
  misc_RNA (1)...(19): siRNA sense strand
ggagacuugugacgacauc

SEQ ID NO: 1430410 - RNA, 19 nt, Homo sapiens
  misc_RNA (1)...(19): siRNA sense strand
ccgcgucuuucucgucuuu

SEQ ID NO: 1430411 - RNA, 19 nt, Homo sapiens
  misc_RNA (1)...(19): siRNA sense strand
ggccugagcaagaaccuuu

SEQ ID NO: 1430412 - RNA, 19 nt, Homo sapiens
  misc_RNA (1)...(19): siRNA sense strand
gcacaauaggcaccagaga

SEQ ID NO: 1430413 - RNA, 19 nt, Homo sapiens
  misc_RNA (1)...(19): siRNA sense strand
ggacuccucgugugucaau

SEQ ID NO: 1430414 - RNA, 19 nt, Homo sapiens
  misc_RNA (1)...(19): siRNA sense strand
ucacuuuucuccuguguaa

SEQ ID NO: 1430415 - RNA, 19 nt, Homo sapiens
  misc_RNA (1)...(19): siRNA sense strand
ggaccugucugcgccaucu

SEQ ID NO: 1430416 - RNA, 19 nt, Homo sapiens
  misc_RNA (1)...(19): siRNA sense strand
cgagaacacgugucaagau

SEQ ID NO: 1430417 - RNA, 19 nt, Homo sapiens
  misc_RNA (1)...(19): siRNA sense strand
gccgguaccuugcacuauc

SEQ ID NO: 1430418 - RNA, 19 nt, Homo sapiens
  misc_RNA (1)...(19): siRNA sense strand
guucagugaucccgagaca

SEQ ID NO: 1430419 - RNA, 19 nt, Homo sapiens
  misc_RNA (1)...(19): siRNA sense strand
cuccaggccucaccuuuau

SEQ ID NO: 1430420 - RNA, 19 nt, Homo sapiens
  misc_RNA (1)...(19): siRNA sense strand
aaccucagcuccccaguua

SEQ ID NO: 1430421 - RNA, 19 nt, Homo sapiens
  misc_RNA (1)...(19): siRNA sense strand
uaugggaaaugguccaaag

SEQ ID NO: 1430422 - RNA, 19 nt, Homo sapiens
  misc_RNA (1)...(19): siRNA sense strand
ucuggugacucucuggauu

SEQ ID NO: 1430423 - RNA, 19 nt, Homo sapiens
  misc_RNA (1)...(19): siRNA sense strand
guccacagccagacgcuuu

SEQ ID NO: 1430424 - RNA, 19 nt, Homo sapiens
  misc_RNA (1)...(19): siRNA sense strand
ccagacgcuuucccgauuc

SEQ ID NO: 1430425 - RNA, 19 nt, Homo sapiens
  misc_RNA (1)...(19): siRNA sense strand
aucaacagauucaugaaga

SEQ ID NO: 1430426 - RNA, 19 nt, Homo sapiens
  misc_RNA (1)...(19): siRNA sense strand
gucaacuacucaagcauca

SEQ ID NO: 1430427 - RNA, 19 nt, Homo sapiens
  misc_RNA (1)...(19): siRNA sense strand
ccucauggcccacuacgau

SEQ ID NO: 1430428 - RNA, 19 nt, Homo sapiens
  misc_RNA (1)...(19): siRNA sense strand
caccauccagagcaucuua

SEQ ID NO: 1430429 - RNA, 19 nt, Homo sapiens
  misc_RNA (1)...(19): siRNA sense strand
cagaauggauguggucacu

SEQ ID NO: 1430430 - RNA, 19 nt, Homo sapiens
  misc_RNA (1)...(19): siRNA sense strand
aaacugagucugagaugca

SEQ ID NO: 1430431 - RNA, 19 nt, Homo sapiens
  misc_RNA (1)...(19): siRNA sense strand
gccuaccucuucaccauca

SEQ ID NO: 1430432 - RNA, 19 nt, Homo sapiens
  misc_RNA (1)...(19): siRNA sense strand
guaccuugcacuaucucua

SEQ ID NO: 1430433 - RNA, 19 nt, Homo sapiens
  misc_RNA (1)...(19): siRNA sense strand
cagcuuugccguccucaug

SEQ ID NO: 1430434 - RNA, 19 nt, Homo sapiens
  misc_RNA (1)...(19): siRNA sense strand
gcagggugucuucaucuuc

SEQ ID NO: 1430435 - RNA, 19 nt, Homo sapiens
  misc_RNA (1)...(19): siRNA sense strand
gcgagaacacgugucaaga

SEQ ID NO: 1430436 - RNA, 19 nt, Homo sapiens
  misc_RNA (1)...(19): siRNA sense strand
caaagggaucaggaaauug

SEQ ID NO: 1430437 - RNA, 19 nt, Homo sapiens
  misc_RNA (1)...(19): siRNA sense strand
caucaacgagugugcaaca

SEQ ID NO: 1430438 - RNA, 19 nt, Homo sapiens
  misc_RNA (1)...(19): siRNA sense strand
ugugaucucugccuuucug

SEQ ID NO: 1430439 - RNA, 19 nt, Homo sapiens
  misc_RNA (1)...(19): siRNA sense strand
agcaagaaccuuuccaaug

SEQ ID NO: 1430440 - RNA, 19 nt, Homo sapiens
  misc_RNA (1)...(19): siRNA sense strand
acaauaggcaccagagaca

SEQ ID NO: 1430441 - RNA, 19 nt, Homo sapiens
  misc_RNA (1)...(19): siRNA sense strand
gccaucuucucugugaauu

SEQ ID NO: 1430442 - RNA, 19 nt, Homo sapiens
  misc_RNA (1)...(19): siRNA sense strand
ccagaaaagggauuuauau

SEQ ID NO: 1430443 - RNA, 19 nt, Homo sapiens
  misc_RNA (1)...(19): siRNA sense strand
guggucaacuacucaagca

SEQ ID NO: 1430444 - RNA, 19 nt, Homo sapiens
  misc_RNA (1)...(19): siRNA sense strand
uggauggccuagaggaugu

SEQ ID NO: 1430445 - RNA, 19 nt, Homo sapiens
  misc_RNA (1)...(19): siRNA sense strand
caacagauucaugaagaag

SEQ ID NO: 1430446 - RNA, 19 nt, Homo sapiens
  misc_RNA (1)...(19): siRNA sense strand
ucaagcaucaacagauuca

SEQ ID NO: 1430447 - RNA, 19 nt, Homo sapiens
  misc_RNA (1)...(19): siRNA sense strand
gaaucaggcacagaaaucu

SEQ ID NO: 1430448 - RNA, 19 nt, Homo sapiens
  misc_RNA (1)...(19): siRNA sense strand
ggaggugcagaagcaagua

SEQ ID NO: 1430449 - RNA, 19 nt, Homo sapiens
  misc_RNA (1)...(19): siRNA sense strand
gcagguccgggagcaauau

SEQ ID NO: 1430450 - RNA, 19 nt, Homo sapiens
  misc_RNA (1)...(19): siRNA sense strand
agucugagaugcacacacu

SEQ ID NO: 1430451 - RNA, 19 nt, Homo sapiens
  misc_RNA (1)...(19): siRNA sense strand
gguccaaagggaucaggaa

SEQ ID NO: 1430452 - RNA, 19 nt, Homo sapiens
  misc_RNA (1)...(19): siRNA sense strand
agaaggugcucugugucuu

SEQ ID NO: 1430453 - RNA, 19 nt, Homo sapiens
  misc_RNA (1)...(19): siRNA sense strand
guccaaagggaucaggaaa

SEQ ID NO: 1430454 - RNA, 19 nt, Homo sapiens
  misc_RNA (1)...(19): siRNA sense strand
gugacucucuggauuuuga

SEQ ID NO: 1430455 - RNA, 19 nt, Homo sapiens
  misc_RNA (1)...(19): siRNA sense strand
caacuacucaagcaucaac

SEQ ID NO: 1430456 - RNA, 19 nt, Homo sapiens
  misc_RNA (1)...(19): siRNA sense strand
ggaccugggcagagacuac

SEQ ID NO: 1430457 - RNA, 19 nt, Homo sapiens
  misc_RNA (1)...(19): siRNA sense strand
uggccuaccucuucaccau

SEQ ID NO: 1430458 - RNA, 19 nt, Homo sapiens
  misc_RNA (1)...(19): siRNA sense strand
gucauggccuaccucuuca

SEQ ID NO: 1430459 - RNA, 19 nt, Homo sapiens
  misc_RNA (1)...(19): siRNA sense strand
ucucgucuuucucgcauuc

SEQ ID NO: 1430460 - RNA, 19 nt, Homo sapiens
  misc_RNA (1)...(19): siRNA sense strand
caucaacagauucaugaag

SEQ ID NO: 1430461 - RNA, 19 nt, Homo sapiens
  misc_RNA (1)...(19): siRNA sense strand
gcaucaacagauucaugaa

SEQ ID NO: 1430462 - RNA, 19 nt, Homo sapiens
  misc_RNA (1)...(19): siRNA sense strand
ucaagaaugagagcgagaa

SEQ ID NO: 1430463 - RNA, 19 nt, Homo sapiens
  misc_RNA (1)...(19): siRNA sense strand
cagacucuccucccucaau

SEQ ID NO: 1430464 - RNA, 19 nt, Homo sapiens
  misc_RNA (1)...(19): siRNA sense strand
aaggugcugugcuccauca

SEQ ID NO: 1430465 - RNA, 19 nt, Homo sapiens
  misc_RNA (1)...(19): siRNA sense strand
cacaggcugcagcacaaua

SEQ ID NO: 1430466 - RNA, 19 nt, Homo sapiens
  misc_RNA (1)...(19): siRNA sense strand
gcaacaacgacacccaaaa

SEQ ID NO: 1430467 - RNA, 19 nt, Homo sapiens
  misc_RNA (1)...(19): siRNA sense strand
gaaaacugagucugagaug

SEQ ID NO: 1430468 - RNA, 19 nt, Homo sapiens
  misc_RNA (1)...(19): siRNA sense strand
cuacucaagcaucaacaga

SEQ ID NO: 1430469 - RNA, 19 nt, Homo sapiens
  misc_RNA (1)...(19): siRNA sense strand
gcaagaaccuuuccaaugg

SEQ ID NO: 1430470 - RNA, 19 nt, Homo sapiens
  misc_RNA (1)...(19): siRNA sense strand
ccaaugggcuguugaacuu

SEQ ID NO: 1430471 - RNA, 19 nt, Homo sapiens
  misc_RNA (1)...(19): siRNA sense strand
caucuucucugugaauuua

SEQ ID NO: 1430472 - RNA, 19 nt, Homo sapiens
  misc_RNA (1)...(19): siRNA sense strand
ccaaagggaucaggaaauu

SEQ ID NO: 1430473 - RNA, 19 nt, Homo sapiens
  misc_RNA (1)...(19): siRNA sense strand
gaauuuaguucucuuucug

SEQ ID NO: 1430474 - RNA, 19 nt, Homo sapiens
  misc_RNA (1)...(19): siRNA sense strand
gugcaacacugucgaaagu

SEQ ID NO: 1430475 - RNA, 19 nt, Homo sapiens
  misc_RNA (1)...(19): siRNA sense strand
gccagacgcuuucccgauu

SEQ ID NO: 1430476 - RNA, 19 nt, Homo sapiens
  misc_RNA (1)...(19): siRNA sense strand
ggucauggccuaccucuuc

SEQ ID NO: 1430477 - RNA, 19 nt, Homo sapiens
  misc_RNA (1)...(19): siRNA sense strand
gaugugaucucugccuuuc

SEQ ID NO: 1430478 - RNA, 19 nt, Homo sapiens
  misc_RNA (1)...(19): siRNA sense strand
ggaaucaggcacagaaauc

SEQ ID NO: 1430479 - RNA, 19 nt, Homo sapiens
  misc_RNA (1)...(19): siRNA sense strand
ccaguuaccuucaccuucu

SEQ ID NO: 1430480 - RNA, 19 nt, Homo sapiens
  misc_RNA (1)...(19): siRNA sense strand
ugaugcagcucgacuggaa

SEQ ID NO: 1430481 - RNA, 19 nt, Homo sapiens
  misc_RNA (1)...(19): siRNA sense strand
aaagggaucaggaaauuga

SEQ ID NO: 1430482 - RNA, 19 nt, Homo sapiens
  misc_RNA (1)...(19): siRNA sense strand
agacucuccucccucaaua

SEQ ID NO: 1430483 - RNA, 19 nt, Homo sapiens
  misc_RNA (1)...(19): siRNA sense strand
gagcauggccagaauggau

SEQ ID NO: 1430484 - RNA, 19 nt, Homo sapiens
  misc_RNA (1)...(19): siRNA sense strand
ucaacagauucaugaagaa

SEQ ID NO: 1430485 - RNA, 19 nt, Homo sapiens
  misc_RNA (1)...(19): siRNA sense strand
ggagcaauaugggaaaugg

SEQ ID NO: 1430486 - RNA, 19 nt, Homo sapiens
  misc_RNA (1)...(19): siRNA sense strand
acucaagcaucaacagauu

SEQ ID NO: 1430487 - RNA, 19 nt, Homo sapiens
  misc_RNA (1)...(19): siRNA sense strand
guaaagccauccagaacac

SEQ ID NO: 1430488 - RNA, 19 nt, Homo sapiens
  misc_RNA (1)...(19): siRNA sense strand
gagcaagaaccuuuccaau

SEQ ID NO: 1430489 - RNA, 19 nt, Homo sapiens
  misc_RNA (1)...(19): siRNA sense strand
gaaagugucaugcggaaaa

SEQ ID NO: 1430490 - RNA, 19 nt, Homo sapiens
  misc_RNA (1)...(19): siRNA sense strand
gcacccaccugagcagcuu

SEQ ID NO: 1430491 - RNA, 19 nt, Homo sapiens
  misc_RNA (1)...(19): siRNA sense strand
ucagugaucccgagacaga

SEQ ID NO: 1430492 - RNA, 19 nt, Homo sapiens
  misc_RNA (1)...(19): siRNA sense strand
ccuccaggccucaccuuua

SEQ ID NO: 1430493 - RNA, 19 nt, Homo sapiens
  misc_RNA (1)...(19): siRNA sense strand
ucuccucccucaauaguga

SEQ ID NO: 1430494 - RNA, 19 nt, Homo sapiens
  misc_RNA (1)...(19): siRNA sense strand
ggagacuugugacgacauc

SEQ ID NO: 1430495 - RNA, 19 nt, Homo sapiens
  misc_RNA (1)...(19): siRNA sense strand
ccgcgucuuucucgucuuu

SEQ ID NO: 1430496 - RNA, 19 nt, Homo sapiens
  misc_RNA (1)...(19): siRNA sense strand
ggccugagcaagaaccuuu

SEQ ID NO: 1430497 - RNA, 19 nt, Homo sapiens
  misc_RNA (1)...(19): siRNA sense strand
gcacaauaggcaccagaga

SEQ ID NO: 1430498 - RNA, 19 nt, Homo sapiens
  misc_RNA (1)...(19): siRNA sense strand
ggacuccucgugugucaau

SEQ ID NO: 1430499 - RNA, 19 nt, Homo sapiens
  misc_RNA (1)...(19): siRNA sense strand
ucacuuuucuccuguguaa

SEQ ID NO: 1430500 - RNA, 19 nt, Homo sapiens
  misc_RNA (1)...(19): siRNA sense strand
ggaccugucugcgccaucu

SEQ ID NO: 1430501 - RNA, 19 nt, Homo sapiens
  misc_RNA (1)...(19): siRNA sense strand
cgagaacacgugucaagau

SEQ ID NO: 1430502 - RNA, 19 nt, Homo sapiens
  misc_RNA (1)...(19): siRNA sense strand
gccgguaccuugcacuauc

SEQ ID NO: 1430503 - RNA, 19 nt, Homo sapiens
  misc_RNA (1)...(19): siRNA sense strand
guucagugaucccgagaca

SEQ ID NO: 1430504 - RNA, 19 nt, Homo sapiens
  misc_RNA (1)...(19): siRNA sense strand
cuccaggccucaccuuuau

SEQ ID NO: 1430505 - RNA, 19 nt, Homo sapiens
  misc_RNA (1)...(19): siRNA sense strand
aaccucagcuccccaguua

SEQ ID NO: 1430506 - RNA, 19 nt, Homo sapiens
  misc_RNA (1)...(19): siRNA sense strand
uaugggaaaugguccaaag

SEQ ID NO: 1430507 - RNA, 19 nt, Homo sapiens
  misc_RNA (1)...(19): siRNA sense strand
ucuggugacucucuggauu

SEQ ID NO: 1430508 - RNA, 19 nt, Homo sapiens
  misc_RNA (1)...(19): siRNA sense strand
guccacagccagacgcuuu

SEQ ID NO: 1430509 - RNA, 19 nt, Homo sapiens
  misc_RNA (1)...(19): siRNA sense strand
ccagacgcuuucccgauuc

SEQ ID NO: 1430510 - RNA, 19 nt, Homo sapiens
  misc_RNA (1)...(19): siRNA sense strand
aucaacagauucaugaaga

SEQ ID NO: 1430511 - RNA, 19 nt, Homo sapiens
  misc_RNA (1)...(19): siRNA sense strand
gucaacuacucaagcauca

SEQ ID NO: 1430512 - RNA, 19 nt, Homo sapiens
  misc_RNA (1)...(19): siRNA sense strand
ccucauggcccacuacgau

SEQ ID NO: 1430513 - RNA, 19 nt, Homo sapiens
  misc_RNA (1)...(19): siRNA sense strand
caccauccagagcaucuua

SEQ ID NO: 1430514 - RNA, 19 nt, Homo sapiens
  misc_RNA (1)...(19): siRNA sense strand
cagaauggauguggucacu

SEQ ID NO: 1430515 - RNA, 19 nt, Homo sapiens
  misc_RNA (1)...(19): siRNA sense strand
aaacugagucugagaugca

SEQ ID NO: 1430516 - RNA, 19 nt, Homo sapiens
  misc_RNA (1)...(19): siRNA sense strand
gccuaccucuucaccauca

SEQ ID NO: 1430517 - RNA, 19 nt, Homo sapiens
  misc_RNA (1)...(19): siRNA sense strand
guaccuugcacuaucucua

SEQ ID NO: 1430518 - RNA, 19 nt, Homo sapiens
  misc_RNA (1)...(19): siRNA sense strand
cagcuuugccguccucaug

SEQ ID NO: 1430519 - RNA, 19 nt, Homo sapiens
  misc_RNA (1)...(19): siRNA sense strand
gcagggugucuucaucuuc

SEQ ID NO: 1430520 - RNA, 19 nt, Homo sapiens
  misc_RNA (1)...(19): siRNA sense strand
gcgagaacacgugucaaga

SEQ ID NO: 1430521 - RNA, 19 nt, Homo sapiens
  misc_RNA (1)...(19): siRNA sense strand
caaagggaucaggaaauug

SEQ ID NO: 1430522 - RNA, 19 nt, Homo sapiens
  misc_RNA (1)...(19): siRNA sense strand
caucaacgagugugcaaca

SEQ ID NO: 1430523 - RNA, 19 nt, Homo sapiens
  misc_RNA (1)...(19): siRNA sense strand
ugugaucucugccuuucug

SEQ ID NO: 1430524 - RNA, 19 nt, Homo sapiens
  misc_RNA (1)...(19): siRNA sense strand
agcaagaaccuuuccaaug

SEQ ID NO: 1430525 - RNA, 19 nt, Homo sapiens
  misc_RNA (1)...(19): siRNA sense strand
acaauaggcaccagagaca

SEQ ID NO: 1430526 - RNA, 19 nt, Homo sapiens
  misc_RNA (1)...(19): siRNA sense strand
gccaucuucucugugaauu

SEQ ID NO: 1430527 - RNA, 19 nt, Homo sapiens
  misc_RNA (1)...(19): siRNA sense strand
ccagaaaagggauuuauau

SEQ ID NO: 1430528 - RNA, 19 nt, Homo sapiens
  misc_RNA (1)...(19): siRNA sense strand
guggucaacuacucaagca

SEQ ID NO: 1430529 - RNA, 19 nt, Homo sapiens
  misc_RNA (1)...(19): siRNA sense strand
uggauggccuagaggaugu

SEQ ID NO: 1430530 - RNA, 19 nt, Homo sapiens
  misc_RNA (1)...(19): siRNA sense strand
caacagauucaugaagaag

SEQ ID NO: 1430531 - RNA, 19 nt, Homo sapiens
  misc_RNA (1)...(19): siRNA sense strand
ucaagcaucaacagauuca

SEQ ID NO: 1430532 - RNA, 19 nt, Homo sapiens
  misc_RNA (1)...(19): siRNA sense strand
gaaucaggcacagaaaucu

SEQ ID NO: 1430533 - RNA, 19 nt, Homo sapiens
  misc_RNA (1)...(19): siRNA sense strand
ggaggugcagaagcaagua

SEQ ID NO: 1430534 - RNA, 19 nt, Homo sapiens
  misc_RNA (1)...(19): siRNA sense strand
gcagguccgggagcaauau

SEQ ID NO: 1430535 - RNA, 19 nt, Homo sapiens
  misc_RNA (1)...(19): siRNA sense strand
agucugagaugcacacacu

SEQ ID NO: 1430536 - RNA, 19 nt, Homo sapiens
  misc_RNA (1)...(19): siRNA sense strand
gguccaaagggaucaggaa

SEQ ID NO: 1430537 - RNA, 19 nt, Homo sapiens
  misc_RNA (1)...(19): siRNA sense strand
agaaggugcucugugucuu

SEQ ID NO: 1430538 - RNA, 19 nt, Homo sapiens
  misc_RNA (1)...(19): siRNA sense strand
guccaaagggaucaggaaa

SEQ ID NO: 1430539 - RNA, 19 nt, Homo sapiens
  misc_RNA (1)...(19): siRNA sense strand
gugacucucuggauuuuga

SEQ ID NO: 1430540 - RNA, 19 nt, Homo sapiens
  misc_RNA (1)...(19): siRNA sense strand
caacuacucaagcaucaac

SEQ ID NO: 1430541 - RNA, 19 nt, Homo sapiens
  misc_RNA (1)...(19): siRNA sense strand
ggaccugggcagagacuac

SEQ ID NO: 1430542 - RNA, 19 nt, Homo sapiens
  misc_RNA (1)...(19): siRNA sense strand
uggccuaccucuucaccau

SEQ ID NO: 1430543 - RNA, 19 nt, Homo sapiens
  misc_RNA (1)...(19): siRNA sense strand
gucauggccuaccucuuca

SEQ ID NO: 1430544 - RNA, 19 nt, Homo sapiens
  misc_RNA (1)...(19): siRNA sense strand
ucucgucuuucucgcauuc

SEQ ID NO: 1430545 - RNA, 19 nt, Homo sapiens
  misc_RNA (1)...(19): siRNA sense strand
caucaacagauucaugaag

SEQ ID NO: 1430546 - RNA, 19 nt, Homo sapiens
  misc_RNA (1)...(19): siRNA sense strand
gcaucaacagauucaugaa

SEQ ID NO: 1430547 - RNA, 19 nt, Homo sapiens
  misc_RNA (1)...(19): siRNA sense strand
ucaagaaugagagcgagaa

SEQ ID NO: 1430548 - RNA, 19 nt, Homo sapiens
  misc_RNA (1)...(19): siRNA sense strand
cagacucuccucccucaau

SEQ ID NO: 1430549 - RNA, 19 nt, Homo sapiens
  misc_RNA (1)...(19): siRNA sense strand
aaggugcugugcuccauca

SEQ ID NO: 1430550 - RNA, 19 nt, Homo sapiens
  misc_RNA (1)...(19): siRNA sense strand
cacaggcugcagcacaaua

SEQ ID NO: 1430551 - RNA, 19 nt, Homo sapiens
  misc_RNA (1)...(19): siRNA sense strand
gcaacaacgacacccaaaa

SEQ ID NO: 1430552 - RNA, 19 nt, Homo sapiens
  misc_RNA (1)...(19): siRNA sense strand
gaaaacugagucugagaug

SEQ ID NO: 1430553 - RNA, 19 nt, Homo sapiens
  misc_RNA (1)...(19): siRNA sense strand
cuacucaagcaucaacaga

SEQ ID NO: 1430554 - RNA, 19 nt, Homo sapiens
  misc_RNA (1)...(19): siRNA sense strand
ggaauacuaugaggaagaa

SEQ ID NO: 1430555 - RNA, 19 nt, Homo sapiens
  misc_RNA (1)...(19): siRNA sense strand
gagagaacgucauguuugu

SEQ ID NO: 1430556 - RNA, 19 nt, Homo sapiens
  misc_RNA (1)...(19): siRNA sense strand
gaaggaauacuaugaggaa

SEQ ID NO: 1430557 - RNA, 19 nt, Homo sapiens
  misc_RNA (1)...(19): siRNA sense strand
caggaaaccuucaugcaau

SEQ ID NO: 1430558 - RNA, 19 nt, Homo sapiens
  misc_RNA (1)...(19): siRNA sense strand
gagaugauaucaccauggu

SEQ ID NO: 1430559 - RNA, 19 nt, Homo sapiens
  misc_RNA (1)...(19): siRNA sense strand
gaaagucuucuaaccauuc

SEQ ID NO: 1430560 - RNA, 19 nt, Homo sapiens
  misc_RNA (1)...(19): siRNA sense strand
guaacauugugugcaaaua

SEQ ID NO: 1430561 - RNA, 19 nt, Homo sapiens
  misc_RNA (1)...(19): siRNA sense strand
auaacucccugaaggaaua

SEQ ID NO: 1430562 - RNA, 19 nt, Homo sapiens
  misc_RNA (1)...(19): siRNA sense strand
gcacugagggcccaggaaa

SEQ ID NO: 1430563 - RNA, 19 nt, Homo sapiens
  misc_RNA (1)...(19): siRNA sense strand
ggaaguuucacggcuauaa

SEQ ID NO: 1430564 - RNA, 19 nt, Homo sapiens
  misc_RNA (1)...(19): siRNA sense strand
gaaacgagagaacgucaug

SEQ ID NO: 1430565 - RNA, 19 nt, Homo sapiens
  misc_RNA (1)...(19): siRNA sense strand
caccggaaguucaucacua

SEQ ID NO: 1430566 - RNA, 19 nt, Homo sapiens
  misc_RNA (1)...(19): siRNA sense strand
ugacauggauggauaagcu

SEQ ID NO: 1430567 - RNA, 19 nt, Homo sapiens
  misc_RNA (1)...(19): siRNA sense strand
cgagagaacgucauguuug

SEQ ID NO: 1430568 - RNA, 19 nt, Homo sapiens
  misc_RNA (1)...(19): siRNA sense strand
gaggaaguuucacggcuau

SEQ ID NO: 1430569 - RNA, 19 nt, Homo sapiens
  misc_RNA (1)...(19): siRNA sense strand
ggaaguucaucacuauguc

SEQ ID NO: 1430570 - RNA, 19 nt, Homo sapiens
  misc_RNA (1)...(19): siRNA sense strand
ggaguacgccaacgccauu

SEQ ID NO: 1430571 - RNA, 19 nt, Homo sapiens
  misc_RNA (1)...(19): siRNA sense strand
cagccugggugguaacauu

SEQ ID NO: 1430572 - RNA, 19 nt, Homo sapiens
  misc_RNA (1)...(19): siRNA sense strand
gcacuguguuggagaugau

SEQ ID NO: 1430573 - RNA, 19 nt, Homo sapiens
  misc_RNA (1)...(19): siRNA sense strand
ugaggucgccacauccuua

SEQ ID NO: 1430574 - RNA, 19 nt, Homo sapiens
  misc_RNA (1)...(19): siRNA sense strand
ccacgcauguucaccuaug

SEQ ID NO: 1430575 - RNA, 19 nt, Homo sapiens
  misc_RNA (1)...(19): siRNA sense strand
ggucaucugcccuggaauu

SEQ ID NO: 1430576 - RNA, 19 nt, Homo sapiens
  misc_RNA (1)...(19): siRNA sense strand
ugaaagucuucuaaccauu

SEQ ID NO: 1430577 - RNA, 19 nt, Homo sapiens
  misc_RNA (1)...(19): siRNA sense strand
ggauuuauguuccucucau

SEQ ID NO: 1430578 - RNA, 19 nt, Homo sapiens
  misc_RNA (1)...(19): siRNA sense strand
ccaggaaaccuucaugcaa

SEQ ID NO: 1430579 - RNA, 19 nt, Homo sapiens
  misc_RNA (1)...(19): siRNA sense strand
uggagaccauguuaagaaa

SEQ ID NO: 1430580 - RNA, 19 nt, Homo sapiens
  misc_RNA (1)...(19): siRNA sense strand
gugcaugaaagucuucuaa

SEQ ID NO: 1430581 - RNA, 19 nt, Homo sapiens
  misc_RNA (1)...(19): siRNA sense strand
gugguaacauugugugcaa

SEQ ID NO: 1430582 - RNA, 19 nt, Homo sapiens
  misc_RNA (1)...(19): siRNA sense strand
gcugacaacaugaagaaga

SEQ ID NO: 1430583 - RNA, 19 nt, Homo sapiens
  misc_RNA (1)...(19): siRNA sense strand
gcaugaaagucuucuaacc

SEQ ID NO: 1430584 - RNA, 19 nt, Homo sapiens
  misc_RNA (1)...(19): siRNA sense strand
ugaugcagauugaugacaa

SEQ ID NO: 1430585 - RNA, 19 nt, Homo sapiens
  misc_RNA (1)...(19): siRNA sense strand
ugaacuacaucaagaagac

SEQ ID NO: 1430586 - RNA, 19 nt, Homo sapiens
  misc_RNA (1)...(19): siRNA sense strand
acaaugugaugaggaaguu

SEQ ID NO: 1430587 - RNA, 19 nt, Homo sapiens
  misc_RNA (1)...(19): siRNA sense strand
gcccuuggcugagcacugu

SEQ ID NO: 1430588 - RNA, 19 nt, Homo sapiens
  misc_RNA (1)...(19): siRNA sense strand
aaugggagcguaacaaguu

SEQ ID NO: 1430589 - RNA, 19 nt, Homo sapiens
  misc_RNA (1)...(19): siRNA sense strand
gauuuauguuccucucaug

SEQ ID NO: 1430590 - RNA, 19 nt, Homo sapiens
  misc_RNA (1)...(19): siRNA sense strand
gagccauggugaacuacau

SEQ ID NO: 1430591 - RNA, 19 nt, Homo sapiens
  misc_RNA (1)...(19): siRNA sense strand
gcucaaguccuguccucuu

SEQ ID NO: 1430592 - RNA, 19 nt, Homo sapiens
  misc_RNA (1)...(19): siRNA sense strand
cgaacucccagccguguuu

SEQ ID NO: 1430593 - RNA, 19 nt, Homo sapiens
  misc_RNA (1)...(19): siRNA sense strand
gcuauaacucccugaagga

SEQ ID NO: 1430594 - RNA, 19 nt, Homo sapiens
  misc_RNA (1)...(19): siRNA sense strand
gcaauacauccgcacuuuc

SEQ ID NO: 1430595 - RNA, 19 nt, Homo sapiens
  misc_RNA (1)...(19): siRNA sense strand
agcaauacauccgcacuuu

SEQ ID NO: 1430596 - RNA, 19 nt, Homo sapiens
  misc_RNA (1)...(19): siRNA sense strand
guuccucucaugcugguua

SEQ ID NO: 1430597 - RNA, 19 nt, Homo sapiens
  misc_RNA (1)...(19): siRNA sense strand
uggagccacuucuacauuc

SEQ ID NO: 1430598 - RNA, 19 nt, Homo sapiens
  misc_RNA (1)...(19): siRNA sense strand
ugagggcucugugcuguuc

SEQ ID NO: 1430599 - RNA, 19 nt, Homo sapiens
  misc_RNA (1)...(19): siRNA sense strand
caccugaccucuacuucca

SEQ ID NO: 1430600 - RNA, 19 nt, Homo sapiens
  misc_RNA (1)...(19): siRNA sense strand
uaacauugugugcaaauac

SEQ ID NO: 1430601 - RNA, 19 nt, Homo sapiens
  misc_RNA (1)...(19): siRNA sense strand
uuggagccauggugaacua

SEQ ID NO: 1430602 - RNA, 19 nt, Homo sapiens
  misc_RNA (1)...(19): siRNA sense strand
auaagcuggugguggagua

SEQ ID NO: 1430603 - RNA, 19 nt, Homo sapiens
  misc_RNA (1)...(19): siRNA sense strand
caaguccuguccucuucug

SEQ ID NO: 1430604 - RNA, 19 nt, Homo sapiens
  misc_RNA (1)...(19): siRNA sense strand
cugacaacaugaagaagau

SEQ ID NO: 1430605 - RNA, 19 nt, Homo sapiens
  misc_RNA (1)...(19): siRNA sense strand
gagaccauguuaagaaacc

SEQ ID NO: 1430606 - RNA, 19 nt, Homo sapiens
  misc_RNA (1)...(19): siRNA sense strand
gugaucguccgguguuuga

SEQ ID NO: 1430607 - RNA, 19 nt, Homo sapiens
  misc_RNA (1)...(19): siRNA sense strand
caugaaagucuucuaacca

SEQ ID NO: 1430608 - RNA, 19 nt, Homo sapiens
  misc_RNA (1)...(19): siRNA sense strand
gaaguucaucacuaugucu

SEQ ID NO: 1430609 - RNA, 19 nt, Homo sapiens
  misc_RNA (1)...(19): siRNA sense strand
aggaaaccuucaugcaaug

SEQ ID NO: 1430610 - RNA, 19 nt, Homo sapiens
  misc_RNA (1)...(19): siRNA sense strand
gguaacauugugugcaaau

SEQ ID NO: 1430611 - RNA, 19 nt, Homo sapiens
  misc_RNA (1)...(19): siRNA sense strand
caauacauccgcacuuucg

SEQ ID NO: 1430612 - RNA, 19 nt, Homo sapiens
  misc_RNA (1)...(19): siRNA sense strand
guucuacaacuuccucaug

SEQ ID NO: 1430613 - RNA, 19 nt, Homo sapiens
  misc_RNA (1)...(19): siRNA sense strand
ccacuugggcuucuuugag

SEQ ID NO: 1430614 - RNA, 19 nt, Homo sapiens
  misc_RNA (1)...(19): siRNA sense strand
uuggagaccauguuaagaa

SEQ ID NO: 1430615 - RNA, 19 nt, Homo sapiens
  misc_RNA (1)...(19): siRNA sense strand
gacaacaugaagaagauca

SEQ ID NO: 1430616 - RNA, 19 nt, Homo sapiens
  misc_RNA (1)...(19): siRNA sense strand
gauggagccacuucuacau

SEQ ID NO: 1430617 - RNA, 19 nt, Homo sapiens
  misc_RNA (1)...(19): siRNA sense strand
ccaaugggagcguaacaag

SEQ ID NO: 1430618 - RNA, 19 nt, Homo sapiens
  misc_RNA (1)...(19): siRNA sense strand
augaaagucuucuaaccau

SEQ ID NO: 1430619 - RNA, 19 nt, Homo sapiens
  misc_RNA (1)...(19): siRNA sense strand
gaaguuucacggcuauaac

SEQ ID NO: 1430620 - RNA, 19 nt, Homo sapiens
  misc_RNA (1)...(19): siRNA sense strand
gaacuacaucaagaagaca

SEQ ID NO: 1430621 - RNA, 19 nt, Homo sapiens
  misc_RNA (1)...(19): siRNA sense strand
cgccacgcauguucaccua

SEQ ID NO: 1430622 - RNA, 19 nt, Homo sapiens
  misc_RNA (1)...(19): siRNA sense strand
gacaaugugaugaggaagu

SEQ ID NO: 1430623 - RNA, 19 nt, Homo sapiens
  misc_RNA (1)...(19): siRNA sense strand
agacucaggcaaaccaaga

SEQ ID NO: 1430624 - RNA, 19 nt, Homo sapiens
  misc_RNA (1)...(19): siRNA sense strand
gcuucagccugggugguaa

SEQ ID NO: 1430625 - RNA, 19 nt, Homo sapiens
  misc_RNA (1)...(19): siRNA sense strand
auggugaacuacaucaaga

SEQ ID NO: 1430626 - RNA, 19 nt, Homo sapiens
  misc_RNA (1)...(19): siRNA sense strand
accggaaguucaucacuau

SEQ ID NO: 1430627 - RNA, 19 nt, Homo sapiens
  misc_RNA (1)...(19): siRNA sense strand
guuggugcaugaaagucuu

SEQ ID NO: 1430628 - RNA, 19 nt, Homo sapiens
  misc_RNA (1)...(19): siRNA sense strand
uggcugacaacaugaagaa

SEQ ID NO: 1430629 - RNA, 19 nt, Homo sapiens
  misc_RNA (1)...(19): siRNA sense strand
ggggaaaaguggacacauc

SEQ ID NO: 1430630 - RNA, 19 nt, Homo sapiens
  misc_RNA (1)...(19): siRNA sense strand
cggaaguucaucacuaugu

SEQ ID NO: 1430631 - RNA, 19 nt, Homo sapiens
  misc_RNA (1)...(19): siRNA sense strand
ggagccacuucuacauucg

SEQ ID NO: 1430632 - RNA, 19 nt, Homo sapiens
  misc_RNA (1)...(19): siRNA sense strand
acgagagaacgucauguuu

SEQ ID NO: 1430633 - RNA, 19 nt, Homo sapiens
  misc_RNA (1)...(19): siRNA sense strand
cauccagacagccuuguau

SEQ ID NO: 1430634 - RNA, 19 nt, Homo sapiens
  misc_RNA (1)...(19): siRNA sense strand
gaacucccagccguguuug

SEQ ID NO: 1430635 - RNA, 19 nt, Homo sapiens
  misc_RNA (1)...(19): siRNA sense strand
ccuguccucuucugaccaa

SEQ ID NO: 1430636 - RNA, 19 nt, Homo sapiens
  misc_RNA (1)...(19): siRNA sense strand
ugagcacuguguuggagau

SEQ ID NO: 1430637 - RNA, 19 nt, Homo sapiens
  misc_RNA (1)...(19): siRNA sense strand
cucaaguccuguccucuuc

SEQ ID NO: 1430638 - RNA, 19 nt, Homo sapiens
  misc_RNA (1)...(19): siRNA sense strand
augacaaugugaugaggaa

SEQ ID NO: 1430639 - RNA, 19 nt, Homo sapiens
  misc_RNA (1)...(19): siRNA sense strand
gauaucaccauggucaucu

SEQ ID NO: 1430640 - RNA, 19 nt, Homo sapiens
  misc_RNA (1)...(19): siRNA sense strand
agggugaggucgccacauc

SEQ ID NO: 1430641 - RNA, 19 nt, Homo sapiens
  misc_RNA (1)...(19): siRNA sense strand
acgauccguuggugcauga

SEQ ID NO: 1430642 - RNA, 19 nt, Homo sapiens
  misc_RNA (1)...(19): siRNA sense strand
cauccgcacuuucguugac

SEQ ID NO: 1430643 - RNA, 19 nt, Homo sapiens
  misc_RNA (1)...(19): siRNA sense strand
ggaauacuaugaggaagaa

SEQ ID NO: 1430644 - RNA, 19 nt, Homo sapiens
  misc_RNA (1)...(19): siRNA sense strand
gagagaacgucauguuugu

SEQ ID NO: 1430645 - RNA, 19 nt, Homo sapiens
  misc_RNA (1)...(19): siRNA sense strand
gaaggaauacuaugaggaa

SEQ ID NO: 1430646 - RNA, 19 nt, Homo sapiens
  misc_RNA (1)...(19): siRNA sense strand
caggaaaccuucaugcaau

SEQ ID NO: 1430647 - RNA, 19 nt, Homo sapiens
  misc_RNA (1)...(19): siRNA sense strand
gagaugauaucaccauggu

SEQ ID NO: 1430648 - RNA, 19 nt, Homo sapiens
  misc_RNA (1)...(19): siRNA sense strand
gaaagucuucuaaccauuc

SEQ ID NO: 1430649 - RNA, 19 nt, Homo sapiens
  misc_RNA (1)...(19): siRNA sense strand
guaacauugugugcaaaua

SEQ ID NO: 1430650 - RNA, 19 nt, Homo sapiens
  misc_RNA (1)...(19): siRNA sense strand
auaacucccugaaggaaua

SEQ ID NO: 1430651 - RNA, 19 nt, Homo sapiens
  misc_RNA (1)...(19): siRNA sense strand
gcacugagggcccaggaaa

SEQ ID NO: 1430652 - RNA, 19 nt, Homo sapiens
  misc_RNA (1)...(19): siRNA sense strand
ggaaguuucacggcuauaa

SEQ ID NO: 1430653 - RNA, 19 nt, Homo sapiens
  misc_RNA (1)...(19): siRNA sense strand
gaaacgagagaacgucaug

SEQ ID NO: 1430654 - RNA, 19 nt, Homo sapiens
  misc_RNA (1)...(19): siRNA sense strand
caccggaaguucaucacua

SEQ ID NO: 1430655 - RNA, 19 nt, Homo sapiens
  misc_RNA (1)...(19): siRNA sense strand
ugacauggauggauaagcu

SEQ ID NO: 1430656 - RNA, 19 nt, Homo sapiens
  misc_RNA (1)...(19): siRNA sense strand
cgagagaacgucauguuug

SEQ ID NO: 1430657 - RNA, 19 nt, Homo sapiens
  misc_RNA (1)...(19): siRNA sense strand
gaggaaguuucacggcuau

SEQ ID NO: 1430658 - RNA, 19 nt, Homo sapiens
  misc_RNA (1)...(19): siRNA sense strand
ggaaguucaucacuauguc

SEQ ID NO: 1430659 - RNA, 19 nt, Homo sapiens
  misc_RNA (1)...(19): siRNA sense strand
ggaguacgccaacgccauu

SEQ ID NO: 1430660 - RNA, 19 nt, Homo sapiens
  misc_RNA (1)...(19): siRNA sense strand
cagccugggugguaacauu

SEQ ID NO: 1430661 - RNA, 19 nt, Homo sapiens
  misc_RNA (1)...(19): siRNA sense strand
gcacuguguuggagaugau

SEQ ID NO: 1430662 - RNA, 19 nt, Homo sapiens
  misc_RNA (1)...(19): siRNA sense strand
ugaggucgccacauccuua

SEQ ID NO: 1430663 - RNA, 19 nt, Homo sapiens
  misc_RNA (1)...(19): siRNA sense strand
ccacgcauguucaccuaug

SEQ ID NO: 1430664 - RNA, 19 nt, Homo sapiens
  misc_RNA (1)...(19): siRNA sense strand
ggucaucugcccuggaauu

SEQ ID NO: 1430665 - RNA, 19 nt, Homo sapiens
  misc_RNA (1)...(19): siRNA sense strand
ugaaagucuucuaaccauu

SEQ ID NO: 1430666 - RNA, 19 nt, Homo sapiens
  misc_RNA (1)...(19): siRNA sense strand
ggauuuauguuccucucau

SEQ ID NO: 1430667 - RNA, 19 nt, Homo sapiens
  misc_RNA (1)...(19): siRNA sense strand
ccaggaaaccuucaugcaa

SEQ ID NO: 1430668 - RNA, 19 nt, Homo sapiens
  misc_RNA (1)...(19): siRNA sense strand
uggagaccauguuaagaaa

SEQ ID NO: 1430669 - RNA, 19 nt, Homo sapiens
  misc_RNA (1)...(19): siRNA sense strand
gugcaugaaagucuucuaa

SEQ ID NO: 1430670 - RNA, 19 nt, Homo sapiens
  misc_RNA (1)...(19): siRNA sense strand
gugguaacauugugugcaa

SEQ ID NO: 1430671 - RNA, 19 nt, Homo sapiens
  misc_RNA (1)...(19): siRNA sense strand
gcugacaacaugaagaaga

SEQ ID NO: 1430672 - RNA, 19 nt, Homo sapiens
  misc_RNA (1)...(19): siRNA sense strand
gcaugaaagucuucuaacc

SEQ ID NO: 1430673 - RNA, 19 nt, Homo sapiens
  misc_RNA (1)...(19): siRNA sense strand
ugaugcagauugaugacaa

SEQ ID NO: 1430674 - RNA, 19 nt, Homo sapiens
  misc_RNA (1)...(19): siRNA sense strand
ugaacuacaucaagaagac

SEQ ID NO: 1430675 - RNA, 19 nt, Homo sapiens
  misc_RNA (1)...(19): siRNA sense strand
acaaugugaugaggaaguu

SEQ ID NO: 1430676 - RNA, 19 nt, Homo sapiens
  misc_RNA (1)...(19): siRNA sense strand
gcccuuggcugagcacugu

SEQ ID NO: 1430677 - RNA, 19 nt, Homo sapiens
  misc_RNA (1)...(19): siRNA sense strand
aaugggagcguaacaaguu

SEQ ID NO: 1430678 - RNA, 19 nt, Homo sapiens
  misc_RNA (1)...(19): siRNA sense strand
gauuuauguuccucucaug

SEQ ID NO: 1430679 - RNA, 19 nt, Homo sapiens
  misc_RNA (1)...(19): siRNA sense strand
gagccauggugaacuacau

SEQ ID NO: 1430680 - RNA, 19 nt, Homo sapiens
  misc_RNA (1)...(19): siRNA sense strand
gcucaaguccuguccucuu

SEQ ID NO: 1430681 - RNA, 19 nt, Homo sapiens
  misc_RNA (1)...(19): siRNA sense strand
cgaacucccagccguguuu

SEQ ID NO: 1430682 - RNA, 19 nt, Homo sapiens
  misc_RNA (1)...(19): siRNA sense strand
gcuauaacucccugaagga

SEQ ID NO: 1430683 - RNA, 19 nt, Homo sapiens
  misc_RNA (1)...(19): siRNA sense strand
gcaauacauccgcacuuuc

SEQ ID NO: 1430684 - RNA, 19 nt, Homo sapiens
  misc_RNA (1)...(19): siRNA sense strand
agcaauacauccgcacuuu

SEQ ID NO: 1430685 - RNA, 19 nt, Homo sapiens
  misc_RNA (1)...(19): siRNA sense strand
guuccucucaugcugguua

SEQ ID NO: 1430686 - RNA, 19 nt, Homo sapiens
  misc_RNA (1)...(19): siRNA sense strand
uggagccacuucuacauuc

SEQ ID NO: 1430687 - RNA, 19 nt, Homo sapiens
  misc_RNA (1)...(19): siRNA sense strand
ugagggcucugugcuguuc

SEQ ID NO: 1430688 - RNA, 19 nt, Homo sapiens
  misc_RNA (1)...(19): siRNA sense strand
caccugaccucuacuucca

SEQ ID NO: 1430689 - RNA, 19 nt, Homo sapiens
  misc_RNA (1)...(19): siRNA sense strand
uaacauugugugcaaauac

SEQ ID NO: 1430690 - RNA, 19 nt, Homo sapiens
  misc_RNA (1)...(19): siRNA sense strand
uuggagccauggugaacua

SEQ ID NO: 1430691 - RNA, 19 nt, Homo sapiens
  misc_RNA (1)...(19): siRNA sense strand
auaagcuggugguggagua

SEQ ID NO: 1430692 - RNA, 19 nt, Homo sapiens
  misc_RNA (1)...(19): siRNA sense strand
caaguccuguccucuucug

SEQ ID NO: 1430693 - RNA, 19 nt, Homo sapiens
  misc_RNA (1)...(19): siRNA sense strand
cugacaacaugaagaagau

SEQ ID NO: 1430694 - RNA, 19 nt, Homo sapiens
  misc_RNA (1)...(19): siRNA sense strand
gagaccauguuaagaaacc

SEQ ID NO: 1430695 - RNA, 19 nt, Homo sapiens
  misc_RNA (1)...(19): siRNA sense strand
gugaucguccgguguuuga

SEQ ID NO: 1430696 - RNA, 19 nt, Homo sapiens
  misc_RNA (1)...(19): siRNA sense strand
caugaaagucuucuaacca

SEQ ID NO: 1430697 - RNA, 19 nt, Homo sapiens
  misc_RNA (1)...(19): siRNA sense strand
gaaguucaucacuaugucu

SEQ ID NO: 1430698 - RNA, 19 nt, Homo sapiens
  misc_RNA (1)...(19): siRNA sense strand
aggaaaccuucaugcaaug

SEQ ID NO: 1430699 - RNA, 19 nt, Homo sapiens
  misc_RNA (1)...(19): siRNA sense strand
gguaacauugugugcaaau

SEQ ID NO: 1430700 - RNA, 19 nt, Homo sapiens
  misc_RNA (1)...(19): siRNA sense strand
caauacauccgcacuuucg

SEQ ID NO: 1430701 - RNA, 19 nt, Homo sapiens
  misc_RNA (1)...(19): siRNA sense strand
guucuacaacuuccucaug

SEQ ID NO: 1430702 - RNA, 19 nt, Homo sapiens
  misc_RNA (1)...(19): siRNA sense strand
ccacuugggcuucuuugag

SEQ ID NO: 1430703 - RNA, 19 nt, Homo sapiens
  misc_RNA (1)...(19): siRNA sense strand
uuggagaccauguuaagaa

SEQ ID NO: 1430704 - RNA, 19 nt, Homo sapiens
  misc_RNA (1)...(19): siRNA sense strand
gacaacaugaagaagauca

SEQ ID NO: 1430705 - RNA, 19 nt, Homo sapiens
  misc_RNA (1)...(19): siRNA sense strand
gauggagccacuucuacau

SEQ ID NO: 1430706 - RNA, 19 nt, Homo sapiens
  misc_RNA (1)...(19): siRNA sense strand
ccaaugggagcguaacaag

SEQ ID NO: 1430707 - RNA, 19 nt, Homo sapiens
  misc_RNA (1)...(19): siRNA sense strand
augaaagucuucuaaccau

SEQ ID NO: 1430708 - RNA, 19 nt, Homo sapiens
  misc_RNA (1)...(19): siRNA sense strand
gaaguuucacggcuauaac

SEQ ID NO: 1430709 - RNA, 19 nt, Homo sapiens
  misc_RNA (1)...(19): siRNA sense strand
gaacuacaucaagaagaca

SEQ ID NO: 1430710 - RNA, 19 nt, Homo sapiens
  misc_RNA (1)...(19): siRNA sense strand
cgccacgcauguucaccua

SEQ ID NO: 1430711 - RNA, 19 nt, Homo sapiens
  misc_RNA (1)...(19): siRNA sense strand
gacaaugugaugaggaagu

SEQ ID NO: 1430712 - RNA, 19 nt, Homo sapiens
  misc_RNA (1)...(19): siRNA sense strand
agacucaggcaaaccaaga

SEQ ID NO: 1430713 - RNA, 19 nt, Homo sapiens
  misc_RNA (1)...(19): siRNA sense strand
gcuucagccugggugguaa

SEQ ID NO: 1430714 - RNA, 19 nt, Homo sapiens
  misc_RNA (1)...(19): siRNA sense strand
auggugaacuacaucaaga

SEQ ID NO: 1430715 - RNA, 19 nt, Homo sapiens
  misc_RNA (1)...(19): siRNA sense strand
accggaaguucaucacuau

SEQ ID NO: 1430716 - RNA, 19 nt, Homo sapiens
  misc_RNA (1)...(19): siRNA sense strand
guuggugcaugaaagucuu

SEQ ID NO: 1430717 - RNA, 19 nt, Homo sapiens
  misc_RNA (1)...(19): siRNA sense strand
uggcugacaacaugaagaa

SEQ ID NO: 1430718 - RNA, 19 nt, Homo sapiens
  misc_RNA (1)...(19): siRNA sense strand
ggggaaaaguggacacauc

SEQ ID NO: 1430719 - RNA, 19 nt, Homo sapiens
  misc_RNA (1)...(19): siRNA sense strand
cggaaguucaucacuaugu

SEQ ID NO: 1430720 - RNA, 19 nt, Homo sapiens
  misc_RNA (1)...(19): siRNA sense strand
ggagccacuucuacauucg

SEQ ID NO: 1430721 - RNA, 19 nt, Homo sapiens
  misc_RNA (1)...(19): siRNA sense strand
acgagagaacgucauguuu

SEQ ID NO: 1430722 - RNA, 19 nt, Homo sapiens
  misc_RNA (1)...(19): siRNA sense strand
cauccagacagccuuguau

SEQ ID NO: 1430723 - RNA, 19 nt, Homo sapiens
  misc_RNA (1)...(19): siRNA sense strand
gaacucccagccguguuug

SEQ ID NO: 1430724 - RNA, 19 nt, Homo sapiens
  misc_RNA (1)...(19): siRNA sense strand
ccuguccucuucugaccaa

SEQ ID NO: 1430725 - RNA, 19 nt, Homo sapiens
  misc_RNA (1)...(19): siRNA sense strand
ugagcacuguguuggagau

SEQ ID NO: 1430726 - RNA, 19 nt, Homo sapiens
  misc_RNA (1)...(19): siRNA sense strand
cucaaguccuguccucuuc

SEQ ID NO: 1430727 - RNA, 19 nt, Homo sapiens
  misc_RNA (1)...(19): siRNA sense strand
augacaaugugaugaggaa

SEQ ID NO: 1430728 - RNA, 19 nt, Homo sapiens
  misc_RNA (1)...(19): siRNA sense strand
gauaucaccauggucaucu

SEQ ID NO: 1430729 - RNA, 19 nt, Homo sapiens
  misc_RNA (1)...(19): siRNA sense strand
agggugaggucgccacauc

SEQ ID NO: 1430730 - RNA, 19 nt, Homo sapiens
  misc_RNA (1)...(19): siRNA sense strand
acgauccguuggugcauga

SEQ ID NO: 1430731 - RNA, 19 nt, Homo sapiens
  misc_RNA (1)...(19): siRNA sense strand
cauccgcacuuucguugac

SEQ ID NO: 1430732 - RNA, 19 nt, Homo sapiens
  misc_RNA (1)...(19): siRNA sense strand
gcaaagagcuccuguuaca

SEQ ID NO: 1430733 - RNA, 19 nt, Homo sapiens
  misc_RNA (1)...(19): siRNA sense strand
gaaacaggcugaugagauc

SEQ ID NO: 1430734 - RNA, 19 nt, Homo sapiens
  misc_RNA (1)...(19): siRNA sense strand
gaagaguuccuuaagaauu

SEQ ID NO: 1430735 - RNA, 19 nt, Homo sapiens
  misc_RNA (1)...(19): siRNA sense strand
gaacuucuccucccagguu

SEQ ID NO: 1430736 - RNA, 19 nt, Homo sapiens
  misc_RNA (1)...(19): siRNA sense strand
uagcaaagagcuccuguua

SEQ ID NO: 1430737 - RNA, 19 nt, Homo sapiens
  misc_RNA (1)...(19): siRNA sense strand
gaugagaucgagaagauuu

SEQ ID NO: 1430738 - RNA, 19 nt, Homo sapiens
  misc_RNA (1)...(19): siRNA sense strand
gagcagauguacaaacaca

SEQ ID NO: 1430739 - RNA, 19 nt, Homo sapiens
  misc_RNA (1)...(19): siRNA sense strand
gcugaagaguuccuuaaga

SEQ ID NO: 1430740 - RNA, 19 nt, Homo sapiens
  misc_RNA (1)...(19): siRNA sense strand
cugaagaguuccuuaagaa

SEQ ID NO: 1430741 - RNA, 19 nt, Homo sapiens
  misc_RNA (1)...(19): siRNA sense strand
acacagagcagauguacaa

SEQ ID NO: 1430742 - RNA, 19 nt, Homo sapiens
  misc_RNA (1)...(19): siRNA sense strand
cagagcagauguacaaaca

SEQ ID NO: 1430743 - RNA, 19 nt, Homo sapiens
  misc_RNA (1)...(19): siRNA sense strand
gaaguggaagucaggagua

SEQ ID NO: 1430744 - RNA, 19 nt, Homo sapiens
  misc_RNA (1)...(19): siRNA sense strand
caacaagccggaaguggaa

SEQ ID NO: 1430745 - RNA, 19 nt, Homo sapiens
  misc_RNA (1)...(19): siRNA sense strand
gaacuucuuuauccuucga

SEQ ID NO: 1430746 - RNA, 19 nt, Homo sapiens
  misc_RNA (1)...(19): siRNA sense strand
uggaggagauugacaagga

SEQ ID NO: 1430747 - RNA, 19 nt, Homo sapiens
  misc_RNA (1)...(19): siRNA sense strand
gagaugaagcugucaguca

SEQ ID NO: 1430748 - RNA, 19 nt, Homo sapiens
  misc_RNA (1)...(19): siRNA sense strand
cauuguggcugaagaguuc

SEQ ID NO: 1430749 - RNA, 19 nt, Homo sapiens
  misc_RNA (1)...(19): siRNA sense strand
ggagaucagugagaugaag

SEQ ID NO: 1430750 - RNA, 19 nt, Homo sapiens
  misc_RNA (1)...(19): siRNA sense strand
cugaugagaucgagaagau

SEQ ID NO: 1430751 - RNA, 19 nt, Homo sapiens
  misc_RNA (1)...(19): siRNA sense strand
agaugaagcugucagucaa

SEQ ID NO: 1430752 - RNA, 19 nt, Homo sapiens
  misc_RNA (1)...(19): siRNA sense strand
gaagucaggaguagcaaag

SEQ ID NO: 1430753 - RNA, 19 nt, Homo sapiens
  misc_RNA (1)...(19): siRNA sense strand
gguaugauaucagcuuucu

SEQ ID NO: 1430754 - RNA, 19 nt, Homo sapiens
  misc_RNA (1)...(19): siRNA sense strand
cagcaggaaugagaaggaa

SEQ ID NO: 1430755 - RNA, 19 nt, Homo sapiens
  misc_RNA (1)...(19): siRNA sense strand
acaaggagaucagugagau

SEQ ID NO: 1430756 - RNA, 19 nt, Homo sapiens
  misc_RNA (1)...(19): siRNA sense strand
ucaccaacuuccacacaga

SEQ ID NO: 1430757 - RNA, 19 nt, Homo sapiens
  misc_RNA (1)...(19): siRNA sense strand
ugaaacaggcugaugagau

SEQ ID NO: 1430758 - RNA, 19 nt, Homo sapiens
  misc_RNA (1)...(19): siRNA sense strand
gauguacaaacacaaguug

SEQ ID NO: 1430759 - RNA, 19 nt, Homo sapiens
  misc_RNA (1)...(19): siRNA sense strand
gaaggaaaagguucugauu

SEQ ID NO: 1430760 - RNA, 19 nt, Homo sapiens
  misc_RNA (1)...(19): siRNA sense strand
aggaaaagguucugauuga

SEQ ID NO: 1430761 - RNA, 19 nt, Homo sapiens
  misc_RNA (1)...(19): siRNA sense strand
gcagauguacaaacacaag

SEQ ID NO: 1430762 - RNA, 19 nt, Homo sapiens
  misc_RNA (1)...(19): siRNA sense strand
ggaagucaggaguagcaaa

SEQ ID NO: 1430763 - RNA, 19 nt, Homo sapiens
  misc_RNA (1)...(19): siRNA sense strand
gaucaccaacuuccacaca

SEQ ID NO: 1430764 - RNA, 19 nt, Homo sapiens
  misc_RNA (1)...(19): siRNA sense strand
gacaaggagaucagugaga

SEQ ID NO: 1430765 - RNA, 19 nt, Homo sapiens
  misc_RNA (1)...(19): siRNA sense strand
gcauuguggcugaagaguu

SEQ ID NO: 1430766 - RNA, 19 nt, Homo sapiens
  misc_RNA (1)...(19): siRNA sense strand
aaagagcuccuguuacaac

SEQ ID NO: 1430767 - RNA, 19 nt, Homo sapiens
  misc_RNA (1)...(19): siRNA sense strand
gaugcgagcagagaacuuc

SEQ ID NO: 1430768 - RNA, 19 nt, Homo sapiens
  misc_RNA (1)...(19): siRNA sense strand
ugaagaguuccuuaagaau

SEQ ID NO: 1430769 - RNA, 19 nt, Homo sapiens
  misc_RNA (1)...(19): siRNA sense strand
gcaggaaugagaaggaaaa

SEQ ID NO: 1430770 - RNA, 19 nt, Homo sapiens
  misc_RNA (1)...(19): siRNA sense strand
caaagagcuccuguuacaa

SEQ ID NO: 1430771 - RNA, 19 nt, Homo sapiens
  misc_RNA (1)...(19): siRNA sense strand
ggaaugagaaggaaaaggu

SEQ ID NO: 1430772 - RNA, 19 nt, Homo sapiens
  misc_RNA (1)...(19): siRNA sense strand
gcuuucugaucaccaacuu

SEQ ID NO: 1430773 - RNA, 19 nt, Homo sapiens
  misc_RNA (1)...(19): siRNA sense strand
gaugaagcugucagucaau

SEQ ID NO: 1430774 - RNA, 19 nt, Homo sapiens
  misc_RNA (1)...(19): siRNA sense strand
aaggagaucagugagauga

SEQ ID NO: 1430775 - RNA, 19 nt, Homo sapiens
  misc_RNA (1)...(19): siRNA sense strand
uggcugaagaguuccuuaa

SEQ ID NO: 1430776 - RNA, 19 nt, Homo sapiens
  misc_RNA (1)...(19): siRNA sense strand
ggacuuugugauccacuuc

SEQ ID NO: 1430777 - RNA, 19 nt, Homo sapiens
  misc_RNA (1)...(19): siRNA sense strand
gagauugacaaggagauca

SEQ ID NO: 1430778 - RNA, 19 nt, Homo sapiens
  misc_RNA (1)...(19): siRNA sense strand
ggaaaagguucugauugag

SEQ ID NO: 1430779 - RNA, 19 nt, Homo sapiens
  misc_RNA (1)...(19): siRNA sense strand
ccacacaacuggucucaua

SEQ ID NO: 1430780 - RNA, 19 nt, Homo sapiens
  misc_RNA (1)...(19): siRNA sense strand
gaucugaggucaucaagaa

SEQ ID NO: 1430781 - RNA, 19 nt, Homo sapiens
  misc_RNA (1)...(19): siRNA sense strand
ggucucagcucaggaauua

SEQ ID NO: 1430782 - RNA, 19 nt, Homo sapiens
  misc_RNA (1)...(19): siRNA sense strand
ccagaaaccuagauaagaa

SEQ ID NO: 1430783 - RNA, 19 nt, Homo sapiens
  misc_RNA (1)...(19): siRNA sense strand
caacuggucucauacuuca

SEQ ID NO: 1430784 - RNA, 19 nt, Homo sapiens
  misc_RNA (1)...(19): siRNA sense strand
ggacuucacuggcuccaau

SEQ ID NO: 1430785 - RNA, 19 nt, Homo sapiens
  misc_RNA (1)...(19): siRNA sense strand
guacagaucugaggucauc

SEQ ID NO: 1430786 - RNA, 19 nt, Homo sapiens
  misc_RNA (1)...(19): siRNA sense strand
aaaggacaaucguguagua

SEQ ID NO: 1430787 - RNA, 19 nt, Homo sapiens
  misc_RNA (1)...(19): siRNA sense strand
gcaggucucgcaugaauuu

SEQ ID NO: 1430788 - RNA, 19 nt, Homo sapiens
  misc_RNA (1)...(19): siRNA sense strand
caagaacucuggaacuauc

SEQ ID NO: 1430789 - RNA, 19 nt, Homo sapiens
  misc_RNA (1)...(19): siRNA sense strand
caacaggggucaaugagua

SEQ ID NO: 1430790 - RNA, 19 nt, Homo sapiens
  misc_RNA (1)...(19): siRNA sense strand
uacaagaacucuggaacua

SEQ ID NO: 1430791 - RNA, 19 nt, Homo sapiens
  misc_RNA (1)...(19): siRNA sense strand
gcugagggaugaugacuuc

SEQ ID NO: 1430792 - RNA, 19 nt, Homo sapiens
  misc_RNA (1)...(19): siRNA sense strand
gcaugaauuugccuugaau

SEQ ID NO: 1430793 - RNA, 19 nt, Homo sapiens
  misc_RNA (1)...(19): siRNA sense strand
gagggaugaugacuuccua

SEQ ID NO: 1430794 - RNA, 19 nt, Homo sapiens
  misc_RNA (1)...(19): siRNA sense strand
ggacaucggcuccaagucu

SEQ ID NO: 1430795 - RNA, 19 nt, Homo sapiens
  misc_RNA (1)...(19): siRNA sense strand
cgccagagcugagggauga

SEQ ID NO: 1430796 - RNA, 19 nt, Homo sapiens
  misc_RNA (1)...(19): siRNA sense strand
ggaacuauccgugucaaga

SEQ ID NO: 1430797 - RNA, 19 nt, Homo sapiens
  misc_RNA (1)...(19): siRNA sense strand
gaacuauccgugucaagau

SEQ ID NO: 1430798 - RNA, 19 nt, Homo sapiens
  misc_RNA (1)...(19): siRNA sense strand
caagauuugucggguagaa

SEQ ID NO: 1430799 - RNA, 19 nt, Homo sapiens
  misc_RNA (1)...(19): siRNA sense strand
gcagcgugguucaggacua

SEQ ID NO: 1430800 - RNA, 19 nt, Homo sapiens
  misc_RNA (1)...(19): siRNA sense strand
gcuguucccugcauuugga

SEQ ID NO: 1430801 - RNA, 19 nt, Homo sapiens
  misc_RNA (1)...(19): siRNA sense strand
agaaacagaguacuccuuu

SEQ ID NO: 1430802 - RNA, 19 nt, Homo sapiens
  misc_RNA (1)...(19): siRNA sense strand
gguagaggccagaaaccua

SEQ ID NO: 1430803 - RNA, 19 nt, Homo sapiens
  misc_RNA (1)...(19): siRNA sense strand
gugcaaugcuccgauuaug

SEQ ID NO: 1430804 - RNA, 19 nt, Homo sapiens
  misc_RNA (1)...(19): siRNA sense strand
uggcaggucucgcaugaau

SEQ ID NO: 1430805 - RNA, 19 nt, Homo sapiens
  misc_RNA (1)...(19): siRNA sense strand
ggacaaucguguaguaacc

SEQ ID NO: 1430806 - RNA, 19 nt, Homo sapiens
  misc_RNA (1)...(19): siRNA sense strand
cuauggcccuaccaacuuu

SEQ ID NO: 1430807 - RNA, 19 nt, Homo sapiens
  misc_RNA (1)...(19): siRNA sense strand
gaaugcauccacccugaga

SEQ ID NO: 1430808 - RNA, 19 nt, Homo sapiens
  misc_RNA (1)...(19): siRNA sense strand
gccagaaaccuagauaaga

SEQ ID NO: 1430809 - RNA, 19 nt, Homo sapiens
  misc_RNA (1)...(19): siRNA sense strand
gcuacgcuuuggaaucuau

SEQ ID NO: 1430810 - RNA, 19 nt, Homo sapiens
  misc_RNA (1)...(19): siRNA sense strand
gugaccaucucauugacaa

SEQ ID NO: 1430811 - RNA, 19 nt, Homo sapiens
  misc_RNA (1)...(19): siRNA sense strand
gaugggaggcugucagauc

SEQ ID NO: 1430812 - RNA, 19 nt, Homo sapiens
  misc_RNA (1)...(19): siRNA sense strand
gacaagcuguucccugcau

SEQ ID NO: 1430813 - RNA, 19 nt, Homo sapiens
  misc_RNA (1)...(19): siRNA sense strand
ggacugccucgcaauacuu

SEQ ID NO: 1430814 - RNA, 19 nt, Homo sapiens
  misc_RNA (1)...(19): siRNA sense strand
gacccacucugcguccuuu

SEQ ID NO: 1430815 - RNA, 19 nt, Homo sapiens
  misc_RNA (1)...(19): siRNA sense strand
caacuuugcacccaucauc

SEQ ID NO: 1430816 - RNA, 19 nt, Homo sapiens
  misc_RNA (1)...(19): siRNA sense strand
ccaugucagugaucauugu

SEQ ID NO: 1430817 - RNA, 19 nt, Homo sapiens
  misc_RNA (1)...(19): siRNA sense strand
gagcuuggccggacugaac

SEQ ID NO: 1430818 - RNA, 19 nt, Homo sapiens
  misc_RNA (1)...(19): siRNA sense strand
ccucgaaccugcccauguc

SEQ ID NO: 1430819 - RNA, 19 nt, Homo sapiens
  misc_RNA (1)...(19): siRNA sense strand
ggaauuaaaggacaaucgu

SEQ ID NO: 1430820 - RNA, 19 nt, Homo sapiens
  misc_RNA (1)...(19): siRNA sense strand
caggugcaaugcuccgauu

SEQ ID NO: 1430821 - RNA, 19 nt, Homo sapiens
  misc_RNA (1)...(19): siRNA sense strand
ucgcagaagugcccacaca

SEQ ID NO: 1430822 - RNA, 19 nt, Homo sapiens
  misc_RNA (1)...(19): siRNA sense strand
ucucagcucaggaauuaaa

SEQ ID NO: 1430823 - RNA, 19 nt, Homo sapiens
  misc_RNA (1)...(19): siRNA sense strand
aaacagaguacuccuuucu

SEQ ID NO: 1430824 - RNA, 19 nt, Homo sapiens
  misc_RNA (1)...(19): siRNA sense strand
cagcuugaguaccgcuuug

SEQ ID NO: 1430825 - RNA, 19 nt, Homo sapiens
  misc_RNA (1)...(19): siRNA sense strand
cacaacuggucucauacuu

SEQ ID NO: 1430826 - RNA, 19 nt, Homo sapiens
  misc_RNA (1)...(19): siRNA sense strand
cgcaauacuucaugcuguu

SEQ ID NO: 1430827 - RNA, 19 nt, Homo sapiens
  misc_RNA (1)...(19): siRNA sense strand
guacuccuuucuggacuau

SEQ ID NO: 1430828 - RNA, 19 nt, Homo sapiens
  misc_RNA (1)...(19): siRNA sense strand
gauuguguccagccaggua

SEQ ID NO: 1430829 - RNA, 19 nt, Homo sapiens
  misc_RNA (1)...(19): siRNA sense strand
ggagguagaggccagaaac

SEQ ID NO: 1430830 - RNA, 19 nt, Homo sapiens
  misc_RNA (1)...(19): siRNA sense strand
cgcaugaauuugccuugaa

SEQ ID NO: 1430831 - RNA, 19 nt, Homo sapiens
  misc_RNA (1)...(19): siRNA sense strand
ugguucagcuguccauuuc

SEQ ID NO: 1430832 - RNA, 19 nt, Homo sapiens
  misc_RNA (1)...(19): siRNA sense strand
cagcgugguucaggacuau

SEQ ID NO: 1430833 - RNA, 19 nt, Homo sapiens
  misc_RNA (1)...(19): siRNA sense strand
gaggccagaaaccuagaua

SEQ ID NO: 1430834 - RNA, 19 nt, Homo sapiens
  misc_RNA (1)...(19): siRNA sense strand
caagcuguucccugcauuu

SEQ ID NO: 1430835 - RNA, 19 nt, Homo sapiens
  misc_RNA (1)...(19): siRNA sense strand
ggucaaugaguaccugaug

SEQ ID NO: 1430836 - RNA, 19 nt, Homo sapiens
  misc_RNA (1)...(19): siRNA sense strand
cggcugaguuugaaugcau

SEQ ID NO: 1430837 - RNA, 19 nt, Homo sapiens
  misc_RNA (1)...(19): siRNA sense strand
ggcagucccggcugaguuu

SEQ ID NO: 1430838 - RNA, 19 nt, Homo sapiens
  misc_RNA (1)...(19): siRNA sense strand
cauggaagcguuucucagu

SEQ ID NO: 1430839 - RNA, 19 nt, Homo sapiens
  misc_RNA (1)...(19): siRNA sense strand
ggccagaaaccuagauaag

SEQ ID NO: 1430840 - RNA, 19 nt, Homo sapiens
  misc_RNA (1)...(19): siRNA sense strand
gcccugaguucuccaagac

SEQ ID NO: 1430841 - RNA, 19 nt, Homo sapiens
  misc_RNA (1)...(19): siRNA sense strand
uguggguggugcugacuuu

SEQ ID NO: 1430842 - RNA, 19 nt, Homo sapiens
  misc_RNA (1)...(19): siRNA sense strand
acaaggacaucggcuccaa

SEQ ID NO: 1430843 - RNA, 19 nt, Homo sapiens
  misc_RNA (1)...(19): siRNA sense strand
ccugugaccaucucauuga

SEQ ID NO: 1430844 - RNA, 19 nt, Homo sapiens
  misc_RNA (1)...(19): siRNA sense strand
ccgccagggugaugggaaa

SEQ ID NO: 1430845 - RNA, 19 nt, Homo sapiens
  misc_RNA (1)...(19): siRNA sense strand
gcagaagugcccacacaac

SEQ ID NO: 1430846 - RNA, 19 nt, Homo sapiens
  misc_RNA (1)...(19): siRNA sense strand
gcaauacuucaugcuguug

SEQ ID NO: 1430847 - RNA, 19 nt, Homo sapiens
  misc_RNA (1)...(19): siRNA sense strand
gcaggcauccagggcauug

SEQ ID NO: 1430848 - RNA, 19 nt, Homo sapiens
  misc_RNA (1)...(19): siRNA sense strand
ucgcaugaauuugccuuga

SEQ ID NO: 1430849 - RNA, 19 nt, Homo sapiens
  misc_RNA (1)...(19): siRNA sense strand
cuccaagacucuacagcuu

SEQ ID NO: 1430850 - RNA, 19 nt, Homo sapiens
  misc_RNA (1)...(19): siRNA sense strand
ggugcaaugcuccgauuau

SEQ ID NO: 1430851 - RNA, 19 nt, Homo sapiens
  misc_RNA (1)...(19): siRNA sense strand
gggacugccucgcaauacu

SEQ ID NO: 1430852 - RNA, 19 nt, Homo sapiens
  misc_RNA (1)...(19): siRNA sense strand
acuggcaggucucgcauga

SEQ ID NO: 1430853 - RNA, 19 nt, Homo sapiens
  misc_RNA (1)...(19): siRNA sense strand
ucaccugacucccuacacu

SEQ ID NO: 1430854 - RNA, 19 nt, Homo sapiens
  misc_RNA (1)...(19): siRNA sense strand
gcgacauugugcaguuugu

SEQ ID NO: 1430855 - RNA, 19 nt, Homo sapiens
  misc_RNA (1)...(19): siRNA sense strand
uaguaaccauggagguaga

SEQ ID NO: 1430856 - RNA, 19 nt, Homo sapiens
  misc_RNA (1)...(19): siRNA sense strand
gcccaugucagugaucauu

SEQ ID NO: 1430857 - RNA, 19 nt, Homo sapiens
  misc_RNA (1)...(19): siRNA sense strand
gaacaaccugaacccuaca

SEQ ID NO: 1430858 - RNA, 19 nt, Homo sapiens
  misc_RNA (1)...(19): siRNA sense strand
gaaaccuagauaagaagga

SEQ ID NO: 1430859 - RNA, 19 nt, Homo sapiens
  misc_RNA (1)...(19): siRNA sense strand
gcuuugagacaguccagaa

SEQ ID NO: 1430860 - RNA, 19 nt, Homo sapiens
  misc_RNA (1)...(19): siRNA sense strand
aacuauccgugucaagauu

SEQ ID NO: 1430861 - RNA, 19 nt, Homo sapiens
  misc_RNA (1)...(19): siRNA sense strand
agaccgugcucgcagaagu

SEQ ID NO: 1430862 - RNA, 19 nt, Homo sapiens
  misc_RNA (1)...(19): siRNA sense strand
ccgcgacauugugcaguuu

SEQ ID NO: 1430863 - RNA, 19 nt, Homo sapiens
  misc_RNA (1)...(19): siRNA sense strand
gaggcugucagaucaacuu

SEQ ID NO: 1430864 - RNA, 19 nt, Homo sapiens
  misc_RNA (1)...(19): siRNA sense strand
gcuuuggaaucuaugacau

SEQ ID NO: 1430865 - RNA, 19 nt, Homo sapiens
  misc_RNA (1)...(19): siRNA sense strand
cgacauugugcaguuugua

SEQ ID NO: 1430866 - RNA, 19 nt, Homo sapiens
  misc_RNA (1)...(19): siRNA sense strand
uguaguaaccauggaggua

SEQ ID NO: 1430867 - RNA, 19 nt, Homo sapiens
  misc_RNA (1)...(19): siRNA sense strand
gcugucagaucaacuucac

SEQ ID NO: 1430868 - RNA, 19 nt, Homo sapiens
  misc_RNA (1)...(19): siRNA sense strand
uuaaaggacaaucguguag

SEQ ID NO: 1430869 - RNA, 19 nt, Homo sapiens
  misc_RNA (1)...(19): siRNA sense strand
ucuauggcccuaccaacuu

SEQ ID NO: 1430870 - RNA, 19 nt, Homo sapiens
  misc_RNA (1)...(19): siRNA sense strand
augggaggcugucagauca

SEQ ID NO: 1430871 - RNA, 19 nt, Homo sapiens
  misc_RNA (1)...(19): siRNA sense strand
ccagggugaugggaaaugg

SEQ ID NO: 1430872 - RNA, 19 nt, Homo sapiens
  misc_RNA (1)...(19): siRNA sense strand
cagcucaggaauuaaagga

SEQ ID NO: 1430873 - RNA, 19 nt, Homo sapiens
  misc_RNA (1)...(19): siRNA sense strand
cagaagugcccacacaacu

SEQ ID NO: 1430874 - RNA, 19 nt, Homo sapiens
  misc_RNA (1)...(19): siRNA sense strand
acaagcuguucccugcauu

SEQ ID NO: 1430875 - RNA, 19 nt, Homo sapiens
  misc_RNA (1)...(19): siRNA sense strand
aagaaaagcuacaagaacu

SEQ ID NO: 1430876 - RNA, 19 nt, Homo sapiens
  misc_RNA (1)...(19): siRNA sense strand
gcauccacccugagaagca

SEQ ID NO: 1430877 - RNA, 19 nt, Homo sapiens
  misc_RNA (1)...(19): siRNA sense strand
acuccuuucuggacuaugu

SEQ ID NO: 1430878 - RNA, 19 nt, Homo sapiens
  misc_RNA (1)...(19): siRNA sense strand
ggguggugcugacuuugag

SEQ ID NO: 1430879 - RNA, 19 nt, Homo sapiens
  misc_RNA (1)...(19): siRNA sense strand
ccacacaacuggucucaua

SEQ ID NO: 1430880 - RNA, 19 nt, Homo sapiens
  misc_RNA (1)...(19): siRNA sense strand
gaucugaggucaucaagaa

SEQ ID NO: 1430881 - RNA, 19 nt, Homo sapiens
  misc_RNA (1)...(19): siRNA sense strand
ggucucagcucaggaauua

SEQ ID NO: 1430882 - RNA, 19 nt, Homo sapiens
  misc_RNA (1)...(19): siRNA sense strand
ccagaaaccuagauaagaa

SEQ ID NO: 1430883 - RNA, 19 nt, Homo sapiens
  misc_RNA (1)...(19): siRNA sense strand
caacuggucucauacuuca

SEQ ID NO: 1430884 - RNA, 19 nt, Homo sapiens
  misc_RNA (1)...(19): siRNA sense strand
ggacuucacuggcuccaau

SEQ ID NO: 1430885 - RNA, 19 nt, Homo sapiens
  misc_RNA (1)...(19): siRNA sense strand
guacagaucugaggucauc

SEQ ID NO: 1430886 - RNA, 19 nt, Homo sapiens
  misc_RNA (1)...(19): siRNA sense strand
aaaggacaaucguguagua

SEQ ID NO: 1430887 - RNA, 19 nt, Homo sapiens
  misc_RNA (1)...(19): siRNA sense strand
gcaggucucgcaugaauuu

SEQ ID NO: 1430888 - RNA, 19 nt, Homo sapiens
  misc_RNA (1)...(19): siRNA sense strand
caagaacucuggaacuauc

SEQ ID NO: 1430889 - RNA, 19 nt, Homo sapiens
  misc_RNA (1)...(19): siRNA sense strand
caacaggggucaaugagua

SEQ ID NO: 1430890 - RNA, 19 nt, Homo sapiens
  misc_RNA (1)...(19): siRNA sense strand
uacaagaacucuggaacua

SEQ ID NO: 1430891 - RNA, 19 nt, Homo sapiens
  misc_RNA (1)...(19): siRNA sense strand
gcugagggaugaugacuuc

SEQ ID NO: 1430892 - RNA, 19 nt, Homo sapiens
  misc_RNA (1)...(19): siRNA sense strand
gcaugaauuugccuugaau

SEQ ID NO: 1430893 - RNA, 19 nt, Homo sapiens
  misc_RNA (1)...(19): siRNA sense strand
gagggaugaugacuuccua

SEQ ID NO: 1430894 - RNA, 19 nt, Homo sapiens
  misc_RNA (1)...(19): siRNA sense strand
ggacaucggcuccaagucu

SEQ ID NO: 1430895 - RNA, 19 nt, Homo sapiens
  misc_RNA (1)...(19): siRNA sense strand
cgccagagcugagggauga

SEQ ID NO: 1430896 - RNA, 19 nt, Homo sapiens
  misc_RNA (1)...(19): siRNA sense strand
ggaacuauccgugucaaga

SEQ ID NO: 1430897 - RNA, 19 nt, Homo sapiens
  misc_RNA (1)...(19): siRNA sense strand
gaacuauccgugucaagau

SEQ ID NO: 1430898 - RNA, 19 nt, Homo sapiens
  misc_RNA (1)...(19): siRNA sense strand
caagauuugucggguagaa

SEQ ID NO: 1430899 - RNA, 19 nt, Homo sapiens
  misc_RNA (1)...(19): siRNA sense strand
gcagcgugguucaggacua

SEQ ID NO: 1430900 - RNA, 19 nt, Homo sapiens
  misc_RNA (1)...(19): siRNA sense strand
gcuguucccugcauuugga

SEQ ID NO: 1430901 - RNA, 19 nt, Homo sapiens
  misc_RNA (1)...(19): siRNA sense strand
agaaacagaguacuccuuu

SEQ ID NO: 1430902 - RNA, 19 nt, Homo sapiens
  misc_RNA (1)...(19): siRNA sense strand
gguagaggccagaaaccua

SEQ ID NO: 1430903 - RNA, 19 nt, Homo sapiens
  misc_RNA (1)...(19): siRNA sense strand
gugcaaugcuccgauuaug

SEQ ID NO: 1430904 - RNA, 19 nt, Homo sapiens
  misc_RNA (1)...(19): siRNA sense strand
uggcaggucucgcaugaau

SEQ ID NO: 1430905 - RNA, 19 nt, Homo sapiens
  misc_RNA (1)...(19): siRNA sense strand
ggacaaucguguaguaacc

SEQ ID NO: 1430906 - RNA, 19 nt, Homo sapiens
  misc_RNA (1)...(19): siRNA sense strand
cuauggcccuaccaacuuu

SEQ ID NO: 1430907 - RNA, 19 nt, Homo sapiens
  misc_RNA (1)...(19): siRNA sense strand
gaaugcauccacccugaga

SEQ ID NO: 1430908 - RNA, 19 nt, Homo sapiens
  misc_RNA (1)...(19): siRNA sense strand
gccagaaaccuagauaaga

SEQ ID NO: 1430909 - RNA, 19 nt, Homo sapiens
  misc_RNA (1)...(19): siRNA sense strand
gcuacgcuuuggaaucuau

SEQ ID NO: 1430910 - RNA, 19 nt, Homo sapiens
  misc_RNA (1)...(19): siRNA sense strand
gugaccaucucauugacaa

SEQ ID NO: 1430911 - RNA, 19 nt, Homo sapiens
  misc_RNA (1)...(19): siRNA sense strand
gaugggaggcugucagauc

SEQ ID NO: 1430912 - RNA, 19 nt, Homo sapiens
  misc_RNA (1)...(19): siRNA sense strand
gacaagcuguucccugcau

SEQ ID NO: 1430913 - RNA, 19 nt, Homo sapiens
  misc_RNA (1)...(19): siRNA sense strand
ggacugccucgcaauacuu

SEQ ID NO: 1430914 - RNA, 19 nt, Homo sapiens
  misc_RNA (1)...(19): siRNA sense strand
gacccacucugcguccuuu

SEQ ID NO: 1430915 - RNA, 19 nt, Homo sapiens
  misc_RNA (1)...(19): siRNA sense strand
caacuuugcacccaucauc

SEQ ID NO: 1430916 - RNA, 19 nt, Homo sapiens
  misc_RNA (1)...(19): siRNA sense strand
ccaugucagugaucauugu

SEQ ID NO: 1430917 - RNA, 19 nt, Homo sapiens
  misc_RNA (1)...(19): siRNA sense strand
gagcuuggccggacugaac

SEQ ID NO: 1430918 - RNA, 19 nt, Homo sapiens
  misc_RNA (1)...(19): siRNA sense strand
ccucgaaccugcccauguc

SEQ ID NO: 1430919 - RNA, 19 nt, Homo sapiens
  misc_RNA (1)...(19): siRNA sense strand
ggaauuaaaggacaaucgu

SEQ ID NO: 1430920 - RNA, 19 nt, Homo sapiens
  misc_RNA (1)...(19): siRNA sense strand
caggugcaaugcuccgauu

SEQ ID NO: 1430921 - RNA, 19 nt, Homo sapiens
  misc_RNA (1)...(19): siRNA sense strand
ucgcagaagugcccacaca

SEQ ID NO: 1430922 - RNA, 19 nt, Homo sapiens
  misc_RNA (1)...(19): siRNA sense strand
ucucagcucaggaauuaaa

SEQ ID NO: 1430923 - RNA, 19 nt, Homo sapiens
  misc_RNA (1)...(19): siRNA sense strand
aaacagaguacuccuuucu

SEQ ID NO: 1430924 - RNA, 19 nt, Homo sapiens
  misc_RNA (1)...(19): siRNA sense strand
cagcuugaguaccgcuuug

SEQ ID NO: 1430925 - RNA, 19 nt, Homo sapiens
  misc_RNA (1)...(19): siRNA sense strand
cacaacuggucucauacuu

SEQ ID NO: 1430926 - RNA, 19 nt, Homo sapiens
  misc_RNA (1)...(19): siRNA sense strand
cgcaauacuucaugcuguu

SEQ ID NO: 1430927 - RNA, 19 nt, Homo sapiens
  misc_RNA (1)...(19): siRNA sense strand
guacuccuuucuggacuau

SEQ ID NO: 1430928 - RNA, 19 nt, Homo sapiens
  misc_RNA (1)...(19): siRNA sense strand
gauuguguccagccaggua

SEQ ID NO: 1430929 - RNA, 19 nt, Homo sapiens
  misc_RNA (1)...(19): siRNA sense strand
ggagguagaggccagaaac

SEQ ID NO: 1430930 - RNA, 19 nt, Homo sapiens
  misc_RNA (1)...(19): siRNA sense strand
cgcaugaauuugccuugaa

SEQ ID NO: 1430931 - RNA, 19 nt, Homo sapiens
  misc_RNA (1)...(19): siRNA sense strand
ugguucagcuguccauuuc

SEQ ID NO: 1430932 - RNA, 19 nt, Homo sapiens
  misc_RNA (1)...(19): siRNA sense strand
cagcgugguucaggacuau

SEQ ID NO: 1430933 - RNA, 19 nt, Homo sapiens
  misc_RNA (1)...(19): siRNA sense strand
gaggccagaaaccuagaua

SEQ ID NO: 1430934 - RNA, 19 nt, Homo sapiens
  misc_RNA (1)...(19): siRNA sense strand
caagcuguucccugcauuu

SEQ ID NO: 1430935 - RNA, 19 nt, Homo sapiens
  misc_RNA (1)...(19): siRNA sense strand
ggucaaugaguaccugaug

SEQ ID NO: 1430936 - RNA, 19 nt, Homo sapiens
  misc_RNA (1)...(19): siRNA sense strand
cggcugaguuugaaugcau

SEQ ID NO: 1430937 - RNA, 19 nt, Homo sapiens
  misc_RNA (1)...(19): siRNA sense strand
ggcagucccggcugaguuu

SEQ ID NO: 1430938 - RNA, 19 nt, Homo sapiens
  misc_RNA (1)...(19): siRNA sense strand
cauggaagcguuucucagu

SEQ ID NO: 1430939 - RNA, 19 nt, Homo sapiens
  misc_RNA (1)...(19): siRNA sense strand
ggccagaaaccuagauaag

SEQ ID NO: 1430940 - RNA, 19 nt, Homo sapiens
  misc_RNA (1)...(19): siRNA sense strand
gcccugaguucuccaagac

SEQ ID NO: 1430941 - RNA, 19 nt, Homo sapiens
  misc_RNA (1)...(19): siRNA sense strand
uguggguggugcugacuuu

SEQ ID NO: 1430942 - RNA, 19 nt, Homo sapiens
  misc_RNA (1)...(19): siRNA sense strand
acaaggacaucggcuccaa

SEQ ID NO: 1430943 - RNA, 19 nt, Homo sapiens
  misc_RNA (1)...(19): siRNA sense strand
ccugugaccaucucauuga

SEQ ID NO: 1430944 - RNA, 19 nt, Homo sapiens
  misc_RNA (1)...(19): siRNA sense strand
ccgccagggugaugggaaa

SEQ ID NO: 1430945 - RNA, 19 nt, Homo sapiens
  misc_RNA (1)...(19): siRNA sense strand
gcagaagugcccacacaac

SEQ ID NO: 1430946 - RNA, 19 nt, Homo sapiens
  misc_RNA (1)...(19): siRNA sense strand
gcaauacuucaugcuguug

SEQ ID NO: 1430947 - RNA, 19 nt, Homo sapiens
  misc_RNA (1)...(19): siRNA sense strand
gcaggcauccagggcauug

SEQ ID NO: 1430948 - RNA, 19 nt, Homo sapiens
  misc_RNA (1)...(19): siRNA sense strand
ucgcaugaauuugccuuga

SEQ ID NO: 1430949 - RNA, 19 nt, Homo sapiens
  misc_RNA (1)...(19): siRNA sense strand
cuccaagacucuacagcuu

SEQ ID NO: 1430950 - RNA, 19 nt, Homo sapiens
  misc_RNA (1)...(19): siRNA sense strand
ggugcaaugcuccgauuau

SEQ ID NO: 1430951 - RNA, 19 nt, Homo sapiens
  misc_RNA (1)...(19): siRNA sense strand
gggacugccucgcaauacu

SEQ ID NO: 1430952 - RNA, 19 nt, Homo sapiens
  misc_RNA (1)...(19): siRNA sense strand
acuggcaggucucgcauga

SEQ ID NO: 1430953 - RNA, 19 nt, Homo sapiens
  misc_RNA (1)...(19): siRNA sense strand
ucaccugacucccuacacu

SEQ ID NO: 1430954 - RNA, 19 nt, Homo sapiens
  misc_RNA (1)...(19): siRNA sense strand
gcgacauugugcaguuugu

SEQ ID NO: 1430955 - RNA, 19 nt, Homo sapiens
  misc_RNA (1)...(19): siRNA sense strand
uaguaaccauggagguaga

SEQ ID NO: 1430956 - RNA, 19 nt, Homo sapiens
  misc_RNA (1)...(19): siRNA sense strand
gcccaugucagugaucauu

SEQ ID NO: 1430957 - RNA, 19 nt, Homo sapiens
  misc_RNA (1)...(19): siRNA sense strand
gaacaaccugaacccuaca

SEQ ID NO: 1430958 - RNA, 19 nt, Homo sapiens
  misc_RNA (1)...(19): siRNA sense strand
gaaaccuagauaagaagga

SEQ ID NO: 1430959 - RNA, 19 nt, Homo sapiens
  misc_RNA (1)...(19): siRNA sense strand
gcuuugagacaguccagaa

SEQ ID NO: 1430960 - RNA, 19 nt, Homo sapiens
  misc_RNA (1)...(19): siRNA sense strand
aacuauccgugucaagauu

SEQ ID NO: 1430961 - RNA, 19 nt, Homo sapiens
  misc_RNA (1)...(19): siRNA sense strand
agaccgugcucgcagaagu

SEQ ID NO: 1430962 - RNA, 19 nt, Homo sapiens
  misc_RNA (1)...(19): siRNA sense strand
ccgcgacauugugcaguuu

SEQ ID NO: 1430963 - RNA, 19 nt, Homo sapiens
  misc_RNA (1)...(19): siRNA sense strand
gaggcugucagaucaacuu

SEQ ID NO: 1430964 - RNA, 19 nt, Homo sapiens
  misc_RNA (1)...(19): siRNA sense strand
gcuuuggaaucuaugacau

SEQ ID NO: 1430965 - RNA, 19 nt, Homo sapiens
  misc_RNA (1)...(19): siRNA sense strand
cgacauugugcaguuugua

SEQ ID NO: 1430966 - RNA, 19 nt, Homo sapiens
  misc_RNA (1)...(19): siRNA sense strand
uguaguaaccauggaggua

SEQ ID NO: 1430967 - RNA, 19 nt, Homo sapiens
  misc_RNA (1)...(19): siRNA sense strand
gcugucagaucaacuucac

SEQ ID NO: 1430968 - RNA, 19 nt, Homo sapiens
  misc_RNA (1)...(19): siRNA sense strand
uuaaaggacaaucguguag

SEQ ID NO: 1430969 - RNA, 19 nt, Homo sapiens
  misc_RNA (1)...(19): siRNA sense strand
ucuauggcccuaccaacuu

SEQ ID NO: 1430970 - RNA, 19 nt, Homo sapiens
  misc_RNA (1)...(19): siRNA sense strand
augggaggcugucagauca

SEQ ID NO: 1430971 - RNA, 19 nt, Homo sapiens
  misc_RNA (1)...(19): siRNA sense strand
ccagggugaugggaaaugg

SEQ ID NO: 1430972 - RNA, 19 nt, Homo sapiens
  misc_RNA (1)...(19): siRNA sense strand
cagcucaggaauuaaagga

SEQ ID NO: 1430973 - RNA, 19 nt, Homo sapiens
  misc_RNA (1)...(19): siRNA sense strand
cagaagugcccacacaacu

SEQ ID NO: 1430974 - RNA, 19 nt, Homo sapiens
  misc_RNA (1)...(19): siRNA sense strand
acaagcuguucccugcauu

SEQ ID NO: 1430975 - RNA, 19 nt, Homo sapiens
  misc_RNA (1)...(19): siRNA sense strand
aagaaaagcuacaagaacu

SEQ ID NO: 1430976 - RNA, 19 nt, Homo sapiens
  misc_RNA (1)...(19): siRNA sense strand
gcauccacccugagaagca

SEQ ID NO: 1430977 - RNA, 19 nt, Homo sapiens
  misc_RNA (1)...(19): siRNA sense strand
acuccuuucuggacuaugu

SEQ ID NO: 1430978 - RNA, 19 nt, Homo sapiens
  misc_RNA (1)...(19): siRNA sense strand
ggguggugcugacuuugag

SEQ ID NO: 1430979 - RNA, 19 nt, Homo sapiens
  misc_RNA (1)...(19): siRNA sense strand
ccacacaacuggucucaua

SEQ ID NO: 1430980 - RNA, 19 nt, Homo sapiens
  misc_RNA (1)...(19): siRNA sense strand
gaucugaggucaucaagaa

SEQ ID NO: 1430981 - RNA, 19 nt, Homo sapiens
  misc_RNA (1)...(19): siRNA sense strand
ggucucagcucaggaauua

SEQ ID NO: 1430982 - RNA, 19 nt, Homo sapiens
  misc_RNA (1)...(19): siRNA sense strand
ccagaaaccuagauaagaa

SEQ ID NO: 1430983 - RNA, 19 nt, Homo sapiens
  misc_RNA (1)...(19): siRNA sense strand
caacuggucucauacuuca

SEQ ID NO: 1430984 - RNA, 19 nt, Homo sapiens
  misc_RNA (1)...(19): siRNA sense strand
ggacuucacuggcuccaau

SEQ ID NO: 1430985 - RNA, 19 nt, Homo sapiens
  misc_RNA (1)...(19): siRNA sense strand
guacagaucugaggucauc

SEQ ID NO: 1430986 - RNA, 19 nt, Homo sapiens
  misc_RNA (1)...(19): siRNA sense strand
aaaggacaaucguguagua

SEQ ID NO: 1430987 - RNA, 19 nt, Homo sapiens
  misc_RNA (1)...(19): siRNA sense strand
gcaggucucgcaugaauuu

SEQ ID NO: 1430988 - RNA, 19 nt, Homo sapiens
  misc_RNA (1)...(19): siRNA sense strand
caagaacucuggaacuauc

SEQ ID NO: 1430989 - RNA, 19 nt, Homo sapiens
  misc_RNA (1)...(19): siRNA sense strand
caacaggggucaaugagua

SEQ ID NO: 1430990 - RNA, 19 nt, Homo sapiens
  misc_RNA (1)...(19): siRNA sense strand
uacaagaacucuggaacua

SEQ ID NO: 1430991 - RNA, 19 nt, Homo sapiens
  misc_RNA (1)...(19): siRNA sense strand
gcugagggaugaugacuuc

SEQ ID NO: 1430992 - RNA, 19 nt, Homo sapiens
  misc_RNA (1)...(19): siRNA sense strand
gcaugaauuugccuugaau

SEQ ID NO: 1430993 - RNA, 19 nt, Homo sapiens
  misc_RNA (1)...(19): siRNA sense strand
gagggaugaugacuuccua

SEQ ID NO: 1430994 - RNA, 19 nt, Homo sapiens
  misc_RNA (1)...(19): siRNA sense strand
ggacaucggcuccaagucu

SEQ ID NO: 1430995 - RNA, 19 nt, Homo sapiens
  misc_RNA (1)...(19): siRNA sense strand
cgccagagcugagggauga

SEQ ID NO: 1430996 - RNA, 19 nt, Homo sapiens
  misc_RNA (1)...(19): siRNA sense strand
ggaacuauccgugucaaga

SEQ ID NO: 1430997 - RNA, 19 nt, Homo sapiens
  misc_RNA (1)...(19): siRNA sense strand
gaacuauccgugucaagau

SEQ ID NO: 1430998 - RNA, 19 nt, Homo sapiens
  misc_RNA (1)...(19): siRNA sense strand
caagauuugucggguagaa

SEQ ID NO: 1430999 - RNA, 19 nt, Homo sapiens
  misc_RNA (1)...(19): siRNA sense strand
gcagcgugguucaggacua

SEQ ID NO: 1431000 - RNA, 19 nt, Homo sapiens
  misc_RNA (1)...(19): siRNA sense strand
gcuguucccugcauuugga

SEQ ID NO: 1431001 - RNA, 19 nt, Homo sapiens
  misc_RNA (1)...(19): siRNA sense strand
agaaacagaguacuccuuu

SEQ ID NO: 1431002 - RNA, 19 nt, Homo sapiens
  misc_RNA (1)...(19): siRNA sense strand
gguagaggccagaaaccua

SEQ ID NO: 1431003 - RNA, 19 nt, Homo sapiens
  misc_RNA (1)...(19): siRNA sense strand
gugcaaugcuccgauuaug

SEQ ID NO: 1431004 - RNA, 19 nt, Homo sapiens
  misc_RNA (1)...(19): siRNA sense strand
uggcaggucucgcaugaau

SEQ ID NO: 1431005 - RNA, 19 nt, Homo sapiens
  misc_RNA (1)...(19): siRNA sense strand
ggacaaucguguaguaacc

SEQ ID NO: 1431006 - RNA, 19 nt, Homo sapiens
  misc_RNA (1)...(19): siRNA sense strand
cuauggcccuaccaacuuu

SEQ ID NO: 1431007 - RNA, 19 nt, Homo sapiens
  misc_RNA (1)...(19): siRNA sense strand
gaaugcauccacccugaga

SEQ ID NO: 1431008 - RNA, 19 nt, Homo sapiens
  misc_RNA (1)...(19): siRNA sense strand
gccagaaaccuagauaaga

SEQ ID NO: 1431009 - RNA, 19 nt, Homo sapiens
  misc_RNA (1)...(19): siRNA sense strand
gcuacgcuuuggaaucuau

SEQ ID NO: 1431010 - RNA, 19 nt, Homo sapiens
  misc_RNA (1)...(19): siRNA sense strand
gugaccaucucauugacaa

SEQ ID NO: 1431011 - RNA, 19 nt, Homo sapiens
  misc_RNA (1)...(19): siRNA sense strand
gaugggaggcugucagauc

SEQ ID NO: 1431012 - RNA, 19 nt, Homo sapiens
  misc_RNA (1)...(19): siRNA sense strand
gacaagcuguucccugcau

SEQ ID NO: 1431013 - RNA, 19 nt, Homo sapiens
  misc_RNA (1)...(19): siRNA sense strand
ggacugccucgcaauacuu

SEQ ID NO: 1431014 - RNA, 19 nt, Homo sapiens
  misc_RNA (1)...(19): siRNA sense strand
gacccacucugcguccuuu

SEQ ID NO: 1431015 - RNA, 19 nt, Homo sapiens
  misc_RNA (1)...(19): siRNA sense strand
caacuuugcacccaucauc

SEQ ID NO: 1431016 - RNA, 19 nt, Homo sapiens
  misc_RNA (1)...(19): siRNA sense strand
ccaugucagugaucauugu

SEQ ID NO: 1431017 - RNA, 19 nt, Homo sapiens
  misc_RNA (1)...(19): siRNA sense strand
gagcuuggccggacugaac

SEQ ID NO: 1431018 - RNA, 19 nt, Homo sapiens
  misc_RNA (1)...(19): siRNA sense strand
ccucgaaccugcccauguc

SEQ ID NO: 1431019 - RNA, 19 nt, Homo sapiens
  misc_RNA (1)...(19): siRNA sense strand
ggaauuaaaggacaaucgu

SEQ ID NO: 1431020 - RNA, 19 nt, Homo sapiens
  misc_RNA (1)...(19): siRNA sense strand
caggugcaaugcuccgauu

SEQ ID NO: 1431021 - RNA, 19 nt, Homo sapiens
  misc_RNA (1)...(19): siRNA sense strand
ucgcagaagugcccacaca

SEQ ID NO: 1431022 - RNA, 19 nt, Homo sapiens
  misc_RNA (1)...(19): siRNA sense strand
ucucagcucaggaauuaaa

SEQ ID NO: 1431023 - RNA, 19 nt, Homo sapiens
  misc_RNA (1)...(19): siRNA sense strand
aaacagaguacuccuuucu

SEQ ID NO: 1431024 - RNA, 19 nt, Homo sapiens
  misc_RNA (1)...(19): siRNA sense strand
cagcuugaguaccgcuuug

SEQ ID NO: 1431025 - RNA, 19 nt, Homo sapiens
  misc_RNA (1)...(19): siRNA sense strand
cacaacuggucucauacuu

SEQ ID NO: 1431026 - RNA, 19 nt, Homo sapiens
  misc_RNA (1)...(19): siRNA sense strand
cgcaauacuucaugcuguu

SEQ ID NO: 1431027 - RNA, 19 nt, Homo sapiens
  misc_RNA (1)...(19): siRNA sense strand
guacuccuuucuggacuau

SEQ ID NO: 1431028 - RNA, 19 nt, Homo sapiens
  misc_RNA (1)...(19): siRNA sense strand
gauuguguccagccaggua

SEQ ID NO: 1431029 - RNA, 19 nt, Homo sapiens
  misc_RNA (1)...(19): siRNA sense strand
ggagguagaggccagaaac

SEQ ID NO: 1431030 - RNA, 19 nt, Homo sapiens
  misc_RNA (1)...(19): siRNA sense strand
cgcaugaauuugccuugaa

SEQ ID NO: 1431031 - RNA, 19 nt, Homo sapiens
  misc_RNA (1)...(19): siRNA sense strand
ugguucagcuguccauuuc

SEQ ID NO: 1431032 - RNA, 19 nt, Homo sapiens
  misc_RNA (1)...(19): siRNA sense strand
cagcgugguucaggacuau

SEQ ID NO: 1431033 - RNA, 19 nt, Homo sapiens
  misc_RNA (1)...(19): siRNA sense strand
gaggccagaaaccuagaua

SEQ ID NO: 1431034 - RNA, 19 nt, Homo sapiens
  misc_RNA (1)...(19): siRNA sense strand
caagcuguucccugcauuu

SEQ ID NO: 1431035 - RNA, 19 nt, Homo sapiens
  misc_RNA (1)...(19): siRNA sense strand
ggucaaugaguaccugaug

SEQ ID NO: 1431036 - RNA, 19 nt, Homo sapiens
  misc_RNA (1)...(19): siRNA sense strand
cggcugaguuugaaugcau

SEQ ID NO: 1431037 - RNA, 19 nt, Homo sapiens
  misc_RNA (1)...(19): siRNA sense strand
ggcagucccggcugaguuu

SEQ ID NO: 1431038 - RNA, 19 nt, Homo sapiens
  misc_RNA (1)...(19): siRNA sense strand
cauggaagcguuucucagu

SEQ ID NO: 1431039 - RNA, 19 nt, Homo sapiens
  misc_RNA (1)...(19): siRNA sense strand
ggccagaaaccuagauaag

SEQ ID NO: 1431040 - RNA, 19 nt, Homo sapiens
  misc_RNA (1)...(19): siRNA sense strand
gcccugaguucuccaagac

SEQ ID NO: 1431041 - RNA, 19 nt, Homo sapiens
  misc_RNA (1)...(19): siRNA sense strand
uguggguggugcugacuuu

SEQ ID NO: 1431042 - RNA, 19 nt, Homo sapiens
  misc_RNA (1)...(19): siRNA sense strand
acaaggacaucggcuccaa

SEQ ID NO: 1431043 - RNA, 19 nt, Homo sapiens
  misc_RNA (1)...(19): siRNA sense strand
ccugugaccaucucauuga

SEQ ID NO: 1431044 - RNA, 19 nt, Homo sapiens
  misc_RNA (1)...(19): siRNA sense strand
ccgccagggugaugggaaa

SEQ ID NO: 1431045 - RNA, 19 nt, Homo sapiens
  misc_RNA (1)...(19): siRNA sense strand
gcagaagugcccacacaac

SEQ ID NO: 1431046 - RNA, 19 nt, Homo sapiens
  misc_RNA (1)...(19): siRNA sense strand
gcaauacuucaugcuguug

SEQ ID NO: 1431047 - RNA, 19 nt, Homo sapiens
  misc_RNA (1)...(19): siRNA sense strand
gcaggcauccagggcauug

SEQ ID NO: 1431048 - RNA, 19 nt, Homo sapiens
  misc_RNA (1)...(19): siRNA sense strand
ucgcaugaauuugccuuga

SEQ ID NO: 1431049 - RNA, 19 nt, Homo sapiens
  misc_RNA (1)...(19): siRNA sense strand
cuccaagacucuacagcuu

SEQ ID NO: 1431050 - RNA, 19 nt, Homo sapiens
  misc_RNA (1)...(19): siRNA sense strand
ggugcaaugcuccgauuau

SEQ ID NO: 1431051 - RNA, 19 nt, Homo sapiens
  misc_RNA (1)...(19): siRNA sense strand
gggacugccucgcaauacu

SEQ ID NO: 1431052 - RNA, 19 nt, Homo sapiens
  misc_RNA (1)...(19): siRNA sense strand
acuggcaggucucgcauga

SEQ ID NO: 1431053 - RNA, 19 nt, Homo sapiens
  misc_RNA (1)...(19): siRNA sense strand
ucaccugacucccuacacu

SEQ ID NO: 1431054 - RNA, 19 nt, Homo sapiens
  misc_RNA (1)...(19): siRNA sense strand
gcgacauugugcaguuugu

SEQ ID NO: 1431055 - RNA, 19 nt, Homo sapiens
  misc_RNA (1)...(19): siRNA sense strand
uaguaaccauggagguaga

SEQ ID NO: 1431056 - RNA, 19 nt, Homo sapiens
  misc_RNA (1)...(19): siRNA sense strand
gcccaugucagugaucauu

SEQ ID NO: 1431057 - RNA, 19 nt, Homo sapiens
  misc_RNA (1)...(19): siRNA sense strand
gaacaaccugaacccuaca

SEQ ID NO: 1431058 - RNA, 19 nt, Homo sapiens
  misc_RNA (1)...(19): siRNA sense strand
gaaaccuagauaagaagga

SEQ ID NO: 1431059 - RNA, 19 nt, Homo sapiens
  misc_RNA (1)...(19): siRNA sense strand
gcuuugagacaguccagaa

SEQ ID NO: 1431060 - RNA, 19 nt, Homo sapiens
  misc_RNA (1)...(19): siRNA sense strand
aacuauccgugucaagauu

SEQ ID NO: 1431061 - RNA, 19 nt, Homo sapiens
  misc_RNA (1)...(19): siRNA sense strand
agaccgugcucgcagaagu

SEQ ID NO: 1431062 - RNA, 19 nt, Homo sapiens
  misc_RNA (1)...(19): siRNA sense strand
ccgcgacauugugcaguuu

SEQ ID NO: 1431063 - RNA, 19 nt, Homo sapiens
  misc_RNA (1)...(19): siRNA sense strand
gaggcugucagaucaacuu

SEQ ID NO: 1431064 - RNA, 19 nt, Homo sapiens
  misc_RNA (1)...(19): siRNA sense strand
gcuuuggaaucuaugacau

SEQ ID NO: 1431065 - RNA, 19 nt, Homo sapiens
  misc_RNA (1)...(19): siRNA sense strand
cgacauugugcaguuugua

SEQ ID NO: 1431066 - RNA, 19 nt, Homo sapiens
  misc_RNA (1)...(19): siRNA sense strand
uguaguaaccauggaggua

SEQ ID NO: 1431067 - RNA, 19 nt, Homo sapiens
  misc_RNA (1)...(19): siRNA sense strand
gcugucagaucaacuucac

SEQ ID NO: 1431068 - RNA, 19 nt, Homo sapiens
  misc_RNA (1)...(19): siRNA sense strand
uuaaaggacaaucguguag

SEQ ID NO: 1431069 - RNA, 19 nt, Homo sapiens
  misc_RNA (1)...(19): siRNA sense strand
ucuauggcccuaccaacuu

SEQ ID NO: 1431070 - RNA, 19 nt, Homo sapiens
  misc_RNA (1)...(19): siRNA sense strand
augggaggcugucagauca

SEQ ID NO: 1431071 - RNA, 19 nt, Homo sapiens
  misc_RNA (1)...(19): siRNA sense strand
ccagggugaugggaaaugg

SEQ ID NO: 1431072 - RNA, 19 nt, Homo sapiens
  misc_RNA (1)...(19): siRNA sense strand
cagcucaggaauuaaagga

SEQ ID NO: 1431073 - RNA, 19 nt, Homo sapiens
  misc_RNA (1)...(19): siRNA sense strand
cagaagugcccacacaacu

SEQ ID NO: 1431074 - RNA, 19 nt, Homo sapiens
  misc_RNA (1)...(19): siRNA sense strand
acaagcuguucccugcauu

SEQ ID NO: 1431075 - RNA, 19 nt, Homo sapiens
  misc_RNA (1)...(19): siRNA sense strand
aagaaaagcuacaagaacu

SEQ ID NO: 1431076 - RNA, 19 nt, Homo sapiens
  misc_RNA (1)...(19): siRNA sense strand
gcauccacccugagaagca

SEQ ID NO: 1431077 - RNA, 19 nt, Homo sapiens
  misc_RNA (1)...(19): siRNA sense strand
acuccuuucuggacuaugu

SEQ ID NO: 1431078 - RNA, 19 nt, Homo sapiens
  misc_RNA (1)...(19): siRNA sense strand
ggguggugcugacuuugag

SEQ ID NO: 1431079 - RNA, 19 nt, Homo sapiens
  misc_RNA (1)...(19): siRNA sense strand
ccacacaacuggucucaua

SEQ ID NO: 1431080 - RNA, 19 nt, Homo sapiens
  misc_RNA (1)...(19): siRNA sense strand
gaucugaggucaucaagaa

SEQ ID NO: 1431081 - RNA, 19 nt, Homo sapiens
  misc_RNA (1)...(19): siRNA sense strand
ggucucagcucaggaauua

SEQ ID NO: 1431082 - RNA, 19 nt, Homo sapiens
  misc_RNA (1)...(19): siRNA sense strand
ccagaaaccuagauaagaa

SEQ ID NO: 1431083 - RNA, 19 nt, Homo sapiens
  misc_RNA (1)...(19): siRNA sense strand
caacuggucucauacuuca

SEQ ID NO: 1431084 - RNA, 19 nt, Homo sapiens
  misc_RNA (1)...(19): siRNA sense strand
ggacuucacuggcuccaau

SEQ ID NO: 1431085 - RNA, 19 nt, Homo sapiens
  misc_RNA (1)...(19): siRNA sense strand
guacagaucugaggucauc

SEQ ID NO: 1431086 - RNA, 19 nt, Homo sapiens
  misc_RNA (1)...(19): siRNA sense strand
aaaggacaaucguguagua

SEQ ID NO: 1431087 - RNA, 19 nt, Homo sapiens
  misc_RNA (1)...(19): siRNA sense strand
gcaggucucgcaugaauuu

SEQ ID NO: 1431088 - RNA, 19 nt, Homo sapiens
  misc_RNA (1)...(19): siRNA sense strand
caagaacucuggaacuauc

SEQ ID NO: 1431089 - RNA, 19 nt, Homo sapiens
  misc_RNA (1)...(19): siRNA sense strand
caacaggggucaaugagua

SEQ ID NO: 1431090 - RNA, 19 nt, Homo sapiens
  misc_RNA (1)...(19): siRNA sense strand
uacaagaacucuggaacua

SEQ ID NO: 1431091 - RNA, 19 nt, Homo sapiens
  misc_RNA (1)...(19): siRNA sense strand
gcugagggaugaugacuuc

SEQ ID NO: 1431092 - RNA, 19 nt, Homo sapiens
  misc_RNA (1)...(19): siRNA sense strand
gcaugaauuugccuugaau

SEQ ID NO: 1431093 - RNA, 19 nt, Homo sapiens
  misc_RNA (1)...(19): siRNA sense strand
gagggaugaugacuuccua

SEQ ID NO: 1431094 - RNA, 19 nt, Homo sapiens
  misc_RNA (1)...(19): siRNA sense strand
ggacaucggcuccaagucu

SEQ ID NO: 1431095 - RNA, 19 nt, Homo sapiens
  misc_RNA (1)...(19): siRNA sense strand
cgccagagcugagggauga

SEQ ID NO: 1431096 - RNA, 19 nt, Homo sapiens
  misc_RNA (1)...(19): siRNA sense strand
ggaacuauccgugucaaga

SEQ ID NO: 1431097 - RNA, 19 nt, Homo sapiens
  misc_RNA (1)...(19): siRNA sense strand
gaacuauccgugucaagau

SEQ ID NO: 1431098 - RNA, 19 nt, Homo sapiens
  misc_RNA (1)...(19): siRNA sense strand
caagauuugucggguagaa

SEQ ID NO: 1431099 - RNA, 19 nt, Homo sapiens
  misc_RNA (1)...(19): siRNA sense strand
gcagcgugguucaggacua

SEQ ID NO: 1431100 - RNA, 19 nt, Homo sapiens
  misc_RNA (1)...(19): siRNA sense strand
gcuguucccugcauuugga

SEQ ID NO: 1431101 - RNA, 19 nt, Homo sapiens
  misc_RNA (1)...(19): siRNA sense strand
agaaacagaguacuccuuu

SEQ ID NO: 1431102 - RNA, 19 nt, Homo sapiens
  misc_RNA (1)...(19): siRNA sense strand
gguagaggccagaaaccua

SEQ ID NO: 1431103 - RNA, 19 nt, Homo sapiens
  misc_RNA (1)...(19): siRNA sense strand
gugcaaugcuccgauuaug

SEQ ID NO: 1431104 - RNA, 19 nt, Homo sapiens
  misc_RNA (1)...(19): siRNA sense strand
uggcaggucucgcaugaau

SEQ ID NO: 1431105 - RNA, 19 nt, Homo sapiens
  misc_RNA (1)...(19): siRNA sense strand
ggacaaucguguaguaacc

SEQ ID NO: 1431106 - RNA, 19 nt, Homo sapiens
  misc_RNA (1)...(19): siRNA sense strand
cuauggcccuaccaacuuu

SEQ ID NO: 1431107 - RNA, 19 nt, Homo sapiens
  misc_RNA (1)...(19): siRNA sense strand
gaaugcauccacccugaga

SEQ ID NO: 1431108 - RNA, 19 nt, Homo sapiens
  misc_RNA (1)...(19): siRNA sense strand
gccagaaaccuagauaaga

SEQ ID NO: 1431109 - RNA, 19 nt, Homo sapiens
  misc_RNA (1)...(19): siRNA sense strand
gcuacgcuuuggaaucuau

SEQ ID NO: 1431110 - RNA, 19 nt, Homo sapiens
  misc_RNA (1)...(19): siRNA sense strand
gugaccaucucauugacaa

SEQ ID NO: 1431111 - RNA, 19 nt, Homo sapiens
  misc_RNA (1)...(19): siRNA sense strand
gaugggaggcugucagauc

SEQ ID NO: 1431112 - RNA, 19 nt, Homo sapiens
  misc_RNA (1)...(19): siRNA sense strand
gacaagcuguucccugcau

SEQ ID NO: 1431113 - RNA, 19 nt, Homo sapiens
  misc_RNA (1)...(19): siRNA sense strand
ggacugccucgcaauacuu

SEQ ID NO: 1431114 - RNA, 19 nt, Homo sapiens
  misc_RNA (1)...(19): siRNA sense strand
gacccacucugcguccuuu

SEQ ID NO: 1431115 - RNA, 19 nt, Homo sapiens
  misc_RNA (1)...(19): siRNA sense strand
caacuuugcacccaucauc

SEQ ID NO: 1431116 - RNA, 19 nt, Homo sapiens
  misc_RNA (1)...(19): siRNA sense strand
ccaugucagugaucauugu

SEQ ID NO: 1431117 - RNA, 19 nt, Homo sapiens
  misc_RNA (1)...(19): siRNA sense strand
gagcuuggccggacugaac

SEQ ID NO: 1431118 - RNA, 19 nt, Homo sapiens
  misc_RNA (1)...(19): siRNA sense strand
ccucgaaccugcccauguc

SEQ ID NO: 1431119 - RNA, 19 nt, Homo sapiens
  misc_RNA (1)...(19): siRNA sense strand
ggaauuaaaggacaaucgu

SEQ ID NO: 1431120 - RNA, 19 nt, Homo sapiens
  misc_RNA (1)...(19): siRNA sense strand
caggugcaaugcuccgauu

SEQ ID NO: 1431121 - RNA, 19 nt, Homo sapiens
  misc_RNA (1)...(19): siRNA sense strand
ucgcagaagugcccacaca

SEQ ID NO: 1431122 - RNA, 19 nt, Homo sapiens
  misc_RNA (1)...(19): siRNA sense strand
ucucagcucaggaauuaaa

SEQ ID NO: 1431123 - RNA, 19 nt, Homo sapiens
  misc_RNA (1)...(19): siRNA sense strand
aaacagaguacuccuuucu

SEQ ID NO: 1431124 - RNA, 19 nt, Homo sapiens
  misc_RNA (1)...(19): siRNA sense strand
cagcuugaguaccgcuuug

SEQ ID NO: 1431125 - RNA, 19 nt, Homo sapiens
  misc_RNA (1)...(19): siRNA sense strand
cacaacuggucucauacuu

SEQ ID NO: 1431126 - RNA, 19 nt, Homo sapiens
  misc_RNA (1)...(19): siRNA sense strand
cgcaauacuucaugcuguu

SEQ ID NO: 1431127 - RNA, 19 nt, Homo sapiens
  misc_RNA (1)...(19): siRNA sense strand
guacuccuuucuggacuau

SEQ ID NO: 1431128 - RNA, 19 nt, Homo sapiens
  misc_RNA (1)...(19): siRNA sense strand
gauuguguccagccaggua

SEQ ID NO: 1431129 - RNA, 19 nt, Homo sapiens
  misc_RNA (1)...(19): siRNA sense strand
ggagguagaggccagaaac

SEQ ID NO: 1431130 - RNA, 19 nt, Homo sapiens
  misc_RNA (1)...(19): siRNA sense strand
cgcaugaauuugccuugaa

SEQ ID NO: 1431131 - RNA, 19 nt, Homo sapiens
  misc_RNA (1)...(19): siRNA sense strand
ugguucagcuguccauuuc

SEQ ID NO: 1431132 - RNA, 19 nt, Homo sapiens
  misc_RNA (1)...(19): siRNA sense strand
cagcgugguucaggacuau

SEQ ID NO: 1431133 - RNA, 19 nt, Homo sapiens
  misc_RNA (1)...(19): siRNA sense strand
gaggccagaaaccuagaua

SEQ ID NO: 1431134 - RNA, 19 nt, Homo sapiens
  misc_RNA (1)...(19): siRNA sense strand
caagcuguucccugcauuu

SEQ ID NO: 1431135 - RNA, 19 nt, Homo sapiens
  misc_RNA (1)...(19): siRNA sense strand
ggucaaugaguaccugaug

SEQ ID NO: 1431136 - RNA, 19 nt, Homo sapiens
  misc_RNA (1)...(19): siRNA sense strand
cggcugaguuugaaugcau

SEQ ID NO: 1431137 - RNA, 19 nt, Homo sapiens
  misc_RNA (1)...(19): siRNA sense strand
ggcagucccggcugaguuu

SEQ ID NO: 1431138 - RNA, 19 nt, Homo sapiens
  misc_RNA (1)...(19): siRNA sense strand
cauggaagcguuucucagu

SEQ ID NO: 1431139 - RNA, 19 nt, Homo sapiens
  misc_RNA (1)...(19): siRNA sense strand
ggccagaaaccuagauaag

SEQ ID NO: 1431140 - RNA, 19 nt, Homo sapiens
  misc_RNA (1)...(19): siRNA sense strand
gcccugaguucuccaagac

SEQ ID NO: 1431141 - RNA, 19 nt, Homo sapiens
  misc_RNA (1)...(19): siRNA sense strand
uguggguggugcugacuuu

SEQ ID NO: 1431142 - RNA, 19 nt, Homo sapiens
  misc_RNA (1)...(19): siRNA sense strand
acaaggacaucggcuccaa

SEQ ID NO: 1431143 - RNA, 19 nt, Homo sapiens
  misc_RNA (1)...(19): siRNA sense strand
ccugugaccaucucauuga

SEQ ID NO: 1431144 - RNA, 19 nt, Homo sapiens
  misc_RNA (1)...(19): siRNA sense strand
ccgccagggugaugggaaa

SEQ ID NO: 1431145 - RNA, 19 nt, Homo sapiens
  misc_RNA (1)...(19): siRNA sense strand
gcagaagugcccacacaac

SEQ ID NO: 1431146 - RNA, 19 nt, Homo sapiens
  misc_RNA (1)...(19): siRNA sense strand
gcaauacuucaugcuguug

SEQ ID NO: 1431147 - RNA, 19 nt, Homo sapiens
  misc_RNA (1)...(19): siRNA sense strand
gcaggcauccagggcauug

SEQ ID NO: 1431148 - RNA, 19 nt, Homo sapiens
  misc_RNA (1)...(19): siRNA sense strand
ucgcaugaauuugccuuga

SEQ ID NO: 1431149 - RNA, 19 nt, Homo sapiens
  misc_RNA (1)...(19): siRNA sense strand
cuccaagacucuacagcuu

SEQ ID NO: 1431150 - RNA, 19 nt, Homo sapiens
  misc_RNA (1)...(19): siRNA sense strand
ggugcaaugcuccgauuau

SEQ ID NO: 1431151 - RNA, 19 nt, Homo sapiens
  misc_RNA (1)...(19): siRNA sense strand
gggacugccucgcaauacu

SEQ ID NO: 1431152 - RNA, 19 nt, Homo sapiens
  misc_RNA (1)...(19): siRNA sense strand
acuggcaggucucgcauga

SEQ ID NO: 1431153 - RNA, 19 nt, Homo sapiens
  misc_RNA (1)...(19): siRNA sense strand
ucaccugacucccuacacu

SEQ ID NO: 1431154 - RNA, 19 nt, Homo sapiens
  misc_RNA (1)...(19): siRNA sense strand
gcgacauugugcaguuugu

SEQ ID NO: 1431155 - RNA, 19 nt, Homo sapiens
  misc_RNA (1)...(19): siRNA sense strand
uaguaaccauggagguaga

SEQ ID NO: 1431156 - RNA, 19 nt, Homo sapiens
  misc_RNA (1)...(19): siRNA sense strand
gcccaugucagugaucauu

SEQ ID NO: 1431157 - RNA, 19 nt, Homo sapiens
  misc_RNA (1)...(19): siRNA sense strand
gaacaaccugaacccuaca

SEQ ID NO: 1431158 - RNA, 19 nt, Homo sapiens
  misc_RNA (1)...(19): siRNA sense strand
gaaaccuagauaagaagga

SEQ ID NO: 1431159 - RNA, 19 nt, Homo sapiens
  misc_RNA (1)...(19): siRNA sense strand
gcuuugagacaguccagaa

SEQ ID NO: 1431160 - RNA, 19 nt, Homo sapiens
  misc_RNA (1)...(19): siRNA sense strand
aacuauccgugucaagauu

SEQ ID NO: 1431161 - RNA, 19 nt, Homo sapiens
  misc_RNA (1)...(19): siRNA sense strand
agaccgugcucgcagaagu

SEQ ID NO: 1431162 - RNA, 19 nt, Homo sapiens
  misc_RNA (1)...(19): siRNA sense strand
ccgcgacauugugcaguuu

SEQ ID NO: 1431163 - RNA, 19 nt, Homo sapiens
  misc_RNA (1)...(19): siRNA sense strand
gaggcugucagaucaacuu

SEQ ID NO: 1431164 - RNA, 19 nt, Homo sapiens
  misc_RNA (1)...(19): siRNA sense strand
gcuuuggaaucuaugacau

SEQ ID NO: 1431165 - RNA, 19 nt, Homo sapiens
  misc_RNA (1)...(19): siRNA sense strand
cgacauugugcaguuugua

SEQ ID NO: 1431166 - RNA, 19 nt, Homo sapiens
  misc_RNA (1)...(19): siRNA sense strand
uguaguaaccauggaggua

SEQ ID NO: 1431167 - RNA, 19 nt, Homo sapiens
  misc_RNA (1)...(19): siRNA sense strand
gcugucagaucaacuucac

SEQ ID NO: 1431168 - RNA, 19 nt, Homo sapiens
  misc_RNA (1)...(19): siRNA sense strand
uuaaaggacaaucguguag

SEQ ID NO: 1431169 - RNA, 19 nt, Homo sapiens
  misc_RNA (1)...(19): siRNA sense strand
ucuauggcccuaccaacuu

SEQ ID NO: 1431170 - RNA, 19 nt, Homo sapiens
  misc_RNA (1)...(19): siRNA sense strand
augggaggcugucagauca

SEQ ID NO: 1431171 - RNA, 19 nt, Homo sapiens
  misc_RNA (1)...(19): siRNA sense strand
ccagggugaugggaaaugg

SEQ ID NO: 1431172 - RNA, 19 nt, Homo sapiens
  misc_RNA (1)...(19): siRNA sense strand
cagcucaggaauuaaagga

SEQ ID NO: 1431173 - RNA, 19 nt, Homo sapiens
  misc_RNA (1)...(19): siRNA sense strand
cagaagugcccacacaacu

SEQ ID NO: 1431174 - RNA, 19 nt, Homo sapiens
  misc_RNA (1)...(19): siRNA sense strand
acaagcuguucccugcauu

SEQ ID NO: 1431175 - RNA, 19 nt, Homo sapiens
  misc_RNA (1)...(19): siRNA sense strand
aagaaaagcuacaagaacu

SEQ ID NO: 1431176 - RNA, 19 nt, Homo sapiens
  misc_RNA (1)...(19): siRNA sense strand
gcauccacccugagaagca

SEQ ID NO: 1431177 - RNA, 19 nt, Homo sapiens
  misc_RNA (1)...(19): siRNA sense strand
acuccuuucuggacuaugu

SEQ ID NO: 1431178 - RNA, 19 nt, Homo sapiens
  misc_RNA (1)...(19): siRNA sense strand
ggguggugcugacuuugag

SEQ ID NO: 1431179 - RNA, 19 nt, Homo sapiens
  misc_RNA (1)...(19): siRNA sense strand
ccacacaacuggucucaua

SEQ ID NO: 1431180 - RNA, 19 nt, Homo sapiens
  misc_RNA (1)...(19): siRNA sense strand
gaucugaggucaucaagaa

SEQ ID NO: 1431181 - RNA, 19 nt, Homo sapiens
  misc_RNA (1)...(19): siRNA sense strand
ggucucagcucaggaauua

SEQ ID NO: 1431182 - RNA, 19 nt, Homo sapiens
  misc_RNA (1)...(19): siRNA sense strand
ccagaaaccuagauaagaa

SEQ ID NO: 1431183 - RNA, 19 nt, Homo sapiens
  misc_RNA (1)...(19): siRNA sense strand
caacuggucucauacuuca

SEQ ID NO: 1431184 - RNA, 19 nt, Homo sapiens
  misc_RNA (1)...(19): siRNA sense strand
ggacuucacuggcuccaau

SEQ ID NO: 1431185 - RNA, 19 nt, Homo sapiens
  misc_RNA (1)...(19): siRNA sense strand
guacagaucugaggucauc

SEQ ID NO: 1431186 - RNA, 19 nt, Homo sapiens
  misc_RNA (1)...(19): siRNA sense strand
aaaggacaaucguguagua

SEQ ID NO: 1431187 - RNA, 19 nt, Homo sapiens
  misc_RNA (1)...(19): siRNA sense strand
gcaggucucgcaugaauuu

SEQ ID NO: 1431188 - RNA, 19 nt, Homo sapiens
  misc_RNA (1)...(19): siRNA sense strand
caagaacucuggaacuauc

SEQ ID NO: 1431189 - RNA, 19 nt, Homo sapiens
  misc_RNA (1)...(19): siRNA sense strand
caacaggggucaaugagua

SEQ ID NO: 1431190 - RNA, 19 nt, Homo sapiens
  misc_RNA (1)...(19): siRNA sense strand
uacaagaacucuggaacua

SEQ ID NO: 1431191 - RNA, 19 nt, Homo sapiens
  misc_RNA (1)...(19): siRNA sense strand
gcugagggaugaugacuuc

SEQ ID NO: 1431192 - RNA, 19 nt, Homo sapiens
  misc_RNA (1)...(19): siRNA sense strand
gcaugaauuugccuugaau

SEQ ID NO: 1431193 - RNA, 19 nt, Homo sapiens
  misc_RNA (1)...(19): siRNA sense strand
gagggaugaugacuuccua

SEQ ID NO: 1431194 - RNA, 19 nt, Homo sapiens
  misc_RNA (1)...(19): siRNA sense strand
ggacaucggcuccaagucu

SEQ ID NO: 1431195 - RNA, 19 nt, Homo sapiens
  misc_RNA (1)...(19): siRNA sense strand
cgccagagcugagggauga

SEQ ID NO: 1431196 - RNA, 19 nt, Homo sapiens
  misc_RNA (1)...(19): siRNA sense strand
ggaacuauccgugucaaga

SEQ ID NO: 1431197 - RNA, 19 nt, Homo sapiens
  misc_RNA (1)...(19): siRNA sense strand
gaacuauccgugucaagau

SEQ ID NO: 1431198 - RNA, 19 nt, Homo sapiens
  misc_RNA (1)...(19): siRNA sense strand
caagauuugucggguagaa

SEQ ID NO: 1431199 - RNA, 19 nt, Homo sapiens
  misc_RNA (1)...(19): siRNA sense strand
gcagcgugguucaggacua

SEQ ID NO: 1431200 - RNA, 19 nt, Homo sapiens
  misc_RNA (1)...(19): siRNA sense strand
gcuguucccugcauuugga

SEQ ID NO: 1431201 - RNA, 19 nt, Homo sapiens
  misc_RNA (1)...(19): siRNA sense strand
agaaacagaguacuccuuu

SEQ ID NO: 1431202 - RNA, 19 nt, Homo sapiens
  misc_RNA (1)...(19): siRNA sense strand
gguagaggccagaaaccua

SEQ ID NO: 1431203 - RNA, 19 nt, Homo sapiens
  misc_RNA (1)...(19): siRNA sense strand
gugcaaugcuccgauuaug

SEQ ID NO: 1431204 - RNA, 19 nt, Homo sapiens
  misc_RNA (1)...(19): siRNA sense strand
uggcaggucucgcaugaau

SEQ ID NO: 1431205 - RNA, 19 nt, Homo sapiens
  misc_RNA (1)...(19): siRNA sense strand
ggacaaucguguaguaacc

SEQ ID NO: 1431206 - RNA, 19 nt, Homo sapiens
  misc_RNA (1)...(19): siRNA sense strand
cuauggcccuaccaacuuu

SEQ ID NO: 1431207 - RNA, 19 nt, Homo sapiens
  misc_RNA (1)...(19): siRNA sense strand
gaaugcauccacccugaga

SEQ ID NO: 1431208 - RNA, 19 nt, Homo sapiens
  misc_RNA (1)...(19): siRNA sense strand
gccagaaaccuagauaaga

SEQ ID NO: 1431209 - RNA, 19 nt, Homo sapiens
  misc_RNA (1)...(19): siRNA sense strand
gcuacgcuuuggaaucuau

SEQ ID NO: 1431210 - RNA, 19 nt, Homo sapiens
  misc_RNA (1)...(19): siRNA sense strand
gugaccaucucauugacaa

SEQ ID NO: 1431211 - RNA, 19 nt, Homo sapiens
  misc_RNA (1)...(19): siRNA sense strand
gaugggaggcugucagauc

SEQ ID NO: 1431212 - RNA, 19 nt, Homo sapiens
  misc_RNA (1)...(19): siRNA sense strand
gacaagcuguucccugcau

SEQ ID NO: 1431213 - RNA, 19 nt, Homo sapiens
  misc_RNA (1)...(19): siRNA sense strand
ggacugccucgcaauacuu

SEQ ID NO: 1431214 - RNA, 19 nt, Homo sapiens
  misc_RNA (1)...(19): siRNA sense strand
gacccacucugcguccuuu

SEQ ID NO: 1431215 - RNA, 19 nt, Homo sapiens
  misc_RNA (1)...(19): siRNA sense strand
caacuuugcacccaucauc

SEQ ID NO: 1431216 - RNA, 19 nt, Homo sapiens
  misc_RNA (1)...(19): siRNA sense strand
ccaugucagugaucauugu

SEQ ID NO: 1431217 - RNA, 19 nt, Homo sapiens
  misc_RNA (1)...(19): siRNA sense strand
gagcuuggccggacugaac

SEQ ID NO: 1431218 - RNA, 19 nt, Homo sapiens
  misc_RNA (1)...(19): siRNA sense strand
ccucgaaccugcccauguc

SEQ ID NO: 1431219 - RNA, 19 nt, Homo sapiens
  misc_RNA (1)...(19): siRNA sense strand
ggaauuaaaggacaaucgu

SEQ ID NO: 1431220 - RNA, 19 nt, Homo sapiens
  misc_RNA (1)...(19): siRNA sense strand
caggugcaaugcuccgauu

SEQ ID NO: 1431221 - RNA, 19 nt, Homo sapiens
  misc_RNA (1)...(19): siRNA sense strand
ucgcagaagugcccacaca

SEQ ID NO: 1431222 - RNA, 19 nt, Homo sapiens
  misc_RNA (1)...(19): siRNA sense strand
ucucagcucaggaauuaaa

SEQ ID NO: 1431223 - RNA, 19 nt, Homo sapiens
  misc_RNA (1)...(19): siRNA sense strand
aaacagaguacuccuuucu

SEQ ID NO: 1431224 - RNA, 19 nt, Homo sapiens
  misc_RNA (1)...(19): siRNA sense strand
cagcuugaguaccgcuuug

SEQ ID NO: 1431225 - RNA, 19 nt, Homo sapiens
  misc_RNA (1)...(19): siRNA sense strand
cacaacuggucucauacuu

SEQ ID NO: 1431226 - RNA, 19 nt, Homo sapiens
  misc_RNA (1)...(19): siRNA sense strand
cgcaauacuucaugcuguu

SEQ ID NO: 1431227 - RNA, 19 nt, Homo sapiens
  misc_RNA (1)...(19): siRNA sense strand
guacuccuuucuggacuau

SEQ ID NO: 1431228 - RNA, 19 nt, Homo sapiens
  misc_RNA (1)...(19): siRNA sense strand
gauuguguccagccaggua

SEQ ID NO: 1431229 - RNA, 19 nt, Homo sapiens
  misc_RNA (1)...(19): siRNA sense strand
ggagguagaggccagaaac

SEQ ID NO: 1431230 - RNA, 19 nt, Homo sapiens
  misc_RNA (1)...(19): siRNA sense strand
cgcaugaauuugccuugaa

SEQ ID NO: 1431231 - RNA, 19 nt, Homo sapiens
  misc_RNA (1)...(19): siRNA sense strand
ugguucagcuguccauuuc

SEQ ID NO: 1431232 - RNA, 19 nt, Homo sapiens
  misc_RNA (1)...(19): siRNA sense strand
cagcgugguucaggacuau

SEQ ID NO: 1431233 - RNA, 19 nt, Homo sapiens
  misc_RNA (1)...(19): siRNA sense strand
gaggccagaaaccuagaua

SEQ ID NO: 1431234 - RNA, 19 nt, Homo sapiens
  misc_RNA (1)...(19): siRNA sense strand
caagcuguucccugcauuu

SEQ ID NO: 1431235 - RNA, 19 nt, Homo sapiens
  misc_RNA (1)...(19): siRNA sense strand
ggucaaugaguaccugaug

SEQ ID NO: 1431236 - RNA, 19 nt, Homo sapiens
  misc_RNA (1)...(19): siRNA sense strand
cggcugaguuugaaugcau

SEQ ID NO: 1431237 - RNA, 19 nt, Homo sapiens
  misc_RNA (1)...(19): siRNA sense strand
ggcagucccggcugaguuu

SEQ ID NO: 1431238 - RNA, 19 nt, Homo sapiens
  misc_RNA (1)...(19): siRNA sense strand
cauggaagcguuucucagu

SEQ ID NO: 1431239 - RNA, 19 nt, Homo sapiens
  misc_RNA (1)...(19): siRNA sense strand
ggccagaaaccuagauaag

SEQ ID NO: 1431240 - RNA, 19 nt, Homo sapiens
  misc_RNA (1)...(19): siRNA sense strand
gcccugaguucuccaagac

SEQ ID NO: 1431241 - RNA, 19 nt, Homo sapiens
  misc_RNA (1)...(19): siRNA sense strand
uguggguggugcugacuuu

SEQ ID NO: 1431242 - RNA, 19 nt, Homo sapiens
  misc_RNA (1)...(19): siRNA sense strand
acaaggacaucggcuccaa

SEQ ID NO: 1431243 - RNA, 19 nt, Homo sapiens
  misc_RNA (1)...(19): siRNA sense strand
ccugugaccaucucauuga

SEQ ID NO: 1431244 - RNA, 19 nt, Homo sapiens
  misc_RNA (1)...(19): siRNA sense strand
ccgccagggugaugggaaa

SEQ ID NO: 1431245 - RNA, 19 nt, Homo sapiens
  misc_RNA (1)...(19): siRNA sense strand
gcagaagugcccacacaac

SEQ ID NO: 1431246 - RNA, 19 nt, Homo sapiens
  misc_RNA (1)...(19): siRNA sense strand
gcaauacuucaugcuguug

SEQ ID NO: 1431247 - RNA, 19 nt, Homo sapiens
  misc_RNA (1)...(19): siRNA sense strand
gcaggcauccagggcauug

SEQ ID NO: 1431248 - RNA, 19 nt, Homo sapiens
  misc_RNA (1)...(19): siRNA sense strand
ucgcaugaauuugccuuga

SEQ ID NO: 1431249 - RNA, 19 nt, Homo sapiens
  misc_RNA (1)...(19): siRNA sense strand
cuccaagacucuacagcuu

SEQ ID NO: 1431250 - RNA, 19 nt, Homo sapiens
  misc_RNA (1)...(19): siRNA sense strand
ggugcaaugcuccgauuau

SEQ ID NO: 1431251 - RNA, 19 nt, Homo sapiens
  misc_RNA (1)...(19): siRNA sense strand
gggacugccucgcaauacu

SEQ ID NO: 1431252 - RNA, 19 nt, Homo sapiens
  misc_RNA (1)...(19): siRNA sense strand
acuggcaggucucgcauga

SEQ ID NO: 1431253 - RNA, 19 nt, Homo sapiens
  misc_RNA (1)...(19): siRNA sense strand
ucaccugacucccuacacu

SEQ ID NO: 1431254 - RNA, 19 nt, Homo sapiens
  misc_RNA (1)...(19): siRNA sense strand
gcgacauugugcaguuugu

SEQ ID NO: 1431255 - RNA, 19 nt, Homo sapiens
  misc_RNA (1)...(19): siRNA sense strand
uaguaaccauggagguaga

SEQ ID NO: 1431256 - RNA, 19 nt, Homo sapiens
  misc_RNA (1)...(19): siRNA sense strand
gcccaugucagugaucauu

SEQ ID NO: 1431257 - RNA, 19 nt, Homo sapiens
  misc_RNA (1)...(19): siRNA sense strand
gaacaaccugaacccuaca

SEQ ID NO: 1431258 - RNA, 19 nt, Homo sapiens
  misc_RNA (1)...(19): siRNA sense strand
gaaaccuagauaagaagga

SEQ ID NO: 1431259 - RNA, 19 nt, Homo sapiens
  misc_RNA (1)...(19): siRNA sense strand
gcuuugagacaguccagaa

SEQ ID NO: 1431260 - RNA, 19 nt, Homo sapiens
  misc_RNA (1)...(19): siRNA sense strand
aacuauccgugucaagauu

SEQ ID NO: 1431261 - RNA, 19 nt, Homo sapiens
  misc_RNA (1)...(19): siRNA sense strand
agaccgugcucgcagaagu

SEQ ID NO: 1431262 - RNA, 19 nt, Homo sapiens
  misc_RNA (1)...(19): siRNA sense strand
ccgcgacauugugcaguuu

SEQ ID NO: 1431263 - RNA, 19 nt, Homo sapiens
  misc_RNA (1)...(19): siRNA sense strand
gaggcugucagaucaacuu

SEQ ID NO: 1431264 - RNA, 19 nt, Homo sapiens
  misc_RNA (1)...(19): siRNA sense strand
gcuuuggaaucuaugacau

SEQ ID NO: 1431265 - RNA, 19 nt, Homo sapiens
  misc_RNA (1)...(19): siRNA sense strand
cgacauugugcaguuugua

SEQ ID NO: 1431266 - RNA, 19 nt, Homo sapiens
  misc_RNA (1)...(19): siRNA sense strand
uguaguaaccauggaggua

SEQ ID NO: 1431267 - RNA, 19 nt, Homo sapiens
  misc_RNA (1)...(19): siRNA sense strand
gcugucagaucaacuucac

SEQ ID NO: 1431268 - RNA, 19 nt, Homo sapiens
  misc_RNA (1)...(19): siRNA sense strand
uuaaaggacaaucguguag

SEQ ID NO: 1431269 - RNA, 19 nt, Homo sapiens
  misc_RNA (1)...(19): siRNA sense strand
ucuauggcccuaccaacuu

SEQ ID NO: 1431270 - RNA, 19 nt, Homo sapiens
  misc_RNA (1)...(19): siRNA sense strand
augggaggcugucagauca

SEQ ID NO: 1431271 - RNA, 19 nt, Homo sapiens
  misc_RNA (1)...(19): siRNA sense strand
ccagggugaugggaaaugg

SEQ ID NO: 1431272 - RNA, 19 nt, Homo sapiens
  misc_RNA (1)...(19): siRNA sense strand
cagcucaggaauuaaagga

SEQ ID NO: 1431273 - RNA, 19 nt, Homo sapiens
  misc_RNA (1)...(19): siRNA sense strand
cagaagugcccacacaacu

SEQ ID NO: 1431274 - RNA, 19 nt, Homo sapiens
  misc_RNA (1)...(19): siRNA sense strand
acaagcuguucccugcauu

SEQ ID NO: 1431275 - RNA, 19 nt, Homo sapiens
  misc_RNA (1)...(19): siRNA sense strand
aagaaaagcuacaagaacu

SEQ ID NO: 1431276 - RNA, 19 nt, Homo sapiens
  misc_RNA (1)...(19): siRNA sense strand
gcauccacccugagaagca

SEQ ID NO: 1431277 - RNA, 19 nt, Homo sapiens
  misc_RNA (1)...(19): siRNA sense strand
acuccuuucuggacuaugu

SEQ ID NO: 1431278 - RNA, 19 nt, Homo sapiens
  misc_RNA (1)...(19): siRNA sense strand
ggguggugcugacuuugag

SEQ ID NO: 1431279 - RNA, 19 nt, Homo sapiens
  misc_RNA (1)...(19): siRNA sense strand
ccacacaacuggucucaua

SEQ ID NO: 1431280 - RNA, 19 nt, Homo sapiens
  misc_RNA (1)...(19): siRNA sense strand
gaucugaggucaucaagaa

SEQ ID NO: 1431281 - RNA, 19 nt, Homo sapiens
  misc_RNA (1)...(19): siRNA sense strand
ggucucagcucaggaauua

SEQ ID NO: 1431282 - RNA, 19 nt, Homo sapiens
  misc_RNA (1)...(19): siRNA sense strand
ccagaaaccuagauaagaa

SEQ ID NO: 1431283 - RNA, 19 nt, Homo sapiens
  misc_RNA (1)...(19): siRNA sense strand
caacuggucucauacuuca

SEQ ID NO: 1431284 - RNA, 19 nt, Homo sapiens
  misc_RNA (1)...(19): siRNA sense strand
ggacuucacuggcuccaau

SEQ ID NO: 1431285 - RNA, 19 nt, Homo sapiens
  misc_RNA (1)...(19): siRNA sense strand
guacagaucugaggucauc

SEQ ID NO: 1431286 - RNA, 19 nt, Homo sapiens
  misc_RNA (1)...(19): siRNA sense strand
aaaggacaaucguguagua

SEQ ID NO: 1431287 - RNA, 19 nt, Homo sapiens
  misc_RNA (1)...(19): siRNA sense strand
gcaggucucgcaugaauuu

SEQ ID NO: 1431288 - RNA, 19 nt, Homo sapiens
  misc_RNA (1)...(19): siRNA sense strand
caagaacucuggaacuauc

SEQ ID NO: 1431289 - RNA, 19 nt, Homo sapiens
  misc_RNA (1)...(19): siRNA sense strand
caacaggggucaaugagua

SEQ ID NO: 1431290 - RNA, 19 nt, Homo sapiens
  misc_RNA (1)...(19): siRNA sense strand
uacaagaacucuggaacua

SEQ ID NO: 1431291 - RNA, 19 nt, Homo sapiens
  misc_RNA (1)...(19): siRNA sense strand
gcugagggaugaugacuuc

SEQ ID NO: 1431292 - RNA, 19 nt, Homo sapiens
  misc_RNA (1)...(19): siRNA sense strand
gcaugaauuugccuugaau

SEQ ID NO: 1431293 - RNA, 19 nt, Homo sapiens
  misc_RNA (1)...(19): siRNA sense strand
gagggaugaugacuuccua

SEQ ID NO: 1431294 - RNA, 19 nt, Homo sapiens
  misc_RNA (1)...(19): siRNA sense strand
ggacaucggcuccaagucu

SEQ ID NO: 1431295 - RNA, 19 nt, Homo sapiens
  misc_RNA (1)...(19): siRNA sense strand
cgccagagcugagggauga

SEQ ID NO: 1431296 - RNA, 19 nt, Homo sapiens
  misc_RNA (1)...(19): siRNA sense strand
ggaacuauccgugucaaga

SEQ ID NO: 1431297 - RNA, 19 nt, Homo sapiens
  misc_RNA (1)...(19): siRNA sense strand
gaacuauccgugucaagau

SEQ ID NO: 1431298 - RNA, 19 nt, Homo sapiens
  misc_RNA (1)...(19): siRNA sense strand
caagauuugucggguagaa

SEQ ID NO: 1431299 - RNA, 19 nt, Homo sapiens
  misc_RNA (1)...(19): siRNA sense strand
gcagcgugguucaggacua

SEQ ID NO: 1431300 - RNA, 19 nt, Homo sapiens
  misc_RNA (1)...(19): siRNA sense strand
gcuguucccugcauuugga

SEQ ID NO: 1431301 - RNA, 19 nt, Homo sapiens
  misc_RNA (1)...(19): siRNA sense strand
agaaacagaguacuccuuu

SEQ ID NO: 1431302 - RNA, 19 nt, Homo sapiens
  misc_RNA (1)...(19): siRNA sense strand
gguagaggccagaaaccua

SEQ ID NO: 1431303 - RNA, 19 nt, Homo sapiens
  misc_RNA (1)...(19): siRNA sense strand
gugcaaugcuccgauuaug

SEQ ID NO: 1431304 - RNA, 19 nt, Homo sapiens
  misc_RNA (1)...(19): siRNA sense strand
uggcaggucucgcaugaau

SEQ ID NO: 1431305 - RNA, 19 nt, Homo sapiens
  misc_RNA (1)...(19): siRNA sense strand
ggacaaucguguaguaacc

SEQ ID NO: 1431306 - RNA, 19 nt, Homo sapiens
  misc_RNA (1)...(19): siRNA sense strand
cuauggcccuaccaacuuu

SEQ ID NO: 1431307 - RNA, 19 nt, Homo sapiens
  misc_RNA (1)...(19): siRNA sense strand
gaaugcauccacccugaga

SEQ ID NO: 1431308 - RNA, 19 nt, Homo sapiens
  misc_RNA (1)...(19): siRNA sense strand
gccagaaaccuagauaaga

SEQ ID NO: 1431309 - RNA, 19 nt, Homo sapiens
  misc_RNA (1)...(19): siRNA sense strand
gcuacgcuuuggaaucuau

SEQ ID NO: 1431310 - RNA, 19 nt, Homo sapiens
  misc_RNA (1)...(19): siRNA sense strand
gugaccaucucauugacaa

SEQ ID NO: 1431311 - RNA, 19 nt, Homo sapiens
  misc_RNA (1)...(19): siRNA sense strand
gaugggaggcugucagauc

SEQ ID NO: 1431312 - RNA, 19 nt, Homo sapiens
  misc_RNA (1)...(19): siRNA sense strand
gacaagcuguucccugcau

SEQ ID NO: 1431313 - RNA, 19 nt, Homo sapiens
  misc_RNA (1)...(19): siRNA sense strand
ggacugccucgcaauacuu

SEQ ID NO: 1431314 - RNA, 19 nt, Homo sapiens
  misc_RNA (1)...(19): siRNA sense strand
gacccacucugcguccuuu

SEQ ID NO: 1431315 - RNA, 19 nt, Homo sapiens
  misc_RNA (1)...(19): siRNA sense strand
caacuuugcacccaucauc

SEQ ID NO: 1431316 - RNA, 19 nt, Homo sapiens
  misc_RNA (1)...(19): siRNA sense strand
ccaugucagugaucauugu

SEQ ID NO: 1431317 - RNA, 19 nt, Homo sapiens
  misc_RNA (1)...(19): siRNA sense strand
gagcuuggccggacugaac

SEQ ID NO: 1431318 - RNA, 19 nt, Homo sapiens
  misc_RNA (1)...(19): siRNA sense strand
ccucgaaccugcccauguc

SEQ ID NO: 1431319 - RNA, 19 nt, Homo sapiens
  misc_RNA (1)...(19): siRNA sense strand
ggaauuaaaggacaaucgu

SEQ ID NO: 1431320 - RNA, 19 nt, Homo sapiens
  misc_RNA (1)...(19): siRNA sense strand
caggugcaaugcuccgauu

SEQ ID NO: 1431321 - RNA, 19 nt, Homo sapiens
  misc_RNA (1)...(19): siRNA sense strand
ucgcagaagugcccacaca

SEQ ID NO: 1431322 - RNA, 19 nt, Homo sapiens
  misc_RNA (1)...(19): siRNA sense strand
ucucagcucaggaauuaaa

SEQ ID NO: 1431323 - RNA, 19 nt, Homo sapiens
  misc_RNA (1)...(19): siRNA sense strand
aaacagaguacuccuuucu

SEQ ID NO: 1431324 - RNA, 19 nt, Homo sapiens
  misc_RNA (1)...(19): siRNA sense strand
cagcuugaguaccgcuuug

SEQ ID NO: 1431325 - RNA, 19 nt, Homo sapiens
  misc_RNA (1)...(19): siRNA sense strand
cacaacuggucucauacuu

SEQ ID NO: 1431326 - RNA, 19 nt, Homo sapiens
  misc_RNA (1)...(19): siRNA sense strand
cgcaauacuucaugcuguu

SEQ ID NO: 1431327 - RNA, 19 nt, Homo sapiens
  misc_RNA (1)...(19): siRNA sense strand
guacuccuuucuggacuau

SEQ ID NO: 1431328 - RNA, 19 nt, Homo sapiens
  misc_RNA (1)...(19): siRNA sense strand
gauuguguccagccaggua

SEQ ID NO: 1431329 - RNA, 19 nt, Homo sapiens
  misc_RNA (1)...(19): siRNA sense strand
ggagguagaggccagaaac

SEQ ID NO: 1431330 - RNA, 19 nt, Homo sapiens
  misc_RNA (1)...(19): siRNA sense strand
cgcaugaauuugccuugaa

SEQ ID NO: 1431331 - RNA, 19 nt, Homo sapiens
  misc_RNA (1)...(19): siRNA sense strand
ugguucagcuguccauuuc

SEQ ID NO: 1431332 - RNA, 19 nt, Homo sapiens
  misc_RNA (1)...(19): siRNA sense strand
cagcgugguucaggacuau

SEQ ID NO: 1431333 - RNA, 19 nt, Homo sapiens
  misc_RNA (1)...(19): siRNA sense strand
gaggccagaaaccuagaua

SEQ ID NO: 1431334 - RNA, 19 nt, Homo sapiens
  misc_RNA (1)...(19): siRNA sense strand
caagcuguucccugcauuu

SEQ ID NO: 1431335 - RNA, 19 nt, Homo sapiens
  misc_RNA (1)...(19): siRNA sense strand
ggucaaugaguaccugaug

SEQ ID NO: 1431336 - RNA, 19 nt, Homo sapiens
  misc_RNA (1)...(19): siRNA sense strand
cggcugaguuugaaugcau

SEQ ID NO: 1431337 - RNA, 19 nt, Homo sapiens
  misc_RNA (1)...(19): siRNA sense strand
ggcagucccggcugaguuu

SEQ ID NO: 1431338 - RNA, 19 nt, Homo sapiens
  misc_RNA (1)...(19): siRNA sense strand
cauggaagcguuucucagu

SEQ ID NO: 1431339 - RNA, 19 nt, Homo sapiens
  misc_RNA (1)...(19): siRNA sense strand
ggccagaaaccuagauaag

SEQ ID NO: 1431340 - RNA, 19 nt, Homo sapiens
  misc_RNA (1)...(19): siRNA sense strand
gcccugaguucuccaagac

SEQ ID NO: 1431341 - RNA, 19 nt, Homo sapiens
  misc_RNA (1)...(19): siRNA sense strand
uguggguggugcugacuuu

SEQ ID NO: 1431342 - RNA, 19 nt, Homo sapiens
  misc_RNA (1)...(19): siRNA sense strand
acaaggacaucggcuccaa

SEQ ID NO: 1431343 - RNA, 19 nt, Homo sapiens
  misc_RNA (1)...(19): siRNA sense strand
ccugugaccaucucauuga

SEQ ID NO: 1431344 - RNA, 19 nt, Homo sapiens
  misc_RNA (1)...(19): siRNA sense strand
ccgccagggugaugggaaa

SEQ ID NO: 1431345 - RNA, 19 nt, Homo sapiens
  misc_RNA (1)...(19): siRNA sense strand
gcagaagugcccacacaac

SEQ ID NO: 1431346 - RNA, 19 nt, Homo sapiens
  misc_RNA (1)...(19): siRNA sense strand
gcaauacuucaugcuguug

SEQ ID NO: 1431347 - RNA, 19 nt, Homo sapiens
  misc_RNA (1)...(19): siRNA sense strand
gcaggcauccagggcauug

SEQ ID NO: 1431348 - RNA, 19 nt, Homo sapiens
  misc_RNA (1)...(19): siRNA sense strand
ucgcaugaauuugccuuga

SEQ ID NO: 1431349 - RNA, 19 nt, Homo sapiens
  misc_RNA (1)...(19): siRNA sense strand
cuccaagacucuacagcuu

SEQ ID NO: 1431350 - RNA, 19 nt, Homo sapiens
  misc_RNA (1)...(19): siRNA sense strand
ggugcaaugcuccgauuau

SEQ ID NO: 1431351 - RNA, 19 nt, Homo sapiens
  misc_RNA (1)...(19): siRNA sense strand
gggacugccucgcaauacu

SEQ ID NO: 1431352 - RNA, 19 nt, Homo sapiens
  misc_RNA (1)...(19): siRNA sense strand
acuggcaggucucgcauga

SEQ ID NO: 1431353 - RNA, 19 nt, Homo sapiens
  misc_RNA (1)...(19): siRNA sense strand
ucaccugacucccuacacu

SEQ ID NO: 1431354 - RNA, 19 nt, Homo sapiens
  misc_RNA (1)...(19): siRNA sense strand
gcgacauugugcaguuugu

SEQ ID NO: 1431355 - RNA, 19 nt, Homo sapiens
  misc_RNA (1)...(19): siRNA sense strand
uaguaaccauggagguaga

SEQ ID NO: 1431356 - RNA, 19 nt, Homo sapiens
  misc_RNA (1)...(19): siRNA sense strand
gcccaugucagugaucauu

SEQ ID NO: 1431357 - RNA, 19 nt, Homo sapiens
  misc_RNA (1)...(19): siRNA sense strand
gaacaaccugaacccuaca

SEQ ID NO: 1431358 - RNA, 19 nt, Homo sapiens
  misc_RNA (1)...(19): siRNA sense strand
gaaaccuagauaagaagga

SEQ ID NO: 1431359 - RNA, 19 nt, Homo sapiens
  misc_RNA (1)...(19): siRNA sense strand
gcuuugagacaguccagaa

SEQ ID NO: 1431360 - RNA, 19 nt, Homo sapiens
  misc_RNA (1)...(19): siRNA sense strand
aacuauccgugucaagauu

SEQ ID NO: 1431361 - RNA, 19 nt, Homo sapiens
  misc_RNA (1)...(19): siRNA sense strand
agaccgugcucgcagaagu

SEQ ID NO: 1431362 - RNA, 19 nt, Homo sapiens
  misc_RNA (1)...(19): siRNA sense strand
ccgcgacauugugcaguuu

SEQ ID NO: 1431363 - RNA, 19 nt, Homo sapiens
  misc_RNA (1)...(19): siRNA sense strand
gaggcugucagaucaacuu

SEQ ID NO: 1431364 - RNA, 19 nt, Homo sapiens
  misc_RNA (1)...(19): siRNA sense strand
gcuuuggaaucuaugacau

SEQ ID NO: 1431365 - RNA, 19 nt, Homo sapiens
  misc_RNA (1)...(19): siRNA sense strand
cgacauugugcaguuugua

SEQ ID NO: 1431366 - RNA, 19 nt, Homo sapiens
  misc_RNA (1)...(19): siRNA sense strand
uguaguaaccauggaggua

SEQ ID NO: 1431367 - RNA, 19 nt, Homo sapiens
  misc_RNA (1)...(19): siRNA sense strand
gcugucagaucaacuucac

SEQ ID NO: 1431368 - RNA, 19 nt, Homo sapiens
  misc_RNA (1)...(19): siRNA sense strand
uuaaaggacaaucguguag

SEQ ID NO: 1431369 - RNA, 19 nt, Homo sapiens
  misc_RNA (1)...(19): siRNA sense strand
ucuauggcccuaccaacuu

SEQ ID NO: 1431370 - RNA, 19 nt, Homo sapiens
  misc_RNA (1)...(19): siRNA sense strand
augggaggcugucagauca

SEQ ID NO: 1431371 - RNA, 19 nt, Homo sapiens
  misc_RNA (1)...(19): siRNA sense strand
ccagggugaugggaaaugg

SEQ ID NO: 1431372 - RNA, 19 nt, Homo sapiens
  misc_RNA (1)...(19): siRNA sense strand
cagcucaggaauuaaagga

SEQ ID NO: 1431373 - RNA, 19 nt, Homo sapiens
  misc_RNA (1)...(19): siRNA sense strand
cagaagugcccacacaacu

SEQ ID NO: 1431374 - RNA, 19 nt, Homo sapiens
  misc_RNA (1)...(19): siRNA sense strand
acaagcuguucccugcauu

SEQ ID NO: 1431375 - RNA, 19 nt, Homo sapiens
  misc_RNA (1)...(19): siRNA sense strand
aagaaaagcuacaagaacu

SEQ ID NO: 1431376 - RNA, 19 nt, Homo sapiens
  misc_RNA (1)...(19): siRNA sense strand
gcauccacccugagaagca

SEQ ID NO: 1431377 - RNA, 19 nt, Homo sapiens
  misc_RNA (1)...(19): siRNA sense strand
acuccuuucuggacuaugu

SEQ ID NO: 1431378 - RNA, 19 nt, Homo sapiens
  misc_RNA (1)...(19): siRNA sense strand
ggguggugcugacuuugag

SEQ ID NO: 1431379 - RNA, 19 nt, Homo sapiens
  misc_RNA (1)...(19): siRNA sense strand
ccacacaacuggucucaua

SEQ ID NO: 1431380 - RNA, 19 nt, Homo sapiens
  misc_RNA (1)...(19): siRNA sense strand
gaucugaggucaucaagaa

SEQ ID NO: 1431381 - RNA, 19 nt, Homo sapiens
  misc_RNA (1)...(19): siRNA sense strand
ggucucagcucaggaauua

SEQ ID NO: 1431382 - RNA, 19 nt, Homo sapiens
  misc_RNA (1)...(19): siRNA sense strand
ccagaaaccuagauaagaa

SEQ ID NO: 1431383 - RNA, 19 nt, Homo sapiens
  misc_RNA (1)...(19): siRNA sense strand
caacuggucucauacuuca

SEQ ID NO: 1431384 - RNA, 19 nt, Homo sapiens
  misc_RNA (1)...(19): siRNA sense strand
ggacuucacuggcuccaau

SEQ ID NO: 1431385 - RNA, 19 nt, Homo sapiens
  misc_RNA (1)...(19): siRNA sense strand
guacagaucugaggucauc

SEQ ID NO: 1431386 - RNA, 19 nt, Homo sapiens
  misc_RNA (1)...(19): siRNA sense strand
aaaggacaaucguguagua

SEQ ID NO: 1431387 - RNA, 19 nt, Homo sapiens
  misc_RNA (1)...(19): siRNA sense strand
gcaggucucgcaugaauuu

SEQ ID NO: 1431388 - RNA, 19 nt, Homo sapiens
  misc_RNA (1)...(19): siRNA sense strand
caagaacucuggaacuauc

SEQ ID NO: 1431389 - RNA, 19 nt, Homo sapiens
  misc_RNA (1)...(19): siRNA sense strand
caacaggggucaaugagua

SEQ ID NO: 1431390 - RNA, 19 nt, Homo sapiens
  misc_RNA (1)...(19): siRNA sense strand
uacaagaacucuggaacua

SEQ ID NO: 1431391 - RNA, 19 nt, Homo sapiens
  misc_RNA (1)...(19): siRNA sense strand
gcugagggaugaugacuuc

SEQ ID NO: 1431392 - RNA, 19 nt, Homo sapiens
  misc_RNA (1)...(19): siRNA sense strand
gcaugaauuugccuugaau

SEQ ID NO: 1431393 - RNA, 19 nt, Homo sapiens
  misc_RNA (1)...(19): siRNA sense strand
gagggaugaugacuuccua

SEQ ID NO: 1431394 - RNA, 19 nt, Homo sapiens
  misc_RNA (1)...(19): siRNA sense strand
ggacaucggcuccaagucu

SEQ ID NO: 1431395 - RNA, 19 nt, Homo sapiens
  misc_RNA (1)...(19): siRNA sense strand
cgccagagcugagggauga

SEQ ID NO: 1431396 - RNA, 19 nt, Homo sapiens
  misc_RNA (1)...(19): siRNA sense strand
ggaacuauccgugucaaga

SEQ ID NO: 1431397 - RNA, 19 nt, Homo sapiens
  misc_RNA (1)...(19): siRNA sense strand
gaacuauccgugucaagau

SEQ ID NO: 1431398 - RNA, 19 nt, Homo sapiens
  misc_RNA (1)...(19): siRNA sense strand
caagauuugucggguagaa

SEQ ID NO: 1431399 - RNA, 19 nt, Homo sapiens
  misc_RNA (1)...(19): siRNA sense strand
gcagcgugguucaggacua

SEQ ID NO: 1431400 - RNA, 19 nt, Homo sapiens
  misc_RNA (1)...(19): siRNA sense strand
gcuguucccugcauuugga

SEQ ID NO: 1431401 - RNA, 19 nt, Homo sapiens
  misc_RNA (1)...(19): siRNA sense strand
agaaacagaguacuccuuu

SEQ ID NO: 1431402 - RNA, 19 nt, Homo sapiens
  misc_RNA (1)...(19): siRNA sense strand
gguagaggccagaaaccua

SEQ ID NO: 1431403 - RNA, 19 nt, Homo sapiens
  misc_RNA (1)...(19): siRNA sense strand
gugcaaugcuccgauuaug

SEQ ID NO: 1431404 - RNA, 19 nt, Homo sapiens
  misc_RNA (1)...(19): siRNA sense strand
uggcaggucucgcaugaau

SEQ ID NO: 1431405 - RNA, 19 nt, Homo sapiens
  misc_RNA (1)...(19): siRNA sense strand
ggacaaucguguaguaacc

SEQ ID NO: 1431406 - RNA, 19 nt, Homo sapiens
  misc_RNA (1)...(19): siRNA sense strand
cuauggcccuaccaacuuu

SEQ ID NO: 1431407 - RNA, 19 nt, Homo sapiens
  misc_RNA (1)...(19): siRNA sense strand
gaaugcauccacccugaga

SEQ ID NO: 1431408 - RNA, 19 nt, Homo sapiens
  misc_RNA (1)...(19): siRNA sense strand
gccagaaaccuagauaaga

SEQ ID NO: 1431409 - RNA, 19 nt, Homo sapiens
  misc_RNA (1)...(19): siRNA sense strand
gcuacgcuuuggaaucuau

SEQ ID NO: 1431410 - RNA, 19 nt, Homo sapiens
  misc_RNA (1)...(19): siRNA sense strand
gugaccaucucauugacaa

SEQ ID NO: 1431411 - RNA, 19 nt, Homo sapiens
  misc_RNA (1)...(19): siRNA sense strand
gaugggaggcugucagauc

SEQ ID NO: 1431412 - RNA, 19 nt, Homo sapiens
  misc_RNA (1)...(19): siRNA sense strand
gacaagcuguucccugcau

SEQ ID NO: 1431413 - RNA, 19 nt, Homo sapiens
  misc_RNA (1)...(19): siRNA sense strand
ggacugccucgcaauacuu

SEQ ID NO: 1431414 - RNA, 19 nt, Homo sapiens
  misc_RNA (1)...(19): siRNA sense strand
gacccacucugcguccuuu

SEQ ID NO: 1431415 - RNA, 19 nt, Homo sapiens
  misc_RNA (1)...(19): siRNA sense strand
caacuuugcacccaucauc

SEQ ID NO: 1431416 - RNA, 19 nt, Homo sapiens
  misc_RNA (1)...(19): siRNA sense strand
ccaugucagugaucauugu

SEQ ID NO: 1431417 - RNA, 19 nt, Homo sapiens
  misc_RNA (1)...(19): siRNA sense strand
gagcuuggccggacugaac

SEQ ID NO: 1431418 - RNA, 19 nt, Homo sapiens
  misc_RNA (1)...(19): siRNA sense strand
ccucgaaccugcccauguc

SEQ ID NO: 1431419 - RNA, 19 nt, Homo sapiens
  misc_RNA (1)...(19): siRNA sense strand
ggaauuaaaggacaaucgu

SEQ ID NO: 1431420 - RNA, 19 nt, Homo sapiens
  misc_RNA (1)...(19): siRNA sense strand
caggugcaaugcuccgauu

SEQ ID NO: 1431421 - RNA, 19 nt, Homo sapiens
  misc_RNA (1)...(19): siRNA sense strand
ucgcagaagugcccacaca

SEQ ID NO: 1431422 - RNA, 19 nt, Homo sapiens
  misc_RNA (1)...(19): siRNA sense strand
ucucagcucaggaauuaaa

SEQ ID NO: 1431423 - RNA, 19 nt, Homo sapiens
  misc_RNA (1)...(19): siRNA sense strand
aaacagaguacuccuuucu

SEQ ID NO: 1431424 - RNA, 19 nt, Homo sapiens
  misc_RNA (1)...(19): siRNA sense strand
cagcuugaguaccgcuuug

SEQ ID NO: 1431425 - RNA, 19 nt, Homo sapiens
  misc_RNA (1)...(19): siRNA sense strand
cacaacuggucucauacuu

SEQ ID NO: 1431426 - RNA, 19 nt, Homo sapiens
  misc_RNA (1)...(19): siRNA sense strand
cgcaauacuucaugcuguu

SEQ ID NO: 1431427 - RNA, 19 nt, Homo sapiens
  misc_RNA (1)...(19): siRNA sense strand
guacuccuuucuggacuau

SEQ ID NO: 1431428 - RNA, 19 nt, Homo sapiens
  misc_RNA (1)...(19): siRNA sense strand
gauuguguccagccaggua

SEQ ID NO: 1431429 - RNA, 19 nt, Homo sapiens
  misc_RNA (1)...(19): siRNA sense strand
ggagguagaggccagaaac

SEQ ID NO: 1431430 - RNA, 19 nt, Homo sapiens
  misc_RNA (1)...(19): siRNA sense strand
cgcaugaauuugccuugaa

SEQ ID NO: 1431431 - RNA, 19 nt, Homo sapiens
  misc_RNA (1)...(19): siRNA sense strand
ugguucagcuguccauuuc

SEQ ID NO: 1431432 - RNA, 19 nt, Homo sapiens
  misc_RNA (1)...(19): siRNA sense strand
cagcgugguucaggacuau

SEQ ID NO: 1431433 - RNA, 19 nt, Homo sapiens
  misc_RNA (1)...(19): siRNA sense strand
gaggccagaaaccuagaua

SEQ ID NO: 1431434 - RNA, 19 nt, Homo sapiens
  misc_RNA (1)...(19): siRNA sense strand
caagcuguucccugcauuu

SEQ ID NO: 1431435 - RNA, 19 nt, Homo sapiens
  misc_RNA (1)...(19): siRNA sense strand
ggucaaugaguaccugaug

SEQ ID NO: 1431436 - RNA, 19 nt, Homo sapiens
  misc_RNA (1)...(19): siRNA sense strand
cggcugaguuugaaugcau

SEQ ID NO: 1431437 - RNA, 19 nt, Homo sapiens
  misc_RNA (1)...(19): siRNA sense strand
ggcagucccggcugaguuu

SEQ ID NO: 1431438 - RNA, 19 nt, Homo sapiens
  misc_RNA (1)...(19): siRNA sense strand
cauggaagcguuucucagu

SEQ ID NO: 1431439 - RNA, 19 nt, Homo sapiens
  misc_RNA (1)...(19): siRNA sense strand
ggccagaaaccuagauaag

SEQ ID NO: 1431440 - RNA, 19 nt, Homo sapiens
  misc_RNA (1)...(19): siRNA sense strand
gcccugaguucuccaagac

SEQ ID NO: 1431441 - RNA, 19 nt, Homo sapiens
  misc_RNA (1)...(19): siRNA sense strand
uguggguggugcugacuuu

SEQ ID NO: 1431442 - RNA, 19 nt, Homo sapiens
  misc_RNA (1)...(19): siRNA sense strand
acaaggacaucggcuccaa

SEQ ID NO: 1431443 - RNA, 19 nt, Homo sapiens
  misc_RNA (1)...(19): siRNA sense strand
ccugugaccaucucauuga

SEQ ID NO: 1431444 - RNA, 19 nt, Homo sapiens
  misc_RNA (1)...(19): siRNA sense strand
ccgccagggugaugggaaa

SEQ ID NO: 1431445 - RNA, 19 nt, Homo sapiens
  misc_RNA (1)...(19): siRNA sense strand
gcagaagugcccacacaac

SEQ ID NO: 1431446 - RNA, 19 nt, Homo sapiens
  misc_RNA (1)...(19): siRNA sense strand
gcaauacuucaugcuguug

SEQ ID NO: 1431447 - RNA, 19 nt, Homo sapiens
  misc_RNA (1)...(19): siRNA sense strand
gcaggcauccagggcauug

SEQ ID NO: 1431448 - RNA, 19 nt, Homo sapiens
  misc_RNA (1)...(19): siRNA sense strand
ucgcaugaauuugccuuga

SEQ ID NO: 1431449 - RNA, 19 nt, Homo sapiens
  misc_RNA (1)...(19): siRNA sense strand
cuccaagacucuacagcuu

SEQ ID NO: 1431450 - RNA, 19 nt, Homo sapiens
  misc_RNA (1)...(19): siRNA sense strand
ggugcaaugcuccgauuau

SEQ ID NO: 1431451 - RNA, 19 nt, Homo sapiens
  misc_RNA (1)...(19): siRNA sense strand
gggacugccucgcaauacu

SEQ ID NO: 1431452 - RNA, 19 nt, Homo sapiens
  misc_RNA (1)...(19): siRNA sense strand
acuggcaggucucgcauga

SEQ ID NO: 1431453 - RNA, 19 nt, Homo sapiens
  misc_RNA (1)...(19): siRNA sense strand
ucaccugacucccuacacu

SEQ ID NO: 1431454 - RNA, 19 nt, Homo sapiens
  misc_RNA (1)...(19): siRNA sense strand
gcgacauugugcaguuugu

SEQ ID NO: 1431455 - RNA, 19 nt, Homo sapiens
  misc_RNA (1)...(19): siRNA sense strand
uaguaaccauggagguaga

SEQ ID NO: 1431456 - RNA, 19 nt, Homo sapiens
  misc_RNA (1)...(19): siRNA sense strand
gcccaugucagugaucauu

SEQ ID NO: 1431457 - RNA, 19 nt, Homo sapiens
  misc_RNA (1)...(19): siRNA sense strand
gaacaaccugaacccuaca

SEQ ID NO: 1431458 - RNA, 19 nt, Homo sapiens
  misc_RNA (1)...(19): siRNA sense strand
gaaaccuagauaagaagga

SEQ ID NO: 1431459 - RNA, 19 nt, Homo sapiens
  misc_RNA (1)...(19): siRNA sense strand
gcuuugagacaguccagaa

SEQ ID NO: 1431460 - RNA, 19 nt, Homo sapiens
  misc_RNA (1)...(19): siRNA sense strand
aacuauccgugucaagauu

SEQ ID NO: 1431461 - RNA, 19 nt, Homo sapiens
  misc_RNA (1)...(19): siRNA sense strand
agaccgugcucgcagaagu

SEQ ID NO: 1431462 - RNA, 19 nt, Homo sapiens
  misc_RNA (1)...(19): siRNA sense strand
ccgcgacauugugcaguuu

SEQ ID NO: 1431463 - RNA, 19 nt, Homo sapiens
  misc_RNA (1)...(19): siRNA sense strand
gaggcugucagaucaacuu

SEQ ID NO: 1431464 - RNA, 19 nt, Homo sapiens
  misc_RNA (1)...(19): siRNA sense strand
gcuuuggaaucuaugacau

SEQ ID NO: 1431465 - RNA, 19 nt, Homo sapiens
  misc_RNA (1)...(19): siRNA sense strand
cgacauugugcaguuugua

SEQ ID NO: 1431466 - RNA, 19 nt, Homo sapiens
  misc_RNA (1)...(19): siRNA sense strand
uguaguaaccauggaggua

SEQ ID NO: 1431467 - RNA, 19 nt, Homo sapiens
  misc_RNA (1)...(19): siRNA sense strand
gcugucagaucaacuucac

SEQ ID NO: 1431468 - RNA, 19 nt, Homo sapiens
  misc_RNA (1)...(19): siRNA sense strand
uuaaaggacaaucguguag

SEQ ID NO: 1431469 - RNA, 19 nt, Homo sapiens
  misc_RNA (1)...(19): siRNA sense strand
ucuauggcccuaccaacuu

SEQ ID NO: 1431470 - RNA, 19 nt, Homo sapiens
  misc_RNA (1)...(19): siRNA sense strand
augggaggcugucagauca

SEQ ID NO: 1431471 - RNA, 19 nt, Homo sapiens
  misc_RNA (1)...(19): siRNA sense strand
ccagggugaugggaaaugg

SEQ ID NO: 1431472 - RNA, 19 nt, Homo sapiens
  misc_RNA (1)...(19): siRNA sense strand
cagcucaggaauuaaagga

SEQ ID NO: 1431473 - RNA, 19 nt, Homo sapiens
  misc_RNA (1)...(19): siRNA sense strand
cagaagugcccacacaacu

SEQ ID NO: 1431474 - RNA, 19 nt, Homo sapiens
  misc_RNA (1)...(19): siRNA sense strand
acaagcuguucccugcauu

SEQ ID NO: 1431475 - RNA, 19 nt, Homo sapiens
  misc_RNA (1)...(19): siRNA sense strand
aagaaaagcuacaagaacu

SEQ ID NO: 1431476 - RNA, 19 nt, Homo sapiens
  misc_RNA (1)...(19): siRNA sense strand
gcauccacccugagaagca

SEQ ID NO: 1431477 - RNA, 19 nt, Homo sapiens
  misc_RNA (1)...(19): siRNA sense strand
acuccuuucuggacuaugu

SEQ ID NO: 1431478 - RNA, 19 nt, Homo sapiens
  misc_RNA (1)...(19): siRNA sense strand
ggguggugcugacuuugag

SEQ ID NO: 1431479 - RNA, 19 nt, Homo sapiens
  misc_RNA (1)...(19): siRNA sense strand
ccacacaacuggucucaua

SEQ ID NO: 1431480 - RNA, 19 nt, Homo sapiens
  misc_RNA (1)...(19): siRNA sense strand
gaucugaggucaucaagaa

SEQ ID NO: 1431481 - RNA, 19 nt, Homo sapiens
  misc_RNA (1)...(19): siRNA sense strand
ggucucagcucaggaauua

SEQ ID NO: 1431482 - RNA, 19 nt, Homo sapiens
  misc_RNA (1)...(19): siRNA sense strand
ccagaaaccuagauaagaa

SEQ ID NO: 1431483 - RNA, 19 nt, Homo sapiens
  misc_RNA (1)...(19): siRNA sense strand
caacuggucucauacuuca

SEQ ID NO: 1431484 - RNA, 19 nt, Homo sapiens
  misc_RNA (1)...(19): siRNA sense strand
ggacuucacuggcuccaau

SEQ ID NO: 1431485 - RNA, 19 nt, Homo sapiens
  misc_RNA (1)...(19): siRNA sense strand
guacagaucugaggucauc

SEQ ID NO: 1431486 - RNA, 19 nt, Homo sapiens
  misc_RNA (1)...(19): siRNA sense strand
aaaggacaaucguguagua

SEQ ID NO: 1431487 - RNA, 19 nt, Homo sapiens
  misc_RNA (1)...(19): siRNA sense strand
gcaggucucgcaugaauuu

SEQ ID NO: 1431488 - RNA, 19 nt, Homo sapiens
  misc_RNA (1)...(19): siRNA sense strand
caagaacucuggaacuauc

SEQ ID NO: 1431489 - RNA, 19 nt, Homo sapiens
  misc_RNA (1)...(19): siRNA sense strand
caacaggggucaaugagua

SEQ ID NO: 1431490 - RNA, 19 nt, Homo sapiens
  misc_RNA (1)...(19): siRNA sense strand
uacaagaacucuggaacua

SEQ ID NO: 1431491 - RNA, 19 nt, Homo sapiens
  misc_RNA (1)...(19): siRNA sense strand
gcugagggaugaugacuuc

SEQ ID NO: 1431492 - RNA, 19 nt, Homo sapiens
  misc_RNA (1)...(19): siRNA sense strand
gcaugaauuugccuugaau

SEQ ID NO: 1431493 - RNA, 19 nt, Homo sapiens
  misc_RNA (1)...(19): siRNA sense strand
gagggaugaugacuuccua

SEQ ID NO: 1431494 - RNA, 19 nt, Homo sapiens
  misc_RNA (1)...(19): siRNA sense strand
ggacaucggcuccaagucu

SEQ ID NO: 1431495 - RNA, 19 nt, Homo sapiens
  misc_RNA (1)...(19): siRNA sense strand
cgccagagcugagggauga

SEQ ID NO: 1431496 - RNA, 19 nt, Homo sapiens
  misc_RNA (1)...(19): siRNA sense strand
ggaacuauccgugucaaga

SEQ ID NO: 1431497 - RNA, 19 nt, Homo sapiens
  misc_RNA (1)...(19): siRNA sense strand
gaacuauccgugucaagau

SEQ ID NO: 1431498 - RNA, 19 nt, Homo sapiens
  misc_RNA (1)...(19): siRNA sense strand
caagauuugucggguagaa

SEQ ID NO: 1431499 - RNA, 19 nt, Homo sapiens
  misc_RNA (1)...(19): siRNA sense strand
gcagcgugguucaggacua

SEQ ID NO: 1431500 - RNA, 19 nt, Homo sapiens
  misc_RNA (1)...(19): siRNA sense strand
gcuguucccugcauuugga

SEQ ID NO: 1431501 - RNA, 19 nt, Homo sapiens
  misc_RNA (1)...(19): siRNA sense strand
agaaacagaguacuccuuu

SEQ ID NO: 1431502 - RNA, 19 nt, Homo sapiens
  misc_RNA (1)...(19): siRNA sense strand
gguagaggccagaaaccua

SEQ ID NO: 1431503 - RNA, 19 nt, Homo sapiens
  misc_RNA (1)...(19): siRNA sense strand
gugcaaugcuccgauuaug

SEQ ID NO: 1431504 - RNA, 19 nt, Homo sapiens
  misc_RNA (1)...(19): siRNA sense strand
uggcaggucucgcaugaau

SEQ ID NO: 1431505 - RNA, 19 nt, Homo sapiens
  misc_RNA (1)...(19): siRNA sense strand
ggacaaucguguaguaacc

SEQ ID NO: 1431506 - RNA, 19 nt, Homo sapiens
  misc_RNA (1)...(19): siRNA sense strand
cuauggcccuaccaacuuu

SEQ ID NO: 1431507 - RNA, 19 nt, Homo sapiens
  misc_RNA (1)...(19): siRNA sense strand
gaaugcauccacccugaga

SEQ ID NO: 1431508 - RNA, 19 nt, Homo sapiens
  misc_RNA (1)...(19): siRNA sense strand
gccagaaaccuagauaaga

SEQ ID NO: 1431509 - RNA, 19 nt, Homo sapiens
  misc_RNA (1)...(19): siRNA sense strand
gcuacgcuuuggaaucuau

SEQ ID NO: 1431510 - RNA, 19 nt, Homo sapiens
  misc_RNA (1)...(19): siRNA sense strand
gugaccaucucauugacaa

SEQ ID NO: 1431511 - RNA, 19 nt, Homo sapiens
  misc_RNA (1)...(19): siRNA sense strand
gaugggaggcugucagauc

SEQ ID NO: 1431512 - RNA, 19 nt, Homo sapiens
  misc_RNA (1)...(19): siRNA sense strand
gacaagcuguucccugcau

SEQ ID NO: 1431513 - RNA, 19 nt, Homo sapiens
  misc_RNA (1)...(19): siRNA sense strand
ggacugccucgcaauacuu

SEQ ID NO: 1431514 - RNA, 19 nt, Homo sapiens
  misc_RNA (1)...(19): siRNA sense strand
gacccacucugcguccuuu

SEQ ID NO: 1431515 - RNA, 19 nt, Homo sapiens
  misc_RNA (1)...(19): siRNA sense strand
caacuuugcacccaucauc

SEQ ID NO: 1431516 - RNA, 19 nt, Homo sapiens
  misc_RNA (1)...(19): siRNA sense strand
ccaugucagugaucauugu

SEQ ID NO: 1431517 - RNA, 19 nt, Homo sapiens
  misc_RNA (1)...(19): siRNA sense strand
gagcuuggccggacugaac

SEQ ID NO: 1431518 - RNA, 19 nt, Homo sapiens
  misc_RNA (1)...(19): siRNA sense strand
ccucgaaccugcccauguc

SEQ ID NO: 1431519 - RNA, 19 nt, Homo sapiens
  misc_RNA (1)...(19): siRNA sense strand
ggaauuaaaggacaaucgu

SEQ ID NO: 1431520 - RNA, 19 nt, Homo sapiens
  misc_RNA (1)...(19): siRNA sense strand
caggugcaaugcuccgauu

SEQ ID NO: 1431521 - RNA, 19 nt, Homo sapiens
  misc_RNA (1)...(19): siRNA sense strand
ucgcagaagugcccacaca

SEQ ID NO: 1431522 - RNA, 19 nt, Homo sapiens
  misc_RNA (1)...(19): siRNA sense strand
ucucagcucaggaauuaaa

SEQ ID NO: 1431523 - RNA, 19 nt, Homo sapiens
  misc_RNA (1)...(19): siRNA sense strand
aaacagaguacuccuuucu

SEQ ID NO: 1431524 - RNA, 19 nt, Homo sapiens
  misc_RNA (1)...(19): siRNA sense strand
cagcuugaguaccgcuuug

SEQ ID NO: 1431525 - RNA, 19 nt, Homo sapiens
  misc_RNA (1)...(19): siRNA sense strand
cacaacuggucucauacuu

SEQ ID NO: 1431526 - RNA, 19 nt, Homo sapiens
  misc_RNA (1)...(19): siRNA sense strand
cgcaauacuucaugcuguu

SEQ ID NO: 1431527 - RNA, 19 nt, Homo sapiens
  misc_RNA (1)...(19): siRNA sense strand
guacuccuuucuggacuau

SEQ ID NO: 1431528 - RNA, 19 nt, Homo sapiens
  misc_RNA (1)...(19): siRNA sense strand
gauuguguccagccaggua

SEQ ID NO: 1431529 - RNA, 19 nt, Homo sapiens
  misc_RNA (1)...(19): siRNA sense strand
ggagguagaggccagaaac

SEQ ID NO: 1431530 - RNA, 19 nt, Homo sapiens
  misc_RNA (1)...(19): siRNA sense strand
cgcaugaauuugccuugaa

SEQ ID NO: 1431531 - RNA, 19 nt, Homo sapiens
  misc_RNA (1)...(19): siRNA sense strand
ugguucagcuguccauuuc

SEQ ID NO: 1431532 - RNA, 19 nt, Homo sapiens
  misc_RNA (1)...(19): siRNA sense strand
cagcgugguucaggacuau

SEQ ID NO: 1431533 - RNA, 19 nt, Homo sapiens
  misc_RNA (1)...(19): siRNA sense strand
gaggccagaaaccuagaua

SEQ ID NO: 1431534 - RNA, 19 nt, Homo sapiens
  misc_RNA (1)...(19): siRNA sense strand
caagcuguucccugcauuu

SEQ ID NO: 1431535 - RNA, 19 nt, Homo sapiens
  misc_RNA (1)...(19): siRNA sense strand
ggucaaugaguaccugaug

SEQ ID NO: 1431536 - RNA, 19 nt, Homo sapiens
  misc_RNA (1)...(19): siRNA sense strand
cggcugaguuugaaugcau

SEQ ID NO: 1431537 - RNA, 19 nt, Homo sapiens
  misc_RNA (1)...(19): siRNA sense strand
ggcagucccggcugaguuu

SEQ ID NO: 1431538 - RNA, 19 nt, Homo sapiens
  misc_RNA (1)...(19): siRNA sense strand
cauggaagcguuucucagu

SEQ ID NO: 1431539 - RNA, 19 nt, Homo sapiens
  misc_RNA (1)...(19): siRNA sense strand
ggccagaaaccuagauaag

SEQ ID NO: 1431540 - RNA, 19 nt, Homo sapiens
  misc_RNA (1)...(19): siRNA sense strand
gcccugaguucuccaagac

SEQ ID NO: 1431541 - RNA, 19 nt, Homo sapiens
  misc_RNA (1)...(19): siRNA sense strand
uguggguggugcugacuuu

SEQ ID NO: 1431542 - RNA, 19 nt, Homo sapiens
  misc_RNA (1)...(19): siRNA sense strand
acaaggacaucggcuccaa

SEQ ID NO: 1431543 - RNA, 19 nt, Homo sapiens
  misc_RNA (1)...(19): siRNA sense strand
ccugugaccaucucauuga

SEQ ID NO: 1431544 - RNA, 19 nt, Homo sapiens
  misc_RNA (1)...(19): siRNA sense strand
ccgccagggugaugggaaa

SEQ ID NO: 1431545 - RNA, 19 nt, Homo sapiens
  misc_RNA (1)...(19): siRNA sense strand
gcagaagugcccacacaac

SEQ ID NO: 1431546 - RNA, 19 nt, Homo sapiens
  misc_RNA (1)...(19): siRNA sense strand
gcaauacuucaugcuguug

SEQ ID NO: 1431547 - RNA, 19 nt, Homo sapiens
  misc_RNA (1)...(19): siRNA sense strand
gcaggcauccagggcauug

SEQ ID NO: 1431548 - RNA, 19 nt, Homo sapiens
  misc_RNA (1)...(19): siRNA sense strand
ucgcaugaauuugccuuga

SEQ ID NO: 1431549 - RNA, 19 nt, Homo sapiens
  misc_RNA (1)...(19): siRNA sense strand
cuccaagacucuacagcuu

SEQ ID NO: 1431550 - RNA, 19 nt, Homo sapiens
  misc_RNA (1)...(19): siRNA sense strand
ggugcaaugcuccgauuau

SEQ ID NO: 1431551 - RNA, 19 nt, Homo sapiens
  misc_RNA (1)...(19): siRNA sense strand
gggacugccucgcaauacu

SEQ ID NO: 1431552 - RNA, 19 nt, Homo sapiens
  misc_RNA (1)...(19): siRNA sense strand
acuggcaggucucgcauga

SEQ ID NO: 1431553 - RNA, 19 nt, Homo sapiens
  misc_RNA (1)...(19): siRNA sense strand
ucaccugacucccuacacu

SEQ ID NO: 1431554 - RNA, 19 nt, Homo sapiens
  misc_RNA (1)...(19): siRNA sense strand
gcgacauugugcaguuugu

SEQ ID NO: 1431555 - RNA, 19 nt, Homo sapiens
  misc_RNA (1)...(19): siRNA sense strand
uaguaaccauggagguaga

SEQ ID NO: 1431556 - RNA, 19 nt, Homo sapiens
  misc_RNA (1)...(19): siRNA sense strand
gcccaugucagugaucauu

SEQ ID NO: 1431557 - RNA, 19 nt, Homo sapiens
  misc_RNA (1)...(19): siRNA sense strand
gaacaaccugaacccuaca

SEQ ID NO: 1431558 - RNA, 19 nt, Homo sapiens
  misc_RNA (1)...(19): siRNA sense strand
gaaaccuagauaagaagga

SEQ ID NO: 1431559 - RNA, 19 nt, Homo sapiens
  misc_RNA (1)...(19): siRNA sense strand
gcuuugagacaguccagaa

SEQ ID NO: 1431560 - RNA, 19 nt, Homo sapiens
  misc_RNA (1)...(19): siRNA sense strand
aacuauccgugucaagauu

SEQ ID NO: 1431561 - RNA, 19 nt, Homo sapiens
  misc_RNA (1)...(19): siRNA sense strand
agaccgugcucgcagaagu

SEQ ID NO: 1431562 - RNA, 19 nt, Homo sapiens
  misc_RNA (1)...(19): siRNA sense strand
ccgcgacauugugcaguuu

SEQ ID NO: 1431563 - RNA, 19 nt, Homo sapiens
  misc_RNA (1)...(19): siRNA sense strand
gaggcugucagaucaacuu

SEQ ID NO: 1431564 - RNA, 19 nt, Homo sapiens
  misc_RNA (1)...(19): siRNA sense strand
gcuuuggaaucuaugacau

SEQ ID NO: 1431565 - RNA, 19 nt, Homo sapiens
  misc_RNA (1)...(19): siRNA sense strand
cgacauugugcaguuugua

SEQ ID NO: 1431566 - RNA, 19 nt, Homo sapiens
  misc_RNA (1)...(19): siRNA sense strand
uguaguaaccauggaggua

SEQ ID NO: 1431567 - RNA, 19 nt, Homo sapiens
  misc_RNA (1)...(19): siRNA sense strand
gcugucagaucaacuucac

SEQ ID NO: 1431568 - RNA, 19 nt, Homo sapiens
  misc_RNA (1)...(19): siRNA sense strand
uuaaaggacaaucguguag

SEQ ID NO: 1431569 - RNA, 19 nt, Homo sapiens
  misc_RNA (1)...(19): siRNA sense strand
ucuauggcccuaccaacuu

SEQ ID NO: 1431570 - RNA, 19 nt, Homo sapiens
  misc_RNA (1)...(19): siRNA sense strand
augggaggcugucagauca

SEQ ID NO: 1431571 - RNA, 19 nt, Homo sapiens
  misc_RNA (1)...(19): siRNA sense strand
ccagggugaugggaaaugg

SEQ ID NO: 1431572 - RNA, 19 nt, Homo sapiens
  misc_RNA (1)...(19): siRNA sense strand
cagcucaggaauuaaagga

SEQ ID NO: 1431573 - RNA, 19 nt, Homo sapiens
  misc_RNA (1)...(19): siRNA sense strand
cagaagugcccacacaacu

SEQ ID NO: 1431574 - RNA, 19 nt, Homo sapiens
  misc_RNA (1)...(19): siRNA sense strand
acaagcuguucccugcauu

SEQ ID NO: 1431575 - RNA, 19 nt, Homo sapiens
  misc_RNA (1)...(19): siRNA sense strand
aagaaaagcuacaagaacu

SEQ ID NO: 1431576 - RNA, 19 nt, Homo sapiens
  misc_RNA (1)...(19): siRNA sense strand
gcauccacccugagaagca

SEQ ID NO: 1431577 - RNA, 19 nt, Homo sapiens
  misc_RNA (1)...(19): siRNA sense strand
acuccuuucuggacuaugu

SEQ ID NO: 1431578 - RNA, 19 nt, Homo sapiens
  misc_RNA (1)...(19): siRNA sense strand
ggguggugcugacuuugag

SEQ ID NO: 1431579 - RNA, 19 nt, Homo sapiens
  misc_RNA (1)...(19): siRNA sense strand
ccacacaacuggucucaua

SEQ ID NO: 1431580 - RNA, 19 nt, Homo sapiens
  misc_RNA (1)...(19): siRNA sense strand
gaucugaggucaucaagaa

SEQ ID NO: 1431581 - RNA, 19 nt, Homo sapiens
  misc_RNA (1)...(19): siRNA sense strand
ggucucagcucaggaauua

SEQ ID NO: 1431582 - RNA, 19 nt, Homo sapiens
  misc_RNA (1)...(19): siRNA sense strand
ccagaaaccuagauaagaa

SEQ ID NO: 1431583 - RNA, 19 nt, Homo sapiens
  misc_RNA (1)...(19): siRNA sense strand
caacuggucucauacuuca

SEQ ID NO: 1431584 - RNA, 19 nt, Homo sapiens
  misc_RNA (1)...(19): siRNA sense strand
ggacuucacuggcuccaau

SEQ ID NO: 1431585 - RNA, 19 nt, Homo sapiens
  misc_RNA (1)...(19): siRNA sense strand
guacagaucugaggucauc

SEQ ID NO: 1431586 - RNA, 19 nt, Homo sapiens
  misc_RNA (1)...(19): siRNA sense strand
aaaggacaaucguguagua

SEQ ID NO: 1431587 - RNA, 19 nt, Homo sapiens
  misc_RNA (1)...(19): siRNA sense strand
gcaggucucgcaugaauuu

SEQ ID NO: 1431588 - RNA, 19 nt, Homo sapiens
  misc_RNA (1)...(19): siRNA sense strand
caagaacucuggaacuauc

SEQ ID NO: 1431589 - RNA, 19 nt, Homo sapiens
  misc_RNA (1)...(19): siRNA sense strand
caacaggggucaaugagua

SEQ ID NO: 1431590 - RNA, 19 nt, Homo sapiens
  misc_RNA (1)...(19): siRNA sense strand
uacaagaacucuggaacua

SEQ ID NO: 1431591 - RNA, 19 nt, Homo sapiens
  misc_RNA (1)...(19): siRNA sense strand
gcugagggaugaugacuuc

SEQ ID NO: 1431592 - RNA, 19 nt, Homo sapiens
  misc_RNA (1)...(19): siRNA sense strand
gcaugaauuugccuugaau

SEQ ID NO: 1431593 - RNA, 19 nt, Homo sapiens
  misc_RNA (1)...(19): siRNA sense strand
gagggaugaugacuuccua

SEQ ID NO: 1431594 - RNA, 19 nt, Homo sapiens
  misc_RNA (1)...(19): siRNA sense strand
ggacaucggcuccaagucu

SEQ ID NO: 1431595 - RNA, 19 nt, Homo sapiens
  misc_RNA (1)...(19): siRNA sense strand
cgccagagcugagggauga

SEQ ID NO: 1431596 - RNA, 19 nt, Homo sapiens
  misc_RNA (1)...(19): siRNA sense strand
ggaacuauccgugucaaga

SEQ ID NO: 1431597 - RNA, 19 nt, Homo sapiens
  misc_RNA (1)...(19): siRNA sense strand
gaacuauccgugucaagau

SEQ ID NO: 1431598 - RNA, 19 nt, Homo sapiens
  misc_RNA (1)...(19): siRNA sense strand
caagauuugucggguagaa

SEQ ID NO: 1431599 - RNA, 19 nt, Homo sapiens
  misc_RNA (1)...(19): siRNA sense strand
gcagcgugguucaggacua

SEQ ID NO: 1431600 - RNA, 19 nt, Homo sapiens
  misc_RNA (1)...(19): siRNA sense strand
gcuguucccugcauuugga

SEQ ID NO: 1431601 - RNA, 19 nt, Homo sapiens
  misc_RNA (1)...(19): siRNA sense strand
agaaacagaguacuccuuu

SEQ ID NO: 1431602 - RNA, 19 nt, Homo sapiens
  misc_RNA (1)...(19): siRNA sense strand
gguagaggccagaaaccua

SEQ ID NO: 1431603 - RNA, 19 nt, Homo sapiens
  misc_RNA (1)...(19): siRNA sense strand
gugcaaugcuccgauuaug

SEQ ID NO: 1431604 - RNA, 19 nt, Homo sapiens
  misc_RNA (1)...(19): siRNA sense strand
uggcaggucucgcaugaau

SEQ ID NO: 1431605 - RNA, 19 nt, Homo sapiens
  misc_RNA (1)...(19): siRNA sense strand
ggacaaucguguaguaacc

SEQ ID NO: 1431606 - RNA, 19 nt, Homo sapiens
  misc_RNA (1)...(19): siRNA sense strand
cuauggcccuaccaacuuu

SEQ ID NO: 1431607 - RNA, 19 nt, Homo sapiens
  misc_RNA (1)...(19): siRNA sense strand
gaaugcauccacccugaga

SEQ ID NO: 1431608 - RNA, 19 nt, Homo sapiens
  misc_RNA (1)...(19): siRNA sense strand
gccagaaaccuagauaaga

SEQ ID NO: 1431609 - RNA, 19 nt, Homo sapiens
  misc_RNA (1)...(19): siRNA sense strand
gcuacgcuuuggaaucuau

SEQ ID NO: 1431610 - RNA, 19 nt, Homo sapiens
  misc_RNA (1)...(19): siRNA sense strand
gugaccaucucauugacaa

SEQ ID NO: 1431611 - RNA, 19 nt, Homo sapiens
  misc_RNA (1)...(19): siRNA sense strand
gaugggaggcugucagauc

SEQ ID NO: 1431612 - RNA, 19 nt, Homo sapiens
  misc_RNA (1)...(19): siRNA sense strand
gacaagcuguucccugcau

SEQ ID NO: 1431613 - RNA, 19 nt, Homo sapiens
  misc_RNA (1)...(19): siRNA sense strand
ggacugccucgcaauacuu

SEQ ID NO: 1431614 - RNA, 19 nt, Homo sapiens
  misc_RNA (1)...(19): siRNA sense strand
gacccacucugcguccuuu

SEQ ID NO: 1431615 - RNA, 19 nt, Homo sapiens
  misc_RNA (1)...(19): siRNA sense strand
caacuuugcacccaucauc

SEQ ID NO: 1431616 - RNA, 19 nt, Homo sapiens
  misc_RNA (1)...(19): siRNA sense strand
ccaugucagugaucauugu

SEQ ID NO: 1431617 - RNA, 19 nt, Homo sapiens
  misc_RNA (1)...(19): siRNA sense strand
gagcuuggccggacugaac

SEQ ID NO: 1431618 - RNA, 19 nt, Homo sapiens
  misc_RNA (1)...(19): siRNA sense strand
ccucgaaccugcccauguc

SEQ ID NO: 1431619 - RNA, 19 nt, Homo sapiens
  misc_RNA (1)...(19): siRNA sense strand
ggaauuaaaggacaaucgu

SEQ ID NO: 1431620 - RNA, 19 nt, Homo sapiens
  misc_RNA (1)...(19): siRNA sense strand
caggugcaaugcuccgauu

SEQ ID NO: 1431621 - RNA, 19 nt, Homo sapiens
  misc_RNA (1)...(19): siRNA sense strand
ucgcagaagugcccacaca

SEQ ID NO: 1431622 - RNA, 19 nt, Homo sapiens
  misc_RNA (1)...(19): siRNA sense strand
ucucagcucaggaauuaaa

SEQ ID NO: 1431623 - RNA, 19 nt, Homo sapiens
  misc_RNA (1)...(19): siRNA sense strand
aaacagaguacuccuuucu

SEQ ID NO: 1431624 - RNA, 19 nt, Homo sapiens
  misc_RNA (1)...(19): siRNA sense strand
cagcuugaguaccgcuuug

SEQ ID NO: 1431625 - RNA, 19 nt, Homo sapiens
  misc_RNA (1)...(19): siRNA sense strand
cacaacuggucucauacuu

SEQ ID NO: 1431626 - RNA, 19 nt, Homo sapiens
  misc_RNA (1)...(19): siRNA sense strand
cgcaauacuucaugcuguu

SEQ ID NO: 1431627 - RNA, 19 nt, Homo sapiens
  misc_RNA (1)...(19): siRNA sense strand
guacuccuuucuggacuau

SEQ ID NO: 1431628 - RNA, 19 nt, Homo sapiens
  misc_RNA (1)...(19): siRNA sense strand
gauuguguccagccaggua

SEQ ID NO: 1431629 - RNA, 19 nt, Homo sapiens
  misc_RNA (1)...(19): siRNA sense strand
ggagguagaggccagaaac

SEQ ID NO: 1431630 - RNA, 19 nt, Homo sapiens
  misc_RNA (1)...(19): siRNA sense strand
cgcaugaauuugccuugaa

SEQ ID NO: 1431631 - RNA, 19 nt, Homo sapiens
  misc_RNA (1)...(19): siRNA sense strand
ugguucagcuguccauuuc

SEQ ID NO: 1431632 - RNA, 19 nt, Homo sapiens
  misc_RNA (1)...(19): siRNA sense strand
cagcgugguucaggacuau

SEQ ID NO: 1431633 - RNA, 19 nt, Homo sapiens
  misc_RNA (1)...(19): siRNA sense strand
gaggccagaaaccuagaua

SEQ ID NO: 1431634 - RNA, 19 nt, Homo sapiens
  misc_RNA (1)...(19): siRNA sense strand
caagcuguucccugcauuu

SEQ ID NO: 1431635 - RNA, 19 nt, Homo sapiens
  misc_RNA (1)...(19): siRNA sense strand
ggucaaugaguaccugaug

SEQ ID NO: 1431636 - RNA, 19 nt, Homo sapiens
  misc_RNA (1)...(19): siRNA sense strand
cggcugaguuugaaugcau

SEQ ID NO: 1431637 - RNA, 19 nt, Homo sapiens
  misc_RNA (1)...(19): siRNA sense strand
ggcagucccggcugaguuu

SEQ ID NO: 1431638 - RNA, 19 nt, Homo sapiens
  misc_RNA (1)...(19): siRNA sense strand
cauggaagcguuucucagu

SEQ ID NO: 1431639 - RNA, 19 nt, Homo sapiens
  misc_RNA (1)...(19): siRNA sense strand
ggccagaaaccuagauaag

SEQ ID NO: 1431640 - RNA, 19 nt, Homo sapiens
  misc_RNA (1)...(19): siRNA sense strand
gcccugaguucuccaagac

SEQ ID NO: 1431641 - RNA, 19 nt, Homo sapiens
  misc_RNA (1)...(19): siRNA sense strand
uguggguggugcugacuuu

SEQ ID NO: 1431642 - RNA, 19 nt, Homo sapiens
  misc_RNA (1)...(19): siRNA sense strand
acaaggacaucggcuccaa

SEQ ID NO: 1431643 - RNA, 19 nt, Homo sapiens
  misc_RNA (1)...(19): siRNA sense strand
ccugugaccaucucauuga

SEQ ID NO: 1431644 - RNA, 19 nt, Homo sapiens
  misc_RNA (1)...(19): siRNA sense strand
ccgccagggugaugggaaa

SEQ ID NO: 1431645 - RNA, 19 nt, Homo sapiens
  misc_RNA (1)...(19): siRNA sense strand
gcagaagugcccacacaac

SEQ ID NO: 1431646 - RNA, 19 nt, Homo sapiens
  misc_RNA (1)...(19): siRNA sense strand
gcaauacuucaugcuguug

SEQ ID NO: 1431647 - RNA, 19 nt, Homo sapiens
  misc_RNA (1)...(19): siRNA sense strand
gcaggcauccagggcauug

SEQ ID NO: 1431648 - RNA, 19 nt, Homo sapiens
  misc_RNA (1)...(19): siRNA sense strand
ucgcaugaauuugccuuga

SEQ ID NO: 1431649 - RNA, 19 nt, Homo sapiens
  misc_RNA (1)...(19): siRNA sense strand
cuccaagacucuacagcuu

SEQ ID NO: 1431650 - RNA, 19 nt, Homo sapiens
  misc_RNA (1)...(19): siRNA sense strand
ggugcaaugcuccgauuau

SEQ ID NO: 1431651 - RNA, 19 nt, Homo sapiens
  misc_RNA (1)...(19): siRNA sense strand
gggacugccucgcaauacu

SEQ ID NO: 1431652 - RNA, 19 nt, Homo sapiens
  misc_RNA (1)...(19): siRNA sense strand
acuggcaggucucgcauga

SEQ ID NO: 1431653 - RNA, 19 nt, Homo sapiens
  misc_RNA (1)...(19): siRNA sense strand
ucaccugacucccuacacu

SEQ ID NO: 1431654 - RNA, 19 nt, Homo sapiens
  misc_RNA (1)...(19): siRNA sense strand
gcgacauugugcaguuugu

SEQ ID NO: 1431655 - RNA, 19 nt, Homo sapiens
  misc_RNA (1)...(19): siRNA sense strand
uaguaaccauggagguaga

SEQ ID NO: 1431656 - RNA, 19 nt, Homo sapiens
  misc_RNA (1)...(19): siRNA sense strand
gcccaugucagugaucauu

SEQ ID NO: 1431657 - RNA, 19 nt, Homo sapiens
  misc_RNA (1)...(19): siRNA sense strand
gaacaaccugaacccuaca

SEQ ID NO: 1431658 - RNA, 19 nt, Homo sapiens
  misc_RNA (1)...(19): siRNA sense strand
gaaaccuagauaagaagga

SEQ ID NO: 1431659 - RNA, 19 nt, Homo sapiens
  misc_RNA (1)...(19): siRNA sense strand
gcuuugagacaguccagaa

SEQ ID NO: 1431660 - RNA, 19 nt, Homo sapiens
  misc_RNA (1)...(19): siRNA sense strand
aacuauccgugucaagauu

SEQ ID NO: 1431661 - RNA, 19 nt, Homo sapiens
  misc_RNA (1)...(19): siRNA sense strand
agaccgugcucgcagaagu

SEQ ID NO: 1431662 - RNA, 19 nt, Homo sapiens
  misc_RNA (1)...(19): siRNA sense strand
ccgcgacauugugcaguuu

SEQ ID NO: 1431663 - RNA, 19 nt, Homo sapiens
  misc_RNA (1)...(19): siRNA sense strand
gaggcugucagaucaacuu

SEQ ID NO: 1431664 - RNA, 19 nt, Homo sapiens
  misc_RNA (1)...(19): siRNA sense strand
gcuuuggaaucuaugacau

SEQ ID NO: 1431665 - RNA, 19 nt, Homo sapiens
  misc_RNA (1)...(19): siRNA sense strand
cgacauugugcaguuugua

SEQ ID NO: 1431666 - RNA, 19 nt, Homo sapiens
  misc_RNA (1)...(19): siRNA sense strand
uguaguaaccauggaggua

SEQ ID NO: 1431667 - RNA, 19 nt, Homo sapiens
  misc_RNA (1)...(19): siRNA sense strand
gcugucagaucaacuucac

SEQ ID NO: 1431668 - RNA, 19 nt, Homo sapiens
  misc_RNA (1)...(19): siRNA sense strand
uuaaaggacaaucguguag

SEQ ID NO: 1431669 - RNA, 19 nt, Homo sapiens
  misc_RNA (1)...(19): siRNA sense strand
ucuauggcccuaccaacuu

SEQ ID NO: 1431670 - RNA, 19 nt, Homo sapiens
  misc_RNA (1)...(19): siRNA sense strand
augggaggcugucagauca

SEQ ID NO: 1431671 - RNA, 19 nt, Homo sapiens
  misc_RNA (1)...(19): siRNA sense strand
ccagggugaugggaaaugg

SEQ ID NO: 1431672 - RNA, 19 nt, Homo sapiens
  misc_RNA (1)...(19): siRNA sense strand
cagcucaggaauuaaagga

SEQ ID NO: 1431673 - RNA, 19 nt, Homo sapiens
  misc_RNA (1)...(19): siRNA sense strand
cagaagugcccacacaacu

SEQ ID NO: 1431674 - RNA, 19 nt, Homo sapiens
  misc_RNA (1)...(19): siRNA sense strand
acaagcuguucccugcauu

SEQ ID NO: 1431675 - RNA, 19 nt, Homo sapiens
  misc_RNA (1)...(19): siRNA sense strand
aagaaaagcuacaagaacu

SEQ ID NO: 1431676 - RNA, 19 nt, Homo sapiens
  misc_RNA (1)...(19): siRNA sense strand
gcauccacccugagaagca

SEQ ID NO: 1431677 - RNA, 19 nt, Homo sapiens
  misc_RNA (1)...(19): siRNA sense strand
acuccuuucuggacuaugu

SEQ ID NO: 1431678 - RNA, 19 nt, Homo sapiens
  misc_RNA (1)...(19): siRNA sense strand
ggguggugcugacuuugag

SEQ ID NO: 1431679 - RNA, 19 nt, Homo sapiens
  misc_RNA (1)...(19): siRNA sense strand
ccacacaacuggucucaua

SEQ ID NO: 1431680 - RNA, 19 nt, Homo sapiens
  misc_RNA (1)...(19): siRNA sense strand
gaucugaggucaucaagaa

SEQ ID NO: 1431681 - RNA, 19 nt, Homo sapiens
  misc_RNA (1)...(19): siRNA sense strand
ggucucagcucaggaauua

SEQ ID NO: 1431682 - RNA, 19 nt, Homo sapiens
  misc_RNA (1)...(19): siRNA sense strand
ccagaaaccuagauaagaa

SEQ ID NO: 1431683 - RNA, 19 nt, Homo sapiens
  misc_RNA (1)...(19): siRNA sense strand
caacuggucucauacuuca

SEQ ID NO: 1431684 - RNA, 19 nt, Homo sapiens
  misc_RNA (1)...(19): siRNA sense strand
ggacuucacuggcuccaau

SEQ ID NO: 1431685 - RNA, 19 nt, Homo sapiens
  misc_RNA (1)...(19): siRNA sense strand
guacagaucugaggucauc

SEQ ID NO: 1431686 - RNA, 19 nt, Homo sapiens
  misc_RNA (1)...(19): siRNA sense strand
aaaggacaaucguguagua

SEQ ID NO: 1431687 - RNA, 19 nt, Homo sapiens
  misc_RNA (1)...(19): siRNA sense strand
gcaggucucgcaugaauuu

SEQ ID NO: 1431688 - RNA, 19 nt, Homo sapiens
  misc_RNA (1)...(19): siRNA sense strand
caagaacucuggaacuauc

SEQ ID NO: 1431689 - RNA, 19 nt, Homo sapiens
  misc_RNA (1)...(19): siRNA sense strand
caacaggggucaaugagua

SEQ ID NO: 1431690 - RNA, 19 nt, Homo sapiens
  misc_RNA (1)...(19): siRNA sense strand
uacaagaacucuggaacua

SEQ ID NO: 1431691 - RNA, 19 nt, Homo sapiens
  misc_RNA (1)...(19): siRNA sense strand
gcugagggaugaugacuuc

SEQ ID NO: 1431692 - RNA, 19 nt, Homo sapiens
  misc_RNA (1)...(19): siRNA sense strand
gcaugaauuugccuugaau

SEQ ID NO: 1431693 - RNA, 19 nt, Homo sapiens
  misc_RNA (1)...(19): siRNA sense strand
gagggaugaugacuuccua

SEQ ID NO: 1431694 - RNA, 19 nt, Homo sapiens
  misc_RNA (1)...(19): siRNA sense strand
ggacaucggcuccaagucu

SEQ ID NO: 1431695 - RNA, 19 nt, Homo sapiens
  misc_RNA (1)...(19): siRNA sense strand
cgccagagcugagggauga

SEQ ID NO: 1431696 - RNA, 19 nt, Homo sapiens
  misc_RNA (1)...(19): siRNA sense strand
ggaacuauccgugucaaga

SEQ ID NO: 1431697 - RNA, 19 nt, Homo sapiens
  misc_RNA (1)...(19): siRNA sense strand
gaacuauccgugucaagau

SEQ ID NO: 1431698 - RNA, 19 nt, Homo sapiens
  misc_RNA (1)...(19): siRNA sense strand
caagauuugucggguagaa

SEQ ID NO: 1431699 - RNA, 19 nt, Homo sapiens
  misc_RNA (1)...(19): siRNA sense strand
gcagcgugguucaggacua

SEQ ID NO: 1431700 - RNA, 19 nt, Homo sapiens
  misc_RNA (1)...(19): siRNA sense strand
gcuguucccugcauuugga

SEQ ID NO: 1431701 - RNA, 19 nt, Homo sapiens
  misc_RNA (1)...(19): siRNA sense strand
agaaacagaguacuccuuu

SEQ ID NO: 1431702 - RNA, 19 nt, Homo sapiens
  misc_RNA (1)...(19): siRNA sense strand
gguagaggccagaaaccua

SEQ ID NO: 1431703 - RNA, 19 nt, Homo sapiens
  misc_RNA (1)...(19): siRNA sense strand
gugcaaugcuccgauuaug

SEQ ID NO: 1431704 - RNA, 19 nt, Homo sapiens
  misc_RNA (1)...(19): siRNA sense strand
uggcaggucucgcaugaau

SEQ ID NO: 1431705 - RNA, 19 nt, Homo sapiens
  misc_RNA (1)...(19): siRNA sense strand
ggacaaucguguaguaacc

SEQ ID NO: 1431706 - RNA, 19 nt, Homo sapiens
  misc_RNA (1)...(19): siRNA sense strand
cuauggcccuaccaacuuu

SEQ ID NO: 1431707 - RNA, 19 nt, Homo sapiens
  misc_RNA (1)...(19): siRNA sense strand
gaaugcauccacccugaga

SEQ ID NO: 1431708 - RNA, 19 nt, Homo sapiens
  misc_RNA (1)...(19): siRNA sense strand
gccagaaaccuagauaaga

SEQ ID NO: 1431709 - RNA, 19 nt, Homo sapiens
  misc_RNA (1)...(19): siRNA sense strand
gcuacgcuuuggaaucuau

SEQ ID NO: 1431710 - RNA, 19 nt, Homo sapiens
  misc_RNA (1)...(19): siRNA sense strand
gugaccaucucauugacaa

SEQ ID NO: 1431711 - RNA, 19 nt, Homo sapiens
  misc_RNA (1)...(19): siRNA sense strand
gaugggaggcugucagauc

SEQ ID NO: 1431712 - RNA, 19 nt, Homo sapiens
  misc_RNA (1)...(19): siRNA sense strand
gacaagcuguucccugcau

SEQ ID NO: 1431713 - RNA, 19 nt, Homo sapiens
  misc_RNA (1)...(19): siRNA sense strand
ggacugccucgcaauacuu

SEQ ID NO: 1431714 - RNA, 19 nt, Homo sapiens
  misc_RNA (1)...(19): siRNA sense strand
gacccacucugcguccuuu

SEQ ID NO: 1431715 - RNA, 19 nt, Homo sapiens
  misc_RNA (1)...(19): siRNA sense strand
caacuuugcacccaucauc

SEQ ID NO: 1431716 - RNA, 19 nt, Homo sapiens
  misc_RNA (1)...(19): siRNA sense strand
ccaugucagugaucauugu

SEQ ID NO: 1431717 - RNA, 19 nt, Homo sapiens
  misc_RNA (1)...(19): siRNA sense strand
gagcuuggccggacugaac

SEQ ID NO: 1431718 - RNA, 19 nt, Homo sapiens
  misc_RNA (1)...(19): siRNA sense strand
ccucgaaccugcccauguc

SEQ ID NO: 1431719 - RNA, 19 nt, Homo sapiens
  misc_RNA (1)...(19): siRNA sense strand
ggaauuaaaggacaaucgu

SEQ ID NO: 1431720 - RNA, 19 nt, Homo sapiens
  misc_RNA (1)...(19): siRNA sense strand
caggugcaaugcuccgauu

SEQ ID NO: 1431721 - RNA, 19 nt, Homo sapiens
  misc_RNA (1)...(19): siRNA sense strand
ucgcagaagugcccacaca

SEQ ID NO: 1431722 - RNA, 19 nt, Homo sapiens
  misc_RNA (1)...(19): siRNA sense strand
ucucagcucaggaauuaaa

SEQ ID NO: 1431723 - RNA, 19 nt, Homo sapiens
  misc_RNA (1)...(19): siRNA sense strand
aaacagaguacuccuuucu

SEQ ID NO: 1431724 - RNA, 19 nt, Homo sapiens
  misc_RNA (1)...(19): siRNA sense strand
cagcuugaguaccgcuuug

SEQ ID NO: 1431725 - RNA, 19 nt, Homo sapiens
  misc_RNA (1)...(19): siRNA sense strand
cacaacuggucucauacuu

SEQ ID NO: 1431726 - RNA, 19 nt, Homo sapiens
  misc_RNA (1)...(19): siRNA sense strand
cgcaauacuucaugcuguu

SEQ ID NO: 1431727 - RNA, 19 nt, Homo sapiens
  misc_RNA (1)...(19): siRNA sense strand
guacuccuuucuggacuau

SEQ ID NO: 1431728 - RNA, 19 nt, Homo sapiens
  misc_RNA (1)...(19): siRNA sense strand
gauuguguccagccaggua

SEQ ID NO: 1431729 - RNA, 19 nt, Homo sapiens
  misc_RNA (1)...(19): siRNA sense strand
ggagguagaggccagaaac

SEQ ID NO: 1431730 - RNA, 19 nt, Homo sapiens
  misc_RNA (1)...(19): siRNA sense strand
cgcaugaauuugccuugaa

SEQ ID NO: 1431731 - RNA, 19 nt, Homo sapiens
  misc_RNA (1)...(19): siRNA sense strand
ugguucagcuguccauuuc

SEQ ID NO: 1431732 - RNA, 19 nt, Homo sapiens
  misc_RNA (1)...(19): siRNA sense strand
cagcgugguucaggacuau

SEQ ID NO: 1431733 - RNA, 19 nt, Homo sapiens
  misc_RNA (1)...(19): siRNA sense strand
gaggccagaaaccuagaua

SEQ ID NO: 1431734 - RNA, 19 nt, Homo sapiens
  misc_RNA (1)...(19): siRNA sense strand
caagcuguucccugcauuu

SEQ ID NO: 1431735 - RNA, 19 nt, Homo sapiens
  misc_RNA (1)...(19): siRNA sense strand
ggucaaugaguaccugaug

SEQ ID NO: 1431736 - RNA, 19 nt, Homo sapiens
  misc_RNA (1)...(19): siRNA sense strand
cggcugaguuugaaugcau

SEQ ID NO: 1431737 - RNA, 19 nt, Homo sapiens
  misc_RNA (1)...(19): siRNA sense strand
ggcagucccggcugaguuu

SEQ ID NO: 1431738 - RNA, 19 nt, Homo sapiens
  misc_RNA (1)...(19): siRNA sense strand
cauggaagcguuucucagu

SEQ ID NO: 1431739 - RNA, 19 nt, Homo sapiens
  misc_RNA (1)...(19): siRNA sense strand
ggccagaaaccuagauaag

SEQ ID NO: 1431740 - RNA, 19 nt, Homo sapiens
  misc_RNA (1)...(19): siRNA sense strand
gcccugaguucuccaagac

SEQ ID NO: 1431741 - RNA, 19 nt, Homo sapiens
  misc_RNA (1)...(19): siRNA sense strand
uguggguggugcugacuuu

SEQ ID NO: 1431742 - RNA, 19 nt, Homo sapiens
  misc_RNA (1)...(19): siRNA sense strand
acaaggacaucggcuccaa

SEQ ID NO: 1431743 - RNA, 19 nt, Homo sapiens
  misc_RNA (1)...(19): siRNA sense strand
ccugugaccaucucauuga

SEQ ID NO: 1431744 - RNA, 19 nt, Homo sapiens
  misc_RNA (1)...(19): siRNA sense strand
ccgccagggugaugggaaa

SEQ ID NO: 1431745 - RNA, 19 nt, Homo sapiens
  misc_RNA (1)...(19): siRNA sense strand
gcagaagugcccacacaac

SEQ ID NO: 1431746 - RNA, 19 nt, Homo sapiens
  misc_RNA (1)...(19): siRNA sense strand
gcaauacuucaugcuguug

SEQ ID NO: 1431747 - RNA, 19 nt, Homo sapiens
  misc_RNA (1)...(19): siRNA sense strand
gcaggcauccagggcauug

SEQ ID NO: 1431748 - RNA, 19 nt, Homo sapiens
  misc_RNA (1)...(19): siRNA sense strand
ucgcaugaauuugccuuga

SEQ ID NO: 1431749 - RNA, 19 nt, Homo sapiens
  misc_RNA (1)...(19): siRNA sense strand
cuccaagacucuacagcuu

SEQ ID NO: 1431750 - RNA, 19 nt, Homo sapiens
  misc_RNA (1)...(19): siRNA sense strand
ggugcaaugcuccgauuau

SEQ ID NO: 1431751 - RNA, 19 nt, Homo sapiens
  misc_RNA (1)...(19): siRNA sense strand
gggacugccucgcaauacu

SEQ ID NO: 1431752 - RNA, 19 nt, Homo sapiens
  misc_RNA (1)...(19): siRNA sense strand
acuggcaggucucgcauga

SEQ ID NO: 1431753 - RNA, 19 nt, Homo sapiens
  misc_RNA (1)...(19): siRNA sense strand
ucaccugacucccuacacu

SEQ ID NO: 1431754 - RNA, 19 nt, Homo sapiens
  misc_RNA (1)...(19): siRNA sense strand
gcgacauugugcaguuugu

SEQ ID NO: 1431755 - RNA, 19 nt, Homo sapiens
  misc_RNA (1)...(19): siRNA sense strand
uaguaaccauggagguaga

SEQ ID NO: 1431756 - RNA, 19 nt, Homo sapiens
  misc_RNA (1)...(19): siRNA sense strand
gcccaugucagugaucauu

SEQ ID NO: 1431757 - RNA, 19 nt, Homo sapiens
  misc_RNA (1)...(19): siRNA sense strand
gaacaaccugaacccuaca

SEQ ID NO: 1431758 - RNA, 19 nt, Homo sapiens
  misc_RNA (1)...(19): siRNA sense strand
gaaaccuagauaagaagga

SEQ ID NO: 1431759 - RNA, 19 nt, Homo sapiens
  misc_RNA (1)...(19): siRNA sense strand
gcuuugagacaguccagaa

SEQ ID NO: 1431760 - RNA, 19 nt, Homo sapiens
  misc_RNA (1)...(19): siRNA sense strand
aacuauccgugucaagauu

SEQ ID NO: 1431761 - RNA, 19 nt, Homo sapiens
  misc_RNA (1)...(19): siRNA sense strand
agaccgugcucgcagaagu

SEQ ID NO: 1431762 - RNA, 19 nt, Homo sapiens
  misc_RNA (1)...(19): siRNA sense strand
ccgcgacauugugcaguuu

SEQ ID NO: 1431763 - RNA, 19 nt, Homo sapiens
  misc_RNA (1)...(19): siRNA sense strand
gaggcugucagaucaacuu

SEQ ID NO: 1431764 - RNA, 19 nt, Homo sapiens
  misc_RNA (1)...(19): siRNA sense strand
gcuuuggaaucuaugacau

SEQ ID NO: 1431765 - RNA, 19 nt, Homo sapiens
  misc_RNA (1)...(19): siRNA sense strand
cgacauugugcaguuugua

SEQ ID NO: 1431766 - RNA, 19 nt, Homo sapiens
  misc_RNA (1)...(19): siRNA sense strand
uguaguaaccauggaggua

SEQ ID NO: 1431767 - RNA, 19 nt, Homo sapiens
  misc_RNA (1)...(19): siRNA sense strand
gcugucagaucaacuucac

SEQ ID NO: 1431768 - RNA, 19 nt, Homo sapiens
  misc_RNA (1)...(19): siRNA sense strand
uuaaaggacaaucguguag

SEQ ID NO: 1431769 - RNA, 19 nt, Homo sapiens
  misc_RNA (1)...(19): siRNA sense strand
ucuauggcccuaccaacuu

SEQ ID NO: 1431770 - RNA, 19 nt, Homo sapiens
  misc_RNA (1)...(19): siRNA sense strand
augggaggcugucagauca

SEQ ID NO: 1431771 - RNA, 19 nt, Homo sapiens
  misc_RNA (1)...(19): siRNA sense strand
ccagggugaugggaaaugg

SEQ ID NO: 1431772 - RNA, 19 nt, Homo sapiens
  misc_RNA (1)...(19): siRNA sense strand
cagcucaggaauuaaagga

SEQ ID NO: 1431773 - RNA, 19 nt, Homo sapiens
  misc_RNA (1)...(19): siRNA sense strand
cagaagugcccacacaacu

SEQ ID NO: 1431774 - RNA, 19 nt, Homo sapiens
  misc_RNA (1)...(19): siRNA sense strand
acaagcuguucccugcauu

SEQ ID NO: 1431775 - RNA, 19 nt, Homo sapiens
  misc_RNA (1)...(19): siRNA sense strand
aagaaaagcuacaagaacu

SEQ ID NO: 1431776 - RNA, 19 nt, Homo sapiens
  misc_RNA (1)...(19): siRNA sense strand
gcauccacccugagaagca

SEQ ID NO: 1431777 - RNA, 19 nt, Homo sapiens
  misc_RNA (1)...(19): siRNA sense strand
acuccuuucuggacuaugu

SEQ ID NO: 1431778 - RNA, 19 nt, Homo sapiens
  misc_RNA (1)...(19): siRNA sense strand
ggguggugcugacuuugag

SEQ ID NO: 1431779 - RNA, 19 nt, Homo sapiens
  misc_RNA (1)...(19): siRNA sense strand
ccacacaacuggucucaua

SEQ ID NO: 1431780 - RNA, 19 nt, Homo sapiens
  misc_RNA (1)...(19): siRNA sense strand
gaucugaggucaucaagaa

SEQ ID NO: 1431781 - RNA, 19 nt, Homo sapiens
  misc_RNA (1)...(19): siRNA sense strand
ggucucagcucaggaauua

SEQ ID NO: 1431782 - RNA, 19 nt, Homo sapiens
  misc_RNA (1)...(19): siRNA sense strand
ccagaaaccuagauaagaa

SEQ ID NO: 1431783 - RNA, 19 nt, Homo sapiens
  misc_RNA (1)...(19): siRNA sense strand
caacuggucucauacuuca

SEQ ID NO: 1431784 - RNA, 19 nt, Homo sapiens
  misc_RNA (1)...(19): siRNA sense strand
ggacuucacuggcuccaau

SEQ ID NO: 1431785 - RNA, 19 nt, Homo sapiens
  misc_RNA (1)...(19): siRNA sense strand
guacagaucugaggucauc

SEQ ID NO: 1431786 - RNA, 19 nt, Homo sapiens
  misc_RNA (1)...(19): siRNA sense strand
aaaggacaaucguguagua

SEQ ID NO: 1431787 - RNA, 19 nt, Homo sapiens
  misc_RNA (1)...(19): siRNA sense strand
gcaggucucgcaugaauuu

SEQ ID NO: 1431788 - RNA, 19 nt, Homo sapiens
  misc_RNA (1)...(19): siRNA sense strand
caagaacucuggaacuauc

SEQ ID NO: 1431789 - RNA, 19 nt, Homo sapiens
  misc_RNA (1)...(19): siRNA sense strand
caacaggggucaaugagua

SEQ ID NO: 1431790 - RNA, 19 nt, Homo sapiens
  misc_RNA (1)...(19): siRNA sense strand
uacaagaacucuggaacua

SEQ ID NO: 1431791 - RNA, 19 nt, Homo sapiens
  misc_RNA (1)...(19): siRNA sense strand
gcugagggaugaugacuuc

SEQ ID NO: 1431792 - RNA, 19 nt, Homo sapiens
  misc_RNA (1)...(19): siRNA sense strand
gcaugaauuugccuugaau

SEQ ID NO: 1431793 - RNA, 19 nt, Homo sapiens
  misc_RNA (1)...(19): siRNA sense strand
gagggaugaugacuuccua

SEQ ID NO: 1431794 - RNA, 19 nt, Homo sapiens
  misc_RNA (1)...(19): siRNA sense strand
ggacaucggcuccaagucu

SEQ ID NO: 1431795 - RNA, 19 nt, Homo sapiens
  misc_RNA (1)...(19): siRNA sense strand
cgccagagcugagggauga

SEQ ID NO: 1431796 - RNA, 19 nt, Homo sapiens
  misc_RNA (1)...(19): siRNA sense strand
ggaacuauccgugucaaga

SEQ ID NO: 1431797 - RNA, 19 nt, Homo sapiens
  misc_RNA (1)...(19): siRNA sense strand
gaacuauccgugucaagau

SEQ ID NO: 1431798 - RNA, 19 nt, Homo sapiens
  misc_RNA (1)...(19): siRNA sense strand
caagauuugucggguagaa

SEQ ID NO: 1431799 - RNA, 19 nt, Homo sapiens
  misc_RNA (1)...(19): siRNA sense strand
gcagcgugguucaggacua

SEQ ID NO: 1431800 - RNA, 19 nt, Homo sapiens
  misc_RNA (1)...(19): siRNA sense strand
gcuguucccugcauuugga

SEQ ID NO: 1431801 - RNA, 19 nt, Homo sapiens
  misc_RNA (1)...(19): siRNA sense strand
agaaacagaguacuccuuu

SEQ ID NO: 1431802 - RNA, 19 nt, Homo sapiens
  misc_RNA (1)...(19): siRNA sense strand
gguagaggccagaaaccua

SEQ ID NO: 1431803 - RNA, 19 nt, Homo sapiens
  misc_RNA (1)...(19): siRNA sense strand
gugcaaugcuccgauuaug

SEQ ID NO: 1431804 - RNA, 19 nt, Homo sapiens
  misc_RNA (1)...(19): siRNA sense strand
uggcaggucucgcaugaau

SEQ ID NO: 1431805 - RNA, 19 nt, Homo sapiens
  misc_RNA (1)...(19): siRNA sense strand
ggacaaucguguaguaacc

SEQ ID NO: 1431806 - RNA, 19 nt, Homo sapiens
  misc_RNA (1)...(19): siRNA sense strand
cuauggcccuaccaacuuu

SEQ ID NO: 1431807 - RNA, 19 nt, Homo sapiens
  misc_RNA (1)...(19): siRNA sense strand
gaaugcauccacccugaga

SEQ ID NO: 1431808 - RNA, 19 nt, Homo sapiens
  misc_RNA (1)...(19): siRNA sense strand
gccagaaaccuagauaaga

SEQ ID NO: 1431809 - RNA, 19 nt, Homo sapiens
  misc_RNA (1)...(19): siRNA sense strand
gcuacgcuuuggaaucuau

SEQ ID NO: 1431810 - RNA, 19 nt, Homo sapiens
  misc_RNA (1)...(19): siRNA sense strand
gugaccaucucauugacaa

SEQ ID NO: 1431811 - RNA, 19 nt, Homo sapiens
  misc_RNA (1)...(19): siRNA sense strand
gaugggaggcugucagauc

SEQ ID NO: 1431812 - RNA, 19 nt, Homo sapiens
  misc_RNA (1)...(19): siRNA sense strand
gacaagcuguucccugcau

SEQ ID NO: 1431813 - RNA, 19 nt, Homo sapiens
  misc_RNA (1)...(19): siRNA sense strand
ggacugccucgcaauacuu

SEQ ID NO: 1431814 - RNA, 19 nt, Homo sapiens
  misc_RNA (1)...(19): siRNA sense strand
gacccacucugcguccuuu

SEQ ID NO: 1431815 - RNA, 19 nt, Homo sapiens
  misc_RNA (1)...(19): siRNA sense strand
caacuuugcacccaucauc

SEQ ID NO: 1431816 - RNA, 19 nt, Homo sapiens
  misc_RNA (1)...(19): siRNA sense strand
ccaugucagugaucauugu

SEQ ID NO: 1431817 - RNA, 19 nt, Homo sapiens
  misc_RNA (1)...(19): siRNA sense strand
gagcuuggccggacugaac

SEQ ID NO: 1431818 - RNA, 19 nt, Homo sapiens
  misc_RNA (1)...(19): siRNA sense strand
ccucgaaccugcccauguc

SEQ ID NO: 1431819 - RNA, 19 nt, Homo sapiens
  misc_RNA (1)...(19): siRNA sense strand
ggaauuaaaggacaaucgu

SEQ ID NO: 1431820 - RNA, 19 nt, Homo sapiens
  misc_RNA (1)...(19): siRNA sense strand
caggugcaaugcuccgauu

SEQ ID NO: 1431821 - RNA, 19 nt, Homo sapiens
  misc_RNA (1)...(19): siRNA sense strand
ucgcagaagugcccacaca

SEQ ID NO: 1431822 - RNA, 19 nt, Homo sapiens
  misc_RNA (1)...(19): siRNA sense strand
ucucagcucaggaauuaaa

SEQ ID NO: 1431823 - RNA, 19 nt, Homo sapiens
  misc_RNA (1)...(19): siRNA sense strand
aaacagaguacuccuuucu

SEQ ID NO: 1431824 - RNA, 19 nt, Homo sapiens
  misc_RNA (1)...(19): siRNA sense strand
cagcuugaguaccgcuuug

SEQ ID NO: 1431825 - RNA, 19 nt, Homo sapiens
  misc_RNA (1)...(19): siRNA sense strand
cacaacuggucucauacuu

SEQ ID NO: 1431826 - RNA, 19 nt, Homo sapiens
  misc_RNA (1)...(19): siRNA sense strand
cgcaauacuucaugcuguu

SEQ ID NO: 1431827 - RNA, 19 nt, Homo sapiens
  misc_RNA (1)...(19): siRNA sense strand
guacuccuuucuggacuau

SEQ ID NO: 1431828 - RNA, 19 nt, Homo sapiens
  misc_RNA (1)...(19): siRNA sense strand
gauuguguccagccaggua

SEQ ID NO: 1431829 - RNA, 19 nt, Homo sapiens
  misc_RNA (1)...(19): siRNA sense strand
ggagguagaggccagaaac

SEQ ID NO: 1431830 - RNA, 19 nt, Homo sapiens
  misc_RNA (1)...(19): siRNA sense strand
cgcaugaauuugccuugaa

SEQ ID NO: 1431831 - RNA, 19 nt, Homo sapiens
  misc_RNA (1)...(19): siRNA sense strand
ugguucagcuguccauuuc

SEQ ID NO: 1431832 - RNA, 19 nt, Homo sapiens
  misc_RNA (1)...(19): siRNA sense strand
cagcgugguucaggacuau

SEQ ID NO: 1431833 - RNA, 19 nt, Homo sapiens
  misc_RNA (1)...(19): siRNA sense strand
gaggccagaaaccuagaua

SEQ ID NO: 1431834 - RNA, 19 nt, Homo sapiens
  misc_RNA (1)...(19): siRNA sense strand
caagcuguucccugcauuu

SEQ ID NO: 1431835 - RNA, 19 nt, Homo sapiens
  misc_RNA (1)...(19): siRNA sense strand
ggucaaugaguaccugaug

SEQ ID NO: 1431836 - RNA, 19 nt, Homo sapiens
  misc_RNA (1)...(19): siRNA sense strand
cggcugaguuugaaugcau

SEQ ID NO: 1431837 - RNA, 19 nt, Homo sapiens
  misc_RNA (1)...(19): siRNA sense strand
ggcagucccggcugaguuu

SEQ ID NO: 1431838 - RNA, 19 nt, Homo sapiens
  misc_RNA (1)...(19): siRNA sense strand
cauggaagcguuucucagu

SEQ ID NO: 1431839 - RNA, 19 nt, Homo sapiens
  misc_RNA (1)...(19): siRNA sense strand
ggccagaaaccuagauaag

SEQ ID NO: 1431840 - RNA, 19 nt, Homo sapiens
  misc_RNA (1)...(19): siRNA sense strand
gcccugaguucuccaagac

SEQ ID NO: 1431841 - RNA, 19 nt, Homo sapiens
  misc_RNA (1)...(19): siRNA sense strand
uguggguggugcugacuuu

SEQ ID NO: 1431842 - RNA, 19 nt, Homo sapiens
  misc_RNA (1)...(19): siRNA sense strand
acaaggacaucggcuccaa

SEQ ID NO: 1431843 - RNA, 19 nt, Homo sapiens
  misc_RNA (1)...(19): siRNA sense strand
ccugugaccaucucauuga

SEQ ID NO: 1431844 - RNA, 19 nt, Homo sapiens
  misc_RNA (1)...(19): siRNA sense strand
ccgccagggugaugggaaa

SEQ ID NO: 1431845 - RNA, 19 nt, Homo sapiens
  misc_RNA (1)...(19): siRNA sense strand
gcagaagugcccacacaac

SEQ ID NO: 1431846 - RNA, 19 nt, Homo sapiens
  misc_RNA (1)...(19): siRNA sense strand
gcaauacuucaugcuguug

SEQ ID NO: 1431847 - RNA, 19 nt, Homo sapiens
  misc_RNA (1)...(19): siRNA sense strand
gcaggcauccagggcauug

SEQ ID NO: 1431848 - RNA, 19 nt, Homo sapiens
  misc_RNA (1)...(19): siRNA sense strand
ucgcaugaauuugccuuga

SEQ ID NO: 1431849 - RNA, 19 nt, Homo sapiens
  misc_RNA (1)...(19): siRNA sense strand
cuccaagacucuacagcuu

SEQ ID NO: 1431850 - RNA, 19 nt, Homo sapiens
  misc_RNA (1)...(19): siRNA sense strand
ggugcaaugcuccgauuau

SEQ ID NO: 1431851 - RNA, 19 nt, Homo sapiens
  misc_RNA (1)...(19): siRNA sense strand
gggacugccucgcaauacu

SEQ ID NO: 1431852 - RNA, 19 nt, Homo sapiens
  misc_RNA (1)...(19): siRNA sense strand
acuggcaggucucgcauga

SEQ ID NO: 1431853 - RNA, 19 nt, Homo sapiens
  misc_RNA (1)...(19): siRNA sense strand
ucaccugacucccuacacu

SEQ ID NO: 1431854 - RNA, 19 nt, Homo sapiens
  misc_RNA (1)...(19): siRNA sense strand
gcgacauugugcaguuugu

SEQ ID NO: 1431855 - RNA, 19 nt, Homo sapiens
  misc_RNA (1)...(19): siRNA sense strand
uaguaaccauggagguaga

SEQ ID NO: 1431856 - RNA, 19 nt, Homo sapiens
  misc_RNA (1)...(19): siRNA sense strand
gcccaugucagugaucauu

SEQ ID NO: 1431857 - RNA, 19 nt, Homo sapiens
  misc_RNA (1)...(19): siRNA sense strand
gaacaaccugaacccuaca

SEQ ID NO: 1431858 - RNA, 19 nt, Homo sapiens
  misc_RNA (1)...(19): siRNA sense strand
gaaaccuagauaagaagga

SEQ ID NO: 1431859 - RNA, 19 nt, Homo sapiens
  misc_RNA (1)...(19): siRNA sense strand
gcuuugagacaguccagaa

SEQ ID NO: 1431860 - RNA, 19 nt, Homo sapiens
  misc_RNA (1)...(19): siRNA sense strand
aacuauccgugucaagauu

SEQ ID NO: 1431861 - RNA, 19 nt, Homo sapiens
  misc_RNA (1)...(19): siRNA sense strand
agaccgugcucgcagaagu

SEQ ID NO: 1431862 - RNA, 19 nt, Homo sapiens
  misc_RNA (1)...(19): siRNA sense strand
ccgcgacauugugcaguuu

SEQ ID NO: 1431863 - RNA, 19 nt, Homo sapiens
  misc_RNA (1)...(19): siRNA sense strand
gaggcugucagaucaacuu

SEQ ID NO: 1431864 - RNA, 19 nt, Homo sapiens
  misc_RNA (1)...(19): siRNA sense strand
gcuuuggaaucuaugacau

SEQ ID NO: 1431865 - RNA, 19 nt, Homo sapiens
  misc_RNA (1)...(19): siRNA sense strand
cgacauugugcaguuugua

SEQ ID NO: 1431866 - RNA, 19 nt, Homo sapiens
  misc_RNA (1)...(19): siRNA sense strand
uguaguaaccauggaggua

SEQ ID NO: 1431867 - RNA, 19 nt, Homo sapiens
  misc_RNA (1)...(19): siRNA sense strand
gcugucagaucaacuucac

SEQ ID NO: 1431868 - RNA, 19 nt, Homo sapiens
  misc_RNA (1)...(19): siRNA sense strand
uuaaaggacaaucguguag

SEQ ID NO: 1431869 - RNA, 19 nt, Homo sapiens
  misc_RNA (1)...(19): siRNA sense strand
ucuauggcccuaccaacuu

SEQ ID NO: 1431870 - RNA, 19 nt, Homo sapiens
  misc_RNA (1)...(19): siRNA sense strand
augggaggcugucagauca

SEQ ID NO: 1431871 - RNA, 19 nt, Homo sapiens
  misc_RNA (1)...(19): siRNA sense strand
ccagggugaugggaaaugg

SEQ ID NO: 1431872 - RNA, 19 nt, Homo sapiens
  misc_RNA (1)...(19): siRNA sense strand
cagcucaggaauuaaagga

SEQ ID NO: 1431873 - RNA, 19 nt, Homo sapiens
  misc_RNA (1)...(19): siRNA sense strand
cagaagugcccacacaacu

SEQ ID NO: 1431874 - RNA, 19 nt, Homo sapiens
  misc_RNA (1)...(19): siRNA sense strand
acaagcuguucccugcauu

SEQ ID NO: 1431875 - RNA, 19 nt, Homo sapiens
  misc_RNA (1)...(19): siRNA sense strand
aagaaaagcuacaagaacu

SEQ ID NO: 1431876 - RNA, 19 nt, Homo sapiens
  misc_RNA (1)...(19): siRNA sense strand
gcauccacccugagaagca

SEQ ID NO: 1431877 - RNA, 19 nt, Homo sapiens
  misc_RNA (1)...(19): siRNA sense strand
acuccuuucuggacuaugu

SEQ ID NO: 1431878 - RNA, 19 nt, Homo sapiens
  misc_RNA (1)...(19): siRNA sense strand
ggguggugcugacuuugag

SEQ ID NO: 1431879 - RNA, 19 nt, Homo sapiens
  misc_RNA (1)...(19): siRNA sense strand
ccacacaacuggucucaua

SEQ ID NO: 1431880 - RNA, 19 nt, Homo sapiens
  misc_RNA (1)...(19): siRNA sense strand
gaucugaggucaucaagaa

SEQ ID NO: 1431881 - RNA, 19 nt, Homo sapiens
  misc_RNA (1)...(19): siRNA sense strand
ggucucagcucaggaauua

SEQ ID NO: 1431882 - RNA, 19 nt, Homo sapiens
  misc_RNA (1)...(19): siRNA sense strand
ccagaaaccuagauaagaa

SEQ ID NO: 1431883 - RNA, 19 nt, Homo sapiens
  misc_RNA (1)...(19): siRNA sense strand
caacuggucucauacuuca

SEQ ID NO: 1431884 - RNA, 19 nt, Homo sapiens
  misc_RNA (1)...(19): siRNA sense strand
ggacuucacuggcuccaau

SEQ ID NO: 1431885 - RNA, 19 nt, Homo sapiens
  misc_RNA (1)...(19): siRNA sense strand
guacagaucugaggucauc

SEQ ID NO: 1431886 - RNA, 19 nt, Homo sapiens
  misc_RNA (1)...(19): siRNA sense strand
aaaggacaaucguguagua

SEQ ID NO: 1431887 - RNA, 19 nt, Homo sapiens
  misc_RNA (1)...(19): siRNA sense strand
gcaggucucgcaugaauuu

SEQ ID NO: 1431888 - RNA, 19 nt, Homo sapiens
  misc_RNA (1)...(19): siRNA sense strand
caagaacucuggaacuauc

SEQ ID NO: 1431889 - RNA, 19 nt, Homo sapiens
  misc_RNA (1)...(19): siRNA sense strand
caacaggggucaaugagua

SEQ ID NO: 1431890 - RNA, 19 nt, Homo sapiens
  misc_RNA (1)...(19): siRNA sense strand
uacaagaacucuggaacua

SEQ ID NO: 1431891 - RNA, 19 nt, Homo sapiens
  misc_RNA (1)...(19): siRNA sense strand
gcugagggaugaugacuuc

SEQ ID NO: 1431892 - RNA, 19 nt, Homo sapiens
  misc_RNA (1)...(19): siRNA sense strand
gcaugaauuugccuugaau

SEQ ID NO: 1431893 - RNA, 19 nt, Homo sapiens
  misc_RNA (1)...(19): siRNA sense strand
gagggaugaugacuuccua

SEQ ID NO: 1431894 - RNA, 19 nt, Homo sapiens
  misc_RNA (1)...(19): siRNA sense strand
ggacaucggcuccaagucu

SEQ ID NO: 1431895 - RNA, 19 nt, Homo sapiens
  misc_RNA (1)...(19): siRNA sense strand
cgccagagcugagggauga

SEQ ID NO: 1431896 - RNA, 19 nt, Homo sapiens
  misc_RNA (1)...(19): siRNA sense strand
ggaacuauccgugucaaga

SEQ ID NO: 1431897 - RNA, 19 nt, Homo sapiens
  misc_RNA (1)...(19): siRNA sense strand
gaacuauccgugucaagau

SEQ ID NO: 1431898 - RNA, 19 nt, Homo sapiens
  misc_RNA (1)...(19): siRNA sense strand
caagauuugucggguagaa

SEQ ID NO: 1431899 - RNA, 19 nt, Homo sapiens
  misc_RNA (1)...(19): siRNA sense strand
gcagcgugguucaggacua

SEQ ID NO: 1431900 - RNA, 19 nt, Homo sapiens
  misc_RNA (1)...(19): siRNA sense strand
gcuguucccugcauuugga

SEQ ID NO: 1431901 - RNA, 19 nt, Homo sapiens
  misc_RNA (1)...(19): siRNA sense strand
agaaacagaguacuccuuu

SEQ ID NO: 1431902 - RNA, 19 nt, Homo sapiens
  misc_RNA (1)...(19): siRNA sense strand
gguagaggccagaaaccua

SEQ ID NO: 1431903 - RNA, 19 nt, Homo sapiens
  misc_RNA (1)...(19): siRNA sense strand
gugcaaugcuccgauuaug

SEQ ID NO: 1431904 - RNA, 19 nt, Homo sapiens
  misc_RNA (1)...(19): siRNA sense strand
uggcaggucucgcaugaau

SEQ ID NO: 1431905 - RNA, 19 nt, Homo sapiens
  misc_RNA (1)...(19): siRNA sense strand
ggacaaucguguaguaacc

SEQ ID NO: 1431906 - RNA, 19 nt, Homo sapiens
  misc_RNA (1)...(19): siRNA sense strand
cuauggcccuaccaacuuu

SEQ ID NO: 1431907 - RNA, 19 nt, Homo sapiens
  misc_RNA (1)...(19): siRNA sense strand
gaaugcauccacccugaga

SEQ ID NO: 1431908 - RNA, 19 nt, Homo sapiens
  misc_RNA (1)...(19): siRNA sense strand
gccagaaaccuagauaaga

SEQ ID NO: 1431909 - RNA, 19 nt, Homo sapiens
  misc_RNA (1)...(19): siRNA sense strand
gcuacgcuuuggaaucuau

SEQ ID NO: 1431910 - RNA, 19 nt, Homo sapiens
  misc_RNA (1)...(19): siRNA sense strand
gugaccaucucauugacaa

SEQ ID NO: 1431911 - RNA, 19 nt, Homo sapiens
  misc_RNA (1)...(19): siRNA sense strand
gaugggaggcugucagauc

SEQ ID NO: 1431912 - RNA, 19 nt, Homo sapiens
  misc_RNA (1)...(19): siRNA sense strand
gacaagcuguucccugcau

SEQ ID NO: 1431913 - RNA, 19 nt, Homo sapiens
  misc_RNA (1)...(19): siRNA sense strand
ggacugccucgcaauacuu

SEQ ID NO: 1431914 - RNA, 19 nt, Homo sapiens
  misc_RNA (1)...(19): siRNA sense strand
gacccacucugcguccuuu

SEQ ID NO: 1431915 - RNA, 19 nt, Homo sapiens
  misc_RNA (1)...(19): siRNA sense strand
caacuuugcacccaucauc

SEQ ID NO: 1431916 - RNA, 19 nt, Homo sapiens
  misc_RNA (1)...(19): siRNA sense strand
ccaugucagugaucauugu

SEQ ID NO: 1431917 - RNA, 19 nt, Homo sapiens
  misc_RNA (1)...(19): siRNA sense strand
gagcuuggccggacugaac

SEQ ID NO: 1431918 - RNA, 19 nt, Homo sapiens
  misc_RNA (1)...(19): siRNA sense strand
ccucgaaccugcccauguc

SEQ ID NO: 1431919 - RNA, 19 nt, Homo sapiens
  misc_RNA (1)...(19): siRNA sense strand
ggaauuaaaggacaaucgu

SEQ ID NO: 1431920 - RNA, 19 nt, Homo sapiens
  misc_RNA (1)...(19): siRNA sense strand
caggugcaaugcuccgauu

SEQ ID NO: 1431921 - RNA, 19 nt, Homo sapiens
  misc_RNA (1)...(19): siRNA sense strand
ucgcagaagugcccacaca

SEQ ID NO: 1431922 - RNA, 19 nt, Homo sapiens
  misc_RNA (1)...(19): siRNA sense strand
ucucagcucaggaauuaaa

SEQ ID NO: 1431923 - RNA, 19 nt, Homo sapiens
  misc_RNA (1)...(19): siRNA sense strand
aaacagaguacuccuuucu

SEQ ID NO: 1431924 - RNA, 19 nt, Homo sapiens
  misc_RNA (1)...(19): siRNA sense strand
cagcuugaguaccgcuuug

SEQ ID NO: 1431925 - RNA, 19 nt, Homo sapiens
  misc_RNA (1)...(19): siRNA sense strand
cacaacuggucucauacuu

SEQ ID NO: 1431926 - RNA, 19 nt, Homo sapiens
  misc_RNA (1)...(19): siRNA sense strand
cgcaauacuucaugcuguu

SEQ ID NO: 1431927 - RNA, 19 nt, Homo sapiens
  misc_RNA (1)...(19): siRNA sense strand
guacuccuuucuggacuau

SEQ ID NO: 1431928 - RNA, 19 nt, Homo sapiens
  misc_RNA (1)...(19): siRNA sense strand
gauuguguccagccaggua

SEQ ID NO: 1431929 - RNA, 19 nt, Homo sapiens
  misc_RNA (1)...(19): siRNA sense strand
ggagguagaggccagaaac

SEQ ID NO: 1431930 - RNA, 19 nt, Homo sapiens
  misc_RNA (1)...(19): siRNA sense strand
cgcaugaauuugccuugaa

SEQ ID NO: 1431931 - RNA, 19 nt, Homo sapiens
  misc_RNA (1)...(19): siRNA sense strand
ugguucagcuguccauuuc

SEQ ID NO: 1431932 - RNA, 19 nt, Homo sapiens
  misc_RNA (1)...(19): siRNA sense strand
cagcgugguucaggacuau

SEQ ID NO: 1431933 - RNA, 19 nt, Homo sapiens
  misc_RNA (1)...(19): siRNA sense strand
gaggccagaaaccuagaua

SEQ ID NO: 1431934 - RNA, 19 nt, Homo sapiens
  misc_RNA (1)...(19): siRNA sense strand
caagcuguucccugcauuu

SEQ ID NO: 1431935 - RNA, 19 nt, Homo sapiens
  misc_RNA (1)...(19): siRNA sense strand
ggucaaugaguaccugaug

SEQ ID NO: 1431936 - RNA, 19 nt, Homo sapiens
  misc_RNA (1)...(19): siRNA sense strand
cggcugaguuugaaugcau

SEQ ID NO: 1431937 - RNA, 19 nt, Homo sapiens
  misc_RNA (1)...(19): siRNA sense strand
ggcagucccggcugaguuu

SEQ ID NO: 1431938 - RNA, 19 nt, Homo sapiens
  misc_RNA (1)...(19): siRNA sense strand
cauggaagcguuucucagu

SEQ ID NO: 1431939 - RNA, 19 nt, Homo sapiens
  misc_RNA (1)...(19): siRNA sense strand
ggccagaaaccuagauaag

SEQ ID NO: 1431940 - RNA, 19 nt, Homo sapiens
  misc_RNA (1)...(19): siRNA sense strand
gcccugaguucuccaagac

SEQ ID NO: 1431941 - RNA, 19 nt, Homo sapiens
  misc_RNA (1)...(19): siRNA sense strand
uguggguggugcugacuuu

SEQ ID NO: 1431942 - RNA, 19 nt, Homo sapiens
  misc_RNA (1)...(19): siRNA sense strand
acaaggacaucggcuccaa

SEQ ID NO: 1431943 - RNA, 19 nt, Homo sapiens
  misc_RNA (1)...(19): siRNA sense strand
ccugugaccaucucauuga

SEQ ID NO: 1431944 - RNA, 19 nt, Homo sapiens
  misc_RNA (1)...(19): siRNA sense strand
ccgccagggugaugggaaa

SEQ ID NO: 1431945 - RNA, 19 nt, Homo sapiens
  misc_RNA (1)...(19): siRNA sense strand
gcagaagugcccacacaac

SEQ ID NO: 1431946 - RNA, 19 nt, Homo sapiens
  misc_RNA (1)...(19): siRNA sense strand
gcaauacuucaugcuguug

SEQ ID NO: 1431947 - RNA, 19 nt, Homo sapiens
  misc_RNA (1)...(19): siRNA sense strand
gcaggcauccagggcauug

SEQ ID NO: 1431948 - RNA, 19 nt, Homo sapiens
  misc_RNA (1)...(19): siRNA sense strand
ucgcaugaauuugccuuga

SEQ ID NO: 1431949 - RNA, 19 nt, Homo sapiens
  misc_RNA (1)...(19): siRNA sense strand
cuccaagacucuacagcuu

SEQ ID NO: 1431950 - RNA, 19 nt, Homo sapiens
  misc_RNA (1)...(19): siRNA sense strand
ggugcaaugcuccgauuau

SEQ ID NO: 1431951 - RNA, 19 nt, Homo sapiens
  misc_RNA (1)...(19): siRNA sense strand
gggacugccucgcaauacu

SEQ ID NO: 1431952 - RNA, 19 nt, Homo sapiens
  misc_RNA (1)...(19): siRNA sense strand
acuggcaggucucgcauga

SEQ ID NO: 1431953 - RNA, 19 nt, Homo sapiens
  misc_RNA (1)...(19): siRNA sense strand
ucaccugacucccuacacu

SEQ ID NO: 1431954 - RNA, 19 nt, Homo sapiens
  misc_RNA (1)...(19): siRNA sense strand
gcgacauugugcaguuugu

SEQ ID NO: 1431955 - RNA, 19 nt, Homo sapiens
  misc_RNA (1)...(19): siRNA sense strand
uaguaaccauggagguaga

SEQ ID NO: 1431956 - RNA, 19 nt, Homo sapiens
  misc_RNA (1)...(19): siRNA sense strand
gcccaugucagugaucauu

SEQ ID NO: 1431957 - RNA, 19 nt, Homo sapiens
  misc_RNA (1)...(19): siRNA sense strand
gaacaaccugaacccuaca

SEQ ID NO: 1431958 - RNA, 19 nt, Homo sapiens
  misc_RNA (1)...(19): siRNA sense strand
gaaaccuagauaagaagga

SEQ ID NO: 1431959 - RNA, 19 nt, Homo sapiens
  misc_RNA (1)...(19): siRNA sense strand
gcuuugagacaguccagaa

SEQ ID NO: 1431960 - RNA, 19 nt, Homo sapiens
  misc_RNA (1)...(19): siRNA sense strand
aacuauccgugucaagauu

SEQ ID NO: 1431961 - RNA, 19 nt, Homo sapiens
  misc_RNA (1)...(19): siRNA sense strand
agaccgugcucgcagaagu

SEQ ID NO: 1431962 - RNA, 19 nt, Homo sapiens
  misc_RNA (1)...(19): siRNA sense strand
ccgcgacauugugcaguuu

SEQ ID NO: 1431963 - RNA, 19 nt, Homo sapiens
  misc_RNA (1)...(19): siRNA sense strand
gaggcugucagaucaacuu

SEQ ID NO: 1431964 - RNA, 19 nt, Homo sapiens
  misc_RNA (1)...(19): siRNA sense strand
gcuuuggaaucuaugacau

SEQ ID NO: 1431965 - RNA, 19 nt, Homo sapiens
  misc_RNA (1)...(19): siRNA sense strand
cgacauugugcaguuugua

SEQ ID NO: 1431966 - RNA, 19 nt, Homo sapiens
  misc_RNA (1)...(19): siRNA sense strand
uguaguaaccauggaggua

SEQ ID NO: 1431967 - RNA, 19 nt, Homo sapiens
  misc_RNA (1)...(19): siRNA sense strand
gcugucagaucaacuucac

SEQ ID NO: 1431968 - RNA, 19 nt, Homo sapiens
  misc_RNA (1)...(19): siRNA sense strand
uuaaaggacaaucguguag

SEQ ID NO: 1431969 - RNA, 19 nt, Homo sapiens
  misc_RNA (1)...(19): siRNA sense strand
ucuauggcccuaccaacuu

SEQ ID NO: 1431970 - RNA, 19 nt, Homo sapiens
  misc_RNA (1)...(19): siRNA sense strand
augggaggcugucagauca

SEQ ID NO: 1431971 - RNA, 19 nt, Homo sapiens
  misc_RNA (1)...(19): siRNA sense strand
ccagggugaugggaaaugg

SEQ ID NO: 1431972 - RNA, 19 nt, Homo sapiens
  misc_RNA (1)...(19): siRNA sense strand
cagcucaggaauuaaagga

SEQ ID NO: 1431973 - RNA, 19 nt, Homo sapiens
  misc_RNA (1)...(19): siRNA sense strand
cagaagugcccacacaacu

SEQ ID NO: 1431974 - RNA, 19 nt, Homo sapiens
  misc_RNA (1)...(19): siRNA sense strand
acaagcuguucccugcauu

SEQ ID NO: 1431975 - RNA, 19 nt, Homo sapiens
  misc_RNA (1)...(19): siRNA sense strand
aagaaaagcuacaagaacu

SEQ ID NO: 1431976 - RNA, 19 nt, Homo sapiens
  misc_RNA (1)...(19): siRNA sense strand
gcauccacccugagaagca

SEQ ID NO: 1431977 - RNA, 19 nt, Homo sapiens
  misc_RNA (1)...(19): siRNA sense strand
acuccuuucuggacuaugu

SEQ ID NO: 1431978 - RNA, 19 nt, Homo sapiens
  misc_RNA (1)...(19): siRNA sense strand
ggguggugcugacuuugag

SEQ ID NO: 1431979 - RNA, 19 nt, Homo sapiens
  misc_RNA (1)...(19): siRNA sense strand
ccacacaacuggucucaua

SEQ ID NO: 1431980 - RNA, 19 nt, Homo sapiens
  misc_RNA (1)...(19): siRNA sense strand
gaucugaggucaucaagaa

SEQ ID NO: 1431981 - RNA, 19 nt, Homo sapiens
  misc_RNA (1)...(19): siRNA sense strand
ggucucagcucaggaauua

SEQ ID NO: 1431982 - RNA, 19 nt, Homo sapiens
  misc_RNA (1)...(19): siRNA sense strand
ccagaaaccuagauaagaa

SEQ ID NO: 1431983 - RNA, 19 nt, Homo sapiens
  misc_RNA (1)...(19): siRNA sense strand
caacuggucucauacuuca

SEQ ID NO: 1431984 - RNA, 19 nt, Homo sapiens
  misc_RNA (1)...(19): siRNA sense strand
ggacuucacuggcuccaau

SEQ ID NO: 1431985 - RNA, 19 nt, Homo sapiens
  misc_RNA (1)...(19): siRNA sense strand
guacagaucugaggucauc

SEQ ID NO: 1431986 - RNA, 19 nt, Homo sapiens
  misc_RNA (1)...(19): siRNA sense strand
aaaggacaaucguguagua

SEQ ID NO: 1431987 - RNA, 19 nt, Homo sapiens
  misc_RNA (1)...(19): siRNA sense strand
gcaggucucgcaugaauuu

SEQ ID NO: 1431988 - RNA, 19 nt, Homo sapiens
  misc_RNA (1)...(19): siRNA sense strand
caagaacucuggaacuauc

SEQ ID NO: 1431989 - RNA, 19 nt, Homo sapiens
  misc_RNA (1)...(19): siRNA sense strand
caacaggggucaaugagua

SEQ ID NO: 1431990 - RNA, 19 nt, Homo sapiens
  misc_RNA (1)...(19): siRNA sense strand
uacaagaacucuggaacua

SEQ ID NO: 1431991 - RNA, 19 nt, Homo sapiens
  misc_RNA (1)...(19): siRNA sense strand
gcugagggaugaugacuuc

SEQ ID NO: 1431992 - RNA, 19 nt, Homo sapiens
  misc_RNA (1)...(19): siRNA sense strand
gcaugaauuugccuugaau

SEQ ID NO: 1431993 - RNA, 19 nt, Homo sapiens
  misc_RNA (1)...(19): siRNA sense strand
gagggaugaugacuuccua

SEQ ID NO: 1431994 - RNA, 19 nt, Homo sapiens
  misc_RNA (1)...(19): siRNA sense strand
ggacaucggcuccaagucu

SEQ ID NO: 1431995 - RNA, 19 nt, Homo sapiens
  misc_RNA (1)...(19): siRNA sense strand
cgccagagcugagggauga

SEQ ID NO: 1431996 - RNA, 19 nt, Homo sapiens
  misc_RNA (1)...(19): siRNA sense strand
ggaacuauccgugucaaga

SEQ ID NO: 1431997 - RNA, 19 nt, Homo sapiens
  misc_RNA (1)...(19): siRNA sense strand
gaacuauccgugucaagau

SEQ ID NO: 1431998 - RNA, 19 nt, Homo sapiens
  misc_RNA (1)...(19): siRNA sense strand
caagauuugucggguagaa

SEQ ID NO: 1431999 - RNA, 19 nt, Homo sapiens
  misc_RNA (1)...(19): siRNA sense strand
gcagcgugguucaggacua

SEQ ID NO: 1432000 - RNA, 19 nt, Homo sapiens
  misc_RNA (1)...(19): siRNA sense strand
gcuguucccugcauuugga

SEQ ID NO: 1432001 - RNA, 19 nt, Homo sapiens
  misc_RNA (1)...(19): siRNA sense strand
agaaacagaguacuccuuu

SEQ ID NO: 1432002 - RNA, 19 nt, Homo sapiens
  misc_RNA (1)...(19): siRNA sense strand
gguagaggccagaaaccua

SEQ ID NO: 1432003 - RNA, 19 nt, Homo sapiens
  misc_RNA (1)...(19): siRNA sense strand
gugcaaugcuccgauuaug

SEQ ID NO: 1432004 - RNA, 19 nt, Homo sapiens
  misc_RNA (1)...(19): siRNA sense strand
uggcaggucucgcaugaau

SEQ ID NO: 1432005 - RNA, 19 nt, Homo sapiens
  misc_RNA (1)...(19): siRNA sense strand
ggacaaucguguaguaacc

SEQ ID NO: 1432006 - RNA, 19 nt, Homo sapiens
  misc_RNA (1)...(19): siRNA sense strand
cuauggcccuaccaacuuu

SEQ ID NO: 1432007 - RNA, 19 nt, Homo sapiens
  misc_RNA (1)...(19): siRNA sense strand
gaaugcauccacccugaga

SEQ ID NO: 1432008 - RNA, 19 nt, Homo sapiens
  misc_RNA (1)...(19): siRNA sense strand
gccagaaaccuagauaaga

SEQ ID NO: 1432009 - RNA, 19 nt, Homo sapiens
  misc_RNA (1)...(19): siRNA sense strand
gcuacgcuuuggaaucuau

SEQ ID NO: 1432010 - RNA, 19 nt, Homo sapiens
  misc_RNA (1)...(19): siRNA sense strand
gugaccaucucauugacaa

SEQ ID NO: 1432011 - RNA, 19 nt, Homo sapiens
  misc_RNA (1)...(19): siRNA sense strand
gaugggaggcugucagauc

SEQ ID NO: 1432012 - RNA, 19 nt, Homo sapiens
  misc_RNA (1)...(19): siRNA sense strand
gacaagcuguucccugcau

SEQ ID NO: 1432013 - RNA, 19 nt, Homo sapiens
  misc_RNA (1)...(19): siRNA sense strand
ggacugccucgcaauacuu

SEQ ID NO: 1432014 - RNA, 19 nt, Homo sapiens
  misc_RNA (1)...(19): siRNA sense strand
gacccacucugcguccuuu

SEQ ID NO: 1432015 - RNA, 19 nt, Homo sapiens
  misc_RNA (1)...(19): siRNA sense strand
caacuuugcacccaucauc

SEQ ID NO: 1432016 - RNA, 19 nt, Homo sapiens
  misc_RNA (1)...(19): siRNA sense strand
ccaugucagugaucauugu

SEQ ID NO: 1432017 - RNA, 19 nt, Homo sapiens
  misc_RNA (1)...(19): siRNA sense strand
gagcuuggccggacugaac

SEQ ID NO: 1432018 - RNA, 19 nt, Homo sapiens
  misc_RNA (1)...(19): siRNA sense strand
ccucgaaccugcccauguc

SEQ ID NO: 1432019 - RNA, 19 nt, Homo sapiens
  misc_RNA (1)...(19): siRNA sense strand
ggaauuaaaggacaaucgu

SEQ ID NO: 1432020 - RNA, 19 nt, Homo sapiens
  misc_RNA (1)...(19): siRNA sense strand
caggugcaaugcuccgauu

SEQ ID NO: 1432021 - RNA, 19 nt, Homo sapiens
  misc_RNA (1)...(19): siRNA sense strand
ucgcagaagugcccacaca

SEQ ID NO: 1432022 - RNA, 19 nt, Homo sapiens
  misc_RNA (1)...(19): siRNA sense strand
ucucagcucaggaauuaaa

SEQ ID NO: 1432023 - RNA, 19 nt, Homo sapiens
  misc_RNA (1)...(19): siRNA sense strand
aaacagaguacuccuuucu

SEQ ID NO: 1432024 - RNA, 19 nt, Homo sapiens
  misc_RNA (1)...(19): siRNA sense strand
cagcuugaguaccgcuuug

SEQ ID NO: 1432025 - RNA, 19 nt, Homo sapiens
  misc_RNA (1)...(19): siRNA sense strand
cacaacuggucucauacuu

SEQ ID NO: 1432026 - RNA, 19 nt, Homo sapiens
  misc_RNA (1)...(19): siRNA sense strand
cgcaauacuucaugcuguu

SEQ ID NO: 1432027 - RNA, 19 nt, Homo sapiens
  misc_RNA (1)...(19): siRNA sense strand
guacuccuuucuggacuau

SEQ ID NO: 1432028 - RNA, 19 nt, Homo sapiens
  misc_RNA (1)...(19): siRNA sense strand
gauuguguccagccaggua

SEQ ID NO: 1432029 - RNA, 19 nt, Homo sapiens
  misc_RNA (1)...(19): siRNA sense strand
ggagguagaggccagaaac

SEQ ID NO: 1432030 - RNA, 19 nt, Homo sapiens
  misc_RNA (1)...(19): siRNA sense strand
cgcaugaauuugccuugaa

SEQ ID NO: 1432031 - RNA, 19 nt, Homo sapiens
  misc_RNA (1)...(19): siRNA sense strand
ugguucagcuguccauuuc

SEQ ID NO: 1432032 - RNA, 19 nt, Homo sapiens
  misc_RNA (1)...(19): siRNA sense strand
cagcgugguucaggacuau

SEQ ID NO: 1432033 - RNA, 19 nt, Homo sapiens
  misc_RNA (1)...(19): siRNA sense strand
gaggccagaaaccuagaua

SEQ ID NO: 1432034 - RNA, 19 nt, Homo sapiens
  misc_RNA (1)...(19): siRNA sense strand
caagcuguucccugcauuu

SEQ ID NO: 1432035 - RNA, 19 nt, Homo sapiens
  misc_RNA (1)...(19): siRNA sense strand
ggucaaugaguaccugaug

SEQ ID NO: 1432036 - RNA, 19 nt, Homo sapiens
  misc_RNA (1)...(19): siRNA sense strand
cggcugaguuugaaugcau

SEQ ID NO: 1432037 - RNA, 19 nt, Homo sapiens
  misc_RNA (1)...(19): siRNA sense strand
ggcagucccggcugaguuu

SEQ ID NO: 1432038 - RNA, 19 nt, Homo sapiens
  misc_RNA (1)...(19): siRNA sense strand
cauggaagcguuucucagu

SEQ ID NO: 1432039 - RNA, 19 nt, Homo sapiens
  misc_RNA (1)...(19): siRNA sense strand
ggccagaaaccuagauaag

SEQ ID NO: 1432040 - RNA, 19 nt, Homo sapiens
  misc_RNA (1)...(19): siRNA sense strand
gcccugaguucuccaagac

SEQ ID NO: 1432041 - RNA, 19 nt, Homo sapiens
  misc_RNA (1)...(19): siRNA sense strand
uguggguggugcugacuuu

SEQ ID NO: 1432042 - RNA, 19 nt, Homo sapiens
  misc_RNA (1)...(19): siRNA sense strand
acaaggacaucggcuccaa

SEQ ID NO: 1432043 - RNA, 19 nt, Homo sapiens
  misc_RNA (1)...(19): siRNA sense strand
ccugugaccaucucauuga

SEQ ID NO: 1432044 - RNA, 19 nt, Homo sapiens
  misc_RNA (1)...(19): siRNA sense strand
ccgccagggugaugggaaa

SEQ ID NO: 1432045 - RNA, 19 nt, Homo sapiens
  misc_RNA (1)...(19): siRNA sense strand
gcagaagugcccacacaac

SEQ ID NO: 1432046 - RNA, 19 nt, Homo sapiens
  misc_RNA (1)...(19): siRNA sense strand
gcaauacuucaugcuguug

SEQ ID NO: 1432047 - RNA, 19 nt, Homo sapiens
  misc_RNA (1)...(19): siRNA sense strand
gcaggcauccagggcauug

SEQ ID NO: 1432048 - RNA, 19 nt, Homo sapiens
  misc_RNA (1)...(19): siRNA sense strand
ucgcaugaauuugccuuga

SEQ ID NO: 1432049 - RNA, 19 nt, Homo sapiens
  misc_RNA (1)...(19): siRNA sense strand
cuccaagacucuacagcuu

SEQ ID NO: 1432050 - RNA, 19 nt, Homo sapiens
  misc_RNA (1)...(19): siRNA sense strand
ggugcaaugcuccgauuau

SEQ ID NO: 1432051 - RNA, 19 nt, Homo sapiens
  misc_RNA (1)...(19): siRNA sense strand
gggacugccucgcaauacu

SEQ ID NO: 1432052 - RNA, 19 nt, Homo sapiens
  misc_RNA (1)...(19): siRNA sense strand
acuggcaggucucgcauga

SEQ ID NO: 1432053 - RNA, 19 nt, Homo sapiens
  misc_RNA (1)...(19): siRNA sense strand
ucaccugacucccuacacu

SEQ ID NO: 1432054 - RNA, 19 nt, Homo sapiens
  misc_RNA (1)...(19): siRNA sense strand
gcgacauugugcaguuugu

SEQ ID NO: 1432055 - RNA, 19 nt, Homo sapiens
  misc_RNA (1)...(19): siRNA sense strand
uaguaaccauggagguaga

SEQ ID NO: 1432056 - RNA, 19 nt, Homo sapiens
  misc_RNA (1)...(19): siRNA sense strand
gcccaugucagugaucauu

SEQ ID NO: 1432057 - RNA, 19 nt, Homo sapiens
  misc_RNA (1)...(19): siRNA sense strand
gaacaaccugaacccuaca

SEQ ID NO: 1432058 - RNA, 19 nt, Homo sapiens
  misc_RNA (1)...(19): siRNA sense strand
gaaaccuagauaagaagga

SEQ ID NO: 1432059 - RNA, 19 nt, Homo sapiens
  misc_RNA (1)...(19): siRNA sense strand
gcuuugagacaguccagaa

SEQ ID NO: 1432060 - RNA, 19 nt, Homo sapiens
  misc_RNA (1)...(19): siRNA sense strand
aacuauccgugucaagauu

SEQ ID NO: 1432061 - RNA, 19 nt, Homo sapiens
  misc_RNA (1)...(19): siRNA sense strand
agaccgugcucgcagaagu

SEQ ID NO: 1432062 - RNA, 19 nt, Homo sapiens
  misc_RNA (1)...(19): siRNA sense strand
ccgcgacauugugcaguuu

SEQ ID NO: 1432063 - RNA, 19 nt, Homo sapiens
  misc_RNA (1)...(19): siRNA sense strand
gaggcugucagaucaacuu

SEQ ID NO: 1432064 - RNA, 19 nt, Homo sapiens
  misc_RNA (1)...(19): siRNA sense strand
gcuuuggaaucuaugacau

SEQ ID NO: 1432065 - RNA, 19 nt, Homo sapiens
  misc_RNA (1)...(19): siRNA sense strand
cgacauugugcaguuugua

SEQ ID NO: 1432066 - RNA, 19 nt, Homo sapiens
  misc_RNA (1)...(19): siRNA sense strand
uguaguaaccauggaggua

SEQ ID NO: 1432067 - RNA, 19 nt, Homo sapiens
  misc_RNA (1)...(19): siRNA sense strand
gcugucagaucaacuucac

SEQ ID NO: 1432068 - RNA, 19 nt, Homo sapiens
  misc_RNA (1)...(19): siRNA sense strand
uuaaaggacaaucguguag

SEQ ID NO: 1432069 - RNA, 19 nt, Homo sapiens
  misc_RNA (1)...(19): siRNA sense strand
ucuauggcccuaccaacuu

SEQ ID NO: 1432070 - RNA, 19 nt, Homo sapiens
  misc_RNA (1)...(19): siRNA sense strand
augggaggcugucagauca

SEQ ID NO: 1432071 - RNA, 19 nt, Homo sapiens
  misc_RNA (1)...(19): siRNA sense strand
ccagggugaugggaaaugg

SEQ ID NO: 1432072 - RNA, 19 nt, Homo sapiens
  misc_RNA (1)...(19): siRNA sense strand
cagcucaggaauuaaagga

SEQ ID NO: 1432073 - RNA, 19 nt, Homo sapiens
  misc_RNA (1)...(19): siRNA sense strand
cagaagugcccacacaacu

SEQ ID NO: 1432074 - RNA, 19 nt, Homo sapiens
  misc_RNA (1)...(19): siRNA sense strand
acaagcuguucccugcauu

SEQ ID NO: 1432075 - RNA, 19 nt, Homo sapiens
  misc_RNA (1)...(19): siRNA sense strand
aagaaaagcuacaagaacu

SEQ ID NO: 1432076 - RNA, 19 nt, Homo sapiens
  misc_RNA (1)...(19): siRNA sense strand
gcauccacccugagaagca

SEQ ID NO: 1432077 - RNA, 19 nt, Homo sapiens
  misc_RNA (1)...(19): siRNA sense strand
acuccuuucuggacuaugu

SEQ ID NO: 1432078 - RNA, 19 nt, Homo sapiens
  misc_RNA (1)...(19): siRNA sense strand
ggguggugcugacuuugag

SEQ ID NO: 1432079 - RNA, 19 nt, Homo sapiens
  misc_RNA (1)...(19): siRNA sense strand
ccacacaacuggucucaua

SEQ ID NO: 1432080 - RNA, 19 nt, Homo sapiens
  misc_RNA (1)...(19): siRNA sense strand
gaucugaggucaucaagaa

SEQ ID NO: 1432081 - RNA, 19 nt, Homo sapiens
  misc_RNA (1)...(19): siRNA sense strand
ggucucagcucaggaauua

SEQ ID NO: 1432082 - RNA, 19 nt, Homo sapiens
  misc_RNA (1)...(19): siRNA sense strand
ccagaaaccuagauaagaa

SEQ ID NO: 1432083 - RNA, 19 nt, Homo sapiens
  misc_RNA (1)...(19): siRNA sense strand
caacuggucucauacuuca

SEQ ID NO: 1432084 - RNA, 19 nt, Homo sapiens
  misc_RNA (1)...(19): siRNA sense strand
ggacuucacuggcuccaau

SEQ ID NO: 1432085 - RNA, 19 nt, Homo sapiens
  misc_RNA (1)...(19): siRNA sense strand
guacagaucugaggucauc

SEQ ID NO: 1432086 - RNA, 19 nt, Homo sapiens
  misc_RNA (1)...(19): siRNA sense strand
aaaggacaaucguguagua

SEQ ID NO: 1432087 - RNA, 19 nt, Homo sapiens
  misc_RNA (1)...(19): siRNA sense strand
gcaggucucgcaugaauuu

SEQ ID NO: 1432088 - RNA, 19 nt, Homo sapiens
  misc_RNA (1)...(19): siRNA sense strand
caagaacucuggaacuauc

SEQ ID NO: 1432089 - RNA, 19 nt, Homo sapiens
  misc_RNA (1)...(19): siRNA sense strand
caacaggggucaaugagua

SEQ ID NO: 1432090 - RNA, 19 nt, Homo sapiens
  misc_RNA (1)...(19): siRNA sense strand
uacaagaacucuggaacua

SEQ ID NO: 1432091 - RNA, 19 nt, Homo sapiens
  misc_RNA (1)...(19): siRNA sense strand
gcugagggaugaugacuuc

SEQ ID NO: 1432092 - RNA, 19 nt, Homo sapiens
  misc_RNA (1)...(19): siRNA sense strand
gcaugaauuugccuugaau

SEQ ID NO: 1432093 - RNA, 19 nt, Homo sapiens
  misc_RNA (1)...(19): siRNA sense strand
gagggaugaugacuuccua

SEQ ID NO: 1432094 - RNA, 19 nt, Homo sapiens
  misc_RNA (1)...(19): siRNA sense strand
ggacaucggcuccaagucu

SEQ ID NO: 1432095 - RNA, 19 nt, Homo sapiens
  misc_RNA (1)...(19): siRNA sense strand
cgccagagcugagggauga

SEQ ID NO: 1432096 - RNA, 19 nt, Homo sapiens
  misc_RNA (1)...(19): siRNA sense strand
ggaacuauccgugucaaga

SEQ ID NO: 1432097 - RNA, 19 nt, Homo sapiens
  misc_RNA (1)...(19): siRNA sense strand
gaacuauccgugucaagau

SEQ ID NO: 1432098 - RNA, 19 nt, Homo sapiens
  misc_RNA (1)...(19): siRNA sense strand
caagauuugucggguagaa

SEQ ID NO: 1432099 - RNA, 19 nt, Homo sapiens
  misc_RNA (1)...(19): siRNA sense strand
gcagcgugguucaggacua

SEQ ID NO: 1432100 - RNA, 19 nt, Homo sapiens
  misc_RNA (1)...(19): siRNA sense strand
gcuguucccugcauuugga

SEQ ID NO: 1432101 - RNA, 19 nt, Homo sapiens
  misc_RNA (1)...(19): siRNA sense strand
agaaacagaguacuccuuu

SEQ ID NO: 1432102 - RNA, 19 nt, Homo sapiens
  misc_RNA (1)...(19): siRNA sense strand
gguagaggccagaaaccua

SEQ ID NO: 1432103 - RNA, 19 nt, Homo sapiens
  misc_RNA (1)...(19): siRNA sense strand
gugcaaugcuccgauuaug

SEQ ID NO: 1432104 - RNA, 19 nt, Homo sapiens
  misc_RNA (1)...(19): siRNA sense strand
uggcaggucucgcaugaau

SEQ ID NO: 1432105 - RNA, 19 nt, Homo sapiens
  misc_RNA (1)...(19): siRNA sense strand
ggacaaucguguaguaacc

SEQ ID NO: 1432106 - RNA, 19 nt, Homo sapiens
  misc_RNA (1)...(19): siRNA sense strand
cuauggcccuaccaacuuu

SEQ ID NO: 1432107 - RNA, 19 nt, Homo sapiens
  misc_RNA (1)...(19): siRNA sense strand
gaaugcauccacccugaga

SEQ ID NO: 1432108 - RNA, 19 nt, Homo sapiens
  misc_RNA (1)...(19): siRNA sense strand
gccagaaaccuagauaaga

SEQ ID NO: 1432109 - RNA, 19 nt, Homo sapiens
  misc_RNA (1)...(19): siRNA sense strand
gcuacgcuuuggaaucuau

SEQ ID NO: 1432110 - RNA, 19 nt, Homo sapiens
  misc_RNA (1)...(19): siRNA sense strand
gugaccaucucauugacaa

SEQ ID NO: 1432111 - RNA, 19 nt, Homo sapiens
  misc_RNA (1)...(19): siRNA sense strand
gaugggaggcugucagauc

SEQ ID NO: 1432112 - RNA, 19 nt, Homo sapiens
  misc_RNA (1)...(19): siRNA sense strand
gacaagcuguucccugcau

SEQ ID NO: 1432113 - RNA, 19 nt, Homo sapiens
  misc_RNA (1)...(19): siRNA sense strand
ggacugccucgcaauacuu

SEQ ID NO: 1432114 - RNA, 19 nt, Homo sapiens
  misc_RNA (1)...(19): siRNA sense strand
gacccacucugcguccuuu

SEQ ID NO: 1432115 - RNA, 19 nt, Homo sapiens
  misc_RNA (1)...(19): siRNA sense strand
caacuuugcacccaucauc

SEQ ID NO: 1432116 - RNA, 19 nt, Homo sapiens
  misc_RNA (1)...(19): siRNA sense strand
ccaugucagugaucauugu

SEQ ID NO: 1432117 - RNA, 19 nt, Homo sapiens
  misc_RNA (1)...(19): siRNA sense strand
gagcuuggccggacugaac

SEQ ID NO: 1432118 - RNA, 19 nt, Homo sapiens
  misc_RNA (1)...(19): siRNA sense strand
ccucgaaccugcccauguc

SEQ ID NO: 1432119 - RNA, 19 nt, Homo sapiens
  misc_RNA (1)...(19): siRNA sense strand
ggaauuaaaggacaaucgu

SEQ ID NO: 1432120 - RNA, 19 nt, Homo sapiens
  misc_RNA (1)...(19): siRNA sense strand
caggugcaaugcuccgauu

SEQ ID NO: 1432121 - RNA, 19 nt, Homo sapiens
  misc_RNA (1)...(19): siRNA sense strand
ucgcagaagugcccacaca

SEQ ID NO: 1432122 - RNA, 19 nt, Homo sapiens
  misc_RNA (1)...(19): siRNA sense strand
ucucagcucaggaauuaaa

SEQ ID NO: 1432123 - RNA, 19 nt, Homo sapiens
  misc_RNA (1)...(19): siRNA sense strand
aaacagaguacuccuuucu

SEQ ID NO: 1432124 - RNA, 19 nt, Homo sapiens
  misc_RNA (1)...(19): siRNA sense strand
cagcuugaguaccgcuuug

SEQ ID NO: 1432125 - RNA, 19 nt, Homo sapiens
  misc_RNA (1)...(19): siRNA sense strand
cacaacuggucucauacuu

SEQ ID NO: 1432126 - RNA, 19 nt, Homo sapiens
  misc_RNA (1)...(19): siRNA sense strand
cgcaauacuucaugcuguu

SEQ ID NO: 1432127 - RNA, 19 nt, Homo sapiens
  misc_RNA (1)...(19): siRNA sense strand
guacuccuuucuggacuau

SEQ ID NO: 1432128 - RNA, 19 nt, Homo sapiens
  misc_RNA (1)...(19): siRNA sense strand
gauuguguccagccaggua

SEQ ID NO: 1432129 - RNA, 19 nt, Homo sapiens
  misc_RNA (1)...(19): siRNA sense strand
ggagguagaggccagaaac

SEQ ID NO: 1432130 - RNA, 19 nt, Homo sapiens
  misc_RNA (1)...(19): siRNA sense strand
cgcaugaauuugccuugaa

SEQ ID NO: 1432131 - RNA, 19 nt, Homo sapiens
  misc_RNA (1)...(19): siRNA sense strand
ugguucagcuguccauuuc

SEQ ID NO: 1432132 - RNA, 19 nt, Homo sapiens
  misc_RNA (1)...(19): siRNA sense strand
cagcgugguucaggacuau

SEQ ID NO: 1432133 - RNA, 19 nt, Homo sapiens
  misc_RNA (1)...(19): siRNA sense strand
gaggccagaaaccuagaua

SEQ ID NO: 1432134 - RNA, 19 nt, Homo sapiens
  misc_RNA (1)...(19): siRNA sense strand
caagcuguucccugcauuu

SEQ ID NO: 1432135 - RNA, 19 nt, Homo sapiens
  misc_RNA (1)...(19): siRNA sense strand
ggucaaugaguaccugaug

SEQ ID NO: 1432136 - RNA, 19 nt, Homo sapiens
  misc_RNA (1)...(19): siRNA sense strand
cggcugaguuugaaugcau

SEQ ID NO: 1432137 - RNA, 19 nt, Homo sapiens
  misc_RNA (1)...(19): siRNA sense strand
ggcagucccggcugaguuu

SEQ ID NO: 1432138 - RNA, 19 nt, Homo sapiens
  misc_RNA (1)...(19): siRNA sense strand
cauggaagcguuucucagu

SEQ ID NO: 1432139 - RNA, 19 nt, Homo sapiens
  misc_RNA (1)...(19): siRNA sense strand
ggccagaaaccuagauaag

SEQ ID NO: 1432140 - RNA, 19 nt, Homo sapiens
  misc_RNA (1)...(19): siRNA sense strand
gcccugaguucuccaagac

SEQ ID NO: 1432141 - RNA, 19 nt, Homo sapiens
  misc_RNA (1)...(19): siRNA sense strand
uguggguggugcugacuuu

SEQ ID NO: 1432142 - RNA, 19 nt, Homo sapiens
  misc_RNA (1)...(19): siRNA sense strand
acaaggacaucggcuccaa

SEQ ID NO: 1432143 - RNA, 19 nt, Homo sapiens
  misc_RNA (1)...(19): siRNA sense strand
ccugugaccaucucauuga

SEQ ID NO: 1432144 - RNA, 19 nt, Homo sapiens
  misc_RNA (1)...(19): siRNA sense strand
ccgccagggugaugggaaa

SEQ ID NO: 1432145 - RNA, 19 nt, Homo sapiens
  misc_RNA (1)...(19): siRNA sense strand
gcagaagugcccacacaac

SEQ ID NO: 1432146 - RNA, 19 nt, Homo sapiens
  misc_RNA (1)...(19): siRNA sense strand
gcaauacuucaugcuguug

SEQ ID NO: 1432147 - RNA, 19 nt, Homo sapiens
  misc_RNA (1)...(19): siRNA sense strand
gcaggcauccagggcauug

SEQ ID NO: 1432148 - RNA, 19 nt, Homo sapiens
  misc_RNA (1)...(19): siRNA sense strand
ucgcaugaauuugccuuga

SEQ ID NO: 1432149 - RNA, 19 nt, Homo sapiens
  misc_RNA (1)...(19): siRNA sense strand
cuccaagacucuacagcuu

SEQ ID NO: 1432150 - RNA, 19 nt, Homo sapiens
  misc_RNA (1)...(19): siRNA sense strand
ggugcaaugcuccgauuau

SEQ ID NO: 1432151 - RNA, 19 nt, Homo sapiens
  misc_RNA (1)...(19): siRNA sense strand
gggacugccucgcaauacu

SEQ ID NO: 1432152 - RNA, 19 nt, Homo sapiens
  misc_RNA (1)...(19): siRNA sense strand
acuggcaggucucgcauga

SEQ ID NO: 1432153 - RNA, 19 nt, Homo sapiens
  misc_RNA (1)...(19): siRNA sense strand
ucaccugacucccuacacu

SEQ ID NO: 1432154 - RNA, 19 nt, Homo sapiens
  misc_RNA (1)...(19): siRNA sense strand
gcgacauugugcaguuugu

SEQ ID NO: 1432155 - RNA, 19 nt, Homo sapiens
  misc_RNA (1)...(19): siRNA sense strand
uaguaaccauggagguaga

SEQ ID NO: 1432156 - RNA, 19 nt, Homo sapiens
  misc_RNA (1)...(19): siRNA sense strand
gcccaugucagugaucauu

SEQ ID NO: 1432157 - RNA, 19 nt, Homo sapiens
  misc_RNA (1)...(19): siRNA sense strand
gaacaaccugaacccuaca

SEQ ID NO: 1432158 - RNA, 19 nt, Homo sapiens
  misc_RNA (1)...(19): siRNA sense strand
gaaaccuagauaagaagga

SEQ ID NO: 1432159 - RNA, 19 nt, Homo sapiens
  misc_RNA (1)...(19): siRNA sense strand
gcuuugagacaguccagaa

SEQ ID NO: 1432160 - RNA, 19 nt, Homo sapiens
  misc_RNA (1)...(19): siRNA sense strand
aacuauccgugucaagauu

SEQ ID NO: 1432161 - RNA, 19 nt, Homo sapiens
  misc_RNA (1)...(19): siRNA sense strand
agaccgugcucgcagaagu

SEQ ID NO: 1432162 - RNA, 19 nt, Homo sapiens
  misc_RNA (1)...(19): siRNA sense strand
ccgcgacauugugcaguuu

SEQ ID NO: 1432163 - RNA, 19 nt, Homo sapiens
  misc_RNA (1)...(19): siRNA sense strand
gaggcugucagaucaacuu

SEQ ID NO: 1432164 - RNA, 19 nt, Homo sapiens
  misc_RNA (1)...(19): siRNA sense strand
gcuuuggaaucuaugacau

SEQ ID NO: 1432165 - RNA, 19 nt, Homo sapiens
  misc_RNA (1)...(19): siRNA sense strand
cgacauugugcaguuugua

SEQ ID NO: 1432166 - RNA, 19 nt, Homo sapiens
  misc_RNA (1)...(19): siRNA sense strand
uguaguaaccauggaggua

SEQ ID NO: 1432167 - RNA, 19 nt, Homo sapiens
  misc_RNA (1)...(19): siRNA sense strand
gcugucagaucaacuucac

SEQ ID NO: 1432168 - RNA, 19 nt, Homo sapiens
  misc_RNA (1)...(19): siRNA sense strand
uuaaaggacaaucguguag

SEQ ID NO: 1432169 - RNA, 19 nt, Homo sapiens
  misc_RNA (1)...(19): siRNA sense strand
ucuauggcccuaccaacuu

SEQ ID NO: 1432170 - RNA, 19 nt, Homo sapiens
  misc_RNA (1)...(19): siRNA sense strand
augggaggcugucagauca

SEQ ID NO: 1432171 - RNA, 19 nt, Homo sapiens
  misc_RNA (1)...(19): siRNA sense strand
ccagggugaugggaaaugg

SEQ ID NO: 1432172 - RNA, 19 nt, Homo sapiens
  misc_RNA (1)...(19): siRNA sense strand
cagcucaggaauuaaagga

SEQ ID NO: 1432173 - RNA, 19 nt, Homo sapiens
  misc_RNA (1)...(19): siRNA sense strand
cagaagugcccacacaacu

SEQ ID NO: 1432174 - RNA, 19 nt, Homo sapiens
  misc_RNA (1)...(19): siRNA sense strand
acaagcuguucccugcauu

SEQ ID NO: 1432175 - RNA, 19 nt, Homo sapiens
  misc_RNA (1)...(19): siRNA sense strand
aagaaaagcuacaagaacu

SEQ ID NO: 1432176 - RNA, 19 nt, Homo sapiens
  misc_RNA (1)...(19): siRNA sense strand
gcauccacccugagaagca

SEQ ID NO: 1432177 - RNA, 19 nt, Homo sapiens
  misc_RNA (1)...(19): siRNA sense strand
acuccuuucuggacuaugu

SEQ ID NO: 1432178 - RNA, 19 nt, Homo sapiens
  misc_RNA (1)...(19): siRNA sense strand
ggguggugcugacuuugag

SEQ ID NO: 1432179 - RNA, 19 nt, Homo sapiens
  misc_RNA (1)...(19): siRNA sense strand
ccacacaacuggucucaua

SEQ ID NO: 1432180 - RNA, 19 nt, Homo sapiens
  misc_RNA (1)...(19): siRNA sense strand
gaucugaggucaucaagaa

SEQ ID NO: 1432181 - RNA, 19 nt, Homo sapiens
  misc_RNA (1)...(19): siRNA sense strand
ggucucagcucaggaauua

SEQ ID NO: 1432182 - RNA, 19 nt, Homo sapiens
  misc_RNA (1)...(19): siRNA sense strand
ccagaaaccuagauaagaa

SEQ ID NO: 1432183 - RNA, 19 nt, Homo sapiens
  misc_RNA (1)...(19): siRNA sense strand
caacuggucucauacuuca

SEQ ID NO: 1432184 - RNA, 19 nt, Homo sapiens
  misc_RNA (1)...(19): siRNA sense strand
ggacuucacuggcuccaau

SEQ ID NO: 1432185 - RNA, 19 nt, Homo sapiens
  misc_RNA (1)...(19): siRNA sense strand
guacagaucugaggucauc

SEQ ID NO: 1432186 - RNA, 19 nt, Homo sapiens
  misc_RNA (1)...(19): siRNA sense strand
aaaggacaaucguguagua

SEQ ID NO: 1432187 - RNA, 19 nt, Homo sapiens
  misc_RNA (1)...(19): siRNA sense strand
gcaggucucgcaugaauuu

SEQ ID NO: 1432188 - RNA, 19 nt, Homo sapiens
  misc_RNA (1)...(19): siRNA sense strand
caagaacucuggaacuauc

SEQ ID NO: 1432189 - RNA, 19 nt, Homo sapiens
  misc_RNA (1)...(19): siRNA sense strand
caacaggggucaaugagua

SEQ ID NO: 1432190 - RNA, 19 nt, Homo sapiens
  misc_RNA (1)...(19): siRNA sense strand
uacaagaacucuggaacua

SEQ ID NO: 1432191 - RNA, 19 nt, Homo sapiens
  misc_RNA (1)...(19): siRNA sense strand
gcugagggaugaugacuuc

SEQ ID NO: 1432192 - RNA, 19 nt, Homo sapiens
  misc_RNA (1)...(19): siRNA sense strand
gcaugaauuugccuugaau

SEQ ID NO: 1432193 - RNA, 19 nt, Homo sapiens
  misc_RNA (1)...(19): siRNA sense strand
gagggaugaugacuuccua

SEQ ID NO: 1432194 - RNA, 19 nt, Homo sapiens
  misc_RNA (1)...(19): siRNA sense strand
ggacaucggcuccaagucu

SEQ ID NO: 1432195 - RNA, 19 nt, Homo sapiens
  misc_RNA (1)...(19): siRNA sense strand
cgccagagcugagggauga

SEQ ID NO: 1432196 - RNA, 19 nt, Homo sapiens
  misc_RNA (1)...(19): siRNA sense strand
ggaacuauccgugucaaga

SEQ ID NO: 1432197 - RNA, 19 nt, Homo sapiens
  misc_RNA (1)...(19): siRNA sense strand
gaacuauccgugucaagau

SEQ ID NO: 1432198 - RNA, 19 nt, Homo sapiens
  misc_RNA (1)...(19): siRNA sense strand
caagauuugucggguagaa

SEQ ID NO: 1432199 - RNA, 19 nt, Homo sapiens
  misc_RNA (1)...(19): siRNA sense strand
gcagcgugguucaggacua

SEQ ID NO: 1432200 - RNA, 19 nt, Homo sapiens
  misc_RNA (1)...(19): siRNA sense strand
gcuguucccugcauuugga

SEQ ID NO: 1432201 - RNA, 19 nt, Homo sapiens
  misc_RNA (1)...(19): siRNA sense strand
agaaacagaguacuccuuu

SEQ ID NO: 1432202 - RNA, 19 nt, Homo sapiens
  misc_RNA (1)...(19): siRNA sense strand
gguagaggccagaaaccua

SEQ ID NO: 1432203 - RNA, 19 nt, Homo sapiens
  misc_RNA (1)...(19): siRNA sense strand
gugcaaugcuccgauuaug

SEQ ID NO: 1432204 - RNA, 19 nt, Homo sapiens
  misc_RNA (1)...(19): siRNA sense strand
uggcaggucucgcaugaau

SEQ ID NO: 1432205 - RNA, 19 nt, Homo sapiens
  misc_RNA (1)...(19): siRNA sense strand
ggacaaucguguaguaacc

SEQ ID NO: 1432206 - RNA, 19 nt, Homo sapiens
  misc_RNA (1)...(19): siRNA sense strand
cuauggcccuaccaacuuu

SEQ ID NO: 1432207 - RNA, 19 nt, Homo sapiens
  misc_RNA (1)...(19): siRNA sense strand
gaaugcauccacccugaga

SEQ ID NO: 1432208 - RNA, 19 nt, Homo sapiens
  misc_RNA (1)...(19): siRNA sense strand
gccagaaaccuagauaaga

SEQ ID NO: 1432209 - RNA, 19 nt, Homo sapiens
  misc_RNA (1)...(19): siRNA sense strand
gcuacgcuuuggaaucuau

SEQ ID NO: 1432210 - RNA, 19 nt, Homo sapiens
  misc_RNA (1)...(19): siRNA sense strand
gugaccaucucauugacaa

SEQ ID NO: 1432211 - RNA, 19 nt, Homo sapiens
  misc_RNA (1)...(19): siRNA sense strand
gaugggaggcugucagauc

SEQ ID NO: 1432212 - RNA, 19 nt, Homo sapiens
  misc_RNA (1)...(19): siRNA sense strand
gacaagcuguucccugcau

SEQ ID NO: 1432213 - RNA, 19 nt, Homo sapiens
  misc_RNA (1)...(19): siRNA sense strand
ggacugccucgcaauacuu

SEQ ID NO: 1432214 - RNA, 19 nt, Homo sapiens
  misc_RNA (1)...(19): siRNA sense strand
gacccacucugcguccuuu

SEQ ID NO: 1432215 - RNA, 19 nt, Homo sapiens
  misc_RNA (1)...(19): siRNA sense strand
caacuuugcacccaucauc

SEQ ID NO: 1432216 - RNA, 19 nt, Homo sapiens
  misc_RNA (1)...(19): siRNA sense strand
ccaugucagugaucauugu

SEQ ID NO: 1432217 - RNA, 19 nt, Homo sapiens
  misc_RNA (1)...(19): siRNA sense strand
gagcuuggccggacugaac

SEQ ID NO: 1432218 - RNA, 19 nt, Homo sapiens
  misc_RNA (1)...(19): siRNA sense strand
ccucgaaccugcccauguc

SEQ ID NO: 1432219 - RNA, 19 nt, Homo sapiens
  misc_RNA (1)...(19): siRNA sense strand
ggaauuaaaggacaaucgu

SEQ ID NO: 1432220 - RNA, 19 nt, Homo sapiens
  misc_RNA (1)...(19): siRNA sense strand
caggugcaaugcuccgauu

SEQ ID NO: 1432221 - RNA, 19 nt, Homo sapiens
  misc_RNA (1)...(19): siRNA sense strand
ucgcagaagugcccacaca

SEQ ID NO: 1432222 - RNA, 19 nt, Homo sapiens
  misc_RNA (1)...(19): siRNA sense strand
ucucagcucaggaauuaaa

SEQ ID NO: 1432223 - RNA, 19 nt, Homo sapiens
  misc_RNA (1)...(19): siRNA sense strand
aaacagaguacuccuuucu

SEQ ID NO: 1432224 - RNA, 19 nt, Homo sapiens
  misc_RNA (1)...(19): siRNA sense strand
cagcuugaguaccgcuuug

SEQ ID NO: 1432225 - RNA, 19 nt, Homo sapiens
  misc_RNA (1)...(19): siRNA sense strand
cacaacuggucucauacuu

SEQ ID NO: 1432226 - RNA, 19 nt, Homo sapiens
  misc_RNA (1)...(19): siRNA sense strand
cgcaauacuucaugcuguu

SEQ ID NO: 1432227 - RNA, 19 nt, Homo sapiens
  misc_RNA (1)...(19): siRNA sense strand
guacuccuuucuggacuau

SEQ ID NO: 1432228 - RNA, 19 nt, Homo sapiens
  misc_RNA (1)...(19): siRNA sense strand
gauuguguccagccaggua

SEQ ID NO: 1432229 - RNA, 19 nt, Homo sapiens
  misc_RNA (1)...(19): siRNA sense strand
ggagguagaggccagaaac

SEQ ID NO: 1432230 - RNA, 19 nt, Homo sapiens
  misc_RNA (1)...(19): siRNA sense strand
cgcaugaauuugccuugaa

SEQ ID NO: 1432231 - RNA, 19 nt, Homo sapiens
  misc_RNA (1)...(19): siRNA sense strand
ugguucagcuguccauuuc

SEQ ID NO: 1432232 - RNA, 19 nt, Homo sapiens
  misc_RNA (1)...(19): siRNA sense strand
cagcgugguucaggacuau

SEQ ID NO: 1432233 - RNA, 19 nt, Homo sapiens
  misc_RNA (1)...(19): siRNA sense strand
gaggccagaaaccuagaua

SEQ ID NO: 1432234 - RNA, 19 nt, Homo sapiens
  misc_RNA (1)...(19): siRNA sense strand
caagcuguucccugcauuu

SEQ ID NO: 1432235 - RNA, 19 nt, Homo sapiens
  misc_RNA (1)...(19): siRNA sense strand
ggucaaugaguaccugaug

SEQ ID NO: 1432236 - RNA, 19 nt, Homo sapiens
  misc_RNA (1)...(19): siRNA sense strand
cggcugaguuugaaugcau

SEQ ID NO: 1432237 - RNA, 19 nt, Homo sapiens
  misc_RNA (1)...(19): siRNA sense strand
ggcagucccggcugaguuu

SEQ ID NO: 1432238 - RNA, 19 nt, Homo sapiens
  misc_RNA (1)...(19): siRNA sense strand
cauggaagcguuucucagu

SEQ ID NO: 1432239 - RNA, 19 nt, Homo sapiens
  misc_RNA (1)...(19): siRNA sense strand
ggccagaaaccuagauaag

SEQ ID NO: 1432240 - RNA, 19 nt, Homo sapiens
  misc_RNA (1)...(19): siRNA sense strand
gcccugaguucuccaagac

SEQ ID NO: 1432241 - RNA, 19 nt, Homo sapiens
  misc_RNA (1)...(19): siRNA sense strand
uguggguggugcugacuuu

SEQ ID NO: 1432242 - RNA, 19 nt, Homo sapiens
  misc_RNA (1)...(19): siRNA sense strand
acaaggacaucggcuccaa

SEQ ID NO: 1432243 - RNA, 19 nt, Homo sapiens
  misc_RNA (1)...(19): siRNA sense strand
ccugugaccaucucauuga

SEQ ID NO: 1432244 - RNA, 19 nt, Homo sapiens
  misc_RNA (1)...(19): siRNA sense strand
ccgccagggugaugggaaa

SEQ ID NO: 1432245 - RNA, 19 nt, Homo sapiens
  misc_RNA (1)...(19): siRNA sense strand
gcagaagugcccacacaac

SEQ ID NO: 1432246 - RNA, 19 nt, Homo sapiens
  misc_RNA (1)...(19): siRNA sense strand
gcaauacuucaugcuguug

SEQ ID NO: 1432247 - RNA, 19 nt, Homo sapiens
  misc_RNA (1)...(19): siRNA sense strand
gcaggcauccagggcauug

SEQ ID NO: 1432248 - RNA, 19 nt, Homo sapiens
  misc_RNA (1)...(19): siRNA sense strand
ucgcaugaauuugccuuga

SEQ ID NO: 1432249 - RNA, 19 nt, Homo sapiens
  misc_RNA (1)...(19): siRNA sense strand
cuccaagacucuacagcuu

SEQ ID NO: 1432250 - RNA, 19 nt, Homo sapiens
  misc_RNA (1)...(19): siRNA sense strand
ggugcaaugcuccgauuau

SEQ ID NO: 1432251 - RNA, 19 nt, Homo sapiens
  misc_RNA (1)...(19): siRNA sense strand
gggacugccucgcaauacu

SEQ ID NO: 1432252 - RNA, 19 nt, Homo sapiens
  misc_RNA (1)...(19): siRNA sense strand
acuggcaggucucgcauga

SEQ ID NO: 1432253 - RNA, 19 nt, Homo sapiens
  misc_RNA (1)...(19): siRNA sense strand
ucaccugacucccuacacu

SEQ ID NO: 1432254 - RNA, 19 nt, Homo sapiens
  misc_RNA (1)...(19): siRNA sense strand
gcgacauugugcaguuugu

SEQ ID NO: 1432255 - RNA, 19 nt, Homo sapiens
  misc_RNA (1)...(19): siRNA sense strand
uaguaaccauggagguaga

SEQ ID NO: 1432256 - RNA, 19 nt, Homo sapiens
  misc_RNA (1)...(19): siRNA sense strand
gcccaugucagugaucauu

SEQ ID NO: 1432257 - RNA, 19 nt, Homo sapiens
  misc_RNA (1)...(19): siRNA sense strand
gaacaaccugaacccuaca

SEQ ID NO: 1432258 - RNA, 19 nt, Homo sapiens
  misc_RNA (1)...(19): siRNA sense strand
gaaaccuagauaagaagga

SEQ ID NO: 1432259 - RNA, 19 nt, Homo sapiens
  misc_RNA (1)...(19): siRNA sense strand
gcuuugagacaguccagaa

SEQ ID NO: 1432260 - RNA, 19 nt, Homo sapiens
  misc_RNA (1)...(19): siRNA sense strand
aacuauccgugucaagauu

SEQ ID NO: 1432261 - RNA, 19 nt, Homo sapiens
  misc_RNA (1)...(19): siRNA sense strand
agaccgugcucgcagaagu

SEQ ID NO: 1432262 - RNA, 19 nt, Homo sapiens
  misc_RNA (1)...(19): siRNA sense strand
ccgcgacauugugcaguuu

SEQ ID NO: 1432263 - RNA, 19 nt, Homo sapiens
  misc_RNA (1)...(19): siRNA sense strand
gaggcugucagaucaacuu

SEQ ID NO: 1432264 - RNA, 19 nt, Homo sapiens
  misc_RNA (1)...(19): siRNA sense strand
gcuuuggaaucuaugacau

SEQ ID NO: 1432265 - RNA, 19 nt, Homo sapiens
  misc_RNA (1)...(19): siRNA sense strand
cgacauugugcaguuugua

SEQ ID NO: 1432266 - RNA, 19 nt, Homo sapiens
  misc_RNA (1)...(19): siRNA sense strand
uguaguaaccauggaggua

SEQ ID NO: 1432267 - RNA, 19 nt, Homo sapiens
  misc_RNA (1)...(19): siRNA sense strand
gcugucagaucaacuucac

SEQ ID NO: 1432268 - RNA, 19 nt, Homo sapiens
  misc_RNA (1)...(19): siRNA sense strand
uuaaaggacaaucguguag

SEQ ID NO: 1432269 - RNA, 19 nt, Homo sapiens
  misc_RNA (1)...(19): siRNA sense strand
ucuauggcccuaccaacuu

SEQ ID NO: 1432270 - RNA, 19 nt, Homo sapiens
  misc_RNA (1)...(19): siRNA sense strand
augggaggcugucagauca

SEQ ID NO: 1432271 - RNA, 19 nt, Homo sapiens
  misc_RNA (1)...(19): siRNA sense strand
ccagggugaugggaaaugg

SEQ ID NO: 1432272 - RNA, 19 nt, Homo sapiens
  misc_RNA (1)...(19): siRNA sense strand
cagcucaggaauuaaagga

SEQ ID NO: 1432273 - RNA, 19 nt, Homo sapiens
  misc_RNA (1)...(19): siRNA sense strand
cagaagugcccacacaacu

SEQ ID NO: 1432274 - RNA, 19 nt, Homo sapiens
  misc_RNA (1)...(19): siRNA sense strand
acaagcuguucccugcauu

SEQ ID NO: 1432275 - RNA, 19 nt, Homo sapiens
  misc_RNA (1)...(19): siRNA sense strand
aagaaaagcuacaagaacu

SEQ ID NO: 1432276 - RNA, 19 nt, Homo sapiens
  misc_RNA (1)...(19): siRNA sense strand
gcauccacccugagaagca

SEQ ID NO: 1432277 - RNA, 19 nt, Homo sapiens
  misc_RNA (1)...(19): siRNA sense strand
acuccuuucuggacuaugu

SEQ ID NO: 1432278 - RNA, 19 nt, Homo sapiens
  misc_RNA (1)...(19): siRNA sense strand
ggguggugcugacuuugag

SEQ ID NO: 1432279 - RNA, 19 nt, Homo sapiens
  misc_RNA (1)...(19): siRNA sense strand
ccacacaacuggucucaua

SEQ ID NO: 1432280 - RNA, 19 nt, Homo sapiens
  misc_RNA (1)...(19): siRNA sense strand
gaucugaggucaucaagaa

SEQ ID NO: 1432281 - RNA, 19 nt, Homo sapiens
  misc_RNA (1)...(19): siRNA sense strand
ggucucagcucaggaauua

SEQ ID NO: 1432282 - RNA, 19 nt, Homo sapiens
  misc_RNA (1)...(19): siRNA sense strand
ccagaaaccuagauaagaa

SEQ ID NO: 1432283 - RNA, 19 nt, Homo sapiens
  misc_RNA (1)...(19): siRNA sense strand
caacuggucucauacuuca

SEQ ID NO: 1432284 - RNA, 19 nt, Homo sapiens
  misc_RNA (1)...(19): siRNA sense strand
ggacuucacuggcuccaau

SEQ ID NO: 1432285 - RNA, 19 nt, Homo sapiens
  misc_RNA (1)...(19): siRNA sense strand
guacagaucugaggucauc

SEQ ID NO: 1432286 - RNA, 19 nt, Homo sapiens
  misc_RNA (1)...(19): siRNA sense strand
aaaggacaaucguguagua

SEQ ID NO: 1432287 - RNA, 19 nt, Homo sapiens
  misc_RNA (1)...(19): siRNA sense strand
gcaggucucgcaugaauuu

SEQ ID NO: 1432288 - RNA, 19 nt, Homo sapiens
  misc_RNA (1)...(19): siRNA sense strand
caagaacucuggaacuauc

SEQ ID NO: 1432289 - RNA, 19 nt, Homo sapiens
  misc_RNA (1)...(19): siRNA sense strand
caacaggggucaaugagua

SEQ ID NO: 1432290 - RNA, 19 nt, Homo sapiens
  misc_RNA (1)...(19): siRNA sense strand
uacaagaacucuggaacua

SEQ ID NO: 1432291 - RNA, 19 nt, Homo sapiens
  misc_RNA (1)...(19): siRNA sense strand
gcugagggaugaugacuuc

SEQ ID NO: 1432292 - RNA, 19 nt, Homo sapiens
  misc_RNA (1)...(19): siRNA sense strand
gcaugaauuugccuugaau

SEQ ID NO: 1432293 - RNA, 19 nt, Homo sapiens
  misc_RNA (1)...(19): siRNA sense strand
gagggaugaugacuuccua

SEQ ID NO: 1432294 - RNA, 19 nt, Homo sapiens
  misc_RNA (1)...(19): siRNA sense strand
ggacaucggcuccaagucu

SEQ ID NO: 1432295 - RNA, 19 nt, Homo sapiens
  misc_RNA (1)...(19): siRNA sense strand
cgccagagcugagggauga

SEQ ID NO: 1432296 - RNA, 19 nt, Homo sapiens
  misc_RNA (1)...(19): siRNA sense strand
ggaacuauccgugucaaga

SEQ ID NO: 1432297 - RNA, 19 nt, Homo sapiens
  misc_RNA (1)...(19): siRNA sense strand
gaacuauccgugucaagau

SEQ ID NO: 1432298 - RNA, 19 nt, Homo sapiens
  misc_RNA (1)...(19): siRNA sense strand
caagauuugucggguagaa

SEQ ID NO: 1432299 - RNA, 19 nt, Homo sapiens
  misc_RNA (1)...(19): siRNA sense strand
gcagcgugguucaggacua

SEQ ID NO: 1432300 - RNA, 19 nt, Homo sapiens
  misc_RNA (1)...(19): siRNA sense strand
gcuguucccugcauuugga

SEQ ID NO: 1432301 - RNA, 19 nt, Homo sapiens
  misc_RNA (1)...(19): siRNA sense strand
agaaacagaguacuccuuu

SEQ ID NO: 1432302 - RNA, 19 nt, Homo sapiens
  misc_RNA (1)...(19): siRNA sense strand
gguagaggccagaaaccua

SEQ ID NO: 1432303 - RNA, 19 nt, Homo sapiens
  misc_RNA (1)...(19): siRNA sense strand
gugcaaugcuccgauuaug

SEQ ID NO: 1432304 - RNA, 19 nt, Homo sapiens
  misc_RNA (1)...(19): siRNA sense strand
uggcaggucucgcaugaau

SEQ ID NO: 1432305 - RNA, 19 nt, Homo sapiens
  misc_RNA (1)...(19): siRNA sense strand
ggacaaucguguaguaacc

SEQ ID NO: 1432306 - RNA, 19 nt, Homo sapiens
  misc_RNA (1)...(19): siRNA sense strand
cuauggcccuaccaacuuu

SEQ ID NO: 1432307 - RNA, 19 nt, Homo sapiens
  misc_RNA (1)...(19): siRNA sense strand
gaaugcauccacccugaga

SEQ ID NO: 1432308 - RNA, 19 nt, Homo sapiens
  misc_RNA (1)...(19): siRNA sense strand
gccagaaaccuagauaaga

SEQ ID NO: 1432309 - RNA, 19 nt, Homo sapiens
  misc_RNA (1)...(19): siRNA sense strand
gcuacgcuuuggaaucuau

SEQ ID NO: 1432310 - RNA, 19 nt, Homo sapiens
  misc_RNA (1)...(19): siRNA sense strand
gugaccaucucauugacaa

SEQ ID NO: 1432311 - RNA, 19 nt, Homo sapiens
  misc_RNA (1)...(19): siRNA sense strand
gaugggaggcugucagauc

SEQ ID NO: 1432312 - RNA, 19 nt, Homo sapiens
  misc_RNA (1)...(19): siRNA sense strand
gacaagcuguucccugcau

SEQ ID NO: 1432313 - RNA, 19 nt, Homo sapiens
  misc_RNA (1)...(19): siRNA sense strand
ggacugccucgcaauacuu

SEQ ID NO: 1432314 - RNA, 19 nt, Homo sapiens
  misc_RNA (1)...(19): siRNA sense strand
gacccacucugcguccuuu

SEQ ID NO: 1432315 - RNA, 19 nt, Homo sapiens
  misc_RNA (1)...(19): siRNA sense strand
caacuuugcacccaucauc

SEQ ID NO: 1432316 - RNA, 19 nt, Homo sapiens
  misc_RNA (1)...(19): siRNA sense strand
ccaugucagugaucauugu

SEQ ID NO: 1432317 - RNA, 19 nt, Homo sapiens
  misc_RNA (1)...(19): siRNA sense strand
gagcuuggccggacugaac

SEQ ID NO: 1432318 - RNA, 19 nt, Homo sapiens
  misc_RNA (1)...(19): siRNA sense strand
ccucgaaccugcccauguc

SEQ ID NO: 1432319 - RNA, 19 nt, Homo sapiens
  misc_RNA (1)...(19): siRNA sense strand
ggaauuaaaggacaaucgu

SEQ ID NO: 1432320 - RNA, 19 nt, Homo sapiens
  misc_RNA (1)...(19): siRNA sense strand
caggugcaaugcuccgauu

SEQ ID NO: 1432321 - RNA, 19 nt, Homo sapiens
  misc_RNA (1)...(19): siRNA sense strand
ucgcagaagugcccacaca

SEQ ID NO: 1432322 - RNA, 19 nt, Homo sapiens
  misc_RNA (1)...(19): siRNA sense strand
ucucagcucaggaauuaaa

SEQ ID NO: 1432323 - RNA, 19 nt, Homo sapiens
  misc_RNA (1)...(19): siRNA sense strand
aaacagaguacuccuuucu

SEQ ID NO: 1432324 - RNA, 19 nt, Homo sapiens
  misc_RNA (1)...(19): siRNA sense strand
cagcuugaguaccgcuuug

SEQ ID NO: 1432325 - RNA, 19 nt, Homo sapiens
  misc_RNA (1)...(19): siRNA sense strand
cacaacuggucucauacuu

SEQ ID NO: 1432326 - RNA, 19 nt, Homo sapiens
  misc_RNA (1)...(19): siRNA sense strand
cgcaauacuucaugcuguu

SEQ ID NO: 1432327 - RNA, 19 nt, Homo sapiens
  misc_RNA (1)...(19): siRNA sense strand
guacuccuuucuggacuau

SEQ ID NO: 1432328 - RNA, 19 nt, Homo sapiens
  misc_RNA (1)...(19): siRNA sense strand
gauuguguccagccaggua

SEQ ID NO: 1432329 - RNA, 19 nt, Homo sapiens
  misc_RNA (1)...(19): siRNA sense strand
ggagguagaggccagaaac

SEQ ID NO: 1432330 - RNA, 19 nt, Homo sapiens
  misc_RNA (1)...(19): siRNA sense strand
cgcaugaauuugccuugaa

SEQ ID NO: 1432331 - RNA, 19 nt, Homo sapiens
  misc_RNA (1)...(19): siRNA sense strand
ugguucagcuguccauuuc

SEQ ID NO: 1432332 - RNA, 19 nt, Homo sapiens
  misc_RNA (1)...(19): siRNA sense strand
cagcgugguucaggacuau

SEQ ID NO: 1432333 - RNA, 19 nt, Homo sapiens
  misc_RNA (1)...(19): siRNA sense strand
gaggccagaaaccuagaua

SEQ ID NO: 1432334 - RNA, 19 nt, Homo sapiens
  misc_RNA (1)...(19): siRNA sense strand
caagcuguucccugcauuu

SEQ ID NO: 1432335 - RNA, 19 nt, Homo sapiens
  misc_RNA (1)...(19): siRNA sense strand
ggucaaugaguaccugaug

SEQ ID NO: 1432336 - RNA, 19 nt, Homo sapiens
  misc_RNA (1)...(19): siRNA sense strand
cggcugaguuugaaugcau

SEQ ID NO: 1432337 - RNA, 19 nt, Homo sapiens
  misc_RNA (1)...(19): siRNA sense strand
ggcagucccggcugaguuu

SEQ ID NO: 1432338 - RNA, 19 nt, Homo sapiens
  misc_RNA (1)...(19): siRNA sense strand
cauggaagcguuucucagu

SEQ ID NO: 1432339 - RNA, 19 nt, Homo sapiens
  misc_RNA (1)...(19): siRNA sense strand
ggccagaaaccuagauaag

SEQ ID NO: 1432340 - RNA, 19 nt, Homo sapiens
  misc_RNA (1)...(19): siRNA sense strand
gcccugaguucuccaagac

SEQ ID NO: 1432341 - RNA, 19 nt, Homo sapiens
  misc_RNA (1)...(19): siRNA sense strand
uguggguggugcugacuuu

SEQ ID NO: 1432342 - RNA, 19 nt, Homo sapiens
  misc_RNA (1)...(19): siRNA sense strand
acaaggacaucggcuccaa

SEQ ID NO: 1432343 - RNA, 19 nt, Homo sapiens
  misc_RNA (1)...(19): siRNA sense strand
ccugugaccaucucauuga

SEQ ID NO: 1432344 - RNA, 19 nt, Homo sapiens
  misc_RNA (1)...(19): siRNA sense strand
ccgccagggugaugggaaa

SEQ ID NO: 1432345 - RNA, 19 nt, Homo sapiens
  misc_RNA (1)...(19): siRNA sense strand
gcagaagugcccacacaac

SEQ ID NO: 1432346 - RNA, 19 nt, Homo sapiens
  misc_RNA (1)...(19): siRNA sense strand
gcaauacuucaugcuguug

SEQ ID NO: 1432347 - RNA, 19 nt, Homo sapiens
  misc_RNA (1)...(19): siRNA sense strand
gcaggcauccagggcauug

SEQ ID NO: 1432348 - RNA, 19 nt, Homo sapiens
  misc_RNA (1)...(19): siRNA sense strand
ucgcaugaauuugccuuga

SEQ ID NO: 1432349 - RNA, 19 nt, Homo sapiens
  misc_RNA (1)...(19): siRNA sense strand
cuccaagacucuacagcuu

SEQ ID NO: 1432350 - RNA, 19 nt, Homo sapiens
  misc_RNA (1)...(19): siRNA sense strand
ggugcaaugcuccgauuau

SEQ ID NO: 1432351 - RNA, 19 nt, Homo sapiens
  misc_RNA (1)...(19): siRNA sense strand
gggacugccucgcaauacu

SEQ ID NO: 1432352 - RNA, 19 nt, Homo sapiens
  misc_RNA (1)...(19): siRNA sense strand
acuggcaggucucgcauga

SEQ ID NO: 1432353 - RNA, 19 nt, Homo sapiens
  misc_RNA (1)...(19): siRNA sense strand
ucaccugacucccuacacu

SEQ ID NO: 1432354 - RNA, 19 nt, Homo sapiens
  misc_RNA (1)...(19): siRNA sense strand
gcgacauugugcaguuugu

SEQ ID NO: 1432355 - RNA, 19 nt, Homo sapiens
  misc_RNA (1)...(19): siRNA sense strand
uaguaaccauggagguaga

SEQ ID NO: 1432356 - RNA, 19 nt, Homo sapiens
  misc_RNA (1)...(19): siRNA sense strand
gcccaugucagugaucauu

SEQ ID NO: 1432357 - RNA, 19 nt, Homo sapiens
  misc_RNA (1)...(19): siRNA sense strand
gaacaaccugaacccuaca

SEQ ID NO: 1432358 - RNA, 19 nt, Homo sapiens
  misc_RNA (1)...(19): siRNA sense strand
gaaaccuagauaagaagga

SEQ ID NO: 1432359 - RNA, 19 nt, Homo sapiens
  misc_RNA (1)...(19): siRNA sense strand
gcuuugagacaguccagaa

SEQ ID NO: 1432360 - RNA, 19 nt, Homo sapiens
  misc_RNA (1)...(19): siRNA sense strand
aacuauccgugucaagauu

SEQ ID NO: 1432361 - RNA, 19 nt, Homo sapiens
  misc_RNA (1)...(19): siRNA sense strand
agaccgugcucgcagaagu

SEQ ID NO: 1432362 - RNA, 19 nt, Homo sapiens
  misc_RNA (1)...(19): siRNA sense strand
ccgcgacauugugcaguuu

SEQ ID NO: 1432363 - RNA, 19 nt, Homo sapiens
  misc_RNA (1)...(19): siRNA sense strand
gaggcugucagaucaacuu

SEQ ID NO: 1432364 - RNA, 19 nt, Homo sapiens
  misc_RNA (1)...(19): siRNA sense strand
gcuuuggaaucuaugacau

SEQ ID NO: 1432365 - RNA, 19 nt, Homo sapiens
  misc_RNA (1)...(19): siRNA sense strand
cgacauugugcaguuugua

SEQ ID NO: 1432366 - RNA, 19 nt, Homo sapiens
  misc_RNA (1)...(19): siRNA sense strand
uguaguaaccauggaggua

SEQ ID NO: 1432367 - RNA, 19 nt, Homo sapiens
  misc_RNA (1)...(19): siRNA sense strand
gcugucagaucaacuucac

SEQ ID NO: 1432368 - RNA, 19 nt, Homo sapiens
  misc_RNA (1)...(19): siRNA sense strand
uuaaaggacaaucguguag

SEQ ID NO: 1432369 - RNA, 19 nt, Homo sapiens
  misc_RNA (1)...(19): siRNA sense strand
ucuauggcccuaccaacuu

SEQ ID NO: 1432370 - RNA, 19 nt, Homo sapiens
  misc_RNA (1)...(19): siRNA sense strand
augggaggcugucagauca

SEQ ID NO: 1432371 - RNA, 19 nt, Homo sapiens
  misc_RNA (1)...(19): siRNA sense strand
ccagggugaugggaaaugg

SEQ ID NO: 1432372 - RNA, 19 nt, Homo sapiens
  misc_RNA (1)...(19): siRNA sense strand
cagcucaggaauuaaagga

SEQ ID NO: 1432373 - RNA, 19 nt, Homo sapiens
  misc_RNA (1)...(19): siRNA sense strand
cagaagugcccacacaacu

SEQ ID NO: 1432374 - RNA, 19 nt, Homo sapiens
  misc_RNA (1)...(19): siRNA sense strand
acaagcuguucccugcauu

SEQ ID NO: 1432375 - RNA, 19 nt, Homo sapiens
  misc_RNA (1)...(19): siRNA sense strand
aagaaaagcuacaagaacu

SEQ ID NO: 1432376 - RNA, 19 nt, Homo sapiens
  misc_RNA (1)...(19): siRNA sense strand
gcauccacccugagaagca

SEQ ID NO: 1432377 - RNA, 19 nt, Homo sapiens
  misc_RNA (1)...(19): siRNA sense strand
acuccuuucuggacuaugu

SEQ ID NO: 1432378 - RNA, 19 nt, Homo sapiens
  misc_RNA (1)...(19): siRNA sense strand
ggguggugcugacuuugag

SEQ ID NO: 1432379 - RNA, 19 nt, Homo sapiens
  misc_RNA (1)...(19): siRNA sense strand
ccacacaacuggucucaua

SEQ ID NO: 1432380 - RNA, 19 nt, Homo sapiens
  misc_RNA (1)...(19): siRNA sense strand
gaucugaggucaucaagaa

SEQ ID NO: 1432381 - RNA, 19 nt, Homo sapiens
  misc_RNA (1)...(19): siRNA sense strand
ggucucagcucaggaauua

SEQ ID NO: 1432382 - RNA, 19 nt, Homo sapiens
  misc_RNA (1)...(19): siRNA sense strand
ccagaaaccuagauaagaa

SEQ ID NO: 1432383 - RNA, 19 nt, Homo sapiens
  misc_RNA (1)...(19): siRNA sense strand
caacuggucucauacuuca

SEQ ID NO: 1432384 - RNA, 19 nt, Homo sapiens
  misc_RNA (1)...(19): siRNA sense strand
ggacuucacuggcuccaau

SEQ ID NO: 1432385 - RNA, 19 nt, Homo sapiens
  misc_RNA (1)...(19): siRNA sense strand
guacagaucugaggucauc

SEQ ID NO: 1432386 - RNA, 19 nt, Homo sapiens
  misc_RNA (1)...(19): siRNA sense strand
aaaggacaaucguguagua

SEQ ID NO: 1432387 - RNA, 19 nt, Homo sapiens
  misc_RNA (1)...(19): siRNA sense strand
gcaggucucgcaugaauuu

SEQ ID NO: 1432388 - RNA, 19 nt, Homo sapiens
  misc_RNA (1)...(19): siRNA sense strand
caagaacucuggaacuauc

SEQ ID NO: 1432389 - RNA, 19 nt, Homo sapiens
  misc_RNA (1)...(19): siRNA sense strand
caacaggggucaaugagua

SEQ ID NO: 1432390 - RNA, 19 nt, Homo sapiens
  misc_RNA (1)...(19): siRNA sense strand
uacaagaacucuggaacua

SEQ ID NO: 1432391 - RNA, 19 nt, Homo sapiens
  misc_RNA (1)...(19): siRNA sense strand
gcugagggaugaugacuuc

SEQ ID NO: 1432392 - RNA, 19 nt, Homo sapiens
  misc_RNA (1)...(19): siRNA sense strand
gcaugaauuugccuugaau

SEQ ID NO: 1432393 - RNA, 19 nt, Homo sapiens
  misc_RNA (1)...(19): siRNA sense strand
gagggaugaugacuuccua

SEQ ID NO: 1432394 - RNA, 19 nt, Homo sapiens
  misc_RNA (1)...(19): siRNA sense strand
ggacaucggcuccaagucu

SEQ ID NO: 1432395 - RNA, 19 nt, Homo sapiens
  misc_RNA (1)...(19): siRNA sense strand
cgccagagcugagggauga

SEQ ID NO: 1432396 - RNA, 19 nt, Homo sapiens
  misc_RNA (1)...(19): siRNA sense strand
ggaacuauccgugucaaga

SEQ ID NO: 1432397 - RNA, 19 nt, Homo sapiens
  misc_RNA (1)...(19): siRNA sense strand
gaacuauccgugucaagau

SEQ ID NO: 1432398 - RNA, 19 nt, Homo sapiens
  misc_RNA (1)...(19): siRNA sense strand
caagauuugucggguagaa

SEQ ID NO: 1432399 - RNA, 19 nt, Homo sapiens
  misc_RNA (1)...(19): siRNA sense strand
gcagcgugguucaggacua

SEQ ID NO: 1432400 - RNA, 19 nt, Homo sapiens
  misc_RNA (1)...(19): siRNA sense strand
gcuguucccugcauuugga

SEQ ID NO: 1432401 - RNA, 19 nt, Homo sapiens
  misc_RNA (1)...(19): siRNA sense strand
agaaacagaguacuccuuu

SEQ ID NO: 1432402 - RNA, 19 nt, Homo sapiens
  misc_RNA (1)...(19): siRNA sense strand
gguagaggccagaaaccua

SEQ ID NO: 1432403 - RNA, 19 nt, Homo sapiens
  misc_RNA (1)...(19): siRNA sense strand
gugcaaugcuccgauuaug

SEQ ID NO: 1432404 - RNA, 19 nt, Homo sapiens
  misc_RNA (1)...(19): siRNA sense strand
uggcaggucucgcaugaau

SEQ ID NO: 1432405 - RNA, 19 nt, Homo sapiens
  misc_RNA (1)...(19): siRNA sense strand
ggacaaucguguaguaacc

SEQ ID NO: 1432406 - RNA, 19 nt, Homo sapiens
  misc_RNA (1)...(19): siRNA sense strand
cuauggcccuaccaacuuu

SEQ ID NO: 1432407 - RNA, 19 nt, Homo sapiens
  misc_RNA (1)...(19): siRNA sense strand
gaaugcauccacccugaga

SEQ ID NO: 1432408 - RNA, 19 nt, Homo sapiens
  misc_RNA (1)...(19): siRNA sense strand
gccagaaaccuagauaaga

SEQ ID NO: 1432409 - RNA, 19 nt, Homo sapiens
  misc_RNA (1)...(19): siRNA sense strand
gcuacgcuuuggaaucuau

SEQ ID NO: 1432410 - RNA, 19 nt, Homo sapiens
  misc_RNA (1)...(19): siRNA sense strand
gugaccaucucauugacaa

SEQ ID NO: 1432411 - RNA, 19 nt, Homo sapiens
  misc_RNA (1)...(19): siRNA sense strand
gaugggaggcugucagauc

SEQ ID NO: 1432412 - RNA, 19 nt, Homo sapiens
  misc_RNA (1)...(19): siRNA sense strand
gacaagcuguucccugcau

SEQ ID NO: 1432413 - RNA, 19 nt, Homo sapiens
  misc_RNA (1)...(19): siRNA sense strand
ggacugccucgcaauacuu

SEQ ID NO: 1432414 - RNA, 19 nt, Homo sapiens
  misc_RNA (1)...(19): siRNA sense strand
gacccacucugcguccuuu

SEQ ID NO: 1432415 - RNA, 19 nt, Homo sapiens
  misc_RNA (1)...(19): siRNA sense strand
caacuuugcacccaucauc

SEQ ID NO: 1432416 - RNA, 19 nt, Homo sapiens
  misc_RNA (1)...(19): siRNA sense strand
ccaugucagugaucauugu

SEQ ID NO: 1432417 - RNA, 19 nt, Homo sapiens
  misc_RNA (1)...(19): siRNA sense strand
gagcuuggccggacugaac

SEQ ID NO: 1432418 - RNA, 19 nt, Homo sapiens
  misc_RNA (1)...(19): siRNA sense strand
ccucgaaccugcccauguc

SEQ ID NO: 1432419 - RNA, 19 nt, Homo sapiens
  misc_RNA (1)...(19): siRNA sense strand
ggaauuaaaggacaaucgu

SEQ ID NO: 1432420 - RNA, 19 nt, Homo sapiens
  misc_RNA (1)...(19): siRNA sense strand
caggugcaaugcuccgauu

SEQ ID NO: 1432421 - RNA, 19 nt, Homo sapiens
  misc_RNA (1)...(19): siRNA sense strand
ucgcagaagugcccacaca

SEQ ID NO: 1432422 - RNA, 19 nt, Homo sapiens
  misc_RNA (1)...(19): siRNA sense strand
ucucagcucaggaauuaaa

SEQ ID NO: 1432423 - RNA, 19 nt, Homo sapiens
  misc_RNA (1)...(19): siRNA sense strand
aaacagaguacuccuuucu

SEQ ID NO: 1432424 - RNA, 19 nt, Homo sapiens
  misc_RNA (1)...(19): siRNA sense strand
cagcuugaguaccgcuuug

SEQ ID NO: 1432425 - RNA, 19 nt, Homo sapiens
  misc_RNA (1)...(19): siRNA sense strand
cacaacuggucucauacuu

SEQ ID NO: 1432426 - RNA, 19 nt, Homo sapiens
  misc_RNA (1)...(19): siRNA sense strand
cgcaauacuucaugcuguu

SEQ ID NO: 1432427 - RNA, 19 nt, Homo sapiens
  misc_RNA (1)...(19): siRNA sense strand
guacuccuuucuggacuau

SEQ ID NO: 1432428 - RNA, 19 nt, Homo sapiens
  misc_RNA (1)...(19): siRNA sense strand
gauuguguccagccaggua

SEQ ID NO: 1432429 - RNA, 19 nt, Homo sapiens
  misc_RNA (1)...(19): siRNA sense strand
ggagguagaggccagaaac

SEQ ID NO: 1432430 - RNA, 19 nt, Homo sapiens
  misc_RNA (1)...(19): siRNA sense strand
cgcaugaauuugccuugaa

SEQ ID NO: 1432431 - RNA, 19 nt, Homo sapiens
  misc_RNA (1)...(19): siRNA sense strand
ugguucagcuguccauuuc

SEQ ID NO: 1432432 - RNA, 19 nt, Homo sapiens
  misc_RNA (1)...(19): siRNA sense strand
cagcgugguucaggacuau

SEQ ID NO: 1432433 - RNA, 19 nt, Homo sapiens
  misc_RNA (1)...(19): siRNA sense strand
gaggccagaaaccuagaua

SEQ ID NO: 1432434 - RNA, 19 nt, Homo sapiens
  misc_RNA (1)...(19): siRNA sense strand
caagcuguucccugcauuu

SEQ ID NO: 1432435 - RNA, 19 nt, Homo sapiens
  misc_RNA (1)...(19): siRNA sense strand
ggucaaugaguaccugaug

SEQ ID NO: 1432436 - RNA, 19 nt, Homo sapiens
  misc_RNA (1)...(19): siRNA sense strand
cggcugaguuugaaugcau

SEQ ID NO: 1432437 - RNA, 19 nt, Homo sapiens
  misc_RNA (1)...(19): siRNA sense strand
ggcagucccggcugaguuu

SEQ ID NO: 1432438 - RNA, 19 nt, Homo sapiens
  misc_RNA (1)...(19): siRNA sense strand
cauggaagcguuucucagu

SEQ ID NO: 1432439 - RNA, 19 nt, Homo sapiens
  misc_RNA (1)...(19): siRNA sense strand
ggccagaaaccuagauaag

SEQ ID NO: 1432440 - RNA, 19 nt, Homo sapiens
  misc_RNA (1)...(19): siRNA sense strand
gcccugaguucuccaagac

SEQ ID NO: 1432441 - RNA, 19 nt, Homo sapiens
  misc_RNA (1)...(19): siRNA sense strand
uguggguggugcugacuuu

SEQ ID NO: 1432442 - RNA, 19 nt, Homo sapiens
  misc_RNA (1)...(19): siRNA sense strand
acaaggacaucggcuccaa

SEQ ID NO: 1432443 - RNA, 19 nt, Homo sapiens
  misc_RNA (1)...(19): siRNA sense strand
ccugugaccaucucauuga

SEQ ID NO: 1432444 - RNA, 19 nt, Homo sapiens
  misc_RNA (1)...(19): siRNA sense strand
ccgccagggugaugggaaa

SEQ ID NO: 1432445 - RNA, 19 nt, Homo sapiens
  misc_RNA (1)...(19): siRNA sense strand
gcagaagugcccacacaac

SEQ ID NO: 1432446 - RNA, 19 nt, Homo sapiens
  misc_RNA (1)...(19): siRNA sense strand
gcaauacuucaugcuguug

SEQ ID NO: 1432447 - RNA, 19 nt, Homo sapiens
  misc_RNA (1)...(19): siRNA sense strand
gcaggcauccagggcauug

SEQ ID NO: 1432448 - RNA, 19 nt, Homo sapiens
  misc_RNA (1)...(19): siRNA sense strand
ucgcaugaauuugccuuga

SEQ ID NO: 1432449 - RNA, 19 nt, Homo sapiens
  misc_RNA (1)...(19): siRNA sense strand
cuccaagacucuacagcuu

SEQ ID NO: 1432450 - RNA, 19 nt, Homo sapiens
  misc_RNA (1)...(19): siRNA sense strand
ggugcaaugcuccgauuau

SEQ ID NO: 1432451 - RNA, 19 nt, Homo sapiens
  misc_RNA (1)...(19): siRNA sense strand
gggacugccucgcaauacu

SEQ ID NO: 1432452 - RNA, 19 nt, Homo sapiens
  misc_RNA (1)...(19): siRNA sense strand
acuggcaggucucgcauga

SEQ ID NO: 1432453 - RNA, 19 nt, Homo sapiens
  misc_RNA (1)...(19): siRNA sense strand
ucaccugacucccuacacu

SEQ ID NO: 1432454 - RNA, 19 nt, Homo sapiens
  misc_RNA (1)...(19): siRNA sense strand
gcgacauugugcaguuugu

SEQ ID NO: 1432455 - RNA, 19 nt, Homo sapiens
  misc_RNA (1)...(19): siRNA sense strand
uaguaaccauggagguaga

SEQ ID NO: 1432456 - RNA, 19 nt, Homo sapiens
  misc_RNA (1)...(19): siRNA sense strand
gcccaugucagugaucauu

SEQ ID NO: 1432457 - RNA, 19 nt, Homo sapiens
  misc_RNA (1)...(19): siRNA sense strand
gaacaaccugaacccuaca

SEQ ID NO: 1432458 - RNA, 19 nt, Homo sapiens
  misc_RNA (1)...(19): siRNA sense strand
gaaaccuagauaagaagga

SEQ ID NO: 1432459 - RNA, 19 nt, Homo sapiens
  misc_RNA (1)...(19): siRNA sense strand
gcuuugagacaguccagaa

SEQ ID NO: 1432460 - RNA, 19 nt, Homo sapiens
  misc_RNA (1)...(19): siRNA sense strand
aacuauccgugucaagauu

SEQ ID NO: 1432461 - RNA, 19 nt, Homo sapiens
  misc_RNA (1)...(19): siRNA sense strand
agaccgugcucgcagaagu

SEQ ID NO: 1432462 - RNA, 19 nt, Homo sapiens
  misc_RNA (1)...(19): siRNA sense strand
ccgcgacauugugcaguuu

SEQ ID NO: 1432463 - RNA, 19 nt, Homo sapiens
  misc_RNA (1)...(19): siRNA sense strand
gaggcugucagaucaacuu

SEQ ID NO: 1432464 - RNA, 19 nt, Homo sapiens
  misc_RNA (1)...(19): siRNA sense strand
gcuuuggaaucuaugacau

SEQ ID NO: 1432465 - RNA, 19 nt, Homo sapiens
  misc_RNA (1)...(19): siRNA sense strand
cgacauugugcaguuugua

SEQ ID NO: 1432466 - RNA, 19 nt, Homo sapiens
  misc_RNA (1)...(19): siRNA sense strand
uguaguaaccauggaggua

SEQ ID NO: 1432467 - RNA, 19 nt, Homo sapiens
  misc_RNA (1)...(19): siRNA sense strand
gcugucagaucaacuucac

SEQ ID NO: 1432468 - RNA, 19 nt, Homo sapiens
  misc_RNA (1)...(19): siRNA sense strand
uuaaaggacaaucguguag

SEQ ID NO: 1432469 - RNA, 19 nt, Homo sapiens
  misc_RNA (1)...(19): siRNA sense strand
ucuauggcccuaccaacuu

SEQ ID NO: 1432470 - RNA, 19 nt, Homo sapiens
  misc_RNA (1)...(19): siRNA sense strand
augggaggcugucagauca

SEQ ID NO: 1432471 - RNA, 19 nt, Homo sapiens
  misc_RNA (1)...(19): siRNA sense strand
ccagggugaugggaaaugg

SEQ ID NO: 1432472 - RNA, 19 nt, Homo sapiens
  misc_RNA (1)...(19): siRNA sense strand
cagcucaggaauuaaagga

SEQ ID NO: 1432473 - RNA, 19 nt, Homo sapiens
  misc_RNA (1)...(19): siRNA sense strand
cagaagugcccacacaacu

SEQ ID NO: 1432474 - RNA, 19 nt, Homo sapiens
  misc_RNA (1)...(19): siRNA sense strand
acaagcuguucccugcauu

SEQ ID NO: 1432475 - RNA, 19 nt, Homo sapiens
  misc_RNA (1)...(19): siRNA sense strand
aagaaaagcuacaagaacu

SEQ ID NO: 1432476 - RNA, 19 nt, Homo sapiens
  misc_RNA (1)...(19): siRNA sense strand
gcauccacccugagaagca

SEQ ID NO: 1432477 - RNA, 19 nt, Homo sapiens
  misc_RNA (1)...(19): siRNA sense strand
acuccuuucuggacuaugu

SEQ ID NO: 1432478 - RNA, 19 nt, Homo sapiens
  misc_RNA (1)...(19): siRNA sense strand
ggguggugcugacuuugag

SEQ ID NO: 1432479 - RNA, 19 nt, Homo sapiens
  misc_RNA (1)...(19): siRNA sense strand
ccacacaacuggucucaua

SEQ ID NO: 1432480 - RNA, 19 nt, Homo sapiens
  misc_RNA (1)...(19): siRNA sense strand
gaucugaggucaucaagaa

SEQ ID NO: 1432481 - RNA, 19 nt, Homo sapiens
  misc_RNA (1)...(19): siRNA sense strand
ggucucagcucaggaauua

SEQ ID NO: 1432482 - RNA, 19 nt, Homo sapiens
  misc_RNA (1)...(19): siRNA sense strand
ccagaaaccuagauaagaa

SEQ ID NO: 1432483 - RNA, 19 nt, Homo sapiens
  misc_RNA (1)...(19): siRNA sense strand
caacuggucucauacuuca

SEQ ID NO: 1432484 - RNA, 19 nt, Homo sapiens
  misc_RNA (1)...(19): siRNA sense strand
ggacuucacuggcuccaau

SEQ ID NO: 1432485 - RNA, 19 nt, Homo sapiens
  misc_RNA (1)...(19): siRNA sense strand
guacagaucugaggucauc

SEQ ID NO: 1432486 - RNA, 19 nt, Homo sapiens
  misc_RNA (1)...(19): siRNA sense strand
aaaggacaaucguguagua

SEQ ID NO: 1432487 - RNA, 19 nt, Homo sapiens
  misc_RNA (1)...(19): siRNA sense strand
gcaggucucgcaugaauuu

SEQ ID NO: 1432488 - RNA, 19 nt, Homo sapiens
  misc_RNA (1)...(19): siRNA sense strand
caagaacucuggaacuauc

SEQ ID NO: 1432489 - RNA, 19 nt, Homo sapiens
  misc_RNA (1)...(19): siRNA sense strand
caacaggggucaaugagua

SEQ ID NO: 1432490 - RNA, 19 nt, Homo sapiens
  misc_RNA (1)...(19): siRNA sense strand
uacaagaacucuggaacua

SEQ ID NO: 1432491 - RNA, 19 nt, Homo sapiens
  misc_RNA (1)...(19): siRNA sense strand
gcugagggaugaugacuuc

SEQ ID NO: 1432492 - RNA, 19 nt, Homo sapiens
  misc_RNA (1)...(19): siRNA sense strand
gcaugaauuugccuugaau

SEQ ID NO: 1432493 - RNA, 19 nt, Homo sapiens
  misc_RNA (1)...(19): siRNA sense strand
gagggaugaugacuuccua

SEQ ID NO: 1432494 - RNA, 19 nt, Homo sapiens
  misc_RNA (1)...(19): siRNA sense strand
ggacaucggcuccaagucu

SEQ ID NO: 1432495 - RNA, 19 nt, Homo sapiens
  misc_RNA (1)...(19): siRNA sense strand
cgccagagcugagggauga

SEQ ID NO: 1432496 - RNA, 19 nt, Homo sapiens
  misc_RNA (1)...(19): siRNA sense strand
ggaacuauccgugucaaga

SEQ ID NO: 1432497 - RNA, 19 nt, Homo sapiens
  misc_RNA (1)...(19): siRNA sense strand
gaacuauccgugucaagau

SEQ ID NO: 1432498 - RNA, 19 nt, Homo sapiens
  misc_RNA (1)...(19): siRNA sense strand
caagauuugucggguagaa

SEQ ID NO: 1432499 - RNA, 19 nt, Homo sapiens
  misc_RNA (1)...(19): siRNA sense strand
gcagcgugguucaggacua

SEQ ID NO: 1432500 - RNA, 19 nt, Homo sapiens
  misc_RNA (1)...(19): siRNA sense strand
gcuguucccugcauuugga

SEQ ID NO: 1432501 - RNA, 19 nt, Homo sapiens
  misc_RNA (1)...(19): siRNA sense strand
agaaacagaguacuccuuu

SEQ ID NO: 1432502 - RNA, 19 nt, Homo sapiens
  misc_RNA (1)...(19): siRNA sense strand
gguagaggccagaaaccua

SEQ ID NO: 1432503 - RNA, 19 nt, Homo sapiens
  misc_RNA (1)...(19): siRNA sense strand
gugcaaugcuccgauuaug

SEQ ID NO: 1432504 - RNA, 19 nt, Homo sapiens
  misc_RNA (1)...(19): siRNA sense strand
uggcaggucucgcaugaau

SEQ ID NO: 1432505 - RNA, 19 nt, Homo sapiens
  misc_RNA (1)...(19): siRNA sense strand
ggacaaucguguaguaacc

SEQ ID NO: 1432506 - RNA, 19 nt, Homo sapiens
  misc_RNA (1)...(19): siRNA sense strand
cuauggcccuaccaacuuu

SEQ ID NO: 1432507 - RNA, 19 nt, Homo sapiens
  misc_RNA (1)...(19): siRNA sense strand
gaaugcauccacccugaga

SEQ ID NO: 1432508 - RNA, 19 nt, Homo sapiens
  misc_RNA (1)...(19): siRNA sense strand
gccagaaaccuagauaaga

SEQ ID NO: 1432509 - RNA, 19 nt, Homo sapiens
  misc_RNA (1)...(19): siRNA sense strand
gcuacgcuuuggaaucuau

SEQ ID NO: 1432510 - RNA, 19 nt, Homo sapiens
  misc_RNA (1)...(19): siRNA sense strand
gugaccaucucauugacaa

SEQ ID NO: 1432511 - RNA, 19 nt, Homo sapiens
  misc_RNA (1)...(19): siRNA sense strand
gaugggaggcugucagauc

SEQ ID NO: 1432512 - RNA, 19 nt, Homo sapiens
  misc_RNA (1)...(19): siRNA sense strand
gacaagcuguucccugcau

SEQ ID NO: 1432513 - RNA, 19 nt, Homo sapiens
  misc_RNA (1)...(19): siRNA sense strand
ggacugccucgcaauacuu

SEQ ID NO: 1432514 - RNA, 19 nt, Homo sapiens
  misc_RNA (1)...(19): siRNA sense strand
gacccacucugcguccuuu

SEQ ID NO: 1432515 - RNA, 19 nt, Homo sapiens
  misc_RNA (1)...(19): siRNA sense strand
caacuuugcacccaucauc

SEQ ID NO: 1432516 - RNA, 19 nt, Homo sapiens
  misc_RNA (1)...(19): siRNA sense strand
ccaugucagugaucauugu

SEQ ID NO: 1432517 - RNA, 19 nt, Homo sapiens
  misc_RNA (1)...(19): siRNA sense strand
gagcuuggccggacugaac

SEQ ID NO: 1432518 - RNA, 19 nt, Homo sapiens
  misc_RNA (1)...(19): siRNA sense strand
ccucgaaccugcccauguc

SEQ ID NO: 1432519 - RNA, 19 nt, Homo sapiens
  misc_RNA (1)...(19): siRNA sense strand
ggaauuaaaggacaaucgu

SEQ ID NO: 1432520 - RNA, 19 nt, Homo sapiens
  misc_RNA (1)...(19): siRNA sense strand
caggugcaaugcuccgauu

SEQ ID NO: 1432521 - RNA, 19 nt, Homo sapiens
  misc_RNA (1)...(19): siRNA sense strand
ucgcagaagugcccacaca

SEQ ID NO: 1432522 - RNA, 19 nt, Homo sapiens
  misc_RNA (1)...(19): siRNA sense strand
ucucagcucaggaauuaaa

SEQ ID NO: 1432523 - RNA, 19 nt, Homo sapiens
  misc_RNA (1)...(19): siRNA sense strand
aaacagaguacuccuuucu

SEQ ID NO: 1432524 - RNA, 19 nt, Homo sapiens
  misc_RNA (1)...(19): siRNA sense strand
cagcuugaguaccgcuuug

SEQ ID NO: 1432525 - RNA, 19 nt, Homo sapiens
  misc_RNA (1)...(19): siRNA sense strand
cacaacuggucucauacuu

SEQ ID NO: 1432526 - RNA, 19 nt, Homo sapiens
  misc_RNA (1)...(19): siRNA sense strand
cgcaauacuucaugcuguu

SEQ ID NO: 1432527 - RNA, 19 nt, Homo sapiens
  misc_RNA (1)...(19): siRNA sense strand
guacuccuuucuggacuau

SEQ ID NO: 1432528 - RNA, 19 nt, Homo sapiens
  misc_RNA (1)...(19): siRNA sense strand
gauuguguccagccaggua

SEQ ID NO: 1432529 - RNA, 19 nt, Homo sapiens
  misc_RNA (1)...(19): siRNA sense strand
ggagguagaggccagaaac

SEQ ID NO: 1432530 - RNA, 19 nt, Homo sapiens
  misc_RNA (1)...(19): siRNA sense strand
cgcaugaauuugccuugaa

SEQ ID NO: 1432531 - RNA, 19 nt, Homo sapiens
  misc_RNA (1)...(19): siRNA sense strand
ugguucagcuguccauuuc

SEQ ID NO: 1432532 - RNA, 19 nt, Homo sapiens
  misc_RNA (1)...(19): siRNA sense strand
cagcgugguucaggacuau

SEQ ID NO: 1432533 - RNA, 19 nt, Homo sapiens
  misc_RNA (1)...(19): siRNA sense strand
gaggccagaaaccuagaua

SEQ ID NO: 1432534 - RNA, 19 nt, Homo sapiens
  misc_RNA (1)...(19): siRNA sense strand
caagcuguucccugcauuu

SEQ ID NO: 1432535 - RNA, 19 nt, Homo sapiens
  misc_RNA (1)...(19): siRNA sense strand
ggucaaugaguaccugaug

SEQ ID NO: 1432536 - RNA, 19 nt, Homo sapiens
  misc_RNA (1)...(19): siRNA sense strand
cggcugaguuugaaugcau

SEQ ID NO: 1432537 - RNA, 19 nt, Homo sapiens
  misc_RNA (1)...(19): siRNA sense strand
ggcagucccggcugaguuu

SEQ ID NO: 1432538 - RNA, 19 nt, Homo sapiens
  misc_RNA (1)...(19): siRNA sense strand
cauggaagcguuucucagu

SEQ ID NO: 1432539 - RNA, 19 nt, Homo sapiens
  misc_RNA (1)...(19): siRNA sense strand
ggccagaaaccuagauaag

SEQ ID NO: 1432540 - RNA, 19 nt, Homo sapiens
  misc_RNA (1)...(19): siRNA sense strand
gcccugaguucuccaagac

SEQ ID NO: 1432541 - RNA, 19 nt, Homo sapiens
  misc_RNA (1)...(19): siRNA sense strand
uguggguggugcugacuuu

SEQ ID NO: 1432542 - RNA, 19 nt, Homo sapiens
  misc_RNA (1)...(19): siRNA sense strand
acaaggacaucggcuccaa

SEQ ID NO: 1432543 - RNA, 19 nt, Homo sapiens
  misc_RNA (1)...(19): siRNA sense strand
ccugugaccaucucauuga

SEQ ID NO: 1432544 - RNA, 19 nt, Homo sapiens
  misc_RNA (1)...(19): siRNA sense strand
ccgccagggugaugggaaa

SEQ ID NO: 1432545 - RNA, 19 nt, Homo sapiens
  misc_RNA (1)...(19): siRNA sense strand
gcagaagugcccacacaac

SEQ ID NO: 1432546 - RNA, 19 nt, Homo sapiens
  misc_RNA (1)...(19): siRNA sense strand
gcaauacuucaugcuguug

SEQ ID NO: 1432547 - RNA, 19 nt, Homo sapiens
  misc_RNA (1)...(19): siRNA sense strand
gcaggcauccagggcauug

SEQ ID NO: 1432548 - RNA, 19 nt, Homo sapiens
  misc_RNA (1)...(19): siRNA sense strand
ucgcaugaauuugccuuga

SEQ ID NO: 1432549 - RNA, 19 nt, Homo sapiens
  misc_RNA (1)...(19): siRNA sense strand
cuccaagacucuacagcuu

SEQ ID NO: 1432550 - RNA, 19 nt, Homo sapiens
  misc_RNA (1)...(19): siRNA sense strand
ggugcaaugcuccgauuau

SEQ ID NO: 1432551 - RNA, 19 nt, Homo sapiens
  misc_RNA (1)...(19): siRNA sense strand
gggacugccucgcaauacu

SEQ ID NO: 1432552 - RNA, 19 nt, Homo sapiens
  misc_RNA (1)...(19): siRNA sense strand
acuggcaggucucgcauga

SEQ ID NO: 1432553 - RNA, 19 nt, Homo sapiens
  misc_RNA (1)...(19): siRNA sense strand
ucaccugacucccuacacu

SEQ ID NO: 1432554 - RNA, 19 nt, Homo sapiens
  misc_RNA (1)...(19): siRNA sense strand
gcgacauugugcaguuugu

SEQ ID NO: 1432555 - RNA, 19 nt, Homo sapiens
  misc_RNA (1)...(19): siRNA sense strand
uaguaaccauggagguaga

SEQ ID NO: 1432556 - RNA, 19 nt, Homo sapiens
  misc_RNA (1)...(19): siRNA sense strand
gcccaugucagugaucauu

SEQ ID NO: 1432557 - RNA, 19 nt, Homo sapiens
  misc_RNA (1)...(19): siRNA sense strand
gaacaaccugaacccuaca

SEQ ID NO: 1432558 - RNA, 19 nt, Homo sapiens
  misc_RNA (1)...(19): siRNA sense strand
gaaaccuagauaagaagga

SEQ ID NO: 1432559 - RNA, 19 nt, Homo sapiens
  misc_RNA (1)...(19): siRNA sense strand
gcuuugagacaguccagaa

SEQ ID NO: 1432560 - RNA, 19 nt, Homo sapiens
  misc_RNA (1)...(19): siRNA sense strand
aacuauccgugucaagauu

SEQ ID NO: 1432561 - RNA, 19 nt, Homo sapiens
  misc_RNA (1)...(19): siRNA sense strand
agaccgugcucgcagaagu

SEQ ID NO: 1432562 - RNA, 19 nt, Homo sapiens
  misc_RNA (1)...(19): siRNA sense strand
ccgcgacauugugcaguuu

SEQ ID NO: 1432563 - RNA, 19 nt, Homo sapiens
  misc_RNA (1)...(19): siRNA sense strand
gaggcugucagaucaacuu

SEQ ID NO: 1432564 - RNA, 19 nt, Homo sapiens
  misc_RNA (1)...(19): siRNA sense strand
gcuuuggaaucuaugacau

SEQ ID NO: 1432565 - RNA, 19 nt, Homo sapiens
  misc_RNA (1)...(19): siRNA sense strand
cgacauugugcaguuugua

SEQ ID NO: 1432566 - RNA, 19 nt, Homo sapiens
  misc_RNA (1)...(19): siRNA sense strand
uguaguaaccauggaggua

SEQ ID NO: 1432567 - RNA, 19 nt, Homo sapiens
  misc_RNA (1)...(19): siRNA sense strand
gcugucagaucaacuucac

SEQ ID NO: 1432568 - RNA, 19 nt, Homo sapiens
  misc_RNA (1)...(19): siRNA sense strand
uuaaaggacaaucguguag

SEQ ID NO: 1432569 - RNA, 19 nt, Homo sapiens
  misc_RNA (1)...(19): siRNA sense strand
ucuauggcccuaccaacuu

SEQ ID NO: 1432570 - RNA, 19 nt, Homo sapiens
  misc_RNA (1)...(19): siRNA sense strand
augggaggcugucagauca

SEQ ID NO: 1432571 - RNA, 19 nt, Homo sapiens
  misc_RNA (1)...(19): siRNA sense strand
ccagggugaugggaaaugg

SEQ ID NO: 1432572 - RNA, 19 nt, Homo sapiens
  misc_RNA (1)...(19): siRNA sense strand
cagcucaggaauuaaagga

SEQ ID NO: 1432573 - RNA, 19 nt, Homo sapiens
  misc_RNA (1)...(19): siRNA sense strand
cagaagugcccacacaacu

SEQ ID NO: 1432574 - RNA, 19 nt, Homo sapiens
  misc_RNA (1)...(19): siRNA sense strand
acaagcuguucccugcauu

SEQ ID NO: 1432575 - RNA, 19 nt, Homo sapiens
  misc_RNA (1)...(19): siRNA sense strand
aagaaaagcuacaagaacu

SEQ ID NO: 1432576 - RNA, 19 nt, Homo sapiens
  misc_RNA (1)...(19): siRNA sense strand
gcauccacccugagaagca

SEQ ID NO: 1432577 - RNA, 19 nt, Homo sapiens
  misc_RNA (1)...(19): siRNA sense strand
acuccuuucuggacuaugu

SEQ ID NO: 1432578 - RNA, 19 nt, Homo sapiens
  misc_RNA (1)...(19): siRNA sense strand
ggguggugcugacuuugag

SEQ ID NO: 1432579 - RNA, 19 nt, Homo sapiens
  misc_RNA (1)...(19): siRNA sense strand
ccacacaacuggucucaua

SEQ ID NO: 1432580 - RNA, 19 nt, Homo sapiens
  misc_RNA (1)...(19): siRNA sense strand
gaucugaggucaucaagaa

SEQ ID NO: 1432581 - RNA, 19 nt, Homo sapiens
  misc_RNA (1)...(19): siRNA sense strand
ggucucagcucaggaauua

SEQ ID NO: 1432582 - RNA, 19 nt, Homo sapiens
  misc_RNA (1)...(19): siRNA sense strand
ccagaaaccuagauaagaa

SEQ ID NO: 1432583 - RNA, 19 nt, Homo sapiens
  misc_RNA (1)...(19): siRNA sense strand
caacuggucucauacuuca

SEQ ID NO: 1432584 - RNA, 19 nt, Homo sapiens
  misc_RNA (1)...(19): siRNA sense strand
ggacuucacuggcuccaau

SEQ ID NO: 1432585 - RNA, 19 nt, Homo sapiens
  misc_RNA (1)...(19): siRNA sense strand
guacagaucugaggucauc

SEQ ID NO: 1432586 - RNA, 19 nt, Homo sapiens
  misc_RNA (1)...(19): siRNA sense strand
aaaggacaaucguguagua

SEQ ID NO: 1432587 - RNA, 19 nt, Homo sapiens
  misc_RNA (1)...(19): siRNA sense strand
gcaggucucgcaugaauuu

SEQ ID NO: 1432588 - RNA, 19 nt, Homo sapiens
  misc_RNA (1)...(19): siRNA sense strand
caagaacucuggaacuauc

SEQ ID NO: 1432589 - RNA, 19 nt, Homo sapiens
  misc_RNA (1)...(19): siRNA sense strand
caacaggggucaaugagua

SEQ ID NO: 1432590 - RNA, 19 nt, Homo sapiens
  misc_RNA (1)...(19): siRNA sense strand
uacaagaacucuggaacua

SEQ ID NO: 1432591 - RNA, 19 nt, Homo sapiens
  misc_RNA (1)...(19): siRNA sense strand
gcugagggaugaugacuuc

SEQ ID NO: 1432592 - RNA, 19 nt, Homo sapiens
  misc_RNA (1)...(19): siRNA sense strand
gcaugaauuugccuugaau

SEQ ID NO: 1432593 - RNA, 19 nt, Homo sapiens
  misc_RNA (1)...(19): siRNA sense strand
gagggaugaugacuuccua

SEQ ID NO: 1432594 - RNA, 19 nt, Homo sapiens
  misc_RNA (1)...(19): siRNA sense strand
ggacaucggcuccaagucu

SEQ ID NO: 1432595 - RNA, 19 nt, Homo sapiens
  misc_RNA (1)...(19): siRNA sense strand
cgccagagcugagggauga

SEQ ID NO: 1432596 - RNA, 19 nt, Homo sapiens
  misc_RNA (1)...(19): siRNA sense strand
ggaacuauccgugucaaga

SEQ ID NO: 1432597 - RNA, 19 nt, Homo sapiens
  misc_RNA (1)...(19): siRNA sense strand
gaacuauccgugucaagau

SEQ ID NO: 1432598 - RNA, 19 nt, Homo sapiens
  misc_RNA (1)...(19): siRNA sense strand
caagauuugucggguagaa

SEQ ID NO: 1432599 - RNA, 19 nt, Homo sapiens
  misc_RNA (1)...(19): siRNA sense strand
gcagcgugguucaggacua

SEQ ID NO: 1432600 - RNA, 19 nt, Homo sapiens
  misc_RNA (1)...(19): siRNA sense strand
gcuguucccugcauuugga

SEQ ID NO: 1432601 - RNA, 19 nt, Homo sapiens
  misc_RNA (1)...(19): siRNA sense strand
agaaacagaguacuccuuu

SEQ ID NO: 1432602 - RNA, 19 nt, Homo sapiens
  misc_RNA (1)...(19): siRNA sense strand
gguagaggccagaaaccua

SEQ ID NO: 1432603 - RNA, 19 nt, Homo sapiens
  misc_RNA (1)...(19): siRNA sense strand
gugcaaugcuccgauuaug

SEQ ID NO: 1432604 - RNA, 19 nt, Homo sapiens
  misc_RNA (1)...(19): siRNA sense strand
uggcaggucucgcaugaau

SEQ ID NO: 1432605 - RNA, 19 nt, Homo sapiens
  misc_RNA (1)...(19): siRNA sense strand
ggacaaucguguaguaacc

SEQ ID NO: 1432606 - RNA, 19 nt, Homo sapiens
  misc_RNA (1)...(19): siRNA sense strand
cuauggcccuaccaacuuu

SEQ ID NO: 1432607 - RNA, 19 nt, Homo sapiens
  misc_RNA (1)...(19): siRNA sense strand
gaaugcauccacccugaga

SEQ ID NO: 1432608 - RNA, 19 nt, Homo sapiens
  misc_RNA (1)...(19): siRNA sense strand
gccagaaaccuagauaaga

SEQ ID NO: 1432609 - RNA, 19 nt, Homo sapiens
  misc_RNA (1)...(19): siRNA sense strand
gcuacgcuuuggaaucuau

SEQ ID NO: 1432610 - RNA, 19 nt, Homo sapiens
  misc_RNA (1)...(19): siRNA sense strand
gugaccaucucauugacaa

SEQ ID NO: 1432611 - RNA, 19 nt, Homo sapiens
  misc_RNA (1)...(19): siRNA sense strand
gaugggaggcugucagauc

SEQ ID NO: 1432612 - RNA, 19 nt, Homo sapiens
  misc_RNA (1)...(19): siRNA sense strand
gacaagcuguucccugcau

SEQ ID NO: 1432613 - RNA, 19 nt, Homo sapiens
  misc_RNA (1)...(19): siRNA sense strand
ggacugccucgcaauacuu

SEQ ID NO: 1432614 - RNA, 19 nt, Homo sapiens
  misc_RNA (1)...(19): siRNA sense strand
gacccacucugcguccuuu

SEQ ID NO: 1432615 - RNA, 19 nt, Homo sapiens
  misc_RNA (1)...(19): siRNA sense strand
caacuuugcacccaucauc

SEQ ID NO: 1432616 - RNA, 19 nt, Homo sapiens
  misc_RNA (1)...(19): siRNA sense strand
ccaugucagugaucauugu

SEQ ID NO: 1432617 - RNA, 19 nt, Homo sapiens
  misc_RNA (1)...(19): siRNA sense strand
gagcuuggccggacugaac

SEQ ID NO: 1432618 - RNA, 19 nt, Homo sapiens
  misc_RNA (1)...(19): siRNA sense strand
ccucgaaccugcccauguc

SEQ ID NO: 1432619 - RNA, 19 nt, Homo sapiens
  misc_RNA (1)...(19): siRNA sense strand
ggaauuaaaggacaaucgu

SEQ ID NO: 1432620 - RNA, 19 nt, Homo sapiens
  misc_RNA (1)...(19): siRNA sense strand
caggugcaaugcuccgauu

SEQ ID NO: 1432621 - RNA, 19 nt, Homo sapiens
  misc_RNA (1)...(19): siRNA sense strand
ucgcagaagugcccacaca

SEQ ID NO: 1432622 - RNA, 19 nt, Homo sapiens
  misc_RNA (1)...(19): siRNA sense strand
ucucagcucaggaauuaaa

SEQ ID NO: 1432623 - RNA, 19 nt, Homo sapiens
  misc_RNA (1)...(19): siRNA sense strand
aaacagaguacuccuuucu

SEQ ID NO: 1432624 - RNA, 19 nt, Homo sapiens
  misc_RNA (1)...(19): siRNA sense strand
cagcuugaguaccgcuuug

SEQ ID NO: 1432625 - RNA, 19 nt, Homo sapiens
  misc_RNA (1)...(19): siRNA sense strand
cacaacuggucucauacuu

SEQ ID NO: 1432626 - RNA, 19 nt, Homo sapiens
  misc_RNA (1)...(19): siRNA sense strand
cgcaauacuucaugcuguu

SEQ ID NO: 1432627 - RNA, 19 nt, Homo sapiens
  misc_RNA (1)...(19): siRNA sense strand
guacuccuuucuggacuau

SEQ ID NO: 1432628 - RNA, 19 nt, Homo sapiens
  misc_RNA (1)...(19): siRNA sense strand
gauuguguccagccaggua

SEQ ID NO: 1432629 - RNA, 19 nt, Homo sapiens
  misc_RNA (1)...(19): siRNA sense strand
ggagguagaggccagaaac

SEQ ID NO: 1432630 - RNA, 19 nt, Homo sapiens
  misc_RNA (1)...(19): siRNA sense strand
cgcaugaauuugccuugaa

SEQ ID NO: 1432631 - RNA, 19 nt, Homo sapiens
  misc_RNA (1)...(19): siRNA sense strand
ugguucagcuguccauuuc

SEQ ID NO: 1432632 - RNA, 19 nt, Homo sapiens
  misc_RNA (1)...(19): siRNA sense strand
cagcgugguucaggacuau

SEQ ID NO: 1432633 - RNA, 19 nt, Homo sapiens
  misc_RNA (1)...(19): siRNA sense strand
gaggccagaaaccuagaua

SEQ ID NO: 1432634 - RNA, 19 nt, Homo sapiens
  misc_RNA (1)...(19): siRNA sense strand
caagcuguucccugcauuu

SEQ ID NO: 1432635 - RNA, 19 nt, Homo sapiens
  misc_RNA (1)...(19): siRNA sense strand
ggucaaugaguaccugaug

SEQ ID NO: 1432636 - RNA, 19 nt, Homo sapiens
  misc_RNA (1)...(19): siRNA sense strand
cggcugaguuugaaugcau

SEQ ID NO: 1432637 - RNA, 19 nt, Homo sapiens
  misc_RNA (1)...(19): siRNA sense strand
ggcagucccggcugaguuu

SEQ ID NO: 1432638 - RNA, 19 nt, Homo sapiens
  misc_RNA (1)...(19): siRNA sense strand
cauggaagcguuucucagu

SEQ ID NO: 1432639 - RNA, 19 nt, Homo sapiens
  misc_RNA (1)...(19): siRNA sense strand
ggccagaaaccuagauaag

SEQ ID NO: 1432640 - RNA, 19 nt, Homo sapiens
  misc_RNA (1)...(19): siRNA sense strand
gcccugaguucuccaagac

SEQ ID NO: 1432641 - RNA, 19 nt, Homo sapiens
  misc_RNA (1)...(19): siRNA sense strand
uguggguggugcugacuuu

SEQ ID NO: 1432642 - RNA, 19 nt, Homo sapiens
  misc_RNA (1)...(19): siRNA sense strand
acaaggacaucggcuccaa

SEQ ID NO: 1432643 - RNA, 19 nt, Homo sapiens
  misc_RNA (1)...(19): siRNA sense strand
ccugugaccaucucauuga

SEQ ID NO: 1432644 - RNA, 19 nt, Homo sapiens
  misc_RNA (1)...(19): siRNA sense strand
ccgccagggugaugggaaa

SEQ ID NO: 1432645 - RNA, 19 nt, Homo sapiens
  misc_RNA (1)...(19): siRNA sense strand
gcagaagugcccacacaac

SEQ ID NO: 1432646 - RNA, 19 nt, Homo sapiens
  misc_RNA (1)...(19): siRNA sense strand
gcaauacuucaugcuguug

SEQ ID NO: 1432647 - RNA, 19 nt, Homo sapiens
  misc_RNA (1)...(19): siRNA sense strand
gcaggcauccagggcauug

SEQ ID NO: 1432648 - RNA, 19 nt, Homo sapiens
  misc_RNA (1)...(19): siRNA sense strand
ucgcaugaauuugccuuga

SEQ ID NO: 1432649 - RNA, 19 nt, Homo sapiens
  misc_RNA (1)...(19): siRNA sense strand
cuccaagacucuacagcuu

SEQ ID NO: 1432650 - RNA, 19 nt, Homo sapiens
  misc_RNA (1)...(19): siRNA sense strand
ggugcaaugcuccgauuau

SEQ ID NO: 1432651 - RNA, 19 nt, Homo sapiens
  misc_RNA (1)...(19): siRNA sense strand
gggacugccucgcaauacu

SEQ ID NO: 1432652 - RNA, 19 nt, Homo sapiens
  misc_RNA (1)...(19): siRNA sense strand
acuggcaggucucgcauga

SEQ ID NO: 1432653 - RNA, 19 nt, Homo sapiens
  misc_RNA (1)...(19): siRNA sense strand
ucaccugacucccuacacu

SEQ ID NO: 1432654 - RNA, 19 nt, Homo sapiens
  misc_RNA (1)...(19): siRNA sense strand
gcgacauugugcaguuugu

SEQ ID NO: 1432655 - RNA, 19 nt, Homo sapiens
  misc_RNA (1)...(19): siRNA sense strand
uaguaaccauggagguaga

SEQ ID NO: 1432656 - RNA, 19 nt, Homo sapiens
  misc_RNA (1)...(19): siRNA sense strand
gcccaugucagugaucauu

SEQ ID NO: 1432657 - RNA, 19 nt, Homo sapiens
  misc_RNA (1)...(19): siRNA sense strand
gaacaaccugaacccuaca

SEQ ID NO: 1432658 - RNA, 19 nt, Homo sapiens
  misc_RNA (1)...(19): siRNA sense strand
gaaaccuagauaagaagga

SEQ ID NO: 1432659 - RNA, 19 nt, Homo sapiens
  misc_RNA (1)...(19): siRNA sense strand
gcuuugagacaguccagaa

SEQ ID NO: 1432660 - RNA, 19 nt, Homo sapiens
  misc_RNA (1)...(19): siRNA sense strand
aacuauccgugucaagauu

SEQ ID NO: 1432661 - RNA, 19 nt, Homo sapiens
  misc_RNA (1)...(19): siRNA sense strand
agaccgugcucgcagaagu

SEQ ID NO: 1432662 - RNA, 19 nt, Homo sapiens
  misc_RNA (1)...(19): siRNA sense strand
ccgcgacauugugcaguuu

SEQ ID NO: 1432663 - RNA, 19 nt, Homo sapiens
  misc_RNA (1)...(19): siRNA sense strand
gaggcugucagaucaacuu

SEQ ID NO: 1432664 - RNA, 19 nt, Homo sapiens
  misc_RNA (1)...(19): siRNA sense strand
gcuuuggaaucuaugacau

SEQ ID NO: 1432665 - RNA, 19 nt, Homo sapiens
  misc_RNA (1)...(19): siRNA sense strand
cgacauugugcaguuugua

SEQ ID NO: 1432666 - RNA, 19 nt, Homo sapiens
  misc_RNA (1)...(19): siRNA sense strand
uguaguaaccauggaggua

SEQ ID NO: 1432667 - RNA, 19 nt, Homo sapiens
  misc_RNA (1)...(19): siRNA sense strand
gcugucagaucaacuucac

SEQ ID NO: 1432668 - RNA, 19 nt, Homo sapiens
  misc_RNA (1)...(19): siRNA sense strand
uuaaaggacaaucguguag

SEQ ID NO: 1432669 - RNA, 19 nt, Homo sapiens
  misc_RNA (1)...(19): siRNA sense strand
ucuauggcccuaccaacuu

SEQ ID NO: 1432670 - RNA, 19 nt, Homo sapiens
  misc_RNA (1)...(19): siRNA sense strand
augggaggcugucagauca

SEQ ID NO: 1432671 - RNA, 19 nt, Homo sapiens
  misc_RNA (1)...(19): siRNA sense strand
ccagggugaugggaaaugg

SEQ ID NO: 1432672 - RNA, 19 nt, Homo sapiens
  misc_RNA (1)...(19): siRNA sense strand
cagcucaggaauuaaagga

SEQ ID NO: 1432673 - RNA, 19 nt, Homo sapiens
  misc_RNA (1)...(19): siRNA sense strand
cagaagugcccacacaacu

SEQ ID NO: 1432674 - RNA, 19 nt, Homo sapiens
  misc_RNA (1)...(19): siRNA sense strand
acaagcuguucccugcauu

SEQ ID NO: 1432675 - RNA, 19 nt, Homo sapiens
  misc_RNA (1)...(19): siRNA sense strand
aagaaaagcuacaagaacu

SEQ ID NO: 1432676 - RNA, 19 nt, Homo sapiens
  misc_RNA (1)...(19): siRNA sense strand
gcauccacccugagaagca

SEQ ID NO: 1432677 - RNA, 19 nt, Homo sapiens
  misc_RNA (1)...(19): siRNA sense strand
acuccuuucuggacuaugu

SEQ ID NO: 1432678 - RNA, 19 nt, Homo sapiens
  misc_RNA (1)...(19): siRNA sense strand
ggguggugcugacuuugag

SEQ ID NO: 1432679 - RNA, 19 nt, Homo sapiens
  misc_RNA (1)...(19): siRNA sense strand
ccacacaacuggucucaua

SEQ ID NO: 1432680 - RNA, 19 nt, Homo sapiens
  misc_RNA (1)...(19): siRNA sense strand
gaucugaggucaucaagaa

SEQ ID NO: 1432681 - RNA, 19 nt, Homo sapiens
  misc_RNA (1)...(19): siRNA sense strand
ggucucagcucaggaauua

SEQ ID NO: 1432682 - RNA, 19 nt, Homo sapiens
  misc_RNA (1)...(19): siRNA sense strand
ccagaaaccuagauaagaa

SEQ ID NO: 1432683 - RNA, 19 nt, Homo sapiens
  misc_RNA (1)...(19): siRNA sense strand
caacuggucucauacuuca

SEQ ID NO: 1432684 - RNA, 19 nt, Homo sapiens
  misc_RNA (1)...(19): siRNA sense strand
ggacuucacuggcuccaau

SEQ ID NO: 1432685 - RNA, 19 nt, Homo sapiens
  misc_RNA (1)...(19): siRNA sense strand
guacagaucugaggucauc

SEQ ID NO: 1432686 - RNA, 19 nt, Homo sapiens
  misc_RNA (1)...(19): siRNA sense strand
aaaggacaaucguguagua

SEQ ID NO: 1432687 - RNA, 19 nt, Homo sapiens
  misc_RNA (1)...(19): siRNA sense strand
gcaggucucgcaugaauuu

SEQ ID NO: 1432688 - RNA, 19 nt, Homo sapiens
  misc_RNA (1)...(19): siRNA sense strand
caagaacucuggaacuauc

SEQ ID NO: 1432689 - RNA, 19 nt, Homo sapiens
  misc_RNA (1)...(19): siRNA sense strand
caacaggggucaaugagua

SEQ ID NO: 1432690 - RNA, 19 nt, Homo sapiens
  misc_RNA (1)...(19): siRNA sense strand
uacaagaacucuggaacua

SEQ ID NO: 1432691 - RNA, 19 nt, Homo sapiens
  misc_RNA (1)...(19): siRNA sense strand
gcugagggaugaugacuuc

SEQ ID NO: 1432692 - RNA, 19 nt, Homo sapiens
  misc_RNA (1)...(19): siRNA sense strand
gcaugaauuugccuugaau

SEQ ID NO: 1432693 - RNA, 19 nt, Homo sapiens
  misc_RNA (1)...(19): siRNA sense strand
gagggaugaugacuuccua

SEQ ID NO: 1432694 - RNA, 19 nt, Homo sapiens
  misc_RNA (1)...(19): siRNA sense strand
ggacaucggcuccaagucu

SEQ ID NO: 1432695 - RNA, 19 nt, Homo sapiens
  misc_RNA (1)...(19): siRNA sense strand
cgccagagcugagggauga

SEQ ID NO: 1432696 - RNA, 19 nt, Homo sapiens
  misc_RNA (1)...(19): siRNA sense strand
ggaacuauccgugucaaga

SEQ ID NO: 1432697 - RNA, 19 nt, Homo sapiens
  misc_RNA (1)...(19): siRNA sense strand
gaacuauccgugucaagau

SEQ ID NO: 1432698 - RNA, 19 nt, Homo sapiens
  misc_RNA (1)...(19): siRNA sense strand
caagauuugucggguagaa

SEQ ID NO: 1432699 - RNA, 19 nt, Homo sapiens
  misc_RNA (1)...(19): siRNA sense strand
gcagcgugguucaggacua

SEQ ID NO: 1432700 - RNA, 19 nt, Homo sapiens
  misc_RNA (1)...(19): siRNA sense strand
gcuguucccugcauuugga

SEQ ID NO: 1432701 - RNA, 19 nt, Homo sapiens
  misc_RNA (1)...(19): siRNA sense strand
agaaacagaguacuccuuu

SEQ ID NO: 1432702 - RNA, 19 nt, Homo sapiens
  misc_RNA (1)...(19): siRNA sense strand
gguagaggccagaaaccua

SEQ ID NO: 1432703 - RNA, 19 nt, Homo sapiens
  misc_RNA (1)...(19): siRNA sense strand
gugcaaugcuccgauuaug

SEQ ID NO: 1432704 - RNA, 19 nt, Homo sapiens
  misc_RNA (1)...(19): siRNA sense strand
uggcaggucucgcaugaau

SEQ ID NO: 1432705 - RNA, 19 nt, Homo sapiens
  misc_RNA (1)...(19): siRNA sense strand
ggacaaucguguaguaacc

SEQ ID NO: 1432706 - RNA, 19 nt, Homo sapiens
  misc_RNA (1)...(19): siRNA sense strand
cuauggcccuaccaacuuu

SEQ ID NO: 1432707 - RNA, 19 nt, Homo sapiens
  misc_RNA (1)...(19): siRNA sense strand
gaaugcauccacccugaga

SEQ ID NO: 1432708 - RNA, 19 nt, Homo sapiens
  misc_RNA (1)...(19): siRNA sense strand
gccagaaaccuagauaaga

SEQ ID NO: 1432709 - RNA, 19 nt, Homo sapiens
  misc_RNA (1)...(19): siRNA sense strand
gcuacgcuuuggaaucuau

SEQ ID NO: 1432710 - RNA, 19 nt, Homo sapiens
  misc_RNA (1)...(19): siRNA sense strand
gugaccaucucauugacaa

SEQ ID NO: 1432711 - RNA, 19 nt, Homo sapiens
  misc_RNA (1)...(19): siRNA sense strand
gaugggaggcugucagauc

SEQ ID NO: 1432712 - RNA, 19 nt, Homo sapiens
  misc_RNA (1)...(19): siRNA sense strand
gacaagcuguucccugcau

SEQ ID NO: 1432713 - RNA, 19 nt, Homo sapiens
  misc_RNA (1)...(19): siRNA sense strand
ggacugccucgcaauacuu

SEQ ID NO: 1432714 - RNA, 19 nt, Homo sapiens
  misc_RNA (1)...(19): siRNA sense strand
gacccacucugcguccuuu

SEQ ID NO: 1432715 - RNA, 19 nt, Homo sapiens
  misc_RNA (1)...(19): siRNA sense strand
caacuuugcacccaucauc

SEQ ID NO: 1432716 - RNA, 19 nt, Homo sapiens
  misc_RNA (1)...(19): siRNA sense strand
ccaugucagugaucauugu

SEQ ID NO: 1432717 - RNA, 19 nt, Homo sapiens
  misc_RNA (1)...(19): siRNA sense strand
gagcuuggccggacugaac

SEQ ID NO: 1432718 - RNA, 19 nt, Homo sapiens
  misc_RNA (1)...(19): siRNA sense strand
ccucgaaccugcccauguc

SEQ ID NO: 1432719 - RNA, 19 nt, Homo sapiens
  misc_RNA (1)...(19): siRNA sense strand
ggaauuaaaggacaaucgu

SEQ ID NO: 1432720 - RNA, 19 nt, Homo sapiens
  misc_RNA (1)...(19): siRNA sense strand
caggugcaaugcuccgauu

SEQ ID NO: 1432721 - RNA, 19 nt, Homo sapiens
  misc_RNA (1)...(19): siRNA sense strand
ucgcagaagugcccacaca

SEQ ID NO: 1432722 - RNA, 19 nt, Homo sapiens
  misc_RNA (1)...(19): siRNA sense strand
ucucagcucaggaauuaaa

SEQ ID NO: 1432723 - RNA, 19 nt, Homo sapiens
  misc_RNA (1)...(19): siRNA sense strand
aaacagaguacuccuuucu

SEQ ID NO: 1432724 - RNA, 19 nt, Homo sapiens
  misc_RNA (1)...(19): siRNA sense strand
cagcuugaguaccgcuuug

SEQ ID NO: 1432725 - RNA, 19 nt, Homo sapiens
  misc_RNA (1)...(19): siRNA sense strand
cacaacuggucucauacuu

SEQ ID NO: 1432726 - RNA, 19 nt, Homo sapiens
  misc_RNA (1)...(19): siRNA sense strand
cgcaauacuucaugcuguu

SEQ ID NO: 1432727 - RNA, 19 nt, Homo sapiens
  misc_RNA (1)...(19): siRNA sense strand
guacuccuuucuggacuau

SEQ ID NO: 1432728 - RNA, 19 nt, Homo sapiens
  misc_RNA (1)...(19): siRNA sense strand
gauuguguccagccaggua

SEQ ID NO: 1432729 - RNA, 19 nt, Homo sapiens
  misc_RNA (1)...(19): siRNA sense strand
ggagguagaggccagaaac

SEQ ID NO: 1432730 - RNA, 19 nt, Homo sapiens
  misc_RNA (1)...(19): siRNA sense strand
cgcaugaauuugccuugaa

SEQ ID NO: 1432731 - RNA, 19 nt, Homo sapiens
  misc_RNA (1)...(19): siRNA sense strand
ugguucagcuguccauuuc

SEQ ID NO: 1432732 - RNA, 19 nt, Homo sapiens
  misc_RNA (1)...(19): siRNA sense strand
cagcgugguucaggacuau

SEQ ID NO: 1432733 - RNA, 19 nt, Homo sapiens
  misc_RNA (1)...(19): siRNA sense strand
gaggccagaaaccuagaua

SEQ ID NO: 1432734 - RNA, 19 nt, Homo sapiens
  misc_RNA (1)...(19): siRNA sense strand
caagcuguucccugcauuu

SEQ ID NO: 1432735 - RNA, 19 nt, Homo sapiens
  misc_RNA (1)...(19): siRNA sense strand
ggucaaugaguaccugaug

SEQ ID NO: 1432736 - RNA, 19 nt, Homo sapiens
  misc_RNA (1)...(19): siRNA sense strand
cggcugaguuugaaugcau

SEQ ID NO: 1432737 - RNA, 19 nt, Homo sapiens
  misc_RNA (1)...(19): siRNA sense strand
ggcagucccggcugaguuu

SEQ ID NO: 1432738 - RNA, 19 nt, Homo sapiens
  misc_RNA (1)...(19): siRNA sense strand
cauggaagcguuucucagu

SEQ ID NO: 1432739 - RNA, 19 nt, Homo sapiens
  misc_RNA (1)...(19): siRNA sense strand
ggccagaaaccuagauaag

SEQ ID NO: 1432740 - RNA, 19 nt, Homo sapiens
  misc_RNA (1)...(19): siRNA sense strand
gcccugaguucuccaagac

SEQ ID NO: 1432741 - RNA, 19 nt, Homo sapiens
  misc_RNA (1)...(19): siRNA sense strand
uguggguggugcugacuuu

SEQ ID NO: 1432742 - RNA, 19 nt, Homo sapiens
  misc_RNA (1)...(19): siRNA sense strand
acaaggacaucggcuccaa

SEQ ID NO: 1432743 - RNA, 19 nt, Homo sapiens
  misc_RNA (1)...(19): siRNA sense strand
ccugugaccaucucauuga

SEQ ID NO: 1432744 - RNA, 19 nt, Homo sapiens
  misc_RNA (1)...(19): siRNA sense strand
ccgccagggugaugggaaa

SEQ ID NO: 1432745 - RNA, 19 nt, Homo sapiens
  misc_RNA (1)...(19): siRNA sense strand
gcagaagugcccacacaac

SEQ ID NO: 1432746 - RNA, 19 nt, Homo sapiens
  misc_RNA (1)...(19): siRNA sense strand
gcaauacuucaugcuguug

SEQ ID NO: 1432747 - RNA, 19 nt, Homo sapiens
  misc_RNA (1)...(19): siRNA sense strand
gcaggcauccagggcauug

SEQ ID NO: 1432748 - RNA, 19 nt, Homo sapiens
  misc_RNA (1)...(19): siRNA sense strand
ucgcaugaauuugccuuga

SEQ ID NO: 1432749 - RNA, 19 nt, Homo sapiens
  misc_RNA (1)...(19): siRNA sense strand
cuccaagacucuacagcuu

SEQ ID NO: 1432750 - RNA, 19 nt, Homo sapiens
  misc_RNA (1)...(19): siRNA sense strand
ggugcaaugcuccgauuau

SEQ ID NO: 1432751 - RNA, 19 nt, Homo sapiens
  misc_RNA (1)...(19): siRNA sense strand
gggacugccucgcaauacu

SEQ ID NO: 1432752 - RNA, 19 nt, Homo sapiens
  misc_RNA (1)...(19): siRNA sense strand
acuggcaggucucgcauga

SEQ ID NO: 1432753 - RNA, 19 nt, Homo sapiens
  misc_RNA (1)...(19): siRNA sense strand
ucaccugacucccuacacu

SEQ ID NO: 1432754 - RNA, 19 nt, Homo sapiens
  misc_RNA (1)...(19): siRNA sense strand
gcgacauugugcaguuugu

SEQ ID NO: 1432755 - RNA, 19 nt, Homo sapiens
  misc_RNA (1)...(19): siRNA sense strand
uaguaaccauggagguaga

SEQ ID NO: 1432756 - RNA, 19 nt, Homo sapiens
  misc_RNA (1)...(19): siRNA sense strand
gcccaugucagugaucauu

SEQ ID NO: 1432757 - RNA, 19 nt, Homo sapiens
  misc_RNA (1)...(19): siRNA sense strand
gaacaaccugaacccuaca

SEQ ID NO: 1432758 - RNA, 19 nt, Homo sapiens
  misc_RNA (1)...(19): siRNA sense strand
gaaaccuagauaagaagga

SEQ ID NO: 1432759 - RNA, 19 nt, Homo sapiens
  misc_RNA (1)...(19): siRNA sense strand
gcuuugagacaguccagaa

SEQ ID NO: 1432760 - RNA, 19 nt, Homo sapiens
  misc_RNA (1)...(19): siRNA sense strand
aacuauccgugucaagauu

SEQ ID NO: 1432761 - RNA, 19 nt, Homo sapiens
  misc_RNA (1)...(19): siRNA sense strand
agaccgugcucgcagaagu

SEQ ID NO: 1432762 - RNA, 19 nt, Homo sapiens
  misc_RNA (1)...(19): siRNA sense strand
ccgcgacauugugcaguuu

SEQ ID NO: 1432763 - RNA, 19 nt, Homo sapiens
  misc_RNA (1)...(19): siRNA sense strand
gaggcugucagaucaacuu

SEQ ID NO: 1432764 - RNA, 19 nt, Homo sapiens
  misc_RNA (1)...(19): siRNA sense strand
gcuuuggaaucuaugacau

SEQ ID NO: 1432765 - RNA, 19 nt, Homo sapiens
  misc_RNA (1)...(19): siRNA sense strand
cgacauugugcaguuugua

SEQ ID NO: 1432766 - RNA, 19 nt, Homo sapiens
  misc_RNA (1)...(19): siRNA sense strand
uguaguaaccauggaggua

SEQ ID NO: 1432767 - RNA, 19 nt, Homo sapiens
  misc_RNA (1)...(19): siRNA sense strand
gcugucagaucaacuucac

SEQ ID NO: 1432768 - RNA, 19 nt, Homo sapiens
  misc_RNA (1)...(19): siRNA sense strand
uuaaaggacaaucguguag

SEQ ID NO: 1432769 - RNA, 19 nt, Homo sapiens
  misc_RNA (1)...(19): siRNA sense strand
ucuauggcccuaccaacuu

SEQ ID NO: 1432770 - RNA, 19 nt, Homo sapiens
  misc_RNA (1)...(19): siRNA sense strand
augggaggcugucagauca

SEQ ID NO: 1432771 - RNA, 19 nt, Homo sapiens
  misc_RNA (1)...(19): siRNA sense strand
ccagggugaugggaaaugg

SEQ ID NO: 1432772 - RNA, 19 nt, Homo sapiens
  misc_RNA (1)...(19): siRNA sense strand
cagcucaggaauuaaagga

SEQ ID NO: 1432773 - RNA, 19 nt, Homo sapiens
  misc_RNA (1)...(19): siRNA sense strand
cagaagugcccacacaacu

SEQ ID NO: 1432774 - RNA, 19 nt, Homo sapiens
  misc_RNA (1)...(19): siRNA sense strand
acaagcuguucccugcauu

SEQ ID NO: 1432775 - RNA, 19 nt, Homo sapiens
  misc_RNA (1)...(19): siRNA sense strand
aagaaaagcuacaagaacu

SEQ ID NO: 1432776 - RNA, 19 nt, Homo sapiens
  misc_RNA (1)...(19): siRNA sense strand
gcauccacccugagaagca

SEQ ID NO: 1432777 - RNA, 19 nt, Homo sapiens
  misc_RNA (1)...(19): siRNA sense strand
acuccuuucuggacuaugu

SEQ ID NO: 1432778 - RNA, 19 nt, Homo sapiens
  misc_RNA (1)...(19): siRNA sense strand
ggguggugcugacuuugag

SEQ ID NO: 1432779 - RNA, 19 nt, Homo sapiens
  misc_RNA (1)...(19): siRNA sense strand
ccacacaacuggucucaua

SEQ ID NO: 1432780 - RNA, 19 nt, Homo sapiens
  misc_RNA (1)...(19): siRNA sense strand
gaucugaggucaucaagaa

SEQ ID NO: 1432781 - RNA, 19 nt, Homo sapiens
  misc_RNA (1)...(19): siRNA sense strand
ggucucagcucaggaauua

SEQ ID NO: 1432782 - RNA, 19 nt, Homo sapiens
  misc_RNA (1)...(19): siRNA sense strand
ccagaaaccuagauaagaa

SEQ ID NO: 1432783 - RNA, 19 nt, Homo sapiens
  misc_RNA (1)...(19): siRNA sense strand
caacuggucucauacuuca

SEQ ID NO: 1432784 - RNA, 19 nt, Homo sapiens
  misc_RNA (1)...(19): siRNA sense strand
ggacuucacuggcuccaau

SEQ ID NO: 1432785 - RNA, 19 nt, Homo sapiens
  misc_RNA (1)...(19): siRNA sense strand
guacagaucugaggucauc

SEQ ID NO: 1432786 - RNA, 19 nt, Homo sapiens
  misc_RNA (1)...(19): siRNA sense strand
aaaggacaaucguguagua

SEQ ID NO: 1432787 - RNA, 19 nt, Homo sapiens
  misc_RNA (1)...(19): siRNA sense strand
gcaggucucgcaugaauuu

SEQ ID NO: 1432788 - RNA, 19 nt, Homo sapiens
  misc_RNA (1)...(19): siRNA sense strand
caagaacucuggaacuauc

SEQ ID NO: 1432789 - RNA, 19 nt, Homo sapiens
  misc_RNA (1)...(19): siRNA sense strand
caacaggggucaaugagua

SEQ ID NO: 1432790 - RNA, 19 nt, Homo sapiens
  misc_RNA (1)...(19): siRNA sense strand
uacaagaacucuggaacua

SEQ ID NO: 1432791 - RNA, 19 nt, Homo sapiens
  misc_RNA (1)...(19): siRNA sense strand
gcugagggaugaugacuuc

SEQ ID NO: 1432792 - RNA, 19 nt, Homo sapiens
  misc_RNA (1)...(19): siRNA sense strand
gcaugaauuugccuugaau

SEQ ID NO: 1432793 - RNA, 19 nt, Homo sapiens
  misc_RNA (1)...(19): siRNA sense strand
gagggaugaugacuuccua

SEQ ID NO: 1432794 - RNA, 19 nt, Homo sapiens
  misc_RNA (1)...(19): siRNA sense strand
ggacaucggcuccaagucu

SEQ ID NO: 1432795 - RNA, 19 nt, Homo sapiens
  misc_RNA (1)...(19): siRNA sense strand
cgccagagcugagggauga

SEQ ID NO: 1432796 - RNA, 19 nt, Homo sapiens
  misc_RNA (1)...(19): siRNA sense strand
ggaacuauccgugucaaga

SEQ ID NO: 1432797 - RNA, 19 nt, Homo sapiens
  misc_RNA (1)...(19): siRNA sense strand
gaacuauccgugucaagau

SEQ ID NO: 1432798 - RNA, 19 nt, Homo sapiens
  misc_RNA (1)...(19): siRNA sense strand
caagauuugucggguagaa

SEQ ID NO: 1432799 - RNA, 19 nt, Homo sapiens
  misc_RNA (1)...(19): siRNA sense strand
gcagcgugguucaggacua

SEQ ID NO: 1432800 - RNA, 19 nt, Homo sapiens
  misc_RNA (1)...(19): siRNA sense strand
gcuguucccugcauuugga

SEQ ID NO: 1432801 - RNA, 19 nt, Homo sapiens
  misc_RNA (1)...(19): siRNA sense strand
agaaacagaguacuccuuu

SEQ ID NO: 1432802 - RNA, 19 nt, Homo sapiens
  misc_RNA (1)...(19): siRNA sense strand
gguagaggccagaaaccua

SEQ ID NO: 1432803 - RNA, 19 nt, Homo sapiens
  misc_RNA (1)...(19): siRNA sense strand
gugcaaugcuccgauuaug

SEQ ID NO: 1432804 - RNA, 19 nt, Homo sapiens
  misc_RNA (1)...(19): siRNA sense strand
uggcaggucucgcaugaau

SEQ ID NO: 1432805 - RNA, 19 nt, Homo sapiens
  misc_RNA (1)...(19): siRNA sense strand
ggacaaucguguaguaacc

SEQ ID NO: 1432806 - RNA, 19 nt, Homo sapiens
  misc_RNA (1)...(19): siRNA sense strand
cuauggcccuaccaacuuu

SEQ ID NO: 1432807 - RNA, 19 nt, Homo sapiens
  misc_RNA (1)...(19): siRNA sense strand
gaaugcauccacccugaga

SEQ ID NO: 1432808 - RNA, 19 nt, Homo sapiens
  misc_RNA (1)...(19): siRNA sense strand
gccagaaaccuagauaaga

SEQ ID NO: 1432809 - RNA, 19 nt, Homo sapiens
  misc_RNA (1)...(19): siRNA sense strand
gcuacgcuuuggaaucuau

SEQ ID NO: 1432810 - RNA, 19 nt, Homo sapiens
  misc_RNA (1)...(19): siRNA sense strand
gugaccaucucauugacaa

SEQ ID NO: 1432811 - RNA, 19 nt, Homo sapiens
  misc_RNA (1)...(19): siRNA sense strand
gaugggaggcugucagauc

SEQ ID NO: 1432812 - RNA, 19 nt, Homo sapiens
  misc_RNA (1)...(19): siRNA sense strand
gacaagcuguucccugcau

SEQ ID NO: 1432813 - RNA, 19 nt, Homo sapiens
  misc_RNA (1)...(19): siRNA sense strand
ggacugccucgcaauacuu

SEQ ID NO: 1432814 - RNA, 19 nt, Homo sapiens
  misc_RNA (1)...(19): siRNA sense strand
gacccacucugcguccuuu

SEQ ID NO: 1432815 - RNA, 19 nt, Homo sapiens
  misc_RNA (1)...(19): siRNA sense strand
caacuuugcacccaucauc

SEQ ID NO: 1432816 - RNA, 19 nt, Homo sapiens
  misc_RNA (1)...(19): siRNA sense strand
ccaugucagugaucauugu

SEQ ID NO: 1432817 - RNA, 19 nt, Homo sapiens
  misc_RNA (1)...(19): siRNA sense strand
gagcuuggccggacugaac

SEQ ID NO: 1432818 - RNA, 19 nt, Homo sapiens
  misc_RNA (1)...(19): siRNA sense strand
ccucgaaccugcccauguc

SEQ ID NO: 1432819 - RNA, 19 nt, Homo sapiens
  misc_RNA (1)...(19): siRNA sense strand
ggaauuaaaggacaaucgu

SEQ ID NO: 1432820 - RNA, 19 nt, Homo sapiens
  misc_RNA (1)...(19): siRNA sense strand
caggugcaaugcuccgauu

SEQ ID NO: 1432821 - RNA, 19 nt, Homo sapiens
  misc_RNA (1)...(19): siRNA sense strand
ucgcagaagugcccacaca

SEQ ID NO: 1432822 - RNA, 19 nt, Homo sapiens
  misc_RNA (1)...(19): siRNA sense strand
ucucagcucaggaauuaaa

SEQ ID NO: 1432823 - RNA, 19 nt, Homo sapiens
  misc_RNA (1)...(19): siRNA sense strand
aaacagaguacuccuuucu

SEQ ID NO: 1432824 - RNA, 19 nt, Homo sapiens
  misc_RNA (1)...(19): siRNA sense strand
cagcuugaguaccgcuuug

SEQ ID NO: 1432825 - RNA, 19 nt, Homo sapiens
  misc_RNA (1)...(19): siRNA sense strand
cacaacuggucucauacuu

SEQ ID NO: 1432826 - RNA, 19 nt, Homo sapiens
  misc_RNA (1)...(19): siRNA sense strand
cgcaauacuucaugcuguu

SEQ ID NO: 1432827 - RNA, 19 nt, Homo sapiens
  misc_RNA (1)...(19): siRNA sense strand
guacuccuuucuggacuau

SEQ ID NO: 1432828 - RNA, 19 nt, Homo sapiens
  misc_RNA (1)...(19): siRNA sense strand
gauuguguccagccaggua

SEQ ID NO: 1432829 - RNA, 19 nt, Homo sapiens
  misc_RNA (1)...(19): siRNA sense strand
ggagguagaggccagaaac

SEQ ID NO: 1432830 - RNA, 19 nt, Homo sapiens
  misc_RNA (1)...(19): siRNA sense strand
cgcaugaauuugccuugaa

SEQ ID NO: 1432831 - RNA, 19 nt, Homo sapiens
  misc_RNA (1)...(19): siRNA sense strand
ugguucagcuguccauuuc

SEQ ID NO: 1432832 - RNA, 19 nt, Homo sapiens
  misc_RNA (1)...(19): siRNA sense strand
cagcgugguucaggacuau

SEQ ID NO: 1432833 - RNA, 19 nt, Homo sapiens
  misc_RNA (1)...(19): siRNA sense strand
gaggccagaaaccuagaua

SEQ ID NO: 1432834 - RNA, 19 nt, Homo sapiens
  misc_RNA (1)...(19): siRNA sense strand
caagcuguucccugcauuu

SEQ ID NO: 1432835 - RNA, 19 nt, Homo sapiens
  misc_RNA (1)...(19): siRNA sense strand
ggucaaugaguaccugaug

SEQ ID NO: 1432836 - RNA, 19 nt, Homo sapiens
  misc_RNA (1)...(19): siRNA sense strand
cggcugaguuugaaugcau

SEQ ID NO: 1432837 - RNA, 19 nt, Homo sapiens
  misc_RNA (1)...(19): siRNA sense strand
ggcagucccggcugaguuu

SEQ ID NO: 1432838 - RNA, 19 nt, Homo sapiens
  misc_RNA (1)...(19): siRNA sense strand
cauggaagcguuucucagu

SEQ ID NO: 1432839 - RNA, 19 nt, Homo sapiens
  misc_RNA (1)...(19): siRNA sense strand
ggccagaaaccuagauaag

SEQ ID NO: 1432840 - RNA, 19 nt, Homo sapiens
  misc_RNA (1)...(19): siRNA sense strand
gcccugaguucuccaagac

SEQ ID NO: 1432841 - RNA, 19 nt, Homo sapiens
  misc_RNA (1)...(19): siRNA sense strand
uguggguggugcugacuuu

SEQ ID NO: 1432842 - RNA, 19 nt, Homo sapiens
  misc_RNA (1)...(19): siRNA sense strand
acaaggacaucggcuccaa

SEQ ID NO: 1432843 - RNA, 19 nt, Homo sapiens
  misc_RNA (1)...(19): siRNA sense strand
ccugugaccaucucauuga

SEQ ID NO: 1432844 - RNA, 19 nt, Homo sapiens
  misc_RNA (1)...(19): siRNA sense strand
ccgccagggugaugggaaa

SEQ ID NO: 1432845 - RNA, 19 nt, Homo sapiens
  misc_RNA (1)...(19): siRNA sense strand
gcagaagugcccacacaac

SEQ ID NO: 1432846 - RNA, 19 nt, Homo sapiens
  misc_RNA (1)...(19): siRNA sense strand
gcaauacuucaugcuguug

SEQ ID NO: 1432847 - RNA, 19 nt, Homo sapiens
  misc_RNA (1)...(19): siRNA sense strand
gcaggcauccagggcauug

SEQ ID NO: 1432848 - RNA, 19 nt, Homo sapiens
  misc_RNA (1)...(19): siRNA sense strand
ucgcaugaauuugccuuga

SEQ ID NO: 1432849 - RNA, 19 nt, Homo sapiens
  misc_RNA (1)...(19): siRNA sense strand
cuccaagacucuacagcuu

SEQ ID NO: 1432850 - RNA, 19 nt, Homo sapiens
  misc_RNA (1)...(19): siRNA sense strand
ggugcaaugcuccgauuau

SEQ ID NO: 1432851 - RNA, 19 nt, Homo sapiens
  misc_RNA (1)...(19): siRNA sense strand
gggacugccucgcaauacu

SEQ ID NO: 1432852 - RNA, 19 nt, Homo sapiens
  misc_RNA (1)...(19): siRNA sense strand
acuggcaggucucgcauga

SEQ ID NO: 1432853 - RNA, 19 nt, Homo sapiens
  misc_RNA (1)...(19): siRNA sense strand
ucaccugacucccuacacu

SEQ ID NO: 1432854 - RNA, 19 nt, Homo sapiens
  misc_RNA (1)...(19): siRNA sense strand
gcgacauugugcaguuugu

SEQ ID NO: 1432855 - RNA, 19 nt, Homo sapiens
  misc_RNA (1)...(19): siRNA sense strand
uaguaaccauggagguaga

SEQ ID NO: 1432856 - RNA, 19 nt, Homo sapiens
  misc_RNA (1)...(19): siRNA sense strand
gcccaugucagugaucauu

SEQ ID NO: 1432857 - RNA, 19 nt, Homo sapiens
  misc_RNA (1)...(19): siRNA sense strand
gaacaaccugaacccuaca

SEQ ID NO: 1432858 - RNA, 19 nt, Homo sapiens
  misc_RNA (1)...(19): siRNA sense strand
gaaaccuagauaagaagga

SEQ ID NO: 1432859 - RNA, 19 nt, Homo sapiens
  misc_RNA (1)...(19): siRNA sense strand
gcuuugagacaguccagaa

SEQ ID NO: 1432860 - RNA, 19 nt, Homo sapiens
  misc_RNA (1)...(19): siRNA sense strand
aacuauccgugucaagauu

SEQ ID NO: 1432861 - RNA, 19 nt, Homo sapiens
  misc_RNA (1)...(19): siRNA sense strand
agaccgugcucgcagaagu

SEQ ID NO: 1432862 - RNA, 19 nt, Homo sapiens
  misc_RNA (1)...(19): siRNA sense strand
ccgcgacauugugcaguuu

SEQ ID NO: 1432863 - RNA, 19 nt, Homo sapiens
  misc_RNA (1)...(19): siRNA sense strand
gaggcugucagaucaacuu

SEQ ID NO: 1432864 - RNA, 19 nt, Homo sapiens
  misc_RNA (1)...(19): siRNA sense strand
gcuuuggaaucuaugacau

SEQ ID NO: 1432865 - RNA, 19 nt, Homo sapiens
  misc_RNA (1)...(19): siRNA sense strand
cgacauugugcaguuugua

SEQ ID NO: 1432866 - RNA, 19 nt, Homo sapiens
  misc_RNA (1)...(19): siRNA sense strand
uguaguaaccauggaggua

SEQ ID NO: 1432867 - RNA, 19 nt, Homo sapiens
  misc_RNA (1)...(19): siRNA sense strand
gcugucagaucaacuucac

SEQ ID NO: 1432868 - RNA, 19 nt, Homo sapiens
  misc_RNA (1)...(19): siRNA sense strand
uuaaaggacaaucguguag

SEQ ID NO: 1432869 - RNA, 19 nt, Homo sapiens
  misc_RNA (1)...(19): siRNA sense strand
ucuauggcccuaccaacuu

SEQ ID NO: 1432870 - RNA, 19 nt, Homo sapiens
  misc_RNA (1)...(19): siRNA sense strand
augggaggcugucagauca

SEQ ID NO: 1432871 - RNA, 19 nt, Homo sapiens
  misc_RNA (1)...(19): siRNA sense strand
ccagggugaugggaaaugg

SEQ ID NO: 1432872 - RNA, 19 nt, Homo sapiens
  misc_RNA (1)...(19): siRNA sense strand
cagcucaggaauuaaagga

SEQ ID NO: 1432873 - RNA, 19 nt, Homo sapiens
  misc_RNA (1)...(19): siRNA sense strand
cagaagugcccacacaacu

SEQ ID NO: 1432874 - RNA, 19 nt, Homo sapiens
  misc_RNA (1)...(19): siRNA sense strand
acaagcuguucccugcauu

SEQ ID NO: 1432875 - RNA, 19 nt, Homo sapiens
  misc_RNA (1)...(19): siRNA sense strand
aagaaaagcuacaagaacu

SEQ ID NO: 1432876 - RNA, 19 nt, Homo sapiens
  misc_RNA (1)...(19): siRNA sense strand
gcauccacccugagaagca

SEQ ID NO: 1432877 - RNA, 19 nt, Homo sapiens
  misc_RNA (1)...(19): siRNA sense strand
acuccuuucuggacuaugu

SEQ ID NO: 1432878 - RNA, 19 nt, Homo sapiens
  misc_RNA (1)...(19): siRNA sense strand
ggguggugcugacuuugag

SEQ ID NO: 1432879 - RNA, 19 nt, Homo sapiens
  misc_RNA (1)...(19): siRNA sense strand
ccacacaacuggucucaua

SEQ ID NO: 1432880 - RNA, 19 nt, Homo sapiens
  misc_RNA (1)...(19): siRNA sense strand
gaucugaggucaucaagaa

SEQ ID NO: 1432881 - RNA, 19 nt, Homo sapiens
  misc_RNA (1)...(19): siRNA sense strand
ggucucagcucaggaauua

SEQ ID NO: 1432882 - RNA, 19 nt, Homo sapiens
  misc_RNA (1)...(19): siRNA sense strand
ccagaaaccuagauaagaa

SEQ ID NO: 1432883 - RNA, 19 nt, Homo sapiens
  misc_RNA (1)...(19): siRNA sense strand
caacuggucucauacuuca

SEQ ID NO: 1432884 - RNA, 19 nt, Homo sapiens
  misc_RNA (1)...(19): siRNA sense strand
ggacuucacuggcuccaau

SEQ ID NO: 1432885 - RNA, 19 nt, Homo sapiens
  misc_RNA (1)...(19): siRNA sense strand
guacagaucugaggucauc

SEQ ID NO: 1432886 - RNA, 19 nt, Homo sapiens
  misc_RNA (1)...(19): siRNA sense strand
aaaggacaaucguguagua

SEQ ID NO: 1432887 - RNA, 19 nt, Homo sapiens
  misc_RNA (1)...(19): siRNA sense strand
gcaggucucgcaugaauuu

SEQ ID NO: 1432888 - RNA, 19 nt, Homo sapiens
  misc_RNA (1)...(19): siRNA sense strand
caagaacucuggaacuauc

SEQ ID NO: 1432889 - RNA, 19 nt, Homo sapiens
  misc_RNA (1)...(19): siRNA sense strand
caacaggggucaaugagua

SEQ ID NO: 1432890 - RNA, 19 nt, Homo sapiens
  misc_RNA (1)...(19): siRNA sense strand
uacaagaacucuggaacua

SEQ ID NO: 1432891 - RNA, 19 nt, Homo sapiens
  misc_RNA (1)...(19): siRNA sense strand
gcugagggaugaugacuuc

SEQ ID NO: 1432892 - RNA, 19 nt, Homo sapiens
  misc_RNA (1)...(19): siRNA sense strand
gcaugaauuugccuugaau

SEQ ID NO: 1432893 - RNA, 19 nt, Homo sapiens
  misc_RNA (1)...(19): siRNA sense strand
gagggaugaugacuuccua

SEQ ID NO: 1432894 - RNA, 19 nt, Homo sapiens
  misc_RNA (1)...(19): siRNA sense strand
ggacaucggcuccaagucu

SEQ ID NO: 1432895 - RNA, 19 nt, Homo sapiens
  misc_RNA (1)...(19): siRNA sense strand
cgccagagcugagggauga

SEQ ID NO: 1432896 - RNA, 19 nt, Homo sapiens
  misc_RNA (1)...(19): siRNA sense strand
ggaacuauccgugucaaga

SEQ ID NO: 1432897 - RNA, 19 nt, Homo sapiens
  misc_RNA (1)...(19): siRNA sense strand
gaacuauccgugucaagau

SEQ ID NO: 1432898 - RNA, 19 nt, Homo sapiens
  misc_RNA (1)...(19): siRNA sense strand
caagauuugucggguagaa

SEQ ID NO: 1432899 - RNA, 19 nt, Homo sapiens
  misc_RNA (1)...(19): siRNA sense strand
gcagcgugguucaggacua

SEQ ID NO: 1432900 - RNA, 19 nt, Homo sapiens
  misc_RNA (1)...(19): siRNA sense strand
gcuguucccugcauuugga

SEQ ID NO: 1432901 - RNA, 19 nt, Homo sapiens
  misc_RNA (1)...(19): siRNA sense strand
agaaacagaguacuccuuu

SEQ ID NO: 1432902 - RNA, 19 nt, Homo sapiens
  misc_RNA (1)...(19): siRNA sense strand
gguagaggccagaaaccua

SEQ ID NO: 1432903 - RNA, 19 nt, Homo sapiens
  misc_RNA (1)...(19): siRNA sense strand
gugcaaugcuccgauuaug

SEQ ID NO: 1432904 - RNA, 19 nt, Homo sapiens
  misc_RNA (1)...(19): siRNA sense strand
uggcaggucucgcaugaau

SEQ ID NO: 1432905 - RNA, 19 nt, Homo sapiens
  misc_RNA (1)...(19): siRNA sense strand
ggacaaucguguaguaacc

SEQ ID NO: 1432906 - RNA, 19 nt, Homo sapiens
  misc_RNA (1)...(19): siRNA sense strand
cuauggcccuaccaacuuu

SEQ ID NO: 1432907 - RNA, 19 nt, Homo sapiens
  misc_RNA (1)...(19): siRNA sense strand
gaaugcauccacccugaga

SEQ ID NO: 1432908 - RNA, 19 nt, Homo sapiens
  misc_RNA (1)...(19): siRNA sense strand
gccagaaaccuagauaaga

SEQ ID NO: 1432909 - RNA, 19 nt, Homo sapiens
  misc_RNA (1)...(19): siRNA sense strand
gcuacgcuuuggaaucuau

SEQ ID NO: 1432910 - RNA, 19 nt, Homo sapiens
  misc_RNA (1)...(19): siRNA sense strand
gugaccaucucauugacaa

SEQ ID NO: 1432911 - RNA, 19 nt, Homo sapiens
  misc_RNA (1)...(19): siRNA sense strand
gaugggaggcugucagauc

SEQ ID NO: 1432912 - RNA, 19 nt, Homo sapiens
  misc_RNA (1)...(19): siRNA sense strand
gacaagcuguucccugcau

SEQ ID NO: 1432913 - RNA, 19 nt, Homo sapiens
  misc_RNA (1)...(19): siRNA sense strand
ggacugccucgcaauacuu

SEQ ID NO: 1432914 - RNA, 19 nt, Homo sapiens
  misc_RNA (1)...(19): siRNA sense strand
gacccacucugcguccuuu

SEQ ID NO: 1432915 - RNA, 19 nt, Homo sapiens
  misc_RNA (1)...(19): siRNA sense strand
caacuuugcacccaucauc

SEQ ID NO: 1432916 - RNA, 19 nt, Homo sapiens
  misc_RNA (1)...(19): siRNA sense strand
ccaugucagugaucauugu

SEQ ID NO: 1432917 - RNA, 19 nt, Homo sapiens
  misc_RNA (1)...(19): siRNA sense strand
gagcuuggccggacugaac

SEQ ID NO: 1432918 - RNA, 19 nt, Homo sapiens
  misc_RNA (1)...(19): siRNA sense strand
ccucgaaccugcccauguc

SEQ ID NO: 1432919 - RNA, 19 nt, Homo sapiens
  misc_RNA (1)...(19): siRNA sense strand
ggaauuaaaggacaaucgu

SEQ ID NO: 1432920 - RNA, 19 nt, Homo sapiens
  misc_RNA (1)...(19): siRNA sense strand
caggugcaaugcuccgauu

SEQ ID NO: 1432921 - RNA, 19 nt, Homo sapiens
  misc_RNA (1)...(19): siRNA sense strand
ucgcagaagugcccacaca

SEQ ID NO: 1432922 - RNA, 19 nt, Homo sapiens
  misc_RNA (1)...(19): siRNA sense strand
ucucagcucaggaauuaaa

SEQ ID NO: 1432923 - RNA, 19 nt, Homo sapiens
  misc_RNA (1)...(19): siRNA sense strand
aaacagaguacuccuuucu

SEQ ID NO: 1432924 - RNA, 19 nt, Homo sapiens
  misc_RNA (1)...(19): siRNA sense strand
cagcuugaguaccgcuuug

SEQ ID NO: 1432925 - RNA, 19 nt, Homo sapiens
  misc_RNA (1)...(19): siRNA sense strand
cacaacuggucucauacuu

SEQ ID NO: 1432926 - RNA, 19 nt, Homo sapiens
  misc_RNA (1)...(19): siRNA sense strand
cgcaauacuucaugcuguu

SEQ ID NO: 1432927 - RNA, 19 nt, Homo sapiens
  misc_RNA (1)...(19): siRNA sense strand
guacuccuuucuggacuau

SEQ ID NO: 1432928 - RNA, 19 nt, Homo sapiens
  misc_RNA (1)...(19): siRNA sense strand
gauuguguccagccaggua

SEQ ID NO: 1432929 - RNA, 19 nt, Homo sapiens
  misc_RNA (1)...(19): siRNA sense strand
ggagguagaggccagaaac

SEQ ID NO: 1432930 - RNA, 19 nt, Homo sapiens
  misc_RNA (1)...(19): siRNA sense strand
cgcaugaauuugccuugaa

SEQ ID NO: 1432931 - RNA, 19 nt, Homo sapiens
  misc_RNA (1)...(19): siRNA sense strand
ugguucagcuguccauuuc

SEQ ID NO: 1432932 - RNA, 19 nt, Homo sapiens
  misc_RNA (1)...(19): siRNA sense strand
cagcgugguucaggacuau

SEQ ID NO: 1432933 - RNA, 19 nt, Homo sapiens
  misc_RNA (1)...(19): siRNA sense strand
gaggccagaaaccuagaua

SEQ ID NO: 1432934 - RNA, 19 nt, Homo sapiens
  misc_RNA (1)...(19): siRNA sense strand
caagcuguucccugcauuu

SEQ ID NO: 1432935 - RNA, 19 nt, Homo sapiens
  misc_RNA (1)...(19): siRNA sense strand
ggucaaugaguaccugaug

SEQ ID NO: 1432936 - RNA, 19 nt, Homo sapiens
  misc_RNA (1)...(19): siRNA sense strand
cggcugaguuugaaugcau

SEQ ID NO: 1432937 - RNA, 19 nt, Homo sapiens
  misc_RNA (1)...(19): siRNA sense strand
ggcagucccggcugaguuu

SEQ ID NO: 1432938 - RNA, 19 nt, Homo sapiens
  misc_RNA (1)...(19): siRNA sense strand
cauggaagcguuucucagu

SEQ ID NO: 1432939 - RNA, 19 nt, Homo sapiens
  misc_RNA (1)...(19): siRNA sense strand
ggccagaaaccuagauaag

SEQ ID NO: 1432940 - RNA, 19 nt, Homo sapiens
  misc_RNA (1)...(19): siRNA sense strand
gcccugaguucuccaagac

SEQ ID NO: 1432941 - RNA, 19 nt, Homo sapiens
  misc_RNA (1)...(19): siRNA sense strand
uguggguggugcugacuuu

SEQ ID NO: 1432942 - RNA, 19 nt, Homo sapiens
  misc_RNA (1)...(19): siRNA sense strand
acaaggacaucggcuccaa

SEQ ID NO: 1432943 - RNA, 19 nt, Homo sapiens
  misc_RNA (1)...(19): siRNA sense strand
ccugugaccaucucauuga

SEQ ID NO: 1432944 - RNA, 19 nt, Homo sapiens
  misc_RNA (1)...(19): siRNA sense strand
ccgccagggugaugggaaa

SEQ ID NO: 1432945 - RNA, 19 nt, Homo sapiens
  misc_RNA (1)...(19): siRNA sense strand
gcagaagugcccacacaac

SEQ ID NO: 1432946 - RNA, 19 nt, Homo sapiens
  misc_RNA (1)...(19): siRNA sense strand
gcaauacuucaugcuguug

SEQ ID NO: 1432947 - RNA, 19 nt, Homo sapiens
  misc_RNA (1)...(19): siRNA sense strand
gcaggcauccagggcauug

SEQ ID NO: 1432948 - RNA, 19 nt, Homo sapiens
  misc_RNA (1)...(19): siRNA sense strand
ucgcaugaauuugccuuga

SEQ ID NO: 1432949 - RNA, 19 nt, Homo sapiens
  misc_RNA (1)...(19): siRNA sense strand
cuccaagacucuacagcuu

SEQ ID NO: 1432950 - RNA, 19 nt, Homo sapiens
  misc_RNA (1)...(19): siRNA sense strand
ggugcaaugcuccgauuau

SEQ ID NO: 1432951 - RNA, 19 nt, Homo sapiens
  misc_RNA (1)...(19): siRNA sense strand
gggacugccucgcaauacu

SEQ ID NO: 1432952 - RNA, 19 nt, Homo sapiens
  misc_RNA (1)...(19): siRNA sense strand
acuggcaggucucgcauga

SEQ ID NO: 1432953 - RNA, 19 nt, Homo sapiens
  misc_RNA (1)...(19): siRNA sense strand
ucaccugacucccuacacu

SEQ ID NO: 1432954 - RNA, 19 nt, Homo sapiens
  misc_RNA (1)...(19): siRNA sense strand
gcgacauugugcaguuugu

SEQ ID NO: 1432955 - RNA, 19 nt, Homo sapiens
  misc_RNA (1)...(19): siRNA sense strand
uaguaaccauggagguaga

SEQ ID NO: 1432956 - RNA, 19 nt, Homo sapiens
  misc_RNA (1)...(19): siRNA sense strand
gcccaugucagugaucauu

SEQ ID NO: 1432957 - RNA, 19 nt, Homo sapiens
  misc_RNA (1)...(19): siRNA sense strand
gaacaaccugaacccuaca

SEQ ID NO: 1432958 - RNA, 19 nt, Homo sapiens
  misc_RNA (1)...(19): siRNA sense strand
gaaaccuagauaagaagga

SEQ ID NO: 1432959 - RNA, 19 nt, Homo sapiens
  misc_RNA (1)...(19): siRNA sense strand
gcuuugagacaguccagaa

SEQ ID NO: 1432960 - RNA, 19 nt, Homo sapiens
  misc_RNA (1)...(19): siRNA sense strand
aacuauccgugucaagauu

SEQ ID NO: 1432961 - RNA, 19 nt, Homo sapiens
  misc_RNA (1)...(19): siRNA sense strand
agaccgugcucgcagaagu

SEQ ID NO: 1432962 - RNA, 19 nt, Homo sapiens
  misc_RNA (1)...(19): siRNA sense strand
ccgcgacauugugcaguuu

SEQ ID NO: 1432963 - RNA, 19 nt, Homo sapiens
  misc_RNA (1)...(19): siRNA sense strand
gaggcugucagaucaacuu

SEQ ID NO: 1432964 - RNA, 19 nt, Homo sapiens
  misc_RNA (1)...(19): siRNA sense strand
gcuuuggaaucuaugacau

SEQ ID NO: 1432965 - RNA, 19 nt, Homo sapiens
  misc_RNA (1)...(19): siRNA sense strand
cgacauugugcaguuugua

SEQ ID NO: 1432966 - RNA, 19 nt, Homo sapiens
  misc_RNA (1)...(19): siRNA sense strand
uguaguaaccauggaggua

SEQ ID NO: 1432967 - RNA, 19 nt, Homo sapiens
  misc_RNA (1)...(19): siRNA sense strand
gcugucagaucaacuucac

SEQ ID NO: 1432968 - RNA, 19 nt, Homo sapiens
  misc_RNA (1)...(19): siRNA sense strand
uuaaaggacaaucguguag

SEQ ID NO: 1432969 - RNA, 19 nt, Homo sapiens
  misc_RNA (1)...(19): siRNA sense strand
ucuauggcccuaccaacuu

SEQ ID NO: 1432970 - RNA, 19 nt, Homo sapiens
  misc_RNA (1)...(19): siRNA sense strand
augggaggcugucagauca

SEQ ID NO: 1432971 - RNA, 19 nt, Homo sapiens
  misc_RNA (1)...(19): siRNA sense strand
ccagggugaugggaaaugg

SEQ ID NO: 1432972 - RNA, 19 nt, Homo sapiens
  misc_RNA (1)...(19): siRNA sense strand
cagcucaggaauuaaagga

SEQ ID NO: 1432973 - RNA, 19 nt, Homo sapiens
  misc_RNA (1)...(19): siRNA sense strand
cagaagugcccacacaacu

SEQ ID NO: 1432974 - RNA, 19 nt, Homo sapiens
  misc_RNA (1)...(19): siRNA sense strand
acaagcuguucccugcauu

SEQ ID NO: 1432975 - RNA, 19 nt, Homo sapiens
  misc_RNA (1)...(19): siRNA sense strand
aagaaaagcuacaagaacu

SEQ ID NO: 1432976 - RNA, 19 nt, Homo sapiens
  misc_RNA (1)...(19): siRNA sense strand
gcauccacccugagaagca

SEQ ID NO: 1432977 - RNA, 19 nt, Homo sapiens
  misc_RNA (1)...(19): siRNA sense strand
acuccuuucuggacuaugu

SEQ ID NO: 1432978 - RNA, 19 nt, Homo sapiens
  misc_RNA (1)...(19): siRNA sense strand
ggguggugcugacuuugag

SEQ ID NO: 1432979 - RNA, 19 nt, Homo sapiens
  misc_RNA (1)...(19): siRNA sense strand
ccacacaacuggucucaua

SEQ ID NO: 1432980 - RNA, 19 nt, Homo sapiens
  misc_RNA (1)...(19): siRNA sense strand
gaucugaggucaucaagaa

SEQ ID NO: 1432981 - RNA, 19 nt, Homo sapiens
  misc_RNA (1)...(19): siRNA sense strand
ggucucagcucaggaauua

SEQ ID NO: 1432982 - RNA, 19 nt, Homo sapiens
  misc_RNA (1)...(19): siRNA sense strand
ccagaaaccuagauaagaa

SEQ ID NO: 1432983 - RNA, 19 nt, Homo sapiens
  misc_RNA (1)...(19): siRNA sense strand
caacuggucucauacuuca

SEQ ID NO: 1432984 - RNA, 19 nt, Homo sapiens
  misc_RNA (1)...(19): siRNA sense strand
ggacuucacuggcuccaau

SEQ ID NO: 1432985 - RNA, 19 nt, Homo sapiens
  misc_RNA (1)...(19): siRNA sense strand
guacagaucugaggucauc

SEQ ID NO: 1432986 - RNA, 19 nt, Homo sapiens
  misc_RNA (1)...(19): siRNA sense strand
aaaggacaaucguguagua

SEQ ID NO: 1432987 - RNA, 19 nt, Homo sapiens
  misc_RNA (1)...(19): siRNA sense strand
gcaggucucgcaugaauuu

SEQ ID NO: 1432988 - RNA, 19 nt, Homo sapiens
  misc_RNA (1)...(19): siRNA sense strand
caagaacucuggaacuauc

SEQ ID NO: 1432989 - RNA, 19 nt, Homo sapiens
  misc_RNA (1)...(19): siRNA sense strand
caacaggggucaaugagua

SEQ ID NO: 1432990 - RNA, 19 nt, Homo sapiens
  misc_RNA (1)...(19): siRNA sense strand
uacaagaacucuggaacua

SEQ ID NO: 1432991 - RNA, 19 nt, Homo sapiens
  misc_RNA (1)...(19): siRNA sense strand
gcugagggaugaugacuuc

SEQ ID NO: 1432992 - RNA, 19 nt, Homo sapiens
  misc_RNA (1)...(19): siRNA sense strand
gcaugaauuugccuugaau

SEQ ID NO: 1432993 - RNA, 19 nt, Homo sapiens
  misc_RNA (1)...(19): siRNA sense strand
gagggaugaugacuuccua

SEQ ID NO: 1432994 - RNA, 19 nt, Homo sapiens
  misc_RNA (1)...(19): siRNA sense strand
ggacaucggcuccaagucu

SEQ ID NO: 1432995 - RNA, 19 nt, Homo sapiens
  misc_RNA (1)...(19): siRNA sense strand
cgccagagcugagggauga

SEQ ID NO: 1432996 - RNA, 19 nt, Homo sapiens
  misc_RNA (1)...(19): siRNA sense strand
ggaacuauccgugucaaga

SEQ ID NO: 1432997 - RNA, 19 nt, Homo sapiens
  misc_RNA (1)...(19): siRNA sense strand
gaacuauccgugucaagau

SEQ ID NO: 1432998 - RNA, 19 nt, Homo sapiens
  misc_RNA (1)...(19): siRNA sense strand
caagauuugucggguagaa

SEQ ID NO: 1432999 - RNA, 19 nt, Homo sapiens
  misc_RNA (1)...(19): siRNA sense strand
gcagcgugguucaggacua

SEQ ID NO: 1433000 - RNA, 19 nt, Homo sapiens
  misc_RNA (1)...(19): siRNA sense strand
gcuguucccugcauuugga

SEQ ID NO: 1433001 - RNA, 19 nt, Homo sapiens
  misc_RNA (1)...(19): siRNA sense strand
agaaacagaguacuccuuu

SEQ ID NO: 1433002 - RNA, 19 nt, Homo sapiens
  misc_RNA (1)...(19): siRNA sense strand
gguagaggccagaaaccua

SEQ ID NO: 1433003 - RNA, 19 nt, Homo sapiens
  misc_RNA (1)...(19): siRNA sense strand
gugcaaugcuccgauuaug

SEQ ID NO: 1433004 - RNA, 19 nt, Homo sapiens
  misc_RNA (1)...(19): siRNA sense strand
uggcaggucucgcaugaau

SEQ ID NO: 1433005 - RNA, 19 nt, Homo sapiens
  misc_RNA (1)...(19): siRNA sense strand
ggacaaucguguaguaacc

SEQ ID NO: 1433006 - RNA, 19 nt, Homo sapiens
  misc_RNA (1)...(19): siRNA sense strand
cuauggcccuaccaacuuu

SEQ ID NO: 1433007 - RNA, 19 nt, Homo sapiens
  misc_RNA (1)...(19): siRNA sense strand
gaaugcauccacccugaga

SEQ ID NO: 1433008 - RNA, 19 nt, Homo sapiens
  misc_RNA (1)...(19): siRNA sense strand
gccagaaaccuagauaaga

SEQ ID NO: 1433009 - RNA, 19 nt, Homo sapiens
  misc_RNA (1)...(19): siRNA sense strand
gcuacgcuuuggaaucuau

SEQ ID NO: 1433010 - RNA, 19 nt, Homo sapiens
  misc_RNA (1)...(19): siRNA sense strand
gugaccaucucauugacaa

SEQ ID NO: 1433011 - RNA, 19 nt, Homo sapiens
  misc_RNA (1)...(19): siRNA sense strand
gaugggaggcugucagauc

SEQ ID NO: 1433012 - RNA, 19 nt, Homo sapiens
  misc_RNA (1)...(19): siRNA sense strand
gacaagcuguucccugcau

SEQ ID NO: 1433013 - RNA, 19 nt, Homo sapiens
  misc_RNA (1)...(19): siRNA sense strand
ggacugccucgcaauacuu

SEQ ID NO: 1433014 - RNA, 19 nt, Homo sapiens
  misc_RNA (1)...(19): siRNA sense strand
gacccacucugcguccuuu

SEQ ID NO: 1433015 - RNA, 19 nt, Homo sapiens
  misc_RNA (1)...(19): siRNA sense strand
caacuuugcacccaucauc

SEQ ID NO: 1433016 - RNA, 19 nt, Homo sapiens
  misc_RNA (1)...(19): siRNA sense strand
ccaugucagugaucauugu

SEQ ID NO: 1433017 - RNA, 19 nt, Homo sapiens
  misc_RNA (1)...(19): siRNA sense strand
gagcuuggccggacugaac

SEQ ID NO: 1433018 - RNA, 19 nt, Homo sapiens
  misc_RNA (1)...(19): siRNA sense strand
ccucgaaccugcccauguc

SEQ ID NO: 1433019 - RNA, 19 nt, Homo sapiens
  misc_RNA (1)...(19): siRNA sense strand
ggaauuaaaggacaaucgu

SEQ ID NO: 1433020 - RNA, 19 nt, Homo sapiens
  misc_RNA (1)...(19): siRNA sense strand
caggugcaaugcuccgauu

SEQ ID NO: 1433021 - RNA, 19 nt, Homo sapiens
  misc_RNA (1)...(19): siRNA sense strand
ucgcagaagugcccacaca

SEQ ID NO: 1433022 - RNA, 19 nt, Homo sapiens
  misc_RNA (1)...(19): siRNA sense strand
ucucagcucaggaauuaaa

SEQ ID NO: 1433023 - RNA, 19 nt, Homo sapiens
  misc_RNA (1)...(19): siRNA sense strand
aaacagaguacuccuuucu

SEQ ID NO: 1433024 - RNA, 19 nt, Homo sapiens
  misc_RNA (1)...(19): siRNA sense strand
cagcuugaguaccgcuuug

SEQ ID NO: 1433025 - RNA, 19 nt, Homo sapiens
  misc_RNA (1)...(19): siRNA sense strand
cacaacuggucucauacuu

SEQ ID NO: 1433026 - RNA, 19 nt, Homo sapiens
  misc_RNA (1)...(19): siRNA sense strand
cgcaauacuucaugcuguu

SEQ ID NO: 1433027 - RNA, 19 nt, Homo sapiens
  misc_RNA (1)...(19): siRNA sense strand
guacuccuuucuggacuau

SEQ ID NO: 1433028 - RNA, 19 nt, Homo sapiens
  misc_RNA (1)...(19): siRNA sense strand
gauuguguccagccaggua

SEQ ID NO: 1433029 - RNA, 19 nt, Homo sapiens
  misc_RNA (1)...(19): siRNA sense strand
ggagguagaggccagaaac

SEQ ID NO: 1433030 - RNA, 19 nt, Homo sapiens
  misc_RNA (1)...(19): siRNA sense strand
cgcaugaauuugccuugaa

SEQ ID NO: 1433031 - RNA, 19 nt, Homo sapiens
  misc_RNA (1)...(19): siRNA sense strand
ugguucagcuguccauuuc

SEQ ID NO: 1433032 - RNA, 19 nt, Homo sapiens
  misc_RNA (1)...(19): siRNA sense strand
cagcgugguucaggacuau

SEQ ID NO: 1433033 - RNA, 19 nt, Homo sapiens
  misc_RNA (1)...(19): siRNA sense strand
gaggccagaaaccuagaua

SEQ ID NO: 1433034 - RNA, 19 nt, Homo sapiens
  misc_RNA (1)...(19): siRNA sense strand
caagcuguucccugcauuu

SEQ ID NO: 1433035 - RNA, 19 nt, Homo sapiens
  misc_RNA (1)...(19): siRNA sense strand
ggucaaugaguaccugaug

SEQ ID NO: 1433036 - RNA, 19 nt, Homo sapiens
  misc_RNA (1)...(19): siRNA sense strand
cggcugaguuugaaugcau

SEQ ID NO: 1433037 - RNA, 19 nt, Homo sapiens
  misc_RNA (1)...(19): siRNA sense strand
ggcagucccggcugaguuu

SEQ ID NO: 1433038 - RNA, 19 nt, Homo sapiens
  misc_RNA (1)...(19): siRNA sense strand
cauggaagcguuucucagu

SEQ ID NO: 1433039 - RNA, 19 nt, Homo sapiens
  misc_RNA (1)...(19): siRNA sense strand
ggccagaaaccuagauaag

SEQ ID NO: 1433040 - RNA, 19 nt, Homo sapiens
  misc_RNA (1)...(19): siRNA sense strand
gcccugaguucuccaagac

SEQ ID NO: 1433041 - RNA, 19 nt, Homo sapiens
  misc_RNA (1)...(19): siRNA sense strand
uguggguggugcugacuuu

SEQ ID NO: 1433042 - RNA, 19 nt, Homo sapiens
  misc_RNA (1)...(19): siRNA sense strand
acaaggacaucggcuccaa

SEQ ID NO: 1433043 - RNA, 19 nt, Homo sapiens
  misc_RNA (1)...(19): siRNA sense strand
ccugugaccaucucauuga

SEQ ID NO: 1433044 - RNA, 19 nt, Homo sapiens
  misc_RNA (1)...(19): siRNA sense strand
ccgccagggugaugggaaa

SEQ ID NO: 1433045 - RNA, 19 nt, Homo sapiens
  misc_RNA (1)...(19): siRNA sense strand
gcagaagugcccacacaac

SEQ ID NO: 1433046 - RNA, 19 nt, Homo sapiens
  misc_RNA (1)...(19): siRNA sense strand
gcaauacuucaugcuguug

SEQ ID NO: 1433047 - RNA, 19 nt, Homo sapiens
  misc_RNA (1)...(19): siRNA sense strand
gcaggcauccagggcauug

SEQ ID NO: 1433048 - RNA, 19 nt, Homo sapiens
  misc_RNA (1)...(19): siRNA sense strand
ucgcaugaauuugccuuga

SEQ ID NO: 1433049 - RNA, 19 nt, Homo sapiens
  misc_RNA (1)...(19): siRNA sense strand
cuccaagacucuacagcuu

SEQ ID NO: 1433050 - RNA, 19 nt, Homo sapiens
  misc_RNA (1)...(19): siRNA sense strand
ggugcaaugcuccgauuau

SEQ ID NO: 1433051 - RNA, 19 nt, Homo sapiens
  misc_RNA (1)...(19): siRNA sense strand
gggacugccucgcaauacu

SEQ ID NO: 1433052 - RNA, 19 nt, Homo sapiens
  misc_RNA (1)...(19): siRNA sense strand
acuggcaggucucgcauga

SEQ ID NO: 1433053 - RNA, 19 nt, Homo sapiens
  misc_RNA (1)...(19): siRNA sense strand
ucaccugacucccuacacu

SEQ ID NO: 1433054 - RNA, 19 nt, Homo sapiens
  misc_RNA (1)...(19): siRNA sense strand
gcgacauugugcaguuugu

SEQ ID NO: 1433055 - RNA, 19 nt, Homo sapiens
  misc_RNA (1)...(19): siRNA sense strand
uaguaaccauggagguaga

SEQ ID NO: 1433056 - RNA, 19 nt, Homo sapiens
  misc_RNA (1)...(19): siRNA sense strand
gcccaugucagugaucauu

SEQ ID NO: 1433057 - RNA, 19 nt, Homo sapiens
  misc_RNA (1)...(19): siRNA sense strand
gaacaaccugaacccuaca

SEQ ID NO: 1433058 - RNA, 19 nt, Homo sapiens
  misc_RNA (1)...(19): siRNA sense strand
gaaaccuagauaagaagga

SEQ ID NO: 1433059 - RNA, 19 nt, Homo sapiens
  misc_RNA (1)...(19): siRNA sense strand
gcuuugagacaguccagaa

SEQ ID NO: 1433060 - RNA, 19 nt, Homo sapiens
  misc_RNA (1)...(19): siRNA sense strand
aacuauccgugucaagauu

SEQ ID NO: 1433061 - RNA, 19 nt, Homo sapiens
  misc_RNA (1)...(19): siRNA sense strand
agaccgugcucgcagaagu

SEQ ID NO: 1433062 - RNA, 19 nt, Homo sapiens
  misc_RNA (1)...(19): siRNA sense strand
ccgcgacauugugcaguuu

SEQ ID NO: 1433063 - RNA, 19 nt, Homo sapiens
  misc_RNA (1)...(19): siRNA sense strand
gaggcugucagaucaacuu

SEQ ID NO: 1433064 - RNA, 19 nt, Homo sapiens
  misc_RNA (1)...(19): siRNA sense strand
gcuuuggaaucuaugacau

SEQ ID NO: 1433065 - RNA, 19 nt, Homo sapiens
  misc_RNA (1)...(19): siRNA sense strand
cgacauugugcaguuugua

SEQ ID NO: 1433066 - RNA, 19 nt, Homo sapiens
  misc_RNA (1)...(19): siRNA sense strand
uguaguaaccauggaggua

SEQ ID NO: 1433067 - RNA, 19 nt, Homo sapiens
  misc_RNA (1)...(19): siRNA sense strand
gcugucagaucaacuucac

SEQ ID NO: 1433068 - RNA, 19 nt, Homo sapiens
  misc_RNA (1)...(19): siRNA sense strand
uuaaaggacaaucguguag

SEQ ID NO: 1433069 - RNA, 19 nt, Homo sapiens
  misc_RNA (1)...(19): siRNA sense strand
ucuauggcccuaccaacuu

SEQ ID NO: 1433070 - RNA, 19 nt, Homo sapiens
  misc_RNA (1)...(19): siRNA sense strand
augggaggcugucagauca

SEQ ID NO: 1433071 - RNA, 19 nt, Homo sapiens
  misc_RNA (1)...(19): siRNA sense strand
ccagggugaugggaaaugg

SEQ ID NO: 1433072 - RNA, 19 nt, Homo sapiens
  misc_RNA (1)...(19): siRNA sense strand
cagcucaggaauuaaagga

SEQ ID NO: 1433073 - RNA, 19 nt, Homo sapiens
  misc_RNA (1)...(19): siRNA sense strand
cagaagugcccacacaacu

SEQ ID NO: 1433074 - RNA, 19 nt, Homo sapiens
  misc_RNA (1)...(19): siRNA sense strand
acaagcuguucccugcauu

SEQ ID NO: 1433075 - RNA, 19 nt, Homo sapiens
  misc_RNA (1)...(19): siRNA sense strand
aagaaaagcuacaagaacu

SEQ ID NO: 1433076 - RNA, 19 nt, Homo sapiens
  misc_RNA (1)...(19): siRNA sense strand
gcauccacccugagaagca

SEQ ID NO: 1433077 - RNA, 19 nt, Homo sapiens
  misc_RNA (1)...(19): siRNA sense strand
acuccuuucuggacuaugu

SEQ ID NO: 1433078 - RNA, 19 nt, Homo sapiens
  misc_RNA (1)...(19): siRNA sense strand
ggguggugcugacuuugag

SEQ ID NO: 1433079 - RNA, 19 nt, Homo sapiens
  misc_RNA (1)...(19): siRNA sense strand
ccacacaacuggucucaua

SEQ ID NO: 1433080 - RNA, 19 nt, Homo sapiens
  misc_RNA (1)...(19): siRNA sense strand
gaucugaggucaucaagaa

SEQ ID NO: 1433081 - RNA, 19 nt, Homo sapiens
  misc_RNA (1)...(19): siRNA sense strand
ggucucagcucaggaauua

SEQ ID NO: 1433082 - RNA, 19 nt, Homo sapiens
  misc_RNA (1)...(19): siRNA sense strand
ccagaaaccuagauaagaa

SEQ ID NO: 1433083 - RNA, 19 nt, Homo sapiens
  misc_RNA (1)...(19): siRNA sense strand
caacuggucucauacuuca

SEQ ID NO: 1433084 - RNA, 19 nt, Homo sapiens
  misc_RNA (1)...(19): siRNA sense strand
ggacuucacuggcuccaau

SEQ ID NO: 1433085 - RNA, 19 nt, Homo sapiens
  misc_RNA (1)...(19): siRNA sense strand
guacagaucugaggucauc

SEQ ID NO: 1433086 - RNA, 19 nt, Homo sapiens
  misc_RNA (1)...(19): siRNA sense strand
aaaggacaaucguguagua

SEQ ID NO: 1433087 - RNA, 19 nt, Homo sapiens
  misc_RNA (1)...(19): siRNA sense strand
gcaggucucgcaugaauuu

SEQ ID NO: 1433088 - RNA, 19 nt, Homo sapiens
  misc_RNA (1)...(19): siRNA sense strand
caagaacucuggaacuauc

SEQ ID NO: 1433089 - RNA, 19 nt, Homo sapiens
  misc_RNA (1)...(19): siRNA sense strand
caacaggggucaaugagua

SEQ ID NO: 1433090 - RNA, 19 nt, Homo sapiens
  misc_RNA (1)...(19): siRNA sense strand
uacaagaacucuggaacua

SEQ ID NO: 1433091 - RNA, 19 nt, Homo sapiens
  misc_RNA (1)...(19): siRNA sense strand
gcugagggaugaugacuuc

SEQ ID NO: 1433092 - RNA, 19 nt, Homo sapiens
  misc_RNA (1)...(19): siRNA sense strand
gcaugaauuugccuugaau

SEQ ID NO: 1433093 - RNA, 19 nt, Homo sapiens
  misc_RNA (1)...(19): siRNA sense strand
gagggaugaugacuuccua

SEQ ID NO: 1433094 - RNA, 19 nt, Homo sapiens
  misc_RNA (1)...(19): siRNA sense strand
ggacaucggcuccaagucu

SEQ ID NO: 1433095 - RNA, 19 nt, Homo sapiens
  misc_RNA (1)...(19): siRNA sense strand
cgccagagcugagggauga

SEQ ID NO: 1433096 - RNA, 19 nt, Homo sapiens
  misc_RNA (1)...(19): siRNA sense strand
ggaacuauccgugucaaga

SEQ ID NO: 1433097 - RNA, 19 nt, Homo sapiens
  misc_RNA (1)...(19): siRNA sense strand
gaacuauccgugucaagau

SEQ ID NO: 1433098 - RNA, 19 nt, Homo sapiens
  misc_RNA (1)...(19): siRNA sense strand
caagauuugucggguagaa

SEQ ID NO: 1433099 - RNA, 19 nt, Homo sapiens
  misc_RNA (1)...(19): siRNA sense strand
gcagcgugguucaggacua

SEQ ID NO: 1433100 - RNA, 19 nt, Homo sapiens
  misc_RNA (1)...(19): siRNA sense strand
gcuguucccugcauuugga

SEQ ID NO: 1433101 - RNA, 19 nt, Homo sapiens
  misc_RNA (1)...(19): siRNA sense strand
agaaacagaguacuccuuu

SEQ ID NO: 1433102 - RNA, 19 nt, Homo sapiens
  misc_RNA (1)...(19): siRNA sense strand
gguagaggccagaaaccua

SEQ ID NO: 1433103 - RNA, 19 nt, Homo sapiens
  misc_RNA (1)...(19): siRNA sense strand
gugcaaugcuccgauuaug

SEQ ID NO: 1433104 - RNA, 19 nt, Homo sapiens
  misc_RNA (1)...(19): siRNA sense strand
uggcaggucucgcaugaau

SEQ ID NO: 1433105 - RNA, 19 nt, Homo sapiens
  misc_RNA (1)...(19): siRNA sense strand
ggacaaucguguaguaacc

SEQ ID NO: 1433106 - RNA, 19 nt, Homo sapiens
  misc_RNA (1)...(19): siRNA sense strand
cuauggcccuaccaacuuu

SEQ ID NO: 1433107 - RNA, 19 nt, Homo sapiens
  misc_RNA (1)...(19): siRNA sense strand
gaaugcauccacccugaga

SEQ ID NO: 1433108 - RNA, 19 nt, Homo sapiens
  misc_RNA (1)...(19): siRNA sense strand
gccagaaaccuagauaaga

SEQ ID NO: 1433109 - RNA, 19 nt, Homo sapiens
  misc_RNA (1)...(19): siRNA sense strand
gcuacgcuuuggaaucuau

SEQ ID NO: 1433110 - RNA, 19 nt, Homo sapiens
  misc_RNA (1)...(19): siRNA sense strand
gugaccaucucauugacaa

SEQ ID NO: 1433111 - RNA, 19 nt, Homo sapiens
  misc_RNA (1)...(19): siRNA sense strand
gaugggaggcugucagauc

SEQ ID NO: 1433112 - RNA, 19 nt, Homo sapiens
  misc_RNA (1)...(19): siRNA sense strand
gacaagcuguucccugcau

SEQ ID NO: 1433113 - RNA, 19 nt, Homo sapiens
  misc_RNA (1)...(19): siRNA sense strand
ggacugccucgcaauacuu

SEQ ID NO: 1433114 - RNA, 19 nt, Homo sapiens
  misc_RNA (1)...(19): siRNA sense strand
gacccacucugcguccuuu

SEQ ID NO: 1433115 - RNA, 19 nt, Homo sapiens
  misc_RNA (1)...(19): siRNA sense strand
caacuuugcacccaucauc

SEQ ID NO: 1433116 - RNA, 19 nt, Homo sapiens
  misc_RNA (1)...(19): siRNA sense strand
ccaugucagugaucauugu

SEQ ID NO: 1433117 - RNA, 19 nt, Homo sapiens
  misc_RNA (1)...(19): siRNA sense strand
gagcuuggccggacugaac

SEQ ID NO: 1433118 - RNA, 19 nt, Homo sapiens
  misc_RNA (1)...(19): siRNA sense strand
ccucgaaccugcccauguc

SEQ ID NO: 1433119 - RNA, 19 nt, Homo sapiens
  misc_RNA (1)...(19): siRNA sense strand
ggaauuaaaggacaaucgu

SEQ ID NO: 1433120 - RNA, 19 nt, Homo sapiens
  misc_RNA (1)...(19): siRNA sense strand
caggugcaaugcuccgauu

SEQ ID NO: 1433121 - RNA, 19 nt, Homo sapiens
  misc_RNA (1)...(19): siRNA sense strand
ucgcagaagugcccacaca

SEQ ID NO: 1433122 - RNA, 19 nt, Homo sapiens
  misc_RNA (1)...(19): siRNA sense strand
ucucagcucaggaauuaaa

SEQ ID NO: 1433123 - RNA, 19 nt, Homo sapiens
  misc_RNA (1)...(19): siRNA sense strand
aaacagaguacuccuuucu

SEQ ID NO: 1433124 - RNA, 19 nt, Homo sapiens
  misc_RNA (1)...(19): siRNA sense strand
cagcuugaguaccgcuuug

SEQ ID NO: 1433125 - RNA, 19 nt, Homo sapiens
  misc_RNA (1)...(19): siRNA sense strand
cacaacuggucucauacuu

SEQ ID NO: 1433126 - RNA, 19 nt, Homo sapiens
  misc_RNA (1)...(19): siRNA sense strand
cgcaauacuucaugcuguu

SEQ ID NO: 1433127 - RNA, 19 nt, Homo sapiens
  misc_RNA (1)...(19): siRNA sense strand
guacuccuuucuggacuau

SEQ ID NO: 1433128 - RNA, 19 nt, Homo sapiens
  misc_RNA (1)...(19): siRNA sense strand
gauuguguccagccaggua

SEQ ID NO: 1433129 - RNA, 19 nt, Homo sapiens
  misc_RNA (1)...(19): siRNA sense strand
ggagguagaggccagaaac

SEQ ID NO: 1433130 - RNA, 19 nt, Homo sapiens
  misc_RNA (1)...(19): siRNA sense strand
cgcaugaauuugccuugaa

SEQ ID NO: 1433131 - RNA, 19 nt, Homo sapiens
  misc_RNA (1)...(19): siRNA sense strand
ugguucagcuguccauuuc

SEQ ID NO: 1433132 - RNA, 19 nt, Homo sapiens
  misc_RNA (1)...(19): siRNA sense strand
cagcgugguucaggacuau

SEQ ID NO: 1433133 - RNA, 19 nt, Homo sapiens
  misc_RNA (1)...(19): siRNA sense strand
gaggccagaaaccuagaua

SEQ ID NO: 1433134 - RNA, 19 nt, Homo sapiens
  misc_RNA (1)...(19): siRNA sense strand
caagcuguucccugcauuu

SEQ ID NO: 1433135 - RNA, 19 nt, Homo sapiens
  misc_RNA (1)...(19): siRNA sense strand
ggucaaugaguaccugaug

SEQ ID NO: 1433136 - RNA, 19 nt, Homo sapiens
  misc_RNA (1)...(19): siRNA sense strand
cggcugaguuugaaugcau

SEQ ID NO: 1433137 - RNA, 19 nt, Homo sapiens
  misc_RNA (1)...(19): siRNA sense strand
ggcagucccggcugaguuu

SEQ ID NO: 1433138 - RNA, 19 nt, Homo sapiens
  misc_RNA (1)...(19): siRNA sense strand
cauggaagcguuucucagu

SEQ ID NO: 1433139 - RNA, 19 nt, Homo sapiens
  misc_RNA (1)...(19): siRNA sense strand
ggccagaaaccuagauaag

SEQ ID NO: 1433140 - RNA, 19 nt, Homo sapiens
  misc_RNA (1)...(19): siRNA sense strand
gcccugaguucuccaagac

SEQ ID NO: 1433141 - RNA, 19 nt, Homo sapiens
  misc_RNA (1)...(19): siRNA sense strand
uguggguggugcugacuuu

SEQ ID NO: 1433142 - RNA, 19 nt, Homo sapiens
  misc_RNA (1)...(19): siRNA sense strand
acaaggacaucggcuccaa

SEQ ID NO: 1433143 - RNA, 19 nt, Homo sapiens
  misc_RNA (1)...(19): siRNA sense strand
ccugugaccaucucauuga

SEQ ID NO: 1433144 - RNA, 19 nt, Homo sapiens
  misc_RNA (1)...(19): siRNA sense strand
ccgccagggugaugggaaa

SEQ ID NO: 1433145 - RNA, 19 nt, Homo sapiens
  misc_RNA (1)...(19): siRNA sense strand
gcagaagugcccacacaac

SEQ ID NO: 1433146 - RNA, 19 nt, Homo sapiens
  misc_RNA (1)...(19): siRNA sense strand
gcaauacuucaugcuguug

SEQ ID NO: 1433147 - RNA, 19 nt, Homo sapiens
  misc_RNA (1)...(19): siRNA sense strand
gcaggcauccagggcauug

SEQ ID NO: 1433148 - RNA, 19 nt, Homo sapiens
  misc_RNA (1)...(19): siRNA sense strand
ucgcaugaauuugccuuga

SEQ ID NO: 1433149 - RNA, 19 nt, Homo sapiens
  misc_RNA (1)...(19): siRNA sense strand
cuccaagacucuacagcuu

SEQ ID NO: 1433150 - RNA, 19 nt, Homo sapiens
  misc_RNA (1)...(19): siRNA sense strand
ggugcaaugcuccgauuau

SEQ ID NO: 1433151 - RNA, 19 nt, Homo sapiens
  misc_RNA (1)...(19): siRNA sense strand
gggacugccucgcaauacu

SEQ ID NO: 1433152 - RNA, 19 nt, Homo sapiens
  misc_RNA (1)...(19): siRNA sense strand
acuggcaggucucgcauga

SEQ ID NO: 1433153 - RNA, 19 nt, Homo sapiens
  misc_RNA (1)...(19): siRNA sense strand
ucaccugacucccuacacu

SEQ ID NO: 1433154 - RNA, 19 nt, Homo sapiens
  misc_RNA (1)...(19): siRNA sense strand
gcgacauugugcaguuugu

SEQ ID NO: 1433155 - RNA, 19 nt, Homo sapiens
  misc_RNA (1)...(19): siRNA sense strand
uaguaaccauggagguaga

SEQ ID NO: 1433156 - RNA, 19 nt, Homo sapiens
  misc_RNA (1)...(19): siRNA sense strand
gcccaugucagugaucauu

SEQ ID NO: 1433157 - RNA, 19 nt, Homo sapiens
  misc_RNA (1)...(19): siRNA sense strand
gaacaaccugaacccuaca

SEQ ID NO: 1433158 - RNA, 19 nt, Homo sapiens
  misc_RNA (1)...(19): siRNA sense strand
gaaaccuagauaagaagga

SEQ ID NO: 1433159 - RNA, 19 nt, Homo sapiens
  misc_RNA (1)...(19): siRNA sense strand
gcuuugagacaguccagaa

SEQ ID NO: 1433160 - RNA, 19 nt, Homo sapiens
  misc_RNA (1)...(19): siRNA sense strand
aacuauccgugucaagauu

SEQ ID NO: 1433161 - RNA, 19 nt, Homo sapiens
  misc_RNA (1)...(19): siRNA sense strand
agaccgugcucgcagaagu

SEQ ID NO: 1433162 - RNA, 19 nt, Homo sapiens
  misc_RNA (1)...(19): siRNA sense strand
ccgcgacauugugcaguuu

SEQ ID NO: 1433163 - RNA, 19 nt, Homo sapiens
  misc_RNA (1)...(19): siRNA sense strand
gaggcugucagaucaacuu

SEQ ID NO: 1433164 - RNA, 19 nt, Homo sapiens
  misc_RNA (1)...(19): siRNA sense strand
gcuuuggaaucuaugacau

SEQ ID NO: 1433165 - RNA, 19 nt, Homo sapiens
  misc_RNA (1)...(19): siRNA sense strand
cgacauugugcaguuugua

SEQ ID NO: 1433166 - RNA, 19 nt, Homo sapiens
  misc_RNA (1)...(19): siRNA sense strand
uguaguaaccauggaggua

SEQ ID NO: 1433167 - RNA, 19 nt, Homo sapiens
  misc_RNA (1)...(19): siRNA sense strand
gcugucagaucaacuucac

SEQ ID NO: 1433168 - RNA, 19 nt, Homo sapiens
  misc_RNA (1)...(19): siRNA sense strand
uuaaaggacaaucguguag

SEQ ID NO: 1433169 - RNA, 19 nt, Homo sapiens
  misc_RNA (1)...(19): siRNA sense strand
ucuauggcccuaccaacuu

SEQ ID NO: 1433170 - RNA, 19 nt, Homo sapiens
  misc_RNA (1)...(19): siRNA sense strand
augggaggcugucagauca

SEQ ID NO: 1433171 - RNA, 19 nt, Homo sapiens
  misc_RNA (1)...(19): siRNA sense strand
ccagggugaugggaaaugg

SEQ ID NO: 1433172 - RNA, 19 nt, Homo sapiens
  misc_RNA (1)...(19): siRNA sense strand
cagcucaggaauuaaagga

SEQ ID NO: 1433173 - RNA, 19 nt, Homo sapiens
  misc_RNA (1)...(19): siRNA sense strand
cagaagugcccacacaacu

SEQ ID NO: 1433174 - RNA, 19 nt, Homo sapiens
  misc_RNA (1)...(19): siRNA sense strand
acaagcuguucccugcauu

SEQ ID NO: 1433175 - RNA, 19 nt, Homo sapiens
  misc_RNA (1)...(19): siRNA sense strand
aagaaaagcuacaagaacu

SEQ ID NO: 1433176 - RNA, 19 nt, Homo sapiens
  misc_RNA (1)...(19): siRNA sense strand
gcauccacccugagaagca

SEQ ID NO: 1433177 - RNA, 19 nt, Homo sapiens
  misc_RNA (1)...(19): siRNA sense strand
acuccuuucuggacuaugu

SEQ ID NO: 1433178 - RNA, 19 nt, Homo sapiens
  misc_RNA (1)...(19): siRNA sense strand
ggguggugcugacuuugag

SEQ ID NO: 1433179 - RNA, 19 nt, Homo sapiens
  misc_RNA (1)...(19): siRNA sense strand
ccacacaacuggucucaua

SEQ ID NO: 1433180 - RNA, 19 nt, Homo sapiens
  misc_RNA (1)...(19): siRNA sense strand
gaucugaggucaucaagaa

SEQ ID NO: 1433181 - RNA, 19 nt, Homo sapiens
  misc_RNA (1)...(19): siRNA sense strand
ggucucagcucaggaauua

SEQ ID NO: 1433182 - RNA, 19 nt, Homo sapiens
  misc_RNA (1)...(19): siRNA sense strand
ccagaaaccuagauaagaa

SEQ ID NO: 1433183 - RNA, 19 nt, Homo sapiens
  misc_RNA (1)...(19): siRNA sense strand
caacuggucucauacuuca

SEQ ID NO: 1433184 - RNA, 19 nt, Homo sapiens
  misc_RNA (1)...(19): siRNA sense strand
ggacuucacuggcuccaau

SEQ ID NO: 1433185 - RNA, 19 nt, Homo sapiens
  misc_RNA (1)...(19): siRNA sense strand
guacagaucugaggucauc

SEQ ID NO: 1433186 - RNA, 19 nt, Homo sapiens
  misc_RNA (1)...(19): siRNA sense strand
aaaggacaaucguguagua

SEQ ID NO: 1433187 - RNA, 19 nt, Homo sapiens
  misc_RNA (1)...(19): siRNA sense strand
gcaggucucgcaugaauuu

SEQ ID NO: 1433188 - RNA, 19 nt, Homo sapiens
  misc_RNA (1)...(19): siRNA sense strand
caagaacucuggaacuauc

SEQ ID NO: 1433189 - RNA, 19 nt, Homo sapiens
  misc_RNA (1)...(19): siRNA sense strand
caacaggggucaaugagua

SEQ ID NO: 1433190 - RNA, 19 nt, Homo sapiens
  misc_RNA (1)...(19): siRNA sense strand
uacaagaacucuggaacua

SEQ ID NO: 1433191 - RNA, 19 nt, Homo sapiens
  misc_RNA (1)...(19): siRNA sense strand
gcugagggaugaugacuuc

SEQ ID NO: 1433192 - RNA, 19 nt, Homo sapiens
  misc_RNA (1)...(19): siRNA sense strand
gcaugaauuugccuugaau

SEQ ID NO: 1433193 - RNA, 19 nt, Homo sapiens
  misc_RNA (1)...(19): siRNA sense strand
gagggaugaugacuuccua

SEQ ID NO: 1433194 - RNA, 19 nt, Homo sapiens
  misc_RNA (1)...(19): siRNA sense strand
ggacaucggcuccaagucu

SEQ ID NO: 1433195 - RNA, 19 nt, Homo sapiens
  misc_RNA (1)...(19): siRNA sense strand
cgccagagcugagggauga

SEQ ID NO: 1433196 - RNA, 19 nt, Homo sapiens
  misc_RNA (1)...(19): siRNA sense strand
ggaacuauccgugucaaga

SEQ ID NO: 1433197 - RNA, 19 nt, Homo sapiens
  misc_RNA (1)...(19): siRNA sense strand
gaacuauccgugucaagau

SEQ ID NO: 1433198 - RNA, 19 nt, Homo sapiens
  misc_RNA (1)...(19): siRNA sense strand
caagauuugucggguagaa

SEQ ID NO: 1433199 - RNA, 19 nt, Homo sapiens
  misc_RNA (1)...(19): siRNA sense strand
gcagcgugguucaggacua

SEQ ID NO: 1433200 - RNA, 19 nt, Homo sapiens
  misc_RNA (1)...(19): siRNA sense strand
gcuguucccugcauuugga

SEQ ID NO: 1433201 - RNA, 19 nt, Homo sapiens
  misc_RNA (1)...(19): siRNA sense strand
agaaacagaguacuccuuu

SEQ ID NO: 1433202 - RNA, 19 nt, Homo sapiens
  misc_RNA (1)...(19): siRNA sense strand
gguagaggccagaaaccua

SEQ ID NO: 1433203 - RNA, 19 nt, Homo sapiens
  misc_RNA (1)...(19): siRNA sense strand
gugcaaugcuccgauuaug

SEQ ID NO: 1433204 - RNA, 19 nt, Homo sapiens
  misc_RNA (1)...(19): siRNA sense strand
uggcaggucucgcaugaau

SEQ ID NO: 1433205 - RNA, 19 nt, Homo sapiens
  misc_RNA (1)...(19): siRNA sense strand
ggacaaucguguaguaacc

SEQ ID NO: 1433206 - RNA, 19 nt, Homo sapiens
  misc_RNA (1)...(19): siRNA sense strand
cuauggcccuaccaacuuu

SEQ ID NO: 1433207 - RNA, 19 nt, Homo sapiens
  misc_RNA (1)...(19): siRNA sense strand
gaaugcauccacccugaga

SEQ ID NO: 1433208 - RNA, 19 nt, Homo sapiens
  misc_RNA (1)...(19): siRNA sense strand
gccagaaaccuagauaaga

SEQ ID NO: 1433209 - RNA, 19 nt, Homo sapiens
  misc_RNA (1)...(19): siRNA sense strand
gcuacgcuuuggaaucuau

SEQ ID NO: 1433210 - RNA, 19 nt, Homo sapiens
  misc_RNA (1)...(19): siRNA sense strand
gugaccaucucauugacaa

SEQ ID NO: 1433211 - RNA, 19 nt, Homo sapiens
  misc_RNA (1)...(19): siRNA sense strand
gaugggaggcugucagauc

SEQ ID NO: 1433212 - RNA, 19 nt, Homo sapiens
  misc_RNA (1)...(19): siRNA sense strand
gacaagcuguucccugcau

SEQ ID NO: 1433213 - RNA, 19 nt, Homo sapiens
  misc_RNA (1)...(19): siRNA sense strand
ggacugccucgcaauacuu

SEQ ID NO: 1433214 - RNA, 19 nt, Homo sapiens
  misc_RNA (1)...(19): siRNA sense strand
gacccacucugcguccuuu

SEQ ID NO: 1433215 - RNA, 19 nt, Homo sapiens
  misc_RNA (1)...(19): siRNA sense strand
caacuuugcacccaucauc

SEQ ID NO: 1433216 - RNA, 19 nt, Homo sapiens
  misc_RNA (1)...(19): siRNA sense strand
ccaugucagugaucauugu

SEQ ID NO: 1433217 - RNA, 19 nt, Homo sapiens
  misc_RNA (1)...(19): siRNA sense strand
gagcuuggccggacugaac

SEQ ID NO: 1433218 - RNA, 19 nt, Homo sapiens
  misc_RNA (1)...(19): siRNA sense strand
ccucgaaccugcccauguc

SEQ ID NO: 1433219 - RNA, 19 nt, Homo sapiens
  misc_RNA (1)...(19): siRNA sense strand
ggaauuaaaggacaaucgu

SEQ ID NO: 1433220 - RNA, 19 nt, Homo sapiens
  misc_RNA (1)...(19): siRNA sense strand
caggugcaaugcuccgauu

SEQ ID NO: 1433221 - RNA, 19 nt, Homo sapiens
  misc_RNA (1)...(19): siRNA sense strand
ucgcagaagugcccacaca

SEQ ID NO: 1433222 - RNA, 19 nt, Homo sapiens
  misc_RNA (1)...(19): siRNA sense strand
ucucagcucaggaauuaaa

SEQ ID NO: 1433223 - RNA, 19 nt, Homo sapiens
  misc_RNA (1)...(19): siRNA sense strand
aaacagaguacuccuuucu

SEQ ID NO: 1433224 - RNA, 19 nt, Homo sapiens
  misc_RNA (1)...(19): siRNA sense strand
cagcuugaguaccgcuuug

SEQ ID NO: 1433225 - RNA, 19 nt, Homo sapiens
  misc_RNA (1)...(19): siRNA sense strand
cacaacuggucucauacuu

SEQ ID NO: 1433226 - RNA, 19 nt, Homo sapiens
  misc_RNA (1)...(19): siRNA sense strand
cgcaauacuucaugcuguu

SEQ ID NO: 1433227 - RNA, 19 nt, Homo sapiens
  misc_RNA (1)...(19): siRNA sense strand
guacuccuuucuggacuau

SEQ ID NO: 1433228 - RNA, 19 nt, Homo sapiens
  misc_RNA (1)...(19): siRNA sense strand
gauuguguccagccaggua

SEQ ID NO: 1433229 - RNA, 19 nt, Homo sapiens
  misc_RNA (1)...(19): siRNA sense strand
ggagguagaggccagaaac

SEQ ID NO: 1433230 - RNA, 19 nt, Homo sapiens
  misc_RNA (1)...(19): siRNA sense strand
cgcaugaauuugccuugaa

SEQ ID NO: 1433231 - RNA, 19 nt, Homo sapiens
  misc_RNA (1)...(19): siRNA sense strand
ugguucagcuguccauuuc

SEQ ID NO: 1433232 - RNA, 19 nt, Homo sapiens
  misc_RNA (1)...(19): siRNA sense strand
cagcgugguucaggacuau

SEQ ID NO: 1433233 - RNA, 19 nt, Homo sapiens
  misc_RNA (1)...(19): siRNA sense strand
gaggccagaaaccuagaua

SEQ ID NO: 1433234 - RNA, 19 nt, Homo sapiens
  misc_RNA (1)...(19): siRNA sense strand
caagcuguucccugcauuu

SEQ ID NO: 1433235 - RNA, 19 nt, Homo sapiens
  misc_RNA (1)...(19): siRNA sense strand
ggucaaugaguaccugaug

SEQ ID NO: 1433236 - RNA, 19 nt, Homo sapiens
  misc_RNA (1)...(19): siRNA sense strand
cggcugaguuugaaugcau

SEQ ID NO: 1433237 - RNA, 19 nt, Homo sapiens
  misc_RNA (1)...(19): siRNA sense strand
ggcagucccggcugaguuu

SEQ ID NO: 1433238 - RNA, 19 nt, Homo sapiens
  misc_RNA (1)...(19): siRNA sense strand
cauggaagcguuucucagu

SEQ ID NO: 1433239 - RNA, 19 nt, Homo sapiens
  misc_RNA (1)...(19): siRNA sense strand
ggccagaaaccuagauaag

SEQ ID NO: 1433240 - RNA, 19 nt, Homo sapiens
  misc_RNA (1)...(19): siRNA sense strand
gcccugaguucuccaagac

SEQ ID NO: 1433241 - RNA, 19 nt, Homo sapiens
  misc_RNA (1)...(19): siRNA sense strand
uguggguggugcugacuuu

SEQ ID NO: 1433242 - RNA, 19 nt, Homo sapiens
  misc_RNA (1)...(19): siRNA sense strand
acaaggacaucggcuccaa

SEQ ID NO: 1433243 - RNA, 19 nt, Homo sapiens
  misc_RNA (1)...(19): siRNA sense strand
ccugugaccaucucauuga

SEQ ID NO: 1433244 - RNA, 19 nt, Homo sapiens
  misc_RNA (1)...(19): siRNA sense strand
ccgccagggugaugggaaa

SEQ ID NO: 1433245 - RNA, 19 nt, Homo sapiens
  misc_RNA (1)...(19): siRNA sense strand
gcagaagugcccacacaac

SEQ ID NO: 1433246 - RNA, 19 nt, Homo sapiens
  misc_RNA (1)...(19): siRNA sense strand
gcaauacuucaugcuguug

SEQ ID NO: 1433247 - RNA, 19 nt, Homo sapiens
  misc_RNA (1)...(19): siRNA sense strand
gcaggcauccagggcauug

SEQ ID NO: 1433248 - RNA, 19 nt, Homo sapiens
  misc_RNA (1)...(19): siRNA sense strand
ucgcaugaauuugccuuga

SEQ ID NO: 1433249 - RNA, 19 nt, Homo sapiens
  misc_RNA (1)...(19): siRNA sense strand
cuccaagacucuacagcuu

SEQ ID NO: 1433250 - RNA, 19 nt, Homo sapiens
  misc_RNA (1)...(19): siRNA sense strand
ggugcaaugcuccgauuau

SEQ ID NO: 1433251 - RNA, 19 nt, Homo sapiens
  misc_RNA (1)...(19): siRNA sense strand
gggacugccucgcaauacu

SEQ ID NO: 1433252 - RNA, 19 nt, Homo sapiens
  misc_RNA (1)...(19): siRNA sense strand
acuggcaggucucgcauga

SEQ ID NO: 1433253 - RNA, 19 nt, Homo sapiens
  misc_RNA (1)...(19): siRNA sense strand
ucaccugacucccuacacu

SEQ ID NO: 1433254 - RNA, 19 nt, Homo sapiens
  misc_RNA (1)...(19): siRNA sense strand
gcgacauugugcaguuugu

SEQ ID NO: 1433255 - RNA, 19 nt, Homo sapiens
  misc_RNA (1)...(19): siRNA sense strand
uaguaaccauggagguaga

SEQ ID NO: 1433256 - RNA, 19 nt, Homo sapiens
  misc_RNA (1)...(19): siRNA sense strand
gcccaugucagugaucauu

SEQ ID NO: 1433257 - RNA, 19 nt, Homo sapiens
  misc_RNA (1)...(19): siRNA sense strand
gaacaaccugaacccuaca

SEQ ID NO: 1433258 - RNA, 19 nt, Homo sapiens
  misc_RNA (1)...(19): siRNA sense strand
gaaaccuagauaagaagga

SEQ ID NO: 1433259 - RNA, 19 nt, Homo sapiens
  misc_RNA (1)...(19): siRNA sense strand
gcuuugagacaguccagaa

SEQ ID NO: 1433260 - RNA, 19 nt, Homo sapiens
  misc_RNA (1)...(19): siRNA sense strand
aacuauccgugucaagauu

SEQ ID NO: 1433261 - RNA, 19 nt, Homo sapiens
  misc_RNA (1)...(19): siRNA sense strand
agaccgugcucgcagaagu

SEQ ID NO: 1433262 - RNA, 19 nt, Homo sapiens
  misc_RNA (1)...(19): siRNA sense strand
ccgcgacauugugcaguuu

SEQ ID NO: 1433263 - RNA, 19 nt, Homo sapiens
  misc_RNA (1)...(19): siRNA sense strand
gaggcugucagaucaacuu

SEQ ID NO: 1433264 - RNA, 19 nt, Homo sapiens
  misc_RNA (1)...(19): siRNA sense strand
gcuuuggaaucuaugacau

SEQ ID NO: 1433265 - RNA, 19 nt, Homo sapiens
  misc_RNA (1)...(19): siRNA sense strand
cgacauugugcaguuugua

SEQ ID NO: 1433266 - RNA, 19 nt, Homo sapiens
  misc_RNA (1)...(19): siRNA sense strand
uguaguaaccauggaggua

SEQ ID NO: 1433267 - RNA, 19 nt, Homo sapiens
  misc_RNA (1)...(19): siRNA sense strand
gcugucagaucaacuucac

SEQ ID NO: 1433268 - RNA, 19 nt, Homo sapiens
  misc_RNA (1)...(19): siRNA sense strand
uuaaaggacaaucguguag

SEQ ID NO: 1433269 - RNA, 19 nt, Homo sapiens
  misc_RNA (1)...(19): siRNA sense strand
ucuauggcccuaccaacuu

SEQ ID NO: 1433270 - RNA, 19 nt, Homo sapiens
  misc_RNA (1)...(19): siRNA sense strand
augggaggcugucagauca

SEQ ID NO: 1433271 - RNA, 19 nt, Homo sapiens
  misc_RNA (1)...(19): siRNA sense strand
ccagggugaugggaaaugg

SEQ ID NO: 1433272 - RNA, 19 nt, Homo sapiens
  misc_RNA (1)...(19): siRNA sense strand
cagcucaggaauuaaagga

SEQ ID NO: 1433273 - RNA, 19 nt, Homo sapiens
  misc_RNA (1)...(19): siRNA sense strand
cagaagugcccacacaacu

SEQ ID NO: 1433274 - RNA, 19 nt, Homo sapiens
  misc_RNA (1)...(19): siRNA sense strand
acaagcuguucccugcauu

SEQ ID NO: 1433275 - RNA, 19 nt, Homo sapiens
  misc_RNA (1)...(19): siRNA sense strand
aagaaaagcuacaagaacu

SEQ ID NO: 1433276 - RNA, 19 nt, Homo sapiens
  misc_RNA (1)...(19): siRNA sense strand
gcauccacccugagaagca

SEQ ID NO: 1433277 - RNA, 19 nt, Homo sapiens
  misc_RNA (1)...(19): siRNA sense strand
acuccuuucuggacuaugu

SEQ ID NO: 1433278 - RNA, 19 nt, Homo sapiens
  misc_RNA (1)...(19): siRNA sense strand
ggguggugcugacuuugag

SEQ ID NO: 1433279 - RNA, 19 nt, Homo sapiens
  misc_RNA (1)...(19): siRNA sense strand
ccacacaacuggucucaua

SEQ ID NO: 1433280 - RNA, 19 nt, Homo sapiens
  misc_RNA (1)...(19): siRNA sense strand
gaucugaggucaucaagaa

SEQ ID NO: 1433281 - RNA, 19 nt, Homo sapiens
  misc_RNA (1)...(19): siRNA sense strand
ggucucagcucaggaauua

SEQ ID NO: 1433282 - RNA, 19 nt, Homo sapiens
  misc_RNA (1)...(19): siRNA sense strand
ccagaaaccuagauaagaa

SEQ ID NO: 1433283 - RNA, 19 nt, Homo sapiens
  misc_RNA (1)...(19): siRNA sense strand
caacuggucucauacuuca

SEQ ID NO: 1433284 - RNA, 19 nt, Homo sapiens
  misc_RNA (1)...(19): siRNA sense strand
ggacuucacuggcuccaau

SEQ ID NO: 1433285 - RNA, 19 nt, Homo sapiens
  misc_RNA (1)...(19): siRNA sense strand
guacagaucugaggucauc

SEQ ID NO: 1433286 - RNA, 19 nt, Homo sapiens
  misc_RNA (1)...(19): siRNA sense strand
aaaggacaaucguguagua

SEQ ID NO: 1433287 - RNA, 19 nt, Homo sapiens
  misc_RNA (1)...(19): siRNA sense strand
gcaggucucgcaugaauuu

SEQ ID NO: 1433288 - RNA, 19 nt, Homo sapiens
  misc_RNA (1)...(19): siRNA sense strand
caagaacucuggaacuauc

SEQ ID NO: 1433289 - RNA, 19 nt, Homo sapiens
  misc_RNA (1)...(19): siRNA sense strand
caacaggggucaaugagua

SEQ ID NO: 1433290 - RNA, 19 nt, Homo sapiens
  misc_RNA (1)...(19): siRNA sense strand
uacaagaacucuggaacua

SEQ ID NO: 1433291 - RNA, 19 nt, Homo sapiens
  misc_RNA (1)...(19): siRNA sense strand
gcugagggaugaugacuuc

SEQ ID NO: 1433292 - RNA, 19 nt, Homo sapiens
  misc_RNA (1)...(19): siRNA sense strand
gcaugaauuugccuugaau

SEQ ID NO: 1433293 - RNA, 19 nt, Homo sapiens
  misc_RNA (1)...(19): siRNA sense strand
gagggaugaugacuuccua

SEQ ID NO: 1433294 - RNA, 19 nt, Homo sapiens
  misc_RNA (1)...(19): siRNA sense strand
ggacaucggcuccaagucu

SEQ ID NO: 1433295 - RNA, 19 nt, Homo sapiens
  misc_RNA (1)...(19): siRNA sense strand
cgccagagcugagggauga

SEQ ID NO: 1433296 - RNA, 19 nt, Homo sapiens
  misc_RNA (1)...(19): siRNA sense strand
ggaacuauccgugucaaga

SEQ ID NO: 1433297 - RNA, 19 nt, Homo sapiens
  misc_RNA (1)...(19): siRNA sense strand
gaacuauccgugucaagau

SEQ ID NO: 1433298 - RNA, 19 nt, Homo sapiens
  misc_RNA (1)...(19): siRNA sense strand
caagauuugucggguagaa

SEQ ID NO: 1433299 - RNA, 19 nt, Homo sapiens
  misc_RNA (1)...(19): siRNA sense strand
gcagcgugguucaggacua

SEQ ID NO: 1433300 - RNA, 19 nt, Homo sapiens
  misc_RNA (1)...(19): siRNA sense strand
gcuguucccugcauuugga

SEQ ID NO: 1433301 - RNA, 19 nt, Homo sapiens
  misc_RNA (1)...(19): siRNA sense strand
agaaacagaguacuccuuu

SEQ ID NO: 1433302 - RNA, 19 nt, Homo sapiens
  misc_RNA (1)...(19): siRNA sense strand
gguagaggccagaaaccua

SEQ ID NO: 1433303 - RNA, 19 nt, Homo sapiens
  misc_RNA (1)...(19): siRNA sense strand
gugcaaugcuccgauuaug

SEQ ID NO: 1433304 - RNA, 19 nt, Homo sapiens
  misc_RNA (1)...(19): siRNA sense strand
uggcaggucucgcaugaau

SEQ ID NO: 1433305 - RNA, 19 nt, Homo sapiens
  misc_RNA (1)...(19): siRNA sense strand
ggacaaucguguaguaacc

SEQ ID NO: 1433306 - RNA, 19 nt, Homo sapiens
  misc_RNA (1)...(19): siRNA sense strand
cuauggcccuaccaacuuu

SEQ ID NO: 1433307 - RNA, 19 nt, Homo sapiens
  misc_RNA (1)...(19): siRNA sense strand
gaaugcauccacccugaga

SEQ ID NO: 1433308 - RNA, 19 nt, Homo sapiens
  misc_RNA (1)...(19): siRNA sense strand
gccagaaaccuagauaaga

SEQ ID NO: 1433309 - RNA, 19 nt, Homo sapiens
  misc_RNA (1)...(19): siRNA sense strand
gcuacgcuuuggaaucuau

SEQ ID NO: 1433310 - RNA, 19 nt, Homo sapiens
  misc_RNA (1)...(19): siRNA sense strand
gugaccaucucauugacaa

SEQ ID NO: 1433311 - RNA, 19 nt, Homo sapiens
  misc_RNA (1)...(19): siRNA sense strand
gaugggaggcugucagauc

SEQ ID NO: 1433312 - RNA, 19 nt, Homo sapiens
  misc_RNA (1)...(19): siRNA sense strand
gacaagcuguucccugcau

SEQ ID NO: 1433313 - RNA, 19 nt, Homo sapiens
  misc_RNA (1)...(19): siRNA sense strand
ggacugccucgcaauacuu

SEQ ID NO: 1433314 - RNA, 19 nt, Homo sapiens
  misc_RNA (1)...(19): siRNA sense strand
gacccacucugcguccuuu

SEQ ID NO: 1433315 - RNA, 19 nt, Homo sapiens
  misc_RNA (1)...(19): siRNA sense strand
caacuuugcacccaucauc

SEQ ID NO: 1433316 - RNA, 19 nt, Homo sapiens
  misc_RNA (1)...(19): siRNA sense strand
ccaugucagugaucauugu

SEQ ID NO: 1433317 - RNA, 19 nt, Homo sapiens
  misc_RNA (1)...(19): siRNA sense strand
gagcuuggccggacugaac

SEQ ID NO: 1433318 - RNA, 19 nt, Homo sapiens
  misc_RNA (1)...(19): siRNA sense strand
ccucgaaccugcccauguc

SEQ ID NO: 1433319 - RNA, 19 nt, Homo sapiens
  misc_RNA (1)...(19): siRNA sense strand
ggaauuaaaggacaaucgu

SEQ ID NO: 1433320 - RNA, 19 nt, Homo sapiens
  misc_RNA (1)...(19): siRNA sense strand
caggugcaaugcuccgauu

SEQ ID NO: 1433321 - RNA, 19 nt, Homo sapiens
  misc_RNA (1)...(19): siRNA sense strand
ucgcagaagugcccacaca

SEQ ID NO: 1433322 - RNA, 19 nt, Homo sapiens
  misc_RNA (1)...(19): siRNA sense strand
ucucagcucaggaauuaaa

SEQ ID NO: 1433323 - RNA, 19 nt, Homo sapiens
  misc_RNA (1)...(19): siRNA sense strand
aaacagaguacuccuuucu

SEQ ID NO: 1433324 - RNA, 19 nt, Homo sapiens
  misc_RNA (1)...(19): siRNA sense strand
cagcuugaguaccgcuuug

SEQ ID NO: 1433325 - RNA, 19 nt, Homo sapiens
  misc_RNA (1)...(19): siRNA sense strand
cacaacuggucucauacuu

SEQ ID NO: 1433326 - RNA, 19 nt, Homo sapiens
  misc_RNA (1)...(19): siRNA sense strand
cgcaauacuucaugcuguu

SEQ ID NO: 1433327 - RNA, 19 nt, Homo sapiens
  misc_RNA (1)...(19): siRNA sense strand
guacuccuuucuggacuau

SEQ ID NO: 1433328 - RNA, 19 nt, Homo sapiens
  misc_RNA (1)...(19): siRNA sense strand
gauuguguccagccaggua

SEQ ID NO: 1433329 - RNA, 19 nt, Homo sapiens
  misc_RNA (1)...(19): siRNA sense strand
ggagguagaggccagaaac

SEQ ID NO: 1433330 - RNA, 19 nt, Homo sapiens
  misc_RNA (1)...(19): siRNA sense strand
cgcaugaauuugccuugaa

SEQ ID NO: 1433331 - RNA, 19 nt, Homo sapiens
  misc_RNA (1)...(19): siRNA sense strand
ugguucagcuguccauuuc

SEQ ID NO: 1433332 - RNA, 19 nt, Homo sapiens
  misc_RNA (1)...(19): siRNA sense strand
cagcgugguucaggacuau

SEQ ID NO: 1433333 - RNA, 19 nt, Homo sapiens
  misc_RNA (1)...(19): siRNA sense strand
gaggccagaaaccuagaua

SEQ ID NO: 1433334 - RNA, 19 nt, Homo sapiens
  misc_RNA (1)...(19): siRNA sense strand
caagcuguucccugcauuu

SEQ ID NO: 1433335 - RNA, 19 nt, Homo sapiens
  misc_RNA (1)...(19): siRNA sense strand
ggucaaugaguaccugaug

SEQ ID NO: 1433336 - RNA, 19 nt, Homo sapiens
  misc_RNA (1)...(19): siRNA sense strand
cggcugaguuugaaugcau

SEQ ID NO: 1433337 - RNA, 19 nt, Homo sapiens
  misc_RNA (1)...(19): siRNA sense strand
ggcagucccggcugaguuu

SEQ ID NO: 1433338 - RNA, 19 nt, Homo sapiens
  misc_RNA (1)...(19): siRNA sense strand
cauggaagcguuucucagu

SEQ ID NO: 1433339 - RNA, 19 nt, Homo sapiens
  misc_RNA (1)...(19): siRNA sense strand
ggccagaaaccuagauaag

SEQ ID NO: 1433340 - RNA, 19 nt, Homo sapiens
  misc_RNA (1)...(19): siRNA sense strand
gcccugaguucuccaagac

SEQ ID NO: 1433341 - RNA, 19 nt, Homo sapiens
  misc_RNA (1)...(19): siRNA sense strand
uguggguggugcugacuuu

SEQ ID NO: 1433342 - RNA, 19 nt, Homo sapiens
  misc_RNA (1)...(19): siRNA sense strand
acaaggacaucggcuccaa

SEQ ID NO: 1433343 - RNA, 19 nt, Homo sapiens
  misc_RNA (1)...(19): siRNA sense strand
ccugugaccaucucauuga

SEQ ID NO: 1433344 - RNA, 19 nt, Homo sapiens
  misc_RNA (1)...(19): siRNA sense strand
ccgccagggugaugggaaa

SEQ ID NO: 1433345 - RNA, 19 nt, Homo sapiens
  misc_RNA (1)...(19): siRNA sense strand
gcagaagugcccacacaac

SEQ ID NO: 1433346 - RNA, 19 nt, Homo sapiens
  misc_RNA (1)...(19): siRNA sense strand
gcaauacuucaugcuguug

SEQ ID NO: 1433347 - RNA, 19 nt, Homo sapiens
  misc_RNA (1)...(19): siRNA sense strand
gcaggcauccagggcauug

SEQ ID NO: 1433348 - RNA, 19 nt, Homo sapiens
  misc_RNA (1)...(19): siRNA sense strand
ucgcaugaauuugccuuga

SEQ ID NO: 1433349 - RNA, 19 nt, Homo sapiens
  misc_RNA (1)...(19): siRNA sense strand
cuccaagacucuacagcuu

SEQ ID NO: 1433350 - RNA, 19 nt, Homo sapiens
  misc_RNA (1)...(19): siRNA sense strand
ggugcaaugcuccgauuau

SEQ ID NO: 1433351 - RNA, 19 nt, Homo sapiens
  misc_RNA (1)...(19): siRNA sense strand
gggacugccucgcaauacu

SEQ ID NO: 1433352 - RNA, 19 nt, Homo sapiens
  misc_RNA (1)...(19): siRNA sense strand
acuggcaggucucgcauga

SEQ ID NO: 1433353 - RNA, 19 nt, Homo sapiens
  misc_RNA (1)...(19): siRNA sense strand
ucaccugacucccuacacu

SEQ ID NO: 1433354 - RNA, 19 nt, Homo sapiens
  misc_RNA (1)...(19): siRNA sense strand
gcgacauugugcaguuugu

SEQ ID NO: 1433355 - RNA, 19 nt, Homo sapiens
  misc_RNA (1)...(19): siRNA sense strand
uaguaaccauggagguaga

SEQ ID NO: 1433356 - RNA, 19 nt, Homo sapiens
  misc_RNA (1)...(19): siRNA sense strand
gcccaugucagugaucauu

SEQ ID NO: 1433357 - RNA, 19 nt, Homo sapiens
  misc_RNA (1)...(19): siRNA sense strand
gaacaaccugaacccuaca

SEQ ID NO: 1433358 - RNA, 19 nt, Homo sapiens
  misc_RNA (1)...(19): siRNA sense strand
gaaaccuagauaagaagga

SEQ ID NO: 1433359 - RNA, 19 nt, Homo sapiens
  misc_RNA (1)...(19): siRNA sense strand
gcuuugagacaguccagaa

SEQ ID NO: 1433360 - RNA, 19 nt, Homo sapiens
  misc_RNA (1)...(19): siRNA sense strand
aacuauccgugucaagauu

SEQ ID NO: 1433361 - RNA, 19 nt, Homo sapiens
  misc_RNA (1)...(19): siRNA sense strand
agaccgugcucgcagaagu

SEQ ID NO: 1433362 - RNA, 19 nt, Homo sapiens
  misc_RNA (1)...(19): siRNA sense strand
ccgcgacauugugcaguuu

SEQ ID NO: 1433363 - RNA, 19 nt, Homo sapiens
  misc_RNA (1)...(19): siRNA sense strand
gaggcugucagaucaacuu

SEQ ID NO: 1433364 - RNA, 19 nt, Homo sapiens
  misc_RNA (1)...(19): siRNA sense strand
gcuuuggaaucuaugacau

SEQ ID NO: 1433365 - RNA, 19 nt, Homo sapiens
  misc_RNA (1)...(19): siRNA sense strand
cgacauugugcaguuugua

SEQ ID NO: 1433366 - RNA, 19 nt, Homo sapiens
  misc_RNA (1)...(19): siRNA sense strand
uguaguaaccauggaggua

SEQ ID NO: 1433367 - RNA, 19 nt, Homo sapiens
  misc_RNA (1)...(19): siRNA sense strand
gcugucagaucaacuucac

SEQ ID NO: 1433368 - RNA, 19 nt, Homo sapiens
  misc_RNA (1)...(19): siRNA sense strand
uuaaaggacaaucguguag

SEQ ID NO: 1433369 - RNA, 19 nt, Homo sapiens
  misc_RNA (1)...(19): siRNA sense strand
ucuauggcccuaccaacuu

SEQ ID NO: 1433370 - RNA, 19 nt, Homo sapiens
  misc_RNA (1)...(19): siRNA sense strand
augggaggcugucagauca

SEQ ID NO: 1433371 - RNA, 19 nt, Homo sapiens
  misc_RNA (1)...(19): siRNA sense strand
ccagggugaugggaaaugg

SEQ ID NO: 1433372 - RNA, 19 nt, Homo sapiens
  misc_RNA (1)...(19): siRNA sense strand
cagcucaggaauuaaagga

SEQ ID NO: 1433373 - RNA, 19 nt, Homo sapiens
  misc_RNA (1)...(19): siRNA sense strand
cagaagugcccacacaacu

SEQ ID NO: 1433374 - RNA, 19 nt, Homo sapiens
  misc_RNA (1)...(19): siRNA sense strand
acaagcuguucccugcauu

SEQ ID NO: 1433375 - RNA, 19 nt, Homo sapiens
  misc_RNA (1)...(19): siRNA sense strand
aagaaaagcuacaagaacu

SEQ ID NO: 1433376 - RNA, 19 nt, Homo sapiens
  misc_RNA (1)...(19): siRNA sense strand
gcauccacccugagaagca

SEQ ID NO: 1433377 - RNA, 19 nt, Homo sapiens
  misc_RNA (1)...(19): siRNA sense strand
acuccuuucuggacuaugu

SEQ ID NO: 1433378 - RNA, 19 nt, Homo sapiens
  misc_RNA (1)...(19): siRNA sense strand
ggguggugcugacuuugag

SEQ ID NO: 1433379 - RNA, 19 nt, Homo sapiens
  misc_RNA (1)...(19): siRNA sense strand
ccacacaacuggucucaua

SEQ ID NO: 1433380 - RNA, 19 nt, Homo sapiens
  misc_RNA (1)...(19): siRNA sense strand
gaucugaggucaucaagaa

SEQ ID NO: 1433381 - RNA, 19 nt, Homo sapiens
  misc_RNA (1)...(19): siRNA sense strand
ggucucagcucaggaauua

SEQ ID NO: 1433382 - RNA, 19 nt, Homo sapiens
  misc_RNA (1)...(19): siRNA sense strand
ccagaaaccuagauaagaa

SEQ ID NO: 1433383 - RNA, 19 nt, Homo sapiens
  misc_RNA (1)...(19): siRNA sense strand
caacuggucucauacuuca

SEQ ID NO: 1433384 - RNA, 19 nt, Homo sapiens
  misc_RNA (1)...(19): siRNA sense strand
ggacuucacuggcuccaau

SEQ ID NO: 1433385 - RNA, 19 nt, Homo sapiens
  misc_RNA (1)...(19): siRNA sense strand
guacagaucugaggucauc

SEQ ID NO: 1433386 - RNA, 19 nt, Homo sapiens
  misc_RNA (1)...(19): siRNA sense strand
aaaggacaaucguguagua

SEQ ID NO: 1433387 - RNA, 19 nt, Homo sapiens
  misc_RNA (1)...(19): siRNA sense strand
gcaggucucgcaugaauuu

SEQ ID NO: 1433388 - RNA, 19 nt, Homo sapiens
  misc_RNA (1)...(19): siRNA sense strand
caagaacucuggaacuauc

SEQ ID NO: 1433389 - RNA, 19 nt, Homo sapiens
  misc_RNA (1)...(19): siRNA sense strand
caacaggggucaaugagua

SEQ ID NO: 1433390 - RNA, 19 nt, Homo sapiens
  misc_RNA (1)...(19): siRNA sense strand
uacaagaacucuggaacua

SEQ ID NO: 1433391 - RNA, 19 nt, Homo sapiens
  misc_RNA (1)...(19): siRNA sense strand
gcugagggaugaugacuuc

SEQ ID NO: 1433392 - RNA, 19 nt, Homo sapiens
  misc_RNA (1)...(19): siRNA sense strand
gcaugaauuugccuugaau

SEQ ID NO: 1433393 - RNA, 19 nt, Homo sapiens
  misc_RNA (1)...(19): siRNA sense strand
gagggaugaugacuuccua

SEQ ID NO: 1433394 - RNA, 19 nt, Homo sapiens
  misc_RNA (1)...(19): siRNA sense strand
ggacaucggcuccaagucu

SEQ ID NO: 1433395 - RNA, 19 nt, Homo sapiens
  misc_RNA (1)...(19): siRNA sense strand
cgccagagcugagggauga

SEQ ID NO: 1433396 - RNA, 19 nt, Homo sapiens
  misc_RNA (1)...(19): siRNA sense strand
ggaacuauccgugucaaga

SEQ ID NO: 1433397 - RNA, 19 nt, Homo sapiens
  misc_RNA (1)...(19): siRNA sense strand
gaacuauccgugucaagau

SEQ ID NO: 1433398 - RNA, 19 nt, Homo sapiens
  misc_RNA (1)...(19): siRNA sense strand
caagauuugucggguagaa

SEQ ID NO: 1433399 - RNA, 19 nt, Homo sapiens
  misc_RNA (1)...(19): siRNA sense strand
gcagcgugguucaggacua

SEQ ID NO: 1433400 - RNA, 19 nt, Homo sapiens
  misc_RNA (1)...(19): siRNA sense strand
gcuguucccugcauuugga

SEQ ID NO: 1433401 - RNA, 19 nt, Homo sapiens
  misc_RNA (1)...(19): siRNA sense strand
agaaacagaguacuccuuu

SEQ ID NO: 1433402 - RNA, 19 nt, Homo sapiens
  misc_RNA (1)...(19): siRNA sense strand
gguagaggccagaaaccua

SEQ ID NO: 1433403 - RNA, 19 nt, Homo sapiens
  misc_RNA (1)...(19): siRNA sense strand
gugcaaugcuccgauuaug

SEQ ID NO: 1433404 - RNA, 19 nt, Homo sapiens
  misc_RNA (1)...(19): siRNA sense strand
uggcaggucucgcaugaau

SEQ ID NO: 1433405 - RNA, 19 nt, Homo sapiens
  misc_RNA (1)...(19): siRNA sense strand
ggacaaucguguaguaacc

SEQ ID NO: 1433406 - RNA, 19 nt, Homo sapiens
  misc_RNA (1)...(19): siRNA sense strand
cuauggcccuaccaacuuu

SEQ ID NO: 1433407 - RNA, 19 nt, Homo sapiens
  misc_RNA (1)...(19): siRNA sense strand
gaaugcauccacccugaga

SEQ ID NO: 1433408 - RNA, 19 nt, Homo sapiens
  misc_RNA (1)...(19): siRNA sense strand
gccagaaaccuagauaaga

SEQ ID NO: 1433409 - RNA, 19 nt, Homo sapiens
  misc_RNA (1)...(19): siRNA sense strand
gcuacgcuuuggaaucuau

SEQ ID NO: 1433410 - RNA, 19 nt, Homo sapiens
  misc_RNA (1)...(19): siRNA sense strand
gugaccaucucauugacaa

SEQ ID NO: 1433411 - RNA, 19 nt, Homo sapiens
  misc_RNA (1)...(19): siRNA sense strand
gaugggaggcugucagauc

SEQ ID NO: 1433412 - RNA, 19 nt, Homo sapiens
  misc_RNA (1)...(19): siRNA sense strand
gacaagcuguucccugcau

SEQ ID NO: 1433413 - RNA, 19 nt, Homo sapiens
  misc_RNA (1)...(19): siRNA sense strand
ggacugccucgcaauacuu

SEQ ID NO: 1433414 - RNA, 19 nt, Homo sapiens
  misc_RNA (1)...(19): siRNA sense strand
gacccacucugcguccuuu

SEQ ID NO: 1433415 - RNA, 19 nt, Homo sapiens
  misc_RNA (1)...(19): siRNA sense strand
caacuuugcacccaucauc

SEQ ID NO: 1433416 - RNA, 19 nt, Homo sapiens
  misc_RNA (1)...(19): siRNA sense strand
ccaugucagugaucauugu

SEQ ID NO: 1433417 - RNA, 19 nt, Homo sapiens
  misc_RNA (1)...(19): siRNA sense strand
gagcuuggccggacugaac

SEQ ID NO: 1433418 - RNA, 19 nt, Homo sapiens
  misc_RNA (1)...(19): siRNA sense strand
ccucgaaccugcccauguc

SEQ ID NO: 1433419 - RNA, 19 nt, Homo sapiens
  misc_RNA (1)...(19): siRNA sense strand
ggaauuaaaggacaaucgu

SEQ ID NO: 1433420 - RNA, 19 nt, Homo sapiens
  misc_RNA (1)...(19): siRNA sense strand
caggugcaaugcuccgauu

SEQ ID NO: 1433421 - RNA, 19 nt, Homo sapiens
  misc_RNA (1)...(19): siRNA sense strand
ucgcagaagugcccacaca

SEQ ID NO: 1433422 - RNA, 19 nt, Homo sapiens
  misc_RNA (1)...(19): siRNA sense strand
ucucagcucaggaauuaaa

SEQ ID NO: 1433423 - RNA, 19 nt, Homo sapiens
  misc_RNA (1)...(19): siRNA sense strand
aaacagaguacuccuuucu

SEQ ID NO: 1433424 - RNA, 19 nt, Homo sapiens
  misc_RNA (1)...(19): siRNA sense strand
cagcuugaguaccgcuuug

SEQ ID NO: 1433425 - RNA, 19 nt, Homo sapiens
  misc_RNA (1)...(19): siRNA sense strand
cacaacuggucucauacuu

SEQ ID NO: 1433426 - RNA, 19 nt, Homo sapiens
  misc_RNA (1)...(19): siRNA sense strand
cgcaauacuucaugcuguu

SEQ ID NO: 1433427 - RNA, 19 nt, Homo sapiens
  misc_RNA (1)...(19): siRNA sense strand
guacuccuuucuggacuau

SEQ ID NO: 1433428 - RNA, 19 nt, Homo sapiens
  misc_RNA (1)...(19): siRNA sense strand
gauuguguccagccaggua

SEQ ID NO: 1433429 - RNA, 19 nt, Homo sapiens
  misc_RNA (1)...(19): siRNA sense strand
ggagguagaggccagaaac

SEQ ID NO: 1433430 - RNA, 19 nt, Homo sapiens
  misc_RNA (1)...(19): siRNA sense strand
cgcaugaauuugccuugaa

SEQ ID NO: 1433431 - RNA, 19 nt, Homo sapiens
  misc_RNA (1)...(19): siRNA sense strand
ugguucagcuguccauuuc

SEQ ID NO: 1433432 - RNA, 19 nt, Homo sapiens
  misc_RNA (1)...(19): siRNA sense strand
cagcgugguucaggacuau

SEQ ID NO: 1433433 - RNA, 19 nt, Homo sapiens
  misc_RNA (1)...(19): siRNA sense strand
gaggccagaaaccuagaua

SEQ ID NO: 1433434 - RNA, 19 nt, Homo sapiens
  misc_RNA (1)...(19): siRNA sense strand
caagcuguucccugcauuu

SEQ ID NO: 1433435 - RNA, 19 nt, Homo sapiens
  misc_RNA (1)...(19): siRNA sense strand
ggucaaugaguaccugaug

SEQ ID NO: 1433436 - RNA, 19 nt, Homo sapiens
  misc_RNA (1)...(19): siRNA sense strand
cggcugaguuugaaugcau

SEQ ID NO: 1433437 - RNA, 19 nt, Homo sapiens
  misc_RNA (1)...(19): siRNA sense strand
ggcagucccggcugaguuu

SEQ ID NO: 1433438 - RNA, 19 nt, Homo sapiens
  misc_RNA (1)...(19): siRNA sense strand
cauggaagcguuucucagu

SEQ ID NO: 1433439 - RNA, 19 nt, Homo sapiens
  misc_RNA (1)...(19): siRNA sense strand
ggccagaaaccuagauaag

SEQ ID NO: 1433440 - RNA, 19 nt, Homo sapiens
  misc_RNA (1)...(19): siRNA sense strand
gcccugaguucuccaagac

SEQ ID NO: 1433441 - RNA, 19 nt, Homo sapiens
  misc_RNA (1)...(19): siRNA sense strand
uguggguggugcugacuuu

SEQ ID NO: 1433442 - RNA, 19 nt, Homo sapiens
  misc_RNA (1)...(19): siRNA sense strand
acaaggacaucggcuccaa

SEQ ID NO: 1433443 - RNA, 19 nt, Homo sapiens
  misc_RNA (1)...(19): siRNA sense strand
ccugugaccaucucauuga

SEQ ID NO: 1433444 - RNA, 19 nt, Homo sapiens
  misc_RNA (1)...(19): siRNA sense strand
ccgccagggugaugggaaa

SEQ ID NO: 1433445 - RNA, 19 nt, Homo sapiens
  misc_RNA (1)...(19): siRNA sense strand
gcagaagugcccacacaac

SEQ ID NO: 1433446 - RNA, 19 nt, Homo sapiens
  misc_RNA (1)...(19): siRNA sense strand
gcaauacuucaugcuguug

SEQ ID NO: 1433447 - RNA, 19 nt, Homo sapiens
  misc_RNA (1)...(19): siRNA sense strand
gcaggcauccagggcauug

SEQ ID NO: 1433448 - RNA, 19 nt, Homo sapiens
  misc_RNA (1)...(19): siRNA sense strand
ucgcaugaauuugccuuga

SEQ ID NO: 1433449 - RNA, 19 nt, Homo sapiens
  misc_RNA (1)...(19): siRNA sense strand
cuccaagacucuacagcuu

SEQ ID NO: 1433450 - RNA, 19 nt, Homo sapiens
  misc_RNA (1)...(19): siRNA sense strand
ggugcaaugcuccgauuau

SEQ ID NO: 1433451 - RNA, 19 nt, Homo sapiens
  misc_RNA (1)...(19): siRNA sense strand
gggacugccucgcaauacu

SEQ ID NO: 1433452 - RNA, 19 nt, Homo sapiens
  misc_RNA (1)...(19): siRNA sense strand
acuggcaggucucgcauga

SEQ ID NO: 1433453 - RNA, 19 nt, Homo sapiens
  misc_RNA (1)...(19): siRNA sense strand
ucaccugacucccuacacu

SEQ ID NO: 1433454 - RNA, 19 nt, Homo sapiens
  misc_RNA (1)...(19): siRNA sense strand
gcgacauugugcaguuugu

SEQ ID NO: 1433455 - RNA, 19 nt, Homo sapiens
  misc_RNA (1)...(19): siRNA sense strand
uaguaaccauggagguaga

SEQ ID NO: 1433456 - RNA, 19 nt, Homo sapiens
  misc_RNA (1)...(19): siRNA sense strand
gcccaugucagugaucauu

SEQ ID NO: 1433457 - RNA, 19 nt, Homo sapiens
  misc_RNA (1)...(19): siRNA sense strand
gaacaaccugaacccuaca

SEQ ID NO: 1433458 - RNA, 19 nt, Homo sapiens
  misc_RNA (1)...(19): siRNA sense strand
gaaaccuagauaagaagga

SEQ ID NO: 1433459 - RNA, 19 nt, Homo sapiens
  misc_RNA (1)...(19): siRNA sense strand
gcuuugagacaguccagaa

SEQ ID NO: 1433460 - RNA, 19 nt, Homo sapiens
  misc_RNA (1)...(19): siRNA sense strand
aacuauccgugucaagauu

SEQ ID NO: 1433461 - RNA, 19 nt, Homo sapiens
  misc_RNA (1)...(19): siRNA sense strand
agaccgugcucgcagaagu

SEQ ID NO: 1433462 - RNA, 19 nt, Homo sapiens
  misc_RNA (1)...(19): siRNA sense strand
ccgcgacauugugcaguuu

SEQ ID NO: 1433463 - RNA, 19 nt, Homo sapiens
  misc_RNA (1)...(19): siRNA sense strand
gaggcugucagaucaacuu

SEQ ID NO: 1433464 - RNA, 19 nt, Homo sapiens
  misc_RNA (1)...(19): siRNA sense strand
gcuuuggaaucuaugacau

SEQ ID NO: 1433465 - RNA, 19 nt, Homo sapiens
  misc_RNA (1)...(19): siRNA sense strand
cgacauugugcaguuugua

SEQ ID NO: 1433466 - RNA, 19 nt, Homo sapiens
  misc_RNA (1)...(19): siRNA sense strand
uguaguaaccauggaggua

SEQ ID NO: 1433467 - RNA, 19 nt, Homo sapiens
  misc_RNA (1)...(19): siRNA sense strand
gcugucagaucaacuucac

SEQ ID NO: 1433468 - RNA, 19 nt, Homo sapiens
  misc_RNA (1)...(19): siRNA sense strand
uuaaaggacaaucguguag

SEQ ID NO: 1433469 - RNA, 19 nt, Homo sapiens
  misc_RNA (1)...(19): siRNA sense strand
ucuauggcccuaccaacuu

SEQ ID NO: 1433470 - RNA, 19 nt, Homo sapiens
  misc_RNA (1)...(19): siRNA sense strand
augggaggcugucagauca

SEQ ID NO: 1433471 - RNA, 19 nt, Homo sapiens
  misc_RNA (1)...(19): siRNA sense strand
ccagggugaugggaaaugg

SEQ ID NO: 1433472 - RNA, 19 nt, Homo sapiens
  misc_RNA (1)...(19): siRNA sense strand
cagcucaggaauuaaagga

SEQ ID NO: 1433473 - RNA, 19 nt, Homo sapiens
  misc_RNA (1)...(19): siRNA sense strand
cagaagugcccacacaacu

SEQ ID NO: 1433474 - RNA, 19 nt, Homo sapiens
  misc_RNA (1)...(19): siRNA sense strand
acaagcuguucccugcauu

SEQ ID NO: 1433475 - RNA, 19 nt, Homo sapiens
  misc_RNA (1)...(19): siRNA sense strand
aagaaaagcuacaagaacu

SEQ ID NO: 1433476 - RNA, 19 nt, Homo sapiens
  misc_RNA (1)...(19): siRNA sense strand
gcauccacccugagaagca

SEQ ID NO: 1433477 - RNA, 19 nt, Homo sapiens
  misc_RNA (1)...(19): siRNA sense strand
acuccuuucuggacuaugu

SEQ ID NO: 1433478 - RNA, 19 nt, Homo sapiens
  misc_RNA (1)...(19): siRNA sense strand
ggguggugcugacuuugag

SEQ ID NO: 1433479 - RNA, 19 nt, Homo sapiens
  misc_RNA (1)...(19): siRNA sense strand
ccacacaacuggucucaua

SEQ ID NO: 1433480 - RNA, 19 nt, Homo sapiens
  misc_RNA (1)...(19): siRNA sense strand
gaucugaggucaucaagaa

SEQ ID NO: 1433481 - RNA, 19 nt, Homo sapiens
  misc_RNA (1)...(19): siRNA sense strand
ggucucagcucaggaauua

SEQ ID NO: 1433482 - RNA, 19 nt, Homo sapiens
  misc_RNA (1)...(19): siRNA sense strand
ccagaaaccuagauaagaa

SEQ ID NO: 1433483 - RNA, 19 nt, Homo sapiens
  misc_RNA (1)...(19): siRNA sense strand
caacuggucucauacuuca

SEQ ID NO: 1433484 - RNA, 19 nt, Homo sapiens
  misc_RNA (1)...(19): siRNA sense strand
ggacuucacuggcuccaau

SEQ ID NO: 1433485 - RNA, 19 nt, Homo sapiens
  misc_RNA (1)...(19): siRNA sense strand
guacagaucugaggucauc

SEQ ID NO: 1433486 - RNA, 19 nt, Homo sapiens
  misc_RNA (1)...(19): siRNA sense strand
aaaggacaaucguguagua

SEQ ID NO: 1433487 - RNA, 19 nt, Homo sapiens
  misc_RNA (1)...(19): siRNA sense strand
gcaggucucgcaugaauuu

SEQ ID NO: 1433488 - RNA, 19 nt, Homo sapiens
  misc_RNA (1)...(19): siRNA sense strand
caagaacucuggaacuauc

SEQ ID NO: 1433489 - RNA, 19 nt, Homo sapiens
  misc_RNA (1)...(19): siRNA sense strand
caacaggggucaaugagua

SEQ ID NO: 1433490 - RNA, 19 nt, Homo sapiens
  misc_RNA (1)...(19): siRNA sense strand
uacaagaacucuggaacua

SEQ ID NO: 1433491 - RNA, 19 nt, Homo sapiens
  misc_RNA (1)...(19): siRNA sense strand
gcugagggaugaugacuuc

SEQ ID NO: 1433492 - RNA, 19 nt, Homo sapiens
  misc_RNA (1)...(19): siRNA sense strand
gcaugaauuugccuugaau

SEQ ID NO: 1433493 - RNA, 19 nt, Homo sapiens
  misc_RNA (1)...(19): siRNA sense strand
gagggaugaugacuuccua

SEQ ID NO: 1433494 - RNA, 19 nt, Homo sapiens
  misc_RNA (1)...(19): siRNA sense strand
ggacaucggcuccaagucu

SEQ ID NO: 1433495 - RNA, 19 nt, Homo sapiens
  misc_RNA (1)...(19): siRNA sense strand
cgccagagcugagggauga

SEQ ID NO: 1433496 - RNA, 19 nt, Homo sapiens
  misc_RNA (1)...(19): siRNA sense strand
ggaacuauccgugucaaga

SEQ ID NO: 1433497 - RNA, 19 nt, Homo sapiens
  misc_RNA (1)...(19): siRNA sense strand
gaacuauccgugucaagau

SEQ ID NO: 1433498 - RNA, 19 nt, Homo sapiens
  misc_RNA (1)...(19): siRNA sense strand
caagauuugucggguagaa

SEQ ID NO: 1433499 - RNA, 19 nt, Homo sapiens
  misc_RNA (1)...(19): siRNA sense strand
gcagcgugguucaggacua

SEQ ID NO: 1433500 - RNA, 19 nt, Homo sapiens
  misc_RNA (1)...(19): siRNA sense strand
gcuguucccugcauuugga

SEQ ID NO: 1433501 - RNA, 19 nt, Homo sapiens
  misc_RNA (1)...(19): siRNA sense strand
agaaacagaguacuccuuu

SEQ ID NO: 1433502 - RNA, 19 nt, Homo sapiens
  misc_RNA (1)...(19): siRNA sense strand
gguagaggccagaaaccua

SEQ ID NO: 1433503 - RNA, 19 nt, Homo sapiens
  misc_RNA (1)...(19): siRNA sense strand
gugcaaugcuccgauuaug

SEQ ID NO: 1433504 - RNA, 19 nt, Homo sapiens
  misc_RNA (1)...(19): siRNA sense strand
uggcaggucucgcaugaau

SEQ ID NO: 1433505 - RNA, 19 nt, Homo sapiens
  misc_RNA (1)...(19): siRNA sense strand
ggacaaucguguaguaacc

SEQ ID NO: 1433506 - RNA, 19 nt, Homo sapiens
  misc_RNA (1)...(19): siRNA sense strand
cuauggcccuaccaacuuu

SEQ ID NO: 1433507 - RNA, 19 nt, Homo sapiens
  misc_RNA (1)...(19): siRNA sense strand
gaaugcauccacccugaga

SEQ ID NO: 1433508 - RNA, 19 nt, Homo sapiens
  misc_RNA (1)...(19): siRNA sense strand
gccagaaaccuagauaaga

SEQ ID NO: 1433509 - RNA, 19 nt, Homo sapiens
  misc_RNA (1)...(19): siRNA sense strand
gcuacgcuuuggaaucuau

SEQ ID NO: 1433510 - RNA, 19 nt, Homo sapiens
  misc_RNA (1)...(19): siRNA sense strand
gugaccaucucauugacaa

SEQ ID NO: 1433511 - RNA, 19 nt, Homo sapiens
  misc_RNA (1)...(19): siRNA sense strand
gaugggaggcugucagauc

SEQ ID NO: 1433512 - RNA, 19 nt, Homo sapiens
  misc_RNA (1)...(19): siRNA sense strand
gacaagcuguucccugcau

SEQ ID NO: 1433513 - RNA, 19 nt, Homo sapiens
  misc_RNA (1)...(19): siRNA sense strand
ggacugccucgcaauacuu

SEQ ID NO: 1433514 - RNA, 19 nt, Homo sapiens
  misc_RNA (1)...(19): siRNA sense strand
gacccacucugcguccuuu

SEQ ID NO: 1433515 - RNA, 19 nt, Homo sapiens
  misc_RNA (1)...(19): siRNA sense strand
caacuuugcacccaucauc

SEQ ID NO: 1433516 - RNA, 19 nt, Homo sapiens
  misc_RNA (1)...(19): siRNA sense strand
ccaugucagugaucauugu

SEQ ID NO: 1433517 - RNA, 19 nt, Homo sapiens
  misc_RNA (1)...(19): siRNA sense strand
gagcuuggccggacugaac

SEQ ID NO: 1433518 - RNA, 19 nt, Homo sapiens
  misc_RNA (1)...(19): siRNA sense strand
ccucgaaccugcccauguc

SEQ ID NO: 1433519 - RNA, 19 nt, Homo sapiens
  misc_RNA (1)...(19): siRNA sense strand
ggaauuaaaggacaaucgu

SEQ ID NO: 1433520 - RNA, 19 nt, Homo sapiens
  misc_RNA (1)...(19): siRNA sense strand
caggugcaaugcuccgauu

SEQ ID NO: 1433521 - RNA, 19 nt, Homo sapiens
  misc_RNA (1)...(19): siRNA sense strand
ucgcagaagugcccacaca

SEQ ID NO: 1433522 - RNA, 19 nt, Homo sapiens
  misc_RNA (1)...(19): siRNA sense strand
ucucagcucaggaauuaaa

SEQ ID NO: 1433523 - RNA, 19 nt, Homo sapiens
  misc_RNA (1)...(19): siRNA sense strand
aaacagaguacuccuuucu

SEQ ID NO: 1433524 - RNA, 19 nt, Homo sapiens
  misc_RNA (1)...(19): siRNA sense strand
cagcuugaguaccgcuuug

SEQ ID NO: 1433525 - RNA, 19 nt, Homo sapiens
  misc_RNA (1)...(19): siRNA sense strand
cacaacuggucucauacuu

SEQ ID NO: 1433526 - RNA, 19 nt, Homo sapiens
  misc_RNA (1)...(19): siRNA sense strand
cgcaauacuucaugcuguu

SEQ ID NO: 1433527 - RNA, 19 nt, Homo sapiens
  misc_RNA (1)...(19): siRNA sense strand
guacuccuuucuggacuau

SEQ ID NO: 1433528 - RNA, 19 nt, Homo sapiens
  misc_RNA (1)...(19): siRNA sense strand
gauuguguccagccaggua

SEQ ID NO: 1433529 - RNA, 19 nt, Homo sapiens
  misc_RNA (1)...(19): siRNA sense strand
ggagguagaggccagaaac

SEQ ID NO: 1433530 - RNA, 19 nt, Homo sapiens
  misc_RNA (1)...(19): siRNA sense strand
cgcaugaauuugccuugaa

SEQ ID NO: 1433531 - RNA, 19 nt, Homo sapiens
  misc_RNA (1)...(19): siRNA sense strand
ugguucagcuguccauuuc

SEQ ID NO: 1433532 - RNA, 19 nt, Homo sapiens
  misc_RNA (1)...(19): siRNA sense strand
cagcgugguucaggacuau

SEQ ID NO: 1433533 - RNA, 19 nt, Homo sapiens
  misc_RNA (1)...(19): siRNA sense strand
gaggccagaaaccuagaua

SEQ ID NO: 1433534 - RNA, 19 nt, Homo sapiens
  misc_RNA (1)...(19): siRNA sense strand
caagcuguucccugcauuu

SEQ ID NO: 1433535 - RNA, 19 nt, Homo sapiens
  misc_RNA (1)...(19): siRNA sense strand
ggucaaugaguaccugaug

SEQ ID NO: 1433536 - RNA, 19 nt, Homo sapiens
  misc_RNA (1)...(19): siRNA sense strand
cggcugaguuugaaugcau

SEQ ID NO: 1433537 - RNA, 19 nt, Homo sapiens
  misc_RNA (1)...(19): siRNA sense strand
ggcagucccggcugaguuu

SEQ ID NO: 1433538 - RNA, 19 nt, Homo sapiens
  misc_RNA (1)...(19): siRNA sense strand
cauggaagcguuucucagu

SEQ ID NO: 1433539 - RNA, 19 nt, Homo sapiens
  misc_RNA (1)...(19): siRNA sense strand
ggccagaaaccuagauaag

SEQ ID NO: 1433540 - RNA, 19 nt, Homo sapiens
  misc_RNA (1)...(19): siRNA sense strand
gcccugaguucuccaagac

SEQ ID NO: 1433541 - RNA, 19 nt, Homo sapiens
  misc_RNA (1)...(19): siRNA sense strand
uguggguggugcugacuuu

SEQ ID NO: 1433542 - RNA, 19 nt, Homo sapiens
  misc_RNA (1)...(19): siRNA sense strand
acaaggacaucggcuccaa

SEQ ID NO: 1433543 - RNA, 19 nt, Homo sapiens
  misc_RNA (1)...(19): siRNA sense strand
ccugugaccaucucauuga

SEQ ID NO: 1433544 - RNA, 19 nt, Homo sapiens
  misc_RNA (1)...(19): siRNA sense strand
ccgccagggugaugggaaa

SEQ ID NO: 1433545 - RNA, 19 nt, Homo sapiens
  misc_RNA (1)...(19): siRNA sense strand
gcagaagugcccacacaac

SEQ ID NO: 1433546 - RNA, 19 nt, Homo sapiens
  misc_RNA (1)...(19): siRNA sense strand
gcaauacuucaugcuguug

SEQ ID NO: 1433547 - RNA, 19 nt, Homo sapiens
  misc_RNA (1)...(19): siRNA sense strand
gcaggcauccagggcauug

SEQ ID NO: 1433548 - RNA, 19 nt, Homo sapiens
  misc_RNA (1)...(19): siRNA sense strand
ucgcaugaauuugccuuga

SEQ ID NO: 1433549 - RNA, 19 nt, Homo sapiens
  misc_RNA (1)...(19): siRNA sense strand
cuccaagacucuacagcuu

SEQ ID NO: 1433550 - RNA, 19 nt, Homo sapiens
  misc_RNA (1)...(19): siRNA sense strand
ggugcaaugcuccgauuau

SEQ ID NO: 1433551 - RNA, 19 nt, Homo sapiens
  misc_RNA (1)...(19): siRNA sense strand
gggacugccucgcaauacu

SEQ ID NO: 1433552 - RNA, 19 nt, Homo sapiens
  misc_RNA (1)...(19): siRNA sense strand
acuggcaggucucgcauga

SEQ ID NO: 1433553 - RNA, 19 nt, Homo sapiens
  misc_RNA (1)...(19): siRNA sense strand
ucaccugacucccuacacu

SEQ ID NO: 1433554 - RNA, 19 nt, Homo sapiens
  misc_RNA (1)...(19): siRNA sense strand
gcgacauugugcaguuugu

SEQ ID NO: 1433555 - RNA, 19 nt, Homo sapiens
  misc_RNA (1)...(19): siRNA sense strand
uaguaaccauggagguaga

SEQ ID NO: 1433556 - RNA, 19 nt, Homo sapiens
  misc_RNA (1)...(19): siRNA sense strand
gcccaugucagugaucauu

SEQ ID NO: 1433557 - RNA, 19 nt, Homo sapiens
  misc_RNA (1)...(19): siRNA sense strand
gaacaaccugaacccuaca

SEQ ID NO: 1433558 - RNA, 19 nt, Homo sapiens
  misc_RNA (1)...(19): siRNA sense strand
gaaaccuagauaagaagga

SEQ ID NO: 1433559 - RNA, 19 nt, Homo sapiens
  misc_RNA (1)...(19): siRNA sense strand
gcuuugagacaguccagaa

SEQ ID NO: 1433560 - RNA, 19 nt, Homo sapiens
  misc_RNA (1)...(19): siRNA sense strand
aacuauccgugucaagauu

SEQ ID NO: 1433561 - RNA, 19 nt, Homo sapiens
  misc_RNA (1)...(19): siRNA sense strand
agaccgugcucgcagaagu

SEQ ID NO: 1433562 - RNA, 19 nt, Homo sapiens
  misc_RNA (1)...(19): siRNA sense strand
ccgcgacauugugcaguuu

SEQ ID NO: 1433563 - RNA, 19 nt, Homo sapiens
  misc_RNA (1)...(19): siRNA sense strand
gaggcugucagaucaacuu

SEQ ID NO: 1433564 - RNA, 19 nt, Homo sapiens
  misc_RNA (1)...(19): siRNA sense strand
gcuuuggaaucuaugacau

SEQ ID NO: 1433565 - RNA, 19 nt, Homo sapiens
  misc_RNA (1)...(19): siRNA sense strand
cgacauugugcaguuugua

SEQ ID NO: 1433566 - RNA, 19 nt, Homo sapiens
  misc_RNA (1)...(19): siRNA sense strand
uguaguaaccauggaggua

SEQ ID NO: 1433567 - RNA, 19 nt, Homo sapiens
  misc_RNA (1)...(19): siRNA sense strand
gcugucagaucaacuucac

SEQ ID NO: 1433568 - RNA, 19 nt, Homo sapiens
  misc_RNA (1)...(19): siRNA sense strand
uuaaaggacaaucguguag

SEQ ID NO: 1433569 - RNA, 19 nt, Homo sapiens
  misc_RNA (1)...(19): siRNA sense strand
ucuauggcccuaccaacuu

SEQ ID NO: 1433570 - RNA, 19 nt, Homo sapiens
  misc_RNA (1)...(19): siRNA sense strand
augggaggcugucagauca

SEQ ID NO: 1433571 - RNA, 19 nt, Homo sapiens
  misc_RNA (1)...(19): siRNA sense strand
ccagggugaugggaaaugg

SEQ ID NO: 1433572 - RNA, 19 nt, Homo sapiens
  misc_RNA (1)...(19): siRNA sense strand
cagcucaggaauuaaagga

SEQ ID NO: 1433573 - RNA, 19 nt, Homo sapiens
  misc_RNA (1)...(19): siRNA sense strand
cagaagugcccacacaacu

SEQ ID NO: 1433574 - RNA, 19 nt, Homo sapiens
  misc_RNA (1)...(19): siRNA sense strand
acaagcuguucccugcauu

SEQ ID NO: 1433575 - RNA, 19 nt, Homo sapiens
  misc_RNA (1)...(19): siRNA sense strand
aagaaaagcuacaagaacu

SEQ ID NO: 1433576 - RNA, 19 nt, Homo sapiens
  misc_RNA (1)...(19): siRNA sense strand
gcauccacccugagaagca

SEQ ID NO: 1433577 - RNA, 19 nt, Homo sapiens
  misc_RNA (1)...(19): siRNA sense strand
acuccuuucuggacuaugu

SEQ ID NO: 1433578 - RNA, 19 nt, Homo sapiens
  misc_RNA (1)...(19): siRNA sense strand
ggguggugcugacuuugag

SEQ ID NO: 1433579 - RNA, 19 nt, Homo sapiens
  misc_RNA (1)...(19): siRNA sense strand
ccacacaacuggucucaua

SEQ ID NO: 1433580 - RNA, 19 nt, Homo sapiens
  misc_RNA (1)...(19): siRNA sense strand
gaucugaggucaucaagaa

SEQ ID NO: 1433581 - RNA, 19 nt, Homo sapiens
  misc_RNA (1)...(19): siRNA sense strand
ggucucagcucaggaauua

SEQ ID NO: 1433582 - RNA, 19 nt, Homo sapiens
  misc_RNA (1)...(19): siRNA sense strand
ccagaaaccuagauaagaa

SEQ ID NO: 1433583 - RNA, 19 nt, Homo sapiens
  misc_RNA (1)...(19): siRNA sense strand
caacuggucucauacuuca

SEQ ID NO: 1433584 - RNA, 19 nt, Homo sapiens
  misc_RNA (1)...(19): siRNA sense strand
ggacuucacuggcuccaau

SEQ ID NO: 1433585 - RNA, 19 nt, Homo sapiens
  misc_RNA (1)...(19): siRNA sense strand
guacagaucugaggucauc

SEQ ID NO: 1433586 - RNA, 19 nt, Homo sapiens
  misc_RNA (1)...(19): siRNA sense strand
aaaggacaaucguguagua

SEQ ID NO: 1433587 - RNA, 19 nt, Homo sapiens
  misc_RNA (1)...(19): siRNA sense strand
gcaggucucgcaugaauuu

SEQ ID NO: 1433588 - RNA, 19 nt, Homo sapiens
  misc_RNA (1)...(19): siRNA sense strand
caagaacucuggaacuauc

SEQ ID NO: 1433589 - RNA, 19 nt, Homo sapiens
  misc_RNA (1)...(19): siRNA sense strand
caacaggggucaaugagua

SEQ ID NO: 1433590 - RNA, 19 nt, Homo sapiens
  misc_RNA (1)...(19): siRNA sense strand
uacaagaacucuggaacua

SEQ ID NO: 1433591 - RNA, 19 nt, Homo sapiens
  misc_RNA (1)...(19): siRNA sense strand
gcugagggaugaugacuuc

SEQ ID NO: 1433592 - RNA, 19 nt, Homo sapiens
  misc_RNA (1)...(19): siRNA sense strand
gcaugaauuugccuugaau

SEQ ID NO: 1433593 - RNA, 19 nt, Homo sapiens
  misc_RNA (1)...(19): siRNA sense strand
gagggaugaugacuuccua

SEQ ID NO: 1433594 - RNA, 19 nt, Homo sapiens
  misc_RNA (1)...(19): siRNA sense strand
ggacaucggcuccaagucu

SEQ ID NO: 1433595 - RNA, 19 nt, Homo sapiens
  misc_RNA (1)...(19): siRNA sense strand
cgccagagcugagggauga

SEQ ID NO: 1433596 - RNA, 19 nt, Homo sapiens
  misc_RNA (1)...(19): siRNA sense strand
ggaacuauccgugucaaga

SEQ ID NO: 1433597 - RNA, 19 nt, Homo sapiens
  misc_RNA (1)...(19): siRNA sense strand
gaacuauccgugucaagau

SEQ ID NO: 1433598 - RNA, 19 nt, Homo sapiens
  misc_RNA (1)...(19): siRNA sense strand
caagauuugucggguagaa

SEQ ID NO: 1433599 - RNA, 19 nt, Homo sapiens
  misc_RNA (1)...(19): siRNA sense strand
gcagcgugguucaggacua

SEQ ID NO: 1433600 - RNA, 19 nt, Homo sapiens
  misc_RNA (1)...(19): siRNA sense strand
gcuguucccugcauuugga

SEQ ID NO: 1433601 - RNA, 19 nt, Homo sapiens
  misc_RNA (1)...(19): siRNA sense strand
agaaacagaguacuccuuu

SEQ ID NO: 1433602 - RNA, 19 nt, Homo sapiens
  misc_RNA (1)...(19): siRNA sense strand
gguagaggccagaaaccua

SEQ ID NO: 1433603 - RNA, 19 nt, Homo sapiens
  misc_RNA (1)...(19): siRNA sense strand
gugcaaugcuccgauuaug

SEQ ID NO: 1433604 - RNA, 19 nt, Homo sapiens
  misc_RNA (1)...(19): siRNA sense strand
uggcaggucucgcaugaau

SEQ ID NO: 1433605 - RNA, 19 nt, Homo sapiens
  misc_RNA (1)...(19): siRNA sense strand
ggacaaucguguaguaacc

SEQ ID NO: 1433606 - RNA, 19 nt, Homo sapiens
  misc_RNA (1)...(19): siRNA sense strand
cuauggcccuaccaacuuu

SEQ ID NO: 1433607 - RNA, 19 nt, Homo sapiens
  misc_RNA (1)...(19): siRNA sense strand
gaaugcauccacccugaga

SEQ ID NO: 1433608 - RNA, 19 nt, Homo sapiens
  misc_RNA (1)...(19): siRNA sense strand
gccagaaaccuagauaaga

SEQ ID NO: 1433609 - RNA, 19 nt, Homo sapiens
  misc_RNA (1)...(19): siRNA sense strand
gcuacgcuuuggaaucuau

SEQ ID NO: 1433610 - RNA, 19 nt, Homo sapiens
  misc_RNA (1)...(19): siRNA sense strand
gugaccaucucauugacaa

SEQ ID NO: 1433611 - RNA, 19 nt, Homo sapiens
  misc_RNA (1)...(19): siRNA sense strand
gaugggaggcugucagauc

SEQ ID NO: 1433612 - RNA, 19 nt, Homo sapiens
  misc_RNA (1)...(19): siRNA sense strand
gacaagcuguucccugcau

SEQ ID NO: 1433613 - RNA, 19 nt, Homo sapiens
  misc_RNA (1)...(19): siRNA sense strand
ggacugccucgcaauacuu

SEQ ID NO: 1433614 - RNA, 19 nt, Homo sapiens
  misc_RNA (1)...(19): siRNA sense strand
gacccacucugcguccuuu

SEQ ID NO: 1433615 - RNA, 19 nt, Homo sapiens
  misc_RNA (1)...(19): siRNA sense strand
caacuuugcacccaucauc

SEQ ID NO: 1433616 - RNA, 19 nt, Homo sapiens
  misc_RNA (1)...(19): siRNA sense strand
ccaugucagugaucauugu

SEQ ID NO: 1433617 - RNA, 19 nt, Homo sapiens
  misc_RNA (1)...(19): siRNA sense strand
gagcuuggccggacugaac

SEQ ID NO: 1433618 - RNA, 19 nt, Homo sapiens
  misc_RNA (1)...(19): siRNA sense strand
ccucgaaccugcccauguc

SEQ ID NO: 1433619 - RNA, 19 nt, Homo sapiens
  misc_RNA (1)...(19): siRNA sense strand
ggaauuaaaggacaaucgu

SEQ ID NO: 1433620 - RNA, 19 nt, Homo sapiens
  misc_RNA (1)...(19): siRNA sense strand
caggugcaaugcuccgauu

SEQ ID NO: 1433621 - RNA, 19 nt, Homo sapiens
  misc_RNA (1)...(19): siRNA sense strand
ucgcagaagugcccacaca

SEQ ID NO: 1433622 - RNA, 19 nt, Homo sapiens
  misc_RNA (1)...(19): siRNA sense strand
ucucagcucaggaauuaaa

SEQ ID NO: 1433623 - RNA, 19 nt, Homo sapiens
  misc_RNA (1)...(19): siRNA sense strand
aaacagaguacuccuuucu

SEQ ID NO: 1433624 - RNA, 19 nt, Homo sapiens
  misc_RNA (1)...(19): siRNA sense strand
cagcuugaguaccgcuuug

SEQ ID NO: 1433625 - RNA, 19 nt, Homo sapiens
  misc_RNA (1)...(19): siRNA sense strand
cacaacuggucucauacuu

SEQ ID NO: 1433626 - RNA, 19 nt, Homo sapiens
  misc_RNA (1)...(19): siRNA sense strand
cgcaauacuucaugcuguu

SEQ ID NO: 1433627 - RNA, 19 nt, Homo sapiens
  misc_RNA (1)...(19): siRNA sense strand
guacuccuuucuggacuau

SEQ ID NO: 1433628 - RNA, 19 nt, Homo sapiens
  misc_RNA (1)...(19): siRNA sense strand
gauuguguccagccaggua

SEQ ID NO: 1433629 - RNA, 19 nt, Homo sapiens
  misc_RNA (1)...(19): siRNA sense strand
ggagguagaggccagaaac

SEQ ID NO: 1433630 - RNA, 19 nt, Homo sapiens
  misc_RNA (1)...(19): siRNA sense strand
cgcaugaauuugccuugaa

SEQ ID NO: 1433631 - RNA, 19 nt, Homo sapiens
  misc_RNA (1)...(19): siRNA sense strand
ugguucagcuguccauuuc

SEQ ID NO: 1433632 - RNA, 19 nt, Homo sapiens
  misc_RNA (1)...(19): siRNA sense strand
cagcgugguucaggacuau

SEQ ID NO: 1433633 - RNA, 19 nt, Homo sapiens
  misc_RNA (1)...(19): siRNA sense strand
gaggccagaaaccuagaua

SEQ ID NO: 1433634 - RNA, 19 nt, Homo sapiens
  misc_RNA (1)...(19): siRNA sense strand
caagcuguucccugcauuu

SEQ ID NO: 1433635 - RNA, 19 nt, Homo sapiens
  misc_RNA (1)...(19): siRNA sense strand
ggucaaugaguaccugaug

SEQ ID NO: 1433636 - RNA, 19 nt, Homo sapiens
  misc_RNA (1)...(19): siRNA sense strand
cggcugaguuugaaugcau

SEQ ID NO: 1433637 - RNA, 19 nt, Homo sapiens
  misc_RNA (1)...(19): siRNA sense strand
ggcagucccggcugaguuu

SEQ ID NO: 1433638 - RNA, 19 nt, Homo sapiens
  misc_RNA (1)...(19): siRNA sense strand
cauggaagcguuucucagu

SEQ ID NO: 1433639 - RNA, 19 nt, Homo sapiens
  misc_RNA (1)...(19): siRNA sense strand
ggccagaaaccuagauaag

SEQ ID NO: 1433640 - RNA, 19 nt, Homo sapiens
  misc_RNA (1)...(19): siRNA sense strand
gcccugaguucuccaagac

SEQ ID NO: 1433641 - RNA, 19 nt, Homo sapiens
  misc_RNA (1)...(19): siRNA sense strand
uguggguggugcugacuuu

SEQ ID NO: 1433642 - RNA, 19 nt, Homo sapiens
  misc_RNA (1)...(19): siRNA sense strand
acaaggacaucggcuccaa

SEQ ID NO: 1433643 - RNA, 19 nt, Homo sapiens
  misc_RNA (1)...(19): siRNA sense strand
ccugugaccaucucauuga

SEQ ID NO: 1433644 - RNA, 19 nt, Homo sapiens
  misc_RNA (1)...(19): siRNA sense strand
ccgccagggugaugggaaa

SEQ ID NO: 1433645 - RNA, 19 nt, Homo sapiens
  misc_RNA (1)...(19): siRNA sense strand
gcagaagugcccacacaac

SEQ ID NO: 1433646 - RNA, 19 nt, Homo sapiens
  misc_RNA (1)...(19): siRNA sense strand
gcaauacuucaugcuguug

SEQ ID NO: 1433647 - RNA, 19 nt, Homo sapiens
  misc_RNA (1)...(19): siRNA sense strand
gcaggcauccagggcauug

SEQ ID NO: 1433648 - RNA, 19 nt, Homo sapiens
  misc_RNA (1)...(19): siRNA sense strand
ucgcaugaauuugccuuga

SEQ ID NO: 1433649 - RNA, 19 nt, Homo sapiens
  misc_RNA (1)...(19): siRNA sense strand
cuccaagacucuacagcuu

SEQ ID NO: 1433650 - RNA, 19 nt, Homo sapiens
  misc_RNA (1)...(19): siRNA sense strand
ggugcaaugcuccgauuau

SEQ ID NO: 1433651 - RNA, 19 nt, Homo sapiens
  misc_RNA (1)...(19): siRNA sense strand
gggacugccucgcaauacu

SEQ ID NO: 1433652 - RNA, 19 nt, Homo sapiens
  misc_RNA (1)...(19): siRNA sense strand
acuggcaggucucgcauga

SEQ ID NO: 1433653 - RNA, 19 nt, Homo sapiens
  misc_RNA (1)...(19): siRNA sense strand
ucaccugacucccuacacu

SEQ ID NO: 1433654 - RNA, 19 nt, Homo sapiens
  misc_RNA (1)...(19): siRNA sense strand
gcgacauugugcaguuugu

SEQ ID NO: 1433655 - RNA, 19 nt, Homo sapiens
  misc_RNA (1)...(19): siRNA sense strand
uaguaaccauggagguaga

SEQ ID NO: 1433656 - RNA, 19 nt, Homo sapiens
  misc_RNA (1)...(19): siRNA sense strand
gcccaugucagugaucauu

SEQ ID NO: 1433657 - RNA, 19 nt, Homo sapiens
  misc_RNA (1)...(19): siRNA sense strand
gaacaaccugaacccuaca

SEQ ID NO: 1433658 - RNA, 19 nt, Homo sapiens
  misc_RNA (1)...(19): siRNA sense strand
gaaaccuagauaagaagga

SEQ ID NO: 1433659 - RNA, 19 nt, Homo sapiens
  misc_RNA (1)...(19): siRNA sense strand
gcuuugagacaguccagaa

SEQ ID NO: 1433660 - RNA, 19 nt, Homo sapiens
  misc_RNA (1)...(19): siRNA sense strand
aacuauccgugucaagauu

SEQ ID NO: 1433661 - RNA, 19 nt, Homo sapiens
  misc_RNA (1)...(19): siRNA sense strand
agaccgugcucgcagaagu

SEQ ID NO: 1433662 - RNA, 19 nt, Homo sapiens
  misc_RNA (1)...(19): siRNA sense strand
ccgcgacauugugcaguuu

SEQ ID NO: 1433663 - RNA, 19 nt, Homo sapiens
  misc_RNA (1)...(19): siRNA sense strand
gaggcugucagaucaacuu

SEQ ID NO: 1433664 - RNA, 19 nt, Homo sapiens
  misc_RNA (1)...(19): siRNA sense strand
gcuuuggaaucuaugacau

SEQ ID NO: 1433665 - RNA, 19 nt, Homo sapiens
  misc_RNA (1)...(19): siRNA sense strand
cgacauugugcaguuugua

SEQ ID NO: 1433666 - RNA, 19 nt, Homo sapiens
  misc_RNA (1)...(19): siRNA sense strand
uguaguaaccauggaggua

SEQ ID NO: 1433667 - RNA, 19 nt, Homo sapiens
  misc_RNA (1)...(19): siRNA sense strand
gcugucagaucaacuucac

SEQ ID NO: 1433668 - RNA, 19 nt, Homo sapiens
  misc_RNA (1)...(19): siRNA sense strand
uuaaaggacaaucguguag

SEQ ID NO: 1433669 - RNA, 19 nt, Homo sapiens
  misc_RNA (1)...(19): siRNA sense strand
ucuauggcccuaccaacuu

SEQ ID NO: 1433670 - RNA, 19 nt, Homo sapiens
  misc_RNA (1)...(19): siRNA sense strand
augggaggcugucagauca

SEQ ID NO: 1433671 - RNA, 19 nt, Homo sapiens
  misc_RNA (1)...(19): siRNA sense strand
ccagggugaugggaaaugg

SEQ ID NO: 1433672 - RNA, 19 nt, Homo sapiens
  misc_RNA (1)...(19): siRNA sense strand
cagcucaggaauuaaagga

SEQ ID NO: 1433673 - RNA, 19 nt, Homo sapiens
  misc_RNA (1)...(19): siRNA sense strand
cagaagugcccacacaacu

SEQ ID NO: 1433674 - RNA, 19 nt, Homo sapiens
  misc_RNA (1)...(19): siRNA sense strand
acaagcuguucccugcauu

SEQ ID NO: 1433675 - RNA, 19 nt, Homo sapiens
  misc_RNA (1)...(19): siRNA sense strand
aagaaaagcuacaagaacu

SEQ ID NO: 1433676 - RNA, 19 nt, Homo sapiens
  misc_RNA (1)...(19): siRNA sense strand
gcauccacccugagaagca

SEQ ID NO: 1433677 - RNA, 19 nt, Homo sapiens
  misc_RNA (1)...(19): siRNA sense strand
acuccuuucuggacuaugu

SEQ ID NO: 1433678 - RNA, 19 nt, Homo sapiens
  misc_RNA (1)...(19): siRNA sense strand
ggguggugcugacuuugag

SEQ ID NO: 1433679 - RNA, 19 nt, Homo sapiens
  misc_RNA (1)...(19): siRNA sense strand
ccacacaacuggucucaua

SEQ ID NO: 1433680 - RNA, 19 nt, Homo sapiens
  misc_RNA (1)...(19): siRNA sense strand
gaucugaggucaucaagaa

SEQ ID NO: 1433681 - RNA, 19 nt, Homo sapiens
  misc_RNA (1)...(19): siRNA sense strand
ggucucagcucaggaauua

SEQ ID NO: 1433682 - RNA, 19 nt, Homo sapiens
  misc_RNA (1)...(19): siRNA sense strand
ccagaaaccuagauaagaa

SEQ ID NO: 1433683 - RNA, 19 nt, Homo sapiens
  misc_RNA (1)...(19): siRNA sense strand
caacuggucucauacuuca

SEQ ID NO: 1433684 - RNA, 19 nt, Homo sapiens
  misc_RNA (1)...(19): siRNA sense strand
ggacuucacuggcuccaau

SEQ ID NO: 1433685 - RNA, 19 nt, Homo sapiens
  misc_RNA (1)...(19): siRNA sense strand
guacagaucugaggucauc

SEQ ID NO: 1433686 - RNA, 19 nt, Homo sapiens
  misc_RNA (1)...(19): siRNA sense strand
aaaggacaaucguguagua

SEQ ID NO: 1433687 - RNA, 19 nt, Homo sapiens
  misc_RNA (1)...(19): siRNA sense strand
gcaggucucgcaugaauuu

SEQ ID NO: 1433688 - RNA, 19 nt, Homo sapiens
  misc_RNA (1)...(19): siRNA sense strand
caagaacucuggaacuauc

SEQ ID NO: 1433689 - RNA, 19 nt, Homo sapiens
  misc_RNA (1)...(19): siRNA sense strand
caacaggggucaaugagua

SEQ ID NO: 1433690 - RNA, 19 nt, Homo sapiens
  misc_RNA (1)...(19): siRNA sense strand
uacaagaacucuggaacua

SEQ ID NO: 1433691 - RNA, 19 nt, Homo sapiens
  misc_RNA (1)...(19): siRNA sense strand
gcugagggaugaugacuuc

SEQ ID NO: 1433692 - RNA, 19 nt, Homo sapiens
  misc_RNA (1)...(19): siRNA sense strand
gcaugaauuugccuugaau

SEQ ID NO: 1433693 - RNA, 19 nt, Homo sapiens
  misc_RNA (1)...(19): siRNA sense strand
gagggaugaugacuuccua

SEQ ID NO: 1433694 - RNA, 19 nt, Homo sapiens
  misc_RNA (1)...(19): siRNA sense strand
ggacaucggcuccaagucu

SEQ ID NO: 1433695 - RNA, 19 nt, Homo sapiens
  misc_RNA (1)...(19): siRNA sense strand
cgccagagcugagggauga

SEQ ID NO: 1433696 - RNA, 19 nt, Homo sapiens
  misc_RNA (1)...(19): siRNA sense strand
ggaacuauccgugucaaga

SEQ ID NO: 1433697 - RNA, 19 nt, Homo sapiens
  misc_RNA (1)...(19): siRNA sense strand
gaacuauccgugucaagau

SEQ ID NO: 1433698 - RNA, 19 nt, Homo sapiens
  misc_RNA (1)...(19): siRNA sense strand
caagauuugucggguagaa

SEQ ID NO: 1433699 - RNA, 19 nt, Homo sapiens
  misc_RNA (1)...(19): siRNA sense strand
gcagcgugguucaggacua

SEQ ID NO: 1433700 - RNA, 19 nt, Homo sapiens
  misc_RNA (1)...(19): siRNA sense strand
gcuguucccugcauuugga

SEQ ID NO: 1433701 - RNA, 19 nt, Homo sapiens
  misc_RNA (1)...(19): siRNA sense strand
agaaacagaguacuccuuu

SEQ ID NO: 1433702 - RNA, 19 nt, Homo sapiens
  misc_RNA (1)...(19): siRNA sense strand
gguagaggccagaaaccua

SEQ ID NO: 1433703 - RNA, 19 nt, Homo sapiens
  misc_RNA (1)...(19): siRNA sense strand
gugcaaugcuccgauuaug

SEQ ID NO: 1433704 - RNA, 19 nt, Homo sapiens
  misc_RNA (1)...(19): siRNA sense strand
uggcaggucucgcaugaau

SEQ ID NO: 1433705 - RNA, 19 nt, Homo sapiens
  misc_RNA (1)...(19): siRNA sense strand
ggacaaucguguaguaacc

SEQ ID NO: 1433706 - RNA, 19 nt, Homo sapiens
  misc_RNA (1)...(19): siRNA sense strand
cuauggcccuaccaacuuu

SEQ ID NO: 1433707 - RNA, 19 nt, Homo sapiens
  misc_RNA (1)...(19): siRNA sense strand
gaaugcauccacccugaga

SEQ ID NO: 1433708 - RNA, 19 nt, Homo sapiens
  misc_RNA (1)...(19): siRNA sense strand
gccagaaaccuagauaaga

SEQ ID NO: 1433709 - RNA, 19 nt, Homo sapiens
  misc_RNA (1)...(19): siRNA sense strand
gcuacgcuuuggaaucuau

SEQ ID NO: 1433710 - RNA, 19 nt, Homo sapiens
  misc_RNA (1)...(19): siRNA sense strand
gugaccaucucauugacaa

SEQ ID NO: 1433711 - RNA, 19 nt, Homo sapiens
  misc_RNA (1)...(19): siRNA sense strand
gaugggaggcugucagauc

SEQ ID NO: 1433712 - RNA, 19 nt, Homo sapiens
  misc_RNA (1)...(19): siRNA sense strand
gacaagcuguucccugcau

SEQ ID NO: 1433713 - RNA, 19 nt, Homo sapiens
  misc_RNA (1)...(19): siRNA sense strand
ggacugccucgcaauacuu

SEQ ID NO: 1433714 - RNA, 19 nt, Homo sapiens
  misc_RNA (1)...(19): siRNA sense strand
gacccacucugcguccuuu

SEQ ID NO: 1433715 - RNA, 19 nt, Homo sapiens
  misc_RNA (1)...(19): siRNA sense strand
caacuuugcacccaucauc

SEQ ID NO: 1433716 - RNA, 19 nt, Homo sapiens
  misc_RNA (1)...(19): siRNA sense strand
ccaugucagugaucauugu

SEQ ID NO: 1433717 - RNA, 19 nt, Homo sapiens
  misc_RNA (1)...(19): siRNA sense strand
gagcuuggccggacugaac

SEQ ID NO: 1433718 - RNA, 19 nt, Homo sapiens
  misc_RNA (1)...(19): siRNA sense strand
ccucgaaccugcccauguc

SEQ ID NO: 1433719 - RNA, 19 nt, Homo sapiens
  misc_RNA (1)...(19): siRNA sense strand
ggaauuaaaggacaaucgu

SEQ ID NO: 1433720 - RNA, 19 nt, Homo sapiens
  misc_RNA (1)...(19): siRNA sense strand
caggugcaaugcuccgauu

SEQ ID NO: 1433721 - RNA, 19 nt, Homo sapiens
  misc_RNA (1)...(19): siRNA sense strand
ucgcagaagugcccacaca

SEQ ID NO: 1433722 - RNA, 19 nt, Homo sapiens
  misc_RNA (1)...(19): siRNA sense strand
ucucagcucaggaauuaaa

SEQ ID NO: 1433723 - RNA, 19 nt, Homo sapiens
  misc_RNA (1)...(19): siRNA sense strand
aaacagaguacuccuuucu

SEQ ID NO: 1433724 - RNA, 19 nt, Homo sapiens
  misc_RNA (1)...(19): siRNA sense strand
cagcuugaguaccgcuuug

SEQ ID NO: 1433725 - RNA, 19 nt, Homo sapiens
  misc_RNA (1)...(19): siRNA sense strand
cacaacuggucucauacuu

SEQ ID NO: 1433726 - RNA, 19 nt, Homo sapiens
  misc_RNA (1)...(19): siRNA sense strand
cgcaauacuucaugcuguu

SEQ ID NO: 1433727 - RNA, 19 nt, Homo sapiens
  misc_RNA (1)...(19): siRNA sense strand
guacuccuuucuggacuau

SEQ ID NO: 1433728 - RNA, 19 nt, Homo sapiens
  misc_RNA (1)...(19): siRNA sense strand
gauuguguccagccaggua

SEQ ID NO: 1433729 - RNA, 19 nt, Homo sapiens
  misc_RNA (1)...(19): siRNA sense strand
ggagguagaggccagaaac

SEQ ID NO: 1433730 - RNA, 19 nt, Homo sapiens
  misc_RNA (1)...(19): siRNA sense strand
cgcaugaauuugccuugaa

SEQ ID NO: 1433731 - RNA, 19 nt, Homo sapiens
  misc_RNA (1)...(19): siRNA sense strand
ugguucagcuguccauuuc

SEQ ID NO: 1433732 - RNA, 19 nt, Homo sapiens
  misc_RNA (1)...(19): siRNA sense strand
cagcgugguucaggacuau

SEQ ID NO: 1433733 - RNA, 19 nt, Homo sapiens
  misc_RNA (1)...(19): siRNA sense strand
gaggccagaaaccuagaua

SEQ ID NO: 1433734 - RNA, 19 nt, Homo sapiens
  misc_RNA (1)...(19): siRNA sense strand
caagcuguucccugcauuu

SEQ ID NO: 1433735 - RNA, 19 nt, Homo sapiens
  misc_RNA (1)...(19): siRNA sense strand
ggucaaugaguaccugaug

SEQ ID NO: 1433736 - RNA, 19 nt, Homo sapiens
  misc_RNA (1)...(19): siRNA sense strand
cggcugaguuugaaugcau

SEQ ID NO: 1433737 - RNA, 19 nt, Homo sapiens
  misc_RNA (1)...(19): siRNA sense strand
ggcagucccggcugaguuu

SEQ ID NO: 1433738 - RNA, 19 nt, Homo sapiens
  misc_RNA (1)...(19): siRNA sense strand
cauggaagcguuucucagu

SEQ ID NO: 1433739 - RNA, 19 nt, Homo sapiens
  misc_RNA (1)...(19): siRNA sense strand
ggccagaaaccuagauaag

SEQ ID NO: 1433740 - RNA, 19 nt, Homo sapiens
  misc_RNA (1)...(19): siRNA sense strand
gcccugaguucuccaagac

SEQ ID NO: 1433741 - RNA, 19 nt, Homo sapiens
  misc_RNA (1)...(19): siRNA sense strand
uguggguggugcugacuuu

SEQ ID NO: 1433742 - RNA, 19 nt, Homo sapiens
  misc_RNA (1)...(19): siRNA sense strand
acaaggacaucggcuccaa

SEQ ID NO: 1433743 - RNA, 19 nt, Homo sapiens
  misc_RNA (1)...(19): siRNA sense strand
ccugugaccaucucauuga

SEQ ID NO: 1433744 - RNA, 19 nt, Homo sapiens
  misc_RNA (1)...(19): siRNA sense strand
ccgccagggugaugggaaa

SEQ ID NO: 1433745 - RNA, 19 nt, Homo sapiens
  misc_RNA (1)...(19): siRNA sense strand
gcagaagugcccacacaac

SEQ ID NO: 1433746 - RNA, 19 nt, Homo sapiens
  misc_RNA (1)...(19): siRNA sense strand
gcaauacuucaugcuguug

SEQ ID NO: 1433747 - RNA, 19 nt, Homo sapiens
  misc_RNA (1)...(19): siRNA sense strand
gcaggcauccagggcauug

SEQ ID NO: 1433748 - RNA, 19 nt, Homo sapiens
  misc_RNA (1)...(19): siRNA sense strand
ucgcaugaauuugccuuga

SEQ ID NO: 1433749 - RNA, 19 nt, Homo sapiens
  misc_RNA (1)...(19): siRNA sense strand
cuccaagacucuacagcuu

SEQ ID NO: 1433750 - RNA, 19 nt, Homo sapiens
  misc_RNA (1)...(19): siRNA sense strand
ggugcaaugcuccgauuau

SEQ ID NO: 1433751 - RNA, 19 nt, Homo sapiens
  misc_RNA (1)...(19): siRNA sense strand
gggacugccucgcaauacu

SEQ ID NO: 1433752 - RNA, 19 nt, Homo sapiens
  misc_RNA (1)...(19): siRNA sense strand
acuggcaggucucgcauga

SEQ ID NO: 1433753 - RNA, 19 nt, Homo sapiens
  misc_RNA (1)...(19): siRNA sense strand
ucaccugacucccuacacu

SEQ ID NO: 1433754 - RNA, 19 nt, Homo sapiens
  misc_RNA (1)...(19): siRNA sense strand
gcgacauugugcaguuugu

SEQ ID NO: 1433755 - RNA, 19 nt, Homo sapiens
  misc_RNA (1)...(19): siRNA sense strand
uaguaaccauggagguaga

SEQ ID NO: 1433756 - RNA, 19 nt, Homo sapiens
  misc_RNA (1)...(19): siRNA sense strand
gcccaugucagugaucauu

SEQ ID NO: 1433757 - RNA, 19 nt, Homo sapiens
  misc_RNA (1)...(19): siRNA sense strand
gaacaaccugaacccuaca

SEQ ID NO: 1433758 - RNA, 19 nt, Homo sapiens
  misc_RNA (1)...(19): siRNA sense strand
gaaaccuagauaagaagga

SEQ ID NO: 1433759 - RNA, 19 nt, Homo sapiens
  misc_RNA (1)...(19): siRNA sense strand
gcuuugagacaguccagaa

SEQ ID NO: 1433760 - RNA, 19 nt, Homo sapiens
  misc_RNA (1)...(19): siRNA sense strand
aacuauccgugucaagauu

SEQ ID NO: 1433761 - RNA, 19 nt, Homo sapiens
  misc_RNA (1)...(19): siRNA sense strand
agaccgugcucgcagaagu

SEQ ID NO: 1433762 - RNA, 19 nt, Homo sapiens
  misc_RNA (1)...(19): siRNA sense strand
ccgcgacauugugcaguuu

SEQ ID NO: 1433763 - RNA, 19 nt, Homo sapiens
  misc_RNA (1)...(19): siRNA sense strand
gaggcugucagaucaacuu

SEQ ID NO: 1433764 - RNA, 19 nt, Homo sapiens
  misc_RNA (1)...(19): siRNA sense strand
gcuuuggaaucuaugacau

SEQ ID NO: 1433765 - RNA, 19 nt, Homo sapiens
  misc_RNA (1)...(19): siRNA sense strand
cgacauugugcaguuugua

SEQ ID NO: 1433766 - RNA, 19 nt, Homo sapiens
  misc_RNA (1)...(19): siRNA sense strand
uguaguaaccauggaggua

SEQ ID NO: 1433767 - RNA, 19 nt, Homo sapiens
  misc_RNA (1)...(19): siRNA sense strand
gcugucagaucaacuucac

SEQ ID NO: 1433768 - RNA, 19 nt, Homo sapiens
  misc_RNA (1)...(19): siRNA sense strand
uuaaaggacaaucguguag

SEQ ID NO: 1433769 - RNA, 19 nt, Homo sapiens
  misc_RNA (1)...(19): siRNA sense strand
ucuauggcccuaccaacuu

SEQ ID NO: 1433770 - RNA, 19 nt, Homo sapiens
  misc_RNA (1)...(19): siRNA sense strand
augggaggcugucagauca

SEQ ID NO: 1433771 - RNA, 19 nt, Homo sapiens
  misc_RNA (1)...(19): siRNA sense strand
ccagggugaugggaaaugg

SEQ ID NO: 1433772 - RNA, 19 nt, Homo sapiens
  misc_RNA (1)...(19): siRNA sense strand
cagcucaggaauuaaagga

SEQ ID NO: 1433773 - RNA, 19 nt, Homo sapiens
  misc_RNA (1)...(19): siRNA sense strand
cagaagugcccacacaacu

SEQ ID NO: 1433774 - RNA, 19 nt, Homo sapiens
  misc_RNA (1)...(19): siRNA sense strand
acaagcuguucccugcauu

SEQ ID NO: 1433775 - RNA, 19 nt, Homo sapiens
  misc_RNA (1)...(19): siRNA sense strand
aagaaaagcuacaagaacu

SEQ ID NO: 1433776 - RNA, 19 nt, Homo sapiens
  misc_RNA (1)...(19): siRNA sense strand
gcauccacccugagaagca

SEQ ID NO: 1433777 - RNA, 19 nt, Homo sapiens
  misc_RNA (1)...(19): siRNA sense strand
acuccuuucuggacuaugu

SEQ ID NO: 1433778 - RNA, 19 nt, Homo sapiens
  misc_RNA (1)...(19): siRNA sense strand
ggguggugcugacuuugag

SEQ ID NO: 1433779 - RNA, 19 nt, Homo sapiens
  misc_RNA (1)...(19): siRNA sense strand
ccacacaacuggucucaua

SEQ ID NO: 1433780 - RNA, 19 nt, Homo sapiens
  misc_RNA (1)...(19): siRNA sense strand
gaucugaggucaucaagaa

SEQ ID NO: 1433781 - RNA, 19 nt, Homo sapiens
  misc_RNA (1)...(19): siRNA sense strand
ggucucagcucaggaauua

SEQ ID NO: 1433782 - RNA, 19 nt, Homo sapiens
  misc_RNA (1)...(19): siRNA sense strand
ccagaaaccuagauaagaa

SEQ ID NO: 1433783 - RNA, 19 nt, Homo sapiens
  misc_RNA (1)...(19): siRNA sense strand
caacuggucucauacuuca

SEQ ID NO: 1433784 - RNA, 19 nt, Homo sapiens
  misc_RNA (1)...(19): siRNA sense strand
ggacuucacuggcuccaau

SEQ ID NO: 1433785 - RNA, 19 nt, Homo sapiens
  misc_RNA (1)...(19): siRNA sense strand
guacagaucugaggucauc

SEQ ID NO: 1433786 - RNA, 19 nt, Homo sapiens
  misc_RNA (1)...(19): siRNA sense strand
aaaggacaaucguguagua

SEQ ID NO: 1433787 - RNA, 19 nt, Homo sapiens
  misc_RNA (1)...(19): siRNA sense strand
gcaggucucgcaugaauuu

SEQ ID NO: 1433788 - RNA, 19 nt, Homo sapiens
  misc_RNA (1)...(19): siRNA sense strand
caagaacucuggaacuauc

SEQ ID NO: 1433789 - RNA, 19 nt, Homo sapiens
  misc_RNA (1)...(19): siRNA sense strand
caacaggggucaaugagua

SEQ ID NO: 1433790 - RNA, 19 nt, Homo sapiens
  misc_RNA (1)...(19): siRNA sense strand
uacaagaacucuggaacua

SEQ ID NO: 1433791 - RNA, 19 nt, Homo sapiens
  misc_RNA (1)...(19): siRNA sense strand
gcugagggaugaugacuuc

SEQ ID NO: 1433792 - RNA, 19 nt, Homo sapiens
  misc_RNA (1)...(19): siRNA sense strand
gcaugaauuugccuugaau

SEQ ID NO: 1433793 - RNA, 19 nt, Homo sapiens
  misc_RNA (1)...(19): siRNA sense strand
gagggaugaugacuuccua

SEQ ID NO: 1433794 - RNA, 19 nt, Homo sapiens
  misc_RNA (1)...(19): siRNA sense strand
ggacaucggcuccaagucu

SEQ ID NO: 1433795 - RNA, 19 nt, Homo sapiens
  misc_RNA (1)...(19): siRNA sense strand
cgccagagcugagggauga

SEQ ID NO: 1433796 - RNA, 19 nt, Homo sapiens
  misc_RNA (1)...(19): siRNA sense strand
ggaacuauccgugucaaga

SEQ ID NO: 1433797 - RNA, 19 nt, Homo sapiens
  misc_RNA (1)...(19): siRNA sense strand
gaacuauccgugucaagau

SEQ ID NO: 1433798 - RNA, 19 nt, Homo sapiens
  misc_RNA (1)...(19): siRNA sense strand
caagauuugucggguagaa

SEQ ID NO: 1433799 - RNA, 19 nt, Homo sapiens
  misc_RNA (1)...(19): siRNA sense strand
gcagcgugguucaggacua

SEQ ID NO: 1433800 - RNA, 19 nt, Homo sapiens
  misc_RNA (1)...(19): siRNA sense strand
gcuguucccugcauuugga

SEQ ID NO: 1433801 - RNA, 19 nt, Homo sapiens
  misc_RNA (1)...(19): siRNA sense strand
agaaacagaguacuccuuu

SEQ ID NO: 1433802 - RNA, 19 nt, Homo sapiens
  misc_RNA (1)...(19): siRNA sense strand
gguagaggccagaaaccua

SEQ ID NO: 1433803 - RNA, 19 nt, Homo sapiens
  misc_RNA (1)...(19): siRNA sense strand
gugcaaugcuccgauuaug

SEQ ID NO: 1433804 - RNA, 19 nt, Homo sapiens
  misc_RNA (1)...(19): siRNA sense strand
uggcaggucucgcaugaau

SEQ ID NO: 1433805 - RNA, 19 nt, Homo sapiens
  misc_RNA (1)...(19): siRNA sense strand
ggacaaucguguaguaacc

SEQ ID NO: 1433806 - RNA, 19 nt, Homo sapiens
  misc_RNA (1)...(19): siRNA sense strand
cuauggcccuaccaacuuu

SEQ ID NO: 1433807 - RNA, 19 nt, Homo sapiens
  misc_RNA (1)...(19): siRNA sense strand
gaaugcauccacccugaga

SEQ ID NO: 1433808 - RNA, 19 nt, Homo sapiens
  misc_RNA (1)...(19): siRNA sense strand
gccagaaaccuagauaaga

SEQ ID NO: 1433809 - RNA, 19 nt, Homo sapiens
  misc_RNA (1)...(19): siRNA sense strand
gcuacgcuuuggaaucuau

SEQ ID NO: 1433810 - RNA, 19 nt, Homo sapiens
  misc_RNA (1)...(19): siRNA sense strand
gugaccaucucauugacaa

SEQ ID NO: 1433811 - RNA, 19 nt, Homo sapiens
  misc_RNA (1)...(19): siRNA sense strand
gaugggaggcugucagauc

SEQ ID NO: 1433812 - RNA, 19 nt, Homo sapiens
  misc_RNA (1)...(19): siRNA sense strand
gacaagcuguucccugcau

SEQ ID NO: 1433813 - RNA, 19 nt, Homo sapiens
  misc_RNA (1)...(19): siRNA sense strand
ggacugccucgcaauacuu

SEQ ID NO: 1433814 - RNA, 19 nt, Homo sapiens
  misc_RNA (1)...(19): siRNA sense strand
gacccacucugcguccuuu

SEQ ID NO: 1433815 - RNA, 19 nt, Homo sapiens
  misc_RNA (1)...(19): siRNA sense strand
caacuuugcacccaucauc

SEQ ID NO: 1433816 - RNA, 19 nt, Homo sapiens
  misc_RNA (1)...(19): siRNA sense strand
ccaugucagugaucauugu

SEQ ID NO: 1433817 - RNA, 19 nt, Homo sapiens
  misc_RNA (1)...(19): siRNA sense strand
gagcuuggccggacugaac

SEQ ID NO: 1433818 - RNA, 19 nt, Homo sapiens
  misc_RNA (1)...(19): siRNA sense strand
ccucgaaccugcccauguc

SEQ ID NO: 1433819 - RNA, 19 nt, Homo sapiens
  misc_RNA (1)...(19): siRNA sense strand
ggaauuaaaggacaaucgu

SEQ ID NO: 1433820 - RNA, 19 nt, Homo sapiens
  misc_RNA (1)...(19): siRNA sense strand
caggugcaaugcuccgauu

SEQ ID NO: 1433821 - RNA, 19 nt, Homo sapiens
  misc_RNA (1)...(19): siRNA sense strand
ucgcagaagugcccacaca

SEQ ID NO: 1433822 - RNA, 19 nt, Homo sapiens
  misc_RNA (1)...(19): siRNA sense strand
ucucagcucaggaauuaaa

SEQ ID NO: 1433823 - RNA, 19 nt, Homo sapiens
  misc_RNA (1)...(19): siRNA sense strand
aaacagaguacuccuuucu

SEQ ID NO: 1433824 - RNA, 19 nt, Homo sapiens
  misc_RNA (1)...(19): siRNA sense strand
cagcuugaguaccgcuuug

SEQ ID NO: 1433825 - RNA, 19 nt, Homo sapiens
  misc_RNA (1)...(19): siRNA sense strand
cacaacuggucucauacuu

SEQ ID NO: 1433826 - RNA, 19 nt, Homo sapiens
  misc_RNA (1)...(19): siRNA sense strand
cgcaauacuucaugcuguu

SEQ ID NO: 1433827 - RNA, 19 nt, Homo sapiens
  misc_RNA (1)...(19): siRNA sense strand
guacuccuuucuggacuau

SEQ ID NO: 1433828 - RNA, 19 nt, Homo sapiens
  misc_RNA (1)...(19): siRNA sense strand
gauuguguccagccaggua

SEQ ID NO: 1433829 - RNA, 19 nt, Homo sapiens
  misc_RNA (1)...(19): siRNA sense strand
ggagguagaggccagaaac

SEQ ID NO: 1433830 - RNA, 19 nt, Homo sapiens
  misc_RNA (1)...(19): siRNA sense strand
cgcaugaauuugccuugaa

SEQ ID NO: 1433831 - RNA, 19 nt, Homo sapiens
  misc_RNA (1)...(19): siRNA sense strand
ugguucagcuguccauuuc

SEQ ID NO: 1433832 - RNA, 19 nt, Homo sapiens
  misc_RNA (1)...(19): siRNA sense strand
cagcgugguucaggacuau

SEQ ID NO: 1433833 - RNA, 19 nt, Homo sapiens
  misc_RNA (1)...(19): siRNA sense strand
gaggccagaaaccuagaua

SEQ ID NO: 1433834 - RNA, 19 nt, Homo sapiens
  misc_RNA (1)...(19): siRNA sense strand
caagcuguucccugcauuu

SEQ ID NO: 1433835 - RNA, 19 nt, Homo sapiens
  misc_RNA (1)...(19): siRNA sense strand
ggucaaugaguaccugaug

SEQ ID NO: 1433836 - RNA, 19 nt, Homo sapiens
  misc_RNA (1)...(19): siRNA sense strand
cggcugaguuugaaugcau

SEQ ID NO: 1433837 - RNA, 19 nt, Homo sapiens
  misc_RNA (1)...(19): siRNA sense strand
ggcagucccggcugaguuu

SEQ ID NO: 1433838 - RNA, 19 nt, Homo sapiens
  misc_RNA (1)...(19): siRNA sense strand
cauggaagcguuucucagu

SEQ ID NO: 1433839 - RNA, 19 nt, Homo sapiens
  misc_RNA (1)...(19): siRNA sense strand
ggccagaaaccuagauaag

SEQ ID NO: 1433840 - RNA, 19 nt, Homo sapiens
  misc_RNA (1)...(19): siRNA sense strand
gcccugaguucuccaagac

SEQ ID NO: 1433841 - RNA, 19 nt, Homo sapiens
  misc_RNA (1)...(19): siRNA sense strand
uguggguggugcugacuuu

SEQ ID NO: 1433842 - RNA, 19 nt, Homo sapiens
  misc_RNA (1)...(19): siRNA sense strand
acaaggacaucggcuccaa

SEQ ID NO: 1433843 - RNA, 19 nt, Homo sapiens
  misc_RNA (1)...(19): siRNA sense strand
ccugugaccaucucauuga

SEQ ID NO: 1433844 - RNA, 19 nt, Homo sapiens
  misc_RNA (1)...(19): siRNA sense strand
ccgccagggugaugggaaa

SEQ ID NO: 1433845 - RNA, 19 nt, Homo sapiens
  misc_RNA (1)...(19): siRNA sense strand
gcagaagugcccacacaac

SEQ ID NO: 1433846 - RNA, 19 nt, Homo sapiens
  misc_RNA (1)...(19): siRNA sense strand
gcaauacuucaugcuguug

SEQ ID NO: 1433847 - RNA, 19 nt, Homo sapiens
  misc_RNA (1)...(19): siRNA sense strand
gcaggcauccagggcauug

SEQ ID NO: 1433848 - RNA, 19 nt, Homo sapiens
  misc_RNA (1)...(19): siRNA sense strand
ucgcaugaauuugccuuga

SEQ ID NO: 1433849 - RNA, 19 nt, Homo sapiens
  misc_RNA (1)...(19): siRNA sense strand
cuccaagacucuacagcuu

SEQ ID NO: 1433850 - RNA, 19 nt, Homo sapiens
  misc_RNA (1)...(19): siRNA sense strand
ggugcaaugcuccgauuau

SEQ ID NO: 1433851 - RNA, 19 nt, Homo sapiens
  misc_RNA (1)...(19): siRNA sense strand
gggacugccucgcaauacu

SEQ ID NO: 1433852 - RNA, 19 nt, Homo sapiens
  misc_RNA (1)...(19): siRNA sense strand
acuggcaggucucgcauga

SEQ ID NO: 1433853 - RNA, 19 nt, Homo sapiens
  misc_RNA (1)...(19): siRNA sense strand
ucaccugacucccuacacu

SEQ ID NO: 1433854 - RNA, 19 nt, Homo sapiens
  misc_RNA (1)...(19): siRNA sense strand
gcgacauugugcaguuugu

SEQ ID NO: 1433855 - RNA, 19 nt, Homo sapiens
  misc_RNA (1)...(19): siRNA sense strand
uaguaaccauggagguaga

SEQ ID NO: 1433856 - RNA, 19 nt, Homo sapiens
  misc_RNA (1)...(19): siRNA sense strand
gcccaugucagugaucauu

SEQ ID NO: 1433857 - RNA, 19 nt, Homo sapiens
  misc_RNA (1)...(19): siRNA sense strand
gaacaaccugaacccuaca

SEQ ID NO: 1433858 - RNA, 19 nt, Homo sapiens
  misc_RNA (1)...(19): siRNA sense strand
gaaaccuagauaagaagga

SEQ ID NO: 1433859 - RNA, 19 nt, Homo sapiens
  misc_RNA (1)...(19): siRNA sense strand
gcuuugagacaguccagaa

SEQ ID NO: 1433860 - RNA, 19 nt, Homo sapiens
  misc_RNA (1)...(19): siRNA sense strand
aacuauccgugucaagauu

SEQ ID NO: 1433861 - RNA, 19 nt, Homo sapiens
  misc_RNA (1)...(19): siRNA sense strand
agaccgugcucgcagaagu

SEQ ID NO: 1433862 - RNA, 19 nt, Homo sapiens
  misc_RNA (1)...(19): siRNA sense strand
ccgcgacauugugcaguuu

SEQ ID NO: 1433863 - RNA, 19 nt, Homo sapiens
  misc_RNA (1)...(19): siRNA sense strand
gaggcugucagaucaacuu

SEQ ID NO: 1433864 - RNA, 19 nt, Homo sapiens
  misc_RNA (1)...(19): siRNA sense strand
gcuuuggaaucuaugacau

SEQ ID NO: 1433865 - RNA, 19 nt, Homo sapiens
  misc_RNA (1)...(19): siRNA sense strand
cgacauugugcaguuugua

SEQ ID NO: 1433866 - RNA, 19 nt, Homo sapiens
  misc_RNA (1)...(19): siRNA sense strand
uguaguaaccauggaggua

SEQ ID NO: 1433867 - RNA, 19 nt, Homo sapiens
  misc_RNA (1)...(19): siRNA sense strand
gcugucagaucaacuucac

SEQ ID NO: 1433868 - RNA, 19 nt, Homo sapiens
  misc_RNA (1)...(19): siRNA sense strand
uuaaaggacaaucguguag

SEQ ID NO: 1433869 - RNA, 19 nt, Homo sapiens
  misc_RNA (1)...(19): siRNA sense strand
ucuauggcccuaccaacuu

SEQ ID NO: 1433870 - RNA, 19 nt, Homo sapiens
  misc_RNA (1)...(19): siRNA sense strand
augggaggcugucagauca

SEQ ID NO: 1433871 - RNA, 19 nt, Homo sapiens
  misc_RNA (1)...(19): siRNA sense strand
ccagggugaugggaaaugg

SEQ ID NO: 1433872 - RNA, 19 nt, Homo sapiens
  misc_RNA (1)...(19): siRNA sense strand
cagcucaggaauuaaagga

SEQ ID NO: 1433873 - RNA, 19 nt, Homo sapiens
  misc_RNA (1)...(19): siRNA sense strand
cagaagugcccacacaacu

SEQ ID NO: 1433874 - RNA, 19 nt, Homo sapiens
  misc_RNA (1)...(19): siRNA sense strand
acaagcuguucccugcauu

SEQ ID NO: 1433875 - RNA, 19 nt, Homo sapiens
  misc_RNA (1)...(19): siRNA sense strand
aagaaaagcuacaagaacu

SEQ ID NO: 1433876 - RNA, 19 nt, Homo sapiens
  misc_RNA (1)...(19): siRNA sense strand
gcauccacccugagaagca

SEQ ID NO: 1433877 - RNA, 19 nt, Homo sapiens
  misc_RNA (1)...(19): siRNA sense strand
acuccuuucuggacuaugu

SEQ ID NO: 1433878 - RNA, 19 nt, Homo sapiens
  misc_RNA (1)...(19): siRNA sense strand
ggguggugcugacuuugag

SEQ ID NO: 1433879 - RNA, 19 nt, Homo sapiens
  misc_RNA (1)...(19): siRNA sense strand
ccacacaacuggucucaua

SEQ ID NO: 1433880 - RNA, 19 nt, Homo sapiens
  misc_RNA (1)...(19): siRNA sense strand
gaucugaggucaucaagaa

SEQ ID NO: 1433881 - RNA, 19 nt, Homo sapiens
  misc_RNA (1)...(19): siRNA sense strand
ggucucagcucaggaauua

SEQ ID NO: 1433882 - RNA, 19 nt, Homo sapiens
  misc_RNA (1)...(19): siRNA sense strand
ccagaaaccuagauaagaa

SEQ ID NO: 1433883 - RNA, 19 nt, Homo sapiens
  misc_RNA (1)...(19): siRNA sense strand
caacuggucucauacuuca

SEQ ID NO: 1433884 - RNA, 19 nt, Homo sapiens
  misc_RNA (1)...(19): siRNA sense strand
ggacuucacuggcuccaau

SEQ ID NO: 1433885 - RNA, 19 nt, Homo sapiens
  misc_RNA (1)...(19): siRNA sense strand
guacagaucugaggucauc

SEQ ID NO: 1433886 - RNA, 19 nt, Homo sapiens
  misc_RNA (1)...(19): siRNA sense strand
aaaggacaaucguguagua

SEQ ID NO: 1433887 - RNA, 19 nt, Homo sapiens
  misc_RNA (1)...(19): siRNA sense strand
gcaggucucgcaugaauuu

SEQ ID NO: 1433888 - RNA, 19 nt, Homo sapiens
  misc_RNA (1)...(19): siRNA sense strand
caagaacucuggaacuauc

SEQ ID NO: 1433889 - RNA, 19 nt, Homo sapiens
  misc_RNA (1)...(19): siRNA sense strand
caacaggggucaaugagua

SEQ ID NO: 1433890 - RNA, 19 nt, Homo sapiens
  misc_RNA (1)...(19): siRNA sense strand
uacaagaacucuggaacua

SEQ ID NO: 1433891 - RNA, 19 nt, Homo sapiens
  misc_RNA (1)...(19): siRNA sense strand
gcugagggaugaugacuuc

SEQ ID NO: 1433892 - RNA, 19 nt, Homo sapiens
  misc_RNA (1)...(19): siRNA sense strand
gcaugaauuugccuugaau

SEQ ID NO: 1433893 - RNA, 19 nt, Homo sapiens
  misc_RNA (1)...(19): siRNA sense strand
gagggaugaugacuuccua

SEQ ID NO: 1433894 - RNA, 19 nt, Homo sapiens
  misc_RNA (1)...(19): siRNA sense strand
ggacaucggcuccaagucu

SEQ ID NO: 1433895 - RNA, 19 nt, Homo sapiens
  misc_RNA (1)...(19): siRNA sense strand
cgccagagcugagggauga

SEQ ID NO: 1433896 - RNA, 19 nt, Homo sapiens
  misc_RNA (1)...(19): siRNA sense strand
ggaacuauccgugucaaga

SEQ ID NO: 1433897 - RNA, 19 nt, Homo sapiens
  misc_RNA (1)...(19): siRNA sense strand
gaacuauccgugucaagau

SEQ ID NO: 1433898 - RNA, 19 nt, Homo sapiens
  misc_RNA (1)...(19): siRNA sense strand
caagauuugucggguagaa

SEQ ID NO: 1433899 - RNA, 19 nt, Homo sapiens
  misc_RNA (1)...(19): siRNA sense strand
gcagcgugguucaggacua

SEQ ID NO: 1433900 - RNA, 19 nt, Homo sapiens
  misc_RNA (1)...(19): siRNA sense strand
gcuguucccugcauuugga

SEQ ID NO: 1433901 - RNA, 19 nt, Homo sapiens
  misc_RNA (1)...(19): siRNA sense strand
agaaacagaguacuccuuu

SEQ ID NO: 1433902 - RNA, 19 nt, Homo sapiens
  misc_RNA (1)...(19): siRNA sense strand
gguagaggccagaaaccua

SEQ ID NO: 1433903 - RNA, 19 nt, Homo sapiens
  misc_RNA (1)...(19): siRNA sense strand
gugcaaugcuccgauuaug

SEQ ID NO: 1433904 - RNA, 19 nt, Homo sapiens
  misc_RNA (1)...(19): siRNA sense strand
uggcaggucucgcaugaau

SEQ ID NO: 1433905 - RNA, 19 nt, Homo sapiens
  misc_RNA (1)...(19): siRNA sense strand
ggacaaucguguaguaacc

SEQ ID NO: 1433906 - RNA, 19 nt, Homo sapiens
  misc_RNA (1)...(19): siRNA sense strand
cuauggcccuaccaacuuu

SEQ ID NO: 1433907 - RNA, 19 nt, Homo sapiens
  misc_RNA (1)...(19): siRNA sense strand
gaaugcauccacccugaga

SEQ ID NO: 1433908 - RNA, 19 nt, Homo sapiens
  misc_RNA (1)...(19): siRNA sense strand
gccagaaaccuagauaaga

SEQ ID NO: 1433909 - RNA, 19 nt, Homo sapiens
  misc_RNA (1)...(19): siRNA sense strand
gcuacgcuuuggaaucuau

SEQ ID NO: 1433910 - RNA, 19 nt, Homo sapiens
  misc_RNA (1)...(19): siRNA sense strand
gugaccaucucauugacaa

SEQ ID NO: 1433911 - RNA, 19 nt, Homo sapiens
  misc_RNA (1)...(19): siRNA sense strand
gaugggaggcugucagauc

SEQ ID NO: 1433912 - RNA, 19 nt, Homo sapiens
  misc_RNA (1)...(19): siRNA sense strand
gacaagcuguucccugcau

SEQ ID NO: 1433913 - RNA, 19 nt, Homo sapiens
  misc_RNA (1)...(19): siRNA sense strand
ggacugccucgcaauacuu

SEQ ID NO: 1433914 - RNA, 19 nt, Homo sapiens
  misc_RNA (1)...(19): siRNA sense strand
gacccacucugcguccuuu

SEQ ID NO: 1433915 - RNA, 19 nt, Homo sapiens
  misc_RNA (1)...(19): siRNA sense strand
caacuuugcacccaucauc

SEQ ID NO: 1433916 - RNA, 19 nt, Homo sapiens
  misc_RNA (1)...(19): siRNA sense strand
ccaugucagugaucauugu

SEQ ID NO: 1433917 - RNA, 19 nt, Homo sapiens
  misc_RNA (1)...(19): siRNA sense strand
gagcuuggccggacugaac

SEQ ID NO: 1433918 - RNA, 19 nt, Homo sapiens
  misc_RNA (1)...(19): siRNA sense strand
ccucgaaccugcccauguc

SEQ ID NO: 1433919 - RNA, 19 nt, Homo sapiens
  misc_RNA (1)...(19): siRNA sense strand
ggaauuaaaggacaaucgu

SEQ ID NO: 1433920 - RNA, 19 nt, Homo sapiens
  misc_RNA (1)...(19): siRNA sense strand
caggugcaaugcuccgauu

SEQ ID NO: 1433921 - RNA, 19 nt, Homo sapiens
  misc_RNA (1)...(19): siRNA sense strand
ucgcagaagugcccacaca

SEQ ID NO: 1433922 - RNA, 19 nt, Homo sapiens
  misc_RNA (1)...(19): siRNA sense strand
ucucagcucaggaauuaaa

SEQ ID NO: 1433923 - RNA, 19 nt, Homo sapiens
  misc_RNA (1)...(19): siRNA sense strand
aaacagaguacuccuuucu

SEQ ID NO: 1433924 - RNA, 19 nt, Homo sapiens
  misc_RNA (1)...(19): siRNA sense strand
cagcuugaguaccgcuuug

SEQ ID NO: 1433925 - RNA, 19 nt, Homo sapiens
  misc_RNA (1)...(19): siRNA sense strand
cacaacuggucucauacuu

SEQ ID NO: 1433926 - RNA, 19 nt, Homo sapiens
  misc_RNA (1)...(19): siRNA sense strand
cgcaauacuucaugcuguu

SEQ ID NO: 1433927 - RNA, 19 nt, Homo sapiens
  misc_RNA (1)...(19): siRNA sense strand
guacuccuuucuggacuau

SEQ ID NO: 1433928 - RNA, 19 nt, Homo sapiens
  misc_RNA (1)...(19): siRNA sense strand
gauuguguccagccaggua

SEQ ID NO: 1433929 - RNA, 19 nt, Homo sapiens
  misc_RNA (1)...(19): siRNA sense strand
ggagguagaggccagaaac

SEQ ID NO: 1433930 - RNA, 19 nt, Homo sapiens
  misc_RNA (1)...(19): siRNA sense strand
cgcaugaauuugccuugaa

SEQ ID NO: 1433931 - RNA, 19 nt, Homo sapiens
  misc_RNA (1)...(19): siRNA sense strand
ugguucagcuguccauuuc

SEQ ID NO: 1433932 - RNA, 19 nt, Homo sapiens
  misc_RNA (1)...(19): siRNA sense strand
cagcgugguucaggacuau

SEQ ID NO: 1433933 - RNA, 19 nt, Homo sapiens
  misc_RNA (1)...(19): siRNA sense strand
gaggccagaaaccuagaua

SEQ ID NO: 1433934 - RNA, 19 nt, Homo sapiens
  misc_RNA (1)...(19): siRNA sense strand
caagcuguucccugcauuu

SEQ ID NO: 1433935 - RNA, 19 nt, Homo sapiens
  misc_RNA (1)...(19): siRNA sense strand
ggucaaugaguaccugaug

SEQ ID NO: 1433936 - RNA, 19 nt, Homo sapiens
  misc_RNA (1)...(19): siRNA sense strand
cggcugaguuugaaugcau

SEQ ID NO: 1433937 - RNA, 19 nt, Homo sapiens
  misc_RNA (1)...(19): siRNA sense strand
ggcagucccggcugaguuu

SEQ ID NO: 1433938 - RNA, 19 nt, Homo sapiens
  misc_RNA (1)...(19): siRNA sense strand
cauggaagcguuucucagu

SEQ ID NO: 1433939 - RNA, 19 nt, Homo sapiens
  misc_RNA (1)...(19): siRNA sense strand
ggccagaaaccuagauaag

SEQ ID NO: 1433940 - RNA, 19 nt, Homo sapiens
  misc_RNA (1)...(19): siRNA sense strand
gcccugaguucuccaagac

SEQ ID NO: 1433941 - RNA, 19 nt, Homo sapiens
  misc_RNA (1)...(19): siRNA sense strand
uguggguggugcugacuuu

SEQ ID NO: 1433942 - RNA, 19 nt, Homo sapiens
  misc_RNA (1)...(19): siRNA sense strand
acaaggacaucggcuccaa

SEQ ID NO: 1433943 - RNA, 19 nt, Homo sapiens
  misc_RNA (1)...(19): siRNA sense strand
ccugugaccaucucauuga

SEQ ID NO: 1433944 - RNA, 19 nt, Homo sapiens
  misc_RNA (1)...(19): siRNA sense strand
ccgccagggugaugggaaa

SEQ ID NO: 1433945 - RNA, 19 nt, Homo sapiens
  misc_RNA (1)...(19): siRNA sense strand
gcagaagugcccacacaac

SEQ ID NO: 1433946 - RNA, 19 nt, Homo sapiens
  misc_RNA (1)...(19): siRNA sense strand
gcaauacuucaugcuguug

SEQ ID NO: 1433947 - RNA, 19 nt, Homo sapiens
  misc_RNA (1)...(19): siRNA sense strand
gcaggcauccagggcauug

SEQ ID NO: 1433948 - RNA, 19 nt, Homo sapiens
  misc_RNA (1)...(19): siRNA sense strand
ucgcaugaauuugccuuga

SEQ ID NO: 1433949 - RNA, 19 nt, Homo sapiens
  misc_RNA (1)...(19): siRNA sense strand
cuccaagacucuacagcuu

SEQ ID NO: 1433950 - RNA, 19 nt, Homo sapiens
  misc_RNA (1)...(19): siRNA sense strand
ggugcaaugcuccgauuau

SEQ ID NO: 1433951 - RNA, 19 nt, Homo sapiens
  misc_RNA (1)...(19): siRNA sense strand
gggacugccucgcaauacu

SEQ ID NO: 1433952 - RNA, 19 nt, Homo sapiens
  misc_RNA (1)...(19): siRNA sense strand
acuggcaggucucgcauga

SEQ ID NO: 1433953 - RNA, 19 nt, Homo sapiens
  misc_RNA (1)...(19): siRNA sense strand
ucaccugacucccuacacu

SEQ ID NO: 1433954 - RNA, 19 nt, Homo sapiens
  misc_RNA (1)...(19): siRNA sense strand
gcgacauugugcaguuugu

SEQ ID NO: 1433955 - RNA, 19 nt, Homo sapiens
  misc_RNA (1)...(19): siRNA sense strand
uaguaaccauggagguaga

SEQ ID NO: 1433956 - RNA, 19 nt, Homo sapiens
  misc_RNA (1)...(19): siRNA sense strand
gcccaugucagugaucauu

SEQ ID NO: 1433957 - RNA, 19 nt, Homo sapiens
  misc_RNA (1)...(19): siRNA sense strand
gaacaaccugaacccuaca

SEQ ID NO: 1433958 - RNA, 19 nt, Homo sapiens
  misc_RNA (1)...(19): siRNA sense strand
gaaaccuagauaagaagga

SEQ ID NO: 1433959 - RNA, 19 nt, Homo sapiens
  misc_RNA (1)...(19): siRNA sense strand
gcuuugagacaguccagaa

SEQ ID NO: 1433960 - RNA, 19 nt, Homo sapiens
  misc_RNA (1)...(19): siRNA sense strand
aacuauccgugucaagauu

SEQ ID NO: 1433961 - RNA, 19 nt, Homo sapiens
  misc_RNA (1)...(19): siRNA sense strand
agaccgugcucgcagaagu

SEQ ID NO: 1433962 - RNA, 19 nt, Homo sapiens
  misc_RNA (1)...(19): siRNA sense strand
ccgcgacauugugcaguuu

SEQ ID NO: 1433963 - RNA, 19 nt, Homo sapiens
  misc_RNA (1)...(19): siRNA sense strand
gaggcugucagaucaacuu

SEQ ID NO: 1433964 - RNA, 19 nt, Homo sapiens
  misc_RNA (1)...(19): siRNA sense strand
gcuuuggaaucuaugacau

SEQ ID NO: 1433965 - RNA, 19 nt, Homo sapiens
  misc_RNA (1)...(19): siRNA sense strand
cgacauugugcaguuugua

SEQ ID NO: 1433966 - RNA, 19 nt, Homo sapiens
  misc_RNA (1)...(19): siRNA sense strand
uguaguaaccauggaggua

SEQ ID NO: 1433967 - RNA, 19 nt, Homo sapiens
  misc_RNA (1)...(19): siRNA sense strand
gcugucagaucaacuucac

SEQ ID NO: 1433968 - RNA, 19 nt, Homo sapiens
  misc_RNA (1)...(19): siRNA sense strand
uuaaaggacaaucguguag

SEQ ID NO: 1433969 - RNA, 19 nt, Homo sapiens
  misc_RNA (1)...(19): siRNA sense strand
ucuauggcccuaccaacuu

SEQ ID NO: 1433970 - RNA, 19 nt, Homo sapiens
  misc_RNA (1)...(19): siRNA sense strand
augggaggcugucagauca

SEQ ID NO: 1433971 - RNA, 19 nt, Homo sapiens
  misc_RNA (1)...(19): siRNA sense strand
ccagggugaugggaaaugg

SEQ ID NO: 1433972 - RNA, 19 nt, Homo sapiens
  misc_RNA (1)...(19): siRNA sense strand
cagcucaggaauuaaagga

SEQ ID NO: 1433973 - RNA, 19 nt, Homo sapiens
  misc_RNA (1)...(19): siRNA sense strand
cagaagugcccacacaacu

SEQ ID NO: 1433974 - RNA, 19 nt, Homo sapiens
  misc_RNA (1)...(19): siRNA sense strand
acaagcuguucccugcauu

SEQ ID NO: 1433975 - RNA, 19 nt, Homo sapiens
  misc_RNA (1)...(19): siRNA sense strand
aagaaaagcuacaagaacu

SEQ ID NO: 1433976 - RNA, 19 nt, Homo sapiens
  misc_RNA (1)...(19): siRNA sense strand
gcauccacccugagaagca

SEQ ID NO: 1433977 - RNA, 19 nt, Homo sapiens
  misc_RNA (1)...(19): siRNA sense strand
acuccuuucuggacuaugu

SEQ ID NO: 1433978 - RNA, 19 nt, Homo sapiens
  misc_RNA (1)...(19): siRNA sense strand
ggguggugcugacuuugag

SEQ ID NO: 1433979 - RNA, 19 nt, Homo sapiens
  misc_RNA (1)...(19): siRNA sense strand
ccacacaacuggucucaua

SEQ ID NO: 1433980 - RNA, 19 nt, Homo sapiens
  misc_RNA (1)...(19): siRNA sense strand
gaucugaggucaucaagaa

SEQ ID NO: 1433981 - RNA, 19 nt, Homo sapiens
  misc_RNA (1)...(19): siRNA sense strand
ggucucagcucaggaauua

SEQ ID NO: 1433982 - RNA, 19 nt, Homo sapiens
  misc_RNA (1)...(19): siRNA sense strand
ccagaaaccuagauaagaa

SEQ ID NO: 1433983 - RNA, 19 nt, Homo sapiens
  misc_RNA (1)...(19): siRNA sense strand
caacuggucucauacuuca

SEQ ID NO: 1433984 - RNA, 19 nt, Homo sapiens
  misc_RNA (1)...(19): siRNA sense strand
ggacuucacuggcuccaau

SEQ ID NO: 1433985 - RNA, 19 nt, Homo sapiens
  misc_RNA (1)...(19): siRNA sense strand
guacagaucugaggucauc

SEQ ID NO: 1433986 - RNA, 19 nt, Homo sapiens
  misc_RNA (1)...(19): siRNA sense strand
aaaggacaaucguguagua

SEQ ID NO: 1433987 - RNA, 19 nt, Homo sapiens
  misc_RNA (1)...(19): siRNA sense strand
gcaggucucgcaugaauuu

SEQ ID NO: 1433988 - RNA, 19 nt, Homo sapiens
  misc_RNA (1)...(19): siRNA sense strand
caagaacucuggaacuauc

SEQ ID NO: 1433989 - RNA, 19 nt, Homo sapiens
  misc_RNA (1)...(19): siRNA sense strand
caacaggggucaaugagua

SEQ ID NO: 1433990 - RNA, 19 nt, Homo sapiens
  misc_RNA (1)...(19): siRNA sense strand
uacaagaacucuggaacua

SEQ ID NO: 1433991 - RNA, 19 nt, Homo sapiens
  misc_RNA (1)...(19): siRNA sense strand
gcugagggaugaugacuuc

SEQ ID NO: 1433992 - RNA, 19 nt, Homo sapiens
  misc_RNA (1)...(19): siRNA sense strand
gcaugaauuugccuugaau

SEQ ID NO: 1433993 - RNA, 19 nt, Homo sapiens
  misc_RNA (1)...(19): siRNA sense strand
gagggaugaugacuuccua

SEQ ID NO: 1433994 - RNA, 19 nt, Homo sapiens
  misc_RNA (1)...(19): siRNA sense strand
ggacaucggcuccaagucu

SEQ ID NO: 1433995 - RNA, 19 nt, Homo sapiens
  misc_RNA (1)...(19): siRNA sense strand
cgccagagcugagggauga

SEQ ID NO: 1433996 - RNA, 19 nt, Homo sapiens
  misc_RNA (1)...(19): siRNA sense strand
ggaacuauccgugucaaga

SEQ ID NO: 1433997 - RNA, 19 nt, Homo sapiens
  misc_RNA (1)...(19): siRNA sense strand
gaacuauccgugucaagau

SEQ ID NO: 1433998 - RNA, 19 nt, Homo sapiens
  misc_RNA (1)...(19): siRNA sense strand
caagauuugucggguagaa

SEQ ID NO: 1433999 - RNA, 19 nt, Homo sapiens
  misc_RNA (1)...(19): siRNA sense strand
gcagcgugguucaggacua

SEQ ID NO: 1434000 - RNA, 19 nt, Homo sapiens
  misc_RNA (1)...(19): siRNA sense strand
gcuguucccugcauuugga

SEQ ID NO: 1434001 - RNA, 19 nt, Homo sapiens
  misc_RNA (1)...(19): siRNA sense strand
agaaacagaguacuccuuu

SEQ ID NO: 1434002 - RNA, 19 nt, Homo sapiens
  misc_RNA (1)...(19): siRNA sense strand
gguagaggccagaaaccua

SEQ ID NO: 1434003 - RNA, 19 nt, Homo sapiens
  misc_RNA (1)...(19): siRNA sense strand
gugcaaugcuccgauuaug

SEQ ID NO: 1434004 - RNA, 19 nt, Homo sapiens
  misc_RNA (1)...(19): siRNA sense strand
uggcaggucucgcaugaau

SEQ ID NO: 1434005 - RNA, 19 nt, Homo sapiens
  misc_RNA (1)...(19): siRNA sense strand
ggacaaucguguaguaacc

SEQ ID NO: 1434006 - RNA, 19 nt, Homo sapiens
  misc_RNA (1)...(19): siRNA sense strand
cuauggcccuaccaacuuu

SEQ ID NO: 1434007 - RNA, 19 nt, Homo sapiens
  misc_RNA (1)...(19): siRNA sense strand
gaaugcauccacccugaga

SEQ ID NO: 1434008 - RNA, 19 nt, Homo sapiens
  misc_RNA (1)...(19): siRNA sense strand
gccagaaaccuagauaaga

SEQ ID NO: 1434009 - RNA, 19 nt, Homo sapiens
  misc_RNA (1)...(19): siRNA sense strand
gcuacgcuuuggaaucuau

SEQ ID NO: 1434010 - RNA, 19 nt, Homo sapiens
  misc_RNA (1)...(19): siRNA sense strand
gugaccaucucauugacaa

SEQ ID NO: 1434011 - RNA, 19 nt, Homo sapiens
  misc_RNA (1)...(19): siRNA sense strand
gaugggaggcugucagauc

SEQ ID NO: 1434012 - RNA, 19 nt, Homo sapiens
  misc_RNA (1)...(19): siRNA sense strand
gacaagcuguucccugcau

SEQ ID NO: 1434013 - RNA, 19 nt, Homo sapiens
  misc_RNA (1)...(19): siRNA sense strand
ggacugccucgcaauacuu

SEQ ID NO: 1434014 - RNA, 19 nt, Homo sapiens
  misc_RNA (1)...(19): siRNA sense strand
gacccacucugcguccuuu

SEQ ID NO: 1434015 - RNA, 19 nt, Homo sapiens
  misc_RNA (1)...(19): siRNA sense strand
caacuuugcacccaucauc

SEQ ID NO: 1434016 - RNA, 19 nt, Homo sapiens
  misc_RNA (1)...(19): siRNA sense strand
ccaugucagugaucauugu

SEQ ID NO: 1434017 - RNA, 19 nt, Homo sapiens
  misc_RNA (1)...(19): siRNA sense strand
gagcuuggccggacugaac

SEQ ID NO: 1434018 - RNA, 19 nt, Homo sapiens
  misc_RNA (1)...(19): siRNA sense strand
ccucgaaccugcccauguc

SEQ ID NO: 1434019 - RNA, 19 nt, Homo sapiens
  misc_RNA (1)...(19): siRNA sense strand
ggaauuaaaggacaaucgu

SEQ ID NO: 1434020 - RNA, 19 nt, Homo sapiens
  misc_RNA (1)...(19): siRNA sense strand
caggugcaaugcuccgauu

SEQ ID NO: 1434021 - RNA, 19 nt, Homo sapiens
  misc_RNA (1)...(19): siRNA sense strand
ucgcagaagugcccacaca

SEQ ID NO: 1434022 - RNA, 19 nt, Homo sapiens
  misc_RNA (1)...(19): siRNA sense strand
ucucagcucaggaauuaaa

SEQ ID NO: 1434023 - RNA, 19 nt, Homo sapiens
  misc_RNA (1)...(19): siRNA sense strand
aaacagaguacuccuuucu

SEQ ID NO: 1434024 - RNA, 19 nt, Homo sapiens
  misc_RNA (1)...(19): siRNA sense strand
cagcuugaguaccgcuuug

SEQ ID NO: 1434025 - RNA, 19 nt, Homo sapiens
  misc_RNA (1)...(19): siRNA sense strand
cacaacuggucucauacuu

SEQ ID NO: 1434026 - RNA, 19 nt, Homo sapiens
  misc_RNA (1)...(19): siRNA sense strand
cgcaauacuucaugcuguu

SEQ ID NO: 1434027 - RNA, 19 nt, Homo sapiens
  misc_RNA (1)...(19): siRNA sense strand
guacuccuuucuggacuau

SEQ ID NO: 1434028 - RNA, 19 nt, Homo sapiens
  misc_RNA (1)...(19): siRNA sense strand
gauuguguccagccaggua

SEQ ID NO: 1434029 - RNA, 19 nt, Homo sapiens
  misc_RNA (1)...(19): siRNA sense strand
ggagguagaggccagaaac

SEQ ID NO: 1434030 - RNA, 19 nt, Homo sapiens
  misc_RNA (1)...(19): siRNA sense strand
cgcaugaauuugccuugaa

SEQ ID NO: 1434031 - RNA, 19 nt, Homo sapiens
  misc_RNA (1)...(19): siRNA sense strand
ugguucagcuguccauuuc

SEQ ID NO: 1434032 - RNA, 19 nt, Homo sapiens
  misc_RNA (1)...(19): siRNA sense strand
cagcgugguucaggacuau

SEQ ID NO: 1434033 - RNA, 19 nt, Homo sapiens
  misc_RNA (1)...(19): siRNA sense strand
gaggccagaaaccuagaua

SEQ ID NO: 1434034 - RNA, 19 nt, Homo sapiens
  misc_RNA (1)...(19): siRNA sense strand
caagcuguucccugcauuu

SEQ ID NO: 1434035 - RNA, 19 nt, Homo sapiens
  misc_RNA (1)...(19): siRNA sense strand
ggucaaugaguaccugaug

SEQ ID NO: 1434036 - RNA, 19 nt, Homo sapiens
  misc_RNA (1)...(19): siRNA sense strand
cggcugaguuugaaugcau

SEQ ID NO: 1434037 - RNA, 19 nt, Homo sapiens
  misc_RNA (1)...(19): siRNA sense strand
ggcagucccggcugaguuu

SEQ ID NO: 1434038 - RNA, 19 nt, Homo sapiens
  misc_RNA (1)...(19): siRNA sense strand
cauggaagcguuucucagu

SEQ ID NO: 1434039 - RNA, 19 nt, Homo sapiens
  misc_RNA (1)...(19): siRNA sense strand
ggccagaaaccuagauaag

SEQ ID NO: 1434040 - RNA, 19 nt, Homo sapiens
  misc_RNA (1)...(19): siRNA sense strand
gcccugaguucuccaagac

SEQ ID NO: 1434041 - RNA, 19 nt, Homo sapiens
  misc_RNA (1)...(19): siRNA sense strand
uguggguggugcugacuuu

SEQ ID NO: 1434042 - RNA, 19 nt, Homo sapiens
  misc_RNA (1)...(19): siRNA sense strand
acaaggacaucggcuccaa

SEQ ID NO: 1434043 - RNA, 19 nt, Homo sapiens
  misc_RNA (1)...(19): siRNA sense strand
ccugugaccaucucauuga

SEQ ID NO: 1434044 - RNA, 19 nt, Homo sapiens
  misc_RNA (1)...(19): siRNA sense strand
ccgccagggugaugggaaa

SEQ ID NO: 1434045 - RNA, 19 nt, Homo sapiens
  misc_RNA (1)...(19): siRNA sense strand
gcagaagugcccacacaac

SEQ ID NO: 1434046 - RNA, 19 nt, Homo sapiens
  misc_RNA (1)...(19): siRNA sense strand
gcaauacuucaugcuguug

SEQ ID NO: 1434047 - RNA, 19 nt, Homo sapiens
  misc_RNA (1)...(19): siRNA sense strand
gcaggcauccagggcauug

SEQ ID NO: 1434048 - RNA, 19 nt, Homo sapiens
  misc_RNA (1)...(19): siRNA sense strand
ucgcaugaauuugccuuga

SEQ ID NO: 1434049 - RNA, 19 nt, Homo sapiens
  misc_RNA (1)...(19): siRNA sense strand
cuccaagacucuacagcuu

SEQ ID NO: 1434050 - RNA, 19 nt, Homo sapiens
  misc_RNA (1)...(19): siRNA sense strand
ggugcaaugcuccgauuau

SEQ ID NO: 1434051 - RNA, 19 nt, Homo sapiens
  misc_RNA (1)...(19): siRNA sense strand
gggacugccucgcaauacu

SEQ ID NO: 1434052 - RNA, 19 nt, Homo sapiens
  misc_RNA (1)...(19): siRNA sense strand
acuggcaggucucgcauga

SEQ ID NO: 1434053 - RNA, 19 nt, Homo sapiens
  misc_RNA (1)...(19): siRNA sense strand
ucaccugacucccuacacu

SEQ ID NO: 1434054 - RNA, 19 nt, Homo sapiens
  misc_RNA (1)...(19): siRNA sense strand
gcgacauugugcaguuugu

SEQ ID NO: 1434055 - RNA, 19 nt, Homo sapiens
  misc_RNA (1)...(19): siRNA sense strand
uaguaaccauggagguaga

SEQ ID NO: 1434056 - RNA, 19 nt, Homo sapiens
  misc_RNA (1)...(19): siRNA sense strand
gcccaugucagugaucauu

SEQ ID NO: 1434057 - RNA, 19 nt, Homo sapiens
  misc_RNA (1)...(19): siRNA sense strand
gaacaaccugaacccuaca

SEQ ID NO: 1434058 - RNA, 19 nt, Homo sapiens
  misc_RNA (1)...(19): siRNA sense strand
gaaaccuagauaagaagga

SEQ ID NO: 1434059 - RNA, 19 nt, Homo sapiens
  misc_RNA (1)...(19): siRNA sense strand
gcuuugagacaguccagaa

SEQ ID NO: 1434060 - RNA, 19 nt, Homo sapiens
  misc_RNA (1)...(19): siRNA sense strand
aacuauccgugucaagauu

SEQ ID NO: 1434061 - RNA, 19 nt, Homo sapiens
  misc_RNA (1)...(19): siRNA sense strand
agaccgugcucgcagaagu

SEQ ID NO: 1434062 - RNA, 19 nt, Homo sapiens
  misc_RNA (1)...(19): siRNA sense strand
ccgcgacauugugcaguuu

SEQ ID NO: 1434063 - RNA, 19 nt, Homo sapiens
  misc_RNA (1)...(19): siRNA sense strand
gaggcugucagaucaacuu

SEQ ID NO: 1434064 - RNA, 19 nt, Homo sapiens
  misc_RNA (1)...(19): siRNA sense strand
gcuuuggaaucuaugacau

SEQ ID NO: 1434065 - RNA, 19 nt, Homo sapiens
  misc_RNA (1)...(19): siRNA sense strand
cgacauugugcaguuugua

SEQ ID NO: 1434066 - RNA, 19 nt, Homo sapiens
  misc_RNA (1)...(19): siRNA sense strand
uguaguaaccauggaggua

SEQ ID NO: 1434067 - RNA, 19 nt, Homo sapiens
  misc_RNA (1)...(19): siRNA sense strand
gcugucagaucaacuucac

SEQ ID NO: 1434068 - RNA, 19 nt, Homo sapiens
  misc_RNA (1)...(19): siRNA sense strand
uuaaaggacaaucguguag

SEQ ID NO: 1434069 - RNA, 19 nt, Homo sapiens
  misc_RNA (1)...(19): siRNA sense strand
ucuauggcccuaccaacuu

SEQ ID NO: 1434070 - RNA, 19 nt, Homo sapiens
  misc_RNA (1)...(19): siRNA sense strand
augggaggcugucagauca

SEQ ID NO: 1434071 - RNA, 19 nt, Homo sapiens
  misc_RNA (1)...(19): siRNA sense strand
ccagggugaugggaaaugg

SEQ ID NO: 1434072 - RNA, 19 nt, Homo sapiens
  misc_RNA (1)...(19): siRNA sense strand
cagcucaggaauuaaagga

SEQ ID NO: 1434073 - RNA, 19 nt, Homo sapiens
  misc_RNA (1)...(19): siRNA sense strand
cagaagugcccacacaacu

SEQ ID NO: 1434074 - RNA, 19 nt, Homo sapiens
  misc_RNA (1)...(19): siRNA sense strand
acaagcuguucccugcauu

SEQ ID NO: 1434075 - RNA, 19 nt, Homo sapiens
  misc_RNA (1)...(19): siRNA sense strand
aagaaaagcuacaagaacu

SEQ ID NO: 1434076 - RNA, 19 nt, Homo sapiens
  misc_RNA (1)...(19): siRNA sense strand
gcauccacccugagaagca

SEQ ID NO: 1434077 - RNA, 19 nt, Homo sapiens
  misc_RNA (1)...(19): siRNA sense strand
acuccuuucuggacuaugu

SEQ ID NO: 1434078 - RNA, 19 nt, Homo sapiens
  misc_RNA (1)...(19): siRNA sense strand
ggguggugcugacuuugag

SEQ ID NO: 1434079 - RNA, 19 nt, Homo sapiens
  misc_RNA (1)...(19): siRNA sense strand
ccacacaacuggucucaua

SEQ ID NO: 1434080 - RNA, 19 nt, Homo sapiens
  misc_RNA (1)...(19): siRNA sense strand
gaucugaggucaucaagaa

SEQ ID NO: 1434081 - RNA, 19 nt, Homo sapiens
  misc_RNA (1)...(19): siRNA sense strand
ggucucagcucaggaauua

SEQ ID NO: 1434082 - RNA, 19 nt, Homo sapiens
  misc_RNA (1)...(19): siRNA sense strand
ccagaaaccuagauaagaa

SEQ ID NO: 1434083 - RNA, 19 nt, Homo sapiens
  misc_RNA (1)...(19): siRNA sense strand
caacuggucucauacuuca

SEQ ID NO: 1434084 - RNA, 19 nt, Homo sapiens
  misc_RNA (1)...(19): siRNA sense strand
ggacuucacuggcuccaau

SEQ ID NO: 1434085 - RNA, 19 nt, Homo sapiens
  misc_RNA (1)...(19): siRNA sense strand
guacagaucugaggucauc

SEQ ID NO: 1434086 - RNA, 19 nt, Homo sapiens
  misc_RNA (1)...(19): siRNA sense strand
aaaggacaaucguguagua

SEQ ID NO: 1434087 - RNA, 19 nt, Homo sapiens
  misc_RNA (1)...(19): siRNA sense strand
gcaggucucgcaugaauuu

SEQ ID NO: 1434088 - RNA, 19 nt, Homo sapiens
  misc_RNA (1)...(19): siRNA sense strand
caagaacucuggaacuauc

SEQ ID NO: 1434089 - RNA, 19 nt, Homo sapiens
  misc_RNA (1)...(19): siRNA sense strand
caacaggggucaaugagua

SEQ ID NO: 1434090 - RNA, 19 nt, Homo sapiens
  misc_RNA (1)...(19): siRNA sense strand
uacaagaacucuggaacua

SEQ ID NO: 1434091 - RNA, 19 nt, Homo sapiens
  misc_RNA (1)...(19): siRNA sense strand
gcugagggaugaugacuuc

SEQ ID NO: 1434092 - RNA, 19 nt, Homo sapiens
  misc_RNA (1)...(19): siRNA sense strand
gcaugaauuugccuugaau

SEQ ID NO: 1434093 - RNA, 19 nt, Homo sapiens
  misc_RNA (1)...(19): siRNA sense strand
gagggaugaugacuuccua

SEQ ID NO: 1434094 - RNA, 19 nt, Homo sapiens
  misc_RNA (1)...(19): siRNA sense strand
ggacaucggcuccaagucu

SEQ ID NO: 1434095 - RNA, 19 nt, Homo sapiens
  misc_RNA (1)...(19): siRNA sense strand
cgccagagcugagggauga

SEQ ID NO: 1434096 - RNA, 19 nt, Homo sapiens
  misc_RNA (1)...(19): siRNA sense strand
ggaacuauccgugucaaga

SEQ ID NO: 1434097 - RNA, 19 nt, Homo sapiens
  misc_RNA (1)...(19): siRNA sense strand
gaacuauccgugucaagau

SEQ ID NO: 1434098 - RNA, 19 nt, Homo sapiens
  misc_RNA (1)...(19): siRNA sense strand
caagauuugucggguagaa

SEQ ID NO: 1434099 - RNA, 19 nt, Homo sapiens
  misc_RNA (1)...(19): siRNA sense strand
gcagcgugguucaggacua

SEQ ID NO: 1434100 - RNA, 19 nt, Homo sapiens
  misc_RNA (1)...(19): siRNA sense strand
gcuguucccugcauuugga

SEQ ID NO: 1434101 - RNA, 19 nt, Homo sapiens
  misc_RNA (1)...(19): siRNA sense strand
agaaacagaguacuccuuu

SEQ ID NO: 1434102 - RNA, 19 nt, Homo sapiens
  misc_RNA (1)...(19): siRNA sense strand
gguagaggccagaaaccua

SEQ ID NO: 1434103 - RNA, 19 nt, Homo sapiens
  misc_RNA (1)...(19): siRNA sense strand
gugcaaugcuccgauuaug

SEQ ID NO: 1434104 - RNA, 19 nt, Homo sapiens
  misc_RNA (1)...(19): siRNA sense strand
uggcaggucucgcaugaau

SEQ ID NO: 1434105 - RNA, 19 nt, Homo sapiens
  misc_RNA (1)...(19): siRNA sense strand
ggacaaucguguaguaacc

SEQ ID NO: 1434106 - RNA, 19 nt, Homo sapiens
  misc_RNA (1)...(19): siRNA sense strand
cuauggcccuaccaacuuu

SEQ ID NO: 1434107 - RNA, 19 nt, Homo sapiens
  misc_RNA (1)...(19): siRNA sense strand
gaaugcauccacccugaga

SEQ ID NO: 1434108 - RNA, 19 nt, Homo sapiens
  misc_RNA (1)...(19): siRNA sense strand
gccagaaaccuagauaaga

SEQ ID NO: 1434109 - RNA, 19 nt, Homo sapiens
  misc_RNA (1)...(19): siRNA sense strand
gcuacgcuuuggaaucuau

SEQ ID NO: 1434110 - RNA, 19 nt, Homo sapiens
  misc_RNA (1)...(19): siRNA sense strand
gugaccaucucauugacaa

SEQ ID NO: 1434111 - RNA, 19 nt, Homo sapiens
  misc_RNA (1)...(19): siRNA sense strand
gaugggaggcugucagauc

SEQ ID NO: 1434112 - RNA, 19 nt, Homo sapiens
  misc_RNA (1)...(19): siRNA sense strand
gacaagcuguucccugcau

SEQ ID NO: 1434113 - RNA, 19 nt, Homo sapiens
  misc_RNA (1)...(19): siRNA sense strand
ggacugccucgcaauacuu

SEQ ID NO: 1434114 - RNA, 19 nt, Homo sapiens
  misc_RNA (1)...(19): siRNA sense strand
gacccacucugcguccuuu

SEQ ID NO: 1434115 - RNA, 19 nt, Homo sapiens
  misc_RNA (1)...(19): siRNA sense strand
caacuuugcacccaucauc

SEQ ID NO: 1434116 - RNA, 19 nt, Homo sapiens
  misc_RNA (1)...(19): siRNA sense strand
ccaugucagugaucauugu

SEQ ID NO: 1434117 - RNA, 19 nt, Homo sapiens
  misc_RNA (1)...(19): siRNA sense strand
gagcuuggccggacugaac

SEQ ID NO: 1434118 - RNA, 19 nt, Homo sapiens
  misc_RNA (1)...(19): siRNA sense strand
ccucgaaccugcccauguc

SEQ ID NO: 1434119 - RNA, 19 nt, Homo sapiens
  misc_RNA (1)...(19): siRNA sense strand
ggaauuaaaggacaaucgu

SEQ ID NO: 1434120 - RNA, 19 nt, Homo sapiens
  misc_RNA (1)...(19): siRNA sense strand
caggugcaaugcuccgauu

SEQ ID NO: 1434121 - RNA, 19 nt, Homo sapiens
  misc_RNA (1)...(19): siRNA sense strand
ucgcagaagugcccacaca

SEQ ID NO: 1434122 - RNA, 19 nt, Homo sapiens
  misc_RNA (1)...(19): siRNA sense strand
ucucagcucaggaauuaaa

SEQ ID NO: 1434123 - RNA, 19 nt, Homo sapiens
  misc_RNA (1)...(19): siRNA sense strand
aaacagaguacuccuuucu

SEQ ID NO: 1434124 - RNA, 19 nt, Homo sapiens
  misc_RNA (1)...(19): siRNA sense strand
cagcuugaguaccgcuuug

SEQ ID NO: 1434125 - RNA, 19 nt, Homo sapiens
  misc_RNA (1)...(19): siRNA sense strand
cacaacuggucucauacuu

SEQ ID NO: 1434126 - RNA, 19 nt, Homo sapiens
  misc_RNA (1)...(19): siRNA sense strand
cgcaauacuucaugcuguu

SEQ ID NO: 1434127 - RNA, 19 nt, Homo sapiens
  misc_RNA (1)...(19): siRNA sense strand
guacuccuuucuggacuau

SEQ ID NO: 1434128 - RNA, 19 nt, Homo sapiens
  misc_RNA (1)...(19): siRNA sense strand
gauuguguccagccaggua

SEQ ID NO: 1434129 - RNA, 19 nt, Homo sapiens
  misc_RNA (1)...(19): siRNA sense strand
ggagguagaggccagaaac

SEQ ID NO: 1434130 - RNA, 19 nt, Homo sapiens
  misc_RNA (1)...(19): siRNA sense strand
cgcaugaauuugccuugaa

SEQ ID NO: 1434131 - RNA, 19 nt, Homo sapiens
  misc_RNA (1)...(19): siRNA sense strand
ugguucagcuguccauuuc

SEQ ID NO: 1434132 - RNA, 19 nt, Homo sapiens
  misc_RNA (1)...(19): siRNA sense strand
cagcgugguucaggacuau

SEQ ID NO: 1434133 - RNA, 19 nt, Homo sapiens
  misc_RNA (1)...(19): siRNA sense strand
gaggccagaaaccuagaua

SEQ ID NO: 1434134 - RNA, 19 nt, Homo sapiens
  misc_RNA (1)...(19): siRNA sense strand
caagcuguucccugcauuu

SEQ ID NO: 1434135 - RNA, 19 nt, Homo sapiens
  misc_RNA (1)...(19): siRNA sense strand
ggucaaugaguaccugaug

SEQ ID NO: 1434136 - RNA, 19 nt, Homo sapiens
  misc_RNA (1)...(19): siRNA sense strand
cggcugaguuugaaugcau

SEQ ID NO: 1434137 - RNA, 19 nt, Homo sapiens
  misc_RNA (1)...(19): siRNA sense strand
ggcagucccggcugaguuu

SEQ ID NO: 1434138 - RNA, 19 nt, Homo sapiens
  misc_RNA (1)...(19): siRNA sense strand
cauggaagcguuucucagu

SEQ ID NO: 1434139 - RNA, 19 nt, Homo sapiens
  misc_RNA (1)...(19): siRNA sense strand
ggccagaaaccuagauaag

SEQ ID NO: 1434140 - RNA, 19 nt, Homo sapiens
  misc_RNA (1)...(19): siRNA sense strand
gcccugaguucuccaagac

SEQ ID NO: 1434141 - RNA, 19 nt, Homo sapiens
  misc_RNA (1)...(19): siRNA sense strand
uguggguggugcugacuuu

SEQ ID NO: 1434142 - RNA, 19 nt, Homo sapiens
  misc_RNA (1)...(19): siRNA sense strand
acaaggacaucggcuccaa

SEQ ID NO: 1434143 - RNA, 19 nt, Homo sapiens
  misc_RNA (1)...(19): siRNA sense strand
ccugugaccaucucauuga

SEQ ID NO: 1434144 - RNA, 19 nt, Homo sapiens
  misc_RNA (1)...(19): siRNA sense strand
ccgccagggugaugggaaa

SEQ ID NO: 1434145 - RNA, 19 nt, Homo sapiens
  misc_RNA (1)...(19): siRNA sense strand
gcagaagugcccacacaac

SEQ ID NO: 1434146 - RNA, 19 nt, Homo sapiens
  misc_RNA (1)...(19): siRNA sense strand
gcaauacuucaugcuguug

SEQ ID NO: 1434147 - RNA, 19 nt, Homo sapiens
  misc_RNA (1)...(19): siRNA sense strand
gcaggcauccagggcauug

SEQ ID NO: 1434148 - RNA, 19 nt, Homo sapiens
  misc_RNA (1)...(19): siRNA sense strand
ucgcaugaauuugccuuga

SEQ ID NO: 1434149 - RNA, 19 nt, Homo sapiens
  misc_RNA (1)...(19): siRNA sense strand
cuccaagacucuacagcuu

SEQ ID NO: 1434150 - RNA, 19 nt, Homo sapiens
  misc_RNA (1)...(19): siRNA sense strand
ggugcaaugcuccgauuau

SEQ ID NO: 1434151 - RNA, 19 nt, Homo sapiens
  misc_RNA (1)...(19): siRNA sense strand
gggacugccucgcaauacu

SEQ ID NO: 1434152 - RNA, 19 nt, Homo sapiens
  misc_RNA (1)...(19): siRNA sense strand
acuggcaggucucgcauga

SEQ ID NO: 1434153 - RNA, 19 nt, Homo sapiens
  misc_RNA (1)...(19): siRNA sense strand
ucaccugacucccuacacu

SEQ ID NO: 1434154 - RNA, 19 nt, Homo sapiens
  misc_RNA (1)...(19): siRNA sense strand
gcgacauugugcaguuugu

SEQ ID NO: 1434155 - RNA, 19 nt, Homo sapiens
  misc_RNA (1)...(19): siRNA sense strand
uaguaaccauggagguaga

SEQ ID NO: 1434156 - RNA, 19 nt, Homo sapiens
  misc_RNA (1)...(19): siRNA sense strand
gcccaugucagugaucauu

SEQ ID NO: 1434157 - RNA, 19 nt, Homo sapiens
  misc_RNA (1)...(19): siRNA sense strand
gaacaaccugaacccuaca

SEQ ID NO: 1434158 - RNA, 19 nt, Homo sapiens
  misc_RNA (1)...(19): siRNA sense strand
gaaaccuagauaagaagga

SEQ ID NO: 1434159 - RNA, 19 nt, Homo sapiens
  misc_RNA (1)...(19): siRNA sense strand
gcuuugagacaguccagaa

SEQ ID NO: 1434160 - RNA, 19 nt, Homo sapiens
  misc_RNA (1)...(19): siRNA sense strand
aacuauccgugucaagauu

SEQ ID NO: 1434161 - RNA, 19 nt, Homo sapiens
  misc_RNA (1)...(19): siRNA sense strand
agaccgugcucgcagaagu

SEQ ID NO: 1434162 - RNA, 19 nt, Homo sapiens
  misc_RNA (1)...(19): siRNA sense strand
ccgcgacauugugcaguuu

SEQ ID NO: 1434163 - RNA, 19 nt, Homo sapiens
  misc_RNA (1)...(19): siRNA sense strand
gaggcugucagaucaacuu

SEQ ID NO: 1434164 - RNA, 19 nt, Homo sapiens
  misc_RNA (1)...(19): siRNA sense strand
gcuuuggaaucuaugacau

SEQ ID NO: 1434165 - RNA, 19 nt, Homo sapiens
  misc_RNA (1)...(19): siRNA sense strand
cgacauugugcaguuugua

SEQ ID NO: 1434166 - RNA, 19 nt, Homo sapiens
  misc_RNA (1)...(19): siRNA sense strand
uguaguaaccauggaggua

SEQ ID NO: 1434167 - RNA, 19 nt, Homo sapiens
  misc_RNA (1)...(19): siRNA sense strand
gcugucagaucaacuucac

SEQ ID NO: 1434168 - RNA, 19 nt, Homo sapiens
  misc_RNA (1)...(19): siRNA sense strand
uuaaaggacaaucguguag

SEQ ID NO: 1434169 - RNA, 19 nt, Homo sapiens
  misc_RNA (1)...(19): siRNA sense strand
ucuauggcccuaccaacuu

SEQ ID NO: 1434170 - RNA, 19 nt, Homo sapiens
  misc_RNA (1)...(19): siRNA sense strand
augggaggcugucagauca

SEQ ID NO: 1434171 - RNA, 19 nt, Homo sapiens
  misc_RNA (1)...(19): siRNA sense strand
ccagggugaugggaaaugg

SEQ ID NO: 1434172 - RNA, 19 nt, Homo sapiens
  misc_RNA (1)...(19): siRNA sense strand
cagcucaggaauuaaagga

SEQ ID NO: 1434173 - RNA, 19 nt, Homo sapiens
  misc_RNA (1)...(19): siRNA sense strand
cagaagugcccacacaacu

SEQ ID NO: 1434174 - RNA, 19 nt, Homo sapiens
  misc_RNA (1)...(19): siRNA sense strand
acaagcuguucccugcauu

SEQ ID NO: 1434175 - RNA, 19 nt, Homo sapiens
  misc_RNA (1)...(19): siRNA sense strand
aagaaaagcuacaagaacu

SEQ ID NO: 1434176 - RNA, 19 nt, Homo sapiens
  misc_RNA (1)...(19): siRNA sense strand
gcauccacccugagaagca

SEQ ID NO: 1434177 - RNA, 19 nt, Homo sapiens
  misc_RNA (1)...(19): siRNA sense strand
acuccuuucuggacuaugu

SEQ ID NO: 1434178 - RNA, 19 nt, Homo sapiens
  misc_RNA (1)...(19): siRNA sense strand
ggguggugcugacuuugag

SEQ ID NO: 1434179 - RNA, 19 nt, Homo sapiens
  misc_RNA (1)...(19): siRNA sense strand
ccacacaacuggucucaua

SEQ ID NO: 1434180 - RNA, 19 nt, Homo sapiens
  misc_RNA (1)...(19): siRNA sense strand
gaucugaggucaucaagaa

SEQ ID NO: 1434181 - RNA, 19 nt, Homo sapiens
  misc_RNA (1)...(19): siRNA sense strand
ggucucagcucaggaauua

SEQ ID NO: 1434182 - RNA, 19 nt, Homo sapiens
  misc_RNA (1)...(19): siRNA sense strand
ccagaaaccuagauaagaa

SEQ ID NO: 1434183 - RNA, 19 nt, Homo sapiens
  misc_RNA (1)...(19): siRNA sense strand
caacuggucucauacuuca

SEQ ID NO: 1434184 - RNA, 19 nt, Homo sapiens
  misc_RNA (1)...(19): siRNA sense strand
ggacuucacuggcuccaau

SEQ ID NO: 1434185 - RNA, 19 nt, Homo sapiens
  misc_RNA (1)...(19): siRNA sense strand
guacagaucugaggucauc

SEQ ID NO: 1434186 - RNA, 19 nt, Homo sapiens
  misc_RNA (1)...(19): siRNA sense strand
aaaggacaaucguguagua

SEQ ID NO: 1434187 - RNA, 19 nt, Homo sapiens
  misc_RNA (1)...(19): siRNA sense strand
gcaggucucgcaugaauuu

SEQ ID NO: 1434188 - RNA, 19 nt, Homo sapiens
  misc_RNA (1)...(19): siRNA sense strand
caagaacucuggaacuauc

SEQ ID NO: 1434189 - RNA, 19 nt, Homo sapiens
  misc_RNA (1)...(19): siRNA sense strand
caacaggggucaaugagua

SEQ ID NO: 1434190 - RNA, 19 nt, Homo sapiens
  misc_RNA (1)...(19): siRNA sense strand
uacaagaacucuggaacua

SEQ ID NO: 1434191 - RNA, 19 nt, Homo sapiens
  misc_RNA (1)...(19): siRNA sense strand
gcugagggaugaugacuuc

SEQ ID NO: 1434192 - RNA, 19 nt, Homo sapiens
  misc_RNA (1)...(19): siRNA sense strand
gcaugaauuugccuugaau

SEQ ID NO: 1434193 - RNA, 19 nt, Homo sapiens
  misc_RNA (1)...(19): siRNA sense strand
gagggaugaugacuuccua

SEQ ID NO: 1434194 - RNA, 19 nt, Homo sapiens
  misc_RNA (1)...(19): siRNA sense strand
ggacaucggcuccaagucu

SEQ ID NO: 1434195 - RNA, 19 nt, Homo sapiens
  misc_RNA (1)...(19): siRNA sense strand
cgccagagcugagggauga

SEQ ID NO: 1434196 - RNA, 19 nt, Homo sapiens
  misc_RNA (1)...(19): siRNA sense strand
ggaacuauccgugucaaga

SEQ ID NO: 1434197 - RNA, 19 nt, Homo sapiens
  misc_RNA (1)...(19): siRNA sense strand
gaacuauccgugucaagau

SEQ ID NO: 1434198 - RNA, 19 nt, Homo sapiens
  misc_RNA (1)...(19): siRNA sense strand
caagauuugucggguagaa

SEQ ID NO: 1434199 - RNA, 19 nt, Homo sapiens
  misc_RNA (1)...(19): siRNA sense strand
gcagcgugguucaggacua

SEQ ID NO: 1434200 - RNA, 19 nt, Homo sapiens
  misc_RNA (1)...(19): siRNA sense strand
gcuguucccugcauuugga

SEQ ID NO: 1434201 - RNA, 19 nt, Homo sapiens
  misc_RNA (1)...(19): siRNA sense strand
agaaacagaguacuccuuu

SEQ ID NO: 1434202 - RNA, 19 nt, Homo sapiens
  misc_RNA (1)...(19): siRNA sense strand
gguagaggccagaaaccua

SEQ ID NO: 1434203 - RNA, 19 nt, Homo sapiens
  misc_RNA (1)...(19): siRNA sense strand
gugcaaugcuccgauuaug

SEQ ID NO: 1434204 - RNA, 19 nt, Homo sapiens
  misc_RNA (1)...(19): siRNA sense strand
uggcaggucucgcaugaau

SEQ ID NO: 1434205 - RNA, 19 nt, Homo sapiens
  misc_RNA (1)...(19): siRNA sense strand
ggacaaucguguaguaacc

SEQ ID NO: 1434206 - RNA, 19 nt, Homo sapiens
  misc_RNA (1)...(19): siRNA sense strand
cuauggcccuaccaacuuu

SEQ ID NO: 1434207 - RNA, 19 nt, Homo sapiens
  misc_RNA (1)...(19): siRNA sense strand
gaaugcauccacccugaga

SEQ ID NO: 1434208 - RNA, 19 nt, Homo sapiens
  misc_RNA (1)...(19): siRNA sense strand
gccagaaaccuagauaaga

SEQ ID NO: 1434209 - RNA, 19 nt, Homo sapiens
  misc_RNA (1)...(19): siRNA sense strand
gcuacgcuuuggaaucuau

SEQ ID NO: 1434210 - RNA, 19 nt, Homo sapiens
  misc_RNA (1)...(19): siRNA sense strand
gugaccaucucauugacaa

SEQ ID NO: 1434211 - RNA, 19 nt, Homo sapiens
  misc_RNA (1)...(19): siRNA sense strand
gaugggaggcugucagauc

SEQ ID NO: 1434212 - RNA, 19 nt, Homo sapiens
  misc_RNA (1)...(19): siRNA sense strand
gacaagcuguucccugcau

SEQ ID NO: 1434213 - RNA, 19 nt, Homo sapiens
  misc_RNA (1)...(19): siRNA sense strand
ggacugccucgcaauacuu

SEQ ID NO: 1434214 - RNA, 19 nt, Homo sapiens
  misc_RNA (1)...(19): siRNA sense strand
gacccacucugcguccuuu

SEQ ID NO: 1434215 - RNA, 19 nt, Homo sapiens
  misc_RNA (1)...(19): siRNA sense strand
caacuuugcacccaucauc

SEQ ID NO: 1434216 - RNA, 19 nt, Homo sapiens
  misc_RNA (1)...(19): siRNA sense strand
ccaugucagugaucauugu

SEQ ID NO: 1434217 - RNA, 19 nt, Homo sapiens
  misc_RNA (1)...(19): siRNA sense strand
gagcuuggccggacugaac

SEQ ID NO: 1434218 - RNA, 19 nt, Homo sapiens
  misc_RNA (1)...(19): siRNA sense strand
ccucgaaccugcccauguc

SEQ ID NO: 1434219 - RNA, 19 nt, Homo sapiens
  misc_RNA (1)...(19): siRNA sense strand
ggaauuaaaggacaaucgu

SEQ ID NO: 1434220 - RNA, 19 nt, Homo sapiens
  misc_RNA (1)...(19): siRNA sense strand
caggugcaaugcuccgauu

SEQ ID NO: 1434221 - RNA, 19 nt, Homo sapiens
  misc_RNA (1)...(19): siRNA sense strand
ucgcagaagugcccacaca

SEQ ID NO: 1434222 - RNA, 19 nt, Homo sapiens
  misc_RNA (1)...(19): siRNA sense strand
ucucagcucaggaauuaaa

SEQ ID NO: 1434223 - RNA, 19 nt, Homo sapiens
  misc_RNA (1)...(19): siRNA sense strand
aaacagaguacuccuuucu

SEQ ID NO: 1434224 - RNA, 19 nt, Homo sapiens
  misc_RNA (1)...(19): siRNA sense strand
cagcuugaguaccgcuuug

SEQ ID NO: 1434225 - RNA, 19 nt, Homo sapiens
  misc_RNA (1)...(19): siRNA sense strand
cacaacuggucucauacuu

SEQ ID NO: 1434226 - RNA, 19 nt, Homo sapiens
  misc_RNA (1)...(19): siRNA sense strand
cgcaauacuucaugcuguu

SEQ ID NO: 1434227 - RNA, 19 nt, Homo sapiens
  misc_RNA (1)...(19): siRNA sense strand
guacuccuuucuggacuau

SEQ ID NO: 1434228 - RNA, 19 nt, Homo sapiens
  misc_RNA (1)...(19): siRNA sense strand
gauuguguccagccaggua

SEQ ID NO: 1434229 - RNA, 19 nt, Homo sapiens
  misc_RNA (1)...(19): siRNA sense strand
ggagguagaggccagaaac

SEQ ID NO: 1434230 - RNA, 19 nt, Homo sapiens
  misc_RNA (1)...(19): siRNA sense strand
cgcaugaauuugccuugaa

SEQ ID NO: 1434231 - RNA, 19 nt, Homo sapiens
  misc_RNA (1)...(19): siRNA sense strand
ugguucagcuguccauuuc

SEQ ID NO: 1434232 - RNA, 19 nt, Homo sapiens
  misc_RNA (1)...(19): siRNA sense strand
cagcgugguucaggacuau

SEQ ID NO: 1434233 - RNA, 19 nt, Homo sapiens
  misc_RNA (1)...(19): siRNA sense strand
gaggccagaaaccuagaua

SEQ ID NO: 1434234 - RNA, 19 nt, Homo sapiens
  misc_RNA (1)...(19): siRNA sense strand
caagcuguucccugcauuu

SEQ ID NO: 1434235 - RNA, 19 nt, Homo sapiens
  misc_RNA (1)...(19): siRNA sense strand
ggucaaugaguaccugaug

SEQ ID NO: 1434236 - RNA, 19 nt, Homo sapiens
  misc_RNA (1)...(19): siRNA sense strand
cggcugaguuugaaugcau

SEQ ID NO: 1434237 - RNA, 19 nt, Homo sapiens
  misc_RNA (1)...(19): siRNA sense strand
ggcagucccggcugaguuu

SEQ ID NO: 1434238 - RNA, 19 nt, Homo sapiens
  misc_RNA (1)...(19): siRNA sense strand
cauggaagcguuucucagu

SEQ ID NO: 1434239 - RNA, 19 nt, Homo sapiens
  misc_RNA (1)...(19): siRNA sense strand
ggccagaaaccuagauaag

SEQ ID NO: 1434240 - RNA, 19 nt, Homo sapiens
  misc_RNA (1)...(19): siRNA sense strand
gcccugaguucuccaagac

SEQ ID NO: 1434241 - RNA, 19 nt, Homo sapiens
  misc_RNA (1)...(19): siRNA sense strand
uguggguggugcugacuuu

SEQ ID NO: 1434242 - RNA, 19 nt, Homo sapiens
  misc_RNA (1)...(19): siRNA sense strand
acaaggacaucggcuccaa

SEQ ID NO: 1434243 - RNA, 19 nt, Homo sapiens
  misc_RNA (1)...(19): siRNA sense strand
ccugugaccaucucauuga

SEQ ID NO: 1434244 - RNA, 19 nt, Homo sapiens
  misc_RNA (1)...(19): siRNA sense strand
ccgccagggugaugggaaa

SEQ ID NO: 1434245 - RNA, 19 nt, Homo sapiens
  misc_RNA (1)...(19): siRNA sense strand
gcagaagugcccacacaac

SEQ ID NO: 1434246 - RNA, 19 nt, Homo sapiens
  misc_RNA (1)...(19): siRNA sense strand
gcaauacuucaugcuguug

SEQ ID NO: 1434247 - RNA, 19 nt, Homo sapiens
  misc_RNA (1)...(19): siRNA sense strand
gcaggcauccagggcauug

SEQ ID NO: 1434248 - RNA, 19 nt, Homo sapiens
  misc_RNA (1)...(19): siRNA sense strand
ucgcaugaauuugccuuga

SEQ ID NO: 1434249 - RNA, 19 nt, Homo sapiens
  misc_RNA (1)...(19): siRNA sense strand
cuccaagacucuacagcuu

SEQ ID NO: 1434250 - RNA, 19 nt, Homo sapiens
  misc_RNA (1)...(19): siRNA sense strand
ggugcaaugcuccgauuau

SEQ ID NO: 1434251 - RNA, 19 nt, Homo sapiens
  misc_RNA (1)...(19): siRNA sense strand
gggacugccucgcaauacu

SEQ ID NO: 1434252 - RNA, 19 nt, Homo sapiens
  misc_RNA (1)...(19): siRNA sense strand
acuggcaggucucgcauga

SEQ ID NO: 1434253 - RNA, 19 nt, Homo sapiens
  misc_RNA (1)...(19): siRNA sense strand
ucaccugacucccuacacu

SEQ ID NO: 1434254 - RNA, 19 nt, Homo sapiens
  misc_RNA (1)...(19): siRNA sense strand
gcgacauugugcaguuugu

SEQ ID NO: 1434255 - RNA, 19 nt, Homo sapiens
  misc_RNA (1)...(19): siRNA sense strand
uaguaaccauggagguaga

SEQ ID NO: 1434256 - RNA, 19 nt, Homo sapiens
  misc_RNA (1)...(19): siRNA sense strand
gcccaugucagugaucauu

SEQ ID NO: 1434257 - RNA, 19 nt, Homo sapiens
  misc_RNA (1)...(19): siRNA sense strand
gaacaaccugaacccuaca

SEQ ID NO: 1434258 - RNA, 19 nt, Homo sapiens
  misc_RNA (1)...(19): siRNA sense strand
gaaaccuagauaagaagga

SEQ ID NO: 1434259 - RNA, 19 nt, Homo sapiens
  misc_RNA (1)...(19): siRNA sense strand
gcuuugagacaguccagaa

SEQ ID NO: 1434260 - RNA, 19 nt, Homo sapiens
  misc_RNA (1)...(19): siRNA sense strand
aacuauccgugucaagauu

SEQ ID NO: 1434261 - RNA, 19 nt, Homo sapiens
  misc_RNA (1)...(19): siRNA sense strand
agaccgugcucgcagaagu

SEQ ID NO: 1434262 - RNA, 19 nt, Homo sapiens
  misc_RNA (1)...(19): siRNA sense strand
ccgcgacauugugcaguuu

SEQ ID NO: 1434263 - RNA, 19 nt, Homo sapiens
  misc_RNA (1)...(19): siRNA sense strand
gaggcugucagaucaacuu

SEQ ID NO: 1434264 - RNA, 19 nt, Homo sapiens
  misc_RNA (1)...(19): siRNA sense strand
gcuuuggaaucuaugacau

SEQ ID NO: 1434265 - RNA, 19 nt, Homo sapiens
  misc_RNA (1)...(19): siRNA sense strand
cgacauugugcaguuugua

SEQ ID NO: 1434266 - RNA, 19 nt, Homo sapiens
  misc_RNA (1)...(19): siRNA sense strand
uguaguaaccauggaggua

SEQ ID NO: 1434267 - RNA, 19 nt, Homo sapiens
  misc_RNA (1)...(19): siRNA sense strand
gcugucagaucaacuucac

SEQ ID NO: 1434268 - RNA, 19 nt, Homo sapiens
  misc_RNA (1)...(19): siRNA sense strand
uuaaaggacaaucguguag

SEQ ID NO: 1434269 - RNA, 19 nt, Homo sapiens
  misc_RNA (1)...(19): siRNA sense strand
ucuauggcccuaccaacuu

SEQ ID NO: 1434270 - RNA, 19 nt, Homo sapiens
  misc_RNA (1)...(19): siRNA sense strand
augggaggcugucagauca

SEQ ID NO: 1434271 - RNA, 19 nt, Homo sapiens
  misc_RNA (1)...(19): siRNA sense strand
ccagggugaugggaaaugg

SEQ ID NO: 1434272 - RNA, 19 nt, Homo sapiens
  misc_RNA (1)...(19): siRNA sense strand
cagcucaggaauuaaagga

SEQ ID NO: 1434273 - RNA, 19 nt, Homo sapiens
  misc_RNA (1)...(19): siRNA sense strand
cagaagugcccacacaacu

SEQ ID NO: 1434274 - RNA, 19 nt, Homo sapiens
  misc_RNA (1)...(19): siRNA sense strand
acaagcuguucccugcauu

SEQ ID NO: 1434275 - RNA, 19 nt, Homo sapiens
  misc_RNA (1)...(19): siRNA sense strand
aagaaaagcuacaagaacu

SEQ ID NO: 1434276 - RNA, 19 nt, Homo sapiens
  misc_RNA (1)...(19): siRNA sense strand
gcauccacccugagaagca

SEQ ID NO: 1434277 - RNA, 19 nt, Homo sapiens
  misc_RNA (1)...(19): siRNA sense strand
acuccuuucuggacuaugu

SEQ ID NO: 1434278 - RNA, 19 nt, Homo sapiens
  misc_RNA (1)...(19): siRNA sense strand
ggguggugcugacuuugag

SEQ ID NO: 1434279 - RNA, 19 nt, Homo sapiens
  misc_RNA (1)...(19): siRNA sense strand
ccacacaacuggucucaua

SEQ ID NO: 1434280 - RNA, 19 nt, Homo sapiens
  misc_RNA (1)...(19): siRNA sense strand
gaucugaggucaucaagaa

SEQ ID NO: 1434281 - RNA, 19 nt, Homo sapiens
  misc_RNA (1)...(19): siRNA sense strand
ggucucagcucaggaauua

SEQ ID NO: 1434282 - RNA, 19 nt, Homo sapiens
  misc_RNA (1)...(19): siRNA sense strand
ccagaaaccuagauaagaa

SEQ ID NO: 1434283 - RNA, 19 nt, Homo sapiens
  misc_RNA (1)...(19): siRNA sense strand
caacuggucucauacuuca

SEQ ID NO: 1434284 - RNA, 19 nt, Homo sapiens
  misc_RNA (1)...(19): siRNA sense strand
ggacuucacuggcuccaau

SEQ ID NO: 1434285 - RNA, 19 nt, Homo sapiens
  misc_RNA (1)...(19): siRNA sense strand
guacagaucugaggucauc

SEQ ID NO: 1434286 - RNA, 19 nt, Homo sapiens
  misc_RNA (1)...(19): siRNA sense strand
aaaggacaaucguguagua

SEQ ID NO: 1434287 - RNA, 19 nt, Homo sapiens
  misc_RNA (1)...(19): siRNA sense strand
gcaggucucgcaugaauuu

SEQ ID NO: 1434288 - RNA, 19 nt, Homo sapiens
  misc_RNA (1)...(19): siRNA sense strand
caagaacucuggaacuauc

SEQ ID NO: 1434289 - RNA, 19 nt, Homo sapiens
  misc_RNA (1)...(19): siRNA sense strand
caacaggggucaaugagua

SEQ ID NO: 1434290 - RNA, 19 nt, Homo sapiens
  misc_RNA (1)...(19): siRNA sense strand
uacaagaacucuggaacua

SEQ ID NO: 1434291 - RNA, 19 nt, Homo sapiens
  misc_RNA (1)...(19): siRNA sense strand
gcugagggaugaugacuuc

SEQ ID NO: 1434292 - RNA, 19 nt, Homo sapiens
  misc_RNA (1)...(19): siRNA sense strand
gcaugaauuugccuugaau

SEQ ID NO: 1434293 - RNA, 19 nt, Homo sapiens
  misc_RNA (1)...(19): siRNA sense strand
gagggaugaugacuuccua

SEQ ID NO: 1434294 - RNA, 19 nt, Homo sapiens
  misc_RNA (1)...(19): siRNA sense strand
ggacaucggcuccaagucu

SEQ ID NO: 1434295 - RNA, 19 nt, Homo sapiens
  misc_RNA (1)...(19): siRNA sense strand
cgccagagcugagggauga

SEQ ID NO: 1434296 - RNA, 19 nt, Homo sapiens
  misc_RNA (1)...(19): siRNA sense strand
ggaacuauccgugucaaga

SEQ ID NO: 1434297 - RNA, 19 nt, Homo sapiens
  misc_RNA (1)...(19): siRNA sense strand
gaacuauccgugucaagau

SEQ ID NO: 1434298 - RNA, 19 nt, Homo sapiens
  misc_RNA (1)...(19): siRNA sense strand
caagauuugucggguagaa

SEQ ID NO: 1434299 - RNA, 19 nt, Homo sapiens
  misc_RNA (1)...(19): siRNA sense strand
gcagcgugguucaggacua

SEQ ID NO: 1434300 - RNA, 19 nt, Homo sapiens
  misc_RNA (1)...(19): siRNA sense strand
gcuguucccugcauuugga

SEQ ID NO: 1434301 - RNA, 19 nt, Homo sapiens
  misc_RNA (1)...(19): siRNA sense strand
agaaacagaguacuccuuu

SEQ ID NO: 1434302 - RNA, 19 nt, Homo sapiens
  misc_RNA (1)...(19): siRNA sense strand
gguagaggccagaaaccua

SEQ ID NO: 1434303 - RNA, 19 nt, Homo sapiens
  misc_RNA (1)...(19): siRNA sense strand
gugcaaugcuccgauuaug

SEQ ID NO: 1434304 - RNA, 19 nt, Homo sapiens
  misc_RNA (1)...(19): siRNA sense strand
uggcaggucucgcaugaau

SEQ ID NO: 1434305 - RNA, 19 nt, Homo sapiens
  misc_RNA (1)...(19): siRNA sense strand
ggacaaucguguaguaacc

SEQ ID NO: 1434306 - RNA, 19 nt, Homo sapiens
  misc_RNA (1)...(19): siRNA sense strand
cuauggcccuaccaacuuu

SEQ ID NO: 1434307 - RNA, 19 nt, Homo sapiens
  misc_RNA (1)...(19): siRNA sense strand
gaaugcauccacccugaga

SEQ ID NO: 1434308 - RNA, 19 nt, Homo sapiens
  misc_RNA (1)...(19): siRNA sense strand
gccagaaaccuagauaaga

SEQ ID NO: 1434309 - RNA, 19 nt, Homo sapiens
  misc_RNA (1)...(19): siRNA sense strand
gcuacgcuuuggaaucuau

SEQ ID NO: 1434310 - RNA, 19 nt, Homo sapiens
  misc_RNA (1)...(19): siRNA sense strand
gugaccaucucauugacaa

SEQ ID NO: 1434311 - RNA, 19 nt, Homo sapiens
  misc_RNA (1)...(19): siRNA sense strand
gaugggaggcugucagauc

SEQ ID NO: 1434312 - RNA, 19 nt, Homo sapiens
  misc_RNA (1)...(19): siRNA sense strand
gacaagcuguucccugcau

SEQ ID NO: 1434313 - RNA, 19 nt, Homo sapiens
  misc_RNA (1)...(19): siRNA sense strand
ggacugccucgcaauacuu

SEQ ID NO: 1434314 - RNA, 19 nt, Homo sapiens
  misc_RNA (1)...(19): siRNA sense strand
gacccacucugcguccuuu

SEQ ID NO: 1434315 - RNA, 19 nt, Homo sapiens
  misc_RNA (1)...(19): siRNA sense strand
caacuuugcacccaucauc

SEQ ID NO: 1434316 - RNA, 19 nt, Homo sapiens
  misc_RNA (1)...(19): siRNA sense strand
ccaugucagugaucauugu

SEQ ID NO: 1434317 - RNA, 19 nt, Homo sapiens
  misc_RNA (1)...(19): siRNA sense strand
gagcuuggccggacugaac

SEQ ID NO: 1434318 - RNA, 19 nt, Homo sapiens
  misc_RNA (1)...(19): siRNA sense strand
ccucgaaccugcccauguc

SEQ ID NO: 1434319 - RNA, 19 nt, Homo sapiens
  misc_RNA (1)...(19): siRNA sense strand
ggaauuaaaggacaaucgu

SEQ ID NO: 1434320 - RNA, 19 nt, Homo sapiens
  misc_RNA (1)...(19): siRNA sense strand
caggugcaaugcuccgauu

SEQ ID NO: 1434321 - RNA, 19 nt, Homo sapiens
  misc_RNA (1)...(19): siRNA sense strand
ucgcagaagugcccacaca

SEQ ID NO: 1434322 - RNA, 19 nt, Homo sapiens
  misc_RNA (1)...(19): siRNA sense strand
ucucagcucaggaauuaaa

SEQ ID NO: 1434323 - RNA, 19 nt, Homo sapiens
  misc_RNA (1)...(19): siRNA sense strand
aaacagaguacuccuuucu

SEQ ID NO: 1434324 - RNA, 19 nt, Homo sapiens
  misc_RNA (1)...(19): siRNA sense strand
cagcuugaguaccgcuuug

SEQ ID NO: 1434325 - RNA, 19 nt, Homo sapiens
  misc_RNA (1)...(19): siRNA sense strand
cacaacuggucucauacuu

SEQ ID NO: 1434326 - RNA, 19 nt, Homo sapiens
  misc_RNA (1)...(19): siRNA sense strand
cgcaauacuucaugcuguu

SEQ ID NO: 1434327 - RNA, 19 nt, Homo sapiens
  misc_RNA (1)...(19): siRNA sense strand
guacuccuuucuggacuau

SEQ ID NO: 1434328 - RNA, 19 nt, Homo sapiens
  misc_RNA (1)...(19): siRNA sense strand
gauuguguccagccaggua

SEQ ID NO: 1434329 - RNA, 19 nt, Homo sapiens
  misc_RNA (1)...(19): siRNA sense strand
ggagguagaggccagaaac

SEQ ID NO: 1434330 - RNA, 19 nt, Homo sapiens
  misc_RNA (1)...(19): siRNA sense strand
cgcaugaauuugccuugaa

SEQ ID NO: 1434331 - RNA, 19 nt, Homo sapiens
  misc_RNA (1)...(19): siRNA sense strand
ugguucagcuguccauuuc

SEQ ID NO: 1434332 - RNA, 19 nt, Homo sapiens
  misc_RNA (1)...(19): siRNA sense strand
cagcgugguucaggacuau

SEQ ID NO: 1434333 - RNA, 19 nt, Homo sapiens
  misc_RNA (1)...(19): siRNA sense strand
gaggccagaaaccuagaua

SEQ ID NO: 1434334 - RNA, 19 nt, Homo sapiens
  misc_RNA (1)...(19): siRNA sense strand
caagcuguucccugcauuu

SEQ ID NO: 1434335 - RNA, 19 nt, Homo sapiens
  misc_RNA (1)...(19): siRNA sense strand
ggucaaugaguaccugaug

SEQ ID NO: 1434336 - RNA, 19 nt, Homo sapiens
  misc_RNA (1)...(19): siRNA sense strand
cggcugaguuugaaugcau

SEQ ID NO: 1434337 - RNA, 19 nt, Homo sapiens
  misc_RNA (1)...(19): siRNA sense strand
ggcagucccggcugaguuu

SEQ ID NO: 1434338 - RNA, 19 nt, Homo sapiens
  misc_RNA (1)...(19): siRNA sense strand
cauggaagcguuucucagu

SEQ ID NO: 1434339 - RNA, 19 nt, Homo sapiens
  misc_RNA (1)...(19): siRNA sense strand
ggccagaaaccuagauaag

SEQ ID NO: 1434340 - RNA, 19 nt, Homo sapiens
  misc_RNA (1)...(19): siRNA sense strand
gcccugaguucuccaagac

SEQ ID NO: 1434341 - RNA, 19 nt, Homo sapiens
  misc_RNA (1)...(19): siRNA sense strand
uguggguggugcugacuuu

SEQ ID NO: 1434342 - RNA, 19 nt, Homo sapiens
  misc_RNA (1)...(19): siRNA sense strand
acaaggacaucggcuccaa

SEQ ID NO: 1434343 - RNA, 19 nt, Homo sapiens
  misc_RNA (1)...(19): siRNA sense strand
ccugugaccaucucauuga

SEQ ID NO: 1434344 - RNA, 19 nt, Homo sapiens
  misc_RNA (1)...(19): siRNA sense strand
ccgccagggugaugggaaa

SEQ ID NO: 1434345 - RNA, 19 nt, Homo sapiens
  misc_RNA (1)...(19): siRNA sense strand
gcagaagugcccacacaac

SEQ ID NO: 1434346 - RNA, 19 nt, Homo sapiens
  misc_RNA (1)...(19): siRNA sense strand
gcaauacuucaugcuguug

SEQ ID NO: 1434347 - RNA, 19 nt, Homo sapiens
  misc_RNA (1)...(19): siRNA sense strand
gcaggcauccagggcauug

SEQ ID NO: 1434348 - RNA, 19 nt, Homo sapiens
  misc_RNA (1)...(19): siRNA sense strand
ucgcaugaauuugccuuga

SEQ ID NO: 1434349 - RNA, 19 nt, Homo sapiens
  misc_RNA (1)...(19): siRNA sense strand
cuccaagacucuacagcuu

SEQ ID NO: 1434350 - RNA, 19 nt, Homo sapiens
  misc_RNA (1)...(19): siRNA sense strand
ggugcaaugcuccgauuau

SEQ ID NO: 1434351 - RNA, 19 nt, Homo sapiens
  misc_RNA (1)...(19): siRNA sense strand
gggacugccucgcaauacu

SEQ ID NO: 1434352 - RNA, 19 nt, Homo sapiens
  misc_RNA (1)...(19): siRNA sense strand
acuggcaggucucgcauga

SEQ ID NO: 1434353 - RNA, 19 nt, Homo sapiens
  misc_RNA (1)...(19): siRNA sense strand
ucaccugacucccuacacu

SEQ ID NO: 1434354 - RNA, 19 nt, Homo sapiens
  misc_RNA (1)...(19): siRNA sense strand
gcgacauugugcaguuugu

SEQ ID NO: 1434355 - RNA, 19 nt, Homo sapiens
  misc_RNA (1)...(19): siRNA sense strand
uaguaaccauggagguaga

SEQ ID NO: 1434356 - RNA, 19 nt, Homo sapiens
  misc_RNA (1)...(19): siRNA sense strand
gcccaugucagugaucauu

SEQ ID NO: 1434357 - RNA, 19 nt, Homo sapiens
  misc_RNA (1)...(19): siRNA sense strand
gaacaaccugaacccuaca

SEQ ID NO: 1434358 - RNA, 19 nt, Homo sapiens
  misc_RNA (1)...(19): siRNA sense strand
gaaaccuagauaagaagga

SEQ ID NO: 1434359 - RNA, 19 nt, Homo sapiens
  misc_RNA (1)...(19): siRNA sense strand
gcuuugagacaguccagaa

SEQ ID NO: 1434360 - RNA, 19 nt, Homo sapiens
  misc_RNA (1)...(19): siRNA sense strand
aacuauccgugucaagauu

SEQ ID NO: 1434361 - RNA, 19 nt, Homo sapiens
  misc_RNA (1)...(19): siRNA sense strand
agaccgugcucgcagaagu

SEQ ID NO: 1434362 - RNA, 19 nt, Homo sapiens
  misc_RNA (1)...(19): siRNA sense strand
ccgcgacauugugcaguuu

SEQ ID NO: 1434363 - RNA, 19 nt, Homo sapiens
  misc_RNA (1)...(19): siRNA sense strand
gaggcugucagaucaacuu

SEQ ID NO: 1434364 - RNA, 19 nt, Homo sapiens
  misc_RNA (1)...(19): siRNA sense strand
gcuuuggaaucuaugacau

SEQ ID NO: 1434365 - RNA, 19 nt, Homo sapiens
  misc_RNA (1)...(19): siRNA sense strand
cgacauugugcaguuugua

SEQ ID NO: 1434366 - RNA, 19 nt, Homo sapiens
  misc_RNA (1)...(19): siRNA sense strand
uguaguaaccauggaggua

SEQ ID NO: 1434367 - RNA, 19 nt, Homo sapiens
  misc_RNA (1)...(19): siRNA sense strand
gcugucagaucaacuucac

SEQ ID NO: 1434368 - RNA, 19 nt, Homo sapiens
  misc_RNA (1)...(19): siRNA sense strand
uuaaaggacaaucguguag

SEQ ID NO: 1434369 - RNA, 19 nt, Homo sapiens
  misc_RNA (1)...(19): siRNA sense strand
ucuauggcccuaccaacuu

SEQ ID NO: 1434370 - RNA, 19 nt, Homo sapiens
  misc_RNA (1)...(19): siRNA sense strand
augggaggcugucagauca

SEQ ID NO: 1434371 - RNA, 19 nt, Homo sapiens
  misc_RNA (1)...(19): siRNA sense strand
ccagggugaugggaaaugg

SEQ ID NO: 1434372 - RNA, 19 nt, Homo sapiens
  misc_RNA (1)...(19): siRNA sense strand
cagcucaggaauuaaagga

SEQ ID NO: 1434373 - RNA, 19 nt, Homo sapiens
  misc_RNA (1)...(19): siRNA sense strand
cagaagugcccacacaacu

SEQ ID NO: 1434374 - RNA, 19 nt, Homo sapiens
  misc_RNA (1)...(19): siRNA sense strand
acaagcuguucccugcauu

SEQ ID NO: 1434375 - RNA, 19 nt, Homo sapiens
  misc_RNA (1)...(19): siRNA sense strand
aagaaaagcuacaagaacu

SEQ ID NO: 1434376 - RNA, 19 nt, Homo sapiens
  misc_RNA (1)...(19): siRNA sense strand
gcauccacccugagaagca

SEQ ID NO: 1434377 - RNA, 19 nt, Homo sapiens
  misc_RNA (1)...(19): siRNA sense strand
acuccuuucuggacuaugu

SEQ ID NO: 1434378 - RNA, 19 nt, Homo sapiens
  misc_RNA (1)...(19): siRNA sense strand
ggguggugcugacuuugag

SEQ ID NO: 1434379 - RNA, 19 nt, Homo sapiens
  misc_RNA (1)...(19): siRNA sense strand
ccacacaacuggucucaua

SEQ ID NO: 1434380 - RNA, 19 nt, Homo sapiens
  misc_RNA (1)...(19): siRNA sense strand
gaucugaggucaucaagaa

SEQ ID NO: 1434381 - RNA, 19 nt, Homo sapiens
  misc_RNA (1)...(19): siRNA sense strand
ggucucagcucaggaauua

SEQ ID NO: 1434382 - RNA, 19 nt, Homo sapiens
  misc_RNA (1)...(19): siRNA sense strand
ccagaaaccuagauaagaa

SEQ ID NO: 1434383 - RNA, 19 nt, Homo sapiens
  misc_RNA (1)...(19): siRNA sense strand
caacuggucucauacuuca

SEQ ID NO: 1434384 - RNA, 19 nt, Homo sapiens
  misc_RNA (1)...(19): siRNA sense strand
ggacuucacuggcuccaau

SEQ ID NO: 1434385 - RNA, 19 nt, Homo sapiens
  misc_RNA (1)...(19): siRNA sense strand
guacagaucugaggucauc

SEQ ID NO: 1434386 - RNA, 19 nt, Homo sapiens
  misc_RNA (1)...(19): siRNA sense strand
aaaggacaaucguguagua

SEQ ID NO: 1434387 - RNA, 19 nt, Homo sapiens
  misc_RNA (1)...(19): siRNA sense strand
gcaggucucgcaugaauuu

SEQ ID NO: 1434388 - RNA, 19 nt, Homo sapiens
  misc_RNA (1)...(19): siRNA sense strand
caagaacucuggaacuauc

SEQ ID NO: 1434389 - RNA, 19 nt, Homo sapiens
  misc_RNA (1)...(19): siRNA sense strand
caacaggggucaaugagua

SEQ ID NO: 1434390 - RNA, 19 nt, Homo sapiens
  misc_RNA (1)...(19): siRNA sense strand
uacaagaacucuggaacua

SEQ ID NO: 1434391 - RNA, 19 nt, Homo sapiens
  misc_RNA (1)...(19): siRNA sense strand
gcugagggaugaugacuuc

SEQ ID NO: 1434392 - RNA, 19 nt, Homo sapiens
  misc_RNA (1)...(19): siRNA sense strand
gcaugaauuugccuugaau

SEQ ID NO: 1434393 - RNA, 19 nt, Homo sapiens
  misc_RNA (1)...(19): siRNA sense strand
gagggaugaugacuuccua

SEQ ID NO: 1434394 - RNA, 19 nt, Homo sapiens
  misc_RNA (1)...(19): siRNA sense strand
ggacaucggcuccaagucu

SEQ ID NO: 1434395 - RNA, 19 nt, Homo sapiens
  misc_RNA (1)...(19): siRNA sense strand
cgccagagcugagggauga

SEQ ID NO: 1434396 - RNA, 19 nt, Homo sapiens
  misc_RNA (1)...(19): siRNA sense strand
ggaacuauccgugucaaga

SEQ ID NO: 1434397 - RNA, 19 nt, Homo sapiens
  misc_RNA (1)...(19): siRNA sense strand
gaacuauccgugucaagau

SEQ ID NO: 1434398 - RNA, 19 nt, Homo sapiens
  misc_RNA (1)...(19): siRNA sense strand
caagauuugucggguagaa

SEQ ID NO: 1434399 - RNA, 19 nt, Homo sapiens
  misc_RNA (1)...(19): siRNA sense strand
gcagcgugguucaggacua

SEQ ID NO: 1434400 - RNA, 19 nt, Homo sapiens
  misc_RNA (1)...(19): siRNA sense strand
gcuguucccugcauuugga

SEQ ID NO: 1434401 - RNA, 19 nt, Homo sapiens
  misc_RNA (1)...(19): siRNA sense strand
agaaacagaguacuccuuu

SEQ ID NO: 1434402 - RNA, 19 nt, Homo sapiens
  misc_RNA (1)...(19): siRNA sense strand
gguagaggccagaaaccua

SEQ ID NO: 1434403 - RNA, 19 nt, Homo sapiens
  misc_RNA (1)...(19): siRNA sense strand
gugcaaugcuccgauuaug

SEQ ID NO: 1434404 - RNA, 19 nt, Homo sapiens
  misc_RNA (1)...(19): siRNA sense strand
uggcaggucucgcaugaau

SEQ ID NO: 1434405 - RNA, 19 nt, Homo sapiens
  misc_RNA (1)...(19): siRNA sense strand
ggacaaucguguaguaacc

SEQ ID NO: 1434406 - RNA, 19 nt, Homo sapiens
  misc_RNA (1)...(19): siRNA sense strand
cuauggcccuaccaacuuu

SEQ ID NO: 1434407 - RNA, 19 nt, Homo sapiens
  misc_RNA (1)...(19): siRNA sense strand
gaaugcauccacccugaga

SEQ ID NO: 1434408 - RNA, 19 nt, Homo sapiens
  misc_RNA (1)...(19): siRNA sense strand
gccagaaaccuagauaaga

SEQ ID NO: 1434409 - RNA, 19 nt, Homo sapiens
  misc_RNA (1)...(19): siRNA sense strand
gcuacgcuuuggaaucuau

SEQ ID NO: 1434410 - RNA, 19 nt, Homo sapiens
  misc_RNA (1)...(19): siRNA sense strand
gugaccaucucauugacaa

SEQ ID NO: 1434411 - RNA, 19 nt, Homo sapiens
  misc_RNA (1)...(19): siRNA sense strand
gaugggaggcugucagauc

SEQ ID NO: 1434412 - RNA, 19 nt, Homo sapiens
  misc_RNA (1)...(19): siRNA sense strand
gacaagcuguucccugcau

SEQ ID NO: 1434413 - RNA, 19 nt, Homo sapiens
  misc_RNA (1)...(19): siRNA sense strand
ggacugccucgcaauacuu

SEQ ID NO: 1434414 - RNA, 19 nt, Homo sapiens
  misc_RNA (1)...(19): siRNA sense strand
gacccacucugcguccuuu

SEQ ID NO: 1434415 - RNA, 19 nt, Homo sapiens
  misc_RNA (1)...(19): siRNA sense strand
caacuuugcacccaucauc

SEQ ID NO: 1434416 - RNA, 19 nt, Homo sapiens
  misc_RNA (1)...(19): siRNA sense strand
ccaugucagugaucauugu

SEQ ID NO: 1434417 - RNA, 19 nt, Homo sapiens
  misc_RNA (1)...(19): siRNA sense strand
gagcuuggccggacugaac

SEQ ID NO: 1434418 - RNA, 19 nt, Homo sapiens
  misc_RNA (1)...(19): siRNA sense strand
ccucgaaccugcccauguc

SEQ ID NO: 1434419 - RNA, 19 nt, Homo sapiens
  misc_RNA (1)...(19): siRNA sense strand
ggaauuaaaggacaaucgu

SEQ ID NO: 1434420 - RNA, 19 nt, Homo sapiens
  misc_RNA (1)...(19): siRNA sense strand
caggugcaaugcuccgauu

SEQ ID NO: 1434421 - RNA, 19 nt, Homo sapiens
  misc_RNA (1)...(19): siRNA sense strand
ucgcagaagugcccacaca

SEQ ID NO: 1434422 - RNA, 19 nt, Homo sapiens
  misc_RNA (1)...(19): siRNA sense strand
ucucagcucaggaauuaaa

SEQ ID NO: 1434423 - RNA, 19 nt, Homo sapiens
  misc_RNA (1)...(19): siRNA sense strand
aaacagaguacuccuuucu

SEQ ID NO: 1434424 - RNA, 19 nt, Homo sapiens
  misc_RNA (1)...(19): siRNA sense strand
cagcuugaguaccgcuuug

SEQ ID NO: 1434425 - RNA, 19 nt, Homo sapiens
  misc_RNA (1)...(19): siRNA sense strand
cacaacuggucucauacuu

SEQ ID NO: 1434426 - RNA, 19 nt, Homo sapiens
  misc_RNA (1)...(19): siRNA sense strand
cgcaauacuucaugcuguu

SEQ ID NO: 1434427 - RNA, 19 nt, Homo sapiens
  misc_RNA (1)...(19): siRNA sense strand
guacuccuuucuggacuau

SEQ ID NO: 1434428 - RNA, 19 nt, Homo sapiens
  misc_RNA (1)...(19): siRNA sense strand
gauuguguccagccaggua

SEQ ID NO: 1434429 - RNA, 19 nt, Homo sapiens
  misc_RNA (1)...(19): siRNA sense strand
ggagguagaggccagaaac

SEQ ID NO: 1434430 - RNA, 19 nt, Homo sapiens
  misc_RNA (1)...(19): siRNA sense strand
cgcaugaauuugccuugaa

SEQ ID NO: 1434431 - RNA, 19 nt, Homo sapiens
  misc_RNA (1)...(19): siRNA sense strand
ugguucagcuguccauuuc

SEQ ID NO: 1434432 - RNA, 19 nt, Homo sapiens
  misc_RNA (1)...(19): siRNA sense strand
cagcgugguucaggacuau

SEQ ID NO: 1434433 - RNA, 19 nt, Homo sapiens
  misc_RNA (1)...(19): siRNA sense strand
gaggccagaaaccuagaua

SEQ ID NO: 1434434 - RNA, 19 nt, Homo sapiens
  misc_RNA (1)...(19): siRNA sense strand
caagcuguucccugcauuu

SEQ ID NO: 1434435 - RNA, 19 nt, Homo sapiens
  misc_RNA (1)...(19): siRNA sense strand
ggucaaugaguaccugaug

SEQ ID NO: 1434436 - RNA, 19 nt, Homo sapiens
  misc_RNA (1)...(19): siRNA sense strand
cggcugaguuugaaugcau

SEQ ID NO: 1434437 - RNA, 19 nt, Homo sapiens
  misc_RNA (1)...(19): siRNA sense strand
ggcagucccggcugaguuu

SEQ ID NO: 1434438 - RNA, 19 nt, Homo sapiens
  misc_RNA (1)...(19): siRNA sense strand
cauggaagcguuucucagu

SEQ ID NO: 1434439 - RNA, 19 nt, Homo sapiens
  misc_RNA (1)...(19): siRNA sense strand
ggccagaaaccuagauaag

SEQ ID NO: 1434440 - RNA, 19 nt, Homo sapiens
  misc_RNA (1)...(19): siRNA sense strand
gcccugaguucuccaagac

SEQ ID NO: 1434441 - RNA, 19 nt, Homo sapiens
  misc_RNA (1)...(19): siRNA sense strand
uguggguggugcugacuuu

SEQ ID NO: 1434442 - RNA, 19 nt, Homo sapiens
  misc_RNA (1)...(19): siRNA sense strand
acaaggacaucggcuccaa

SEQ ID NO: 1434443 - RNA, 19 nt, Homo sapiens
  misc_RNA (1)...(19): siRNA sense strand
ccugugaccaucucauuga

SEQ ID NO: 1434444 - RNA, 19 nt, Homo sapiens
  misc_RNA (1)...(19): siRNA sense strand
ccgccagggugaugggaaa

SEQ ID NO: 1434445 - RNA, 19 nt, Homo sapiens
  misc_RNA (1)...(19): siRNA sense strand
gcagaagugcccacacaac

SEQ ID NO: 1434446 - RNA, 19 nt, Homo sapiens
  misc_RNA (1)...(19): siRNA sense strand
gcaauacuucaugcuguug

SEQ ID NO: 1434447 - RNA, 19 nt, Homo sapiens
  misc_RNA (1)...(19): siRNA sense strand
gcaggcauccagggcauug

SEQ ID NO: 1434448 - RNA, 19 nt, Homo sapiens
  misc_RNA (1)...(19): siRNA sense strand
ucgcaugaauuugccuuga

SEQ ID NO: 1434449 - RNA, 19 nt, Homo sapiens
  misc_RNA (1)...(19): siRNA sense strand
cuccaagacucuacagcuu

SEQ ID NO: 1434450 - RNA, 19 nt, Homo sapiens
  misc_RNA (1)...(19): siRNA sense strand
ggugcaaugcuccgauuau

SEQ ID NO: 1434451 - RNA, 19 nt, Homo sapiens
  misc_RNA (1)...(19): siRNA sense strand
gggacugccucgcaauacu

SEQ ID NO: 1434452 - RNA, 19 nt, Homo sapiens
  misc_RNA (1)...(19): siRNA sense strand
acuggcaggucucgcauga

SEQ ID NO: 1434453 - RNA, 19 nt, Homo sapiens
  misc_RNA (1)...(19): siRNA sense strand
ucaccugacucccuacacu

SEQ ID NO: 1434454 - RNA, 19 nt, Homo sapiens
  misc_RNA (1)...(19): siRNA sense strand
gcgacauugugcaguuugu

SEQ ID NO: 1434455 - RNA, 19 nt, Homo sapiens
  misc_RNA (1)...(19): siRNA sense strand
uaguaaccauggagguaga

SEQ ID NO: 1434456 - RNA, 19 nt, Homo sapiens
  misc_RNA (1)...(19): siRNA sense strand
gcccaugucagugaucauu

SEQ ID NO: 1434457 - RNA, 19 nt, Homo sapiens
  misc_RNA (1)...(19): siRNA sense strand
gaacaaccugaacccuaca

SEQ ID NO: 1434458 - RNA, 19 nt, Homo sapiens
  misc_RNA (1)...(19): siRNA sense strand
gaaaccuagauaagaagga

SEQ ID NO: 1434459 - RNA, 19 nt, Homo sapiens
  misc_RNA (1)...(19): siRNA sense strand
gcuuugagacaguccagaa

SEQ ID NO: 1434460 - RNA, 19 nt, Homo sapiens
  misc_RNA (1)...(19): siRNA sense strand
aacuauccgugucaagauu

SEQ ID NO: 1434461 - RNA, 19 nt, Homo sapiens
  misc_RNA (1)...(19): siRNA sense strand
agaccgugcucgcagaagu

SEQ ID NO: 1434462 - RNA, 19 nt, Homo sapiens
  misc_RNA (1)...(19): siRNA sense strand
ccgcgacauugugcaguuu

SEQ ID NO: 1434463 - RNA, 19 nt, Homo sapiens
  misc_RNA (1)...(19): siRNA sense strand
gaggcugucagaucaacuu

SEQ ID NO: 1434464 - RNA, 19 nt, Homo sapiens
  misc_RNA (1)...(19): siRNA sense strand
gcuuuggaaucuaugacau

SEQ ID NO: 1434465 - RNA, 19 nt, Homo sapiens
  misc_RNA (1)...(19): siRNA sense strand
cgacauugugcaguuugua

SEQ ID NO: 1434466 - RNA, 19 nt, Homo sapiens
  misc_RNA (1)...(19): siRNA sense strand
uguaguaaccauggaggua

SEQ ID NO: 1434467 - RNA, 19 nt, Homo sapiens
  misc_RNA (1)...(19): siRNA sense strand
gcugucagaucaacuucac

SEQ ID NO: 1434468 - RNA, 19 nt, Homo sapiens
  misc_RNA (1)...(19): siRNA sense strand
uuaaaggacaaucguguag

SEQ ID NO: 1434469 - RNA, 19 nt, Homo sapiens
  misc_RNA (1)...(19): siRNA sense strand
ucuauggcccuaccaacuu

SEQ ID NO: 1434470 - RNA, 19 nt, Homo sapiens
  misc_RNA (1)...(19): siRNA sense strand
augggaggcugucagauca

SEQ ID NO: 1434471 - RNA, 19 nt, Homo sapiens
  misc_RNA (1)...(19): siRNA sense strand
ccagggugaugggaaaugg

SEQ ID NO: 1434472 - RNA, 19 nt, Homo sapiens
  misc_RNA (1)...(19): siRNA sense strand
cagcucaggaauuaaagga

SEQ ID NO: 1434473 - RNA, 19 nt, Homo sapiens
  misc_RNA (1)...(19): siRNA sense strand
cagaagugcccacacaacu

SEQ ID NO: 1434474 - RNA, 19 nt, Homo sapiens
  misc_RNA (1)...(19): siRNA sense strand
acaagcuguucccugcauu

SEQ ID NO: 1434475 - RNA, 19 nt, Homo sapiens
  misc_RNA (1)...(19): siRNA sense strand
aagaaaagcuacaagaacu

SEQ ID NO: 1434476 - RNA, 19 nt, Homo sapiens
  misc_RNA (1)...(19): siRNA sense strand
gcauccacccugagaagca

SEQ ID NO: 1434477 - RNA, 19 nt, Homo sapiens
  misc_RNA (1)...(19): siRNA sense strand
acuccuuucuggacuaugu

SEQ ID NO: 1434478 - RNA, 19 nt, Homo sapiens
  misc_RNA (1)...(19): siRNA sense strand
ggguggugcugacuuugag

SEQ ID NO: 1434479 - RNA, 19 nt, Homo sapiens
  misc_RNA (1)...(19): siRNA sense strand
ccacacaacuggucucaua

SEQ ID NO: 1434480 - RNA, 19 nt, Homo sapiens
  misc_RNA (1)...(19): siRNA sense strand
gaucugaggucaucaagaa

SEQ ID NO: 1434481 - RNA, 19 nt, Homo sapiens
  misc_RNA (1)...(19): siRNA sense strand
ggucucagcucaggaauua

SEQ ID NO: 1434482 - RNA, 19 nt, Homo sapiens
  misc_RNA (1)...(19): siRNA sense strand
ccagaaaccuagauaagaa

SEQ ID NO: 1434483 - RNA, 19 nt, Homo sapiens
  misc_RNA (1)...(19): siRNA sense strand
caacuggucucauacuuca

SEQ ID NO: 1434484 - RNA, 19 nt, Homo sapiens
  misc_RNA (1)...(19): siRNA sense strand
ggacuucacuggcuccaau

SEQ ID NO: 1434485 - RNA, 19 nt, Homo sapiens
  misc_RNA (1)...(19): siRNA sense strand
guacagaucugaggucauc

SEQ ID NO: 1434486 - RNA, 19 nt, Homo sapiens
  misc_RNA (1)...(19): siRNA sense strand
aaaggacaaucguguagua

SEQ ID NO: 1434487 - RNA, 19 nt, Homo sapiens
  misc_RNA (1)...(19): siRNA sense strand
gcaggucucgcaugaauuu

SEQ ID NO: 1434488 - RNA, 19 nt, Homo sapiens
  misc_RNA (1)...(19): siRNA sense strand
caagaacucuggaacuauc

SEQ ID NO: 1434489 - RNA, 19 nt, Homo sapiens
  misc_RNA (1)...(19): siRNA sense strand
caacaggggucaaugagua

SEQ ID NO: 1434490 - RNA, 19 nt, Homo sapiens
  misc_RNA (1)...(19): siRNA sense strand
uacaagaacucuggaacua

SEQ ID NO: 1434491 - RNA, 19 nt, Homo sapiens
  misc_RNA (1)...(19): siRNA sense strand
gcugagggaugaugacuuc

SEQ ID NO: 1434492 - RNA, 19 nt, Homo sapiens
  misc_RNA (1)...(19): siRNA sense strand
gcaugaauuugccuugaau

SEQ ID NO: 1434493 - RNA, 19 nt, Homo sapiens
  misc_RNA (1)...(19): siRNA sense strand
gagggaugaugacuuccua

SEQ ID NO: 1434494 - RNA, 19 nt, Homo sapiens
  misc_RNA (1)...(19): siRNA sense strand
ggacaucggcuccaagucu

SEQ ID NO: 1434495 - RNA, 19 nt, Homo sapiens
  misc_RNA (1)...(19): siRNA sense strand
cgccagagcugagggauga

SEQ ID NO: 1434496 - RNA, 19 nt, Homo sapiens
  misc_RNA (1)...(19): siRNA sense strand
ggaacuauccgugucaaga

SEQ ID NO: 1434497 - RNA, 19 nt, Homo sapiens
  misc_RNA (1)...(19): siRNA sense strand
gaacuauccgugucaagau

SEQ ID NO: 1434498 - RNA, 19 nt, Homo sapiens
  misc_RNA (1)...(19): siRNA sense strand
caagauuugucggguagaa

SEQ ID NO: 1434499 - RNA, 19 nt, Homo sapiens
  misc_RNA (1)...(19): siRNA sense strand
gcagcgugguucaggacua

SEQ ID NO: 1434500 - RNA, 19 nt, Homo sapiens
  misc_RNA (1)...(19): siRNA sense strand
gcuguucccugcauuugga

SEQ ID NO: 1434501 - RNA, 19 nt, Homo sapiens
  misc_RNA (1)...(19): siRNA sense strand
agaaacagaguacuccuuu

SEQ ID NO: 1434502 - RNA, 19 nt, Homo sapiens
  misc_RNA (1)...(19): siRNA sense strand
gguagaggccagaaaccua

SEQ ID NO: 1434503 - RNA, 19 nt, Homo sapiens
  misc_RNA (1)...(19): siRNA sense strand
gugcaaugcuccgauuaug

SEQ ID NO: 1434504 - RNA, 19 nt, Homo sapiens
  misc_RNA (1)...(19): siRNA sense strand
uggcaggucucgcaugaau

SEQ ID NO: 1434505 - RNA, 19 nt, Homo sapiens
  misc_RNA (1)...(19): siRNA sense strand
ggacaaucguguaguaacc

SEQ ID NO: 1434506 - RNA, 19 nt, Homo sapiens
  misc_RNA (1)...(19): siRNA sense strand
cuauggcccuaccaacuuu

SEQ ID NO: 1434507 - RNA, 19 nt, Homo sapiens
  misc_RNA (1)...(19): siRNA sense strand
gaaugcauccacccugaga

SEQ ID NO: 1434508 - RNA, 19 nt, Homo sapiens
  misc_RNA (1)...(19): siRNA sense strand
gccagaaaccuagauaaga

SEQ ID NO: 1434509 - RNA, 19 nt, Homo sapiens
  misc_RNA (1)...(19): siRNA sense strand
gcuacgcuuuggaaucuau

SEQ ID NO: 1434510 - RNA, 19 nt, Homo sapiens
  misc_RNA (1)...(19): siRNA sense strand
gugaccaucucauugacaa

SEQ ID NO: 1434511 - RNA, 19 nt, Homo sapiens
  misc_RNA (1)...(19): siRNA sense strand
gaugggaggcugucagauc

SEQ ID NO: 1434512 - RNA, 19 nt, Homo sapiens
  misc_RNA (1)...(19): siRNA sense strand
gacaagcuguucccugcau

SEQ ID NO: 1434513 - RNA, 19 nt, Homo sapiens
  misc_RNA (1)...(19): siRNA sense strand
ggacugccucgcaauacuu

SEQ ID NO: 1434514 - RNA, 19 nt, Homo sapiens
  misc_RNA (1)...(19): siRNA sense strand
gacccacucugcguccuuu

SEQ ID NO: 1434515 - RNA, 19 nt, Homo sapiens
  misc_RNA (1)...(19): siRNA sense strand
caacuuugcacccaucauc

SEQ ID NO: 1434516 - RNA, 19 nt, Homo sapiens
  misc_RNA (1)...(19): siRNA sense strand
ccaugucagugaucauugu

SEQ ID NO: 1434517 - RNA, 19 nt, Homo sapiens
  misc_RNA (1)...(19): siRNA sense strand
gagcuuggccggacugaac

SEQ ID NO: 1434518 - RNA, 19 nt, Homo sapiens
  misc_RNA (1)...(19): siRNA sense strand
ccucgaaccugcccauguc

SEQ ID NO: 1434519 - RNA, 19 nt, Homo sapiens
  misc_RNA (1)...(19): siRNA sense strand
ggaauuaaaggacaaucgu

SEQ ID NO: 1434520 - RNA, 19 nt, Homo sapiens
  misc_RNA (1)...(19): siRNA sense strand
caggugcaaugcuccgauu

SEQ ID NO: 1434521 - RNA, 19 nt, Homo sapiens
  misc_RNA (1)...(19): siRNA sense strand
ucgcagaagugcccacaca

SEQ ID NO: 1434522 - RNA, 19 nt, Homo sapiens
  misc_RNA (1)...(19): siRNA sense strand
ucucagcucaggaauuaaa

SEQ ID NO: 1434523 - RNA, 19 nt, Homo sapiens
  misc_RNA (1)...(19): siRNA sense strand
aaacagaguacuccuuucu

SEQ ID NO: 1434524 - RNA, 19 nt, Homo sapiens
  misc_RNA (1)...(19): siRNA sense strand
cagcuugaguaccgcuuug

SEQ ID NO: 1434525 - RNA, 19 nt, Homo sapiens
  misc_RNA (1)...(19): siRNA sense strand
cacaacuggucucauacuu

SEQ ID NO: 1434526 - RNA, 19 nt, Homo sapiens
  misc_RNA (1)...(19): siRNA sense strand
cgcaauacuucaugcuguu

SEQ ID NO: 1434527 - RNA, 19 nt, Homo sapiens
  misc_RNA (1)...(19): siRNA sense strand
guacuccuuucuggacuau

SEQ ID NO: 1434528 - RNA, 19 nt, Homo sapiens
  misc_RNA (1)...(19): siRNA sense strand
gauuguguccagccaggua

SEQ ID NO: 1434529 - RNA, 19 nt, Homo sapiens
  misc_RNA (1)...(19): siRNA sense strand
ggagguagaggccagaaac

SEQ ID NO: 1434530 - RNA, 19 nt, Homo sapiens
  misc_RNA (1)...(19): siRNA sense strand
cgcaugaauuugccuugaa

SEQ ID NO: 1434531 - RNA, 19 nt, Homo sapiens
  misc_RNA (1)...(19): siRNA sense strand
ugguucagcuguccauuuc

SEQ ID NO: 1434532 - RNA, 19 nt, Homo sapiens
  misc_RNA (1)...(19): siRNA sense strand
cagcgugguucaggacuau

SEQ ID NO: 1434533 - RNA, 19 nt, Homo sapiens
  misc_RNA (1)...(19): siRNA sense strand
gaggccagaaaccuagaua

SEQ ID NO: 1434534 - RNA, 19 nt, Homo sapiens
  misc_RNA (1)...(19): siRNA sense strand
caagcuguucccugcauuu

SEQ ID NO: 1434535 - RNA, 19 nt, Homo sapiens
  misc_RNA (1)...(19): siRNA sense strand
ggucaaugaguaccugaug

SEQ ID NO: 1434536 - RNA, 19 nt, Homo sapiens
  misc_RNA (1)...(19): siRNA sense strand
cggcugaguuugaaugcau

SEQ ID NO: 1434537 - RNA, 19 nt, Homo sapiens
  misc_RNA (1)...(19): siRNA sense strand
ggcagucccggcugaguuu

SEQ ID NO: 1434538 - RNA, 19 nt, Homo sapiens
  misc_RNA (1)...(19): siRNA sense strand
cauggaagcguuucucagu

SEQ ID NO: 1434539 - RNA, 19 nt, Homo sapiens
  misc_RNA (1)...(19): siRNA sense strand
ggccagaaaccuagauaag

SEQ ID NO: 1434540 - RNA, 19 nt, Homo sapiens
  misc_RNA (1)...(19): siRNA sense strand
gcccugaguucuccaagac

SEQ ID NO: 1434541 - RNA, 19 nt, Homo sapiens
  misc_RNA (1)...(19): siRNA sense strand
uguggguggugcugacuuu

SEQ ID NO: 1434542 - RNA, 19 nt, Homo sapiens
  misc_RNA (1)...(19): siRNA sense strand
acaaggacaucggcuccaa

SEQ ID NO: 1434543 - RNA, 19 nt, Homo sapiens
  misc_RNA (1)...(19): siRNA sense strand
ccugugaccaucucauuga

SEQ ID NO: 1434544 - RNA, 19 nt, Homo sapiens
  misc_RNA (1)...(19): siRNA sense strand
ccgccagggugaugggaaa

SEQ ID NO: 1434545 - RNA, 19 nt, Homo sapiens
  misc_RNA (1)...(19): siRNA sense strand
gcagaagugcccacacaac

SEQ ID NO: 1434546 - RNA, 19 nt, Homo sapiens
  misc_RNA (1)...(19): siRNA sense strand
gcaauacuucaugcuguug

SEQ ID NO: 1434547 - RNA, 19 nt, Homo sapiens
  misc_RNA (1)...(19): siRNA sense strand
gcaggcauccagggcauug

SEQ ID NO: 1434548 - RNA, 19 nt, Homo sapiens
  misc_RNA (1)...(19): siRNA sense strand
ucgcaugaauuugccuuga

SEQ ID NO: 1434549 - RNA, 19 nt, Homo sapiens
  misc_RNA (1)...(19): siRNA sense strand
cuccaagacucuacagcuu

SEQ ID NO: 1434550 - RNA, 19 nt, Homo sapiens
  misc_RNA (1)...(19): siRNA sense strand
ggugcaaugcuccgauuau

SEQ ID NO: 1434551 - RNA, 19 nt, Homo sapiens
  misc_RNA (1)...(19): siRNA sense strand
gggacugccucgcaauacu

SEQ ID NO: 1434552 - RNA, 19 nt, Homo sapiens
  misc_RNA (1)...(19): siRNA sense strand
acuggcaggucucgcauga

SEQ ID NO: 1434553 - RNA, 19 nt, Homo sapiens
  misc_RNA (1)...(19): siRNA sense strand
ucaccugacucccuacacu

SEQ ID NO: 1434554 - RNA, 19 nt, Homo sapiens
  misc_RNA (1)...(19): siRNA sense strand
gcgacauugugcaguuugu

SEQ ID NO: 1434555 - RNA, 19 nt, Homo sapiens
  misc_RNA (1)...(19): siRNA sense strand
uaguaaccauggagguaga

SEQ ID NO: 1434556 - RNA, 19 nt, Homo sapiens
  misc_RNA (1)...(19): siRNA sense strand
gcccaugucagugaucauu

SEQ ID NO: 1434557 - RNA, 19 nt, Homo sapiens
  misc_RNA (1)...(19): siRNA sense strand
gaacaaccugaacccuaca

SEQ ID NO: 1434558 - RNA, 19 nt, Homo sapiens
  misc_RNA (1)...(19): siRNA sense strand
gaaaccuagauaagaagga

SEQ ID NO: 1434559 - RNA, 19 nt, Homo sapiens
  misc_RNA (1)...(19): siRNA sense strand
gcuuugagacaguccagaa

SEQ ID NO: 1434560 - RNA, 19 nt, Homo sapiens
  misc_RNA (1)...(19): siRNA sense strand
aacuauccgugucaagauu

SEQ ID NO: 1434561 - RNA, 19 nt, Homo sapiens
  misc_RNA (1)...(19): siRNA sense strand
agaccgugcucgcagaagu

SEQ ID NO: 1434562 - RNA, 19 nt, Homo sapiens
  misc_RNA (1)...(19): siRNA sense strand
ccgcgacauugugcaguuu

SEQ ID NO: 1434563 - RNA, 19 nt, Homo sapiens
  misc_RNA (1)...(19): siRNA sense strand
gaggcugucagaucaacuu

SEQ ID NO: 1434564 - RNA, 19 nt, Homo sapiens
  misc_RNA (1)...(19): siRNA sense strand
gcuuuggaaucuaugacau

SEQ ID NO: 1434565 - RNA, 19 nt, Homo sapiens
  misc_RNA (1)...(19): siRNA sense strand
cgacauugugcaguuugua

SEQ ID NO: 1434566 - RNA, 19 nt, Homo sapiens
  misc_RNA (1)...(19): siRNA sense strand
uguaguaaccauggaggua

SEQ ID NO: 1434567 - RNA, 19 nt, Homo sapiens
  misc_RNA (1)...(19): siRNA sense strand
gcugucagaucaacuucac

SEQ ID NO: 1434568 - RNA, 19 nt, Homo sapiens
  misc_RNA (1)...(19): siRNA sense strand
uuaaaggacaaucguguag

SEQ ID NO: 1434569 - RNA, 19 nt, Homo sapiens
  misc_RNA (1)...(19): siRNA sense strand
ucuauggcccuaccaacuu

SEQ ID NO: 1434570 - RNA, 19 nt, Homo sapiens
  misc_RNA (1)...(19): siRNA sense strand
augggaggcugucagauca

SEQ ID NO: 1434571 - RNA, 19 nt, Homo sapiens
  misc_RNA (1)...(19): siRNA sense strand
ccagggugaugggaaaugg

SEQ ID NO: 1434572 - RNA, 19 nt, Homo sapiens
  misc_RNA (1)...(19): siRNA sense strand
cagcucaggaauuaaagga

SEQ ID NO: 1434573 - RNA, 19 nt, Homo sapiens
  misc_RNA (1)...(19): siRNA sense strand
cagaagugcccacacaacu

SEQ ID NO: 1434574 - RNA, 19 nt, Homo sapiens
  misc_RNA (1)...(19): siRNA sense strand
acaagcuguucccugcauu

SEQ ID NO: 1434575 - RNA, 19 nt, Homo sapiens
  misc_RNA (1)...(19): siRNA sense strand
aagaaaagcuacaagaacu

SEQ ID NO: 1434576 - RNA, 19 nt, Homo sapiens
  misc_RNA (1)...(19): siRNA sense strand
gcauccacccugagaagca

SEQ ID NO: 1434577 - RNA, 19 nt, Homo sapiens
  misc_RNA (1)...(19): siRNA sense strand
acuccuuucuggacuaugu

SEQ ID NO: 1434578 - RNA, 19 nt, Homo sapiens
  misc_RNA (1)...(19): siRNA sense strand
ggguggugcugacuuugag

SEQ ID NO: 1434579 - RNA, 19 nt, Homo sapiens
  misc_RNA (1)...(19): siRNA sense strand
ccacacaacuggucucaua

SEQ ID NO: 1434580 - RNA, 19 nt, Homo sapiens
  misc_RNA (1)...(19): siRNA sense strand
gaucugaggucaucaagaa

SEQ ID NO: 1434581 - RNA, 19 nt, Homo sapiens
  misc_RNA (1)...(19): siRNA sense strand
ggucucagcucaggaauua

SEQ ID NO: 1434582 - RNA, 19 nt, Homo sapiens
  misc_RNA (1)...(19): siRNA sense strand
ccagaaaccuagauaagaa

SEQ ID NO: 1434583 - RNA, 19 nt, Homo sapiens
  misc_RNA (1)...(19): siRNA sense strand
caacuggucucauacuuca

SEQ ID NO: 1434584 - RNA, 19 nt, Homo sapiens
  misc_RNA (1)...(19): siRNA sense strand
ggacuucacuggcuccaau

SEQ ID NO: 1434585 - RNA, 19 nt, Homo sapiens
  misc_RNA (1)...(19): siRNA sense strand
guacagaucugaggucauc

SEQ ID NO: 1434586 - RNA, 19 nt, Homo sapiens
  misc_RNA (1)...(19): siRNA sense strand
aaaggacaaucguguagua

SEQ ID NO: 1434587 - RNA, 19 nt, Homo sapiens
  misc_RNA (1)...(19): siRNA sense strand
gcaggucucgcaugaauuu

SEQ ID NO: 1434588 - RNA, 19 nt, Homo sapiens
  misc_RNA (1)...(19): siRNA sense strand
caagaacucuggaacuauc

SEQ ID NO: 1434589 - RNA, 19 nt, Homo sapiens
  misc_RNA (1)...(19): siRNA sense strand
caacaggggucaaugagua

SEQ ID NO: 1434590 - RNA, 19 nt, Homo sapiens
  misc_RNA (1)...(19): siRNA sense strand
uacaagaacucuggaacua

SEQ ID NO: 1434591 - RNA, 19 nt, Homo sapiens
  misc_RNA (1)...(19): siRNA sense strand
gcugagggaugaugacuuc

SEQ ID NO: 1434592 - RNA, 19 nt, Homo sapiens
  misc_RNA (1)...(19): siRNA sense strand
gcaugaauuugccuugaau

SEQ ID NO: 1434593 - RNA, 19 nt, Homo sapiens
  misc_RNA (1)...(19): siRNA sense strand
gagggaugaugacuuccua

SEQ ID NO: 1434594 - RNA, 19 nt, Homo sapiens
  misc_RNA (1)...(19): siRNA sense strand
ggacaucggcuccaagucu

SEQ ID NO: 1434595 - RNA, 19 nt, Homo sapiens
  misc_RNA (1)...(19): siRNA sense strand
cgccagagcugagggauga

SEQ ID NO: 1434596 - RNA, 19 nt, Homo sapiens
  misc_RNA (1)...(19): siRNA sense strand
ggaacuauccgugucaaga

SEQ ID NO: 1434597 - RNA, 19 nt, Homo sapiens
  misc_RNA (1)...(19): siRNA sense strand
gaacuauccgugucaagau

SEQ ID NO: 1434598 - RNA, 19 nt, Homo sapiens
  misc_RNA (1)...(19): siRNA sense strand
caagauuugucggguagaa

SEQ ID NO: 1434599 - RNA, 19 nt, Homo sapiens
  misc_RNA (1)...(19): siRNA sense strand
gcagcgugguucaggacua

SEQ ID NO: 1434600 - RNA, 19 nt, Homo sapiens
  misc_RNA (1)...(19): siRNA sense strand
gcuguucccugcauuugga

SEQ ID NO: 1434601 - RNA, 19 nt, Homo sapiens
  misc_RNA (1)...(19): siRNA sense strand
agaaacagaguacuccuuu

SEQ ID NO: 1434602 - RNA, 19 nt, Homo sapiens
  misc_RNA (1)...(19): siRNA sense strand
gguagaggccagaaaccua

SEQ ID NO: 1434603 - RNA, 19 nt, Homo sapiens
  misc_RNA (1)...(19): siRNA sense strand
gugcaaugcuccgauuaug

SEQ ID NO: 1434604 - RNA, 19 nt, Homo sapiens
  misc_RNA (1)...(19): siRNA sense strand
uggcaggucucgcaugaau

SEQ ID NO: 1434605 - RNA, 19 nt, Homo sapiens
  misc_RNA (1)...(19): siRNA sense strand
ggacaaucguguaguaacc

SEQ ID NO: 1434606 - RNA, 19 nt, Homo sapiens
  misc_RNA (1)...(19): siRNA sense strand
cuauggcccuaccaacuuu

SEQ ID NO: 1434607 - RNA, 19 nt, Homo sapiens
  misc_RNA (1)...(19): siRNA sense strand
gaaugcauccacccugaga

SEQ ID NO: 1434608 - RNA, 19 nt, Homo sapiens
  misc_RNA (1)...(19): siRNA sense strand
gccagaaaccuagauaaga

SEQ ID NO: 1434609 - RNA, 19 nt, Homo sapiens
  misc_RNA (1)...(19): siRNA sense strand
gcuacgcuuuggaaucuau

SEQ ID NO: 1434610 - RNA, 19 nt, Homo sapiens
  misc_RNA (1)...(19): siRNA sense strand
gugaccaucucauugacaa

SEQ ID NO: 1434611 - RNA, 19 nt, Homo sapiens
  misc_RNA (1)...(19): siRNA sense strand
gaugggaggcugucagauc

SEQ ID NO: 1434612 - RNA, 19 nt, Homo sapiens
  misc_RNA (1)...(19): siRNA sense strand
gacaagcuguucccugcau

SEQ ID NO: 1434613 - RNA, 19 nt, Homo sapiens
  misc_RNA (1)...(19): siRNA sense strand
ggacugccucgcaauacuu

SEQ ID NO: 1434614 - RNA, 19 nt, Homo sapiens
  misc_RNA (1)...(19): siRNA sense strand
gacccacucugcguccuuu

SEQ ID NO: 1434615 - RNA, 19 nt, Homo sapiens
  misc_RNA (1)...(19): siRNA sense strand
caacuuugcacccaucauc

SEQ ID NO: 1434616 - RNA, 19 nt, Homo sapiens
  misc_RNA (1)...(19): siRNA sense strand
ccaugucagugaucauugu

SEQ ID NO: 1434617 - RNA, 19 nt, Homo sapiens
  misc_RNA (1)...(19): siRNA sense strand
gagcuuggccggacugaac

SEQ ID NO: 1434618 - RNA, 19 nt, Homo sapiens
  misc_RNA (1)...(19): siRNA sense strand
ccucgaaccugcccauguc

SEQ ID NO: 1434619 - RNA, 19 nt, Homo sapiens
  misc_RNA (1)...(19): siRNA sense strand
ggaauuaaaggacaaucgu

SEQ ID NO: 1434620 - RNA, 19 nt, Homo sapiens
  misc_RNA (1)...(19): siRNA sense strand
caggugcaaugcuccgauu

SEQ ID NO: 1434621 - RNA, 19 nt, Homo sapiens
  misc_RNA (1)...(19): siRNA sense strand
ucgcagaagugcccacaca

SEQ ID NO: 1434622 - RNA, 19 nt, Homo sapiens
  misc_RNA (1)...(19): siRNA sense strand
ucucagcucaggaauuaaa

SEQ ID NO: 1434623 - RNA, 19 nt, Homo sapiens
  misc_RNA (1)...(19): siRNA sense strand
aaacagaguacuccuuucu

SEQ ID NO: 1434624 - RNA, 19 nt, Homo sapiens
  misc_RNA (1)...(19): siRNA sense strand
cagcuugaguaccgcuuug

SEQ ID NO: 1434625 - RNA, 19 nt, Homo sapiens
  misc_RNA (1)...(19): siRNA sense strand
cacaacuggucucauacuu

SEQ ID NO: 1434626 - RNA, 19 nt, Homo sapiens
  misc_RNA (1)...(19): siRNA sense strand
cgcaauacuucaugcuguu

SEQ ID NO: 1434627 - RNA, 19 nt, Homo sapiens
  misc_RNA (1)...(19): siRNA sense strand
guacuccuuucuggacuau

SEQ ID NO: 1434628 - RNA, 19 nt, Homo sapiens
  misc_RNA (1)...(19): siRNA sense strand
gauuguguccagccaggua

SEQ ID NO: 1434629 - RNA, 19 nt, Homo sapiens
  misc_RNA (1)...(19): siRNA sense strand
ggagguagaggccagaaac

SEQ ID NO: 1434630 - RNA, 19 nt, Homo sapiens
  misc_RNA (1)...(19): siRNA sense strand
cgcaugaauuugccuugaa

SEQ ID NO: 1434631 - RNA, 19 nt, Homo sapiens
  misc_RNA (1)...(19): siRNA sense strand
ugguucagcuguccauuuc

SEQ ID NO: 1434632 - RNA, 19 nt, Homo sapiens
  misc_RNA (1)...(19): siRNA sense strand
cagcgugguucaggacuau

SEQ ID NO: 1434633 - RNA, 19 nt, Homo sapiens
  misc_RNA (1)...(19): siRNA sense strand
gaggccagaaaccuagaua

SEQ ID NO: 1434634 - RNA, 19 nt, Homo sapiens
  misc_RNA (1)...(19): siRNA sense strand
caagcuguucccugcauuu

SEQ ID NO: 1434635 - RNA, 19 nt, Homo sapiens
  misc_RNA (1)...(19): siRNA sense strand
ggucaaugaguaccugaug

SEQ ID NO: 1434636 - RNA, 19 nt, Homo sapiens
  misc_RNA (1)...(19): siRNA sense strand
cggcugaguuugaaugcau

SEQ ID NO: 1434637 - RNA, 19 nt, Homo sapiens
  misc_RNA (1)...(19): siRNA sense strand
ggcagucccggcugaguuu

SEQ ID NO: 1434638 - RNA, 19 nt, Homo sapiens
  misc_RNA (1)...(19): siRNA sense strand
cauggaagcguuucucagu

SEQ ID NO: 1434639 - RNA, 19 nt, Homo sapiens
  misc_RNA (1)...(19): siRNA sense strand
ggccagaaaccuagauaag

SEQ ID NO: 1434640 - RNA, 19 nt, Homo sapiens
  misc_RNA (1)...(19): siRNA sense strand
gcccugaguucuccaagac

SEQ ID NO: 1434641 - RNA, 19 nt, Homo sapiens
  misc_RNA (1)...(19): siRNA sense strand
uguggguggugcugacuuu

SEQ ID NO: 1434642 - RNA, 19 nt, Homo sapiens
  misc_RNA (1)...(19): siRNA sense strand
acaaggacaucggcuccaa

SEQ ID NO: 1434643 - RNA, 19 nt, Homo sapiens
  misc_RNA (1)...(19): siRNA sense strand
ccugugaccaucucauuga

SEQ ID NO: 1434644 - RNA, 19 nt, Homo sapiens
  misc_RNA (1)...(19): siRNA sense strand
ccgccagggugaugggaaa

SEQ ID NO: 1434645 - RNA, 19 nt, Homo sapiens
  misc_RNA (1)...(19): siRNA sense strand
gcagaagugcccacacaac

SEQ ID NO: 1434646 - RNA, 19 nt, Homo sapiens
  misc_RNA (1)...(19): siRNA sense strand
gcaauacuucaugcuguug

SEQ ID NO: 1434647 - RNA, 19 nt, Homo sapiens
  misc_RNA (1)...(19): siRNA sense strand
gcaggcauccagggcauug

SEQ ID NO: 1434648 - RNA, 19 nt, Homo sapiens
  misc_RNA (1)...(19): siRNA sense strand
ucgcaugaauuugccuuga

SEQ ID NO: 1434649 - RNA, 19 nt, Homo sapiens
  misc_RNA (1)...(19): siRNA sense strand
cuccaagacucuacagcuu

SEQ ID NO: 1434650 - RNA, 19 nt, Homo sapiens
  misc_RNA (1)...(19): siRNA sense strand
ggugcaaugcuccgauuau

SEQ ID NO: 1434651 - RNA, 19 nt, Homo sapiens
  misc_RNA (1)...(19): siRNA sense strand
gggacugccucgcaauacu

SEQ ID NO: 1434652 - RNA, 19 nt, Homo sapiens
  misc_RNA (1)...(19): siRNA sense strand
acuggcaggucucgcauga

SEQ ID NO: 1434653 - RNA, 19 nt, Homo sapiens
  misc_RNA (1)...(19): siRNA sense strand
ucaccugacucccuacacu

SEQ ID NO: 1434654 - RNA, 19 nt, Homo sapiens
  misc_RNA (1)...(19): siRNA sense strand
gcgacauugugcaguuugu

SEQ ID NO: 1434655 - RNA, 19 nt, Homo sapiens
  misc_RNA (1)...(19): siRNA sense strand
uaguaaccauggagguaga

SEQ ID NO: 1434656 - RNA, 19 nt, Homo sapiens
  misc_RNA (1)...(19): siRNA sense strand
gcccaugucagugaucauu

SEQ ID NO: 1434657 - RNA, 19 nt, Homo sapiens
  misc_RNA (1)...(19): siRNA sense strand
gaacaaccugaacccuaca

SEQ ID NO: 1434658 - RNA, 19 nt, Homo sapiens
  misc_RNA (1)...(19): siRNA sense strand
gaaaccuagauaagaagga

SEQ ID NO: 1434659 - RNA, 19 nt, Homo sapiens
  misc_RNA (1)...(19): siRNA sense strand
gcuuugagacaguccagaa

SEQ ID NO: 1434660 - RNA, 19 nt, Homo sapiens
  misc_RNA (1)...(19): siRNA sense strand
aacuauccgugucaagauu

SEQ ID NO: 1434661 - RNA, 19 nt, Homo sapiens
  misc_RNA (1)...(19): siRNA sense strand
agaccgugcucgcagaagu

SEQ ID NO: 1434662 - RNA, 19 nt, Homo sapiens
  misc_RNA (1)...(19): siRNA sense strand
ccgcgacauugugcaguuu

SEQ ID NO: 1434663 - RNA, 19 nt, Homo sapiens
  misc_RNA (1)...(19): siRNA sense strand
gaggcugucagaucaacuu

SEQ ID NO: 1434664 - RNA, 19 nt, Homo sapiens
  misc_RNA (1)...(19): siRNA sense strand
gcuuuggaaucuaugacau

SEQ ID NO: 1434665 - RNA, 19 nt, Homo sapiens
  misc_RNA (1)...(19): siRNA sense strand
cgacauugugcaguuugua

SEQ ID NO: 1434666 - RNA, 19 nt, Homo sapiens
  misc_RNA (1)...(19): siRNA sense strand
uguaguaaccauggaggua

SEQ ID NO: 1434667 - RNA, 19 nt, Homo sapiens
  misc_RNA (1)...(19): siRNA sense strand
gcugucagaucaacuucac

SEQ ID NO: 1434668 - RNA, 19 nt, Homo sapiens
  misc_RNA (1)...(19): siRNA sense strand
uuaaaggacaaucguguag

SEQ ID NO: 1434669 - RNA, 19 nt, Homo sapiens
  misc_RNA (1)...(19): siRNA sense strand
ucuauggcccuaccaacuu

SEQ ID NO: 1434670 - RNA, 19 nt, Homo sapiens
  misc_RNA (1)...(19): siRNA sense strand
augggaggcugucagauca

SEQ ID NO: 1434671 - RNA, 19 nt, Homo sapiens
  misc_RNA (1)...(19): siRNA sense strand
ccagggugaugggaaaugg

SEQ ID NO: 1434672 - RNA, 19 nt, Homo sapiens
  misc_RNA (1)...(19): siRNA sense strand
cagcucaggaauuaaagga

SEQ ID NO: 1434673 - RNA, 19 nt, Homo sapiens
  misc_RNA (1)...(19): siRNA sense strand
cagaagugcccacacaacu

SEQ ID NO: 1434674 - RNA, 19 nt, Homo sapiens
  misc_RNA (1)...(19): siRNA sense strand
acaagcuguucccugcauu

SEQ ID NO: 1434675 - RNA, 19 nt, Homo sapiens
  misc_RNA (1)...(19): siRNA sense strand
aagaaaagcuacaagaacu

SEQ ID NO: 1434676 - RNA, 19 nt, Homo sapiens
  misc_RNA (1)...(19): siRNA sense strand
gcauccacccugagaagca

SEQ ID NO: 1434677 - RNA, 19 nt, Homo sapiens
  misc_RNA (1)...(19): siRNA sense strand
acuccuuucuggacuaugu

SEQ ID NO: 1434678 - RNA, 19 nt, Homo sapiens
  misc_RNA (1)...(19): siRNA sense strand
ggguggugcugacuuugag

SEQ ID NO: 1434679 - RNA, 19 nt, Homo sapiens
  misc_RNA (1)...(19): siRNA sense strand
ccacacaacuggucucaua

SEQ ID NO: 1434680 - RNA, 19 nt, Homo sapiens
  misc_RNA (1)...(19): siRNA sense strand
gaucugaggucaucaagaa

SEQ ID NO: 1434681 - RNA, 19 nt, Homo sapiens
  misc_RNA (1)...(19): siRNA sense strand
ggucucagcucaggaauua

SEQ ID NO: 1434682 - RNA, 19 nt, Homo sapiens
  misc_RNA (1)...(19): siRNA sense strand
ccagaaaccuagauaagaa

SEQ ID NO: 1434683 - RNA, 19 nt, Homo sapiens
  misc_RNA (1)...(19): siRNA sense strand
caacuggucucauacuuca

SEQ ID NO: 1434684 - RNA, 19 nt, Homo sapiens
  misc_RNA (1)...(19): siRNA sense strand
ggacuucacuggcuccaau

SEQ ID NO: 1434685 - RNA, 19 nt, Homo sapiens
  misc_RNA (1)...(19): siRNA sense strand
guacagaucugaggucauc

SEQ ID NO: 1434686 - RNA, 19 nt, Homo sapiens
  misc_RNA (1)...(19): siRNA sense strand
aaaggacaaucguguagua

SEQ ID NO: 1434687 - RNA, 19 nt, Homo sapiens
  misc_RNA (1)...(19): siRNA sense strand
gcaggucucgcaugaauuu

SEQ ID NO: 1434688 - RNA, 19 nt, Homo sapiens
  misc_RNA (1)...(19): siRNA sense strand
caagaacucuggaacuauc

SEQ ID NO: 1434689 - RNA, 19 nt, Homo sapiens
  misc_RNA (1)...(19): siRNA sense strand
caacaggggucaaugagua

SEQ ID NO: 1434690 - RNA, 19 nt, Homo sapiens
  misc_RNA (1)...(19): siRNA sense strand
uacaagaacucuggaacua

SEQ ID NO: 1434691 - RNA, 19 nt, Homo sapiens
  misc_RNA (1)...(19): siRNA sense strand
gcugagggaugaugacuuc

SEQ ID NO: 1434692 - RNA, 19 nt, Homo sapiens
  misc_RNA (1)...(19): siRNA sense strand
gcaugaauuugccuugaau

SEQ ID NO: 1434693 - RNA, 19 nt, Homo sapiens
  misc_RNA (1)...(19): siRNA sense strand
gagggaugaugacuuccua

SEQ ID NO: 1434694 - RNA, 19 nt, Homo sapiens
  misc_RNA (1)...(19): siRNA sense strand
ggacaucggcuccaagucu

SEQ ID NO: 1434695 - RNA, 19 nt, Homo sapiens
  misc_RNA (1)...(19): siRNA sense strand
cgccagagcugagggauga

SEQ ID NO: 1434696 - RNA, 19 nt, Homo sapiens
  misc_RNA (1)...(19): siRNA sense strand
ggaacuauccgugucaaga

SEQ ID NO: 1434697 - RNA, 19 nt, Homo sapiens
  misc_RNA (1)...(19): siRNA sense strand
gaacuauccgugucaagau

SEQ ID NO: 1434698 - RNA, 19 nt, Homo sapiens
  misc_RNA (1)...(19): siRNA sense strand
caagauuugucggguagaa

SEQ ID NO: 1434699 - RNA, 19 nt, Homo sapiens
  misc_RNA (1)...(19): siRNA sense strand
gcagcgugguucaggacua

SEQ ID NO: 1434700 - RNA, 19 nt, Homo sapiens
  misc_RNA (1)...(19): siRNA sense strand
gcuguucccugcauuugga

SEQ ID NO: 1434701 - RNA, 19 nt, Homo sapiens
  misc_RNA (1)...(19): siRNA sense strand
agaaacagaguacuccuuu

SEQ ID NO: 1434702 - RNA, 19 nt, Homo sapiens
  misc_RNA (1)...(19): siRNA sense strand
gguagaggccagaaaccua

SEQ ID NO: 1434703 - RNA, 19 nt, Homo sapiens
  misc_RNA (1)...(19): siRNA sense strand
gugcaaugcuccgauuaug

SEQ ID NO: 1434704 - RNA, 19 nt, Homo sapiens
  misc_RNA (1)...(19): siRNA sense strand
uggcaggucucgcaugaau

SEQ ID NO: 1434705 - RNA, 19 nt, Homo sapiens
  misc_RNA (1)...(19): siRNA sense strand
ggacaaucguguaguaacc

SEQ ID NO: 1434706 - RNA, 19 nt, Homo sapiens
  misc_RNA (1)...(19): siRNA sense strand
cuauggcccuaccaacuuu

SEQ ID NO: 1434707 - RNA, 19 nt, Homo sapiens
  misc_RNA (1)...(19): siRNA sense strand
gaaugcauccacccugaga

SEQ ID NO: 1434708 - RNA, 19 nt, Homo sapiens
  misc_RNA (1)...(19): siRNA sense strand
gccagaaaccuagauaaga

SEQ ID NO: 1434709 - RNA, 19 nt, Homo sapiens
  misc_RNA (1)...(19): siRNA sense strand
gcuacgcuuuggaaucuau

SEQ ID NO: 1434710 - RNA, 19 nt, Homo sapiens
  misc_RNA (1)...(19): siRNA sense strand
gugaccaucucauugacaa

SEQ ID NO: 1434711 - RNA, 19 nt, Homo sapiens
  misc_RNA (1)...(19): siRNA sense strand
gaugggaggcugucagauc

SEQ ID NO: 1434712 - RNA, 19 nt, Homo sapiens
  misc_RNA (1)...(19): siRNA sense strand
gacaagcuguucccugcau

SEQ ID NO: 1434713 - RNA, 19 nt, Homo sapiens
  misc_RNA (1)...(19): siRNA sense strand
ggacugccucgcaauacuu

SEQ ID NO: 1434714 - RNA, 19 nt, Homo sapiens
  misc_RNA (1)...(19): siRNA sense strand
gacccacucugcguccuuu

SEQ ID NO: 1434715 - RNA, 19 nt, Homo sapiens
  misc_RNA (1)...(19): siRNA sense strand
caacuuugcacccaucauc

SEQ ID NO: 1434716 - RNA, 19 nt, Homo sapiens
  misc_RNA (1)...(19): siRNA sense strand
ccaugucagugaucauugu

SEQ ID NO: 1434717 - RNA, 19 nt, Homo sapiens
  misc_RNA (1)...(19): siRNA sense strand
gagcuuggccggacugaac

SEQ ID NO: 1434718 - RNA, 19 nt, Homo sapiens
  misc_RNA (1)...(19): siRNA sense strand
ccucgaaccugcccauguc

SEQ ID NO: 1434719 - RNA, 19 nt, Homo sapiens
  misc_RNA (1)...(19): siRNA sense strand
ggaauuaaaggacaaucgu

SEQ ID NO: 1434720 - RNA, 19 nt, Homo sapiens
  misc_RNA (1)...(19): siRNA sense strand
caggugcaaugcuccgauu

SEQ ID NO: 1434721 - RNA, 19 nt, Homo sapiens
  misc_RNA (1)...(19): siRNA sense strand
ucgcagaagugcccacaca

SEQ ID NO: 1434722 - RNA, 19 nt, Homo sapiens
  misc_RNA (1)...(19): siRNA sense strand
ucucagcucaggaauuaaa

SEQ ID NO: 1434723 - RNA, 19 nt, Homo sapiens
  misc_RNA (1)...(19): siRNA sense strand
aaacagaguacuccuuucu

SEQ ID NO: 1434724 - RNA, 19 nt, Homo sapiens
  misc_RNA (1)...(19): siRNA sense strand
cagcuugaguaccgcuuug

SEQ ID NO: 1434725 - RNA, 19 nt, Homo sapiens
  misc_RNA (1)...(19): siRNA sense strand
cacaacuggucucauacuu

SEQ ID NO: 1434726 - RNA, 19 nt, Homo sapiens
  misc_RNA (1)...(19): siRNA sense strand
cgcaauacuucaugcuguu

SEQ ID NO: 1434727 - RNA, 19 nt, Homo sapiens
  misc_RNA (1)...(19): siRNA sense strand
guacuccuuucuggacuau

SEQ ID NO: 1434728 - RNA, 19 nt, Homo sapiens
  misc_RNA (1)...(19): siRNA sense strand
gauuguguccagccaggua

SEQ ID NO: 1434729 - RNA, 19 nt, Homo sapiens
  misc_RNA (1)...(19): siRNA sense strand
ggagguagaggccagaaac

SEQ ID NO: 1434730 - RNA, 19 nt, Homo sapiens
  misc_RNA (1)...(19): siRNA sense strand
cgcaugaauuugccuugaa

SEQ ID NO: 1434731 - RNA, 19 nt, Homo sapiens
  misc_RNA (1)...(19): siRNA sense strand
ugguucagcuguccauuuc

SEQ ID NO: 1434732 - RNA, 19 nt, Homo sapiens
  misc_RNA (1)...(19): siRNA sense strand
cagcgugguucaggacuau

SEQ ID NO: 1434733 - RNA, 19 nt, Homo sapiens
  misc_RNA (1)...(19): siRNA sense strand
gaggccagaaaccuagaua

SEQ ID NO: 1434734 - RNA, 19 nt, Homo sapiens
  misc_RNA (1)...(19): siRNA sense strand
caagcuguucccugcauuu

SEQ ID NO: 1434735 - RNA, 19 nt, Homo sapiens
  misc_RNA (1)...(19): siRNA sense strand
ggucaaugaguaccugaug

SEQ ID NO: 1434736 - RNA, 19 nt, Homo sapiens
  misc_RNA (1)...(19): siRNA sense strand
cggcugaguuugaaugcau

SEQ ID NO: 1434737 - RNA, 19 nt, Homo sapiens
  misc_RNA (1)...(19): siRNA sense strand
ggcagucccggcugaguuu

SEQ ID NO: 1434738 - RNA, 19 nt, Homo sapiens
  misc_RNA (1)...(19): siRNA sense strand
cauggaagcguuucucagu

SEQ ID NO: 1434739 - RNA, 19 nt, Homo sapiens
  misc_RNA (1)...(19): siRNA sense strand
ggccagaaaccuagauaag

SEQ ID NO: 1434740 - RNA, 19 nt, Homo sapiens
  misc_RNA (1)...(19): siRNA sense strand
gcccugaguucuccaagac

SEQ ID NO: 1434741 - RNA, 19 nt, Homo sapiens
  misc_RNA (1)...(19): siRNA sense strand
uguggguggugcugacuuu

SEQ ID NO: 1434742 - RNA, 19 nt, Homo sapiens
  misc_RNA (1)...(19): siRNA sense strand
acaaggacaucggcuccaa

SEQ ID NO: 1434743 - RNA, 19 nt, Homo sapiens
  misc_RNA (1)...(19): siRNA sense strand
ccugugaccaucucauuga

SEQ ID NO: 1434744 - RNA, 19 nt, Homo sapiens
  misc_RNA (1)...(19): siRNA sense strand
ccgccagggugaugggaaa

SEQ ID NO: 1434745 - RNA, 19 nt, Homo sapiens
  misc_RNA (1)...(19): siRNA sense strand
gcagaagugcccacacaac

SEQ ID NO: 1434746 - RNA, 19 nt, Homo sapiens
  misc_RNA (1)...(19): siRNA sense strand
gcaauacuucaugcuguug

SEQ ID NO: 1434747 - RNA, 19 nt, Homo sapiens
  misc_RNA (1)...(19): siRNA sense strand
gcaggcauccagggcauug

SEQ ID NO: 1434748 - RNA, 19 nt, Homo sapiens
  misc_RNA (1)...(19): siRNA sense strand
ucgcaugaauuugccuuga

SEQ ID NO: 1434749 - RNA, 19 nt, Homo sapiens
  misc_RNA (1)...(19): siRNA sense strand
cuccaagacucuacagcuu

SEQ ID NO: 1434750 - RNA, 19 nt, Homo sapiens
  misc_RNA (1)...(19): siRNA sense strand
ggugcaaugcuccgauuau

SEQ ID NO: 1434751 - RNA, 19 nt, Homo sapiens
  misc_RNA (1)...(19): siRNA sense strand
gggacugccucgcaauacu

SEQ ID NO: 1434752 - RNA, 19 nt, Homo sapiens
  misc_RNA (1)...(19): siRNA sense strand
acuggcaggucucgcauga

SEQ ID NO: 1434753 - RNA, 19 nt, Homo sapiens
  misc_RNA (1)...(19): siRNA sense strand
ucaccugacucccuacacu

SEQ ID NO: 1434754 - RNA, 19 nt, Homo sapiens
  misc_RNA (1)...(19): siRNA sense strand
gcgacauugugcaguuugu

SEQ ID NO: 1434755 - RNA, 19 nt, Homo sapiens
  misc_RNA (1)...(19): siRNA sense strand
uaguaaccauggagguaga

SEQ ID NO: 1434756 - RNA, 19 nt, Homo sapiens
  misc_RNA (1)...(19): siRNA sense strand
gcccaugucagugaucauu

SEQ ID NO: 1434757 - RNA, 19 nt, Homo sapiens
  misc_RNA (1)...(19): siRNA sense strand
gaacaaccugaacccuaca

SEQ ID NO: 1434758 - RNA, 19 nt, Homo sapiens
  misc_RNA (1)...(19): siRNA sense strand
gaaaccuagauaagaagga

SEQ ID NO: 1434759 - RNA, 19 nt, Homo sapiens
  misc_RNA (1)...(19): siRNA sense strand
gcuuugagacaguccagaa

SEQ ID NO: 1434760 - RNA, 19 nt, Homo sapiens
  misc_RNA (1)...(19): siRNA sense strand
aacuauccgugucaagauu

SEQ ID NO: 1434761 - RNA, 19 nt, Homo sapiens
  misc_RNA (1)...(19): siRNA sense strand
agaccgugcucgcagaagu

SEQ ID NO: 1434762 - RNA, 19 nt, Homo sapiens
  misc_RNA (1)...(19): siRNA sense strand
ccgcgacauugugcaguuu

SEQ ID NO: 1434763 - RNA, 19 nt, Homo sapiens
  misc_RNA (1)...(19): siRNA sense strand
gaggcugucagaucaacuu

SEQ ID NO: 1434764 - RNA, 19 nt, Homo sapiens
  misc_RNA (1)...(19): siRNA sense strand
gcuuuggaaucuaugacau

SEQ ID NO: 1434765 - RNA, 19 nt, Homo sapiens
  misc_RNA (1)...(19): siRNA sense strand
cgacauugugcaguuugua

SEQ ID NO: 1434766 - RNA, 19 nt, Homo sapiens
  misc_RNA (1)...(19): siRNA sense strand
uguaguaaccauggaggua

SEQ ID NO: 1434767 - RNA, 19 nt, Homo sapiens
  misc_RNA (1)...(19): siRNA sense strand
gcugucagaucaacuucac

SEQ ID NO: 1434768 - RNA, 19 nt, Homo sapiens
  misc_RNA (1)...(19): siRNA sense strand
uuaaaggacaaucguguag

SEQ ID NO: 1434769 - RNA, 19 nt, Homo sapiens
  misc_RNA (1)...(19): siRNA sense strand
ucuauggcccuaccaacuu

SEQ ID NO: 1434770 - RNA, 19 nt, Homo sapiens
  misc_RNA (1)...(19): siRNA sense strand
augggaggcugucagauca

SEQ ID NO: 1434771 - RNA, 19 nt, Homo sapiens
  misc_RNA (1)...(19): siRNA sense strand
ccagggugaugggaaaugg

SEQ ID NO: 1434772 - RNA, 19 nt, Homo sapiens
  misc_RNA (1)...(19): siRNA sense strand
cagcucaggaauuaaagga

SEQ ID NO: 1434773 - RNA, 19 nt, Homo sapiens
  misc_RNA (1)...(19): siRNA sense strand
cagaagugcccacacaacu

SEQ ID NO: 1434774 - RNA, 19 nt, Homo sapiens
  misc_RNA (1)...(19): siRNA sense strand
acaagcuguucccugcauu

SEQ ID NO: 1434775 - RNA, 19 nt, Homo sapiens
  misc_RNA (1)...(19): siRNA sense strand
aagaaaagcuacaagaacu

SEQ ID NO: 1434776 - RNA, 19 nt, Homo sapiens
  misc_RNA (1)...(19): siRNA sense strand
gcauccacccugagaagca

SEQ ID NO: 1434777 - RNA, 19 nt, Homo sapiens
  misc_RNA (1)...(19): siRNA sense strand
acuccuuucuggacuaugu

SEQ ID NO: 1434778 - RNA, 19 nt, Homo sapiens
  misc_RNA (1)...(19): siRNA sense strand
ggguggugcugacuuugag

SEQ ID NO: 1434779 - RNA, 19 nt, Homo sapiens
  misc_RNA (1)...(19): siRNA sense strand
ccacacaacuggucucaua

SEQ ID NO: 1434780 - RNA, 19 nt, Homo sapiens
  misc_RNA (1)...(19): siRNA sense strand
gaucugaggucaucaagaa

SEQ ID NO: 1434781 - RNA, 19 nt, Homo sapiens
  misc_RNA (1)...(19): siRNA sense strand
ggucucagcucaggaauua

SEQ ID NO: 1434782 - RNA, 19 nt, Homo sapiens
  misc_RNA (1)...(19): siRNA sense strand
ccagaaaccuagauaagaa

SEQ ID NO: 1434783 - RNA, 19 nt, Homo sapiens
  misc_RNA (1)...(19): siRNA sense strand
caacuggucucauacuuca

SEQ ID NO: 1434784 - RNA, 19 nt, Homo sapiens
  misc_RNA (1)...(19): siRNA sense strand
ggacuucacuggcuccaau

SEQ ID NO: 1434785 - RNA, 19 nt, Homo sapiens
  misc_RNA (1)...(19): siRNA sense strand
guacagaucugaggucauc

SEQ ID NO: 1434786 - RNA, 19 nt, Homo sapiens
  misc_RNA (1)...(19): siRNA sense strand
aaaggacaaucguguagua

SEQ ID NO: 1434787 - RNA, 19 nt, Homo sapiens
  misc_RNA (1)...(19): siRNA sense strand
gcaggucucgcaugaauuu

SEQ ID NO: 1434788 - RNA, 19 nt, Homo sapiens
  misc_RNA (1)...(19): siRNA sense strand
caagaacucuggaacuauc

SEQ ID NO: 1434789 - RNA, 19 nt, Homo sapiens
  misc_RNA (1)...(19): siRNA sense strand
caacaggggucaaugagua

SEQ ID NO: 1434790 - RNA, 19 nt, Homo sapiens
  misc_RNA (1)...(19): siRNA sense strand
uacaagaacucuggaacua

SEQ ID NO: 1434791 - RNA, 19 nt, Homo sapiens
  misc_RNA (1)...(19): siRNA sense strand
gcugagggaugaugacuuc

SEQ ID NO: 1434792 - RNA, 19 nt, Homo sapiens
  misc_RNA (1)...(19): siRNA sense strand
gcaugaauuugccuugaau

SEQ ID NO: 1434793 - RNA, 19 nt, Homo sapiens
  misc_RNA (1)...(19): siRNA sense strand
gagggaugaugacuuccua

SEQ ID NO: 1434794 - RNA, 19 nt, Homo sapiens
  misc_RNA (1)...(19): siRNA sense strand
ggacaucggcuccaagucu

SEQ ID NO: 1434795 - RNA, 19 nt, Homo sapiens
  misc_RNA (1)...(19): siRNA sense strand
cgccagagcugagggauga

SEQ ID NO: 1434796 - RNA, 19 nt, Homo sapiens
  misc_RNA (1)...(19): siRNA sense strand
ggaacuauccgugucaaga

SEQ ID NO: 1434797 - RNA, 19 nt, Homo sapiens
  misc_RNA (1)...(19): siRNA sense strand
gaacuauccgugucaagau

SEQ ID NO: 1434798 - RNA, 19 nt, Homo sapiens
  misc_RNA (1)...(19): siRNA sense strand
caagauuugucggguagaa

SEQ ID NO: 1434799 - RNA, 19 nt, Homo sapiens
  misc_RNA (1)...(19): siRNA sense strand
gcagcgugguucaggacua

SEQ ID NO: 1434800 - RNA, 19 nt, Homo sapiens
  misc_RNA (1)...(19): siRNA sense strand
gcuguucccugcauuugga

SEQ ID NO: 1434801 - RNA, 19 nt, Homo sapiens
  misc_RNA (1)...(19): siRNA sense strand
agaaacagaguacuccuuu

SEQ ID NO: 1434802 - RNA, 19 nt, Homo sapiens
  misc_RNA (1)...(19): siRNA sense strand
gguagaggccagaaaccua

SEQ ID NO: 1434803 - RNA, 19 nt, Homo sapiens
  misc_RNA (1)...(19): siRNA sense strand
gugcaaugcuccgauuaug

SEQ ID NO: 1434804 - RNA, 19 nt, Homo sapiens
  misc_RNA (1)...(19): siRNA sense strand
uggcaggucucgcaugaau

SEQ ID NO: 1434805 - RNA, 19 nt, Homo sapiens
  misc_RNA (1)...(19): siRNA sense strand
ggacaaucguguaguaacc

SEQ ID NO: 1434806 - RNA, 19 nt, Homo sapiens
  misc_RNA (1)...(19): siRNA sense strand
cuauggcccuaccaacuuu

SEQ ID NO: 1434807 - RNA, 19 nt, Homo sapiens
  misc_RNA (1)...(19): siRNA sense strand
gaaugcauccacccugaga

SEQ ID NO: 1434808 - RNA, 19 nt, Homo sapiens
  misc_RNA (1)...(19): siRNA sense strand
gccagaaaccuagauaaga

SEQ ID NO: 1434809 - RNA, 19 nt, Homo sapiens
  misc_RNA (1)...(19): siRNA sense strand
gcuacgcuuuggaaucuau

SEQ ID NO: 1434810 - RNA, 19 nt, Homo sapiens
  misc_RNA (1)...(19): siRNA sense strand
gugaccaucucauugacaa

SEQ ID NO: 1434811 - RNA, 19 nt, Homo sapiens
  misc_RNA (1)...(19): siRNA sense strand
gaugggaggcugucagauc

SEQ ID NO: 1434812 - RNA, 19 nt, Homo sapiens
  misc_RNA (1)...(19): siRNA sense strand
gacaagcuguucccugcau

SEQ ID NO: 1434813 - RNA, 19 nt, Homo sapiens
  misc_RNA (1)...(19): siRNA sense strand
ggacugccucgcaauacuu

SEQ ID NO: 1434814 - RNA, 19 nt, Homo sapiens
  misc_RNA (1)...(19): siRNA sense strand
gacccacucugcguccuuu

SEQ ID NO: 1434815 - RNA, 19 nt, Homo sapiens
  misc_RNA (1)...(19): siRNA sense strand
caacuuugcacccaucauc

SEQ ID NO: 1434816 - RNA, 19 nt, Homo sapiens
  misc_RNA (1)...(19): siRNA sense strand
ccaugucagugaucauugu

SEQ ID NO: 1434817 - RNA, 19 nt, Homo sapiens
  misc_RNA (1)...(19): siRNA sense strand
gagcuuggccggacugaac

SEQ ID NO: 1434818 - RNA, 19 nt, Homo sapiens
  misc_RNA (1)...(19): siRNA sense strand
ccucgaaccugcccauguc

SEQ ID NO: 1434819 - RNA, 19 nt, Homo sapiens
  misc_RNA (1)...(19): siRNA sense strand
ggaauuaaaggacaaucgu

SEQ ID NO: 1434820 - RNA, 19 nt, Homo sapiens
  misc_RNA (1)...(19): siRNA sense strand
caggugcaaugcuccgauu

SEQ ID NO: 1434821 - RNA, 19 nt, Homo sapiens
  misc_RNA (1)...(19): siRNA sense strand
ucgcagaagugcccacaca

SEQ ID NO: 1434822 - RNA, 19 nt, Homo sapiens
  misc_RNA (1)...(19): siRNA sense strand
ucucagcucaggaauuaaa

SEQ ID NO: 1434823 - RNA, 19 nt, Homo sapiens
  misc_RNA (1)...(19): siRNA sense strand
aaacagaguacuccuuucu

SEQ ID NO: 1434824 - RNA, 19 nt, Homo sapiens
  misc_RNA (1)...(19): siRNA sense strand
cagcuugaguaccgcuuug

SEQ ID NO: 1434825 - RNA, 19 nt, Homo sapiens
  misc_RNA (1)...(19): siRNA sense strand
cacaacuggucucauacuu

SEQ ID NO: 1434826 - RNA, 19 nt, Homo sapiens
  misc_RNA (1)...(19): siRNA sense strand
cgcaauacuucaugcuguu

SEQ ID NO: 1434827 - RNA, 19 nt, Homo sapiens
  misc_RNA (1)...(19): siRNA sense strand
guacuccuuucuggacuau

SEQ ID NO: 1434828 - RNA, 19 nt, Homo sapiens
  misc_RNA (1)...(19): siRNA sense strand
gauuguguccagccaggua

SEQ ID NO: 1434829 - RNA, 19 nt, Homo sapiens
  misc_RNA (1)...(19): siRNA sense strand
ggagguagaggccagaaac

SEQ ID NO: 1434830 - RNA, 19 nt, Homo sapiens
  misc_RNA (1)...(19): siRNA sense strand
cgcaugaauuugccuugaa

SEQ ID NO: 1434831 - RNA, 19 nt, Homo sapiens
  misc_RNA (1)...(19): siRNA sense strand
ugguucagcuguccauuuc

SEQ ID NO: 1434832 - RNA, 19 nt, Homo sapiens
  misc_RNA (1)...(19): siRNA sense strand
cagcgugguucaggacuau

SEQ ID NO: 1434833 - RNA, 19 nt, Homo sapiens
  misc_RNA (1)...(19): siRNA sense strand
gaggccagaaaccuagaua

SEQ ID NO: 1434834 - RNA, 19 nt, Homo sapiens
  misc_RNA (1)...(19): siRNA sense strand
caagcuguucccugcauuu

SEQ ID NO: 1434835 - RNA, 19 nt, Homo sapiens
  misc_RNA (1)...(19): siRNA sense strand
ggucaaugaguaccugaug

SEQ ID NO: 1434836 - RNA, 19 nt, Homo sapiens
  misc_RNA (1)...(19): siRNA sense strand
cggcugaguuugaaugcau

SEQ ID NO: 1434837 - RNA, 19 nt, Homo sapiens
  misc_RNA (1)...(19): siRNA sense strand
ggcagucccggcugaguuu

SEQ ID NO: 1434838 - RNA, 19 nt, Homo sapiens
  misc_RNA (1)...(19): siRNA sense strand
cauggaagcguuucucagu

SEQ ID NO: 1434839 - RNA, 19 nt, Homo sapiens
  misc_RNA (1)...(19): siRNA sense strand
ggccagaaaccuagauaag

SEQ ID NO: 1434840 - RNA, 19 nt, Homo sapiens
  misc_RNA (1)...(19): siRNA sense strand
gcccugaguucuccaagac

SEQ ID NO: 1434841 - RNA, 19 nt, Homo sapiens
  misc_RNA (1)...(19): siRNA sense strand
uguggguggugcugacuuu

SEQ ID NO: 1434842 - RNA, 19 nt, Homo sapiens
  misc_RNA (1)...(19): siRNA sense strand
acaaggacaucggcuccaa

SEQ ID NO: 1434843 - RNA, 19 nt, Homo sapiens
  misc_RNA (1)...(19): siRNA sense strand
ccugugaccaucucauuga

SEQ ID NO: 1434844 - RNA, 19 nt, Homo sapiens
  misc_RNA (1)...(19): siRNA sense strand
ccgccagggugaugggaaa

SEQ ID NO: 1434845 - RNA, 19 nt, Homo sapiens
  misc_RNA (1)...(19): siRNA sense strand
gcagaagugcccacacaac

SEQ ID NO: 1434846 - RNA, 19 nt, Homo sapiens
  misc_RNA (1)...(19): siRNA sense strand
gcaauacuucaugcuguug

SEQ ID NO: 1434847 - RNA, 19 nt, Homo sapiens
  misc_RNA (1)...(19): siRNA sense strand
gcaggcauccagggcauug

SEQ ID NO: 1434848 - RNA, 19 nt, Homo sapiens
  misc_RNA (1)...(19): siRNA sense strand
ucgcaugaauuugccuuga

SEQ ID NO: 1434849 - RNA, 19 nt, Homo sapiens
  misc_RNA (1)...(19): siRNA sense strand
cuccaagacucuacagcuu

SEQ ID NO: 1434850 - RNA, 19 nt, Homo sapiens
  misc_RNA (1)...(19): siRNA sense strand
ggugcaaugcuccgauuau

SEQ ID NO: 1434851 - RNA, 19 nt, Homo sapiens
  misc_RNA (1)...(19): siRNA sense strand
gggacugccucgcaauacu

SEQ ID NO: 1434852 - RNA, 19 nt, Homo sapiens
  misc_RNA (1)...(19): siRNA sense strand
acuggcaggucucgcauga

SEQ ID NO: 1434853 - RNA, 19 nt, Homo sapiens
  misc_RNA (1)...(19): siRNA sense strand
ucaccugacucccuacacu

SEQ ID NO: 1434854 - RNA, 19 nt, Homo sapiens
  misc_RNA (1)...(19): siRNA sense strand
gcgacauugugcaguuugu

SEQ ID NO: 1434855 - RNA, 19 nt, Homo sapiens
  misc_RNA (1)...(19): siRNA sense strand
uaguaaccauggagguaga

SEQ ID NO: 1434856 - RNA, 19 nt, Homo sapiens
  misc_RNA (1)...(19): siRNA sense strand
gcccaugucagugaucauu

SEQ ID NO: 1434857 - RNA, 19 nt, Homo sapiens
  misc_RNA (1)...(19): siRNA sense strand
gaacaaccugaacccuaca

SEQ ID NO: 1434858 - RNA, 19 nt, Homo sapiens
  misc_RNA (1)...(19): siRNA sense strand
gaaaccuagauaagaagga

SEQ ID NO: 1434859 - RNA, 19 nt, Homo sapiens
  misc_RNA (1)...(19): siRNA sense strand
gcuuugagacaguccagaa

SEQ ID NO: 1434860 - RNA, 19 nt, Homo sapiens
  misc_RNA (1)...(19): siRNA sense strand
aacuauccgugucaagauu

SEQ ID NO: 1434861 - RNA, 19 nt, Homo sapiens
  misc_RNA (1)...(19): siRNA sense strand
agaccgugcucgcagaagu

SEQ ID NO: 1434862 - RNA, 19 nt, Homo sapiens
  misc_RNA (1)...(19): siRNA sense strand
ccgcgacauugugcaguuu

SEQ ID NO: 1434863 - RNA, 19 nt, Homo sapiens
  misc_RNA (1)...(19): siRNA sense strand
gaggcugucagaucaacuu

SEQ ID NO: 1434864 - RNA, 19 nt, Homo sapiens
  misc_RNA (1)...(19): siRNA sense strand
gcuuuggaaucuaugacau

SEQ ID NO: 1434865 - RNA, 19 nt, Homo sapiens
  misc_RNA (1)...(19): siRNA sense strand
cgacauugugcaguuugua

SEQ ID NO: 1434866 - RNA, 19 nt, Homo sapiens
  misc_RNA (1)...(19): siRNA sense strand
uguaguaaccauggaggua

SEQ ID NO: 1434867 - RNA, 19 nt, Homo sapiens
  misc_RNA (1)...(19): siRNA sense strand
gcugucagaucaacuucac

SEQ ID NO: 1434868 - RNA, 19 nt, Homo sapiens
  misc_RNA (1)...(19): siRNA sense strand
uuaaaggacaaucguguag

SEQ ID NO: 1434869 - RNA, 19 nt, Homo sapiens
  misc_RNA (1)...(19): siRNA sense strand
ucuauggcccuaccaacuu

SEQ ID NO: 1434870 - RNA, 19 nt, Homo sapiens
  misc_RNA (1)...(19): siRNA sense strand
augggaggcugucagauca

SEQ ID NO: 1434871 - RNA, 19 nt, Homo sapiens
  misc_RNA (1)...(19): siRNA sense strand
ccagggugaugggaaaugg

SEQ ID NO: 1434872 - RNA, 19 nt, Homo sapiens
  misc_RNA (1)...(19): siRNA sense strand
cagcucaggaauuaaagga

SEQ ID NO: 1434873 - RNA, 19 nt, Homo sapiens
  misc_RNA (1)...(19): siRNA sense strand
cagaagugcccacacaacu

SEQ ID NO: 1434874 - RNA, 19 nt, Homo sapiens
  misc_RNA (1)...(19): siRNA sense strand
acaagcuguucccugcauu

SEQ ID NO: 1434875 - RNA, 19 nt, Homo sapiens
  misc_RNA (1)...(19): siRNA sense strand
aagaaaagcuacaagaacu

SEQ ID NO: 1434876 - RNA, 19 nt, Homo sapiens
  misc_RNA (1)...(19): siRNA sense strand
gcauccacccugagaagca

SEQ ID NO: 1434877 - RNA, 19 nt, Homo sapiens
  misc_RNA (1)...(19): siRNA sense strand
acuccuuucuggacuaugu

SEQ ID NO: 1434878 - RNA, 19 nt, Homo sapiens
  misc_RNA (1)...(19): siRNA sense strand
ggguggugcugacuuugag

SEQ ID NO: 1434879 - RNA, 19 nt, Homo sapiens
  misc_RNA (1)...(19): siRNA sense strand
ccacacaacuggucucaua

SEQ ID NO: 1434880 - RNA, 19 nt, Homo sapiens
  misc_RNA (1)...(19): siRNA sense strand
gaucugaggucaucaagaa

SEQ ID NO: 1434881 - RNA, 19 nt, Homo sapiens
  misc_RNA (1)...(19): siRNA sense strand
ggucucagcucaggaauua

SEQ ID NO: 1434882 - RNA, 19 nt, Homo sapiens
  misc_RNA (1)...(19): siRNA sense strand
ccagaaaccuagauaagaa

SEQ ID NO: 1434883 - RNA, 19 nt, Homo sapiens
  misc_RNA (1)...(19): siRNA sense strand
caacuggucucauacuuca

SEQ ID NO: 1434884 - RNA, 19 nt, Homo sapiens
  misc_RNA (1)...(19): siRNA sense strand
ggacuucacuggcuccaau

SEQ ID NO: 1434885 - RNA, 19 nt, Homo sapiens
  misc_RNA (1)...(19): siRNA sense strand
guacagaucugaggucauc

SEQ ID NO: 1434886 - RNA, 19 nt, Homo sapiens
  misc_RNA (1)...(19): siRNA sense strand
aaaggacaaucguguagua

SEQ ID NO: 1434887 - RNA, 19 nt, Homo sapiens
  misc_RNA (1)...(19): siRNA sense strand
gcaggucucgcaugaauuu

SEQ ID NO: 1434888 - RNA, 19 nt, Homo sapiens
  misc_RNA (1)...(19): siRNA sense strand
caagaacucuggaacuauc

SEQ ID NO: 1434889 - RNA, 19 nt, Homo sapiens
  misc_RNA (1)...(19): siRNA sense strand
caacaggggucaaugagua

SEQ ID NO: 1434890 - RNA, 19 nt, Homo sapiens
  misc_RNA (1)...(19): siRNA sense strand
uacaagaacucuggaacua

SEQ ID NO: 1434891 - RNA, 19 nt, Homo sapiens
  misc_RNA (1)...(19): siRNA sense strand
gcugagggaugaugacuuc

SEQ ID NO: 1434892 - RNA, 19 nt, Homo sapiens
  misc_RNA (1)...(19): siRNA sense strand
gcaugaauuugccuugaau

SEQ ID NO: 1434893 - RNA, 19 nt, Homo sapiens
  misc_RNA (1)...(19): siRNA sense strand
gagggaugaugacuuccua

SEQ ID NO: 1434894 - RNA, 19 nt, Homo sapiens
  misc_RNA (1)...(19): siRNA sense strand
ggacaucggcuccaagucu

SEQ ID NO: 1434895 - RNA, 19 nt, Homo sapiens
  misc_RNA (1)...(19): siRNA sense strand
cgccagagcugagggauga

SEQ ID NO: 1434896 - RNA, 19 nt, Homo sapiens
  misc_RNA (1)...(19): siRNA sense strand
ggaacuauccgugucaaga

SEQ ID NO: 1434897 - RNA, 19 nt, Homo sapiens
  misc_RNA (1)...(19): siRNA sense strand
gaacuauccgugucaagau

SEQ ID NO: 1434898 - RNA, 19 nt, Homo sapiens
  misc_RNA (1)...(19): siRNA sense strand
caagauuugucggguagaa

SEQ ID NO: 1434899 - RNA, 19 nt, Homo sapiens
  misc_RNA (1)...(19): siRNA sense strand
gcagcgugguucaggacua

SEQ ID NO: 1434900 - RNA, 19 nt, Homo sapiens
  misc_RNA (1)...(19): siRNA sense strand
gcuguucccugcauuugga

SEQ ID NO: 1434901 - RNA, 19 nt, Homo sapiens
  misc_RNA (1)...(19): siRNA sense strand
agaaacagaguacuccuuu

SEQ ID NO: 1434902 - RNA, 19 nt, Homo sapiens
  misc_RNA (1)...(19): siRNA sense strand
gguagaggccagaaaccua

SEQ ID NO: 1434903 - RNA, 19 nt, Homo sapiens
  misc_RNA (1)...(19): siRNA sense strand
gugcaaugcuccgauuaug

SEQ ID NO: 1434904 - RNA, 19 nt, Homo sapiens
  misc_RNA (1)...(19): siRNA sense strand
uggcaggucucgcaugaau

SEQ ID NO: 1434905 - RNA, 19 nt, Homo sapiens
  misc_RNA (1)...(19): siRNA sense strand
ggacaaucguguaguaacc

SEQ ID NO: 1434906 - RNA, 19 nt, Homo sapiens
  misc_RNA (1)...(19): siRNA sense strand
cuauggcccuaccaacuuu

SEQ ID NO: 1434907 - RNA, 19 nt, Homo sapiens
  misc_RNA (1)...(19): siRNA sense strand
gaaugcauccacccugaga

SEQ ID NO: 1434908 - RNA, 19 nt, Homo sapiens
  misc_RNA (1)...(19): siRNA sense strand
gccagaaaccuagauaaga

SEQ ID NO: 1434909 - RNA, 19 nt, Homo sapiens
  misc_RNA (1)...(19): siRNA sense strand
gcuacgcuuuggaaucuau

SEQ ID NO: 1434910 - RNA, 19 nt, Homo sapiens
  misc_RNA (1)...(19): siRNA sense strand
gugaccaucucauugacaa

SEQ ID NO: 1434911 - RNA, 19 nt, Homo sapiens
  misc_RNA (1)...(19): siRNA sense strand
gaugggaggcugucagauc

SEQ ID NO: 1434912 - RNA, 19 nt, Homo sapiens
  misc_RNA (1)...(19): siRNA sense strand
gacaagcuguucccugcau

SEQ ID NO: 1434913 - RNA, 19 nt, Homo sapiens
  misc_RNA (1)...(19): siRNA sense strand
ggacugccucgcaauacuu

SEQ ID NO: 1434914 - RNA, 19 nt, Homo sapiens
  misc_RNA (1)...(19): siRNA sense strand
gacccacucugcguccuuu

SEQ ID NO: 1434915 - RNA, 19 nt, Homo sapiens
  misc_RNA (1)...(19): siRNA sense strand
caacuuugcacccaucauc

SEQ ID NO: 1434916 - RNA, 19 nt, Homo sapiens
  misc_RNA (1)...(19): siRNA sense strand
ccaugucagugaucauugu

SEQ ID NO: 1434917 - RNA, 19 nt, Homo sapiens
  misc_RNA (1)...(19): siRNA sense strand
gagcuuggccggacugaac

SEQ ID NO: 1434918 - RNA, 19 nt, Homo sapiens
  misc_RNA (1)...(19): siRNA sense strand
ccucgaaccugcccauguc

SEQ ID NO: 1434919 - RNA, 19 nt, Homo sapiens
  misc_RNA (1)...(19): siRNA sense strand
ggaauuaaaggacaaucgu

SEQ ID NO: 1434920 - RNA, 19 nt, Homo sapiens
  misc_RNA (1)...(19): siRNA sense strand
caggugcaaugcuccgauu

SEQ ID NO: 1434921 - RNA, 19 nt, Homo sapiens
  misc_RNA (1)...(19): siRNA sense strand
ucgcagaagugcccacaca

SEQ ID NO: 1434922 - RNA, 19 nt, Homo sapiens
  misc_RNA (1)...(19): siRNA sense strand
ucucagcucaggaauuaaa

SEQ ID NO: 1434923 - RNA, 19 nt, Homo sapiens
  misc_RNA (1)...(19): siRNA sense strand
aaacagaguacuccuuucu

SEQ ID NO: 1434924 - RNA, 19 nt, Homo sapiens
  misc_RNA (1)...(19): siRNA sense strand
cagcuugaguaccgcuuug

SEQ ID NO: 1434925 - RNA, 19 nt, Homo sapiens
  misc_RNA (1)...(19): siRNA sense strand
cacaacuggucucauacuu

SEQ ID NO: 1434926 - RNA, 19 nt, Homo sapiens
  misc_RNA (1)...(19): siRNA sense strand
cgcaauacuucaugcuguu

SEQ ID NO: 1434927 - RNA, 19 nt, Homo sapiens
  misc_RNA (1)...(19): siRNA sense strand
guacuccuuucuggacuau

SEQ ID NO: 1434928 - RNA, 19 nt, Homo sapiens
  misc_RNA (1)...(19): siRNA sense strand
gauuguguccagccaggua

SEQ ID NO: 1434929 - RNA, 19 nt, Homo sapiens
  misc_RNA (1)...(19): siRNA sense strand
ggagguagaggccagaaac

SEQ ID NO: 1434930 - RNA, 19 nt, Homo sapiens
  misc_RNA (1)...(19): siRNA sense strand
cgcaugaauuugccuugaa

SEQ ID NO: 1434931 - RNA, 19 nt, Homo sapiens
  misc_RNA (1)...(19): siRNA sense strand
ugguucagcuguccauuuc

SEQ ID NO: 1434932 - RNA, 19 nt, Homo sapiens
  misc_RNA (1)...(19): siRNA sense strand
cagcgugguucaggacuau

SEQ ID NO: 1434933 - RNA, 19 nt, Homo sapiens
  misc_RNA (1)...(19): siRNA sense strand
gaggccagaaaccuagaua

SEQ ID NO: 1434934 - RNA, 19 nt, Homo sapiens
  misc_RNA (1)...(19): siRNA sense strand
caagcuguucccugcauuu

SEQ ID NO: 1434935 - RNA, 19 nt, Homo sapiens
  misc_RNA (1)...(19): siRNA sense strand
ggucaaugaguaccugaug

SEQ ID NO: 1434936 - RNA, 19 nt, Homo sapiens
  misc_RNA (1)...(19): siRNA sense strand
cggcugaguuugaaugcau

SEQ ID NO: 1434937 - RNA, 19 nt, Homo sapiens
  misc_RNA (1)...(19): siRNA sense strand
ggcagucccggcugaguuu

SEQ ID NO: 1434938 - RNA, 19 nt, Homo sapiens
  misc_RNA (1)...(19): siRNA sense strand
cauggaagcguuucucagu

SEQ ID NO: 1434939 - RNA, 19 nt, Homo sapiens
  misc_RNA (1)...(19): siRNA sense strand
ggccagaaaccuagauaag

SEQ ID NO: 1434940 - RNA, 19 nt, Homo sapiens
  misc_RNA (1)...(19): siRNA sense strand
gcccugaguucuccaagac

SEQ ID NO: 1434941 - RNA, 19 nt, Homo sapiens
  misc_RNA (1)...(19): siRNA sense strand
uguggguggugcugacuuu

SEQ ID NO: 1434942 - RNA, 19 nt, Homo sapiens
  misc_RNA (1)...(19): siRNA sense strand
acaaggacaucggcuccaa

SEQ ID NO: 1434943 - RNA, 19 nt, Homo sapiens
  misc_RNA (1)...(19): siRNA sense strand
ccugugaccaucucauuga

SEQ ID NO: 1434944 - RNA, 19 nt, Homo sapiens
  misc_RNA (1)...(19): siRNA sense strand
ccgccagggugaugggaaa

SEQ ID NO: 1434945 - RNA, 19 nt, Homo sapiens
  misc_RNA (1)...(19): siRNA sense strand
gcagaagugcccacacaac

SEQ ID NO: 1434946 - RNA, 19 nt, Homo sapiens
  misc_RNA (1)...(19): siRNA sense strand
gcaauacuucaugcuguug

SEQ ID NO: 1434947 - RNA, 19 nt, Homo sapiens
  misc_RNA (1)...(19): siRNA sense strand
gcaggcauccagggcauug

SEQ ID NO: 1434948 - RNA, 19 nt, Homo sapiens
  misc_RNA (1)...(19): siRNA sense strand
ucgcaugaauuugccuuga

SEQ ID NO: 1434949 - RNA, 19 nt, Homo sapiens
  misc_RNA (1)...(19): siRNA sense strand
cuccaagacucuacagcuu

SEQ ID NO: 1434950 - RNA, 19 nt, Homo sapiens
  misc_RNA (1)...(19): siRNA sense strand
ggugcaaugcuccgauuau

SEQ ID NO: 1434951 - RNA, 19 nt, Homo sapiens
  misc_RNA (1)...(19): siRNA sense strand
gggacugccucgcaauacu

SEQ ID NO: 1434952 - RNA, 19 nt, Homo sapiens
  misc_RNA (1)...(19): siRNA sense strand
acuggcaggucucgcauga

SEQ ID NO: 1434953 - RNA, 19 nt, Homo sapiens
  misc_RNA (1)...(19): siRNA sense strand
ucaccugacucccuacacu

SEQ ID NO: 1434954 - RNA, 19 nt, Homo sapiens
  misc_RNA (1)...(19): siRNA sense strand
gcgacauugugcaguuugu

SEQ ID NO: 1434955 - RNA, 19 nt, Homo sapiens
  misc_RNA (1)...(19): siRNA sense strand
uaguaaccauggagguaga

SEQ ID NO: 1434956 - RNA, 19 nt, Homo sapiens
  misc_RNA (1)...(19): siRNA sense strand
gcccaugucagugaucauu

SEQ ID NO: 1434957 - RNA, 19 nt, Homo sapiens
  misc_RNA (1)...(19): siRNA sense strand
gaacaaccugaacccuaca

SEQ ID NO: 1434958 - RNA, 19 nt, Homo sapiens
  misc_RNA (1)...(19): siRNA sense strand
gaaaccuagauaagaagga

SEQ ID NO: 1434959 - RNA, 19 nt, Homo sapiens
  misc_RNA (1)...(19): siRNA sense strand
gcuuugagacaguccagaa

SEQ ID NO: 1434960 - RNA, 19 nt, Homo sapiens
  misc_RNA (1)...(19): siRNA sense strand
aacuauccgugucaagauu

SEQ ID NO: 1434961 - RNA, 19 nt, Homo sapiens
  misc_RNA (1)...(19): siRNA sense strand
agaccgugcucgcagaagu

SEQ ID NO: 1434962 - RNA, 19 nt, Homo sapiens
  misc_RNA (1)...(19): siRNA sense strand
ccgcgacauugugcaguuu

SEQ ID NO: 1434963 - RNA, 19 nt, Homo sapiens
  misc_RNA (1)...(19): siRNA sense strand
gaggcugucagaucaacuu

SEQ ID NO: 1434964 - RNA, 19 nt, Homo sapiens
  misc_RNA (1)...(19): siRNA sense strand
gcuuuggaaucuaugacau

SEQ ID NO: 1434965 - RNA, 19 nt, Homo sapiens
  misc_RNA (1)...(19): siRNA sense strand
cgacauugugcaguuugua

SEQ ID NO: 1434966 - RNA, 19 nt, Homo sapiens
  misc_RNA (1)...(19): siRNA sense strand
uguaguaaccauggaggua

SEQ ID NO: 1434967 - RNA, 19 nt, Homo sapiens
  misc_RNA (1)...(19): siRNA sense strand
gcugucagaucaacuucac

SEQ ID NO: 1434968 - RNA, 19 nt, Homo sapiens
  misc_RNA (1)...(19): siRNA sense strand
uuaaaggacaaucguguag

SEQ ID NO: 1434969 - RNA, 19 nt, Homo sapiens
  misc_RNA (1)...(19): siRNA sense strand
ucuauggcccuaccaacuu

SEQ ID NO: 1434970 - RNA, 19 nt, Homo sapiens
  misc_RNA (1)...(19): siRNA sense strand
augggaggcugucagauca

SEQ ID NO: 1434971 - RNA, 19 nt, Homo sapiens
  misc_RNA (1)...(19): siRNA sense strand
ccagggugaugggaaaugg

SEQ ID NO: 1434972 - RNA, 19 nt, Homo sapiens
  misc_RNA (1)...(19): siRNA sense strand
cagcucaggaauuaaagga

SEQ ID NO: 1434973 - RNA, 19 nt, Homo sapiens
  misc_RNA (1)...(19): siRNA sense strand
cagaagugcccacacaacu

SEQ ID NO: 1434974 - RNA, 19 nt, Homo sapiens
  misc_RNA (1)...(19): siRNA sense strand
acaagcuguucccugcauu

SEQ ID NO: 1434975 - RNA, 19 nt, Homo sapiens
  misc_RNA (1)...(19): siRNA sense strand
aagaaaagcuacaagaacu

SEQ ID NO: 1434976 - RNA, 19 nt, Homo sapiens
  misc_RNA (1)...(19): siRNA sense strand
gcauccacccugagaagca

SEQ ID NO: 1434977 - RNA, 19 nt, Homo sapiens
  misc_RNA (1)...(19): siRNA sense strand
acuccuuucuggacuaugu

SEQ ID NO: 1434978 - RNA, 19 nt, Homo sapiens
  misc_RNA (1)...(19): siRNA sense strand
ggguggugcugacuuugag

SEQ ID NO: 1434979 - RNA, 19 nt, Homo sapiens
  misc_RNA (1)...(19): siRNA sense strand
ccacacaacuggucucaua

SEQ ID NO: 1434980 - RNA, 19 nt, Homo sapiens
  misc_RNA (1)...(19): siRNA sense strand
gaucugaggucaucaagaa

SEQ ID NO: 1434981 - RNA, 19 nt, Homo sapiens
  misc_RNA (1)...(19): siRNA sense strand
ggucucagcucaggaauua

SEQ ID NO: 1434982 - RNA, 19 nt, Homo sapiens
  misc_RNA (1)...(19): siRNA sense strand
ccagaaaccuagauaagaa

SEQ ID NO: 1434983 - RNA, 19 nt, Homo sapiens
  misc_RNA (1)...(19): siRNA sense strand
caacuggucucauacuuca

SEQ ID NO: 1434984 - RNA, 19 nt, Homo sapiens
  misc_RNA (1)...(19): siRNA sense strand
ggacuucacuggcuccaau

SEQ ID NO: 1434985 - RNA, 19 nt, Homo sapiens
  misc_RNA (1)...(19): siRNA sense strand
guacagaucugaggucauc

SEQ ID NO: 1434986 - RNA, 19 nt, Homo sapiens
  misc_RNA (1)...(19): siRNA sense strand
aaaggacaaucguguagua

SEQ ID NO: 1434987 - RNA, 19 nt, Homo sapiens
  misc_RNA (1)...(19): siRNA sense strand
gcaggucucgcaugaauuu

SEQ ID NO: 1434988 - RNA, 19 nt, Homo sapiens
  misc_RNA (1)...(19): siRNA sense strand
caagaacucuggaacuauc

SEQ ID NO: 1434989 - RNA, 19 nt, Homo sapiens
  misc_RNA (1)...(19): siRNA sense strand
caacaggggucaaugagua

SEQ ID NO: 1434990 - RNA, 19 nt, Homo sapiens
  misc_RNA (1)...(19): siRNA sense strand
uacaagaacucuggaacua

SEQ ID NO: 1434991 - RNA, 19 nt, Homo sapiens
  misc_RNA (1)...(19): siRNA sense strand
gcugagggaugaugacuuc

SEQ ID NO: 1434992 - RNA, 19 nt, Homo sapiens
  misc_RNA (1)...(19): siRNA sense strand
gcaugaauuugccuugaau

SEQ ID NO: 1434993 - RNA, 19 nt, Homo sapiens
  misc_RNA (1)...(19): siRNA sense strand
gagggaugaugacuuccua

SEQ ID NO: 1434994 - RNA, 19 nt, Homo sapiens
  misc_RNA (1)...(19): siRNA sense strand
ggacaucggcuccaagucu

SEQ ID NO: 1434995 - RNA, 19 nt, Homo sapiens
  misc_RNA (1)...(19): siRNA sense strand
cgccagagcugagggauga

SEQ ID NO: 1434996 - RNA, 19 nt, Homo sapiens
  misc_RNA (1)...(19): siRNA sense strand
ggaacuauccgugucaaga

SEQ ID NO: 1434997 - RNA, 19 nt, Homo sapiens
  misc_RNA (1)...(19): siRNA sense strand
gaacuauccgugucaagau

SEQ ID NO: 1434998 - RNA, 19 nt, Homo sapiens
  misc_RNA (1)...(19): siRNA sense strand
caagauuugucggguagaa

SEQ ID NO: 1434999 - RNA, 19 nt, Homo sapiens
  misc_RNA (1)...(19): siRNA sense strand
gcagcgugguucaggacua

SEQ ID NO: 1435000 - RNA, 19 nt, Homo sapiens
  misc_RNA (1)...(19): siRNA sense strand
gcuguucccugcauuugga

SEQ ID NO: 1435001 - RNA, 19 nt, Homo sapiens
  misc_RNA (1)...(19): siRNA sense strand
agaaacagaguacuccuuu

SEQ ID NO: 1435002 - RNA, 19 nt, Homo sapiens
  misc_RNA (1)...(19): siRNA sense strand
gguagaggccagaaaccua

SEQ ID NO: 1435003 - RNA, 19 nt, Homo sapiens
  misc_RNA (1)...(19): siRNA sense strand
gugcaaugcuccgauuaug

SEQ ID NO: 1435004 - RNA, 19 nt, Homo sapiens
  misc_RNA (1)...(19): siRNA sense strand
uggcaggucucgcaugaau

SEQ ID NO: 1435005 - RNA, 19 nt, Homo sapiens
  misc_RNA (1)...(19): siRNA sense strand
ggacaaucguguaguaacc

SEQ ID NO: 1435006 - RNA, 19 nt, Homo sapiens
  misc_RNA (1)...(19): siRNA sense strand
cuauggcccuaccaacuuu

SEQ ID NO: 1435007 - RNA, 19 nt, Homo sapiens
  misc_RNA (1)...(19): siRNA sense strand
gaaugcauccacccugaga

SEQ ID NO: 1435008 - RNA, 19 nt, Homo sapiens
  misc_RNA (1)...(19): siRNA sense strand
gccagaaaccuagauaaga

SEQ ID NO: 1435009 - RNA, 19 nt, Homo sapiens
  misc_RNA (1)...(19): siRNA sense strand
gcuacgcuuuggaaucuau

SEQ ID NO: 1435010 - RNA, 19 nt, Homo sapiens
  misc_RNA (1)...(19): siRNA sense strand
gugaccaucucauugacaa

SEQ ID NO: 1435011 - RNA, 19 nt, Homo sapiens
  misc_RNA (1)...(19): siRNA sense strand
gaugggaggcugucagauc

SEQ ID NO: 1435012 - RNA, 19 nt, Homo sapiens
  misc_RNA (1)...(19): siRNA sense strand
gacaagcuguucccugcau

SEQ ID NO: 1435013 - RNA, 19 nt, Homo sapiens
  misc_RNA (1)...(19): siRNA sense strand
ggacugccucgcaauacuu

SEQ ID NO: 1435014 - RNA, 19 nt, Homo sapiens
  misc_RNA (1)...(19): siRNA sense strand
gacccacucugcguccuuu

SEQ ID NO: 1435015 - RNA, 19 nt, Homo sapiens
  misc_RNA (1)...(19): siRNA sense strand
caacuuugcacccaucauc

SEQ ID NO: 1435016 - RNA, 19 nt, Homo sapiens
  misc_RNA (1)...(19): siRNA sense strand
ccaugucagugaucauugu

SEQ ID NO: 1435017 - RNA, 19 nt, Homo sapiens
  misc_RNA (1)...(19): siRNA sense strand
gagcuuggccggacugaac

SEQ ID NO: 1435018 - RNA, 19 nt, Homo sapiens
  misc_RNA (1)...(19): siRNA sense strand
ccucgaaccugcccauguc

SEQ ID NO: 1435019 - RNA, 19 nt, Homo sapiens
  misc_RNA (1)...(19): siRNA sense strand
ggaauuaaaggacaaucgu

SEQ ID NO: 1435020 - RNA, 19 nt, Homo sapiens
  misc_RNA (1)...(19): siRNA sense strand
caggugcaaugcuccgauu

SEQ ID NO: 1435021 - RNA, 19 nt, Homo sapiens
  misc_RNA (1)...(19): siRNA sense strand
ucgcagaagugcccacaca

SEQ ID NO: 1435022 - RNA, 19 nt, Homo sapiens
  misc_RNA (1)...(19): siRNA sense strand
ucucagcucaggaauuaaa

SEQ ID NO: 1435023 - RNA, 19 nt, Homo sapiens
  misc_RNA (1)...(19): siRNA sense strand
aaacagaguacuccuuucu

SEQ ID NO: 1435024 - RNA, 19 nt, Homo sapiens
  misc_RNA (1)...(19): siRNA sense strand
cagcuugaguaccgcuuug

SEQ ID NO: 1435025 - RNA, 19 nt, Homo sapiens
  misc_RNA (1)...(19): siRNA sense strand
cacaacuggucucauacuu

SEQ ID NO: 1435026 - RNA, 19 nt, Homo sapiens
  misc_RNA (1)...(19): siRNA sense strand
cgcaauacuucaugcuguu

SEQ ID NO: 1435027 - RNA, 19 nt, Homo sapiens
  misc_RNA (1)...(19): siRNA sense strand
guacuccuuucuggacuau

SEQ ID NO: 1435028 - RNA, 19 nt, Homo sapiens
  misc_RNA (1)...(19): siRNA sense strand
gauuguguccagccaggua

SEQ ID NO: 1435029 - RNA, 19 nt, Homo sapiens
  misc_RNA (1)...(19): siRNA sense strand
ggagguagaggccagaaac

SEQ ID NO: 1435030 - RNA, 19 nt, Homo sapiens
  misc_RNA (1)...(19): siRNA sense strand
cgcaugaauuugccuugaa

SEQ ID NO: 1435031 - RNA, 19 nt, Homo sapiens
  misc_RNA (1)...(19): siRNA sense strand
ugguucagcuguccauuuc

SEQ ID NO: 1435032 - RNA, 19 nt, Homo sapiens
  misc_RNA (1)...(19): siRNA sense strand
cagcgugguucaggacuau

SEQ ID NO: 1435033 - RNA, 19 nt, Homo sapiens
  misc_RNA (1)...(19): siRNA sense strand
gaggccagaaaccuagaua

SEQ ID NO: 1435034 - RNA, 19 nt, Homo sapiens
  misc_RNA (1)...(19): siRNA sense strand
caagcuguucccugcauuu

SEQ ID NO: 1435035 - RNA, 19 nt, Homo sapiens
  misc_RNA (1)...(19): siRNA sense strand
ggucaaugaguaccugaug

SEQ ID NO: 1435036 - RNA, 19 nt, Homo sapiens
  misc_RNA (1)...(19): siRNA sense strand
cggcugaguuugaaugcau

SEQ ID NO: 1435037 - RNA, 19 nt, Homo sapiens
  misc_RNA (1)...(19): siRNA sense strand
ggcagucccggcugaguuu

SEQ ID NO: 1435038 - RNA, 19 nt, Homo sapiens
  misc_RNA (1)...(19): siRNA sense strand
cauggaagcguuucucagu

SEQ ID NO: 1435039 - RNA, 19 nt, Homo sapiens
  misc_RNA (1)...(19): siRNA sense strand
ggccagaaaccuagauaag

SEQ ID NO: 1435040 - RNA, 19 nt, Homo sapiens
  misc_RNA (1)...(19): siRNA sense strand
gcccugaguucuccaagac

SEQ ID NO: 1435041 - RNA, 19 nt, Homo sapiens
  misc_RNA (1)...(19): siRNA sense strand
uguggguggugcugacuuu

SEQ ID NO: 1435042 - RNA, 19 nt, Homo sapiens
  misc_RNA (1)...(19): siRNA sense strand
acaaggacaucggcuccaa

SEQ ID NO: 1435043 - RNA, 19 nt, Homo sapiens
  misc_RNA (1)...(19): siRNA sense strand
ccugugaccaucucauuga

SEQ ID NO: 1435044 - RNA, 19 nt, Homo sapiens
  misc_RNA (1)...(19): siRNA sense strand
ccgccagggugaugggaaa

SEQ ID NO: 1435045 - RNA, 19 nt, Homo sapiens
  misc_RNA (1)...(19): siRNA sense strand
gcagaagugcccacacaac

SEQ ID NO: 1435046 - RNA, 19 nt, Homo sapiens
  misc_RNA (1)...(19): siRNA sense strand
gcaauacuucaugcuguug

SEQ ID NO: 1435047 - RNA, 19 nt, Homo sapiens
  misc_RNA (1)...(19): siRNA sense strand
gcaggcauccagggcauug

SEQ ID NO: 1435048 - RNA, 19 nt, Homo sapiens
  misc_RNA (1)...(19): siRNA sense strand
ucgcaugaauuugccuuga

SEQ ID NO: 1435049 - RNA, 19 nt, Homo sapiens
  misc_RNA (1)...(19): siRNA sense strand
cuccaagacucuacagcuu

SEQ ID NO: 1435050 - RNA, 19 nt, Homo sapiens
  misc_RNA (1)...(19): siRNA sense strand
ggugcaaugcuccgauuau

SEQ ID NO: 1435051 - RNA, 19 nt, Homo sapiens
  misc_RNA (1)...(19): siRNA sense strand
gggacugccucgcaauacu

SEQ ID NO: 1435052 - RNA, 19 nt, Homo sapiens
  misc_RNA (1)...(19): siRNA sense strand
acuggcaggucucgcauga

SEQ ID NO: 1435053 - RNA, 19 nt, Homo sapiens
  misc_RNA (1)...(19): siRNA sense strand
ucaccugacucccuacacu

SEQ ID NO: 1435054 - RNA, 19 nt, Homo sapiens
  misc_RNA (1)...(19): siRNA sense strand
gcgacauugugcaguuugu

SEQ ID NO: 1435055 - RNA, 19 nt, Homo sapiens
  misc_RNA (1)...(19): siRNA sense strand
uaguaaccauggagguaga

SEQ ID NO: 1435056 - RNA, 19 nt, Homo sapiens
  misc_RNA (1)...(19): siRNA sense strand
gcccaugucagugaucauu

SEQ ID NO: 1435057 - RNA, 19 nt, Homo sapiens
  misc_RNA (1)...(19): siRNA sense strand
gaacaaccugaacccuaca

SEQ ID NO: 1435058 - RNA, 19 nt, Homo sapiens
  misc_RNA (1)...(19): siRNA sense strand
gaaaccuagauaagaagga

SEQ ID NO: 1435059 - RNA, 19 nt, Homo sapiens
  misc_RNA (1)...(19): siRNA sense strand
gcuuugagacaguccagaa

SEQ ID NO: 1435060 - RNA, 19 nt, Homo sapiens
  misc_RNA (1)...(19): siRNA sense strand
aacuauccgugucaagauu

SEQ ID NO: 1435061 - RNA, 19 nt, Homo sapiens
  misc_RNA (1)...(19): siRNA sense strand
agaccgugcucgcagaagu

SEQ ID NO: 1435062 - RNA, 19 nt, Homo sapiens
  misc_RNA (1)...(19): siRNA sense strand
ccgcgacauugugcaguuu

SEQ ID NO: 1435063 - RNA, 19 nt, Homo sapiens
  misc_RNA (1)...(19): siRNA sense strand
gaggcugucagaucaacuu

SEQ ID NO: 1435064 - RNA, 19 nt, Homo sapiens
  misc_RNA (1)...(19): siRNA sense strand
gcuuuggaaucuaugacau

SEQ ID NO: 1435065 - RNA, 19 nt, Homo sapiens
  misc_RNA (1)...(19): siRNA sense strand
cgacauugugcaguuugua

SEQ ID NO: 1435066 - RNA, 19 nt, Homo sapiens
  misc_RNA (1)...(19): siRNA sense strand
uguaguaaccauggaggua

SEQ ID NO: 1435067 - RNA, 19 nt, Homo sapiens
  misc_RNA (1)...(19): siRNA sense strand
gcugucagaucaacuucac

SEQ ID NO: 1435068 - RNA, 19 nt, Homo sapiens
  misc_RNA (1)...(19): siRNA sense strand
uuaaaggacaaucguguag

SEQ ID NO: 1435069 - RNA, 19 nt, Homo sapiens
  misc_RNA (1)...(19): siRNA sense strand
ucuauggcccuaccaacuu

SEQ ID NO: 1435070 - RNA, 19 nt, Homo sapiens
  misc_RNA (1)...(19): siRNA sense strand
augggaggcugucagauca

SEQ ID NO: 1435071 - RNA, 19 nt, Homo sapiens
  misc_RNA (1)...(19): siRNA sense strand
ccagggugaugggaaaugg

SEQ ID NO: 1435072 - RNA, 19 nt, Homo sapiens
  misc_RNA (1)...(19): siRNA sense strand
cagcucaggaauuaaagga

SEQ ID NO: 1435073 - RNA, 19 nt, Homo sapiens
  misc_RNA (1)...(19): siRNA sense strand
cagaagugcccacacaacu

SEQ ID NO: 1435074 - RNA, 19 nt, Homo sapiens
  misc_RNA (1)...(19): siRNA sense strand
acaagcuguucccugcauu

SEQ ID NO: 1435075 - RNA, 19 nt, Homo sapiens
  misc_RNA (1)...(19): siRNA sense strand
aagaaaagcuacaagaacu

SEQ ID NO: 1435076 - RNA, 19 nt, Homo sapiens
  misc_RNA (1)...(19): siRNA sense strand
gcauccacccugagaagca

SEQ ID NO: 1435077 - RNA, 19 nt, Homo sapiens
  misc_RNA (1)...(19): siRNA sense strand
acuccuuucuggacuaugu

SEQ ID NO: 1435078 - RNA, 19 nt, Homo sapiens
  misc_RNA (1)...(19): siRNA sense strand
ggguggugcugacuuugag

SEQ ID NO: 1435079 - RNA, 19 nt, Homo sapiens
  misc_RNA (1)...(19): siRNA sense strand
ccacacaacuggucucaua

SEQ ID NO: 1435080 - RNA, 19 nt, Homo sapiens
  misc_RNA (1)...(19): siRNA sense strand
gaucugaggucaucaagaa

SEQ ID NO: 1435081 - RNA, 19 nt, Homo sapiens
  misc_RNA (1)...(19): siRNA sense strand
ggucucagcucaggaauua

SEQ ID NO: 1435082 - RNA, 19 nt, Homo sapiens
  misc_RNA (1)...(19): siRNA sense strand
ccagaaaccuagauaagaa

SEQ ID NO: 1435083 - RNA, 19 nt, Homo sapiens
  misc_RNA (1)...(19): siRNA sense strand
caacuggucucauacuuca

SEQ ID NO: 1435084 - RNA, 19 nt, Homo sapiens
  misc_RNA (1)...(19): siRNA sense strand
ggacuucacuggcuccaau

SEQ ID NO: 1435085 - RNA, 19 nt, Homo sapiens
  misc_RNA (1)...(19): siRNA sense strand
guacagaucugaggucauc

SEQ ID NO: 1435086 - RNA, 19 nt, Homo sapiens
  misc_RNA (1)...(19): siRNA sense strand
aaaggacaaucguguagua

SEQ ID NO: 1435087 - RNA, 19 nt, Homo sapiens
  misc_RNA (1)...(19): siRNA sense strand
gcaggucucgcaugaauuu

SEQ ID NO: 1435088 - RNA, 19 nt, Homo sapiens
  misc_RNA (1)...(19): siRNA sense strand
caagaacucuggaacuauc

SEQ ID NO: 1435089 - RNA, 19 nt, Homo sapiens
  misc_RNA (1)...(19): siRNA sense strand
caacaggggucaaugagua

SEQ ID NO: 1435090 - RNA, 19 nt, Homo sapiens
  misc_RNA (1)...(19): siRNA sense strand
uacaagaacucuggaacua

SEQ ID NO: 1435091 - RNA, 19 nt, Homo sapiens
  misc_RNA (1)...(19): siRNA sense strand
gcugagggaugaugacuuc

SEQ ID NO: 1435092 - RNA, 19 nt, Homo sapiens
  misc_RNA (1)...(19): siRNA sense strand
gcaugaauuugccuugaau

SEQ ID NO: 1435093 - RNA, 19 nt, Homo sapiens
  misc_RNA (1)...(19): siRNA sense strand
gagggaugaugacuuccua

SEQ ID NO: 1435094 - RNA, 19 nt, Homo sapiens
  misc_RNA (1)...(19): siRNA sense strand
ggacaucggcuccaagucu

SEQ ID NO: 1435095 - RNA, 19 nt, Homo sapiens
  misc_RNA (1)...(19): siRNA sense strand
cgccagagcugagggauga

SEQ ID NO: 1435096 - RNA, 19 nt, Homo sapiens
  misc_RNA (1)...(19): siRNA sense strand
ggaacuauccgugucaaga

SEQ ID NO: 1435097 - RNA, 19 nt, Homo sapiens
  misc_RNA (1)...(19): siRNA sense strand
gaacuauccgugucaagau

SEQ ID NO: 1435098 - RNA, 19 nt, Homo sapiens
  misc_RNA (1)...(19): siRNA sense strand
caagauuugucggguagaa

SEQ ID NO: 1435099 - RNA, 19 nt, Homo sapiens
  misc_RNA (1)...(19): siRNA sense strand
gcagcgugguucaggacua

SEQ ID NO: 1435100 - RNA, 19 nt, Homo sapiens
  misc_RNA (1)...(19): siRNA sense strand
gcuguucccugcauuugga

SEQ ID NO: 1435101 - RNA, 19 nt, Homo sapiens
  misc_RNA (1)...(19): siRNA sense strand
agaaacagaguacuccuuu

SEQ ID NO: 1435102 - RNA, 19 nt, Homo sapiens
  misc_RNA (1)...(19): siRNA sense strand
gguagaggccagaaaccua

SEQ ID NO: 1435103 - RNA, 19 nt, Homo sapiens
  misc_RNA (1)...(19): siRNA sense strand
gugcaaugcuccgauuaug

SEQ ID NO: 1435104 - RNA, 19 nt, Homo sapiens
  misc_RNA (1)...(19): siRNA sense strand
uggcaggucucgcaugaau

SEQ ID NO: 1435105 - RNA, 19 nt, Homo sapiens
  misc_RNA (1)...(19): siRNA sense strand
ggacaaucguguaguaacc

SEQ ID NO: 1435106 - RNA, 19 nt, Homo sapiens
  misc_RNA (1)...(19): siRNA sense strand
cuauggcccuaccaacuuu

SEQ ID NO: 1435107 - RNA, 19 nt, Homo sapiens
  misc_RNA (1)...(19): siRNA sense strand
gaaugcauccacccugaga

SEQ ID NO: 1435108 - RNA, 19 nt, Homo sapiens
  misc_RNA (1)...(19): siRNA sense strand
gccagaaaccuagauaaga

SEQ ID NO: 1435109 - RNA, 19 nt, Homo sapiens
  misc_RNA (1)...(19): siRNA sense strand
gcuacgcuuuggaaucuau

SEQ ID NO: 1435110 - RNA, 19 nt, Homo sapiens
  misc_RNA (1)...(19): siRNA sense strand
gugaccaucucauugacaa

SEQ ID NO: 1435111 - RNA, 19 nt, Homo sapiens
  misc_RNA (1)...(19): siRNA sense strand
gaugggaggcugucagauc

SEQ ID NO: 1435112 - RNA, 19 nt, Homo sapiens
  misc_RNA (1)...(19): siRNA sense strand
gacaagcuguucccugcau

SEQ ID NO: 1435113 - RNA, 19 nt, Homo sapiens
  misc_RNA (1)...(19): siRNA sense strand
ggacugccucgcaauacuu

SEQ ID NO: 1435114 - RNA, 19 nt, Homo sapiens
  misc_RNA (1)...(19): siRNA sense strand
gacccacucugcguccuuu

SEQ ID NO: 1435115 - RNA, 19 nt, Homo sapiens
  misc_RNA (1)...(19): siRNA sense strand
caacuuugcacccaucauc

SEQ ID NO: 1435116 - RNA, 19 nt, Homo sapiens
  misc_RNA (1)...(19): siRNA sense strand
ccaugucagugaucauugu

SEQ ID NO: 1435117 - RNA, 19 nt, Homo sapiens
  misc_RNA (1)...(19): siRNA sense strand
gagcuuggccggacugaac

SEQ ID NO: 1435118 - RNA, 19 nt, Homo sapiens
  misc_RNA (1)...(19): siRNA sense strand
ccucgaaccugcccauguc

SEQ ID NO: 1435119 - RNA, 19 nt, Homo sapiens
  misc_RNA (1)...(19): siRNA sense strand
ggaauuaaaggacaaucgu

SEQ ID NO: 1435120 - RNA, 19 nt, Homo sapiens
  misc_RNA (1)...(19): siRNA sense strand
caggugcaaugcuccgauu

SEQ ID NO: 1435121 - RNA, 19 nt, Homo sapiens
  misc_RNA (1)...(19): siRNA sense strand
ucgcagaagugcccacaca

SEQ ID NO: 1435122 - RNA, 19 nt, Homo sapiens
  misc_RNA (1)...(19): siRNA sense strand
ucucagcucaggaauuaaa

SEQ ID NO: 1435123 - RNA, 19 nt, Homo sapiens
  misc_RNA (1)...(19): siRNA sense strand
aaacagaguacuccuuucu

SEQ ID NO: 1435124 - RNA, 19 nt, Homo sapiens
  misc_RNA (1)...(19): siRNA sense strand
cagcuugaguaccgcuuug

SEQ ID NO: 1435125 - RNA, 19 nt, Homo sapiens
  misc_RNA (1)...(19): siRNA sense strand
cacaacuggucucauacuu

SEQ ID NO: 1435126 - RNA, 19 nt, Homo sapiens
  misc_RNA (1)...(19): siRNA sense strand
cgcaauacuucaugcuguu

SEQ ID NO: 1435127 - RNA, 19 nt, Homo sapiens
  misc_RNA (1)...(19): siRNA sense strand
guacuccuuucuggacuau

SEQ ID NO: 1435128 - RNA, 19 nt, Homo sapiens
  misc_RNA (1)...(19): siRNA sense strand
gauuguguccagccaggua

SEQ ID NO: 1435129 - RNA, 19 nt, Homo sapiens
  misc_RNA (1)...(19): siRNA sense strand
ggagguagaggccagaaac

SEQ ID NO: 1435130 - RNA, 19 nt, Homo sapiens
  misc_RNA (1)...(19): siRNA sense strand
cgcaugaauuugccuugaa

SEQ ID NO: 1435131 - RNA, 19 nt, Homo sapiens
  misc_RNA (1)...(19): siRNA sense strand
ugguucagcuguccauuuc

SEQ ID NO: 1435132 - RNA, 19 nt, Homo sapiens
  misc_RNA (1)...(19): siRNA sense strand
cagcgugguucaggacuau

SEQ ID NO: 1435133 - RNA, 19 nt, Homo sapiens
  misc_RNA (1)...(19): siRNA sense strand
gaggccagaaaccuagaua

SEQ ID NO: 1435134 - RNA, 19 nt, Homo sapiens
  misc_RNA (1)...(19): siRNA sense strand
caagcuguucccugcauuu

SEQ ID NO: 1435135 - RNA, 19 nt, Homo sapiens
  misc_RNA (1)...(19): siRNA sense strand
ggucaaugaguaccugaug

SEQ ID NO: 1435136 - RNA, 19 nt, Homo sapiens
  misc_RNA (1)...(19): siRNA sense strand
cggcugaguuugaaugcau

SEQ ID NO: 1435137 - RNA, 19 nt, Homo sapiens
  misc_RNA (1)...(19): siRNA sense strand
ggcagucccggcugaguuu

SEQ ID NO: 1435138 - RNA, 19 nt, Homo sapiens
  misc_RNA (1)...(19): siRNA sense strand
cauggaagcguuucucagu

SEQ ID NO: 1435139 - RNA, 19 nt, Homo sapiens
  misc_RNA (1)...(19): siRNA sense strand
ggccagaaaccuagauaag

SEQ ID NO: 1435140 - RNA, 19 nt, Homo sapiens
  misc_RNA (1)...(19): siRNA sense strand
gcccugaguucuccaagac

SEQ ID NO: 1435141 - RNA, 19 nt, Homo sapiens
  misc_RNA (1)...(19): siRNA sense strand
uguggguggugcugacuuu

SEQ ID NO: 1435142 - RNA, 19 nt, Homo sapiens
  misc_RNA (1)...(19): siRNA sense strand
acaaggacaucggcuccaa

SEQ ID NO: 1435143 - RNA, 19 nt, Homo sapiens
  misc_RNA (1)...(19): siRNA sense strand
ccugugaccaucucauuga

SEQ ID NO: 1435144 - RNA, 19 nt, Homo sapiens
  misc_RNA (1)...(19): siRNA sense strand
ccgccagggugaugggaaa

SEQ ID NO: 1435145 - RNA, 19 nt, Homo sapiens
  misc_RNA (1)...(19): siRNA sense strand
gcagaagugcccacacaac

SEQ ID NO: 1435146 - RNA, 19 nt, Homo sapiens
  misc_RNA (1)...(19): siRNA sense strand
gcaauacuucaugcuguug

SEQ ID NO: 1435147 - RNA, 19 nt, Homo sapiens
  misc_RNA (1)...(19): siRNA sense strand
gcaggcauccagggcauug

SEQ ID NO: 1435148 - RNA, 19 nt, Homo sapiens
  misc_RNA (1)...(19): siRNA sense strand
ucgcaugaauuugccuuga

SEQ ID NO: 1435149 - RNA, 19 nt, Homo sapiens
  misc_RNA (1)...(19): siRNA sense strand
cuccaagacucuacagcuu

SEQ ID NO: 1435150 - RNA, 19 nt, Homo sapiens
  misc_RNA (1)...(19): siRNA sense strand
ggugcaaugcuccgauuau

SEQ ID NO: 1435151 - RNA, 19 nt, Homo sapiens
  misc_RNA (1)...(19): siRNA sense strand
gggacugccucgcaauacu

SEQ ID NO: 1435152 - RNA, 19 nt, Homo sapiens
  misc_RNA (1)...(19): siRNA sense strand
acuggcaggucucgcauga

SEQ ID NO: 1435153 - RNA, 19 nt, Homo sapiens
  misc_RNA (1)...(19): siRNA sense strand
ucaccugacucccuacacu

SEQ ID NO: 1435154 - RNA, 19 nt, Homo sapiens
  misc_RNA (1)...(19): siRNA sense strand
gcgacauugugcaguuugu

SEQ ID NO: 1435155 - RNA, 19 nt, Homo sapiens
  misc_RNA (1)...(19): siRNA sense strand
uaguaaccauggagguaga

SEQ ID NO: 1435156 - RNA, 19 nt, Homo sapiens
  misc_RNA (1)...(19): siRNA sense strand
gcccaugucagugaucauu

SEQ ID NO: 1435157 - RNA, 19 nt, Homo sapiens
  misc_RNA (1)...(19): siRNA sense strand
gaacaaccugaacccuaca

SEQ ID NO: 1435158 - RNA, 19 nt, Homo sapiens
  misc_RNA (1)...(19): siRNA sense strand
gaaaccuagauaagaagga

SEQ ID NO: 1435159 - RNA, 19 nt, Homo sapiens
  misc_RNA (1)...(19): siRNA sense strand
gcuuugagacaguccagaa

SEQ ID NO: 1435160 - RNA, 19 nt, Homo sapiens
  misc_RNA (1)...(19): siRNA sense strand
aacuauccgugucaagauu

SEQ ID NO: 1435161 - RNA, 19 nt, Homo sapiens
  misc_RNA (1)...(19): siRNA sense strand
agaccgugcucgcagaagu

SEQ ID NO: 1435162 - RNA, 19 nt, Homo sapiens
  misc_RNA (1)...(19): siRNA sense strand
ccgcgacauugugcaguuu

SEQ ID NO: 1435163 - RNA, 19 nt, Homo sapiens
  misc_RNA (1)...(19): siRNA sense strand
gaggcugucagaucaacuu

SEQ ID NO: 1435164 - RNA, 19 nt, Homo sapiens
  misc_RNA (1)...(19): siRNA sense strand
gcuuuggaaucuaugacau

SEQ ID NO: 1435165 - RNA, 19 nt, Homo sapiens
  misc_RNA (1)...(19): siRNA sense strand
cgacauugugcaguuugua

SEQ ID NO: 1435166 - RNA, 19 nt, Homo sapiens
  misc_RNA (1)...(19): siRNA sense strand
uguaguaaccauggaggua

SEQ ID NO: 1435167 - RNA, 19 nt, Homo sapiens
  misc_RNA (1)...(19): siRNA sense strand
gcugucagaucaacuucac

SEQ ID NO: 1435168 - RNA, 19 nt, Homo sapiens
  misc_RNA (1)...(19): siRNA sense strand
uuaaaggacaaucguguag

SEQ ID NO: 1435169 - RNA, 19 nt, Homo sapiens
  misc_RNA (1)...(19): siRNA sense strand
ucuauggcccuaccaacuu

SEQ ID NO: 1435170 - RNA, 19 nt, Homo sapiens
  misc_RNA (1)...(19): siRNA sense strand
augggaggcugucagauca

SEQ ID NO: 1435171 - RNA, 19 nt, Homo sapiens
  misc_RNA (1)...(19): siRNA sense strand
ccagggugaugggaaaugg

SEQ ID NO: 1435172 - RNA, 19 nt, Homo sapiens
  misc_RNA (1)...(19): siRNA sense strand
cagcucaggaauuaaagga

SEQ ID NO: 1435173 - RNA, 19 nt, Homo sapiens
  misc_RNA (1)...(19): siRNA sense strand
cagaagugcccacacaacu

SEQ ID NO: 1435174 - RNA, 19 nt, Homo sapiens
  misc_RNA (1)...(19): siRNA sense strand
acaagcuguucccugcauu

SEQ ID NO: 1435175 - RNA, 19 nt, Homo sapiens
  misc_RNA (1)...(19): siRNA sense strand
aagaaaagcuacaagaacu

SEQ ID NO: 1435176 - RNA, 19 nt, Homo sapiens
  misc_RNA (1)...(19): siRNA sense strand
gcauccacccugagaagca

SEQ ID NO: 1435177 - RNA, 19 nt, Homo sapiens
  misc_RNA (1)...(19): siRNA sense strand
acuccuuucuggacuaugu

SEQ ID NO: 1435178 - RNA, 19 nt, Homo sapiens
  misc_RNA (1)...(19): siRNA sense strand
ggguggugcugacuuugag

SEQ ID NO: 1435179 - RNA, 19 nt, Homo sapiens
  misc_RNA (1)...(19): siRNA sense strand
ccacacaacuggucucaua

SEQ ID NO: 1435180 - RNA, 19 nt, Homo sapiens
  misc_RNA (1)...(19): siRNA sense strand
gaucugaggucaucaagaa

SEQ ID NO: 1435181 - RNA, 19 nt, Homo sapiens
  misc_RNA (1)...(19): siRNA sense strand
ggucucagcucaggaauua

SEQ ID NO: 1435182 - RNA, 19 nt, Homo sapiens
  misc_RNA (1)...(19): siRNA sense strand
ccagaaaccuagauaagaa

SEQ ID NO: 1435183 - RNA, 19 nt, Homo sapiens
  misc_RNA (1)...(19): siRNA sense strand
caacuggucucauacuuca

SEQ ID NO: 1435184 - RNA, 19 nt, Homo sapiens
  misc_RNA (1)...(19): siRNA sense strand
ggacuucacuggcuccaau

SEQ ID NO: 1435185 - RNA, 19 nt, Homo sapiens
  misc_RNA (1)...(19): siRNA sense strand
guacagaucugaggucauc

SEQ ID NO: 1435186 - RNA, 19 nt, Homo sapiens
  misc_RNA (1)...(19): siRNA sense strand
aaaggacaaucguguagua

SEQ ID NO: 1435187 - RNA, 19 nt, Homo sapiens
  misc_RNA (1)...(19): siRNA sense strand
gcaggucucgcaugaauuu

SEQ ID NO: 1435188 - RNA, 19 nt, Homo sapiens
  misc_RNA (1)...(19): siRNA sense strand
caagaacucuggaacuauc

SEQ ID NO: 1435189 - RNA, 19 nt, Homo sapiens
  misc_RNA (1)...(19): siRNA sense strand
caacaggggucaaugagua

SEQ ID NO: 1435190 - RNA, 19 nt, Homo sapiens
  misc_RNA (1)...(19): siRNA sense strand
uacaagaacucuggaacua

SEQ ID NO: 1435191 - RNA, 19 nt, Homo sapiens
  misc_RNA (1)...(19): siRNA sense strand
gcugagggaugaugacuuc

SEQ ID NO: 1435192 - RNA, 19 nt, Homo sapiens
  misc_RNA (1)...(19): siRNA sense strand
gcaugaauuugccuugaau

SEQ ID NO: 1435193 - RNA, 19 nt, Homo sapiens
  misc_RNA (1)...(19): siRNA sense strand
gagggaugaugacuuccua

SEQ ID NO: 1435194 - RNA, 19 nt, Homo sapiens
  misc_RNA (1)...(19): siRNA sense strand
ggacaucggcuccaagucu

SEQ ID NO: 1435195 - RNA, 19 nt, Homo sapiens
  misc_RNA (1)...(19): siRNA sense strand
cgccagagcugagggauga

SEQ ID NO: 1435196 - RNA, 19 nt, Homo sapiens
  misc_RNA (1)...(19): siRNA sense strand
ggaacuauccgugucaaga

SEQ ID NO: 1435197 - RNA, 19 nt, Homo sapiens
  misc_RNA (1)...(19): siRNA sense strand
gaacuauccgugucaagau

SEQ ID NO: 1435198 - RNA, 19 nt, Homo sapiens
  misc_RNA (1)...(19): siRNA sense strand
caagauuugucggguagaa

SEQ ID NO: 1435199 - RNA, 19 nt, Homo sapiens
  misc_RNA (1)...(19): siRNA sense strand
gcagcgugguucaggacua

SEQ ID NO: 1435200 - RNA, 19 nt, Homo sapiens
  misc_RNA (1)...(19): siRNA sense strand
gcuguucccugcauuugga

SEQ ID NO: 1435201 - RNA, 19 nt, Homo sapiens
  misc_RNA (1)...(19): siRNA sense strand
agaaacagaguacuccuuu

SEQ ID NO: 1435202 - RNA, 19 nt, Homo sapiens
  misc_RNA (1)...(19): siRNA sense strand
gguagaggccagaaaccua

SEQ ID NO: 1435203 - RNA, 19 nt, Homo sapiens
  misc_RNA (1)...(19): siRNA sense strand
gugcaaugcuccgauuaug

SEQ ID NO: 1435204 - RNA, 19 nt, Homo sapiens
  misc_RNA (1)...(19): siRNA sense strand
uggcaggucucgcaugaau

SEQ ID NO: 1435205 - RNA, 19 nt, Homo sapiens
  misc_RNA (1)...(19): siRNA sense strand
ggacaaucguguaguaacc

SEQ ID NO: 1435206 - RNA, 19 nt, Homo sapiens
  misc_RNA (1)...(19): siRNA sense strand
cuauggcccuaccaacuuu

SEQ ID NO: 1435207 - RNA, 19 nt, Homo sapiens
  misc_RNA (1)...(19): siRNA sense strand
gaaugcauccacccugaga

SEQ ID NO: 1435208 - RNA, 19 nt, Homo sapiens
  misc_RNA (1)...(19): siRNA sense strand
gccagaaaccuagauaaga

SEQ ID NO: 1435209 - RNA, 19 nt, Homo sapiens
  misc_RNA (1)...(19): siRNA sense strand
gcuacgcuuuggaaucuau

SEQ ID NO: 1435210 - RNA, 19 nt, Homo sapiens
  misc_RNA (1)...(19): siRNA sense strand
gugaccaucucauugacaa

SEQ ID NO: 1435211 - RNA, 19 nt, Homo sapiens
  misc_RNA (1)...(19): siRNA sense strand
gaugggaggcugucagauc

SEQ ID NO: 1435212 - RNA, 19 nt, Homo sapiens
  misc_RNA (1)...(19): siRNA sense strand
gacaagcuguucccugcau

SEQ ID NO: 1435213 - RNA, 19 nt, Homo sapiens
  misc_RNA (1)...(19): siRNA sense strand
ggacugccucgcaauacuu

SEQ ID NO: 1435214 - RNA, 19 nt, Homo sapiens
  misc_RNA (1)...(19): siRNA sense strand
gacccacucugcguccuuu

SEQ ID NO: 1435215 - RNA, 19 nt, Homo sapiens
  misc_RNA (1)...(19): siRNA sense strand
caacuuugcacccaucauc

SEQ ID NO: 1435216 - RNA, 19 nt, Homo sapiens
  misc_RNA (1)...(19): siRNA sense strand
ccaugucagugaucauugu

SEQ ID NO: 1435217 - RNA, 19 nt, Homo sapiens
  misc_RNA (1)...(19): siRNA sense strand
gagcuuggccggacugaac

SEQ ID NO: 1435218 - RNA, 19 nt, Homo sapiens
  misc_RNA (1)...(19): siRNA sense strand
ccucgaaccugcccauguc

SEQ ID NO: 1435219 - RNA, 19 nt, Homo sapiens
  misc_RNA (1)...(19): siRNA sense strand
ggaauuaaaggacaaucgu

SEQ ID NO: 1435220 - RNA, 19 nt, Homo sapiens
  misc_RNA (1)...(19): siRNA sense strand
caggugcaaugcuccgauu

SEQ ID NO: 1435221 - RNA, 19 nt, Homo sapiens
  misc_RNA (1)...(19): siRNA sense strand
ucgcagaagugcccacaca

SEQ ID NO: 1435222 - RNA, 19 nt, Homo sapiens
  misc_RNA (1)...(19): siRNA sense strand
ucucagcucaggaauuaaa

SEQ ID NO: 1435223 - RNA, 19 nt, Homo sapiens
  misc_RNA (1)...(19): siRNA sense strand
aaacagaguacuccuuucu

SEQ ID NO: 1435224 - RNA, 19 nt, Homo sapiens
  misc_RNA (1)...(19): siRNA sense strand
cagcuugaguaccgcuuug

SEQ ID NO: 1435225 - RNA, 19 nt, Homo sapiens
  misc_RNA (1)...(19): siRNA sense strand
cacaacuggucucauacuu

SEQ ID NO: 1435226 - RNA, 19 nt, Homo sapiens
  misc_RNA (1)...(19): siRNA sense strand
cgcaauacuucaugcuguu

SEQ ID NO: 1435227 - RNA, 19 nt, Homo sapiens
  misc_RNA (1)...(19): siRNA sense strand
guacuccuuucuggacuau

SEQ ID NO: 1435228 - RNA, 19 nt, Homo sapiens
  misc_RNA (1)...(19): siRNA sense strand
gauuguguccagccaggua

SEQ ID NO: 1435229 - RNA, 19 nt, Homo sapiens
  misc_RNA (1)...(19): siRNA sense strand
ggagguagaggccagaaac

SEQ ID NO: 1435230 - RNA, 19 nt, Homo sapiens
  misc_RNA (1)...(19): siRNA sense strand
cgcaugaauuugccuugaa

SEQ ID NO: 1435231 - RNA, 19 nt, Homo sapiens
  misc_RNA (1)...(19): siRNA sense strand
ugguucagcuguccauuuc

SEQ ID NO: 1435232 - RNA, 19 nt, Homo sapiens
  misc_RNA (1)...(19): siRNA sense strand
cagcgugguucaggacuau

SEQ ID NO: 1435233 - RNA, 19 nt, Homo sapiens
  misc_RNA (1)...(19): siRNA sense strand
gaggccagaaaccuagaua

SEQ ID NO: 1435234 - RNA, 19 nt, Homo sapiens
  misc_RNA (1)...(19): siRNA sense strand
caagcuguucccugcauuu

SEQ ID NO: 1435235 - RNA, 19 nt, Homo sapiens
  misc_RNA (1)...(19): siRNA sense strand
ggucaaugaguaccugaug

SEQ ID NO: 1435236 - RNA, 19 nt, Homo sapiens
  misc_RNA (1)...(19): siRNA sense strand
cggcugaguuugaaugcau

SEQ ID NO: 1435237 - RNA, 19 nt, Homo sapiens
  misc_RNA (1)...(19): siRNA sense strand
ggcagucccggcugaguuu

SEQ ID NO: 1435238 - RNA, 19 nt, Homo sapiens
  misc_RNA (1)...(19): siRNA sense strand
cauggaagcguuucucagu

SEQ ID NO: 1435239 - RNA, 19 nt, Homo sapiens
  misc_RNA (1)...(19): siRNA sense strand
ggccagaaaccuagauaag

SEQ ID NO: 1435240 - RNA, 19 nt, Homo sapiens
  misc_RNA (1)...(19): siRNA sense strand
gcccugaguucuccaagac

SEQ ID NO: 1435241 - RNA, 19 nt, Homo sapiens
  misc_RNA (1)...(19): siRNA sense strand
uguggguggugcugacuuu

SEQ ID NO: 1435242 - RNA, 19 nt, Homo sapiens
  misc_RNA (1)...(19): siRNA sense strand
acaaggacaucggcuccaa

SEQ ID NO: 1435243 - RNA, 19 nt, Homo sapiens
  misc_RNA (1)...(19): siRNA sense strand
ccugugaccaucucauuga

SEQ ID NO: 1435244 - RNA, 19 nt, Homo sapiens
  misc_RNA (1)...(19): siRNA sense strand
ccgccagggugaugggaaa

SEQ ID NO: 1435245 - RNA, 19 nt, Homo sapiens
  misc_RNA (1)...(19): siRNA sense strand
gcagaagugcccacacaac

SEQ ID NO: 1435246 - RNA, 19 nt, Homo sapiens
  misc_RNA (1)...(19): siRNA sense strand
gcaauacuucaugcuguug

SEQ ID NO: 1435247 - RNA, 19 nt, Homo sapiens
  misc_RNA (1)...(19): siRNA sense strand
gcaggcauccagggcauug

SEQ ID NO: 1435248 - RNA, 19 nt, Homo sapiens
  misc_RNA (1)...(19): siRNA sense strand
ucgcaugaauuugccuuga

SEQ ID NO: 1435249 - RNA, 19 nt, Homo sapiens
  misc_RNA (1)...(19): siRNA sense strand
cuccaagacucuacagcuu

SEQ ID NO: 1435250 - RNA, 19 nt, Homo sapiens
  misc_RNA (1)...(19): siRNA sense strand
ggugcaaugcuccgauuau

SEQ ID NO: 1435251 - RNA, 19 nt, Homo sapiens
  misc_RNA (1)...(19): siRNA sense strand
gggacugccucgcaauacu

SEQ ID NO: 1435252 - RNA, 19 nt, Homo sapiens
  misc_RNA (1)...(19): siRNA sense strand
acuggcaggucucgcauga

SEQ ID NO: 1435253 - RNA, 19 nt, Homo sapiens
  misc_RNA (1)...(19): siRNA sense strand
ucaccugacucccuacacu

SEQ ID NO: 1435254 - RNA, 19 nt, Homo sapiens
  misc_RNA (1)...(19): siRNA sense strand
gcgacauugugcaguuugu

SEQ ID NO: 1435255 - RNA, 19 nt, Homo sapiens
  misc_RNA (1)...(19): siRNA sense strand
uaguaaccauggagguaga

SEQ ID NO: 1435256 - RNA, 19 nt, Homo sapiens
  misc_RNA (1)...(19): siRNA sense strand
gcccaugucagugaucauu

SEQ ID NO: 1435257 - RNA, 19 nt, Homo sapiens
  misc_RNA (1)...(19): siRNA sense strand
gaacaaccugaacccuaca

SEQ ID NO: 1435258 - RNA, 19 nt, Homo sapiens
  misc_RNA (1)...(19): siRNA sense strand
gaaaccuagauaagaagga

SEQ ID NO: 1435259 - RNA, 19 nt, Homo sapiens
  misc_RNA (1)...(19): siRNA sense strand
gcuuugagacaguccagaa

SEQ ID NO: 1435260 - RNA, 19 nt, Homo sapiens
  misc_RNA (1)...(19): siRNA sense strand
aacuauccgugucaagauu

SEQ ID NO: 1435261 - RNA, 19 nt, Homo sapiens
  misc_RNA (1)...(19): siRNA sense strand
agaccgugcucgcagaagu

SEQ ID NO: 1435262 - RNA, 19 nt, Homo sapiens
  misc_RNA (1)...(19): siRNA sense strand
ccgcgacauugugcaguuu

SEQ ID NO: 1435263 - RNA, 19 nt, Homo sapiens
  misc_RNA (1)...(19): siRNA sense strand
gaggcugucagaucaacuu

SEQ ID NO: 1435264 - RNA, 19 nt, Homo sapiens
  misc_RNA (1)...(19): siRNA sense strand
gcuuuggaaucuaugacau

SEQ ID NO: 1435265 - RNA, 19 nt, Homo sapiens
  misc_RNA (1)...(19): siRNA sense strand
cgacauugugcaguuugua

SEQ ID NO: 1435266 - RNA, 19 nt, Homo sapiens
  misc_RNA (1)...(19): siRNA sense strand
uguaguaaccauggaggua

SEQ ID NO: 1435267 - RNA, 19 nt, Homo sapiens
  misc_RNA (1)...(19): siRNA sense strand
gcugucagaucaacuucac

SEQ ID NO: 1435268 - RNA, 19 nt, Homo sapiens
  misc_RNA (1)...(19): siRNA sense strand
uuaaaggacaaucguguag

SEQ ID NO: 1435269 - RNA, 19 nt, Homo sapiens
  misc_RNA (1)...(19): siRNA sense strand
ucuauggcccuaccaacuu

SEQ ID NO: 1435270 - RNA, 19 nt, Homo sapiens
  misc_RNA (1)...(19): siRNA sense strand
augggaggcugucagauca

SEQ ID NO: 1435271 - RNA, 19 nt, Homo sapiens
  misc_RNA (1)...(19): siRNA sense strand
ccagggugaugggaaaugg

SEQ ID NO: 1435272 - RNA, 19 nt, Homo sapiens
  misc_RNA (1)...(19): siRNA sense strand
cagcucaggaauuaaagga

SEQ ID NO: 1435273 - RNA, 19 nt, Homo sapiens
  misc_RNA (1)...(19): siRNA sense strand
cagaagugcccacacaacu

SEQ ID NO: 1435274 - RNA, 19 nt, Homo sapiens
  misc_RNA (1)...(19): siRNA sense strand
acaagcuguucccugcauu

SEQ ID NO: 1435275 - RNA, 19 nt, Homo sapiens
  misc_RNA (1)...(19): siRNA sense strand
aagaaaagcuacaagaacu

SEQ ID NO: 1435276 - RNA, 19 nt, Homo sapiens
  misc_RNA (1)...(19): siRNA sense strand
gcauccacccugagaagca

SEQ ID NO: 1435277 - RNA, 19 nt, Homo sapiens
  misc_RNA (1)...(19): siRNA sense strand
acuccuuucuggacuaugu

SEQ ID NO: 1435278 - RNA, 19 nt, Homo sapiens
  misc_RNA (1)...(19): siRNA sense strand
ggguggugcugacuuugag

SEQ ID NO: 1435279 - RNA, 19 nt, Homo sapiens
  misc_RNA (1)...(19): siRNA sense strand
ccacacaacuggucucaua

SEQ ID NO: 1435280 - RNA, 19 nt, Homo sapiens
  misc_RNA (1)...(19): siRNA sense strand
gaucugaggucaucaagaa

SEQ ID NO: 1435281 - RNA, 19 nt, Homo sapiens
  misc_RNA (1)...(19): siRNA sense strand
ggucucagcucaggaauua

SEQ ID NO: 1435282 - RNA, 19 nt, Homo sapiens
  misc_RNA (1)...(19): siRNA sense strand
ccagaaaccuagauaagaa

SEQ ID NO: 1435283 - RNA, 19 nt, Homo sapiens
  misc_RNA (1)...(19): siRNA sense strand
caacuggucucauacuuca

SEQ ID NO: 1435284 - RNA, 19 nt, Homo sapiens
  misc_RNA (1)...(19): siRNA sense strand
ggacuucacuggcuccaau

SEQ ID NO: 1435285 - RNA, 19 nt, Homo sapiens
  misc_RNA (1)...(19): siRNA sense strand
guacagaucugaggucauc

SEQ ID NO: 1435286 - RNA, 19 nt, Homo sapiens
  misc_RNA (1)...(19): siRNA sense strand
aaaggacaaucguguagua

SEQ ID NO: 1435287 - RNA, 19 nt, Homo sapiens
  misc_RNA (1)...(19): siRNA sense strand
gcaggucucgcaugaauuu

SEQ ID NO: 1435288 - RNA, 19 nt, Homo sapiens
  misc_RNA (1)...(19): siRNA sense strand
caagaacucuggaacuauc

SEQ ID NO: 1435289 - RNA, 19 nt, Homo sapiens
  misc_RNA (1)...(19): siRNA sense strand
caacaggggucaaugagua

SEQ ID NO: 1435290 - RNA, 19 nt, Homo sapiens
  misc_RNA (1)...(19): siRNA sense strand
uacaagaacucuggaacua

SEQ ID NO: 1435291 - RNA, 19 nt, Homo sapiens
  misc_RNA (1)...(19): siRNA sense strand
gcugagggaugaugacuuc

SEQ ID NO: 1435292 - RNA, 19 nt, Homo sapiens
  misc_RNA (1)...(19): siRNA sense strand
gcaugaauuugccuugaau

SEQ ID NO: 1435293 - RNA, 19 nt, Homo sapiens
  misc_RNA (1)...(19): siRNA sense strand
gagggaugaugacuuccua

SEQ ID NO: 1435294 - RNA, 19 nt, Homo sapiens
  misc_RNA (1)...(19): siRNA sense strand
ggacaucggcuccaagucu

SEQ ID NO: 1435295 - RNA, 19 nt, Homo sapiens
  misc_RNA (1)...(19): siRNA sense strand
cgccagagcugagggauga

SEQ ID NO: 1435296 - RNA, 19 nt, Homo sapiens
  misc_RNA (1)...(19): siRNA sense strand
ggaacuauccgugucaaga

SEQ ID NO: 1435297 - RNA, 19 nt, Homo sapiens
  misc_RNA (1)...(19): siRNA sense strand
gaacuauccgugucaagau

SEQ ID NO: 1435298 - RNA, 19 nt, Homo sapiens
  misc_RNA (1)...(19): siRNA sense strand
caagauuugucggguagaa

SEQ ID NO: 1435299 - RNA, 19 nt, Homo sapiens
  misc_RNA (1)...(19): siRNA sense strand
gcagcgugguucaggacua

SEQ ID NO: 1435300 - RNA, 19 nt, Homo sapiens
  misc_RNA (1)...(19): siRNA sense strand
gcuguucccugcauuugga

SEQ ID NO: 1435301 - RNA, 19 nt, Homo sapiens
  misc_RNA (1)...(19): siRNA sense strand
agaaacagaguacuccuuu

SEQ ID NO: 1435302 - RNA, 19 nt, Homo sapiens
  misc_RNA (1)...(19): siRNA sense strand
gguagaggccagaaaccua

SEQ ID NO: 1435303 - RNA, 19 nt, Homo sapiens
  misc_RNA (1)...(19): siRNA sense strand
gugcaaugcuccgauuaug

SEQ ID NO: 1435304 - RNA, 19 nt, Homo sapiens
  misc_RNA (1)...(19): siRNA sense strand
uggcaggucucgcaugaau

SEQ ID NO: 1435305 - RNA, 19 nt, Homo sapiens
  misc_RNA (1)...(19): siRNA sense strand
ggacaaucguguaguaacc

SEQ ID NO: 1435306 - RNA, 19 nt, Homo sapiens
  misc_RNA (1)...(19): siRNA sense strand
cuauggcccuaccaacuuu

SEQ ID NO: 1435307 - RNA, 19 nt, Homo sapiens
  misc_RNA (1)...(19): siRNA sense strand
gaaugcauccacccugaga

SEQ ID NO: 1435308 - RNA, 19 nt, Homo sapiens
  misc_RNA (1)...(19): siRNA sense strand
gccagaaaccuagauaaga

SEQ ID NO: 1435309 - RNA, 19 nt, Homo sapiens
  misc_RNA (1)...(19): siRNA sense strand
gcuacgcuuuggaaucuau

SEQ ID NO: 1435310 - RNA, 19 nt, Homo sapiens
  misc_RNA (1)...(19): siRNA sense strand
gugaccaucucauugacaa

SEQ ID NO: 1435311 - RNA, 19 nt, Homo sapiens
  misc_RNA (1)...(19): siRNA sense strand
gaugggaggcugucagauc

SEQ ID NO: 1435312 - RNA, 19 nt, Homo sapiens
  misc_RNA (1)...(19): siRNA sense strand
gacaagcuguucccugcau

SEQ ID NO: 1435313 - RNA, 19 nt, Homo sapiens
  misc_RNA (1)...(19): siRNA sense strand
ggacugccucgcaauacuu

SEQ ID NO: 1435314 - RNA, 19 nt, Homo sapiens
  misc_RNA (1)...(19): siRNA sense strand
gacccacucugcguccuuu

SEQ ID NO: 1435315 - RNA, 19 nt, Homo sapiens
  misc_RNA (1)...(19): siRNA sense strand
caacuuugcacccaucauc

SEQ ID NO: 1435316 - RNA, 19 nt, Homo sapiens
  misc_RNA (1)...(19): siRNA sense strand
ccaugucagugaucauugu

SEQ ID NO: 1435317 - RNA, 19 nt, Homo sapiens
  misc_RNA (1)...(19): siRNA sense strand
gagcuuggccggacugaac

SEQ ID NO: 1435318 - RNA, 19 nt, Homo sapiens
  misc_RNA (1)...(19): siRNA sense strand
ccucgaaccugcccauguc

SEQ ID NO: 1435319 - RNA, 19 nt, Homo sapiens
  misc_RNA (1)...(19): siRNA sense strand
ggaauuaaaggacaaucgu

SEQ ID NO: 1435320 - RNA, 19 nt, Homo sapiens
  misc_RNA (1)...(19): siRNA sense strand
caggugcaaugcuccgauu

SEQ ID NO: 1435321 - RNA, 19 nt, Homo sapiens
  misc_RNA (1)...(19): siRNA sense strand
ucgcagaagugcccacaca

SEQ ID NO: 1435322 - RNA, 19 nt, Homo sapiens
  misc_RNA (1)...(19): siRNA sense strand
ucucagcucaggaauuaaa

SEQ ID NO: 1435323 - RNA, 19 nt, Homo sapiens
  misc_RNA (1)...(19): siRNA sense strand
aaacagaguacuccuuucu

SEQ ID NO: 1435324 - RNA, 19 nt, Homo sapiens
  misc_RNA (1)...(19): siRNA sense strand
cagcuugaguaccgcuuug

SEQ ID NO: 1435325 - RNA, 19 nt, Homo sapiens
  misc_RNA (1)...(19): siRNA sense strand
cacaacuggucucauacuu

SEQ ID NO: 1435326 - RNA, 19 nt, Homo sapiens
  misc_RNA (1)...(19): siRNA sense strand
cgcaauacuucaugcuguu

SEQ ID NO: 1435327 - RNA, 19 nt, Homo sapiens
  misc_RNA (1)...(19): siRNA sense strand
guacuccuuucuggacuau

SEQ ID NO: 1435328 - RNA, 19 nt, Homo sapiens
  misc_RNA (1)...(19): siRNA sense strand
gauuguguccagccaggua

SEQ ID NO: 1435329 - RNA, 19 nt, Homo sapiens
  misc_RNA (1)...(19): siRNA sense strand
ggagguagaggccagaaac

SEQ ID NO: 1435330 - RNA, 19 nt, Homo sapiens
  misc_RNA (1)...(19): siRNA sense strand
cgcaugaauuugccuugaa

SEQ ID NO: 1435331 - RNA, 19 nt, Homo sapiens
  misc_RNA (1)...(19): siRNA sense strand
ugguucagcuguccauuuc

SEQ ID NO: 1435332 - RNA, 19 nt, Homo sapiens
  misc_RNA (1)...(19): siRNA sense strand
cagcgugguucaggacuau

SEQ ID NO: 1435333 - RNA, 19 nt, Homo sapiens
  misc_RNA (1)...(19): siRNA sense strand
gaggccagaaaccuagaua

SEQ ID NO: 1435334 - RNA, 19 nt, Homo sapiens
  misc_RNA (1)...(19): siRNA sense strand
caagcuguucccugcauuu

SEQ ID NO: 1435335 - RNA, 19 nt, Homo sapiens
  misc_RNA (1)...(19): siRNA sense strand
ggucaaugaguaccugaug

SEQ ID NO: 1435336 - RNA, 19 nt, Homo sapiens
  misc_RNA (1)...(19): siRNA sense strand
cggcugaguuugaaugcau

SEQ ID NO: 1435337 - RNA, 19 nt, Homo sapiens
  misc_RNA (1)...(19): siRNA sense strand
ggcagucccggcugaguuu

SEQ ID NO: 1435338 - RNA, 19 nt, Homo sapiens
  misc_RNA (1)...(19): siRNA sense strand
cauggaagcguuucucagu

SEQ ID NO: 1435339 - RNA, 19 nt, Homo sapiens
  misc_RNA (1)...(19): siRNA sense strand
ggccagaaaccuagauaag

SEQ ID NO: 1435340 - RNA, 19 nt, Homo sapiens
  misc_RNA (1)...(19): siRNA sense strand
gcccugaguucuccaagac

SEQ ID NO: 1435341 - RNA, 19 nt, Homo sapiens
  misc_RNA (1)...(19): siRNA sense strand
uguggguggugcugacuuu

SEQ ID NO: 1435342 - RNA, 19 nt, Homo sapiens
  misc_RNA (1)...(19): siRNA sense strand
acaaggacaucggcuccaa

SEQ ID NO: 1435343 - RNA, 19 nt, Homo sapiens
  misc_RNA (1)...(19): siRNA sense strand
ccugugaccaucucauuga

SEQ ID NO: 1435344 - RNA, 19 nt, Homo sapiens
  misc_RNA (1)...(19): siRNA sense strand
ccgccagggugaugggaaa

SEQ ID NO: 1435345 - RNA, 19 nt, Homo sapiens
  misc_RNA (1)...(19): siRNA sense strand
gcagaagugcccacacaac

SEQ ID NO: 1435346 - RNA, 19 nt, Homo sapiens
  misc_RNA (1)...(19): siRNA sense strand
gcaauacuucaugcuguug

SEQ ID NO: 1435347 - RNA, 19 nt, Homo sapiens
  misc_RNA (1)...(19): siRNA sense strand
gcaggcauccagggcauug

SEQ ID NO: 1435348 - RNA, 19 nt, Homo sapiens
  misc_RNA (1)...(19): siRNA sense strand
ucgcaugaauuugccuuga

SEQ ID NO: 1435349 - RNA, 19 nt, Homo sapiens
  misc_RNA (1)...(19): siRNA sense strand
cuccaagacucuacagcuu

SEQ ID NO: 1435350 - RNA, 19 nt, Homo sapiens
  misc_RNA (1)...(19): siRNA sense strand
ggugcaaugcuccgauuau

SEQ ID NO: 1435351 - RNA, 19 nt, Homo sapiens
  misc_RNA (1)...(19): siRNA sense strand
gggacugccucgcaauacu

SEQ ID NO: 1435352 - RNA, 19 nt, Homo sapiens
  misc_RNA (1)...(19): siRNA sense strand
acuggcaggucucgcauga

SEQ ID NO: 1435353 - RNA, 19 nt, Homo sapiens
  misc_RNA (1)...(19): siRNA sense strand
ucaccugacucccuacacu

SEQ ID NO: 1435354 - RNA, 19 nt, Homo sapiens
  misc_RNA (1)...(19): siRNA sense strand
gcgacauugugcaguuugu

SEQ ID NO: 1435355 - RNA, 19 nt, Homo sapiens
  misc_RNA (1)...(19): siRNA sense strand
uaguaaccauggagguaga

SEQ ID NO: 1435356 - RNA, 19 nt, Homo sapiens
  misc_RNA (1)...(19): siRNA sense strand
gcccaugucagugaucauu

SEQ ID NO: 1435357 - RNA, 19 nt, Homo sapiens
  misc_RNA (1)...(19): siRNA sense strand
gaacaaccugaacccuaca

SEQ ID NO: 1435358 - RNA, 19 nt, Homo sapiens
  misc_RNA (1)...(19): siRNA sense strand
gaaaccuagauaagaagga

SEQ ID NO: 1435359 - RNA, 19 nt, Homo sapiens
  misc_RNA (1)...(19): siRNA sense strand
gcuuugagacaguccagaa

SEQ ID NO: 1435360 - RNA, 19 nt, Homo sapiens
  misc_RNA (1)...(19): siRNA sense strand
aacuauccgugucaagauu

SEQ ID NO: 1435361 - RNA, 19 nt, Homo sapiens
  misc_RNA (1)...(19): siRNA sense strand
agaccgugcucgcagaagu

SEQ ID NO: 1435362 - RNA, 19 nt, Homo sapiens
  misc_RNA (1)...(19): siRNA sense strand
ccgcgacauugugcaguuu

SEQ ID NO: 1435363 - RNA, 19 nt, Homo sapiens
  misc_RNA (1)...(19): siRNA sense strand
gaggcugucagaucaacuu

SEQ ID NO: 1435364 - RNA, 19 nt, Homo sapiens
  misc_RNA (1)...(19): siRNA sense strand
gcuuuggaaucuaugacau

SEQ ID NO: 1435365 - RNA, 19 nt, Homo sapiens
  misc_RNA (1)...(19): siRNA sense strand
cgacauugugcaguuugua

SEQ ID NO: 1435366 - RNA, 19 nt, Homo sapiens
  misc_RNA (1)...(19): siRNA sense strand
uguaguaaccauggaggua

SEQ ID NO: 1435367 - RNA, 19 nt, Homo sapiens
  misc_RNA (1)...(19): siRNA sense strand
gcugucagaucaacuucac

SEQ ID NO: 1435368 - RNA, 19 nt, Homo sapiens
  misc_RNA (1)...(19): siRNA sense strand
uuaaaggacaaucguguag

SEQ ID NO: 1435369 - RNA, 19 nt, Homo sapiens
  misc_RNA (1)...(19): siRNA sense strand
ucuauggcccuaccaacuu

SEQ ID NO: 1435370 - RNA, 19 nt, Homo sapiens
  misc_RNA (1)...(19): siRNA sense strand
augggaggcugucagauca

SEQ ID NO: 1435371 - RNA, 19 nt, Homo sapiens
  misc_RNA (1)...(19): siRNA sense strand
ccagggugaugggaaaugg

SEQ ID NO: 1435372 - RNA, 19 nt, Homo sapiens
  misc_RNA (1)...(19): siRNA sense strand
cagcucaggaauuaaagga

SEQ ID NO: 1435373 - RNA, 19 nt, Homo sapiens
  misc_RNA (1)...(19): siRNA sense strand
cagaagugcccacacaacu

SEQ ID NO: 1435374 - RNA, 19 nt, Homo sapiens
  misc_RNA (1)...(19): siRNA sense strand
acaagcuguucccugcauu

SEQ ID NO: 1435375 - RNA, 19 nt, Homo sapiens
  misc_RNA (1)...(19): siRNA sense strand
aagaaaagcuacaagaacu

SEQ ID NO: 1435376 - RNA, 19 nt, Homo sapiens
  misc_RNA (1)...(19): siRNA sense strand
gcauccacccugagaagca

SEQ ID NO: 1435377 - RNA, 19 nt, Homo sapiens
  misc_RNA (1)...(19): siRNA sense strand
acuccuuucuggacuaugu

SEQ ID NO: 1435378 - RNA, 19 nt, Homo sapiens
  misc_RNA (1)...(19): siRNA sense strand
ggguggugcugacuuugag

SEQ ID NO: 1435379 - RNA, 19 nt, Homo sapiens
  misc_RNA (1)...(19): siRNA sense strand
ccacacaacuggucucaua

SEQ ID NO: 1435380 - RNA, 19 nt, Homo sapiens
  misc_RNA (1)...(19): siRNA sense strand
gaucugaggucaucaagaa

SEQ ID NO: 1435381 - RNA, 19 nt, Homo sapiens
  misc_RNA (1)...(19): siRNA sense strand
ggucucagcucaggaauua

SEQ ID NO: 1435382 - RNA, 19 nt, Homo sapiens
  misc_RNA (1)...(19): siRNA sense strand
ccagaaaccuagauaagaa

SEQ ID NO: 1435383 - RNA, 19 nt, Homo sapiens
  misc_RNA (1)...(19): siRNA sense strand
caacuggucucauacuuca

SEQ ID NO: 1435384 - RNA, 19 nt, Homo sapiens
  misc_RNA (1)...(19): siRNA sense strand
ggacuucacuggcuccaau

SEQ ID NO: 1435385 - RNA, 19 nt, Homo sapiens
  misc_RNA (1)...(19): siRNA sense strand
guacagaucugaggucauc

SEQ ID NO: 1435386 - RNA, 19 nt, Homo sapiens
  misc_RNA (1)...(19): siRNA sense strand
aaaggacaaucguguagua

SEQ ID NO: 1435387 - RNA, 19 nt, Homo sapiens
  misc_RNA (1)...(19): siRNA sense strand
gcaggucucgcaugaauuu

SEQ ID NO: 1435388 - RNA, 19 nt, Homo sapiens
  misc_RNA (1)...(19): siRNA sense strand
caagaacucuggaacuauc

SEQ ID NO: 1435389 - RNA, 19 nt, Homo sapiens
  misc_RNA (1)...(19): siRNA sense strand
caacaggggucaaugagua

SEQ ID NO: 1435390 - RNA, 19 nt, Homo sapiens
  misc_RNA (1)...(19): siRNA sense strand
uacaagaacucuggaacua

SEQ ID NO: 1435391 - RNA, 19 nt, Homo sapiens
  misc_RNA (1)...(19): siRNA sense strand
gcugagggaugaugacuuc

SEQ ID NO: 1435392 - RNA, 19 nt, Homo sapiens
  misc_RNA (1)...(19): siRNA sense strand
gcaugaauuugccuugaau

SEQ ID NO: 1435393 - RNA, 19 nt, Homo sapiens
  misc_RNA (1)...(19): siRNA sense strand
gagggaugaugacuuccua

SEQ ID NO: 1435394 - RNA, 19 nt, Homo sapiens
  misc_RNA (1)...(19): siRNA sense strand
ggacaucggcuccaagucu

SEQ ID NO: 1435395 - RNA, 19 nt, Homo sapiens
  misc_RNA (1)...(19): siRNA sense strand
cgccagagcugagggauga

SEQ ID NO: 1435396 - RNA, 19 nt, Homo sapiens
  misc_RNA (1)...(19): siRNA sense strand
ggaacuauccgugucaaga

SEQ ID NO: 1435397 - RNA, 19 nt, Homo sapiens
  misc_RNA (1)...(19): siRNA sense strand
gaacuauccgugucaagau

SEQ ID NO: 1435398 - RNA, 19 nt, Homo sapiens
  misc_RNA (1)...(19): siRNA sense strand
caagauuugucggguagaa

SEQ ID NO: 1435399 - RNA, 19 nt, Homo sapiens
  misc_RNA (1)...(19): siRNA sense strand
gcagcgugguucaggacua

SEQ ID NO: 1435400 - RNA, 19 nt, Homo sapiens
  misc_RNA (1)...(19): siRNA sense strand
gcuguucccugcauuugga

SEQ ID NO: 1435401 - RNA, 19 nt, Homo sapiens
  misc_RNA (1)...(19): siRNA sense strand
agaaacagaguacuccuuu

SEQ ID NO: 1435402 - RNA, 19 nt, Homo sapiens
  misc_RNA (1)...(19): siRNA sense strand
gguagaggccagaaaccua

SEQ ID NO: 1435403 - RNA, 19 nt, Homo sapiens
  misc_RNA (1)...(19): siRNA sense strand
gugcaaugcuccgauuaug

SEQ ID NO: 1435404 - RNA, 19 nt, Homo sapiens
  misc_RNA (1)...(19): siRNA sense strand
uggcaggucucgcaugaau

SEQ ID NO: 1435405 - RNA, 19 nt, Homo sapiens
  misc_RNA (1)...(19): siRNA sense strand
ggacaaucguguaguaacc

SEQ ID NO: 1435406 - RNA, 19 nt, Homo sapiens
  misc_RNA (1)...(19): siRNA sense strand
cuauggcccuaccaacuuu

SEQ ID NO: 1435407 - RNA, 19 nt, Homo sapiens
  misc_RNA (1)...(19): siRNA sense strand
gaaugcauccacccugaga

SEQ ID NO: 1435408 - RNA, 19 nt, Homo sapiens
  misc_RNA (1)...(19): siRNA sense strand
gccagaaaccuagauaaga

SEQ ID NO: 1435409 - RNA, 19 nt, Homo sapiens
  misc_RNA (1)...(19): siRNA sense strand
gcuacgcuuuggaaucuau

SEQ ID NO: 1435410 - RNA, 19 nt, Homo sapiens
  misc_RNA (1)...(19): siRNA sense strand
gugaccaucucauugacaa

SEQ ID NO: 1435411 - RNA, 19 nt, Homo sapiens
  misc_RNA (1)...(19): siRNA sense strand
gaugggaggcugucagauc

SEQ ID NO: 1435412 - RNA, 19 nt, Homo sapiens
  misc_RNA (1)...(19): siRNA sense strand
gacaagcuguucccugcau

SEQ ID NO: 1435413 - RNA, 19 nt, Homo sapiens
  misc_RNA (1)...(19): siRNA sense strand
ggacugccucgcaauacuu

SEQ ID NO: 1435414 - RNA, 19 nt, Homo sapiens
  misc_RNA (1)...(19): siRNA sense strand
gacccacucugcguccuuu

SEQ ID NO: 1435415 - RNA, 19 nt, Homo sapiens
  misc_RNA (1)...(19): siRNA sense strand
caacuuugcacccaucauc

SEQ ID NO: 1435416 - RNA, 19 nt, Homo sapiens
  misc_RNA (1)...(19): siRNA sense strand
ccaugucagugaucauugu

SEQ ID NO: 1435417 - RNA, 19 nt, Homo sapiens
  misc_RNA (1)...(19): siRNA sense strand
gagcuuggccggacugaac

SEQ ID NO: 1435418 - RNA, 19 nt, Homo sapiens
  misc_RNA (1)...(19): siRNA sense strand
ccucgaaccugcccauguc

SEQ ID NO: 1435419 - RNA, 19 nt, Homo sapiens
  misc_RNA (1)...(19): siRNA sense strand
ggaauuaaaggacaaucgu

SEQ ID NO: 1435420 - RNA, 19 nt, Homo sapiens
  misc_RNA (1)...(19): siRNA sense strand
caggugcaaugcuccgauu

SEQ ID NO: 1435421 - RNA, 19 nt, Homo sapiens
  misc_RNA (1)...(19): siRNA sense strand
ucgcagaagugcccacaca

SEQ ID NO: 1435422 - RNA, 19 nt, Homo sapiens
  misc_RNA (1)...(19): siRNA sense strand
ucucagcucaggaauuaaa

SEQ ID NO: 1435423 - RNA, 19 nt, Homo sapiens
  misc_RNA (1)...(19): siRNA sense strand
aaacagaguacuccuuucu

SEQ ID NO: 1435424 - RNA, 19 nt, Homo sapiens
  misc_RNA (1)...(19): siRNA sense strand
cagcuugaguaccgcuuug

SEQ ID NO: 1435425 - RNA, 19 nt, Homo sapiens
  misc_RNA (1)...(19): siRNA sense strand
cacaacuggucucauacuu

SEQ ID NO: 1435426 - RNA, 19 nt, Homo sapiens
  misc_RNA (1)...(19): siRNA sense strand
cgcaauacuucaugcuguu

SEQ ID NO: 1435427 - RNA, 19 nt, Homo sapiens
  misc_RNA (1)...(19): siRNA sense strand
guacuccuuucuggacuau

SEQ ID NO: 1435428 - RNA, 19 nt, Homo sapiens
  misc_RNA (1)...(19): siRNA sense strand
gauuguguccagccaggua

SEQ ID NO: 1435429 - RNA, 19 nt, Homo sapiens
  misc_RNA (1)...(19): siRNA sense strand
ggagguagaggccagaaac

SEQ ID NO: 1435430 - RNA, 19 nt, Homo sapiens
  misc_RNA (1)...(19): siRNA sense strand
cgcaugaauuugccuugaa

SEQ ID NO: 1435431 - RNA, 19 nt, Homo sapiens
  misc_RNA (1)...(19): siRNA sense strand
ugguucagcuguccauuuc

SEQ ID NO: 1435432 - RNA, 19 nt, Homo sapiens
  misc_RNA (1)...(19): siRNA sense strand
cagcgugguucaggacuau

SEQ ID NO: 1435433 - RNA, 19 nt, Homo sapiens
  misc_RNA (1)...(19): siRNA sense strand
gaggccagaaaccuagaua

SEQ ID NO: 1435434 - RNA, 19 nt, Homo sapiens
  misc_RNA (1)...(19): siRNA sense strand
caagcuguucccugcauuu

SEQ ID NO: 1435435 - RNA, 19 nt, Homo sapiens
  misc_RNA (1)...(19): siRNA sense strand
ggucaaugaguaccugaug

SEQ ID NO: 1435436 - RNA, 19 nt, Homo sapiens
  misc_RNA (1)...(19): siRNA sense strand
cggcugaguuugaaugcau

SEQ ID NO: 1435437 - RNA, 19 nt, Homo sapiens
  misc_RNA (1)...(19): siRNA sense strand
ggcagucccggcugaguuu

SEQ ID NO: 1435438 - RNA, 19 nt, Homo sapiens
  misc_RNA (1)...(19): siRNA sense strand
cauggaagcguuucucagu

SEQ ID NO: 1435439 - RNA, 19 nt, Homo sapiens
  misc_RNA (1)...(19): siRNA sense strand
ggccagaaaccuagauaag

SEQ ID NO: 1435440 - RNA, 19 nt, Homo sapiens
  misc_RNA (1)...(19): siRNA sense strand
gcccugaguucuccaagac

SEQ ID NO: 1435441 - RNA, 19 nt, Homo sapiens
  misc_RNA (1)...(19): siRNA sense strand
uguggguggugcugacuuu

SEQ ID NO: 1435442 - RNA, 19 nt, Homo sapiens
  misc_RNA (1)...(19): siRNA sense strand
acaaggacaucggcuccaa

SEQ ID NO: 1435443 - RNA, 19 nt, Homo sapiens
  misc_RNA (1)...(19): siRNA sense strand
ccugugaccaucucauuga

SEQ ID NO: 1435444 - RNA, 19 nt, Homo sapiens
  misc_RNA (1)...(19): siRNA sense strand
ccgccagggugaugggaaa

SEQ ID NO: 1435445 - RNA, 19 nt, Homo sapiens
  misc_RNA (1)...(19): siRNA sense strand
gcagaagugcccacacaac

SEQ ID NO: 1435446 - RNA, 19 nt, Homo sapiens
  misc_RNA (1)...(19): siRNA sense strand
gcaauacuucaugcuguug

SEQ ID NO: 1435447 - RNA, 19 nt, Homo sapiens
  misc_RNA (1)...(19): siRNA sense strand
gcaggcauccagggcauug

SEQ ID NO: 1435448 - RNA, 19 nt, Homo sapiens
  misc_RNA (1)...(19): siRNA sense strand
ucgcaugaauuugccuuga

SEQ ID NO: 1435449 - RNA, 19 nt, Homo sapiens
  misc_RNA (1)...(19): siRNA sense strand
cuccaagacucuacagcuu

SEQ ID NO: 1435450 - RNA, 19 nt, Homo sapiens
  misc_RNA (1)...(19): siRNA sense strand
ggugcaaugcuccgauuau

SEQ ID NO: 1435451 - RNA, 19 nt, Homo sapiens
  misc_RNA (1)...(19): siRNA sense strand
gggacugccucgcaauacu

SEQ ID NO: 1435452 - RNA, 19 nt, Homo sapiens
  misc_RNA (1)...(19): siRNA sense strand
acuggcaggucucgcauga

SEQ ID NO: 1435453 - RNA, 19 nt, Homo sapiens
  misc_RNA (1)...(19): siRNA sense strand
ucaccugacucccuacacu

SEQ ID NO: 1435454 - RNA, 19 nt, Homo sapiens
  misc_RNA (1)...(19): siRNA sense strand
gcgacauugugcaguuugu

SEQ ID NO: 1435455 - RNA, 19 nt, Homo sapiens
  misc_RNA (1)...(19): siRNA sense strand
uaguaaccauggagguaga

SEQ ID NO: 1435456 - RNA, 19 nt, Homo sapiens
  misc_RNA (1)...(19): siRNA sense strand
gcccaugucagugaucauu

SEQ ID NO: 1435457 - RNA, 19 nt, Homo sapiens
  misc_RNA (1)...(19): siRNA sense strand
gaacaaccugaacccuaca

SEQ ID NO: 1435458 - RNA, 19 nt, Homo sapiens
  misc_RNA (1)...(19): siRNA sense strand
gaaaccuagauaagaagga

SEQ ID NO: 1435459 - RNA, 19 nt, Homo sapiens
  misc_RNA (1)...(19): siRNA sense strand
gcuuugagacaguccagaa

SEQ ID NO: 1435460 - RNA, 19 nt, Homo sapiens
  misc_RNA (1)...(19): siRNA sense strand
aacuauccgugucaagauu

SEQ ID NO: 1435461 - RNA, 19 nt, Homo sapiens
  misc_RNA (1)...(19): siRNA sense strand
agaccgugcucgcagaagu

SEQ ID NO: 1435462 - RNA, 19 nt, Homo sapiens
  misc_RNA (1)...(19): siRNA sense strand
ccgcgacauugugcaguuu

SEQ ID NO: 1435463 - RNA, 19 nt, Homo sapiens
  misc_RNA (1)...(19): siRNA sense strand
gaggcugucagaucaacuu

SEQ ID NO: 1435464 - RNA, 19 nt, Homo sapiens
  misc_RNA (1)...(19): siRNA sense strand
gcuuuggaaucuaugacau

SEQ ID NO: 1435465 - RNA, 19 nt, Homo sapiens
  misc_RNA (1)...(19): siRNA sense strand
cgacauugugcaguuugua

SEQ ID NO: 1435466 - RNA, 19 nt, Homo sapiens
  misc_RNA (1)...(19): siRNA sense strand
uguaguaaccauggaggua

SEQ ID NO: 1435467 - RNA, 19 nt, Homo sapiens
  misc_RNA (1)...(19): siRNA sense strand
gcugucagaucaacuucac

SEQ ID NO: 1435468 - RNA, 19 nt, Homo sapiens
  misc_RNA (1)...(19): siRNA sense strand
uuaaaggacaaucguguag

SEQ ID NO: 1435469 - RNA, 19 nt, Homo sapiens
  misc_RNA (1)...(19): siRNA sense strand
ucuauggcccuaccaacuu

SEQ ID NO: 1435470 - RNA, 19 nt, Homo sapiens
  misc_RNA (1)...(19): siRNA sense strand
augggaggcugucagauca

SEQ ID NO: 1435471 - RNA, 19 nt, Homo sapiens
  misc_RNA (1)...(19): siRNA sense strand
ccagggugaugggaaaugg

SEQ ID NO: 1435472 - RNA, 19 nt, Homo sapiens
  misc_RNA (1)...(19): siRNA sense strand
cagcucaggaauuaaagga

SEQ ID NO: 1435473 - RNA, 19 nt, Homo sapiens
  misc_RNA (1)...(19): siRNA sense strand
cagaagugcccacacaacu

SEQ ID NO: 1435474 - RNA, 19 nt, Homo sapiens
  misc_RNA (1)...(19): siRNA sense strand
acaagcuguucccugcauu

SEQ ID NO: 1435475 - RNA, 19 nt, Homo sapiens
  misc_RNA (1)...(19): siRNA sense strand
aagaaaagcuacaagaacu

SEQ ID NO: 1435476 - RNA, 19 nt, Homo sapiens
  misc_RNA (1)...(19): siRNA sense strand
gcauccacccugagaagca

SEQ ID NO: 1435477 - RNA, 19 nt, Homo sapiens
  misc_RNA (1)...(19): siRNA sense strand
acuccuuucuggacuaugu

SEQ ID NO: 1435478 - RNA, 19 nt, Homo sapiens
  misc_RNA (1)...(19): siRNA sense strand
ggguggugcugacuuugag

SEQ ID NO: 1435479 - RNA, 19 nt, Homo sapiens
  misc_RNA (1)...(19): siRNA sense strand
ccacacaacuggucucaua

SEQ ID NO: 1435480 - RNA, 19 nt, Homo sapiens
  misc_RNA (1)...(19): siRNA sense strand
gaucugaggucaucaagaa

SEQ ID NO: 1435481 - RNA, 19 nt, Homo sapiens
  misc_RNA (1)...(19): siRNA sense strand
ggucucagcucaggaauua

SEQ ID NO: 1435482 - RNA, 19 nt, Homo sapiens
  misc_RNA (1)...(19): siRNA sense strand
ccagaaaccuagauaagaa

SEQ ID NO: 1435483 - RNA, 19 nt, Homo sapiens
  misc_RNA (1)...(19): siRNA sense strand
caacuggucucauacuuca

SEQ ID NO: 1435484 - RNA, 19 nt, Homo sapiens
  misc_RNA (1)...(19): siRNA sense strand
ggacuucacuggcuccaau

SEQ ID NO: 1435485 - RNA, 19 nt, Homo sapiens
  misc_RNA (1)...(19): siRNA sense strand
guacagaucugaggucauc

SEQ ID NO: 1435486 - RNA, 19 nt, Homo sapiens
  misc_RNA (1)...(19): siRNA sense strand
aaaggacaaucguguagua

SEQ ID NO: 1435487 - RNA, 19 nt, Homo sapiens
  misc_RNA (1)...(19): siRNA sense strand
gcaggucucgcaugaauuu

SEQ ID NO: 1435488 - RNA, 19 nt, Homo sapiens
  misc_RNA (1)...(19): siRNA sense strand
caagaacucuggaacuauc

SEQ ID NO: 1435489 - RNA, 19 nt, Homo sapiens
  misc_RNA (1)...(19): siRNA sense strand
caacaggggucaaugagua

SEQ ID NO: 1435490 - RNA, 19 nt, Homo sapiens
  misc_RNA (1)...(19): siRNA sense strand
uacaagaacucuggaacua

SEQ ID NO: 1435491 - RNA, 19 nt, Homo sapiens
  misc_RNA (1)...(19): siRNA sense strand
gcugagggaugaugacuuc

SEQ ID NO: 1435492 - RNA, 19 nt, Homo sapiens
  misc_RNA (1)...(19): siRNA sense strand
gcaugaauuugccuugaau

SEQ ID NO: 1435493 - RNA, 19 nt, Homo sapiens
  misc_RNA (1)...(19): siRNA sense strand
gagggaugaugacuuccua

SEQ ID NO: 1435494 - RNA, 19 nt, Homo sapiens
  misc_RNA (1)...(19): siRNA sense strand
ggacaucggcuccaagucu

SEQ ID NO: 1435495 - RNA, 19 nt, Homo sapiens
  misc_RNA (1)...(19): siRNA sense strand
cgccagagcugagggauga

SEQ ID NO: 1435496 - RNA, 19 nt, Homo sapiens
  misc_RNA (1)...(19): siRNA sense strand
ggaacuauccgugucaaga

SEQ ID NO: 1435497 - RNA, 19 nt, Homo sapiens
  misc_RNA (1)...(19): siRNA sense strand
gaacuauccgugucaagau

SEQ ID NO: 1435498 - RNA, 19 nt, Homo sapiens
  misc_RNA (1)...(19): siRNA sense strand
caagauuugucggguagaa

SEQ ID NO: 1435499 - RNA, 19 nt, Homo sapiens
  misc_RNA (1)...(19): siRNA sense strand
gcagcgugguucaggacua

SEQ ID NO: 1435500 - RNA, 19 nt, Homo sapiens
  misc_RNA (1)...(19): siRNA sense strand
gcuguucccugcauuugga

SEQ ID NO: 1435501 - RNA, 19 nt, Homo sapiens
  misc_RNA (1)...(19): siRNA sense strand
agaaacagaguacuccuuu

SEQ ID NO: 1435502 - RNA, 19 nt, Homo sapiens
  misc_RNA (1)...(19): siRNA sense strand
gguagaggccagaaaccua

SEQ ID NO: 1435503 - RNA, 19 nt, Homo sapiens
  misc_RNA (1)...(19): siRNA sense strand
gugcaaugcuccgauuaug

SEQ ID NO: 1435504 - RNA, 19 nt, Homo sapiens
  misc_RNA (1)...(19): siRNA sense strand
uggcaggucucgcaugaau

SEQ ID NO: 1435505 - RNA, 19 nt, Homo sapiens
  misc_RNA (1)...(19): siRNA sense strand
ggacaaucguguaguaacc

SEQ ID NO: 1435506 - RNA, 19 nt, Homo sapiens
  misc_RNA (1)...(19): siRNA sense strand
cuauggcccuaccaacuuu

SEQ ID NO: 1435507 - RNA, 19 nt, Homo sapiens
  misc_RNA (1)...(19): siRNA sense strand
gaaugcauccacccugaga

SEQ ID NO: 1435508 - RNA, 19 nt, Homo sapiens
  misc_RNA (1)...(19): siRNA sense strand
gccagaaaccuagauaaga

SEQ ID NO: 1435509 - RNA, 19 nt, Homo sapiens
  misc_RNA (1)...(19): siRNA sense strand
gcuacgcuuuggaaucuau

SEQ ID NO: 1435510 - RNA, 19 nt, Homo sapiens
  misc_RNA (1)...(19): siRNA sense strand
gugaccaucucauugacaa

SEQ ID NO: 1435511 - RNA, 19 nt, Homo sapiens
  misc_RNA (1)...(19): siRNA sense strand
gaugggaggcugucagauc

SEQ ID NO: 1435512 - RNA, 19 nt, Homo sapiens
  misc_RNA (1)...(19): siRNA sense strand
gacaagcuguucccugcau

SEQ ID NO: 1435513 - RNA, 19 nt, Homo sapiens
  misc_RNA (1)...(19): siRNA sense strand
ggacugccucgcaauacuu

SEQ ID NO: 1435514 - RNA, 19 nt, Homo sapiens
  misc_RNA (1)...(19): siRNA sense strand
gacccacucugcguccuuu

SEQ ID NO: 1435515 - RNA, 19 nt, Homo sapiens
  misc_RNA (1)...(19): siRNA sense strand
caacuuugcacccaucauc

SEQ ID NO: 1435516 - RNA, 19 nt, Homo sapiens
  misc_RNA (1)...(19): siRNA sense strand
ccaugucagugaucauugu

SEQ ID NO: 1435517 - RNA, 19 nt, Homo sapiens
  misc_RNA (1)...(19): siRNA sense strand
gagcuuggccggacugaac

SEQ ID NO: 1435518 - RNA, 19 nt, Homo sapiens
  misc_RNA (1)...(19): siRNA sense strand
ccucgaaccugcccauguc

SEQ ID NO: 1435519 - RNA, 19 nt, Homo sapiens
  misc_RNA (1)...(19): siRNA sense strand
ggaauuaaaggacaaucgu

SEQ ID NO: 1435520 - RNA, 19 nt, Homo sapiens
  misc_RNA (1)...(19): siRNA sense strand
caggugcaaugcuccgauu

SEQ ID NO: 1435521 - RNA, 19 nt, Homo sapiens
  misc_RNA (1)...(19): siRNA sense strand
ucgcagaagugcccacaca

SEQ ID NO: 1435522 - RNA, 19 nt, Homo sapiens
  misc_RNA (1)...(19): siRNA sense strand
ucucagcucaggaauuaaa

SEQ ID NO: 1435523 - RNA, 19 nt, Homo sapiens
  misc_RNA (1)...(19): siRNA sense strand
aaacagaguacuccuuucu

SEQ ID NO: 1435524 - RNA, 19 nt, Homo sapiens
  misc_RNA (1)...(19): siRNA sense strand
cagcuugaguaccgcuuug

SEQ ID NO: 1435525 - RNA, 19 nt, Homo sapiens
  misc_RNA (1)...(19): siRNA sense strand
cacaacuggucucauacuu

SEQ ID NO: 1435526 - RNA, 19 nt, Homo sapiens
  misc_RNA (1)...(19): siRNA sense strand
cgcaauacuucaugcuguu

SEQ ID NO: 1435527 - RNA, 19 nt, Homo sapiens
  misc_RNA (1)...(19): siRNA sense strand
guacuccuuucuggacuau

SEQ ID NO: 1435528 - RNA, 19 nt, Homo sapiens
  misc_RNA (1)...(19): siRNA sense strand
gauuguguccagccaggua

SEQ ID NO: 1435529 - RNA, 19 nt, Homo sapiens
  misc_RNA (1)...(19): siRNA sense strand
ggagguagaggccagaaac

SEQ ID NO: 1435530 - RNA, 19 nt, Homo sapiens
  misc_RNA (1)...(19): siRNA sense strand
cgcaugaauuugccuugaa

SEQ ID NO: 1435531 - RNA, 19 nt, Homo sapiens
  misc_RNA (1)...(19): siRNA sense strand
ugguucagcuguccauuuc

SEQ ID NO: 1435532 - RNA, 19 nt, Homo sapiens
  misc_RNA (1)...(19): siRNA sense strand
cagcgugguucaggacuau

SEQ ID NO: 1435533 - RNA, 19 nt, Homo sapiens
  misc_RNA (1)...(19): siRNA sense strand
gaggccagaaaccuagaua

SEQ ID NO: 1435534 - RNA, 19 nt, Homo sapiens
  misc_RNA (1)...(19): siRNA sense strand
caagcuguucccugcauuu

SEQ ID NO: 1435535 - RNA, 19 nt, Homo sapiens
  misc_RNA (1)...(19): siRNA sense strand
ggucaaugaguaccugaug

SEQ ID NO: 1435536 - RNA, 19 nt, Homo sapiens
  misc_RNA (1)...(19): siRNA sense strand
cggcugaguuugaaugcau

SEQ ID NO: 1435537 - RNA, 19 nt, Homo sapiens
  misc_RNA (1)...(19): siRNA sense strand
ggcagucccggcugaguuu

SEQ ID NO: 1435538 - RNA, 19 nt, Homo sapiens
  misc_RNA (1)...(19): siRNA sense strand
cauggaagcguuucucagu

SEQ ID NO: 1435539 - RNA, 19 nt, Homo sapiens
  misc_RNA (1)...(19): siRNA sense strand
ggccagaaaccuagauaag

SEQ ID NO: 1435540 - RNA, 19 nt, Homo sapiens
  misc_RNA (1)...(19): siRNA sense strand
gcccugaguucuccaagac

SEQ ID NO: 1435541 - RNA, 19 nt, Homo sapiens
  misc_RNA (1)...(19): siRNA sense strand
uguggguggugcugacuuu

SEQ ID NO: 1435542 - RNA, 19 nt, Homo sapiens
  misc_RNA (1)...(19): siRNA sense strand
acaaggacaucggcuccaa

SEQ ID NO: 1435543 - RNA, 19 nt, Homo sapiens
  misc_RNA (1)...(19): siRNA sense strand
ccugugaccaucucauuga

SEQ ID NO: 1435544 - RNA, 19 nt, Homo sapiens
  misc_RNA (1)...(19): siRNA sense strand
ccgccagggugaugggaaa

SEQ ID NO: 1435545 - RNA, 19 nt, Homo sapiens
  misc_RNA (1)...(19): siRNA sense strand
gcagaagugcccacacaac

SEQ ID NO: 1435546 - RNA, 19 nt, Homo sapiens
  misc_RNA (1)...(19): siRNA sense strand
gcaauacuucaugcuguug

SEQ ID NO: 1435547 - RNA, 19 nt, Homo sapiens
  misc_RNA (1)...(19): siRNA sense strand
gcaggcauccagggcauug

SEQ ID NO: 1435548 - RNA, 19 nt, Homo sapiens
  misc_RNA (1)...(19): siRNA sense strand
ucgcaugaauuugccuuga

SEQ ID NO: 1435549 - RNA, 19 nt, Homo sapiens
  misc_RNA (1)...(19): siRNA sense strand
cuccaagacucuacagcuu

SEQ ID NO: 1435550 - RNA, 19 nt, Homo sapiens
  misc_RNA (1)...(19): siRNA sense strand
ggugcaaugcuccgauuau

SEQ ID NO: 1435551 - RNA, 19 nt, Homo sapiens
  misc_RNA (1)...(19): siRNA sense strand
gggacugccucgcaauacu

SEQ ID NO: 1435552 - RNA, 19 nt, Homo sapiens
  misc_RNA (1)...(19): siRNA sense strand
acuggcaggucucgcauga

SEQ ID NO: 1435553 - RNA, 19 nt, Homo sapiens
  misc_RNA (1)...(19): siRNA sense strand
ucaccugacucccuacacu

SEQ ID NO: 1435554 - RNA, 19 nt, Homo sapiens
  misc_RNA (1)...(19): siRNA sense strand
gcgacauugugcaguuugu

SEQ ID NO: 1435555 - RNA, 19 nt, Homo sapiens
  misc_RNA (1)...(19): siRNA sense strand
uaguaaccauggagguaga

SEQ ID NO: 1435556 - RNA, 19 nt, Homo sapiens
  misc_RNA (1)...(19): siRNA sense strand
gcccaugucagugaucauu

SEQ ID NO: 1435557 - RNA, 19 nt, Homo sapiens
  misc_RNA (1)...(19): siRNA sense strand
gaacaaccugaacccuaca

SEQ ID NO: 1435558 - RNA, 19 nt, Homo sapiens
  misc_RNA (1)...(19): siRNA sense strand
gaaaccuagauaagaagga

SEQ ID NO: 1435559 - RNA, 19 nt, Homo sapiens
  misc_RNA (1)...(19): siRNA sense strand
gcuuugagacaguccagaa

SEQ ID NO: 1435560 - RNA, 19 nt, Homo sapiens
  misc_RNA (1)...(19): siRNA sense strand
aacuauccgugucaagauu

SEQ ID NO: 1435561 - RNA, 19 nt, Homo sapiens
  misc_RNA (1)...(19): siRNA sense strand
agaccgugcucgcagaagu

SEQ ID NO: 1435562 - RNA, 19 nt, Homo sapiens
  misc_RNA (1)...(19): siRNA sense strand
ccgcgacauugugcaguuu

SEQ ID NO: 1435563 - RNA, 19 nt, Homo sapiens
  misc_RNA (1)...(19): siRNA sense strand
gaggcugucagaucaacuu

SEQ ID NO: 1435564 - RNA, 19 nt, Homo sapiens
  misc_RNA (1)...(19): siRNA sense strand
gcuuuggaaucuaugacau

SEQ ID NO: 1435565 - RNA, 19 nt, Homo sapiens
  misc_RNA (1)...(19): siRNA sense strand
cgacauugugcaguuugua

SEQ ID NO: 1435566 - RNA, 19 nt, Homo sapiens
  misc_RNA (1)...(19): siRNA sense strand
uguaguaaccauggaggua

SEQ ID NO: 1435567 - RNA, 19 nt, Homo sapiens
  misc_RNA (1)...(19): siRNA sense strand
gcugucagaucaacuucac

SEQ ID NO: 1435568 - RNA, 19 nt, Homo sapiens
  misc_RNA (1)...(19): siRNA sense strand
uuaaaggacaaucguguag

SEQ ID NO: 1435569 - RNA, 19 nt, Homo sapiens
  misc_RNA (1)...(19): siRNA sense strand
ucuauggcccuaccaacuu

SEQ ID NO: 1435570 - RNA, 19 nt, Homo sapiens
  misc_RNA (1)...(19): siRNA sense strand
augggaggcugucagauca

SEQ ID NO: 1435571 - RNA, 19 nt, Homo sapiens
  misc_RNA (1)...(19): siRNA sense strand
ccagggugaugggaaaugg

SEQ ID NO: 1435572 - RNA, 19 nt, Homo sapiens
  misc_RNA (1)...(19): siRNA sense strand
cagcucaggaauuaaagga

SEQ ID NO: 1435573 - RNA, 19 nt, Homo sapiens
  misc_RNA (1)...(19): siRNA sense strand
cagaagugcccacacaacu

SEQ ID NO: 1435574 - RNA, 19 nt, Homo sapiens
  misc_RNA (1)...(19): siRNA sense strand
acaagcuguucccugcauu

SEQ ID NO: 1435575 - RNA, 19 nt, Homo sapiens
  misc_RNA (1)...(19): siRNA sense strand
aagaaaagcuacaagaacu

SEQ ID NO: 1435576 - RNA, 19 nt, Homo sapiens
  misc_RNA (1)...(19): siRNA sense strand
gcauccacccugagaagca

SEQ ID NO: 1435577 - RNA, 19 nt, Homo sapiens
  misc_RNA (1)...(19): siRNA sense strand
acuccuuucuggacuaugu

SEQ ID NO: 1435578 - RNA, 19 nt, Homo sapiens
  misc_RNA (1)...(19): siRNA sense strand
ggguggugcugacuuugag

SEQ ID NO: 1435579 - RNA, 19 nt, Homo sapiens
  misc_RNA (1)...(19): siRNA sense strand
ccacacaacuggucucaua

SEQ ID NO: 1435580 - RNA, 19 nt, Homo sapiens
  misc_RNA (1)...(19): siRNA sense strand
gaucugaggucaucaagaa

SEQ ID NO: 1435581 - RNA, 19 nt, Homo sapiens
  misc_RNA (1)...(19): siRNA sense strand
ggucucagcucaggaauua

SEQ ID NO: 1435582 - RNA, 19 nt, Homo sapiens
  misc_RNA (1)...(19): siRNA sense strand
ccagaaaccuagauaagaa

SEQ ID NO: 1435583 - RNA, 19 nt, Homo sapiens
  misc_RNA (1)...(19): siRNA sense strand
caacuggucucauacuuca

SEQ ID NO: 1435584 - RNA, 19 nt, Homo sapiens
  misc_RNA (1)...(19): siRNA sense strand
ggacuucacuggcuccaau

SEQ ID NO: 1435585 - RNA, 19 nt, Homo sapiens
  misc_RNA (1)...(19): siRNA sense strand
guacagaucugaggucauc

SEQ ID NO: 1435586 - RNA, 19 nt, Homo sapiens
  misc_RNA (1)...(19): siRNA sense strand
aaaggacaaucguguagua

SEQ ID NO: 1435587 - RNA, 19 nt, Homo sapiens
  misc_RNA (1)...(19): siRNA sense strand
gcaggucucgcaugaauuu

SEQ ID NO: 1435588 - RNA, 19 nt, Homo sapiens
  misc_RNA (1)...(19): siRNA sense strand
caagaacucuggaacuauc

SEQ ID NO: 1435589 - RNA, 19 nt, Homo sapiens
  misc_RNA (1)...(19): siRNA sense strand
caacaggggucaaugagua

SEQ ID NO: 1435590 - RNA, 19 nt, Homo sapiens
  misc_RNA (1)...(19): siRNA sense strand
uacaagaacucuggaacua

SEQ ID NO: 1435591 - RNA, 19 nt, Homo sapiens
  misc_RNA (1)...(19): siRNA sense strand
gcugagggaugaugacuuc

SEQ ID NO: 1435592 - RNA, 19 nt, Homo sapiens
  misc_RNA (1)...(19): siRNA sense strand
gcaugaauuugccuugaau

SEQ ID NO: 1435593 - RNA, 19 nt, Homo sapiens
  misc_RNA (1)...(19): siRNA sense strand
gagggaugaugacuuccua

SEQ ID NO: 1435594 - RNA, 19 nt, Homo sapiens
  misc_RNA (1)...(19): siRNA sense strand
ggacaucggcuccaagucu

SEQ ID NO: 1435595 - RNA, 19 nt, Homo sapiens
  misc_RNA (1)...(19): siRNA sense strand
cgccagagcugagggauga

SEQ ID NO: 1435596 - RNA, 19 nt, Homo sapiens
  misc_RNA (1)...(19): siRNA sense strand
ggaacuauccgugucaaga

SEQ ID NO: 1435597 - RNA, 19 nt, Homo sapiens
  misc_RNA (1)...(19): siRNA sense strand
gaacuauccgugucaagau

SEQ ID NO: 1435598 - RNA, 19 nt, Homo sapiens
  misc_RNA (1)...(19): siRNA sense strand
caagauuugucggguagaa

SEQ ID NO: 1435599 - RNA, 19 nt, Homo sapiens
  misc_RNA (1)...(19): siRNA sense strand
gcagcgugguucaggacua

SEQ ID NO: 1435600 - RNA, 19 nt, Homo sapiens
  misc_RNA (1)...(19): siRNA sense strand
gcuguucccugcauuugga

SEQ ID NO: 1435601 - RNA, 19 nt, Homo sapiens
  misc_RNA (1)...(19): siRNA sense strand
agaaacagaguacuccuuu

SEQ ID NO: 1435602 - RNA, 19 nt, Homo sapiens
  misc_RNA (1)...(19): siRNA sense strand
gguagaggccagaaaccua

SEQ ID NO: 1435603 - RNA, 19 nt, Homo sapiens
  misc_RNA (1)...(19): siRNA sense strand
gugcaaugcuccgauuaug

SEQ ID NO: 1435604 - RNA, 19 nt, Homo sapiens
  misc_RNA (1)...(19): siRNA sense strand
uggcaggucucgcaugaau

SEQ ID NO: 1435605 - RNA, 19 nt, Homo sapiens
  misc_RNA (1)...(19): siRNA sense strand
ggacaaucguguaguaacc

SEQ ID NO: 1435606 - RNA, 19 nt, Homo sapiens
  misc_RNA (1)...(19): siRNA sense strand
cuauggcccuaccaacuuu

SEQ ID NO: 1435607 - RNA, 19 nt, Homo sapiens
  misc_RNA (1)...(19): siRNA sense strand
gaaugcauccacccugaga

SEQ ID NO: 1435608 - RNA, 19 nt, Homo sapiens
  misc_RNA (1)...(19): siRNA sense strand
gccagaaaccuagauaaga

SEQ ID NO: 1435609 - RNA, 19 nt, Homo sapiens
  misc_RNA (1)...(19): siRNA sense strand
gcuacgcuuuggaaucuau

SEQ ID NO: 1435610 - RNA, 19 nt, Homo sapiens
  misc_RNA (1)...(19): siRNA sense strand
gugaccaucucauugacaa

SEQ ID NO: 1435611 - RNA, 19 nt, Homo sapiens
  misc_RNA (1)...(19): siRNA sense strand
gaugggaggcugucagauc

SEQ ID NO: 1435612 - RNA, 19 nt, Homo sapiens
  misc_RNA (1)...(19): siRNA sense strand
gacaagcuguucccugcau

SEQ ID NO: 1435613 - RNA, 19 nt, Homo sapiens
  misc_RNA (1)...(19): siRNA sense strand
ggacugccucgcaauacuu

SEQ ID NO: 1435614 - RNA, 19 nt, Homo sapiens
  misc_RNA (1)...(19): siRNA sense strand
gacccacucugcguccuuu

SEQ ID NO: 1435615 - RNA, 19 nt, Homo sapiens
  misc_RNA (1)...(19): siRNA sense strand
caacuuugcacccaucauc

SEQ ID NO: 1435616 - RNA, 19 nt, Homo sapiens
  misc_RNA (1)...(19): siRNA sense strand
ccaugucagugaucauugu

SEQ ID NO: 1435617 - RNA, 19 nt, Homo sapiens
  misc_RNA (1)...(19): siRNA sense strand
gagcuuggccggacugaac

SEQ ID NO: 1435618 - RNA, 19 nt, Homo sapiens
  misc_RNA (1)...(19): siRNA sense strand
ccucgaaccugcccauguc

SEQ ID NO: 1435619 - RNA, 19 nt, Homo sapiens
  misc_RNA (1)...(19): siRNA sense strand
ggaauuaaaggacaaucgu

SEQ ID NO: 1435620 - RNA, 19 nt, Homo sapiens
  misc_RNA (1)...(19): siRNA sense strand
caggugcaaugcuccgauu

SEQ ID NO: 1435621 - RNA, 19 nt, Homo sapiens
  misc_RNA (1)...(19): siRNA sense strand
ucgcagaagugcccacaca

SEQ ID NO: 1435622 - RNA, 19 nt, Homo sapiens
  misc_RNA (1)...(19): siRNA sense strand
ucucagcucaggaauuaaa

SEQ ID NO: 1435623 - RNA, 19 nt, Homo sapiens
  misc_RNA (1)...(19): siRNA sense strand
aaacagaguacuccuuucu

SEQ ID NO: 1435624 - RNA, 19 nt, Homo sapiens
  misc_RNA (1)...(19): siRNA sense strand
cagcuugaguaccgcuuug

SEQ ID NO: 1435625 - RNA, 19 nt, Homo sapiens
  misc_RNA (1)...(19): siRNA sense strand
cacaacuggucucauacuu

SEQ ID NO: 1435626 - RNA, 19 nt, Homo sapiens
  misc_RNA (1)...(19): siRNA sense strand
cgcaauacuucaugcuguu

SEQ ID NO: 1435627 - RNA, 19 nt, Homo sapiens
  misc_RNA (1)...(19): siRNA sense strand
guacuccuuucuggacuau

SEQ ID NO: 1435628 - RNA, 19 nt, Homo sapiens
  misc_RNA (1)...(19): siRNA sense strand
gauuguguccagccaggua

SEQ ID NO: 1435629 - RNA, 19 nt, Homo sapiens
  misc_RNA (1)...(19): siRNA sense strand
ggagguagaggccagaaac

SEQ ID NO: 1435630 - RNA, 19 nt, Homo sapiens
  misc_RNA (1)...(19): siRNA sense strand
cgcaugaauuugccuugaa

SEQ ID NO: 1435631 - RNA, 19 nt, Homo sapiens
  misc_RNA (1)...(19): siRNA sense strand
ugguucagcuguccauuuc

SEQ ID NO: 1435632 - RNA, 19 nt, Homo sapiens
  misc_RNA (1)...(19): siRNA sense strand
cagcgugguucaggacuau

SEQ ID NO: 1435633 - RNA, 19 nt, Homo sapiens
  misc_RNA (1)...(19): siRNA sense strand
gaggccagaaaccuagaua

SEQ ID NO: 1435634 - RNA, 19 nt, Homo sapiens
  misc_RNA (1)...(19): siRNA sense strand
caagcuguucccugcauuu

SEQ ID NO: 1435635 - RNA, 19 nt, Homo sapiens
  misc_RNA (1)...(19): siRNA sense strand
ggucaaugaguaccugaug

SEQ ID NO: 1435636 - RNA, 19 nt, Homo sapiens
  misc_RNA (1)...(19): siRNA sense strand
cggcugaguuugaaugcau

SEQ ID NO: 1435637 - RNA, 19 nt, Homo sapiens
  misc_RNA (1)...(19): siRNA sense strand
ggcagucccggcugaguuu

SEQ ID NO: 1435638 - RNA, 19 nt, Homo sapiens
  misc_RNA (1)...(19): siRNA sense strand
cauggaagcguuucucagu

SEQ ID NO: 1435639 - RNA, 19 nt, Homo sapiens
  misc_RNA (1)...(19): siRNA sense strand
ggccagaaaccuagauaag

SEQ ID NO: 1435640 - RNA, 19 nt, Homo sapiens
  misc_RNA (1)...(19): siRNA sense strand
gcccugaguucuccaagac

SEQ ID NO: 1435641 - RNA, 19 nt, Homo sapiens
  misc_RNA (1)...(19): siRNA sense strand
uguggguggugcugacuuu

SEQ ID NO: 1435642 - RNA, 19 nt, Homo sapiens
  misc_RNA (1)...(19): siRNA sense strand
acaaggacaucggcuccaa

SEQ ID NO: 1435643 - RNA, 19 nt, Homo sapiens
  misc_RNA (1)...(19): siRNA sense strand
ccugugaccaucucauuga

SEQ ID NO: 1435644 - RNA, 19 nt, Homo sapiens
  misc_RNA (1)...(19): siRNA sense strand
ccgccagggugaugggaaa

SEQ ID NO: 1435645 - RNA, 19 nt, Homo sapiens
  misc_RNA (1)...(19): siRNA sense strand
gcagaagugcccacacaac

SEQ ID NO: 1435646 - RNA, 19 nt, Homo sapiens
  misc_RNA (1)...(19): siRNA sense strand
gcaauacuucaugcuguug

SEQ ID NO: 1435647 - RNA, 19 nt, Homo sapiens
  misc_RNA (1)...(19): siRNA sense strand
gcaggcauccagggcauug

SEQ ID NO: 1435648 - RNA, 19 nt, Homo sapiens
  misc_RNA (1)...(19): siRNA sense strand
ucgcaugaauuugccuuga

SEQ ID NO: 1435649 - RNA, 19 nt, Homo sapiens
  misc_RNA (1)...(19): siRNA sense strand
cuccaagacucuacagcuu

SEQ ID NO: 1435650 - RNA, 19 nt, Homo sapiens
  misc_RNA (1)...(19): siRNA sense strand
ggugcaaugcuccgauuau

SEQ ID NO: 1435651 - RNA, 19 nt, Homo sapiens
  misc_RNA (1)...(19): siRNA sense strand
gggacugccucgcaauacu

SEQ ID NO: 1435652 - RNA, 19 nt, Homo sapiens
  misc_RNA (1)...(19): siRNA sense strand
acuggcaggucucgcauga

SEQ ID NO: 1435653 - RNA, 19 nt, Homo sapiens
  misc_RNA (1)...(19): siRNA sense strand
ucaccugacucccuacacu

SEQ ID NO: 1435654 - RNA, 19 nt, Homo sapiens
  misc_RNA (1)...(19): siRNA sense strand
gcgacauugugcaguuugu

SEQ ID NO: 1435655 - RNA, 19 nt, Homo sapiens
  misc_RNA (1)...(19): siRNA sense strand
uaguaaccauggagguaga

SEQ ID NO: 1435656 - RNA, 19 nt, Homo sapiens
  misc_RNA (1)...(19): siRNA sense strand
gcccaugucagugaucauu

SEQ ID NO: 1435657 - RNA, 19 nt, Homo sapiens
  misc_RNA (1)...(19): siRNA sense strand
gaacaaccugaacccuaca

SEQ ID NO: 1435658 - RNA, 19 nt, Homo sapiens
  misc_RNA (1)...(19): siRNA sense strand
gaaaccuagauaagaagga

SEQ ID NO: 1435659 - RNA, 19 nt, Homo sapiens
  misc_RNA (1)...(19): siRNA sense strand
gcuuugagacaguccagaa

SEQ ID NO: 1435660 - RNA, 19 nt, Homo sapiens
  misc_RNA (1)...(19): siRNA sense strand
aacuauccgugucaagauu

SEQ ID NO: 1435661 - RNA, 19 nt, Homo sapiens
  misc_RNA (1)...(19): siRNA sense strand
agaccgugcucgcagaagu

SEQ ID NO: 1435662 - RNA, 19 nt, Homo sapiens
  misc_RNA (1)...(19): siRNA sense strand
ccgcgacauugugcaguuu

SEQ ID NO: 1435663 - RNA, 19 nt, Homo sapiens
  misc_RNA (1)...(19): siRNA sense strand
gaggcugucagaucaacuu

SEQ ID NO: 1435664 - RNA, 19 nt, Homo sapiens
  misc_RNA (1)...(19): siRNA sense strand
gcuuuggaaucuaugacau

SEQ ID NO: 1435665 - RNA, 19 nt, Homo sapiens
  misc_RNA (1)...(19): siRNA sense strand
cgacauugugcaguuugua

SEQ ID NO: 1435666 - RNA, 19 nt, Homo sapiens
  misc_RNA (1)...(19): siRNA sense strand
uguaguaaccauggaggua

SEQ ID NO: 1435667 - RNA, 19 nt, Homo sapiens
  misc_RNA (1)...(19): siRNA sense strand
gcugucagaucaacuucac

SEQ ID NO: 1435668 - RNA, 19 nt, Homo sapiens
  misc_RNA (1)...(19): siRNA sense strand
uuaaaggacaaucguguag

SEQ ID NO: 1435669 - RNA, 19 nt, Homo sapiens
  misc_RNA (1)...(19): siRNA sense strand
ucuauggcccuaccaacuu

SEQ ID NO: 1435670 - RNA, 19 nt, Homo sapiens
  misc_RNA (1)...(19): siRNA sense strand
augggaggcugucagauca

SEQ ID NO: 1435671 - RNA, 19 nt, Homo sapiens
  misc_RNA (1)...(19): siRNA sense strand
ccagggugaugggaaaugg

SEQ ID NO: 1435672 - RNA, 19 nt, Homo sapiens
  misc_RNA (1)...(19): siRNA sense strand
cagcucaggaauuaaagga

SEQ ID NO: 1435673 - RNA, 19 nt, Homo sapiens
  misc_RNA (1)...(19): siRNA sense strand
cagaagugcccacacaacu

SEQ ID NO: 1435674 - RNA, 19 nt, Homo sapiens
  misc_RNA (1)...(19): siRNA sense strand
acaagcuguucccugcauu

SEQ ID NO: 1435675 - RNA, 19 nt, Homo sapiens
  misc_RNA (1)...(19): siRNA sense strand
aagaaaagcuacaagaacu

SEQ ID NO: 1435676 - RNA, 19 nt, Homo sapiens
  misc_RNA (1)...(19): siRNA sense strand
gcauccacccugagaagca

SEQ ID NO: 1435677 - RNA, 19 nt, Homo sapiens
  misc_RNA (1)...(19): siRNA sense strand
acuccuuucuggacuaugu

SEQ ID NO: 1435678 - RNA, 19 nt, Homo sapiens
  misc_RNA (1)...(19): siRNA sense strand
ggguggugcugacuuugag

SEQ ID NO: 1435679 - RNA, 19 nt, Homo sapiens
  misc_RNA (1)...(19): siRNA sense strand
ccacacaacuggucucaua

SEQ ID NO: 1435680 - RNA, 19 nt, Homo sapiens
  misc_RNA (1)...(19): siRNA sense strand
gaucugaggucaucaagaa

SEQ ID NO: 1435681 - RNA, 19 nt, Homo sapiens
  misc_RNA (1)...(19): siRNA sense strand
ggucucagcucaggaauua

SEQ ID NO: 1435682 - RNA, 19 nt, Homo sapiens
  misc_RNA (1)...(19): siRNA sense strand
ccagaaaccuagauaagaa

SEQ ID NO: 1435683 - RNA, 19 nt, Homo sapiens
  misc_RNA (1)...(19): siRNA sense strand
caacuggucucauacuuca

SEQ ID NO: 1435684 - RNA, 19 nt, Homo sapiens
  misc_RNA (1)...(19): siRNA sense strand
ggacuucacuggcuccaau

SEQ ID NO: 1435685 - RNA, 19 nt, Homo sapiens
  misc_RNA (1)...(19): siRNA sense strand
guacagaucugaggucauc

SEQ ID NO: 1435686 - RNA, 19 nt, Homo sapiens
  misc_RNA (1)...(19): siRNA sense strand
aaaggacaaucguguagua

SEQ ID NO: 1435687 - RNA, 19 nt, Homo sapiens
  misc_RNA (1)...(19): siRNA sense strand
gcaggucucgcaugaauuu

SEQ ID NO: 1435688 - RNA, 19 nt, Homo sapiens
  misc_RNA (1)...(19): siRNA sense strand
caagaacucuggaacuauc

SEQ ID NO: 1435689 - RNA, 19 nt, Homo sapiens
  misc_RNA (1)...(19): siRNA sense strand
caacaggggucaaugagua

SEQ ID NO: 1435690 - RNA, 19 nt, Homo sapiens
  misc_RNA (1)...(19): siRNA sense strand
uacaagaacucuggaacua

SEQ ID NO: 1435691 - RNA, 19 nt, Homo sapiens
  misc_RNA (1)...(19): siRNA sense strand
gcugagggaugaugacuuc

SEQ ID NO: 1435692 - RNA, 19 nt, Homo sapiens
  misc_RNA (1)...(19): siRNA sense strand
gcaugaauuugccuugaau

SEQ ID NO: 1435693 - RNA, 19 nt, Homo sapiens
  misc_RNA (1)...(19): siRNA sense strand
gagggaugaugacuuccua

SEQ ID NO: 1435694 - RNA, 19 nt, Homo sapiens
  misc_RNA (1)...(19): siRNA sense strand
ggacaucggcuccaagucu

SEQ ID NO: 1435695 - RNA, 19 nt, Homo sapiens
  misc_RNA (1)...(19): siRNA sense strand
cgccagagcugagggauga

SEQ ID NO: 1435696 - RNA, 19 nt, Homo sapiens
  misc_RNA (1)...(19): siRNA sense strand
ggaacuauccgugucaaga

SEQ ID NO: 1435697 - RNA, 19 nt, Homo sapiens
  misc_RNA (1)...(19): siRNA sense strand
gaacuauccgugucaagau

SEQ ID NO: 1435698 - RNA, 19 nt, Homo sapiens
  misc_RNA (1)...(19): siRNA sense strand
caagauuugucggguagaa

SEQ ID NO: 1435699 - RNA, 19 nt, Homo sapiens
  misc_RNA (1)...(19): siRNA sense strand
gcagcgugguucaggacua

SEQ ID NO: 1435700 - RNA, 19 nt, Homo sapiens
  misc_RNA (1)...(19): siRNA sense strand
gcuguucccugcauuugga

SEQ ID NO: 1435701 - RNA, 19 nt, Homo sapiens
  misc_RNA (1)...(19): siRNA sense strand
agaaacagaguacuccuuu

SEQ ID NO: 1435702 - RNA, 19 nt, Homo sapiens
  misc_RNA (1)...(19): siRNA sense strand
gguagaggccagaaaccua

SEQ ID NO: 1435703 - RNA, 19 nt, Homo sapiens
  misc_RNA (1)...(19): siRNA sense strand
gugcaaugcuccgauuaug

SEQ ID NO: 1435704 - RNA, 19 nt, Homo sapiens
  misc_RNA (1)...(19): siRNA sense strand
uggcaggucucgcaugaau

SEQ ID NO: 1435705 - RNA, 19 nt, Homo sapiens
  misc_RNA (1)...(19): siRNA sense strand
ggacaaucguguaguaacc

SEQ ID NO: 1435706 - RNA, 19 nt, Homo sapiens
  misc_RNA (1)...(19): siRNA sense strand
cuauggcccuaccaacuuu

SEQ ID NO: 1435707 - RNA, 19 nt, Homo sapiens
  misc_RNA (1)...(19): siRNA sense strand
gaaugcauccacccugaga

SEQ ID NO: 1435708 - RNA, 19 nt, Homo sapiens
  misc_RNA (1)...(19): siRNA sense strand
gccagaaaccuagauaaga

SEQ ID NO: 1435709 - RNA, 19 nt, Homo sapiens
  misc_RNA (1)...(19): siRNA sense strand
gcuacgcuuuggaaucuau

SEQ ID NO: 1435710 - RNA, 19 nt, Homo sapiens
  misc_RNA (1)...(19): siRNA sense strand
gugaccaucucauugacaa

SEQ ID NO: 1435711 - RNA, 19 nt, Homo sapiens
  misc_RNA (1)...(19): siRNA sense strand
gaugggaggcugucagauc

SEQ ID NO: 1435712 - RNA, 19 nt, Homo sapiens
  misc_RNA (1)...(19): siRNA sense strand
gacaagcuguucccugcau

SEQ ID NO: 1435713 - RNA, 19 nt, Homo sapiens
  misc_RNA (1)...(19): siRNA sense strand
ggacugccucgcaauacuu

SEQ ID NO: 1435714 - RNA, 19 nt, Homo sapiens
  misc_RNA (1)...(19): siRNA sense strand
gacccacucugcguccuuu

SEQ ID NO: 1435715 - RNA, 19 nt, Homo sapiens
  misc_RNA (1)...(19): siRNA sense strand
caacuuugcacccaucauc

SEQ ID NO: 1435716 - RNA, 19 nt, Homo sapiens
  misc_RNA (1)...(19): siRNA sense strand
ccaugucagugaucauugu

SEQ ID NO: 1435717 - RNA, 19 nt, Homo sapiens
  misc_RNA (1)...(19): siRNA sense strand
gagcuuggccggacugaac

SEQ ID NO: 1435718 - RNA, 19 nt, Homo sapiens
  misc_RNA (1)...(19): siRNA sense strand
ccucgaaccugcccauguc

SEQ ID NO: 1435719 - RNA, 19 nt, Homo sapiens
  misc_RNA (1)...(19): siRNA sense strand
ggaauuaaaggacaaucgu

SEQ ID NO: 1435720 - RNA, 19 nt, Homo sapiens
  misc_RNA (1)...(19): siRNA sense strand
caggugcaaugcuccgauu

SEQ ID NO: 1435721 - RNA, 19 nt, Homo sapiens
  misc_RNA (1)...(19): siRNA sense strand
ucgcagaagugcccacaca

SEQ ID NO: 1435722 - RNA, 19 nt, Homo sapiens
  misc_RNA (1)...(19): siRNA sense strand
ucucagcucaggaauuaaa

SEQ ID NO: 1435723 - RNA, 19 nt, Homo sapiens
  misc_RNA (1)...(19): siRNA sense strand
aaacagaguacuccuuucu

SEQ ID NO: 1435724 - RNA, 19 nt, Homo sapiens
  misc_RNA (1)...(19): siRNA sense strand
cagcuugaguaccgcuuug

SEQ ID NO: 1435725 - RNA, 19 nt, Homo sapiens
  misc_RNA (1)...(19): siRNA sense strand
cacaacuggucucauacuu

SEQ ID NO: 1435726 - RNA, 19 nt, Homo sapiens
  misc_RNA (1)...(19): siRNA sense strand
cgcaauacuucaugcuguu

SEQ ID NO: 1435727 - RNA, 19 nt, Homo sapiens
  misc_RNA (1)...(19): siRNA sense strand
guacuccuuucuggacuau

SEQ ID NO: 1435728 - RNA, 19 nt, Homo sapiens
  misc_RNA (1)...(19): siRNA sense strand
gauuguguccagccaggua

SEQ ID NO: 1435729 - RNA, 19 nt, Homo sapiens
  misc_RNA (1)...(19): siRNA sense strand
ggagguagaggccagaaac

SEQ ID NO: 1435730 - RNA, 19 nt, Homo sapiens
  misc_RNA (1)...(19): siRNA sense strand
cgcaugaauuugccuugaa

SEQ ID NO: 1435731 - RNA, 19 nt, Homo sapiens
  misc_RNA (1)...(19): siRNA sense strand
ugguucagcuguccauuuc

SEQ ID NO: 1435732 - RNA, 19 nt, Homo sapiens
  misc_RNA (1)...(19): siRNA sense strand
cagcgugguucaggacuau

SEQ ID NO: 1435733 - RNA, 19 nt, Homo sapiens
  misc_RNA (1)...(19): siRNA sense strand
gaggccagaaaccuagaua

SEQ ID NO: 1435734 - RNA, 19 nt, Homo sapiens
  misc_RNA (1)...(19): siRNA sense strand
caagcuguucccugcauuu

SEQ ID NO: 1435735 - RNA, 19 nt, Homo sapiens
  misc_RNA (1)...(19): siRNA sense strand
ggucaaugaguaccugaug

SEQ ID NO: 1435736 - RNA, 19 nt, Homo sapiens
  misc_RNA (1)...(19): siRNA sense strand
cggcugaguuugaaugcau

SEQ ID NO: 1435737 - RNA, 19 nt, Homo sapiens
  misc_RNA (1)...(19): siRNA sense strand
ggcagucccggcugaguuu

SEQ ID NO: 1435738 - RNA, 19 nt, Homo sapiens
  misc_RNA (1)...(19): siRNA sense strand
cauggaagcguuucucagu

SEQ ID NO: 1435739 - RNA, 19 nt, Homo sapiens
  misc_RNA (1)...(19): siRNA sense strand
ggccagaaaccuagauaag

SEQ ID NO: 1435740 - RNA, 19 nt, Homo sapiens
  misc_RNA (1)...(19): siRNA sense strand
gcccugaguucuccaagac

SEQ ID NO: 1435741 - RNA, 19 nt, Homo sapiens
  misc_RNA (1)...(19): siRNA sense strand
uguggguggugcugacuuu

SEQ ID NO: 1435742 - RNA, 19 nt, Homo sapiens
  misc_RNA (1)...(19): siRNA sense strand
acaaggacaucggcuccaa

SEQ ID NO: 1435743 - RNA, 19 nt, Homo sapiens
  misc_RNA (1)...(19): siRNA sense strand
ccugugaccaucucauuga

SEQ ID NO: 1435744 - RNA, 19 nt, Homo sapiens
  misc_RNA (1)...(19): siRNA sense strand
ccgccagggugaugggaaa

SEQ ID NO: 1435745 - RNA, 19 nt, Homo sapiens
  misc_RNA (1)...(19): siRNA sense strand
gcagaagugcccacacaac

SEQ ID NO: 1435746 - RNA, 19 nt, Homo sapiens
  misc_RNA (1)...(19): siRNA sense strand
gcaauacuucaugcuguug

SEQ ID NO: 1435747 - RNA, 19 nt, Homo sapiens
  misc_RNA (1)...(19): siRNA sense strand
gcaggcauccagggcauug

SEQ ID NO: 1435748 - RNA, 19 nt, Homo sapiens
  misc_RNA (1)...(19): siRNA sense strand
ucgcaugaauuugccuuga

SEQ ID NO: 1435749 - RNA, 19 nt, Homo sapiens
  misc_RNA (1)...(19): siRNA sense strand
cuccaagacucuacagcuu

SEQ ID NO: 1435750 - RNA, 19 nt, Homo sapiens
  misc_RNA (1)...(19): siRNA sense strand
ggugcaaugcuccgauuau

SEQ ID NO: 1435751 - RNA, 19 nt, Homo sapiens
  misc_RNA (1)...(19): siRNA sense strand
gggacugccucgcaauacu

SEQ ID NO: 1435752 - RNA, 19 nt, Homo sapiens
  misc_RNA (1)...(19): siRNA sense strand
acuggcaggucucgcauga

SEQ ID NO: 1435753 - RNA, 19 nt, Homo sapiens
  misc_RNA (1)...(19): siRNA sense strand
ucaccugacucccuacacu

SEQ ID NO: 1435754 - RNA, 19 nt, Homo sapiens
  misc_RNA (1)...(19): siRNA sense strand
gcgacauugugcaguuugu

SEQ ID NO: 1435755 - RNA, 19 nt, Homo sapiens
  misc_RNA (1)...(19): siRNA sense strand
uaguaaccauggagguaga

SEQ ID NO: 1435756 - RNA, 19 nt, Homo sapiens
  misc_RNA (1)...(19): siRNA sense strand
gcccaugucagugaucauu

SEQ ID NO: 1435757 - RNA, 19 nt, Homo sapiens
  misc_RNA (1)...(19): siRNA sense strand
gaacaaccugaacccuaca

SEQ ID NO: 1435758 - RNA, 19 nt, Homo sapiens
  misc_RNA (1)...(19): siRNA sense strand
gaaaccuagauaagaagga

SEQ ID NO: 1435759 - RNA, 19 nt, Homo sapiens
  misc_RNA (1)...(19): siRNA sense strand
gcuuugagacaguccagaa

SEQ ID NO: 1435760 - RNA, 19 nt, Homo sapiens
  misc_RNA (1)...(19): siRNA sense strand
aacuauccgugucaagauu

SEQ ID NO: 1435761 - RNA, 19 nt, Homo sapiens
  misc_RNA (1)...(19): siRNA sense strand
agaccgugcucgcagaagu

SEQ ID NO: 1435762 - RNA, 19 nt, Homo sapiens
  misc_RNA (1)...(19): siRNA sense strand
ccgcgacauugugcaguuu

SEQ ID NO: 1435763 - RNA, 19 nt, Homo sapiens
  misc_RNA (1)...(19): siRNA sense strand
gaggcugucagaucaacuu

SEQ ID NO: 1435764 - RNA, 19 nt, Homo sapiens
  misc_RNA (1)...(19): siRNA sense strand
gcuuuggaaucuaugacau

SEQ ID NO: 1435765 - RNA, 19 nt, Homo sapiens
  misc_RNA (1)...(19): siRNA sense strand
cgacauugugcaguuugua

SEQ ID NO: 1435766 - RNA, 19 nt, Homo sapiens
  misc_RNA (1)...(19): siRNA sense strand
uguaguaaccauggaggua

SEQ ID NO: 1435767 - RNA, 19 nt, Homo sapiens
  misc_RNA (1)...(19): siRNA sense strand
gcugucagaucaacuucac

SEQ ID NO: 1435768 - RNA, 19 nt, Homo sapiens
  misc_RNA (1)...(19): siRNA sense strand
uuaaaggacaaucguguag

SEQ ID NO: 1435769 - RNA, 19 nt, Homo sapiens
  misc_RNA (1)...(19): siRNA sense strand
ucuauggcccuaccaacuu

SEQ ID NO: 1435770 - RNA, 19 nt, Homo sapiens
  misc_RNA (1)...(19): siRNA sense strand
augggaggcugucagauca

SEQ ID NO: 1435771 - RNA, 19 nt, Homo sapiens
  misc_RNA (1)...(19): siRNA sense strand
ccagggugaugggaaaugg

SEQ ID NO: 1435772 - RNA, 19 nt, Homo sapiens
  misc_RNA (1)...(19): siRNA sense strand
cagcucaggaauuaaagga

SEQ ID NO: 1435773 - RNA, 19 nt, Homo sapiens
  misc_RNA (1)...(19): siRNA sense strand
cagaagugcccacacaacu

SEQ ID NO: 1435774 - RNA, 19 nt, Homo sapiens
  misc_RNA (1)...(19): siRNA sense strand
acaagcuguucccugcauu

SEQ ID NO: 1435775 - RNA, 19 nt, Homo sapiens
  misc_RNA (1)...(19): siRNA sense strand
aagaaaagcuacaagaacu

SEQ ID NO: 1435776 - RNA, 19 nt, Homo sapiens
  misc_RNA (1)...(19): siRNA sense strand
gcauccacccugagaagca

SEQ ID NO: 1435777 - RNA, 19 nt, Homo sapiens
  misc_RNA (1)...(19): siRNA sense strand
acuccuuucuggacuaugu

SEQ ID NO: 1435778 - RNA, 19 nt, Homo sapiens
  misc_RNA (1)...(19): siRNA sense strand
ggguggugcugacuuugag

SEQ ID NO: 1435779 - RNA, 19 nt, Homo sapiens
  misc_RNA (1)...(19): siRNA sense strand
ccacacaacuggucucaua

SEQ ID NO: 1435780 - RNA, 19 nt, Homo sapiens
  misc_RNA (1)...(19): siRNA sense strand
gaucugaggucaucaagaa

SEQ ID NO: 1435781 - RNA, 19 nt, Homo sapiens
  misc_RNA (1)...(19): siRNA sense strand
ggucucagcucaggaauua

SEQ ID NO: 1435782 - RNA, 19 nt, Homo sapiens
  misc_RNA (1)...(19): siRNA sense strand
ccagaaaccuagauaagaa

SEQ ID NO: 1435783 - RNA, 19 nt, Homo sapiens
  misc_RNA (1)...(19): siRNA sense strand
caacuggucucauacuuca

SEQ ID NO: 1435784 - RNA, 19 nt, Homo sapiens
  misc_RNA (1)...(19): siRNA sense strand
ggacuucacuggcuccaau

SEQ ID NO: 1435785 - RNA, 19 nt, Homo sapiens
  misc_RNA (1)...(19): siRNA sense strand
guacagaucugaggucauc

SEQ ID NO: 1435786 - RNA, 19 nt, Homo sapiens
  misc_RNA (1)...(19): siRNA sense strand
aaaggacaaucguguagua

SEQ ID NO: 1435787 - RNA, 19 nt, Homo sapiens
  misc_RNA (1)...(19): siRNA sense strand
gcaggucucgcaugaauuu

SEQ ID NO: 1435788 - RNA, 19 nt, Homo sapiens
  misc_RNA (1)...(19): siRNA sense strand
caagaacucuggaacuauc

SEQ ID NO: 1435789 - RNA, 19 nt, Homo sapiens
  misc_RNA (1)...(19): siRNA sense strand
caacaggggucaaugagua

SEQ ID NO: 1435790 - RNA, 19 nt, Homo sapiens
  misc_RNA (1)...(19): siRNA sense strand
uacaagaacucuggaacua

SEQ ID NO: 1435791 - RNA, 19 nt, Homo sapiens
  misc_RNA (1)...(19): siRNA sense strand
gcugagggaugaugacuuc

SEQ ID NO: 1435792 - RNA, 19 nt, Homo sapiens
  misc_RNA (1)...(19): siRNA sense strand
gcaugaauuugccuugaau

SEQ ID NO: 1435793 - RNA, 19 nt, Homo sapiens
  misc_RNA (1)...(19): siRNA sense strand
gagggaugaugacuuccua

SEQ ID NO: 1435794 - RNA, 19 nt, Homo sapiens
  misc_RNA (1)...(19): siRNA sense strand
ggacaucggcuccaagucu

SEQ ID NO: 1435795 - RNA, 19 nt, Homo sapiens
  misc_RNA (1)...(19): siRNA sense strand
cgccagagcugagggauga

SEQ ID NO: 1435796 - RNA, 19 nt, Homo sapiens
  misc_RNA (1)...(19): siRNA sense strand
ggaacuauccgugucaaga

SEQ ID NO: 1435797 - RNA, 19 nt, Homo sapiens
  misc_RNA (1)...(19): siRNA sense strand
gaacuauccgugucaagau

SEQ ID NO: 1435798 - RNA, 19 nt, Homo sapiens
  misc_RNA (1)...(19): siRNA sense strand
caagauuugucggguagaa

SEQ ID NO: 1435799 - RNA, 19 nt, Homo sapiens
  misc_RNA (1)...(19): siRNA sense strand
gcagcgugguucaggacua

SEQ ID NO: 1435800 - RNA, 19 nt, Homo sapiens
  misc_RNA (1)...(19): siRNA sense strand
gcuguucccugcauuugga

SEQ ID NO: 1435801 - RNA, 19 nt, Homo sapiens
  misc_RNA (1)...(19): siRNA sense strand
agaaacagaguacuccuuu

SEQ ID NO: 1435802 - RNA, 19 nt, Homo sapiens
  misc_RNA (1)...(19): siRNA sense strand
gguagaggccagaaaccua

SEQ ID NO: 1435803 - RNA, 19 nt, Homo sapiens
  misc_RNA (1)...(19): siRNA sense strand
gugcaaugcuccgauuaug

SEQ ID NO: 1435804 - RNA, 19 nt, Homo sapiens
  misc_RNA (1)...(19): siRNA sense strand
uggcaggucucgcaugaau

SEQ ID NO: 1435805 - RNA, 19 nt, Homo sapiens
  misc_RNA (1)...(19): siRNA sense strand
ggacaaucguguaguaacc

SEQ ID NO: 1435806 - RNA, 19 nt, Homo sapiens
  misc_RNA (1)...(19): siRNA sense strand
cuauggcccuaccaacuuu

SEQ ID NO: 1435807 - RNA, 19 nt, Homo sapiens
  misc_RNA (1)...(19): siRNA sense strand
gaaugcauccacccugaga

SEQ ID NO: 1435808 - RNA, 19 nt, Homo sapiens
  misc_RNA (1)...(19): siRNA sense strand
gccagaaaccuagauaaga

SEQ ID NO: 1435809 - RNA, 19 nt, Homo sapiens
  misc_RNA (1)...(19): siRNA sense strand
gcuacgcuuuggaaucuau

SEQ ID NO: 1435810 - RNA, 19 nt, Homo sapiens
  misc_RNA (1)...(19): siRNA sense strand
gugaccaucucauugacaa

SEQ ID NO: 1435811 - RNA, 19 nt, Homo sapiens
  misc_RNA (1)...(19): siRNA sense strand
gaugggaggcugucagauc

SEQ ID NO: 1435812 - RNA, 19 nt, Homo sapiens
  misc_RNA (1)...(19): siRNA sense strand
gacaagcuguucccugcau

SEQ ID NO: 1435813 - RNA, 19 nt, Homo sapiens
  misc_RNA (1)...(19): siRNA sense strand
ggacugccucgcaauacuu

SEQ ID NO: 1435814 - RNA, 19 nt, Homo sapiens
  misc_RNA (1)...(19): siRNA sense strand
gacccacucugcguccuuu

SEQ ID NO: 1435815 - RNA, 19 nt, Homo sapiens
  misc_RNA (1)...(19): siRNA sense strand
caacuuugcacccaucauc

SEQ ID NO: 1435816 - RNA, 19 nt, Homo sapiens
  misc_RNA (1)...(19): siRNA sense strand
ccaugucagugaucauugu

SEQ ID NO: 1435817 - RNA, 19 nt, Homo sapiens
  misc_RNA (1)...(19): siRNA sense strand
gagcuuggccggacugaac

SEQ ID NO: 1435818 - RNA, 19 nt, Homo sapiens
  misc_RNA (1)...(19): siRNA sense strand
ccucgaaccugcccauguc

SEQ ID NO: 1435819 - RNA, 19 nt, Homo sapiens
  misc_RNA (1)...(19): siRNA sense strand
ggaauuaaaggacaaucgu

SEQ ID NO: 1435820 - RNA, 19 nt, Homo sapiens
  misc_RNA (1)...(19): siRNA sense strand
caggugcaaugcuccgauu

SEQ ID NO: 1435821 - RNA, 19 nt, Homo sapiens
  misc_RNA (1)...(19): siRNA sense strand
ucgcagaagugcccacaca

SEQ ID NO: 1435822 - RNA, 19 nt, Homo sapiens
  misc_RNA (1)...(19): siRNA sense strand
ucucagcucaggaauuaaa

SEQ ID NO: 1435823 - RNA, 19 nt, Homo sapiens
  misc_RNA (1)...(19): siRNA sense strand
aaacagaguacuccuuucu

SEQ ID NO: 1435824 - RNA, 19 nt, Homo sapiens
  misc_RNA (1)...(19): siRNA sense strand
cagcuugaguaccgcuuug

SEQ ID NO: 1435825 - RNA, 19 nt, Homo sapiens
  misc_RNA (1)...(19): siRNA sense strand
cacaacuggucucauacuu

SEQ ID NO: 1435826 - RNA, 19 nt, Homo sapiens
  misc_RNA (1)...(19): siRNA sense strand
cgcaauacuucaugcuguu

SEQ ID NO: 1435827 - RNA, 19 nt, Homo sapiens
  misc_RNA (1)...(19): siRNA sense strand
guacuccuuucuggacuau

SEQ ID NO: 1435828 - RNA, 19 nt, Homo sapiens
  misc_RNA (1)...(19): siRNA sense strand
gauuguguccagccaggua

SEQ ID NO: 1435829 - RNA, 19 nt, Homo sapiens
  misc_RNA (1)...(19): siRNA sense strand
ggagguagaggccagaaac

SEQ ID NO: 1435830 - RNA, 19 nt, Homo sapiens
  misc_RNA (1)...(19): siRNA sense strand
cgcaugaauuugccuugaa

SEQ ID NO: 1435831 - RNA, 19 nt, Homo sapiens
  misc_RNA (1)...(19): siRNA sense strand
ugguucagcuguccauuuc

SEQ ID NO: 1435832 - RNA, 19 nt, Homo sapiens
  misc_RNA (1)...(19): siRNA sense strand
cagcgugguucaggacuau

SEQ ID NO: 1435833 - RNA, 19 nt, Homo sapiens
  misc_RNA (1)...(19): siRNA sense strand
gaggccagaaaccuagaua

SEQ ID NO: 1435834 - RNA, 19 nt, Homo sapiens
  misc_RNA (1)...(19): siRNA sense strand
caagcuguucccugcauuu

SEQ ID NO: 1435835 - RNA, 19 nt, Homo sapiens
  misc_RNA (1)...(19): siRNA sense strand
ggucaaugaguaccugaug

SEQ ID NO: 1435836 - RNA, 19 nt, Homo sapiens
  misc_RNA (1)...(19): siRNA sense strand
cggcugaguuugaaugcau

SEQ ID NO: 1435837 - RNA, 19 nt, Homo sapiens
  misc_RNA (1)...(19): siRNA sense strand
ggcagucccggcugaguuu

SEQ ID NO: 1435838 - RNA, 19 nt, Homo sapiens
  misc_RNA (1)...(19): siRNA sense strand
cauggaagcguuucucagu

SEQ ID NO: 1435839 - RNA, 19 nt, Homo sapiens
  misc_RNA (1)...(19): siRNA sense strand
ggccagaaaccuagauaag

SEQ ID NO: 1435840 - RNA, 19 nt, Homo sapiens
  misc_RNA (1)...(19): siRNA sense strand
gcccugaguucuccaagac

SEQ ID NO: 1435841 - RNA, 19 nt, Homo sapiens
  misc_RNA (1)...(19): siRNA sense strand
uguggguggugcugacuuu

SEQ ID NO: 1435842 - RNA, 19 nt, Homo sapiens
  misc_RNA (1)...(19): siRNA sense strand
acaaggacaucggcuccaa

SEQ ID NO: 1435843 - RNA, 19 nt, Homo sapiens
  misc_RNA (1)...(19): siRNA sense strand
ccugugaccaucucauuga

SEQ ID NO: 1435844 - RNA, 19 nt, Homo sapiens
  misc_RNA (1)...(19): siRNA sense strand
ccgccagggugaugggaaa

SEQ ID NO: 1435845 - RNA, 19 nt, Homo sapiens
  misc_RNA (1)...(19): siRNA sense strand
gcagaagugcccacacaac

SEQ ID NO: 1435846 - RNA, 19 nt, Homo sapiens
  misc_RNA (1)...(19): siRNA sense strand
gcaauacuucaugcuguug

SEQ ID NO: 1435847 - RNA, 19 nt, Homo sapiens
  misc_RNA (1)...(19): siRNA sense strand
gcaggcauccagggcauug

SEQ ID NO: 1435848 - RNA, 19 nt, Homo sapiens
  misc_RNA (1)...(19): siRNA sense strand
ucgcaugaauuugccuuga

SEQ ID NO: 1435849 - RNA, 19 nt, Homo sapiens
  misc_RNA (1)...(19): siRNA sense strand
cuccaagacucuacagcuu

SEQ ID NO: 1435850 - RNA, 19 nt, Homo sapiens
  misc_RNA (1)...(19): siRNA sense strand
ggugcaaugcuccgauuau

SEQ ID NO: 1435851 - RNA, 19 nt, Homo sapiens
  misc_RNA (1)...(19): siRNA sense strand
gggacugccucgcaauacu

SEQ ID NO: 1435852 - RNA, 19 nt, Homo sapiens
  misc_RNA (1)...(19): siRNA sense strand
acuggcaggucucgcauga

SEQ ID NO: 1435853 - RNA, 19 nt, Homo sapiens
  misc_RNA (1)...(19): siRNA sense strand
ucaccugacucccuacacu

SEQ ID NO: 1435854 - RNA, 19 nt, Homo sapiens
  misc_RNA (1)...(19): siRNA sense strand
gcgacauugugcaguuugu

SEQ ID NO: 1435855 - RNA, 19 nt, Homo sapiens
  misc_RNA (1)...(19): siRNA sense strand
uaguaaccauggagguaga

SEQ ID NO: 1435856 - RNA, 19 nt, Homo sapiens
  misc_RNA (1)...(19): siRNA sense strand
gcccaugucagugaucauu

SEQ ID NO: 1435857 - RNA, 19 nt, Homo sapiens
  misc_RNA (1)...(19): siRNA sense strand
gaacaaccugaacccuaca

SEQ ID NO: 1435858 - RNA, 19 nt, Homo sapiens
  misc_RNA (1)...(19): siRNA sense strand
gaaaccuagauaagaagga

SEQ ID NO: 1435859 - RNA, 19 nt, Homo sapiens
  misc_RNA (1)...(19): siRNA sense strand
gcuuugagacaguccagaa

SEQ ID NO: 1435860 - RNA, 19 nt, Homo sapiens
  misc_RNA (1)...(19): siRNA sense strand
aacuauccgugucaagauu

SEQ ID NO: 1435861 - RNA, 19 nt, Homo sapiens
  misc_RNA (1)...(19): siRNA sense strand
agaccgugcucgcagaagu

SEQ ID NO: 1435862 - RNA, 19 nt, Homo sapiens
  misc_RNA (1)...(19): siRNA sense strand
ccgcgacauugugcaguuu

SEQ ID NO: 1435863 - RNA, 19 nt, Homo sapiens
  misc_RNA (1)...(19): siRNA sense strand
gaggcugucagaucaacuu

SEQ ID NO: 1435864 - RNA, 19 nt, Homo sapiens
  misc_RNA (1)...(19): siRNA sense strand
gcuuuggaaucuaugacau

SEQ ID NO: 1435865 - RNA, 19 nt, Homo sapiens
  misc_RNA (1)...(19): siRNA sense strand
cgacauugugcaguuugua

SEQ ID NO: 1435866 - RNA, 19 nt, Homo sapiens
  misc_RNA (1)...(19): siRNA sense strand
uguaguaaccauggaggua

SEQ ID NO: 1435867 - RNA, 19 nt, Homo sapiens
  misc_RNA (1)...(19): siRNA sense strand
gcugucagaucaacuucac

SEQ ID NO: 1435868 - RNA, 19 nt, Homo sapiens
  misc_RNA (1)...(19): siRNA sense strand
uuaaaggacaaucguguag

SEQ ID NO: 1435869 - RNA, 19 nt, Homo sapiens
  misc_RNA (1)...(19): siRNA sense strand
ucuauggcccuaccaacuu

SEQ ID NO: 1435870 - RNA, 19 nt, Homo sapiens
  misc_RNA (1)...(19): siRNA sense strand
augggaggcugucagauca

SEQ ID NO: 1435871 - RNA, 19 nt, Homo sapiens
  misc_RNA (1)...(19): siRNA sense strand
ccagggugaugggaaaugg

SEQ ID NO: 1435872 - RNA, 19 nt, Homo sapiens
  misc_RNA (1)...(19): siRNA sense strand
cagcucaggaauuaaagga

SEQ ID NO: 1435873 - RNA, 19 nt, Homo sapiens
  misc_RNA (1)...(19): siRNA sense strand
cagaagugcccacacaacu

SEQ ID NO: 1435874 - RNA, 19 nt, Homo sapiens
  misc_RNA (1)...(19): siRNA sense strand
acaagcuguucccugcauu

SEQ ID NO: 1435875 - RNA, 19 nt, Homo sapiens
  misc_RNA (1)...(19): siRNA sense strand
aagaaaagcuacaagaacu

SEQ ID NO: 1435876 - RNA, 19 nt, Homo sapiens
  misc_RNA (1)...(19): siRNA sense strand
gcauccacccugagaagca

SEQ ID NO: 1435877 - RNA, 19 nt, Homo sapiens
  misc_RNA (1)...(19): siRNA sense strand
acuccuuucuggacuaugu

SEQ ID NO: 1435878 - RNA, 19 nt, Homo sapiens
  misc_RNA (1)...(19): siRNA sense strand
ggguggugcugacuuugag

SEQ ID NO: 1435879 - RNA, 19 nt, Homo sapiens
  misc_RNA (1)...(19): siRNA sense strand
ccacacaacuggucucaua

SEQ ID NO: 1435880 - RNA, 19 nt, Homo sapiens
  misc_RNA (1)...(19): siRNA sense strand
gaucugaggucaucaagaa

SEQ ID NO: 1435881 - RNA, 19 nt, Homo sapiens
  misc_RNA (1)...(19): siRNA sense strand
ggucucagcucaggaauua

SEQ ID NO: 1435882 - RNA, 19 nt, Homo sapiens
  misc_RNA (1)...(19): siRNA sense strand
ccagaaaccuagauaagaa

SEQ ID NO: 1435883 - RNA, 19 nt, Homo sapiens
  misc_RNA (1)...(19): siRNA sense strand
caacuggucucauacuuca

SEQ ID NO: 1435884 - RNA, 19 nt, Homo sapiens
  misc_RNA (1)...(19): siRNA sense strand
ggacuucacuggcuccaau

SEQ ID NO: 1435885 - RNA, 19 nt, Homo sapiens
  misc_RNA (1)...(19): siRNA sense strand
guacagaucugaggucauc

SEQ ID NO: 1435886 - RNA, 19 nt, Homo sapiens
  misc_RNA (1)...(19): siRNA sense strand
aaaggacaaucguguagua

SEQ ID NO: 1435887 - RNA, 19 nt, Homo sapiens
  misc_RNA (1)...(19): siRNA sense strand
gcaggucucgcaugaauuu

SEQ ID NO: 1435888 - RNA, 19 nt, Homo sapiens
  misc_RNA (1)...(19): siRNA sense strand
caagaacucuggaacuauc

SEQ ID NO: 1435889 - RNA, 19 nt, Homo sapiens
  misc_RNA (1)...(19): siRNA sense strand
caacaggggucaaugagua

SEQ ID NO: 1435890 - RNA, 19 nt, Homo sapiens
  misc_RNA (1)...(19): siRNA sense strand
uacaagaacucuggaacua

SEQ ID NO: 1435891 - RNA, 19 nt, Homo sapiens
  misc_RNA (1)...(19): siRNA sense strand
gcugagggaugaugacuuc

SEQ ID NO: 1435892 - RNA, 19 nt, Homo sapiens
  misc_RNA (1)...(19): siRNA sense strand
gcaugaauuugccuugaau

SEQ ID NO: 1435893 - RNA, 19 nt, Homo sapiens
  misc_RNA (1)...(19): siRNA sense strand
gagggaugaugacuuccua

SEQ ID NO: 1435894 - RNA, 19 nt, Homo sapiens
  misc_RNA (1)...(19): siRNA sense strand
ggacaucggcuccaagucu

SEQ ID NO: 1435895 - RNA, 19 nt, Homo sapiens
  misc_RNA (1)...(19): siRNA sense strand
cgccagagcugagggauga

SEQ ID NO: 1435896 - RNA, 19 nt, Homo sapiens
  misc_RNA (1)...(19): siRNA sense strand
ggaacuauccgugucaaga

SEQ ID NO: 1435897 - RNA, 19 nt, Homo sapiens
  misc_RNA (1)...(19): siRNA sense strand
gaacuauccgugucaagau

SEQ ID NO: 1435898 - RNA, 19 nt, Homo sapiens
  misc_RNA (1)...(19): siRNA sense strand
caagauuugucggguagaa

SEQ ID NO: 1435899 - RNA, 19 nt, Homo sapiens
  misc_RNA (1)...(19): siRNA sense strand
gcagcgugguucaggacua

SEQ ID NO: 1435900 - RNA, 19 nt, Homo sapiens
  misc_RNA (1)...(19): siRNA sense strand
gcuguucccugcauuugga

SEQ ID NO: 1435901 - RNA, 19 nt, Homo sapiens
  misc_RNA (1)...(19): siRNA sense strand
agaaacagaguacuccuuu

SEQ ID NO: 1435902 - RNA, 19 nt, Homo sapiens
  misc_RNA (1)...(19): siRNA sense strand
gguagaggccagaaaccua

SEQ ID NO: 1435903 - RNA, 19 nt, Homo sapiens
  misc_RNA (1)...(19): siRNA sense strand
gugcaaugcuccgauuaug

SEQ ID NO: 1435904 - RNA, 19 nt, Homo sapiens
  misc_RNA (1)...(19): siRNA sense strand
uggcaggucucgcaugaau

SEQ ID NO: 1435905 - RNA, 19 nt, Homo sapiens
  misc_RNA (1)...(19): siRNA sense strand
ggacaaucguguaguaacc

SEQ ID NO: 1435906 - RNA, 19 nt, Homo sapiens
  misc_RNA (1)...(19): siRNA sense strand
cuauggcccuaccaacuuu

SEQ ID NO: 1435907 - RNA, 19 nt, Homo sapiens
  misc_RNA (1)...(19): siRNA sense strand
gaaugcauccacccugaga

SEQ ID NO: 1435908 - RNA, 19 nt, Homo sapiens
  misc_RNA (1)...(19): siRNA sense strand
gccagaaaccuagauaaga

SEQ ID NO: 1435909 - RNA, 19 nt, Homo sapiens
  misc_RNA (1)...(19): siRNA sense strand
gcuacgcuuuggaaucuau

SEQ ID NO: 1435910 - RNA, 19 nt, Homo sapiens
  misc_RNA (1)...(19): siRNA sense strand
gugaccaucucauugacaa

SEQ ID NO: 1435911 - RNA, 19 nt, Homo sapiens
  misc_RNA (1)...(19): siRNA sense strand
gaugggaggcugucagauc

SEQ ID NO: 1435912 - RNA, 19 nt, Homo sapiens
  misc_RNA (1)...(19): siRNA sense strand
gacaagcuguucccugcau

SEQ ID NO: 1435913 - RNA, 19 nt, Homo sapiens
  misc_RNA (1)...(19): siRNA sense strand
ggacugccucgcaauacuu

SEQ ID NO: 1435914 - RNA, 19 nt, Homo sapiens
  misc_RNA (1)...(19): siRNA sense strand
gacccacucugcguccuuu

SEQ ID NO: 1435915 - RNA, 19 nt, Homo sapiens
  misc_RNA (1)...(19): siRNA sense strand
caacuuugcacccaucauc

SEQ ID NO: 1435916 - RNA, 19 nt, Homo sapiens
  misc_RNA (1)...(19): siRNA sense strand
ccaugucagugaucauugu

SEQ ID NO: 1435917 - RNA, 19 nt, Homo sapiens
  misc_RNA (1)...(19): siRNA sense strand
gagcuuggccggacugaac

SEQ ID NO: 1435918 - RNA, 19 nt, Homo sapiens
  misc_RNA (1)...(19): siRNA sense strand
ccucgaaccugcccauguc

SEQ ID NO: 1435919 - RNA, 19 nt, Homo sapiens
  misc_RNA (1)...(19): siRNA sense strand
ggaauuaaaggacaaucgu

SEQ ID NO: 1435920 - RNA, 19 nt, Homo sapiens
  misc_RNA (1)...(19): siRNA sense strand
caggugcaaugcuccgauu

SEQ ID NO: 1435921 - RNA, 19 nt, Homo sapiens
  misc_RNA (1)...(19): siRNA sense strand
ucgcagaagugcccacaca

SEQ ID NO: 1435922 - RNA, 19 nt, Homo sapiens
  misc_RNA (1)...(19): siRNA sense strand
ucucagcucaggaauuaaa

SEQ ID NO: 1435923 - RNA, 19 nt, Homo sapiens
  misc_RNA (1)...(19): siRNA sense strand
aaacagaguacuccuuucu

SEQ ID NO: 1435924 - RNA, 19 nt, Homo sapiens
  misc_RNA (1)...(19): siRNA sense strand
cagcuugaguaccgcuuug

SEQ ID NO: 1435925 - RNA, 19 nt, Homo sapiens
  misc_RNA (1)...(19): siRNA sense strand
cacaacuggucucauacuu

SEQ ID NO: 1435926 - RNA, 19 nt, Homo sapiens
  misc_RNA (1)...(19): siRNA sense strand
cgcaauacuucaugcuguu

SEQ ID NO: 1435927 - RNA, 19 nt, Homo sapiens
  misc_RNA (1)...(19): siRNA sense strand
guacuccuuucuggacuau

SEQ ID NO: 1435928 - RNA, 19 nt, Homo sapiens
  misc_RNA (1)...(19): siRNA sense strand
gauuguguccagccaggua

SEQ ID NO: 1435929 - RNA, 19 nt, Homo sapiens
  misc_RNA (1)...(19): siRNA sense strand
ggagguagaggccagaaac

SEQ ID NO: 1435930 - RNA, 19 nt, Homo sapiens
  misc_RNA (1)...(19): siRNA sense strand
cgcaugaauuugccuugaa

SEQ ID NO: 1435931 - RNA, 19 nt, Homo sapiens
  misc_RNA (1)...(19): siRNA sense strand
ugguucagcuguccauuuc

SEQ ID NO: 1435932 - RNA, 19 nt, Homo sapiens
  misc_RNA (1)...(19): siRNA sense strand
cagcgugguucaggacuau

SEQ ID NO: 1435933 - RNA, 19 nt, Homo sapiens
  misc_RNA (1)...(19): siRNA sense strand
gaggccagaaaccuagaua

SEQ ID NO: 1435934 - RNA, 19 nt, Homo sapiens
  misc_RNA (1)...(19): siRNA sense strand
caagcuguucccugcauuu

SEQ ID NO: 1435935 - RNA, 19 nt, Homo sapiens
  misc_RNA (1)...(19): siRNA sense strand
ggucaaugaguaccugaug

SEQ ID NO: 1435936 - RNA, 19 nt, Homo sapiens
  misc_RNA (1)...(19): siRNA sense strand
cggcugaguuugaaugcau

SEQ ID NO: 1435937 - RNA, 19 nt, Homo sapiens
  misc_RNA (1)...(19): siRNA sense strand
ggcagucccggcugaguuu

SEQ ID NO: 1435938 - RNA, 19 nt, Homo sapiens
  misc_RNA (1)...(19): siRNA sense strand
cauggaagcguuucucagu

SEQ ID NO: 1435939 - RNA, 19 nt, Homo sapiens
  misc_RNA (1)...(19): siRNA sense strand
ggccagaaaccuagauaag

SEQ ID NO: 1435940 - RNA, 19 nt, Homo sapiens
  misc_RNA (1)...(19): siRNA sense strand
gcccugaguucuccaagac

SEQ ID NO: 1435941 - RNA, 19 nt, Homo sapiens
  misc_RNA (1)...(19): siRNA sense strand
uguggguggugcugacuuu

SEQ ID NO: 1435942 - RNA, 19 nt, Homo sapiens
  misc_RNA (1)...(19): siRNA sense strand
acaaggacaucggcuccaa

SEQ ID NO: 1435943 - RNA, 19 nt, Homo sapiens
  misc_RNA (1)...(19): siRNA sense strand
ccugugaccaucucauuga

SEQ ID NO: 1435944 - RNA, 19 nt, Homo sapiens
  misc_RNA (1)...(19): siRNA sense strand
ccgccagggugaugggaaa

SEQ ID NO: 1435945 - RNA, 19 nt, Homo sapiens
  misc_RNA (1)...(19): siRNA sense strand
gcagaagugcccacacaac

SEQ ID NO: 1435946 - RNA, 19 nt, Homo sapiens
  misc_RNA (1)...(19): siRNA sense strand
gcaauacuucaugcuguug

SEQ ID NO: 1435947 - RNA, 19 nt, Homo sapiens
  misc_RNA (1)...(19): siRNA sense strand
gcaggcauccagggcauug

SEQ ID NO: 1435948 - RNA, 19 nt, Homo sapiens
  misc_RNA (1)...(19): siRNA sense strand
ucgcaugaauuugccuuga

SEQ ID NO: 1435949 - RNA, 19 nt, Homo sapiens
  misc_RNA (1)...(19): siRNA sense strand
cuccaagacucuacagcuu

SEQ ID NO: 1435950 - RNA, 19 nt, Homo sapiens
  misc_RNA (1)...(19): siRNA sense strand
ggugcaaugcuccgauuau

SEQ ID NO: 1435951 - RNA, 19 nt, Homo sapiens
  misc_RNA (1)...(19): siRNA sense strand
gggacugccucgcaauacu

SEQ ID NO: 1435952 - RNA, 19 nt, Homo sapiens
  misc_RNA (1)...(19): siRNA sense strand
acuggcaggucucgcauga

SEQ ID NO: 1435953 - RNA, 19 nt, Homo sapiens
  misc_RNA (1)...(19): siRNA sense strand
ucaccugacucccuacacu

SEQ ID NO: 1435954 - RNA, 19 nt, Homo sapiens
  misc_RNA (1)...(19): siRNA sense strand
gcgacauugugcaguuugu

SEQ ID NO: 1435955 - RNA, 19 nt, Homo sapiens
  misc_RNA (1)...(19): siRNA sense strand
uaguaaccauggagguaga

SEQ ID NO: 1435956 - RNA, 19 nt, Homo sapiens
  misc_RNA (1)...(19): siRNA sense strand
gcccaugucagugaucauu

SEQ ID NO: 1435957 - RNA, 19 nt, Homo sapiens
  misc_RNA (1)...(19): siRNA sense strand
gaacaaccugaacccuaca

SEQ ID NO: 1435958 - RNA, 19 nt, Homo sapiens
  misc_RNA (1)...(19): siRNA sense strand
gaaaccuagauaagaagga

SEQ ID NO: 1435959 - RNA, 19 nt, Homo sapiens
  misc_RNA (1)...(19): siRNA sense strand
gcuuugagacaguccagaa

SEQ ID NO: 1435960 - RNA, 19 nt, Homo sapiens
  misc_RNA (1)...(19): siRNA sense strand
aacuauccgugucaagauu

SEQ ID NO: 1435961 - RNA, 19 nt, Homo sapiens
  misc_RNA (1)...(19): siRNA sense strand
agaccgugcucgcagaagu

SEQ ID NO: 1435962 - RNA, 19 nt, Homo sapiens
  misc_RNA (1)...(19): siRNA sense strand
ccgcgacauugugcaguuu

SEQ ID NO: 1435963 - RNA, 19 nt, Homo sapiens
  misc_RNA (1)...(19): siRNA sense strand
gaggcugucagaucaacuu

SEQ ID NO: 1435964 - RNA, 19 nt, Homo sapiens
  misc_RNA (1)...(19): siRNA sense strand
gcuuuggaaucuaugacau

SEQ ID NO: 1435965 - RNA, 19 nt, Homo sapiens
  misc_RNA (1)...(19): siRNA sense strand
cgacauugugcaguuugua

SEQ ID NO: 1435966 - RNA, 19 nt, Homo sapiens
  misc_RNA (1)...(19): siRNA sense strand
uguaguaaccauggaggua

SEQ ID NO: 1435967 - RNA, 19 nt, Homo sapiens
  misc_RNA (1)...(19): siRNA sense strand
gcugucagaucaacuucac

SEQ ID NO: 1435968 - RNA, 19 nt, Homo sapiens
  misc_RNA (1)...(19): siRNA sense strand
uuaaaggacaaucguguag

SEQ ID NO: 1435969 - RNA, 19 nt, Homo sapiens
  misc_RNA (1)...(19): siRNA sense strand
ucuauggcccuaccaacuu

SEQ ID NO: 1435970 - RNA, 19 nt, Homo sapiens
  misc_RNA (1)...(19): siRNA sense strand
augggaggcugucagauca

SEQ ID NO: 1435971 - RNA, 19 nt, Homo sapiens
  misc_RNA (1)...(19): siRNA sense strand
ccagggugaugggaaaugg

SEQ ID NO: 1435972 - RNA, 19 nt, Homo sapiens
  misc_RNA (1)...(19): siRNA sense strand
cagcucaggaauuaaagga

SEQ ID NO: 1435973 - RNA, 19 nt, Homo sapiens
  misc_RNA (1)...(19): siRNA sense strand
cagaagugcccacacaacu

SEQ ID NO: 1435974 - RNA, 19 nt, Homo sapiens
  misc_RNA (1)...(19): siRNA sense strand
acaagcuguucccugcauu

SEQ ID NO: 1435975 - RNA, 19 nt, Homo sapiens
  misc_RNA (1)...(19): siRNA sense strand
aagaaaagcuacaagaacu

SEQ ID NO: 1435976 - RNA, 19 nt, Homo sapiens
  misc_RNA (1)...(19): siRNA sense strand
gcauccacccugagaagca

SEQ ID NO: 1435977 - RNA, 19 nt, Homo sapiens
  misc_RNA (1)...(19): siRNA sense strand
acuccuuucuggacuaugu

SEQ ID NO: 1435978 - RNA, 19 nt, Homo sapiens
  misc_RNA (1)...(19): siRNA sense strand
ggguggugcugacuuugag

SEQ ID NO: 1435979 - RNA, 19 nt, Homo sapiens
  misc_RNA (1)...(19): siRNA sense strand
ccacacaacuggucucaua

SEQ ID NO: 1435980 - RNA, 19 nt, Homo sapiens
  misc_RNA (1)...(19): siRNA sense strand
gaucugaggucaucaagaa

SEQ ID NO: 1435981 - RNA, 19 nt, Homo sapiens
  misc_RNA (1)...(19): siRNA sense strand
ggucucagcucaggaauua

SEQ ID NO: 1435982 - RNA, 19 nt, Homo sapiens
  misc_RNA (1)...(19): siRNA sense strand
ccagaaaccuagauaagaa

SEQ ID NO: 1435983 - RNA, 19 nt, Homo sapiens
  misc_RNA (1)...(19): siRNA sense strand
caacuggucucauacuuca

SEQ ID NO: 1435984 - RNA, 19 nt, Homo sapiens
  misc_RNA (1)...(19): siRNA sense strand
ggacuucacuggcuccaau

SEQ ID NO: 1435985 - RNA, 19 nt, Homo sapiens
  misc_RNA (1)...(19): siRNA sense strand
guacagaucugaggucauc

SEQ ID NO: 1435986 - RNA, 19 nt, Homo sapiens
  misc_RNA (1)...(19): siRNA sense strand
aaaggacaaucguguagua

SEQ ID NO: 1435987 - RNA, 19 nt, Homo sapiens
  misc_RNA (1)...(19): siRNA sense strand
gcaggucucgcaugaauuu

SEQ ID NO: 1435988 - RNA, 19 nt, Homo sapiens
  misc_RNA (1)...(19): siRNA sense strand
caagaacucuggaacuauc

SEQ ID NO: 1435989 - RNA, 19 nt, Homo sapiens
  misc_RNA (1)...(19): siRNA sense strand
caacaggggucaaugagua

SEQ ID NO: 1435990 - RNA, 19 nt, Homo sapiens
  misc_RNA (1)...(19): siRNA sense strand
uacaagaacucuggaacua

SEQ ID NO: 1435991 - RNA, 19 nt, Homo sapiens
  misc_RNA (1)...(19): siRNA sense strand
gcugagggaugaugacuuc

SEQ ID NO: 1435992 - RNA, 19 nt, Homo sapiens
  misc_RNA (1)...(19): siRNA sense strand
gcaugaauuugccuugaau

SEQ ID NO: 1435993 - RNA, 19 nt, Homo sapiens
  misc_RNA (1)...(19): siRNA sense strand
gagggaugaugacuuccua

SEQ ID NO: 1435994 - RNA, 19 nt, Homo sapiens
  misc_RNA (1)...(19): siRNA sense strand
ggacaucggcuccaagucu

SEQ ID NO: 1435995 - RNA, 19 nt, Homo sapiens
  misc_RNA (1)...(19): siRNA sense strand
cgccagagcugagggauga

SEQ ID NO: 1435996 - RNA, 19 nt, Homo sapiens
  misc_RNA (1)...(19): siRNA sense strand
ggaacuauccgugucaaga

SEQ ID NO: 1435997 - RNA, 19 nt, Homo sapiens
  misc_RNA (1)...(19): siRNA sense strand
gaacuauccgugucaagau

SEQ ID NO: 1435998 - RNA, 19 nt, Homo sapiens
  misc_RNA (1)...(19): siRNA sense strand
caagauuugucggguagaa

SEQ ID NO: 1435999 - RNA, 19 nt, Homo sapiens
  misc_RNA (1)...(19): siRNA sense strand
gcagcgugguucaggacua

SEQ ID NO: 1436000 - RNA, 19 nt, Homo sapiens
  misc_RNA (1)...(19): siRNA sense strand
gcuguucccugcauuugga

SEQ ID NO: 1436001 - RNA, 19 nt, Homo sapiens
  misc_RNA (1)...(19): siRNA sense strand
agaaacagaguacuccuuu

SEQ ID NO: 1436002 - RNA, 19 nt, Homo sapiens
  misc_RNA (1)...(19): siRNA sense strand
gguagaggccagaaaccua

SEQ ID NO: 1436003 - RNA, 19 nt, Homo sapiens
  misc_RNA (1)...(19): siRNA sense strand
gugcaaugcuccgauuaug

SEQ ID NO: 1436004 - RNA, 19 nt, Homo sapiens
  misc_RNA (1)...(19): siRNA sense strand
uggcaggucucgcaugaau

SEQ ID NO: 1436005 - RNA, 19 nt, Homo sapiens
  misc_RNA (1)...(19): siRNA sense strand
ggacaaucguguaguaacc

SEQ ID NO: 1436006 - RNA, 19 nt, Homo sapiens
  misc_RNA (1)...(19): siRNA sense strand
cuauggcccuaccaacuuu

SEQ ID NO: 1436007 - RNA, 19 nt, Homo sapiens
  misc_RNA (1)...(19): siRNA sense strand
gaaugcauccacccugaga

SEQ ID NO: 1436008 - RNA, 19 nt, Homo sapiens
  misc_RNA (1)...(19): siRNA sense strand
gccagaaaccuagauaaga

SEQ ID NO: 1436009 - RNA, 19 nt, Homo sapiens
  misc_RNA (1)...(19): siRNA sense strand
gcuacgcuuuggaaucuau

SEQ ID NO: 1436010 - RNA, 19 nt, Homo sapiens
  misc_RNA (1)...(19): siRNA sense strand
gugaccaucucauugacaa

SEQ ID NO: 1436011 - RNA, 19 nt, Homo sapiens
  misc_RNA (1)...(19): siRNA sense strand
gaugggaggcugucagauc

SEQ ID NO: 1436012 - RNA, 19 nt, Homo sapiens
  misc_RNA (1)...(19): siRNA sense strand
gacaagcuguucccugcau

SEQ ID NO: 1436013 - RNA, 19 nt, Homo sapiens
  misc_RNA (1)...(19): siRNA sense strand
ggacugccucgcaauacuu

SEQ ID NO: 1436014 - RNA, 19 nt, Homo sapiens
  misc_RNA (1)...(19): siRNA sense strand
gacccacucugcguccuuu

SEQ ID NO: 1436015 - RNA, 19 nt, Homo sapiens
  misc_RNA (1)...(19): siRNA sense strand
caacuuugcacccaucauc

SEQ ID NO: 1436016 - RNA, 19 nt, Homo sapiens
  misc_RNA (1)...(19): siRNA sense strand
ccaugucagugaucauugu

SEQ ID NO: 1436017 - RNA, 19 nt, Homo sapiens
  misc_RNA (1)...(19): siRNA sense strand
gagcuuggccggacugaac

SEQ ID NO: 1436018 - RNA, 19 nt, Homo sapiens
  misc_RNA (1)...(19): siRNA sense strand
ccucgaaccugcccauguc

SEQ ID NO: 1436019 - RNA, 19 nt, Homo sapiens
  misc_RNA (1)...(19): siRNA sense strand
ggaauuaaaggacaaucgu

SEQ ID NO: 1436020 - RNA, 19 nt, Homo sapiens
  misc_RNA (1)...(19): siRNA sense strand
caggugcaaugcuccgauu

SEQ ID NO: 1436021 - RNA, 19 nt, Homo sapiens
  misc_RNA (1)...(19): siRNA sense strand
ucgcagaagugcccacaca

SEQ ID NO: 1436022 - RNA, 19 nt, Homo sapiens
  misc_RNA (1)...(19): siRNA sense strand
ucucagcucaggaauuaaa

SEQ ID NO: 1436023 - RNA, 19 nt, Homo sapiens
  misc_RNA (1)...(19): siRNA sense strand
aaacagaguacuccuuucu

SEQ ID NO: 1436024 - RNA, 19 nt, Homo sapiens
  misc_RNA (1)...(19): siRNA sense strand
cagcuugaguaccgcuuug

SEQ ID NO: 1436025 - RNA, 19 nt, Homo sapiens
  misc_RNA (1)...(19): siRNA sense strand
cacaacuggucucauacuu

SEQ ID NO: 1436026 - RNA, 19 nt, Homo sapiens
  misc_RNA (1)...(19): siRNA sense strand
cgcaauacuucaugcuguu

SEQ ID NO: 1436027 - RNA, 19 nt, Homo sapiens
  misc_RNA (1)...(19): siRNA sense strand
guacuccuuucuggacuau

SEQ ID NO: 1436028 - RNA, 19 nt, Homo sapiens
  misc_RNA (1)...(19): siRNA sense strand
gauuguguccagccaggua

SEQ ID NO: 1436029 - RNA, 19 nt, Homo sapiens
  misc_RNA (1)...(19): siRNA sense strand
ggagguagaggccagaaac

SEQ ID NO: 1436030 - RNA, 19 nt, Homo sapiens
  misc_RNA (1)...(19): siRNA sense strand
cgcaugaauuugccuugaa

SEQ ID NO: 1436031 - RNA, 19 nt, Homo sapiens
  misc_RNA (1)...(19): siRNA sense strand
ugguucagcuguccauuuc

SEQ ID NO: 1436032 - RNA, 19 nt, Homo sapiens
  misc_RNA (1)...(19): siRNA sense strand
cagcgugguucaggacuau

SEQ ID NO: 1436033 - RNA, 19 nt, Homo sapiens
  misc_RNA (1)...(19): siRNA sense strand
gaggccagaaaccuagaua

SEQ ID NO: 1436034 - RNA, 19 nt, Homo sapiens
  misc_RNA (1)...(19): siRNA sense strand
caagcuguucccugcauuu

SEQ ID NO: 1436035 - RNA, 19 nt, Homo sapiens
  misc_RNA (1)...(19): siRNA sense strand
ggucaaugaguaccugaug

SEQ ID NO: 1436036 - RNA, 19 nt, Homo sapiens
  misc_RNA (1)...(19): siRNA sense strand
cggcugaguuugaaugcau

SEQ ID NO: 1436037 - RNA, 19 nt, Homo sapiens
  misc_RNA (1)...(19): siRNA sense strand
ggcagucccggcugaguuu

SEQ ID NO: 1436038 - RNA, 19 nt, Homo sapiens
  misc_RNA (1)...(19): siRNA sense strand
cauggaagcguuucucagu

SEQ ID NO: 1436039 - RNA, 19 nt, Homo sapiens
  misc_RNA (1)...(19): siRNA sense strand
ggccagaaaccuagauaag

SEQ ID NO: 1436040 - RNA, 19 nt, Homo sapiens
  misc_RNA (1)...(19): siRNA sense strand
gcccugaguucuccaagac

SEQ ID NO: 1436041 - RNA, 19 nt, Homo sapiens
  misc_RNA (1)...(19): siRNA sense strand
uguggguggugcugacuuu

SEQ ID NO: 1436042 - RNA, 19 nt, Homo sapiens
  misc_RNA (1)...(19): siRNA sense strand
acaaggacaucggcuccaa

SEQ ID NO: 1436043 - RNA, 19 nt, Homo sapiens
  misc_RNA (1)...(19): siRNA sense strand
ccugugaccaucucauuga

SEQ ID NO: 1436044 - RNA, 19 nt, Homo sapiens
  misc_RNA (1)...(19): siRNA sense strand
ccgccagggugaugggaaa

SEQ ID NO: 1436045 - RNA, 19 nt, Homo sapiens
  misc_RNA (1)...(19): siRNA sense strand
gcagaagugcccacacaac

SEQ ID NO: 1436046 - RNA, 19 nt, Homo sapiens
  misc_RNA (1)...(19): siRNA sense strand
gcaauacuucaugcuguug

SEQ ID NO: 1436047 - RNA, 19 nt, Homo sapiens
  misc_RNA (1)...(19): siRNA sense strand
gcaggcauccagggcauug

SEQ ID NO: 1436048 - RNA, 19 nt, Homo sapiens
  misc_RNA (1)...(19): siRNA sense strand
ucgcaugaauuugccuuga

SEQ ID NO: 1436049 - RNA, 19 nt, Homo sapiens
  misc_RNA (1)...(19): siRNA sense strand
cuccaagacucuacagcuu

SEQ ID NO: 1436050 - RNA, 19 nt, Homo sapiens
  misc_RNA (1)...(19): siRNA sense strand
ggugcaaugcuccgauuau

SEQ ID NO: 1436051 - RNA, 19 nt, Homo sapiens
  misc_RNA (1)...(19): siRNA sense strand
gggacugccucgcaauacu

SEQ ID NO: 1436052 - RNA, 19 nt, Homo sapiens
  misc_RNA (1)...(19): siRNA sense strand
acuggcaggucucgcauga

SEQ ID NO: 1436053 - RNA, 19 nt, Homo sapiens
  misc_RNA (1)...(19): siRNA sense strand
ucaccugacucccuacacu

SEQ ID NO: 1436054 - RNA, 19 nt, Homo sapiens
  misc_RNA (1)...(19): siRNA sense strand
gcgacauugugcaguuugu

SEQ ID NO: 1436055 - RNA, 19 nt, Homo sapiens
  misc_RNA (1)...(19): siRNA sense strand
uaguaaccauggagguaga

SEQ ID NO: 1436056 - RNA, 19 nt, Homo sapiens
  misc_RNA (1)...(19): siRNA sense strand
gcccaugucagugaucauu

SEQ ID NO: 1436057 - RNA, 19 nt, Homo sapiens
  misc_RNA (1)...(19): siRNA sense strand
gaacaaccugaacccuaca

SEQ ID NO: 1436058 - RNA, 19 nt, Homo sapiens
  misc_RNA (1)...(19): siRNA sense strand
gaaaccuagauaagaagga

SEQ ID NO: 1436059 - RNA, 19 nt, Homo sapiens
  misc_RNA (1)...(19): siRNA sense strand
gcuuugagacaguccagaa

SEQ ID NO: 1436060 - RNA, 19 nt, Homo sapiens
  misc_RNA (1)...(19): siRNA sense strand
aacuauccgugucaagauu

SEQ ID NO: 1436061 - RNA, 19 nt, Homo sapiens
  misc_RNA (1)...(19): siRNA sense strand
agaccgugcucgcagaagu

SEQ ID NO: 1436062 - RNA, 19 nt, Homo sapiens
  misc_RNA (1)...(19): siRNA sense strand
ccgcgacauugugcaguuu

SEQ ID NO: 1436063 - RNA, 19 nt, Homo sapiens
  misc_RNA (1)...(19): siRNA sense strand
gaggcugucagaucaacuu

SEQ ID NO: 1436064 - RNA, 19 nt, Homo sapiens
  misc_RNA (1)...(19): siRNA sense strand
gcuuuggaaucuaugacau

SEQ ID NO: 1436065 - RNA, 19 nt, Homo sapiens
  misc_RNA (1)...(19): siRNA sense strand
cgacauugugcaguuugua

SEQ ID NO: 1436066 - RNA, 19 nt, Homo sapiens
  misc_RNA (1)...(19): siRNA sense strand
uguaguaaccauggaggua

SEQ ID NO: 1436067 - RNA, 19 nt, Homo sapiens
  misc_RNA (1)...(19): siRNA sense strand
gcugucagaucaacuucac

SEQ ID NO: 1436068 - RNA, 19 nt, Homo sapiens
  misc_RNA (1)...(19): siRNA sense strand
uuaaaggacaaucguguag

SEQ ID NO: 1436069 - RNA, 19 nt, Homo sapiens
  misc_RNA (1)...(19): siRNA sense strand
ucuauggcccuaccaacuu

SEQ ID NO: 1436070 - RNA, 19 nt, Homo sapiens
  misc_RNA (1)...(19): siRNA sense strand
augggaggcugucagauca

SEQ ID NO: 1436071 - RNA, 19 nt, Homo sapiens
  misc_RNA (1)...(19): siRNA sense strand
ccagggugaugggaaaugg

SEQ ID NO: 1436072 - RNA, 19 nt, Homo sapiens
  misc_RNA (1)...(19): siRNA sense strand
cagcucaggaauuaaagga

SEQ ID NO: 1436073 - RNA, 19 nt, Homo sapiens
  misc_RNA (1)...(19): siRNA sense strand
cagaagugcccacacaacu

SEQ ID NO: 1436074 - RNA, 19 nt, Homo sapiens
  misc_RNA (1)...(19): siRNA sense strand
acaagcuguucccugcauu

SEQ ID NO: 1436075 - RNA, 19 nt, Homo sapiens
  misc_RNA (1)...(19): siRNA sense strand
aagaaaagcuacaagaacu

SEQ ID NO: 1436076 - RNA, 19 nt, Homo sapiens
  misc_RNA (1)...(19): siRNA sense strand
gcauccacccugagaagca

SEQ ID NO: 1436077 - RNA, 19 nt, Homo sapiens
  misc_RNA (1)...(19): siRNA sense strand
acuccuuucuggacuaugu

SEQ ID NO: 1436078 - RNA, 19 nt, Homo sapiens
  misc_RNA (1)...(19): siRNA sense strand
ggguggugcugacuuugag

SEQ ID NO: 1436079 - RNA, 19 nt, Homo sapiens
  misc_RNA (1)...(19): siRNA sense strand
ccacacaacuggucucaua

SEQ ID NO: 1436080 - RNA, 19 nt, Homo sapiens
  misc_RNA (1)...(19): siRNA sense strand
gaucugaggucaucaagaa

SEQ ID NO: 1436081 - RNA, 19 nt, Homo sapiens
  misc_RNA (1)...(19): siRNA sense strand
ggucucagcucaggaauua

SEQ ID NO: 1436082 - RNA, 19 nt, Homo sapiens
  misc_RNA (1)...(19): siRNA sense strand
ccagaaaccuagauaagaa

SEQ ID NO: 1436083 - RNA, 19 nt, Homo sapiens
  misc_RNA (1)...(19): siRNA sense strand
caacuggucucauacuuca

SEQ ID NO: 1436084 - RNA, 19 nt, Homo sapiens
  misc_RNA (1)...(19): siRNA sense strand
ggacuucacuggcuccaau

SEQ ID NO: 1436085 - RNA, 19 nt, Homo sapiens
  misc_RNA (1)...(19): siRNA sense strand
guacagaucugaggucauc

SEQ ID NO: 1436086 - RNA, 19 nt, Homo sapiens
  misc_RNA (1)...(19): siRNA sense strand
aaaggacaaucguguagua

SEQ ID NO: 1436087 - RNA, 19 nt, Homo sapiens
  misc_RNA (1)...(19): siRNA sense strand
gcaggucucgcaugaauuu

SEQ ID NO: 1436088 - RNA, 19 nt, Homo sapiens
  misc_RNA (1)...(19): siRNA sense strand
caagaacucuggaacuauc

SEQ ID NO: 1436089 - RNA, 19 nt, Homo sapiens
  misc_RNA (1)...(19): siRNA sense strand
caacaggggucaaugagua

SEQ ID NO: 1436090 - RNA, 19 nt, Homo sapiens
  misc_RNA (1)...(19): siRNA sense strand
uacaagaacucuggaacua

SEQ ID NO: 1436091 - RNA, 19 nt, Homo sapiens
  misc_RNA (1)...(19): siRNA sense strand
gcugagggaugaugacuuc

SEQ ID NO: 1436092 - RNA, 19 nt, Homo sapiens
  misc_RNA (1)...(19): siRNA sense strand
gcaugaauuugccuugaau

SEQ ID NO: 1436093 - RNA, 19 nt, Homo sapiens
  misc_RNA (1)...(19): siRNA sense strand
gagggaugaugacuuccua

SEQ ID NO: 1436094 - RNA, 19 nt, Homo sapiens
  misc_RNA (1)...(19): siRNA sense strand
ggacaucggcuccaagucu

SEQ ID NO: 1436095 - RNA, 19 nt, Homo sapiens
  misc_RNA (1)...(19): siRNA sense strand
cgccagagcugagggauga

SEQ ID NO: 1436096 - RNA, 19 nt, Homo sapiens
  misc_RNA (1)...(19): siRNA sense strand
ggaacuauccgugucaaga

SEQ ID NO: 1436097 - RNA, 19 nt, Homo sapiens
  misc_RNA (1)...(19): siRNA sense strand
gaacuauccgugucaagau

SEQ ID NO: 1436098 - RNA, 19 nt, Homo sapiens
  misc_RNA (1)...(19): siRNA sense strand
caagauuugucggguagaa

SEQ ID NO: 1436099 - RNA, 19 nt, Homo sapiens
  misc_RNA (1)...(19): siRNA sense strand
gcagcgugguucaggacua

SEQ ID NO: 1436100 - RNA, 19 nt, Homo sapiens
  misc_RNA (1)...(19): siRNA sense strand
gcuguucccugcauuugga

SEQ ID NO: 1436101 - RNA, 19 nt, Homo sapiens
  misc_RNA (1)...(19): siRNA sense strand
agaaacagaguacuccuuu

SEQ ID NO: 1436102 - RNA, 19 nt, Homo sapiens
  misc_RNA (1)...(19): siRNA sense strand
gguagaggccagaaaccua

SEQ ID NO: 1436103 - RNA, 19 nt, Homo sapiens
  misc_RNA (1)...(19): siRNA sense strand
gugcaaugcuccgauuaug

SEQ ID NO: 1436104 - RNA, 19 nt, Homo sapiens
  misc_RNA (1)...(19): siRNA sense strand
uggcaggucucgcaugaau

SEQ ID NO: 1436105 - RNA, 19 nt, Homo sapiens
  misc_RNA (1)...(19): siRNA sense strand
ggacaaucguguaguaacc

SEQ ID NO: 1436106 - RNA, 19 nt, Homo sapiens
  misc_RNA (1)...(19): siRNA sense strand
cuauggcccuaccaacuuu

SEQ ID NO: 1436107 - RNA, 19 nt, Homo sapiens
  misc_RNA (1)...(19): siRNA sense strand
gaaugcauccacccugaga

SEQ ID NO: 1436108 - RNA, 19 nt, Homo sapiens
  misc_RNA (1)...(19): siRNA sense strand
gccagaaaccuagauaaga

SEQ ID NO: 1436109 - RNA, 19 nt, Homo sapiens
  misc_RNA (1)...(19): siRNA sense strand
gcuacgcuuuggaaucuau

SEQ ID NO: 1436110 - RNA, 19 nt, Homo sapiens
  misc_RNA (1)...(19): siRNA sense strand
gugaccaucucauugacaa

SEQ ID NO: 1436111 - RNA, 19 nt, Homo sapiens
  misc_RNA (1)...(19): siRNA sense strand
gaugggaggcugucagauc

SEQ ID NO: 1436112 - RNA, 19 nt, Homo sapiens
  misc_RNA (1)...(19): siRNA sense strand
gacaagcuguucccugcau

SEQ ID NO: 1436113 - RNA, 19 nt, Homo sapiens
  misc_RNA (1)...(19): siRNA sense strand
ggacugccucgcaauacuu

SEQ ID NO: 1436114 - RNA, 19 nt, Homo sapiens
  misc_RNA (1)...(19): siRNA sense strand
gacccacucugcguccuuu

SEQ ID NO: 1436115 - RNA, 19 nt, Homo sapiens
  misc_RNA (1)...(19): siRNA sense strand
caacuuugcacccaucauc

SEQ ID NO: 1436116 - RNA, 19 nt, Homo sapiens
  misc_RNA (1)...(19): siRNA sense strand
ccaugucagugaucauugu

SEQ ID NO: 1436117 - RNA, 19 nt, Homo sapiens
  misc_RNA (1)...(19): siRNA sense strand
gagcuuggccggacugaac

SEQ ID NO: 1436118 - RNA, 19 nt, Homo sapiens
  misc_RNA (1)...(19): siRNA sense strand
ccucgaaccugcccauguc

SEQ ID NO: 1436119 - RNA, 19 nt, Homo sapiens
  misc_RNA (1)...(19): siRNA sense strand
ggaauuaaaggacaaucgu

SEQ ID NO: 1436120 - RNA, 19 nt, Homo sapiens
  misc_RNA (1)...(19): siRNA sense strand
caggugcaaugcuccgauu

SEQ ID NO: 1436121 - RNA, 19 nt, Homo sapiens
  misc_RNA (1)...(19): siRNA sense strand
ucgcagaagugcccacaca

SEQ ID NO: 1436122 - RNA, 19 nt, Homo sapiens
  misc_RNA (1)...(19): siRNA sense strand
ucucagcucaggaauuaaa

SEQ ID NO: 1436123 - RNA, 19 nt, Homo sapiens
  misc_RNA (1)...(19): siRNA sense strand
aaacagaguacuccuuucu

SEQ ID NO: 1436124 - RNA, 19 nt, Homo sapiens
  misc_RNA (1)...(19): siRNA sense strand
cagcuugaguaccgcuuug

SEQ ID NO: 1436125 - RNA, 19 nt, Homo sapiens
  misc_RNA (1)...(19): siRNA sense strand
cacaacuggucucauacuu

SEQ ID NO: 1436126 - RNA, 19 nt, Homo sapiens
  misc_RNA (1)...(19): siRNA sense strand
cgcaauacuucaugcuguu

SEQ ID NO: 1436127 - RNA, 19 nt, Homo sapiens
  misc_RNA (1)...(19): siRNA sense strand
guacuccuuucuggacuau

SEQ ID NO: 1436128 - RNA, 19 nt, Homo sapiens
  misc_RNA (1)...(19): siRNA sense strand
gauuguguccagccaggua

SEQ ID NO: 1436129 - RNA, 19 nt, Homo sapiens
  misc_RNA (1)...(19): siRNA sense strand
ggagguagaggccagaaac

SEQ ID NO: 1436130 - RNA, 19 nt, Homo sapiens
  misc_RNA (1)...(19): siRNA sense strand
cgcaugaauuugccuugaa

SEQ ID NO: 1436131 - RNA, 19 nt, Homo sapiens
  misc_RNA (1)...(19): siRNA sense strand
ugguucagcuguccauuuc

SEQ ID NO: 1436132 - RNA, 19 nt, Homo sapiens
  misc_RNA (1)...(19): siRNA sense strand
cagcgugguucaggacuau

SEQ ID NO: 1436133 - RNA, 19 nt, Homo sapiens
  misc_RNA (1)...(19): siRNA sense strand
gaggccagaaaccuagaua

SEQ ID NO: 1436134 - RNA, 19 nt, Homo sapiens
  misc_RNA (1)...(19): siRNA sense strand
caagcuguucccugcauuu

SEQ ID NO: 1436135 - RNA, 19 nt, Homo sapiens
  misc_RNA (1)...(19): siRNA sense strand
ggucaaugaguaccugaug

SEQ ID NO: 1436136 - RNA, 19 nt, Homo sapiens
  misc_RNA (1)...(19): siRNA sense strand
cggcugaguuugaaugcau

SEQ ID NO: 1436137 - RNA, 19 nt, Homo sapiens
  misc_RNA (1)...(19): siRNA sense strand
ggcagucccggcugaguuu

SEQ ID NO: 1436138 - RNA, 19 nt, Homo sapiens
  misc_RNA (1)...(19): siRNA sense strand
cauggaagcguuucucagu

SEQ ID NO: 1436139 - RNA, 19 nt, Homo sapiens
  misc_RNA (1)...(19): siRNA sense strand
ggccagaaaccuagauaag

SEQ ID NO: 1436140 - RNA, 19 nt, Homo sapiens
  misc_RNA (1)...(19): siRNA sense strand
gcccugaguucuccaagac

SEQ ID NO: 1436141 - RNA, 19 nt, Homo sapiens
  misc_RNA (1)...(19): siRNA sense strand
uguggguggugcugacuuu

SEQ ID NO: 1436142 - RNA, 19 nt, Homo sapiens
  misc_RNA (1)...(19): siRNA sense strand
acaaggacaucggcuccaa

SEQ ID NO: 1436143 - RNA, 19 nt, Homo sapiens
  misc_RNA (1)...(19): siRNA sense strand
ccugugaccaucucauuga

SEQ ID NO: 1436144 - RNA, 19 nt, Homo sapiens
  misc_RNA (1)...(19): siRNA sense strand
ccgccagggugaugggaaa

SEQ ID NO: 1436145 - RNA, 19 nt, Homo sapiens
  misc_RNA (1)...(19): siRNA sense strand
gcagaagugcccacacaac

SEQ ID NO: 1436146 - RNA, 19 nt, Homo sapiens
  misc_RNA (1)...(19): siRNA sense strand
gcaauacuucaugcuguug

SEQ ID NO: 1436147 - RNA, 19 nt, Homo sapiens
  misc_RNA (1)...(19): siRNA sense strand
gcaggcauccagggcauug

SEQ ID NO: 1436148 - RNA, 19 nt, Homo sapiens
  misc_RNA (1)...(19): siRNA sense strand
ucgcaugaauuugccuuga

SEQ ID NO: 1436149 - RNA, 19 nt, Homo sapiens
  misc_RNA (1)...(19): siRNA sense strand
cuccaagacucuacagcuu

SEQ ID NO: 1436150 - RNA, 19 nt, Homo sapiens
  misc_RNA (1)...(19): siRNA sense strand
ggugcaaugcuccgauuau

SEQ ID NO: 1436151 - RNA, 19 nt, Homo sapiens
  misc_RNA (1)...(19): siRNA sense strand
gggacugccucgcaauacu

SEQ ID NO: 1436152 - RNA, 19 nt, Homo sapiens
  misc_RNA (1)...(19): siRNA sense strand
acuggcaggucucgcauga

SEQ ID NO: 1436153 - RNA, 19 nt, Homo sapiens
  misc_RNA (1)...(19): siRNA sense strand
ucaccugacucccuacacu

SEQ ID NO: 1436154 - RNA, 19 nt, Homo sapiens
  misc_RNA (1)...(19): siRNA sense strand
gcgacauugugcaguuugu

SEQ ID NO: 1436155 - RNA, 19 nt, Homo sapiens
  misc_RNA (1)...(19): siRNA sense strand
uaguaaccauggagguaga

SEQ ID NO: 1436156 - RNA, 19 nt, Homo sapiens
  misc_RNA (1)...(19): siRNA sense strand
gcccaugucagugaucauu

SEQ ID NO: 1436157 - RNA, 19 nt, Homo sapiens
  misc_RNA (1)...(19): siRNA sense strand
gaacaaccugaacccuaca

SEQ ID NO: 1436158 - RNA, 19 nt, Homo sapiens
  misc_RNA (1)...(19): siRNA sense strand
gaaaccuagauaagaagga

SEQ ID NO: 1436159 - RNA, 19 nt, Homo sapiens
  misc_RNA (1)...(19): siRNA sense strand
gcuuugagacaguccagaa

SEQ ID NO: 1436160 - RNA, 19 nt, Homo sapiens
  misc_RNA (1)...(19): siRNA sense strand
aacuauccgugucaagauu

SEQ ID NO: 1436161 - RNA, 19 nt, Homo sapiens
  misc_RNA (1)...(19): siRNA sense strand
agaccgugcucgcagaagu

SEQ ID NO: 1436162 - RNA, 19 nt, Homo sapiens
  misc_RNA (1)...(19): siRNA sense strand
ccgcgacauugugcaguuu

SEQ ID NO: 1436163 - RNA, 19 nt, Homo sapiens
  misc_RNA (1)...(19): siRNA sense strand
gaggcugucagaucaacuu

SEQ ID NO: 1436164 - RNA, 19 nt, Homo sapiens
  misc_RNA (1)...(19): siRNA sense strand
gcuuuggaaucuaugacau

SEQ ID NO: 1436165 - RNA, 19 nt, Homo sapiens
  misc_RNA (1)...(19): siRNA sense strand
cgacauugugcaguuugua

SEQ ID NO: 1436166 - RNA, 19 nt, Homo sapiens
  misc_RNA (1)...(19): siRNA sense strand
uguaguaaccauggaggua

SEQ ID NO: 1436167 - RNA, 19 nt, Homo sapiens
  misc_RNA (1)...(19): siRNA sense strand
gcugucagaucaacuucac

SEQ ID NO: 1436168 - RNA, 19 nt, Homo sapiens
  misc_RNA (1)...(19): siRNA sense strand
uuaaaggacaaucguguag

SEQ ID NO: 1436169 - RNA, 19 nt, Homo sapiens
  misc_RNA (1)...(19): siRNA sense strand
ucuauggcccuaccaacuu

SEQ ID NO: 1436170 - RNA, 19 nt, Homo sapiens
  misc_RNA (1)...(19): siRNA sense strand
augggaggcugucagauca

SEQ ID NO: 1436171 - RNA, 19 nt, Homo sapiens
  misc_RNA (1)...(19): siRNA sense strand
ccagggugaugggaaaugg

SEQ ID NO: 1436172 - RNA, 19 nt, Homo sapiens
  misc_RNA (1)...(19): siRNA sense strand
cagcucaggaauuaaagga

SEQ ID NO: 1436173 - RNA, 19 nt, Homo sapiens
  misc_RNA (1)...(19): siRNA sense strand
cagaagugcccacacaacu

SEQ ID NO: 1436174 - RNA, 19 nt, Homo sapiens
  misc_RNA (1)...(19): siRNA sense strand
acaagcuguucccugcauu

SEQ ID NO: 1436175 - RNA, 19 nt, Homo sapiens
  misc_RNA (1)...(19): siRNA sense strand
aagaaaagcuacaagaacu

SEQ ID NO: 1436176 - RNA, 19 nt, Homo sapiens
  misc_RNA (1)...(19): siRNA sense strand
gcauccacccugagaagca

SEQ ID NO: 1436177 - RNA, 19 nt, Homo sapiens
  misc_RNA (1)...(19): siRNA sense strand
acuccuuucuggacuaugu

SEQ ID NO: 1436178 - RNA, 19 nt, Homo sapiens
  misc_RNA (1)...(19): siRNA sense strand
ggguggugcugacuuugag

SEQ ID NO: 1436179 - RNA, 19 nt, Homo sapiens
  misc_RNA (1)...(19): siRNA sense strand
ccacacaacuggucucaua

SEQ ID NO: 1436180 - RNA, 19 nt, Homo sapiens
  misc_RNA (1)...(19): siRNA sense strand
gaucugaggucaucaagaa

SEQ ID NO: 1436181 - RNA, 19 nt, Homo sapiens
  misc_RNA (1)...(19): siRNA sense strand
ggucucagcucaggaauua

SEQ ID NO: 1436182 - RNA, 19 nt, Homo sapiens
  misc_RNA (1)...(19): siRNA sense strand
ccagaaaccuagauaagaa

SEQ ID NO: 1436183 - RNA, 19 nt, Homo sapiens
  misc_RNA (1)...(19): siRNA sense strand
caacuggucucauacuuca

SEQ ID NO: 1436184 - RNA, 19 nt, Homo sapiens
  misc_RNA (1)...(19): siRNA sense strand
ggacuucacuggcuccaau

SEQ ID NO: 1436185 - RNA, 19 nt, Homo sapiens
  misc_RNA (1)...(19): siRNA sense strand
guacagaucugaggucauc

SEQ ID NO: 1436186 - RNA, 19 nt, Homo sapiens
  misc_RNA (1)...(19): siRNA sense strand
aaaggacaaucguguagua

SEQ ID NO: 1436187 - RNA, 19 nt, Homo sapiens
  misc_RNA (1)...(19): siRNA sense strand
gcaggucucgcaugaauuu

SEQ ID NO: 1436188 - RNA, 19 nt, Homo sapiens
  misc_RNA (1)...(19): siRNA sense strand
caagaacucuggaacuauc

SEQ ID NO: 1436189 - RNA, 19 nt, Homo sapiens
  misc_RNA (1)...(19): siRNA sense strand
caacaggggucaaugagua

SEQ ID NO: 1436190 - RNA, 19 nt, Homo sapiens
  misc_RNA (1)...(19): siRNA sense strand
uacaagaacucuggaacua

SEQ ID NO: 1436191 - RNA, 19 nt, Homo sapiens
  misc_RNA (1)...(19): siRNA sense strand
gcugagggaugaugacuuc

SEQ ID NO: 1436192 - RNA, 19 nt, Homo sapiens
  misc_RNA (1)...(19): siRNA sense strand
gcaugaauuugccuugaau

SEQ ID NO: 1436193 - RNA, 19 nt, Homo sapiens
  misc_RNA (1)...(19): siRNA sense strand
gagggaugaugacuuccua

SEQ ID NO: 1436194 - RNA, 19 nt, Homo sapiens
  misc_RNA (1)...(19): siRNA sense strand
ggacaucggcuccaagucu

SEQ ID NO: 1436195 - RNA, 19 nt, Homo sapiens
  misc_RNA (1)...(19): siRNA sense strand
cgccagagcugagggauga

SEQ ID NO: 1436196 - RNA, 19 nt, Homo sapiens
  misc_RNA (1)...(19): siRNA sense strand
ggaacuauccgugucaaga

SEQ ID NO: 1436197 - RNA, 19 nt, Homo sapiens
  misc_RNA (1)...(19): siRNA sense strand
gaacuauccgugucaagau

SEQ ID NO: 1436198 - RNA, 19 nt, Homo sapiens
  misc_RNA (1)...(19): siRNA sense strand
caagauuugucggguagaa

SEQ ID NO: 1436199 - RNA, 19 nt, Homo sapiens
  misc_RNA (1)...(19): siRNA sense strand
gcagcgugguucaggacua

SEQ ID NO: 1436200 - RNA, 19 nt, Homo sapiens
  misc_RNA (1)...(19): siRNA sense strand
gcuguucccugcauuugga

SEQ ID NO: 1436201 - RNA, 19 nt, Homo sapiens
  misc_RNA (1)...(19): siRNA sense strand
agaaacagaguacuccuuu

SEQ ID NO: 1436202 - RNA, 19 nt, Homo sapiens
  misc_RNA (1)...(19): siRNA sense strand
gguagaggccagaaaccua

SEQ ID NO: 1436203 - RNA, 19 nt, Homo sapiens
  misc_RNA (1)...(19): siRNA sense strand
gugcaaugcuccgauuaug

SEQ ID NO: 1436204 - RNA, 19 nt, Homo sapiens
  misc_RNA (1)...(19): siRNA sense strand
uggcaggucucgcaugaau

SEQ ID NO: 1436205 - RNA, 19 nt, Homo sapiens
  misc_RNA (1)...(19): siRNA sense strand
ggacaaucguguaguaacc

SEQ ID NO: 1436206 - RNA, 19 nt, Homo sapiens
  misc_RNA (1)...(19): siRNA sense strand
cuauggcccuaccaacuuu

SEQ ID NO: 1436207 - RNA, 19 nt, Homo sapiens
  misc_RNA (1)...(19): siRNA sense strand
gaaugcauccacccugaga

SEQ ID NO: 1436208 - RNA, 19 nt, Homo sapiens
  misc_RNA (1)...(19): siRNA sense strand
gccagaaaccuagauaaga

SEQ ID NO: 1436209 - RNA, 19 nt, Homo sapiens
  misc_RNA (1)...(19): siRNA sense strand
gcuacgcuuuggaaucuau

SEQ ID NO: 1436210 - RNA, 19 nt, Homo sapiens
  misc_RNA (1)...(19): siRNA sense strand
gugaccaucucauugacaa

SEQ ID NO: 1436211 - RNA, 19 nt, Homo sapiens
  misc_RNA (1)...(19): siRNA sense strand
gaugggaggcugucagauc

SEQ ID NO: 1436212 - RNA, 19 nt, Homo sapiens
  misc_RNA (1)...(19): siRNA sense strand
gacaagcuguucccugcau

SEQ ID NO: 1436213 - RNA, 19 nt, Homo sapiens
  misc_RNA (1)...(19): siRNA sense strand
ggacugccucgcaauacuu

SEQ ID NO: 1436214 - RNA, 19 nt, Homo sapiens
  misc_RNA (1)...(19): siRNA sense strand
gacccacucugcguccuuu

SEQ ID NO: 1436215 - RNA, 19 nt, Homo sapiens
  misc_RNA (1)...(19): siRNA sense strand
caacuuugcacccaucauc

SEQ ID NO: 1436216 - RNA, 19 nt, Homo sapiens
  misc_RNA (1)...(19): siRNA sense strand
ccaugucagugaucauugu

SEQ ID NO: 1436217 - RNA, 19 nt, Homo sapiens
  misc_RNA (1)...(19): siRNA sense strand
gagcuuggccggacugaac

SEQ ID NO: 1436218 - RNA, 19 nt, Homo sapiens
  misc_RNA (1)...(19): siRNA sense strand
ccucgaaccugcccauguc

SEQ ID NO: 1436219 - RNA, 19 nt, Homo sapiens
  misc_RNA (1)...(19): siRNA sense strand
ggaauuaaaggacaaucgu

SEQ ID NO: 1436220 - RNA, 19 nt, Homo sapiens
  misc_RNA (1)...(19): siRNA sense strand
caggugcaaugcuccgauu

SEQ ID NO: 1436221 - RNA, 19 nt, Homo sapiens
  misc_RNA (1)...(19): siRNA sense strand
ucgcagaagugcccacaca

SEQ ID NO: 1436222 - RNA, 19 nt, Homo sapiens
  misc_RNA (1)...(19): siRNA sense strand
ucucagcucaggaauuaaa

SEQ ID NO: 1436223 - RNA, 19 nt, Homo sapiens
  misc_RNA (1)...(19): siRNA sense strand
aaacagaguacuccuuucu

SEQ ID NO: 1436224 - RNA, 19 nt, Homo sapiens
  misc_RNA (1)...(19): siRNA sense strand
cagcuugaguaccgcuuug

SEQ ID NO: 1436225 - RNA, 19 nt, Homo sapiens
  misc_RNA (1)...(19): siRNA sense strand
cacaacuggucucauacuu

SEQ ID NO: 1436226 - RNA, 19 nt, Homo sapiens
  misc_RNA (1)...(19): siRNA sense strand
cgcaauacuucaugcuguu

SEQ ID NO: 1436227 - RNA, 19 nt, Homo sapiens
  misc_RNA (1)...(19): siRNA sense strand
guacuccuuucuggacuau

SEQ ID NO: 1436228 - RNA, 19 nt, Homo sapiens
  misc_RNA (1)...(19): siRNA sense strand
gauuguguccagccaggua

SEQ ID NO: 1436229 - RNA, 19 nt, Homo sapiens
  misc_RNA (1)...(19): siRNA sense strand
ggagguagaggccagaaac

SEQ ID NO: 1436230 - RNA, 19 nt, Homo sapiens
  misc_RNA (1)...(19): siRNA sense strand
cgcaugaauuugccuugaa

SEQ ID NO: 1436231 - RNA, 19 nt, Homo sapiens
  misc_RNA (1)...(19): siRNA sense strand
ugguucagcuguccauuuc

SEQ ID NO: 1436232 - RNA, 19 nt, Homo sapiens
  misc_RNA (1)...(19): siRNA sense strand
cagcgugguucaggacuau

SEQ ID NO: 1436233 - RNA, 19 nt, Homo sapiens
  misc_RNA (1)...(19): siRNA sense strand
gaggccagaaaccuagaua

SEQ ID NO: 1436234 - RNA, 19 nt, Homo sapiens
  misc_RNA (1)...(19): siRNA sense strand
caagcuguucccugcauuu

SEQ ID NO: 1436235 - RNA, 19 nt, Homo sapiens
  misc_RNA (1)...(19): siRNA sense strand
ggucaaugaguaccugaug

SEQ ID NO: 1436236 - RNA, 19 nt, Homo sapiens
  misc_RNA (1)...(19): siRNA sense strand
cggcugaguuugaaugcau

SEQ ID NO: 1436237 - RNA, 19 nt, Homo sapiens
  misc_RNA (1)...(19): siRNA sense strand
ggcagucccggcugaguuu

SEQ ID NO: 1436238 - RNA, 19 nt, Homo sapiens
  misc_RNA (1)...(19): siRNA sense strand
cauggaagcguuucucagu

SEQ ID NO: 1436239 - RNA, 19 nt, Homo sapiens
  misc_RNA (1)...(19): siRNA sense strand
ggccagaaaccuagauaag

SEQ ID NO: 1436240 - RNA, 19 nt, Homo sapiens
  misc_RNA (1)...(19): siRNA sense strand
gcccugaguucuccaagac

SEQ ID NO: 1436241 - RNA, 19 nt, Homo sapiens
  misc_RNA (1)...(19): siRNA sense strand
uguggguggugcugacuuu

SEQ ID NO: 1436242 - RNA, 19 nt, Homo sapiens
  misc_RNA (1)...(19): siRNA sense strand
acaaggacaucggcuccaa

SEQ ID NO: 1436243 - RNA, 19 nt, Homo sapiens
  misc_RNA (1)...(19): siRNA sense strand
ccugugaccaucucauuga

SEQ ID NO: 1436244 - RNA, 19 nt, Homo sapiens
  misc_RNA (1)...(19): siRNA sense strand
ccgccagggugaugggaaa

SEQ ID NO: 1436245 - RNA, 19 nt, Homo sapiens
  misc_RNA (1)...(19): siRNA sense strand
gcagaagugcccacacaac

SEQ ID NO: 1436246 - RNA, 19 nt, Homo sapiens
  misc_RNA (1)...(19): siRNA sense strand
gcaauacuucaugcuguug

SEQ ID NO: 1436247 - RNA, 19 nt, Homo sapiens
  misc_RNA (1)...(19): siRNA sense strand
gcaggcauccagggcauug

SEQ ID NO: 1436248 - RNA, 19 nt, Homo sapiens
  misc_RNA (1)...(19): siRNA sense strand
ucgcaugaauuugccuuga

SEQ ID NO: 1436249 - RNA, 19 nt, Homo sapiens
  misc_RNA (1)...(19): siRNA sense strand
cuccaagacucuacagcuu

SEQ ID NO: 1436250 - RNA, 19 nt, Homo sapiens
  misc_RNA (1)...(19): siRNA sense strand
ggugcaaugcuccgauuau

SEQ ID NO: 1436251 - RNA, 19 nt, Homo sapiens
  misc_RNA (1)...(19): siRNA sense strand
gggacugccucgcaauacu

SEQ ID NO: 1436252 - RNA, 19 nt, Homo sapiens
  misc_RNA (1)...(19): siRNA sense strand
acuggcaggucucgcauga

SEQ ID NO: 1436253 - RNA, 19 nt, Homo sapiens
  misc_RNA (1)...(19): siRNA sense strand
ucaccugacucccuacacu

SEQ ID NO: 1436254 - RNA, 19 nt, Homo sapiens
  misc_RNA (1)...(19): siRNA sense strand
gcgacauugugcaguuugu

SEQ ID NO: 1436255 - RNA, 19 nt, Homo sapiens
  misc_RNA (1)...(19): siRNA sense strand
uaguaaccauggagguaga

SEQ ID NO: 1436256 - RNA, 19 nt, Homo sapiens
  misc_RNA (1)...(19): siRNA sense strand
gcccaugucagugaucauu

SEQ ID NO: 1436257 - RNA, 19 nt, Homo sapiens
  misc_RNA (1)...(19): siRNA sense strand
gaacaaccugaacccuaca

SEQ ID NO: 1436258 - RNA, 19 nt, Homo sapiens
  misc_RNA (1)...(19): siRNA sense strand
gaaaccuagauaagaagga

SEQ ID NO: 1436259 - RNA, 19 nt, Homo sapiens
  misc_RNA (1)...(19): siRNA sense strand
gcuuugagacaguccagaa

SEQ ID NO: 1436260 - RNA, 19 nt, Homo sapiens
  misc_RNA (1)...(19): siRNA sense strand
aacuauccgugucaagauu

SEQ ID NO: 1436261 - RNA, 19 nt, Homo sapiens
  misc_RNA (1)...(19): siRNA sense strand
agaccgugcucgcagaagu

SEQ ID NO: 1436262 - RNA, 19 nt, Homo sapiens
  misc_RNA (1)...(19): siRNA sense strand
ccgcgacauugugcaguuu

SEQ ID NO: 1436263 - RNA, 19 nt, Homo sapiens
  misc_RNA (1)...(19): siRNA sense strand
gaggcugucagaucaacuu

SEQ ID NO: 1436264 - RNA, 19 nt, Homo sapiens
  misc_RNA (1)...(19): siRNA sense strand
gcuuuggaaucuaugacau

SEQ ID NO: 1436265 - RNA, 19 nt, Homo sapiens
  misc_RNA (1)...(19): siRNA sense strand
cgacauugugcaguuugua

SEQ ID NO: 1436266 - RNA, 19 nt, Homo sapiens
  misc_RNA (1)...(19): siRNA sense strand
uguaguaaccauggaggua

SEQ ID NO: 1436267 - RNA, 19 nt, Homo sapiens
  misc_RNA (1)...(19): siRNA sense strand
gcugucagaucaacuucac

SEQ ID NO: 1436268 - RNA, 19 nt, Homo sapiens
  misc_RNA (1)...(19): siRNA sense strand
uuaaaggacaaucguguag

SEQ ID NO: 1436269 - RNA, 19 nt, Homo sapiens
  misc_RNA (1)...(19): siRNA sense strand
ucuauggcccuaccaacuu

SEQ ID NO: 1436270 - RNA, 19 nt, Homo sapiens
  misc_RNA (1)...(19): siRNA sense strand
augggaggcugucagauca

SEQ ID NO: 1436271 - RNA, 19 nt, Homo sapiens
  misc_RNA (1)...(19): siRNA sense strand
ccagggugaugggaaaugg

SEQ ID NO: 1436272 - RNA, 19 nt, Homo sapiens
  misc_RNA (1)...(19): siRNA sense strand
cagcucaggaauuaaagga

SEQ ID NO: 1436273 - RNA, 19 nt, Homo sapiens
  misc_RNA (1)...(19): siRNA sense strand
cagaagugcccacacaacu

SEQ ID NO: 1436274 - RNA, 19 nt, Homo sapiens
  misc_RNA (1)...(19): siRNA sense strand
acaagcuguucccugcauu

SEQ ID NO: 1436275 - RNA, 19 nt, Homo sapiens
  misc_RNA (1)...(19): siRNA sense strand
aagaaaagcuacaagaacu

SEQ ID NO: 1436276 - RNA, 19 nt, Homo sapiens
  misc_RNA (1)...(19): siRNA sense strand
gcauccacccugagaagca

SEQ ID NO: 1436277 - RNA, 19 nt, Homo sapiens
  misc_RNA (1)...(19): siRNA sense strand
acuccuuucuggacuaugu

SEQ ID NO: 1436278 - RNA, 19 nt, Homo sapiens
  misc_RNA (1)...(19): siRNA sense strand
ggguggugcugacuuugag

SEQ ID NO: 1436279 - RNA, 19 nt, Homo sapiens
  misc_RNA (1)...(19): siRNA sense strand
ccacacaacuggucucaua

SEQ ID NO: 1436280 - RNA, 19 nt, Homo sapiens
  misc_RNA (1)...(19): siRNA sense strand
gaucugaggucaucaagaa

SEQ ID NO: 1436281 - RNA, 19 nt, Homo sapiens
  misc_RNA (1)...(19): siRNA sense strand
ggucucagcucaggaauua

SEQ ID NO: 1436282 - RNA, 19 nt, Homo sapiens
  misc_RNA (1)...(19): siRNA sense strand
ccagaaaccuagauaagaa

SEQ ID NO: 1436283 - RNA, 19 nt, Homo sapiens
  misc_RNA (1)...(19): siRNA sense strand
caacuggucucauacuuca

SEQ ID NO: 1436284 - RNA, 19 nt, Homo sapiens
  misc_RNA (1)...(19): siRNA sense strand
ggacuucacuggcuccaau

SEQ ID NO: 1436285 - RNA, 19 nt, Homo sapiens
  misc_RNA (1)...(19): siRNA sense strand
guacagaucugaggucauc

SEQ ID NO: 1436286 - RNA, 19 nt, Homo sapiens
  misc_RNA (1)...(19): siRNA sense strand
aaaggacaaucguguagua

SEQ ID NO: 1436287 - RNA, 19 nt, Homo sapiens
  misc_RNA (1)...(19): siRNA sense strand
gcaggucucgcaugaauuu

SEQ ID NO: 1436288 - RNA, 19 nt, Homo sapiens
  misc_RNA (1)...(19): siRNA sense strand
caagaacucuggaacuauc

SEQ ID NO: 1436289 - RNA, 19 nt, Homo sapiens
  misc_RNA (1)...(19): siRNA sense strand
caacaggggucaaugagua

SEQ ID NO: 1436290 - RNA, 19 nt, Homo sapiens
  misc_RNA (1)...(19): siRNA sense strand
uacaagaacucuggaacua

SEQ ID NO: 1436291 - RNA, 19 nt, Homo sapiens
  misc_RNA (1)...(19): siRNA sense strand
gcugagggaugaugacuuc

SEQ ID NO: 1436292 - RNA, 19 nt, Homo sapiens
  misc_RNA (1)...(19): siRNA sense strand
gcaugaauuugccuugaau

SEQ ID NO: 1436293 - RNA, 19 nt, Homo sapiens
  misc_RNA (1)...(19): siRNA sense strand
gagggaugaugacuuccua

SEQ ID NO: 1436294 - RNA, 19 nt, Homo sapiens
  misc_RNA (1)...(19): siRNA sense strand
ggacaucggcuccaagucu

SEQ ID NO: 1436295 - RNA, 19 nt, Homo sapiens
  misc_RNA (1)...(19): siRNA sense strand
cgccagagcugagggauga

SEQ ID NO: 1436296 - RNA, 19 nt, Homo sapiens
  misc_RNA (1)...(19): siRNA sense strand
ggaacuauccgugucaaga

SEQ ID NO: 1436297 - RNA, 19 nt, Homo sapiens
  misc_RNA (1)...(19): siRNA sense strand
gaacuauccgugucaagau

SEQ ID NO: 1436298 - RNA, 19 nt, Homo sapiens
  misc_RNA (1)...(19): siRNA sense strand
caagauuugucggguagaa

SEQ ID NO: 1436299 - RNA, 19 nt, Homo sapiens
  misc_RNA (1)...(19): siRNA sense strand
gcagcgugguucaggacua

SEQ ID NO: 1436300 - RNA, 19 nt, Homo sapiens
  misc_RNA (1)...(19): siRNA sense strand
gcuguucccugcauuugga

SEQ ID NO: 1436301 - RNA, 19 nt, Homo sapiens
  misc_RNA (1)...(19): siRNA sense strand
agaaacagaguacuccuuu

SEQ ID NO: 1436302 - RNA, 19 nt, Homo sapiens
  misc_RNA (1)...(19): siRNA sense strand
gguagaggccagaaaccua

SEQ ID NO: 1436303 - RNA, 19 nt, Homo sapiens
  misc_RNA (1)...(19): siRNA sense strand
gugcaaugcuccgauuaug

SEQ ID NO: 1436304 - RNA, 19 nt, Homo sapiens
  misc_RNA (1)...(19): siRNA sense strand
uggcaggucucgcaugaau

SEQ ID NO: 1436305 - RNA, 19 nt, Homo sapiens
  misc_RNA (1)...(19): siRNA sense strand
ggacaaucguguaguaacc

SEQ ID NO: 1436306 - RNA, 19 nt, Homo sapiens
  misc_RNA (1)...(19): siRNA sense strand
cuauggcccuaccaacuuu

SEQ ID NO: 1436307 - RNA, 19 nt, Homo sapiens
  misc_RNA (1)...(19): siRNA sense strand
gaaugcauccacccugaga

SEQ ID NO: 1436308 - RNA, 19 nt, Homo sapiens
  misc_RNA (1)...(19): siRNA sense strand
gccagaaaccuagauaaga

SEQ ID NO: 1436309 - RNA, 19 nt, Homo sapiens
  misc_RNA (1)...(19): siRNA sense strand
gcuacgcuuuggaaucuau

SEQ ID NO: 1436310 - RNA, 19 nt, Homo sapiens
  misc_RNA (1)...(19): siRNA sense strand
gugaccaucucauugacaa

SEQ ID NO: 1436311 - RNA, 19 nt, Homo sapiens
  misc_RNA (1)...(19): siRNA sense strand
gaugggaggcugucagauc

SEQ ID NO: 1436312 - RNA, 19 nt, Homo sapiens
  misc_RNA (1)...(19): siRNA sense strand
gacaagcuguucccugcau

SEQ ID NO: 1436313 - RNA, 19 nt, Homo sapiens
  misc_RNA (1)...(19): siRNA sense strand
ggacugccucgcaauacuu

SEQ ID NO: 1436314 - RNA, 19 nt, Homo sapiens
  misc_RNA (1)...(19): siRNA sense strand
gacccacucugcguccuuu

SEQ ID NO: 1436315 - RNA, 19 nt, Homo sapiens
  misc_RNA (1)...(19): siRNA sense strand
caacuuugcacccaucauc

SEQ ID NO: 1436316 - RNA, 19 nt, Homo sapiens
  misc_RNA (1)...(19): siRNA sense strand
ccaugucagugaucauugu

SEQ ID NO: 1436317 - RNA, 19 nt, Homo sapiens
  misc_RNA (1)...(19): siRNA sense strand
gagcuuggccggacugaac

SEQ ID NO: 1436318 - RNA, 19 nt, Homo sapiens
  misc_RNA (1)...(19): siRNA sense strand
ccucgaaccugcccauguc

SEQ ID NO: 1436319 - RNA, 19 nt, Homo sapiens
  misc_RNA (1)...(19): siRNA sense strand
ggaauuaaaggacaaucgu

SEQ ID NO: 1436320 - RNA, 19 nt, Homo sapiens
  misc_RNA (1)...(19): siRNA sense strand
caggugcaaugcuccgauu

SEQ ID NO: 1436321 - RNA, 19 nt, Homo sapiens
  misc_RNA (1)...(19): siRNA sense strand
ucgcagaagugcccacaca

SEQ ID NO: 1436322 - RNA, 19 nt, Homo sapiens
  misc_RNA (1)...(19): siRNA sense strand
ucucagcucaggaauuaaa

SEQ ID NO: 1436323 - RNA, 19 nt, Homo sapiens
  misc_RNA (1)...(19): siRNA sense strand
aaacagaguacuccuuucu

SEQ ID NO: 1436324 - RNA, 19 nt, Homo sapiens
  misc_RNA (1)...(19): siRNA sense strand
cagcuugaguaccgcuuug

SEQ ID NO: 1436325 - RNA, 19 nt, Homo sapiens
  misc_RNA (1)...(19): siRNA sense strand
cacaacuggucucauacuu

SEQ ID NO: 1436326 - RNA, 19 nt, Homo sapiens
  misc_RNA (1)...(19): siRNA sense strand
cgcaauacuucaugcuguu

SEQ ID NO: 1436327 - RNA, 19 nt, Homo sapiens
  misc_RNA (1)...(19): siRNA sense strand
guacuccuuucuggacuau

SEQ ID NO: 1436328 - RNA, 19 nt, Homo sapiens
  misc_RNA (1)...(19): siRNA sense strand
gauuguguccagccaggua

SEQ ID NO: 1436329 - RNA, 19 nt, Homo sapiens
  misc_RNA (1)...(19): siRNA sense strand
ggagguagaggccagaaac

SEQ ID NO: 1436330 - RNA, 19 nt, Homo sapiens
  misc_RNA (1)...(19): siRNA sense strand
cgcaugaauuugccuugaa

SEQ ID NO: 1436331 - RNA, 19 nt, Homo sapiens
  misc_RNA (1)...(19): siRNA sense strand
ugguucagcuguccauuuc

SEQ ID NO: 1436332 - RNA, 19 nt, Homo sapiens
  misc_RNA (1)...(19): siRNA sense strand
cagcgugguucaggacuau

SEQ ID NO: 1436333 - RNA, 19 nt, Homo sapiens
  misc_RNA (1)...(19): siRNA sense strand
gaggccagaaaccuagaua

SEQ ID NO: 1436334 - RNA, 19 nt, Homo sapiens
  misc_RNA (1)...(19): siRNA sense strand
caagcuguucccugcauuu

SEQ ID NO: 1436335 - RNA, 19 nt, Homo sapiens
  misc_RNA (1)...(19): siRNA sense strand
ggucaaugaguaccugaug

SEQ ID NO: 1436336 - RNA, 19 nt, Homo sapiens
  misc_RNA (1)...(19): siRNA sense strand
cggcugaguuugaaugcau

SEQ ID NO: 1436337 - RNA, 19 nt, Homo sapiens
  misc_RNA (1)...(19): siRNA sense strand
ggcagucccggcugaguuu

SEQ ID NO: 1436338 - RNA, 19 nt, Homo sapiens
  misc_RNA (1)...(19): siRNA sense strand
cauggaagcguuucucagu

SEQ ID NO: 1436339 - RNA, 19 nt, Homo sapiens
  misc_RNA (1)...(19): siRNA sense strand
ggccagaaaccuagauaag

SEQ ID NO: 1436340 - RNA, 19 nt, Homo sapiens
  misc_RNA (1)...(19): siRNA sense strand
gcccugaguucuccaagac

SEQ ID NO: 1436341 - RNA, 19 nt, Homo sapiens
  misc_RNA (1)...(19): siRNA sense strand
uguggguggugcugacuuu

SEQ ID NO: 1436342 - RNA, 19 nt, Homo sapiens
  misc_RNA (1)...(19): siRNA sense strand
acaaggacaucggcuccaa

SEQ ID NO: 1436343 - RNA, 19 nt, Homo sapiens
  misc_RNA (1)...(19): siRNA sense strand
ccugugaccaucucauuga

SEQ ID NO: 1436344 - RNA, 19 nt, Homo sapiens
  misc_RNA (1)...(19): siRNA sense strand
ccgccagggugaugggaaa

SEQ ID NO: 1436345 - RNA, 19 nt, Homo sapiens
  misc_RNA (1)...(19): siRNA sense strand
gcagaagugcccacacaac

SEQ ID NO: 1436346 - RNA, 19 nt, Homo sapiens
  misc_RNA (1)...(19): siRNA sense strand
gcaauacuucaugcuguug

SEQ ID NO: 1436347 - RNA, 19 nt, Homo sapiens
  misc_RNA (1)...(19): siRNA sense strand
gcaggcauccagggcauug

SEQ ID NO: 1436348 - RNA, 19 nt, Homo sapiens
  misc_RNA (1)...(19): siRNA sense strand
ucgcaugaauuugccuuga

SEQ ID NO: 1436349 - RNA, 19 nt, Homo sapiens
  misc_RNA (1)...(19): siRNA sense strand
cuccaagacucuacagcuu

SEQ ID NO: 1436350 - RNA, 19 nt, Homo sapiens
  misc_RNA (1)...(19): siRNA sense strand
ggugcaaugcuccgauuau

SEQ ID NO: 1436351 - RNA, 19 nt, Homo sapiens
  misc_RNA (1)...(19): siRNA sense strand
gggacugccucgcaauacu

SEQ ID NO: 1436352 - RNA, 19 nt, Homo sapiens
  misc_RNA (1)...(19): siRNA sense strand
acuggcaggucucgcauga

SEQ ID NO: 1436353 - RNA, 19 nt, Homo sapiens
  misc_RNA (1)...(19): siRNA sense strand
ucaccugacucccuacacu

SEQ ID NO: 1436354 - RNA, 19 nt, Homo sapiens
  misc_RNA (1)...(19): siRNA sense strand
gcgacauugugcaguuugu

SEQ ID NO: 1436355 - RNA, 19 nt, Homo sapiens
  misc_RNA (1)...(19): siRNA sense strand
uaguaaccauggagguaga

SEQ ID NO: 1436356 - RNA, 19 nt, Homo sapiens
  misc_RNA (1)...(19): siRNA sense strand
gcccaugucagugaucauu

SEQ ID NO: 1436357 - RNA, 19 nt, Homo sapiens
  misc_RNA (1)...(19): siRNA sense strand
gaacaaccugaacccuaca

SEQ ID NO: 1436358 - RNA, 19 nt, Homo sapiens
  misc_RNA (1)...(19): siRNA sense strand
gaaaccuagauaagaagga

SEQ ID NO: 1436359 - RNA, 19 nt, Homo sapiens
  misc_RNA (1)...(19): siRNA sense strand
gcuuugagacaguccagaa

SEQ ID NO: 1436360 - RNA, 19 nt, Homo sapiens
  misc_RNA (1)...(19): siRNA sense strand
aacuauccgugucaagauu

SEQ ID NO: 1436361 - RNA, 19 nt, Homo sapiens
  misc_RNA (1)...(19): siRNA sense strand
agaccgugcucgcagaagu

SEQ ID NO: 1436362 - RNA, 19 nt, Homo sapiens
  misc_RNA (1)...(19): siRNA sense strand
ccgcgacauugugcaguuu

SEQ ID NO: 1436363 - RNA, 19 nt, Homo sapiens
  misc_RNA (1)...(19): siRNA sense strand
gaggcugucagaucaacuu

SEQ ID NO: 1436364 - RNA, 19 nt, Homo sapiens
  misc_RNA (1)...(19): siRNA sense strand
gcuuuggaaucuaugacau

SEQ ID NO: 1436365 - RNA, 19 nt, Homo sapiens
  misc_RNA (1)...(19): siRNA sense strand
cgacauugugcaguuugua

SEQ ID NO: 1436366 - RNA, 19 nt, Homo sapiens
  misc_RNA (1)...(19): siRNA sense strand
uguaguaaccauggaggua

SEQ ID NO: 1436367 - RNA, 19 nt, Homo sapiens
  misc_RNA (1)...(19): siRNA sense strand
gcugucagaucaacuucac

SEQ ID NO: 1436368 - RNA, 19 nt, Homo sapiens
  misc_RNA (1)...(19): siRNA sense strand
uuaaaggacaaucguguag

SEQ ID NO: 1436369 - RNA, 19 nt, Homo sapiens
  misc_RNA (1)...(19): siRNA sense strand
ucuauggcccuaccaacuu

SEQ ID NO: 1436370 - RNA, 19 nt, Homo sapiens
  misc_RNA (1)...(19): siRNA sense strand
augggaggcugucagauca

SEQ ID NO: 1436371 - RNA, 19 nt, Homo sapiens
  misc_RNA (1)...(19): siRNA sense strand
ccagggugaugggaaaugg

SEQ ID NO: 1436372 - RNA, 19 nt, Homo sapiens
  misc_RNA (1)...(19): siRNA sense strand
cagcucaggaauuaaagga

SEQ ID NO: 1436373 - RNA, 19 nt, Homo sapiens
  misc_RNA (1)...(19): siRNA sense strand
cagaagugcccacacaacu

SEQ ID NO: 1436374 - RNA, 19 nt, Homo sapiens
  misc_RNA (1)...(19): siRNA sense strand
acaagcuguucccugcauu

SEQ ID NO: 1436375 - RNA, 19 nt, Homo sapiens
  misc_RNA (1)...(19): siRNA sense strand
aagaaaagcuacaagaacu

SEQ ID NO: 1436376 - RNA, 19 nt, Homo sapiens
  misc_RNA (1)...(19): siRNA sense strand
gcauccacccugagaagca

SEQ ID NO: 1436377 - RNA, 19 nt, Homo sapiens
  misc_RNA (1)...(19): siRNA sense strand
acuccuuucuggacuaugu

SEQ ID NO: 1436378 - RNA, 19 nt, Homo sapiens
  misc_RNA (1)...(19): siRNA sense strand
ggguggugcugacuuugag

SEQ ID NO: 1436379 - RNA, 19 nt, Homo sapiens
  misc_RNA (1)...(19): siRNA sense strand
gaugaucacuuuccagaua

SEQ ID NO: 1436380 - RNA, 19 nt, Homo sapiens
  misc_RNA (1)...(19): siRNA sense strand
guacagagcuuccggaaag

SEQ ID NO: 1436381 - RNA, 19 nt, Homo sapiens
  misc_RNA (1)...(19): siRNA sense strand
ggacacaaaucacaaugaa

SEQ ID NO: 1436382 - RNA, 19 nt, Homo sapiens
  misc_RNA (1)...(19): siRNA sense strand
gaaaggcgcuagaauugau

SEQ ID NO: 1436383 - RNA, 19 nt, Homo sapiens
  misc_RNA (1)...(19): siRNA sense strand
ccagauugcucucuaauga

SEQ ID NO: 1436384 - RNA, 19 nt, Homo sapiens
  misc_RNA (1)...(19): siRNA sense strand
gaagaaagaagaaacaaga

SEQ ID NO: 1436385 - RNA, 19 nt, Homo sapiens
  misc_RNA (1)...(19): siRNA sense strand
agacaaagaugaagaugaa

SEQ ID NO: 1436386 - RNA, 19 nt, Homo sapiens
  misc_RNA (1)...(19): siRNA sense strand
gaagagaagguauaugaaa

SEQ ID NO: 1436387 - RNA, 19 nt, Homo sapiens
  misc_RNA (1)...(19): siRNA sense strand
gaauagaaaucuccacagu

SEQ ID NO: 1436388 - RNA, 19 nt, Homo sapiens
  misc_RNA (1)...(19): siRNA sense strand
gcaguugaauccauauuug

SEQ ID NO: 1436389 - RNA, 19 nt, Homo sapiens
  misc_RNA (1)...(19): siRNA sense strand
gaaaucuagugaaugauga

SEQ ID NO: 1436390 - RNA, 19 nt, Homo sapiens
  misc_RNA (1)...(19): siRNA sense strand
gcaguuguauguggaauuu

SEQ ID NO: 1436391 - RNA, 19 nt, Homo sapiens
  misc_RNA (1)...(19): siRNA sense strand
aaacugaacuugguguuaa

SEQ ID NO: 1436392 - RNA, 19 nt, Homo sapiens
  misc_RNA (1)...(19): siRNA sense strand
caagaaaggcgcuagaauu

SEQ ID NO: 1436393 - RNA, 19 nt, Homo sapiens
  misc_RNA (1)...(19): siRNA sense strand
gaaggaauuugucaaucuu

SEQ ID NO: 1436394 - RNA, 19 nt, Homo sapiens
  misc_RNA (1)...(19): siRNA sense strand
gaaugagguucuagaaaug

SEQ ID NO: 1436395 - RNA, 19 nt, Homo sapiens
  misc_RNA (1)...(19): siRNA sense strand
ugaaugagguucuagaaau

SEQ ID NO: 1436396 - RNA, 19 nt, Homo sapiens
  misc_RNA (1)...(19): siRNA sense strand
ggaaggaauuugucaaucu

SEQ ID NO: 1436397 - RNA, 19 nt, Homo sapiens
  misc_RNA (1)...(19): siRNA sense strand
gaaaaccacuuaucccuuu

SEQ ID NO: 1436398 - RNA, 19 nt, Homo sapiens
  misc_RNA (1)...(19): siRNA sense strand
caaugaaucucccuuaaag

SEQ ID NO: 1436399 - RNA, 19 nt, Homo sapiens
  misc_RNA (1)...(19): siRNA sense strand
uaacagaagagaagguaua

SEQ ID NO: 1436400 - RNA, 19 nt, Homo sapiens
  misc_RNA (1)...(19): siRNA sense strand
gaaacugaacuugguguua

SEQ ID NO: 1436401 - RNA, 19 nt, Homo sapiens
  misc_RNA (1)...(19): siRNA sense strand
cagaagagaagguauauga

SEQ ID NO: 1436402 - RNA, 19 nt, Homo sapiens
  misc_RNA (1)...(19): siRNA sense strand
ccaaugauguaugaucuaa

SEQ ID NO: 1436403 - RNA, 19 nt, Homo sapiens
  misc_RNA (1)...(19): siRNA sense strand
gacagcaguugaauccaua

SEQ ID NO: 1436404 - RNA, 19 nt, Homo sapiens
  misc_RNA (1)...(19): siRNA sense strand
ggauauugaugccauuaga

SEQ ID NO: 1436405 - RNA, 19 nt, Homo sapiens
  misc_RNA (1)...(19): siRNA sense strand
uaugacaugucccuuuaua

SEQ ID NO: 1436406 - RNA, 19 nt, Homo sapiens
  misc_RNA (1)...(19): siRNA sense strand
ugaagaagaugaugaagag

SEQ ID NO: 1436407 - RNA, 19 nt, Homo sapiens
  misc_RNA (1)...(19): siRNA sense strand
guagagaaagagaggauua

SEQ ID NO: 1436408 - RNA, 19 nt, Homo sapiens
  misc_RNA (1)...(19): siRNA sense strand
ugacaugucccuuuauauu

SEQ ID NO: 1436409 - RNA, 19 nt, Homo sapiens
  misc_RNA (1)...(19): siRNA sense strand
gucgaaaucuagugaauga

SEQ ID NO: 1436410 - RNA, 19 nt, Homo sapiens
  misc_RNA (1)...(19): siRNA sense strand
ggaagaagacucagaagca

SEQ ID NO: 1436411 - RNA, 19 nt, Homo sapiens
  misc_RNA (1)...(19): siRNA sense strand
gaagaagacucagaagcau

SEQ ID NO: 1436412 - RNA, 19 nt, Homo sapiens
  misc_RNA (1)...(19): siRNA sense strand
ggacagcaguugaauccau

SEQ ID NO: 1436413 - RNA, 19 nt, Homo sapiens
  misc_RNA (1)...(19): siRNA sense strand
gaauucgcauguacaguga

SEQ ID NO: 1436414 - RNA, 19 nt, Homo sapiens
  misc_RNA (1)...(19): siRNA sense strand
ugaaugcugucacaaagaa

SEQ ID NO: 1436415 - RNA, 19 nt, Homo sapiens
  misc_RNA (1)...(19): siRNA sense strand
gaugaugugucuguggaua

SEQ ID NO: 1436416 - RNA, 19 nt, Homo sapiens
  misc_RNA (1)...(19): siRNA sense strand
gggaaaucguucauucauu

SEQ ID NO: 1436417 - RNA, 19 nt, Homo sapiens
  misc_RNA (1)...(19): siRNA sense strand
ugagggagguguuuccaaa

SEQ ID NO: 1436418 - RNA, 19 nt, Homo sapiens
  misc_RNA (1)...(19): siRNA sense strand
ugacguaucacaauguaua

SEQ ID NO: 1436419 - RNA, 19 nt, Homo sapiens
  misc_RNA (1)...(19): siRNA sense strand
gaaugugacuugacguauc

SEQ ID NO: 1436420 - RNA, 19 nt, Homo sapiens
  misc_RNA (1)...(19): siRNA sense strand
gagaagguauaugaaauuc

SEQ ID NO: 1436421 - RNA, 19 nt, Homo sapiens
  misc_RNA (1)...(19): siRNA sense strand
gauguaugaucuaaaggaa

SEQ ID NO: 1436422 - RNA, 19 nt, Homo sapiens
  misc_RNA (1)...(19): siRNA sense strand
guaacccaaugauguauga

SEQ ID NO: 1436423 - RNA, 19 nt, Homo sapiens
  misc_RNA (1)...(19): siRNA sense strand
ugaagaagcaguuguaugu

SEQ ID NO: 1436424 - RNA, 19 nt, Homo sapiens
  misc_RNA (1)...(19): siRNA sense strand
gaaagaagaaacaagaaag

SEQ ID NO: 1436425 - RNA, 19 nt, Homo sapiens
  misc_RNA (1)...(19): siRNA sense strand
gagaugaucgcuauggaaa

SEQ ID NO: 1436426 - RNA, 19 nt, Homo sapiens
  misc_RNA (1)...(19): siRNA sense strand
gcacuuguccggcuagaga

SEQ ID NO: 1436427 - RNA, 19 nt, Homo sapiens
  misc_RNA (1)...(19): siRNA sense strand
gaaaugaagccugcacgaa

SEQ ID NO: 1436428 - RNA, 19 nt, Homo sapiens
  misc_RNA (1)...(19): siRNA sense strand
ggaauacucaagcaaagaa

SEQ ID NO: 1436429 - RNA, 19 nt, Homo sapiens
  misc_RNA (1)...(19): siRNA sense strand
uuuaugacaugucccuuua

SEQ ID NO: 1436430 - RNA, 19 nt, Homo sapiens
  misc_RNA (1)...(19): siRNA sense strand
cugacuacauucucaauaa

SEQ ID NO: 1436431 - RNA, 19 nt, Homo sapiens
  misc_RNA (1)...(19): siRNA sense strand
ggaaaauccugcagacuug

SEQ ID NO: 1436432 - RNA, 19 nt, Homo sapiens
  misc_RNA (1)...(19): siRNA sense strand
ucucauacuugcuuuaaug

SEQ ID NO: 1436433 - RNA, 19 nt, Homo sapiens
  misc_RNA (1)...(19): siRNA sense strand
agacucuucuugcaguuua

SEQ ID NO: 1436434 - RNA, 19 nt, Homo sapiens
  misc_RNA (1)...(19): siRNA sense strand
cagggacucuguucugauu

SEQ ID NO: 1436435 - RNA, 19 nt, Homo sapiens
  misc_RNA (1)...(19): siRNA sense strand
caccuaacguggaauguga

SEQ ID NO: 1436436 - RNA, 19 nt, Homo sapiens
  misc_RNA (1)...(19): siRNA sense strand
acacaaaucacaaugaaga

SEQ ID NO: 1436437 - RNA, 19 nt, Homo sapiens
  misc_RNA (1)...(19): siRNA sense strand
gguuuacuaugcaaaugua

SEQ ID NO: 1436438 - RNA, 19 nt, Homo sapiens
  misc_RNA (1)...(19): siRNA sense strand
cagcuuaccuugagaacuc

SEQ ID NO: 1436439 - RNA, 19 nt, Homo sapiens
  misc_RNA (1)...(19): siRNA sense strand
ggagguguuuccaaagaau

SEQ ID NO: 1436440 - RNA, 19 nt, Homo sapiens
  misc_RNA (1)...(19): siRNA sense strand
gacaauagaauucgcaugu

SEQ ID NO: 1436441 - RNA, 19 nt, Homo sapiens
  misc_RNA (1)...(19): siRNA sense strand
uuaaugaaccacugaauga

SEQ ID NO: 1436442 - RNA, 19 nt, Homo sapiens
  misc_RNA (1)...(19): siRNA sense strand
gagaaagagaggauuauuc

SEQ ID NO: 1436443 - RNA, 19 nt, Homo sapiens
  misc_RNA (1)...(19): siRNA sense strand
gaacaagaaaggcgcuaga

SEQ ID NO: 1436444 - RNA, 19 nt, Homo sapiens
  misc_RNA (1)...(19): siRNA sense strand
caacuccugcucugagaua

SEQ ID NO: 1436445 - RNA, 19 nt, Homo sapiens
  misc_RNA (1)...(19): siRNA sense strand
gaauaugacgguggcuaua

SEQ ID NO: 1436446 - RNA, 19 nt, Homo sapiens
  misc_RNA (1)...(19): siRNA sense strand
acaugucccuuuauauuga

SEQ ID NO: 1436447 - RNA, 19 nt, Homo sapiens
  misc_RNA (1)...(19): siRNA sense strand
gcaaagcgaugagcaagcu

SEQ ID NO: 1436448 - RNA, 19 nt, Homo sapiens
  misc_RNA (1)...(19): siRNA sense strand
caaugcacuuguauauuug

SEQ ID NO: 1436449 - RNA, 19 nt, Homo sapiens
  misc_RNA (1)...(19): siRNA sense strand
agauugcucucuaaugaaa

SEQ ID NO: 1436450 - RNA, 19 nt, Homo sapiens
  misc_RNA (1)...(19): siRNA sense strand
ggagacaacaauuugcaaa

SEQ ID NO: 1436451 - RNA, 19 nt, Homo sapiens
  misc_RNA (1)...(19): siRNA sense strand
caauagaauucgcauguac

SEQ ID NO: 1436452 - RNA, 19 nt, Homo sapiens
  misc_RNA (1)...(19): siRNA sense strand
gaaaaugguuuacuaugca

SEQ ID NO: 1436453 - RNA, 19 nt, Homo sapiens
  misc_RNA (1)...(19): siRNA sense strand
aagaaaggcgcuagaauug

SEQ ID NO: 1436454 - RNA, 19 nt, Homo sapiens
  misc_RNA (1)...(19): siRNA sense strand
ccaaugaaucucccuuaaa

SEQ ID NO: 1436455 - RNA, 19 nt, Homo sapiens
  misc_RNA (1)...(19): siRNA sense strand
gcgagcagcugcaaagcau

SEQ ID NO: 1436456 - RNA, 19 nt, Homo sapiens
  misc_RNA (1)...(19): siRNA sense strand
gacaugucccuuuauauug

SEQ ID NO: 1436457 - RNA, 19 nt, Homo sapiens
  misc_RNA (1)...(19): siRNA sense strand
ggagacauuucagcaacuu

SEQ ID NO: 1436458 - RNA, 19 nt, Homo sapiens
  misc_RNA (1)...(19): siRNA sense strand
ugacuuacuuaacagaaga

SEQ ID NO: 1436459 - RNA, 19 nt, Homo sapiens
  misc_RNA (1)...(19): siRNA sense strand
ccacaguccugaauaucug

SEQ ID NO: 1436460 - RNA, 19 nt, Homo sapiens
  misc_RNA (1)...(19): siRNA sense strand
gaccaaugaaucucccuua

SEQ ID NO: 1436461 - RNA, 19 nt, Homo sapiens
  misc_RNA (1)...(19): siRNA sense strand
gguuuaauccaucuucuuu

SEQ ID NO: 1436462 - RNA, 19 nt, Homo sapiens
  misc_RNA (1)...(19): siRNA sense strand
ggcuagagaugaucgcuau

SEQ ID NO: 1436463 - RNA, 19 nt, Homo sapiens
  misc_RNA (1)...(19): siRNA sense strand
gaaguggacacaaaucaca

SEQ ID NO: 1436464 - RNA, 19 nt, Homo sapiens
  misc_RNA (1)...(19): siRNA sense strand
aggaagaacugaaaucucu

SEQ ID NO: 1436465 - RNA, 19 nt, Homo sapiens
  misc_RNA (1)...(19): siRNA sense strand
uacugggucuggcuauuua

SEQ ID NO: 1436466 - RNA, 19 nt, Homo sapiens
  misc_RNA (1)...(19): siRNA sense strand
gggagguguuuccaaagaa

SEQ ID NO: 1436467 - RNA, 19 nt, Homo sapiens
  misc_RNA (1)...(19): siRNA sense strand
acaauagaauucgcaugua

SEQ ID NO: 1436468 - RNA, 19 nt, Homo sapiens
  misc_RNA (1)...(19): siRNA sense strand
uaacguggaaugugacuug

SEQ ID NO: 1436469 - RNA, 19 nt, Homo sapiens
  misc_RNA (1)...(19): siRNA sense strand
ggagaagaaagaagaaaca

SEQ ID NO: 1436470 - RNA, 19 nt, Homo sapiens
  misc_RNA (1)...(19): siRNA sense strand
guucauucauuuacagaug

SEQ ID NO: 1436471 - RNA, 19 nt, Homo sapiens
  misc_RNA (1)...(19): siRNA sense strand
gaagcgagcagcugcaaag

SEQ ID NO: 1436472 - RNA, 19 nt, Homo sapiens
  misc_RNA (1)...(19): siRNA sense strand
gaagagcccaucccugagu

SEQ ID NO: 1436473 - RNA, 19 nt, Homo sapiens
  misc_RNA (1)...(19): siRNA sense strand
uuaccuacaucucauacuu

SEQ ID NO: 1436474 - RNA, 19 nt, Homo sapiens
  misc_RNA (1)...(19): siRNA sense strand
gaagaaacuacagaauaug

SEQ ID NO: 1436475 - RNA, 19 nt, Homo sapiens
  misc_RNA (1)...(19): siRNA sense strand
aagggaauguggaagauga

SEQ ID NO: 1436476 - RNA, 19 nt, Homo sapiens
  misc_RNA (1)...(19): siRNA sense strand
guacugggucuggcuauuu

SEQ ID NO: 1436477 - RNA, 19 nt, Homo sapiens
  misc_RNA (1)...(19): siRNA sense strand
ggaauuugaaggagaacaa

SEQ ID NO: 1436478 - RNA, 19 nt, Homo sapiens
  misc_RNA (1)...(19): siRNA sense strand
aaaguuagacgugaccaua

SEQ ID NO: 1436479 - RNA, 19 nt, Homo sapiens
  misc_RNA (1)...(19): siRNA sense strand
gaugaucacuuuccagaua

SEQ ID NO: 1436480 - RNA, 19 nt, Homo sapiens
  misc_RNA (1)...(19): siRNA sense strand
guacagagcuuccggaaag

SEQ ID NO: 1436481 - RNA, 19 nt, Homo sapiens
  misc_RNA (1)...(19): siRNA sense strand
ggacacaaaucacaaugaa

SEQ ID NO: 1436482 - RNA, 19 nt, Homo sapiens
  misc_RNA (1)...(19): siRNA sense strand
gaaaggcgcuagaauugau

SEQ ID NO: 1436483 - RNA, 19 nt, Homo sapiens
  misc_RNA (1)...(19): siRNA sense strand
ccagauugcucucuaauga

SEQ ID NO: 1436484 - RNA, 19 nt, Homo sapiens
  misc_RNA (1)...(19): siRNA sense strand
gaagaaagaagaaacaaga

SEQ ID NO: 1436485 - RNA, 19 nt, Homo sapiens
  misc_RNA (1)...(19): siRNA sense strand
agacaaagaugaagaugaa

SEQ ID NO: 1436486 - RNA, 19 nt, Homo sapiens
  misc_RNA (1)...(19): siRNA sense strand
gaagagaagguauaugaaa

SEQ ID NO: 1436487 - RNA, 19 nt, Homo sapiens
  misc_RNA (1)...(19): siRNA sense strand
gaauagaaaucuccacagu

SEQ ID NO: 1436488 - RNA, 19 nt, Homo sapiens
  misc_RNA (1)...(19): siRNA sense strand
gcaguugaauccauauuug

SEQ ID NO: 1436489 - RNA, 19 nt, Homo sapiens
  misc_RNA (1)...(19): siRNA sense strand
gaaaucuagugaaugauga

SEQ ID NO: 1436490 - RNA, 19 nt, Homo sapiens
  misc_RNA (1)...(19): siRNA sense strand
gcaguuguauguggaauuu

SEQ ID NO: 1436491 - RNA, 19 nt, Homo sapiens
  misc_RNA (1)...(19): siRNA sense strand
aaacugaacuugguguuaa

SEQ ID NO: 1436492 - RNA, 19 nt, Homo sapiens
  misc_RNA (1)...(19): siRNA sense strand
caagaaaggcgcuagaauu

SEQ ID NO: 1436493 - RNA, 19 nt, Homo sapiens
  misc_RNA (1)...(19): siRNA sense strand
gaaggaauuugucaaucuu

SEQ ID NO: 1436494 - RNA, 19 nt, Homo sapiens
  misc_RNA (1)...(19): siRNA sense strand
gaaugagguucuagaaaug

SEQ ID NO: 1436495 - RNA, 19 nt, Homo sapiens
  misc_RNA (1)...(19): siRNA sense strand
ugaaugagguucuagaaau

SEQ ID NO: 1436496 - RNA, 19 nt, Homo sapiens
  misc_RNA (1)...(19): siRNA sense strand
ggaaggaauuugucaaucu

SEQ ID NO: 1436497 - RNA, 19 nt, Homo sapiens
  misc_RNA (1)...(19): siRNA sense strand
gaaaaccacuuaucccuuu

SEQ ID NO: 1436498 - RNA, 19 nt, Homo sapiens
  misc_RNA (1)...(19): siRNA sense strand
caaugaaucucccuuaaag

SEQ ID NO: 1436499 - RNA, 19 nt, Homo sapiens
  misc_RNA (1)...(19): siRNA sense strand
uaacagaagagaagguaua

SEQ ID NO: 1436500 - RNA, 19 nt, Homo sapiens
  misc_RNA (1)...(19): siRNA sense strand
gaaacugaacuugguguua

SEQ ID NO: 1436501 - RNA, 19 nt, Homo sapiens
  misc_RNA (1)...(19): siRNA sense strand
cagaagagaagguauauga

SEQ ID NO: 1436502 - RNA, 19 nt, Homo sapiens
  misc_RNA (1)...(19): siRNA sense strand
ccaaugauguaugaucuaa

SEQ ID NO: 1436503 - RNA, 19 nt, Homo sapiens
  misc_RNA (1)...(19): siRNA sense strand
gacagcaguugaauccaua

SEQ ID NO: 1436504 - RNA, 19 nt, Homo sapiens
  misc_RNA (1)...(19): siRNA sense strand
ggauauugaugccauuaga

SEQ ID NO: 1436505 - RNA, 19 nt, Homo sapiens
  misc_RNA (1)...(19): siRNA sense strand
uaugacaugucccuuuaua

SEQ ID NO: 1436506 - RNA, 19 nt, Homo sapiens
  misc_RNA (1)...(19): siRNA sense strand
ugaagaagaugaugaagag

SEQ ID NO: 1436507 - RNA, 19 nt, Homo sapiens
  misc_RNA (1)...(19): siRNA sense strand
guagagaaagagaggauua

SEQ ID NO: 1436508 - RNA, 19 nt, Homo sapiens
  misc_RNA (1)...(19): siRNA sense strand
ugacaugucccuuuauauu

SEQ ID NO: 1436509 - RNA, 19 nt, Homo sapiens
  misc_RNA (1)...(19): siRNA sense strand
gucgaaaucuagugaauga

SEQ ID NO: 1436510 - RNA, 19 nt, Homo sapiens
  misc_RNA (1)...(19): siRNA sense strand
ggaagaagacucagaagca

SEQ ID NO: 1436511 - RNA, 19 nt, Homo sapiens
  misc_RNA (1)...(19): siRNA sense strand
gaagaagacucagaagcau

SEQ ID NO: 1436512 - RNA, 19 nt, Homo sapiens
  misc_RNA (1)...(19): siRNA sense strand
ggacagcaguugaauccau

SEQ ID NO: 1436513 - RNA, 19 nt, Homo sapiens
  misc_RNA (1)...(19): siRNA sense strand
gaauucgcauguacaguga

SEQ ID NO: 1436514 - RNA, 19 nt, Homo sapiens
  misc_RNA (1)...(19): siRNA sense strand
ugaaugcugucacaaagaa

SEQ ID NO: 1436515 - RNA, 19 nt, Homo sapiens
  misc_RNA (1)...(19): siRNA sense strand
gaugaugugucuguggaua

SEQ ID NO: 1436516 - RNA, 19 nt, Homo sapiens
  misc_RNA (1)...(19): siRNA sense strand
gggaaaucguucauucauu

SEQ ID NO: 1436517 - RNA, 19 nt, Homo sapiens
  misc_RNA (1)...(19): siRNA sense strand
ugagggagguguuuccaaa

SEQ ID NO: 1436518 - RNA, 19 nt, Homo sapiens
  misc_RNA (1)...(19): siRNA sense strand
ugacguaucacaauguaua

SEQ ID NO: 1436519 - RNA, 19 nt, Homo sapiens
  misc_RNA (1)...(19): siRNA sense strand
gaaugugacuugacguauc

SEQ ID NO: 1436520 - RNA, 19 nt, Homo sapiens
  misc_RNA (1)...(19): siRNA sense strand
gagaagguauaugaaauuc

SEQ ID NO: 1436521 - RNA, 19 nt, Homo sapiens
  misc_RNA (1)...(19): siRNA sense strand
gauguaugaucuaaaggaa

SEQ ID NO: 1436522 - RNA, 19 nt, Homo sapiens
  misc_RNA (1)...(19): siRNA sense strand
guaacccaaugauguauga

SEQ ID NO: 1436523 - RNA, 19 nt, Homo sapiens
  misc_RNA (1)...(19): siRNA sense strand
ugaagaagcaguuguaugu

SEQ ID NO: 1436524 - RNA, 19 nt, Homo sapiens
  misc_RNA (1)...(19): siRNA sense strand
gaaagaagaaacaagaaag

SEQ ID NO: 1436525 - RNA, 19 nt, Homo sapiens
  misc_RNA (1)...(19): siRNA sense strand
gagaugaucgcuauggaaa

SEQ ID NO: 1436526 - RNA, 19 nt, Homo sapiens
  misc_RNA (1)...(19): siRNA sense strand
gcacuuguccggcuagaga

SEQ ID NO: 1436527 - RNA, 19 nt, Homo sapiens
  misc_RNA (1)...(19): siRNA sense strand
gaaaugaagccugcacgaa

SEQ ID NO: 1436528 - RNA, 19 nt, Homo sapiens
  misc_RNA (1)...(19): siRNA sense strand
ggaauacucaagcaaagaa

SEQ ID NO: 1436529 - RNA, 19 nt, Homo sapiens
  misc_RNA (1)...(19): siRNA sense strand
uuuaugacaugucccuuua

SEQ ID NO: 1436530 - RNA, 19 nt, Homo sapiens
  misc_RNA (1)...(19): siRNA sense strand
cugacuacauucucaauaa

SEQ ID NO: 1436531 - RNA, 19 nt, Homo sapiens
  misc_RNA (1)...(19): siRNA sense strand
ggaaaauccugcagacuug

SEQ ID NO: 1436532 - RNA, 19 nt, Homo sapiens
  misc_RNA (1)...(19): siRNA sense strand
ucucauacuugcuuuaaug

SEQ ID NO: 1436533 - RNA, 19 nt, Homo sapiens
  misc_RNA (1)...(19): siRNA sense strand
agacucuucuugcaguuua

SEQ ID NO: 1436534 - RNA, 19 nt, Homo sapiens
  misc_RNA (1)...(19): siRNA sense strand
cagggacucuguucugauu

SEQ ID NO: 1436535 - RNA, 19 nt, Homo sapiens
  misc_RNA (1)...(19): siRNA sense strand
caccuaacguggaauguga

SEQ ID NO: 1436536 - RNA, 19 nt, Homo sapiens
  misc_RNA (1)...(19): siRNA sense strand
acacaaaucacaaugaaga

SEQ ID NO: 1436537 - RNA, 19 nt, Homo sapiens
  misc_RNA (1)...(19): siRNA sense strand
gguuuacuaugcaaaugua

SEQ ID NO: 1436538 - RNA, 19 nt, Homo sapiens
  misc_RNA (1)...(19): siRNA sense strand
cagcuuaccuugagaacuc

SEQ ID NO: 1436539 - RNA, 19 nt, Homo sapiens
  misc_RNA (1)...(19): siRNA sense strand
ggagguguuuccaaagaau

SEQ ID NO: 1436540 - RNA, 19 nt, Homo sapiens
  misc_RNA (1)...(19): siRNA sense strand
gacaauagaauucgcaugu

SEQ ID NO: 1436541 - RNA, 19 nt, Homo sapiens
  misc_RNA (1)...(19): siRNA sense strand
uuaaugaaccacugaauga

SEQ ID NO: 1436542 - RNA, 19 nt, Homo sapiens
  misc_RNA (1)...(19): siRNA sense strand
gagaaagagaggauuauuc

SEQ ID NO: 1436543 - RNA, 19 nt, Homo sapiens
  misc_RNA (1)...(19): siRNA sense strand
gaacaagaaaggcgcuaga

SEQ ID NO: 1436544 - RNA, 19 nt, Homo sapiens
  misc_RNA (1)...(19): siRNA sense strand
caacuccugcucugagaua

SEQ ID NO: 1436545 - RNA, 19 nt, Homo sapiens
  misc_RNA (1)...(19): siRNA sense strand
gaauaugacgguggcuaua

SEQ ID NO: 1436546 - RNA, 19 nt, Homo sapiens
  misc_RNA (1)...(19): siRNA sense strand
acaugucccuuuauauuga

SEQ ID NO: 1436547 - RNA, 19 nt, Homo sapiens
  misc_RNA (1)...(19): siRNA sense strand
gcaaagcgaugagcaagcu

SEQ ID NO: 1436548 - RNA, 19 nt, Homo sapiens
  misc_RNA (1)...(19): siRNA sense strand
caaugcacuuguauauuug

SEQ ID NO: 1436549 - RNA, 19 nt, Homo sapiens
  misc_RNA (1)...(19): siRNA sense strand
agauugcucucuaaugaaa

SEQ ID NO: 1436550 - RNA, 19 nt, Homo sapiens
  misc_RNA (1)...(19): siRNA sense strand
ggagacaacaauuugcaaa

SEQ ID NO: 1436551 - RNA, 19 nt, Homo sapiens
  misc_RNA (1)...(19): siRNA sense strand
caauagaauucgcauguac

SEQ ID NO: 1436552 - RNA, 19 nt, Homo sapiens
  misc_RNA (1)...(19): siRNA sense strand
gaaaaugguuuacuaugca

SEQ ID NO: 1436553 - RNA, 19 nt, Homo sapiens
  misc_RNA (1)...(19): siRNA sense strand
aagaaaggcgcuagaauug

SEQ ID NO: 1436554 - RNA, 19 nt, Homo sapiens
  misc_RNA (1)...(19): siRNA sense strand
ccaaugaaucucccuuaaa

SEQ ID NO: 1436555 - RNA, 19 nt, Homo sapiens
  misc_RNA (1)...(19): siRNA sense strand
gacaugucccuuuauauug

SEQ ID NO: 1436556 - RNA, 19 nt, Homo sapiens
  misc_RNA (1)...(19): siRNA sense strand
ggagacauuucagcaacuu

SEQ ID NO: 1436557 - RNA, 19 nt, Homo sapiens
  misc_RNA (1)...(19): siRNA sense strand
gcgagcagcugcaaagcau

SEQ ID NO: 1436558 - RNA, 19 nt, Homo sapiens
  misc_RNA (1)...(19): siRNA sense strand
ugacuuacuuaacagaaga

SEQ ID NO: 1436559 - RNA, 19 nt, Homo sapiens
  misc_RNA (1)...(19): siRNA sense strand
ccacaguccugaauaucug

SEQ ID NO: 1436560 - RNA, 19 nt, Homo sapiens
  misc_RNA (1)...(19): siRNA sense strand
gaccaaugaaucucccuua

SEQ ID NO: 1436561 - RNA, 19 nt, Homo sapiens
  misc_RNA (1)...(19): siRNA sense strand
gguuuaauccaucuucuuu

SEQ ID NO: 1436562 - RNA, 19 nt, Homo sapiens
  misc_RNA (1)...(19): siRNA sense strand
ggcuagagaugaucgcuau

SEQ ID NO: 1436563 - RNA, 19 nt, Homo sapiens
  misc_RNA (1)...(19): siRNA sense strand
gaaguggacacaaaucaca

SEQ ID NO: 1436564 - RNA, 19 nt, Homo sapiens
  misc_RNA (1)...(19): siRNA sense strand
aggaagaacugaaaucucu

SEQ ID NO: 1436565 - RNA, 19 nt, Homo sapiens
  misc_RNA (1)...(19): siRNA sense strand
uacugggucuggcuauuua

SEQ ID NO: 1436566 - RNA, 19 nt, Homo sapiens
  misc_RNA (1)...(19): siRNA sense strand
gggagguguuuccaaagaa

SEQ ID NO: 1436567 - RNA, 19 nt, Homo sapiens
  misc_RNA (1)...(19): siRNA sense strand
acaauagaauucgcaugua

SEQ ID NO: 1436568 - RNA, 19 nt, Homo sapiens
  misc_RNA (1)...(19): siRNA sense strand
uaacguggaaugugacuug

SEQ ID NO: 1436569 - RNA, 19 nt, Homo sapiens
  misc_RNA (1)...(19): siRNA sense strand
ggagaagaaagaagaaaca

SEQ ID NO: 1436570 - RNA, 19 nt, Homo sapiens
  misc_RNA (1)...(19): siRNA sense strand
guucauucauuuacagaug

SEQ ID NO: 1436571 - RNA, 19 nt, Homo sapiens
  misc_RNA (1)...(19): siRNA sense strand
gaagcgagcagcugcaaag

SEQ ID NO: 1436572 - RNA, 19 nt, Homo sapiens
  misc_RNA (1)...(19): siRNA sense strand
gaagagcccaucccugagu

SEQ ID NO: 1436573 - RNA, 19 nt, Homo sapiens
  misc_RNA (1)...(19): siRNA sense strand
uuaccuacaucucauacuu

SEQ ID NO: 1436574 - RNA, 19 nt, Homo sapiens
  misc_RNA (1)...(19): siRNA sense strand
gaagaaacuacagaauaug

SEQ ID NO: 1436575 - RNA, 19 nt, Homo sapiens
  misc_RNA (1)...(19): siRNA sense strand
aagggaauguggaagauga

SEQ ID NO: 1436576 - RNA, 19 nt, Homo sapiens
  misc_RNA (1)...(19): siRNA sense strand
guacugggucuggcuauuu

SEQ ID NO: 1436577 - RNA, 19 nt, Homo sapiens
  misc_RNA (1)...(19): siRNA sense strand
ggaauuugaaggagaacaa

SEQ ID NO: 1436578 - RNA, 19 nt, Homo sapiens
  misc_RNA (1)...(19): siRNA sense strand
aaaguuagacgugaccaua

SEQ ID NO: 1436579 - RNA, 19 nt, Homo sapiens
  misc_RNA (1)...(19): siRNA sense strand
gaugaucacuuuccagaua

SEQ ID NO: 1436580 - RNA, 19 nt, Homo sapiens
  misc_RNA (1)...(19): siRNA sense strand
guacagagcuuccggaaag

SEQ ID NO: 1436581 - RNA, 19 nt, Homo sapiens
  misc_RNA (1)...(19): siRNA sense strand
ggacacaaaucacaaugaa

SEQ ID NO: 1436582 - RNA, 19 nt, Homo sapiens
  misc_RNA (1)...(19): siRNA sense strand
gaaaggcgcuagaauugau

SEQ ID NO: 1436583 - RNA, 19 nt, Homo sapiens
  misc_RNA (1)...(19): siRNA sense strand
ccagauugcucucuaauga

SEQ ID NO: 1436584 - RNA, 19 nt, Homo sapiens
  misc_RNA (1)...(19): siRNA sense strand
gaagaaagaagaaacaaga

SEQ ID NO: 1436585 - RNA, 19 nt, Homo sapiens
  misc_RNA (1)...(19): siRNA sense strand
agacaaagaugaagaugaa

SEQ ID NO: 1436586 - RNA, 19 nt, Homo sapiens
  misc_RNA (1)...(19): siRNA sense strand
gaagagaagguauaugaaa

SEQ ID NO: 1436587 - RNA, 19 nt, Homo sapiens
  misc_RNA (1)...(19): siRNA sense strand
gaauagaaaucuccacagu

SEQ ID NO: 1436588 - RNA, 19 nt, Homo sapiens
  misc_RNA (1)...(19): siRNA sense strand
gcaguugaauccauauuug

SEQ ID NO: 1436589 - RNA, 19 nt, Homo sapiens
  misc_RNA (1)...(19): siRNA sense strand
gaaaucuagugaaugauga

SEQ ID NO: 1436590 - RNA, 19 nt, Homo sapiens
  misc_RNA (1)...(19): siRNA sense strand
gcaguuguauguggaauuu

SEQ ID NO: 1436591 - RNA, 19 nt, Homo sapiens
  misc_RNA (1)...(19): siRNA sense strand
aaacugaacuugguguuaa

SEQ ID NO: 1436592 - RNA, 19 nt, Homo sapiens
  misc_RNA (1)...(19): siRNA sense strand
caagaaaggcgcuagaauu

SEQ ID NO: 1436593 - RNA, 19 nt, Homo sapiens
  misc_RNA (1)...(19): siRNA sense strand
gaaggaauuugucaaucuu

SEQ ID NO: 1436594 - RNA, 19 nt, Homo sapiens
  misc_RNA (1)...(19): siRNA sense strand
gaaugagguucuagaaaug

SEQ ID NO: 1436595 - RNA, 19 nt, Homo sapiens
  misc_RNA (1)...(19): siRNA sense strand
ugaaugagguucuagaaau

SEQ ID NO: 1436596 - RNA, 19 nt, Homo sapiens
  misc_RNA (1)...(19): siRNA sense strand
ggaaggaauuugucaaucu

SEQ ID NO: 1436597 - RNA, 19 nt, Homo sapiens
  misc_RNA (1)...(19): siRNA sense strand
gaaaaccacuuaucccuuu

SEQ ID NO: 1436598 - RNA, 19 nt, Homo sapiens
  misc_RNA (1)...(19): siRNA sense strand
caaugaaucucccuuaaag

SEQ ID NO: 1436599 - RNA, 19 nt, Homo sapiens
  misc_RNA (1)...(19): siRNA sense strand
uaacagaagagaagguaua

SEQ ID NO: 1436600 - RNA, 19 nt, Homo sapiens
  misc_RNA (1)...(19): siRNA sense strand
gaaacugaacuugguguua

SEQ ID NO: 1436601 - RNA, 19 nt, Homo sapiens
  misc_RNA (1)...(19): siRNA sense strand
cagaagagaagguauauga

SEQ ID NO: 1436602 - RNA, 19 nt, Homo sapiens
  misc_RNA (1)...(19): siRNA sense strand
ccaaugauguaugaucuaa

SEQ ID NO: 1436603 - RNA, 19 nt, Homo sapiens
  misc_RNA (1)...(19): siRNA sense strand
gacagcaguugaauccaua

SEQ ID NO: 1436604 - RNA, 19 nt, Homo sapiens
  misc_RNA (1)...(19): siRNA sense strand
ggauauugaugccauuaga

SEQ ID NO: 1436605 - RNA, 19 nt, Homo sapiens
  misc_RNA (1)...(19): siRNA sense strand
uaugacaugucccuuuaua

SEQ ID NO: 1436606 - RNA, 19 nt, Homo sapiens
  misc_RNA (1)...(19): siRNA sense strand
ugaagaagaugaugaagag

SEQ ID NO: 1436607 - RNA, 19 nt, Homo sapiens
  misc_RNA (1)...(19): siRNA sense strand
guagagaaagagaggauua

SEQ ID NO: 1436608 - RNA, 19 nt, Homo sapiens
  misc_RNA (1)...(19): siRNA sense strand
ugacaugucccuuuauauu

SEQ ID NO: 1436609 - RNA, 19 nt, Homo sapiens
  misc_RNA (1)...(19): siRNA sense strand
gucgaaaucuagugaauga

SEQ ID NO: 1436610 - RNA, 19 nt, Homo sapiens
  misc_RNA (1)...(19): siRNA sense strand
ggaagaagacucagaagca

SEQ ID NO: 1436611 - RNA, 19 nt, Homo sapiens
  misc_RNA (1)...(19): siRNA sense strand
gaagaagacucagaagcau

SEQ ID NO: 1436612 - RNA, 19 nt, Homo sapiens
  misc_RNA (1)...(19): siRNA sense strand
ggacagcaguugaauccau

SEQ ID NO: 1436613 - RNA, 19 nt, Homo sapiens
  misc_RNA (1)...(19): siRNA sense strand
gaauucgcauguacaguga

SEQ ID NO: 1436614 - RNA, 19 nt, Homo sapiens
  misc_RNA (1)...(19): siRNA sense strand
ugaaugcugucacaaagaa

SEQ ID NO: 1436615 - RNA, 19 nt, Homo sapiens
  misc_RNA (1)...(19): siRNA sense strand
gaugaugugucuguggaua

SEQ ID NO: 1436616 - RNA, 19 nt, Homo sapiens
  misc_RNA (1)...(19): siRNA sense strand
gggaaaucguucauucauu

SEQ ID NO: 1436617 - RNA, 19 nt, Homo sapiens
  misc_RNA (1)...(19): siRNA sense strand
ugagggagguguuuccaaa

SEQ ID NO: 1436618 - RNA, 19 nt, Homo sapiens
  misc_RNA (1)...(19): siRNA sense strand
ugacguaucacaauguaua

SEQ ID NO: 1436619 - RNA, 19 nt, Homo sapiens
  misc_RNA (1)...(19): siRNA sense strand
gaaugugacuugacguauc

SEQ ID NO: 1436620 - RNA, 19 nt, Homo sapiens
  misc_RNA (1)...(19): siRNA sense strand
gagaagguauaugaaauuc

SEQ ID NO: 1436621 - RNA, 19 nt, Homo sapiens
  misc_RNA (1)...(19): siRNA sense strand
gauguaugaucuaaaggaa

SEQ ID NO: 1436622 - RNA, 19 nt, Homo sapiens
  misc_RNA (1)...(19): siRNA sense strand
guaacccaaugauguauga

SEQ ID NO: 1436623 - RNA, 19 nt, Homo sapiens
  misc_RNA (1)...(19): siRNA sense strand
ugaagaagcaguuguaugu

SEQ ID NO: 1436624 - RNA, 19 nt, Homo sapiens
  misc_RNA (1)...(19): siRNA sense strand
gaaagaagaaacaagaaag

SEQ ID NO: 1436625 - RNA, 19 nt, Homo sapiens
  misc_RNA (1)...(19): siRNA sense strand
gagaugaucgcuauggaaa

SEQ ID NO: 1436626 - RNA, 19 nt, Homo sapiens
  misc_RNA (1)...(19): siRNA sense strand
gcacuuguccggcuagaga

SEQ ID NO: 1436627 - RNA, 19 nt, Homo sapiens
  misc_RNA (1)...(19): siRNA sense strand
gaaaugaagccugcacgaa

SEQ ID NO: 1436628 - RNA, 19 nt, Homo sapiens
  misc_RNA (1)...(19): siRNA sense strand
ggaauacucaagcaaagaa

SEQ ID NO: 1436629 - RNA, 19 nt, Homo sapiens
  misc_RNA (1)...(19): siRNA sense strand
uuuaugacaugucccuuua

SEQ ID NO: 1436630 - RNA, 19 nt, Homo sapiens
  misc_RNA (1)...(19): siRNA sense strand
cugacuacauucucaauaa

SEQ ID NO: 1436631 - RNA, 19 nt, Homo sapiens
  misc_RNA (1)...(19): siRNA sense strand
ggaaaauccugcagacuug

SEQ ID NO: 1436632 - RNA, 19 nt, Homo sapiens
  misc_RNA (1)...(19): siRNA sense strand
ucucauacuugcuuuaaug

SEQ ID NO: 1436633 - RNA, 19 nt, Homo sapiens
  misc_RNA (1)...(19): siRNA sense strand
agacucuucuugcaguuua

SEQ ID NO: 1436634 - RNA, 19 nt, Homo sapiens
  misc_RNA (1)...(19): siRNA sense strand
cagggacucuguucugauu

SEQ ID NO: 1436635 - RNA, 19 nt, Homo sapiens
  misc_RNA (1)...(19): siRNA sense strand
caccuaacguggaauguga

SEQ ID NO: 1436636 - RNA, 19 nt, Homo sapiens
  misc_RNA (1)...(19): siRNA sense strand
acacaaaucacaaugaaga

SEQ ID NO: 1436637 - RNA, 19 nt, Homo sapiens
  misc_RNA (1)...(19): siRNA sense strand
gguuuacuaugcaaaugua

SEQ ID NO: 1436638 - RNA, 19 nt, Homo sapiens
  misc_RNA (1)...(19): siRNA sense strand
cagcuuaccuugagaacuc

SEQ ID NO: 1436639 - RNA, 19 nt, Homo sapiens
  misc_RNA (1)...(19): siRNA sense strand
ggagguguuuccaaagaau

SEQ ID NO: 1436640 - RNA, 19 nt, Homo sapiens
  misc_RNA (1)...(19): siRNA sense strand
gacaauagaauucgcaugu

SEQ ID NO: 1436641 - RNA, 19 nt, Homo sapiens
  misc_RNA (1)...(19): siRNA sense strand
uuaaugaaccacugaauga

SEQ ID NO: 1436642 - RNA, 19 nt, Homo sapiens
  misc_RNA (1)...(19): siRNA sense strand
gagaaagagaggauuauuc

SEQ ID NO: 1436643 - RNA, 19 nt, Homo sapiens
  misc_RNA (1)...(19): siRNA sense strand
gaacaagaaaggcgcuaga

SEQ ID NO: 1436644 - RNA, 19 nt, Homo sapiens
  misc_RNA (1)...(19): siRNA sense strand
caacuccugcucugagaua

SEQ ID NO: 1436645 - RNA, 19 nt, Homo sapiens
  misc_RNA (1)...(19): siRNA sense strand
gaauaugacgguggcuaua

SEQ ID NO: 1436646 - RNA, 19 nt, Homo sapiens
  misc_RNA (1)...(19): siRNA sense strand
acaugucccuuuauauuga

SEQ ID NO: 1436647 - RNA, 19 nt, Homo sapiens
  misc_RNA (1)...(19): siRNA sense strand
gcaaagcgaugagcaagcu

SEQ ID NO: 1436648 - RNA, 19 nt, Homo sapiens
  misc_RNA (1)...(19): siRNA sense strand
caaugcacuuguauauuug

SEQ ID NO: 1436649 - RNA, 19 nt, Homo sapiens
  misc_RNA (1)...(19): siRNA sense strand
agauugcucucuaaugaaa

SEQ ID NO: 1436650 - RNA, 19 nt, Homo sapiens
  misc_RNA (1)...(19): siRNA sense strand
ggagacaacaauuugcaaa

SEQ ID NO: 1436651 - RNA, 19 nt, Homo sapiens
  misc_RNA (1)...(19): siRNA sense strand
caauagaauucgcauguac

SEQ ID NO: 1436652 - RNA, 19 nt, Homo sapiens
  misc_RNA (1)...(19): siRNA sense strand
gaaaaugguuuacuaugca

SEQ ID NO: 1436653 - RNA, 19 nt, Homo sapiens
  misc_RNA (1)...(19): siRNA sense strand
aagaaaggcgcuagaauug

SEQ ID NO: 1436654 - RNA, 19 nt, Homo sapiens
  misc_RNA (1)...(19): siRNA sense strand
ccaaugaaucucccuuaaa

SEQ ID NO: 1436655 - RNA, 19 nt, Homo sapiens
  misc_RNA (1)...(19): siRNA sense strand
gcgagcagcugcaaagcau

SEQ ID NO: 1436656 - RNA, 19 nt, Homo sapiens
  misc_RNA (1)...(19): siRNA sense strand
gacaugucccuuuauauug

SEQ ID NO: 1436657 - RNA, 19 nt, Homo sapiens
  misc_RNA (1)...(19): siRNA sense strand
ggagacauuucagcaacuu

SEQ ID NO: 1436658 - RNA, 19 nt, Homo sapiens
  misc_RNA (1)...(19): siRNA sense strand
ugacuuacuuaacagaaga

SEQ ID NO: 1436659 - RNA, 19 nt, Homo sapiens
  misc_RNA (1)...(19): siRNA sense strand
ccacaguccugaauaucug

SEQ ID NO: 1436660 - RNA, 19 nt, Homo sapiens
  misc_RNA (1)...(19): siRNA sense strand
gaccaaugaaucucccuua

SEQ ID NO: 1436661 - RNA, 19 nt, Homo sapiens
  misc_RNA (1)...(19): siRNA sense strand
gguuuaauccaucuucuuu

SEQ ID NO: 1436662 - RNA, 19 nt, Homo sapiens
  misc_RNA (1)...(19): siRNA sense strand
ggcuagagaugaucgcuau

SEQ ID NO: 1436663 - RNA, 19 nt, Homo sapiens
  misc_RNA (1)...(19): siRNA sense strand
gaaguggacacaaaucaca

SEQ ID NO: 1436664 - RNA, 19 nt, Homo sapiens
  misc_RNA (1)...(19): siRNA sense strand
aggaagaacugaaaucucu

SEQ ID NO: 1436665 - RNA, 19 nt, Homo sapiens
  misc_RNA (1)...(19): siRNA sense strand
uacugggucuggcuauuua

SEQ ID NO: 1436666 - RNA, 19 nt, Homo sapiens
  misc_RNA (1)...(19): siRNA sense strand
gggagguguuuccaaagaa

SEQ ID NO: 1436667 - RNA, 19 nt, Homo sapiens
  misc_RNA (1)...(19): siRNA sense strand
acaauagaauucgcaugua

SEQ ID NO: 1436668 - RNA, 19 nt, Homo sapiens
  misc_RNA (1)...(19): siRNA sense strand
uaacguggaaugugacuug

SEQ ID NO: 1436669 - RNA, 19 nt, Homo sapiens
  misc_RNA (1)...(19): siRNA sense strand
ggagaagaaagaagaaaca

SEQ ID NO: 1436670 - RNA, 19 nt, Homo sapiens
  misc_RNA (1)...(19): siRNA sense strand
guucauucauuuacagaug

SEQ ID NO: 1436671 - RNA, 19 nt, Homo sapiens
  misc_RNA (1)...(19): siRNA sense strand
gaagcgagcagcugcaaag

SEQ ID NO: 1436672 - RNA, 19 nt, Homo sapiens
  misc_RNA (1)...(19): siRNA sense strand
gaagagcccaucccugagu

SEQ ID NO: 1436673 - RNA, 19 nt, Homo sapiens
  misc_RNA (1)...(19): siRNA sense strand
uuaccuacaucucauacuu

SEQ ID NO: 1436674 - RNA, 19 nt, Homo sapiens
  misc_RNA (1)...(19): siRNA sense strand
gaagaaacuacagaauaug

SEQ ID NO: 1436675 - RNA, 19 nt, Homo sapiens
  misc_RNA (1)...(19): siRNA sense strand
aagggaauguggaagauga

SEQ ID NO: 1436676 - RNA, 19 nt, Homo sapiens
  misc_RNA (1)...(19): siRNA sense strand
guacugggucuggcuauuu

SEQ ID NO: 1436677 - RNA, 19 nt, Homo sapiens
  misc_RNA (1)...(19): siRNA sense strand
ggaauuugaaggagaacaa

SEQ ID NO: 1436678 - RNA, 19 nt, Homo sapiens
  misc_RNA (1)...(19): siRNA sense strand
aaaguuagacgugaccaua

SEQ ID NO: 1436679 - RNA, 19 nt, Homo sapiens
  misc_RNA (1)...(19): siRNA sense strand
uguaaaggcugccaaguua

SEQ ID NO: 1436680 - RNA, 19 nt, Homo sapiens
  misc_RNA (1)...(19): siRNA sense strand
caugaaaccuuuaaccuuu

SEQ ID NO: 1436681 - RNA, 19 nt, Homo sapiens
  misc_RNA (1)...(19): siRNA sense strand
gaauauaacuaaccaacug

SEQ ID NO: 1436682 - RNA, 19 nt, Homo sapiens
  misc_RNA (1)...(19): siRNA sense strand
caacagugauucccugaaa

SEQ ID NO: 1436683 - RNA, 19 nt, Homo sapiens
  misc_RNA (1)...(19): siRNA sense strand
ggaaagaauucguaagcuu

SEQ ID NO: 1436684 - RNA, 19 nt, Homo sapiens
  misc_RNA (1)...(19): siRNA sense strand
gcacaacacucgcuccaau

SEQ ID NO: 1436685 - RNA, 19 nt, Homo sapiens
  misc_RNA (1)...(19): siRNA sense strand
caggaaaccaguacaauua

SEQ ID NO: 1436686 - RNA, 19 nt, Homo sapiens
  misc_RNA (1)...(19): siRNA sense strand
gaauggaaacgacagaaua

SEQ ID NO: 1436687 - RNA, 19 nt, Homo sapiens
  misc_RNA (1)...(19): siRNA sense strand
ggaugaaacucaauguaga

SEQ ID NO: 1436688 - RNA, 19 nt, Homo sapiens
  misc_RNA (1)...(19): siRNA sense strand
ggucaucgcugcaucugaa

SEQ ID NO: 1436689 - RNA, 19 nt, Homo sapiens
  misc_RNA (1)...(19): siRNA sense strand
gggaauccaugaaaccuuu

SEQ ID NO: 1436690 - RNA, 19 nt, Homo sapiens
  misc_RNA (1)...(19): siRNA sense strand
gcgcaaagaaggccauaua

SEQ ID NO: 1436691 - RNA, 19 nt, Homo sapiens
  misc_RNA (1)...(19): siRNA sense strand
gguccuggcucaacaguga

SEQ ID NO: 1436692 - RNA, 19 nt, Homo sapiens
  misc_RNA (1)...(19): siRNA sense strand
gaaacucaauguagaagag

SEQ ID NO: 1436693 - RNA, 19 nt, Homo sapiens
  misc_RNA (1)...(19): siRNA sense strand
gugauauucuugcccuuua

SEQ ID NO: 1436694 - RNA, 19 nt, Homo sapiens
  misc_RNA (1)...(19): siRNA sense strand
gcaggaaaccaguacaauu

SEQ ID NO: 1436695 - RNA, 19 nt, Homo sapiens
  misc_RNA (1)...(19): siRNA sense strand
gaagagggacuguauagca

SEQ ID NO: 1436696 - RNA, 19 nt, Homo sapiens
  misc_RNA (1)...(19): siRNA sense strand
caaagaaggccauauacau

SEQ ID NO: 1436697 - RNA, 19 nt, Homo sapiens
  misc_RNA (1)...(19): siRNA sense strand
ggcuguugcucucuucuua

SEQ ID NO: 1436698 - RNA, 19 nt, Homo sapiens
  misc_RNA (1)...(19): siRNA sense strand
gcaaagaaggccauauaca

SEQ ID NO: 1436699 - RNA, 19 nt, Homo sapiens
  misc_RNA (1)...(19): siRNA sense strand
accgagaucucaaacauaa

SEQ ID NO: 1436700 - RNA, 19 nt, Homo sapiens
  misc_RNA (1)...(19): siRNA sense strand
ggaaaccaguacaauuaca

SEQ ID NO: 1436701 - RNA, 19 nt, Homo sapiens
  misc_RNA (1)...(19): siRNA sense strand
cauggaugaugauguaauu

SEQ ID NO: 1436702 - RNA, 19 nt, Homo sapiens
  misc_RNA (1)...(19): siRNA sense strand
gauauucaccucaguuugu

SEQ ID NO: 1436703 - RNA, 19 nt, Homo sapiens
  misc_RNA (1)...(19): siRNA sense strand
uuggcuaucuugacuauaa

SEQ ID NO: 1436704 - RNA, 19 nt, Homo sapiens
  misc_RNA (1)...(19): siRNA sense strand
gcucucuucuuacugguuu

SEQ ID NO: 1436705 - RNA, 19 nt, Homo sapiens
  misc_RNA (1)...(19): siRNA sense strand
caacaccuccucugcuuau

SEQ ID NO: 1436706 - RNA, 19 nt, Homo sapiens
  misc_RNA (1)...(19): siRNA sense strand
aaccuaauccgaagauaua

SEQ ID NO: 1436707 - RNA, 19 nt, Homo sapiens
  misc_RNA (1)...(19): siRNA sense strand
ggaugaugauguaauugug

SEQ ID NO: 1436708 - RNA, 19 nt, Homo sapiens
  misc_RNA (1)...(19): siRNA sense strand
gaucucaaacauaaaguga

SEQ ID NO: 1436709 - RNA, 19 nt, Homo sapiens
  misc_RNA (1)...(19): siRNA sense strand
acaggcaaauucaaccuaa

SEQ ID NO: 1436710 - RNA, 19 nt, Homo sapiens
  misc_RNA (1)...(19): siRNA sense strand
gaugaaacucaauguagaa

SEQ ID NO: 1436711 - RNA, 19 nt, Homo sapiens
  misc_RNA (1)...(19): siRNA sense strand
uugcaaaccugacggaaug

SEQ ID NO: 1436712 - RNA, 19 nt, Homo sapiens
  misc_RNA (1)...(19): siRNA sense strand
aaagaaggccauauacaug

SEQ ID NO: 1436713 - RNA, 19 nt, Homo sapiens
  misc_RNA (1)...(19): siRNA sense strand
uggaaacgacagaauauaa

SEQ ID NO: 1436714 - RNA, 19 nt, Homo sapiens
  misc_RNA (1)...(19): siRNA sense strand
gcaguuuguuaaggaauga

SEQ ID NO: 1436715 - RNA, 19 nt, Homo sapiens
  misc_RNA (1)...(19): siRNA sense strand
uaaacagcauucagcacaa

SEQ ID NO: 1436716 - RNA, 19 nt, Homo sapiens
  misc_RNA (1)...(19): siRNA sense strand
ggagauuccuguggucauc

SEQ ID NO: 1436717 - RNA, 19 nt, Homo sapiens
  misc_RNA (1)...(19): siRNA sense strand
gauauaccgagaucucaaa

SEQ ID NO: 1436718 - RNA, 19 nt, Homo sapiens
  misc_RNA (1)...(19): siRNA sense strand
guagaagagggacuguaua

SEQ ID NO: 1436719 - RNA, 19 nt, Homo sapiens
  misc_RNA (1)...(19): siRNA sense strand
gacagaauauaacuaacca

SEQ ID NO: 1436720 - RNA, 19 nt, Homo sapiens
  misc_RNA (1)...(19): siRNA sense strand
caaccuaauccgaagauau

SEQ ID NO: 1436721 - RNA, 19 nt, Homo sapiens
  misc_RNA (1)...(19): siRNA sense strand
cacaacaccuccucugcuu

SEQ ID NO: 1436722 - RNA, 19 nt, Homo sapiens
  misc_RNA (1)...(19): siRNA sense strand
cagcuugagcaguuuguua

SEQ ID NO: 1436723 - RNA, 19 nt, Homo sapiens
  misc_RNA (1)...(19): siRNA sense strand
ggacugcuucauauacuga

SEQ ID NO: 1436724 - RNA, 19 nt, Homo sapiens
  misc_RNA (1)...(19): siRNA sense strand
gagggacuguauagcagaa

SEQ ID NO: 1436725 - RNA, 19 nt, Homo sapiens
  misc_RNA (1)...(19): siRNA sense strand
gauucagccucuacuaaag

SEQ ID NO: 1436726 - RNA, 19 nt, Homo sapiens
  misc_RNA (1)...(19): siRNA sense strand
gccucaaccuauagacuuu

SEQ ID NO: 1436727 - RNA, 19 nt, Homo sapiens
  misc_RNA (1)...(19): siRNA sense strand
ggaauggaaacgacagaau

SEQ ID NO: 1436728 - RNA, 19 nt, Homo sapiens
  misc_RNA (1)...(19): siRNA sense strand
gcacugaagccaggacaug

SEQ ID NO: 1436729 - RNA, 19 nt, Homo sapiens
  misc_RNA (1)...(19): siRNA sense strand
aacacucgcuccaauguga

SEQ ID NO: 1436730 - RNA, 19 nt, Homo sapiens
  misc_RNA (1)...(19): siRNA sense strand
gagcaggaaaccaguacaa

SEQ ID NO: 1436731 - RNA, 19 nt, Homo sapiens
  misc_RNA (1)...(19): siRNA sense strand
guaauugugcaaggugaua

SEQ ID NO: 1436732 - RNA, 19 nt, Homo sapiens
  misc_RNA (1)...(19): siRNA sense strand
ggaaacgacagaauauaac

SEQ ID NO: 1436733 - RNA, 19 nt, Homo sapiens
  misc_RNA (1)...(19): siRNA sense strand
gugauucagccucuacuaa

SEQ ID NO: 1436734 - RNA, 19 nt, Homo sapiens
  misc_RNA (1)...(19): siRNA sense strand
ccaugaaaccuuuaaccuu

SEQ ID NO: 1436735 - RNA, 19 nt, Homo sapiens
  misc_RNA (1)...(19): siRNA sense strand
ccgaagauauaccgagauc

SEQ ID NO: 1436736 - RNA, 19 nt, Homo sapiens
  misc_RNA (1)...(19): siRNA sense strand
gaaaccaguacaauuacau

SEQ ID NO: 1436737 - RNA, 19 nt, Homo sapiens
  misc_RNA (1)...(19): siRNA sense strand
ggaauccaugaaaccuuua

SEQ ID NO: 1436738 - RNA, 19 nt, Homo sapiens
  misc_RNA (1)...(19): siRNA sense strand
gaaacgacagaauauaacu

SEQ ID NO: 1436739 - RNA, 19 nt, Homo sapiens
  misc_RNA (1)...(19): siRNA sense strand
uucguaagcuuuccaugaa

SEQ ID NO: 1436740 - RNA, 19 nt, Homo sapiens
  misc_RNA (1)...(19): siRNA sense strand
ugauucagccucuacuaaa

SEQ ID NO: 1436741 - RNA, 19 nt, Homo sapiens
  misc_RNA (1)...(19): siRNA sense strand
uaaggaaugagguuacaga

SEQ ID NO: 1436742 - RNA, 19 nt, Homo sapiens
  misc_RNA (1)...(19): siRNA sense strand
cauuggcuaucuugacuau

SEQ ID NO: 1436743 - RNA, 19 nt, Homo sapiens
  misc_RNA (1)...(19): siRNA sense strand
uucagaagauugugauuca

SEQ ID NO: 1436744 - RNA, 19 nt, Homo sapiens
  misc_RNA (1)...(19): siRNA sense strand
auaccgagaucucaaacau

SEQ ID NO: 1436745 - RNA, 19 nt, Homo sapiens
  misc_RNA (1)...(19): siRNA sense strand
gaaaagcaucagauacaaa

SEQ ID NO: 1436746 - RNA, 19 nt, Homo sapiens
  misc_RNA (1)...(19): siRNA sense strand
cuucauauacugauguuug

SEQ ID NO: 1436747 - RNA, 19 nt, Homo sapiens
  misc_RNA (1)...(19): siRNA sense strand
gcugccaaguuacuccauu

SEQ ID NO: 1436748 - RNA, 19 nt, Homo sapiens
  misc_RNA (1)...(19): siRNA sense strand
uagaagagggacuguauag

SEQ ID NO: 1436749 - RNA, 19 nt, Homo sapiens
  misc_RNA (1)...(19): siRNA sense strand
gaauccaugaaaccuuuaa

SEQ ID NO: 1436750 - RNA, 19 nt, Homo sapiens
  misc_RNA (1)...(19): siRNA sense strand
guuaaggaaugagguuaca

SEQ ID NO: 1436751 - RNA, 19 nt, Homo sapiens
  misc_RNA (1)...(19): siRNA sense strand
ccaaaugcucuccgacaug

SEQ ID NO: 1436752 - RNA, 19 nt, Homo sapiens
  misc_RNA (1)...(19): siRNA sense strand
gcuccaaugugauuuucua

SEQ ID NO: 1436753 - RNA, 19 nt, Homo sapiens
  misc_RNA (1)...(19): siRNA sense strand
auucuugcccuuuacaaua

SEQ ID NO: 1436754 - RNA, 19 nt, Homo sapiens
  misc_RNA (1)...(19): siRNA sense strand
ggugauauucuugcccuuu

SEQ ID NO: 1436755 - RNA, 19 nt, Homo sapiens
  misc_RNA (1)...(19): siRNA sense strand
cgagaucucaaacauaaag

SEQ ID NO: 1436756 - RNA, 19 nt, Homo sapiens
  misc_RNA (1)...(19): siRNA sense strand
ccaucgauccuauguggaa

SEQ ID NO: 1436757 - RNA, 19 nt, Homo sapiens
  misc_RNA (1)...(19): siRNA sense strand
ugugcaaggugauauucuu

SEQ ID NO: 1436758 - RNA, 19 nt, Homo sapiens
  misc_RNA (1)...(19): siRNA sense strand
auauucaccucaguuugua

SEQ ID NO: 1436759 - RNA, 19 nt, Homo sapiens
  misc_RNA (1)...(19): siRNA sense strand
gagguuacagauucaggaa

SEQ ID NO: 1436760 - RNA, 19 nt, Homo sapiens
  misc_RNA (1)...(19): siRNA sense strand
caacaauacagcagaccau

SEQ ID NO: 1436761 - RNA, 19 nt, Homo sapiens
  misc_RNA (1)...(19): siRNA sense strand
ugagcaguuuguuaaggaa

SEQ ID NO: 1436762 - RNA, 19 nt, Homo sapiens
  misc_RNA (1)...(19): siRNA sense strand
uguagaagagggacuguau

SEQ ID NO: 1436763 - RNA, 19 nt, Homo sapiens
  misc_RNA (1)...(19): siRNA sense strand
aaaccugacggaauggaaa

SEQ ID NO: 1436764 - RNA, 19 nt, Homo sapiens
  misc_RNA (1)...(19): siRNA sense strand
gcagcuauaaacagcauuc

SEQ ID NO: 1436765 - RNA, 19 nt, Homo sapiens
  misc_RNA (1)...(19): siRNA sense strand
ggccucaaccuauagacuu

SEQ ID NO: 1436766 - RNA, 19 nt, Homo sapiens
  misc_RNA (1)...(19): siRNA sense strand
cauaacuuccucagcuuga

SEQ ID NO: 1436767 - RNA, 19 nt, Homo sapiens
  misc_RNA (1)...(19): siRNA sense strand
ucuccgacaugcaguagau

SEQ ID NO: 1436768 - RNA, 19 nt, Homo sapiens
  misc_RNA (1)...(19): siRNA sense strand
uugagcaguuuguuaagga

SEQ ID NO: 1436769 - RNA, 19 nt, Homo sapiens
  misc_RNA (1)...(19): siRNA sense strand
uaaacaucaucaucuuggu

SEQ ID NO: 1436770 - RNA, 19 nt, Homo sapiens
  misc_RNA (1)...(19): siRNA sense strand
aauggaaacgacagaauau

SEQ ID NO: 1436771 - RNA, 19 nt, Homo sapiens
  misc_RNA (1)...(19): siRNA sense strand
uacauuggcuaucuugacu

SEQ ID NO: 1436772 - RNA, 19 nt, Homo sapiens
  misc_RNA (1)...(19): siRNA sense strand
ucaaccuaauccgaagaua

SEQ ID NO: 1436773 - RNA, 19 nt, Homo sapiens
  misc_RNA (1)...(19): siRNA sense strand
aaacgauauucaccucagu

SEQ ID NO: 1436774 - RNA, 19 nt, Homo sapiens
  misc_RNA (1)...(19): siRNA sense strand
uaacuaaccaacuggaaaa

SEQ ID NO: 1436775 - RNA, 19 nt, Homo sapiens
  misc_RNA (1)...(19): siRNA sense strand
caauacagcagaccaucuc

SEQ ID NO: 1436776 - RNA, 19 nt, Homo sapiens
  misc_RNA (1)...(19): siRNA sense strand
acucuaccaucgauccuau

SEQ ID NO: 1436777 - RNA, 19 nt, Homo sapiens
  misc_RNA (1)...(19): siRNA sense strand
uggaugaaacucaauguag

SEQ ID NO: 1436778 - RNA, 19 nt, Homo sapiens
  misc_RNA (1)...(19): siRNA sense strand
uggcuaucuugacuauaaa

SEQ ID NO: 1436779 - RNA, 19 nt, Homo sapiens
  misc_RNA (1)...(19): siRNA sense strand
uguaaaggcugccaaguua

SEQ ID NO: 1436780 - RNA, 19 nt, Homo sapiens
  misc_RNA (1)...(19): siRNA sense strand
caugaaaccuuuaaccuuu

SEQ ID NO: 1436781 - RNA, 19 nt, Homo sapiens
  misc_RNA (1)...(19): siRNA sense strand
gaauauaacuaaccaacug

SEQ ID NO: 1436782 - RNA, 19 nt, Homo sapiens
  misc_RNA (1)...(19): siRNA sense strand
caacagugauucccugaaa

SEQ ID NO: 1436783 - RNA, 19 nt, Homo sapiens
  misc_RNA (1)...(19): siRNA sense strand
ggaaagaauucguaagcuu

SEQ ID NO: 1436784 - RNA, 19 nt, Homo sapiens
  misc_RNA (1)...(19): siRNA sense strand
gcacaacacucgcuccaau

SEQ ID NO: 1436785 - RNA, 19 nt, Homo sapiens
  misc_RNA (1)...(19): siRNA sense strand
caggaaaccaguacaauua

SEQ ID NO: 1436786 - RNA, 19 nt, Homo sapiens
  misc_RNA (1)...(19): siRNA sense strand
gaauggaaacgacagaaua

SEQ ID NO: 1436787 - RNA, 19 nt, Homo sapiens
  misc_RNA (1)...(19): siRNA sense strand
ggaugaaacucaauguaga

SEQ ID NO: 1436788 - RNA, 19 nt, Homo sapiens
  misc_RNA (1)...(19): siRNA sense strand
ggucaucgcugcaucugaa

SEQ ID NO: 1436789 - RNA, 19 nt, Homo sapiens
  misc_RNA (1)...(19): siRNA sense strand
gggaauccaugaaaccuuu

SEQ ID NO: 1436790 - RNA, 19 nt, Homo sapiens
  misc_RNA (1)...(19): siRNA sense strand
gcgcaaagaaggccauaua

SEQ ID NO: 1436791 - RNA, 19 nt, Homo sapiens
  misc_RNA (1)...(19): siRNA sense strand
gguccuggcucaacaguga

SEQ ID NO: 1436792 - RNA, 19 nt, Homo sapiens
  misc_RNA (1)...(19): siRNA sense strand
gaaacucaauguagaagag

SEQ ID NO: 1436793 - RNA, 19 nt, Homo sapiens
  misc_RNA (1)...(19): siRNA sense strand
gugauauucuugcccuuua

SEQ ID NO: 1436794 - RNA, 19 nt, Homo sapiens
  misc_RNA (1)...(19): siRNA sense strand
gcaggaaaccaguacaauu

SEQ ID NO: 1436795 - RNA, 19 nt, Homo sapiens
  misc_RNA (1)...(19): siRNA sense strand
gaagagggacuguauagca

SEQ ID NO: 1436796 - RNA, 19 nt, Homo sapiens
  misc_RNA (1)...(19): siRNA sense strand
caaagaaggccauauacau

SEQ ID NO: 1436797 - RNA, 19 nt, Homo sapiens
  misc_RNA (1)...(19): siRNA sense strand
ggcuguugcucucuucuua

SEQ ID NO: 1436798 - RNA, 19 nt, Homo sapiens
  misc_RNA (1)...(19): siRNA sense strand
gcaaagaaggccauauaca

SEQ ID NO: 1436799 - RNA, 19 nt, Homo sapiens
  misc_RNA (1)...(19): siRNA sense strand
accgagaucucaaacauaa

SEQ ID NO: 1436800 - RNA, 19 nt, Homo sapiens
  misc_RNA (1)...(19): siRNA sense strand
ggaaaccaguacaauuaca

SEQ ID NO: 1436801 - RNA, 19 nt, Homo sapiens
  misc_RNA (1)...(19): siRNA sense strand
cauggaugaugauguaauu

SEQ ID NO: 1436802 - RNA, 19 nt, Homo sapiens
  misc_RNA (1)...(19): siRNA sense strand
gauauucaccucaguuugu

SEQ ID NO: 1436803 - RNA, 19 nt, Homo sapiens
  misc_RNA (1)...(19): siRNA sense strand
uuggcuaucuugacuauaa

SEQ ID NO: 1436804 - RNA, 19 nt, Homo sapiens
  misc_RNA (1)...(19): siRNA sense strand
gcucucuucuuacugguuu

SEQ ID NO: 1436805 - RNA, 19 nt, Homo sapiens
  misc_RNA (1)...(19): siRNA sense strand
caacaccuccucugcuuau

SEQ ID NO: 1436806 - RNA, 19 nt, Homo sapiens
  misc_RNA (1)...(19): siRNA sense strand
aaccuaauccgaagauaua

SEQ ID NO: 1436807 - RNA, 19 nt, Homo sapiens
  misc_RNA (1)...(19): siRNA sense strand
ggaugaugauguaauugug

SEQ ID NO: 1436808 - RNA, 19 nt, Homo sapiens
  misc_RNA (1)...(19): siRNA sense strand
gaucucaaacauaaaguga

SEQ ID NO: 1436809 - RNA, 19 nt, Homo sapiens
  misc_RNA (1)...(19): siRNA sense strand
acaggcaaauucaaccuaa

SEQ ID NO: 1436810 - RNA, 19 nt, Homo sapiens
  misc_RNA (1)...(19): siRNA sense strand
gaugaaacucaauguagaa

SEQ ID NO: 1436811 - RNA, 19 nt, Homo sapiens
  misc_RNA (1)...(19): siRNA sense strand
uugcaaaccugacggaaug

SEQ ID NO: 1436812 - RNA, 19 nt, Homo sapiens
  misc_RNA (1)...(19): siRNA sense strand
aaagaaggccauauacaug

SEQ ID NO: 1436813 - RNA, 19 nt, Homo sapiens
  misc_RNA (1)...(19): siRNA sense strand
uggaaacgacagaauauaa

SEQ ID NO: 1436814 - RNA, 19 nt, Homo sapiens
  misc_RNA (1)...(19): siRNA sense strand
gcaguuuguuaaggaauga

SEQ ID NO: 1436815 - RNA, 19 nt, Homo sapiens
  misc_RNA (1)...(19): siRNA sense strand
uaaacagcauucagcacaa

SEQ ID NO: 1436816 - RNA, 19 nt, Homo sapiens
  misc_RNA (1)...(19): siRNA sense strand
ggagauuccuguggucauc

SEQ ID NO: 1436817 - RNA, 19 nt, Homo sapiens
  misc_RNA (1)...(19): siRNA sense strand
gauauaccgagaucucaaa

SEQ ID NO: 1436818 - RNA, 19 nt, Homo sapiens
  misc_RNA (1)...(19): siRNA sense strand
guagaagagggacuguaua

SEQ ID NO: 1436819 - RNA, 19 nt, Homo sapiens
  misc_RNA (1)...(19): siRNA sense strand
gacagaauauaacuaacca

SEQ ID NO: 1436820 - RNA, 19 nt, Homo sapiens
  misc_RNA (1)...(19): siRNA sense strand
caaccuaauccgaagauau

SEQ ID NO: 1436821 - RNA, 19 nt, Homo sapiens
  misc_RNA (1)...(19): siRNA sense strand
cacaacaccuccucugcuu

SEQ ID NO: 1436822 - RNA, 19 nt, Homo sapiens
  misc_RNA (1)...(19): siRNA sense strand
cagcuugagcaguuuguua

SEQ ID NO: 1436823 - RNA, 19 nt, Homo sapiens
  misc_RNA (1)...(19): siRNA sense strand
ggacugcuucauauacuga

SEQ ID NO: 1436824 - RNA, 19 nt, Homo sapiens
  misc_RNA (1)...(19): siRNA sense strand
gagggacuguauagcagaa

SEQ ID NO: 1436825 - RNA, 19 nt, Homo sapiens
  misc_RNA (1)...(19): siRNA sense strand
gauucagccucuacuaaag

SEQ ID NO: 1436826 - RNA, 19 nt, Homo sapiens
  misc_RNA (1)...(19): siRNA sense strand
gccucaaccuauagacuuu

SEQ ID NO: 1436827 - RNA, 19 nt, Homo sapiens
  misc_RNA (1)...(19): siRNA sense strand
ggaauggaaacgacagaau

SEQ ID NO: 1436828 - RNA, 19 nt, Homo sapiens
  misc_RNA (1)...(19): siRNA sense strand
gcacugaagccaggacaug

SEQ ID NO: 1436829 - RNA, 19 nt, Homo sapiens
  misc_RNA (1)...(19): siRNA sense strand
aacacucgcuccaauguga

SEQ ID NO: 1436830 - RNA, 19 nt, Homo sapiens
  misc_RNA (1)...(19): siRNA sense strand
gagcaggaaaccaguacaa

SEQ ID NO: 1436831 - RNA, 19 nt, Homo sapiens
  misc_RNA (1)...(19): siRNA sense strand
guaauugugcaaggugaua

SEQ ID NO: 1436832 - RNA, 19 nt, Homo sapiens
  misc_RNA (1)...(19): siRNA sense strand
ggaaacgacagaauauaac

SEQ ID NO: 1436833 - RNA, 19 nt, Homo sapiens
  misc_RNA (1)...(19): siRNA sense strand
gugauucagccucuacuaa

SEQ ID NO: 1436834 - RNA, 19 nt, Homo sapiens
  misc_RNA (1)...(19): siRNA sense strand
ccaugaaaccuuuaaccuu

SEQ ID NO: 1436835 - RNA, 19 nt, Homo sapiens
  misc_RNA (1)...(19): siRNA sense strand
ccgaagauauaccgagauc

SEQ ID NO: 1436836 - RNA, 19 nt, Homo sapiens
  misc_RNA (1)...(19): siRNA sense strand
gaaaccaguacaauuacau

SEQ ID NO: 1436837 - RNA, 19 nt, Homo sapiens
  misc_RNA (1)...(19): siRNA sense strand
ggaauccaugaaaccuuua

SEQ ID NO: 1436838 - RNA, 19 nt, Homo sapiens
  misc_RNA (1)...(19): siRNA sense strand
gaaacgacagaauauaacu

SEQ ID NO: 1436839 - RNA, 19 nt, Homo sapiens
  misc_RNA (1)...(19): siRNA sense strand
uucguaagcuuuccaugaa

SEQ ID NO: 1436840 - RNA, 19 nt, Homo sapiens
  misc_RNA (1)...(19): siRNA sense strand
ugauucagccucuacuaaa

SEQ ID NO: 1436841 - RNA, 19 nt, Homo sapiens
  misc_RNA (1)...(19): siRNA sense strand
uaaggaaugagguuacaga

SEQ ID NO: 1436842 - RNA, 19 nt, Homo sapiens
  misc_RNA (1)...(19): siRNA sense strand
cauuggcuaucuugacuau

SEQ ID NO: 1436843 - RNA, 19 nt, Homo sapiens
  misc_RNA (1)...(19): siRNA sense strand
uucagaagauugugauuca

SEQ ID NO: 1436844 - RNA, 19 nt, Homo sapiens
  misc_RNA (1)...(19): siRNA sense strand
auaccgagaucucaaacau

SEQ ID NO: 1436845 - RNA, 19 nt, Homo sapiens
  misc_RNA (1)...(19): siRNA sense strand
gaaaagcaucagauacaaa

SEQ ID NO: 1436846 - RNA, 19 nt, Homo sapiens
  misc_RNA (1)...(19): siRNA sense strand
cuucauauacugauguuug

SEQ ID NO: 1436847 - RNA, 19 nt, Homo sapiens
  misc_RNA (1)...(19): siRNA sense strand
gcugccaaguuacuccauu

SEQ ID NO: 1436848 - RNA, 19 nt, Homo sapiens
  misc_RNA (1)...(19): siRNA sense strand
uagaagagggacuguauag

SEQ ID NO: 1436849 - RNA, 19 nt, Homo sapiens
  misc_RNA (1)...(19): siRNA sense strand
gaauccaugaaaccuuuaa

SEQ ID NO: 1436850 - RNA, 19 nt, Homo sapiens
  misc_RNA (1)...(19): siRNA sense strand
guuaaggaaugagguuaca

SEQ ID NO: 1436851 - RNA, 19 nt, Homo sapiens
  misc_RNA (1)...(19): siRNA sense strand
ccaaaugcucuccgacaug

SEQ ID NO: 1436852 - RNA, 19 nt, Homo sapiens
  misc_RNA (1)...(19): siRNA sense strand
gcuccaaugugauuuucua

SEQ ID NO: 1436853 - RNA, 19 nt, Homo sapiens
  misc_RNA (1)...(19): siRNA sense strand
auucuugcccuuuacaaua

SEQ ID NO: 1436854 - RNA, 19 nt, Homo sapiens
  misc_RNA (1)...(19): siRNA sense strand
ggugauauucuugcccuuu

SEQ ID NO: 1436855 - RNA, 19 nt, Homo sapiens
  misc_RNA (1)...(19): siRNA sense strand
cgagaucucaaacauaaag

SEQ ID NO: 1436856 - RNA, 19 nt, Homo sapiens
  misc_RNA (1)...(19): siRNA sense strand
ccaucgauccuauguggaa

SEQ ID NO: 1436857 - RNA, 19 nt, Homo sapiens
  misc_RNA (1)...(19): siRNA sense strand
ugugcaaggugauauucuu

SEQ ID NO: 1436858 - RNA, 19 nt, Homo sapiens
  misc_RNA (1)...(19): siRNA sense strand
auauucaccucaguuugua

SEQ ID NO: 1436859 - RNA, 19 nt, Homo sapiens
  misc_RNA (1)...(19): siRNA sense strand
gagguuacagauucaggaa

SEQ ID NO: 1436860 - RNA, 19 nt, Homo sapiens
  misc_RNA (1)...(19): siRNA sense strand
caacaauacagcagaccau

SEQ ID NO: 1436861 - RNA, 19 nt, Homo sapiens
  misc_RNA (1)...(19): siRNA sense strand
ugagcaguuuguuaaggaa

SEQ ID NO: 1436862 - RNA, 19 nt, Homo sapiens
  misc_RNA (1)...(19): siRNA sense strand
uguagaagagggacuguau

SEQ ID NO: 1436863 - RNA, 19 nt, Homo sapiens
  misc_RNA (1)...(19): siRNA sense strand
aaaccugacggaauggaaa

SEQ ID NO: 1436864 - RNA, 19 nt, Homo sapiens
  misc_RNA (1)...(19): siRNA sense strand
gcagcuauaaacagcauuc

SEQ ID NO: 1436865 - RNA, 19 nt, Homo sapiens
  misc_RNA (1)...(19): siRNA sense strand
ggccucaaccuauagacuu

SEQ ID NO: 1436866 - RNA, 19 nt, Homo sapiens
  misc_RNA (1)...(19): siRNA sense strand
cauaacuuccucagcuuga

SEQ ID NO: 1436867 - RNA, 19 nt, Homo sapiens
  misc_RNA (1)...(19): siRNA sense strand
ucuccgacaugcaguagau

SEQ ID NO: 1436868 - RNA, 19 nt, Homo sapiens
  misc_RNA (1)...(19): siRNA sense strand
uugagcaguuuguuaagga

SEQ ID NO: 1436869 - RNA, 19 nt, Homo sapiens
  misc_RNA (1)...(19): siRNA sense strand
uaaacaucaucaucuuggu

SEQ ID NO: 1436870 - RNA, 19 nt, Homo sapiens
  misc_RNA (1)...(19): siRNA sense strand
aauggaaacgacagaauau

SEQ ID NO: 1436871 - RNA, 19 nt, Homo sapiens
  misc_RNA (1)...(19): siRNA sense strand
uacauuggcuaucuugacu

SEQ ID NO: 1436872 - RNA, 19 nt, Homo sapiens
  misc_RNA (1)...(19): siRNA sense strand
ucaaccuaauccgaagaua

SEQ ID NO: 1436873 - RNA, 19 nt, Homo sapiens
  misc_RNA (1)...(19): siRNA sense strand
aaacgauauucaccucagu

SEQ ID NO: 1436874 - RNA, 19 nt, Homo sapiens
  misc_RNA (1)...(19): siRNA sense strand
uaacuaaccaacuggaaaa

SEQ ID NO: 1436875 - RNA, 19 nt, Homo sapiens
  misc_RNA (1)...(19): siRNA sense strand
caauacagcagaccaucuc

SEQ ID NO: 1436876 - RNA, 19 nt, Homo sapiens
  misc_RNA (1)...(19): siRNA sense strand
acucuaccaucgauccuau

SEQ ID NO: 1436877 - RNA, 19 nt, Homo sapiens
  misc_RNA (1)...(19): siRNA sense strand
uggaugaaacucaauguag

SEQ ID NO: 1436878 - RNA, 19 nt, Homo sapiens
  misc_RNA (1)...(19): siRNA sense strand
uggcuaucuugacuauaaa

SEQ ID NO: 1436879 - RNA, 19 nt, Homo sapiens
  misc_RNA (1)...(19): siRNA sense strand
caacaaagauggccacauu

SEQ ID NO: 1436880 - RNA, 19 nt, Homo sapiens
  misc_RNA (1)...(19): siRNA sense strand
ccaaggaagugaugaauaa

SEQ ID NO: 1436881 - RNA, 19 nt, Homo sapiens
  misc_RNA (1)...(19): siRNA sense strand
gaaaugcagugacuaugaa

SEQ ID NO: 1436882 - RNA, 19 nt, Homo sapiens
  misc_RNA (1)...(19): siRNA sense strand
gaacauacaaucaaguuug

SEQ ID NO: 1436883 - RNA, 19 nt, Homo sapiens
  misc_RNA (1)...(19): siRNA sense strand
ggaggcagguuguagauau

SEQ ID NO: 1436884 - RNA, 19 nt, Homo sapiens
  misc_RNA (1)...(19): siRNA sense strand
ccaauuggaugacuuaauc

SEQ ID NO: 1436885 - RNA, 19 nt, Homo sapiens
  misc_RNA (1)...(19): siRNA sense strand
gaagaaaugcagugacuau

SEQ ID NO: 1436886 - RNA, 19 nt, Homo sapiens
  misc_RNA (1)...(19): siRNA sense strand
gagaggagcaagauaguuu

SEQ ID NO: 1436887 - RNA, 19 nt, Homo sapiens
  misc_RNA (1)...(19): siRNA sense strand
agacuuacauggccaauug

SEQ ID NO: 1436888 - RNA, 19 nt, Homo sapiens
  misc_RNA (1)...(19): siRNA sense strand
uaagaacccugcaagaugu

SEQ ID NO: 1436889 - RNA, 19 nt, Homo sapiens
  misc_RNA (1)...(19): siRNA sense strand
cuucagaucuucucaguga

SEQ ID NO: 1436890 - RNA, 19 nt, Homo sapiens
  misc_RNA (1)...(19): siRNA sense strand
guagagauccugaugauuc

SEQ ID NO: 1436891 - RNA, 19 nt, Homo sapiens
  misc_RNA (1)...(19): siRNA sense strand
aaagauggccacauugaua

SEQ ID NO: 1436892 - RNA, 19 nt, Homo sapiens
  misc_RNA (1)...(19): siRNA sense strand
gagaagcuguuugcucauu

SEQ ID NO: 1436893 - RNA, 19 nt, Homo sapiens
  misc_RNA (1)...(19): siRNA sense strand
ccagaacggucauaugugu

SEQ ID NO: 1436894 - RNA, 19 nt, Homo sapiens
  misc_RNA (1)...(19): siRNA sense strand
ucacaugaauaucgacauu

SEQ ID NO: 1436895 - RNA, 19 nt, Homo sapiens
  misc_RNA (1)...(19): siRNA sense strand
gaucuucucagugaauuua

SEQ ID NO: 1436896 - RNA, 19 nt, Homo sapiens
  misc_RNA (1)...(19): siRNA sense strand
ggaaggaaauacuaagaac

SEQ ID NO: 1436897 - RNA, 19 nt, Homo sapiens
  misc_RNA (1)...(19): siRNA sense strand
uaacugaucuggagcuuuu

SEQ ID NO: 1436898 - RNA, 19 nt, Homo sapiens
  misc_RNA (1)...(19): siRNA sense strand
ggaggaggcuguuauuuug

SEQ ID NO: 1436899 - RNA, 19 nt, Homo sapiens
  misc_RNA (1)...(19): siRNA sense strand
gagaagagccaaccagaag

SEQ ID NO: 1436900 - RNA, 19 nt, Homo sapiens
  misc_RNA (1)...(19): siRNA sense strand
cagacaacaugcuggagua

SEQ ID NO: 1436901 - RNA, 19 nt, Homo sapiens
  misc_RNA (1)...(19): siRNA sense strand
gagaacauacaaucaaguu

SEQ ID NO: 1436902 - RNA, 19 nt, Homo sapiens
  misc_RNA (1)...(19): siRNA sense strand
ucagcuaucucauggauca

SEQ ID NO: 1436903 - RNA, 19 nt, Homo sapiens
  misc_RNA (1)...(19): siRNA sense strand
ccaugcaacugcccuggua

SEQ ID NO: 1436904 - RNA, 19 nt, Homo sapiens
  misc_RNA (1)...(19): siRNA sense strand
gauauggcuucaccaagga

SEQ ID NO: 1436905 - RNA, 19 nt, Homo sapiens
  misc_RNA (1)...(19): siRNA sense strand
caaucaaguuugcuggaaa

SEQ ID NO: 1436906 - RNA, 19 nt, Homo sapiens
  misc_RNA (1)...(19): siRNA sense strand
agaagcagauggaggagaa

SEQ ID NO: 1436907 - RNA, 19 nt, Homo sapiens
  misc_RNA (1)...(19): siRNA sense strand
guucaacggugacuuugug

SEQ ID NO: 1436908 - RNA, 19 nt, Homo sapiens
  misc_RNA (1)...(19): siRNA sense strand
ugaaggcuaugaauucugu

SEQ ID NO: 1436909 - RNA, 19 nt, Homo sapiens
  misc_RNA (1)...(19): siRNA sense strand
ucugauagaugagaaaguu

SEQ ID NO: 1436910 - RNA, 19 nt, Homo sapiens
  misc_RNA (1)...(19): siRNA sense strand
cagcagcgguggagucugu

SEQ ID NO: 1436911 - RNA, 19 nt, Homo sapiens
  misc_RNA (1)...(19): siRNA sense strand
gaacagcucagcagacaac

SEQ ID NO: 1436912 - RNA, 19 nt, Homo sapiens
  misc_RNA (1)...(19): siRNA sense strand
cauagacagugaucauuca

SEQ ID NO: 1436913 - RNA, 19 nt, Homo sapiens
  misc_RNA (1)...(19): siRNA sense strand
guacagcugccaaacauca

SEQ ID NO: 1436914 - RNA, 19 nt, Homo sapiens
  misc_RNA (1)...(19): siRNA sense strand
gaauaucgacauuacagau

SEQ ID NO: 1436915 - RNA, 19 nt, Homo sapiens
  misc_RNA (1)...(19): siRNA sense strand
gcuguuugcucauucuuca

SEQ ID NO: 1436916 - RNA, 19 nt, Homo sapiens
  misc_RNA (1)...(19): siRNA sense strand
cauauucacugaggacaga

SEQ ID NO: 1436917 - RNA, 19 nt, Homo sapiens
  misc_RNA (1)...(19): siRNA sense strand
ucacaaccgcaagguauua

SEQ ID NO: 1436918 - RNA, 19 nt, Homo sapiens
  misc_RNA (1)...(19): siRNA sense strand
cuaagaacccugcaagaug

SEQ ID NO: 1436919 - RNA, 19 nt, Homo sapiens
  misc_RNA (1)...(19): siRNA sense strand
gaaaccaugaggaccauau

SEQ ID NO: 1436920 - RNA, 19 nt, Homo sapiens
  misc_RNA (1)...(19): siRNA sense strand
caguagagauccugaugau

SEQ ID NO: 1436921 - RNA, 19 nt, Homo sapiens
  misc_RNA (1)...(19): siRNA sense strand
gcccaggacuccgagauga

SEQ ID NO: 1436922 - RNA, 19 nt, Homo sapiens
  misc_RNA (1)...(19): siRNA sense strand
caagcuccaugacuucuuc

SEQ ID NO: 1436923 - RNA, 19 nt, Homo sapiens
  misc_RNA (1)...(19): siRNA sense strand
gcgagaacauacaaucaag

SEQ ID NO: 1436924 - RNA, 19 nt, Homo sapiens
  misc_RNA (1)...(19): siRNA sense strand
gggaaggaaauacuaagaa

SEQ ID NO: 1436925 - RNA, 19 nt, Homo sapiens
  misc_RNA (1)...(19): siRNA sense strand
caagaaacaucugguacag

SEQ ID NO: 1436926 - RNA, 19 nt, Homo sapiens
  misc_RNA (1)...(19): siRNA sense strand
gcaagauaguuuccaccau

SEQ ID NO: 1436927 - RNA, 19 nt, Homo sapiens
  misc_RNA (1)...(19): siRNA sense strand
gauccaaccuagagaccau

SEQ ID NO: 1436928 - RNA, 19 nt, Homo sapiens
  misc_RNA (1)...(19): siRNA sense strand
gugaacagcucagcagaca

SEQ ID NO: 1436929 - RNA, 19 nt, Homo sapiens
  misc_RNA (1)...(19): siRNA sense strand
ggccacagcuggugaacag

SEQ ID NO: 1436930 - RNA, 19 nt, Homo sapiens
  misc_RNA (1)...(19): siRNA sense strand
aaacgagacagaagaguga

SEQ ID NO: 1436931 - RNA, 19 nt, Homo sapiens
  misc_RNA (1)...(19): siRNA sense strand
ucucauggaucacuucauc

SEQ ID NO: 1436932 - RNA, 19 nt, Homo sapiens
  misc_RNA (1)...(19): siRNA sense strand
acaaagauggccacauuga

SEQ ID NO: 1436933 - RNA, 19 nt, Homo sapiens
  misc_RNA (1)...(19): siRNA sense strand
cuggaaacauuguaucgaa

SEQ ID NO: 1436934 - RNA, 19 nt, Homo sapiens
  misc_RNA (1)...(19): siRNA sense strand
acaacaugcuggaguacaa

SEQ ID NO: 1436935 - RNA, 19 nt, Homo sapiens
  misc_RNA (1)...(19): siRNA sense strand
ugagagcucugagggagaa

SEQ ID NO: 1436936 - RNA, 19 nt, Homo sapiens
  misc_RNA (1)...(19): siRNA sense strand
gauauccuguggagugauc

SEQ ID NO: 1436937 - RNA, 19 nt, Homo sapiens
  misc_RNA (1)...(19): siRNA sense strand
agaaaugcagugacuauga

SEQ ID NO: 1436938 - RNA, 19 nt, Homo sapiens
  misc_RNA (1)...(19): siRNA sense strand
acuccgagaugaagaaaug

SEQ ID NO: 1436939 - RNA, 19 nt, Homo sapiens
  misc_RNA (1)...(19): siRNA sense strand
gcucucacaugaauaucga

SEQ ID NO: 1436940 - RNA, 19 nt, Homo sapiens
  misc_RNA (1)...(19): siRNA sense strand
ucagugaauuuaagaagca

SEQ ID NO: 1436941 - RNA, 19 nt, Homo sapiens
  misc_RNA (1)...(19): siRNA sense strand
augcaaaccugaaggcuau

SEQ ID NO: 1436942 - RNA, 19 nt, Homo sapiens
  misc_RNA (1)...(19): siRNA sense strand
uagagguacccgacaguua

SEQ ID NO: 1436943 - RNA, 19 nt, Homo sapiens
  misc_RNA (1)...(19): siRNA sense strand
gagauccugaugauucuuu

SEQ ID NO: 1436944 - RNA, 19 nt, Homo sapiens
  misc_RNA (1)...(19): siRNA sense strand
ucagaaugcccacaagcua

SEQ ID NO: 1436945 - RNA, 19 nt, Homo sapiens
  misc_RNA (1)...(19): siRNA sense strand
gaauuuaagaagcaugaug

SEQ ID NO: 1436946 - RNA, 19 nt, Homo sapiens
  misc_RNA (1)...(19): siRNA sense strand
gaagcuguuugcucauucu

SEQ ID NO: 1436947 - RNA, 19 nt, Homo sapiens
  misc_RNA (1)...(19): siRNA sense strand
agaguuccaucuuaacaga

SEQ ID NO: 1436948 - RNA, 19 nt, Homo sapiens
  misc_RNA (1)...(19): siRNA sense strand
gcaagguauuaacaaucuu

SEQ ID NO: 1436949 - RNA, 19 nt, Homo sapiens
  misc_RNA (1)...(19): siRNA sense strand
uggccacucugauagauga

SEQ ID NO: 1436950 - RNA, 19 nt, Homo sapiens
  misc_RNA (1)...(19): siRNA sense strand
uggaaacauuguaucgaaa

SEQ ID NO: 1436951 - RNA, 19 nt, Homo sapiens
  misc_RNA (1)...(19): siRNA sense strand
gagcaucuuccagucuaua

SEQ ID NO: 1436952 - RNA, 19 nt, Homo sapiens
  misc_RNA (1)...(19): siRNA sense strand
gcuaugaauucugucacaa

SEQ ID NO: 1436953 - RNA, 19 nt, Homo sapiens
  misc_RNA (1)...(19): siRNA sense strand
caacaugcaauuccugauc

SEQ ID NO: 1436954 - RNA, 19 nt, Homo sapiens
  misc_RNA (1)...(19): siRNA sense strand
gcagcaagaccaagucaag

SEQ ID NO: 1436955 - RNA, 19 nt, Homo sapiens
  misc_RNA (1)...(19): siRNA sense strand
gaggaggaggcuguuauuu

SEQ ID NO: 1436956 - RNA, 19 nt, Homo sapiens
  misc_RNA (1)...(19): siRNA sense strand
ggaggagucggcucugaga

SEQ ID NO: 1436957 - RNA, 19 nt, Homo sapiens
  misc_RNA (1)...(19): siRNA sense strand
aagauaguuuccaccauga

SEQ ID NO: 1436958 - RNA, 19 nt, Homo sapiens
  misc_RNA (1)...(19): siRNA sense strand
caguccaggugcacacuaa

SEQ ID NO: 1436959 - RNA, 19 nt, Homo sapiens
  misc_RNA (1)...(19): siRNA sense strand
gaagagccaaccagaagag

SEQ ID NO: 1436960 - RNA, 19 nt, Homo sapiens
  misc_RNA (1)...(19): siRNA sense strand
ccaagaaacaucugguaca

SEQ ID NO: 1436961 - RNA, 19 nt, Homo sapiens
  misc_RNA (1)...(19): siRNA sense strand
cuguucagcucucacauga

SEQ ID NO: 1436962 - RNA, 19 nt, Homo sapiens
  misc_RNA (1)...(19): siRNA sense strand
gcagauggaggagaagaga

SEQ ID NO: 1436963 - RNA, 19 nt, Homo sapiens
  misc_RNA (1)...(19): siRNA sense strand
ccacucugauagaugagaa

SEQ ID NO: 1436964 - RNA, 19 nt, Homo sapiens
  misc_RNA (1)...(19): siRNA sense strand
gcaaggauucaguagagau

SEQ ID NO: 1436965 - RNA, 19 nt, Homo sapiens
  misc_RNA (1)...(19): siRNA sense strand
acaaucaaguuugcuggaa

SEQ ID NO: 1436966 - RNA, 19 nt, Homo sapiens
  misc_RNA (1)...(19): siRNA sense strand
cuuccagucuauagaauau

SEQ ID NO: 1436967 - RNA, 19 nt, Homo sapiens
  misc_RNA (1)...(19): siRNA sense strand
ggcaaaggauuagcagagu

SEQ ID NO: 1436968 - RNA, 19 nt, Homo sapiens
  misc_RNA (1)...(19): siRNA sense strand
cgcaagguauuaacaaucu

SEQ ID NO: 1436969 - RNA, 19 nt, Homo sapiens
  misc_RNA (1)...(19): siRNA sense strand
gcaccuccacccaacauca

SEQ ID NO: 1436970 - RNA, 19 nt, Homo sapiens
  misc_RNA (1)...(19): siRNA sense strand
cagcucagcagacaacaug

SEQ ID NO: 1436971 - RNA, 19 nt, Homo sapiens
  misc_RNA (1)...(19): siRNA sense strand
gcugcaaggccaacacuau

SEQ ID NO: 1436972 - RNA, 19 nt, Homo sapiens
  misc_RNA (1)...(19): siRNA sense strand
uagauauccuguggaguga

SEQ ID NO: 1436973 - RNA, 19 nt, Homo sapiens
  misc_RNA (1)...(19): siRNA sense strand
gaggcagguuguagauauc

SEQ ID NO: 1436974 - RNA, 19 nt, Homo sapiens
  misc_RNA (1)...(19): siRNA sense strand
gacagaagagugagaagca

SEQ ID NO: 1436975 - RNA, 19 nt, Homo sapiens
  misc_RNA (1)...(19): siRNA sense strand
ggagcaucuuccagucuau

SEQ ID NO: 1436976 - RNA, 19 nt, Homo sapiens
  misc_RNA (1)...(19): siRNA sense strand
caaagauggccacauugau

SEQ ID NO: 1436977 - RNA, 19 nt, Homo sapiens
  misc_RNA (1)...(19): siRNA sense strand
uacaaaugcuaaagacagu

SEQ ID NO: 1436978 - RNA, 19 nt, Homo sapiens
  misc_RNA (1)...(19): siRNA sense strand
ccacaagcuacaaaugcua

SEQ ID NO: 1436979 - RNA, 19 nt, Homo sapiens
  misc_RNA (1)...(19): siRNA sense strand
ccaaggaagugaugaauaa

SEQ ID NO: 1436980 - RNA, 19 nt, Homo sapiens
  misc_RNA (1)...(19): siRNA sense strand
gaaaugcagugacuaugaa

SEQ ID NO: 1436981 - RNA, 19 nt, Homo sapiens
  misc_RNA (1)...(19): siRNA sense strand
ggaggcagguuguagauau

SEQ ID NO: 1436982 - RNA, 19 nt, Homo sapiens
  misc_RNA (1)...(19): siRNA sense strand
ccaauuggaugacuuaauc

SEQ ID NO: 1436983 - RNA, 19 nt, Homo sapiens
  misc_RNA (1)...(19): siRNA sense strand
gaagaaaugcagugacuau

SEQ ID NO: 1436984 - RNA, 19 nt, Homo sapiens
  misc_RNA (1)...(19): siRNA sense strand
gagaggagcaagauaguuu

SEQ ID NO: 1436985 - RNA, 19 nt, Homo sapiens
  misc_RNA (1)...(19): siRNA sense strand
agacuuacauggccaauug

SEQ ID NO: 1436986 - RNA, 19 nt, Homo sapiens
  misc_RNA (1)...(19): siRNA sense strand
uaagaacccugcaagaugu

SEQ ID NO: 1436987 - RNA, 19 nt, Homo sapiens
  misc_RNA (1)...(19): siRNA sense strand
cuucagaucuucucaguga

SEQ ID NO: 1436988 - RNA, 19 nt, Homo sapiens
  misc_RNA (1)...(19): siRNA sense strand
guagagauccugaugauuc

SEQ ID NO: 1436989 - RNA, 19 nt, Homo sapiens
  misc_RNA (1)...(19): siRNA sense strand
gagaagcuguuugcucauu

SEQ ID NO: 1436990 - RNA, 19 nt, Homo sapiens
  misc_RNA (1)...(19): siRNA sense strand
ccagaacggucauaugugu

SEQ ID NO: 1436991 - RNA, 19 nt, Homo sapiens
  misc_RNA (1)...(19): siRNA sense strand
gaucuucucagugaauuua

SEQ ID NO: 1436992 - RNA, 19 nt, Homo sapiens
  misc_RNA (1)...(19): siRNA sense strand
ggaaggaaauacuaagaac

SEQ ID NO: 1436993 - RNA, 19 nt, Homo sapiens
  misc_RNA (1)...(19): siRNA sense strand
uaacugaucuggagcuuuu

SEQ ID NO: 1436994 - RNA, 19 nt, Homo sapiens
  misc_RNA (1)...(19): siRNA sense strand
ggaggaggcuguuauuuug

SEQ ID NO: 1436995 - RNA, 19 nt, Homo sapiens
  misc_RNA (1)...(19): siRNA sense strand
gagaagagccaaccagaag

SEQ ID NO: 1436996 - RNA, 19 nt, Homo sapiens
  misc_RNA (1)...(19): siRNA sense strand
ucagcuaucucauggauca

SEQ ID NO: 1436997 - RNA, 19 nt, Homo sapiens
  misc_RNA (1)...(19): siRNA sense strand
ccaugcaacugcccuggua

SEQ ID NO: 1436998 - RNA, 19 nt, Homo sapiens
  misc_RNA (1)...(19): siRNA sense strand
gauauggcuucaccaagga

SEQ ID NO: 1436999 - RNA, 19 nt, Homo sapiens
  misc_RNA (1)...(19): siRNA sense strand
agaagcagauggaggagaa

SEQ ID NO: 1437000 - RNA, 19 nt, Homo sapiens
  misc_RNA (1)...(19): siRNA sense strand
guucaacggugacuuugug

SEQ ID NO: 1437001 - RNA, 19 nt, Homo sapiens
  misc_RNA (1)...(19): siRNA sense strand
ugaaggcuaugaauucugu

SEQ ID NO: 1437002 - RNA, 19 nt, Homo sapiens
  misc_RNA (1)...(19): siRNA sense strand
ucugauagaugagaaaguu

SEQ ID NO: 1437003 - RNA, 19 nt, Homo sapiens
  misc_RNA (1)...(19): siRNA sense strand
guacagcugccaaacauca

SEQ ID NO: 1437004 - RNA, 19 nt, Homo sapiens
  misc_RNA (1)...(19): siRNA sense strand
gcuguuugcucauucuuca

SEQ ID NO: 1437005 - RNA, 19 nt, Homo sapiens
  misc_RNA (1)...(19): siRNA sense strand
cauauucacugaggacaga

SEQ ID NO: 1437006 - RNA, 19 nt, Homo sapiens
  misc_RNA (1)...(19): siRNA sense strand
ucacaaccgcaagguauua

SEQ ID NO: 1437007 - RNA, 19 nt, Homo sapiens
  misc_RNA (1)...(19): siRNA sense strand
cuaagaacccugcaagaug

SEQ ID NO: 1437008 - RNA, 19 nt, Homo sapiens
  misc_RNA (1)...(19): siRNA sense strand
gaaaccaugaggaccauau

SEQ ID NO: 1437009 - RNA, 19 nt, Homo sapiens
  misc_RNA (1)...(19): siRNA sense strand
caguagagauccugaugau

SEQ ID NO: 1437010 - RNA, 19 nt, Homo sapiens
  misc_RNA (1)...(19): siRNA sense strand
gcccaggacuccgagauga

SEQ ID NO: 1437011 - RNA, 19 nt, Homo sapiens
  misc_RNA (1)...(19): siRNA sense strand
caagcuccaugacuucuuc

SEQ ID NO: 1437012 - RNA, 19 nt, Homo sapiens
  misc_RNA (1)...(19): siRNA sense strand
gggaaggaaauacuaagaa

SEQ ID NO: 1437013 - RNA, 19 nt, Homo sapiens
  misc_RNA (1)...(19): siRNA sense strand
caagaaacaucugguacag

SEQ ID NO: 1437014 - RNA, 19 nt, Homo sapiens
  misc_RNA (1)...(19): siRNA sense strand
gcaagauaguuuccaccau

SEQ ID NO: 1437015 - RNA, 19 nt, Homo sapiens
  misc_RNA (1)...(19): siRNA sense strand
aaacgagacagaagaguga

SEQ ID NO: 1437016 - RNA, 19 nt, Homo sapiens
  misc_RNA (1)...(19): siRNA sense strand
ucucauggaucacuucauc

SEQ ID NO: 1437017 - RNA, 19 nt, Homo sapiens
  misc_RNA (1)...(19): siRNA sense strand
ugagagcucugagggagaa

SEQ ID NO: 1437018 - RNA, 19 nt, Homo sapiens
  misc_RNA (1)...(19): siRNA sense strand
gauauccuguggagugauc

SEQ ID NO: 1437019 - RNA, 19 nt, Homo sapiens
  misc_RNA (1)...(19): siRNA sense strand
agaaaugcagugacuauga

SEQ ID NO: 1437020 - RNA, 19 nt, Homo sapiens
  misc_RNA (1)...(19): siRNA sense strand
acuccgagaugaagaaaug

SEQ ID NO: 1437021 - RNA, 19 nt, Homo sapiens
  misc_RNA (1)...(19): siRNA sense strand
ucagugaauuuaagaagca

SEQ ID NO: 1437022 - RNA, 19 nt, Homo sapiens
  misc_RNA (1)...(19): siRNA sense strand
augcaaaccugaaggcuau

SEQ ID NO: 1437023 - RNA, 19 nt, Homo sapiens
  misc_RNA (1)...(19): siRNA sense strand
uagagguacccgacaguua

SEQ ID NO: 1437024 - RNA, 19 nt, Homo sapiens
  misc_RNA (1)...(19): siRNA sense strand
gagauccugaugauucuuu

SEQ ID NO: 1437025 - RNA, 19 nt, Homo sapiens
  misc_RNA (1)...(19): siRNA sense strand
gaauuuaagaagcaugaug

SEQ ID NO: 1437026 - RNA, 19 nt, Homo sapiens
  misc_RNA (1)...(19): siRNA sense strand
gaagcuguuugcucauucu

SEQ ID NO: 1437027 - RNA, 19 nt, Homo sapiens
  misc_RNA (1)...(19): siRNA sense strand
agaguuccaucuuaacaga

SEQ ID NO: 1437028 - RNA, 19 nt, Homo sapiens
  misc_RNA (1)...(19): siRNA sense strand
gcaagguauuaacaaucuu

SEQ ID NO: 1437029 - RNA, 19 nt, Homo sapiens
  misc_RNA (1)...(19): siRNA sense strand
uggccacucugauagauga

SEQ ID NO: 1437030 - RNA, 19 nt, Homo sapiens
  misc_RNA (1)...(19): siRNA sense strand
gagcaucuuccagucuaua

SEQ ID NO: 1437031 - RNA, 19 nt, Homo sapiens
  misc_RNA (1)...(19): siRNA sense strand
gcuaugaauucugucacaa

SEQ ID NO: 1437032 - RNA, 19 nt, Homo sapiens
  misc_RNA (1)...(19): siRNA sense strand
gcagcaagaccaagucaag

SEQ ID NO: 1437033 - RNA, 19 nt, Homo sapiens
  misc_RNA (1)...(19): siRNA sense strand
caacaugcaauuccugauc

SEQ ID NO: 1437034 - RNA, 19 nt, Homo sapiens
  misc_RNA (1)...(19): siRNA sense strand
gaggaggaggcuguuauuu

SEQ ID NO: 1437035 - RNA, 19 nt, Homo sapiens
  misc_RNA (1)...(19): siRNA sense strand
ggaggagucggcucugaga

SEQ ID NO: 1437036 - RNA, 19 nt, Homo sapiens
  misc_RNA (1)...(19): siRNA sense strand
aagauaguuuccaccauga

SEQ ID NO: 1437037 - RNA, 19 nt, Homo sapiens
  misc_RNA (1)...(19): siRNA sense strand
gaagagccaaccagaagag

SEQ ID NO: 1437038 - RNA, 19 nt, Homo sapiens
  misc_RNA (1)...(19): siRNA sense strand
ccaagaaacaucugguaca

SEQ ID NO: 1437039 - RNA, 19 nt, Homo sapiens
  misc_RNA (1)...(19): siRNA sense strand
gcagauggaggagaagaga

SEQ ID NO: 1437040 - RNA, 19 nt, Homo sapiens
  misc_RNA (1)...(19): siRNA sense strand
ccacucugauagaugagaa

SEQ ID NO: 1437041 - RNA, 19 nt, Homo sapiens
  misc_RNA (1)...(19): siRNA sense strand
cuuccagucuauagaauau

SEQ ID NO: 1437042 - RNA, 19 nt, Homo sapiens
  misc_RNA (1)...(19): siRNA sense strand
ggcaaaggauuagcagagu

SEQ ID NO: 1437043 - RNA, 19 nt, Homo sapiens
  misc_RNA (1)...(19): siRNA sense strand
cgcaagguauuaacaaucu

SEQ ID NO: 1437044 - RNA, 19 nt, Homo sapiens
  misc_RNA (1)...(19): siRNA sense strand
gcaaggauucaguagagau

SEQ ID NO: 1437045 - RNA, 19 nt, Homo sapiens
  misc_RNA (1)...(19): siRNA sense strand
ggagcaucuuccagucuau

SEQ ID NO: 1437046 - RNA, 19 nt, Homo sapiens
  misc_RNA (1)...(19): siRNA sense strand
gcugcaaggccaacacuau

SEQ ID NO: 1437047 - RNA, 19 nt, Homo sapiens
  misc_RNA (1)...(19): siRNA sense strand
uagauauccuguggaguga

SEQ ID NO: 1437048 - RNA, 19 nt, Homo sapiens
  misc_RNA (1)...(19): siRNA sense strand
gaggcagguuguagauauc

SEQ ID NO: 1437049 - RNA, 19 nt, Homo sapiens
  misc_RNA (1)...(19): siRNA sense strand
gcaccuccacccaacauca

SEQ ID NO: 1437050 - RNA, 19 nt, Homo sapiens
  misc_RNA (1)...(19): siRNA sense strand
gacagaagagugagaagca

SEQ ID NO: 1437051 - RNA, 19 nt, Homo sapiens
  misc_RNA (1)...(19): siRNA sense strand
cagaucuucucagugaauu

SEQ ID NO: 1437052 - RNA, 19 nt, Homo sapiens
  misc_RNA (1)...(19): siRNA sense strand
caaggcagcagcccugauc

SEQ ID NO: 1437053 - RNA, 19 nt, Homo sapiens
  misc_RNA (1)...(19): siRNA sense strand
accaugaggcaaaggauua

SEQ ID NO: 1437054 - RNA, 19 nt, Homo sapiens
  misc_RNA (1)...(19): siRNA sense strand
cgaggaggaggcuguuauu

SEQ ID NO: 1437055 - RNA, 19 nt, Homo sapiens
  misc_RNA (1)...(19): siRNA sense strand
auggugaacuuacgauaug

SEQ ID NO: 1437056 - RNA, 19 nt, Homo sapiens
  misc_RNA (1)...(19): siRNA sense strand
uaacagaggaaaccaugag

SEQ ID NO: 1437057 - RNA, 19 nt, Homo sapiens
  misc_RNA (1)...(19): siRNA sense strand
caucuuccagucuauagaa

SEQ ID NO: 1437058 - RNA, 19 nt, Homo sapiens
  misc_RNA (1)...(19): siRNA sense strand
aggcaaggauucaguagag

SEQ ID NO: 1437059 - RNA, 19 nt, Homo sapiens
  misc_RNA (1)...(19): siRNA sense strand
caacggugacuuuguggau

SEQ ID NO: 1437060 - RNA, 19 nt, Homo sapiens
  misc_RNA (1)...(19): siRNA sense strand
uagagauccugaugauucu

SEQ ID NO: 1437061 - RNA, 19 nt, Homo sapiens
  misc_RNA (1)...(19): siRNA sense strand
gcaaaccugaaggcuauga

SEQ ID NO: 1437062 - RNA, 19 nt, Homo sapiens
  misc_RNA (1)...(19): siRNA sense strand
caagguacacgggaaggaa

SEQ ID NO: 1437063 - RNA, 19 nt, Homo sapiens
  misc_RNA (1)...(19): siRNA sense strand
ugguacagcugccaaacau

SEQ ID NO: 1437064 - RNA, 19 nt, Homo sapiens
  misc_RNA (1)...(19): siRNA sense strand
gugaucccauggcucaaga

SEQ ID NO: 1437065 - RNA, 19 nt, Homo sapiens
  misc_RNA (1)...(19): siRNA sense strand
cccgaaagccgcucucuuc

SEQ ID NO: 1437066 - RNA, 19 nt, Homo sapiens
  misc_RNA (1)...(19): siRNA sense strand
ccacuggccacucugauag

SEQ ID NO: 1437067 - RNA, 19 nt, Homo sapiens
  misc_RNA (1)...(19): siRNA sense strand
ggaagugaugaauaaauac

SEQ ID NO: 1437068 - RNA, 19 nt, Homo sapiens
  misc_RNA (1)...(19): siRNA sense strand
caaggaagugaugaauaaa

SEQ ID NO: 1437069 - RNA, 19 nt, Homo sapiens
  misc_RNA (1)...(19): siRNA sense strand
ggacuuccugacccgcaua

SEQ ID NO: 1437070 - RNA, 19 nt, Homo sapiens
  misc_RNA (1)...(19): siRNA sense strand
cgccagaacggucauaugu

SEQ ID NO: 1437071 - RNA, 19 nt, Homo sapiens
  misc_RNA (1)...(19): siRNA sense strand
uguaugaaaccaagaaaca

SEQ ID NO: 1437072 - RNA, 19 nt, Homo sapiens
  misc_RNA (1)...(19): siRNA sense strand
gcucauucuucagaucuuc

SEQ ID NO: 1437073 - RNA, 19 nt, Homo sapiens
  misc_RNA (1)...(19): siRNA sense strand
ccguggaacuggagcuaga

SEQ ID NO: 1437074 - RNA, 19 nt, Homo sapiens
  misc_RNA (1)...(19): siRNA sense strand
uccaugacuucuucagcua

SEQ ID NO: 1437075 - RNA, 19 nt, Homo sapiens
  misc_RNA (1)...(19): siRNA sense strand
acacgggaaggaaauacua

SEQ ID NO: 1437076 - RNA, 19 nt, Homo sapiens
  misc_RNA (1)...(19): siRNA sense strand
ggcaaggauucaguagaga

SEQ ID NO: 1437077 - RNA, 19 nt, Homo sapiens
  misc_RNA (1)...(19): siRNA sense strand
ugucacaaccgcaagguau

SEQ ID NO: 1437078 - RNA, 19 nt, Homo sapiens
  misc_RNA (1)...(19): siRNA sense strand
caaccgcaagguauuaaca

SEQ ID NO: 1437079 - RNA, 19 nt, Homo sapiens
  misc_RNA (1)...(19): siRNA sense strand
gaaaugcagugacuaugaa

SEQ ID NO: 1437080 - RNA, 19 nt, Homo sapiens
  misc_RNA (1)...(19): siRNA sense strand
gaagaaaugcagugacuau

SEQ ID NO: 1437081 - RNA, 19 nt, Homo sapiens
  misc_RNA (1)...(19): siRNA sense strand
ucagcuaucucauggauca

SEQ ID NO: 1437082 - RNA, 19 nt, Homo sapiens
  misc_RNA (1)...(19): siRNA sense strand
ccaugcaacugcccuggua

SEQ ID NO: 1437083 - RNA, 19 nt, Homo sapiens
  misc_RNA (1)...(19): siRNA sense strand
cauauucacugaggacaga

SEQ ID NO: 1437084 - RNA, 19 nt, Homo sapiens
  misc_RNA (1)...(19): siRNA sense strand
gcccaggacuccgagauga

SEQ ID NO: 1437085 - RNA, 19 nt, Homo sapiens
  misc_RNA (1)...(19): siRNA sense strand
caagcuccaugacuucuuc

SEQ ID NO: 1437086 - RNA, 19 nt, Homo sapiens
  misc_RNA (1)...(19): siRNA sense strand
ucucauggaucacuucauc

SEQ ID NO: 1437087 - RNA, 19 nt, Homo sapiens
  misc_RNA (1)...(19): siRNA sense strand
agaaaugcagugacuauga

SEQ ID NO: 1437088 - RNA, 19 nt, Homo sapiens
  misc_RNA (1)...(19): siRNA sense strand
acuccgagaugaagaaaug

SEQ ID NO: 1437089 - RNA, 19 nt, Homo sapiens
  misc_RNA (1)...(19): siRNA sense strand
uagagguacccgacaguua

SEQ ID NO: 1437090 - RNA, 19 nt, Homo sapiens
  misc_RNA (1)...(19): siRNA sense strand
gagcaucuuccagucuaua

SEQ ID NO: 1437091 - RNA, 19 nt, Homo sapiens
  misc_RNA (1)...(19): siRNA sense strand
gcagcaagaccaagucaag

SEQ ID NO: 1437092 - RNA, 19 nt, Homo sapiens
  misc_RNA (1)...(19): siRNA sense strand
cuuccagucuauagaauau

SEQ ID NO: 1437093 - RNA, 19 nt, Homo sapiens
  misc_RNA (1)...(19): siRNA sense strand
ggagcaucuuccagucuau

SEQ ID NO: 1437094 - RNA, 19 nt, Homo sapiens
  misc_RNA (1)...(19): siRNA sense strand
gcaccuccacccaacauca

SEQ ID NO: 1437095 - RNA, 19 nt, Homo sapiens
  misc_RNA (1)...(19): siRNA sense strand
caaggcagcagcccugauc

SEQ ID NO: 1437096 - RNA, 19 nt, Homo sapiens
  misc_RNA (1)...(19): siRNA sense strand
caucuuccagucuauagaa

SEQ ID NO: 1437097 - RNA, 19 nt, Homo sapiens
  misc_RNA (1)...(19): siRNA sense strand
ggacuuccugacccgcaua

SEQ ID NO: 1437098 - RNA, 19 nt, Homo sapiens
  misc_RNA (1)...(19): siRNA sense strand
uccaugacuucuucagcua

SEQ ID NO: 1437099 - RNA, 19 nt, Homo sapiens
  misc_RNA (1)...(19): siRNA sense strand
cuucagcuaucucauggau

SEQ ID NO: 1437100 - RNA, 19 nt, Homo sapiens
  misc_RNA (1)...(19): siRNA sense strand
gcuaucucauggaucacuu

SEQ ID NO: 1437101 - RNA, 19 nt, Homo sapiens
  misc_RNA (1)...(19): siRNA sense strand
ugacccgcauauucacuga

SEQ ID NO: 1437102 - RNA, 19 nt, Homo sapiens
  misc_RNA (1)...(19): siRNA sense strand
ggacuccgagaugaagaaa

SEQ ID NO: 1437103 - RNA, 19 nt, Homo sapiens
  misc_RNA (1)...(19): siRNA sense strand
caugacuucuucagcuauc

SEQ ID NO: 1437104 - RNA, 19 nt, Homo sapiens
  misc_RNA (1)...(19): siRNA sense strand
ccacaacgacagggacuuc

SEQ ID NO: 1437105 - RNA, 19 nt, Homo sapiens
  misc_RNA (1)...(19): siRNA sense strand
gcaacugcccugguagaag

SEQ ID NO: 1437106 - RNA, 19 nt, Homo sapiens
  misc_RNA (1)...(19): siRNA sense strand
gcagugacuaugaauccau

SEQ ID NO: 1437107 - RNA, 19 nt, Homo sapiens
  misc_RNA (1)...(19): siRNA sense strand
ccugguagaagcauucaga

SEQ ID NO: 1437108 - RNA, 19 nt, Homo sapiens
  misc_RNA (1)...(19): siRNA sense strand
caacaaagauggccacauu

SEQ ID NO: 1437109 - RNA, 19 nt, Homo sapiens
  misc_RNA (1)...(19): siRNA sense strand
ccaaggaagugaugaauaa

SEQ ID NO: 1437110 - RNA, 19 nt, Homo sapiens
  misc_RNA (1)...(19): siRNA sense strand
gaaaugcagugacuaugaa

SEQ ID NO: 1437111 - RNA, 19 nt, Homo sapiens
  misc_RNA (1)...(19): siRNA sense strand
gaacauacaaucaaguuug

SEQ ID NO: 1437112 - RNA, 19 nt, Homo sapiens
  misc_RNA (1)...(19): siRNA sense strand
ggaggcagguuguagauau

SEQ ID NO: 1437113 - RNA, 19 nt, Homo sapiens
  misc_RNA (1)...(19): siRNA sense strand
ccaauuggaugacuuaauc

SEQ ID NO: 1437114 - RNA, 19 nt, Homo sapiens
  misc_RNA (1)...(19): siRNA sense strand
gaagaaaugcagugacuau

SEQ ID NO: 1437115 - RNA, 19 nt, Homo sapiens
  misc_RNA (1)...(19): siRNA sense strand
gagaggagcaagauaguuu

SEQ ID NO: 1437116 - RNA, 19 nt, Homo sapiens
  misc_RNA (1)...(19): siRNA sense strand
agacuuacauggccaauug

SEQ ID NO: 1437117 - RNA, 19 nt, Homo sapiens
  misc_RNA (1)...(19): siRNA sense strand
uaagaacccugcaagaugu

SEQ ID NO: 1437118 - RNA, 19 nt, Homo sapiens
  misc_RNA (1)...(19): siRNA sense strand
cuucagaucuucucaguga

SEQ ID NO: 1437119 - RNA, 19 nt, Homo sapiens
  misc_RNA (1)...(19): siRNA sense strand
guagagauccugaugauuc

SEQ ID NO: 1437120 - RNA, 19 nt, Homo sapiens
  misc_RNA (1)...(19): siRNA sense strand
aaagauggccacauugaua

SEQ ID NO: 1437121 - RNA, 19 nt, Homo sapiens
  misc_RNA (1)...(19): siRNA sense strand
gagaagcuguuugcucauu

SEQ ID NO: 1437122 - RNA, 19 nt, Homo sapiens
  misc_RNA (1)...(19): siRNA sense strand
ccagaacggucauaugugu

SEQ ID NO: 1437123 - RNA, 19 nt, Homo sapiens
  misc_RNA (1)...(19): siRNA sense strand
ucacaugaauaucgacauu

SEQ ID NO: 1437124 - RNA, 19 nt, Homo sapiens
  misc_RNA (1)...(19): siRNA sense strand
gaucuucucagugaauuua

SEQ ID NO: 1437125 - RNA, 19 nt, Homo sapiens
  misc_RNA (1)...(19): siRNA sense strand
ggaaggaaauacuaagaac

SEQ ID NO: 1437126 - RNA, 19 nt, Homo sapiens
  misc_RNA (1)...(19): siRNA sense strand
uaacugaucuggagcuuuu

SEQ ID NO: 1437127 - RNA, 19 nt, Homo sapiens
  misc_RNA (1)...(19): siRNA sense strand
ggaggaggcuguuauuuug

SEQ ID NO: 1437128 - RNA, 19 nt, Homo sapiens
  misc_RNA (1)...(19): siRNA sense strand
gagaagagccaaccagaag

SEQ ID NO: 1437129 - RNA, 19 nt, Homo sapiens
  misc_RNA (1)...(19): siRNA sense strand
cagacaacaugcuggagua

SEQ ID NO: 1437130 - RNA, 19 nt, Homo sapiens
  misc_RNA (1)...(19): siRNA sense strand
gagaacauacaaucaaguu

SEQ ID NO: 1437131 - RNA, 19 nt, Homo sapiens
  misc_RNA (1)...(19): siRNA sense strand
ucagcuaucucauggauca

SEQ ID NO: 1437132 - RNA, 19 nt, Homo sapiens
  misc_RNA (1)...(19): siRNA sense strand
ccaugcaacugcccuggua

SEQ ID NO: 1437133 - RNA, 19 nt, Homo sapiens
  misc_RNA (1)...(19): siRNA sense strand
gauauggcuucaccaagga

SEQ ID NO: 1437134 - RNA, 19 nt, Homo sapiens
  misc_RNA (1)...(19): siRNA sense strand
caaucaaguuugcuggaaa

SEQ ID NO: 1437135 - RNA, 19 nt, Homo sapiens
  misc_RNA (1)...(19): siRNA sense strand
agaagcagauggaggagaa

SEQ ID NO: 1437136 - RNA, 19 nt, Homo sapiens
  misc_RNA (1)...(19): siRNA sense strand
guucaacggugacuuugug

SEQ ID NO: 1437137 - RNA, 19 nt, Homo sapiens
  misc_RNA (1)...(19): siRNA sense strand
ugaaggcuaugaauucugu

SEQ ID NO: 1437138 - RNA, 19 nt, Homo sapiens
  misc_RNA (1)...(19): siRNA sense strand
ucugauagaugagaaaguu

SEQ ID NO: 1437139 - RNA, 19 nt, Homo sapiens
  misc_RNA (1)...(19): siRNA sense strand
cagcagcgguggagucugu

SEQ ID NO: 1437140 - RNA, 19 nt, Homo sapiens
  misc_RNA (1)...(19): siRNA sense strand
gaacagcucagcagacaac

SEQ ID NO: 1437141 - RNA, 19 nt, Homo sapiens
  misc_RNA (1)...(19): siRNA sense strand
cauagacagugaucauuca

SEQ ID NO: 1437142 - RNA, 19 nt, Homo sapiens
  misc_RNA (1)...(19): siRNA sense strand
guacagcugccaaacauca

SEQ ID NO: 1437143 - RNA, 19 nt, Homo sapiens
  misc_RNA (1)...(19): siRNA sense strand
gaauaucgacauuacagau

SEQ ID NO: 1437144 - RNA, 19 nt, Homo sapiens
  misc_RNA (1)...(19): siRNA sense strand
gcuguuugcucauucuuca

SEQ ID NO: 1437145 - RNA, 19 nt, Homo sapiens
  misc_RNA (1)...(19): siRNA sense strand
cauauucacugaggacaga

SEQ ID NO: 1437146 - RNA, 19 nt, Homo sapiens
  misc_RNA (1)...(19): siRNA sense strand
ucacaaccgcaagguauua

SEQ ID NO: 1437147 - RNA, 19 nt, Homo sapiens
  misc_RNA (1)...(19): siRNA sense strand
cuaagaacccugcaagaug

SEQ ID NO: 1437148 - RNA, 19 nt, Homo sapiens
  misc_RNA (1)...(19): siRNA sense strand
gaaaccaugaggaccauau

SEQ ID NO: 1437149 - RNA, 19 nt, Homo sapiens
  misc_RNA (1)...(19): siRNA sense strand
caguagagauccugaugau

SEQ ID NO: 1437150 - RNA, 19 nt, Homo sapiens
  misc_RNA (1)...(19): siRNA sense strand
gcccaggacuccgagauga

SEQ ID NO: 1437151 - RNA, 19 nt, Homo sapiens
  misc_RNA (1)...(19): siRNA sense strand
caagcuccaugacuucuuc

SEQ ID NO: 1437152 - RNA, 19 nt, Homo sapiens
  misc_RNA (1)...(19): siRNA sense strand
gcgagaacauacaaucaag

SEQ ID NO: 1437153 - RNA, 19 nt, Homo sapiens
  misc_RNA (1)...(19): siRNA sense strand
gggaaggaaauacuaagaa

SEQ ID NO: 1437154 - RNA, 19 nt, Homo sapiens
  misc_RNA (1)...(19): siRNA sense strand
caagaaacaucugguacag

SEQ ID NO: 1437155 - RNA, 19 nt, Homo sapiens
  misc_RNA (1)...(19): siRNA sense strand
gcaagauaguuuccaccau

SEQ ID NO: 1437156 - RNA, 19 nt, Homo sapiens
  misc_RNA (1)...(19): siRNA sense strand
gauccaaccuagagaccau

SEQ ID NO: 1437157 - RNA, 19 nt, Homo sapiens
  misc_RNA (1)...(19): siRNA sense strand
gugaacagcucagcagaca

SEQ ID NO: 1437158 - RNA, 19 nt, Homo sapiens
  misc_RNA (1)...(19): siRNA sense strand
ggccacagcuggugaacag

SEQ ID NO: 1437159 - RNA, 19 nt, Homo sapiens
  misc_RNA (1)...(19): siRNA sense strand
aaacgagacagaagaguga

SEQ ID NO: 1437160 - RNA, 19 nt, Homo sapiens
  misc_RNA (1)...(19): siRNA sense strand
ucucauggaucacuucauc

SEQ ID NO: 1437161 - RNA, 19 nt, Homo sapiens
  misc_RNA (1)...(19): siRNA sense strand
acaaagauggccacauuga

SEQ ID NO: 1437162 - RNA, 19 nt, Homo sapiens
  misc_RNA (1)...(19): siRNA sense strand
cuggaaacauuguaucgaa

SEQ ID NO: 1437163 - RNA, 19 nt, Homo sapiens
  misc_RNA (1)...(19): siRNA sense strand
acaacaugcuggaguacaa

SEQ ID NO: 1437164 - RNA, 19 nt, Homo sapiens
  misc_RNA (1)...(19): siRNA sense strand
ugagagcucugagggagaa

SEQ ID NO: 1437165 - RNA, 19 nt, Homo sapiens
  misc_RNA (1)...(19): siRNA sense strand
gauauccuguggagugauc

SEQ ID NO: 1437166 - RNA, 19 nt, Homo sapiens
  misc_RNA (1)...(19): siRNA sense strand
agaaaugcagugacuauga

SEQ ID NO: 1437167 - RNA, 19 nt, Homo sapiens
  misc_RNA (1)...(19): siRNA sense strand
acuccgagaugaagaaaug

SEQ ID NO: 1437168 - RNA, 19 nt, Homo sapiens
  misc_RNA (1)...(19): siRNA sense strand
gcucucacaugaauaucga

SEQ ID NO: 1437169 - RNA, 19 nt, Homo sapiens
  misc_RNA (1)...(19): siRNA sense strand
ucagugaauuuaagaagca

SEQ ID NO: 1437170 - RNA, 19 nt, Homo sapiens
  misc_RNA (1)...(19): siRNA sense strand
augcaaaccugaaggcuau

SEQ ID NO: 1437171 - RNA, 19 nt, Homo sapiens
  misc_RNA (1)...(19): siRNA sense strand
uagagguacccgacaguua

SEQ ID NO: 1437172 - RNA, 19 nt, Homo sapiens
  misc_RNA (1)...(19): siRNA sense strand
gagauccugaugauucuuu

SEQ ID NO: 1437173 - RNA, 19 nt, Homo sapiens
  misc_RNA (1)...(19): siRNA sense strand
ucagaaugcccacaagcua

SEQ ID NO: 1437174 - RNA, 19 nt, Homo sapiens
  misc_RNA (1)...(19): siRNA sense strand
gaauuuaagaagcaugaug

SEQ ID NO: 1437175 - RNA, 19 nt, Homo sapiens
  misc_RNA (1)...(19): siRNA sense strand
gaagcuguuugcucauucu

SEQ ID NO: 1437176 - RNA, 19 nt, Homo sapiens
  misc_RNA (1)...(19): siRNA sense strand
agaguuccaucuuaacaga

SEQ ID NO: 1437177 - RNA, 19 nt, Homo sapiens
  misc_RNA (1)...(19): siRNA sense strand
gcaagguauuaacaaucuu

SEQ ID NO: 1437178 - RNA, 19 nt, Homo sapiens
  misc_RNA (1)...(19): siRNA sense strand
uggccacucugauagauga

SEQ ID NO: 1437179 - RNA, 19 nt, Homo sapiens
  misc_RNA (1)...(19): siRNA sense strand
uggaaacauuguaucgaaa

SEQ ID NO: 1437180 - RNA, 19 nt, Homo sapiens
  misc_RNA (1)...(19): siRNA sense strand
gagcaucuuccagucuaua

SEQ ID NO: 1437181 - RNA, 19 nt, Homo sapiens
  misc_RNA (1)...(19): siRNA sense strand
gcuaugaauucugucacaa

SEQ ID NO: 1437182 - RNA, 19 nt, Homo sapiens
  misc_RNA (1)...(19): siRNA sense strand
caacaugcaauuccugauc

SEQ ID NO: 1437183 - RNA, 19 nt, Homo sapiens
  misc_RNA (1)...(19): siRNA sense strand
gcagcaagaccaagucaag

SEQ ID NO: 1437184 - RNA, 19 nt, Homo sapiens
  misc_RNA (1)...(19): siRNA sense strand
gaggaggaggcuguuauuu

SEQ ID NO: 1437185 - RNA, 19 nt, Homo sapiens
  misc_RNA (1)...(19): siRNA sense strand
ggaggagucggcucugaga

SEQ ID NO: 1437186 - RNA, 19 nt, Homo sapiens
  misc_RNA (1)...(19): siRNA sense strand
aagauaguuuccaccauga

SEQ ID NO: 1437187 - RNA, 19 nt, Homo sapiens
  misc_RNA (1)...(19): siRNA sense strand
caguccaggugcacacuaa

SEQ ID NO: 1437188 - RNA, 19 nt, Homo sapiens
  misc_RNA (1)...(19): siRNA sense strand
gaagagccaaccagaagag

SEQ ID NO: 1437189 - RNA, 19 nt, Homo sapiens
  misc_RNA (1)...(19): siRNA sense strand
ccaagaaacaucugguaca

SEQ ID NO: 1437190 - RNA, 19 nt, Homo sapiens
  misc_RNA (1)...(19): siRNA sense strand
cuguucagcucucacauga

SEQ ID NO: 1437191 - RNA, 19 nt, Homo sapiens
  misc_RNA (1)...(19): siRNA sense strand
gcagauggaggagaagaga

SEQ ID NO: 1437192 - RNA, 19 nt, Homo sapiens
  misc_RNA (1)...(19): siRNA sense strand
ccacucugauagaugagaa

SEQ ID NO: 1437193 - RNA, 19 nt, Homo sapiens
  misc_RNA (1)...(19): siRNA sense strand
gcaaggauucaguagagau

SEQ ID NO: 1437194 - RNA, 19 nt, Homo sapiens
  misc_RNA (1)...(19): siRNA sense strand
acaaucaaguuugcuggaa

SEQ ID NO: 1437195 - RNA, 19 nt, Homo sapiens
  misc_RNA (1)...(19): siRNA sense strand
cuuccagucuauagaauau

SEQ ID NO: 1437196 - RNA, 19 nt, Homo sapiens
  misc_RNA (1)...(19): siRNA sense strand
ggcaaaggauuagcagagu

SEQ ID NO: 1437197 - RNA, 19 nt, Homo sapiens
  misc_RNA (1)...(19): siRNA sense strand
cgcaagguauuaacaaucu

SEQ ID NO: 1437198 - RNA, 19 nt, Homo sapiens
  misc_RNA (1)...(19): siRNA sense strand
gcaccuccacccaacauca

SEQ ID NO: 1437199 - RNA, 19 nt, Homo sapiens
  misc_RNA (1)...(19): siRNA sense strand
cagcucagcagacaacaug

SEQ ID NO: 1437200 - RNA, 19 nt, Homo sapiens
  misc_RNA (1)...(19): siRNA sense strand
gcugcaaggccaacacuau

SEQ ID NO: 1437201 - RNA, 19 nt, Homo sapiens
  misc_RNA (1)...(19): siRNA sense strand
uagauauccuguggaguga

SEQ ID NO: 1437202 - RNA, 19 nt, Homo sapiens
  misc_RNA (1)...(19): siRNA sense strand
gaggcagguuguagauauc

SEQ ID NO: 1437203 - RNA, 19 nt, Homo sapiens
  misc_RNA (1)...(19): siRNA sense strand
gacagaagagugagaagca

SEQ ID NO: 1437204 - RNA, 19 nt, Homo sapiens
  misc_RNA (1)...(19): siRNA sense strand
ggagcaucuuccagucuau

SEQ ID NO: 1437205 - RNA, 19 nt, Homo sapiens
  misc_RNA (1)...(19): siRNA sense strand
caaagauggccacauugau

SEQ ID NO: 1437206 - RNA, 19 nt, Homo sapiens
  misc_RNA (1)...(19): siRNA sense strand
uacaaaugcuaaagacagu

SEQ ID NO: 1437207 - RNA, 19 nt, Homo sapiens
  misc_RNA (1)...(19): siRNA sense strand
ccacaagcuacaaaugcua

SEQ ID NO: 1437208 - RNA, 19 nt, Homo sapiens
  misc_RNA (1)...(19): siRNA sense strand
ccaaggaagugaugaauaa

SEQ ID NO: 1437209 - RNA, 19 nt, Homo sapiens
  misc_RNA (1)...(19): siRNA sense strand
gaaaugcagugacuaugaa

SEQ ID NO: 1437210 - RNA, 19 nt, Homo sapiens
  misc_RNA (1)...(19): siRNA sense strand
ggaggcagguuguagauau

SEQ ID NO: 1437211 - RNA, 19 nt, Homo sapiens
  misc_RNA (1)...(19): siRNA sense strand
ccaauuggaugacuuaauc

SEQ ID NO: 1437212 - RNA, 19 nt, Homo sapiens
  misc_RNA (1)...(19): siRNA sense strand
gaagaaaugcagugacuau

SEQ ID NO: 1437213 - RNA, 19 nt, Homo sapiens
  misc_RNA (1)...(19): siRNA sense strand
gagaggagcaagauaguuu

SEQ ID NO: 1437214 - RNA, 19 nt, Homo sapiens
  misc_RNA (1)...(19): siRNA sense strand
agacuuacauggccaauug

SEQ ID NO: 1437215 - RNA, 19 nt, Homo sapiens
  misc_RNA (1)...(19): siRNA sense strand
uaagaacccugcaagaugu

SEQ ID NO: 1437216 - RNA, 19 nt, Homo sapiens
  misc_RNA (1)...(19): siRNA sense strand
cuucagaucuucucaguga

SEQ ID NO: 1437217 - RNA, 19 nt, Homo sapiens
  misc_RNA (1)...(19): siRNA sense strand
guagagauccugaugauuc

SEQ ID NO: 1437218 - RNA, 19 nt, Homo sapiens
  misc_RNA (1)...(19): siRNA sense strand
gagaagcuguuugcucauu

SEQ ID NO: 1437219 - RNA, 19 nt, Homo sapiens
  misc_RNA (1)...(19): siRNA sense strand
ccagaacggucauaugugu

SEQ ID NO: 1437220 - RNA, 19 nt, Homo sapiens
  misc_RNA (1)...(19): siRNA sense strand
gaucuucucagugaauuua

SEQ ID NO: 1437221 - RNA, 19 nt, Homo sapiens
  misc_RNA (1)...(19): siRNA sense strand
ggaaggaaauacuaagaac

SEQ ID NO: 1437222 - RNA, 19 nt, Homo sapiens
  misc_RNA (1)...(19): siRNA sense strand
uaacugaucuggagcuuuu

SEQ ID NO: 1437223 - RNA, 19 nt, Homo sapiens
  misc_RNA (1)...(19): siRNA sense strand
ggaggaggcuguuauuuug

SEQ ID NO: 1437224 - RNA, 19 nt, Homo sapiens
  misc_RNA (1)...(19): siRNA sense strand
gagaagagccaaccagaag

SEQ ID NO: 1437225 - RNA, 19 nt, Homo sapiens
  misc_RNA (1)...(19): siRNA sense strand
ucagcuaucucauggauca

SEQ ID NO: 1437226 - RNA, 19 nt, Homo sapiens
  misc_RNA (1)...(19): siRNA sense strand
ccaugcaacugcccuggua

SEQ ID NO: 1437227 - RNA, 19 nt, Homo sapiens
  misc_RNA (1)...(19): siRNA sense strand
gauauggcuucaccaagga

SEQ ID NO: 1437228 - RNA, 19 nt, Homo sapiens
  misc_RNA (1)...(19): siRNA sense strand
agaagcagauggaggagaa

SEQ ID NO: 1437229 - RNA, 19 nt, Homo sapiens
  misc_RNA (1)...(19): siRNA sense strand
guucaacggugacuuugug

SEQ ID NO: 1437230 - RNA, 19 nt, Homo sapiens
  misc_RNA (1)...(19): siRNA sense strand
ugaaggcuaugaauucugu

SEQ ID NO: 1437231 - RNA, 19 nt, Homo sapiens
  misc_RNA (1)...(19): siRNA sense strand
ucugauagaugagaaaguu

SEQ ID NO: 1437232 - RNA, 19 nt, Homo sapiens
  misc_RNA (1)...(19): siRNA sense strand
guacagcugccaaacauca

SEQ ID NO: 1437233 - RNA, 19 nt, Homo sapiens
  misc_RNA (1)...(19): siRNA sense strand
gcuguuugcucauucuuca

SEQ ID NO: 1437234 - RNA, 19 nt, Homo sapiens
  misc_RNA (1)...(19): siRNA sense strand
cauauucacugaggacaga

SEQ ID NO: 1437235 - RNA, 19 nt, Homo sapiens
  misc_RNA (1)...(19): siRNA sense strand
ucacaaccgcaagguauua

SEQ ID NO: 1437236 - RNA, 19 nt, Homo sapiens
  misc_RNA (1)...(19): siRNA sense strand
cuaagaacccugcaagaug

SEQ ID NO: 1437237 - RNA, 19 nt, Homo sapiens
  misc_RNA (1)...(19): siRNA sense strand
gaaaccaugaggaccauau

SEQ ID NO: 1437238 - RNA, 19 nt, Homo sapiens
  misc_RNA (1)...(19): siRNA sense strand
caguagagauccugaugau

SEQ ID NO: 1437239 - RNA, 19 nt, Homo sapiens
  misc_RNA (1)...(19): siRNA sense strand
gcccaggacuccgagauga

SEQ ID NO: 1437240 - RNA, 19 nt, Homo sapiens
  misc_RNA (1)...(19): siRNA sense strand
caagcuccaugacuucuuc

SEQ ID NO: 1437241 - RNA, 19 nt, Homo sapiens
  misc_RNA (1)...(19): siRNA sense strand
gggaaggaaauacuaagaa

SEQ ID NO: 1437242 - RNA, 19 nt, Homo sapiens
  misc_RNA (1)...(19): siRNA sense strand
caagaaacaucugguacag

SEQ ID NO: 1437243 - RNA, 19 nt, Homo sapiens
  misc_RNA (1)...(19): siRNA sense strand
gcaagauaguuuccaccau

SEQ ID NO: 1437244 - RNA, 19 nt, Homo sapiens
  misc_RNA (1)...(19): siRNA sense strand
aaacgagacagaagaguga

SEQ ID NO: 1437245 - RNA, 19 nt, Homo sapiens
  misc_RNA (1)...(19): siRNA sense strand
ucucauggaucacuucauc

SEQ ID NO: 1437246 - RNA, 19 nt, Homo sapiens
  misc_RNA (1)...(19): siRNA sense strand
ugagagcucugagggagaa

SEQ ID NO: 1437247 - RNA, 19 nt, Homo sapiens
  misc_RNA (1)...(19): siRNA sense strand
gauauccuguggagugauc

SEQ ID NO: 1437248 - RNA, 19 nt, Homo sapiens
  misc_RNA (1)...(19): siRNA sense strand
agaaaugcagugacuauga

SEQ ID NO: 1437249 - RNA, 19 nt, Homo sapiens
  misc_RNA (1)...(19): siRNA sense strand
acuccgagaugaagaaaug

SEQ ID NO: 1437250 - RNA, 19 nt, Homo sapiens
  misc_RNA (1)...(19): siRNA sense strand
ucagugaauuuaagaagca

SEQ ID NO: 1437251 - RNA, 19 nt, Homo sapiens
  misc_RNA (1)...(19): siRNA sense strand
augcaaaccugaaggcuau

SEQ ID NO: 1437252 - RNA, 19 nt, Homo sapiens
  misc_RNA (1)...(19): siRNA sense strand
uagagguacccgacaguua

SEQ ID NO: 1437253 - RNA, 19 nt, Homo sapiens
  misc_RNA (1)...(19): siRNA sense strand
gagauccugaugauucuuu

SEQ ID NO: 1437254 - RNA, 19 nt, Homo sapiens
  misc_RNA (1)...(19): siRNA sense strand
gaauuuaagaagcaugaug

SEQ ID NO: 1437255 - RNA, 19 nt, Homo sapiens
  misc_RNA (1)...(19): siRNA sense strand
gaagcuguuugcucauucu

SEQ ID NO: 1437256 - RNA, 19 nt, Homo sapiens
  misc_RNA (1)...(19): siRNA sense strand
agaguuccaucuuaacaga

SEQ ID NO: 1437257 - RNA, 19 nt, Homo sapiens
  misc_RNA (1)...(19): siRNA sense strand
gcaagguauuaacaaucuu

SEQ ID NO: 1437258 - RNA, 19 nt, Homo sapiens
  misc_RNA (1)...(19): siRNA sense strand
uggccacucugauagauga

SEQ ID NO: 1437259 - RNA, 19 nt, Homo sapiens
  misc_RNA (1)...(19): siRNA sense strand
gagcaucuuccagucuaua

SEQ ID NO: 1437260 - RNA, 19 nt, Homo sapiens
  misc_RNA (1)...(19): siRNA sense strand
gcuaugaauucugucacaa

SEQ ID NO: 1437261 - RNA, 19 nt, Homo sapiens
  misc_RNA (1)...(19): siRNA sense strand
gcagcaagaccaagucaag

SEQ ID NO: 1437262 - RNA, 19 nt, Homo sapiens
  misc_RNA (1)...(19): siRNA sense strand
caacaugcaauuccugauc

SEQ ID NO: 1437263 - RNA, 19 nt, Homo sapiens
  misc_RNA (1)...(19): siRNA sense strand
gaggaggaggcuguuauuu

SEQ ID NO: 1437264 - RNA, 19 nt, Homo sapiens
  misc_RNA (1)...(19): siRNA sense strand
ggaggagucggcucugaga

SEQ ID NO: 1437265 - RNA, 19 nt, Homo sapiens
  misc_RNA (1)...(19): siRNA sense strand
aagauaguuuccaccauga

SEQ ID NO: 1437266 - RNA, 19 nt, Homo sapiens
  misc_RNA (1)...(19): siRNA sense strand
gaagagccaaccagaagag

SEQ ID NO: 1437267 - RNA, 19 nt, Homo sapiens
  misc_RNA (1)...(19): siRNA sense strand
ccaagaaacaucugguaca

SEQ ID NO: 1437268 - RNA, 19 nt, Homo sapiens
  misc_RNA (1)...(19): siRNA sense strand
gcagauggaggagaagaga

SEQ ID NO: 1437269 - RNA, 19 nt, Homo sapiens
  misc_RNA (1)...(19): siRNA sense strand
ccacucugauagaugagaa

SEQ ID NO: 1437270 - RNA, 19 nt, Homo sapiens
  misc_RNA (1)...(19): siRNA sense strand
cuuccagucuauagaauau

SEQ ID NO: 1437271 - RNA, 19 nt, Homo sapiens
  misc_RNA (1)...(19): siRNA sense strand
ggcaaaggauuagcagagu

SEQ ID NO: 1437272 - RNA, 19 nt, Homo sapiens
  misc_RNA (1)...(19): siRNA sense strand
cgcaagguauuaacaaucu

SEQ ID NO: 1437273 - RNA, 19 nt, Homo sapiens
  misc_RNA (1)...(19): siRNA sense strand
gcaaggauucaguagagau

SEQ ID NO: 1437274 - RNA, 19 nt, Homo sapiens
  misc_RNA (1)...(19): siRNA sense strand
ggagcaucuuccagucuau

SEQ ID NO: 1437275 - RNA, 19 nt, Homo sapiens
  misc_RNA (1)...(19): siRNA sense strand
gcugcaaggccaacacuau

SEQ ID NO: 1437276 - RNA, 19 nt, Homo sapiens
  misc_RNA (1)...(19): siRNA sense strand
uagauauccuguggaguga

SEQ ID NO: 1437277 - RNA, 19 nt, Homo sapiens
  misc_RNA (1)...(19): siRNA sense strand
gaggcagguuguagauauc

SEQ ID NO: 1437278 - RNA, 19 nt, Homo sapiens
  misc_RNA (1)...(19): siRNA sense strand
gcaccuccacccaacauca

SEQ ID NO: 1437279 - RNA, 19 nt, Homo sapiens
  misc_RNA (1)...(19): siRNA sense strand
gacagaagagugagaagca

SEQ ID NO: 1437280 - RNA, 19 nt, Homo sapiens
  misc_RNA (1)...(19): siRNA sense strand
cagaucuucucagugaauu

SEQ ID NO: 1437281 - RNA, 19 nt, Homo sapiens
  misc_RNA (1)...(19): siRNA sense strand
caaggcagcagcccugauc

SEQ ID NO: 1437282 - RNA, 19 nt, Homo sapiens
  misc_RNA (1)...(19): siRNA sense strand
accaugaggcaaaggauua

SEQ ID NO: 1437283 - RNA, 19 nt, Homo sapiens
  misc_RNA (1)...(19): siRNA sense strand
cgaggaggaggcuguuauu

SEQ ID NO: 1437284 - RNA, 19 nt, Homo sapiens
  misc_RNA (1)...(19): siRNA sense strand
auggugaacuuacgauaug

SEQ ID NO: 1437285 - RNA, 19 nt, Homo sapiens
  misc_RNA (1)...(19): siRNA sense strand
uaacagaggaaaccaugag

SEQ ID NO: 1437286 - RNA, 19 nt, Homo sapiens
  misc_RNA (1)...(19): siRNA sense strand
caucuuccagucuauagaa

SEQ ID NO: 1437287 - RNA, 19 nt, Homo sapiens
  misc_RNA (1)...(19): siRNA sense strand
aggcaaggauucaguagag

SEQ ID NO: 1437288 - RNA, 19 nt, Homo sapiens
  misc_RNA (1)...(19): siRNA sense strand
caacggugacuuuguggau

SEQ ID NO: 1437289 - RNA, 19 nt, Homo sapiens
  misc_RNA (1)...(19): siRNA sense strand
uagagauccugaugauucu

SEQ ID NO: 1437290 - RNA, 19 nt, Homo sapiens
  misc_RNA (1)...(19): siRNA sense strand
gcaaaccugaaggcuauga

SEQ ID NO: 1437291 - RNA, 19 nt, Homo sapiens
  misc_RNA (1)...(19): siRNA sense strand
caagguacacgggaaggaa

SEQ ID NO: 1437292 - RNA, 19 nt, Homo sapiens
  misc_RNA (1)...(19): siRNA sense strand
ugguacagcugccaaacau

SEQ ID NO: 1437293 - RNA, 19 nt, Homo sapiens
  misc_RNA (1)...(19): siRNA sense strand
gugaucccauggcucaaga

SEQ ID NO: 1437294 - RNA, 19 nt, Homo sapiens
  misc_RNA (1)...(19): siRNA sense strand
cccgaaagccgcucucuuc

SEQ ID NO: 1437295 - RNA, 19 nt, Homo sapiens
  misc_RNA (1)...(19): siRNA sense strand
ccacuggccacucugauag

SEQ ID NO: 1437296 - RNA, 19 nt, Homo sapiens
  misc_RNA (1)...(19): siRNA sense strand
ggaagugaugaauaaauac

SEQ ID NO: 1437297 - RNA, 19 nt, Homo sapiens
  misc_RNA (1)...(19): siRNA sense strand
caaggaagugaugaauaaa

SEQ ID NO: 1437298 - RNA, 19 nt, Homo sapiens
  misc_RNA (1)...(19): siRNA sense strand
ggacuuccugacccgcaua

SEQ ID NO: 1437299 - RNA, 19 nt, Homo sapiens
  misc_RNA (1)...(19): siRNA sense strand
cgccagaacggucauaugu

SEQ ID NO: 1437300 - RNA, 19 nt, Homo sapiens
  misc_RNA (1)...(19): siRNA sense strand
uguaugaaaccaagaaaca

SEQ ID NO: 1437301 - RNA, 19 nt, Homo sapiens
  misc_RNA (1)...(19): siRNA sense strand
gcucauucuucagaucuuc

SEQ ID NO: 1437302 - RNA, 19 nt, Homo sapiens
  misc_RNA (1)...(19): siRNA sense strand
ccguggaacuggagcuaga

SEQ ID NO: 1437303 - RNA, 19 nt, Homo sapiens
  misc_RNA (1)...(19): siRNA sense strand
uccaugacuucuucagcua

SEQ ID NO: 1437304 - RNA, 19 nt, Homo sapiens
  misc_RNA (1)...(19): siRNA sense strand
acacgggaaggaaauacua

SEQ ID NO: 1437305 - RNA, 19 nt, Homo sapiens
  misc_RNA (1)...(19): siRNA sense strand
ggcaaggauucaguagaga

SEQ ID NO: 1437306 - RNA, 19 nt, Homo sapiens
  misc_RNA (1)...(19): siRNA sense strand
ugucacaaccgcaagguau

SEQ ID NO: 1437307 - RNA, 19 nt, Homo sapiens
  misc_RNA (1)...(19): siRNA sense strand
caaccgcaagguauuaaca

SEQ ID NO: 1437308 - RNA, 19 nt, Homo sapiens
  misc_RNA (1)...(19): siRNA sense strand
gaaaugcagugacuaugaa

SEQ ID NO: 1437309 - RNA, 19 nt, Homo sapiens
  misc_RNA (1)...(19): siRNA sense strand
gaagaaaugcagugacuau

SEQ ID NO: 1437310 - RNA, 19 nt, Homo sapiens
  misc_RNA (1)...(19): siRNA sense strand
ucagcuaucucauggauca

SEQ ID NO: 1437311 - RNA, 19 nt, Homo sapiens
  misc_RNA (1)...(19): siRNA sense strand
ccaugcaacugcccuggua

SEQ ID NO: 1437312 - RNA, 19 nt, Homo sapiens
  misc_RNA (1)...(19): siRNA sense strand
cauauucacugaggacaga

SEQ ID NO: 1437313 - RNA, 19 nt, Homo sapiens
  misc_RNA (1)...(19): siRNA sense strand
gcccaggacuccgagauga

SEQ ID NO: 1437314 - RNA, 19 nt, Homo sapiens
  misc_RNA (1)...(19): siRNA sense strand
caagcuccaugacuucuuc

SEQ ID NO: 1437315 - RNA, 19 nt, Homo sapiens
  misc_RNA (1)...(19): siRNA sense strand
ucucauggaucacuucauc

SEQ ID NO: 1437316 - RNA, 19 nt, Homo sapiens
  misc_RNA (1)...(19): siRNA sense strand
agaaaugcagugacuauga

SEQ ID NO: 1437317 - RNA, 19 nt, Homo sapiens
  misc_RNA (1)...(19): siRNA sense strand
acuccgagaugaagaaaug

SEQ ID NO: 1437318 - RNA, 19 nt, Homo sapiens
  misc_RNA (1)...(19): siRNA sense strand
uagagguacccgacaguua

SEQ ID NO: 1437319 - RNA, 19 nt, Homo sapiens
  misc_RNA (1)...(19): siRNA sense strand
gagcaucuuccagucuaua

SEQ ID NO: 1437320 - RNA, 19 nt, Homo sapiens
  misc_RNA (1)...(19): siRNA sense strand
gcagcaagaccaagucaag

SEQ ID NO: 1437321 - RNA, 19 nt, Homo sapiens
  misc_RNA (1)...(19): siRNA sense strand
cuuccagucuauagaauau

SEQ ID NO: 1437322 - RNA, 19 nt, Homo sapiens
  misc_RNA (1)...(19): siRNA sense strand
ggagcaucuuccagucuau

SEQ ID NO: 1437323 - RNA, 19 nt, Homo sapiens
  misc_RNA (1)...(19): siRNA sense strand
gcaccuccacccaacauca

SEQ ID NO: 1437324 - RNA, 19 nt, Homo sapiens
  misc_RNA (1)...(19): siRNA sense strand
caaggcagcagcccugauc

SEQ ID NO: 1437325 - RNA, 19 nt, Homo sapiens
  misc_RNA (1)...(19): siRNA sense strand
caucuuccagucuauagaa

SEQ ID NO: 1437326 - RNA, 19 nt, Homo sapiens
  misc_RNA (1)...(19): siRNA sense strand
ggacuuccugacccgcaua

SEQ ID NO: 1437327 - RNA, 19 nt, Homo sapiens
  misc_RNA (1)...(19): siRNA sense strand
uccaugacuucuucagcua

SEQ ID NO: 1437328 - RNA, 19 nt, Homo sapiens
  misc_RNA (1)...(19): siRNA sense strand
cuucagcuaucucauggau

SEQ ID NO: 1437329 - RNA, 19 nt, Homo sapiens
  misc_RNA (1)...(19): siRNA sense strand
gcuaucucauggaucacuu

SEQ ID NO: 1437330 - RNA, 19 nt, Homo sapiens
  misc_RNA (1)...(19): siRNA sense strand
ugacccgcauauucacuga

SEQ ID NO: 1437331 - RNA, 19 nt, Homo sapiens
  misc_RNA (1)...(19): siRNA sense strand
ggacuccgagaugaagaaa

SEQ ID NO: 1437332 - RNA, 19 nt, Homo sapiens
  misc_RNA (1)...(19): siRNA sense strand
caugacuucuucagcuauc

SEQ ID NO: 1437333 - RNA, 19 nt, Homo sapiens
  misc_RNA (1)...(19): siRNA sense strand
ccacaacgacagggacuuc

SEQ ID NO: 1437334 - RNA, 19 nt, Homo sapiens
  misc_RNA (1)...(19): siRNA sense strand
gcaacugcccugguagaag

SEQ ID NO: 1437335 - RNA, 19 nt, Homo sapiens
  misc_RNA (1)...(19): siRNA sense strand
gcagugacuaugaauccau

SEQ ID NO: 1437336 - RNA, 19 nt, Homo sapiens
  misc_RNA (1)...(19): siRNA sense strand
ccugguagaagcauucaga

SEQ ID NO: 1437337 - RNA, 19 nt, Homo sapiens
  misc_RNA (1)...(19): siRNA sense strand
gaaacugccuugaaagauc

SEQ ID NO: 1437338 - RNA, 19 nt, Homo sapiens
  misc_RNA (1)...(19): siRNA sense strand
aaacuuuccucccucaaua

SEQ ID NO: 1437339 - RNA, 19 nt, Homo sapiens
  misc_RNA (1)...(19): siRNA sense strand
caauugcucugaagaaaga

SEQ ID NO: 1437340 - RNA, 19 nt, Homo sapiens
  misc_RNA (1)...(19): siRNA sense strand
caagauggguccugacuca

SEQ ID NO: 1437341 - RNA, 19 nt, Homo sapiens
  misc_RNA (1)...(19): siRNA sense strand
gaagaaagaaagacauuca

SEQ ID NO: 1437342 - RNA, 19 nt, Homo sapiens
  misc_RNA (1)...(19): siRNA sense strand
acacaaggaugcuggcuuu

SEQ ID NO: 1437343 - RNA, 19 nt, Homo sapiens
  misc_RNA (1)...(19): siRNA sense strand
ggcagaaacuauucacauu

SEQ ID NO: 1437344 - RNA, 19 nt, Homo sapiens
  misc_RNA (1)...(19): siRNA sense strand
ucaauagacucaugaagug

SEQ ID NO: 1437345 - RNA, 19 nt, Homo sapiens
  misc_RNA (1)...(19): siRNA sense strand
gacaauugcucugaagaaa

SEQ ID NO: 1437346 - RNA, 19 nt, Homo sapiens
  misc_RNA (1)...(19): siRNA sense strand
cgaaggaaguuucuacugu

SEQ ID NO: 1437347 - RNA, 19 nt, Homo sapiens
  misc_RNA (1)...(19): siRNA sense strand
gaauguacaccacccuaua

SEQ ID NO: 1437348 - RNA, 19 nt, Homo sapiens
  misc_RNA (1)...(19): siRNA sense strand
ggaaacaucauaaaugcaa

SEQ ID NO: 1437349 - RNA, 19 nt, Homo sapiens
  misc_RNA (1)...(19): siRNA sense strand
ucuagaaacugccuugaaa

SEQ ID NO: 1437350 - RNA, 19 nt, Homo sapiens
  misc_RNA (1)...(19): siRNA sense strand
ggacaaauuugagucacuu

SEQ ID NO: 1437351 - RNA, 19 nt, Homo sapiens
  misc_RNA (1)...(19): siRNA sense strand
gaaaucucauccacagcua

SEQ ID NO: 1437352 - RNA, 19 nt, Homo sapiens
  misc_RNA (1)...(19): siRNA sense strand
uugaagagauggauaagaa

SEQ ID NO: 1437353 - RNA, 19 nt, Homo sapiens
  misc_RNA (1)...(19): siRNA sense strand
ggaaguuucuacugucaau

SEQ ID NO: 1437354 - RNA, 19 nt, Homo sapiens
  misc_RNA (1)...(19): siRNA sense strand
gcagucaccuguccagcuu

SEQ ID NO: 1437355 - RNA, 19 nt, Homo sapiens
  misc_RNA (1)...(19): siRNA sense strand
gaacagaagggagacaaga

SEQ ID NO: 1437356 - RNA, 19 nt, Homo sapiens
  misc_RNA (1)...(19): siRNA sense strand
caaggaugcuggcuuucaa

SEQ ID NO: 1437357 - RNA, 19 nt, Homo sapiens
  misc_RNA (1)...(19): siRNA sense strand
gauguggaaucgaaaguuc

SEQ ID NO: 1437358 - RNA, 19 nt, Homo sapiens
  misc_RNA (1)...(19): siRNA sense strand
caggacaagugaagagaaa

SEQ ID NO: 1437359 - RNA, 19 nt, Homo sapiens
  misc_RNA (1)...(19): siRNA sense strand
ggucauggccuaccucuuc

SEQ ID NO: 1437360 - RNA, 19 nt, Homo sapiens
  misc_RNA (1)...(19): siRNA sense strand
ccaaaugcuuccuguguca

SEQ ID NO: 1437361 - RNA, 19 nt, Homo sapiens
  misc_RNA (1)...(19): siRNA sense strand
caacuugaacguccaaaug

SEQ ID NO: 1437362 - RNA, 19 nt, Homo sapiens
  misc_RNA (1)...(19): siRNA sense strand
aaucagacuuuauggagaa

SEQ ID NO: 1437363 - RNA, 19 nt, Homo sapiens
  misc_RNA (1)...(19): siRNA sense strand
ccauugccuuuaucucaua

SEQ ID NO: 1437364 - RNA, 19 nt, Homo sapiens
  misc_RNA (1)...(19): siRNA sense strand
cuugaaagauccagaacaa

SEQ ID NO: 1437365 - RNA, 19 nt, Homo sapiens
  misc_RNA (1)...(19): siRNA sense strand
gucaaugugucccaggaua

SEQ ID NO: 1437366 - RNA, 19 nt, Homo sapiens
  misc_RNA (1)...(19): siRNA sense strand
gaaagaaagacauucaacu

SEQ ID NO: 1437367 - RNA, 19 nt, Homo sapiens
  misc_RNA (1)...(19): siRNA sense strand
gcagaaacuauucacauuc

SEQ ID NO: 1437368 - RNA, 19 nt, Homo sapiens
  misc_RNA (1)...(19): siRNA sense strand
ucugagacauacacacuuu

SEQ ID NO: 1437369 - RNA, 19 nt, Homo sapiens
  misc_RNA (1)...(19): siRNA sense strand
ccagugccauugccuuuau

SEQ ID NO: 1437370 - RNA, 19 nt, Homo sapiens
  misc_RNA (1)...(19): siRNA sense strand
gaaucgaaaguucuagaaa

SEQ ID NO: 1437371 - RNA, 19 nt, Homo sapiens
  misc_RNA (1)...(19): siRNA sense strand
ggauauagacugcauucug

SEQ ID NO: 1437372 - RNA, 19 nt, Homo sapiens
  misc_RNA (1)...(19): siRNA sense strand
caucaucgccggugcuuug

SEQ ID NO: 1437373 - RNA, 19 nt, Homo sapiens
  misc_RNA (1)...(19): siRNA sense strand
gaagagauggauaagaaag

SEQ ID NO: 1437374 - RNA, 19 nt, Homo sapiens
  misc_RNA (1)...(19): siRNA sense strand
ggauggcugcuuccugaua

SEQ ID NO: 1437375 - RNA, 19 nt, Homo sapiens
  misc_RNA (1)...(19): siRNA sense strand
gauaagaaagaucaagugu

SEQ ID NO: 1437376 - RNA, 19 nt, Homo sapiens
  misc_RNA (1)...(19): siRNA sense strand
gccuuuaucucauauucuu

SEQ ID NO: 1437377 - RNA, 19 nt, Homo sapiens
  misc_RNA (1)...(19): siRNA sense strand
ccaaugagaacaccuguca

SEQ ID NO: 1437378 - RNA, 19 nt, Homo sapiens
  misc_RNA (1)...(19): siRNA sense strand
caaaagugguuuagagaga

SEQ ID NO: 1437379 - RNA, 19 nt, Homo sapiens
  misc_RNA (1)...(19): siRNA sense strand
gaucaaguguaucugaacu

SEQ ID NO: 1437380 - RNA, 19 nt, Homo sapiens
  misc_RNA (1)...(19): siRNA sense strand
ggaaucgaaaguucuagaa

SEQ ID NO: 1437381 - RNA, 19 nt, Homo sapiens
  misc_RNA (1)...(19): siRNA sense strand
gaagggagacaagaaaucu

SEQ ID NO: 1437382 - RNA, 19 nt, Homo sapiens
  misc_RNA (1)...(19): siRNA sense strand
cauacacacuuuccagcaa

SEQ ID NO: 1437383 - RNA, 19 nt, Homo sapiens
  misc_RNA (1)...(19): siRNA sense strand
gccagcagguccagaaaca

SEQ ID NO: 1437384 - RNA, 19 nt, Homo sapiens
  misc_RNA (1)...(19): siRNA sense strand
guaaagccauccagaacac

SEQ ID NO: 1437385 - RNA, 19 nt, Homo sapiens
  misc_RNA (1)...(19): siRNA sense strand
caaugugucccaggauaua

SEQ ID NO: 1437386 - RNA, 19 nt, Homo sapiens
  misc_RNA (1)...(19): siRNA sense strand
gcaccugcaaccauggaua

SEQ ID NO: 1437387 - RNA, 19 nt, Homo sapiens
  misc_RNA (1)...(19): siRNA sense strand
aaguguaucugaacucuca

SEQ ID NO: 1437388 - RNA, 19 nt, Homo sapiens
  misc_RNA (1)...(19): siRNA sense strand
uagaaacugccuugaaaga

SEQ ID NO: 1437389 - RNA, 19 nt, Homo sapiens
  misc_RNA (1)...(19): siRNA sense strand
aagaaagacauucaacuug

SEQ ID NO: 1437390 - RNA, 19 nt, Homo sapiens
  misc_RNA (1)...(19): siRNA sense strand
ccuccuggccucaccuuua

SEQ ID NO: 1437391 - RNA, 19 nt, Homo sapiens
  misc_RNA (1)...(19): siRNA sense strand
aaacucaagcgauuacaga

SEQ ID NO: 1437392 - RNA, 19 nt, Homo sapiens
  misc_RNA (1)...(19): siRNA sense strand
caacuacucaagcaucaau

SEQ ID NO: 1437393 - RNA, 19 nt, Homo sapiens
  misc_RNA (1)...(19): siRNA sense strand
ggauaagaaagaucaagug

SEQ ID NO: 1437394 - RNA, 19 nt, Homo sapiens
  misc_RNA (1)...(19): siRNA sense strand
ucucaccaaucagacuuua

SEQ ID NO: 1437395 - RNA, 19 nt, Homo sapiens
  misc_RNA (1)...(19): siRNA sense strand
gcagguccagaaacaauau

SEQ ID NO: 1437396 - RNA, 19 nt, Homo sapiens
  misc_RNA (1)...(19): siRNA sense strand
ucacuuuucuccuguguaa

SEQ ID NO: 1437397 - RNA, 19 nt, Homo sapiens
  misc_RNA (1)...(19): siRNA sense strand
gauggcugcuuccugauac

SEQ ID NO: 1437398 - RNA, 19 nt, Homo sapiens
  misc_RNA (1)...(19): siRNA sense strand
gggcagaaacuauucacau

SEQ ID NO: 1437399 - RNA, 19 nt, Homo sapiens
  misc_RNA (1)...(19): siRNA sense strand
ucaccaaucagacuuuaug

SEQ ID NO: 1437400 - RNA, 19 nt, Homo sapiens
  misc_RNA (1)...(19): siRNA sense strand
guccagaaacaauaucaaa

SEQ ID NO: 1437401 - RNA, 19 nt, Homo sapiens
  misc_RNA (1)...(19): siRNA sense strand
ggcccagucugugccauuu

SEQ ID NO: 1437402 - RNA, 19 nt, Homo sapiens
  misc_RNA (1)...(19): siRNA sense strand
aagcaucaauagacucaug

SEQ ID NO: 1437403 - RNA, 19 nt, Homo sapiens
  misc_RNA (1)...(19): siRNA sense strand
ggauauacuucuggaucug

SEQ ID NO: 1437404 - RNA, 19 nt, Homo sapiens
  misc_RNA (1)...(19): siRNA sense strand
guguagcuauugaaacuca

SEQ ID NO: 1437405 - RNA, 19 nt, Homo sapiens
  misc_RNA (1)...(19): siRNA sense strand
uaguguagcuauugaaacu

SEQ ID NO: 1437406 - RNA, 19 nt, Homo sapiens
  misc_RNA (1)...(19): siRNA sense strand
ucacuucucaccaaucaga

SEQ ID NO: 1437407 - RNA, 19 nt, Homo sapiens
  misc_RNA (1)...(19): siRNA sense strand
ccucaauagugaaguguca

SEQ ID NO: 1437408 - RNA, 19 nt, Homo sapiens
  misc_RNA (1)...(19): siRNA sense strand
ccacuauucuccgggaugu

SEQ ID NO: 1437409 - RNA, 19 nt, Homo sapiens
  misc_RNA (1)...(19): siRNA sense strand
uuagagagaucguaaaauc

SEQ ID NO: 1437410 - RNA, 19 nt, Homo sapiens
  misc_RNA (1)...(19): siRNA sense strand
cagggaccauugcuucuuc

SEQ ID NO: 1437411 - RNA, 19 nt, Homo sapiens
  misc_RNA (1)...(19): siRNA sense strand
ugaaagauccagaacaaaa

SEQ ID NO: 1437412 - RNA, 19 nt, Homo sapiens
  misc_RNA (1)...(19): siRNA sense strand
aaucgaaaguucuagaaac

SEQ ID NO: 1437413 - RNA, 19 nt, Homo sapiens
  misc_RNA (1)...(19): siRNA sense strand
acagaagggagacaagaaa

SEQ ID NO: 1437414 - RNA, 19 nt, Homo sapiens
  misc_RNA (1)...(19): siRNA sense strand
cagaaacuauucacauucc

SEQ ID NO: 1437415 - RNA, 19 nt, Homo sapiens
  misc_RNA (1)...(19): siRNA sense strand
gguugugagugcugcuauu

SEQ ID NO: 1437416 - RNA, 19 nt, Homo sapiens
  misc_RNA (1)...(19): siRNA sense strand
ucaguaauuccaaugagaa

SEQ ID NO: 1437417 - RNA, 19 nt, Homo sapiens
  misc_RNA (1)...(19): siRNA sense strand
cuccaaggcuucuucaucu

SEQ ID NO: 1437418 - RNA, 19 nt, Homo sapiens
  misc_RNA (1)...(19): siRNA sense strand
ugugagugcugcuauugga

SEQ ID NO: 1437419 - RNA, 19 nt, Homo sapiens
  misc_RNA (1)...(19): siRNA sense strand
agagauggauaagaaagau

SEQ ID NO: 1437420 - RNA, 19 nt, Homo sapiens
  misc_RNA (1)...(19): siRNA sense strand
gccauugccuuuaucucau

SEQ ID NO: 1437421 - RNA, 19 nt, Homo sapiens
  misc_RNA (1)...(19): siRNA sense strand
agacaauugcucugaagaa

SEQ ID NO: 1437422 - RNA, 19 nt, Homo sapiens
  misc_RNA (1)...(19): siRNA sense strand
ccacagcuaccacuauucu

SEQ ID NO: 1437423 - RNA, 19 nt, Homo sapiens
  misc_RNA (1)...(19): siRNA sense strand
cagcagguccagaaacaau

SEQ ID NO: 1437424 - RNA, 19 nt, Homo sapiens
  misc_RNA (1)...(19): siRNA sense strand
uuuccucccucaauaguga

SEQ ID NO: 1437425 - RNA, 19 nt, Homo sapiens
  misc_RNA (1)...(19): siRNA sense strand
ugauacacgugaacaagag

SEQ ID NO: 1437426 - RNA, 19 nt, Homo sapiens
  misc_RNA (1)...(19): siRNA sense strand
gcagggaccauugcuucuu

SEQ ID NO: 1437427 - RNA, 19 nt, Homo sapiens
  misc_RNA (1)...(19): siRNA sense strand
uuauggaacugcugaucga

SEQ ID NO: 1437428 - RNA, 19 nt, Homo sapiens
  misc_RNA (1)...(19): siRNA sense strand
gucaacuacucaagcauca

SEQ ID NO: 1437429 - RNA, 19 nt, Homo sapiens
  misc_RNA (1)...(19): siRNA sense strand
cucaagcgauuacagacaa

SEQ ID NO: 1437430 - RNA, 19 nt, Homo sapiens
  misc_RNA (1)...(19): siRNA sense strand
agucacuucucaccaauca

SEQ ID NO: 1437431 - RNA, 19 nt, Homo sapiens
  misc_RNA (1)...(19): siRNA sense strand
gccuaccucuucaccauca

SEQ ID NO: 1437432 - RNA, 19 nt, Homo sapiens
  misc_RNA (1)...(19): siRNA sense strand
gacauccguugcagugaca

SEQ ID NO: 1437433 - RNA, 19 nt, Homo sapiens
  misc_RNA (1)...(19): siRNA sense strand
gagaacagaagggagacaa

SEQ ID NO: 1437434 - RNA, 19 nt, Homo sapiens
  misc_RNA (1)...(19): siRNA sense strand
ucaaguguaucugaacucu

SEQ ID NO: 1437435 - RNA, 19 nt, Homo sapiens
  misc_RNA (1)...(19): siRNA sense strand
gauggguccugacucaaaa

SEQ ID NO: 1437436 - RNA, 19 nt, Homo sapiens
  misc_RNA (1)...(19): siRNA sense strand
caaggcuucuucaucuucu

SEQ ID NO: 1437437 - RNA, 19 nt, Homo sapiens
  misc_RNA (1)...(19): siRNA sense strand
ggcagaaacuauucacauu

SEQ ID NO: 1437438 - RNA, 19 nt, Homo sapiens
  misc_RNA (1)...(19): siRNA sense strand
cgaaggaaguuucuacugu

SEQ ID NO: 1437439 - RNA, 19 nt, Homo sapiens
  misc_RNA (1)...(19): siRNA sense strand
gaauguacaccacccuaua

SEQ ID NO: 1437440 - RNA, 19 nt, Homo sapiens
  misc_RNA (1)...(19): siRNA sense strand
ggaaguuucuacugucaau

SEQ ID NO: 1437441 - RNA, 19 nt, Homo sapiens
  misc_RNA (1)...(19): siRNA sense strand
ccaaaugcuuccuguguca

SEQ ID NO: 1437442 - RNA, 19 nt, Homo sapiens
  misc_RNA (1)...(19): siRNA sense strand
gucaaugugucccaggaua

SEQ ID NO: 1437443 - RNA, 19 nt, Homo sapiens
  misc_RNA (1)...(19): siRNA sense strand
gcagaaacuauucacauuc

SEQ ID NO: 1437444 - RNA, 19 nt, Homo sapiens
  misc_RNA (1)...(19): siRNA sense strand
ggauauagacugcauucug

SEQ ID NO: 1437445 - RNA, 19 nt, Homo sapiens
  misc_RNA (1)...(19): siRNA sense strand
ccaaugagaacaccuguca

SEQ ID NO: 1437446 - RNA, 19 nt, Homo sapiens
  misc_RNA (1)...(19): siRNA sense strand
caaugugucccaggauaua

SEQ ID NO: 1437447 - RNA, 19 nt, Homo sapiens
  misc_RNA (1)...(19): siRNA sense strand
gcaccugcaaccauggaua

SEQ ID NO: 1437448 - RNA, 19 nt, Homo sapiens
  misc_RNA (1)...(19): siRNA sense strand
gggcagaaacuauucacau

SEQ ID NO: 1437449 - RNA, 19 nt, Homo sapiens
  misc_RNA (1)...(19): siRNA sense strand
ggauauacuucuggaucug

SEQ ID NO: 1437450 - RNA, 19 nt, Homo sapiens
  misc_RNA (1)...(19): siRNA sense strand
cagggaccauugcuucuuc

SEQ ID NO: 1437451 - RNA, 19 nt, Homo sapiens
  misc_RNA (1)...(19): siRNA sense strand
cagaaacuauucacauucc

SEQ ID NO: 1437452 - RNA, 19 nt, Homo sapiens
  misc_RNA (1)...(19): siRNA sense strand
ucaguaauuccaaugagaa

SEQ ID NO: 1437453 - RNA, 19 nt, Homo sapiens
  misc_RNA (1)...(19): siRNA sense strand
gcagggaccauugcuucuu

SEQ ID NO: 1437454 - RNA, 19 nt, Homo sapiens
  misc_RNA (1)...(19): siRNA sense strand
ggauuuaacgcuguguguu

SEQ ID NO: 1437455 - RNA, 19 nt, Homo sapiens
  misc_RNA (1)...(19): siRNA sense strand
aaggaaguuucuacuguca

SEQ ID NO: 1437456 - RNA, 19 nt, Homo sapiens
  misc_RNA (1)...(19): siRNA sense strand
guguuacaaugucgaagga

SEQ ID NO: 1437457 - RNA, 19 nt, Homo sapiens
  misc_RNA (1)...(19): siRNA sense strand
gcaaccauggauauacuuc

SEQ ID NO: 1437458 - RNA, 19 nt, Homo sapiens
  misc_RNA (1)...(19): siRNA sense strand
uggauauacuucuggaucu

SEQ ID NO: 1437459 - RNA, 19 nt, Homo sapiens
  misc_RNA (1)...(19): siRNA sense strand
ucaaugugucccaggauau

SEQ ID NO: 1437460 - RNA, 19 nt, Homo sapiens
  misc_RNA (1)...(19): siRNA sense strand
aaugcuuccugugucaaua

SEQ ID NO: 1437461 - RNA, 19 nt, Homo sapiens
  misc_RNA (1)...(19): siRNA sense strand
caaugucgaaggaaguuuc

SEQ ID NO: 1437462 - RNA, 19 nt, Homo sapiens
  misc_RNA (1)...(19): siRNA sense strand
aaccauggauauacuucug

SEQ ID NO: 1437463 - RNA, 19 nt, Homo sapiens
  misc_RNA (1)...(19): siRNA sense strand
caggauauagacugcauuc

SEQ ID NO: 1437464 - RNA, 19 nt, Homo sapiens
  misc_RNA (1)...(19): siRNA sense strand
uuggagcugugacucagaa

SEQ ID NO: 1437465 - RNA, 19 nt, Homo sapiens
  misc_RNA (1)...(19): siRNA sense strand
uucaguaauuccaaugaga

SEQ ID NO: 1437466 - RNA, 19 nt, Homo sapiens
  misc_RNA (1)...(19): siRNA sense strand
caccugcaaccauggauau

SEQ ID NO: 1437467 - RNA, 19 nt, Homo sapiens
  misc_RNA (1)...(19): siRNA sense strand
ugaauguacaccacccuau

SEQ ID NO: 1437468 - RNA, 19 nt, Homo sapiens
  misc_RNA (1)...(19): siRNA sense strand
gaagagcgaggguuaauga

SEQ ID NO: 1437469 - RNA, 19 nt, Homo sapiens
  misc_RNA (1)...(19): siRNA sense strand
ccacggagcacaccaauaa

SEQ ID NO: 1437470 - RNA, 19 nt, Homo sapiens
  misc_RNA (1)...(19): siRNA sense strand
gcacaccaauaacaagauu

SEQ ID NO: 1437471 - RNA, 19 nt, Homo sapiens
  misc_RNA (1)...(19): siRNA sense strand
gagaaaaucuacaucauga

SEQ ID NO: 1437472 - RNA, 19 nt, Homo sapiens
  misc_RNA (1)...(19): siRNA sense strand
cagcagagcccgaguugga

SEQ ID NO: 1437473 - RNA, 19 nt, Homo sapiens
  misc_RNA (1)...(19): siRNA sense strand
uuaaugagccagccacuga

SEQ ID NO: 1437474 - RNA, 19 nt, Homo sapiens
  misc_RNA (1)...(19): siRNA sense strand
gagcacaccaauaacaaga

SEQ ID NO: 1437475 - RNA, 19 nt, Homo sapiens
  misc_RNA (1)...(19): siRNA sense strand
ggaagcgaauucggcagaa

SEQ ID NO: 1437476 - RNA, 19 nt, Homo sapiens
  misc_RNA (1)...(19): siRNA sense strand
ggaagaggaagggaaagaa

SEQ ID NO: 1437477 - RNA, 19 nt, Homo sapiens
  misc_RNA (1)...(19): siRNA sense strand
gaagaggaagggaaagaag

SEQ ID NO: 1437478 - RNA, 19 nt, Homo sapiens
  misc_RNA (1)...(19): siRNA sense strand
ccacagcugccucuggaaa

SEQ ID NO: 1437479 - RNA, 19 nt, Homo sapiens
  misc_RNA (1)...(19): siRNA sense strand
cagaacccgucgcggaaga

SEQ ID NO: 1437480 - RNA, 19 nt, Homo sapiens
  misc_RNA (1)...(19): siRNA sense strand
gaagcgaauucggcagaag

SEQ ID NO: 1437481 - RNA, 19 nt, Homo sapiens
  misc_RNA (1)...(19): siRNA sense strand
ggaagagcgaggguuaaug

SEQ ID NO: 1437482 - RNA, 19 nt, Homo sapiens
  misc_RNA (1)...(19): siRNA sense strand
gcgaugucaugcucucagu

SEQ ID NO: 1437483 - RNA, 19 nt, Homo sapiens
  misc_RNA (1)...(19): siRNA sense strand
gaaaaucuacaucaugaag

SEQ ID NO: 1437484 - RNA, 19 nt, Homo sapiens
  misc_RNA (1)...(19): siRNA sense strand
ggagcacaccaauaacaag

SEQ ID NO: 1437485 - RNA, 19 nt, Homo sapiens
  misc_RNA (1)...(19): siRNA sense strand
gagcuggaggcggaccaua

SEQ ID NO: 1437486 - RNA, 19 nt, Homo sapiens
  misc_RNA (1)...(19): siRNA sense strand
cgcggaagagcgaggguua

SEQ ID NO: 1437487 - RNA, 19 nt, Homo sapiens
  misc_RNA (1)...(19): siRNA sense strand
cagcugcagcgaugucaug

SEQ ID NO: 1437488 - RNA, 19 nt, Homo sapiens
  misc_RNA (1)...(19): siRNA sense strand
gcggaagagcgaggguuaa

SEQ ID NO: 1437489 - RNA, 19 nt, Homo sapiens
  misc_RNA (1)...(19): siRNA sense strand
aagaggaagggaaagaaga

SEQ ID NO: 1437490 - RNA, 19 nt, Homo sapiens
  misc_RNA (1)...(19): siRNA sense strand
ccacggagcacaccaauaa

SEQ ID NO: 1437491 - RNA, 19 nt, Homo sapiens
  misc_RNA (1)...(19): siRNA sense strand
gcacaccaauaacaagauu

SEQ ID NO: 1437492 - RNA, 19 nt, Homo sapiens
  misc_RNA (1)...(19): siRNA sense strand
gagaaaaucuacaucauga

SEQ ID NO: 1437493 - RNA, 19 nt, Homo sapiens
  misc_RNA (1)...(19): siRNA sense strand
cagcagagcccgaguugga

SEQ ID NO: 1437494 - RNA, 19 nt, Homo sapiens
  misc_RNA (1)...(19): siRNA sense strand
gagcacaccaauaacaaga

SEQ ID NO: 1437495 - RNA, 19 nt, Homo sapiens
  misc_RNA (1)...(19): siRNA sense strand
ggaagaggaagggaaagaa

SEQ ID NO: 1437496 - RNA, 19 nt, Homo sapiens
  misc_RNA (1)...(19): siRNA sense strand
gaagaggaagggaaagaag

SEQ ID NO: 1437497 - RNA, 19 nt, Homo sapiens
  misc_RNA (1)...(19): siRNA sense strand
ccacagcugccucuggaaa

SEQ ID NO: 1437498 - RNA, 19 nt, Homo sapiens
  misc_RNA (1)...(19): siRNA sense strand
gcgaugucaugcucucagu

SEQ ID NO: 1437499 - RNA, 19 nt, Homo sapiens
  misc_RNA (1)...(19): siRNA sense strand
gaaaaucuacaucaugaag

SEQ ID NO: 1437500 - RNA, 19 nt, Homo sapiens
  misc_RNA (1)...(19): siRNA sense strand
ggagcacaccaauaacaag

SEQ ID NO: 1437501 - RNA, 19 nt, Homo sapiens
  misc_RNA (1)...(19): siRNA sense strand
gagcuggaggcggaccaua

SEQ ID NO: 1437502 - RNA, 19 nt, Homo sapiens
  misc_RNA (1)...(19): siRNA sense strand
cagcugcagcgaugucaug

SEQ ID NO: 1437503 - RNA, 19 nt, Homo sapiens
  misc_RNA (1)...(19): siRNA sense strand
aagaggaagggaaagaaga

SEQ ID NO: 1437504 - RNA, 19 nt, Homo sapiens
  misc_RNA (1)...(19): siRNA sense strand
caacgucucucaacagaug

SEQ ID NO: 1437505 - RNA, 19 nt, Homo sapiens
  misc_RNA (1)...(19): siRNA sense strand
ucaagacgcuggaaaguau

SEQ ID NO: 1437506 - RNA, 19 nt, Homo sapiens
  misc_RNA (1)...(19): siRNA sense strand
aaagaaagcgaaugacuga

SEQ ID NO: 1437507 - RNA, 19 nt, Homo sapiens
  misc_RNA (1)...(19): siRNA sense strand
gaugcagacucuuaugaga

SEQ ID NO: 1437508 - RNA, 19 nt, Homo sapiens
  misc_RNA (1)...(19): siRNA sense strand
ggucucagcugugacuuug

SEQ ID NO: 1437509 - RNA, 19 nt, Homo sapiens
  misc_RNA (1)...(19): siRNA sense strand
gacuuuggcuuaucugauc

SEQ ID NO: 1437510 - RNA, 19 nt, Homo sapiens
  misc_RNA (1)...(19): siRNA sense strand
ugaggaagaugcagacucu

SEQ ID NO: 1437511 - RNA, 19 nt, Homo sapiens
  misc_RNA (1)...(19): siRNA sense strand
ccagagauauguggguaau

SEQ ID NO: 1437512 - RNA, 19 nt, Homo sapiens
  misc_RNA (1)...(19): siRNA sense strand
ccaaagaccgcccugagau

SEQ ID NO: 1437513 - RNA, 19 nt, Homo sapiens
  misc_RNA (1)...(19): siRNA sense strand
cagcugugacuuuggcuua

SEQ ID NO: 1437514 - RNA, 19 nt, Homo sapiens
  misc_RNA (1)...(19): siRNA sense strand
uggaaggucucagcuguga

SEQ ID NO: 1437515 - RNA, 19 nt, Homo sapiens
  misc_RNA (1)...(19): siRNA sense strand
gggagugggcccagaagaa

SEQ ID NO: 1437516 - RNA, 19 nt, Homo sapiens
  misc_RNA (1)...(19): siRNA sense strand
uggcuuaucugaucuucug

SEQ ID NO: 1437517 - RNA, 19 nt, Homo sapiens
  misc_RNA (1)...(19): siRNA sense strand
agagauauguggguaaugg

SEQ ID NO: 1437518 - RNA, 19 nt, Homo sapiens
  misc_RNA (1)...(19): siRNA sense strand
ccaggagauucuucaaagu

SEQ ID NO: 1437519 - RNA, 19 nt, Homo sapiens
  misc_RNA (1)...(19): siRNA sense strand
aggagauucuucaaaguga

SEQ ID NO: 1437520 - RNA, 19 nt, Homo sapiens
  misc_RNA (1)...(19): siRNA sense strand
gcuggaaaguauuauuguc

SEQ ID NO: 1437521 - RNA, 19 nt, Homo sapiens
  misc_RNA (1)...(19): siRNA sense strand
ggaagucaggcccgaggaa

SEQ ID NO: 1437522 - RNA, 19 nt, Homo sapiens
  misc_RNA (1)...(19): siRNA sense strand
ucuccaacgcugagucuua

SEQ ID NO: 1437523 - RNA, 19 nt, Homo sapiens
  misc_RNA (1)...(19): siRNA sense strand
gggcauucuucaucuucaa

SEQ ID NO: 1437524 - RNA, 19 nt, Homo sapiens
  misc_RNA (1)...(19): siRNA sense strand
gccaaagaccgcccugaga

SEQ ID NO: 1437525 - RNA, 19 nt, Homo sapiens
  misc_RNA (1)...(19): siRNA sense strand
gacccaaucaugaggaaga

SEQ ID NO: 1437526 - RNA, 19 nt, Homo sapiens
  misc_RNA (1)...(19): siRNA sense strand
ugaagaacagguccucaga

SEQ ID NO: 1437527 - RNA, 19 nt, Homo sapiens
  misc_RNA (1)...(19): siRNA sense strand
caaagaccgcccugagauc

SEQ ID NO: 1437528 - RNA, 19 nt, Homo sapiens
  misc_RNA (1)...(19): siRNA sense strand
ccaacgcugagucuuauga

SEQ ID NO: 1437529 - RNA, 19 nt, Homo sapiens
  misc_RNA (1)...(19): siRNA sense strand
acgagaacccugaggauga

SEQ ID NO: 1437530 - RNA, 19 nt, Homo sapiens
  misc_RNA (1)...(19): siRNA sense strand
ugagaacgacuccaaccuu

SEQ ID NO: 1437531 - RNA, 19 nt, Homo sapiens
  misc_RNA (1)...(19): siRNA sense strand
gaaggucucagcugugacu

SEQ ID NO: 1437532 - RNA, 19 nt, Homo sapiens
  misc_RNA (1)...(19): siRNA sense strand
caggagauucuucaaagug

SEQ ID NO: 1437533 - RNA, 19 nt, Homo sapiens
  misc_RNA (1)...(19): siRNA sense strand
ggagugggcccagaagaag

SEQ ID NO: 1437534 - RNA, 19 nt, Homo sapiens
  misc_RNA (1)...(19): siRNA sense strand
ccaaggggccuaagucauu

SEQ ID NO: 1437535 - RNA, 19 nt, Homo sapiens
  misc_RNA (1)...(19): siRNA sense strand
cgagaacccugaggaugag

SEQ ID NO: 1437536 - RNA, 19 nt, Homo sapiens
  misc_RNA (1)...(19): siRNA sense strand
cuuaugagaacgaggauga

SEQ ID NO: 1437537 - RNA, 19 nt, Homo sapiens
  misc_RNA (1)...(19): siRNA sense strand
gaaaagaaagcgaaugacu

SEQ ID NO: 1437538 - RNA, 19 nt, Homo sapiens
  misc_RNA (1)...(19): siRNA sense strand
cuccaacgcugagucuuau

SEQ ID NO: 1437539 - RNA, 19 nt, Homo sapiens
  misc_RNA (1)...(19): siRNA sense strand
accaggagauucuucaaag

SEQ ID NO: 1437540 - RNA, 19 nt, Homo sapiens
  misc_RNA (1)...(19): siRNA sense strand
caccaggagauucuucaaa

SEQ ID NO: 1437541 - RNA, 19 nt, Homo sapiens
  misc_RNA (1)...(19): siRNA sense strand
uaugagaacauggauaauc

SEQ ID NO: 1437542 - RNA, 19 nt, Homo sapiens
  misc_RNA (1)...(19): siRNA sense strand
ggccugggaauccacauga

SEQ ID NO: 1437543 - RNA, 19 nt, Homo sapiens
  misc_RNA (1)...(19): siRNA sense strand
gaagguggaagagggagau

SEQ ID NO: 1437544 - RNA, 19 nt, Homo sapiens
  misc_RNA (1)...(19): siRNA sense strand
guggcaaccugaccauguc

SEQ ID NO: 1437545 - RNA, 19 nt, Homo sapiens
  misc_RNA (1)...(19): siRNA sense strand
gcucaagacgcuggaaagu

SEQ ID NO: 1437546 - RNA, 19 nt, Homo sapiens
  misc_RNA (1)...(19): siRNA sense strand
augaggaaccugacaguga

SEQ ID NO: 1437547 - RNA, 19 nt, Homo sapiens
  misc_RNA (1)...(19): siRNA sense strand
gcugugacuuuggcuuauc

SEQ ID NO: 1437548 - RNA, 19 nt, Homo sapiens
  misc_RNA (1)...(19): siRNA sense strand
uucaacgucucucaacaga

SEQ ID NO: 1437549 - RNA, 19 nt, Homo sapiens
  misc_RNA (1)...(19): siRNA sense strand
gaauguuucggaccuaggu

SEQ ID NO: 1437550 - RNA, 19 nt, Homo sapiens
  misc_RNA (1)...(19): siRNA sense strand
aagacgcuggaaaguauua

SEQ ID NO: 1437551 - RNA, 19 nt, Homo sapiens
  misc_RNA (1)...(19): siRNA sense strand
agucauugcugagccuaga

SEQ ID NO: 1437552 - RNA, 19 nt, Homo sapiens
  misc_RNA (1)...(19): siRNA sense strand
ugagaacgaggaugaagag

SEQ ID NO: 1437553 - RNA, 19 nt, Homo sapiens
  misc_RNA (1)...(19): siRNA sense strand
gcacugccccgucuuaugg

SEQ ID NO: 1437554 - RNA, 19 nt, Homo sapiens
  misc_RNA (1)...(19): siRNA sense strand
guggaauguuucggaccua

SEQ ID NO: 1437555 - RNA, 19 nt, Homo sapiens
  misc_RNA (1)...(19): siRNA sense strand
cagccuggacccaaucaug

SEQ ID NO: 1437556 - RNA, 19 nt, Homo sapiens
  misc_RNA (1)...(19): siRNA sense strand
acgcugagucuuaugagaa

SEQ ID NO: 1437557 - RNA, 19 nt, Homo sapiens
  misc_RNA (1)...(19): siRNA sense strand
gagugggcccagaagaaga

SEQ ID NO: 1437558 - RNA, 19 nt, Homo sapiens
  misc_RNA (1)...(19): siRNA sense strand
caagacgcuggaaaguauu

SEQ ID NO: 1437559 - RNA, 19 nt, Homo sapiens
  misc_RNA (1)...(19): siRNA sense strand
gggagcagcugauacaaga

SEQ ID NO: 1437560 - RNA, 19 nt, Homo sapiens
  misc_RNA (1)...(19): siRNA sense strand
caccaaagcuggcuacuac

SEQ ID NO: 1437561 - RNA, 19 nt, Homo sapiens
  misc_RNA (1)...(19): siRNA sense strand
guacggcccucaguguuug

SEQ ID NO: 1437562 - RNA, 19 nt, Homo sapiens
  misc_RNA (1)...(19): siRNA sense strand
ccaaagcuggcuacuacua

SEQ ID NO: 1437563 - RNA, 19 nt, Homo sapiens
  misc_RNA (1)...(19): siRNA sense strand
gaaggucucacgaggucaa

SEQ ID NO: 1437564 - RNA, 19 nt, Homo sapiens
  misc_RNA (1)...(19): siRNA sense strand
gaugguacccggucuuacu

SEQ ID NO: 1437565 - RNA, 19 nt, Homo sapiens
  misc_RNA (1)...(19): siRNA sense strand
aaagcuggcuacuacuaca

SEQ ID NO: 1437566 - RNA, 19 nt, Homo sapiens
  misc_RNA (1)...(19): siRNA sense strand
cuuccugggugguguggua

SEQ ID NO: 1437567 - RNA, 19 nt, Homo sapiens
  misc_RNA (1)...(19): siRNA sense strand
gugaugguacccggucuua

SEQ ID NO: 1437568 - RNA, 19 nt, Homo sapiens
  misc_RNA (1)...(19): siRNA sense strand
cguacggcccucaguguuu

SEQ ID NO: 1437569 - RNA, 19 nt, Homo sapiens
  misc_RNA (1)...(19): siRNA sense strand
ucaccaaagcuggcuacua

SEQ ID NO: 1437570 - RNA, 19 nt, Homo sapiens
  misc_RNA (1)...(19): siRNA sense strand
acuacuacaucuacuccaa

SEQ ID NO: 1437571 - RNA, 19 nt, Homo sapiens
  misc_RNA (1)...(19): siRNA sense strand
caaagcuggcuacuacuac

SEQ ID NO: 1437572 - RNA, 19 nt, Homo sapiens
  misc_RNA (1)...(19): siRNA sense strand
gacagaccgacaucccauu

SEQ ID NO: 1437573 - RNA, 19 nt, Homo sapiens
  misc_RNA (1)...(19): siRNA sense strand
ggucguccgugugcuggau

SEQ ID NO: 1437574 - RNA, 19 nt, Homo sapiens
  misc_RNA (1)...(19): siRNA sense strand
gggagcagcugauacaaga

SEQ ID NO: 1437575 - RNA, 19 nt, Homo sapiens
  misc_RNA (1)...(19): siRNA sense strand
caccaaagcuggcuacuac

SEQ ID NO: 1437576 - RNA, 19 nt, Homo sapiens
  misc_RNA (1)...(19): siRNA sense strand
guacggcccucaguguuug

SEQ ID NO: 1437577 - RNA, 19 nt, Homo sapiens
  misc_RNA (1)...(19): siRNA sense strand
ccaaagcuggcuacuacua

SEQ ID NO: 1437578 - RNA, 19 nt, Homo sapiens
  misc_RNA (1)...(19): siRNA sense strand
gaaggucucacgaggucaa

SEQ ID NO: 1437579 - RNA, 19 nt, Homo sapiens
  misc_RNA (1)...(19): siRNA sense strand
gaugguacccggucuuacu

SEQ ID NO: 1437580 - RNA, 19 nt, Homo sapiens
  misc_RNA (1)...(19): siRNA sense strand
aaagcuggcuacuacuaca

SEQ ID NO: 1437581 - RNA, 19 nt, Homo sapiens
  misc_RNA (1)...(19): siRNA sense strand
cuuccugggugguguggua

SEQ ID NO: 1437582 - RNA, 19 nt, Homo sapiens
  misc_RNA (1)...(19): siRNA sense strand
gugaugguacccggucuua

SEQ ID NO: 1437583 - RNA, 19 nt, Homo sapiens
  misc_RNA (1)...(19): siRNA sense strand
ggagacagucgugcagugu

SEQ ID NO: 1437584 - RNA, 19 nt, Homo sapiens
  misc_RNA (1)...(19): siRNA sense strand
cguacggcccucaguguuu

SEQ ID NO: 1437585 - RNA, 19 nt, Homo sapiens
  misc_RNA (1)...(19): siRNA sense strand
ucaccaaagcuggcuacua

SEQ ID NO: 1437586 - RNA, 19 nt, Homo sapiens
  misc_RNA (1)...(19): siRNA sense strand
acuacuacaucuacuccaa

SEQ ID NO: 1437587 - RNA, 19 nt, Homo sapiens
  misc_RNA (1)...(19): siRNA sense strand
caaagcuggcuacuacuac

SEQ ID NO: 1437588 - RNA, 19 nt, Homo sapiens
  misc_RNA (1)...(19): siRNA sense strand
gacagaccgacaucccauu

SEQ ID NO: 1437589 - RNA, 19 nt, Homo sapiens
  misc_RNA (1)...(19): siRNA sense strand
ggucguccgugugcuggau

SEQ ID NO: 1437590 - RNA, 19 nt, Homo sapiens
  misc_RNA (1)...(19): siRNA sense strand
gggagcagcugauacaaga

SEQ ID NO: 1437591 - RNA, 19 nt, Homo sapiens
  misc_RNA (1)...(19): siRNA sense strand
caccaaagcuggcuacuac

SEQ ID NO: 1437592 - RNA, 19 nt, Homo sapiens
  misc_RNA (1)...(19): siRNA sense strand
guacggcccucaguguuug

SEQ ID NO: 1437593 - RNA, 19 nt, Homo sapiens
  misc_RNA (1)...(19): siRNA sense strand
ccaaagcuggcuacuacua

SEQ ID NO: 1437594 - RNA, 19 nt, Homo sapiens
  misc_RNA (1)...(19): siRNA sense strand
gaaggucucacgaggucaa

SEQ ID NO: 1437595 - RNA, 19 nt, Homo sapiens
  misc_RNA (1)...(19): siRNA sense strand
gaugguacccggucuuacu

SEQ ID NO: 1437596 - RNA, 19 nt, Homo sapiens
  misc_RNA (1)...(19): siRNA sense strand
aaagcuggcuacuacuaca

SEQ ID NO: 1437597 - RNA, 19 nt, Homo sapiens
  misc_RNA (1)...(19): siRNA sense strand
cuuccugggugguguggua

SEQ ID NO: 1437598 - RNA, 19 nt, Homo sapiens
  misc_RNA (1)...(19): siRNA sense strand
gugaugguacccggucuua

SEQ ID NO: 1437599 - RNA, 19 nt, Homo sapiens
  misc_RNA (1)...(19): siRNA sense strand
cguacggcccucaguguuu

SEQ ID NO: 1437600 - RNA, 19 nt, Homo sapiens
  misc_RNA (1)...(19): siRNA sense strand
ucaccaaagcuggcuacua

SEQ ID NO: 1437601 - RNA, 19 nt, Homo sapiens
  misc_RNA (1)...(19): siRNA sense strand
acuacuacaucuacuccaa

SEQ ID NO: 1437602 - RNA, 19 nt, Homo sapiens
  misc_RNA (1)...(19): siRNA sense strand
caaagcuggcuacuacuac

SEQ ID NO: 1437603 - RNA, 19 nt, Homo sapiens
  misc_RNA (1)...(19): siRNA sense strand
gacagaccgacaucccauu

SEQ ID NO: 1437604 - RNA, 19 nt, Homo sapiens
  misc_RNA (1)...(19): siRNA sense strand
ggucguccgugugcuggau

SEQ ID NO: 1437605 - RNA, 19 nt, Homo sapiens
  misc_RNA (1)...(19): siRNA sense strand
gggagcagcugauacaaga

SEQ ID NO: 1437606 - RNA, 19 nt, Homo sapiens
  misc_RNA (1)...(19): siRNA sense strand
caccaaagcuggcuacuac

SEQ ID NO: 1437607 - RNA, 19 nt, Homo sapiens
  misc_RNA (1)...(19): siRNA sense strand
guacggcccucaguguuug

SEQ ID NO: 1437608 - RNA, 19 nt, Homo sapiens
  misc_RNA (1)...(19): siRNA sense strand
ccaaagcuggcuacuacua

SEQ ID NO: 1437609 - RNA, 19 nt, Homo sapiens
  misc_RNA (1)...(19): siRNA sense strand
gaaggucucacgaggucaa

SEQ ID NO: 1437610 - RNA, 19 nt, Homo sapiens
  misc_RNA (1)...(19): siRNA sense strand
gaugguacccggucuuacu

SEQ ID NO: 1437611 - RNA, 19 nt, Homo sapiens
  misc_RNA (1)...(19): siRNA sense strand
aaagcuggcuacuacuaca

SEQ ID NO: 1437612 - RNA, 19 nt, Homo sapiens
  misc_RNA (1)...(19): siRNA sense strand
cuuccugggugguguggua

SEQ ID NO: 1437613 - RNA, 19 nt, Homo sapiens
  misc_RNA (1)...(19): siRNA sense strand
gugaugguacccggucuua

SEQ ID NO: 1437614 - RNA, 19 nt, Homo sapiens
  misc_RNA (1)...(19): siRNA sense strand
ggagacagucgugcagugu

SEQ ID NO: 1437615 - RNA, 19 nt, Homo sapiens
  misc_RNA (1)...(19): siRNA sense strand
cguacggcccucaguguuu

SEQ ID NO: 1437616 - RNA, 19 nt, Homo sapiens
  misc_RNA (1)...(19): siRNA sense strand
ucaccaaagcuggcuacua

SEQ ID NO: 1437617 - RNA, 19 nt, Homo sapiens
  misc_RNA (1)...(19): siRNA sense strand
acuacuacaucuacuccaa

SEQ ID NO: 1437618 - RNA, 19 nt, Homo sapiens
  misc_RNA (1)...(19): siRNA sense strand
caaagcuggcuacuacuac

SEQ ID NO: 1437619 - RNA, 19 nt, Homo sapiens
  misc_RNA (1)...(19): siRNA sense strand
gacagaccgacaucccauu

SEQ ID NO: 1437620 - RNA, 19 nt, Homo sapiens
  misc_RNA (1)...(19): siRNA sense strand
ggucguccgugugcuggau

SEQ ID NO: 1437621 - RNA, 19 nt, Homo sapiens
  misc_RNA (1)...(19): siRNA sense strand
caaaugaacucuaaucuug

SEQ ID NO: 1437622 - RNA, 19 nt, Homo sapiens
  misc_RNA (1)...(19): siRNA sense strand
gaaaugagcuuugccuuau

SEQ ID NO: 1437623 - RNA, 19 nt, Homo sapiens
  misc_RNA (1)...(19): siRNA sense strand
gccaagagauuauuccuuu

SEQ ID NO: 1437624 - RNA, 19 nt, Homo sapiens
  misc_RNA (1)...(19): siRNA sense strand
gaacucuaaucuuggaaua

SEQ ID NO: 1437625 - RNA, 19 nt, Homo sapiens
  misc_RNA (1)...(19): siRNA sense strand
ggaaaugagcuuugccuua

SEQ ID NO: 1437626 - RNA, 19 nt, Homo sapiens
  misc_RNA (1)...(19): siRNA sense strand
gaagaaaucaagagugaaa

SEQ ID NO: 1437627 - RNA, 19 nt, Homo sapiens
  misc_RNA (1)...(19): siRNA sense strand
gaauaacugcugcuuguaa

SEQ ID NO: 1437628 - RNA, 19 nt, Homo sapiens
  misc_RNA (1)...(19): siRNA sense strand
guacagcccagaugugaua

SEQ ID NO: 1437629 - RNA, 19 nt, Homo sapiens
  misc_RNA (1)...(19): siRNA sense strand
gaagagggacacauuauuc

SEQ ID NO: 1437630 - RNA, 19 nt, Homo sapiens
  misc_RNA (1)...(19): siRNA sense strand
gcagaagagggacacauua

SEQ ID NO: 1437631 - RNA, 19 nt, Homo sapiens
  misc_RNA (1)...(19): siRNA sense strand
gaacgaaugaaucaguuaa

SEQ ID NO: 1437632 - RNA, 19 nt, Homo sapiens
  misc_RNA (1)...(19): siRNA sense strand
agagucagcuacaguuaua

SEQ ID NO: 1437633 - RNA, 19 nt, Homo sapiens
  misc_RNA (1)...(19): siRNA sense strand
gaagauacucagcaagaaa

SEQ ID NO: 1437634 - RNA, 19 nt, Homo sapiens
  misc_RNA (1)...(19): siRNA sense strand
caagaccuauguugaccua

SEQ ID NO: 1437635 - RNA, 19 nt, Homo sapiens
  misc_RNA (1)...(19): siRNA sense strand
cuaaagaagagaucaagua

SEQ ID NO: 1437636 - RNA, 19 nt, Homo sapiens
  misc_RNA (1)...(19): siRNA sense strand
gaaggauauuucacagcua

SEQ ID NO: 1437637 - RNA, 19 nt, Homo sapiens
  misc_RNA (1)...(19): siRNA sense strand
aaagggcucugaacuccua

SEQ ID NO: 1437638 - RNA, 19 nt, Homo sapiens
  misc_RNA (1)...(19): siRNA sense strand
cucauuaccuggaauauug

SEQ ID NO: 1437639 - RNA, 19 nt, Homo sapiens
  misc_RNA (1)...(19): siRNA sense strand
ucacagcuauaauguugaa

SEQ ID NO: 1437640 - RNA, 19 nt, Homo sapiens
  misc_RNA (1)...(19): siRNA sense strand
ggaacgaaugaaucaguua

SEQ ID NO: 1437641 - RNA, 19 nt, Homo sapiens
  misc_RNA (1)...(19): siRNA sense strand
uauuacaggucaugaagaa

SEQ ID NO: 1437642 - RNA, 19 nt, Homo sapiens
  misc_RNA (1)...(19): siRNA sense strand
uuucacagcuauaauguug

SEQ ID NO: 1437643 - RNA, 19 nt, Homo sapiens
  misc_RNA (1)...(19): siRNA sense strand
cagcccagaugugauauuu

SEQ ID NO: 1437644 - RNA, 19 nt, Homo sapiens
  misc_RNA (1)...(19): siRNA sense strand
uggaauaacugcugcuugu

SEQ ID NO: 1437645 - RNA, 19 nt, Homo sapiens
  misc_RNA (1)...(19): siRNA sense strand
ccuaaacauugccaguaua

SEQ ID NO: 1437646 - RNA, 19 nt, Homo sapiens
  misc_RNA (1)...(19): siRNA sense strand
gcccagaugugauauuucu

SEQ ID NO: 1437647 - RNA, 19 nt, Homo sapiens
  misc_RNA (1)...(19): siRNA sense strand
gaccugaaaccaucucuga

SEQ ID NO: 1437648 - RNA, 19 nt, Homo sapiens
  misc_RNA (1)...(19): siRNA sense strand
cagcuauaauguugaagaa

SEQ ID NO: 1437649 - RNA, 19 nt, Homo sapiens
  misc_RNA (1)...(19): siRNA sense strand
gggcgagccugaggugaaa

SEQ ID NO: 1437650 - RNA, 19 nt, Homo sapiens
  misc_RNA (1)...(19): siRNA sense strand
guuuggaccuucuuggauu

SEQ ID NO: 1437651 - RNA, 19 nt, Homo sapiens
  misc_RNA (1)...(19): siRNA sense strand
aauaacugcugcuuguaaa

SEQ ID NO: 1437652 - RNA, 19 nt, Homo sapiens
  misc_RNA (1)...(19): siRNA sense strand
ucuaagggaucgagagguu

SEQ ID NO: 1437653 - RNA, 19 nt, Homo sapiens
  misc_RNA (1)...(19): siRNA sense strand
ugaagauacucagcaagaa

SEQ ID NO: 1437654 - RNA, 19 nt, Homo sapiens
  misc_RNA (1)...(19): siRNA sense strand
aaacuggacugugguagau

SEQ ID NO: 1437655 - RNA, 19 nt, Homo sapiens
  misc_RNA (1)...(19): siRNA sense strand
ggauauuucacagcuauaa

SEQ ID NO: 1437656 - RNA, 19 nt, Homo sapiens
  misc_RNA (1)...(19): siRNA sense strand
caacugauuccaccacuuc

SEQ ID NO: 1437657 - RNA, 19 nt, Homo sapiens
  misc_RNA (1)...(19): siRNA sense strand
ugagaaaccuuuuaugugu

SEQ ID NO: 1437658 - RNA, 19 nt, Homo sapiens
  misc_RNA (1)...(19): siRNA sense strand
guaccaaaaugaugagaaa

SEQ ID NO: 1437659 - RNA, 19 nt, Homo sapiens
  misc_RNA (1)...(19): siRNA sense strand
ccuggaauauugauggauu

SEQ ID NO: 1437660 - RNA, 19 nt, Homo sapiens
  misc_RNA (1)...(19): siRNA sense strand
gaacgugucaggaaaugag

SEQ ID NO: 1437661 - RNA, 19 nt, Homo sapiens
  misc_RNA (1)...(19): siRNA sense strand
ugugguagauuuccuagug

SEQ ID NO: 1437662 - RNA, 19 nt, Homo sapiens
  misc_RNA (1)...(19): siRNA sense strand
ugaccuaaccaaugaagaa

SEQ ID NO: 1437663 - RNA, 19 nt, Homo sapiens
  misc_RNA (1)...(19): siRNA sense strand
ggaauaacugcugcuugua

SEQ ID NO: 1437664 - RNA, 19 nt, Homo sapiens
  misc_RNA (1)...(19): siRNA sense strand
aaugagcuuugccuuauga

SEQ ID NO: 1437665 - RNA, 19 nt, Homo sapiens
  misc_RNA (1)...(19): siRNA sense strand
agcauguucucucucauua

SEQ ID NO: 1437666 - RNA, 19 nt, Homo sapiens
  misc_RNA (1)...(19): siRNA sense strand
ucucugagcccaagaccua

SEQ ID NO: 1437667 - RNA, 19 nt, Homo sapiens
  misc_RNA (1)...(19): siRNA sense strand
ggucuucugugcaacuuag

SEQ ID NO: 1437668 - RNA, 19 nt, Homo sapiens
  misc_RNA (1)...(19): siRNA sense strand
gagaucaaguaauuaugag

SEQ ID NO: 1437669 - RNA, 19 nt, Homo sapiens
  misc_RNA (1)...(19): siRNA sense strand
ccaaugaagaaacaacuga

SEQ ID NO: 1437670 - RNA, 19 nt, Homo sapiens
  misc_RNA (1)...(19): siRNA sense strand
ugugauauuucuacaggaa

SEQ ID NO: 1437671 - RNA, 19 nt, Homo sapiens
  misc_RNA (1)...(19): siRNA sense strand
ccagagucagcuacaguua

SEQ ID NO: 1437672 - RNA, 19 nt, Homo sapiens
  misc_RNA (1)...(19): siRNA sense strand
cagaagagggacacauuau

SEQ ID NO: 1437673 - RNA, 19 nt, Homo sapiens
  misc_RNA (1)...(19): siRNA sense strand
ccuaaccaaugaagaaaca

SEQ ID NO: 1437674 - RNA, 19 nt, Homo sapiens
  misc_RNA (1)...(19): siRNA sense strand
uacaugggauacacaaaug

SEQ ID NO: 1437675 - RNA, 19 nt, Homo sapiens
  misc_RNA (1)...(19): siRNA sense strand
aaggauauuucacagcuau

SEQ ID NO: 1437676 - RNA, 19 nt, Homo sapiens
  misc_RNA (1)...(19): siRNA sense strand
ggcagcauguucucucuca

SEQ ID NO: 1437677 - RNA, 19 nt, Homo sapiens
  misc_RNA (1)...(19): siRNA sense strand
cggaacgaaugaaucaguu

SEQ ID NO: 1437678 - RNA, 19 nt, Homo sapiens
  misc_RNA (1)...(19): siRNA sense strand
guuccuacuuagcuuugua

SEQ ID NO: 1437679 - RNA, 19 nt, Homo sapiens
  misc_RNA (1)...(19): siRNA sense strand
cuggaauauugauggauua

SEQ ID NO: 1437680 - RNA, 19 nt, Homo sapiens
  misc_RNA (1)...(19): siRNA sense strand
aaugaacucuaaucuugga

SEQ ID NO: 1437681 - RNA, 19 nt, Homo sapiens
  misc_RNA (1)...(19): siRNA sense strand
ggaggagagcgccuuggaa

SEQ ID NO: 1437682 - RNA, 19 nt, Homo sapiens
  misc_RNA (1)...(19): siRNA sense strand
gugguagauuuccuaguga

SEQ ID NO: 1437683 - RNA, 19 nt, Homo sapiens
  misc_RNA (1)...(19): siRNA sense strand
aaacauugccaguauacau

SEQ ID NO: 1437684 - RNA, 19 nt, Homo sapiens
  misc_RNA (1)...(19): siRNA sense strand
gagcuuugccuuaugacau

SEQ ID NO: 1437685 - RNA, 19 nt, Homo sapiens
  misc_RNA (1)...(19): siRNA sense strand
gaacgacugggagauggaa

SEQ ID NO: 1437686 - RNA, 19 nt, Homo sapiens
  misc_RNA (1)...(19): siRNA sense strand
cagcauguucucucucauu

SEQ ID NO: 1437687 - RNA, 19 nt, Homo sapiens
  misc_RNA (1)...(19): siRNA sense strand
cugugcaacuuagauauaa

SEQ ID NO: 1437688 - RNA, 19 nt, Homo sapiens
  misc_RNA (1)...(19): siRNA sense strand
agaagagggacacauuauu

SEQ ID NO: 1437689 - RNA, 19 nt, Homo sapiens
  misc_RNA (1)...(19): siRNA sense strand
cagcuacaguuauauuugc

SEQ ID NO: 1437690 - RNA, 19 nt, Homo sapiens
  misc_RNA (1)...(19): siRNA sense strand
gaugagaaaccuuuuaugu

SEQ ID NO: 1437691 - RNA, 19 nt, Homo sapiens
  misc_RNA (1)...(19): siRNA sense strand
gaaaauggcagcauguucu

SEQ ID NO: 1437692 - RNA, 19 nt, Homo sapiens
  misc_RNA (1)...(19): siRNA sense strand
acuggacugugguagauuu

SEQ ID NO: 1437693 - RNA, 19 nt, Homo sapiens
  misc_RNA (1)...(19): siRNA sense strand
uuuggaccuucuuggauua

SEQ ID NO: 1437694 - RNA, 19 nt, Homo sapiens
  misc_RNA (1)...(19): siRNA sense strand
gaccuaaccaaugaagaaa

SEQ ID NO: 1437695 - RNA, 19 nt, Homo sapiens
  misc_RNA (1)...(19): siRNA sense strand
gugaacgugucaggaaaug

SEQ ID NO: 1437696 - RNA, 19 nt, Homo sapiens
  misc_RNA (1)...(19): siRNA sense strand
gaagaaacaacugauucca

SEQ ID NO: 1437697 - RNA, 19 nt, Homo sapiens
  misc_RNA (1)...(19): siRNA sense strand
guagauuuccuagugauca

SEQ ID NO: 1437698 - RNA, 19 nt, Homo sapiens
  misc_RNA (1)...(19): siRNA sense strand
uuucagagcagcagcagaa

SEQ ID NO: 1437699 - RNA, 19 nt, Homo sapiens
  misc_RNA (1)...(19): siRNA sense strand
acacaaaugaacucuaauc

SEQ ID NO: 1437700 - RNA, 19 nt, Homo sapiens
  misc_RNA (1)...(19): siRNA sense strand
gauuauuacaggucaugaa

SEQ ID NO: 1437701 - RNA, 19 nt, Homo sapiens
  misc_RNA (1)...(19): siRNA sense strand
ucaugaagaaggauauuuc

SEQ ID NO: 1437702 - RNA, 19 nt, Homo sapiens
  misc_RNA (1)...(19): siRNA sense strand
cuuaugacaucccauuugg

SEQ ID NO: 1437703 - RNA, 19 nt, Homo sapiens
  misc_RNA (1)...(19): siRNA sense strand
aaaugagcuuugccuuaug

SEQ ID NO: 1437704 - RNA, 19 nt, Homo sapiens
  misc_RNA (1)...(19): siRNA sense strand
ucugugcaacuuagauaua

SEQ ID NO: 1437705 - RNA, 19 nt, Homo sapiens
  misc_RNA (1)...(19): siRNA sense strand
gauacacaaaugaacucua

SEQ ID NO: 1437706 - RNA, 19 nt, Homo sapiens
  misc_RNA (1)...(19): siRNA sense strand
uauguugaccuaaccaaug

SEQ ID NO: 1437707 - RNA, 19 nt, Homo sapiens
  misc_RNA (1)...(19): siRNA sense strand
ucagcuacaguuauauuug

SEQ ID NO: 1437708 - RNA, 19 nt, Homo sapiens
  misc_RNA (1)...(19): siRNA sense strand
cagaugugauauuucuaca

SEQ ID NO: 1437709 - RNA, 19 nt, Homo sapiens
  misc_RNA (1)...(19): siRNA sense strand
gagcccaagaccuauguug

SEQ ID NO: 1437710 - RNA, 19 nt, Homo sapiens
  misc_RNA (1)...(19): siRNA sense strand
auguugaccuaaccaauga

SEQ ID NO: 1437711 - RNA, 19 nt, Homo sapiens
  misc_RNA (1)...(19): siRNA sense strand
ugauauuucuacaggaagu

SEQ ID NO: 1437712 - RNA, 19 nt, Homo sapiens
  misc_RNA (1)...(19): siRNA sense strand
cgagaacgacugggagaug

SEQ ID NO: 1437713 - RNA, 19 nt, Homo sapiens
  misc_RNA (1)...(19): siRNA sense strand
auacaugggauacacaaau

SEQ ID NO: 1437714 - RNA, 19 nt, Homo sapiens
  misc_RNA (1)...(19): siRNA sense strand
cagagucagcuacaguuau

SEQ ID NO: 1437715 - RNA, 19 nt, Homo sapiens
  misc_RNA (1)...(19): siRNA sense strand
gagauuauuacaggucaug

SEQ ID NO: 1437716 - RNA, 19 nt, Homo sapiens
  misc_RNA (1)...(19): siRNA sense strand
ggaauauugauggauuaga

SEQ ID NO: 1437717 - RNA, 19 nt, Homo sapiens
  misc_RNA (1)...(19): siRNA sense strand
ugggcaaaccuaaacauug

SEQ ID NO: 1437718 - RNA, 19 nt, Homo sapiens
  misc_RNA (1)...(19): siRNA sense strand
ggacugugguagauuuccu

SEQ ID NO: 1437719 - RNA, 19 nt, Homo sapiens
  misc_RNA (1)...(19): siRNA sense strand
cugauuccaccacuucuaa

SEQ ID NO: 1437720 - RNA, 19 nt, Homo sapiens
  misc_RNA (1)...(19): siRNA sense strand
caugggauacacaaaugaa

SEQ ID NO: 1437721 - RNA, 19 nt, Homo sapiens
  misc_RNA (1)...(19): siRNA sense strand
ugaagaaggugcacgugaa

SEQ ID NO: 1437722 - RNA, 19 nt, Homo sapiens
  misc_RNA (1)...(19): siRNA sense strand
gaucauaagcugcccaaca

SEQ ID NO: 1437723 - RNA, 19 nt, Homo sapiens
  misc_RNA (1)...(19): siRNA sense strand
acacggaccugacgaccuu

SEQ ID NO: 1437724 - RNA, 19 nt, Homo sapiens
  misc_RNA (1)...(19): siRNA sense strand
ggucaugaguucguauaug

SEQ ID NO: 1437725 - RNA, 19 nt, Homo sapiens
  misc_RNA (1)...(19): siRNA sense strand
gaagaaggugcacgugaau

SEQ ID NO: 1437726 - RNA, 19 nt, Homo sapiens
  misc_RNA (1)...(19): siRNA sense strand
gucaugaguucguauaugg

SEQ ID NO: 1437727 - RNA, 19 nt, Homo sapiens
  misc_RNA (1)...(19): siRNA sense strand
cauaagcugcccaacacua

SEQ ID NO: 1437728 - RNA, 19 nt, Homo sapiens
  misc_RNA (1)...(19): siRNA sense strand
ggucaucguccucaucuuc

SEQ ID NO: 1437729 - RNA, 19 nt, Homo sapiens
  misc_RNA (1)...(19): siRNA sense strand
gcacgugaauucggugaac

SEQ ID NO: 1437730 - RNA, 19 nt, Homo sapiens
  misc_RNA (1)...(19): siRNA sense strand
gcaaguccuagaacuggaa

SEQ ID NO: 1437731 - RNA, 19 nt, Homo sapiens
  misc_RNA (1)...(19): siRNA sense strand
ggaccugacgaccuuauag

SEQ ID NO: 1437732 - RNA, 19 nt, Homo sapiens
  misc_RNA (1)...(19): siRNA sense strand
gcagcaaguccuagaacug

SEQ ID NO: 1437733 - RNA, 19 nt, Homo sapiens
  misc_RNA (1)...(19): siRNA sense strand
cguauauggugaacuccaa

SEQ ID NO: 1437734 - RNA, 19 nt, Homo sapiens
  misc_RNA (1)...(19): siRNA sense strand
uacagccgauggccaaaga

SEQ ID NO: 1437735 - RNA, 19 nt, Homo sapiens
  misc_RNA (1)...(19): siRNA sense strand
uuuaacagguaucugacaa

SEQ ID NO: 1437736 - RNA, 19 nt, Homo sapiens
  misc_RNA (1)...(19): siRNA sense strand
agaaggugcacgugaauuc

SEQ ID NO: 1437737 - RNA, 19 nt, Homo sapiens
  misc_RNA (1)...(19): siRNA sense strand
auaagcugcccaacacuaa

SEQ ID NO: 1437738 - RNA, 19 nt, Homo sapiens
  misc_RNA (1)...(19): siRNA sense strand
uuccagaaccggaggauga

SEQ ID NO: 1437739 - RNA, 19 nt, Homo sapiens
  misc_RNA (1)...(19): siRNA sense strand
caucuuccuccucaucuug

SEQ ID NO: 1437740 - RNA, 19 nt, Homo sapiens
  misc_RNA (1)...(19): siRNA sense strand
uaagcugcccaacacuaaa

SEQ ID NO: 1437741 - RNA, 19 nt, Homo sapiens
  misc_RNA (1)...(19): siRNA sense strand
auggugaacuccaaguaug

SEQ ID NO: 1437742 - RNA, 19 nt, Homo sapiens
  misc_RNA (1)...(19): siRNA sense strand
gcaggucaucguccucauc

SEQ ID NO: 1437743 - RNA, 19 nt, Homo sapiens
  misc_RNA (1)...(19): siRNA sense strand
ggcagcaaguccuagaacu

SEQ ID NO: 1437744 - RNA, 19 nt, Homo sapiens
  misc_RNA (1)...(19): siRNA sense strand
uauggugaacuccaaguau

SEQ ID NO: 1437745 - RNA, 19 nt, Homo sapiens
  misc_RNA (1)...(19): siRNA sense strand
ugucggagcgccagaucaa

SEQ ID NO: 1437746 - RNA, 19 nt, Homo sapiens
  misc_RNA (1)...(19): siRNA sense strand
gacagaagauggagaauau

SEQ ID NO: 1437747 - RNA, 19 nt, Homo sapiens
  misc_RNA (1)...(19): siRNA sense strand
cagaggagcuauaguaauu

SEQ ID NO: 1437748 - RNA, 19 nt, Homo sapiens
  misc_RNA (1)...(19): siRNA sense strand
gaagacagcacucaaaguu

SEQ ID NO: 1437749 - RNA, 19 nt, Homo sapiens
  misc_RNA (1)...(19): siRNA sense strand
gaaaguggccaaugugauu

SEQ ID NO: 1437750 - RNA, 19 nt, Homo sapiens
  misc_RNA (1)...(19): siRNA sense strand
gcgcauggaugagcucuuu

SEQ ID NO: 1437751 - RNA, 19 nt, Homo sapiens
  misc_RNA (1)...(19): siRNA sense strand
ggucugcuaugucaccuuu

SEQ ID NO: 1437752 - RNA, 19 nt, Homo sapiens
  misc_RNA (1)...(19): siRNA sense strand
cagcugcccacaaguauua

SEQ ID NO: 1437753 - RNA, 19 nt, Homo sapiens
  misc_RNA (1)...(19): siRNA sense strand
gauggagaauauuccguuu

SEQ ID NO: 1437754 - RNA, 19 nt, Homo sapiens
  misc_RNA (1)...(19): siRNA sense strand
aggaggagguggacuguuu

SEQ ID NO: 1437755 - RNA, 19 nt, Homo sapiens
  misc_RNA (1)...(19): siRNA sense strand
uaauugcucucgccugaug

SEQ ID NO: 1437756 - RNA, 19 nt, Homo sapiens
  misc_RNA (1)...(19): siRNA sense strand
gagaaaguggccaauguga

SEQ ID NO: 1437757 - RNA, 19 nt, Homo sapiens
  misc_RNA (1)...(19): siRNA sense strand
uggagaaaguggccaaugu

SEQ ID NO: 1437758 - RNA, 19 nt, Homo sapiens
  misc_RNA (1)...(19): siRNA sense strand
ggagaaaguggccaaugug

SEQ ID NO: 1437759 - RNA, 19 nt, Homo sapiens
  misc_RNA (1)...(19): siRNA sense strand
guaacacgcaguacagaga

SEQ ID NO: 1437760 - RNA, 19 nt, Homo sapiens
  misc_RNA (1)...(19): siRNA sense strand
ccaguagagaggaguauaa

SEQ ID NO: 1437761 - RNA, 19 nt, Homo sapiens
  misc_RNA (1)...(19): siRNA sense strand
agacagaagauggagaaua

SEQ ID NO: 1437762 - RNA, 19 nt, Homo sapiens
  misc_RNA (1)...(19): siRNA sense strand
gggagcagcuggagaaaau

SEQ ID NO: 1437763 - RNA, 19 nt, Homo sapiens
  misc_RNA (1)...(19): siRNA sense strand
cagaagauggagaauauuc

SEQ ID NO: 1437764 - RNA, 19 nt, Homo sapiens
  misc_RNA (1)...(19): siRNA sense strand
uaaacaagcaggccagagu

SEQ ID NO: 1437765 - RNA, 19 nt, Homo sapiens
  misc_RNA (1)...(19): siRNA sense strand
gccagaggagcuauaguaa

SEQ ID NO: 1437766 - RNA, 19 nt, Homo sapiens
  misc_RNA (1)...(19): siRNA sense strand
ugccagaggagcuauagua

SEQ ID NO: 1437767 - RNA, 19 nt, Homo sapiens
  misc_RNA (1)...(19): siRNA sense strand
ggugaacccugucuaugac

SEQ ID NO: 1437768 - RNA, 19 nt, Homo sapiens
  misc_RNA (1)...(19): siRNA sense strand
gaggagcuauaguaauugc

SEQ ID NO: 1437769 - RNA, 19 nt, Homo sapiens
  misc_RNA (1)...(19): siRNA sense strand
ugagacagaagauggagaa

SEQ ID NO: 1437770 - RNA, 19 nt, Homo sapiens
  misc_RNA (1)...(19): siRNA sense strand
ucugcaacaucuuugacua

SEQ ID NO: 1437771 - RNA, 19 nt, Homo sapiens
  misc_RNA (1)...(19): siRNA sense strand
guagagaggaguauaaaau

SEQ ID NO: 1437772 - RNA, 19 nt, Homo sapiens
  misc_RNA (1)...(19): siRNA sense strand
ucugcuaugucaccuuuau

SEQ ID NO: 1437773 - RNA, 19 nt, Homo sapiens
  misc_RNA (1)...(19): siRNA sense strand
gcauggaugagcucuuugu

SEQ ID NO: 1437774 - RNA, 19 nt, Homo sapiens
  misc_RNA (1)...(19): siRNA sense strand
ggaggagguggacuguuug

SEQ ID NO: 1437775 - RNA, 19 nt, Homo sapiens
  misc_RNA (1)...(19): siRNA sense strand
ccagaggagcuauaguaau

SEQ ID NO: 1437776 - RNA, 19 nt, Homo sapiens
  misc_RNA (1)...(19): siRNA sense strand
uggugaacccugucuauga

SEQ ID NO: 1437777 - RNA, 19 nt, Homo sapiens
  misc_RNA (1)...(19): siRNA sense strand
ggcugggucugcuauguca

SEQ ID NO: 1437778 - RNA, 19 nt, Homo sapiens
  misc_RNA (1)...(19): siRNA sense strand
gcuguggacuuggagaaag

SEQ ID NO: 1437779 - RNA, 19 nt, Homo sapiens
  misc_RNA (1)...(19): siRNA sense strand
ucauucaggcagagaguaa

SEQ ID NO: 1437780 - RNA, 19 nt, Homo sapiens
  misc_RNA (1)...(19): siRNA sense strand
uggagaauauuccguuugc

SEQ ID NO: 1437781 - RNA, 19 nt, Homo sapiens
  misc_RNA (1)...(19): siRNA sense strand
caguagagaggaguauaaa

SEQ ID NO: 1437782 - RNA, 19 nt, Homo sapiens
  misc_RNA (1)...(19): siRNA sense strand
caugugcuacgccaucauu

SEQ ID NO: 1437783 - RNA, 19 nt, Homo sapiens
  misc_RNA (1)...(19): siRNA sense strand
cgccagcugcccacaagua

SEQ ID NO: 1437784 - RNA, 19 nt, Homo sapiens
  misc_RNA (1)...(19): siRNA sense strand
ugcuggagaucauugaguu

SEQ ID NO: 1437785 - RNA, 19 nt, Homo sapiens
  misc_RNA (1)...(19): siRNA sense strand
ggcagagaguaaacaagca

SEQ ID NO: 1437786 - RNA, 19 nt, Homo sapiens
  misc_RNA (1)...(19): siRNA sense strand
uaacacgcaguacagagau

SEQ ID NO: 1437787 - RNA, 19 nt, Homo sapiens
  misc_RNA (1)...(19): siRNA sense strand
cugcaggacuguguguuca

SEQ ID NO: 1437788 - RNA, 19 nt, Homo sapiens
  misc_RNA (1)...(19): siRNA sense strand
caacgccagcugcccacaa

SEQ ID NO: 1437789 - RNA, 19 nt, Homo sapiens
  misc_RNA (1)...(19): siRNA sense strand
ggacaucaauggagaaauu

SEQ ID NO: 1437790 - RNA, 19 nt, Homo sapiens
  misc_RNA (1)...(19): siRNA sense strand
gaagguggcuguugugaau

SEQ ID NO: 1437791 - RNA, 19 nt, Homo sapiens
  misc_RNA (1)...(19): siRNA sense strand
ccaagaagcucggcaaaug

SEQ ID NO: 1437792 - RNA, 19 nt, Homo sapiens
  misc_RNA (1)...(19): siRNA sense strand
gaaguacccugacuauaag

SEQ ID NO: 1437793 - RNA, 19 nt, Homo sapiens
  misc_RNA (1)...(19): siRNA sense strand
ugacaaaccuagagaaaca

SEQ ID NO: 1437794 - RNA, 19 nt, Homo sapiens
  misc_RNA (1)...(19): siRNA sense strand
uagagaaacagccauauua

SEQ ID NO: 1437795 - RNA, 19 nt, Homo sapiens
  misc_RNA (1)...(19): siRNA sense strand
agaaguacccugacuauaa

SEQ ID NO: 1437796 - RNA, 19 nt, Homo sapiens
  misc_RNA (1)...(19): siRNA sense strand
caagaccucugauggcaaa

SEQ ID NO: 1437797 - RNA, 19 nt, Homo sapiens
  misc_RNA (1)...(19): siRNA sense strand
ggaucucgcuggaaagcua

SEQ ID NO: 1437798 - RNA, 19 nt, Homo sapiens
  misc_RNA (1)...(19): siRNA sense strand
aaacaacacuggagagucu

SEQ ID NO: 1437799 - RNA, 19 nt, Homo sapiens
  misc_RNA (1)...(19): siRNA sense strand
gaacaacaggugcuugaug

SEQ ID NO: 1437800 - RNA, 19 nt, Homo sapiens
  misc_RNA (1)...(19): siRNA sense strand
gcaagcagcaccuggagaa

SEQ ID NO: 1437801 - RNA, 19 nt, Homo sapiens
  misc_RNA (1)...(19): siRNA sense strand
uaaacagaaugaagaagga

SEQ ID NO: 1437802 - RNA, 19 nt, Homo sapiens
  misc_RNA (1)...(19): siRNA sense strand
gaguggagauucugaugga

SEQ ID NO: 1437803 - RNA, 19 nt, Homo sapiens
  misc_RNA (1)...(19): siRNA sense strand
ggaaagcuaugacaaaccu

SEQ ID NO: 1437804 - RNA, 19 nt, Homo sapiens
  misc_RNA (1)...(19): siRNA sense strand
cauaaagcguccaaugaau

SEQ ID NO: 1437805 - RNA, 19 nt, Homo sapiens
  misc_RNA (1)...(19): siRNA sense strand
gcacaauagguuacuuaaa

SEQ ID NO: 1437806 - RNA, 19 nt, Homo sapiens
  misc_RNA (1)...(19): siRNA sense strand
gagaggagccacauaucaa

SEQ ID NO: 1437807 - RNA, 19 nt, Homo sapiens
  misc_RNA (1)...(19): siRNA sense strand
ggagaaguacccugacuau

SEQ ID NO: 1437808 - RNA, 19 nt, Homo sapiens
  misc_RNA (1)...(19): siRNA sense strand
ggugugggcuaaagaugaa

SEQ ID NO: 1437809 - RNA, 19 nt, Homo sapiens
  misc_RNA (1)...(19): siRNA sense strand
gcacagccacugaaccuau

SEQ ID NO: 1437810 - RNA, 19 nt, Homo sapiens
  misc_RNA (1)...(19): siRNA sense strand
ggagaggagccacauauca

SEQ ID NO: 1437811 - RNA, 19 nt, Homo sapiens
  misc_RNA (1)...(19): siRNA sense strand
ggagccacauaucaaagaa

SEQ ID NO: 1437812 - RNA, 19 nt, Homo sapiens
  misc_RNA (1)...(19): siRNA sense strand
gcaaugaaccccacauaaa

SEQ ID NO: 1437813 - RNA, 19 nt, Homo sapiens
  misc_RNA (1)...(19): siRNA sense strand
cggcaguacuucaauguug

SEQ ID NO: 1437814 - RNA, 19 nt, Homo sapiens
  misc_RNA (1)...(19): siRNA sense strand
gaaaugcggcaguacuuca

SEQ ID NO: 1437815 - RNA, 19 nt, Homo sapiens
  misc_RNA (1)...(19): siRNA sense strand
caagaagcucggcaaauga

SEQ ID NO: 1437816 - RNA, 19 nt, Homo sapiens
  misc_RNA (1)...(19): siRNA sense strand
gagccugggaugccuguua

SEQ ID NO: 1437817 - RNA, 19 nt, Homo sapiens
  misc_RNA (1)...(19): siRNA sense strand
caacaucagcaagauauug

SEQ ID NO: 1437818 - RNA, 19 nt, Homo sapiens
  misc_RNA (1)...(19): siRNA sense strand
gcgcauuggugaauacaag

SEQ ID NO: 1437819 - RNA, 19 nt, Homo sapiens
  misc_RNA (1)...(19): siRNA sense strand
gagaaguacccugacuaua

SEQ ID NO: 1437820 - RNA, 19 nt, Homo sapiens
  misc_RNA (1)...(19): siRNA sense strand
ccacauaaagcguccaaug

SEQ ID NO: 1437821 - RNA, 19 nt, Homo sapiens
  misc_RNA (1)...(19): siRNA sense strand
ggagaaauuuaugaugagu

SEQ ID NO: 1437822 - RNA, 19 nt, Homo sapiens
  misc_RNA (1)...(19): siRNA sense strand
uaugccagcucugagaaua

SEQ ID NO: 1437823 - RNA, 19 nt, Homo sapiens
  misc_RNA (1)...(19): siRNA sense strand
gcuggaaagcuaugacaaa

SEQ ID NO: 1437824 - RNA, 19 nt, Homo sapiens
  misc_RNA (1)...(19): siRNA sense strand
aaagaugaacggagaaaga

SEQ ID NO: 1437825 - RNA, 19 nt, Homo sapiens
  misc_RNA (1)...(19): siRNA sense strand
cacauaaagcguccaauga

SEQ ID NO: 1437826 - RNA, 19 nt, Homo sapiens
  misc_RNA (1)...(19): siRNA sense strand
ggcaggaaaugcggcagua

SEQ ID NO: 1437827 - RNA, 19 nt, Homo sapiens
  misc_RNA (1)...(19): siRNA sense strand
gcaacaggcggcaggaaau

SEQ ID NO: 1437828 - RNA, 19 nt, Homo sapiens
  misc_RNA (1)...(19): siRNA sense strand
agccagaguuagcacaaua

SEQ ID NO: 1437829 - RNA, 19 nt, Homo sapiens
  misc_RNA (1)...(19): siRNA sense strand
uggaagugcuggagucuca

SEQ ID NO: 1437830 - RNA, 19 nt, Homo sapiens
  misc_RNA (1)...(19): siRNA sense strand
aaauuuagccaugcaauga

SEQ ID NO: 1437831 - RNA, 19 nt, Homo sapiens
  misc_RNA (1)...(19): siRNA sense strand
uagcacaauagguuacuua

SEQ ID NO: 1437832 - RNA, 19 nt, Homo sapiens
  misc_RNA (1)...(19): siRNA sense strand
agaguuagcacaauagguu

SEQ ID NO: 1437833 - RNA, 19 nt, Homo sapiens
  misc_RNA (1)...(19): siRNA sense strand
gggaacaacaggugcuuga

SEQ ID NO: 1437834 - RNA, 19 nt, Homo sapiens
  misc_RNA (1)...(19): siRNA sense strand
acauaaagcguccaaugaa

SEQ ID NO: 1437835 - RNA, 19 nt, Homo sapiens
  misc_RNA (1)...(19): siRNA sense strand
gcacuuacggugugaaagg

SEQ ID NO: 1437836 - RNA, 19 nt, Homo sapiens
  misc_RNA (1)...(19): siRNA sense strand
ugauccagauguagauuau

SEQ ID NO: 1437837 - RNA, 19 nt, Homo sapiens
  misc_RNA (1)...(19): siRNA sense strand
ggaagguggcuguugugaa

SEQ ID NO: 1437838 - RNA, 19 nt, Homo sapiens
  misc_RNA (1)...(19): siRNA sense strand
ccacauaucaaagaagaga

SEQ ID NO: 1437839 - RNA, 19 nt, Homo sapiens
  misc_RNA (1)...(19): siRNA sense strand
agcagcaccuggagaagua

SEQ ID NO: 1437840 - RNA, 19 nt, Homo sapiens
  misc_RNA (1)...(19): siRNA sense strand
gcaguuaaacagaaugaag

SEQ ID NO: 1437841 - RNA, 19 nt, Homo sapiens
  misc_RNA (1)...(19): siRNA sense strand
caauaacugccgaacagaa

SEQ ID NO: 1437842 - RNA, 19 nt, Homo sapiens
  misc_RNA (1)...(19): siRNA sense strand
gaguuagcacaauagguua

SEQ ID NO: 1437843 - RNA, 19 nt, Homo sapiens
  misc_RNA (1)...(19): siRNA sense strand
cuucaagccuuuccugaca

SEQ ID NO: 1437844 - RNA, 19 nt, Homo sapiens
  misc_RNA (1)...(19): siRNA sense strand
ucucagagucaagaauuua

SEQ ID NO: 1437845 - RNA, 19 nt, Homo sapiens
  misc_RNA (1)...(19): siRNA sense strand
cuagagaaacagccauauu

SEQ ID NO: 1437846 - RNA, 19 nt, Homo sapiens
  misc_RNA (1)...(19): siRNA sense strand
gaaaggagaggagccacau

SEQ ID NO: 1437847 - RNA, 19 nt, Homo sapiens
  misc_RNA (1)...(19): siRNA sense strand
agagaaacagccauauuau

SEQ ID NO: 1437848 - RNA, 19 nt, Homo sapiens
  misc_RNA (1)...(19): siRNA sense strand
ugaauagucugggucucaa

SEQ ID NO: 1437849 - RNA, 19 nt, Homo sapiens
  misc_RNA (1)...(19): siRNA sense strand
uaugacaaaccuagagaaa

SEQ ID NO: 1437850 - RNA, 19 nt, Homo sapiens
  misc_RNA (1)...(19): siRNA sense strand
gauggcaaaucacccacau

SEQ ID NO: 1437851 - RNA, 19 nt, Homo sapiens
  misc_RNA (1)...(19): siRNA sense strand
ugccagcucugagaauaaa

SEQ ID NO: 1437852 - RNA, 19 nt, Homo sapiens
  misc_RNA (1)...(19): siRNA sense strand
gagcacuuacggugugaaa

SEQ ID NO: 1437853 - RNA, 19 nt, Homo sapiens
  misc_RNA (1)...(19): siRNA sense strand
ggaaaugcggcaguacuuc

SEQ ID NO: 1437854 - RNA, 19 nt, Homo sapiens
  misc_RNA (1)...(19): siRNA sense strand
augcacaacuccaacauca

SEQ ID NO: 1437855 - RNA, 19 nt, Homo sapiens
  misc_RNA (1)...(19): siRNA sense strand
caccaaggcaauccaagaa

SEQ ID NO: 1437856 - RNA, 19 nt, Homo sapiens
  misc_RNA (1)...(19): siRNA sense strand
aauaacugccgaacagaaa

SEQ ID NO: 1437857 - RNA, 19 nt, Homo sapiens
  misc_RNA (1)...(19): siRNA sense strand
gaagugcuggagucucaga

SEQ ID NO: 1437858 - RNA, 19 nt, Homo sapiens
  misc_RNA (1)...(19): siRNA sense strand
caguuaaacagaaugaaga

SEQ ID NO: 1437859 - RNA, 19 nt, Homo sapiens
  misc_RNA (1)...(19): siRNA sense strand
caacaggcggcaggaaaug

SEQ ID NO: 1437860 - RNA, 19 nt, Homo sapiens
  misc_RNA (1)...(19): siRNA sense strand
uggcaaaucacccacauca

SEQ ID NO: 1437861 - RNA, 19 nt, Homo sapiens
  misc_RNA (1)...(19): siRNA sense strand
ucaagccuuuccugacaug

SEQ ID NO: 1437862 - RNA, 19 nt, Homo sapiens
  misc_RNA (1)...(19): siRNA sense strand
gaggacaucaauggagaaa

SEQ ID NO: 1437863 - RNA, 19 nt, Homo sapiens
  misc_RNA (1)...(19): siRNA sense strand
ucaccaaggcaauccaaga

SEQ ID NO: 1437864 - RNA, 19 nt, Homo sapiens
  misc_RNA (1)...(19): siRNA sense strand
agccacauaucaaagaaga

SEQ ID NO: 1437865 - RNA, 19 nt, Homo sapiens
  misc_RNA (1)...(19): siRNA sense strand
ccacugcugguguugugua

SEQ ID NO: 1437866 - RNA, 19 nt, Homo sapiens
  misc_RNA (1)...(19): siRNA sense strand
aauagucugggucucaaua

SEQ ID NO: 1437867 - RNA, 19 nt, Homo sapiens
  misc_RNA (1)...(19): siRNA sense strand
guacgacgaggaagaggau

SEQ ID NO: 1437868 - RNA, 19 nt, Homo sapiens
  misc_RNA (1)...(19): siRNA sense strand
gacaucaauggagaaauuu

SEQ ID NO: 1437869 - RNA, 19 nt, Homo sapiens
  misc_RNA (1)...(19): siRNA sense strand
gcuaugacaaaccuagaga

SEQ ID NO: 1437870 - RNA, 19 nt, Homo sapiens
  misc_RNA (1)...(19): siRNA sense strand
gucucagagucaagaauuu

SEQ ID NO: 1437871 - RNA, 19 nt, Homo sapiens
  misc_RNA (1)...(19): siRNA sense strand
cucaauaacugccgaacag

SEQ ID NO: 1437872 - RNA, 19 nt, Homo sapiens
  misc_RNA (1)...(19): siRNA sense strand
aagaagcucggcaaaugaa

SEQ ID NO: 1437873 - RNA, 19 nt, Homo sapiens
  misc_RNA (1)...(19): siRNA sense strand
agaggagccacauaucaaa

SEQ ID NO: 1437874 - RNA, 19 nt, Homo sapiens
  misc_RNA (1)...(19): siRNA sense strand
ugaauacaaggcaaucaug

SEQ ID NO: 1437875 - RNA, 19 nt, Homo sapiens
  misc_RNA (1)...(19): siRNA sense strand
auugggaucucgcuggaaa

SEQ ID NO: 1437876 - RNA, 19 nt, Homo sapiens
  misc_RNA (1)...(19): siRNA sense strand
auaaagcguccaaugaaug

SEQ ID NO: 1437877 - RNA, 19 nt, Homo sapiens
  misc_RNA (1)...(19): siRNA sense strand
ccauaugccagcucugaga

SEQ ID NO: 1437878 - RNA, 19 nt, Homo sapiens
  misc_RNA (1)...(19): siRNA sense strand
aaggagaggagccacauau

SEQ ID NO: 1437879 - RNA, 19 nt, Homo sapiens
  misc_RNA (1)...(19): siRNA sense strand
gugaauagucugggucuca

SEQ ID NO: 1437880 - RNA, 19 nt, Homo sapiens
  misc_RNA (1)...(19): siRNA sense strand
gcuggagucucagagucaa

SEQ ID NO: 1437881 - RNA, 19 nt, Homo sapiens
  misc_RNA (1)...(19): siRNA sense strand
gaaucccgagggcguggua

SEQ ID NO: 1437882 - RNA, 19 nt, Homo sapiens
  misc_RNA (1)...(19): siRNA sense strand
gauacaggccgaggacauc

SEQ ID NO: 1437883 - RNA, 19 nt, Homo sapiens
  misc_RNA (1)...(19): siRNA sense strand
ucacccaccucuccccaua

SEQ ID NO: 1437884 - RNA, 19 nt, Homo sapiens
  misc_RNA (1)...(19): siRNA sense strand
cuaaagaugaacggagaaa

SEQ ID NO: 1437885 - RNA, 19 nt, Homo sapiens
  misc_RNA (1)...(19): siRNA sense strand
uggagaaauuuaugaugag

SEQ ID NO: 1437886 - RNA, 19 nt, Homo sapiens
  misc_RNA (1)...(19): siRNA sense strand
gaggagcaagcccgucuca

SEQ ID NO: 1437887 - RNA, 19 nt, Homo sapiens
  misc_RNA (1)...(19): siRNA sense strand
gcaaaugaaggagcaacuc

SEQ ID NO: 1437888 - RNA, 19 nt, Homo sapiens
  misc_RNA (1)...(19): siRNA sense strand
aaaggagaggagccacaua

SEQ ID NO: 1437889 - RNA, 19 nt, Homo sapiens
  misc_RNA (1)...(19): siRNA sense strand
ggacaucaauggagaaauu

SEQ ID NO: 1437890 - RNA, 19 nt, Homo sapiens
  misc_RNA (1)...(19): siRNA sense strand
gaagguggcuguugugaau

SEQ ID NO: 1437891 - RNA, 19 nt, Homo sapiens
  misc_RNA (1)...(19): siRNA sense strand
ccaagaagcucggcaaaug

SEQ ID NO: 1437892 - RNA, 19 nt, Homo sapiens
  misc_RNA (1)...(19): siRNA sense strand
gaaguacccugacuauaag

SEQ ID NO: 1437893 - RNA, 19 nt, Homo sapiens
  misc_RNA (1)...(19): siRNA sense strand
ugacaaaccuagagaaaca

SEQ ID NO: 1437894 - RNA, 19 nt, Homo sapiens
  misc_RNA (1)...(19): siRNA sense strand
uagagaaacagccauauua

SEQ ID NO: 1437895 - RNA, 19 nt, Homo sapiens
  misc_RNA (1)...(19): siRNA sense strand
agaaguacccugacuauaa

SEQ ID NO: 1437896 - RNA, 19 nt, Homo sapiens
  misc_RNA (1)...(19): siRNA sense strand
caagaccucugauggcaaa

SEQ ID NO: 1437897 - RNA, 19 nt, Homo sapiens
  misc_RNA (1)...(19): siRNA sense strand
ggaucucgcuggaaagcua

SEQ ID NO: 1437898 - RNA, 19 nt, Homo sapiens
  misc_RNA (1)...(19): siRNA sense strand
aaacaacacuggagagucu

SEQ ID NO: 1437899 - RNA, 19 nt, Homo sapiens
  misc_RNA (1)...(19): siRNA sense strand
gaacaacaggugcuugaug

SEQ ID NO: 1437900 - RNA, 19 nt, Homo sapiens
  misc_RNA (1)...(19): siRNA sense strand
gcaagcagcaccuggagaa

SEQ ID NO: 1437901 - RNA, 19 nt, Homo sapiens
  misc_RNA (1)...(19): siRNA sense strand
uaaacagaaugaagaagga

SEQ ID NO: 1437902 - RNA, 19 nt, Homo sapiens
  misc_RNA (1)...(19): siRNA sense strand
gaguggagauucugaugga

SEQ ID NO: 1437903 - RNA, 19 nt, Homo sapiens
  misc_RNA (1)...(19): siRNA sense strand
ggaaagcuaugacaaaccu

SEQ ID NO: 1437904 - RNA, 19 nt, Homo sapiens
  misc_RNA (1)...(19): siRNA sense strand
cauaaagcguccaaugaau

SEQ ID NO: 1437905 - RNA, 19 nt, Homo sapiens
  misc_RNA (1)...(19): siRNA sense strand
gcacaauagguuacuuaaa

SEQ ID NO: 1437906 - RNA, 19 nt, Homo sapiens
  misc_RNA (1)...(19): siRNA sense strand
gagaggagccacauaucaa

SEQ ID NO: 1437907 - RNA, 19 nt, Homo sapiens
  misc_RNA (1)...(19): siRNA sense strand
ggagaaguacccugacuau

SEQ ID NO: 1437908 - RNA, 19 nt, Homo sapiens
  misc_RNA (1)...(19): siRNA sense strand
ggugugggcuaaagaugaa

SEQ ID NO: 1437909 - RNA, 19 nt, Homo sapiens
  misc_RNA (1)...(19): siRNA sense strand
gcacagccacugaaccuau

SEQ ID NO: 1437910 - RNA, 19 nt, Homo sapiens
  misc_RNA (1)...(19): siRNA sense strand
ggagaggagccacauauca

SEQ ID NO: 1437911 - RNA, 19 nt, Homo sapiens
  misc_RNA (1)...(19): siRNA sense strand
ggagccacauaucaaagaa

SEQ ID NO: 1437912 - RNA, 19 nt, Homo sapiens
  misc_RNA (1)...(19): siRNA sense strand
gcaaugaaccccacauaaa

SEQ ID NO: 1437913 - RNA, 19 nt, Homo sapiens
  misc_RNA (1)...(19): siRNA sense strand
cggcaguacuucaauguug

SEQ ID NO: 1437914 - RNA, 19 nt, Homo sapiens
  misc_RNA (1)...(19): siRNA sense strand
gaaaugcggcaguacuuca

SEQ ID NO: 1437915 - RNA, 19 nt, Homo sapiens
  misc_RNA (1)...(19): siRNA sense strand
caagaagcucggcaaauga

SEQ ID NO: 1437916 - RNA, 19 nt, Homo sapiens
  misc_RNA (1)...(19): siRNA sense strand
gagccugggaugccuguua

SEQ ID NO: 1437917 - RNA, 19 nt, Homo sapiens
  misc_RNA (1)...(19): siRNA sense strand
caacaucagcaagauauug

SEQ ID NO: 1437918 - RNA, 19 nt, Homo sapiens
  misc_RNA (1)...(19): siRNA sense strand
gcgcauuggugaauacaag

SEQ ID NO: 1437919 - RNA, 19 nt, Homo sapiens
  misc_RNA (1)...(19): siRNA sense strand
gagaaguacccugacuaua

SEQ ID NO: 1437920 - RNA, 19 nt, Homo sapiens
  misc_RNA (1)...(19): siRNA sense strand
ccacauaaagcguccaaug

SEQ ID NO: 1437921 - RNA, 19 nt, Homo sapiens
  misc_RNA (1)...(19): siRNA sense strand
ggagaaauuuaugaugagu

SEQ ID NO: 1437922 - RNA, 19 nt, Homo sapiens
  misc_RNA (1)...(19): siRNA sense strand
uaugccagcucugagaaua

SEQ ID NO: 1437923 - RNA, 19 nt, Homo sapiens
  misc_RNA (1)...(19): siRNA sense strand
gcuggaaagcuaugacaaa

SEQ ID NO: 1437924 - RNA, 19 nt, Homo sapiens
  misc_RNA (1)...(19): siRNA sense strand
aaagaugaacggagaaaga

SEQ ID NO: 1437925 - RNA, 19 nt, Homo sapiens
  misc_RNA (1)...(19): siRNA sense strand
cacauaaagcguccaauga

SEQ ID NO: 1437926 - RNA, 19 nt, Homo sapiens
  misc_RNA (1)...(19): siRNA sense strand
ggcaggaaaugcggcagua

SEQ ID NO: 1437927 - RNA, 19 nt, Homo sapiens
  misc_RNA (1)...(19): siRNA sense strand
gcaacaggcggcaggaaau

SEQ ID NO: 1437928 - RNA, 19 nt, Homo sapiens
  misc_RNA (1)...(19): siRNA sense strand
agccagaguuagcacaaua

SEQ ID NO: 1437929 - RNA, 19 nt, Homo sapiens
  misc_RNA (1)...(19): siRNA sense strand
uggaagugcuggagucuca

SEQ ID NO: 1437930 - RNA, 19 nt, Homo sapiens
  misc_RNA (1)...(19): siRNA sense strand
aaauuuagccaugcaauga

SEQ ID NO: 1437931 - RNA, 19 nt, Homo sapiens
  misc_RNA (1)...(19): siRNA sense strand
uagcacaauagguuacuua

SEQ ID NO: 1437932 - RNA, 19 nt, Homo sapiens
  misc_RNA (1)...(19): siRNA sense strand
agaguuagcacaauagguu

SEQ ID NO: 1437933 - RNA, 19 nt, Homo sapiens
  misc_RNA (1)...(19): siRNA sense strand
gggaacaacaggugcuuga

SEQ ID NO: 1437934 - RNA, 19 nt, Homo sapiens
  misc_RNA (1)...(19): siRNA sense strand
acauaaagcguccaaugaa

SEQ ID NO: 1437935 - RNA, 19 nt, Homo sapiens
  misc_RNA (1)...(19): siRNA sense strand
gcacuuacggugugaaagg

SEQ ID NO: 1437936 - RNA, 19 nt, Homo sapiens
  misc_RNA (1)...(19): siRNA sense strand
ugauccagauguagauuau

SEQ ID NO: 1437937 - RNA, 19 nt, Homo sapiens
  misc_RNA (1)...(19): siRNA sense strand
ggaagguggcuguugugaa

SEQ ID NO: 1437938 - RNA, 19 nt, Homo sapiens
  misc_RNA (1)...(19): siRNA sense strand
ccacauaucaaagaagaga

SEQ ID NO: 1437939 - RNA, 19 nt, Homo sapiens
  misc_RNA (1)...(19): siRNA sense strand
agcagcaccuggagaagua

SEQ ID NO: 1437940 - RNA, 19 nt, Homo sapiens
  misc_RNA (1)...(19): siRNA sense strand
gcaguuaaacagaaugaag

SEQ ID NO: 1437941 - RNA, 19 nt, Homo sapiens
  misc_RNA (1)...(19): siRNA sense strand
caauaacugccgaacagaa

SEQ ID NO: 1437942 - RNA, 19 nt, Homo sapiens
  misc_RNA (1)...(19): siRNA sense strand
gaguuagcacaauagguua

SEQ ID NO: 1437943 - RNA, 19 nt, Homo sapiens
  misc_RNA (1)...(19): siRNA sense strand
cuucaagccuuuccugaca

SEQ ID NO: 1437944 - RNA, 19 nt, Homo sapiens
  misc_RNA (1)...(19): siRNA sense strand
ucucagagucaagaauuua

SEQ ID NO: 1437945 - RNA, 19 nt, Homo sapiens
  misc_RNA (1)...(19): siRNA sense strand
cuagagaaacagccauauu

SEQ ID NO: 1437946 - RNA, 19 nt, Homo sapiens
  misc_RNA (1)...(19): siRNA sense strand
gaaaggagaggagccacau

SEQ ID NO: 1437947 - RNA, 19 nt, Homo sapiens
  misc_RNA (1)...(19): siRNA sense strand
agagaaacagccauauuau

SEQ ID NO: 1437948 - RNA, 19 nt, Homo sapiens
  misc_RNA (1)...(19): siRNA sense strand
ugaauagucugggucucaa

SEQ ID NO: 1437949 - RNA, 19 nt, Homo sapiens
  misc_RNA (1)...(19): siRNA sense strand
uaugacaaaccuagagaaa

SEQ ID NO: 1437950 - RNA, 19 nt, Homo sapiens
  misc_RNA (1)...(19): siRNA sense strand
gauggcaaaucacccacau

SEQ ID NO: 1437951 - RNA, 19 nt, Homo sapiens
  misc_RNA (1)...(19): siRNA sense strand
ugccagcucugagaauaaa

SEQ ID NO: 1437952 - RNA, 19 nt, Homo sapiens
  misc_RNA (1)...(19): siRNA sense strand
gagcacuuacggugugaaa

SEQ ID NO: 1437953 - RNA, 19 nt, Homo sapiens
  misc_RNA (1)...(19): siRNA sense strand
ggaaaugcggcaguacuuc

SEQ ID NO: 1437954 - RNA, 19 nt, Homo sapiens
  misc_RNA (1)...(19): siRNA sense strand
augcacaacuccaacauca

SEQ ID NO: 1437955 - RNA, 19 nt, Homo sapiens
  misc_RNA (1)...(19): siRNA sense strand
caccaaggcaauccaagaa

SEQ ID NO: 1437956 - RNA, 19 nt, Homo sapiens
  misc_RNA (1)...(19): siRNA sense strand
aauaacugccgaacagaaa

SEQ ID NO: 1437957 - RNA, 19 nt, Homo sapiens
  misc_RNA (1)...(19): siRNA sense strand
gaagugcuggagucucaga

SEQ ID NO: 1437958 - RNA, 19 nt, Homo sapiens
  misc_RNA (1)...(19): siRNA sense strand
caguuaaacagaaugaaga

SEQ ID NO: 1437959 - RNA, 19 nt, Homo sapiens
  misc_RNA (1)...(19): siRNA sense strand
caacaggcggcaggaaaug

SEQ ID NO: 1437960 - RNA, 19 nt, Homo sapiens
  misc_RNA (1)...(19): siRNA sense strand
uggcaaaucacccacauca

SEQ ID NO: 1437961 - RNA, 19 nt, Homo sapiens
  misc_RNA (1)...(19): siRNA sense strand
ucaagccuuuccugacaug

SEQ ID NO: 1437962 - RNA, 19 nt, Homo sapiens
  misc_RNA (1)...(19): siRNA sense strand
gaggacaucaauggagaaa

SEQ ID NO: 1437963 - RNA, 19 nt, Homo sapiens
  misc_RNA (1)...(19): siRNA sense strand
ucaccaaggcaauccaaga

SEQ ID NO: 1437964 - RNA, 19 nt, Homo sapiens
  misc_RNA (1)...(19): siRNA sense strand
agccacauaucaaagaaga

SEQ ID NO: 1437965 - RNA, 19 nt, Homo sapiens
  misc_RNA (1)...(19): siRNA sense strand
ccacugcugguguugugua

SEQ ID NO: 1437966 - RNA, 19 nt, Homo sapiens
  misc_RNA (1)...(19): siRNA sense strand
aauagucugggucucaaua

SEQ ID NO: 1437967 - RNA, 19 nt, Homo sapiens
  misc_RNA (1)...(19): siRNA sense strand
guacgacgaggaagaggau

SEQ ID NO: 1437968 - RNA, 19 nt, Homo sapiens
  misc_RNA (1)...(19): siRNA sense strand
gacaucaauggagaaauuu

SEQ ID NO: 1437969 - RNA, 19 nt, Homo sapiens
  misc_RNA (1)...(19): siRNA sense strand
gcuaugacaaaccuagaga

SEQ ID NO: 1437970 - RNA, 19 nt, Homo sapiens
  misc_RNA (1)...(19): siRNA sense strand
gucucagagucaagaauuu

SEQ ID NO: 1437971 - RNA, 19 nt, Homo sapiens
  misc_RNA (1)...(19): siRNA sense strand
cucaauaacugccgaacag

SEQ ID NO: 1437972 - RNA, 19 nt, Homo sapiens
  misc_RNA (1)...(19): siRNA sense strand
aagaagcucggcaaaugaa

SEQ ID NO: 1437973 - RNA, 19 nt, Homo sapiens
  misc_RNA (1)...(19): siRNA sense strand
agaggagccacauaucaaa

SEQ ID NO: 1437974 - RNA, 19 nt, Homo sapiens
  misc_RNA (1)...(19): siRNA sense strand
ugaauacaaggcaaucaug

SEQ ID NO: 1437975 - RNA, 19 nt, Homo sapiens
  misc_RNA (1)...(19): siRNA sense strand
auugggaucucgcuggaaa

SEQ ID NO: 1437976 - RNA, 19 nt, Homo sapiens
  misc_RNA (1)...(19): siRNA sense strand
auaaagcguccaaugaaug

SEQ ID NO: 1437977 - RNA, 19 nt, Homo sapiens
  misc_RNA (1)...(19): siRNA sense strand
ccauaugccagcucugaga

SEQ ID NO: 1437978 - RNA, 19 nt, Homo sapiens
  misc_RNA (1)...(19): siRNA sense strand
aaggagaggagccacauau

SEQ ID NO: 1437979 - RNA, 19 nt, Homo sapiens
  misc_RNA (1)...(19): siRNA sense strand
gugaauagucugggucuca

SEQ ID NO: 1437980 - RNA, 19 nt, Homo sapiens
  misc_RNA (1)...(19): siRNA sense strand
gcuggagucucagagucaa

SEQ ID NO: 1437981 - RNA, 19 nt, Homo sapiens
  misc_RNA (1)...(19): siRNA sense strand
gaaucccgagggcguggua

SEQ ID NO: 1437982 - RNA, 19 nt, Homo sapiens
  misc_RNA (1)...(19): siRNA sense strand
gauacaggccgaggacauc

SEQ ID NO: 1437983 - RNA, 19 nt, Homo sapiens
  misc_RNA (1)...(19): siRNA sense strand
ucacccaccucuccccaua

SEQ ID NO: 1437984 - RNA, 19 nt, Homo sapiens
  misc_RNA (1)...(19): siRNA sense strand
cuaaagaugaacggagaaa

SEQ ID NO: 1437985 - RNA, 19 nt, Homo sapiens
  misc_RNA (1)...(19): siRNA sense strand
uggagaaauuuaugaugag

SEQ ID NO: 1437986 - RNA, 19 nt, Homo sapiens
  misc_RNA (1)...(19): siRNA sense strand
gaggagcaagcccgucuca

SEQ ID NO: 1437987 - RNA, 19 nt, Homo sapiens
  misc_RNA (1)...(19): siRNA sense strand
gcaaaugaaggagcaacuc

SEQ ID NO: 1437988 - RNA, 19 nt, Homo sapiens
  misc_RNA (1)...(19): siRNA sense strand
aaaggagaggagccacaua

SEQ ID NO: 1437989 - RNA, 19 nt, Homo sapiens
  misc_RNA (1)...(19): siRNA sense strand
ggacaucaauggagaaauu

SEQ ID NO: 1437990 - RNA, 19 nt, Homo sapiens
  misc_RNA (1)...(19): siRNA sense strand
gaagguggcuguugugaau

SEQ ID NO: 1437991 - RNA, 19 nt, Homo sapiens
  misc_RNA (1)...(19): siRNA sense strand
ccaagaagcucggcaaaug

SEQ ID NO: 1437992 - RNA, 19 nt, Homo sapiens
  misc_RNA (1)...(19): siRNA sense strand
gaaguacccugacuauaag

SEQ ID NO: 1437993 - RNA, 19 nt, Homo sapiens
  misc_RNA (1)...(19): siRNA sense strand
ugacaaaccuagagaaaca

SEQ ID NO: 1437994 - RNA, 19 nt, Homo sapiens
  misc_RNA (1)...(19): siRNA sense strand
uagagaaacagccauauua

SEQ ID NO: 1437995 - RNA, 19 nt, Homo sapiens
  misc_RNA (1)...(19): siRNA sense strand
agaaguacccugacuauaa

SEQ ID NO: 1437996 - RNA, 19 nt, Homo sapiens
  misc_RNA (1)...(19): siRNA sense strand
caagaccucugauggcaaa

SEQ ID NO: 1437997 - RNA, 19 nt, Homo sapiens
  misc_RNA (1)...(19): siRNA sense strand
ggaucucgcuggaaagcua

SEQ ID NO: 1437998 - RNA, 19 nt, Homo sapiens
  misc_RNA (1)...(19): siRNA sense strand
aaacaacacuggagagucu

SEQ ID NO: 1437999 - RNA, 19 nt, Homo sapiens
  misc_RNA (1)...(19): siRNA sense strand
gaacaacaggugcuugaug

SEQ ID NO: 1438000 - RNA, 19 nt, Homo sapiens
  misc_RNA (1)...(19): siRNA sense strand
gcaagcagcaccuggagaa

SEQ ID NO: 1438001 - RNA, 19 nt, Homo sapiens
  misc_RNA (1)...(19): siRNA sense strand
uaaacagaaugaagaagga

SEQ ID NO: 1438002 - RNA, 19 nt, Homo sapiens
  misc_RNA (1)...(19): siRNA sense strand
gaguggagauucugaugga

SEQ ID NO: 1438003 - RNA, 19 nt, Homo sapiens
  misc_RNA (1)...(19): siRNA sense strand
ggaaagcuaugacaaaccu

SEQ ID NO: 1438004 - RNA, 19 nt, Homo sapiens
  misc_RNA (1)...(19): siRNA sense strand
cauaaagcguccaaugaau

SEQ ID NO: 1438005 - RNA, 19 nt, Homo sapiens
  misc_RNA (1)...(19): siRNA sense strand
gcacaauagguuacuuaaa

SEQ ID NO: 1438006 - RNA, 19 nt, Homo sapiens
  misc_RNA (1)...(19): siRNA sense strand
gagaggagccacauaucaa

SEQ ID NO: 1438007 - RNA, 19 nt, Homo sapiens
  misc_RNA (1)...(19): siRNA sense strand
ggagaaguacccugacuau

SEQ ID NO: 1438008 - RNA, 19 nt, Homo sapiens
  misc_RNA (1)...(19): siRNA sense strand
ggugugggcuaaagaugaa

SEQ ID NO: 1438009 - RNA, 19 nt, Homo sapiens
  misc_RNA (1)...(19): siRNA sense strand
gcacagccacugaaccuau

SEQ ID NO: 1438010 - RNA, 19 nt, Homo sapiens
  misc_RNA (1)...(19): siRNA sense strand
ggagaggagccacauauca

SEQ ID NO: 1438011 - RNA, 19 nt, Homo sapiens
  misc_RNA (1)...(19): siRNA sense strand
ggagccacauaucaaagaa

SEQ ID NO: 1438012 - RNA, 19 nt, Homo sapiens
  misc_RNA (1)...(19): siRNA sense strand
gcaaugaaccccacauaaa

SEQ ID NO: 1438013 - RNA, 19 nt, Homo sapiens
  misc_RNA (1)...(19): siRNA sense strand
cggcaguacuucaauguug

SEQ ID NO: 1438014 - RNA, 19 nt, Homo sapiens
  misc_RNA (1)...(19): siRNA sense strand
gaaaugcggcaguacuuca

SEQ ID NO: 1438015 - RNA, 19 nt, Homo sapiens
  misc_RNA (1)...(19): siRNA sense strand
caagaagcucggcaaauga

SEQ ID NO: 1438016 - RNA, 19 nt, Homo sapiens
  misc_RNA (1)...(19): siRNA sense strand
gagccugggaugccuguua

SEQ ID NO: 1438017 - RNA, 19 nt, Homo sapiens
  misc_RNA (1)...(19): siRNA sense strand
caacaucagcaagauauug

SEQ ID NO: 1438018 - RNA, 19 nt, Homo sapiens
  misc_RNA (1)...(19): siRNA sense strand
gcgcauuggugaauacaag

SEQ ID NO: 1438019 - RNA, 19 nt, Homo sapiens
  misc_RNA (1)...(19): siRNA sense strand
gagaaguacccugacuaua

SEQ ID NO: 1438020 - RNA, 19 nt, Homo sapiens
  misc_RNA (1)...(19): siRNA sense strand
ccacauaaagcguccaaug

SEQ ID NO: 1438021 - RNA, 19 nt, Homo sapiens
  misc_RNA (1)...(19): siRNA sense strand
ggagaaauuuaugaugagu

SEQ ID NO: 1438022 - RNA, 19 nt, Homo sapiens
  misc_RNA (1)...(19): siRNA sense strand
uaugccagcucugagaaua

SEQ ID NO: 1438023 - RNA, 19 nt, Homo sapiens
  misc_RNA (1)...(19): siRNA sense strand
gcuggaaagcuaugacaaa

SEQ ID NO: 1438024 - RNA, 19 nt, Homo sapiens
  misc_RNA (1)...(19): siRNA sense strand
aaagaugaacggagaaaga

SEQ ID NO: 1438025 - RNA, 19 nt, Homo sapiens
  misc_RNA (1)...(19): siRNA sense strand
cacauaaagcguccaauga

SEQ ID NO: 1438026 - RNA, 19 nt, Homo sapiens
  misc_RNA (1)...(19): siRNA sense strand
ggcaggaaaugcggcagua

SEQ ID NO: 1438027 - RNA, 19 nt, Homo sapiens
  misc_RNA (1)...(19): siRNA sense strand
gcaacaggcggcaggaaau

SEQ ID NO: 1438028 - RNA, 19 nt, Homo sapiens
  misc_RNA (1)...(19): siRNA sense strand
agccagaguuagcacaaua

SEQ ID NO: 1438029 - RNA, 19 nt, Homo sapiens
  misc_RNA (1)...(19): siRNA sense strand
uggaagugcuggagucuca

SEQ ID NO: 1438030 - RNA, 19 nt, Homo sapiens
  misc_RNA (1)...(19): siRNA sense strand
aaauuuagccaugcaauga

SEQ ID NO: 1438031 - RNA, 19 nt, Homo sapiens
  misc_RNA (1)...(19): siRNA sense strand
uagcacaauagguuacuua

SEQ ID NO: 1438032 - RNA, 19 nt, Homo sapiens
  misc_RNA (1)...(19): siRNA sense strand
agaguuagcacaauagguu

SEQ ID NO: 1438033 - RNA, 19 nt, Homo sapiens
  misc_RNA (1)...(19): siRNA sense strand
gggaacaacaggugcuuga

SEQ ID NO: 1438034 - RNA, 19 nt, Homo sapiens
  misc_RNA (1)...(19): siRNA sense strand
acauaaagcguccaaugaa

SEQ ID NO: 1438035 - RNA, 19 nt, Homo sapiens
  misc_RNA (1)...(19): siRNA sense strand
gcacuuacggugugaaagg

SEQ ID NO: 1438036 - RNA, 19 nt, Homo sapiens
  misc_RNA (1)...(19): siRNA sense strand
ugauccagauguagauuau

SEQ ID NO: 1438037 - RNA, 19 nt, Homo sapiens
  misc_RNA (1)...(19): siRNA sense strand
ggaagguggcuguugugaa

SEQ ID NO: 1438038 - RNA, 19 nt, Homo sapiens
  misc_RNA (1)...(19): siRNA sense strand
ccacauaucaaagaagaga

SEQ ID NO: 1438039 - RNA, 19 nt, Homo sapiens
  misc_RNA (1)...(19): siRNA sense strand
agcagcaccuggagaagua

SEQ ID NO: 1438040 - RNA, 19 nt, Homo sapiens
  misc_RNA (1)...(19): siRNA sense strand
gcaguuaaacagaaugaag

SEQ ID NO: 1438041 - RNA, 19 nt, Homo sapiens
  misc_RNA (1)...(19): siRNA sense strand
caauaacugccgaacagaa

SEQ ID NO: 1438042 - RNA, 19 nt, Homo sapiens
  misc_RNA (1)...(19): siRNA sense strand
gaguuagcacaauagguua

SEQ ID NO: 1438043 - RNA, 19 nt, Homo sapiens
  misc_RNA (1)...(19): siRNA sense strand
cuucaagccuuuccugaca

SEQ ID NO: 1438044 - RNA, 19 nt, Homo sapiens
  misc_RNA (1)...(19): siRNA sense strand
ucucagagucaagaauuua

SEQ ID NO: 1438045 - RNA, 19 nt, Homo sapiens
  misc_RNA (1)...(19): siRNA sense strand
cuagagaaacagccauauu

SEQ ID NO: 1438046 - RNA, 19 nt, Homo sapiens
  misc_RNA (1)...(19): siRNA sense strand
gaaaggagaggagccacau

SEQ ID NO: 1438047 - RNA, 19 nt, Homo sapiens
  misc_RNA (1)...(19): siRNA sense strand
agagaaacagccauauuau

SEQ ID NO: 1438048 - RNA, 19 nt, Homo sapiens
  misc_RNA (1)...(19): siRNA sense strand
ugaauagucugggucucaa

SEQ ID NO: 1438049 - RNA, 19 nt, Homo sapiens
  misc_RNA (1)...(19): siRNA sense strand
uaugacaaaccuagagaaa

SEQ ID NO: 1438050 - RNA, 19 nt, Homo sapiens
  misc_RNA (1)...(19): siRNA sense strand
gauggcaaaucacccacau

SEQ ID NO: 1438051 - RNA, 19 nt, Homo sapiens
  misc_RNA (1)...(19): siRNA sense strand
ugccagcucugagaauaaa

SEQ ID NO: 1438052 - RNA, 19 nt, Homo sapiens
  misc_RNA (1)...(19): siRNA sense strand
gagcacuuacggugugaaa

SEQ ID NO: 1438053 - RNA, 19 nt, Homo sapiens
  misc_RNA (1)...(19): siRNA sense strand
ggaaaugcggcaguacuuc

SEQ ID NO: 1438054 - RNA, 19 nt, Homo sapiens
  misc_RNA (1)...(19): siRNA sense strand
augcacaacuccaacauca

SEQ ID NO: 1438055 - RNA, 19 nt, Homo sapiens
  misc_RNA (1)...(19): siRNA sense strand
caccaaggcaauccaagaa

SEQ ID NO: 1438056 - RNA, 19 nt, Homo sapiens
  misc_RNA (1)...(19): siRNA sense strand
aauaacugccgaacagaaa

SEQ ID NO: 1438057 - RNA, 19 nt, Homo sapiens
  misc_RNA (1)...(19): siRNA sense strand
gaagugcuggagucucaga

SEQ ID NO: 1438058 - RNA, 19 nt, Homo sapiens
  misc_RNA (1)...(19): siRNA sense strand
caguuaaacagaaugaaga

SEQ ID NO: 1438059 - RNA, 19 nt, Homo sapiens
  misc_RNA (1)...(19): siRNA sense strand
caacaggcggcaggaaaug

SEQ ID NO: 1438060 - RNA, 19 nt, Homo sapiens
  misc_RNA (1)...(19): siRNA sense strand
uggcaaaucacccacauca

SEQ ID NO: 1438061 - RNA, 19 nt, Homo sapiens
  misc_RNA (1)...(19): siRNA sense strand
ucaagccuuuccugacaug

SEQ ID NO: 1438062 - RNA, 19 nt, Homo sapiens
  misc_RNA (1)...(19): siRNA sense strand
gaggacaucaauggagaaa

SEQ ID NO: 1438063 - RNA, 19 nt, Homo sapiens
  misc_RNA (1)...(19): siRNA sense strand
ucaccaaggcaauccaaga

SEQ ID NO: 1438064 - RNA, 19 nt, Homo sapiens
  misc_RNA (1)...(19): siRNA sense strand
agccacauaucaaagaaga

SEQ ID NO: 1438065 - RNA, 19 nt, Homo sapiens
  misc_RNA (1)...(19): siRNA sense strand
ccacugcugguguugugua

SEQ ID NO: 1438066 - RNA, 19 nt, Homo sapiens
  misc_RNA (1)...(19): siRNA sense strand
aauagucugggucucaaua

SEQ ID NO: 1438067 - RNA, 19 nt, Homo sapiens
  misc_RNA (1)...(19): siRNA sense strand
guacgacgaggaagaggau

SEQ ID NO: 1438068 - RNA, 19 nt, Homo sapiens
  misc_RNA (1)...(19): siRNA sense strand
gacaucaauggagaaauuu

SEQ ID NO: 1438069 - RNA, 19 nt, Homo sapiens
  misc_RNA (1)...(19): siRNA sense strand
gcuaugacaaaccuagaga

SEQ ID NO: 1438070 - RNA, 19 nt, Homo sapiens
  misc_RNA (1)...(19): siRNA sense strand
gucucagagucaagaauuu

SEQ ID NO: 1438071 - RNA, 19 nt, Homo sapiens
  misc_RNA (1)...(19): siRNA sense strand
cucaauaacugccgaacag

SEQ ID NO: 1438072 - RNA, 19 nt, Homo sapiens
  misc_RNA (1)...(19): siRNA sense strand
aagaagcucggcaaaugaa

SEQ ID NO: 1438073 - RNA, 19 nt, Homo sapiens
  misc_RNA (1)...(19): siRNA sense strand
agaggagccacauaucaaa

SEQ ID NO: 1438074 - RNA, 19 nt, Homo sapiens
  misc_RNA (1)...(19): siRNA sense strand
ugaauacaaggcaaucaug

SEQ ID NO: 1438075 - RNA, 19 nt, Homo sapiens
  misc_RNA (1)...(19): siRNA sense strand
auugggaucucgcuggaaa

SEQ ID NO: 1438076 - RNA, 19 nt, Homo sapiens
  misc_RNA (1)...(19): siRNA sense strand
auaaagcguccaaugaaug

SEQ ID NO: 1438077 - RNA, 19 nt, Homo sapiens
  misc_RNA (1)...(19): siRNA sense strand
ccauaugccagcucugaga

SEQ ID NO: 1438078 - RNA, 19 nt, Homo sapiens
  misc_RNA (1)...(19): siRNA sense strand
aaggagaggagccacauau

SEQ ID NO: 1438079 - RNA, 19 nt, Homo sapiens
  misc_RNA (1)...(19): siRNA sense strand
gugaauagucugggucuca

SEQ ID NO: 1438080 - RNA, 19 nt, Homo sapiens
  misc_RNA (1)...(19): siRNA sense strand
gcuggagucucagagucaa

SEQ ID NO: 1438081 - RNA, 19 nt, Homo sapiens
  misc_RNA (1)...(19): siRNA sense strand
gaaucccgagggcguggua

SEQ ID NO: 1438082 - RNA, 19 nt, Homo sapiens
  misc_RNA (1)...(19): siRNA sense strand
gauacaggccgaggacauc

SEQ ID NO: 1438083 - RNA, 19 nt, Homo sapiens
  misc_RNA (1)...(19): siRNA sense strand
ucacccaccucuccccaua

SEQ ID NO: 1438084 - RNA, 19 nt, Homo sapiens
  misc_RNA (1)...(19): siRNA sense strand
cuaaagaugaacggagaaa

SEQ ID NO: 1438085 - RNA, 19 nt, Homo sapiens
  misc_RNA (1)...(19): siRNA sense strand
uggagaaauuuaugaugag

SEQ ID NO: 1438086 - RNA, 19 nt, Homo sapiens
  misc_RNA (1)...(19): siRNA sense strand
gaggagcaagcccgucuca

SEQ ID NO: 1438087 - RNA, 19 nt, Homo sapiens
  misc_RNA (1)...(19): siRNA sense strand
gcaaaugaaggagcaacuc

SEQ ID NO: 1438088 - RNA, 19 nt, Homo sapiens
  misc_RNA (1)...(19): siRNA sense strand
aaaggagaggagccacaua

SEQ ID NO: 1438089 - RNA, 19 nt, Homo sapiens
  misc_RNA (1)...(19): siRNA sense strand
ggacaucaauggagaaauu

SEQ ID NO: 1438090 - RNA, 19 nt, Homo sapiens
  misc_RNA (1)...(19): siRNA sense strand
gaagguggcuguugugaau

SEQ ID NO: 1438091 - RNA, 19 nt, Homo sapiens
  misc_RNA (1)...(19): siRNA sense strand
ccaagaagcucggcaaaug

SEQ ID NO: 1438092 - RNA, 19 nt, Homo sapiens
  misc_RNA (1)...(19): siRNA sense strand
gaaguacccugacuauaag

SEQ ID NO: 1438093 - RNA, 19 nt, Homo sapiens
  misc_RNA (1)...(19): siRNA sense strand
ugacaaaccuagagaaaca

SEQ ID NO: 1438094 - RNA, 19 nt, Homo sapiens
  misc_RNA (1)...(19): siRNA sense strand
uagagaaacagccauauua

SEQ ID NO: 1438095 - RNA, 19 nt, Homo sapiens
  misc_RNA (1)...(19): siRNA sense strand
agaaguacccugacuauaa

SEQ ID NO: 1438096 - RNA, 19 nt, Homo sapiens
  misc_RNA (1)...(19): siRNA sense strand
caagaccucugauggcaaa

SEQ ID NO: 1438097 - RNA, 19 nt, Homo sapiens
  misc_RNA (1)...(19): siRNA sense strand
ggaucucgcuggaaagcua

SEQ ID NO: 1438098 - RNA, 19 nt, Homo sapiens
  misc_RNA (1)...(19): siRNA sense strand
aaacaacacuggagagucu

SEQ ID NO: 1438099 - RNA, 19 nt, Homo sapiens
  misc_RNA (1)...(19): siRNA sense strand
gaacaacaggugcuugaug

SEQ ID NO: 1438100 - RNA, 19 nt, Homo sapiens
  misc_RNA (1)...(19): siRNA sense strand
gcaagcagcaccuggagaa

SEQ ID NO: 1438101 - RNA, 19 nt, Homo sapiens
  misc_RNA (1)...(19): siRNA sense strand
uaaacagaaugaagaagga

SEQ ID NO: 1438102 - RNA, 19 nt, Homo sapiens
  misc_RNA (1)...(19): siRNA sense strand
gaguggagauucugaugga

SEQ ID NO: 1438103 - RNA, 19 nt, Homo sapiens
  misc_RNA (1)...(19): siRNA sense strand
ggaaagcuaugacaaaccu

SEQ ID NO: 1438104 - RNA, 19 nt, Homo sapiens
  misc_RNA (1)...(19): siRNA sense strand
cauaaagcguccaaugaau

SEQ ID NO: 1438105 - RNA, 19 nt, Homo sapiens
  misc_RNA (1)...(19): siRNA sense strand
gcacaauagguuacuuaaa

SEQ ID NO: 1438106 - RNA, 19 nt, Homo sapiens
  misc_RNA (1)...(19): siRNA sense strand
gagaggagccacauaucaa

SEQ ID NO: 1438107 - RNA, 19 nt, Homo sapiens
  misc_RNA (1)...(19): siRNA sense strand
ggagaaguacccugacuau

SEQ ID NO: 1438108 - RNA, 19 nt, Homo sapiens
  misc_RNA (1)...(19): siRNA sense strand
ggugugggcuaaagaugaa

SEQ ID NO: 1438109 - RNA, 19 nt, Homo sapiens
  misc_RNA (1)...(19): siRNA sense strand
gcacagccacugaaccuau

SEQ ID NO: 1438110 - RNA, 19 nt, Homo sapiens
  misc_RNA (1)...(19): siRNA sense strand
ggagaggagccacauauca

SEQ ID NO: 1438111 - RNA, 19 nt, Homo sapiens
  misc_RNA (1)...(19): siRNA sense strand
ggagccacauaucaaagaa

SEQ ID NO: 1438112 - RNA, 19 nt, Homo sapiens
  misc_RNA (1)...(19): siRNA sense strand
gcaaugaaccccacauaaa

SEQ ID NO: 1438113 - RNA, 19 nt, Homo sapiens
  misc_RNA (1)...(19): siRNA sense strand
cggcaguacuucaauguug

SEQ ID NO: 1438114 - RNA, 19 nt, Homo sapiens
  misc_RNA (1)...(19): siRNA sense strand
gaaaugcggcaguacuuca

SEQ ID NO: 1438115 - RNA, 19 nt, Homo sapiens
  misc_RNA (1)...(19): siRNA sense strand
caagaagcucggcaaauga

SEQ ID NO: 1438116 - RNA, 19 nt, Homo sapiens
  misc_RNA (1)...(19): siRNA sense strand
gagccugggaugccuguua

SEQ ID NO: 1438117 - RNA, 19 nt, Homo sapiens
  misc_RNA (1)...(19): siRNA sense strand
caacaucagcaagauauug

SEQ ID NO: 1438118 - RNA, 19 nt, Homo sapiens
  misc_RNA (1)...(19): siRNA sense strand
gcgcauuggugaauacaag

SEQ ID NO: 1438119 - RNA, 19 nt, Homo sapiens
  misc_RNA (1)...(19): siRNA sense strand
gagaaguacccugacuaua

SEQ ID NO: 1438120 - RNA, 19 nt, Homo sapiens
  misc_RNA (1)...(19): siRNA sense strand
ccacauaaagcguccaaug

SEQ ID NO: 1438121 - RNA, 19 nt, Homo sapiens
  misc_RNA (1)...(19): siRNA sense strand
ggagaaauuuaugaugagu

SEQ ID NO: 1438122 - RNA, 19 nt, Homo sapiens
  misc_RNA (1)...(19): siRNA sense strand
uaugccagcucugagaaua

SEQ ID NO: 1438123 - RNA, 19 nt, Homo sapiens
  misc_RNA (1)...(19): siRNA sense strand
gcuggaaagcuaugacaaa

SEQ ID NO: 1438124 - RNA, 19 nt, Homo sapiens
  misc_RNA (1)...(19): siRNA sense strand
aaagaugaacggagaaaga

SEQ ID NO: 1438125 - RNA, 19 nt, Homo sapiens
  misc_RNA (1)...(19): siRNA sense strand
cacauaaagcguccaauga

SEQ ID NO: 1438126 - RNA, 19 nt, Homo sapiens
  misc_RNA (1)...(19): siRNA sense strand
ggcaggaaaugcggcagua

SEQ ID NO: 1438127 - RNA, 19 nt, Homo sapiens
  misc_RNA (1)...(19): siRNA sense strand
gcaacaggcggcaggaaau

SEQ ID NO: 1438128 - RNA, 19 nt, Homo sapiens
  misc_RNA (1)...(19): siRNA sense strand
agccagaguuagcacaaua

SEQ ID NO: 1438129 - RNA, 19 nt, Homo sapiens
  misc_RNA (1)...(19): siRNA sense strand
uggaagugcuggagucuca

SEQ ID NO: 1438130 - RNA, 19 nt, Homo sapiens
  misc_RNA (1)...(19): siRNA sense strand
aaauuuagccaugcaauga

SEQ ID NO: 1438131 - RNA, 19 nt, Homo sapiens
  misc_RNA (1)...(19): siRNA sense strand
uagcacaauagguuacuua

SEQ ID NO: 1438132 - RNA, 19 nt, Homo sapiens
  misc_RNA (1)...(19): siRNA sense strand
agaguuagcacaauagguu

SEQ ID NO: 1438133 - RNA, 19 nt, Homo sapiens
  misc_RNA (1)...(19): siRNA sense strand
gggaacaacaggugcuuga

SEQ ID NO: 1438134 - RNA, 19 nt, Homo sapiens
  misc_RNA (1)...(19): siRNA sense strand
acauaaagcguccaaugaa

SEQ ID NO: 1438135 - RNA, 19 nt, Homo sapiens
  misc_RNA (1)...(19): siRNA sense strand
gcacuuacggugugaaagg

SEQ ID NO: 1438136 - RNA, 19 nt, Homo sapiens
  misc_RNA (1)...(19): siRNA sense strand
ugauccagauguagauuau

SEQ ID NO: 1438137 - RNA, 19 nt, Homo sapiens
  misc_RNA (1)...(19): siRNA sense strand
ggaagguggcuguugugaa

SEQ ID NO: 1438138 - RNA, 19 nt, Homo sapiens
  misc_RNA (1)...(19): siRNA sense strand
ccacauaucaaagaagaga

SEQ ID NO: 1438139 - RNA, 19 nt, Homo sapiens
  misc_RNA (1)...(19): siRNA sense strand
agcagcaccuggagaagua

SEQ ID NO: 1438140 - RNA, 19 nt, Homo sapiens
  misc_RNA (1)...(19): siRNA sense strand
gcaguuaaacagaaugaag

SEQ ID NO: 1438141 - RNA, 19 nt, Homo sapiens
  misc_RNA (1)...(19): siRNA sense strand
caauaacugccgaacagaa

SEQ ID NO: 1438142 - RNA, 19 nt, Homo sapiens
  misc_RNA (1)...(19): siRNA sense strand
gaguuagcacaauagguua

SEQ ID NO: 1438143 - RNA, 19 nt, Homo sapiens
  misc_RNA (1)...(19): siRNA sense strand
cuucaagccuuuccugaca

SEQ ID NO: 1438144 - RNA, 19 nt, Homo sapiens
  misc_RNA (1)...(19): siRNA sense strand
ucucagagucaagaauuua

SEQ ID NO: 1438145 - RNA, 19 nt, Homo sapiens
  misc_RNA (1)...(19): siRNA sense strand
cuagagaaacagccauauu

SEQ ID NO: 1438146 - RNA, 19 nt, Homo sapiens
  misc_RNA (1)...(19): siRNA sense strand
gaaaggagaggagccacau

SEQ ID NO: 1438147 - RNA, 19 nt, Homo sapiens
  misc_RNA (1)...(19): siRNA sense strand
agagaaacagccauauuau

SEQ ID NO: 1438148 - RNA, 19 nt, Homo sapiens
  misc_RNA (1)...(19): siRNA sense strand
ugaauagucugggucucaa

SEQ ID NO: 1438149 - RNA, 19 nt, Homo sapiens
  misc_RNA (1)...(19): siRNA sense strand
uaugacaaaccuagagaaa

SEQ ID NO: 1438150 - RNA, 19 nt, Homo sapiens
  misc_RNA (1)...(19): siRNA sense strand
gauggcaaaucacccacau

SEQ ID NO: 1438151 - RNA, 19 nt, Homo sapiens
  misc_RNA (1)...(19): siRNA sense strand
ugccagcucugagaauaaa

SEQ ID NO: 1438152 - RNA, 19 nt, Homo sapiens
  misc_RNA (1)...(19): siRNA sense strand
gagcacuuacggugugaaa

SEQ ID NO: 1438153 - RNA, 19 nt, Homo sapiens
  misc_RNA (1)...(19): siRNA sense strand
ggaaaugcggcaguacuuc

SEQ ID NO: 1438154 - RNA, 19 nt, Homo sapiens
  misc_RNA (1)...(19): siRNA sense strand
augcacaacuccaacauca

SEQ ID NO: 1438155 - RNA, 19 nt, Homo sapiens
  misc_RNA (1)...(19): siRNA sense strand
caccaaggcaauccaagaa

SEQ ID NO: 1438156 - RNA, 19 nt, Homo sapiens
  misc_RNA (1)...(19): siRNA sense strand
aauaacugccgaacagaaa

SEQ ID NO: 1438157 - RNA, 19 nt, Homo sapiens
  misc_RNA (1)...(19): siRNA sense strand
gaagugcuggagucucaga

SEQ ID NO: 1438158 - RNA, 19 nt, Homo sapiens
  misc_RNA (1)...(19): siRNA sense strand
caguuaaacagaaugaaga

SEQ ID NO: 1438159 - RNA, 19 nt, Homo sapiens
  misc_RNA (1)...(19): siRNA sense strand
caacaggcggcaggaaaug

SEQ ID NO: 1438160 - RNA, 19 nt, Homo sapiens
  misc_RNA (1)...(19): siRNA sense strand
uggcaaaucacccacauca

SEQ ID NO: 1438161 - RNA, 19 nt, Homo sapiens
  misc_RNA (1)...(19): siRNA sense strand
ucaagccuuuccugacaug

SEQ ID NO: 1438162 - RNA, 19 nt, Homo sapiens
  misc_RNA (1)...(19): siRNA sense strand
gaggacaucaauggagaaa

SEQ ID NO: 1438163 - RNA, 19 nt, Homo sapiens
  misc_RNA (1)...(19): siRNA sense strand
ucaccaaggcaauccaaga

SEQ ID NO: 1438164 - RNA, 19 nt, Homo sapiens
  misc_RNA (1)...(19): siRNA sense strand
agccacauaucaaagaaga

SEQ ID NO: 1438165 - RNA, 19 nt, Homo sapiens
  misc_RNA (1)...(19): siRNA sense strand
ccacugcugguguugugua

SEQ ID NO: 1438166 - RNA, 19 nt, Homo sapiens
  misc_RNA (1)...(19): siRNA sense strand
aauagucugggucucaaua

SEQ ID NO: 1438167 - RNA, 19 nt, Homo sapiens
  misc_RNA (1)...(19): siRNA sense strand
guacgacgaggaagaggau

SEQ ID NO: 1438168 - RNA, 19 nt, Homo sapiens
  misc_RNA (1)...(19): siRNA sense strand
gacaucaauggagaaauuu

SEQ ID NO: 1438169 - RNA, 19 nt, Homo sapiens
  misc_RNA (1)...(19): siRNA sense strand
gcuaugacaaaccuagaga

SEQ ID NO: 1438170 - RNA, 19 nt, Homo sapiens
  misc_RNA (1)...(19): siRNA sense strand
gucucagagucaagaauuu

SEQ ID NO: 1438171 - RNA, 19 nt, Homo sapiens
  misc_RNA (1)...(19): siRNA sense strand
cucaauaacugccgaacag

SEQ ID NO: 1438172 - RNA, 19 nt, Homo sapiens
  misc_RNA (1)...(19): siRNA sense strand
aagaagcucggcaaaugaa

SEQ ID NO: 1438173 - RNA, 19 nt, Homo sapiens
  misc_RNA (1)...(19): siRNA sense strand
agaggagccacauaucaaa

SEQ ID NO: 1438174 - RNA, 19 nt, Homo sapiens
  misc_RNA (1)...(19): siRNA sense strand
ugaauacaaggcaaucaug

SEQ ID NO: 1438175 - RNA, 19 nt, Homo sapiens
  misc_RNA (1)...(19): siRNA sense strand
auugggaucucgcuggaaa

SEQ ID NO: 1438176 - RNA, 19 nt, Homo sapiens
  misc_RNA (1)...(19): siRNA sense strand
auaaagcguccaaugaaug

SEQ ID NO: 1438177 - RNA, 19 nt, Homo sapiens
  misc_RNA (1)...(19): siRNA sense strand
ccauaugccagcucugaga

SEQ ID NO: 1438178 - RNA, 19 nt, Homo sapiens
  misc_RNA (1)...(19): siRNA sense strand
aaggagaggagccacauau

SEQ ID NO: 1438179 - RNA, 19 nt, Homo sapiens
  misc_RNA (1)...(19): siRNA sense strand
gugaauagucugggucuca

SEQ ID NO: 1438180 - RNA, 19 nt, Homo sapiens
  misc_RNA (1)...(19): siRNA sense strand
gcuggagucucagagucaa

SEQ ID NO: 1438181 - RNA, 19 nt, Homo sapiens
  misc_RNA (1)...(19): siRNA sense strand
gaaucccgagggcguggua

SEQ ID NO: 1438182 - RNA, 19 nt, Homo sapiens
  misc_RNA (1)...(19): siRNA sense strand
gauacaggccgaggacauc

SEQ ID NO: 1438183 - RNA, 19 nt, Homo sapiens
  misc_RNA (1)...(19): siRNA sense strand
ucacccaccucuccccaua

SEQ ID NO: 1438184 - RNA, 19 nt, Homo sapiens
  misc_RNA (1)...(19): siRNA sense strand
cuaaagaugaacggagaaa

SEQ ID NO: 1438185 - RNA, 19 nt, Homo sapiens
  misc_RNA (1)...(19): siRNA sense strand
uggagaaauuuaugaugag

SEQ ID NO: 1438186 - RNA, 19 nt, Homo sapiens
  misc_RNA (1)...(19): siRNA sense strand
gaggagcaagcccgucuca

SEQ ID NO: 1438187 - RNA, 19 nt, Homo sapiens
  misc_RNA (1)...(19): siRNA sense strand
gcaaaugaaggagcaacuc

SEQ ID NO: 1438188 - RNA, 19 nt, Homo sapiens
  misc_RNA (1)...(19): siRNA sense strand
aaaggagaggagccacaua

SEQ ID NO: 1438189 - RNA, 19 nt, Homo sapiens
  misc_RNA (1)...(19): siRNA sense strand
ggacaucaauggagaaauu

SEQ ID NO: 1438190 - RNA, 19 nt, Homo sapiens
  misc_RNA (1)...(19): siRNA sense strand
gaagguggcuguugugaau

SEQ ID NO: 1438191 - RNA, 19 nt, Homo sapiens
  misc_RNA (1)...(19): siRNA sense strand
ccaagaagcucggcaaaug

SEQ ID NO: 1438192 - RNA, 19 nt, Homo sapiens
  misc_RNA (1)...(19): siRNA sense strand
gaaguacccugacuauaag

SEQ ID NO: 1438193 - RNA, 19 nt, Homo sapiens
  misc_RNA (1)...(19): siRNA sense strand
ugacaaaccuagagaaaca

SEQ ID NO: 1438194 - RNA, 19 nt, Homo sapiens
  misc_RNA (1)...(19): siRNA sense strand
uagagaaacagccauauua

SEQ ID NO: 1438195 - RNA, 19 nt, Homo sapiens
  misc_RNA (1)...(19): siRNA sense strand
agaaguacccugacuauaa

SEQ ID NO: 1438196 - RNA, 19 nt, Homo sapiens
  misc_RNA (1)...(19): siRNA sense strand
caagaccucugauggcaaa

SEQ ID NO: 1438197 - RNA, 19 nt, Homo sapiens
  misc_RNA (1)...(19): siRNA sense strand
ggaucucgcuggaaagcua

SEQ ID NO: 1438198 - RNA, 19 nt, Homo sapiens
  misc_RNA (1)...(19): siRNA sense strand
aaacaacacuggagagucu

SEQ ID NO: 1438199 - RNA, 19 nt, Homo sapiens
  misc_RNA (1)...(19): siRNA sense strand
gaacaacaggugcuugaug

SEQ ID NO: 1438200 - RNA, 19 nt, Homo sapiens
  misc_RNA (1)...(19): siRNA sense strand
gcaagcagcaccuggagaa

SEQ ID NO: 1438201 - RNA, 19 nt, Homo sapiens
  misc_RNA (1)...(19): siRNA sense strand
uaaacagaaugaagaagga

SEQ ID NO: 1438202 - RNA, 19 nt, Homo sapiens
  misc_RNA (1)...(19): siRNA sense strand
gaguggagauucugaugga

SEQ ID NO: 1438203 - RNA, 19 nt, Homo sapiens
  misc_RNA (1)...(19): siRNA sense strand
ggaaagcuaugacaaaccu

SEQ ID NO: 1438204 - RNA, 19 nt, Homo sapiens
  misc_RNA (1)...(19): siRNA sense strand
cauaaagcguccaaugaau

SEQ ID NO: 1438205 - RNA, 19 nt, Homo sapiens
  misc_RNA (1)...(19): siRNA sense strand
gcacaauagguuacuuaaa

SEQ ID NO: 1438206 - RNA, 19 nt, Homo sapiens
  misc_RNA (1)...(19): siRNA sense strand
gagaggagccacauaucaa

SEQ ID NO: 1438207 - RNA, 19 nt, Homo sapiens
  misc_RNA (1)...(19): siRNA sense strand
ggagaaguacccugacuau

SEQ ID NO: 1438208 - RNA, 19 nt, Homo sapiens
  misc_RNA (1)...(19): siRNA sense strand
ggugugggcuaaagaugaa

SEQ ID NO: 1438209 - RNA, 19 nt, Homo sapiens
  misc_RNA (1)...(19): siRNA sense strand
gcacagccacugaaccuau

SEQ ID NO: 1438210 - RNA, 19 nt, Homo sapiens
  misc_RNA (1)...(19): siRNA sense strand
ggagaggagccacauauca

SEQ ID NO: 1438211 - RNA, 19 nt, Homo sapiens
  misc_RNA (1)...(19): siRNA sense strand
ggagccacauaucaaagaa

SEQ ID NO: 1438212 - RNA, 19 nt, Homo sapiens
  misc_RNA (1)...(19): siRNA sense strand
gcaaugaaccccacauaaa

SEQ ID NO: 1438213 - RNA, 19 nt, Homo sapiens
  misc_RNA (1)...(19): siRNA sense strand
cggcaguacuucaauguug

SEQ ID NO: 1438214 - RNA, 19 nt, Homo sapiens
  misc_RNA (1)...(19): siRNA sense strand
gaaaugcggcaguacuuca

SEQ ID NO: 1438215 - RNA, 19 nt, Homo sapiens
  misc_RNA (1)...(19): siRNA sense strand
caagaagcucggcaaauga

SEQ ID NO: 1438216 - RNA, 19 nt, Homo sapiens
  misc_RNA (1)...(19): siRNA sense strand
gagccugggaugccuguua

SEQ ID NO: 1438217 - RNA, 19 nt, Homo sapiens
  misc_RNA (1)...(19): siRNA sense strand
caacaucagcaagauauug

SEQ ID NO: 1438218 - RNA, 19 nt, Homo sapiens
  misc_RNA (1)...(19): siRNA sense strand
gcgcauuggugaauacaag

SEQ ID NO: 1438219 - RNA, 19 nt, Homo sapiens
  misc_RNA (1)...(19): siRNA sense strand
gagaaguacccugacuaua

SEQ ID NO: 1438220 - RNA, 19 nt, Homo sapiens
  misc_RNA (1)...(19): siRNA sense strand
ccacauaaagcguccaaug

SEQ ID NO: 1438221 - RNA, 19 nt, Homo sapiens
  misc_RNA (1)...(19): siRNA sense strand
ggagaaauuuaugaugagu

SEQ ID NO: 1438222 - RNA, 19 nt, Homo sapiens
  misc_RNA (1)...(19): siRNA sense strand
uaugccagcucugagaaua

SEQ ID NO: 1438223 - RNA, 19 nt, Homo sapiens
  misc_RNA (1)...(19): siRNA sense strand
gcuggaaagcuaugacaaa

SEQ ID NO: 1438224 - RNA, 19 nt, Homo sapiens
  misc_RNA (1)...(19): siRNA sense strand
aaagaugaacggagaaaga

SEQ ID NO: 1438225 - RNA, 19 nt, Homo sapiens
  misc_RNA (1)...(19): siRNA sense strand
cacauaaagcguccaauga

SEQ ID NO: 1438226 - RNA, 19 nt, Homo sapiens
  misc_RNA (1)...(19): siRNA sense strand
ggcaggaaaugcggcagua

SEQ ID NO: 1438227 - RNA, 19 nt, Homo sapiens
  misc_RNA (1)...(19): siRNA sense strand
gcaacaggcggcaggaaau

SEQ ID NO: 1438228 - RNA, 19 nt, Homo sapiens
  misc_RNA (1)...(19): siRNA sense strand
agccagaguuagcacaaua

SEQ ID NO: 1438229 - RNA, 19 nt, Homo sapiens
  misc_RNA (1)...(19): siRNA sense strand
uggaagugcuggagucuca

SEQ ID NO: 1438230 - RNA, 19 nt, Homo sapiens
  misc_RNA (1)...(19): siRNA sense strand
aaauuuagccaugcaauga

SEQ ID NO: 1438231 - RNA, 19 nt, Homo sapiens
  misc_RNA (1)...(19): siRNA sense strand
uagcacaauagguuacuua

SEQ ID NO: 1438232 - RNA, 19 nt, Homo sapiens
  misc_RNA (1)...(19): siRNA sense strand
agaguuagcacaauagguu

SEQ ID NO: 1438233 - RNA, 19 nt, Homo sapiens
  misc_RNA (1)...(19): siRNA sense strand
gggaacaacaggugcuuga

SEQ ID NO: 1438234 - RNA, 19 nt, Homo sapiens
  misc_RNA (1)...(19): siRNA sense strand
acauaaagcguccaaugaa

SEQ ID NO: 1438235 - RNA, 19 nt, Homo sapiens
  misc_RNA (1)...(19): siRNA sense strand
gcacuuacggugugaaagg

SEQ ID NO: 1438236 - RNA, 19 nt, Homo sapiens
  misc_RNA (1)...(19): siRNA sense strand
ugauccagauguagauuau

SEQ ID NO: 1438237 - RNA, 19 nt, Homo sapiens
  misc_RNA (1)...(19): siRNA sense strand
ggaagguggcuguugugaa

SEQ ID NO: 1438238 - RNA, 19 nt, Homo sapiens
  misc_RNA (1)...(19): siRNA sense strand
ccacauaucaaagaagaga

SEQ ID NO: 1438239 - RNA, 19 nt, Homo sapiens
  misc_RNA (1)...(19): siRNA sense strand
agcagcaccuggagaagua

SEQ ID NO: 1438240 - RNA, 19 nt, Homo sapiens
  misc_RNA (1)...(19): siRNA sense strand
gcaguuaaacagaaugaag

SEQ ID NO: 1438241 - RNA, 19 nt, Homo sapiens
  misc_RNA (1)...(19): siRNA sense strand
caauaacugccgaacagaa

SEQ ID NO: 1438242 - RNA, 19 nt, Homo sapiens
  misc_RNA (1)...(19): siRNA sense strand
gaguuagcacaauagguua

SEQ ID NO: 1438243 - RNA, 19 nt, Homo sapiens
  misc_RNA (1)...(19): siRNA sense strand
cuucaagccuuuccugaca

SEQ ID NO: 1438244 - RNA, 19 nt, Homo sapiens
  misc_RNA (1)...(19): siRNA sense strand
ucucagagucaagaauuua

SEQ ID NO: 1438245 - RNA, 19 nt, Homo sapiens
  misc_RNA (1)...(19): siRNA sense strand
cuagagaaacagccauauu

SEQ ID NO: 1438246 - RNA, 19 nt, Homo sapiens
  misc_RNA (1)...(19): siRNA sense strand
gaaaggagaggagccacau

SEQ ID NO: 1438247 - RNA, 19 nt, Homo sapiens
  misc_RNA (1)...(19): siRNA sense strand
agagaaacagccauauuau

SEQ ID NO: 1438248 - RNA, 19 nt, Homo sapiens
  misc_RNA (1)...(19): siRNA sense strand
ugaauagucugggucucaa

SEQ ID NO: 1438249 - RNA, 19 nt, Homo sapiens
  misc_RNA (1)...(19): siRNA sense strand
uaugacaaaccuagagaaa

SEQ ID NO: 1438250 - RNA, 19 nt, Homo sapiens
  misc_RNA (1)...(19): siRNA sense strand
gauggcaaaucacccacau

SEQ ID NO: 1438251 - RNA, 19 nt, Homo sapiens
  misc_RNA (1)...(19): siRNA sense strand
ugccagcucugagaauaaa

SEQ ID NO: 1438252 - RNA, 19 nt, Homo sapiens
  misc_RNA (1)...(19): siRNA sense strand
gagcacuuacggugugaaa

SEQ ID NO: 1438253 - RNA, 19 nt, Homo sapiens
  misc_RNA (1)...(19): siRNA sense strand
ggaaaugcggcaguacuuc

SEQ ID NO: 1438254 - RNA, 19 nt, Homo sapiens
  misc_RNA (1)...(19): siRNA sense strand
augcacaacuccaacauca

SEQ ID NO: 1438255 - RNA, 19 nt, Homo sapiens
  misc_RNA (1)...(19): siRNA sense strand
caccaaggcaauccaagaa

SEQ ID NO: 1438256 - RNA, 19 nt, Homo sapiens
  misc_RNA (1)...(19): siRNA sense strand
aauaacugccgaacagaaa

SEQ ID NO: 1438257 - RNA, 19 nt, Homo sapiens
  misc_RNA (1)...(19): siRNA sense strand
gaagugcuggagucucaga

SEQ ID NO: 1438258 - RNA, 19 nt, Homo sapiens
  misc_RNA (1)...(19): siRNA sense strand
caguuaaacagaaugaaga

SEQ ID NO: 1438259 - RNA, 19 nt, Homo sapiens
  misc_RNA (1)...(19): siRNA sense strand
caacaggcggcaggaaaug

SEQ ID NO: 1438260 - RNA, 19 nt, Homo sapiens
  misc_RNA (1)...(19): siRNA sense strand
uggcaaaucacccacauca

SEQ ID NO: 1438261 - RNA, 19 nt, Homo sapiens
  misc_RNA (1)...(19): siRNA sense strand
ucaagccuuuccugacaug

SEQ ID NO: 1438262 - RNA, 19 nt, Homo sapiens
  misc_RNA (1)...(19): siRNA sense strand
gaggacaucaauggagaaa

SEQ ID NO: 1438263 - RNA, 19 nt, Homo sapiens
  misc_RNA (1)...(19): siRNA sense strand
ucaccaaggcaauccaaga

SEQ ID NO: 1438264 - RNA, 19 nt, Homo sapiens
  misc_RNA (1)...(19): siRNA sense strand
agccacauaucaaagaaga

SEQ ID NO: 1438265 - RNA, 19 nt, Homo sapiens
  misc_RNA (1)...(19): siRNA sense strand
ccacugcugguguugugua

SEQ ID NO: 1438266 - RNA, 19 nt, Homo sapiens
  misc_RNA (1)...(19): siRNA sense strand
aauagucugggucucaaua

SEQ ID NO: 1438267 - RNA, 19 nt, Homo sapiens
  misc_RNA (1)...(19): siRNA sense strand
guacgacgaggaagaggau

SEQ ID NO: 1438268 - RNA, 19 nt, Homo sapiens
  misc_RNA (1)...(19): siRNA sense strand
gacaucaauggagaaauuu

SEQ ID NO: 1438269 - RNA, 19 nt, Homo sapiens
  misc_RNA (1)...(19): siRNA sense strand
gcuaugacaaaccuagaga

SEQ ID NO: 1438270 - RNA, 19 nt, Homo sapiens
  misc_RNA (1)...(19): siRNA sense strand
gucucagagucaagaauuu

SEQ ID NO: 1438271 - RNA, 19 nt, Homo sapiens
  misc_RNA (1)...(19): siRNA sense strand
cucaauaacugccgaacag

SEQ ID NO: 1438272 - RNA, 19 nt, Homo sapiens
  misc_RNA (1)...(19): siRNA sense strand
aagaagcucggcaaaugaa

SEQ ID NO: 1438273 - RNA, 19 nt, Homo sapiens
  misc_RNA (1)...(19): siRNA sense strand
agaggagccacauaucaaa

SEQ ID NO: 1438274 - RNA, 19 nt, Homo sapiens
  misc_RNA (1)...(19): siRNA sense strand
ugaauacaaggcaaucaug

SEQ ID NO: 1438275 - RNA, 19 nt, Homo sapiens
  misc_RNA (1)...(19): siRNA sense strand
auugggaucucgcuggaaa

SEQ ID NO: 1438276 - RNA, 19 nt, Homo sapiens
  misc_RNA (1)...(19): siRNA sense strand
auaaagcguccaaugaaug

SEQ ID NO: 1438277 - RNA, 19 nt, Homo sapiens
  misc_RNA (1)...(19): siRNA sense strand
ccauaugccagcucugaga

SEQ ID NO: 1438278 - RNA, 19 nt, Homo sapiens
  misc_RNA (1)...(19): siRNA sense strand
aaggagaggagccacauau

SEQ ID NO: 1438279 - RNA, 19 nt, Homo sapiens
  misc_RNA (1)...(19): siRNA sense strand
gugaauagucugggucuca

SEQ ID NO: 1438280 - RNA, 19 nt, Homo sapiens
  misc_RNA (1)...(19): siRNA sense strand
gcuggagucucagagucaa

SEQ ID NO: 1438281 - RNA, 19 nt, Homo sapiens
  misc_RNA (1)...(19): siRNA sense strand
gaaucccgagggcguggua

SEQ ID NO: 1438282 - RNA, 19 nt, Homo sapiens
  misc_RNA (1)...(19): siRNA sense strand
gauacaggccgaggacauc

SEQ ID NO: 1438283 - RNA, 19 nt, Homo sapiens
  misc_RNA (1)...(19): siRNA sense strand
ucacccaccucuccccaua

SEQ ID NO: 1438284 - RNA, 19 nt, Homo sapiens
  misc_RNA (1)...(19): siRNA sense strand
cuaaagaugaacggagaaa

SEQ ID NO: 1438285 - RNA, 19 nt, Homo sapiens
  misc_RNA (1)...(19): siRNA sense strand
uggagaaauuuaugaugag

SEQ ID NO: 1438286 - RNA, 19 nt, Homo sapiens
  misc_RNA (1)...(19): siRNA sense strand
gaggagcaagcccgucuca

SEQ ID NO: 1438287 - RNA, 19 nt, Homo sapiens
  misc_RNA (1)...(19): siRNA sense strand
gcaaaugaaggagcaacuc

SEQ ID NO: 1438288 - RNA, 19 nt, Homo sapiens
  misc_RNA (1)...(19): siRNA sense strand
aaaggagaggagccacaua

SEQ ID NO: 1438289 - RNA, 19 nt, Homo sapiens
  misc_RNA (1)...(19): siRNA sense strand
ggacaucaauggagaaauu

SEQ ID NO: 1438290 - RNA, 19 nt, Homo sapiens
  misc_RNA (1)...(19): siRNA sense strand
gaagguggcuguugugaau

SEQ ID NO: 1438291 - RNA, 19 nt, Homo sapiens
  misc_RNA (1)...(19): siRNA sense strand
ccaagaagcucggcaaaug

SEQ ID NO: 1438292 - RNA, 19 nt, Homo sapiens
  misc_RNA (1)...(19): siRNA sense strand
gaaguacccugacuauaag

SEQ ID NO: 1438293 - RNA, 19 nt, Homo sapiens
  misc_RNA (1)...(19): siRNA sense strand
ugacaaaccuagagaaaca

SEQ ID NO: 1438294 - RNA, 19 nt, Homo sapiens
  misc_RNA (1)...(19): siRNA sense strand
uagagaaacagccauauua

SEQ ID NO: 1438295 - RNA, 19 nt, Homo sapiens
  misc_RNA (1)...(19): siRNA sense strand
agaaguacccugacuauaa

SEQ ID NO: 1438296 - RNA, 19 nt, Homo sapiens
  misc_RNA (1)...(19): siRNA sense strand
caagaccucugauggcaaa

SEQ ID NO: 1438297 - RNA, 19 nt, Homo sapiens
  misc_RNA (1)...(19): siRNA sense strand
ggaucucgcuggaaagcua

SEQ ID NO: 1438298 - RNA, 19 nt, Homo sapiens
  misc_RNA (1)...(19): siRNA sense strand
aaacaacacuggagagucu

SEQ ID NO: 1438299 - RNA, 19 nt, Homo sapiens
  misc_RNA (1)...(19): siRNA sense strand
gaacaacaggugcuugaug

SEQ ID NO: 1438300 - RNA, 19 nt, Homo sapiens
  misc_RNA (1)...(19): siRNA sense strand
gcaagcagcaccuggagaa

SEQ ID NO: 1438301 - RNA, 19 nt, Homo sapiens
  misc_RNA (1)...(19): siRNA sense strand
uaaacagaaugaagaagga

SEQ ID NO: 1438302 - RNA, 19 nt, Homo sapiens
  misc_RNA (1)...(19): siRNA sense strand
gaguggagauucugaugga

SEQ ID NO: 1438303 - RNA, 19 nt, Homo sapiens
  misc_RNA (1)...(19): siRNA sense strand
ggaaagcuaugacaaaccu

SEQ ID NO: 1438304 - RNA, 19 nt, Homo sapiens
  misc_RNA (1)...(19): siRNA sense strand
cauaaagcguccaaugaau

SEQ ID NO: 1438305 - RNA, 19 nt, Homo sapiens
  misc_RNA (1)...(19): siRNA sense strand
gcacaauagguuacuuaaa

SEQ ID NO: 1438306 - RNA, 19 nt, Homo sapiens
  misc_RNA (1)...(19): siRNA sense strand
gagaggagccacauaucaa

SEQ ID NO: 1438307 - RNA, 19 nt, Homo sapiens
  misc_RNA (1)...(19): siRNA sense strand
ggagaaguacccugacuau

SEQ ID NO: 1438308 - RNA, 19 nt, Homo sapiens
  misc_RNA (1)...(19): siRNA sense strand
ggugugggcuaaagaugaa

SEQ ID NO: 1438309 - RNA, 19 nt, Homo sapiens
  misc_RNA (1)...(19): siRNA sense strand
gcacagccacugaaccuau

SEQ ID NO: 1438310 - RNA, 19 nt, Homo sapiens
  misc_RNA (1)...(19): siRNA sense strand
ggagaggagccacauauca

SEQ ID NO: 1438311 - RNA, 19 nt, Homo sapiens
  misc_RNA (1)...(19): siRNA sense strand
ggagccacauaucaaagaa

SEQ ID NO: 1438312 - RNA, 19 nt, Homo sapiens
  misc_RNA (1)...(19): siRNA sense strand
gcaaugaaccccacauaaa

SEQ ID NO: 1438313 - RNA, 19 nt, Homo sapiens
  misc_RNA (1)...(19): siRNA sense strand
cggcaguacuucaauguug

SEQ ID NO: 1438314 - RNA, 19 nt, Homo sapiens
  misc_RNA (1)...(19): siRNA sense strand
gaaaugcggcaguacuuca

SEQ ID NO: 1438315 - RNA, 19 nt, Homo sapiens
  misc_RNA (1)...(19): siRNA sense strand
caagaagcucggcaaauga

SEQ ID NO: 1438316 - RNA, 19 nt, Homo sapiens
  misc_RNA (1)...(19): siRNA sense strand
gagccugggaugccuguua

SEQ ID NO: 1438317 - RNA, 19 nt, Homo sapiens
  misc_RNA (1)...(19): siRNA sense strand
caacaucagcaagauauug

SEQ ID NO: 1438318 - RNA, 19 nt, Homo sapiens
  misc_RNA (1)...(19): siRNA sense strand
gcgcauuggugaauacaag

SEQ ID NO: 1438319 - RNA, 19 nt, Homo sapiens
  misc_RNA (1)...(19): siRNA sense strand
gagaaguacccugacuaua

SEQ ID NO: 1438320 - RNA, 19 nt, Homo sapiens
  misc_RNA (1)...(19): siRNA sense strand
ccacauaaagcguccaaug

SEQ ID NO: 1438321 - RNA, 19 nt, Homo sapiens
  misc_RNA (1)...(19): siRNA sense strand
ggagaaauuuaugaugagu

SEQ ID NO: 1438322 - RNA, 19 nt, Homo sapiens
  misc_RNA (1)...(19): siRNA sense strand
uaugccagcucugagaaua

SEQ ID NO: 1438323 - RNA, 19 nt, Homo sapiens
  misc_RNA (1)...(19): siRNA sense strand
gcuggaaagcuaugacaaa

SEQ ID NO: 1438324 - RNA, 19 nt, Homo sapiens
  misc_RNA (1)...(19): siRNA sense strand
aaagaugaacggagaaaga

SEQ ID NO: 1438325 - RNA, 19 nt, Homo sapiens
  misc_RNA (1)...(19): siRNA sense strand
cacauaaagcguccaauga

SEQ ID NO: 1438326 - RNA, 19 nt, Homo sapiens
  misc_RNA (1)...(19): siRNA sense strand
ggcaggaaaugcggcagua

SEQ ID NO: 1438327 - RNA, 19 nt, Homo sapiens
  misc_RNA (1)...(19): siRNA sense strand
gcaacaggcggcaggaaau

SEQ ID NO: 1438328 - RNA, 19 nt, Homo sapiens
  misc_RNA (1)...(19): siRNA sense strand
agccagaguuagcacaaua

SEQ ID NO: 1438329 - RNA, 19 nt, Homo sapiens
  misc_RNA (1)...(19): siRNA sense strand
uggaagugcuggagucuca

SEQ ID NO: 1438330 - RNA, 19 nt, Homo sapiens
  misc_RNA (1)...(19): siRNA sense strand
aaauuuagccaugcaauga

SEQ ID NO: 1438331 - RNA, 19 nt, Homo sapiens
  misc_RNA (1)...(19): siRNA sense strand
uagcacaauagguuacuua

SEQ ID NO: 1438332 - RNA, 19 nt, Homo sapiens
  misc_RNA (1)...(19): siRNA sense strand
agaguuagcacaauagguu

SEQ ID NO: 1438333 - RNA, 19 nt, Homo sapiens
  misc_RNA (1)...(19): siRNA sense strand
gggaacaacaggugcuuga

SEQ ID NO: 1438334 - RNA, 19 nt, Homo sapiens
  misc_RNA (1)...(19): siRNA sense strand
acauaaagcguccaaugaa

SEQ ID NO: 1438335 - RNA, 19 nt, Homo sapiens
  misc_RNA (1)...(19): siRNA sense strand
gcacuuacggugugaaagg

SEQ ID NO: 1438336 - RNA, 19 nt, Homo sapiens
  misc_RNA (1)...(19): siRNA sense strand
ugauccagauguagauuau

SEQ ID NO: 1438337 - RNA, 19 nt, Homo sapiens
  misc_RNA (1)...(19): siRNA sense strand
ggaagguggcuguugugaa

SEQ ID NO: 1438338 - RNA, 19 nt, Homo sapiens
  misc_RNA (1)...(19): siRNA sense strand
ccacauaucaaagaagaga

SEQ ID NO: 1438339 - RNA, 19 nt, Homo sapiens
  misc_RNA (1)...(19): siRNA sense strand
agcagcaccuggagaagua

SEQ ID NO: 1438340 - RNA, 19 nt, Homo sapiens
  misc_RNA (1)...(19): siRNA sense strand
gcaguuaaacagaaugaag

SEQ ID NO: 1438341 - RNA, 19 nt, Homo sapiens
  misc_RNA (1)...(19): siRNA sense strand
caauaacugccgaacagaa

SEQ ID NO: 1438342 - RNA, 19 nt, Homo sapiens
  misc_RNA (1)...(19): siRNA sense strand
gaguuagcacaauagguua

SEQ ID NO: 1438343 - RNA, 19 nt, Homo sapiens
  misc_RNA (1)...(19): siRNA sense strand
cuucaagccuuuccugaca

SEQ ID NO: 1438344 - RNA, 19 nt, Homo sapiens
  misc_RNA (1)...(19): siRNA sense strand
ucucagagucaagaauuua

SEQ ID NO: 1438345 - RNA, 19 nt, Homo sapiens
  misc_RNA (1)...(19): siRNA sense strand
cuagagaaacagccauauu

SEQ ID NO: 1438346 - RNA, 19 nt, Homo sapiens
  misc_RNA (1)...(19): siRNA sense strand
gaaaggagaggagccacau

SEQ ID NO: 1438347 - RNA, 19 nt, Homo sapiens
  misc_RNA (1)...(19): siRNA sense strand
agagaaacagccauauuau

SEQ ID NO: 1438348 - RNA, 19 nt, Homo sapiens
  misc_RNA (1)...(19): siRNA sense strand
ugaauagucugggucucaa

SEQ ID NO: 1438349 - RNA, 19 nt, Homo sapiens
  misc_RNA (1)...(19): siRNA sense strand
uaugacaaaccuagagaaa

SEQ ID NO: 1438350 - RNA, 19 nt, Homo sapiens
  misc_RNA (1)...(19): siRNA sense strand
gauggcaaaucacccacau

SEQ ID NO: 1438351 - RNA, 19 nt, Homo sapiens
  misc_RNA (1)...(19): siRNA sense strand
ugccagcucugagaauaaa

SEQ ID NO: 1438352 - RNA, 19 nt, Homo sapiens
  misc_RNA (1)...(19): siRNA sense strand
gagcacuuacggugugaaa

SEQ ID NO: 1438353 - RNA, 19 nt, Homo sapiens
  misc_RNA (1)...(19): siRNA sense strand
ggaaaugcggcaguacuuc

SEQ ID NO: 1438354 - RNA, 19 nt, Homo sapiens
  misc_RNA (1)...(19): siRNA sense strand
augcacaacuccaacauca

SEQ ID NO: 1438355 - RNA, 19 nt, Homo sapiens
  misc_RNA (1)...(19): siRNA sense strand
caccaaggcaauccaagaa

SEQ ID NO: 1438356 - RNA, 19 nt, Homo sapiens
  misc_RNA (1)...(19): siRNA sense strand
aauaacugccgaacagaaa

SEQ ID NO: 1438357 - RNA, 19 nt, Homo sapiens
  misc_RNA (1)...(19): siRNA sense strand
gaagugcuggagucucaga

SEQ ID NO: 1438358 - RNA, 19 nt, Homo sapiens
  misc_RNA (1)...(19): siRNA sense strand
caguuaaacagaaugaaga

SEQ ID NO: 1438359 - RNA, 19 nt, Homo sapiens
  misc_RNA (1)...(19): siRNA sense strand
caacaggcggcaggaaaug

SEQ ID NO: 1438360 - RNA, 19 nt, Homo sapiens
  misc_RNA (1)...(19): siRNA sense strand
uggcaaaucacccacauca

SEQ ID NO: 1438361 - RNA, 19 nt, Homo sapiens
  misc_RNA (1)...(19): siRNA sense strand
ucaagccuuuccugacaug

SEQ ID NO: 1438362 - RNA, 19 nt, Homo sapiens
  misc_RNA (1)...(19): siRNA sense strand
gaggacaucaauggagaaa

SEQ ID NO: 1438363 - RNA, 19 nt, Homo sapiens
  misc_RNA (1)...(19): siRNA sense strand
ucaccaaggcaauccaaga

SEQ ID NO: 1438364 - RNA, 19 nt, Homo sapiens
  misc_RNA (1)...(19): siRNA sense strand
agccacauaucaaagaaga

SEQ ID NO: 1438365 - RNA, 19 nt, Homo sapiens
  misc_RNA (1)...(19): siRNA sense strand
ccacugcugguguugugua

SEQ ID NO: 1438366 - RNA, 19 nt, Homo sapiens
  misc_RNA (1)...(19): siRNA sense strand
aauagucugggucucaaua

SEQ ID NO: 1438367 - RNA, 19 nt, Homo sapiens
  misc_RNA (1)...(19): siRNA sense strand
guacgacgaggaagaggau

SEQ ID NO: 1438368 - RNA, 19 nt, Homo sapiens
  misc_RNA (1)...(19): siRNA sense strand
gacaucaauggagaaauuu

SEQ ID NO: 1438369 - RNA, 19 nt, Homo sapiens
  misc_RNA (1)...(19): siRNA sense strand
gcuaugacaaaccuagaga

SEQ ID NO: 1438370 - RNA, 19 nt, Homo sapiens
  misc_RNA (1)...(19): siRNA sense strand
gucucagagucaagaauuu

SEQ ID NO: 1438371 - RNA, 19 nt, Homo sapiens
  misc_RNA (1)...(19): siRNA sense strand
cucaauaacugccgaacag

SEQ ID NO: 1438372 - RNA, 19 nt, Homo sapiens
  misc_RNA (1)...(19): siRNA sense strand
aagaagcucggcaaaugaa

SEQ ID NO: 1438373 - RNA, 19 nt, Homo sapiens
  misc_RNA (1)...(19): siRNA sense strand
agaggagccacauaucaaa

SEQ ID NO: 1438374 - RNA, 19 nt, Homo sapiens
  misc_RNA (1)...(19): siRNA sense strand
ugaauacaaggcaaucaug

SEQ ID NO: 1438375 - RNA, 19 nt, Homo sapiens
  misc_RNA (1)...(19): siRNA sense strand
auugggaucucgcuggaaa

SEQ ID NO: 1438376 - RNA, 19 nt, Homo sapiens
  misc_RNA (1)...(19): siRNA sense strand
auaaagcguccaaugaaug

SEQ ID NO: 1438377 - RNA, 19 nt, Homo sapiens
  misc_RNA (1)...(19): siRNA sense strand
ccauaugccagcucugaga

SEQ ID NO: 1438378 - RNA, 19 nt, Homo sapiens
  misc_RNA (1)...(19): siRNA sense strand
aaggagaggagccacauau

SEQ ID NO: 1438379 - RNA, 19 nt, Homo sapiens
  misc_RNA (1)...(19): siRNA sense strand
gugaauagucugggucuca

SEQ ID NO: 1438380 - RNA, 19 nt, Homo sapiens
  misc_RNA (1)...(19): siRNA sense strand
gcuggagucucagagucaa

SEQ ID NO: 1438381 - RNA, 19 nt, Homo sapiens
  misc_RNA (1)...(19): siRNA sense strand
gaaucccgagggcguggua

SEQ ID NO: 1438382 - RNA, 19 nt, Homo sapiens
  misc_RNA (1)...(19): siRNA sense strand
gauacaggccgaggacauc

SEQ ID NO: 1438383 - RNA, 19 nt, Homo sapiens
  misc_RNA (1)...(19): siRNA sense strand
ucacccaccucuccccaua

SEQ ID NO: 1438384 - RNA, 19 nt, Homo sapiens
  misc_RNA (1)...(19): siRNA sense strand
cuaaagaugaacggagaaa

SEQ ID NO: 1438385 - RNA, 19 nt, Homo sapiens
  misc_RNA (1)...(19): siRNA sense strand
uggagaaauuuaugaugag

SEQ ID NO: 1438386 - RNA, 19 nt, Homo sapiens
  misc_RNA (1)...(19): siRNA sense strand
gaggagcaagcccgucuca

SEQ ID NO: 1438387 - RNA, 19 nt, Homo sapiens
  misc_RNA (1)...(19): siRNA sense strand
gcaaaugaaggagcaacuc

SEQ ID NO: 1438388 - RNA, 19 nt, Homo sapiens
  misc_RNA (1)...(19): siRNA sense strand
aaaggagaggagccacaua

SEQ ID NO: 1438389 - RNA, 19 nt, Homo sapiens
  misc_RNA (1)...(19): siRNA sense strand
gcacagagaugaaguucua

SEQ ID NO: 1438390 - RNA, 19 nt, Homo sapiens
  misc_RNA (1)...(19): siRNA sense strand
ggaauuauguugauugugu

SEQ ID NO: 1438391 - RNA, 19 nt, Homo sapiens
  misc_RNA (1)...(19): siRNA sense strand
uaaagaaggagauccauua

SEQ ID NO: 1438392 - RNA, 19 nt, Homo sapiens
  misc_RNA (1)...(19): siRNA sense strand
guacaacacugacucauca

SEQ ID NO: 1438393 - RNA, 19 nt, Homo sapiens
  misc_RNA (1)...(19): siRNA sense strand
caacagaguuaccuuguau

SEQ ID NO: 1438394 - RNA, 19 nt, Homo sapiens
  misc_RNA (1)...(19): siRNA sense strand
uaaauagucucaaggaaga

SEQ ID NO: 1438395 - RNA, 19 nt, Homo sapiens
  misc_RNA (1)...(19): siRNA sense strand
gauggaagaugauauagau

SEQ ID NO: 1438396 - RNA, 19 nt, Homo sapiens
  misc_RNA (1)...(19): siRNA sense strand
caaggaagaucauaaccaa

SEQ ID NO: 1438397 - RNA, 19 nt, Homo sapiens
  misc_RNA (1)...(19): siRNA sense strand
gaaauuccauccaagagau

SEQ ID NO: 1438398 - RNA, 19 nt, Homo sapiens
  misc_RNA (1)...(19): siRNA sense strand
gcaacagaguuaccuugua

SEQ ID NO: 1438399 - RNA, 19 nt, Homo sapiens
  misc_RNA (1)...(19): siRNA sense strand
guaggaagcaacagaguua

SEQ ID NO: 1438400 - RNA, 19 nt, Homo sapiens
  misc_RNA (1)...(19): siRNA sense strand
gaucaugcuuuacgauuau

SEQ ID NO: 1438401 - RNA, 19 nt, Homo sapiens
  misc_RNA (1)...(19): siRNA sense strand
ggaucuagaggcauaauua

SEQ ID NO: 1438402 - RNA, 19 nt, Homo sapiens
  misc_RNA (1)...(19): siRNA sense strand
gaaauccgguuguugcaau

SEQ ID NO: 1438403 - RNA, 19 nt, Homo sapiens
  misc_RNA (1)...(19): siRNA sense strand
gcuuuacgauuauggaaua

SEQ ID NO: 1438404 - RNA, 19 nt, Homo sapiens
  misc_RNA (1)...(19): siRNA sense strand
caagauggaagaugauaua

SEQ ID NO: 1438405 - RNA, 19 nt, Homo sapiens
  misc_RNA (1)...(19): siRNA sense strand
gagcugaaauuccauccaa

SEQ ID NO: 1438406 - RNA, 19 nt, Homo sapiens
  misc_RNA (1)...(19): siRNA sense strand
gaggaucaauucaaagaga

SEQ ID NO: 1438407 - RNA, 19 nt, Homo sapiens
  misc_RNA (1)...(19): siRNA sense strand
agaaggagauccauuagug

SEQ ID NO: 1438408 - RNA, 19 nt, Homo sapiens
  misc_RNA (1)...(19): siRNA sense strand
gaucauaaccaaccauugu

SEQ ID NO: 1438409 - RNA, 19 nt, Homo sapiens
  misc_RNA (1)...(19): siRNA sense strand
gcgauuugauacuuucuaa

SEQ ID NO: 1438410 - RNA, 19 nt, Homo sapiens
  misc_RNA (1)...(19): siRNA sense strand
ucaaugagcugaaauucca

SEQ ID NO: 1438411 - RNA, 19 nt, Homo sapiens
  misc_RNA (1)...(19): siRNA sense strand
gauagcagcauucuuauag

SEQ ID NO: 1438412 - RNA, 19 nt, Homo sapiens
  misc_RNA (1)...(19): siRNA sense strand
agaguuaccuuguaugaau

SEQ ID NO: 1438413 - RNA, 19 nt, Homo sapiens
  misc_RNA (1)...(19): siRNA sense strand
ggagauccauuaguguuug

SEQ ID NO: 1438414 - RNA, 19 nt, Homo sapiens
  misc_RNA (1)...(19): siRNA sense strand
caacacugacucaucauaa

SEQ ID NO: 1438415 - RNA, 19 nt, Homo sapiens
  misc_RNA (1)...(19): siRNA sense strand
ccagagacauacauaggaa

SEQ ID NO: 1438416 - RNA, 19 nt, Homo sapiens
  misc_RNA (1)...(19): siRNA sense strand
caaagagaaugaugaaugc

SEQ ID NO: 1438417 - RNA, 19 nt, Homo sapiens
  misc_RNA (1)...(19): siRNA sense strand
aguagaagauccucauaaa

SEQ ID NO: 1438418 - RNA, 19 nt, Homo sapiens
  misc_RNA (1)...(19): siRNA sense strand
uaaauguggugcugcuauu

SEQ ID NO: 1438419 - RNA, 19 nt, Homo sapiens
  misc_RNA (1)...(19): siRNA sense strand
ucaaagagaaugaugaaug

SEQ ID NO: 1438420 - RNA, 19 nt, Homo sapiens
  misc_RNA (1)...(19): siRNA sense strand
gaaguagaagauccucaua

SEQ ID NO: 1438421 - RNA, 19 nt, Homo sapiens
  misc_RNA (1)...(19): siRNA sense strand
agaucaugcuuuacgauua

SEQ ID NO: 1438422 - RNA, 19 nt, Homo sapiens
  misc_RNA (1)...(19): siRNA sense strand
gaaaauggaagucaaagaa

SEQ ID NO: 1438423 - RNA, 19 nt, Homo sapiens
  misc_RNA (1)...(19): siRNA sense strand
ggauagcagcauucuuaua

SEQ ID NO: 1438424 - RNA, 19 nt, Homo sapiens
  misc_RNA (1)...(19): siRNA sense strand
agggauagcagcauucuua

SEQ ID NO: 1438425 - RNA, 19 nt, Homo sapiens
  misc_RNA (1)...(19): siRNA sense strand
aaaauaauguccuguggua

SEQ ID NO: 1438426 - RNA, 19 nt, Homo sapiens
  misc_RNA (1)...(19): siRNA sense strand
acuaacaggccauuuauuu

SEQ ID NO: 1438427 - RNA, 19 nt, Homo sapiens
  misc_RNA (1)...(19): siRNA sense strand
ugaaugcaauuaaggaauc

SEQ ID NO: 1438428 - RNA, 19 nt, Homo sapiens
  misc_RNA (1)...(19): siRNA sense strand
guauggaucauucucuuaa

SEQ ID NO: 1438429 - RNA, 19 nt, Homo sapiens
  misc_RNA (1)...(19): siRNA sense strand
gcacuauguuggccaugga

SEQ ID NO: 1438430 - RNA, 19 nt, Homo sapiens
  misc_RNA (1)...(19): siRNA sense strand
ggaucauucucuuaaacuu

SEQ ID NO: 1438431 - RNA, 19 nt, Homo sapiens
  misc_RNA (1)...(19): siRNA sense strand
ccauggaaaugcuaucaau

SEQ ID NO: 1438432 - RNA, 19 nt, Homo sapiens
  misc_RNA (1)...(19): siRNA sense strand
ggauuuagaaguagaagau

SEQ ID NO: 1438433 - RNA, 19 nt, Homo sapiens
  misc_RNA (1)...(19): siRNA sense strand
aaaugcaccuggaaggaaa

SEQ ID NO: 1438434 - RNA, 19 nt, Homo sapiens
  misc_RNA (1)...(19): siRNA sense strand
uguuugggauuuagaagua

SEQ ID NO: 1438435 - RNA, 19 nt, Homo sapiens
  misc_RNA (1)...(19): siRNA sense strand
guaaagaaggagauccauu

SEQ ID NO: 1438436 - RNA, 19 nt, Homo sapiens
  misc_RNA (1)...(19): siRNA sense strand
gagacauacauaggaauua

SEQ ID NO: 1438437 - RNA, 19 nt, Homo sapiens
  misc_RNA (1)...(19): siRNA sense strand
cuauaacaaugcaguguau

SEQ ID NO: 1438438 - RNA, 19 nt, Homo sapiens
  misc_RNA (1)...(19): siRNA sense strand
ggcuguagcuggaucuaga

SEQ ID NO: 1438439 - RNA, 19 nt, Homo sapiens
  misc_RNA (1)...(19): siRNA sense strand
uagcagggauagcagcauu

SEQ ID NO: 1438440 - RNA, 19 nt, Homo sapiens
  misc_RNA (1)...(19): siRNA sense strand
caaaucuucuccugucagu

SEQ ID NO: 1438441 - RNA, 19 nt, Homo sapiens
  misc_RNA (1)...(19): siRNA sense strand
aaucuucuccugucaguaa

SEQ ID NO: 1438442 - RNA, 19 nt, Homo sapiens
  misc_RNA (1)...(19): siRNA sense strand
cuggaaaccuggcaagaug

SEQ ID NO: 1438443 - RNA, 19 nt, Homo sapiens
  misc_RNA (1)...(19): siRNA sense strand
aaacuaacaggccauuuau

SEQ ID NO: 1438444 - RNA, 19 nt, Homo sapiens
  misc_RNA (1)...(19): siRNA sense strand
gguauggaucauucucuua

SEQ ID NO: 1438445 - RNA, 19 nt, Homo sapiens
  misc_RNA (1)...(19): siRNA sense strand
ucuaagugcugauuaugau

SEQ ID NO: 1438446 - RNA, 19 nt, Homo sapiens
  misc_RNA (1)...(19): siRNA sense strand
gaagucaaagaaaugcaaa

SEQ ID NO: 1438447 - RNA, 19 nt, Homo sapiens
  misc_RNA (1)...(19): siRNA sense strand
uaacaggccauuuauuucu

SEQ ID NO: 1438448 - RNA, 19 nt, Homo sapiens
  misc_RNA (1)...(19): siRNA sense strand
ggaagucaaagaaaugcaa

SEQ ID NO: 1438449 - RNA, 19 nt, Homo sapiens
  misc_RNA (1)...(19): siRNA sense strand
ucuuauagcuguuugugau

SEQ ID NO: 1438450 - RNA, 19 nt, Homo sapiens
  misc_RNA (1)...(19): siRNA sense strand
caaaugcaccuggaaggaa

SEQ ID NO: 1438451 - RNA, 19 nt, Homo sapiens
  misc_RNA (1)...(19): siRNA sense strand
gaaggagauccauuagugu

SEQ ID NO: 1438452 - RNA, 19 nt, Homo sapiens
  misc_RNA (1)...(19): siRNA sense strand
guuaggcgauuugauacuu

SEQ ID NO: 1438453 - RNA, 19 nt, Homo sapiens
  misc_RNA (1)...(19): siRNA sense strand
gaaguucuaagugcugauu

SEQ ID NO: 1438454 - RNA, 19 nt, Homo sapiens
  misc_RNA (1)...(19): siRNA sense strand
uauagaaagugguacaaac

SEQ ID NO: 1438455 - RNA, 19 nt, Homo sapiens
  misc_RNA (1)...(19): siRNA sense strand
gaugaaugcaauuaaggaa

SEQ ID NO: 1438456 - RNA, 19 nt, Homo sapiens
  misc_RNA (1)...(19): siRNA sense strand
gaguuaccuuguaugaaug

SEQ ID NO: 1438457 - RNA, 19 nt, Homo sapiens
  misc_RNA (1)...(19): siRNA sense strand
ggaugcugaugcugaugaa

SEQ ID NO: 1438458 - RNA, 19 nt, Homo sapiens
  misc_RNA (1)...(19): siRNA sense strand
gcugaaauuccauccaaga

SEQ ID NO: 1438459 - RNA, 19 nt, Homo sapiens
  misc_RNA (1)...(19): siRNA sense strand
aacacugacucaucauaaa

SEQ ID NO: 1438460 - RNA, 19 nt, Homo sapiens
  misc_RNA (1)...(19): siRNA sense strand
cccagugaaucuaauguga

SEQ ID NO: 1438461 - RNA, 19 nt, Homo sapiens
  misc_RNA (1)...(19): siRNA sense strand
gcaagauggaagaugauau

SEQ ID NO: 1438462 - RNA, 19 nt, Homo sapiens
  misc_RNA (1)...(19): siRNA sense strand
agagaaugaugaaugcaau

SEQ ID NO: 1438463 - RNA, 19 nt, Homo sapiens
  misc_RNA (1)...(19): siRNA sense strand
guugcaaucuuacguggau

SEQ ID NO: 1438464 - RNA, 19 nt, Homo sapiens
  misc_RNA (1)...(19): siRNA sense strand
uagaagauccucauaaagc

SEQ ID NO: 1438465 - RNA, 19 nt, Homo sapiens
  misc_RNA (1)...(19): siRNA sense strand
gagaaugaugaaugcaauu

SEQ ID NO: 1438466 - RNA, 19 nt, Homo sapiens
  misc_RNA (1)...(19): siRNA sense strand
acacucugguggcaauauu

SEQ ID NO: 1438467 - RNA, 19 nt, Homo sapiens
  misc_RNA (1)...(19): siRNA sense strand
uguaaauagucucaaggaa

SEQ ID NO: 1438468 - RNA, 19 nt, Homo sapiens
  misc_RNA (1)...(19): siRNA sense strand
ugacuauucuugggcgauu

SEQ ID NO: 1438469 - RNA, 19 nt, Homo sapiens
  misc_RNA (1)...(19): siRNA sense strand
guagaagggcacagagaug

SEQ ID NO: 1438470 - RNA, 19 nt, Homo sapiens
  misc_RNA (1)...(19): siRNA sense strand
ggaagaucauaaccaacca

SEQ ID NO: 1438471 - RNA, 19 nt, Homo sapiens
  misc_RNA (1)...(19): siRNA sense strand
gcagugacgagaacagcaa

SEQ ID NO: 1438472 - RNA, 19 nt, Homo sapiens
  misc_RNA (1)...(19): siRNA sense strand
gcuauucgacaaaccaguu

SEQ ID NO: 1438473 - RNA, 19 nt, Homo sapiens
  misc_RNA (1)...(19): siRNA sense strand
ugugacauuugguacauga

SEQ ID NO: 1438474 - RNA, 19 nt, Homo sapiens
  misc_RNA (1)...(19): siRNA sense strand
agcagaagcugagcaguga

SEQ ID NO: 1438475 - RNA, 19 nt, Homo sapiens
  misc_RNA (1)...(19): siRNA sense strand
cuggcaagauggaagauga

SEQ ID NO: 1438476 - RNA, 19 nt, Homo sapiens
  misc_RNA (1)...(19): siRNA sense strand
aaaacuaacaggccauuua

SEQ ID NO: 1438477 - RNA, 19 nt, Homo sapiens
  misc_RNA (1)...(19): siRNA sense strand
gaucuagaggcauaauuag

SEQ ID NO: 1438478 - RNA, 19 nt, Homo sapiens
  misc_RNA (1)...(19): siRNA sense strand
uguuuggaguucaguuuaa

SEQ ID NO: 1438479 - RNA, 19 nt, Homo sapiens
  misc_RNA (1)...(19): siRNA sense strand
guauagaaagugguacaaa

SEQ ID NO: 1438480 - RNA, 19 nt, Homo sapiens
  misc_RNA (1)...(19): siRNA sense strand
uaaacccagugaaucuaau

SEQ ID NO: 1438481 - RNA, 19 nt, Homo sapiens
  misc_RNA (1)...(19): siRNA sense strand
aaacuuuggaggaucaauu

SEQ ID NO: 1438482 - RNA, 19 nt, Homo sapiens
  misc_RNA (1)...(19): siRNA sense strand
guaaguaaagaucaugcuu

SEQ ID NO: 1438483 - RNA, 19 nt, Homo sapiens
  misc_RNA (1)...(19): siRNA sense strand
ugaaauuccauccaagaga

SEQ ID NO: 1438484 - RNA, 19 nt, Homo sapiens
  misc_RNA (1)...(19): siRNA sense strand
cuacaaacacgccaaaugc

SEQ ID NO: 1438485 - RNA, 19 nt, Homo sapiens
  misc_RNA (1)...(19): siRNA sense strand
guagaagauccucauaaag

SEQ ID NO: 1438486 - RNA, 19 nt, Homo sapiens
  misc_RNA (1)...(19): siRNA sense strand
gauuacagccagugugaca

SEQ ID NO: 1438487 - RNA, 19 nt, Homo sapiens
  misc_RNA (1)...(19): siRNA sense strand
gugaaucuaaugugacuau

SEQ ID NO: 1438488 - RNA, 19 nt, Homo sapiens
  misc_RNA (1)...(19): siRNA sense strand
ggaaaccuggcaagaugga

SEQ ID NO: 1438489 - RNA, 19 nt, Homo sapiens
  misc_RNA (1)...(19): siRNA sense strand
gcacagagaugaaguucua

SEQ ID NO: 1438490 - RNA, 19 nt, Homo sapiens
  misc_RNA (1)...(19): siRNA sense strand
ggaauuauguugauugugu

SEQ ID NO: 1438491 - RNA, 19 nt, Homo sapiens
  misc_RNA (1)...(19): siRNA sense strand
uaaagaaggagauccauua

SEQ ID NO: 1438492 - RNA, 19 nt, Homo sapiens
  misc_RNA (1)...(19): siRNA sense strand
caacagaguuaccuuguau

SEQ ID NO: 1438493 - RNA, 19 nt, Homo sapiens
  misc_RNA (1)...(19): siRNA sense strand
uaaauagucucaaggaaga

SEQ ID NO: 1438494 - RNA, 19 nt, Homo sapiens
  misc_RNA (1)...(19): siRNA sense strand
gauggaagaugauauagau

SEQ ID NO: 1438495 - RNA, 19 nt, Homo sapiens
  misc_RNA (1)...(19): siRNA sense strand
caaggaagaucauaaccaa

SEQ ID NO: 1438496 - RNA, 19 nt, Homo sapiens
  misc_RNA (1)...(19): siRNA sense strand
gaaauuccauccaagagau

SEQ ID NO: 1438497 - RNA, 19 nt, Homo sapiens
  misc_RNA (1)...(19): siRNA sense strand
gcaacagaguuaccuugua

SEQ ID NO: 1438498 - RNA, 19 nt, Homo sapiens
  misc_RNA (1)...(19): siRNA sense strand
guaggaagcaacagaguua

SEQ ID NO: 1438499 - RNA, 19 nt, Homo sapiens
  misc_RNA (1)...(19): siRNA sense strand
gaucaugcuuuacgauuau

SEQ ID NO: 1438500 - RNA, 19 nt, Homo sapiens
  misc_RNA (1)...(19): siRNA sense strand
ggaucuagaggcauaauua

SEQ ID NO: 1438501 - RNA, 19 nt, Homo sapiens
  misc_RNA (1)...(19): siRNA sense strand
gaaauccgguuguugcaau

SEQ ID NO: 1438502 - RNA, 19 nt, Homo sapiens
  misc_RNA (1)...(19): siRNA sense strand
gcuuuacgauuauggaaua

SEQ ID NO: 1438503 - RNA, 19 nt, Homo sapiens
  misc_RNA (1)...(19): siRNA sense strand
caagauggaagaugauaua

SEQ ID NO: 1438504 - RNA, 19 nt, Homo sapiens
  misc_RNA (1)...(19): siRNA sense strand
gagcugaaauuccauccaa

SEQ ID NO: 1438505 - RNA, 19 nt, Homo sapiens
  misc_RNA (1)...(19): siRNA sense strand
gaggaucaauucaaagaga

SEQ ID NO: 1438506 - RNA, 19 nt, Homo sapiens
  misc_RNA (1)...(19): siRNA sense strand
agaaggagauccauuagug

SEQ ID NO: 1438507 - RNA, 19 nt, Homo sapiens
  misc_RNA (1)...(19): siRNA sense strand
gaucauaaccaaccauugu

SEQ ID NO: 1438508 - RNA, 19 nt, Homo sapiens
  misc_RNA (1)...(19): siRNA sense strand
gcgauuugauacuuucuaa

SEQ ID NO: 1438509 - RNA, 19 nt, Homo sapiens
  misc_RNA (1)...(19): siRNA sense strand
ucaaugagcugaaauucca

SEQ ID NO: 1438510 - RNA, 19 nt, Homo sapiens
  misc_RNA (1)...(19): siRNA sense strand
agaguuaccuuguaugaau

SEQ ID NO: 1438511 - RNA, 19 nt, Homo sapiens
  misc_RNA (1)...(19): siRNA sense strand
ggagauccauuaguguuug

SEQ ID NO: 1438512 - RNA, 19 nt, Homo sapiens
  misc_RNA (1)...(19): siRNA sense strand
ccagagacauacauaggaa

SEQ ID NO: 1438513 - RNA, 19 nt, Homo sapiens
  misc_RNA (1)...(19): siRNA sense strand
caaagagaaugaugaaugc

SEQ ID NO: 1438514 - RNA, 19 nt, Homo sapiens
  misc_RNA (1)...(19): siRNA sense strand
aguagaagauccucauaaa

SEQ ID NO: 1438515 - RNA, 19 nt, Homo sapiens
  misc_RNA (1)...(19): siRNA sense strand
ucaaagagaaugaugaaug

SEQ ID NO: 1438516 - RNA, 19 nt, Homo sapiens
  misc_RNA (1)...(19): siRNA sense strand
gaaguagaagauccucaua

SEQ ID NO: 1438517 - RNA, 19 nt, Homo sapiens
  misc_RNA (1)...(19): siRNA sense strand
agaucaugcuuuacgauua

SEQ ID NO: 1438518 - RNA, 19 nt, Homo sapiens
  misc_RNA (1)...(19): siRNA sense strand
gaaaauggaagucaaagaa

SEQ ID NO: 1438519 - RNA, 19 nt, Homo sapiens
  misc_RNA (1)...(19): siRNA sense strand
aaaauaauguccuguggua

SEQ ID NO: 1438520 - RNA, 19 nt, Homo sapiens
  misc_RNA (1)...(19): siRNA sense strand
acuaacaggccauuuauuu

SEQ ID NO: 1438521 - RNA, 19 nt, Homo sapiens
  misc_RNA (1)...(19): siRNA sense strand
ugaaugcaauuaaggaauc

SEQ ID NO: 1438522 - RNA, 19 nt, Homo sapiens
  misc_RNA (1)...(19): siRNA sense strand
guauggaucauucucuuaa

SEQ ID NO: 1438523 - RNA, 19 nt, Homo sapiens
  misc_RNA (1)...(19): siRNA sense strand
gcacuauguuggccaugga

SEQ ID NO: 1438524 - RNA, 19 nt, Homo sapiens
  misc_RNA (1)...(19): siRNA sense strand
ggaucauucucuuaaacuu

SEQ ID NO: 1438525 - RNA, 19 nt, Homo sapiens
  misc_RNA (1)...(19): siRNA sense strand
ccauggaaaugcuaucaau

SEQ ID NO: 1438526 - RNA, 19 nt, Homo sapiens
  misc_RNA (1)...(19): siRNA sense strand
ggauuuagaaguagaagau

SEQ ID NO: 1438527 - RNA, 19 nt, Homo sapiens
  misc_RNA (1)...(19): siRNA sense strand
aaaugcaccuggaaggaaa

SEQ ID NO: 1438528 - RNA, 19 nt, Homo sapiens
  misc_RNA (1)...(19): siRNA sense strand
uguuugggauuuagaagua

SEQ ID NO: 1438529 - RNA, 19 nt, Homo sapiens
  misc_RNA (1)...(19): siRNA sense strand
guaaagaaggagauccauu

SEQ ID NO: 1438530 - RNA, 19 nt, Homo sapiens
  misc_RNA (1)...(19): siRNA sense strand
gagacauacauaggaauua

SEQ ID NO: 1438531 - RNA, 19 nt, Homo sapiens
  misc_RNA (1)...(19): siRNA sense strand
cuauaacaaugcaguguau

SEQ ID NO: 1438532 - RNA, 19 nt, Homo sapiens
  misc_RNA (1)...(19): siRNA sense strand
ggcuguagcuggaucuaga

SEQ ID NO: 1438533 - RNA, 19 nt, Homo sapiens
  misc_RNA (1)...(19): siRNA sense strand
caaaucuucuccugucagu

SEQ ID NO: 1438534 - RNA, 19 nt, Homo sapiens
  misc_RNA (1)...(19): siRNA sense strand
aaucuucuccugucaguaa

SEQ ID NO: 1438535 - RNA, 19 nt, Homo sapiens
  misc_RNA (1)...(19): siRNA sense strand
cuggaaaccuggcaagaug

SEQ ID NO: 1438536 - RNA, 19 nt, Homo sapiens
  misc_RNA (1)...(19): siRNA sense strand
aaacuaacaggccauuuau

SEQ ID NO: 1438537 - RNA, 19 nt, Homo sapiens
  misc_RNA (1)...(19): siRNA sense strand
gguauggaucauucucuua

SEQ ID NO: 1438538 - RNA, 19 nt, Homo sapiens
  misc_RNA (1)...(19): siRNA sense strand
ucuaagugcugauuaugau

SEQ ID NO: 1438539 - RNA, 19 nt, Homo sapiens
  misc_RNA (1)...(19): siRNA sense strand
gaagucaaagaaaugcaaa

SEQ ID NO: 1438540 - RNA, 19 nt, Homo sapiens
  misc_RNA (1)...(19): siRNA sense strand
uaacaggccauuuauuucu

SEQ ID NO: 1438541 - RNA, 19 nt, Homo sapiens
  misc_RNA (1)...(19): siRNA sense strand
ggaagucaaagaaaugcaa

SEQ ID NO: 1438542 - RNA, 19 nt, Homo sapiens
  misc_RNA (1)...(19): siRNA sense strand
gaaggagauccauuagugu

SEQ ID NO: 1438543 - RNA, 19 nt, Homo sapiens
  misc_RNA (1)...(19): siRNA sense strand
caaaugcaccuggaaggaa

SEQ ID NO: 1438544 - RNA, 19 nt, Homo sapiens
  misc_RNA (1)...(19): siRNA sense strand
guuaggcgauuugauacuu

SEQ ID NO: 1438545 - RNA, 19 nt, Homo sapiens
  misc_RNA (1)...(19): siRNA sense strand
uauagaaagugguacaaac

SEQ ID NO: 1438546 - RNA, 19 nt, Homo sapiens
  misc_RNA (1)...(19): siRNA sense strand
gaugaaugcaauuaaggaa

SEQ ID NO: 1438547 - RNA, 19 nt, Homo sapiens
  misc_RNA (1)...(19): siRNA sense strand
gaaguucuaagugcugauu

SEQ ID NO: 1438548 - RNA, 19 nt, Homo sapiens
  misc_RNA (1)...(19): siRNA sense strand
gaguuaccuuguaugaaug

SEQ ID NO: 1438549 - RNA, 19 nt, Homo sapiens
  misc_RNA (1)...(19): siRNA sense strand
ggaugcugaugcugaugaa

SEQ ID NO: 1438550 - RNA, 19 nt, Homo sapiens
  misc_RNA (1)...(19): siRNA sense strand
gcugaaauuccauccaaga

SEQ ID NO: 1438551 - RNA, 19 nt, Homo sapiens
  misc_RNA (1)...(19): siRNA sense strand
cccagugaaucuaauguga

SEQ ID NO: 1438552 - RNA, 19 nt, Homo sapiens
  misc_RNA (1)...(19): siRNA sense strand
gcaagauggaagaugauau

SEQ ID NO: 1438553 - RNA, 19 nt, Homo sapiens
  misc_RNA (1)...(19): siRNA sense strand
agagaaugaugaaugcaau

SEQ ID NO: 1438554 - RNA, 19 nt, Homo sapiens
  misc_RNA (1)...(19): siRNA sense strand
guugcaaucuuacguggau

SEQ ID NO: 1438555 - RNA, 19 nt, Homo sapiens
  misc_RNA (1)...(19): siRNA sense strand
uagaagauccucauaaagc

SEQ ID NO: 1438556 - RNA, 19 nt, Homo sapiens
  misc_RNA (1)...(19): siRNA sense strand
gagaaugaugaaugcaauu

SEQ ID NO: 1438557 - RNA, 19 nt, Homo sapiens
  misc_RNA (1)...(19): siRNA sense strand
acacucugguggcaauauu

SEQ ID NO: 1438558 - RNA, 19 nt, Homo sapiens
  misc_RNA (1)...(19): siRNA sense strand
uguaaauagucucaaggaa

SEQ ID NO: 1438559 - RNA, 19 nt, Homo sapiens
  misc_RNA (1)...(19): siRNA sense strand
ugacuauucuugggcgauu

SEQ ID NO: 1438560 - RNA, 19 nt, Homo sapiens
  misc_RNA (1)...(19): siRNA sense strand
guagaagggcacagagaug

SEQ ID NO: 1438561 - RNA, 19 nt, Homo sapiens
  misc_RNA (1)...(19): siRNA sense strand
ggaagaucauaaccaacca

SEQ ID NO: 1438562 - RNA, 19 nt, Homo sapiens
  misc_RNA (1)...(19): siRNA sense strand
gcagugacgagaacagcaa

SEQ ID NO: 1438563 - RNA, 19 nt, Homo sapiens
  misc_RNA (1)...(19): siRNA sense strand
ugugacauuugguacauga

SEQ ID NO: 1438564 - RNA, 19 nt, Homo sapiens
  misc_RNA (1)...(19): siRNA sense strand
cuggcaagauggaagauga

SEQ ID NO: 1438565 - RNA, 19 nt, Homo sapiens
  misc_RNA (1)...(19): siRNA sense strand
aaaacuaacaggccauuua

SEQ ID NO: 1438566 - RNA, 19 nt, Homo sapiens
  misc_RNA (1)...(19): siRNA sense strand
agcagaagcugagcaguga

SEQ ID NO: 1438567 - RNA, 19 nt, Homo sapiens
  misc_RNA (1)...(19): siRNA sense strand
gaucuagaggcauaauuag

SEQ ID NO: 1438568 - RNA, 19 nt, Homo sapiens
  misc_RNA (1)...(19): siRNA sense strand
uguuuggaguucaguuuaa

SEQ ID NO: 1438569 - RNA, 19 nt, Homo sapiens
  misc_RNA (1)...(19): siRNA sense strand
uaaacccagugaaucuaau

SEQ ID NO: 1438570 - RNA, 19 nt, Homo sapiens
  misc_RNA (1)...(19): siRNA sense strand
aaacuuuggaggaucaauu

SEQ ID NO: 1438571 - RNA, 19 nt, Homo sapiens
  misc_RNA (1)...(19): siRNA sense strand
guauagaaagugguacaaa

SEQ ID NO: 1438572 - RNA, 19 nt, Homo sapiens
  misc_RNA (1)...(19): siRNA sense strand
guaaguaaagaucaugcuu

SEQ ID NO: 1438573 - RNA, 19 nt, Homo sapiens
  misc_RNA (1)...(19): siRNA sense strand
ugaaauuccauccaagaga

SEQ ID NO: 1438574 - RNA, 19 nt, Homo sapiens
  misc_RNA (1)...(19): siRNA sense strand
cuacaaacacgccaaaugc

SEQ ID NO: 1438575 - RNA, 19 nt, Homo sapiens
  misc_RNA (1)...(19): siRNA sense strand
guagaagauccucauaaag

SEQ ID NO: 1438576 - RNA, 19 nt, Homo sapiens
  misc_RNA (1)...(19): siRNA sense strand
gauuacagccagugugaca

SEQ ID NO: 1438577 - RNA, 19 nt, Homo sapiens
  misc_RNA (1)...(19): siRNA sense strand
gugaaucuaaugugacuau

SEQ ID NO: 1438578 - RNA, 19 nt, Homo sapiens
  misc_RNA (1)...(19): siRNA sense strand
ucauaaccaaccauuguuu

SEQ ID NO: 1438579 - RNA, 19 nt, Homo sapiens
  misc_RNA (1)...(19): siRNA sense strand
ggaaaccuggcaagaugga

SEQ ID NO: 1438580 - RNA, 19 nt, Homo sapiens
  misc_RNA (1)...(19): siRNA sense strand
uuaggcgauuugauacuuu

SEQ ID NO: 1438581 - RNA, 19 nt, Homo sapiens
  misc_RNA (1)...(19): siRNA sense strand
uagaagggcacagagauga

SEQ ID NO: 1438582 - RNA, 19 nt, Homo sapiens
  misc_RNA (1)...(19): siRNA sense strand
gcacaguaaagaaggagau

SEQ ID NO: 1438583 - RNA, 19 nt, Homo sapiens
  misc_RNA (1)...(19): siRNA sense strand
uuaaacccagugaaucuaa

SEQ ID NO: 1438584 - RNA, 19 nt, Homo sapiens
  misc_RNA (1)...(19): siRNA sense strand
aauaauguccugugguaug

SEQ ID NO: 1438585 - RNA, 19 nt, Homo sapiens
  misc_RNA (1)...(19): siRNA sense strand
acaaugcaguguauaaagc

SEQ ID NO: 1438586 - RNA, 19 nt, Homo sapiens
  misc_RNA (1)...(19): siRNA sense strand
acagaguuaccuuguauga

SEQ ID NO: 1438587 - RNA, 19 nt, Homo sapiens
  misc_RNA (1)...(19): siRNA sense strand
cuaacaggccauuuauuuc

SEQ ID NO: 1438588 - RNA, 19 nt, Homo sapiens
  misc_RNA (1)...(19): siRNA sense strand
gcccugauacaccuacaaa

SEQ ID NO: 1438589 - RNA, 19 nt, Homo sapiens
  misc_RNA (1)...(19): siRNA sense strand
gcacagagaugaaguucua

SEQ ID NO: 1438590 - RNA, 19 nt, Homo sapiens
  misc_RNA (1)...(19): siRNA sense strand
ggaauuauguugauugugu

SEQ ID NO: 1438591 - RNA, 19 nt, Homo sapiens
  misc_RNA (1)...(19): siRNA sense strand
uaaagaaggagauccauua

SEQ ID NO: 1438592 - RNA, 19 nt, Homo sapiens
  misc_RNA (1)...(19): siRNA sense strand
guacaacacugacucauca

SEQ ID NO: 1438593 - RNA, 19 nt, Homo sapiens
  misc_RNA (1)...(19): siRNA sense strand
caacagaguuaccuuguau

SEQ ID NO: 1438594 - RNA, 19 nt, Homo sapiens
  misc_RNA (1)...(19): siRNA sense strand
uaaauagucucaaggaaga

SEQ ID NO: 1438595 - RNA, 19 nt, Homo sapiens
  misc_RNA (1)...(19): siRNA sense strand
gauggaagaugauauagau

SEQ ID NO: 1438596 - RNA, 19 nt, Homo sapiens
  misc_RNA (1)...(19): siRNA sense strand
caaggaagaucauaaccaa

SEQ ID NO: 1438597 - RNA, 19 nt, Homo sapiens
  misc_RNA (1)...(19): siRNA sense strand
gaaauuccauccaagagau

SEQ ID NO: 1438598 - RNA, 19 nt, Homo sapiens
  misc_RNA (1)...(19): siRNA sense strand
gcaacagaguuaccuugua

SEQ ID NO: 1438599 - RNA, 19 nt, Homo sapiens
  misc_RNA (1)...(19): siRNA sense strand
guaggaagcaacagaguua

SEQ ID NO: 1438600 - RNA, 19 nt, Homo sapiens
  misc_RNA (1)...(19): siRNA sense strand
gaucaugcuuuacgauuau

SEQ ID NO: 1438601 - RNA, 19 nt, Homo sapiens
  misc_RNA (1)...(19): siRNA sense strand
ggaucuagaggcauaauua

SEQ ID NO: 1438602 - RNA, 19 nt, Homo sapiens
  misc_RNA (1)...(19): siRNA sense strand
gaaauccgguuguugcaau

SEQ ID NO: 1438603 - RNA, 19 nt, Homo sapiens
  misc_RNA (1)...(19): siRNA sense strand
gcuuuacgauuauggaaua

SEQ ID NO: 1438604 - RNA, 19 nt, Homo sapiens
  misc_RNA (1)...(19): siRNA sense strand
caagauggaagaugauaua

SEQ ID NO: 1438605 - RNA, 19 nt, Homo sapiens
  misc_RNA (1)...(19): siRNA sense strand
gagcugaaauuccauccaa

SEQ ID NO: 1438606 - RNA, 19 nt, Homo sapiens
  misc_RNA (1)...(19): siRNA sense strand
gaggaucaauucaaagaga

SEQ ID NO: 1438607 - RNA, 19 nt, Homo sapiens
  misc_RNA (1)...(19): siRNA sense strand
agaaggagauccauuagug

SEQ ID NO: 1438608 - RNA, 19 nt, Homo sapiens
  misc_RNA (1)...(19): siRNA sense strand
gaucauaaccaaccauugu

SEQ ID NO: 1438609 - RNA, 19 nt, Homo sapiens
  misc_RNA (1)...(19): siRNA sense strand
gcgauuugauacuuucuaa

SEQ ID NO: 1438610 - RNA, 19 nt, Homo sapiens
  misc_RNA (1)...(19): siRNA sense strand
ucaaugagcugaaauucca

SEQ ID NO: 1438611 - RNA, 19 nt, Homo sapiens
  misc_RNA (1)...(19): siRNA sense strand
gauagcagcauucuuauag

SEQ ID NO: 1438612 - RNA, 19 nt, Homo sapiens
  misc_RNA (1)...(19): siRNA sense strand
agaguuaccuuguaugaau

SEQ ID NO: 1438613 - RNA, 19 nt, Homo sapiens
  misc_RNA (1)...(19): siRNA sense strand
ggagauccauuaguguuug

SEQ ID NO: 1438614 - RNA, 19 nt, Homo sapiens
  misc_RNA (1)...(19): siRNA sense strand
caacacugacucaucauaa

SEQ ID NO: 1438615 - RNA, 19 nt, Homo sapiens
  misc_RNA (1)...(19): siRNA sense strand
ccagagacauacauaggaa

SEQ ID NO: 1438616 - RNA, 19 nt, Homo sapiens
  misc_RNA (1)...(19): siRNA sense strand
caaagagaaugaugaaugc

SEQ ID NO: 1438617 - RNA, 19 nt, Homo sapiens
  misc_RNA (1)...(19): siRNA sense strand
aguagaagauccucauaaa

SEQ ID NO: 1438618 - RNA, 19 nt, Homo sapiens
  misc_RNA (1)...(19): siRNA sense strand
uaaauguggugcugcuauu

SEQ ID NO: 1438619 - RNA, 19 nt, Homo sapiens
  misc_RNA (1)...(19): siRNA sense strand
ucaaagagaaugaugaaug

SEQ ID NO: 1438620 - RNA, 19 nt, Homo sapiens
  misc_RNA (1)...(19): siRNA sense strand
gaaguagaagauccucaua

SEQ ID NO: 1438621 - RNA, 19 nt, Homo sapiens
  misc_RNA (1)...(19): siRNA sense strand
agaucaugcuuuacgauua

SEQ ID NO: 1438622 - RNA, 19 nt, Homo sapiens
  misc_RNA (1)...(19): siRNA sense strand
gaaaauggaagucaaagaa

SEQ ID NO: 1438623 - RNA, 19 nt, Homo sapiens
  misc_RNA (1)...(19): siRNA sense strand
ggauagcagcauucuuaua

SEQ ID NO: 1438624 - RNA, 19 nt, Homo sapiens
  misc_RNA (1)...(19): siRNA sense strand
agggauagcagcauucuua

SEQ ID NO: 1438625 - RNA, 19 nt, Homo sapiens
  misc_RNA (1)...(19): siRNA sense strand
aaaauaauguccuguggua

SEQ ID NO: 1438626 - RNA, 19 nt, Homo sapiens
  misc_RNA (1)...(19): siRNA sense strand
acuaacaggccauuuauuu

SEQ ID NO: 1438627 - RNA, 19 nt, Homo sapiens
  misc_RNA (1)...(19): siRNA sense strand
ugaaugcaauuaaggaauc

SEQ ID NO: 1438628 - RNA, 19 nt, Homo sapiens
  misc_RNA (1)...(19): siRNA sense strand
guauggaucauucucuuaa

SEQ ID NO: 1438629 - RNA, 19 nt, Homo sapiens
  misc_RNA (1)...(19): siRNA sense strand
gcacuauguuggccaugga

SEQ ID NO: 1438630 - RNA, 19 nt, Homo sapiens
  misc_RNA (1)...(19): siRNA sense strand
ggaucauucucuuaaacuu

SEQ ID NO: 1438631 - RNA, 19 nt, Homo sapiens
  misc_RNA (1)...(19): siRNA sense strand
ccauggaaaugcuaucaau

SEQ ID NO: 1438632 - RNA, 19 nt, Homo sapiens
  misc_RNA (1)...(19): siRNA sense strand
ggauuuagaaguagaagau

SEQ ID NO: 1438633 - RNA, 19 nt, Homo sapiens
  misc_RNA (1)...(19): siRNA sense strand
aaaugcaccuggaaggaaa

SEQ ID NO: 1438634 - RNA, 19 nt, Homo sapiens
  misc_RNA (1)...(19): siRNA sense strand
uguuugggauuuagaagua

SEQ ID NO: 1438635 - RNA, 19 nt, Homo sapiens
  misc_RNA (1)...(19): siRNA sense strand
guaaagaaggagauccauu

SEQ ID NO: 1438636 - RNA, 19 nt, Homo sapiens
  misc_RNA (1)...(19): siRNA sense strand
gagacauacauaggaauua

SEQ ID NO: 1438637 - RNA, 19 nt, Homo sapiens
  misc_RNA (1)...(19): siRNA sense strand
cuauaacaaugcaguguau

SEQ ID NO: 1438638 - RNA, 19 nt, Homo sapiens
  misc_RNA (1)...(19): siRNA sense strand
ggcuguagcuggaucuaga

SEQ ID NO: 1438639 - RNA, 19 nt, Homo sapiens
  misc_RNA (1)...(19): siRNA sense strand
uagcagggauagcagcauu

SEQ ID NO: 1438640 - RNA, 19 nt, Homo sapiens
  misc_RNA (1)...(19): siRNA sense strand
caaaucuucuccugucagu

SEQ ID NO: 1438641 - RNA, 19 nt, Homo sapiens
  misc_RNA (1)...(19): siRNA sense strand
aaucuucuccugucaguaa

SEQ ID NO: 1438642 - RNA, 19 nt, Homo sapiens
  misc_RNA (1)...(19): siRNA sense strand
cuggaaaccuggcaagaug

SEQ ID NO: 1438643 - RNA, 19 nt, Homo sapiens
  misc_RNA (1)...(19): siRNA sense strand
aaacuaacaggccauuuau

SEQ ID NO: 1438644 - RNA, 19 nt, Homo sapiens
  misc_RNA (1)...(19): siRNA sense strand
gguauggaucauucucuua

SEQ ID NO: 1438645 - RNA, 19 nt, Homo sapiens
  misc_RNA (1)...(19): siRNA sense strand
ucuaagugcugauuaugau

SEQ ID NO: 1438646 - RNA, 19 nt, Homo sapiens
  misc_RNA (1)...(19): siRNA sense strand
gaagucaaagaaaugcaaa

SEQ ID NO: 1438647 - RNA, 19 nt, Homo sapiens
  misc_RNA (1)...(19): siRNA sense strand
uaacaggccauuuauuucu

SEQ ID NO: 1438648 - RNA, 19 nt, Homo sapiens
  misc_RNA (1)...(19): siRNA sense strand
ggaagucaaagaaaugcaa

SEQ ID NO: 1438649 - RNA, 19 nt, Homo sapiens
  misc_RNA (1)...(19): siRNA sense strand
ucuuauagcuguuugugau

SEQ ID NO: 1438650 - RNA, 19 nt, Homo sapiens
  misc_RNA (1)...(19): siRNA sense strand
caaaugcaccuggaaggaa

SEQ ID NO: 1438651 - RNA, 19 nt, Homo sapiens
  misc_RNA (1)...(19): siRNA sense strand
gaaggagauccauuagugu

SEQ ID NO: 1438652 - RNA, 19 nt, Homo sapiens
  misc_RNA (1)...(19): siRNA sense strand
guuaggcgauuugauacuu

SEQ ID NO: 1438653 - RNA, 19 nt, Homo sapiens
  misc_RNA (1)...(19): siRNA sense strand
gaaguucuaagugcugauu

SEQ ID NO: 1438654 - RNA, 19 nt, Homo sapiens
  misc_RNA (1)...(19): siRNA sense strand
uauagaaagugguacaaac

SEQ ID NO: 1438655 - RNA, 19 nt, Homo sapiens
  misc_RNA (1)...(19): siRNA sense strand
gaugaaugcaauuaaggaa

SEQ ID NO: 1438656 - RNA, 19 nt, Homo sapiens
  misc_RNA (1)...(19): siRNA sense strand
gaguuaccuuguaugaaug

SEQ ID NO: 1438657 - RNA, 19 nt, Homo sapiens
  misc_RNA (1)...(19): siRNA sense strand
ggaugcugaugcugaugaa

SEQ ID NO: 1438658 - RNA, 19 nt, Homo sapiens
  misc_RNA (1)...(19): siRNA sense strand
gcugaaauuccauccaaga

SEQ ID NO: 1438659 - RNA, 19 nt, Homo sapiens
  misc_RNA (1)...(19): siRNA sense strand
aacacugacucaucauaaa

SEQ ID NO: 1438660 - RNA, 19 nt, Homo sapiens
  misc_RNA (1)...(19): siRNA sense strand
cccagugaaucuaauguga

SEQ ID NO: 1438661 - RNA, 19 nt, Homo sapiens
  misc_RNA (1)...(19): siRNA sense strand
gcaagauggaagaugauau

SEQ ID NO: 1438662 - RNA, 19 nt, Homo sapiens
  misc_RNA (1)...(19): siRNA sense strand
agagaaugaugaaugcaau

SEQ ID NO: 1438663 - RNA, 19 nt, Homo sapiens
  misc_RNA (1)...(19): siRNA sense strand
guugcaaucuuacguggau

SEQ ID NO: 1438664 - RNA, 19 nt, Homo sapiens
  misc_RNA (1)...(19): siRNA sense strand
uagaagauccucauaaagc

SEQ ID NO: 1438665 - RNA, 19 nt, Homo sapiens
  misc_RNA (1)...(19): siRNA sense strand
gagaaugaugaaugcaauu

SEQ ID NO: 1438666 - RNA, 19 nt, Homo sapiens
  misc_RNA (1)...(19): siRNA sense strand
acacucugguggcaauauu

SEQ ID NO: 1438667 - RNA, 19 nt, Homo sapiens
  misc_RNA (1)...(19): siRNA sense strand
uguaaauagucucaaggaa

SEQ ID NO: 1438668 - RNA, 19 nt, Homo sapiens
  misc_RNA (1)...(19): siRNA sense strand
ugacuauucuugggcgauu

SEQ ID NO: 1438669 - RNA, 19 nt, Homo sapiens
  misc_RNA (1)...(19): siRNA sense strand
guagaagggcacagagaug

SEQ ID NO: 1438670 - RNA, 19 nt, Homo sapiens
  misc_RNA (1)...(19): siRNA sense strand
ggaagaucauaaccaacca

SEQ ID NO: 1438671 - RNA, 19 nt, Homo sapiens
  misc_RNA (1)...(19): siRNA sense strand
gcagugacgagaacagcaa

SEQ ID NO: 1438672 - RNA, 19 nt, Homo sapiens
  misc_RNA (1)...(19): siRNA sense strand
gcuauucgacaaaccaguu

SEQ ID NO: 1438673 - RNA, 19 nt, Homo sapiens
  misc_RNA (1)...(19): siRNA sense strand
ugugacauuugguacauga

SEQ ID NO: 1438674 - RNA, 19 nt, Homo sapiens
  misc_RNA (1)...(19): siRNA sense strand
agcagaagcugagcaguga

SEQ ID NO: 1438675 - RNA, 19 nt, Homo sapiens
  misc_RNA (1)...(19): siRNA sense strand
cuggcaagauggaagauga

SEQ ID NO: 1438676 - RNA, 19 nt, Homo sapiens
  misc_RNA (1)...(19): siRNA sense strand
aaaacuaacaggccauuua

SEQ ID NO: 1438677 - RNA, 19 nt, Homo sapiens
  misc_RNA (1)...(19): siRNA sense strand
gaucuagaggcauaauuag

SEQ ID NO: 1438678 - RNA, 19 nt, Homo sapiens
  misc_RNA (1)...(19): siRNA sense strand
uguuuggaguucaguuuaa

SEQ ID NO: 1438679 - RNA, 19 nt, Homo sapiens
  misc_RNA (1)...(19): siRNA sense strand
guauagaaagugguacaaa

SEQ ID NO: 1438680 - RNA, 19 nt, Homo sapiens
  misc_RNA (1)...(19): siRNA sense strand
uaaacccagugaaucuaau

SEQ ID NO: 1438681 - RNA, 19 nt, Homo sapiens
  misc_RNA (1)...(19): siRNA sense strand
aaacuuuggaggaucaauu

SEQ ID NO: 1438682 - RNA, 19 nt, Homo sapiens
  misc_RNA (1)...(19): siRNA sense strand
guaaguaaagaucaugcuu

SEQ ID NO: 1438683 - RNA, 19 nt, Homo sapiens
  misc_RNA (1)...(19): siRNA sense strand
ugaaauuccauccaagaga

SEQ ID NO: 1438684 - RNA, 19 nt, Homo sapiens
  misc_RNA (1)...(19): siRNA sense strand
cuacaaacacgccaaaugc

SEQ ID NO: 1438685 - RNA, 19 nt, Homo sapiens
  misc_RNA (1)...(19): siRNA sense strand
guagaagauccucauaaag

SEQ ID NO: 1438686 - RNA, 19 nt, Homo sapiens
  misc_RNA (1)...(19): siRNA sense strand
gauuacagccagugugaca

SEQ ID NO: 1438687 - RNA, 19 nt, Homo sapiens
  misc_RNA (1)...(19): siRNA sense strand
gugaaucuaaugugacuau

SEQ ID NO: 1438688 - RNA, 19 nt, Homo sapiens
  misc_RNA (1)...(19): siRNA sense strand
ggaaaccuggcaagaugga

SEQ ID NO: 1438689 - RNA, 19 nt, Homo sapiens
  misc_RNA (1)...(19): siRNA sense strand
gcacagagaugaaguucua

SEQ ID NO: 1438690 - RNA, 19 nt, Homo sapiens
  misc_RNA (1)...(19): siRNA sense strand
ggaauuauguugauugugu

SEQ ID NO: 1438691 - RNA, 19 nt, Homo sapiens
  misc_RNA (1)...(19): siRNA sense strand
uaaagaaggagauccauua

SEQ ID NO: 1438692 - RNA, 19 nt, Homo sapiens
  misc_RNA (1)...(19): siRNA sense strand
caacagaguuaccuuguau

SEQ ID NO: 1438693 - RNA, 19 nt, Homo sapiens
  misc_RNA (1)...(19): siRNA sense strand
uaaauagucucaaggaaga

SEQ ID NO: 1438694 - RNA, 19 nt, Homo sapiens
  misc_RNA (1)...(19): siRNA sense strand
gauggaagaugauauagau

SEQ ID NO: 1438695 - RNA, 19 nt, Homo sapiens
  misc_RNA (1)...(19): siRNA sense strand
caaggaagaucauaaccaa

SEQ ID NO: 1438696 - RNA, 19 nt, Homo sapiens
  misc_RNA (1)...(19): siRNA sense strand
gaaauuccauccaagagau

SEQ ID NO: 1438697 - RNA, 19 nt, Homo sapiens
  misc_RNA (1)...(19): siRNA sense strand
gcaacagaguuaccuugua

SEQ ID NO: 1438698 - RNA, 19 nt, Homo sapiens
  misc_RNA (1)...(19): siRNA sense strand
guaggaagcaacagaguua

SEQ ID NO: 1438699 - RNA, 19 nt, Homo sapiens
  misc_RNA (1)...(19): siRNA sense strand
gaucaugcuuuacgauuau

SEQ ID NO: 1438700 - RNA, 19 nt, Homo sapiens
  misc_RNA (1)...(19): siRNA sense strand
ggaucuagaggcauaauua

SEQ ID NO: 1438701 - RNA, 19 nt, Homo sapiens
  misc_RNA (1)...(19): siRNA sense strand
gaaauccgguuguugcaau

SEQ ID NO: 1438702 - RNA, 19 nt, Homo sapiens
  misc_RNA (1)...(19): siRNA sense strand
gcuuuacgauuauggaaua

SEQ ID NO: 1438703 - RNA, 19 nt, Homo sapiens
  misc_RNA (1)...(19): siRNA sense strand
caagauggaagaugauaua

SEQ ID NO: 1438704 - RNA, 19 nt, Homo sapiens
  misc_RNA (1)...(19): siRNA sense strand
gagcugaaauuccauccaa

SEQ ID NO: 1438705 - RNA, 19 nt, Homo sapiens
  misc_RNA (1)...(19): siRNA sense strand
gaggaucaauucaaagaga

SEQ ID NO: 1438706 - RNA, 19 nt, Homo sapiens
  misc_RNA (1)...(19): siRNA sense strand
agaaggagauccauuagug

SEQ ID NO: 1438707 - RNA, 19 nt, Homo sapiens
  misc_RNA (1)...(19): siRNA sense strand
gaucauaaccaaccauugu

SEQ ID NO: 1438708 - RNA, 19 nt, Homo sapiens
  misc_RNA (1)...(19): siRNA sense strand
gcgauuugauacuuucuaa

SEQ ID NO: 1438709 - RNA, 19 nt, Homo sapiens
  misc_RNA (1)...(19): siRNA sense strand
ucaaugagcugaaauucca

SEQ ID NO: 1438710 - RNA, 19 nt, Homo sapiens
  misc_RNA (1)...(19): siRNA sense strand
agaguuaccuuguaugaau

SEQ ID NO: 1438711 - RNA, 19 nt, Homo sapiens
  misc_RNA (1)...(19): siRNA sense strand
ggagauccauuaguguuug

SEQ ID NO: 1438712 - RNA, 19 nt, Homo sapiens
  misc_RNA (1)...(19): siRNA sense strand
ccagagacauacauaggaa

SEQ ID NO: 1438713 - RNA, 19 nt, Homo sapiens
  misc_RNA (1)...(19): siRNA sense strand
caaagagaaugaugaaugc

SEQ ID NO: 1438714 - RNA, 19 nt, Homo sapiens
  misc_RNA (1)...(19): siRNA sense strand
aguagaagauccucauaaa

SEQ ID NO: 1438715 - RNA, 19 nt, Homo sapiens
  misc_RNA (1)...(19): siRNA sense strand
ucaaagagaaugaugaaug

SEQ ID NO: 1438716 - RNA, 19 nt, Homo sapiens
  misc_RNA (1)...(19): siRNA sense strand
gaaguagaagauccucaua

SEQ ID NO: 1438717 - RNA, 19 nt, Homo sapiens
  misc_RNA (1)...(19): siRNA sense strand
agaucaugcuuuacgauua

SEQ ID NO: 1438718 - RNA, 19 nt, Homo sapiens
  misc_RNA (1)...(19): siRNA sense strand
gaaaauggaagucaaagaa

SEQ ID NO: 1438719 - RNA, 19 nt, Homo sapiens
  misc_RNA (1)...(19): siRNA sense strand
aaaauaauguccuguggua

SEQ ID NO: 1438720 - RNA, 19 nt, Homo sapiens
  misc_RNA (1)...(19): siRNA sense strand
acuaacaggccauuuauuu

SEQ ID NO: 1438721 - RNA, 19 nt, Homo sapiens
  misc_RNA (1)...(19): siRNA sense strand
ugaaugcaauuaaggaauc

SEQ ID NO: 1438722 - RNA, 19 nt, Homo sapiens
  misc_RNA (1)...(19): siRNA sense strand
guauggaucauucucuuaa

SEQ ID NO: 1438723 - RNA, 19 nt, Homo sapiens
  misc_RNA (1)...(19): siRNA sense strand
gcacuauguuggccaugga

SEQ ID NO: 1438724 - RNA, 19 nt, Homo sapiens
  misc_RNA (1)...(19): siRNA sense strand
ggaucauucucuuaaacuu

SEQ ID NO: 1438725 - RNA, 19 nt, Homo sapiens
  misc_RNA (1)...(19): siRNA sense strand
ccauggaaaugcuaucaau

SEQ ID NO: 1438726 - RNA, 19 nt, Homo sapiens
  misc_RNA (1)...(19): siRNA sense strand
ggauuuagaaguagaagau

SEQ ID NO: 1438727 - RNA, 19 nt, Homo sapiens
  misc_RNA (1)...(19): siRNA sense strand
aaaugcaccuggaaggaaa

SEQ ID NO: 1438728 - RNA, 19 nt, Homo sapiens
  misc_RNA (1)...(19): siRNA sense strand
uguuugggauuuagaagua

SEQ ID NO: 1438729 - RNA, 19 nt, Homo sapiens
  misc_RNA (1)...(19): siRNA sense strand
guaaagaaggagauccauu

SEQ ID NO: 1438730 - RNA, 19 nt, Homo sapiens
  misc_RNA (1)...(19): siRNA sense strand
gagacauacauaggaauua

SEQ ID NO: 1438731 - RNA, 19 nt, Homo sapiens
  misc_RNA (1)...(19): siRNA sense strand
cuauaacaaugcaguguau

SEQ ID NO: 1438732 - RNA, 19 nt, Homo sapiens
  misc_RNA (1)...(19): siRNA sense strand
ggcuguagcuggaucuaga

SEQ ID NO: 1438733 - RNA, 19 nt, Homo sapiens
  misc_RNA (1)...(19): siRNA sense strand
caaaucuucuccugucagu

SEQ ID NO: 1438734 - RNA, 19 nt, Homo sapiens
  misc_RNA (1)...(19): siRNA sense strand
aaucuucuccugucaguaa

SEQ ID NO: 1438735 - RNA, 19 nt, Homo sapiens
  misc_RNA (1)...(19): siRNA sense strand
cuggaaaccuggcaagaug

SEQ ID NO: 1438736 - RNA, 19 nt, Homo sapiens
  misc_RNA (1)...(19): siRNA sense strand
aaacuaacaggccauuuau

SEQ ID NO: 1438737 - RNA, 19 nt, Homo sapiens
  misc_RNA (1)...(19): siRNA sense strand
gguauggaucauucucuua

SEQ ID NO: 1438738 - RNA, 19 nt, Homo sapiens
  misc_RNA (1)...(19): siRNA sense strand
ucuaagugcugauuaugau

SEQ ID NO: 1438739 - RNA, 19 nt, Homo sapiens
  misc_RNA (1)...(19): siRNA sense strand
gaagucaaagaaaugcaaa

SEQ ID NO: 1438740 - RNA, 19 nt, Homo sapiens
  misc_RNA (1)...(19): siRNA sense strand
uaacaggccauuuauuucu

SEQ ID NO: 1438741 - RNA, 19 nt, Homo sapiens
  misc_RNA (1)...(19): siRNA sense strand
ggaagucaaagaaaugcaa

SEQ ID NO: 1438742 - RNA, 19 nt, Homo sapiens
  misc_RNA (1)...(19): siRNA sense strand
gaaggagauccauuagugu

SEQ ID NO: 1438743 - RNA, 19 nt, Homo sapiens
  misc_RNA (1)...(19): siRNA sense strand
caaaugcaccuggaaggaa

SEQ ID NO: 1438744 - RNA, 19 nt, Homo sapiens
  misc_RNA (1)...(19): siRNA sense strand
guuaggcgauuugauacuu

SEQ ID NO: 1438745 - RNA, 19 nt, Homo sapiens
  misc_RNA (1)...(19): siRNA sense strand
uauagaaagugguacaaac

SEQ ID NO: 1438746 - RNA, 19 nt, Homo sapiens
  misc_RNA (1)...(19): siRNA sense strand
gaugaaugcaauuaaggaa

SEQ ID NO: 1438747 - RNA, 19 nt, Homo sapiens
  misc_RNA (1)...(19): siRNA sense strand
gaaguucuaagugcugauu

SEQ ID NO: 1438748 - RNA, 19 nt, Homo sapiens
  misc_RNA (1)...(19): siRNA sense strand
gaguuaccuuguaugaaug

SEQ ID NO: 1438749 - RNA, 19 nt, Homo sapiens
  misc_RNA (1)...(19): siRNA sense strand
ggaugcugaugcugaugaa

SEQ ID NO: 1438750 - RNA, 19 nt, Homo sapiens
  misc_RNA (1)...(19): siRNA sense strand
gcugaaauuccauccaaga

SEQ ID NO: 1438751 - RNA, 19 nt, Homo sapiens
  misc_RNA (1)...(19): siRNA sense strand
cccagugaaucuaauguga

SEQ ID NO: 1438752 - RNA, 19 nt, Homo sapiens
  misc_RNA (1)...(19): siRNA sense strand
gcaagauggaagaugauau

SEQ ID NO: 1438753 - RNA, 19 nt, Homo sapiens
  misc_RNA (1)...(19): siRNA sense strand
agagaaugaugaaugcaau

SEQ ID NO: 1438754 - RNA, 19 nt, Homo sapiens
  misc_RNA (1)...(19): siRNA sense strand
guugcaaucuuacguggau

SEQ ID NO: 1438755 - RNA, 19 nt, Homo sapiens
  misc_RNA (1)...(19): siRNA sense strand
uagaagauccucauaaagc

SEQ ID NO: 1438756 - RNA, 19 nt, Homo sapiens
  misc_RNA (1)...(19): siRNA sense strand
gagaaugaugaaugcaauu

SEQ ID NO: 1438757 - RNA, 19 nt, Homo sapiens
  misc_RNA (1)...(19): siRNA sense strand
acacucugguggcaauauu

SEQ ID NO: 1438758 - RNA, 19 nt, Homo sapiens
  misc_RNA (1)...(19): siRNA sense strand
uguaaauagucucaaggaa

SEQ ID NO: 1438759 - RNA, 19 nt, Homo sapiens
  misc_RNA (1)...(19): siRNA sense strand
ugacuauucuugggcgauu

SEQ ID NO: 1438760 - RNA, 19 nt, Homo sapiens
  misc_RNA (1)...(19): siRNA sense strand
guagaagggcacagagaug

SEQ ID NO: 1438761 - RNA, 19 nt, Homo sapiens
  misc_RNA (1)...(19): siRNA sense strand
ggaagaucauaaccaacca

SEQ ID NO: 1438762 - RNA, 19 nt, Homo sapiens
  misc_RNA (1)...(19): siRNA sense strand
gcagugacgagaacagcaa

SEQ ID NO: 1438763 - RNA, 19 nt, Homo sapiens
  misc_RNA (1)...(19): siRNA sense strand
ugugacauuugguacauga

SEQ ID NO: 1438764 - RNA, 19 nt, Homo sapiens
  misc_RNA (1)...(19): siRNA sense strand
cuggcaagauggaagauga

SEQ ID NO: 1438765 - RNA, 19 nt, Homo sapiens
  misc_RNA (1)...(19): siRNA sense strand
aaaacuaacaggccauuua

SEQ ID NO: 1438766 - RNA, 19 nt, Homo sapiens
  misc_RNA (1)...(19): siRNA sense strand
agcagaagcugagcaguga

SEQ ID NO: 1438767 - RNA, 19 nt, Homo sapiens
  misc_RNA (1)...(19): siRNA sense strand
gaucuagaggcauaauuag

SEQ ID NO: 1438768 - RNA, 19 nt, Homo sapiens
  misc_RNA (1)...(19): siRNA sense strand
uguuuggaguucaguuuaa

SEQ ID NO: 1438769 - RNA, 19 nt, Homo sapiens
  misc_RNA (1)...(19): siRNA sense strand
uaaacccagugaaucuaau

SEQ ID NO: 1438770 - RNA, 19 nt, Homo sapiens
  misc_RNA (1)...(19): siRNA sense strand
aaacuuuggaggaucaauu

SEQ ID NO: 1438771 - RNA, 19 nt, Homo sapiens
  misc_RNA (1)...(19): siRNA sense strand
guauagaaagugguacaaa

SEQ ID NO: 1438772 - RNA, 19 nt, Homo sapiens
  misc_RNA (1)...(19): siRNA sense strand
guaaguaaagaucaugcuu

SEQ ID NO: 1438773 - RNA, 19 nt, Homo sapiens
  misc_RNA (1)...(19): siRNA sense strand
ugaaauuccauccaagaga

SEQ ID NO: 1438774 - RNA, 19 nt, Homo sapiens
  misc_RNA (1)...(19): siRNA sense strand
cuacaaacacgccaaaugc

SEQ ID NO: 1438775 - RNA, 19 nt, Homo sapiens
  misc_RNA (1)...(19): siRNA sense strand
guagaagauccucauaaag

SEQ ID NO: 1438776 - RNA, 19 nt, Homo sapiens
  misc_RNA (1)...(19): siRNA sense strand
gauuacagccagugugaca

SEQ ID NO: 1438777 - RNA, 19 nt, Homo sapiens
  misc_RNA (1)...(19): siRNA sense strand
gugaaucuaaugugacuau

SEQ ID NO: 1438778 - RNA, 19 nt, Homo sapiens
  misc_RNA (1)...(19): siRNA sense strand
ucauaaccaaccauuguuu

SEQ ID NO: 1438779 - RNA, 19 nt, Homo sapiens
  misc_RNA (1)...(19): siRNA sense strand
ggaaaccuggcaagaugga

SEQ ID NO: 1438780 - RNA, 19 nt, Homo sapiens
  misc_RNA (1)...(19): siRNA sense strand
uuaggcgauuugauacuuu

SEQ ID NO: 1438781 - RNA, 19 nt, Homo sapiens
  misc_RNA (1)...(19): siRNA sense strand
uagaagggcacagagauga

SEQ ID NO: 1438782 - RNA, 19 nt, Homo sapiens
  misc_RNA (1)...(19): siRNA sense strand
gcacaguaaagaaggagau

SEQ ID NO: 1438783 - RNA, 19 nt, Homo sapiens
  misc_RNA (1)...(19): siRNA sense strand
uuaaacccagugaaucuaa

SEQ ID NO: 1438784 - RNA, 19 nt, Homo sapiens
  misc_RNA (1)...(19): siRNA sense strand
aauaauguccugugguaug

SEQ ID NO: 1438785 - RNA, 19 nt, Homo sapiens
  misc_RNA (1)...(19): siRNA sense strand
acaaugcaguguauaaagc

SEQ ID NO: 1438786 - RNA, 19 nt, Homo sapiens
  misc_RNA (1)...(19): siRNA sense strand
acagaguuaccuuguauga

SEQ ID NO: 1438787 - RNA, 19 nt, Homo sapiens
  misc_RNA (1)...(19): siRNA sense strand
cuaacaggccauuuauuuc

SEQ ID NO: 1438788 - RNA, 19 nt, Homo sapiens
  misc_RNA (1)...(19): siRNA sense strand
gcccugauacaccuacaaa

SEQ ID NO: 1438789 - RNA, 19 nt, Homo sapiens
  misc_RNA (1)...(19): siRNA sense strand
ggaagaagaccaaauauuc

SEQ ID NO: 1438790 - RNA, 19 nt, Homo sapiens
  misc_RNA (1)...(19): siRNA sense strand
ggaggaagaagaccaaaua

SEQ ID NO: 1438791 - RNA, 19 nt, Homo sapiens
  misc_RNA (1)...(19): siRNA sense strand
gaccaaauauuccuugaug

SEQ ID NO: 1438792 - RNA, 19 nt, Homo sapiens
  misc_RNA (1)...(19): siRNA sense strand
gcuaaugacuccagaaaca

SEQ ID NO: 1438793 - RNA, 19 nt, Homo sapiens
  misc_RNA (1)...(19): siRNA sense strand
ucaaagagaagaagaagaa

SEQ ID NO: 1438794 - RNA, 19 nt, Homo sapiens
  misc_RNA (1)...(19): siRNA sense strand
auaaucagcucaacacugu

SEQ ID NO: 1438795 - RNA, 19 nt, Homo sapiens
  misc_RNA (1)...(19): siRNA sense strand
aaaggagacuguacugagu

SEQ ID NO: 1438796 - RNA, 19 nt, Homo sapiens
  misc_RNA (1)...(19): siRNA sense strand
ggacaguggaggaagaaga

SEQ ID NO: 1438797 - RNA, 19 nt, Homo sapiens
  misc_RNA (1)...(19): siRNA sense strand
gcaaaggagacuguacuga

SEQ ID NO: 1438798 - RNA, 19 nt, Homo sapiens
  misc_RNA (1)...(19): siRNA sense strand
aaaggacaguggaggaaga

SEQ ID NO: 1438799 - RNA, 19 nt, Homo sapiens
  misc_RNA (1)...(19): siRNA sense strand
gaagaagaccaaauauucc

SEQ ID NO: 1438800 - RNA, 19 nt, Homo sapiens
  misc_RNA (1)...(19): siRNA sense strand
gaggaagaagaccaaauau

SEQ ID NO: 1438801 - RNA, 19 nt, Homo sapiens
  misc_RNA (1)...(19): siRNA sense strand
ccagauacacuccaguuca

SEQ ID NO: 1438802 - RNA, 19 nt, Homo sapiens
  misc_RNA (1)...(19): siRNA sense strand
gcagauaaucagcucaaca

SEQ ID NO: 1438803 - RNA, 19 nt, Homo sapiens
  misc_RNA (1)...(19): siRNA sense strand
acacuguccucaccaucaa

SEQ ID NO: 1438804 - RNA, 19 nt, Homo sapiens
  misc_RNA (1)...(19): siRNA sense strand
gcgauaccagagcagauaa

SEQ ID NO: 1438805 - RNA, 19 nt, Homo sapiens
  misc_RNA (1)...(19): siRNA sense strand
caaagagaagaagaagaaa

SEQ ID NO: 1438806 - RNA, 19 nt, Homo sapiens
  misc_RNA (1)...(19): siRNA sense strand
ugacagaagaagcagaugu

SEQ ID NO: 1438807 - RNA, 19 nt, Homo sapiens
  misc_RNA (1)...(19): siRNA sense strand
ggccagauacacuccaguu

SEQ ID NO: 1438808 - RNA, 19 nt, Homo sapiens
  misc_RNA (1)...(19): siRNA sense strand
aggaagaagaccaaauauu

SEQ ID NO: 1438809 - RNA, 19 nt, Homo sapiens
  misc_RNA (1)...(19): siRNA sense strand
gaaaaggacaguggaggaa

SEQ ID NO: 1438810 - RNA, 19 nt, Homo sapiens
  misc_RNA (1)...(19): siRNA sense strand
uaaugacuccagaaacaug

SEQ ID NO: 1438811 - RNA, 19 nt, Homo sapiens
  misc_RNA (1)...(19): siRNA sense strand
cagauacacuccaguucac

SEQ ID NO: 1438812 - RNA, 19 nt, Homo sapiens
  misc_RNA (1)...(19): siRNA sense strand
gaucgccccuccugacaga

SEQ ID NO: 1438813 - RNA, 19 nt, Homo sapiens
  misc_RNA (1)...(19): siRNA sense strand
aagaccaaauauuccuuga

SEQ ID NO: 1438814 - RNA, 19 nt, Homo sapiens
  misc_RNA (1)...(19): siRNA sense strand
guucacaguggaugucuuc

SEQ ID NO: 1438815 - RNA, 19 nt, Homo sapiens
  misc_RNA (1)...(19): siRNA sense strand
ucaacacuguccucaccau

SEQ ID NO: 1438816 - RNA, 19 nt, Homo sapiens
  misc_RNA (1)...(19): siRNA sense strand
gauaccagagcagauaauc

SEQ ID NO: 1438817 - RNA, 19 nt, Homo sapiens
  misc_RNA (1)...(19): siRNA sense strand
ugucgacggucucacugau

SEQ ID NO: 1438818 - RNA, 19 nt, Homo sapiens
  misc_RNA (1)...(19): siRNA sense strand
gaugucuuccacuuugcua

SEQ ID NO: 1438819 - RNA, 19 nt, Homo sapiens
  misc_RNA (1)...(19): siRNA sense strand
uguccucaccaucaaguaa

SEQ ID NO: 1438820 - RNA, 19 nt, Homo sapiens
  misc_RNA (1)...(19): siRNA sense strand
ugccucuucugcauucaaa

SEQ ID NO: 1438821 - RNA, 19 nt, Homo sapiens
  misc_RNA (1)...(19): siRNA sense strand
ggaagaagaccaaauauuc

SEQ ID NO: 1438822 - RNA, 19 nt, Homo sapiens
  misc_RNA (1)...(19): siRNA sense strand
ggaggaagaagaccaaaua

SEQ ID NO: 1438823 - RNA, 19 nt, Homo sapiens
  misc_RNA (1)...(19): siRNA sense strand
gaccaaauauuccuugaug

SEQ ID NO: 1438824 - RNA, 19 nt, Homo sapiens
  misc_RNA (1)...(19): siRNA sense strand
gcuaaugacuccagaaaca

SEQ ID NO: 1438825 - RNA, 19 nt, Homo sapiens
  misc_RNA (1)...(19): siRNA sense strand
ucaaagagaagaagaagaa

SEQ ID NO: 1438826 - RNA, 19 nt, Homo sapiens
  misc_RNA (1)...(19): siRNA sense strand
auaaucagcucaacacugu

SEQ ID NO: 1438827 - RNA, 19 nt, Homo sapiens
  misc_RNA (1)...(19): siRNA sense strand
aaaggagacuguacugagu

SEQ ID NO: 1438828 - RNA, 19 nt, Homo sapiens
  misc_RNA (1)...(19): siRNA sense strand
ggacaguggaggaagaaga

SEQ ID NO: 1438829 - RNA, 19 nt, Homo sapiens
  misc_RNA (1)...(19): siRNA sense strand
gcaaaggagacuguacuga

SEQ ID NO: 1438830 - RNA, 19 nt, Homo sapiens
  misc_RNA (1)...(19): siRNA sense strand
aaaggacaguggaggaaga

SEQ ID NO: 1438831 - RNA, 19 nt, Homo sapiens
  misc_RNA (1)...(19): siRNA sense strand
gaagaagaccaaauauucc

SEQ ID NO: 1438832 - RNA, 19 nt, Homo sapiens
  misc_RNA (1)...(19): siRNA sense strand
gaggaagaagaccaaauau

SEQ ID NO: 1438833 - RNA, 19 nt, Homo sapiens
  misc_RNA (1)...(19): siRNA sense strand
ccagauacacuccaguuca

SEQ ID NO: 1438834 - RNA, 19 nt, Homo sapiens
  misc_RNA (1)...(19): siRNA sense strand
gcagauaaucagcucaaca

SEQ ID NO: 1438835 - RNA, 19 nt, Homo sapiens
  misc_RNA (1)...(19): siRNA sense strand
acacuguccucaccaucaa

SEQ ID NO: 1438836 - RNA, 19 nt, Homo sapiens
  misc_RNA (1)...(19): siRNA sense strand
gcgauaccagagcagauaa

SEQ ID NO: 1438837 - RNA, 19 nt, Homo sapiens
  misc_RNA (1)...(19): siRNA sense strand
caaagagaagaagaagaaa

SEQ ID NO: 1438838 - RNA, 19 nt, Homo sapiens
  misc_RNA (1)...(19): siRNA sense strand
ggccagauacacuccaguu

SEQ ID NO: 1438839 - RNA, 19 nt, Homo sapiens
  misc_RNA (1)...(19): siRNA sense strand
aggaagaagaccaaauauu

SEQ ID NO: 1438840 - RNA, 19 nt, Homo sapiens
  misc_RNA (1)...(19): siRNA sense strand
gaaaaggacaguggaggaa

SEQ ID NO: 1438841 - RNA, 19 nt, Homo sapiens
  misc_RNA (1)...(19): siRNA sense strand
uaaugacuccagaaacaug

SEQ ID NO: 1438842 - RNA, 19 nt, Homo sapiens
  misc_RNA (1)...(19): siRNA sense strand
cagauacacuccaguucac

SEQ ID NO: 1438843 - RNA, 19 nt, Homo sapiens
  misc_RNA (1)...(19): siRNA sense strand
gaucgccccuccugacaga

SEQ ID NO: 1438844 - RNA, 19 nt, Homo sapiens
  misc_RNA (1)...(19): siRNA sense strand
aagaccaaauauuccuuga

SEQ ID NO: 1438845 - RNA, 19 nt, Homo sapiens
  misc_RNA (1)...(19): siRNA sense strand
guucacaguggaugucuuc

SEQ ID NO: 1438846 - RNA, 19 nt, Homo sapiens
  misc_RNA (1)...(19): siRNA sense strand
ucaacacuguccucaccau

SEQ ID NO: 1438847 - RNA, 19 nt, Homo sapiens
  misc_RNA (1)...(19): siRNA sense strand
gauaccagagcagauaauc

SEQ ID NO: 1438848 - RNA, 19 nt, Homo sapiens
  misc_RNA (1)...(19): siRNA sense strand
ugucgacggucucacugau

SEQ ID NO: 1438849 - RNA, 19 nt, Homo sapiens
  misc_RNA (1)...(19): siRNA sense strand
gaugucuuccacuuugcua

SEQ ID NO: 1438850 - RNA, 19 nt, Homo sapiens
  misc_RNA (1)...(19): siRNA sense strand
ugccucuucugcauucaaa

SEQ ID NO: 1438851 - RNA, 19 nt, Homo sapiens
  misc_RNA (1)...(19): siRNA sense strand
uguccucaccaucaaguaa

SEQ ID NO: 1438852 - RNA, 19 nt, Homo sapiens
  misc_RNA (1)...(19): siRNA sense strand
gaagacaguuccuccauug

SEQ ID NO: 1438853 - RNA, 19 nt, Homo sapiens
  misc_RNA (1)...(19): siRNA sense strand
ccucacggcugcugcauua

SEQ ID NO: 1438854 - RNA, 19 nt, Homo sapiens
  misc_RNA (1)...(19): siRNA sense strand
gaagagacgguugaguuua

SEQ ID NO: 1438855 - RNA, 19 nt, Homo sapiens
  misc_RNA (1)...(19): siRNA sense strand
ggaugaagcagugaaauuu

SEQ ID NO: 1438856 - RNA, 19 nt, Homo sapiens
  misc_RNA (1)...(19): siRNA sense strand
gaucaucugucucugaauc

SEQ ID NO: 1438857 - RNA, 19 nt, Homo sapiens
  misc_RNA (1)...(19): siRNA sense strand
cauccaagcuuaccuucaa

SEQ ID NO: 1438858 - RNA, 19 nt, Homo sapiens
  misc_RNA (1)...(19): siRNA sense strand
aagagacgguugaguuuaa

SEQ ID NO: 1438859 - RNA, 19 nt, Homo sapiens
  misc_RNA (1)...(19): siRNA sense strand
gaaauccuucuaucaugua

SEQ ID NO: 1438860 - RNA, 19 nt, Homo sapiens
  misc_RNA (1)...(19): siRNA sense strand
gaaacucacggcacuaaga

SEQ ID NO: 1438861 - RNA, 19 nt, Homo sapiens
  misc_RNA (1)...(19): siRNA sense strand
ggccaaaguuccagacaug

SEQ ID NO: 1438862 - RNA, 19 nt, Homo sapiens
  misc_RNA (1)...(19): siRNA sense strand
ugaaggagaugccugagau

SEQ ID NO: 1438863 - RNA, 19 nt, Homo sapiens
  misc_RNA (1)...(19): siRNA sense strand
ugacaugggugcuuauaag

SEQ ID NO: 1438864 - RNA, 19 nt, Homo sapiens
  misc_RNA (1)...(19): siRNA sense strand
gaucaucaaauacgaauuc

SEQ ID NO: 1438865 - RNA, 19 nt, Homo sapiens
  misc_RNA (1)...(19): siRNA sense strand
gaaugacgcccucaaucaa

SEQ ID NO: 1438866 - RNA, 19 nt, Homo sapiens
  misc_RNA (1)...(19): siRNA sense strand
caaaguuccagacauguuu

SEQ ID NO: 1438867 - RNA, 19 nt, Homo sapiens
  misc_RNA (1)...(19): siRNA sense strand
gaaggagaugccugagaua

SEQ ID NO: 1438868 - RNA, 19 nt, Homo sapiens
  misc_RNA (1)...(19): siRNA sense strand
caaucugugucucugagua

SEQ ID NO: 1438869 - RNA, 19 nt, Homo sapiens
  misc_RNA (1)...(19): siRNA sense strand
guaugugacugcccaagau

SEQ ID NO: 1438870 - RNA, 19 nt, Homo sapiens
  misc_RNA (1)...(19): siRNA sense strand
ccacaaagcaagacuacug

SEQ ID NO: 1438871 - RNA, 19 nt, Homo sapiens
  misc_RNA (1)...(19): siRNA sense strand
caugggugcuuauaaguca

SEQ ID NO: 1438872 - RNA, 19 nt, Homo sapiens
  misc_RNA (1)...(19): siRNA sense strand
caucaaauacgaauucauc

SEQ ID NO: 1438873 - RNA, 19 nt, Homo sapiens
  misc_RNA (1)...(19): siRNA sense strand
agaagacaguuccuccauu

SEQ ID NO: 1438874 - RNA, 19 nt, Homo sapiens
  misc_RNA (1)...(19): siRNA sense strand
agaccaaccuccucuucuu

SEQ ID NO: 1438875 - RNA, 19 nt, Homo sapiens
  misc_RNA (1)...(19): siRNA sense strand
gaugaagcagugaaauuug

SEQ ID NO: 1438876 - RNA, 19 nt, Homo sapiens
  misc_RNA (1)...(19): siRNA sense strand
ucuaaaacauccaagcuua

SEQ ID NO: 1438877 - RNA, 19 nt, Homo sapiens
  misc_RNA (1)...(19): siRNA sense strand
uugaagaccugaagaacug

SEQ ID NO: 1438878 - RNA, 19 nt, Homo sapiens
  misc_RNA (1)...(19): siRNA sense strand
ugaaugacgcccucaauca

SEQ ID NO: 1438879 - RNA, 19 nt, Homo sapiens
  misc_RNA (1)...(19): siRNA sense strand
gaaaucaucaagccuaggu

SEQ ID NO: 1438880 - RNA, 19 nt, Homo sapiens
  misc_RNA (1)...(19): siRNA sense strand
aagaagagacgguugaguu

SEQ ID NO: 1438881 - RNA, 19 nt, Homo sapiens
  misc_RNA (1)...(19): siRNA sense strand
gacaguuccuccauugauc

SEQ ID NO: 1438882 - RNA, 19 nt, Homo sapiens
  misc_RNA (1)...(19): siRNA sense strand
agaagagacgguugaguuu

SEQ ID NO: 1438883 - RNA, 19 nt, Homo sapiens
  misc_RNA (1)...(19): siRNA sense strand
ucacggcacuaagaacuau

SEQ ID NO: 1438884 - RNA, 19 nt, Homo sapiens
  misc_RNA (1)...(19): siRNA sense strand
gggaaacucacggcacuaa

SEQ ID NO: 1438885 - RNA, 19 nt, Homo sapiens
  misc_RNA (1)...(19): siRNA sense strand
gugcuuauaagucaucaaa

SEQ ID NO: 1438886 - RNA, 19 nt, Homo sapiens
  misc_RNA (1)...(19): siRNA sense strand
uggaggccaucgccaauga

SEQ ID NO: 1438887 - RNA, 19 nt, Homo sapiens
  misc_RNA (1)...(19): siRNA sense strand
augaagcagugaaauuuga

SEQ ID NO: 1438888 - RNA, 19 nt, Homo sapiens
  misc_RNA (1)...(19): siRNA sense strand
aaccagugcugcugaagga

SEQ ID NO: 1438889 - RNA, 19 nt, Homo sapiens
  misc_RNA (1)...(19): siRNA sense strand
gcacuaagaacuauuucac

SEQ ID NO: 1438890 - RNA, 19 nt, Homo sapiens
  misc_RNA (1)...(19): siRNA sense strand
ccaaaguuccagacauguu

SEQ ID NO: 1438891 - RNA, 19 nt, Homo sapiens
  misc_RNA (1)...(19): siRNA sense strand
uuccagacauguuugaaga

SEQ ID NO: 1438892 - RNA, 19 nt, Homo sapiens
  misc_RNA (1)...(19): siRNA sense strand
aauuugacaugggugcuua

SEQ ID NO: 1438893 - RNA, 19 nt, Homo sapiens
  misc_RNA (1)...(19): siRNA sense strand
ggccaucgccaaugacuca

SEQ ID NO: 1438894 - RNA, 19 nt, Homo sapiens
  misc_RNA (1)...(19): siRNA sense strand
ggagagcauggugguagua

SEQ ID NO: 1438895 - RNA, 19 nt, Homo sapiens
  misc_RNA (1)...(19): siRNA sense strand
aaacucacggcacuaagaa

SEQ ID NO: 1438896 - RNA, 19 nt, Homo sapiens
  misc_RNA (1)...(19): siRNA sense strand
ugacucagaggaagaaauc

SEQ ID NO: 1438897 - RNA, 19 nt, Homo sapiens
  misc_RNA (1)...(19): siRNA sense strand
agaacuauuucacaucagu

SEQ ID NO: 1438898 - RNA, 19 nt, Homo sapiens
  misc_RNA (1)...(19): siRNA sense strand
gaucaaucugugucucuga

SEQ ID NO: 1438899 - RNA, 19 nt, Homo sapiens
  misc_RNA (1)...(19): siRNA sense strand
guauaauucgagccaauga

SEQ ID NO: 1438900 - RNA, 19 nt, Homo sapiens
  misc_RNA (1)...(19): siRNA sense strand
uugaucaucugucucugaa

SEQ ID NO: 1438901 - RNA, 19 nt, Homo sapiens
  misc_RNA (1)...(19): siRNA sense strand
gcccucaaucaaaguauaa

SEQ ID NO: 1438902 - RNA, 19 nt, Homo sapiens
  misc_RNA (1)...(19): siRNA sense strand
cgcccucaaucaaaguaua

SEQ ID NO: 1438903 - RNA, 19 nt, Homo sapiens
  misc_RNA (1)...(19): siRNA sense strand
gagcauggugguaguagca

SEQ ID NO: 1438904 - RNA, 19 nt, Homo sapiens
  misc_RNA (1)...(19): siRNA sense strand
aaacauccaagcuuaccuu

SEQ ID NO: 1438905 - RNA, 19 nt, Homo sapiens
  misc_RNA (1)...(19): siRNA sense strand
uggaugaagcagugaaauu

SEQ ID NO: 1438906 - RNA, 19 nt, Homo sapiens
  misc_RNA (1)...(19): siRNA sense strand
gaggaucaucaaauacgaa

SEQ ID NO: 1438907 - RNA, 19 nt, Homo sapiens
  misc_RNA (1)...(19): siRNA sense strand
ccaaugacucagaggaaga

SEQ ID NO: 1438908 - RNA, 19 nt, Homo sapiens
  misc_RNA (1)...(19): siRNA sense strand
ugaggaucaucaaauacga

SEQ ID NO: 1438909 - RNA, 19 nt, Homo sapiens
  misc_RNA (1)...(19): siRNA sense strand
gaccaaccuccucuucuuc

SEQ ID NO: 1438910 - RNA, 19 nt, Homo sapiens
  misc_RNA (1)...(19): siRNA sense strand
gaagaagagacgguugagu

SEQ ID NO: 1438911 - RNA, 19 nt, Homo sapiens
  misc_RNA (1)...(19): siRNA sense strand
gaagaccugaagaacuguu

SEQ ID NO: 1438912 - RNA, 19 nt, Homo sapiens
  misc_RNA (1)...(19): siRNA sense strand
ucucugaguaucucugaaa

SEQ ID NO: 1438913 - RNA, 19 nt, Homo sapiens
  misc_RNA (1)...(19): siRNA sense strand
caaugacucagaggaagaa

SEQ ID NO: 1438914 - RNA, 19 nt, Homo sapiens
  misc_RNA (1)...(19): siRNA sense strand
aaauuaccgugauucuaag

SEQ ID NO: 1438915 - RNA, 19 nt, Homo sapiens
  misc_RNA (1)...(19): siRNA sense strand
aaugacgcccucaaucaaa

SEQ ID NO: 1438916 - RNA, 19 nt, Homo sapiens
  misc_RNA (1)...(19): siRNA sense strand
caacgggaagguucugaag

SEQ ID NO: 1438917 - RNA, 19 nt, Homo sapiens
  misc_RNA (1)...(19): siRNA sense strand
caucaguugcccauccaaa

SEQ ID NO: 1438918 - RNA, 19 nt, Homo sapiens
  misc_RNA (1)...(19): siRNA sense strand
ugcccaagaugaagaccaa

SEQ ID NO: 1438919 - RNA, 19 nt, Homo sapiens
  misc_RNA (1)...(19): siRNA sense strand
guuccuccauugaucaucu

SEQ ID NO: 1438920 - RNA, 19 nt, Homo sapiens
  misc_RNA (1)...(19): siRNA sense strand
agacaguuccuccauugau

SEQ ID NO: 1438921 - RNA, 19 nt, Homo sapiens
  misc_RNA (1)...(19): siRNA sense strand
ugacugcccaagaugaaga

SEQ ID NO: 1438922 - RNA, 19 nt, Homo sapiens
  misc_RNA (1)...(19): siRNA sense strand
gacaugggugcuuauaagu

SEQ ID NO: 1438923 - RNA, 19 nt, Homo sapiens
  misc_RNA (1)...(19): siRNA sense strand
cggcugcugcauuacauaa

SEQ ID NO: 1438924 - RNA, 19 nt, Homo sapiens
  misc_RNA (1)...(19): siRNA sense strand
aaguauaauucgagccaau

SEQ ID NO: 1438925 - RNA, 19 nt, Homo sapiens
  misc_RNA (1)...(19): siRNA sense strand
gaaggcugcauggaucaau

SEQ ID NO: 1438926 - RNA, 19 nt, Homo sapiens
  misc_RNA (1)...(19): siRNA sense strand
ccugagcaaugugaaauac

SEQ ID NO: 1438927 - RNA, 19 nt, Homo sapiens
  misc_RNA (1)...(19): siRNA sense strand
cgguugaguuuaagccaau

SEQ ID NO: 1438928 - RNA, 19 nt, Homo sapiens
  misc_RNA (1)...(19): siRNA sense strand
ccauugaucaucugucucu

SEQ ID NO: 1438929 - RNA, 19 nt, Homo sapiens
  misc_RNA (1)...(19): siRNA sense strand
caaggagagcaugguggua

SEQ ID NO: 1438930 - RNA, 19 nt, Homo sapiens
  misc_RNA (1)...(19): siRNA sense strand
gagaccaaccuccucuucu

SEQ ID NO: 1438931 - RNA, 19 nt, Homo sapiens
  misc_RNA (1)...(19): siRNA sense strand
gaagcagugaaauuugaca

SEQ ID NO: 1438932 - RNA, 19 nt, Homo sapiens
  misc_RNA (1)...(19): siRNA sense strand
cuucuaucauguaagcuau

SEQ ID NO: 1438933 - RNA, 19 nt, Homo sapiens
  misc_RNA (1)...(19): siRNA sense strand
ucugaaaccucuaaaacau

SEQ ID NO: 1438934 - RNA, 19 nt, Homo sapiens
  misc_RNA (1)...(19): siRNA sense strand
cuaagaacuauuucacauc

SEQ ID NO: 1438935 - RNA, 19 nt, Homo sapiens
  misc_RNA (1)...(19): siRNA sense strand
caaagaaucuagcaucaua

SEQ ID NO: 1438936 - RNA, 19 nt, Homo sapiens
  misc_RNA (1)...(19): siRNA sense strand
caacauagauggaccaaau

SEQ ID NO: 1438937 - RNA, 19 nt, Homo sapiens
  misc_RNA (1)...(19): siRNA sense strand
gaggacggcuucccaauaa

SEQ ID NO: 1438938 - RNA, 19 nt, Homo sapiens
  misc_RNA (1)...(19): siRNA sense strand
gaauguggguuuauaaaug

SEQ ID NO: 1438939 - RNA, 19 nt, Homo sapiens
  misc_RNA (1)...(19): siRNA sense strand
gcugaagccucaauguuua

SEQ ID NO: 1438940 - RNA, 19 nt, Homo sapiens
  misc_RNA (1)...(19): siRNA sense strand
cagacgagcugaugaagua

SEQ ID NO: 1438941 - RNA, 19 nt, Homo sapiens
  misc_RNA (1)...(19): siRNA sense strand
gagggaaaguguaugauaa

SEQ ID NO: 1438942 - RNA, 19 nt, Homo sapiens
  misc_RNA (1)...(19): siRNA sense strand
caauaaagaugaagccaaa

SEQ ID NO: 1438943 - RNA, 19 nt, Homo sapiens
  misc_RNA (1)...(19): siRNA sense strand
gaacggaaaucuuaaacca

SEQ ID NO: 1438944 - RNA, 19 nt, Homo sapiens
  misc_RNA (1)...(19): siRNA sense strand
gcagaaagauacagcugaa

SEQ ID NO: 1438945 - RNA, 19 nt, Homo sapiens
  misc_RNA (1)...(19): siRNA sense strand
gcacuuacuaugacaauuu

SEQ ID NO: 1438946 - RNA, 19 nt, Homo sapiens
  misc_RNA (1)...(19): siRNA sense strand
guagacagguguaugaguu

SEQ ID NO: 1438947 - RNA, 19 nt, Homo sapiens
  misc_RNA (1)...(19): siRNA sense strand
ucaccgagaugauaaagaa

SEQ ID NO: 1438948 - RNA, 19 nt, Homo sapiens
  misc_RNA (1)...(19): siRNA sense strand
gauagagaauguggguuua

SEQ ID NO: 1438949 - RNA, 19 nt, Homo sapiens
  misc_RNA (1)...(19): siRNA sense strand
uaacggugaucacaggaua

SEQ ID NO: 1438950 - RNA, 19 nt, Homo sapiens
  misc_RNA (1)...(19): siRNA sense strand
gaagagggaaaguguauga

SEQ ID NO: 1438951 - RNA, 19 nt, Homo sapiens
  misc_RNA (1)...(19): siRNA sense strand
ugaaugcccuuggucaaua

SEQ ID NO: 1438952 - RNA, 19 nt, Homo sapiens
  misc_RNA (1)...(19): siRNA sense strand
aaacagcucuagacaacaa

SEQ ID NO: 1438953 - RNA, 19 nt, Homo sapiens
  misc_RNA (1)...(19): siRNA sense strand
ucaaagauccugugcagaa

SEQ ID NO: 1438954 - RNA, 19 nt, Homo sapiens
  misc_RNA (1)...(19): siRNA sense strand
ggauagagaauguggguuu

SEQ ID NO: 1438955 - RNA, 19 nt, Homo sapiens
  misc_RNA (1)...(19): siRNA sense strand
uuaaugugcuggaaucaaa

SEQ ID NO: 1438956 - RNA, 19 nt, Homo sapiens
  misc_RNA (1)...(19): siRNA sense strand
ucagagagagcaaagcuua

SEQ ID NO: 1438957 - RNA, 19 nt, Homo sapiens
  misc_RNA (1)...(19): siRNA sense strand
gcaaaucauucgguaaauc

SEQ ID NO: 1438958 - RNA, 19 nt, Homo sapiens
  misc_RNA (1)...(19): siRNA sense strand
gaucacaggauagguauuu

SEQ ID NO: 1438959 - RNA, 19 nt, Homo sapiens
  misc_RNA (1)...(19): siRNA sense strand
gguggaagaugaaacuguu

SEQ ID NO: 1438960 - RNA, 19 nt, Homo sapiens
  misc_RNA (1)...(19): siRNA sense strand
caacacccaacacuuauaa

SEQ ID NO: 1438961 - RNA, 19 nt, Homo sapiens
  misc_RNA (1)...(19): siRNA sense strand
gggcacagcagaagaacua

SEQ ID NO: 1438962 - RNA, 19 nt, Homo sapiens
  misc_RNA (1)...(19): siRNA sense strand
uagagaauguggguuuaua

SEQ ID NO: 1438963 - RNA, 19 nt, Homo sapiens
  misc_RNA (1)...(19): siRNA sense strand
gcagaagaacuaaaggaaa

SEQ ID NO: 1438964 - RNA, 19 nt, Homo sapiens
  misc_RNA (1)...(19): siRNA sense strand
agaugaagcugacagaaga

SEQ ID NO: 1438965 - RNA, 19 nt, Homo sapiens
  misc_RNA (1)...(19): siRNA sense strand
caaagauccugugcagaaa

SEQ ID NO: 1438966 - RNA, 19 nt, Homo sapiens
  misc_RNA (1)...(19): siRNA sense strand
gagagaacaaugauaaaga

SEQ ID NO: 1438967 - RNA, 19 nt, Homo sapiens
  misc_RNA (1)...(19): siRNA sense strand
auaaagaacucaccgaaca

SEQ ID NO: 1438968 - RNA, 19 nt, Homo sapiens
  misc_RNA (1)...(19): siRNA sense strand
gaacacagaaacagcucua

SEQ ID NO: 1438969 - RNA, 19 nt, Homo sapiens
  misc_RNA (1)...(19): siRNA sense strand
gagcuccucugaagcaaau

SEQ ID NO: 1438970 - RNA, 19 nt, Homo sapiens
  misc_RNA (1)...(19): siRNA sense strand
gagaauguggguuuauaaa

SEQ ID NO: 1438971 - RNA, 19 nt, Homo sapiens
  misc_RNA (1)...(19): siRNA sense strand
agaaacagcucuagacaac

SEQ ID NO: 1438972 - RNA, 19 nt, Homo sapiens
  misc_RNA (1)...(19): siRNA sense strand
gugcuggaaucaaaggaua

SEQ ID NO: 1438973 - RNA, 19 nt, Homo sapiens
  misc_RNA (1)...(19): siRNA sense strand
caaaggauacagacaguga

SEQ ID NO: 1438974 - RNA, 19 nt, Homo sapiens
  misc_RNA (1)...(19): siRNA sense strand
agaauacuguggagagauu

SEQ ID NO: 1438975 - RNA, 19 nt, Homo sapiens
  misc_RNA (1)...(19): siRNA sense strand
gaaugcccuuggucaauau

SEQ ID NO: 1438976 - RNA, 19 nt, Homo sapiens
  misc_RNA (1)...(19): siRNA sense strand
gcagcuuucuguucaacuu

SEQ ID NO: 1438977 - RNA, 19 nt, Homo sapiens
  misc_RNA (1)...(19): siRNA sense strand
gacccugaccucugucuua

SEQ ID NO: 1438978 - RNA, 19 nt, Homo sapiens
  misc_RNA (1)...(19): siRNA sense strand
cuaaccauguuuacaacua

SEQ ID NO: 1438979 - RNA, 19 nt, Homo sapiens
  misc_RNA (1)...(19): siRNA sense strand
ccucaauguuuccagauaa

SEQ ID NO: 1438980 - RNA, 19 nt, Homo sapiens
  misc_RNA (1)...(19): siRNA sense strand
gaccaaaugcuaaaucugu

SEQ ID NO: 1438981 - RNA, 19 nt, Homo sapiens
  misc_RNA (1)...(19): siRNA sense strand
gaagagaagaaagaugaaa

SEQ ID NO: 1438982 - RNA, 19 nt, Homo sapiens
  misc_RNA (1)...(19): siRNA sense strand
gcaacacccaacacuuaua

SEQ ID NO: 1438983 - RNA, 19 nt, Homo sapiens
  misc_RNA (1)...(19): siRNA sense strand
uaugggagaugaaguuuua

SEQ ID NO: 1438984 - RNA, 19 nt, Homo sapiens
  misc_RNA (1)...(19): siRNA sense strand
agacgauccugaagaaaga

SEQ ID NO: 1438985 - RNA, 19 nt, Homo sapiens
  misc_RNA (1)...(19): siRNA sense strand
cagaagaacuaaaggaaaa

SEQ ID NO: 1438986 - RNA, 19 nt, Homo sapiens
  misc_RNA (1)...(19): siRNA sense strand
ggaguggaguggugcugaa

SEQ ID NO: 1438987 - RNA, 19 nt, Homo sapiens
  misc_RNA (1)...(19): siRNA sense strand
ggagggagcaaaggaguuu

SEQ ID NO: 1438988 - RNA, 19 nt, Homo sapiens
  misc_RNA (1)...(19): siRNA sense strand
agacagguguaugaguuua

SEQ ID NO: 1438989 - RNA, 19 nt, Homo sapiens
  misc_RNA (1)...(19): siRNA sense strand
gagaugaaguuuuagauca

SEQ ID NO: 1438990 - RNA, 19 nt, Homo sapiens
  misc_RNA (1)...(19): siRNA sense strand
gcaaauucucggugucaaa

SEQ ID NO: 1438991 - RNA, 19 nt, Homo sapiens
  misc_RNA (1)...(19): siRNA sense strand
aagaagagaagaaagauga

SEQ ID NO: 1438992 - RNA, 19 nt, Homo sapiens
  misc_RNA (1)...(19): siRNA sense strand
uaaauaugacugcuuccua

SEQ ID NO: 1438993 - RNA, 19 nt, Homo sapiens
  misc_RNA (1)...(19): siRNA sense strand
gggaaaguguaugauaaau

SEQ ID NO: 1438994 - RNA, 19 nt, Homo sapiens
  misc_RNA (1)...(19): siRNA sense strand
uggagacgauccugaagaa

SEQ ID NO: 1438995 - RNA, 19 nt, Homo sapiens
  misc_RNA (1)...(19): siRNA sense strand
ggugaucacaggauaggua

SEQ ID NO: 1438996 - RNA, 19 nt, Homo sapiens
  misc_RNA (1)...(19): siRNA sense strand
gaagaagagaagaaagaug

SEQ ID NO: 1438997 - RNA, 19 nt, Homo sapiens
  misc_RNA (1)...(19): siRNA sense strand
uaaagaagaagaagagaag

SEQ ID NO: 1438998 - RNA, 19 nt, Homo sapiens
  misc_RNA (1)...(19): siRNA sense strand
ugucaaacaccaauaaaga

SEQ ID NO: 1438999 - RNA, 19 nt, Homo sapiens
  misc_RNA (1)...(19): siRNA sense strand
aagaugaagccaaauauug

SEQ ID NO: 1439000 - RNA, 19 nt, Homo sapiens
  misc_RNA (1)...(19): siRNA sense strand
gucaaagaaucuagcauca

SEQ ID NO: 1439001 - RNA, 19 nt, Homo sapiens
  misc_RNA (1)...(19): siRNA sense strand
ugacuucugugagcucauu

SEQ ID NO: 1439002 - RNA, 19 nt, Homo sapiens
  misc_RNA (1)...(19): siRNA sense strand
aauccaaacugcuaugcaa

SEQ ID NO: 1439003 - RNA, 19 nt, Homo sapiens
  misc_RNA (1)...(19): siRNA sense strand
uauugaaccuccugagaau

SEQ ID NO: 1439004 - RNA, 19 nt, Homo sapiens
  misc_RNA (1)...(19): siRNA sense strand
gagaagggaccaguuuguu

SEQ ID NO: 1439005 - RNA, 19 nt, Homo sapiens
  misc_RNA (1)...(19): siRNA sense strand
ccauuaaugugcuggaauc

SEQ ID NO: 1439006 - RNA, 19 nt, Homo sapiens
  misc_RNA (1)...(19): siRNA sense strand
gcacagcagaagaacuaaa

SEQ ID NO: 1439007 - RNA, 19 nt, Homo sapiens
  misc_RNA (1)...(19): siRNA sense strand
gagacgauccugaagaaag

SEQ ID NO: 1439008 - RNA, 19 nt, Homo sapiens
  misc_RNA (1)...(19): siRNA sense strand
caagagagccauccagacu

SEQ ID NO: 1439009 - RNA, 19 nt, Homo sapiens
  misc_RNA (1)...(19): siRNA sense strand
gaugaagccaaauauugaa

SEQ ID NO: 1439010 - RNA, 19 nt, Homo sapiens
  misc_RNA (1)...(19): siRNA sense strand
caaacaccaauaaagauga

SEQ ID NO: 1439011 - RNA, 19 nt, Homo sapiens
  misc_RNA (1)...(19): siRNA sense strand
gaauggaaacagcgaagga

SEQ ID NO: 1439012 - RNA, 19 nt, Homo sapiens
  misc_RNA (1)...(19): siRNA sense strand
gcugaugaaguaaagagua

SEQ ID NO: 1439013 - RNA, 19 nt, Homo sapiens
  misc_RNA (1)...(19): siRNA sense strand
ccacaguguuaccagcauu

SEQ ID NO: 1439014 - RNA, 19 nt, Homo sapiens
  misc_RNA (1)...(19): siRNA sense strand
cagaagagggaaaguguau

SEQ ID NO: 1439015 - RNA, 19 nt, Homo sapiens
  misc_RNA (1)...(19): siRNA sense strand
agaugaagccaaauauuga

SEQ ID NO: 1439016 - RNA, 19 nt, Homo sapiens
  misc_RNA (1)...(19): siRNA sense strand
ggagagaacaaugauaaag

SEQ ID NO: 1439017 - RNA, 19 nt, Homo sapiens
  misc_RNA (1)...(19): siRNA sense strand
augcaacacccaacacuua

SEQ ID NO: 1439018 - RNA, 19 nt, Homo sapiens
  misc_RNA (1)...(19): siRNA sense strand
gaaguaugucggcaucgaa

SEQ ID NO: 1439019 - RNA, 19 nt, Homo sapiens
  misc_RNA (1)...(19): siRNA sense strand
cugaugcccugaaguaugu

SEQ ID NO: 1439020 - RNA, 19 nt, Homo sapiens
  misc_RNA (1)...(19): siRNA sense strand
agagggaaaguguaugaua

SEQ ID NO: 1439021 - RNA, 19 nt, Homo sapiens
  misc_RNA (1)...(19): siRNA sense strand
aaacuucgagcuccucuga

SEQ ID NO: 1439022 - RNA, 19 nt, Homo sapiens
  misc_RNA (1)...(19): siRNA sense strand
gauaaagaccccaccaaaa

SEQ ID NO: 1439023 - RNA, 19 nt, Homo sapiens
  misc_RNA (1)...(19): siRNA sense strand
ucaggaugguacuuucauu

SEQ ID NO: 1439024 - RNA, 19 nt, Homo sapiens
  misc_RNA (1)...(19): siRNA sense strand
aaauacaugugcagcuuuc

SEQ ID NO: 1439025 - RNA, 19 nt, Homo sapiens
  misc_RNA (1)...(19): siRNA sense strand
gacagaagagggaaagugu

SEQ ID NO: 1439026 - RNA, 19 nt, Homo sapiens
  misc_RNA (1)...(19): siRNA sense strand
ucaauguaguucagagugu

SEQ ID NO: 1439027 - RNA, 19 nt, Homo sapiens
  misc_RNA (1)...(19): siRNA sense strand
ggacggcuccucuaaccau

SEQ ID NO: 1439028 - RNA, 19 nt, Homo sapiens
  misc_RNA (1)...(19): siRNA sense strand
gaguuuagagucaaagaau

SEQ ID NO: 1439029 - RNA, 19 nt, Homo sapiens
  misc_RNA (1)...(19): siRNA sense strand
aagaagaagagaagaaaga

SEQ ID NO: 1439030 - RNA, 19 nt, Homo sapiens
  misc_RNA (1)...(19): siRNA sense strand
gcaaaaguuaugaugguua

SEQ ID NO: 1439031 - RNA, 19 nt, Homo sapiens
  misc_RNA (1)...(19): siRNA sense strand
gcacacugcagaaagauac

SEQ ID NO: 1439032 - RNA, 19 nt, Homo sapiens
  misc_RNA (1)...(19): siRNA sense strand
guaugaguuuagagucaaa

SEQ ID NO: 1439033 - RNA, 19 nt, Homo sapiens
  misc_RNA (1)...(19): siRNA sense strand
ggaaacagcgaaggauaca

SEQ ID NO: 1439034 - RNA, 19 nt, Homo sapiens
  misc_RNA (1)...(19): siRNA sense strand
ucaaacaccaauaaagaug

SEQ ID NO: 1439035 - RNA, 19 nt, Homo sapiens
  misc_RNA (1)...(19): siRNA sense strand
caaagaaucuagcaucaua

SEQ ID NO: 1439036 - RNA, 19 nt, Homo sapiens
  misc_RNA (1)...(19): siRNA sense strand
caacauagauggaccaaau

SEQ ID NO: 1439037 - RNA, 19 nt, Homo sapiens
  misc_RNA (1)...(19): siRNA sense strand
gaggacggcuucccaauaa

SEQ ID NO: 1439038 - RNA, 19 nt, Homo sapiens
  misc_RNA (1)...(19): siRNA sense strand
gaauguggguuuauaaaug

SEQ ID NO: 1439039 - RNA, 19 nt, Homo sapiens
  misc_RNA (1)...(19): siRNA sense strand
gcugaagccucaauguuua

SEQ ID NO: 1439040 - RNA, 19 nt, Homo sapiens
  misc_RNA (1)...(19): siRNA sense strand
cagacgagcugaugaagua

SEQ ID NO: 1439041 - RNA, 19 nt, Homo sapiens
  misc_RNA (1)...(19): siRNA sense strand
gagggaaaguguaugauaa

SEQ ID NO: 1439042 - RNA, 19 nt, Homo sapiens
  misc_RNA (1)...(19): siRNA sense strand
caauaaagaugaagccaaa

SEQ ID NO: 1439043 - RNA, 19 nt, Homo sapiens
  misc_RNA (1)...(19): siRNA sense strand
gaacggaaaucuuaaacca

SEQ ID NO: 1439044 - RNA, 19 nt, Homo sapiens
  misc_RNA (1)...(19): siRNA sense strand
gcagaaagauacagcugaa

SEQ ID NO: 1439045 - RNA, 19 nt, Homo sapiens
  misc_RNA (1)...(19): siRNA sense strand
gcacuuacuaugacaauuu

SEQ ID NO: 1439046 - RNA, 19 nt, Homo sapiens
  misc_RNA (1)...(19): siRNA sense strand
guagacagguguaugaguu

SEQ ID NO: 1439047 - RNA, 19 nt, Homo sapiens
  misc_RNA (1)...(19): siRNA sense strand
ucaccgagaugauaaagaa

SEQ ID NO: 1439048 - RNA, 19 nt, Homo sapiens
  misc_RNA (1)...(19): siRNA sense strand
gauagagaauguggguuua

SEQ ID NO: 1439049 - RNA, 19 nt, Homo sapiens
  misc_RNA (1)...(19): siRNA sense strand
uaacggugaucacaggaua

SEQ ID NO: 1439050 - RNA, 19 nt, Homo sapiens
  misc_RNA (1)...(19): siRNA sense strand
gaagagggaaaguguauga

SEQ ID NO: 1439051 - RNA, 19 nt, Homo sapiens
  misc_RNA (1)...(19): siRNA sense strand
ugaaugcccuuggucaaua

SEQ ID NO: 1439052 - RNA, 19 nt, Homo sapiens
  misc_RNA (1)...(19): siRNA sense strand
aaacagcucuagacaacaa

SEQ ID NO: 1439053 - RNA, 19 nt, Homo sapiens
  misc_RNA (1)...(19): siRNA sense strand
ucaaagauccugugcagaa

SEQ ID NO: 1439054 - RNA, 19 nt, Homo sapiens
  misc_RNA (1)...(19): siRNA sense strand
ggauagagaauguggguuu

SEQ ID NO: 1439055 - RNA, 19 nt, Homo sapiens
  misc_RNA (1)...(19): siRNA sense strand
uuaaugugcuggaaucaaa

SEQ ID NO: 1439056 - RNA, 19 nt, Homo sapiens
  misc_RNA (1)...(19): siRNA sense strand
ucagagagagcaaagcuua

SEQ ID NO: 1439057 - RNA, 19 nt, Homo sapiens
  misc_RNA (1)...(19): siRNA sense strand
gcaaaucauucgguaaauc

SEQ ID NO: 1439058 - RNA, 19 nt, Homo sapiens
  misc_RNA (1)...(19): siRNA sense strand
gaucacaggauagguauuu

SEQ ID NO: 1439059 - RNA, 19 nt, Homo sapiens
  misc_RNA (1)...(19): siRNA sense strand
gguggaagaugaaacuguu

SEQ ID NO: 1439060 - RNA, 19 nt, Homo sapiens
  misc_RNA (1)...(19): siRNA sense strand
caacacccaacacuuauaa

SEQ ID NO: 1439061 - RNA, 19 nt, Homo sapiens
  misc_RNA (1)...(19): siRNA sense strand
gggcacagcagaagaacua

SEQ ID NO: 1439062 - RNA, 19 nt, Homo sapiens
  misc_RNA (1)...(19): siRNA sense strand
uagagaauguggguuuaua

SEQ ID NO: 1439063 - RNA, 19 nt, Homo sapiens
  misc_RNA (1)...(19): siRNA sense strand
gcagaagaacuaaaggaaa

SEQ ID NO: 1439064 - RNA, 19 nt, Homo sapiens
  misc_RNA (1)...(19): siRNA sense strand
agaugaagcugacagaaga

SEQ ID NO: 1439065 - RNA, 19 nt, Homo sapiens
  misc_RNA (1)...(19): siRNA sense strand
caaagauccugugcagaaa

SEQ ID NO: 1439066 - RNA, 19 nt, Homo sapiens
  misc_RNA (1)...(19): siRNA sense strand
gagagaacaaugauaaaga

SEQ ID NO: 1439067 - RNA, 19 nt, Homo sapiens
  misc_RNA (1)...(19): siRNA sense strand
auaaagaacucaccgaaca

SEQ ID NO: 1439068 - RNA, 19 nt, Homo sapiens
  misc_RNA (1)...(19): siRNA sense strand
gaacacagaaacagcucua

SEQ ID NO: 1439069 - RNA, 19 nt, Homo sapiens
  misc_RNA (1)...(19): siRNA sense strand
gagcuccucugaagcaaau

SEQ ID NO: 1439070 - RNA, 19 nt, Homo sapiens
  misc_RNA (1)...(19): siRNA sense strand
gagaauguggguuuauaaa

SEQ ID NO: 1439071 - RNA, 19 nt, Homo sapiens
  misc_RNA (1)...(19): siRNA sense strand
agaaacagcucuagacaac

SEQ ID NO: 1439072 - RNA, 19 nt, Homo sapiens
  misc_RNA (1)...(19): siRNA sense strand
gugcuggaaucaaaggaua

SEQ ID NO: 1439073 - RNA, 19 nt, Homo sapiens
  misc_RNA (1)...(19): siRNA sense strand
caaaggauacagacaguga

SEQ ID NO: 1439074 - RNA, 19 nt, Homo sapiens
  misc_RNA (1)...(19): siRNA sense strand
agaauacuguggagagauu

SEQ ID NO: 1439075 - RNA, 19 nt, Homo sapiens
  misc_RNA (1)...(19): siRNA sense strand
gaaugcccuuggucaauau

SEQ ID NO: 1439076 - RNA, 19 nt, Homo sapiens
  misc_RNA (1)...(19): siRNA sense strand
gcagcuuucuguucaacuu

SEQ ID NO: 1439077 - RNA, 19 nt, Homo sapiens
  misc_RNA (1)...(19): siRNA sense strand
gacccugaccucugucuua

SEQ ID NO: 1439078 - RNA, 19 nt, Homo sapiens
  misc_RNA (1)...(19): siRNA sense strand
cuaaccauguuuacaacua

SEQ ID NO: 1439079 - RNA, 19 nt, Homo sapiens
  misc_RNA (1)...(19): siRNA sense strand
ccucaauguuuccagauaa

SEQ ID NO: 1439080 - RNA, 19 nt, Homo sapiens
  misc_RNA (1)...(19): siRNA sense strand
gaccaaaugcuaaaucugu

SEQ ID NO: 1439081 - RNA, 19 nt, Homo sapiens
  misc_RNA (1)...(19): siRNA sense strand
gaagagaagaaagaugaaa

SEQ ID NO: 1439082 - RNA, 19 nt, Homo sapiens
  misc_RNA (1)...(19): siRNA sense strand
gcaacacccaacacuuaua

SEQ ID NO: 1439083 - RNA, 19 nt, Homo sapiens
  misc_RNA (1)...(19): siRNA sense strand
uaugggagaugaaguuuua

SEQ ID NO: 1439084 - RNA, 19 nt, Homo sapiens
  misc_RNA (1)...(19): siRNA sense strand
agacgauccugaagaaaga

SEQ ID NO: 1439085 - RNA, 19 nt, Homo sapiens
  misc_RNA (1)...(19): siRNA sense strand
cagaagaacuaaaggaaaa

SEQ ID NO: 1439086 - RNA, 19 nt, Homo sapiens
  misc_RNA (1)...(19): siRNA sense strand
ggaguggaguggugcugaa

SEQ ID NO: 1439087 - RNA, 19 nt, Homo sapiens
  misc_RNA (1)...(19): siRNA sense strand
ggagggagcaaaggaguuu

SEQ ID NO: 1439088 - RNA, 19 nt, Homo sapiens
  misc_RNA (1)...(19): siRNA sense strand
agacagguguaugaguuua

SEQ ID NO: 1439089 - RNA, 19 nt, Homo sapiens
  misc_RNA (1)...(19): siRNA sense strand
gagaugaaguuuuagauca

SEQ ID NO: 1439090 - RNA, 19 nt, Homo sapiens
  misc_RNA (1)...(19): siRNA sense strand
gcaaauucucggugucaaa

SEQ ID NO: 1439091 - RNA, 19 nt, Homo sapiens
  misc_RNA (1)...(19): siRNA sense strand
aagaagagaagaaagauga

SEQ ID NO: 1439092 - RNA, 19 nt, Homo sapiens
  misc_RNA (1)...(19): siRNA sense strand
uaaauaugacugcuuccua

SEQ ID NO: 1439093 - RNA, 19 nt, Homo sapiens
  misc_RNA (1)...(19): siRNA sense strand
gggaaaguguaugauaaau

SEQ ID NO: 1439094 - RNA, 19 nt, Homo sapiens
  misc_RNA (1)...(19): siRNA sense strand
uggagacgauccugaagaa

SEQ ID NO: 1439095 - RNA, 19 nt, Homo sapiens
  misc_RNA (1)...(19): siRNA sense strand
ggugaucacaggauaggua

SEQ ID NO: 1439096 - RNA, 19 nt, Homo sapiens
  misc_RNA (1)...(19): siRNA sense strand
gaagaagagaagaaagaug

SEQ ID NO: 1439097 - RNA, 19 nt, Homo sapiens
  misc_RNA (1)...(19): siRNA sense strand
uaaagaagaagaagagaag

SEQ ID NO: 1439098 - RNA, 19 nt, Homo sapiens
  misc_RNA (1)...(19): siRNA sense strand
ugucaaacaccaauaaaga

SEQ ID NO: 1439099 - RNA, 19 nt, Homo sapiens
  misc_RNA (1)...(19): siRNA sense strand
aagaugaagccaaauauug

SEQ ID NO: 1439100 - RNA, 19 nt, Homo sapiens
  misc_RNA (1)...(19): siRNA sense strand
gucaaagaaucuagcauca

SEQ ID NO: 1439101 - RNA, 19 nt, Homo sapiens
  misc_RNA (1)...(19): siRNA sense strand
ugacuucugugagcucauu

SEQ ID NO: 1439102 - RNA, 19 nt, Homo sapiens
  misc_RNA (1)...(19): siRNA sense strand
aauccaaacugcuaugcaa

SEQ ID NO: 1439103 - RNA, 19 nt, Homo sapiens
  misc_RNA (1)...(19): siRNA sense strand
uauugaaccuccugagaau

SEQ ID NO: 1439104 - RNA, 19 nt, Homo sapiens
  misc_RNA (1)...(19): siRNA sense strand
gagaagggaccaguuuguu

SEQ ID NO: 1439105 - RNA, 19 nt, Homo sapiens
  misc_RNA (1)...(19): siRNA sense strand
ccauuaaugugcuggaauc

SEQ ID NO: 1439106 - RNA, 19 nt, Homo sapiens
  misc_RNA (1)...(19): siRNA sense strand
gcacagcagaagaacuaaa

SEQ ID NO: 1439107 - RNA, 19 nt, Homo sapiens
  misc_RNA (1)...(19): siRNA sense strand
gagacgauccugaagaaag

SEQ ID NO: 1439108 - RNA, 19 nt, Homo sapiens
  misc_RNA (1)...(19): siRNA sense strand
caagagagccauccagacu

SEQ ID NO: 1439109 - RNA, 19 nt, Homo sapiens
  misc_RNA (1)...(19): siRNA sense strand
gaugaagccaaauauugaa

SEQ ID NO: 1439110 - RNA, 19 nt, Homo sapiens
  misc_RNA (1)...(19): siRNA sense strand
caaacaccaauaaagauga

SEQ ID NO: 1439111 - RNA, 19 nt, Homo sapiens
  misc_RNA (1)...(19): siRNA sense strand
gaauggaaacagcgaagga

SEQ ID NO: 1439112 - RNA, 19 nt, Homo sapiens
  misc_RNA (1)...(19): siRNA sense strand
gcugaugaaguaaagagua

SEQ ID NO: 1439113 - RNA, 19 nt, Homo sapiens
  misc_RNA (1)...(19): siRNA sense strand
ccacaguguuaccagcauu

SEQ ID NO: 1439114 - RNA, 19 nt, Homo sapiens
  misc_RNA (1)...(19): siRNA sense strand
cagaagagggaaaguguau

SEQ ID NO: 1439115 - RNA, 19 nt, Homo sapiens
  misc_RNA (1)...(19): siRNA sense strand
agaugaagccaaauauuga

SEQ ID NO: 1439116 - RNA, 19 nt, Homo sapiens
  misc_RNA (1)...(19): siRNA sense strand
ggagagaacaaugauaaag

SEQ ID NO: 1439117 - RNA, 19 nt, Homo sapiens
  misc_RNA (1)...(19): siRNA sense strand
augcaacacccaacacuua

SEQ ID NO: 1439118 - RNA, 19 nt, Homo sapiens
  misc_RNA (1)...(19): siRNA sense strand
gaaguaugucggcaucgaa

SEQ ID NO: 1439119 - RNA, 19 nt, Homo sapiens
  misc_RNA (1)...(19): siRNA sense strand
cugaugcccugaaguaugu

SEQ ID NO: 1439120 - RNA, 19 nt, Homo sapiens
  misc_RNA (1)...(19): siRNA sense strand
agagggaaaguguaugaua

SEQ ID NO: 1439121 - RNA, 19 nt, Homo sapiens
  misc_RNA (1)...(19): siRNA sense strand
aaacuucgagcuccucuga

SEQ ID NO: 1439122 - RNA, 19 nt, Homo sapiens
  misc_RNA (1)...(19): siRNA sense strand
gauaaagaccccaccaaaa

SEQ ID NO: 1439123 - RNA, 19 nt, Homo sapiens
  misc_RNA (1)...(19): siRNA sense strand
ucaggaugguacuuucauu

SEQ ID NO: 1439124 - RNA, 19 nt, Homo sapiens
  misc_RNA (1)...(19): siRNA sense strand
aaauacaugugcagcuuuc

SEQ ID NO: 1439125 - RNA, 19 nt, Homo sapiens
  misc_RNA (1)...(19): siRNA sense strand
gacagaagagggaaagugu

SEQ ID NO: 1439126 - RNA, 19 nt, Homo sapiens
  misc_RNA (1)...(19): siRNA sense strand
ucaauguaguucagagugu

SEQ ID NO: 1439127 - RNA, 19 nt, Homo sapiens
  misc_RNA (1)...(19): siRNA sense strand
ggacggcuccucuaaccau

SEQ ID NO: 1439128 - RNA, 19 nt, Homo sapiens
  misc_RNA (1)...(19): siRNA sense strand
gaguuuagagucaaagaau

SEQ ID NO: 1439129 - RNA, 19 nt, Homo sapiens
  misc_RNA (1)...(19): siRNA sense strand
aagaagaagagaagaaaga

SEQ ID NO: 1439130 - RNA, 19 nt, Homo sapiens
  misc_RNA (1)...(19): siRNA sense strand
gcaaaaguuaugaugguua

SEQ ID NO: 1439131 - RNA, 19 nt, Homo sapiens
  misc_RNA (1)...(19): siRNA sense strand
gcacacugcagaaagauac

SEQ ID NO: 1439132 - RNA, 19 nt, Homo sapiens
  misc_RNA (1)...(19): siRNA sense strand
guaugaguuuagagucaaa

SEQ ID NO: 1439133 - RNA, 19 nt, Homo sapiens
  misc_RNA (1)...(19): siRNA sense strand
ggaaacagcgaaggauaca

SEQ ID NO: 1439134 - RNA, 19 nt, Homo sapiens
  misc_RNA (1)...(19): siRNA sense strand
ucaaacaccaauaaagaug

SEQ ID NO: 1439135 - RNA, 19 nt, Homo sapiens
  misc_RNA (1)...(19): siRNA sense strand
gaaugucaaugucaaggua

SEQ ID NO: 1439136 - RNA, 19 nt, Homo sapiens
  misc_RNA (1)...(19): siRNA sense strand
ggaagaccauguuggcaaa

SEQ ID NO: 1439137 - RNA, 19 nt, Homo sapiens
  misc_RNA (1)...(19): siRNA sense strand
ccacaggcuccaacuauua

SEQ ID NO: 1439138 - RNA, 19 nt, Homo sapiens
  misc_RNA (1)...(19): siRNA sense strand
caaaggcgguggcacauca

SEQ ID NO: 1439139 - RNA, 19 nt, Homo sapiens
  misc_RNA (1)...(19): siRNA sense strand
gcucggaguuuguacagaa

SEQ ID NO: 1439140 - RNA, 19 nt, Homo sapiens
  misc_RNA (1)...(19): siRNA sense strand
gaaugcaccugccaucauc

SEQ ID NO: 1439141 - RNA, 19 nt, Homo sapiens
  misc_RNA (1)...(19): siRNA sense strand
gagauucgaugcucagaca

SEQ ID NO: 1439142 - RNA, 19 nt, Homo sapiens
  misc_RNA (1)...(19): siRNA sense strand
cacaacagcugcauucauc

SEQ ID NO: 1439143 - RNA, 19 nt, Homo sapiens
  misc_RNA (1)...(19): siRNA sense strand
ggauggauuugaucagaau

SEQ ID NO: 1439144 - RNA, 19 nt, Homo sapiens
  misc_RNA (1)...(19): siRNA sense strand
acaagacugucaucaagaa

SEQ ID NO: 1439145 - RNA, 19 nt, Homo sapiens
  misc_RNA (1)...(19): siRNA sense strand
ucagauggauggauuugau

SEQ ID NO: 1439146 - RNA, 19 nt, Homo sapiens
  misc_RNA (1)...(19): siRNA sense strand
gaucagaaugucaauguca

SEQ ID NO: 1439147 - RNA, 19 nt, Homo sapiens
  misc_RNA (1)...(19): siRNA sense strand
ucaggagaguggaauguug

SEQ ID NO: 1439148 - RNA, 19 nt, Homo sapiens
  misc_RNA (1)...(19): siRNA sense strand
gcaagaugaaccucucuga

SEQ ID NO: 1439149 - RNA, 19 nt, Homo sapiens
  misc_RNA (1)...(19): siRNA sense strand
auacaagacugucaucaag

SEQ ID NO: 1439150 - RNA, 19 nt, Homo sapiens
  misc_RNA (1)...(19): siRNA sense strand
gaagccagaugugauguac

SEQ ID NO: 1439151 - RNA, 19 nt, Homo sapiens
  misc_RNA (1)...(19): siRNA sense strand
gaggugaagcgaauccaaa

SEQ ID NO: 1439152 - RNA, 19 nt, Homo sapiens
  misc_RNA (1)...(19): siRNA sense strand
ggccaaggacuucgagaaa

SEQ ID NO: 1439153 - RNA, 19 nt, Homo sapiens
  misc_RNA (1)...(19): siRNA sense strand
gaugagaucccagcacugu

SEQ ID NO: 1439154 - RNA, 19 nt, Homo sapiens
  misc_RNA (1)...(19): siRNA sense strand
ugaggagguugacuuggaa

SEQ ID NO: 1439155 - RNA, 19 nt, Homo sapiens
  misc_RNA (1)...(19): siRNA sense strand
cgagaaagcauacaagacu

SEQ ID NO: 1439156 - RNA, 19 nt, Homo sapiens
  misc_RNA (1)...(19): siRNA sense strand
gaccagaagccagauguga

SEQ ID NO: 1439157 - RNA, 19 nt, Homo sapiens
  misc_RNA (1)...(19): siRNA sense strand
acagggagguucagaggau

SEQ ID NO: 1439158 - RNA, 19 nt, Homo sapiens
  misc_RNA (1)...(19): siRNA sense strand
ucaugaugcucaccucaga

SEQ ID NO: 1439159 - RNA, 19 nt, Homo sapiens
  misc_RNA (1)...(19): siRNA sense strand
ucacacaacagcugcauuc

SEQ ID NO: 1439160 - RNA, 19 nt, Homo sapiens
  misc_RNA (1)...(19): siRNA sense strand
aauguuggcuguccgugaa

SEQ ID NO: 1439161 - RNA, 19 nt, Homo sapiens
  misc_RNA (1)...(19): siRNA sense strand
gccgacagcagcaucauga

SEQ ID NO: 1439162 - RNA, 19 nt, Homo sapiens
  misc_RNA (1)...(19): siRNA sense strand
ccaaggacuucgagaaagc

SEQ ID NO: 1439163 - RNA, 19 nt, Homo sapiens
  misc_RNA (1)...(19): siRNA sense strand
cugaggagguugacuugga

SEQ ID NO: 1439164 - RNA, 19 nt, Homo sapiens
  misc_RNA (1)...(19): siRNA sense strand
ucacgcauuucgagcucua

SEQ ID NO: 1439165 - RNA, 19 nt, Homo sapiens
  misc_RNA (1)...(19): siRNA sense strand
uggagaaggcucaggauga

SEQ ID NO: 1439166 - RNA, 19 nt, Homo sapiens
  misc_RNA (1)...(19): siRNA sense strand
gcuggucaucggacaauuu

SEQ ID NO: 1439167 - RNA, 19 nt, Homo sapiens
  misc_RNA (1)...(19): siRNA sense strand
aaucauggccacaaacaga

SEQ ID NO: 1439168 - RNA, 19 nt, Homo sapiens
  misc_RNA (1)...(19): siRNA sense strand
cggaguuuguacagaagua

SEQ ID NO: 1439169 - RNA, 19 nt, Homo sapiens
  misc_RNA (1)...(19): siRNA sense strand
ccagaagccagaugugaug

SEQ ID NO: 1439170 - RNA, 19 nt, Homo sapiens
  misc_RNA (1)...(19): siRNA sense strand
ugcuggagcugcugaauca

SEQ ID NO: 1439171 - RNA, 19 nt, Homo sapiens
  misc_RNA (1)...(19): siRNA sense strand
gagcaugaguuuuacaagu

SEQ ID NO: 1439172 - RNA, 19 nt, Homo sapiens
  misc_RNA (1)...(19): siRNA sense strand
agacugucaucaagaagga

SEQ ID NO: 1439173 - RNA, 19 nt, Homo sapiens
  misc_RNA (1)...(19): siRNA sense strand
cauacaagacugucaucaa

SEQ ID NO: 1439174 - RNA, 19 nt, Homo sapiens
  misc_RNA (1)...(19): siRNA sense strand
gccaaggacuucgagaaag

SEQ ID NO: 1439175 - RNA, 19 nt, Homo sapiens
  misc_RNA (1)...(19): siRNA sense strand
gguggcacaucacacaaca

SEQ ID NO: 1439176 - RNA, 19 nt, Homo sapiens
  misc_RNA (1)...(19): siRNA sense strand
cgccagaagagauugauuu

SEQ ID NO: 1439177 - RNA, 19 nt, Homo sapiens
  misc_RNA (1)...(19): siRNA sense strand
guaaucauggccacaaaca

SEQ ID NO: 1439178 - RNA, 19 nt, Homo sapiens
  misc_RNA (1)...(19): siRNA sense strand
ggucgugggcucggaguuu

SEQ ID NO: 1439179 - RNA, 19 nt, Homo sapiens
  misc_RNA (1)...(19): siRNA sense strand
ggacuucgagaaagcauac

SEQ ID NO: 1439180 - RNA, 19 nt, Homo sapiens
  misc_RNA (1)...(19): siRNA sense strand
gcaccugccaucaucuuca

SEQ ID NO: 1439181 - RNA, 19 nt, Homo sapiens
  misc_RNA (1)...(19): siRNA sense strand
gagaaugcaccugccauca

SEQ ID NO: 1439182 - RNA, 19 nt, Homo sapiens
  misc_RNA (1)...(19): siRNA sense strand
aggaggaggugaagcgaau

SEQ ID NO: 1439183 - RNA, 19 nt, Homo sapiens
  misc_RNA (1)...(19): siRNA sense strand
gagguugacuuggaagacu

SEQ ID NO: 1439184 - RNA, 19 nt, Homo sapiens
  misc_RNA (1)...(19): siRNA sense strand
cacuaucacuagcaagaug

SEQ ID NO: 1439185 - RNA, 19 nt, Homo sapiens
  misc_RNA (1)...(19): siRNA sense strand
cgagcaggagcaugaguuu

SEQ ID NO: 1439186 - RNA, 19 nt, Homo sapiens
  misc_RNA (1)...(19): siRNA sense strand
uaccacaggcuccaacuau

SEQ ID NO: 1439187 - RNA, 19 nt, Homo sapiens
  misc_RNA (1)...(19): siRNA sense strand
uggaggcuguggaucagaa

SEQ ID NO: 1439188 - RNA, 19 nt, Homo sapiens
  misc_RNA (1)...(19): siRNA sense strand
uggauggauuugaucagaa

SEQ ID NO: 1439189 - RNA, 19 nt, Homo sapiens
  misc_RNA (1)...(19): siRNA sense strand
ggucaucggacaauuucug

SEQ ID NO: 1439190 - RNA, 19 nt, Homo sapiens
  misc_RNA (1)...(19): siRNA sense strand
gcaugaguuuuacaaguga

SEQ ID NO: 1439191 - RNA, 19 nt, Homo sapiens
  misc_RNA (1)...(19): siRNA sense strand
gaagccgacagcagcauca

SEQ ID NO: 1439192 - RNA, 19 nt, Homo sapiens
  misc_RNA (1)...(19): siRNA sense strand
ggaggugaagcgaauccaa

SEQ ID NO: 1439193 - RNA, 19 nt, Homo sapiens
  misc_RNA (1)...(19): siRNA sense strand
ugacuuggaagacuaugug

SEQ ID NO: 1439194 - RNA, 19 nt, Homo sapiens
  misc_RNA (1)...(19): siRNA sense strand
gcauuucgagcucuacaag

SEQ ID NO: 1439195 - RNA, 19 nt, Homo sapiens
  misc_RNA (1)...(19): siRNA sense strand
ugaagcgaauccaaagcau

SEQ ID NO: 1439196 - RNA, 19 nt, Homo sapiens
  misc_RNA (1)...(19): siRNA sense strand
caaugucaagguaaucaug

SEQ ID NO: 1439197 - RNA, 19 nt, Homo sapiens
  misc_RNA (1)...(19): siRNA sense strand
ggaccuggaggaccuguac

SEQ ID NO: 1439198 - RNA, 19 nt, Homo sapiens
  misc_RNA (1)...(19): siRNA sense strand
accacaggcuccaacuauu

SEQ ID NO: 1439199 - RNA, 19 nt, Homo sapiens
  misc_RNA (1)...(19): siRNA sense strand
gugaagcgaauccaaagca

SEQ ID NO: 1439200 - RNA, 19 nt, Homo sapiens
  misc_RNA (1)...(19): siRNA sense strand
gaggcuguggaucagaaua

SEQ ID NO: 1439201 - RNA, 19 nt, Homo sapiens
  misc_RNA (1)...(19): siRNA sense strand
cacaggcuccaacuauuau

SEQ ID NO: 1439202 - RNA, 19 nt, Homo sapiens
  misc_RNA (1)...(19): siRNA sense strand
acaagcagaucggcaucga

SEQ ID NO: 1439203 - RNA, 19 nt, Homo sapiens
  misc_RNA (1)...(19): siRNA sense strand
gcaaaggcgguggcacauc

SEQ ID NO: 1439204 - RNA, 19 nt, Homo sapiens
  misc_RNA (1)...(19): siRNA sense strand
gcugugggaagaccauguu

SEQ ID NO: 1439205 - RNA, 19 nt, Homo sapiens
  misc_RNA (1)...(19): siRNA sense strand
gucgugggcucggaguuug

SEQ ID NO: 1439206 - RNA, 19 nt, Homo sapiens
  misc_RNA (1)...(19): siRNA sense strand
gcauacaagacugucauca

SEQ ID NO: 1439207 - RNA, 19 nt, Homo sapiens
  misc_RNA (1)...(19): siRNA sense strand
ggauuugaucagaauguca

SEQ ID NO: 1439208 - RNA, 19 nt, Homo sapiens
  misc_RNA (1)...(19): siRNA sense strand
gaaugucaaugucaaggua

SEQ ID NO: 1439209 - RNA, 19 nt, Homo sapiens
  misc_RNA (1)...(19): siRNA sense strand
ggaagaccauguuggcaaa

SEQ ID NO: 1439210 - RNA, 19 nt, Homo sapiens
  misc_RNA (1)...(19): siRNA sense strand
ccacaggcuccaacuauua

SEQ ID NO: 1439211 - RNA, 19 nt, Homo sapiens
  misc_RNA (1)...(19): siRNA sense strand
caaaggcgguggcacauca

SEQ ID NO: 1439212 - RNA, 19 nt, Homo sapiens
  misc_RNA (1)...(19): siRNA sense strand
gcucggaguuuguacagaa

SEQ ID NO: 1439213 - RNA, 19 nt, Homo sapiens
  misc_RNA (1)...(19): siRNA sense strand
gaaugcaccugccaucauc

SEQ ID NO: 1439214 - RNA, 19 nt, Homo sapiens
  misc_RNA (1)...(19): siRNA sense strand
gagauucgaugcucagaca

SEQ ID NO: 1439215 - RNA, 19 nt, Homo sapiens
  misc_RNA (1)...(19): siRNA sense strand
cacaacagcugcauucauc

SEQ ID NO: 1439216 - RNA, 19 nt, Homo sapiens
  misc_RNA (1)...(19): siRNA sense strand
ggauggauuugaucagaau

SEQ ID NO: 1439217 - RNA, 19 nt, Homo sapiens
  misc_RNA (1)...(19): siRNA sense strand
acaagacugucaucaagaa

SEQ ID NO: 1439218 - RNA, 19 nt, Homo sapiens
  misc_RNA (1)...(19): siRNA sense strand
ucagauggauggauuugau

SEQ ID NO: 1439219 - RNA, 19 nt, Homo sapiens
  misc_RNA (1)...(19): siRNA sense strand
gaucagaaugucaauguca

SEQ ID NO: 1439220 - RNA, 19 nt, Homo sapiens
  misc_RNA (1)...(19): siRNA sense strand
ucaggagaguggaauguug

SEQ ID NO: 1439221 - RNA, 19 nt, Homo sapiens
  misc_RNA (1)...(19): siRNA sense strand
gcaagaugaaccucucuga

SEQ ID NO: 1439222 - RNA, 19 nt, Homo sapiens
  misc_RNA (1)...(19): siRNA sense strand
auacaagacugucaucaag

SEQ ID NO: 1439223 - RNA, 19 nt, Homo sapiens
  misc_RNA (1)...(19): siRNA sense strand
gaagccagaugugauguac

SEQ ID NO: 1439224 - RNA, 19 nt, Homo sapiens
  misc_RNA (1)...(19): siRNA sense strand
gaggugaagcgaauccaaa

SEQ ID NO: 1439225 - RNA, 19 nt, Homo sapiens
  misc_RNA (1)...(19): siRNA sense strand
ggccaaggacuucgagaaa

SEQ ID NO: 1439226 - RNA, 19 nt, Homo sapiens
  misc_RNA (1)...(19): siRNA sense strand
gaugagaucccagcacugu

SEQ ID NO: 1439227 - RNA, 19 nt, Homo sapiens
  misc_RNA (1)...(19): siRNA sense strand
ugaggagguugacuuggaa

SEQ ID NO: 1439228 - RNA, 19 nt, Homo sapiens
  misc_RNA (1)...(19): siRNA sense strand
cgagaaagcauacaagacu

SEQ ID NO: 1439229 - RNA, 19 nt, Homo sapiens
  misc_RNA (1)...(19): siRNA sense strand
gaccagaagccagauguga

SEQ ID NO: 1439230 - RNA, 19 nt, Homo sapiens
  misc_RNA (1)...(19): siRNA sense strand
acagggagguucagaggau

SEQ ID NO: 1439231 - RNA, 19 nt, Homo sapiens
  misc_RNA (1)...(19): siRNA sense strand
ucaugaugcucaccucaga

SEQ ID NO: 1439232 - RNA, 19 nt, Homo sapiens
  misc_RNA (1)...(19): siRNA sense strand
ucacacaacagcugcauuc

SEQ ID NO: 1439233 - RNA, 19 nt, Homo sapiens
  misc_RNA (1)...(19): siRNA sense strand
aauguuggcuguccgugaa

SEQ ID NO: 1439234 - RNA, 19 nt, Homo sapiens
  misc_RNA (1)...(19): siRNA sense strand
gccgacagcagcaucauga

SEQ ID NO: 1439235 - RNA, 19 nt, Homo sapiens
  misc_RNA (1)...(19): siRNA sense strand
ccaaggacuucgagaaagc

SEQ ID NO: 1439236 - RNA, 19 nt, Homo sapiens
  misc_RNA (1)...(19): siRNA sense strand
cugaggagguugacuugga

SEQ ID NO: 1439237 - RNA, 19 nt, Homo sapiens
  misc_RNA (1)...(19): siRNA sense strand
ucacgcauuucgagcucua

SEQ ID NO: 1439238 - RNA, 19 nt, Homo sapiens
  misc_RNA (1)...(19): siRNA sense strand
uggagaaggcucaggauga

SEQ ID NO: 1439239 - RNA, 19 nt, Homo sapiens
  misc_RNA (1)...(19): siRNA sense strand
gcuggucaucggacaauuu

SEQ ID NO: 1439240 - RNA, 19 nt, Homo sapiens
  misc_RNA (1)...(19): siRNA sense strand
aaucauggccacaaacaga

SEQ ID NO: 1439241 - RNA, 19 nt, Homo sapiens
  misc_RNA (1)...(19): siRNA sense strand
cggaguuuguacagaagua

SEQ ID NO: 1439242 - RNA, 19 nt, Homo sapiens
  misc_RNA (1)...(19): siRNA sense strand
ccagaagccagaugugaug

SEQ ID NO: 1439243 - RNA, 19 nt, Homo sapiens
  misc_RNA (1)...(19): siRNA sense strand
ugcuggagcugcugaauca

SEQ ID NO: 1439244 - RNA, 19 nt, Homo sapiens
  misc_RNA (1)...(19): siRNA sense strand
gagcaugaguuuuacaagu

SEQ ID NO: 1439245 - RNA, 19 nt, Homo sapiens
  misc_RNA (1)...(19): siRNA sense strand
agacugucaucaagaagga

SEQ ID NO: 1439246 - RNA, 19 nt, Homo sapiens
  misc_RNA (1)...(19): siRNA sense strand
cauacaagacugucaucaa

SEQ ID NO: 1439247 - RNA, 19 nt, Homo sapiens
  misc_RNA (1)...(19): siRNA sense strand
gccaaggacuucgagaaag

SEQ ID NO: 1439248 - RNA, 19 nt, Homo sapiens
  misc_RNA (1)...(19): siRNA sense strand
gguggcacaucacacaaca

SEQ ID NO: 1439249 - RNA, 19 nt, Homo sapiens
  misc_RNA (1)...(19): siRNA sense strand
cgccagaagagauugauuu

SEQ ID NO: 1439250 - RNA, 19 nt, Homo sapiens
  misc_RNA (1)...(19): siRNA sense strand
guaaucauggccacaaaca

SEQ ID NO: 1439251 - RNA, 19 nt, Homo sapiens
  misc_RNA (1)...(19): siRNA sense strand
ggucgugggcucggaguuu

SEQ ID NO: 1439252 - RNA, 19 nt, Homo sapiens
  misc_RNA (1)...(19): siRNA sense strand
ggacuucgagaaagcauac

SEQ ID NO: 1439253 - RNA, 19 nt, Homo sapiens
  misc_RNA (1)...(19): siRNA sense strand
gcaccugccaucaucuuca

SEQ ID NO: 1439254 - RNA, 19 nt, Homo sapiens
  misc_RNA (1)...(19): siRNA sense strand
gagaaugcaccugccauca

SEQ ID NO: 1439255 - RNA, 19 nt, Homo sapiens
  misc_RNA (1)...(19): siRNA sense strand
aggaggaggugaagcgaau

SEQ ID NO: 1439256 - RNA, 19 nt, Homo sapiens
  misc_RNA (1)...(19): siRNA sense strand
gagguugacuuggaagacu

SEQ ID NO: 1439257 - RNA, 19 nt, Homo sapiens
  misc_RNA (1)...(19): siRNA sense strand
cacuaucacuagcaagaug

SEQ ID NO: 1439258 - RNA, 19 nt, Homo sapiens
  misc_RNA (1)...(19): siRNA sense strand
cgagcaggagcaugaguuu

SEQ ID NO: 1439259 - RNA, 19 nt, Homo sapiens
  misc_RNA (1)...(19): siRNA sense strand
uaccacaggcuccaacuau

SEQ ID NO: 1439260 - RNA, 19 nt, Homo sapiens
  misc_RNA (1)...(19): siRNA sense strand
uggaggcuguggaucagaa

SEQ ID NO: 1439261 - RNA, 19 nt, Homo sapiens
  misc_RNA (1)...(19): siRNA sense strand
uggauggauuugaucagaa

SEQ ID NO: 1439262 - RNA, 19 nt, Homo sapiens
  misc_RNA (1)...(19): siRNA sense strand
ggucaucggacaauuucug

SEQ ID NO: 1439263 - RNA, 19 nt, Homo sapiens
  misc_RNA (1)...(19): siRNA sense strand
gcaugaguuuuacaaguga

SEQ ID NO: 1439264 - RNA, 19 nt, Homo sapiens
  misc_RNA (1)...(19): siRNA sense strand
gaagccgacagcagcauca

SEQ ID NO: 1439265 - RNA, 19 nt, Homo sapiens
  misc_RNA (1)...(19): siRNA sense strand
ggaggugaagcgaauccaa

SEQ ID NO: 1439266 - RNA, 19 nt, Homo sapiens
  misc_RNA (1)...(19): siRNA sense strand
ugacuuggaagacuaugug

SEQ ID NO: 1439267 - RNA, 19 nt, Homo sapiens
  misc_RNA (1)...(19): siRNA sense strand
gcauuucgagcucuacaag

SEQ ID NO: 1439268 - RNA, 19 nt, Homo sapiens
  misc_RNA (1)...(19): siRNA sense strand
ugaagcgaauccaaagcau

SEQ ID NO: 1439269 - RNA, 19 nt, Homo sapiens
  misc_RNA (1)...(19): siRNA sense strand
caaugucaagguaaucaug

SEQ ID NO: 1439270 - RNA, 19 nt, Homo sapiens
  misc_RNA (1)...(19): siRNA sense strand
ggaccuggaggaccuguac

SEQ ID NO: 1439271 - RNA, 19 nt, Homo sapiens
  misc_RNA (1)...(19): siRNA sense strand
accacaggcuccaacuauu

SEQ ID NO: 1439272 - RNA, 19 nt, Homo sapiens
  misc_RNA (1)...(19): siRNA sense strand
gugaagcgaauccaaagca

SEQ ID NO: 1439273 - RNA, 19 nt, Homo sapiens
  misc_RNA (1)...(19): siRNA sense strand
gaggcuguggaucagaaua

SEQ ID NO: 1439274 - RNA, 19 nt, Homo sapiens
  misc_RNA (1)...(19): siRNA sense strand
cacaggcuccaacuauuau

SEQ ID NO: 1439275 - RNA, 19 nt, Homo sapiens
  misc_RNA (1)...(19): siRNA sense strand
acaagcagaucggcaucga

SEQ ID NO: 1439276 - RNA, 19 nt, Homo sapiens
  misc_RNA (1)...(19): siRNA sense strand
gcaaaggcgguggcacauc

SEQ ID NO: 1439277 - RNA, 19 nt, Homo sapiens
  misc_RNA (1)...(19): siRNA sense strand
gcugugggaagaccauguu

SEQ ID NO: 1439278 - RNA, 19 nt, Homo sapiens
  misc_RNA (1)...(19): siRNA sense strand
gucgugggcucggaguuug

SEQ ID NO: 1439279 - RNA, 19 nt, Homo sapiens
  misc_RNA (1)...(19): siRNA sense strand
gcauacaagacugucauca

SEQ ID NO: 1439280 - RNA, 19 nt, Homo sapiens
  misc_RNA (1)...(19): siRNA sense strand
ggauuugaucagaauguca

SEQ ID NO: 1439281 - RNA, 19 nt, Homo sapiens
  misc_RNA (1)...(19): siRNA sense strand
gaaaggacuuguucugauu

SEQ ID NO: 1439282 - RNA, 19 nt, Homo sapiens
  misc_RNA (1)...(19): siRNA sense strand
caacgucaaugauuucuuu

SEQ ID NO: 1439283 - RNA, 19 nt, Homo sapiens
  misc_RNA (1)...(19): siRNA sense strand
gaaauagcaucucaaagga

SEQ ID NO: 1439284 - RNA, 19 nt, Homo sapiens
  misc_RNA (1)...(19): siRNA sense strand
ucaaagaucgggauaaaua

SEQ ID NO: 1439285 - RNA, 19 nt, Homo sapiens
  misc_RNA (1)...(19): siRNA sense strand
gaaggucccugcacuccua

SEQ ID NO: 1439286 - RNA, 19 nt, Homo sapiens
  misc_RNA (1)...(19): siRNA sense strand
gaacauggaugcuuaucuc

SEQ ID NO: 1439287 - RNA, 19 nt, Homo sapiens
  misc_RNA (1)...(19): siRNA sense strand
ggaaaggacuuguucugau

SEQ ID NO: 1439288 - RNA, 19 nt, Homo sapiens
  misc_RNA (1)...(19): siRNA sense strand
gaaaugaggaacuuaauca

SEQ ID NO: 1439289 - RNA, 19 nt, Homo sapiens
  misc_RNA (1)...(19): siRNA sense strand
ggaaauagcaucucaaagg

SEQ ID NO: 1439290 - RNA, 19 nt, Homo sapiens
  misc_RNA (1)...(19): siRNA sense strand
gcagaucucagugaauuua

SEQ ID NO: 1439291 - RNA, 19 nt, Homo sapiens
  misc_RNA (1)...(19): siRNA sense strand
gagcauauauuccuagaac

SEQ ID NO: 1439292 - RNA, 19 nt, Homo sapiens
  misc_RNA (1)...(19): siRNA sense strand
gaaccaauaaugcuaagaa

SEQ ID NO: 1439293 - RNA, 19 nt, Homo sapiens
  misc_RNA (1)...(19): siRNA sense strand
guucaaagaucgggauaaa

SEQ ID NO: 1439294 - RNA, 19 nt, Homo sapiens
  misc_RNA (1)...(19): siRNA sense strand
gcgccaacgucaaugauuu

SEQ ID NO: 1439295 - RNA, 19 nt, Homo sapiens
  misc_RNA (1)...(19): siRNA sense strand
gcuaaacacagcagagaua

SEQ ID NO: 1439296 - RNA, 19 nt, Homo sapiens
  misc_RNA (1)...(19): siRNA sense strand
ggaaaauggugaaaacuug

SEQ ID NO: 1439297 - RNA, 19 nt, Homo sapiens
  misc_RNA (1)...(19): siRNA sense strand
ccacggacccugacauuga

SEQ ID NO: 1439298 - RNA, 19 nt, Homo sapiens
  misc_RNA (1)...(19): siRNA sense strand
gaagacagccaagacgaaa

SEQ ID NO: 1439299 - RNA, 19 nt, Homo sapiens
  misc_RNA (1)...(19): siRNA sense strand
cgucauggcuauuguaaag

SEQ ID NO: 1439300 - RNA, 19 nt, Homo sapiens
  misc_RNA (1)...(19): siRNA sense strand
uaaaggaaacccuaggaaa

SEQ ID NO: 1439301 - RNA, 19 nt, Homo sapiens
  misc_RNA (1)...(19): siRNA sense strand
gaagucauguucuugucau

SEQ ID NO: 1439302 - RNA, 19 nt, Homo sapiens
  misc_RNA (1)...(19): siRNA sense strand
uuacaggauugaagaaaga

SEQ ID NO: 1439303 - RNA, 19 nt, Homo sapiens
  misc_RNA (1)...(19): siRNA sense strand
ccuagaaccuugaaugaag

SEQ ID NO: 1439304 - RNA, 19 nt, Homo sapiens
  misc_RNA (1)...(19): siRNA sense strand
cgucaaugauuucuuuaug

SEQ ID NO: 1439305 - RNA, 19 nt, Homo sapiens
  misc_RNA (1)...(19): siRNA sense strand
ugucacagauccauccauu

SEQ ID NO: 1439306 - RNA, 19 nt, Homo sapiens
  misc_RNA (1)...(19): siRNA sense strand
ggaggcguguauaucauug

SEQ ID NO: 1439307 - RNA, 19 nt, Homo sapiens
  misc_RNA (1)...(19): siRNA sense strand
ugcgggagcucuuugaauu

SEQ ID NO: 1439308 - RNA, 19 nt, Homo sapiens
  misc_RNA (1)...(19): siRNA sense strand
augagaacauggaugcuua

SEQ ID NO: 1439309 - RNA, 19 nt, Homo sapiens
  misc_RNA (1)...(19): siRNA sense strand
ggccaugaaugcccaacaa

SEQ ID NO: 1439310 - RNA, 19 nt, Homo sapiens
  misc_RNA (1)...(19): siRNA sense strand
cauggaugcuuaucucuca

SEQ ID NO: 1439311 - RNA, 19 nt, Homo sapiens
  misc_RNA (1)...(19): siRNA sense strand
ccaauaaugcuaagaaguc

SEQ ID NO: 1439312 - RNA, 19 nt, Homo sapiens
  misc_RNA (1)...(19): siRNA sense strand
caauaaugcuaagaaguca

SEQ ID NO: 1439313 - RNA, 19 nt, Homo sapiens
  misc_RNA (1)...(19): siRNA sense strand
guaaaggaaacccuaggaa

SEQ ID NO: 1439314 - RNA, 19 nt, Homo sapiens
  misc_RNA (1)...(19): siRNA sense strand
ccaaggcucgggaguugua

SEQ ID NO: 1439315 - RNA, 19 nt, Homo sapiens
  misc_RNA (1)...(19): siRNA sense strand
gagauaccauguccagaac

SEQ ID NO: 1439316 - RNA, 19 nt, Homo sapiens
  misc_RNA (1)...(19): siRNA sense strand
caaagaucgggauaaauau

SEQ ID NO: 1439317 - RNA, 19 nt, Homo sapiens
  misc_RNA (1)...(19): siRNA sense strand
ccagaaccaauaaugcuaa

SEQ ID NO: 1439318 - RNA, 19 nt, Homo sapiens
  misc_RNA (1)...(19): siRNA sense strand
ugaaugcccaacaagauaa

SEQ ID NO: 1439319 - RNA, 19 nt, Homo sapiens
  misc_RNA (1)...(19): siRNA sense strand
ggaacuuaaucaggcuaaa

SEQ ID NO: 1439320 - RNA, 19 nt, Homo sapiens
  misc_RNA (1)...(19): siRNA sense strand
uagccaagaucauguggau

SEQ ID NO: 1439321 - RNA, 19 nt, Homo sapiens
  misc_RNA (1)...(19): siRNA sense strand
ucacagauccauccauuac

SEQ ID NO: 1439322 - RNA, 19 nt, Homo sapiens
  misc_RNA (1)...(19): siRNA sense strand
cgggagcucuuugaauuug

SEQ ID NO: 1439323 - RNA, 19 nt, Homo sapiens
  misc_RNA (1)...(19): siRNA sense strand
augcagaucucagugaauu

SEQ ID NO: 1439324 - RNA, 19 nt, Homo sapiens
  misc_RNA (1)...(19): siRNA sense strand
ccaugcagaucucagugaa

SEQ ID NO: 1439325 - RNA, 19 nt, Homo sapiens
  misc_RNA (1)...(19): siRNA sense strand
agagauaccauguccagaa

SEQ ID NO: 1439326 - RNA, 19 nt, Homo sapiens
  misc_RNA (1)...(19): siRNA sense strand
gcgagcauauauuccuaga

SEQ ID NO: 1439327 - RNA, 19 nt, Homo sapiens
  misc_RNA (1)...(19): siRNA sense strand
ccauggaaauagcaucuca

SEQ ID NO: 1439328 - RNA, 19 nt, Homo sapiens
  misc_RNA (1)...(19): siRNA sense strand
caaaggccauggaaauagc

SEQ ID NO: 1439329 - RNA, 19 nt, Homo sapiens
  misc_RNA (1)...(19): siRNA sense strand
gguggaggcguguauauca

SEQ ID NO: 1439330 - RNA, 19 nt, Homo sapiens
  misc_RNA (1)...(19): siRNA sense strand
gcaggucauucaguacaug

SEQ ID NO: 1439331 - RNA, 19 nt, Homo sapiens
  misc_RNA (1)...(19): siRNA sense strand
gagaagaauguaucaggau

SEQ ID NO: 1439332 - RNA, 19 nt, Homo sapiens
  misc_RNA (1)...(19): siRNA sense strand
aaccuugaaugaagugaaa

SEQ ID NO: 1439333 - RNA, 19 nt, Homo sapiens
  misc_RNA (1)...(19): siRNA sense strand
auauguaaguggagaauuc

SEQ ID NO: 1439334 - RNA, 19 nt, Homo sapiens
  misc_RNA (1)...(19): siRNA sense strand
ccacaugccuuggaguucu

SEQ ID NO: 1439335 - RNA, 19 nt, Homo sapiens
  misc_RNA (1)...(19): siRNA sense strand
ucucaaaggccauggaaau

SEQ ID NO: 1439336 - RNA, 19 nt, Homo sapiens
  misc_RNA (1)...(19): siRNA sense strand
ucaaggaagcccagagaga

SEQ ID NO: 1439337 - RNA, 19 nt, Homo sapiens
  misc_RNA (1)...(19): siRNA sense strand
gaggaaaggacuuguucug

SEQ ID NO: 1439338 - RNA, 19 nt, Homo sapiens
  misc_RNA (1)...(19): siRNA sense strand
ucauggcuauuguaaagga

SEQ ID NO: 1439339 - RNA, 19 nt, Homo sapiens
  misc_RNA (1)...(19): siRNA sense strand
gaaccuugaaugaagugaa

SEQ ID NO: 1439340 - RNA, 19 nt, Homo sapiens
  misc_RNA (1)...(19): siRNA sense strand
gaucgggauaaauauguaa

SEQ ID NO: 1439341 - RNA, 19 nt, Homo sapiens
  misc_RNA (1)...(19): siRNA sense strand
ggucaaggaagcccagaga

SEQ ID NO: 1439342 - RNA, 19 nt, Homo sapiens
  misc_RNA (1)...(19): siRNA sense strand
gaaagauuugucaggaguu

SEQ ID NO: 1439343 - RNA, 19 nt, Homo sapiens
  misc_RNA (1)...(19): siRNA sense strand
caggauugaagaaagauuu

SEQ ID NO: 1439344 - RNA, 19 nt, Homo sapiens
  misc_RNA (1)...(19): siRNA sense strand
guuacaggauugaagaaag

SEQ ID NO: 1439345 - RNA, 19 nt, Homo sapiens
  misc_RNA (1)...(19): siRNA sense strand
gauaccauguccagaacca

SEQ ID NO: 1439346 - RNA, 19 nt, Homo sapiens
  misc_RNA (1)...(19): siRNA sense strand
gcgggagcucuuugaauuu

SEQ ID NO: 1439347 - RNA, 19 nt, Homo sapiens
  misc_RNA (1)...(19): siRNA sense strand
guauaucauugacgugucu

SEQ ID NO: 1439348 - RNA, 19 nt, Homo sapiens
  misc_RNA (1)...(19): siRNA sense strand
gauauuggaagcucugagu

SEQ ID NO: 1439349 - RNA, 19 nt, Homo sapiens
  misc_RNA (1)...(19): siRNA sense strand
ucaaaggaccaaggaagaa

SEQ ID NO: 1439350 - RNA, 19 nt, Homo sapiens
  misc_RNA (1)...(19): siRNA sense strand
guaucaggaugccagacuu

SEQ ID NO: 1439351 - RNA, 19 nt, Homo sapiens
  misc_RNA (1)...(19): siRNA sense strand
caugaaugcccaacaagau

SEQ ID NO: 1439352 - RNA, 19 nt, Homo sapiens
  misc_RNA (1)...(19): siRNA sense strand
gaaaggauugcgccaacgu

SEQ ID NO: 1439353 - RNA, 19 nt, Homo sapiens
  misc_RNA (1)...(19): siRNA sense strand
caaaauuccuaaacaugug

SEQ ID NO: 1439354 - RNA, 19 nt, Homo sapiens
  misc_RNA (1)...(19): siRNA sense strand
aagcgagcauauauuccua

SEQ ID NO: 1439355 - RNA, 19 nt, Homo sapiens
  misc_RNA (1)...(19): siRNA sense strand
agaucgggauaaauaugua

SEQ ID NO: 1439356 - RNA, 19 nt, Homo sapiens
  misc_RNA (1)...(19): siRNA sense strand
ggagcucuuugaauuuguc

SEQ ID NO: 1439357 - RNA, 19 nt, Homo sapiens
  misc_RNA (1)...(19): siRNA sense strand
gagcacgaccacccacaug

SEQ ID NO: 1439358 - RNA, 19 nt, Homo sapiens
  misc_RNA (1)...(19): siRNA sense strand
gaacuuaaucaggcuaaac

SEQ ID NO: 1439359 - RNA, 19 nt, Homo sapiens
  misc_RNA (1)...(19): siRNA sense strand
cuagaaccuugaaugaagu

SEQ ID NO: 1439360 - RNA, 19 nt, Homo sapiens
  misc_RNA (1)...(19): siRNA sense strand
uggaugaagagguguuuaa

SEQ ID NO: 1439361 - RNA, 19 nt, Homo sapiens
  misc_RNA (1)...(19): siRNA sense strand
ucaaaggccauggaaauag

SEQ ID NO: 1439362 - RNA, 19 nt, Homo sapiens
  misc_RNA (1)...(19): siRNA sense strand
aaagaucgggauaaauaug

SEQ ID NO: 1439363 - RNA, 19 nt, Homo sapiens
  misc_RNA (1)...(19): siRNA sense strand
aaagauuugucaggaguuc

SEQ ID NO: 1439364 - RNA, 19 nt, Homo sapiens
  misc_RNA (1)...(19): siRNA sense strand
ggugaaaacuugggcagaa

SEQ ID NO: 1439365 - RNA, 19 nt, Homo sapiens
  misc_RNA (1)...(19): siRNA sense strand
gaucucagugaauuuaaca

SEQ ID NO: 1439366 - RNA, 19 nt, Homo sapiens
  misc_RNA (1)...(19): siRNA sense strand
agaacggucuagccaagau

SEQ ID NO: 1439367 - RNA, 19 nt, Homo sapiens
  misc_RNA (1)...(19): siRNA sense strand
cgggauaaauauguaagug

SEQ ID NO: 1439368 - RNA, 19 nt, Homo sapiens
  misc_RNA (1)...(19): siRNA sense strand
ccaugaaugcccaacaaga

SEQ ID NO: 1439369 - RNA, 19 nt, Homo sapiens
  misc_RNA (1)...(19): siRNA sense strand
guucuugucaugaguuuca

SEQ ID NO: 1439370 - RNA, 19 nt, Homo sapiens
  misc_RNA (1)...(19): siRNA sense strand
ugucaggaguucagaaggu

SEQ ID NO: 1439371 - RNA, 19 nt, Homo sapiens
  misc_RNA (1)...(19): siRNA sense strand
ugaguuucaucgguaaaga

SEQ ID NO: 1439372 - RNA, 19 nt, Homo sapiens
  misc_RNA (1)...(19): siRNA sense strand
ggaagcccagagagagaaa

SEQ ID NO: 1439373 - RNA, 19 nt, Homo sapiens
  misc_RNA (1)...(19): siRNA sense strand
ggacccugacauugauaaa

SEQ ID NO: 1439374 - RNA, 19 nt, Homo sapiens
  misc_RNA (1)...(19): siRNA sense strand
aaaggaaacccuaggaaaa

SEQ ID NO: 1439375 - RNA, 19 nt, Homo sapiens
  misc_RNA (1)...(19): siRNA sense strand
cucaaaggccauggaaaua

SEQ ID NO: 1439376 - RNA, 19 nt, Homo sapiens
  misc_RNA (1)...(19): siRNA sense strand
augaaugcccaacaagaua

SEQ ID NO: 1439377 - RNA, 19 nt, Homo sapiens
  misc_RNA (1)...(19): siRNA sense strand
auccauccauuacacauga

SEQ ID NO: 1439378 - RNA, 19 nt, Homo sapiens
  misc_RNA (1)...(19): siRNA sense strand
gcccaacaagauaauauuc

SEQ ID NO: 1439379 - RNA, 19 nt, Homo sapiens
  misc_RNA (1)...(19): siRNA sense strand
cacggacccugacauugau

SEQ ID NO: 1439380 - RNA, 19 nt, Homo sapiens
  misc_RNA (1)...(19): siRNA sense strand
agaagacagccaagacgaa

SEQ ID NO: 1439381 - RNA, 19 nt, Homo sapiens
  misc_RNA (1)...(19): siRNA sense strand
gaaaggacuuguucugauu

SEQ ID NO: 1439382 - RNA, 19 nt, Homo sapiens
  misc_RNA (1)...(19): siRNA sense strand
caacgucaaugauuucuuu

SEQ ID NO: 1439383 - RNA, 19 nt, Homo sapiens
  misc_RNA (1)...(19): siRNA sense strand
gaaauagcaucucaaagga

SEQ ID NO: 1439384 - RNA, 19 nt, Homo sapiens
  misc_RNA (1)...(19): siRNA sense strand
gaaggucccugcacuccua

SEQ ID NO: 1439385 - RNA, 19 nt, Homo sapiens
  misc_RNA (1)...(19): siRNA sense strand
gaacauggaugcuuaucuc

SEQ ID NO: 1439386 - RNA, 19 nt, Homo sapiens
  misc_RNA (1)...(19): siRNA sense strand
ggaaaggacuuguucugau

SEQ ID NO: 1439387 - RNA, 19 nt, Homo sapiens
  misc_RNA (1)...(19): siRNA sense strand
gaaaugaggaacuuaauca

SEQ ID NO: 1439388 - RNA, 19 nt, Homo sapiens
  misc_RNA (1)...(19): siRNA sense strand
ggaaauagcaucucaaagg

SEQ ID NO: 1439389 - RNA, 19 nt, Homo sapiens
  misc_RNA (1)...(19): siRNA sense strand
gcagaucucagugaauuua

SEQ ID NO: 1439390 - RNA, 19 nt, Homo sapiens
  misc_RNA (1)...(19): siRNA sense strand
gagcauauauuccuagaac

SEQ ID NO: 1439391 - RNA, 19 nt, Homo sapiens
  misc_RNA (1)...(19): siRNA sense strand
gaaccaauaaugcuaagaa

SEQ ID NO: 1439392 - RNA, 19 nt, Homo sapiens
  misc_RNA (1)...(19): siRNA sense strand
gcgccaacgucaaugauuu

SEQ ID NO: 1439393 - RNA, 19 nt, Homo sapiens
  misc_RNA (1)...(19): siRNA sense strand
gcuaaacacagcagagaua

SEQ ID NO: 1439394 - RNA, 19 nt, Homo sapiens
  misc_RNA (1)...(19): siRNA sense strand
ccacggacccugacauuga

SEQ ID NO: 1439395 - RNA, 19 nt, Homo sapiens
  misc_RNA (1)...(19): siRNA sense strand
gaagacagccaagacgaaa

SEQ ID NO: 1439396 - RNA, 19 nt, Homo sapiens
  misc_RNA (1)...(19): siRNA sense strand
gaagucauguucuugucau

SEQ ID NO: 1439397 - RNA, 19 nt, Homo sapiens
  misc_RNA (1)...(19): siRNA sense strand
uuacaggauugaagaaaga

SEQ ID NO: 1439398 - RNA, 19 nt, Homo sapiens
  misc_RNA (1)...(19): siRNA sense strand
ccuagaaccuugaaugaag

SEQ ID NO: 1439399 - RNA, 19 nt, Homo sapiens
  misc_RNA (1)...(19): siRNA sense strand
cgucaaugauuucuuuaug

SEQ ID NO: 1439400 - RNA, 19 nt, Homo sapiens
  misc_RNA (1)...(19): siRNA sense strand
ugucacagauccauccauu

SEQ ID NO: 1439401 - RNA, 19 nt, Homo sapiens
  misc_RNA (1)...(19): siRNA sense strand
ggaggcguguauaucauug

SEQ ID NO: 1439402 - RNA, 19 nt, Homo sapiens
  misc_RNA (1)...(19): siRNA sense strand
ugcgggagcucuuugaauu

SEQ ID NO: 1439403 - RNA, 19 nt, Homo sapiens
  misc_RNA (1)...(19): siRNA sense strand
augagaacauggaugcuua

SEQ ID NO: 1439404 - RNA, 19 nt, Homo sapiens
  misc_RNA (1)...(19): siRNA sense strand
ggccaugaaugcccaacaa

SEQ ID NO: 1439405 - RNA, 19 nt, Homo sapiens
  misc_RNA (1)...(19): siRNA sense strand
cauggaugcuuaucucuca

SEQ ID NO: 1439406 - RNA, 19 nt, Homo sapiens
  misc_RNA (1)...(19): siRNA sense strand
ccaauaaugcuaagaaguc

SEQ ID NO: 1439407 - RNA, 19 nt, Homo sapiens
  misc_RNA (1)...(19): siRNA sense strand
caauaaugcuaagaaguca

SEQ ID NO: 1439408 - RNA, 19 nt, Homo sapiens
  misc_RNA (1)...(19): siRNA sense strand
ccaaggcucgggaguugua

SEQ ID NO: 1439409 - RNA, 19 nt, Homo sapiens
  misc_RNA (1)...(19): siRNA sense strand
gagauaccauguccagaac

SEQ ID NO: 1439410 - RNA, 19 nt, Homo sapiens
  misc_RNA (1)...(19): siRNA sense strand
ccagaaccaauaaugcuaa

SEQ ID NO: 1439411 - RNA, 19 nt, Homo sapiens
  misc_RNA (1)...(19): siRNA sense strand
ugaaugcccaacaagauaa

SEQ ID NO: 1439412 - RNA, 19 nt, Homo sapiens
  misc_RNA (1)...(19): siRNA sense strand
ccaugcagaucucagugaa

SEQ ID NO: 1439413 - RNA, 19 nt, Homo sapiens
  misc_RNA (1)...(19): siRNA sense strand
uagccaagaucauguggau

SEQ ID NO: 1439414 - RNA, 19 nt, Homo sapiens
  misc_RNA (1)...(19): siRNA sense strand
ggaacuuaaucaggcuaaa

SEQ ID NO: 1439415 - RNA, 19 nt, Homo sapiens
  misc_RNA (1)...(19): siRNA sense strand
ucacagauccauccauuac

SEQ ID NO: 1439416 - RNA, 19 nt, Homo sapiens
  misc_RNA (1)...(19): siRNA sense strand
cgggagcucuuugaauuug

SEQ ID NO: 1439417 - RNA, 19 nt, Homo sapiens
  misc_RNA (1)...(19): siRNA sense strand
augcagaucucagugaauu

SEQ ID NO: 1439418 - RNA, 19 nt, Homo sapiens
  misc_RNA (1)...(19): siRNA sense strand
gcaggucauucaguacaug

SEQ ID NO: 1439419 - RNA, 19 nt, Homo sapiens
  misc_RNA (1)...(19): siRNA sense strand
gcgagcauauauuccuaga

SEQ ID NO: 1439420 - RNA, 19 nt, Homo sapiens
  misc_RNA (1)...(19): siRNA sense strand
ccauggaaauagcaucuca

SEQ ID NO: 1439421 - RNA, 19 nt, Homo sapiens
  misc_RNA (1)...(19): siRNA sense strand
caaaggccauggaaauagc

SEQ ID NO: 1439422 - RNA, 19 nt, Homo sapiens
  misc_RNA (1)...(19): siRNA sense strand
agagauaccauguccagaa

SEQ ID NO: 1439423 - RNA, 19 nt, Homo sapiens
  misc_RNA (1)...(19): siRNA sense strand
gguggaggcguguauauca

SEQ ID NO: 1439424 - RNA, 19 nt, Homo sapiens
  misc_RNA (1)...(19): siRNA sense strand
gagaagaauguaucaggau

SEQ ID NO: 1439425 - RNA, 19 nt, Homo sapiens
  misc_RNA (1)...(19): siRNA sense strand
aaccuugaaugaagugaaa

SEQ ID NO: 1439426 - RNA, 19 nt, Homo sapiens
  misc_RNA (1)...(19): siRNA sense strand
ccacaugccuuggaguucu

SEQ ID NO: 1439427 - RNA, 19 nt, Homo sapiens
  misc_RNA (1)...(19): siRNA sense strand
ucucaaaggccauggaaau

SEQ ID NO: 1439428 - RNA, 19 nt, Homo sapiens
  misc_RNA (1)...(19): siRNA sense strand
ucaaggaagcccagagaga

SEQ ID NO: 1439429 - RNA, 19 nt, Homo sapiens
  misc_RNA (1)...(19): siRNA sense strand
gaggaaaggacuuguucug

SEQ ID NO: 1439430 - RNA, 19 nt, Homo sapiens
  misc_RNA (1)...(19): siRNA sense strand
gaaccuugaaugaagugaa

SEQ ID NO: 1439431 - RNA, 19 nt, Homo sapiens
  misc_RNA (1)...(19): siRNA sense strand
guuacaggauugaagaaag

SEQ ID NO: 1439432 - RNA, 19 nt, Homo sapiens
  misc_RNA (1)...(19): siRNA sense strand
ggucaaggaagcccagaga

SEQ ID NO: 1439433 - RNA, 19 nt, Homo sapiens
  misc_RNA (1)...(19): siRNA sense strand
gaaagauuugucaggaguu

SEQ ID NO: 1439434 - RNA, 19 nt, Homo sapiens
  misc_RNA (1)...(19): siRNA sense strand
caggauugaagaaagauuu

SEQ ID NO: 1439435 - RNA, 19 nt, Homo sapiens
  misc_RNA (1)...(19): siRNA sense strand
gcgggagcucuuugaauuu

SEQ ID NO: 1439436 - RNA, 19 nt, Homo sapiens
  misc_RNA (1)...(19): siRNA sense strand
gauaccauguccagaacca

SEQ ID NO: 1439437 - RNA, 19 nt, Homo sapiens
  misc_RNA (1)...(19): siRNA sense strand
guauaucauugacgugucu

SEQ ID NO: 1439438 - RNA, 19 nt, Homo sapiens
  misc_RNA (1)...(19): siRNA sense strand
gauauuggaagcucugagu

SEQ ID NO: 1439439 - RNA, 19 nt, Homo sapiens
  misc_RNA (1)...(19): siRNA sense strand
ucaaaggaccaaggaagaa

SEQ ID NO: 1439440 - RNA, 19 nt, Homo sapiens
  misc_RNA (1)...(19): siRNA sense strand
guaucaggaugccagacuu

SEQ ID NO: 1439441 - RNA, 19 nt, Homo sapiens
  misc_RNA (1)...(19): siRNA sense strand
caugaaugcccaacaagau

SEQ ID NO: 1439442 - RNA, 19 nt, Homo sapiens
  misc_RNA (1)...(19): siRNA sense strand
gaaaggauugcgccaacgu

SEQ ID NO: 1439443 - RNA, 19 nt, Homo sapiens
  misc_RNA (1)...(19): siRNA sense strand
caaaauuccuaaacaugug

SEQ ID NO: 1439444 - RNA, 19 nt, Homo sapiens
  misc_RNA (1)...(19): siRNA sense strand
aagcgagcauauauuccua

SEQ ID NO: 1439445 - RNA, 19 nt, Homo sapiens
  misc_RNA (1)...(19): siRNA sense strand
ggagcucuuugaauuuguc

SEQ ID NO: 1439446 - RNA, 19 nt, Homo sapiens
  misc_RNA (1)...(19): siRNA sense strand
gaacuuaaucaggcuaaac

SEQ ID NO: 1439447 - RNA, 19 nt, Homo sapiens
  misc_RNA (1)...(19): siRNA sense strand
cuagaaccuugaaugaagu

SEQ ID NO: 1439448 - RNA, 19 nt, Homo sapiens
  misc_RNA (1)...(19): siRNA sense strand
uggaugaagagguguuuaa

SEQ ID NO: 1439449 - RNA, 19 nt, Homo sapiens
  misc_RNA (1)...(19): siRNA sense strand
ucaaaggccauggaaauag

SEQ ID NO: 1439450 - RNA, 19 nt, Homo sapiens
  misc_RNA (1)...(19): siRNA sense strand
gagcacgaccacccacaug

SEQ ID NO: 1439451 - RNA, 19 nt, Homo sapiens
  misc_RNA (1)...(19): siRNA sense strand
gaucucagugaauuuaaca

SEQ ID NO: 1439452 - RNA, 19 nt, Homo sapiens
  misc_RNA (1)...(19): siRNA sense strand
ggugaaaacuugggcagaa

SEQ ID NO: 1439453 - RNA, 19 nt, Homo sapiens
  misc_RNA (1)...(19): siRNA sense strand
aaagauuugucaggaguuc

SEQ ID NO: 1439454 - RNA, 19 nt, Homo sapiens
  misc_RNA (1)...(19): siRNA sense strand
agaacggucuagccaagau

SEQ ID NO: 1439455 - RNA, 19 nt, Homo sapiens
  misc_RNA (1)...(19): siRNA sense strand
ccaugaaugcccaacaaga

SEQ ID NO: 1439456 - RNA, 19 nt, Homo sapiens
  misc_RNA (1)...(19): siRNA sense strand
guucuugucaugaguuuca

SEQ ID NO: 1439457 - RNA, 19 nt, Homo sapiens
  misc_RNA (1)...(19): siRNA sense strand
ugucaggaguucagaaggu

SEQ ID NO: 1439458 - RNA, 19 nt, Homo sapiens
  misc_RNA (1)...(19): siRNA sense strand
ugaguuucaucgguaaaga

SEQ ID NO: 1439459 - RNA, 19 nt, Homo sapiens
  misc_RNA (1)...(19): siRNA sense strand
ggaagcccagagagagaaa

SEQ ID NO: 1439460 - RNA, 19 nt, Homo sapiens
  misc_RNA (1)...(19): siRNA sense strand
ggacccugacauugauaaa

SEQ ID NO: 1439461 - RNA, 19 nt, Homo sapiens
  misc_RNA (1)...(19): siRNA sense strand
cucaaaggccauggaaaua

SEQ ID NO: 1439462 - RNA, 19 nt, Homo sapiens
  misc_RNA (1)...(19): siRNA sense strand
augaaugcccaacaagaua

SEQ ID NO: 1439463 - RNA, 19 nt, Homo sapiens
  misc_RNA (1)...(19): siRNA sense strand
auccauccauuacacauga

SEQ ID NO: 1439464 - RNA, 19 nt, Homo sapiens
  misc_RNA (1)...(19): siRNA sense strand
gcccaacaagauaauauuc

SEQ ID NO: 1439465 - RNA, 19 nt, Homo sapiens
  misc_RNA (1)...(19): siRNA sense strand
ucagugaauuuaacaugcu

SEQ ID NO: 1439466 - RNA, 19 nt, Homo sapiens
  misc_RNA (1)...(19): siRNA sense strand
agaagacagccaagacgaa

SEQ ID NO: 1439467 - RNA, 19 nt, Homo sapiens
  misc_RNA (1)...(19): siRNA sense strand
cacggacccugacauugau

SEQ ID NO: 1439468 - RNA, 19 nt, Homo sapiens
  misc_RNA (1)...(19): siRNA sense strand
aaacacagcagagauacca

SEQ ID NO: 1439469 - RNA, 19 nt, Homo sapiens
  misc_RNA (1)...(19): siRNA sense strand
uuuaagcgagcauauauuc

SEQ ID NO: 1439470 - RNA, 19 nt, Homo sapiens
  misc_RNA (1)...(19): siRNA sense strand
gauccauccauuacacaug

SEQ ID NO: 1439471 - RNA, 19 nt, Homo sapiens
  misc_RNA (1)...(19): siRNA sense strand
guggaggcguguauaucau

SEQ ID NO: 1439472 - RNA, 19 nt, Homo sapiens
  misc_RNA (1)...(19): siRNA sense strand
caccacggacccugacauu

SEQ ID NO: 1439473 - RNA, 19 nt, Homo sapiens
  misc_RNA (1)...(19): siRNA sense strand
gaagcucugagugcucuga

SEQ ID NO: 1439474 - RNA, 19 nt, Homo sapiens
  misc_RNA (1)...(19): siRNA sense strand
gaaugcccaacaagauaau

SEQ ID NO: 1439475 - RNA, 19 nt, Homo sapiens
  misc_RNA (1)...(19): siRNA sense strand
ccauguccagaaccaauaa

SEQ ID NO: 1439476 - RNA, 19 nt, Homo sapiens
  misc_RNA (1)...(19): siRNA sense strand
uguuuaagcgagcauauau

SEQ ID NO: 1439477 - RNA, 19 nt, Homo sapiens
  misc_RNA (1)...(19): siRNA sense strand
ggaugcuuaucucucaaag

SEQ ID NO: 1439478 - RNA, 19 nt, Homo sapiens
  misc_RNA (1)...(19): siRNA sense strand
ucuuugaauuugucacaga

SEQ ID NO: 1439479 - RNA, 19 nt, Homo sapiens
  misc_RNA (1)...(19): siRNA sense strand
gcauauauuccuagaaccu

SEQ ID NO: 1439480 - RNA, 19 nt, Homo sapiens
  misc_RNA (1)...(19): siRNA sense strand
gaaaaucaaguggaggaaa

SEQ ID NO: 1439481 - RNA, 19 nt, Homo sapiens
  misc_RNA (1)...(19): siRNA sense strand
gaagaucccuggcaucauc

SEQ ID NO: 1439482 - RNA, 19 nt, Homo sapiens
  misc_RNA (1)...(19): siRNA sense strand
gaacaggguuaccaucaug

SEQ ID NO: 1439483 - RNA, 19 nt, Homo sapiens
  misc_RNA (1)...(19): siRNA sense strand
ggacaacauugacuucaug

SEQ ID NO: 1439484 - RNA, 19 nt, Homo sapiens
  misc_RNA (1)...(19): siRNA sense strand
ccaaggagguagcugauga

SEQ ID NO: 1439485 - RNA, 19 nt, Homo sapiens
  misc_RNA (1)...(19): siRNA sense strand
ggauugagguggagaugga

SEQ ID NO: 1439486 - RNA, 19 nt, Homo sapiens
  misc_RNA (1)...(19): siRNA sense strand
ggaccuggccgacuacuug

SEQ ID NO: 1439487 - RNA, 19 nt, Homo sapiens
  misc_RNA (1)...(19): siRNA sense strand
gcaacacccucaccaacau

SEQ ID NO: 1439488 - RNA, 19 nt, Homo sapiens
  misc_RNA (1)...(19): siRNA sense strand
cgaaagaggcucccugaug

SEQ ID NO: 1439489 - RNA, 19 nt, Homo sapiens
  misc_RNA (1)...(19): siRNA sense strand
uggccaagcugaagaaguu

SEQ ID NO: 1439490 - RNA, 19 nt, Homo sapiens
  misc_RNA (1)...(19): siRNA sense strand
gaagaaccgcuacaucauc

SEQ ID NO: 1439491 - RNA, 19 nt, Homo sapiens
  misc_RNA (1)...(19): siRNA sense strand
ggaacaggguuaccaucau

SEQ ID NO: 1439492 - RNA, 19 nt, Homo sapiens
  misc_RNA (1)...(19): siRNA sense strand
gaacucaagcggcauuaca

SEQ ID NO: 1439493 - RNA, 19 nt, Homo sapiens
  misc_RNA (1)...(19): siRNA sense strand
ccagacacaugcagcucua

SEQ ID NO: 1439494 - RNA, 19 nt, Homo sapiens
  misc_RNA (1)...(19): siRNA sense strand
gcacgggcuucaccuucaa

SEQ ID NO: 1439495 - RNA, 19 nt, Homo sapiens
  misc_RNA (1)...(19): siRNA sense strand
ucaaggaugagcacaauga

SEQ ID NO: 1439496 - RNA, 19 nt, Homo sapiens
  misc_RNA (1)...(19): siRNA sense strand
ggagaugcccagacacaug

SEQ ID NO: 1439497 - RNA, 19 nt, Homo sapiens
  misc_RNA (1)...(19): siRNA sense strand
ggacuucaccaagcagaaa

SEQ ID NO: 1439498 - RNA, 19 nt, Homo sapiens
  misc_RNA (1)...(19): siRNA sense strand
ccaagcaugucaucacucu

SEQ ID NO: 1439499 - RNA, 19 nt, Homo sapiens
  misc_RNA (1)...(19): siRNA sense strand
ugacgaguuugacaagaug

SEQ ID NO: 1439500 - RNA, 19 nt, Homo sapiens
  misc_RNA (1)...(19): siRNA sense strand
aagaaccgcuacaucauca

SEQ ID NO: 1439501 - RNA, 19 nt, Homo sapiens
  misc_RNA (1)...(19): siRNA sense strand
auacagggaugaacucaag

SEQ ID NO: 1439502 - RNA, 19 nt, Homo sapiens
  misc_RNA (1)...(19): siRNA sense strand
ucaaggacuucaccaagca

SEQ ID NO: 1439503 - RNA, 19 nt, Homo sapiens
  misc_RNA (1)...(19): siRNA sense strand
ggaagugcaacacagauca

SEQ ID NO: 1439504 - RNA, 19 nt, Homo sapiens
  misc_RNA (1)...(19): siRNA sense strand
gggcuucaccuucaaauac

SEQ ID NO: 1439505 - RNA, 19 nt, Homo sapiens
  misc_RNA (1)...(19): siRNA sense strand
gaggcucccugauggacuu

SEQ ID NO: 1439506 - RNA, 19 nt, Homo sapiens
  misc_RNA (1)...(19): siRNA sense strand
gaucuggccagcuuugaug

SEQ ID NO: 1439507 - RNA, 19 nt, Homo sapiens
  misc_RNA (1)...(19): siRNA sense strand
ugaaguuuguggagaagug

SEQ ID NO: 1439508 - RNA, 19 nt, Homo sapiens
  misc_RNA (1)...(19): siRNA sense strand
gaaccgcuacaucaucaug

SEQ ID NO: 1439509 - RNA, 19 nt, Homo sapiens
  misc_RNA (1)...(19): siRNA sense strand
uggaggaucuggccagcuu

SEQ ID NO: 1439510 - RNA, 19 nt, Homo sapiens
  misc_RNA (1)...(19): siRNA sense strand
gaagcccucagcaagauga

SEQ ID NO: 1439511 - RNA, 19 nt, Homo sapiens
  misc_RNA (1)...(19): siRNA sense strand
uggcugcccucccaaaugu

SEQ ID NO: 1439512 - RNA, 19 nt, Homo sapiens
  misc_RNA (1)...(19): siRNA sense strand
gggaacaggguuaccauca

SEQ ID NO: 1439513 - RNA, 19 nt, Homo sapiens
  misc_RNA (1)...(19): siRNA sense strand
cgccagcccuuccagcauu

SEQ ID NO: 1439514 - RNA, 19 nt, Homo sapiens
  misc_RNA (1)...(19): siRNA sense strand
gguauacacgucugggaaa

SEQ ID NO: 1439515 - RNA, 19 nt, Homo sapiens
  misc_RNA (1)...(19): siRNA sense strand
cgucaaggaugagcacaau

SEQ ID NO: 1439516 - RNA, 19 nt, Homo sapiens
  misc_RNA (1)...(19): siRNA sense strand
gcggaagcccucagcaaga

SEQ ID NO: 1439517 - RNA, 19 nt, Homo sapiens
  misc_RNA (1)...(19): siRNA sense strand
gacaagaugcgagaagaug

SEQ ID NO: 1439518 - RNA, 19 nt, Homo sapiens
  misc_RNA (1)...(19): siRNA sense strand
cugaagaaccgcuacauca

SEQ ID NO: 1439519 - RNA, 19 nt, Homo sapiens
  misc_RNA (1)...(19): siRNA sense strand
gcaucuacuccaucaagaa

SEQ ID NO: 1439520 - RNA, 19 nt, Homo sapiens
  misc_RNA (1)...(19): siRNA sense strand
gcacgugagcgcacugaca

SEQ ID NO: 1439521 - RNA, 19 nt, Homo sapiens
  misc_RNA (1)...(19): siRNA sense strand
gagcagcagaccaucucua

SEQ ID NO: 1439522 - RNA, 19 nt, Homo sapiens
  misc_RNA (1)...(19): siRNA sense strand
gaugaacucaagcggcauu

SEQ ID NO: 1439523 - RNA, 19 nt, Homo sapiens
  misc_RNA (1)...(19): siRNA sense strand
ggaggacaacauugacuuc

SEQ ID NO: 1439524 - RNA, 19 nt, Homo sapiens
  misc_RNA (1)...(19): siRNA sense strand
gugaagaucccuggcauca

SEQ ID NO: 1439525 - RNA, 19 nt, Homo sapiens
  misc_RNA (1)...(19): siRNA sense strand
augaggaccuggccgacua

SEQ ID NO: 1439526 - RNA, 19 nt, Homo sapiens
  misc_RNA (1)...(19): siRNA sense strand
cggaagcccucagcaagau

SEQ ID NO: 1439527 - RNA, 19 nt, Homo sapiens
  misc_RNA (1)...(19): siRNA sense strand
gccaagcugaagaaguuua

SEQ ID NO: 1439528 - RNA, 19 nt, Homo sapiens
  misc_RNA (1)...(19): siRNA sense strand
ucuacuccaucaagaaguu

SEQ ID NO: 1439529 - RNA, 19 nt, Homo sapiens
  misc_RNA (1)...(19): siRNA sense strand
ggcaucuacuccaucaaga

SEQ ID NO: 1439530 - RNA, 19 nt, Homo sapiens
  misc_RNA (1)...(19): siRNA sense strand
caucaugcccgacaaaugc

SEQ ID NO: 1439531 - RNA, 19 nt, Homo sapiens
  misc_RNA (1)...(19): siRNA sense strand
cagcagaccaucucuaucg

SEQ ID NO: 1439532 - RNA, 19 nt, Homo sapiens
  misc_RNA (1)...(19): siRNA sense strand
ggaagcugccaaggaggua

SEQ ID NO: 1439533 - RNA, 19 nt, Homo sapiens
  misc_RNA (1)...(19): siRNA sense strand
caacacccucaccaacauu

SEQ ID NO: 1439534 - RNA, 19 nt, Homo sapiens
  misc_RNA (1)...(19): siRNA sense strand
agaaguuuauugccuacug

SEQ ID NO: 1439535 - RNA, 19 nt, Homo sapiens
  misc_RNA (1)...(19): siRNA sense strand
ccaagucccagcuucugaa

SEQ ID NO: 1439536 - RNA, 19 nt, Homo sapiens
  misc_RNA (1)...(19): siRNA sense strand
ggcuucaccuucaaauaca

SEQ ID NO: 1439537 - RNA, 19 nt, Homo sapiens
  misc_RNA (1)...(19): siRNA sense strand
ccaggaagugcaacacaga

SEQ ID NO: 1439538 - RNA, 19 nt, Homo sapiens
  misc_RNA (1)...(19): siRNA sense strand
cugcggcucuuccaagugu

SEQ ID NO: 1439539 - RNA, 19 nt, Homo sapiens
  misc_RNA (1)...(19): siRNA sense strand
ggccaagcaugucaucacu

SEQ ID NO: 1439540 - RNA, 19 nt, Homo sapiens
  misc_RNA (1)...(19): siRNA sense strand
gacccuucgucccggaauu

SEQ ID NO: 1439541 - RNA, 19 nt, Homo sapiens
  misc_RNA (1)...(19): siRNA sense strand
gggcaucuacuccaucaag

SEQ ID NO: 1439542 - RNA, 19 nt, Homo sapiens
  misc_RNA (1)...(19): siRNA sense strand
ggacccguacuucaucaug

SEQ ID NO: 1439543 - RNA, 19 nt, Homo sapiens
  misc_RNA (1)...(19): siRNA sense strand
gggaggacaacauugacuu

SEQ ID NO: 1439544 - RNA, 19 nt, Homo sapiens
  misc_RNA (1)...(19): siRNA sense strand
gaggaucuggccagcuuug

SEQ ID NO: 1439545 - RNA, 19 nt, Homo sapiens
  misc_RNA (1)...(19): siRNA sense strand
ugaagaaccgcuacaucau

SEQ ID NO: 1439546 - RNA, 19 nt, Homo sapiens
  misc_RNA (1)...(19): siRNA sense strand
aagcugaagaaguuuauug

SEQ ID NO: 1439547 - RNA, 19 nt, Homo sapiens
  misc_RNA (1)...(19): siRNA sense strand
ucaaauacagggaugaacu

SEQ ID NO: 1439548 - RNA, 19 nt, Homo sapiens
  misc_RNA (1)...(19): siRNA sense strand
caaauacagggaugaacuc

SEQ ID NO: 1439549 - RNA, 19 nt, Homo sapiens
  misc_RNA (1)...(19): siRNA sense strand
cugcagagaaacugaagaa

SEQ ID NO: 1439550 - RNA, 19 nt, Homo sapiens
  misc_RNA (1)...(19): siRNA sense strand
gaucuucaucgucaaggau

SEQ ID NO: 1439551 - RNA, 19 nt, Homo sapiens
  misc_RNA (1)...(19): siRNA sense strand
guauacacgucugggaaag

SEQ ID NO: 1439552 - RNA, 19 nt, Homo sapiens
  misc_RNA (1)...(19): siRNA sense strand
acaagaugcgagaagauga

SEQ ID NO: 1439553 - RNA, 19 nt, Homo sapiens
  misc_RNA (1)...(19): siRNA sense strand
ggagcacgccauccacaag

SEQ ID NO: 1439554 - RNA, 19 nt, Homo sapiens
  misc_RNA (1)...(19): siRNA sense strand
gaggacaacauugacuuca

SEQ ID NO: 1439555 - RNA, 19 nt, Homo sapiens
  misc_RNA (1)...(19): siRNA sense strand
guauugacgaguuugacaa

SEQ ID NO: 1439556 - RNA, 19 nt, Homo sapiens
  misc_RNA (1)...(19): siRNA sense strand
acaaggugcugcagcucau

SEQ ID NO: 1439557 - RNA, 19 nt, Homo sapiens
  misc_RNA (1)...(19): siRNA sense strand
agauugaccuggccaagcu

SEQ ID NO: 1439558 - RNA, 19 nt, Homo sapiens
  misc_RNA (1)...(19): siRNA sense strand
auucgacgauccuggcauu

SEQ ID NO: 1439559 - RNA, 19 nt, Homo sapiens
  misc_RNA (1)...(19): siRNA sense strand
ccaagcugaagaaguuuau

SEQ ID NO: 1439560 - RNA, 19 nt, Homo sapiens
  misc_RNA (1)...(19): siRNA sense strand
gccaagucccagcuucuga

SEQ ID NO: 1439561 - RNA, 19 nt, Homo sapiens
  misc_RNA (1)...(19): siRNA sense strand
gucccggaauuucaucaug

SEQ ID NO: 1439562 - RNA, 19 nt, Homo sapiens
  misc_RNA (1)...(19): siRNA sense strand
uugacgaguuugacaagau

SEQ ID NO: 1439563 - RNA, 19 nt, Homo sapiens
  misc_RNA (1)...(19): siRNA sense strand
caucuacuccaucaagaag

SEQ ID NO: 1439564 - RNA, 19 nt, Homo sapiens
  misc_RNA (1)...(19): siRNA sense strand
gcaugcagcgcaagguucu

SEQ ID NO: 1439565 - RNA, 19 nt, Homo sapiens
  misc_RNA (1)...(19): siRNA sense strand
cgcacgggcuucaccuuca

SEQ ID NO: 1439566 - RNA, 19 nt, Homo sapiens
  misc_RNA (1)...(19): siRNA sense strand
cuucaugcccaccaucuug

SEQ ID NO: 1439567 - RNA, 19 nt, Homo sapiens
  misc_RNA (1)...(19): siRNA sense strand
cgacgauccuggcauuuuc

SEQ ID NO: 1439568 - RNA, 19 nt, Homo sapiens
  misc_RNA (1)...(19): siRNA sense strand
ggaucuggccagcuuugau

SEQ ID NO: 1439569 - RNA, 19 nt, Homo sapiens
  misc_RNA (1)...(19): siRNA sense strand
ugacaagaugcgagaagau

SEQ ID NO: 1439570 - RNA, 19 nt, Homo sapiens
  misc_RNA (1)...(19): siRNA sense strand
gaaaggagaccaugucaaa

SEQ ID NO: 1439571 - RNA, 19 nt, Homo sapiens
  misc_RNA (1)...(19): siRNA sense strand
aggaagagcucugaaauua

SEQ ID NO: 1439572 - RNA, 19 nt, Homo sapiens
  misc_RNA (1)...(19): siRNA sense strand
ggacucauaugcaagauug

SEQ ID NO: 1439573 - RNA, 19 nt, Homo sapiens
  misc_RNA (1)...(19): siRNA sense strand
ggaauggacucauaugcaa

SEQ ID NO: 1439574 - RNA, 19 nt, Homo sapiens
  misc_RNA (1)...(19): siRNA sense strand
gcagaagagugguacuuug

SEQ ID NO: 1439575 - RNA, 19 nt, Homo sapiens
  misc_RNA (1)...(19): siRNA sense strand
gaaguuuacuggauuucuu

SEQ ID NO: 1439576 - RNA, 19 nt, Homo sapiens
  misc_RNA (1)...(19): siRNA sense strand
gaagagugguacuuuggaa

SEQ ID NO: 1439577 - RNA, 19 nt, Homo sapiens
  misc_RNA (1)...(19): siRNA sense strand
caaaggaaguuuacuggau

SEQ ID NO: 1439578 - RNA, 19 nt, Homo sapiens
  misc_RNA (1)...(19): siRNA sense strand
gcucugaaauuaccaaauc

SEQ ID NO: 1439579 - RNA, 19 nt, Homo sapiens
  misc_RNA (1)...(19): siRNA sense strand
gaacaaaggaaguuuacug

SEQ ID NO: 1439580 - RNA, 19 nt, Homo sapiens
  misc_RNA (1)...(19): siRNA sense strand
gaaauuaccaaaucuugug

SEQ ID NO: 1439581 - RNA, 19 nt, Homo sapiens
  misc_RNA (1)...(19): siRNA sense strand
aaaggaaguuuacuggauu

SEQ ID NO: 1439582 - RNA, 19 nt, Homo sapiens
  misc_RNA (1)...(19): siRNA sense strand
gaaggaagagcucugaaau

SEQ ID NO: 1439583 - RNA, 19 nt, Homo sapiens
  misc_RNA (1)...(19): siRNA sense strand
gacagaagaugaccugagu

SEQ ID NO: 1439584 - RNA, 19 nt, Homo sapiens
  misc_RNA (1)...(19): siRNA sense strand
gaagagcucugaaauuacc

SEQ ID NO: 1439585 - RNA, 19 nt, Homo sapiens
  misc_RNA (1)...(19): siRNA sense strand
gaagcccgcuccuugacaa

SEQ ID NO: 1439586 - RNA, 19 nt, Homo sapiens
  misc_RNA (1)...(19): siRNA sense strand
gaacagcucggaaggagau

SEQ ID NO: 1439587 - RNA, 19 nt, Homo sapiens
  misc_RNA (1)...(19): siRNA sense strand
ugauugggaugauaugaaa

SEQ ID NO: 1439588 - RNA, 19 nt, Homo sapiens
  misc_RNA (1)...(19): siRNA sense strand
caacuggagagacagguua

SEQ ID NO: 1439589 - RNA, 19 nt, Homo sapiens
  misc_RNA (1)...(19): siRNA sense strand
ggagagacagguuacauuc

SEQ ID NO: 1439590 - RNA, 19 nt, Homo sapiens
  misc_RNA (1)...(19): siRNA sense strand
cggauuggcccgauugaua

SEQ ID NO: 1439591 - RNA, 19 nt, Homo sapiens
  misc_RNA (1)...(19): siRNA sense strand
gaagaacgccccacuuuug

SEQ ID NO: 1439592 - RNA, 19 nt, Homo sapiens
  misc_RNA (1)...(19): siRNA sense strand
cagaagaugaccugaguuu

SEQ ID NO: 1439593 - RNA, 19 nt, Homo sapiens
  misc_RNA (1)...(19): siRNA sense strand
aagcgcagaucaugaagaa

SEQ ID NO: 1439594 - RNA, 19 nt, Homo sapiens
  misc_RNA (1)...(19): siRNA sense strand
acaucgagcgcaugaauua

SEQ ID NO: 1439595 - RNA, 19 nt, Homo sapiens
  misc_RNA (1)...(19): siRNA sense strand
gcgcaugaauuauauccau

SEQ ID NO: 1439596 - RNA, 19 nt, Homo sapiens
  misc_RNA (1)...(19): siRNA sense strand
caaaggugccuauucacuu

SEQ ID NO: 1439597 - RNA, 19 nt, Homo sapiens
  misc_RNA (1)...(19): siRNA sense strand
acagguggcugcaggaaug

SEQ ID NO: 1439598 - RNA, 19 nt, Homo sapiens
  misc_RNA (1)...(19): siRNA sense strand
gcaauguaaggauaaagaa

SEQ ID NO: 1439599 - RNA, 19 nt, Homo sapiens
  misc_RNA (1)...(19): siRNA sense strand
ugacaaugguggauacuac

SEQ ID NO: 1439600 - RNA, 19 nt, Homo sapiens
  misc_RNA (1)...(19): siRNA sense strand
gauagaagacaaugaguac

SEQ ID NO: 1439601 - RNA, 19 nt, Homo sapiens
  misc_RNA (1)...(19): siRNA sense strand
uaccaaaucuuguggacau

SEQ ID NO: 1439602 - RNA, 19 nt, Homo sapiens
  misc_RNA (1)...(19): siRNA sense strand
gacaaugaguacacagcaa

SEQ ID NO: 1439603 - RNA, 19 nt, Homo sapiens
  misc_RNA (1)...(19): siRNA sense strand
caagacaaggugcaaaguu

SEQ ID NO: 1439604 - RNA, 19 nt, Homo sapiens
  misc_RNA (1)...(19): siRNA sense strand
aagacaaggugcaaaguuc

SEQ ID NO: 1439605 - RNA, 19 nt, Homo sapiens
  misc_RNA (1)...(19): siRNA sense strand
gaagaugaccugaguuuuc

SEQ ID NO: 1439606 - RNA, 19 nt, Homo sapiens
  misc_RNA (1)...(19): siRNA sense strand
ggagaaggaagagcucuga

SEQ ID NO: 1439607 - RNA, 19 nt, Homo sapiens
  misc_RNA (1)...(19): siRNA sense strand
gccaaggacucaccgucuu

SEQ ID NO: 1439608 - RNA, 19 nt, Homo sapiens
  misc_RNA (1)...(19): siRNA sense strand
cagguuacauucccagcaa

SEQ ID NO: 1439609 - RNA, 19 nt, Homo sapiens
  misc_RNA (1)...(19): siRNA sense strand
ccgaguauaugaacaaagg

SEQ ID NO: 1439610 - RNA, 19 nt, Homo sapiens
  misc_RNA (1)...(19): siRNA sense strand
ugauagaagacaaugagua

SEQ ID NO: 1439611 - RNA, 19 nt, Homo sapiens
  misc_RNA (1)...(19): siRNA sense strand
gcgaucagcaaacauucua

SEQ ID NO: 1439612 - RNA, 19 nt, Homo sapiens
  misc_RNA (1)...(19): siRNA sense strand
agagguaccuuucuuaucc

SEQ ID NO: 1439613 - RNA, 19 nt, Homo sapiens
  misc_RNA (1)...(19): siRNA sense strand
guacacagcaagacaaggu

SEQ ID NO: 1439614 - RNA, 19 nt, Homo sapiens
  misc_RNA (1)...(19): siRNA sense strand
ugugugcaauguaaggaua

SEQ ID NO: 1439615 - RNA, 19 nt, Homo sapiens
  misc_RNA (1)...(19): siRNA sense strand
gugaacucuucgucucaua

SEQ ID NO: 1439616 - RNA, 19 nt, Homo sapiens
  misc_RNA (1)...(19): siRNA sense strand
ggauuggcccgauugauag

SEQ ID NO: 1439617 - RNA, 19 nt, Homo sapiens
  misc_RNA (1)...(19): siRNA sense strand
cgcaugaauuauauccaua

SEQ ID NO: 1439618 - RNA, 19 nt, Homo sapiens
  misc_RNA (1)...(19): siRNA sense strand
ucuaugcaguggugucuga

SEQ ID NO: 1439619 - RNA, 19 nt, Homo sapiens
  misc_RNA (1)...(19): siRNA sense strand
ggauaaagaagcaacaaaa

SEQ ID NO: 1439620 - RNA, 19 nt, Homo sapiens
  misc_RNA (1)...(19): siRNA sense strand
ccaaaggaagagugccaua

SEQ ID NO: 1439621 - RNA, 19 nt, Homo sapiens
  misc_RNA (1)...(19): siRNA sense strand
ccaaggacucaccgucuuu

SEQ ID NO: 1439622 - RNA, 19 nt, Homo sapiens
  misc_RNA (1)...(19): siRNA sense strand
gaauggaaacacaaaagua

SEQ ID NO: 1439623 - RNA, 19 nt, Homo sapiens
  misc_RNA (1)...(19): siRNA sense strand
cagcuauuguccuuuggaa

SEQ ID NO: 1439624 - RNA, 19 nt, Homo sapiens
  misc_RNA (1)...(19): siRNA sense strand
gaggaagcgcagaucauga

SEQ ID NO: 1439625 - RNA, 19 nt, Homo sapiens
  misc_RNA (1)...(19): siRNA sense strand
acacaaaaguagccauaaa

SEQ ID NO: 1439626 - RNA, 19 nt, Homo sapiens
  misc_RNA (1)...(19): siRNA sense strand
gggaauggacucauaugca

SEQ ID NO: 1439627 - RNA, 19 nt, Homo sapiens
  misc_RNA (1)...(19): siRNA sense strand
ucgagcgcaugaauuauau

SEQ ID NO: 1439628 - RNA, 19 nt, Homo sapiens
  misc_RNA (1)...(19): siRNA sense strand
aaggaaguuuacuggauuu

SEQ ID NO: 1439629 - RNA, 19 nt, Homo sapiens
  misc_RNA (1)...(19): siRNA sense strand
agaaggaagagcucugaaa

SEQ ID NO: 1439630 - RNA, 19 nt, Homo sapiens
  misc_RNA (1)...(19): siRNA sense strand
ggaagagcucugaaauuac

SEQ ID NO: 1439631 - RNA, 19 nt, Homo sapiens
  misc_RNA (1)...(19): siRNA sense strand
guuacauucccagcaauua

SEQ ID NO: 1439632 - RNA, 19 nt, Homo sapiens
  misc_RNA (1)...(19): siRNA sense strand
agucugacguguggucuuu

SEQ ID NO: 1439633 - RNA, 19 nt, Homo sapiens
  misc_RNA (1)...(19): siRNA sense strand
gaagcgcagaucaugaaga

SEQ ID NO: 1439634 - RNA, 19 nt, Homo sapiens
  misc_RNA (1)...(19): siRNA sense strand
ggcagaagagugguacuuu

SEQ ID NO: 1439635 - RNA, 19 nt, Homo sapiens
  misc_RNA (1)...(19): siRNA sense strand
gaguauaugaacaaaggaa

SEQ ID NO: 1439636 - RNA, 19 nt, Homo sapiens
  misc_RNA (1)...(19): siRNA sense strand
aaggaagagcucugaaauu

SEQ ID NO: 1439637 - RNA, 19 nt, Homo sapiens
  misc_RNA (1)...(19): siRNA sense strand
gcaugaauuauauccauag

SEQ ID NO: 1439638 - RNA, 19 nt, Homo sapiens
  misc_RNA (1)...(19): siRNA sense strand
gcuauuguccuuuggaaac

SEQ ID NO: 1439639 - RNA, 19 nt, Homo sapiens
  misc_RNA (1)...(19): siRNA sense strand
cuuaaaagauggagaagga

SEQ ID NO: 1439640 - RNA, 19 nt, Homo sapiens
  misc_RNA (1)...(19): siRNA sense strand
cuugacaacuggagagaca

SEQ ID NO: 1439641 - RNA, 19 nt, Homo sapiens
  misc_RNA (1)...(19): siRNA sense strand
gaucagcaaacauucuagu

SEQ ID NO: 1439642 - RNA, 19 nt, Homo sapiens
  misc_RNA (1)...(19): siRNA sense strand
gcacagguggcugcaggaa

SEQ ID NO: 1439643 - RNA, 19 nt, Homo sapiens
  misc_RNA (1)...(19): siRNA sense strand
gugauugggaugauaugaa

SEQ ID NO: 1439644 - RNA, 19 nt, Homo sapiens
  misc_RNA (1)...(19): siRNA sense strand
uuacauucccagcaauuau

SEQ ID NO: 1439645 - RNA, 19 nt, Homo sapiens
  misc_RNA (1)...(19): siRNA sense strand
agaagacaaugaguacaca

SEQ ID NO: 1439646 - RNA, 19 nt, Homo sapiens
  misc_RNA (1)...(19): siRNA sense strand
uuacaucgagcgcaugaau

SEQ ID NO: 1439647 - RNA, 19 nt, Homo sapiens
  misc_RNA (1)...(19): siRNA sense strand
ucaccgaguauaugaacaa

SEQ ID NO: 1439648 - RNA, 19 nt, Homo sapiens
  misc_RNA (1)...(19): siRNA sense strand
cuacaucgucaccgaguau

SEQ ID NO: 1439649 - RNA, 19 nt, Homo sapiens
  misc_RNA (1)...(19): siRNA sense strand
ugaggaagcgcagaucaug

SEQ ID NO: 1439650 - RNA, 19 nt, Homo sapiens
  misc_RNA (1)...(19): siRNA sense strand
cagcagcuuguacaacauu

SEQ ID NO: 1439651 - RNA, 19 nt, Homo sapiens
  misc_RNA (1)...(19): siRNA sense strand
aaggagaccaugucaaaca

SEQ ID NO: 1439652 - RNA, 19 nt, Homo sapiens
  misc_RNA (1)...(19): siRNA sense strand
cagaagagugguacuuugg

SEQ ID NO: 1439653 - RNA, 19 nt, Homo sapiens
  misc_RNA (1)...(19): siRNA sense strand
ccaaaggugccuauucacu

SEQ ID NO: 1439654 - RNA, 19 nt, Homo sapiens
  misc_RNA (1)...(19): siRNA sense strand
gcaagacaaggugcaaagu

SEQ ID NO: 1439655 - RNA, 19 nt, Homo sapiens
  misc_RNA (1)...(19): siRNA sense strand
gagaaggaagagcucugaa

SEQ ID NO: 1439656 - RNA, 19 nt, Homo sapiens
  misc_RNA (1)...(19): siRNA sense strand
ucgcaaacuugacaauggu

SEQ ID NO: 1439657 - RNA, 19 nt, Homo sapiens
  misc_RNA (1)...(19): siRNA sense strand
ggaagcccgcuccuugaca

SEQ ID NO: 1439658 - RNA, 19 nt, Homo sapiens
  misc_RNA (1)...(19): siRNA sense strand
caccgaguauaugaacaaa

SEQ ID NO: 1439659 - RNA, 19 nt, Homo sapiens
  misc_RNA (1)...(19): siRNA sense strand
gaagcacggacagaagaug

SEQ ID NO: 1439660 - RNA, 19 nt, Homo sapiens
  misc_RNA (1)...(19): siRNA sense strand
aggaagcgcagaucaugaa

SEQ ID NO: 1439661 - RNA, 19 nt, Homo sapiens
  misc_RNA (1)...(19): siRNA sense strand
uucagcagcuuguacaaca

SEQ ID NO: 1439662 - RNA, 19 nt, Homo sapiens
  misc_RNA (1)...(19): siRNA sense strand
gagugaaaccaccaaaggu

SEQ ID NO: 1439663 - RNA, 19 nt, Homo sapiens
  misc_RNA (1)...(19): siRNA sense strand
aaacuuggccgaaaagaug

SEQ ID NO: 1439664 - RNA, 19 nt, Homo sapiens
  misc_RNA (1)...(19): siRNA sense strand
gguuacauucccagcaauu

SEQ ID NO: 1439665 - RNA, 19 nt, Homo sapiens
  misc_RNA (1)...(19): siRNA sense strand
cugcaggaauggcuuacau

SEQ ID NO: 1439666 - RNA, 19 nt, Homo sapiens
  misc_RNA (1)...(19): siRNA sense strand
cugaggagcccaucuacau

SEQ ID NO: 1439667 - RNA, 19 nt, Homo sapiens
  misc_RNA (1)...(19): siRNA sense strand
uaccuggaauggaaacaca

SEQ ID NO: 1439668 - RNA, 19 nt, Homo sapiens
  misc_RNA (1)...(19): siRNA sense strand
ggcccuuuaugacuaugaa

SEQ ID NO: 1439669 - RNA, 19 nt, Homo sapiens
  misc_RNA (1)...(19): siRNA sense strand
uggcuccaguugacucuau

SEQ ID NO: 1439670 - RNA, 19 nt, Homo sapiens
  misc_RNA (1)...(19): siRNA sense strand
gaaaggagaccaugucaaa

SEQ ID NO: 1439671 - RNA, 19 nt, Homo sapiens
  misc_RNA (1)...(19): siRNA sense strand
aggaagagcucugaaauua

SEQ ID NO: 1439672 - RNA, 19 nt, Homo sapiens
  misc_RNA (1)...(19): siRNA sense strand
ggacucauaugcaagauug

SEQ ID NO: 1439673 - RNA, 19 nt, Homo sapiens
  misc_RNA (1)...(19): siRNA sense strand
ggaauggacucauaugcaa

SEQ ID NO: 1439674 - RNA, 19 nt, Homo sapiens
  misc_RNA (1)...(19): siRNA sense strand
gcagaagagugguacuuug

SEQ ID NO: 1439675 - RNA, 19 nt, Homo sapiens
  misc_RNA (1)...(19): siRNA sense strand
gaaguuuacuggauuucuu

SEQ ID NO: 1439676 - RNA, 19 nt, Homo sapiens
  misc_RNA (1)...(19): siRNA sense strand
gaagagugguacuuuggaa

SEQ ID NO: 1439677 - RNA, 19 nt, Homo sapiens
  misc_RNA (1)...(19): siRNA sense strand
caaaggaaguuuacuggau

SEQ ID NO: 1439678 - RNA, 19 nt, Homo sapiens
  misc_RNA (1)...(19): siRNA sense strand
gcucugaaauuaccaaauc

SEQ ID NO: 1439679 - RNA, 19 nt, Homo sapiens
  misc_RNA (1)...(19): siRNA sense strand
gaacaaaggaaguuuacug

SEQ ID NO: 1439680 - RNA, 19 nt, Homo sapiens
  misc_RNA (1)...(19): siRNA sense strand
gaaauuaccaaaucuugug

SEQ ID NO: 1439681 - RNA, 19 nt, Homo sapiens
  misc_RNA (1)...(19): siRNA sense strand
aaaggaaguuuacuggauu

SEQ ID NO: 1439682 - RNA, 19 nt, Homo sapiens
  misc_RNA (1)...(19): siRNA sense strand
gaaggaagagcucugaaau

SEQ ID NO: 1439683 - RNA, 19 nt, Homo sapiens
  misc_RNA (1)...(19): siRNA sense strand
gacagaagaugaccugagu

SEQ ID NO: 1439684 - RNA, 19 nt, Homo sapiens
  misc_RNA (1)...(19): siRNA sense strand
gaagagcucugaaauuacc

SEQ ID NO: 1439685 - RNA, 19 nt, Homo sapiens
  misc_RNA (1)...(19): siRNA sense strand
gaagcccgcuccuugacaa

SEQ ID NO: 1439686 - RNA, 19 nt, Homo sapiens
  misc_RNA (1)...(19): siRNA sense strand
gaacagcucggaaggagau

SEQ ID NO: 1439687 - RNA, 19 nt, Homo sapiens
  misc_RNA (1)...(19): siRNA sense strand
ugauugggaugauaugaaa

SEQ ID NO: 1439688 - RNA, 19 nt, Homo sapiens
  misc_RNA (1)...(19): siRNA sense strand
caacuggagagacagguua

SEQ ID NO: 1439689 - RNA, 19 nt, Homo sapiens
  misc_RNA (1)...(19): siRNA sense strand
ggagagacagguuacauuc

SEQ ID NO: 1439690 - RNA, 19 nt, Homo sapiens
  misc_RNA (1)...(19): siRNA sense strand
cggauuggcccgauugaua

SEQ ID NO: 1439691 - RNA, 19 nt, Homo sapiens
  misc_RNA (1)...(19): siRNA sense strand
gaagaacgccccacuuuug

SEQ ID NO: 1439692 - RNA, 19 nt, Homo sapiens
  misc_RNA (1)...(19): siRNA sense strand
cagaagaugaccugaguuu

SEQ ID NO: 1439693 - RNA, 19 nt, Homo sapiens
  misc_RNA (1)...(19): siRNA sense strand
aagcgcagaucaugaagaa

SEQ ID NO: 1439694 - RNA, 19 nt, Homo sapiens
  misc_RNA (1)...(19): siRNA sense strand
acaucgagcgcaugaauua

SEQ ID NO: 1439695 - RNA, 19 nt, Homo sapiens
  misc_RNA (1)...(19): siRNA sense strand
gcgcaugaauuauauccau

SEQ ID NO: 1439696 - RNA, 19 nt, Homo sapiens
  misc_RNA (1)...(19): siRNA sense strand
caaaggugccuauucacuu

SEQ ID NO: 1439697 - RNA, 19 nt, Homo sapiens
  misc_RNA (1)...(19): siRNA sense strand
acagguggcugcaggaaug

SEQ ID NO: 1439698 - RNA, 19 nt, Homo sapiens
  misc_RNA (1)...(19): siRNA sense strand
gcaauguaaggauaaagaa

SEQ ID NO: 1439699 - RNA, 19 nt, Homo sapiens
  misc_RNA (1)...(19): siRNA sense strand
ugacaaugguggauacuac

SEQ ID NO: 1439700 - RNA, 19 nt, Homo sapiens
  misc_RNA (1)...(19): siRNA sense strand
gauagaagacaaugaguac

SEQ ID NO: 1439701 - RNA, 19 nt, Homo sapiens
  misc_RNA (1)...(19): siRNA sense strand
uaccaaaucuuguggacau

SEQ ID NO: 1439702 - RNA, 19 nt, Homo sapiens
  misc_RNA (1)...(19): siRNA sense strand
gacaaugaguacacagcaa

SEQ ID NO: 1439703 - RNA, 19 nt, Homo sapiens
  misc_RNA (1)...(19): siRNA sense strand
caagacaaggugcaaaguu

SEQ ID NO: 1439704 - RNA, 19 nt, Homo sapiens
  misc_RNA (1)...(19): siRNA sense strand
aagacaaggugcaaaguuc

SEQ ID NO: 1439705 - RNA, 19 nt, Homo sapiens
  misc_RNA (1)...(19): siRNA sense strand
gaagaugaccugaguuuuc

SEQ ID NO: 1439706 - RNA, 19 nt, Homo sapiens
  misc_RNA (1)...(19): siRNA sense strand
ggagaaggaagagcucuga

SEQ ID NO: 1439707 - RNA, 19 nt, Homo sapiens
  misc_RNA (1)...(19): siRNA sense strand
gccaaggacucaccgucuu

SEQ ID NO: 1439708 - RNA, 19 nt, Homo sapiens
  misc_RNA (1)...(19): siRNA sense strand
cagguuacauucccagcaa

SEQ ID NO: 1439709 - RNA, 19 nt, Homo sapiens
  misc_RNA (1)...(19): siRNA sense strand
ccgaguauaugaacaaagg

SEQ ID NO: 1439710 - RNA, 19 nt, Homo sapiens
  misc_RNA (1)...(19): siRNA sense strand
ugauagaagacaaugagua

SEQ ID NO: 1439711 - RNA, 19 nt, Homo sapiens
  misc_RNA (1)...(19): siRNA sense strand
gcgaucagcaaacauucua

SEQ ID NO: 1439712 - RNA, 19 nt, Homo sapiens
  misc_RNA (1)...(19): siRNA sense strand
agagguaccuuucuuaucc

SEQ ID NO: 1439713 - RNA, 19 nt, Homo sapiens
  misc_RNA (1)...(19): siRNA sense strand
guacacagcaagacaaggu

SEQ ID NO: 1439714 - RNA, 19 nt, Homo sapiens
  misc_RNA (1)...(19): siRNA sense strand
ugugugcaauguaaggaua

SEQ ID NO: 1439715 - RNA, 19 nt, Homo sapiens
  misc_RNA (1)...(19): siRNA sense strand
gugaacucuucgucucaua

SEQ ID NO: 1439716 - RNA, 19 nt, Homo sapiens
  misc_RNA (1)...(19): siRNA sense strand
ggauuggcccgauugauag

SEQ ID NO: 1439717 - RNA, 19 nt, Homo sapiens
  misc_RNA (1)...(19): siRNA sense strand
cgcaugaauuauauccaua

SEQ ID NO: 1439718 - RNA, 19 nt, Homo sapiens
  misc_RNA (1)...(19): siRNA sense strand
ucuaugcaguggugucuga

SEQ ID NO: 1439719 - RNA, 19 nt, Homo sapiens
  misc_RNA (1)...(19): siRNA sense strand
ggauaaagaagcaacaaaa

SEQ ID NO: 1439720 - RNA, 19 nt, Homo sapiens
  misc_RNA (1)...(19): siRNA sense strand
ccaaaggaagagugccaua

SEQ ID NO: 1439721 - RNA, 19 nt, Homo sapiens
  misc_RNA (1)...(19): siRNA sense strand
ccaaggacucaccgucuuu

SEQ ID NO: 1439722 - RNA, 19 nt, Homo sapiens
  misc_RNA (1)...(19): siRNA sense strand
gaauggaaacacaaaagua

SEQ ID NO: 1439723 - RNA, 19 nt, Homo sapiens
  misc_RNA (1)...(19): siRNA sense strand
cagcuauuguccuuuggaa

SEQ ID NO: 1439724 - RNA, 19 nt, Homo sapiens
  misc_RNA (1)...(19): siRNA sense strand
gaggaagcgcagaucauga

SEQ ID NO: 1439725 - RNA, 19 nt, Homo sapiens
  misc_RNA (1)...(19): siRNA sense strand
acacaaaaguagccauaaa

SEQ ID NO: 1439726 - RNA, 19 nt, Homo sapiens
  misc_RNA (1)...(19): siRNA sense strand
gggaauggacucauaugca

SEQ ID NO: 1439727 - RNA, 19 nt, Homo sapiens
  misc_RNA (1)...(19): siRNA sense strand
ucgagcgcaugaauuauau

SEQ ID NO: 1439728 - RNA, 19 nt, Homo sapiens
  misc_RNA (1)...(19): siRNA sense strand
aaggaaguuuacuggauuu

SEQ ID NO: 1439729 - RNA, 19 nt, Homo sapiens
  misc_RNA (1)...(19): siRNA sense strand
agaaggaagagcucugaaa

SEQ ID NO: 1439730 - RNA, 19 nt, Homo sapiens
  misc_RNA (1)...(19): siRNA sense strand
ggaagagcucugaaauuac

SEQ ID NO: 1439731 - RNA, 19 nt, Homo sapiens
  misc_RNA (1)...(19): siRNA sense strand
guuacauucccagcaauua

SEQ ID NO: 1439732 - RNA, 19 nt, Homo sapiens
  misc_RNA (1)...(19): siRNA sense strand
agucugacguguggucuuu

SEQ ID NO: 1439733 - RNA, 19 nt, Homo sapiens
  misc_RNA (1)...(19): siRNA sense strand
gaagcgcagaucaugaaga

SEQ ID NO: 1439734 - RNA, 19 nt, Homo sapiens
  misc_RNA (1)...(19): siRNA sense strand
ggcagaagagugguacuuu

SEQ ID NO: 1439735 - RNA, 19 nt, Homo sapiens
  misc_RNA (1)...(19): siRNA sense strand
gaguauaugaacaaaggaa

SEQ ID NO: 1439736 - RNA, 19 nt, Homo sapiens
  misc_RNA (1)...(19): siRNA sense strand
aaggaagagcucugaaauu

SEQ ID NO: 1439737 - RNA, 19 nt, Homo sapiens
  misc_RNA (1)...(19): siRNA sense strand
gcaugaauuauauccauag

SEQ ID NO: 1439738 - RNA, 19 nt, Homo sapiens
  misc_RNA (1)...(19): siRNA sense strand
gcuauuguccuuuggaaac

SEQ ID NO: 1439739 - RNA, 19 nt, Homo sapiens
  misc_RNA (1)...(19): siRNA sense strand
cuuaaaagauggagaagga

SEQ ID NO: 1439740 - RNA, 19 nt, Homo sapiens
  misc_RNA (1)...(19): siRNA sense strand
cuugacaacuggagagaca

SEQ ID NO: 1439741 - RNA, 19 nt, Homo sapiens
  misc_RNA (1)...(19): siRNA sense strand
gaucagcaaacauucuagu

SEQ ID NO: 1439742 - RNA, 19 nt, Homo sapiens
  misc_RNA (1)...(19): siRNA sense strand
gcacagguggcugcaggaa

SEQ ID NO: 1439743 - RNA, 19 nt, Homo sapiens
  misc_RNA (1)...(19): siRNA sense strand
gugauugggaugauaugaa

SEQ ID NO: 1439744 - RNA, 19 nt, Homo sapiens
  misc_RNA (1)...(19): siRNA sense strand
uuacauucccagcaauuau

SEQ ID NO: 1439745 - RNA, 19 nt, Homo sapiens
  misc_RNA (1)...(19): siRNA sense strand
agaagacaaugaguacaca

SEQ ID NO: 1439746 - RNA, 19 nt, Homo sapiens
  misc_RNA (1)...(19): siRNA sense strand
uuacaucgagcgcaugaau

SEQ ID NO: 1439747 - RNA, 19 nt, Homo sapiens
  misc_RNA (1)...(19): siRNA sense strand
ucaccgaguauaugaacaa

SEQ ID NO: 1439748 - RNA, 19 nt, Homo sapiens
  misc_RNA (1)...(19): siRNA sense strand
cuacaucgucaccgaguau

SEQ ID NO: 1439749 - RNA, 19 nt, Homo sapiens
  misc_RNA (1)...(19): siRNA sense strand
ugaggaagcgcagaucaug

SEQ ID NO: 1439750 - RNA, 19 nt, Homo sapiens
  misc_RNA (1)...(19): siRNA sense strand
cagcagcuuguacaacauu

SEQ ID NO: 1439751 - RNA, 19 nt, Homo sapiens
  misc_RNA (1)...(19): siRNA sense strand
aaggagaccaugucaaaca

SEQ ID NO: 1439752 - RNA, 19 nt, Homo sapiens
  misc_RNA (1)...(19): siRNA sense strand
cagaagagugguacuuugg

SEQ ID NO: 1439753 - RNA, 19 nt, Homo sapiens
  misc_RNA (1)...(19): siRNA sense strand
ccaaaggugccuauucacu

SEQ ID NO: 1439754 - RNA, 19 nt, Homo sapiens
  misc_RNA (1)...(19): siRNA sense strand
gcaagacaaggugcaaagu

SEQ ID NO: 1439755 - RNA, 19 nt, Homo sapiens
  misc_RNA (1)...(19): siRNA sense strand
gagaaggaagagcucugaa

SEQ ID NO: 1439756 - RNA, 19 nt, Homo sapiens
  misc_RNA (1)...(19): siRNA sense strand
ucgcaaacuugacaauggu

SEQ ID NO: 1439757 - RNA, 19 nt, Homo sapiens
  misc_RNA (1)...(19): siRNA sense strand
ggaagcccgcuccuugaca

SEQ ID NO: 1439758 - RNA, 19 nt, Homo sapiens
  misc_RNA (1)...(19): siRNA sense strand
caccgaguauaugaacaaa

SEQ ID NO: 1439759 - RNA, 19 nt, Homo sapiens
  misc_RNA (1)...(19): siRNA sense strand
gaagcacggacagaagaug

SEQ ID NO: 1439760 - RNA, 19 nt, Homo sapiens
  misc_RNA (1)...(19): siRNA sense strand
aggaagcgcagaucaugaa

SEQ ID NO: 1439761 - RNA, 19 nt, Homo sapiens
  misc_RNA (1)...(19): siRNA sense strand
uucagcagcuuguacaaca

SEQ ID NO: 1439762 - RNA, 19 nt, Homo sapiens
  misc_RNA (1)...(19): siRNA sense strand
gagugaaaccaccaaaggu

SEQ ID NO: 1439763 - RNA, 19 nt, Homo sapiens
  misc_RNA (1)...(19): siRNA sense strand
aaacuuggccgaaaagaug

SEQ ID NO: 1439764 - RNA, 19 nt, Homo sapiens
  misc_RNA (1)...(19): siRNA sense strand
gguuacauucccagcaauu

SEQ ID NO: 1439765 - RNA, 19 nt, Homo sapiens
  misc_RNA (1)...(19): siRNA sense strand
cugcaggaauggcuuacau

SEQ ID NO: 1439766 - RNA, 19 nt, Homo sapiens
  misc_RNA (1)...(19): siRNA sense strand
cugaggagcccaucuacau

SEQ ID NO: 1439767 - RNA, 19 nt, Homo sapiens
  misc_RNA (1)...(19): siRNA sense strand
uaccuggaauggaaacaca

SEQ ID NO: 1439768 - RNA, 19 nt, Homo sapiens
  misc_RNA (1)...(19): siRNA sense strand
ggcccuuuaugacuaugaa

SEQ ID NO: 1439769 - RNA, 19 nt, Homo sapiens
  misc_RNA (1)...(19): siRNA sense strand
uggcuccaguugacucuau

SEQ ID NO: 1439770 - RNA, 19 nt, Homo sapiens
  misc_RNA (1)...(19): siRNA sense strand
gaaaggagaccaugucaaa

SEQ ID NO: 1439771 - RNA, 19 nt, Homo sapiens
  misc_RNA (1)...(19): siRNA sense strand
aggaagagcucugaaauua

SEQ ID NO: 1439772 - RNA, 19 nt, Homo sapiens
  misc_RNA (1)...(19): siRNA sense strand
ggacucauaugcaagauug

SEQ ID NO: 1439773 - RNA, 19 nt, Homo sapiens
  misc_RNA (1)...(19): siRNA sense strand
ggaauggacucauaugcaa

SEQ ID NO: 1439774 - RNA, 19 nt, Homo sapiens
  misc_RNA (1)...(19): siRNA sense strand
gcagaagagugguacuuug

SEQ ID NO: 1439775 - RNA, 19 nt, Homo sapiens
  misc_RNA (1)...(19): siRNA sense strand
gaaguuuacuggauuucuu

SEQ ID NO: 1439776 - RNA, 19 nt, Homo sapiens
  misc_RNA (1)...(19): siRNA sense strand
gaagagugguacuuuggaa

SEQ ID NO: 1439777 - RNA, 19 nt, Homo sapiens
  misc_RNA (1)...(19): siRNA sense strand
caaaggaaguuuacuggau

SEQ ID NO: 1439778 - RNA, 19 nt, Homo sapiens
  misc_RNA (1)...(19): siRNA sense strand
gcucugaaauuaccaaauc

SEQ ID NO: 1439779 - RNA, 19 nt, Homo sapiens
  misc_RNA (1)...(19): siRNA sense strand
gaacaaaggaaguuuacug

SEQ ID NO: 1439780 - RNA, 19 nt, Homo sapiens
  misc_RNA (1)...(19): siRNA sense strand
gaaauuaccaaaucuugug

SEQ ID NO: 1439781 - RNA, 19 nt, Homo sapiens
  misc_RNA (1)...(19): siRNA sense strand
aaaggaaguuuacuggauu

SEQ ID NO: 1439782 - RNA, 19 nt, Homo sapiens
  misc_RNA (1)...(19): siRNA sense strand
gaaggaagagcucugaaau

SEQ ID NO: 1439783 - RNA, 19 nt, Homo sapiens
  misc_RNA (1)...(19): siRNA sense strand
gacagaagaugaccugagu

SEQ ID NO: 1439784 - RNA, 19 nt, Homo sapiens
  misc_RNA (1)...(19): siRNA sense strand
gaagagcucugaaauuacc

SEQ ID NO: 1439785 - RNA, 19 nt, Homo sapiens
  misc_RNA (1)...(19): siRNA sense strand
gaagcccgcuccuugacaa

SEQ ID NO: 1439786 - RNA, 19 nt, Homo sapiens
  misc_RNA (1)...(19): siRNA sense strand
gaacagcucggaaggagau

SEQ ID NO: 1439787 - RNA, 19 nt, Homo sapiens
  misc_RNA (1)...(19): siRNA sense strand
ugauugggaugauaugaaa

SEQ ID NO: 1439788 - RNA, 19 nt, Homo sapiens
  misc_RNA (1)...(19): siRNA sense strand
caacuggagagacagguua

SEQ ID NO: 1439789 - RNA, 19 nt, Homo sapiens
  misc_RNA (1)...(19): siRNA sense strand
ggagagacagguuacauuc

SEQ ID NO: 1439790 - RNA, 19 nt, Homo sapiens
  misc_RNA (1)...(19): siRNA sense strand
cggauuggcccgauugaua

SEQ ID NO: 1439791 - RNA, 19 nt, Homo sapiens
  misc_RNA (1)...(19): siRNA sense strand
gaagaacgccccacuuuug

SEQ ID NO: 1439792 - RNA, 19 nt, Homo sapiens
  misc_RNA (1)...(19): siRNA sense strand
cagaagaugaccugaguuu

SEQ ID NO: 1439793 - RNA, 19 nt, Homo sapiens
  misc_RNA (1)...(19): siRNA sense strand
aagcgcagaucaugaagaa

SEQ ID NO: 1439794 - RNA, 19 nt, Homo sapiens
  misc_RNA (1)...(19): siRNA sense strand
acaucgagcgcaugaauua

SEQ ID NO: 1439795 - RNA, 19 nt, Homo sapiens
  misc_RNA (1)...(19): siRNA sense strand
gcgcaugaauuauauccau

SEQ ID NO: 1439796 - RNA, 19 nt, Homo sapiens
  misc_RNA (1)...(19): siRNA sense strand
caaaggugccuauucacuu

SEQ ID NO: 1439797 - RNA, 19 nt, Homo sapiens
  misc_RNA (1)...(19): siRNA sense strand
acagguggcugcaggaaug

SEQ ID NO: 1439798 - RNA, 19 nt, Homo sapiens
  misc_RNA (1)...(19): siRNA sense strand
gcaauguaaggauaaagaa

SEQ ID NO: 1439799 - RNA, 19 nt, Homo sapiens
  misc_RNA (1)...(19): siRNA sense strand
ugacaaugguggauacuac

SEQ ID NO: 1439800 - RNA, 19 nt, Homo sapiens
  misc_RNA (1)...(19): siRNA sense strand
gauagaagacaaugaguac

SEQ ID NO: 1439801 - RNA, 19 nt, Homo sapiens
  misc_RNA (1)...(19): siRNA sense strand
uaccaaaucuuguggacau

SEQ ID NO: 1439802 - RNA, 19 nt, Homo sapiens
  misc_RNA (1)...(19): siRNA sense strand
gacaaugaguacacagcaa

SEQ ID NO: 1439803 - RNA, 19 nt, Homo sapiens
  misc_RNA (1)...(19): siRNA sense strand
caagacaaggugcaaaguu

SEQ ID NO: 1439804 - RNA, 19 nt, Homo sapiens
  misc_RNA (1)...(19): siRNA sense strand
aagacaaggugcaaaguuc

SEQ ID NO: 1439805 - RNA, 19 nt, Homo sapiens
  misc_RNA (1)...(19): siRNA sense strand
gaagaugaccugaguuuuc

SEQ ID NO: 1439806 - RNA, 19 nt, Homo sapiens
  misc_RNA (1)...(19): siRNA sense strand
ggagaaggaagagcucuga

SEQ ID NO: 1439807 - RNA, 19 nt, Homo sapiens
  misc_RNA (1)...(19): siRNA sense strand
gccaaggacucaccgucuu

SEQ ID NO: 1439808 - RNA, 19 nt, Homo sapiens
  misc_RNA (1)...(19): siRNA sense strand
cagguuacauucccagcaa

SEQ ID NO: 1439809 - RNA, 19 nt, Homo sapiens
  misc_RNA (1)...(19): siRNA sense strand
ccgaguauaugaacaaagg

SEQ ID NO: 1439810 - RNA, 19 nt, Homo sapiens
  misc_RNA (1)...(19): siRNA sense strand
ugauagaagacaaugagua

SEQ ID NO: 1439811 - RNA, 19 nt, Homo sapiens
  misc_RNA (1)...(19): siRNA sense strand
gcgaucagcaaacauucua

SEQ ID NO: 1439812 - RNA, 19 nt, Homo sapiens
  misc_RNA (1)...(19): siRNA sense strand
agagguaccuuucuuaucc

SEQ ID NO: 1439813 - RNA, 19 nt, Homo sapiens
  misc_RNA (1)...(19): siRNA sense strand
guacacagcaagacaaggu

SEQ ID NO: 1439814 - RNA, 19 nt, Homo sapiens
  misc_RNA (1)...(19): siRNA sense strand
ugugugcaauguaaggaua

SEQ ID NO: 1439815 - RNA, 19 nt, Homo sapiens
  misc_RNA (1)...(19): siRNA sense strand
gugaacucuucgucucaua

SEQ ID NO: 1439816 - RNA, 19 nt, Homo sapiens
  misc_RNA (1)...(19): siRNA sense strand
ggauuggcccgauugauag

SEQ ID NO: 1439817 - RNA, 19 nt, Homo sapiens
  misc_RNA (1)...(19): siRNA sense strand
cgcaugaauuauauccaua

SEQ ID NO: 1439818 - RNA, 19 nt, Homo sapiens
  misc_RNA (1)...(19): siRNA sense strand
ucuaugcaguggugucuga

SEQ ID NO: 1439819 - RNA, 19 nt, Homo sapiens
  misc_RNA (1)...(19): siRNA sense strand
ggauaaagaagcaacaaaa

SEQ ID NO: 1439820 - RNA, 19 nt, Homo sapiens
  misc_RNA (1)...(19): siRNA sense strand
ccaaaggaagagugccaua

SEQ ID NO: 1439821 - RNA, 19 nt, Homo sapiens
  misc_RNA (1)...(19): siRNA sense strand
ccaaggacucaccgucuuu

SEQ ID NO: 1439822 - RNA, 19 nt, Homo sapiens
  misc_RNA (1)...(19): siRNA sense strand
gaauggaaacacaaaagua

SEQ ID NO: 1439823 - RNA, 19 nt, Homo sapiens
  misc_RNA (1)...(19): siRNA sense strand
cagcuauuguccuuuggaa

SEQ ID NO: 1439824 - RNA, 19 nt, Homo sapiens
  misc_RNA (1)...(19): siRNA sense strand
gaggaagcgcagaucauga

SEQ ID NO: 1439825 - RNA, 19 nt, Homo sapiens
  misc_RNA (1)...(19): siRNA sense strand
acacaaaaguagccauaaa

SEQ ID NO: 1439826 - RNA, 19 nt, Homo sapiens
  misc_RNA (1)...(19): siRNA sense strand
gggaauggacucauaugca

SEQ ID NO: 1439827 - RNA, 19 nt, Homo sapiens
  misc_RNA (1)...(19): siRNA sense strand
ucgagcgcaugaauuauau

SEQ ID NO: 1439828 - RNA, 19 nt, Homo sapiens
  misc_RNA (1)...(19): siRNA sense strand
aaggaaguuuacuggauuu

SEQ ID NO: 1439829 - RNA, 19 nt, Homo sapiens
  misc_RNA (1)...(19): siRNA sense strand
agaaggaagagcucugaaa

SEQ ID NO: 1439830 - RNA, 19 nt, Homo sapiens
  misc_RNA (1)...(19): siRNA sense strand
ggaagagcucugaaauuac

SEQ ID NO: 1439831 - RNA, 19 nt, Homo sapiens
  misc_RNA (1)...(19): siRNA sense strand
guuacauucccagcaauua

SEQ ID NO: 1439832 - RNA, 19 nt, Homo sapiens
  misc_RNA (1)...(19): siRNA sense strand
agucugacguguggucuuu

SEQ ID NO: 1439833 - RNA, 19 nt, Homo sapiens
  misc_RNA (1)...(19): siRNA sense strand
gaagcgcagaucaugaaga

SEQ ID NO: 1439834 - RNA, 19 nt, Homo sapiens
  misc_RNA (1)...(19): siRNA sense strand
ggcagaagagugguacuuu

SEQ ID NO: 1439835 - RNA, 19 nt, Homo sapiens
  misc_RNA (1)...(19): siRNA sense strand
gaguauaugaacaaaggaa

SEQ ID NO: 1439836 - RNA, 19 nt, Homo sapiens
  misc_RNA (1)...(19): siRNA sense strand
aaggaagagcucugaaauu

SEQ ID NO: 1439837 - RNA, 19 nt, Homo sapiens
  misc_RNA (1)...(19): siRNA sense strand
gcaugaauuauauccauag

SEQ ID NO: 1439838 - RNA, 19 nt, Homo sapiens
  misc_RNA (1)...(19): siRNA sense strand
gcuauuguccuuuggaaac

SEQ ID NO: 1439839 - RNA, 19 nt, Homo sapiens
  misc_RNA (1)...(19): siRNA sense strand
cuuaaaagauggagaagga

SEQ ID NO: 1439840 - RNA, 19 nt, Homo sapiens
  misc_RNA (1)...(19): siRNA sense strand
cuugacaacuggagagaca

SEQ ID NO: 1439841 - RNA, 19 nt, Homo sapiens
  misc_RNA (1)...(19): siRNA sense strand
gaucagcaaacauucuagu

SEQ ID NO: 1439842 - RNA, 19 nt, Homo sapiens
  misc_RNA (1)...(19): siRNA sense strand
gcacagguggcugcaggaa

SEQ ID NO: 1439843 - RNA, 19 nt, Homo sapiens
  misc_RNA (1)...(19): siRNA sense strand
gugauugggaugauaugaa

SEQ ID NO: 1439844 - RNA, 19 nt, Homo sapiens
  misc_RNA (1)...(19): siRNA sense strand
uuacauucccagcaauuau

SEQ ID NO: 1439845 - RNA, 19 nt, Homo sapiens
  misc_RNA (1)...(19): siRNA sense strand
agaagacaaugaguacaca

SEQ ID NO: 1439846 - RNA, 19 nt, Homo sapiens
  misc_RNA (1)...(19): siRNA sense strand
uuacaucgagcgcaugaau

SEQ ID NO: 1439847 - RNA, 19 nt, Homo sapiens
  misc_RNA (1)...(19): siRNA sense strand
ucaccgaguauaugaacaa

SEQ ID NO: 1439848 - RNA, 19 nt, Homo sapiens
  misc_RNA (1)...(19): siRNA sense strand
cuacaucgucaccgaguau

SEQ ID NO: 1439849 - RNA, 19 nt, Homo sapiens
  misc_RNA (1)...(19): siRNA sense strand
ugaggaagcgcagaucaug

SEQ ID NO: 1439850 - RNA, 19 nt, Homo sapiens
  misc_RNA (1)...(19): siRNA sense strand
cagcagcuuguacaacauu

SEQ ID NO: 1439851 - RNA, 19 nt, Homo sapiens
  misc_RNA (1)...(19): siRNA sense strand
aaggagaccaugucaaaca

SEQ ID NO: 1439852 - RNA, 19 nt, Homo sapiens
  misc_RNA (1)...(19): siRNA sense strand
cagaagagugguacuuugg

SEQ ID NO: 1439853 - RNA, 19 nt, Homo sapiens
  misc_RNA (1)...(19): siRNA sense strand
ccaaaggugccuauucacu

SEQ ID NO: 1439854 - RNA, 19 nt, Homo sapiens
  misc_RNA (1)...(19): siRNA sense strand
gcaagacaaggugcaaagu

SEQ ID NO: 1439855 - RNA, 19 nt, Homo sapiens
  misc_RNA (1)...(19): siRNA sense strand
gagaaggaagagcucugaa

SEQ ID NO: 1439856 - RNA, 19 nt, Homo sapiens
  misc_RNA (1)...(19): siRNA sense strand
ucgcaaacuugacaauggu

SEQ ID NO: 1439857 - RNA, 19 nt, Homo sapiens
  misc_RNA (1)...(19): siRNA sense strand
ggaagcccgcuccuugaca

SEQ ID NO: 1439858 - RNA, 19 nt, Homo sapiens
  misc_RNA (1)...(19): siRNA sense strand
caccgaguauaugaacaaa

SEQ ID NO: 1439859 - RNA, 19 nt, Homo sapiens
  misc_RNA (1)...(19): siRNA sense strand
gaagcacggacagaagaug

SEQ ID NO: 1439860 - RNA, 19 nt, Homo sapiens
  misc_RNA (1)...(19): siRNA sense strand
aggaagcgcagaucaugaa

SEQ ID NO: 1439861 - RNA, 19 nt, Homo sapiens
  misc_RNA (1)...(19): siRNA sense strand
uucagcagcuuguacaaca

SEQ ID NO: 1439862 - RNA, 19 nt, Homo sapiens
  misc_RNA (1)...(19): siRNA sense strand
gagugaaaccaccaaaggu

SEQ ID NO: 1439863 - RNA, 19 nt, Homo sapiens
  misc_RNA (1)...(19): siRNA sense strand
aaacuuggccgaaaagaug

SEQ ID NO: 1439864 - RNA, 19 nt, Homo sapiens
  misc_RNA (1)...(19): siRNA sense strand
gguuacauucccagcaauu

SEQ ID NO: 1439865 - RNA, 19 nt, Homo sapiens
  misc_RNA (1)...(19): siRNA sense strand
cugcaggaauggcuuacau

SEQ ID NO: 1439866 - RNA, 19 nt, Homo sapiens
  misc_RNA (1)...(19): siRNA sense strand
cugaggagcccaucuacau

SEQ ID NO: 1439867 - RNA, 19 nt, Homo sapiens
  misc_RNA (1)...(19): siRNA sense strand
uaccuggaauggaaacaca

SEQ ID NO: 1439868 - RNA, 19 nt, Homo sapiens
  misc_RNA (1)...(19): siRNA sense strand
ggcccuuuaugacuaugaa

SEQ ID NO: 1439869 - RNA, 19 nt, Homo sapiens
  misc_RNA (1)...(19): siRNA sense strand
uggcuccaguugacucuau

SEQ ID NO: 1439870 - RNA, 19 nt, Homo sapiens
  misc_RNA (1)...(19): siRNA sense strand
gaaguggacugaauguuua

SEQ ID NO: 1439871 - RNA, 19 nt, Homo sapiens
  misc_RNA (1)...(19): siRNA sense strand
ggacagaaauuacuucaau

SEQ ID NO: 1439872 - RNA, 19 nt, Homo sapiens
  misc_RNA (1)...(19): siRNA sense strand
ggacaaauguguguugaau

SEQ ID NO: 1439873 - RNA, 19 nt, Homo sapiens
  misc_RNA (1)...(19): siRNA sense strand
ggaaguggacugaauguuu

SEQ ID NO: 1439874 - RNA, 19 nt, Homo sapiens
  misc_RNA (1)...(19): siRNA sense strand
gcauauacauggacaaauc

SEQ ID NO: 1439875 - RNA, 19 nt, Homo sapiens
  misc_RNA (1)...(19): siRNA sense strand
caagacagacugcagguua

SEQ ID NO: 1439876 - RNA, 19 nt, Homo sapiens
  misc_RNA (1)...(19): siRNA sense strand
gcacaggacuggauuuacu

SEQ ID NO: 1439877 - RNA, 19 nt, Homo sapiens
  misc_RNA (1)...(19): siRNA sense strand
ucaauuugccugacauuua

SEQ ID NO: 1439878 - RNA, 19 nt, Homo sapiens
  misc_RNA (1)...(19): siRNA sense strand
gaaaguguauucauuaucc

SEQ ID NO: 1439879 - RNA, 19 nt, Homo sapiens
  misc_RNA (1)...(19): siRNA sense strand
gcugaaggauuaaacaaug

SEQ ID NO: 1439880 - RNA, 19 nt, Homo sapiens
  misc_RNA (1)...(19): siRNA sense strand
caauuugccugacauuuau

SEQ ID NO: 1439881 - RNA, 19 nt, Homo sapiens
  misc_RNA (1)...(19): siRNA sense strand
agaaaugacuucaguaucu

SEQ ID NO: 1439882 - RNA, 19 nt, Homo sapiens
  misc_RNA (1)...(19): siRNA sense strand
ugaaugaaguagacaaaga

SEQ ID NO: 1439883 - RNA, 19 nt, Homo sapiens
  misc_RNA (1)...(19): siRNA sense strand
gcgccuaacugaauacaug

SEQ ID NO: 1439884 - RNA, 19 nt, Homo sapiens
  misc_RNA (1)...(19): siRNA sense strand
ggaauuacacaaaguugaa

SEQ ID NO: 1439885 - RNA, 19 nt, Homo sapiens
  misc_RNA (1)...(19): siRNA sense strand
acaaagacauggagagugu

SEQ ID NO: 1439886 - RNA, 19 nt, Homo sapiens
  misc_RNA (1)...(19): siRNA sense strand
gaagcucugugcccucuau

SEQ ID NO: 1439887 - RNA, 19 nt, Homo sapiens
  misc_RNA (1)...(19): siRNA sense strand
gagcacaggacuggauuua

SEQ ID NO: 1439888 - RNA, 19 nt, Homo sapiens
  misc_RNA (1)...(19): siRNA sense strand
gaaaugacuucaguaucug

SEQ ID NO: 1439889 - RNA, 19 nt, Homo sapiens
  misc_RNA (1)...(19): siRNA sense strand
gaaaggaugcaguguguag

SEQ ID NO: 1439890 - RNA, 19 nt, Homo sapiens
  misc_RNA (1)...(19): siRNA sense strand
ccaauggcaucaagaaaca

SEQ ID NO: 1439891 - RNA, 19 nt, Homo sapiens
  misc_RNA (1)...(19): siRNA sense strand
gaaggcuacauucaagaua

SEQ ID NO: 1439892 - RNA, 19 nt, Homo sapiens
  misc_RNA (1)...(19): siRNA sense strand
gaauguuuauacaguguug

SEQ ID NO: 1439893 - RNA, 19 nt, Homo sapiens
  misc_RNA (1)...(19): siRNA sense strand
auacuuaccucauccacaa

SEQ ID NO: 1439894 - RNA, 19 nt, Homo sapiens
  misc_RNA (1)...(19): siRNA sense strand
gcccagauguauaauuuua

SEQ ID NO: 1439895 - RNA, 19 nt, Homo sapiens
  misc_RNA (1)...(19): siRNA sense strand
gaagaacagcaaacagaug

SEQ ID NO: 1439896 - RNA, 19 nt, Homo sapiens
  misc_RNA (1)...(19): siRNA sense strand
cugcccagauguauaauuu

SEQ ID NO: 1439897 - RNA, 19 nt, Homo sapiens
  misc_RNA (1)...(19): siRNA sense strand
acaaagagcagcccgcaaa

SEQ ID NO: 1439898 - RNA, 19 nt, Homo sapiens
  misc_RNA (1)...(19): siRNA sense strand
agagauagaucaagcuagu

SEQ ID NO: 1439899 - RNA, 19 nt, Homo sapiens
  misc_RNA (1)...(19): siRNA sense strand
ggagagauagaucaagcua

SEQ ID NO: 1439900 - RNA, 19 nt, Homo sapiens
  misc_RNA (1)...(19): siRNA sense strand
cgaugccaguuauauuuaa

SEQ ID NO: 1439901 - RNA, 19 nt, Homo sapiens
  misc_RNA (1)...(19): siRNA sense strand
cuacagcgccuaacugaau

SEQ ID NO: 1439902 - RNA, 19 nt, Homo sapiens
  misc_RNA (1)...(19): siRNA sense strand
gaacacaaugaggcauaua

SEQ ID NO: 1439903 - RNA, 19 nt, Homo sapiens
  misc_RNA (1)...(19): siRNA sense strand
gaaaugccagugccggauu

SEQ ID NO: 1439904 - RNA, 19 nt, Homo sapiens
  misc_RNA (1)...(19): siRNA sense strand
aaggcuacauucaagauaa

SEQ ID NO: 1439905 - RNA, 19 nt, Homo sapiens
  misc_RNA (1)...(19): siRNA sense strand
agaucaagcuagugaagaa

SEQ ID NO: 1439906 - RNA, 19 nt, Homo sapiens
  misc_RNA (1)...(19): siRNA sense strand
ccagaaaugacuucaguau

SEQ ID NO: 1439907 - RNA, 19 nt, Homo sapiens
  misc_RNA (1)...(19): siRNA sense strand
gaaaauguauuggaaugga

SEQ ID NO: 1439908 - RNA, 19 nt, Homo sapiens
  misc_RNA (1)...(19): siRNA sense strand
guauggcaauguggaaauu

SEQ ID NO: 1439909 - RNA, 19 nt, Homo sapiens
  misc_RNA (1)...(19): siRNA sense strand
uuaaugagccucugagcuu

SEQ ID NO: 1439910 - RNA, 19 nt, Homo sapiens
  misc_RNA (1)...(19): siRNA sense strand
ugaaguagacaaagacaug

SEQ ID NO: 1439911 - RNA, 19 nt, Homo sapiens
  misc_RNA (1)...(19): siRNA sense strand
caaguuugccuucuccuau

SEQ ID NO: 1439912 - RNA, 19 nt, Homo sapiens
  misc_RNA (1)...(19): siRNA sense strand
caaaguugaaggcuacauu

SEQ ID NO: 1439913 - RNA, 19 nt, Homo sapiens
  misc_RNA (1)...(19): siRNA sense strand
uggaaaggaugcagugugu

SEQ ID NO: 1439914 - RNA, 19 nt, Homo sapiens
  misc_RNA (1)...(19): siRNA sense strand
ggagcauacuuaccucauc

SEQ ID NO: 1439915 - RNA, 19 nt, Homo sapiens
  misc_RNA (1)...(19): siRNA sense strand
cacgaugccaguuauauuu

SEQ ID NO: 1439916 - RNA, 19 nt, Homo sapiens
  misc_RNA (1)...(19): siRNA sense strand
gaagaguguagaagcagaa

SEQ ID NO: 1439917 - RNA, 19 nt, Homo sapiens
  misc_RNA (1)...(19): siRNA sense strand
gcuacugggacagaaauua

SEQ ID NO: 1439918 - RNA, 19 nt, Homo sapiens
  misc_RNA (1)...(19): siRNA sense strand
ggcaauguggaaauuauaa

SEQ ID NO: 1439919 - RNA, 19 nt, Homo sapiens
  misc_RNA (1)...(19): siRNA sense strand
gaagcagaacccaaaggaa

SEQ ID NO: 1439920 - RNA, 19 nt, Homo sapiens
  misc_RNA (1)...(19): siRNA sense strand
gaucacgaugccaguuaua

SEQ ID NO: 1439921 - RNA, 19 nt, Homo sapiens
  misc_RNA (1)...(19): siRNA sense strand
uaucugcuguugcuucuca

SEQ ID NO: 1439922 - RNA, 19 nt, Homo sapiens
  misc_RNA (1)...(19): siRNA sense strand
cauggaaaauggagagaua

SEQ ID NO: 1439923 - RNA, 19 nt, Homo sapiens
  misc_RNA (1)...(19): siRNA sense strand
aagaagaacagcaaacaga

SEQ ID NO: 1439924 - RNA, 19 nt, Homo sapiens
  misc_RNA (1)...(19): siRNA sense strand
gaacccaaaggaaccauca

SEQ ID NO: 1439925 - RNA, 19 nt, Homo sapiens
  misc_RNA (1)...(19): siRNA sense strand
caagaaacacagaacaagu

SEQ ID NO: 1439926 - RNA, 19 nt, Homo sapiens
  misc_RNA (1)...(19): siRNA sense strand
uacagcgccuaacugaaua

SEQ ID NO: 1439927 - RNA, 19 nt, Homo sapiens
  misc_RNA (1)...(19): siRNA sense strand
uaugggaaguggacugaau

SEQ ID NO: 1439928 - RNA, 19 nt, Homo sapiens
  misc_RNA (1)...(19): siRNA sense strand
ggagcuccuugaacacaau

SEQ ID NO: 1439929 - RNA, 19 nt, Homo sapiens
  misc_RNA (1)...(19): siRNA sense strand
uuucauggcucuaucuauc

SEQ ID NO: 1439930 - RNA, 19 nt, Homo sapiens
  misc_RNA (1)...(19): siRNA sense strand
ucacgaugccaguuauauu

SEQ ID NO: 1439931 - RNA, 19 nt, Homo sapiens
  misc_RNA (1)...(19): siRNA sense strand
cgaacaguauggcaaugug

SEQ ID NO: 1439932 - RNA, 19 nt, Homo sapiens
  misc_RNA (1)...(19): siRNA sense strand
acaaugaggcauauacaug

SEQ ID NO: 1439933 - RNA, 19 nt, Homo sapiens
  misc_RNA (1)...(19): siRNA sense strand
ccuuggagcuccuugaaca

SEQ ID NO: 1439934 - RNA, 19 nt, Homo sapiens
  misc_RNA (1)...(19): siRNA sense strand
cugaaggauuaaacaauga

SEQ ID NO: 1439935 - RNA, 19 nt, Homo sapiens
  misc_RNA (1)...(19): siRNA sense strand
aagaaacacagaacaaguu

SEQ ID NO: 1439936 - RNA, 19 nt, Homo sapiens
  misc_RNA (1)...(19): siRNA sense strand
cugaauacauggagcauac

SEQ ID NO: 1439937 - RNA, 19 nt, Homo sapiens
  misc_RNA (1)...(19): siRNA sense strand
gccggauucugaaagugua

SEQ ID NO: 1439938 - RNA, 19 nt, Homo sapiens
  misc_RNA (1)...(19): siRNA sense strand
auacagaagagaagaagaa

SEQ ID NO: 1439939 - RNA, 19 nt, Homo sapiens
  misc_RNA (1)...(19): siRNA sense strand
gaauacauggagcauacuu

SEQ ID NO: 1439940 - RNA, 19 nt, Homo sapiens
  misc_RNA (1)...(19): siRNA sense strand
aagaacagcaaacagauga

SEQ ID NO: 1439941 - RNA, 19 nt, Homo sapiens
  misc_RNA (1)...(19): siRNA sense strand
gaucgaacaguauggcaau

SEQ ID NO: 1439942 - RNA, 19 nt, Homo sapiens
  misc_RNA (1)...(19): siRNA sense strand
uguagaagcagaacccaaa

SEQ ID NO: 1439943 - RNA, 19 nt, Homo sapiens
  misc_RNA (1)...(19): siRNA sense strand
gaagaagaacagcaaacag

SEQ ID NO: 1439944 - RNA, 19 nt, Homo sapiens
  misc_RNA (1)...(19): siRNA sense strand
cugaggaguuggaugaaau

SEQ ID NO: 1439945 - RNA, 19 nt, Homo sapiens
  misc_RNA (1)...(19): siRNA sense strand
ccacaagacuggggacaaa

SEQ ID NO: 1439946 - RNA, 19 nt, Homo sapiens
  misc_RNA (1)...(19): siRNA sense strand
gacaaauguguguugaauu

SEQ ID NO: 1439947 - RNA, 19 nt, Homo sapiens
  misc_RNA (1)...(19): siRNA sense strand
guauuggaauggaacuauc

SEQ ID NO: 1439948 - RNA, 19 nt, Homo sapiens
  misc_RNA (1)...(19): siRNA sense strand
gacaucagagccauggaaa

SEQ ID NO: 1439949 - RNA, 19 nt, Homo sapiens
  misc_RNA (1)...(19): siRNA sense strand
gagagugugauucccaaga

SEQ ID NO: 1439950 - RNA, 19 nt, Homo sapiens
  misc_RNA (1)...(19): siRNA sense strand
ggacugaauguuuauacag

SEQ ID NO: 1439951 - RNA, 19 nt, Homo sapiens
  misc_RNA (1)...(19): siRNA sense strand
ugaacacaaugaggcauau

SEQ ID NO: 1439952 - RNA, 19 nt, Homo sapiens
  misc_RNA (1)...(19): siRNA sense strand
ggaaaggaugcagugugua

SEQ ID NO: 1439953 - RNA, 19 nt, Homo sapiens
  misc_RNA (1)...(19): siRNA sense strand
cagaaaauguauuggaaug

SEQ ID NO: 1439954 - RNA, 19 nt, Homo sapiens
  misc_RNA (1)...(19): siRNA sense strand
ccaaucagugcauuucaug

SEQ ID NO: 1439955 - RNA, 19 nt, Homo sapiens
  misc_RNA (1)...(19): siRNA sense strand
agacauggagagugugauu

SEQ ID NO: 1439956 - RNA, 19 nt, Homo sapiens
  misc_RNA (1)...(19): siRNA sense strand
gaaugaaguagacaaagac

SEQ ID NO: 1439957 - RNA, 19 nt, Homo sapiens
  misc_RNA (1)...(19): siRNA sense strand
cugccacguuugacgcuua

SEQ ID NO: 1439958 - RNA, 19 nt, Homo sapiens
  misc_RNA (1)...(19): siRNA sense strand
ccugcugugugcauaauau

SEQ ID NO: 1439959 - RNA, 19 nt, Homo sapiens
  misc_RNA (1)...(19): siRNA sense strand
aagaucacgaugccaguua

SEQ ID NO: 1439960 - RNA, 19 nt, Homo sapiens
  misc_RNA (1)...(19): siRNA sense strand
caaggccaguucacucucu

SEQ ID NO: 1439961 - RNA, 19 nt, Homo sapiens
  misc_RNA (1)...(19): siRNA sense strand
gcagcuacugggacagaaa

SEQ ID NO: 1439962 - RNA, 19 nt, Homo sapiens
  misc_RNA (1)...(19): siRNA sense strand
guccuaaucccuacaaugg

SEQ ID NO: 1439963 - RNA, 19 nt, Homo sapiens
  misc_RNA (1)...(19): siRNA sense strand
aaacagguccaagucagaa

SEQ ID NO: 1439964 - RNA, 19 nt, Homo sapiens
  misc_RNA (1)...(19): siRNA sense strand
gaucaagcuagugaagaaa

SEQ ID NO: 1439965 - RNA, 19 nt, Homo sapiens
  misc_RNA (1)...(19): siRNA sense strand
cagaagagaagaagaacag

SEQ ID NO: 1439966 - RNA, 19 nt, Homo sapiens
  misc_RNA (1)...(19): siRNA sense strand
aggcuacauucaagauaaa

SEQ ID NO: 1439967 - RNA, 19 nt, Homo sapiens
  misc_RNA (1)...(19): siRNA sense strand
guagcugcguuugcuguau

SEQ ID NO: 1439968 - RNA, 19 nt, Homo sapiens
  misc_RNA (1)...(19): siRNA sense strand
ugacaucagagccauggaa

SEQ ID NO: 1439969 - RNA, 19 nt, Homo sapiens
  misc_RNA (1)...(19): siRNA sense strand
agauagaucaagcuaguga

SEQ ID NO: 1439970 - RNA, 19 nt, Homo sapiens
  misc_RNA (1)...(19): siRNA sense strand
gaaguggacugaauguuua

SEQ ID NO: 1439971 - RNA, 19 nt, Homo sapiens
  misc_RNA (1)...(19): siRNA sense strand
ggacagaaauuacuucaau

SEQ ID NO: 1439972 - RNA, 19 nt, Homo sapiens
  misc_RNA (1)...(19): siRNA sense strand
ggacaaauguguguugaau

SEQ ID NO: 1439973 - RNA, 19 nt, Homo sapiens
  misc_RNA (1)...(19): siRNA sense strand
ggaaguggacugaauguuu

SEQ ID NO: 1439974 - RNA, 19 nt, Homo sapiens
  misc_RNA (1)...(19): siRNA sense strand
gcauauacauggacaaauc

SEQ ID NO: 1439975 - RNA, 19 nt, Homo sapiens
  misc_RNA (1)...(19): siRNA sense strand
caagacagacugcagguua

SEQ ID NO: 1439976 - RNA, 19 nt, Homo sapiens
  misc_RNA (1)...(19): siRNA sense strand
gcacaggacuggauuuacu

SEQ ID NO: 1439977 - RNA, 19 nt, Homo sapiens
  misc_RNA (1)...(19): siRNA sense strand
ucaauuugccugacauuua

SEQ ID NO: 1439978 - RNA, 19 nt, Homo sapiens
  misc_RNA (1)...(19): siRNA sense strand
gaaaguguauucauuaucc

SEQ ID NO: 1439979 - RNA, 19 nt, Homo sapiens
  misc_RNA (1)...(19): siRNA sense strand
gcugaaggauuaaacaaug

SEQ ID NO: 1439980 - RNA, 19 nt, Homo sapiens
  misc_RNA (1)...(19): siRNA sense strand
caauuugccugacauuuau

SEQ ID NO: 1439981 - RNA, 19 nt, Homo sapiens
  misc_RNA (1)...(19): siRNA sense strand
cacugaacaucaugaauua

SEQ ID NO: 1439982 - RNA, 19 nt, Homo sapiens
  misc_RNA (1)...(19): siRNA sense strand
agaaaugacuucaguaucu

SEQ ID NO: 1439983 - RNA, 19 nt, Homo sapiens
  misc_RNA (1)...(19): siRNA sense strand
ugaaugaaguagacaaaga

SEQ ID NO: 1439984 - RNA, 19 nt, Homo sapiens
  misc_RNA (1)...(19): siRNA sense strand
gcgccuaacugaauacaug

SEQ ID NO: 1439985 - RNA, 19 nt, Homo sapiens
  misc_RNA (1)...(19): siRNA sense strand
ccacugaacaucaugaauu

SEQ ID NO: 1439986 - RNA, 19 nt, Homo sapiens
  misc_RNA (1)...(19): siRNA sense strand
acaaagacauggagagugu

SEQ ID NO: 1439987 - RNA, 19 nt, Homo sapiens
  misc_RNA (1)...(19): siRNA sense strand
gaagcucugugcccucuau

SEQ ID NO: 1439988 - RNA, 19 nt, Homo sapiens
  misc_RNA (1)...(19): siRNA sense strand
ggaauuacacaaaguugaa

SEQ ID NO: 1439989 - RNA, 19 nt, Homo sapiens
  misc_RNA (1)...(19): siRNA sense strand
gagcacaggacuggauuua

SEQ ID NO: 1439990 - RNA, 19 nt, Homo sapiens
  misc_RNA (1)...(19): siRNA sense strand
gaaaugacuucaguaucug

SEQ ID NO: 1439991 - RNA, 19 nt, Homo sapiens
  misc_RNA (1)...(19): siRNA sense strand
ccaauggcaucaagaaaca

SEQ ID NO: 1439992 - RNA, 19 nt, Homo sapiens
  misc_RNA (1)...(19): siRNA sense strand
gaaaggaugcaguguguag

SEQ ID NO: 1439993 - RNA, 19 nt, Homo sapiens
  misc_RNA (1)...(19): siRNA sense strand
ggagagcauuugggcagua

SEQ ID NO: 1439994 - RNA, 19 nt, Homo sapiens
  misc_RNA (1)...(19): siRNA sense strand
gaaaggucccugaguagau

SEQ ID NO: 1439995 - RNA, 19 nt, Homo sapiens
  misc_RNA (1)...(19): siRNA sense strand
gaauguuuauacaguguug

SEQ ID NO: 1439996 - RNA, 19 nt, Homo sapiens
  misc_RNA (1)...(19): siRNA sense strand
gaaggcuacauucaagaua

SEQ ID NO: 1439997 - RNA, 19 nt, Homo sapiens
  misc_RNA (1)...(19): siRNA sense strand
auacuuaccucauccacaa

SEQ ID NO: 1439998 - RNA, 19 nt, Homo sapiens
  misc_RNA (1)...(19): siRNA sense strand
gcccagauguauaauuuua

SEQ ID NO: 1439999 - RNA, 19 nt, Homo sapiens
  misc_RNA (1)...(19): siRNA sense strand
gaagaacagcaaacagaug

SEQ ID NO: 1440000 - RNA, 19 nt, Homo sapiens
  misc_RNA (1)...(19): siRNA sense strand
gaggacgaguucuaugaug

SEQ ID NO: 1440001 - RNA, 19 nt, Homo sapiens
  misc_RNA (1)...(19): siRNA sense strand
acaaagagcagcccgcaaa

SEQ ID NO: 1440002 - RNA, 19 nt, Homo sapiens
  misc_RNA (1)...(19): siRNA sense strand
agagauagaucaagcuagu

SEQ ID NO: 1440003 - RNA, 19 nt, Homo sapiens
  misc_RNA (1)...(19): siRNA sense strand
ggagagauagaucaagcua

SEQ ID NO: 1440004 - RNA, 19 nt, Homo sapiens
  misc_RNA (1)...(19): siRNA sense strand
cugcccagauguauaauuu

SEQ ID NO: 1440005 - RNA, 19 nt, Homo sapiens
  misc_RNA (1)...(19): siRNA sense strand
cgaugccaguuauauuuaa

SEQ ID NO: 1440006 - RNA, 19 nt, Homo sapiens
  misc_RNA (1)...(19): siRNA sense strand
uggagacgcuggccacuga

SEQ ID NO: 1440007 - RNA, 19 nt, Homo sapiens
  misc_RNA (1)...(19): siRNA sense strand
cuacagcgccuaacugaau

SEQ ID NO: 1440008 - RNA, 19 nt, Homo sapiens
  misc_RNA (1)...(19): siRNA sense strand
aaaggucccugaguagauu

SEQ ID NO: 1440009 - RNA, 19 nt, Homo sapiens
  misc_RNA (1)...(19): siRNA sense strand
gaaaugccagugccggauu

SEQ ID NO: 1440010 - RNA, 19 nt, Homo sapiens
  misc_RNA (1)...(19): siRNA sense strand
gaacacaaugaggcauaua

SEQ ID NO: 1440011 - RNA, 19 nt, Homo sapiens
  misc_RNA (1)...(19): siRNA sense strand
uccgaaaggucccugagua

SEQ ID NO: 1440012 - RNA, 19 nt, Homo sapiens
  misc_RNA (1)...(19): siRNA sense strand
agaucaagcuagugaagaa

SEQ ID NO: 1440013 - RNA, 19 nt, Homo sapiens
  misc_RNA (1)...(19): siRNA sense strand
aaggcuacauucaagauaa

SEQ ID NO: 1440014 - RNA, 19 nt, Homo sapiens
  misc_RNA (1)...(19): siRNA sense strand
ccagaaaugacuucaguau

SEQ ID NO: 1440015 - RNA, 19 nt, Homo sapiens
  misc_RNA (1)...(19): siRNA sense strand
gaaaauguauuggaaugga

SEQ ID NO: 1440016 - RNA, 19 nt, Homo sapiens
  misc_RNA (1)...(19): siRNA sense strand
gcgaggacgaguucuauga

SEQ ID NO: 1440017 - RNA, 19 nt, Homo sapiens
  misc_RNA (1)...(19): siRNA sense strand
guauggcaauguggaaauu

SEQ ID NO: 1440018 - RNA, 19 nt, Homo sapiens
  misc_RNA (1)...(19): siRNA sense strand
ugacagcacgcuccuuuga

SEQ ID NO: 1440019 - RNA, 19 nt, Homo sapiens
  misc_RNA (1)...(19): siRNA sense strand
ugaaguagacaaagacaug

SEQ ID NO: 1440020 - RNA, 19 nt, Homo sapiens
  misc_RNA (1)...(19): siRNA sense strand
caaaguugaaggcuacauu

SEQ ID NO: 1440021 - RNA, 19 nt, Homo sapiens
  misc_RNA (1)...(19): siRNA sense strand
uggaaaggaugcagugugu

SEQ ID NO: 1440022 - RNA, 19 nt, Homo sapiens
  misc_RNA (1)...(19): siRNA sense strand
ggagcauacuuaccucauc

SEQ ID NO: 1440023 - RNA, 19 nt, Homo sapiens
  misc_RNA (1)...(19): siRNA sense strand
uuaaugagccucugagcuu

SEQ ID NO: 1440024 - RNA, 19 nt, Homo sapiens
  misc_RNA (1)...(19): siRNA sense strand
caaguuugccuucuccuau

SEQ ID NO: 1440025 - RNA, 19 nt, Homo sapiens
  misc_RNA (1)...(19): siRNA sense strand
cacgaugccaguuauauuu

SEQ ID NO: 1440026 - RNA, 19 nt, Homo sapiens
  misc_RNA (1)...(19): siRNA sense strand
gaagaguguagaagcagaa

SEQ ID NO: 1440027 - RNA, 19 nt, Homo sapiens
  misc_RNA (1)...(19): siRNA sense strand
gcuacugggacagaaauua

SEQ ID NO: 1440028 - RNA, 19 nt, Homo sapiens
  misc_RNA (1)...(19): siRNA sense strand
ggcaauguggaaauuauaa

SEQ ID NO: 1440029 - RNA, 19 nt, Homo sapiens
  misc_RNA (1)...(19): siRNA sense strand
gaagcagaacccaaaggaa

SEQ ID NO: 1440030 - RNA, 19 nt, Homo sapiens
  misc_RNA (1)...(19): siRNA sense strand
cacagaauguccgaagaaa

SEQ ID NO: 1440031 - RNA, 19 nt, Homo sapiens
  misc_RNA (1)...(19): siRNA sense strand
gaucacgaugccaguuaua

SEQ ID NO: 1440032 - RNA, 19 nt, Homo sapiens
  misc_RNA (1)...(19): siRNA sense strand
caagaaacacagaacaagu

SEQ ID NO: 1440033 - RNA, 19 nt, Homo sapiens
  misc_RNA (1)...(19): siRNA sense strand
cauggaaaauggagagaua

SEQ ID NO: 1440034 - RNA, 19 nt, Homo sapiens
  misc_RNA (1)...(19): siRNA sense strand
aagaagaacagcaaacaga

SEQ ID NO: 1440035 - RNA, 19 nt, Homo sapiens
  misc_RNA (1)...(19): siRNA sense strand
uaaauuggaacaagagcaa

SEQ ID NO: 1440036 - RNA, 19 nt, Homo sapiens
  misc_RNA (1)...(19): siRNA sense strand
gaacccaaaggaaccauca

SEQ ID NO: 1440037 - RNA, 19 nt, Homo sapiens
  misc_RNA (1)...(19): siRNA sense strand
uaucugcuguugcuucuca

SEQ ID NO: 1440038 - RNA, 19 nt, Homo sapiens
  misc_RNA (1)...(19): siRNA sense strand
uacagcgccuaacugaaua

SEQ ID NO: 1440039 - RNA, 19 nt, Homo sapiens
  misc_RNA (1)...(19): siRNA sense strand
uaugggaaguggacugaau

SEQ ID NO: 1440040 - RNA, 19 nt, Homo sapiens
  misc_RNA (1)...(19): siRNA sense strand
ggagcuccuugaacacaau

SEQ ID NO: 1440041 - RNA, 19 nt, Homo sapiens
  misc_RNA (1)...(19): siRNA sense strand
uuucauggcucuaucuauc

SEQ ID NO: 1440042 - RNA, 19 nt, Homo sapiens
  misc_RNA (1)...(19): siRNA sense strand
aagaaacacagaacaaguu

SEQ ID NO: 1440043 - RNA, 19 nt, Homo sapiens
  misc_RNA (1)...(19): siRNA sense strand
cgaacaguauggcaaugug

SEQ ID NO: 1440044 - RNA, 19 nt, Homo sapiens
  misc_RNA (1)...(19): siRNA sense strand
acaaugaggcauauacaug

SEQ ID NO: 1440045 - RNA, 19 nt, Homo sapiens
  misc_RNA (1)...(19): siRNA sense strand
ccuuggagcuccuugaaca

SEQ ID NO: 1440046 - RNA, 19 nt, Homo sapiens
  misc_RNA (1)...(19): siRNA sense strand
cugaaggauuaaacaauga

SEQ ID NO: 1440047 - RNA, 19 nt, Homo sapiens
  misc_RNA (1)...(19): siRNA sense strand
ucacgaugccaguuauauu

SEQ ID NO: 1440048 - RNA, 19 nt, Homo sapiens
  misc_RNA (1)...(19): siRNA sense strand
cugaauacauggagcauac

SEQ ID NO: 1440049 - RNA, 19 nt, Homo sapiens
  misc_RNA (1)...(19): siRNA sense strand
gccggauucugaaagugua

SEQ ID NO: 1440050 - RNA, 19 nt, Homo sapiens
  misc_RNA (1)...(19): siRNA sense strand
auacagaagagaagaagaa

SEQ ID NO: 1440051 - RNA, 19 nt, Homo sapiens
  misc_RNA (1)...(19): siRNA sense strand
gaagaggaaggagagcauu

SEQ ID NO: 1440052 - RNA, 19 nt, Homo sapiens
  misc_RNA (1)...(19): siRNA sense strand
gagcauuugggcaguagaa

SEQ ID NO: 1440053 - RNA, 19 nt, Homo sapiens
  misc_RNA (1)...(19): siRNA sense strand
aagaacagcaaacagauga

SEQ ID NO: 1440054 - RNA, 19 nt, Homo sapiens
  misc_RNA (1)...(19): siRNA sense strand
gaucgaacaguauggcaau

SEQ ID NO: 1440055 - RNA, 19 nt, Homo sapiens
  misc_RNA (1)...(19): siRNA sense strand
uguagaagcagaacccaaa

SEQ ID NO: 1440056 - RNA, 19 nt, Homo sapiens
  misc_RNA (1)...(19): siRNA sense strand
gaauacauggagcauacuu

SEQ ID NO: 1440057 - RNA, 19 nt, Homo sapiens
  misc_RNA (1)...(19): siRNA sense strand
gaagaagaacagcaaacag

SEQ ID NO: 1440058 - RNA, 19 nt, Homo sapiens
  misc_RNA (1)...(19): siRNA sense strand
cugaggaguuggaugaaau

SEQ ID NO: 1440059 - RNA, 19 nt, Homo sapiens
  misc_RNA (1)...(19): siRNA sense strand
acacagaauguccgaagaa

SEQ ID NO: 1440060 - RNA, 19 nt, Homo sapiens
  misc_RNA (1)...(19): siRNA sense strand
gacaaauguguguugaauu

SEQ ID NO: 1440061 - RNA, 19 nt, Homo sapiens
  misc_RNA (1)...(19): siRNA sense strand
ccacaagacuggggacaaa

SEQ ID NO: 1440062 - RNA, 19 nt, Homo sapiens
  misc_RNA (1)...(19): siRNA sense strand
guauuggaauggaacuauc

SEQ ID NO: 1440063 - RNA, 19 nt, Homo sapiens
  misc_RNA (1)...(19): siRNA sense strand
gacaucagagccauggaaa

SEQ ID NO: 1440064 - RNA, 19 nt, Homo sapiens
  misc_RNA (1)...(19): siRNA sense strand
gagagugugauucccaaga

SEQ ID NO: 1440065 - RNA, 19 nt, Homo sapiens
  misc_RNA (1)...(19): siRNA sense strand
ggacugaauguuuauacag

SEQ ID NO: 1440066 - RNA, 19 nt, Homo sapiens
  misc_RNA (1)...(19): siRNA sense strand
augaugcgcugucagauuc

SEQ ID NO: 1440067 - RNA, 19 nt, Homo sapiens
  misc_RNA (1)...(19): siRNA sense strand
ugaacacaaugaggcauau

SEQ ID NO: 1440068 - RNA, 19 nt, Homo sapiens
  misc_RNA (1)...(19): siRNA sense strand
cgaaaggucccugaguaga

SEQ ID NO: 1440069 - RNA, 19 nt, Homo sapiens
  misc_RNA (1)...(19): siRNA sense strand
ggaaaggaugcagugugua

SEQ ID NO: 1440070 - RNA, 19 nt, Homo sapiens
  misc_RNA (1)...(19): siRNA sense strand
gaaguggacugaauguuua

SEQ ID NO: 1440071 - RNA, 19 nt, Homo sapiens
  misc_RNA (1)...(19): siRNA sense strand
ggacagaaauuacuucaau

SEQ ID NO: 1440072 - RNA, 19 nt, Homo sapiens
  misc_RNA (1)...(19): siRNA sense strand
ggacaaauguguguugaau

SEQ ID NO: 1440073 - RNA, 19 nt, Homo sapiens
  misc_RNA (1)...(19): siRNA sense strand
ggaaguggacugaauguuu

SEQ ID NO: 1440074 - RNA, 19 nt, Homo sapiens
  misc_RNA (1)...(19): siRNA sense strand
gcauauacauggacaaauc

SEQ ID NO: 1440075 - RNA, 19 nt, Homo sapiens
  misc_RNA (1)...(19): siRNA sense strand
caagacagacugcagguua

SEQ ID NO: 1440076 - RNA, 19 nt, Homo sapiens
  misc_RNA (1)...(19): siRNA sense strand
gcacaggacuggauuuacu

SEQ ID NO: 1440077 - RNA, 19 nt, Homo sapiens
  misc_RNA (1)...(19): siRNA sense strand
ucaauuugccugacauuua

SEQ ID NO: 1440078 - RNA, 19 nt, Homo sapiens
  misc_RNA (1)...(19): siRNA sense strand
gaaaguguauucauuaucc

SEQ ID NO: 1440079 - RNA, 19 nt, Homo sapiens
  misc_RNA (1)...(19): siRNA sense strand
gcugaaggauuaaacaaug

SEQ ID NO: 1440080 - RNA, 19 nt, Homo sapiens
  misc_RNA (1)...(19): siRNA sense strand
caauuugccugacauuuau

SEQ ID NO: 1440081 - RNA, 19 nt, Homo sapiens
  misc_RNA (1)...(19): siRNA sense strand
cacugaacaucaugaauua

SEQ ID NO: 1440082 - RNA, 19 nt, Homo sapiens
  misc_RNA (1)...(19): siRNA sense strand
agaaaugacuucaguaucu

SEQ ID NO: 1440083 - RNA, 19 nt, Homo sapiens
  misc_RNA (1)...(19): siRNA sense strand
ugaaugaaguagacaaaga

SEQ ID NO: 1440084 - RNA, 19 nt, Homo sapiens
  misc_RNA (1)...(19): siRNA sense strand
gcgccuaacugaauacaug

SEQ ID NO: 1440085 - RNA, 19 nt, Homo sapiens
  misc_RNA (1)...(19): siRNA sense strand
ccacugaacaucaugaauu

SEQ ID NO: 1440086 - RNA, 19 nt, Homo sapiens
  misc_RNA (1)...(19): siRNA sense strand
acaaagacauggagagugu

SEQ ID NO: 1440087 - RNA, 19 nt, Homo sapiens
  misc_RNA (1)...(19): siRNA sense strand
gaagcucugugcccucuau

SEQ ID NO: 1440088 - RNA, 19 nt, Homo sapiens
  misc_RNA (1)...(19): siRNA sense strand
ggaauuacacaaaguugaa

SEQ ID NO: 1440089 - RNA, 19 nt, Homo sapiens
  misc_RNA (1)...(19): siRNA sense strand
gagcacaggacuggauuua

SEQ ID NO: 1440090 - RNA, 19 nt, Homo sapiens
  misc_RNA (1)...(19): siRNA sense strand
gaaaugacuucaguaucug

SEQ ID NO: 1440091 - RNA, 19 nt, Homo sapiens
  misc_RNA (1)...(19): siRNA sense strand
ccaauggcaucaagaaaca

SEQ ID NO: 1440092 - RNA, 19 nt, Homo sapiens
  misc_RNA (1)...(19): siRNA sense strand
gaaaggaugcaguguguag

SEQ ID NO: 1440093 - RNA, 19 nt, Homo sapiens
  misc_RNA (1)...(19): siRNA sense strand
ggagagcauuugggcagua

SEQ ID NO: 1440094 - RNA, 19 nt, Homo sapiens
  misc_RNA (1)...(19): siRNA sense strand
gaaaggucccugaguagau

SEQ ID NO: 1440095 - RNA, 19 nt, Homo sapiens
  misc_RNA (1)...(19): siRNA sense strand
gaauguuuauacaguguug

SEQ ID NO: 1440096 - RNA, 19 nt, Homo sapiens
  misc_RNA (1)...(19): siRNA sense strand
gaaggcuacauucaagaua

SEQ ID NO: 1440097 - RNA, 19 nt, Homo sapiens
  misc_RNA (1)...(19): siRNA sense strand
auacuuaccucauccacaa

SEQ ID NO: 1440098 - RNA, 19 nt, Homo sapiens
  misc_RNA (1)...(19): siRNA sense strand
gcccagauguauaauuuua

SEQ ID NO: 1440099 - RNA, 19 nt, Homo sapiens
  misc_RNA (1)...(19): siRNA sense strand
gaagaacagcaaacagaug

SEQ ID NO: 1440100 - RNA, 19 nt, Homo sapiens
  misc_RNA (1)...(19): siRNA sense strand
gaggacgaguucuaugaug

SEQ ID NO: 1440101 - RNA, 19 nt, Homo sapiens
  misc_RNA (1)...(19): siRNA sense strand
acaaagagcagcccgcaaa

SEQ ID NO: 1440102 - RNA, 19 nt, Homo sapiens
  misc_RNA (1)...(19): siRNA sense strand
agagauagaucaagcuagu

SEQ ID NO: 1440103 - RNA, 19 nt, Homo sapiens
  misc_RNA (1)...(19): siRNA sense strand
ggagagauagaucaagcua

SEQ ID NO: 1440104 - RNA, 19 nt, Homo sapiens
  misc_RNA (1)...(19): siRNA sense strand
cugcccagauguauaauuu

SEQ ID NO: 1440105 - RNA, 19 nt, Homo sapiens
  misc_RNA (1)...(19): siRNA sense strand
cgaugccaguuauauuuaa

SEQ ID NO: 1440106 - RNA, 19 nt, Homo sapiens
  misc_RNA (1)...(19): siRNA sense strand
uggagacgcuggccacuga

SEQ ID NO: 1440107 - RNA, 19 nt, Homo sapiens
  misc_RNA (1)...(19): siRNA sense strand
cuacagcgccuaacugaau

SEQ ID NO: 1440108 - RNA, 19 nt, Homo sapiens
  misc_RNA (1)...(19): siRNA sense strand
aaaggucccugaguagauu

SEQ ID NO: 1440109 - RNA, 19 nt, Homo sapiens
  misc_RNA (1)...(19): siRNA sense strand
gaaaugccagugccggauu

SEQ ID NO: 1440110 - RNA, 19 nt, Homo sapiens
  misc_RNA (1)...(19): siRNA sense strand
gaacacaaugaggcauaua

SEQ ID NO: 1440111 - RNA, 19 nt, Homo sapiens
  misc_RNA (1)...(19): siRNA sense strand
uccgaaaggucccugagua

SEQ ID NO: 1440112 - RNA, 19 nt, Homo sapiens
  misc_RNA (1)...(19): siRNA sense strand
agaucaagcuagugaagaa

SEQ ID NO: 1440113 - RNA, 19 nt, Homo sapiens
  misc_RNA (1)...(19): siRNA sense strand
aaggcuacauucaagauaa

SEQ ID NO: 1440114 - RNA, 19 nt, Homo sapiens
  misc_RNA (1)...(19): siRNA sense strand
ccagaaaugacuucaguau

SEQ ID NO: 1440115 - RNA, 19 nt, Homo sapiens
  misc_RNA (1)...(19): siRNA sense strand
gaaaauguauuggaaugga

SEQ ID NO: 1440116 - RNA, 19 nt, Homo sapiens
  misc_RNA (1)...(19): siRNA sense strand
gcgaggacgaguucuauga

SEQ ID NO: 1440117 - RNA, 19 nt, Homo sapiens
  misc_RNA (1)...(19): siRNA sense strand
guauggcaauguggaaauu

SEQ ID NO: 1440118 - RNA, 19 nt, Homo sapiens
  misc_RNA (1)...(19): siRNA sense strand
ugacagcacgcuccuuuga

SEQ ID NO: 1440119 - RNA, 19 nt, Homo sapiens
  misc_RNA (1)...(19): siRNA sense strand
ugaaguagacaaagacaug

SEQ ID NO: 1440120 - RNA, 19 nt, Homo sapiens
  misc_RNA (1)...(19): siRNA sense strand
caaaguugaaggcuacauu

SEQ ID NO: 1440121 - RNA, 19 nt, Homo sapiens
  misc_RNA (1)...(19): siRNA sense strand
uggaaaggaugcagugugu

SEQ ID NO: 1440122 - RNA, 19 nt, Homo sapiens
  misc_RNA (1)...(19): siRNA sense strand
ggagcauacuuaccucauc

SEQ ID NO: 1440123 - RNA, 19 nt, Homo sapiens
  misc_RNA (1)...(19): siRNA sense strand
uuaaugagccucugagcuu

SEQ ID NO: 1440124 - RNA, 19 nt, Homo sapiens
  misc_RNA (1)...(19): siRNA sense strand
caaguuugccuucuccuau

SEQ ID NO: 1440125 - RNA, 19 nt, Homo sapiens
  misc_RNA (1)...(19): siRNA sense strand
cacgaugccaguuauauuu

SEQ ID NO: 1440126 - RNA, 19 nt, Homo sapiens
  misc_RNA (1)...(19): siRNA sense strand
gaagaguguagaagcagaa

SEQ ID NO: 1440127 - RNA, 19 nt, Homo sapiens
  misc_RNA (1)...(19): siRNA sense strand
gcuacugggacagaaauua

SEQ ID NO: 1440128 - RNA, 19 nt, Homo sapiens
  misc_RNA (1)...(19): siRNA sense strand
ggcaauguggaaauuauaa

SEQ ID NO: 1440129 - RNA, 19 nt, Homo sapiens
  misc_RNA (1)...(19): siRNA sense strand
gaagcagaacccaaaggaa

SEQ ID NO: 1440130 - RNA, 19 nt, Homo sapiens
  misc_RNA (1)...(19): siRNA sense strand
cacagaauguccgaagaaa

SEQ ID NO: 1440131 - RNA, 19 nt, Homo sapiens
  misc_RNA (1)...(19): siRNA sense strand
gaucacgaugccaguuaua

SEQ ID NO: 1440132 - RNA, 19 nt, Homo sapiens
  misc_RNA (1)...(19): siRNA sense strand
caagaaacacagaacaagu

SEQ ID NO: 1440133 - RNA, 19 nt, Homo sapiens
  misc_RNA (1)...(19): siRNA sense strand
cauggaaaauggagagaua

SEQ ID NO: 1440134 - RNA, 19 nt, Homo sapiens
  misc_RNA (1)...(19): siRNA sense strand
aagaagaacagcaaacaga

SEQ ID NO: 1440135 - RNA, 19 nt, Homo sapiens
  misc_RNA (1)...(19): siRNA sense strand
uaaauuggaacaagagcaa

SEQ ID NO: 1440136 - RNA, 19 nt, Homo sapiens
  misc_RNA (1)...(19): siRNA sense strand
gaacccaaaggaaccauca

SEQ ID NO: 1440137 - RNA, 19 nt, Homo sapiens
  misc_RNA (1)...(19): siRNA sense strand
uaucugcuguugcuucuca

SEQ ID NO: 1440138 - RNA, 19 nt, Homo sapiens
  misc_RNA (1)...(19): siRNA sense strand
uacagcgccuaacugaaua

SEQ ID NO: 1440139 - RNA, 19 nt, Homo sapiens
  misc_RNA (1)...(19): siRNA sense strand
uaugggaaguggacugaau

SEQ ID NO: 1440140 - RNA, 19 nt, Homo sapiens
  misc_RNA (1)...(19): siRNA sense strand
ggagcuccuugaacacaau

SEQ ID NO: 1440141 - RNA, 19 nt, Homo sapiens
  misc_RNA (1)...(19): siRNA sense strand
uuucauggcucuaucuauc

SEQ ID NO: 1440142 - RNA, 19 nt, Homo sapiens
  misc_RNA (1)...(19): siRNA sense strand
aagaaacacagaacaaguu

SEQ ID NO: 1440143 - RNA, 19 nt, Homo sapiens
  misc_RNA (1)...(19): siRNA sense strand
cgaacaguauggcaaugug

SEQ ID NO: 1440144 - RNA, 19 nt, Homo sapiens
  misc_RNA (1)...(19): siRNA sense strand
acaaugaggcauauacaug

SEQ ID NO: 1440145 - RNA, 19 nt, Homo sapiens
  misc_RNA (1)...(19): siRNA sense strand
ccuuggagcuccuugaaca

SEQ ID NO: 1440146 - RNA, 19 nt, Homo sapiens
  misc_RNA (1)...(19): siRNA sense strand
cugaaggauuaaacaauga

SEQ ID NO: 1440147 - RNA, 19 nt, Homo sapiens
  misc_RNA (1)...(19): siRNA sense strand
ucacgaugccaguuauauu

SEQ ID NO: 1440148 - RNA, 19 nt, Homo sapiens
  misc_RNA (1)...(19): siRNA sense strand
cugaauacauggagcauac

SEQ ID NO: 1440149 - RNA, 19 nt, Homo sapiens
  misc_RNA (1)...(19): siRNA sense strand
gccggauucugaaagugua

SEQ ID NO: 1440150 - RNA, 19 nt, Homo sapiens
  misc_RNA (1)...(19): siRNA sense strand
auacagaagagaagaagaa

SEQ ID NO: 1440151 - RNA, 19 nt, Homo sapiens
  misc_RNA (1)...(19): siRNA sense strand
gaagaggaaggagagcauu

SEQ ID NO: 1440152 - RNA, 19 nt, Homo sapiens
  misc_RNA (1)...(19): siRNA sense strand
gagcauuugggcaguagaa

SEQ ID NO: 1440153 - RNA, 19 nt, Homo sapiens
  misc_RNA (1)...(19): siRNA sense strand
aagaacagcaaacagauga

SEQ ID NO: 1440154 - RNA, 19 nt, Homo sapiens
  misc_RNA (1)...(19): siRNA sense strand
gaucgaacaguauggcaau

SEQ ID NO: 1440155 - RNA, 19 nt, Homo sapiens
  misc_RNA (1)...(19): siRNA sense strand
uguagaagcagaacccaaa

SEQ ID NO: 1440156 - RNA, 19 nt, Homo sapiens
  misc_RNA (1)...(19): siRNA sense strand
gaauacauggagcauacuu

SEQ ID NO: 1440157 - RNA, 19 nt, Homo sapiens
  misc_RNA (1)...(19): siRNA sense strand
gaagaagaacagcaaacag

SEQ ID NO: 1440158 - RNA, 19 nt, Homo sapiens
  misc_RNA (1)...(19): siRNA sense strand
cugaggaguuggaugaaau

SEQ ID NO: 1440159 - RNA, 19 nt, Homo sapiens
  misc_RNA (1)...(19): siRNA sense strand
acacagaauguccgaagaa

SEQ ID NO: 1440160 - RNA, 19 nt, Homo sapiens
  misc_RNA (1)...(19): siRNA sense strand
gacaaauguguguugaauu

SEQ ID NO: 1440161 - RNA, 19 nt, Homo sapiens
  misc_RNA (1)...(19): siRNA sense strand
ccacaagacuggggacaaa

SEQ ID NO: 1440162 - RNA, 19 nt, Homo sapiens
  misc_RNA (1)...(19): siRNA sense strand
guauuggaauggaacuauc

SEQ ID NO: 1440163 - RNA, 19 nt, Homo sapiens
  misc_RNA (1)...(19): siRNA sense strand
gacaucagagccauggaaa

SEQ ID NO: 1440164 - RNA, 19 nt, Homo sapiens
  misc_RNA (1)...(19): siRNA sense strand
gagagugugauucccaaga

SEQ ID NO: 1440165 - RNA, 19 nt, Homo sapiens
  misc_RNA (1)...(19): siRNA sense strand
ggacugaauguuuauacag

SEQ ID NO: 1440166 - RNA, 19 nt, Homo sapiens
  misc_RNA (1)...(19): siRNA sense strand
augaugcgcugucagauuc

SEQ ID NO: 1440167 - RNA, 19 nt, Homo sapiens
  misc_RNA (1)...(19): siRNA sense strand
ugaacacaaugaggcauau

SEQ ID NO: 1440168 - RNA, 19 nt, Homo sapiens
  misc_RNA (1)...(19): siRNA sense strand
cgaaaggucccugaguaga

SEQ ID NO: 1440169 - RNA, 19 nt, Homo sapiens
  misc_RNA (1)...(19): siRNA sense strand
ggaaaggaugcagugugua

SEQ ID NO: 1440170 - RNA, 19 nt, Homo sapiens
  misc_RNA (1)...(19): siRNA sense strand
gaugaucacuuuccagaua

SEQ ID NO: 1440171 - RNA, 19 nt, Homo sapiens
  misc_RNA (1)...(19): siRNA sense strand
guacagagcuuccggaaag

SEQ ID NO: 1440172 - RNA, 19 nt, Homo sapiens
  misc_RNA (1)...(19): siRNA sense strand
ggacacaaaucacaaugaa

SEQ ID NO: 1440173 - RNA, 19 nt, Homo sapiens
  misc_RNA (1)...(19): siRNA sense strand
gaaaggcgcuagaauugau

SEQ ID NO: 1440174 - RNA, 19 nt, Homo sapiens
  misc_RNA (1)...(19): siRNA sense strand
ccagauugcucucuaauga

SEQ ID NO: 1440175 - RNA, 19 nt, Homo sapiens
  misc_RNA (1)...(19): siRNA sense strand
gaagaaagaagaaacaaga

SEQ ID NO: 1440176 - RNA, 19 nt, Homo sapiens
  misc_RNA (1)...(19): siRNA sense strand
agacaaagaugaagaugaa

SEQ ID NO: 1440177 - RNA, 19 nt, Homo sapiens
  misc_RNA (1)...(19): siRNA sense strand
gaagagaagguauaugaaa

SEQ ID NO: 1440178 - RNA, 19 nt, Homo sapiens
  misc_RNA (1)...(19): siRNA sense strand
gaauagaaaucuccacagu

SEQ ID NO: 1440179 - RNA, 19 nt, Homo sapiens
  misc_RNA (1)...(19): siRNA sense strand
gcaguugaauccauauuug

SEQ ID NO: 1440180 - RNA, 19 nt, Homo sapiens
  misc_RNA (1)...(19): siRNA sense strand
gaaaucuagugaaugauga

SEQ ID NO: 1440181 - RNA, 19 nt, Homo sapiens
  misc_RNA (1)...(19): siRNA sense strand
gcaguuguauguggaauuu

SEQ ID NO: 1440182 - RNA, 19 nt, Homo sapiens
  misc_RNA (1)...(19): siRNA sense strand
aaacugaacuugguguuaa

SEQ ID NO: 1440183 - RNA, 19 nt, Homo sapiens
  misc_RNA (1)...(19): siRNA sense strand
caagaaaggcgcuagaauu

SEQ ID NO: 1440184 - RNA, 19 nt, Homo sapiens
  misc_RNA (1)...(19): siRNA sense strand
gaaggaauuugucaaucuu

SEQ ID NO: 1440185 - RNA, 19 nt, Homo sapiens
  misc_RNA (1)...(19): siRNA sense strand
gaaugagguucuagaaaug

SEQ ID NO: 1440186 - RNA, 19 nt, Homo sapiens
  misc_RNA (1)...(19): siRNA sense strand
ugaaugagguucuagaaau

SEQ ID NO: 1440187 - RNA, 19 nt, Homo sapiens
  misc_RNA (1)...(19): siRNA sense strand
ggaaggaauuugucaaucu

SEQ ID NO: 1440188 - RNA, 19 nt, Homo sapiens
  misc_RNA (1)...(19): siRNA sense strand
gaaaaccacuuaucccuuu

SEQ ID NO: 1440189 - RNA, 19 nt, Homo sapiens
  misc_RNA (1)...(19): siRNA sense strand
caaugaaucucccuuaaag

SEQ ID NO: 1440190 - RNA, 19 nt, Homo sapiens
  misc_RNA (1)...(19): siRNA sense strand
uaacagaagagaagguaua

SEQ ID NO: 1440191 - RNA, 19 nt, Homo sapiens
  misc_RNA (1)...(19): siRNA sense strand
gaaacugaacuugguguua

SEQ ID NO: 1440192 - RNA, 19 nt, Homo sapiens
  misc_RNA (1)...(19): siRNA sense strand
cagaagagaagguauauga

SEQ ID NO: 1440193 - RNA, 19 nt, Homo sapiens
  misc_RNA (1)...(19): siRNA sense strand
ccaaugauguaugaucuaa

SEQ ID NO: 1440194 - RNA, 19 nt, Homo sapiens
  misc_RNA (1)...(19): siRNA sense strand
gacagcaguugaauccaua

SEQ ID NO: 1440195 - RNA, 19 nt, Homo sapiens
  misc_RNA (1)...(19): siRNA sense strand
ggauauugaugccauuaga

SEQ ID NO: 1440196 - RNA, 19 nt, Homo sapiens
  misc_RNA (1)...(19): siRNA sense strand
uaugacaugucccuuuaua

SEQ ID NO: 1440197 - RNA, 19 nt, Homo sapiens
  misc_RNA (1)...(19): siRNA sense strand
ugaagaagaugaugaagag

SEQ ID NO: 1440198 - RNA, 19 nt, Homo sapiens
  misc_RNA (1)...(19): siRNA sense strand
guagagaaagagaggauua

SEQ ID NO: 1440199 - RNA, 19 nt, Homo sapiens
  misc_RNA (1)...(19): siRNA sense strand
ugacaugucccuuuauauu

SEQ ID NO: 1440200 - RNA, 19 nt, Homo sapiens
  misc_RNA (1)...(19): siRNA sense strand
gucgaaaucuagugaauga

SEQ ID NO: 1440201 - RNA, 19 nt, Homo sapiens
  misc_RNA (1)...(19): siRNA sense strand
ggaagaagacucagaagca

SEQ ID NO: 1440202 - RNA, 19 nt, Homo sapiens
  misc_RNA (1)...(19): siRNA sense strand
gaagaagacucagaagcau

SEQ ID NO: 1440203 - RNA, 19 nt, Homo sapiens
  misc_RNA (1)...(19): siRNA sense strand
ggacagcaguugaauccau

SEQ ID NO: 1440204 - RNA, 19 nt, Homo sapiens
  misc_RNA (1)...(19): siRNA sense strand
gaauucgcauguacaguga

SEQ ID NO: 1440205 - RNA, 19 nt, Homo sapiens
  misc_RNA (1)...(19): siRNA sense strand
ugaaugcugucacaaagaa

SEQ ID NO: 1440206 - RNA, 19 nt, Homo sapiens
  misc_RNA (1)...(19): siRNA sense strand
gaugaugugucuguggaua

SEQ ID NO: 1440207 - RNA, 19 nt, Homo sapiens
  misc_RNA (1)...(19): siRNA sense strand
gggaaaucguucauucauu

SEQ ID NO: 1440208 - RNA, 19 nt, Homo sapiens
  misc_RNA (1)...(19): siRNA sense strand
ugagggagguguuuccaaa

SEQ ID NO: 1440209 - RNA, 19 nt, Homo sapiens
  misc_RNA (1)...(19): siRNA sense strand
ugacguaucacaauguaua

SEQ ID NO: 1440210 - RNA, 19 nt, Homo sapiens
  misc_RNA (1)...(19): siRNA sense strand
gaaugugacuugacguauc

SEQ ID NO: 1440211 - RNA, 19 nt, Homo sapiens
  misc_RNA (1)...(19): siRNA sense strand
gagaagguauaugaaauuc

SEQ ID NO: 1440212 - RNA, 19 nt, Homo sapiens
  misc_RNA (1)...(19): siRNA sense strand
gauguaugaucuaaaggaa

SEQ ID NO: 1440213 - RNA, 19 nt, Homo sapiens
  misc_RNA (1)...(19): siRNA sense strand
guaacccaaugauguauga

SEQ ID NO: 1440214 - RNA, 19 nt, Homo sapiens
  misc_RNA (1)...(19): siRNA sense strand
ugaagaagcaguuguaugu

SEQ ID NO: 1440215 - RNA, 19 nt, Homo sapiens
  misc_RNA (1)...(19): siRNA sense strand
gaaagaagaaacaagaaag

SEQ ID NO: 1440216 - RNA, 19 nt, Homo sapiens
  misc_RNA (1)...(19): siRNA sense strand
gagaugaucgcuauggaaa

SEQ ID NO: 1440217 - RNA, 19 nt, Homo sapiens
  misc_RNA (1)...(19): siRNA sense strand
gcacuuguccggcuagaga

SEQ ID NO: 1440218 - RNA, 19 nt, Homo sapiens
  misc_RNA (1)...(19): siRNA sense strand
gaaaugaagccugcacgaa

SEQ ID NO: 1440219 - RNA, 19 nt, Homo sapiens
  misc_RNA (1)...(19): siRNA sense strand
ggaauacucaagcaaagaa

SEQ ID NO: 1440220 - RNA, 19 nt, Homo sapiens
  misc_RNA (1)...(19): siRNA sense strand
uuuaugacaugucccuuua

SEQ ID NO: 1440221 - RNA, 19 nt, Homo sapiens
  misc_RNA (1)...(19): siRNA sense strand
cugacuacauucucaauaa

SEQ ID NO: 1440222 - RNA, 19 nt, Homo sapiens
  misc_RNA (1)...(19): siRNA sense strand
ggaaaauccugcagacuug

SEQ ID NO: 1440223 - RNA, 19 nt, Homo sapiens
  misc_RNA (1)...(19): siRNA sense strand
ucucauacuugcuuuaaug

SEQ ID NO: 1440224 - RNA, 19 nt, Homo sapiens
  misc_RNA (1)...(19): siRNA sense strand
agacucuucuugcaguuua

SEQ ID NO: 1440225 - RNA, 19 nt, Homo sapiens
  misc_RNA (1)...(19): siRNA sense strand
cagggacucuguucugauu

SEQ ID NO: 1440226 - RNA, 19 nt, Homo sapiens
  misc_RNA (1)...(19): siRNA sense strand
caccuaacguggaauguga

SEQ ID NO: 1440227 - RNA, 19 nt, Homo sapiens
  misc_RNA (1)...(19): siRNA sense strand
acacaaaucacaaugaaga

SEQ ID NO: 1440228 - RNA, 19 nt, Homo sapiens
  misc_RNA (1)...(19): siRNA sense strand
gguuuacuaugcaaaugua

SEQ ID NO: 1440229 - RNA, 19 nt, Homo sapiens
  misc_RNA (1)...(19): siRNA sense strand
cagcuuaccuugagaacuc

SEQ ID NO: 1440230 - RNA, 19 nt, Homo sapiens
  misc_RNA (1)...(19): siRNA sense strand
ggagguguuuccaaagaau

SEQ ID NO: 1440231 - RNA, 19 nt, Homo sapiens
  misc_RNA (1)...(19): siRNA sense strand
gacaauagaauucgcaugu

SEQ ID NO: 1440232 - RNA, 19 nt, Homo sapiens
  misc_RNA (1)...(19): siRNA sense strand
uuaaugaaccacugaauga

SEQ ID NO: 1440233 - RNA, 19 nt, Homo sapiens
  misc_RNA (1)...(19): siRNA sense strand
gagaaagagaggauuauuc

SEQ ID NO: 1440234 - RNA, 19 nt, Homo sapiens
  misc_RNA (1)...(19): siRNA sense strand
gaacaagaaaggcgcuaga

SEQ ID NO: 1440235 - RNA, 19 nt, Homo sapiens
  misc_RNA (1)...(19): siRNA sense strand
caacuccugcucugagaua

SEQ ID NO: 1440236 - RNA, 19 nt, Homo sapiens
  misc_RNA (1)...(19): siRNA sense strand
gaauaugacgguggcuaua

SEQ ID NO: 1440237 - RNA, 19 nt, Homo sapiens
  misc_RNA (1)...(19): siRNA sense strand
acaugucccuuuauauuga

SEQ ID NO: 1440238 - RNA, 19 nt, Homo sapiens
  misc_RNA (1)...(19): siRNA sense strand
gcaaagcgaugagcaagcu

SEQ ID NO: 1440239 - RNA, 19 nt, Homo sapiens
  misc_RNA (1)...(19): siRNA sense strand
caaugcacuuguauauuug

SEQ ID NO: 1440240 - RNA, 19 nt, Homo sapiens
  misc_RNA (1)...(19): siRNA sense strand
agauugcucucuaaugaaa

SEQ ID NO: 1440241 - RNA, 19 nt, Homo sapiens
  misc_RNA (1)...(19): siRNA sense strand
ggagacaacaauuugcaaa

SEQ ID NO: 1440242 - RNA, 19 nt, Homo sapiens
  misc_RNA (1)...(19): siRNA sense strand
caauagaauucgcauguac

SEQ ID NO: 1440243 - RNA, 19 nt, Homo sapiens
  misc_RNA (1)...(19): siRNA sense strand
gaaaaugguuuacuaugca

SEQ ID NO: 1440244 - RNA, 19 nt, Homo sapiens
  misc_RNA (1)...(19): siRNA sense strand
aagaaaggcgcuagaauug

SEQ ID NO: 1440245 - RNA, 19 nt, Homo sapiens
  misc_RNA (1)...(19): siRNA sense strand
ccaaugaaucucccuuaaa

SEQ ID NO: 1440246 - RNA, 19 nt, Homo sapiens
  misc_RNA (1)...(19): siRNA sense strand
gcgagcagcugcaaagcau

SEQ ID NO: 1440247 - RNA, 19 nt, Homo sapiens
  misc_RNA (1)...(19): siRNA sense strand
gacaugucccuuuauauug

SEQ ID NO: 1440248 - RNA, 19 nt, Homo sapiens
  misc_RNA (1)...(19): siRNA sense strand
ggagacauuucagcaacuu

SEQ ID NO: 1440249 - RNA, 19 nt, Homo sapiens
  misc_RNA (1)...(19): siRNA sense strand
ugacuuacuuaacagaaga

SEQ ID NO: 1440250 - RNA, 19 nt, Homo sapiens
  misc_RNA (1)...(19): siRNA sense strand
ccacaguccugaauaucug

SEQ ID NO: 1440251 - RNA, 19 nt, Homo sapiens
  misc_RNA (1)...(19): siRNA sense strand
gaccaaugaaucucccuua

SEQ ID NO: 1440252 - RNA, 19 nt, Homo sapiens
  misc_RNA (1)...(19): siRNA sense strand
gguuuaauccaucuucuuu

SEQ ID NO: 1440253 - RNA, 19 nt, Homo sapiens
  misc_RNA (1)...(19): siRNA sense strand
ggcuagagaugaucgcuau

SEQ ID NO: 1440254 - RNA, 19 nt, Homo sapiens
  misc_RNA (1)...(19): siRNA sense strand
gaaguggacacaaaucaca

SEQ ID NO: 1440255 - RNA, 19 nt, Homo sapiens
  misc_RNA (1)...(19): siRNA sense strand
aggaagaacugaaaucucu

SEQ ID NO: 1440256 - RNA, 19 nt, Homo sapiens
  misc_RNA (1)...(19): siRNA sense strand
uacugggucuggcuauuua

SEQ ID NO: 1440257 - RNA, 19 nt, Homo sapiens
  misc_RNA (1)...(19): siRNA sense strand
gggagguguuuccaaagaa

SEQ ID NO: 1440258 - RNA, 19 nt, Homo sapiens
  misc_RNA (1)...(19): siRNA sense strand
acaauagaauucgcaugua

SEQ ID NO: 1440259 - RNA, 19 nt, Homo sapiens
  misc_RNA (1)...(19): siRNA sense strand
uaacguggaaugugacuug

SEQ ID NO: 1440260 - RNA, 19 nt, Homo sapiens
  misc_RNA (1)...(19): siRNA sense strand
ggagaagaaagaagaaaca

SEQ ID NO: 1440261 - RNA, 19 nt, Homo sapiens
  misc_RNA (1)...(19): siRNA sense strand
guucauucauuuacagaug

SEQ ID NO: 1440262 - RNA, 19 nt, Homo sapiens
  misc_RNA (1)...(19): siRNA sense strand
gaagcgagcagcugcaaag

SEQ ID NO: 1440263 - RNA, 19 nt, Homo sapiens
  misc_RNA (1)...(19): siRNA sense strand
gaagagcccaucccugagu

SEQ ID NO: 1440264 - RNA, 19 nt, Homo sapiens
  misc_RNA (1)...(19): siRNA sense strand
uuaccuacaucucauacuu

SEQ ID NO: 1440265 - RNA, 19 nt, Homo sapiens
  misc_RNA (1)...(19): siRNA sense strand
gaagaaacuacagaauaug

SEQ ID NO: 1440266 - RNA, 19 nt, Homo sapiens
  misc_RNA (1)...(19): siRNA sense strand
aagggaauguggaagauga

SEQ ID NO: 1440267 - RNA, 19 nt, Homo sapiens
  misc_RNA (1)...(19): siRNA sense strand
guacugggucuggcuauuu

SEQ ID NO: 1440268 - RNA, 19 nt, Homo sapiens
  misc_RNA (1)...(19): siRNA sense strand
ggaauuugaaggagaacaa

SEQ ID NO: 1440269 - RNA, 19 nt, Homo sapiens
  misc_RNA (1)...(19): siRNA sense strand
aaaguuagacgugaccaua

SEQ ID NO: 1440270 - RNA, 19 nt, Homo sapiens
  misc_RNA (1)...(19): siRNA sense strand
gaugaucacuuuccagaua

SEQ ID NO: 1440271 - RNA, 19 nt, Homo sapiens
  misc_RNA (1)...(19): siRNA sense strand
guacagagcuuccggaaag

SEQ ID NO: 1440272 - RNA, 19 nt, Homo sapiens
  misc_RNA (1)...(19): siRNA sense strand
ggacacaaaucacaaugaa

SEQ ID NO: 1440273 - RNA, 19 nt, Homo sapiens
  misc_RNA (1)...(19): siRNA sense strand
gaaaggcgcuagaauugau

SEQ ID NO: 1440274 - RNA, 19 nt, Homo sapiens
  misc_RNA (1)...(19): siRNA sense strand
ccagauugcucucuaauga

SEQ ID NO: 1440275 - RNA, 19 nt, Homo sapiens
  misc_RNA (1)...(19): siRNA sense strand
gaagaaagaagaaacaaga

SEQ ID NO: 1440276 - RNA, 19 nt, Homo sapiens
  misc_RNA (1)...(19): siRNA sense strand
agacaaagaugaagaugaa

SEQ ID NO: 1440277 - RNA, 19 nt, Homo sapiens
  misc_RNA (1)...(19): siRNA sense strand
gaagagaagguauaugaaa

SEQ ID NO: 1440278 - RNA, 19 nt, Homo sapiens
  misc_RNA (1)...(19): siRNA sense strand
gaauagaaaucuccacagu

SEQ ID NO: 1440279 - RNA, 19 nt, Homo sapiens
  misc_RNA (1)...(19): siRNA sense strand
gcaguugaauccauauuug

SEQ ID NO: 1440280 - RNA, 19 nt, Homo sapiens
  misc_RNA (1)...(19): siRNA sense strand
gaaaucuagugaaugauga

SEQ ID NO: 1440281 - RNA, 19 nt, Homo sapiens
  misc_RNA (1)...(19): siRNA sense strand
gcaguuguauguggaauuu

SEQ ID NO: 1440282 - RNA, 19 nt, Homo sapiens
  misc_RNA (1)...(19): siRNA sense strand
aaacugaacuugguguuaa

SEQ ID NO: 1440283 - RNA, 19 nt, Homo sapiens
  misc_RNA (1)...(19): siRNA sense strand
caagaaaggcgcuagaauu

SEQ ID NO: 1440284 - RNA, 19 nt, Homo sapiens
  misc_RNA (1)...(19): siRNA sense strand
gaaggaauuugucaaucuu

SEQ ID NO: 1440285 - RNA, 19 nt, Homo sapiens
  misc_RNA (1)...(19): siRNA sense strand
gaaugagguucuagaaaug

SEQ ID NO: 1440286 - RNA, 19 nt, Homo sapiens
  misc_RNA (1)...(19): siRNA sense strand
ugaaugagguucuagaaau

SEQ ID NO: 1440287 - RNA, 19 nt, Homo sapiens
  misc_RNA (1)...(19): siRNA sense strand
ggaaggaauuugucaaucu

SEQ ID NO: 1440288 - RNA, 19 nt, Homo sapiens
  misc_RNA (1)...(19): siRNA sense strand
gaaaaccacuuaucccuuu

SEQ ID NO: 1440289 - RNA, 19 nt, Homo sapiens
  misc_RNA (1)...(19): siRNA sense strand
caaugaaucucccuuaaag

SEQ ID NO: 1440290 - RNA, 19 nt, Homo sapiens
  misc_RNA (1)...(19): siRNA sense strand
uaacagaagagaagguaua

SEQ ID NO: 1440291 - RNA, 19 nt, Homo sapiens
  misc_RNA (1)...(19): siRNA sense strand
gaaacugaacuugguguua

SEQ ID NO: 1440292 - RNA, 19 nt, Homo sapiens
  misc_RNA (1)...(19): siRNA sense strand
cagaagagaagguauauga

SEQ ID NO: 1440293 - RNA, 19 nt, Homo sapiens
  misc_RNA (1)...(19): siRNA sense strand
ccaaugauguaugaucuaa

SEQ ID NO: 1440294 - RNA, 19 nt, Homo sapiens
  misc_RNA (1)...(19): siRNA sense strand
gacagcaguugaauccaua

SEQ ID NO: 1440295 - RNA, 19 nt, Homo sapiens
  misc_RNA (1)...(19): siRNA sense strand
ggauauugaugccauuaga

SEQ ID NO: 1440296 - RNA, 19 nt, Homo sapiens
  misc_RNA (1)...(19): siRNA sense strand
uaugacaugucccuuuaua

SEQ ID NO: 1440297 - RNA, 19 nt, Homo sapiens
  misc_RNA (1)...(19): siRNA sense strand
ugaagaagaugaugaagag

SEQ ID NO: 1440298 - RNA, 19 nt, Homo sapiens
  misc_RNA (1)...(19): siRNA sense strand
guagagaaagagaggauua

SEQ ID NO: 1440299 - RNA, 19 nt, Homo sapiens
  misc_RNA (1)...(19): siRNA sense strand
ugacaugucccuuuauauu

SEQ ID NO: 1440300 - RNA, 19 nt, Homo sapiens
  misc_RNA (1)...(19): siRNA sense strand
gucgaaaucuagugaauga

SEQ ID NO: 1440301 - RNA, 19 nt, Homo sapiens
  misc_RNA (1)...(19): siRNA sense strand
ggaagaagacucagaagca

SEQ ID NO: 1440302 - RNA, 19 nt, Homo sapiens
  misc_RNA (1)...(19): siRNA sense strand
gaagaagacucagaagcau

SEQ ID NO: 1440303 - RNA, 19 nt, Homo sapiens
  misc_RNA (1)...(19): siRNA sense strand
ggacagcaguugaauccau

SEQ ID NO: 1440304 - RNA, 19 nt, Homo sapiens
  misc_RNA (1)...(19): siRNA sense strand
gaauucgcauguacaguga

SEQ ID NO: 1440305 - RNA, 19 nt, Homo sapiens
  misc_RNA (1)...(19): siRNA sense strand
ugaaugcugucacaaagaa

SEQ ID NO: 1440306 - RNA, 19 nt, Homo sapiens
  misc_RNA (1)...(19): siRNA sense strand
gaugaugugucuguggaua

SEQ ID NO: 1440307 - RNA, 19 nt, Homo sapiens
  misc_RNA (1)...(19): siRNA sense strand
gggaaaucguucauucauu

SEQ ID NO: 1440308 - RNA, 19 nt, Homo sapiens
  misc_RNA (1)...(19): siRNA sense strand
ugagggagguguuuccaaa

SEQ ID NO: 1440309 - RNA, 19 nt, Homo sapiens
  misc_RNA (1)...(19): siRNA sense strand
ugacguaucacaauguaua

SEQ ID NO: 1440310 - RNA, 19 nt, Homo sapiens
  misc_RNA (1)...(19): siRNA sense strand
gaaugugacuugacguauc

SEQ ID NO: 1440311 - RNA, 19 nt, Homo sapiens
  misc_RNA (1)...(19): siRNA sense strand
gagaagguauaugaaauuc

SEQ ID NO: 1440312 - RNA, 19 nt, Homo sapiens
  misc_RNA (1)...(19): siRNA sense strand
gauguaugaucuaaaggaa

SEQ ID NO: 1440313 - RNA, 19 nt, Homo sapiens
  misc_RNA (1)...(19): siRNA sense strand
guaacccaaugauguauga

SEQ ID NO: 1440314 - RNA, 19 nt, Homo sapiens
  misc_RNA (1)...(19): siRNA sense strand
ugaagaagcaguuguaugu

SEQ ID NO: 1440315 - RNA, 19 nt, Homo sapiens
  misc_RNA (1)...(19): siRNA sense strand
gaaagaagaaacaagaaag

SEQ ID NO: 1440316 - RNA, 19 nt, Homo sapiens
  misc_RNA (1)...(19): siRNA sense strand
gagaugaucgcuauggaaa

SEQ ID NO: 1440317 - RNA, 19 nt, Homo sapiens
  misc_RNA (1)...(19): siRNA sense strand
gcacuuguccggcuagaga

SEQ ID NO: 1440318 - RNA, 19 nt, Homo sapiens
  misc_RNA (1)...(19): siRNA sense strand
gaaaugaagccugcacgaa

SEQ ID NO: 1440319 - RNA, 19 nt, Homo sapiens
  misc_RNA (1)...(19): siRNA sense strand
ggaauacucaagcaaagaa

SEQ ID NO: 1440320 - RNA, 19 nt, Homo sapiens
  misc_RNA (1)...(19): siRNA sense strand
uuuaugacaugucccuuua

SEQ ID NO: 1440321 - RNA, 19 nt, Homo sapiens
  misc_RNA (1)...(19): siRNA sense strand
cugacuacauucucaauaa

SEQ ID NO: 1440322 - RNA, 19 nt, Homo sapiens
  misc_RNA (1)...(19): siRNA sense strand
ggaaaauccugcagacuug

SEQ ID NO: 1440323 - RNA, 19 nt, Homo sapiens
  misc_RNA (1)...(19): siRNA sense strand
ucucauacuugcuuuaaug

SEQ ID NO: 1440324 - RNA, 19 nt, Homo sapiens
  misc_RNA (1)...(19): siRNA sense strand
agacucuucuugcaguuua

SEQ ID NO: 1440325 - RNA, 19 nt, Homo sapiens
  misc_RNA (1)...(19): siRNA sense strand
cagggacucuguucugauu

SEQ ID NO: 1440326 - RNA, 19 nt, Homo sapiens
  misc_RNA (1)...(19): siRNA sense strand
caccuaacguggaauguga

SEQ ID NO: 1440327 - RNA, 19 nt, Homo sapiens
  misc_RNA (1)...(19): siRNA sense strand
acacaaaucacaaugaaga

SEQ ID NO: 1440328 - RNA, 19 nt, Homo sapiens
  misc_RNA (1)...(19): siRNA sense strand
gguuuacuaugcaaaugua

SEQ ID NO: 1440329 - RNA, 19 nt, Homo sapiens
  misc_RNA (1)...(19): siRNA sense strand
cagcuuaccuugagaacuc

SEQ ID NO: 1440330 - RNA, 19 nt, Homo sapiens
  misc_RNA (1)...(19): siRNA sense strand
ggagguguuuccaaagaau

SEQ ID NO: 1440331 - RNA, 19 nt, Homo sapiens
  misc_RNA (1)...(19): siRNA sense strand
gacaauagaauucgcaugu

SEQ ID NO: 1440332 - RNA, 19 nt, Homo sapiens
  misc_RNA (1)...(19): siRNA sense strand
uuaaugaaccacugaauga

SEQ ID NO: 1440333 - RNA, 19 nt, Homo sapiens
  misc_RNA (1)...(19): siRNA sense strand
gagaaagagaggauuauuc

SEQ ID NO: 1440334 - RNA, 19 nt, Homo sapiens
  misc_RNA (1)...(19): siRNA sense strand
gaacaagaaaggcgcuaga

SEQ ID NO: 1440335 - RNA, 19 nt, Homo sapiens
  misc_RNA (1)...(19): siRNA sense strand
caacuccugcucugagaua

SEQ ID NO: 1440336 - RNA, 19 nt, Homo sapiens
  misc_RNA (1)...(19): siRNA sense strand
gaauaugacgguggcuaua

SEQ ID NO: 1440337 - RNA, 19 nt, Homo sapiens
  misc_RNA (1)...(19): siRNA sense strand
acaugucccuuuauauuga

SEQ ID NO: 1440338 - RNA, 19 nt, Homo sapiens
  misc_RNA (1)...(19): siRNA sense strand
gcaaagcgaugagcaagcu

SEQ ID NO: 1440339 - RNA, 19 nt, Homo sapiens
  misc_RNA (1)...(19): siRNA sense strand
caaugcacuuguauauuug

SEQ ID NO: 1440340 - RNA, 19 nt, Homo sapiens
  misc_RNA (1)...(19): siRNA sense strand
agauugcucucuaaugaaa

SEQ ID NO: 1440341 - RNA, 19 nt, Homo sapiens
  misc_RNA (1)...(19): siRNA sense strand
ggagacaacaauuugcaaa

SEQ ID NO: 1440342 - RNA, 19 nt, Homo sapiens
  misc_RNA (1)...(19): siRNA sense strand
caauagaauucgcauguac

SEQ ID NO: 1440343 - RNA, 19 nt, Homo sapiens
  misc_RNA (1)...(19): siRNA sense strand
gaaaaugguuuacuaugca

SEQ ID NO: 1440344 - RNA, 19 nt, Homo sapiens
  misc_RNA (1)...(19): siRNA sense strand
aagaaaggcgcuagaauug

SEQ ID NO: 1440345 - RNA, 19 nt, Homo sapiens
  misc_RNA (1)...(19): siRNA sense strand
ccaaugaaucucccuuaaa

SEQ ID NO: 1440346 - RNA, 19 nt, Homo sapiens
  misc_RNA (1)...(19): siRNA sense strand
gacaugucccuuuauauug

SEQ ID NO: 1440347 - RNA, 19 nt, Homo sapiens
  misc_RNA (1)...(19): siRNA sense strand
ggagacauuucagcaacuu

SEQ ID NO: 1440348 - RNA, 19 nt, Homo sapiens
  misc_RNA (1)...(19): siRNA sense strand
gcgagcagcugcaaagcau

SEQ ID NO: 1440349 - RNA, 19 nt, Homo sapiens
  misc_RNA (1)...(19): siRNA sense strand
ugacuuacuuaacagaaga

SEQ ID NO: 1440350 - RNA, 19 nt, Homo sapiens
  misc_RNA (1)...(19): siRNA sense strand
ccacaguccugaauaucug

SEQ ID NO: 1440351 - RNA, 19 nt, Homo sapiens
  misc_RNA (1)...(19): siRNA sense strand
gaccaaugaaucucccuua

SEQ ID NO: 1440352 - RNA, 19 nt, Homo sapiens
  misc_RNA (1)...(19): siRNA sense strand
gguuuaauccaucuucuuu

SEQ ID NO: 1440353 - RNA, 19 nt, Homo sapiens
  misc_RNA (1)...(19): siRNA sense strand
ggcuagagaugaucgcuau

SEQ ID NO: 1440354 - RNA, 19 nt, Homo sapiens
  misc_RNA (1)...(19): siRNA sense strand
gaaguggacacaaaucaca

SEQ ID NO: 1440355 - RNA, 19 nt, Homo sapiens
  misc_RNA (1)...(19): siRNA sense strand
aggaagaacugaaaucucu

SEQ ID NO: 1440356 - RNA, 19 nt, Homo sapiens
  misc_RNA (1)...(19): siRNA sense strand
uacugggucuggcuauuua

SEQ ID NO: 1440357 - RNA, 19 nt, Homo sapiens
  misc_RNA (1)...(19): siRNA sense strand
gggagguguuuccaaagaa

SEQ ID NO: 1440358 - RNA, 19 nt, Homo sapiens
  misc_RNA (1)...(19): siRNA sense strand
acaauagaauucgcaugua

SEQ ID NO: 1440359 - RNA, 19 nt, Homo sapiens
  misc_RNA (1)...(19): siRNA sense strand
uaacguggaaugugacuug

SEQ ID NO: 1440360 - RNA, 19 nt, Homo sapiens
  misc_RNA (1)...(19): siRNA sense strand
ggagaagaaagaagaaaca

SEQ ID NO: 1440361 - RNA, 19 nt, Homo sapiens
  misc_RNA (1)...(19): siRNA sense strand
guucauucauuuacagaug

SEQ ID NO: 1440362 - RNA, 19 nt, Homo sapiens
  misc_RNA (1)...(19): siRNA sense strand
gaagcgagcagcugcaaag

SEQ ID NO: 1440363 - RNA, 19 nt, Homo sapiens
  misc_RNA (1)...(19): siRNA sense strand
gaagagcccaucccugagu

SEQ ID NO: 1440364 - RNA, 19 nt, Homo sapiens
  misc_RNA (1)...(19): siRNA sense strand
uuaccuacaucucauacuu

SEQ ID NO: 1440365 - RNA, 19 nt, Homo sapiens
  misc_RNA (1)...(19): siRNA sense strand
gaagaaacuacagaauaug

SEQ ID NO: 1440366 - RNA, 19 nt, Homo sapiens
  misc_RNA (1)...(19): siRNA sense strand
aagggaauguggaagauga

SEQ ID NO: 1440367 - RNA, 19 nt, Homo sapiens
  misc_RNA (1)...(19): siRNA sense strand
guacugggucuggcuauuu

SEQ ID NO: 1440368 - RNA, 19 nt, Homo sapiens
  misc_RNA (1)...(19): siRNA sense strand
ggaauuugaaggagaacaa

SEQ ID NO: 1440369 - RNA, 19 nt, Homo sapiens
  misc_RNA (1)...(19): siRNA sense strand
aaaguuagacgugaccaua

SEQ ID NO: 1440370 - RNA, 19 nt, Homo sapiens
  misc_RNA (1)...(19): siRNA sense strand
gaugaucacuuuccagaua

SEQ ID NO: 1440371 - RNA, 19 nt, Homo sapiens
  misc_RNA (1)...(19): siRNA sense strand
guacagagcuuccggaaag

SEQ ID NO: 1440372 - RNA, 19 nt, Homo sapiens
  misc_RNA (1)...(19): siRNA sense strand
ggacacaaaucacaaugaa

SEQ ID NO: 1440373 - RNA, 19 nt, Homo sapiens
  misc_RNA (1)...(19): siRNA sense strand
gaaaggcgcuagaauugau

SEQ ID NO: 1440374 - RNA, 19 nt, Homo sapiens
  misc_RNA (1)...(19): siRNA sense strand
ccagauugcucucuaauga

SEQ ID NO: 1440375 - RNA, 19 nt, Homo sapiens
  misc_RNA (1)...(19): siRNA sense strand
gaagaaagaagaaacaaga

SEQ ID NO: 1440376 - RNA, 19 nt, Homo sapiens
  misc_RNA (1)...(19): siRNA sense strand
agacaaagaugaagaugaa

SEQ ID NO: 1440377 - RNA, 19 nt, Homo sapiens
  misc_RNA (1)...(19): siRNA sense strand
gaagagaagguauaugaaa

SEQ ID NO: 1440378 - RNA, 19 nt, Homo sapiens
  misc_RNA (1)...(19): siRNA sense strand
gaauagaaaucuccacagu

SEQ ID NO: 1440379 - RNA, 19 nt, Homo sapiens
  misc_RNA (1)...(19): siRNA sense strand
gcaguugaauccauauuug

SEQ ID NO: 1440380 - RNA, 19 nt, Homo sapiens
  misc_RNA (1)...(19): siRNA sense strand
gaaaucuagugaaugauga

SEQ ID NO: 1440381 - RNA, 19 nt, Homo sapiens
  misc_RNA (1)...(19): siRNA sense strand
gcaguuguauguggaauuu

SEQ ID NO: 1440382 - RNA, 19 nt, Homo sapiens
  misc_RNA (1)...(19): siRNA sense strand
aaacugaacuugguguuaa

SEQ ID NO: 1440383 - RNA, 19 nt, Homo sapiens
  misc_RNA (1)...(19): siRNA sense strand
caagaaaggcgcuagaauu

SEQ ID NO: 1440384 - RNA, 19 nt, Homo sapiens
  misc_RNA (1)...(19): siRNA sense strand
gaaggaauuugucaaucuu

SEQ ID NO: 1440385 - RNA, 19 nt, Homo sapiens
  misc_RNA (1)...(19): siRNA sense strand
gaaugagguucuagaaaug

SEQ ID NO: 1440386 - RNA, 19 nt, Homo sapiens
  misc_RNA (1)...(19): siRNA sense strand
ugaaugagguucuagaaau

SEQ ID NO: 1440387 - RNA, 19 nt, Homo sapiens
  misc_RNA (1)...(19): siRNA sense strand
ggaaggaauuugucaaucu

SEQ ID NO: 1440388 - RNA, 19 nt, Homo sapiens
  misc_RNA (1)...(19): siRNA sense strand
gaaaaccacuuaucccuuu

SEQ ID NO: 1440389 - RNA, 19 nt, Homo sapiens
  misc_RNA (1)...(19): siRNA sense strand
caaugaaucucccuuaaag

SEQ ID NO: 1440390 - RNA, 19 nt, Homo sapiens
  misc_RNA (1)...(19): siRNA sense strand
uaacagaagagaagguaua

SEQ ID NO: 1440391 - RNA, 19 nt, Homo sapiens
  misc_RNA (1)...(19): siRNA sense strand
gaaacugaacuugguguua

SEQ ID NO: 1440392 - RNA, 19 nt, Homo sapiens
  misc_RNA (1)...(19): siRNA sense strand
cagaagagaagguauauga

SEQ ID NO: 1440393 - RNA, 19 nt, Homo sapiens
  misc_RNA (1)...(19): siRNA sense strand
ccaaugauguaugaucuaa

SEQ ID NO: 1440394 - RNA, 19 nt, Homo sapiens
  misc_RNA (1)...(19): siRNA sense strand
gacagcaguugaauccaua

SEQ ID NO: 1440395 - RNA, 19 nt, Homo sapiens
  misc_RNA (1)...(19): siRNA sense strand
ggauauugaugccauuaga

SEQ ID NO: 1440396 - RNA, 19 nt, Homo sapiens
  misc_RNA (1)...(19): siRNA sense strand
uaugacaugucccuuuaua

SEQ ID NO: 1440397 - RNA, 19 nt, Homo sapiens
  misc_RNA (1)...(19): siRNA sense strand
ugaagaagaugaugaagag

SEQ ID NO: 1440398 - RNA, 19 nt, Homo sapiens
  misc_RNA (1)...(19): siRNA sense strand
guagagaaagagaggauua

SEQ ID NO: 1440399 - RNA, 19 nt, Homo sapiens
  misc_RNA (1)...(19): siRNA sense strand
ugacaugucccuuuauauu

SEQ ID NO: 1440400 - RNA, 19 nt, Homo sapiens
  misc_RNA (1)...(19): siRNA sense strand
gucgaaaucuagugaauga

SEQ ID NO: 1440401 - RNA, 19 nt, Homo sapiens
  misc_RNA (1)...(19): siRNA sense strand
ggaagaagacucagaagca

SEQ ID NO: 1440402 - RNA, 19 nt, Homo sapiens
  misc_RNA (1)...(19): siRNA sense strand
gaagaagacucagaagcau

SEQ ID NO: 1440403 - RNA, 19 nt, Homo sapiens
  misc_RNA (1)...(19): siRNA sense strand
ggacagcaguugaauccau

SEQ ID NO: 1440404 - RNA, 19 nt, Homo sapiens
  misc_RNA (1)...(19): siRNA sense strand
gaauucgcauguacaguga

SEQ ID NO: 1440405 - RNA, 19 nt, Homo sapiens
  misc_RNA (1)...(19): siRNA sense strand
ugaaugcugucacaaagaa

SEQ ID NO: 1440406 - RNA, 19 nt, Homo sapiens
  misc_RNA (1)...(19): siRNA sense strand
gaugaugugucuguggaua

SEQ ID NO: 1440407 - RNA, 19 nt, Homo sapiens
  misc_RNA (1)...(19): siRNA sense strand
gggaaaucguucauucauu

SEQ ID NO: 1440408 - RNA, 19 nt, Homo sapiens
  misc_RNA (1)...(19): siRNA sense strand
ugagggagguguuuccaaa

SEQ ID NO: 1440409 - RNA, 19 nt, Homo sapiens
  misc_RNA (1)...(19): siRNA sense strand
ugacguaucacaauguaua

SEQ ID NO: 1440410 - RNA, 19 nt, Homo sapiens
  misc_RNA (1)...(19): siRNA sense strand
gaaugugacuugacguauc

SEQ ID NO: 1440411 - RNA, 19 nt, Homo sapiens
  misc_RNA (1)...(19): siRNA sense strand
gagaagguauaugaaauuc

SEQ ID NO: 1440412 - RNA, 19 nt, Homo sapiens
  misc_RNA (1)...(19): siRNA sense strand
gauguaugaucuaaaggaa

SEQ ID NO: 1440413 - RNA, 19 nt, Homo sapiens
  misc_RNA (1)...(19): siRNA sense strand
guaacccaaugauguauga

SEQ ID NO: 1440414 - RNA, 19 nt, Homo sapiens
  misc_RNA (1)...(19): siRNA sense strand
ugaagaagcaguuguaugu

SEQ ID NO: 1440415 - RNA, 19 nt, Homo sapiens
  misc_RNA (1)...(19): siRNA sense strand
gaaagaagaaacaagaaag

SEQ ID NO: 1440416 - RNA, 19 nt, Homo sapiens
  misc_RNA (1)...(19): siRNA sense strand
gagaugaucgcuauggaaa

SEQ ID NO: 1440417 - RNA, 19 nt, Homo sapiens
  misc_RNA (1)...(19): siRNA sense strand
gcacuuguccggcuagaga

SEQ ID NO: 1440418 - RNA, 19 nt, Homo sapiens
  misc_RNA (1)...(19): siRNA sense strand
gaaaugaagccugcacgaa

SEQ ID NO: 1440419 - RNA, 19 nt, Homo sapiens
  misc_RNA (1)...(19): siRNA sense strand
ggaauacucaagcaaagaa

SEQ ID NO: 1440420 - RNA, 19 nt, Homo sapiens
  misc_RNA (1)...(19): siRNA sense strand
uuuaugacaugucccuuua

SEQ ID NO: 1440421 - RNA, 19 nt, Homo sapiens
  misc_RNA (1)...(19): siRNA sense strand
cugacuacauucucaauaa

SEQ ID NO: 1440422 - RNA, 19 nt, Homo sapiens
  misc_RNA (1)...(19): siRNA sense strand
ggaaaauccugcagacuug

SEQ ID NO: 1440423 - RNA, 19 nt, Homo sapiens
  misc_RNA (1)...(19): siRNA sense strand
ucucauacuugcuuuaaug

SEQ ID NO: 1440424 - RNA, 19 nt, Homo sapiens
  misc_RNA (1)...(19): siRNA sense strand
agacucuucuugcaguuua

SEQ ID NO: 1440425 - RNA, 19 nt, Homo sapiens
  misc_RNA (1)...(19): siRNA sense strand
cagggacucuguucugauu

SEQ ID NO: 1440426 - RNA, 19 nt, Homo sapiens
  misc_RNA (1)...(19): siRNA sense strand
caccuaacguggaauguga

SEQ ID NO: 1440427 - RNA, 19 nt, Homo sapiens
  misc_RNA (1)...(19): siRNA sense strand
acacaaaucacaaugaaga

SEQ ID NO: 1440428 - RNA, 19 nt, Homo sapiens
  misc_RNA (1)...(19): siRNA sense strand
gguuuacuaugcaaaugua

SEQ ID NO: 1440429 - RNA, 19 nt, Homo sapiens
  misc_RNA (1)...(19): siRNA sense strand
cagcuuaccuugagaacuc

SEQ ID NO: 1440430 - RNA, 19 nt, Homo sapiens
  misc_RNA (1)...(19): siRNA sense strand
ggagguguuuccaaagaau

SEQ ID NO: 1440431 - RNA, 19 nt, Homo sapiens
  misc_RNA (1)...(19): siRNA sense strand
gacaauagaauucgcaugu

SEQ ID NO: 1440432 - RNA, 19 nt, Homo sapiens
  misc_RNA (1)...(19): siRNA sense strand
uuaaugaaccacugaauga

SEQ ID NO: 1440433 - RNA, 19 nt, Homo sapiens
  misc_RNA (1)...(19): siRNA sense strand
gagaaagagaggauuauuc

SEQ ID NO: 1440434 - RNA, 19 nt, Homo sapiens
  misc_RNA (1)...(19): siRNA sense strand
gaacaagaaaggcgcuaga

SEQ ID NO: 1440435 - RNA, 19 nt, Homo sapiens
  misc_RNA (1)...(19): siRNA sense strand
caacuccugcucugagaua

SEQ ID NO: 1440436 - RNA, 19 nt, Homo sapiens
  misc_RNA (1)...(19): siRNA sense strand
gaauaugacgguggcuaua

SEQ ID NO: 1440437 - RNA, 19 nt, Homo sapiens
  misc_RNA (1)...(19): siRNA sense strand
acaugucccuuuauauuga

SEQ ID NO: 1440438 - RNA, 19 nt, Homo sapiens
  misc_RNA (1)...(19): siRNA sense strand
gcaaagcgaugagcaagcu

SEQ ID NO: 1440439 - RNA, 19 nt, Homo sapiens
  misc_RNA (1)...(19): siRNA sense strand
caaugcacuuguauauuug

SEQ ID NO: 1440440 - RNA, 19 nt, Homo sapiens
  misc_RNA (1)...(19): siRNA sense strand
agauugcucucuaaugaaa

SEQ ID NO: 1440441 - RNA, 19 nt, Homo sapiens
  misc_RNA (1)...(19): siRNA sense strand
ggagacaacaauuugcaaa

SEQ ID NO: 1440442 - RNA, 19 nt, Homo sapiens
  misc_RNA (1)...(19): siRNA sense strand
caauagaauucgcauguac

SEQ ID NO: 1440443 - RNA, 19 nt, Homo sapiens
  misc_RNA (1)...(19): siRNA sense strand
gaaaaugguuuacuaugca

SEQ ID NO: 1440444 - RNA, 19 nt, Homo sapiens
  misc_RNA (1)...(19): siRNA sense strand
aagaaaggcgcuagaauug

SEQ ID NO: 1440445 - RNA, 19 nt, Homo sapiens
  misc_RNA (1)...(19): siRNA sense strand
ccaaugaaucucccuuaaa

SEQ ID NO: 1440446 - RNA, 19 nt, Homo sapiens
  misc_RNA (1)...(19): siRNA sense strand
gcgagcagcugcaaagcau

SEQ ID NO: 1440447 - RNA, 19 nt, Homo sapiens
  misc_RNA (1)...(19): siRNA sense strand
gacaugucccuuuauauug

SEQ ID NO: 1440448 - RNA, 19 nt, Homo sapiens
  misc_RNA (1)...(19): siRNA sense strand
ggagacauuucagcaacuu

SEQ ID NO: 1440449 - RNA, 19 nt, Homo sapiens
  misc_RNA (1)...(19): siRNA sense strand
ugacuuacuuaacagaaga

SEQ ID NO: 1440450 - RNA, 19 nt, Homo sapiens
  misc_RNA (1)...(19): siRNA sense strand
ccacaguccugaauaucug

SEQ ID NO: 1440451 - RNA, 19 nt, Homo sapiens
  misc_RNA (1)...(19): siRNA sense strand
gaccaaugaaucucccuua

SEQ ID NO: 1440452 - RNA, 19 nt, Homo sapiens
  misc_RNA (1)...(19): siRNA sense strand
gguuuaauccaucuucuuu

SEQ ID NO: 1440453 - RNA, 19 nt, Homo sapiens
  misc_RNA (1)...(19): siRNA sense strand
ggcuagagaugaucgcuau

SEQ ID NO: 1440454 - RNA, 19 nt, Homo sapiens
  misc_RNA (1)...(19): siRNA sense strand
gaaguggacacaaaucaca

SEQ ID NO: 1440455 - RNA, 19 nt, Homo sapiens
  misc_RNA (1)...(19): siRNA sense strand
aggaagaacugaaaucucu

SEQ ID NO: 1440456 - RNA, 19 nt, Homo sapiens
  misc_RNA (1)...(19): siRNA sense strand
uacugggucuggcuauuua

SEQ ID NO: 1440457 - RNA, 19 nt, Homo sapiens
  misc_RNA (1)...(19): siRNA sense strand
gggagguguuuccaaagaa

SEQ ID NO: 1440458 - RNA, 19 nt, Homo sapiens
  misc_RNA (1)...(19): siRNA sense strand
acaauagaauucgcaugua

SEQ ID NO: 1440459 - RNA, 19 nt, Homo sapiens
  misc_RNA (1)...(19): siRNA sense strand
uaacguggaaugugacuug

SEQ ID NO: 1440460 - RNA, 19 nt, Homo sapiens
  misc_RNA (1)...(19): siRNA sense strand
ggagaagaaagaagaaaca

SEQ ID NO: 1440461 - RNA, 19 nt, Homo sapiens
  misc_RNA (1)...(19): siRNA sense strand
guucauucauuuacagaug

SEQ ID NO: 1440462 - RNA, 19 nt, Homo sapiens
  misc_RNA (1)...(19): siRNA sense strand
gaagcgagcagcugcaaag

SEQ ID NO: 1440463 - RNA, 19 nt, Homo sapiens
  misc_RNA (1)...(19): siRNA sense strand
gaagagcccaucccugagu

SEQ ID NO: 1440464 - RNA, 19 nt, Homo sapiens
  misc_RNA (1)...(19): siRNA sense strand
uuaccuacaucucauacuu

SEQ ID NO: 1440465 - RNA, 19 nt, Homo sapiens
  misc_RNA (1)...(19): siRNA sense strand
gaagaaacuacagaauaug

SEQ ID NO: 1440466 - RNA, 19 nt, Homo sapiens
  misc_RNA (1)...(19): siRNA sense strand
aagggaauguggaagauga

SEQ ID NO: 1440467 - RNA, 19 nt, Homo sapiens
  misc_RNA (1)...(19): siRNA sense strand
guacugggucuggcuauuu

SEQ ID NO: 1440468 - RNA, 19 nt, Homo sapiens
  misc_RNA (1)...(19): siRNA sense strand
ggaauuugaaggagaacaa

SEQ ID NO: 1440469 - RNA, 19 nt, Homo sapiens
  misc_RNA (1)...(19): siRNA sense strand
aaaguuagacgugaccaua

SEQ ID NO: 1440470 - RNA, 19 nt, Homo sapiens
  misc_RNA (1)...(19): siRNA sense strand
gcaagaaguuugaggauga

SEQ ID NO: 1440471 - RNA, 19 nt, Homo sapiens
  misc_RNA (1)...(19): siRNA sense strand
gguaauagauggucuggaa

SEQ ID NO: 1440472 - RNA, 19 nt, Homo sapiens
  misc_RNA (1)...(19): siRNA sense strand
gugaauaucuuaagcacaa

SEQ ID NO: 1440473 - RNA, 19 nt, Homo sapiens
  misc_RNA (1)...(19): siRNA sense strand
ggaagaggaggcaacagua

SEQ ID NO: 1440474 - RNA, 19 nt, Homo sapiens
  misc_RNA (1)...(19): siRNA sense strand
uagaugaguuggagaaguu

SEQ ID NO: 1440475 - RNA, 19 nt, Homo sapiens
  misc_RNA (1)...(19): siRNA sense strand
caauggaucucaguucuuc

SEQ ID NO: 1440476 - RNA, 19 nt, Homo sapiens
  misc_RNA (1)...(19): siRNA sense strand
gaagaggaggcaacaguau

SEQ ID NO: 1440477 - RNA, 19 nt, Homo sapiens
  misc_RNA (1)...(19): siRNA sense strand
gaggaugaauacagugaau

SEQ ID NO: 1440478 - RNA, 19 nt, Homo sapiens
  misc_RNA (1)...(19): siRNA sense strand
gcacaauguuagagguguu

SEQ ID NO: 1440479 - RNA, 19 nt, Homo sapiens
  misc_RNA (1)...(19): siRNA sense strand
ggaugaauacagugaauau

SEQ ID NO: 1440480 - RNA, 19 nt, Homo sapiens
  misc_RNA (1)...(19): siRNA sense strand
caccguauuuggaaaggua

SEQ ID NO: 1440481 - RNA, 19 nt, Homo sapiens
  misc_RNA (1)...(19): siRNA sense strand
caagaaguuugaggaugaa

SEQ ID NO: 1440482 - RNA, 19 nt, Homo sapiens
  misc_RNA (1)...(19): siRNA sense strand
uuggagaaguugccaguaa

SEQ ID NO: 1440483 - RNA, 19 nt, Homo sapiens
  misc_RNA (1)...(19): siRNA sense strand
ggaucucaguucuucauca

SEQ ID NO: 1440484 - RNA, 19 nt, Homo sapiens
  misc_RNA (1)...(19): siRNA sense strand
agacauaccgaccucuuaa

SEQ ID NO: 1440485 - RNA, 19 nt, Homo sapiens
  misc_RNA (1)...(19): siRNA sense strand
uggagaaguugccaguaaa

SEQ ID NO: 1440486 - RNA, 19 nt, Homo sapiens
  misc_RNA (1)...(19): siRNA sense strand
caguaaaugagaagacaua

SEQ ID NO: 1440487 - RNA, 19 nt, Homo sapiens
  misc_RNA (1)...(19): siRNA sense strand
gaaguuugaggaugaauac

SEQ ID NO: 1440488 - RNA, 19 nt, Homo sapiens
  misc_RNA (1)...(19): siRNA sense strand
agaaguugccaguaaauga

SEQ ID NO: 1440489 - RNA, 19 nt, Homo sapiens
  misc_RNA (1)...(19): siRNA sense strand
caacccauuugcucaguag

SEQ ID NO: 1440490 - RNA, 19 nt, Homo sapiens
  misc_RNA (1)...(19): siRNA sense strand
uagauggucuggaaacucu

SEQ ID NO: 1440491 - RNA, 19 nt, Homo sapiens
  misc_RNA (1)...(19): siRNA sense strand
acagauguaggugauauua

SEQ ID NO: 1440492 - RNA, 19 nt, Homo sapiens
  misc_RNA (1)...(19): siRNA sense strand
uguuagagguguuguaucu

SEQ ID NO: 1440493 - RNA, 19 nt, Homo sapiens
  misc_RNA (1)...(19): siRNA sense strand
gaaguugccaguaaaugag

SEQ ID NO: 1440494 - RNA, 19 nt, Homo sapiens
  misc_RNA (1)...(19): siRNA sense strand
ggagaaguugccaguaaau

SEQ ID NO: 1440495 - RNA, 19 nt, Homo sapiens
  misc_RNA (1)...(19): siRNA sense strand
agaggaggcaacaguauuu

SEQ ID NO: 1440496 - RNA, 19 nt, Homo sapiens
  misc_RNA (1)...(19): siRNA sense strand
auaccgaccucuuaaugau

SEQ ID NO: 1440497 - RNA, 19 nt, Homo sapiens
  misc_RNA (1)...(19): siRNA sense strand
ccaacccauuugcucagua

SEQ ID NO: 1440498 - RNA, 19 nt, Homo sapiens
  misc_RNA (1)...(19): siRNA sense strand
cauaccgaccucuuaauga

SEQ ID NO: 1440499 - RNA, 19 nt, Homo sapiens
  misc_RNA (1)...(19): siRNA sense strand
gccaguaaaugagaagaca

SEQ ID NO: 1440500 - RNA, 19 nt, Homo sapiens
  misc_RNA (1)...(19): siRNA sense strand
gaucucaguucuucaucac

SEQ ID NO: 1440501 - RNA, 19 nt, Homo sapiens
  misc_RNA (1)...(19): siRNA sense strand
gagaaguugccaguaaaug

SEQ ID NO: 1440502 - RNA, 19 nt, Homo sapiens
  misc_RNA (1)...(19): siRNA sense strand
gaauaucuuaagcacaaug

SEQ ID NO: 1440503 - RNA, 19 nt, Homo sapiens
  misc_RNA (1)...(19): siRNA sense strand
guaauagauggucuggaaa

SEQ ID NO: 1440504 - RNA, 19 nt, Homo sapiens
  misc_RNA (1)...(19): siRNA sense strand
cuucaucaccuauggcaaa

SEQ ID NO: 1440505 - RNA, 19 nt, Homo sapiens
  misc_RNA (1)...(19): siRNA sense strand
guaucuauggcuaauaaug

SEQ ID NO: 1440506 - RNA, 19 nt, Homo sapiens
  misc_RNA (1)...(19): siRNA sense strand
guacacauuaaggacauaa

SEQ ID NO: 1440507 - RNA, 19 nt, Homo sapiens
  misc_RNA (1)...(19): siRNA sense strand
ucuggaaacucuagaugag

SEQ ID NO: 1440508 - RNA, 19 nt, Homo sapiens
  misc_RNA (1)...(19): siRNA sense strand
guuugaggaugaauacagu

SEQ ID NO: 1440509 - RNA, 19 nt, Homo sapiens
  misc_RNA (1)...(19): siRNA sense strand
cagauguaggugauauuaa

SEQ ID NO: 1440510 - RNA, 19 nt, Homo sapiens
  misc_RNA (1)...(19): siRNA sense strand
agaaguuugaggaugaaua

SEQ ID NO: 1440511 - RNA, 19 nt, Homo sapiens
  misc_RNA (1)...(19): siRNA sense strand
cacauuaaggacauaacua

SEQ ID NO: 1440512 - RNA, 19 nt, Homo sapiens
  misc_RNA (1)...(19): siRNA sense strand
gcuaauaauggcccgaaca

SEQ ID NO: 1440513 - RNA, 19 nt, Homo sapiens
  misc_RNA (1)...(19): siRNA sense strand
ugacacugcauacagaugu

SEQ ID NO: 1440514 - RNA, 19 nt, Homo sapiens
  misc_RNA (1)...(19): siRNA sense strand
caucaccuauggcaaacag

SEQ ID NO: 1440515 - RNA, 19 nt, Homo sapiens
  misc_RNA (1)...(19): siRNA sense strand
aagaggaggcaacaguauu

SEQ ID NO: 1440516 - RNA, 19 nt, Homo sapiens
  misc_RNA (1)...(19): siRNA sense strand
gaggaggcaacaguauuug

SEQ ID NO: 1440517 - RNA, 19 nt, Homo sapiens
  misc_RNA (1)...(19): siRNA sense strand
ggucuggaaacucuagaug

SEQ ID NO: 1440518 - RNA, 19 nt, Homo sapiens
  misc_RNA (1)...(19): siRNA sense strand
gggcaagaaguuugaggau

SEQ ID NO: 1440519 - RNA, 19 nt, Homo sapiens
  misc_RNA (1)...(19): siRNA sense strand
cuagaugaguuggagaagu

SEQ ID NO: 1440520 - RNA, 19 nt, Homo sapiens
  misc_RNA (1)...(19): siRNA sense strand
uaucuauggcuaauaaugg

SEQ ID NO: 1440521 - RNA, 19 nt, Homo sapiens
  misc_RNA (1)...(19): siRNA sense strand
ccaauggaucucaguucuu

SEQ ID NO: 1440522 - RNA, 19 nt, Homo sapiens
  misc_RNA (1)...(19): siRNA sense strand
caauguuagagguguugua

SEQ ID NO: 1440523 - RNA, 19 nt, Homo sapiens
  misc_RNA (1)...(19): siRNA sense strand
acauaccgaccucuuaaug

SEQ ID NO: 1440524 - RNA, 19 nt, Homo sapiens
  misc_RNA (1)...(19): siRNA sense strand
cagccacauuuggacauga

SEQ ID NO: 1440525 - RNA, 19 nt, Homo sapiens
  misc_RNA (1)...(19): siRNA sense strand
gacauaccgaccucuuaau

SEQ ID NO: 1440526 - RNA, 19 nt, Homo sapiens
  misc_RNA (1)...(19): siRNA sense strand
gcaagaaguuugaggauga

SEQ ID NO: 1440527 - RNA, 19 nt, Homo sapiens
  misc_RNA (1)...(19): siRNA sense strand
gguaauagauggucuggaa

SEQ ID NO: 1440528 - RNA, 19 nt, Homo sapiens
  misc_RNA (1)...(19): siRNA sense strand
gugaauaucuuaagcacaa

SEQ ID NO: 1440529 - RNA, 19 nt, Homo sapiens
  misc_RNA (1)...(19): siRNA sense strand
ggaagaggaggcaacagua

SEQ ID NO: 1440530 - RNA, 19 nt, Homo sapiens
  misc_RNA (1)...(19): siRNA sense strand
uagaugaguuggagaaguu

SEQ ID NO: 1440531 - RNA, 19 nt, Homo sapiens
  misc_RNA (1)...(19): siRNA sense strand
caauggaucucaguucuuc

SEQ ID NO: 1440532 - RNA, 19 nt, Homo sapiens
  misc_RNA (1)...(19): siRNA sense strand
gaagaggaggcaacaguau

SEQ ID NO: 1440533 - RNA, 19 nt, Homo sapiens
  misc_RNA (1)...(19): siRNA sense strand
gaggaugaauacagugaau

SEQ ID NO: 1440534 - RNA, 19 nt, Homo sapiens
  misc_RNA (1)...(19): siRNA sense strand
gcacaauguuagagguguu

SEQ ID NO: 1440535 - RNA, 19 nt, Homo sapiens
  misc_RNA (1)...(19): siRNA sense strand
ggaugaauacagugaauau

SEQ ID NO: 1440536 - RNA, 19 nt, Homo sapiens
  misc_RNA (1)...(19): siRNA sense strand
caccguauuuggaaaggua

SEQ ID NO: 1440537 - RNA, 19 nt, Homo sapiens
  misc_RNA (1)...(19): siRNA sense strand
caagaaguuugaggaugaa

SEQ ID NO: 1440538 - RNA, 19 nt, Homo sapiens
  misc_RNA (1)...(19): siRNA sense strand
uuggagaaguugccaguaa

SEQ ID NO: 1440539 - RNA, 19 nt, Homo sapiens
  misc_RNA (1)...(19): siRNA sense strand
ggaucucaguucuucauca

SEQ ID NO: 1440540 - RNA, 19 nt, Homo sapiens
  misc_RNA (1)...(19): siRNA sense strand
agacauaccgaccucuuaa

SEQ ID NO: 1440541 - RNA, 19 nt, Homo sapiens
  misc_RNA (1)...(19): siRNA sense strand
uggagaaguugccaguaaa

SEQ ID NO: 1440542 - RNA, 19 nt, Homo sapiens
  misc_RNA (1)...(19): siRNA sense strand
caguaaaugagaagacaua

SEQ ID NO: 1440543 - RNA, 19 nt, Homo sapiens
  misc_RNA (1)...(19): siRNA sense strand
gaaguuugaggaugaauac

SEQ ID NO: 1440544 - RNA, 19 nt, Homo sapiens
  misc_RNA (1)...(19): siRNA sense strand
agaaguugccaguaaauga

SEQ ID NO: 1440545 - RNA, 19 nt, Homo sapiens
  misc_RNA (1)...(19): siRNA sense strand
caacccauuugcucaguag

SEQ ID NO: 1440546 - RNA, 19 nt, Homo sapiens
  misc_RNA (1)...(19): siRNA sense strand
uagauggucuggaaacucu

SEQ ID NO: 1440547 - RNA, 19 nt, Homo sapiens
  misc_RNA (1)...(19): siRNA sense strand
acagauguaggugauauua

SEQ ID NO: 1440548 - RNA, 19 nt, Homo sapiens
  misc_RNA (1)...(19): siRNA sense strand
uguuagagguguuguaucu

SEQ ID NO: 1440549 - RNA, 19 nt, Homo sapiens
  misc_RNA (1)...(19): siRNA sense strand
gaaguugccaguaaaugag

SEQ ID NO: 1440550 - RNA, 19 nt, Homo sapiens
  misc_RNA (1)...(19): siRNA sense strand
ggagaaguugccaguaaau

SEQ ID NO: 1440551 - RNA, 19 nt, Homo sapiens
  misc_RNA (1)...(19): siRNA sense strand
agaggaggcaacaguauuu

SEQ ID NO: 1440552 - RNA, 19 nt, Homo sapiens
  misc_RNA (1)...(19): siRNA sense strand
auaccgaccucuuaaugau

SEQ ID NO: 1440553 - RNA, 19 nt, Homo sapiens
  misc_RNA (1)...(19): siRNA sense strand
ccaacccauuugcucagua

SEQ ID NO: 1440554 - RNA, 19 nt, Homo sapiens
  misc_RNA (1)...(19): siRNA sense strand
cauaccgaccucuuaauga

SEQ ID NO: 1440555 - RNA, 19 nt, Homo sapiens
  misc_RNA (1)...(19): siRNA sense strand
gccaguaaaugagaagaca

SEQ ID NO: 1440556 - RNA, 19 nt, Homo sapiens
  misc_RNA (1)...(19): siRNA sense strand
gaucucaguucuucaucac

SEQ ID NO: 1440557 - RNA, 19 nt, Homo sapiens
  misc_RNA (1)...(19): siRNA sense strand
gagaaguugccaguaaaug

SEQ ID NO: 1440558 - RNA, 19 nt, Homo sapiens
  misc_RNA (1)...(19): siRNA sense strand
gaauaucuuaagcacaaug

SEQ ID NO: 1440559 - RNA, 19 nt, Homo sapiens
  misc_RNA (1)...(19): siRNA sense strand
guaauagauggucuggaaa

SEQ ID NO: 1440560 - RNA, 19 nt, Homo sapiens
  misc_RNA (1)...(19): siRNA sense strand
cuucaucaccuauggcaaa

SEQ ID NO: 1440561 - RNA, 19 nt, Homo sapiens
  misc_RNA (1)...(19): siRNA sense strand
guaucuauggcuaauaaug

SEQ ID NO: 1440562 - RNA, 19 nt, Homo sapiens
  misc_RNA (1)...(19): siRNA sense strand
guacacauuaaggacauaa

SEQ ID NO: 1440563 - RNA, 19 nt, Homo sapiens
  misc_RNA (1)...(19): siRNA sense strand
ucuggaaacucuagaugag

SEQ ID NO: 1440564 - RNA, 19 nt, Homo sapiens
  misc_RNA (1)...(19): siRNA sense strand
guuugaggaugaauacagu

SEQ ID NO: 1440565 - RNA, 19 nt, Homo sapiens
  misc_RNA (1)...(19): siRNA sense strand
cagauguaggugauauuaa

SEQ ID NO: 1440566 - RNA, 19 nt, Homo sapiens
  misc_RNA (1)...(19): siRNA sense strand
agaaguuugaggaugaaua

SEQ ID NO: 1440567 - RNA, 19 nt, Homo sapiens
  misc_RNA (1)...(19): siRNA sense strand
cacauuaaggacauaacua

SEQ ID NO: 1440568 - RNA, 19 nt, Homo sapiens
  misc_RNA (1)...(19): siRNA sense strand
gcuaauaauggcccgaaca

SEQ ID NO: 1440569 - RNA, 19 nt, Homo sapiens
  misc_RNA (1)...(19): siRNA sense strand
ugacacugcauacagaugu

SEQ ID NO: 1440570 - RNA, 19 nt, Homo sapiens
  misc_RNA (1)...(19): siRNA sense strand
caucaccuauggcaaacag

SEQ ID NO: 1440571 - RNA, 19 nt, Homo sapiens
  misc_RNA (1)...(19): siRNA sense strand
aagaggaggcaacaguauu

SEQ ID NO: 1440572 - RNA, 19 nt, Homo sapiens
  misc_RNA (1)...(19): siRNA sense strand
gaggaggcaacaguauuug

SEQ ID NO: 1440573 - RNA, 19 nt, Homo sapiens
  misc_RNA (1)...(19): siRNA sense strand
ggucuggaaacucuagaug

SEQ ID NO: 1440574 - RNA, 19 nt, Homo sapiens
  misc_RNA (1)...(19): siRNA sense strand
gggcaagaaguuugaggau

SEQ ID NO: 1440575 - RNA, 19 nt, Homo sapiens
  misc_RNA (1)...(19): siRNA sense strand
cuagaugaguuggagaagu

SEQ ID NO: 1440576 - RNA, 19 nt, Homo sapiens
  misc_RNA (1)...(19): siRNA sense strand
uaucuauggcuaauaaugg

SEQ ID NO: 1440577 - RNA, 19 nt, Homo sapiens
  misc_RNA (1)...(19): siRNA sense strand
ccaauggaucucaguucuu

SEQ ID NO: 1440578 - RNA, 19 nt, Homo sapiens
  misc_RNA (1)...(19): siRNA sense strand
caauguuagagguguugua

SEQ ID NO: 1440579 - RNA, 19 nt, Homo sapiens
  misc_RNA (1)...(19): siRNA sense strand
acauaccgaccucuuaaug

SEQ ID NO: 1440580 - RNA, 19 nt, Homo sapiens
  misc_RNA (1)...(19): siRNA sense strand
cagccacauuuggacauga

SEQ ID NO: 1440581 - RNA, 19 nt, Homo sapiens
  misc_RNA (1)...(19): siRNA sense strand
gacauaccgaccucuuaau

SEQ ID NO: 1440582 - RNA, 19 nt, Homo sapiens
  misc_RNA (1)...(19): siRNA sense strand
gcaagaaguuugaggauga

SEQ ID NO: 1440583 - RNA, 19 nt, Homo sapiens
  misc_RNA (1)...(19): siRNA sense strand
gguaauagauggucuggaa

SEQ ID NO: 1440584 - RNA, 19 nt, Homo sapiens
  misc_RNA (1)...(19): siRNA sense strand
gugaauaucuuaagcacaa

SEQ ID NO: 1440585 - RNA, 19 nt, Homo sapiens
  misc_RNA (1)...(19): siRNA sense strand
ggaagaggaggcaacagua

SEQ ID NO: 1440586 - RNA, 19 nt, Homo sapiens
  misc_RNA (1)...(19): siRNA sense strand
uagaugaguuggagaaguu

SEQ ID NO: 1440587 - RNA, 19 nt, Homo sapiens
  misc_RNA (1)...(19): siRNA sense strand
caauggaucucaguucuuc

SEQ ID NO: 1440588 - RNA, 19 nt, Homo sapiens
  misc_RNA (1)...(19): siRNA sense strand
gaagaggaggcaacaguau

SEQ ID NO: 1440589 - RNA, 19 nt, Homo sapiens
  misc_RNA (1)...(19): siRNA sense strand
gaggaugaauacagugaau

SEQ ID NO: 1440590 - RNA, 19 nt, Homo sapiens
  misc_RNA (1)...(19): siRNA sense strand
gcacaauguuagagguguu

SEQ ID NO: 1440591 - RNA, 19 nt, Homo sapiens
  misc_RNA (1)...(19): siRNA sense strand
ggaugaauacagugaauau

SEQ ID NO: 1440592 - RNA, 19 nt, Homo sapiens
  misc_RNA (1)...(19): siRNA sense strand
caccguauuuggaaaggua

SEQ ID NO: 1440593 - RNA, 19 nt, Homo sapiens
  misc_RNA (1)...(19): siRNA sense strand
caagaaguuugaggaugaa

SEQ ID NO: 1440594 - RNA, 19 nt, Homo sapiens
  misc_RNA (1)...(19): siRNA sense strand
uuggagaaguugccaguaa

SEQ ID NO: 1440595 - RNA, 19 nt, Homo sapiens
  misc_RNA (1)...(19): siRNA sense strand
ggaucucaguucuucauca

SEQ ID NO: 1440596 - RNA, 19 nt, Homo sapiens
  misc_RNA (1)...(19): siRNA sense strand
agacauaccgaccucuuaa

SEQ ID NO: 1440597 - RNA, 19 nt, Homo sapiens
  misc_RNA (1)...(19): siRNA sense strand
uggagaaguugccaguaaa

SEQ ID NO: 1440598 - RNA, 19 nt, Homo sapiens
  misc_RNA (1)...(19): siRNA sense strand
caguaaaugagaagacaua

SEQ ID NO: 1440599 - RNA, 19 nt, Homo sapiens
  misc_RNA (1)...(19): siRNA sense strand
gaaguuugaggaugaauac

SEQ ID NO: 1440600 - RNA, 19 nt, Homo sapiens
  misc_RNA (1)...(19): siRNA sense strand
agaaguugccaguaaauga

SEQ ID NO: 1440601 - RNA, 19 nt, Homo sapiens
  misc_RNA (1)...(19): siRNA sense strand
caacccauuugcucaguag

SEQ ID NO: 1440602 - RNA, 19 nt, Homo sapiens
  misc_RNA (1)...(19): siRNA sense strand
uagauggucuggaaacucu

SEQ ID NO: 1440603 - RNA, 19 nt, Homo sapiens
  misc_RNA (1)...(19): siRNA sense strand
acagauguaggugauauua

SEQ ID NO: 1440604 - RNA, 19 nt, Homo sapiens
  misc_RNA (1)...(19): siRNA sense strand
uguuagagguguuguaucu

SEQ ID NO: 1440605 - RNA, 19 nt, Homo sapiens
  misc_RNA (1)...(19): siRNA sense strand
gaaguugccaguaaaugag

SEQ ID NO: 1440606 - RNA, 19 nt, Homo sapiens
  misc_RNA (1)...(19): siRNA sense strand
ggagaaguugccaguaaau

SEQ ID NO: 1440607 - RNA, 19 nt, Homo sapiens
  misc_RNA (1)...(19): siRNA sense strand
agaggaggcaacaguauuu

SEQ ID NO: 1440608 - RNA, 19 nt, Homo sapiens
  misc_RNA (1)...(19): siRNA sense strand
auaccgaccucuuaaugau

SEQ ID NO: 1440609 - RNA, 19 nt, Homo sapiens
  misc_RNA (1)...(19): siRNA sense strand
ccaacccauuugcucagua

SEQ ID NO: 1440610 - RNA, 19 nt, Homo sapiens
  misc_RNA (1)...(19): siRNA sense strand
cauaccgaccucuuaauga

SEQ ID NO: 1440611 - RNA, 19 nt, Homo sapiens
  misc_RNA (1)...(19): siRNA sense strand
gccaguaaaugagaagaca

SEQ ID NO: 1440612 - RNA, 19 nt, Homo sapiens
  misc_RNA (1)...(19): siRNA sense strand
gaucucaguucuucaucac

SEQ ID NO: 1440613 - RNA, 19 nt, Homo sapiens
  misc_RNA (1)...(19): siRNA sense strand
gagaaguugccaguaaaug

SEQ ID NO: 1440614 - RNA, 19 nt, Homo sapiens
  misc_RNA (1)...(19): siRNA sense strand
gaauaucuuaagcacaaug

SEQ ID NO: 1440615 - RNA, 19 nt, Homo sapiens
  misc_RNA (1)...(19): siRNA sense strand
guaauagauggucuggaaa

SEQ ID NO: 1440616 - RNA, 19 nt, Homo sapiens
  misc_RNA (1)...(19): siRNA sense strand
cuucaucaccuauggcaaa

SEQ ID NO: 1440617 - RNA, 19 nt, Homo sapiens
  misc_RNA (1)...(19): siRNA sense strand
guaucuauggcuaauaaug

SEQ ID NO: 1440618 - RNA, 19 nt, Homo sapiens
  misc_RNA (1)...(19): siRNA sense strand
guacacauuaaggacauaa

SEQ ID NO: 1440619 - RNA, 19 nt, Homo sapiens
  misc_RNA (1)...(19): siRNA sense strand
ucuggaaacucuagaugag

SEQ ID NO: 1440620 - RNA, 19 nt, Homo sapiens
  misc_RNA (1)...(19): siRNA sense strand
guuugaggaugaauacagu

SEQ ID NO: 1440621 - RNA, 19 nt, Homo sapiens
  misc_RNA (1)...(19): siRNA sense strand
cagauguaggugauauuaa

SEQ ID NO: 1440622 - RNA, 19 nt, Homo sapiens
  misc_RNA (1)...(19): siRNA sense strand
agaaguuugaggaugaaua

SEQ ID NO: 1440623 - RNA, 19 nt, Homo sapiens
  misc_RNA (1)...(19): siRNA sense strand
cacauuaaggacauaacua

SEQ ID NO: 1440624 - RNA, 19 nt, Homo sapiens
  misc_RNA (1)...(19): siRNA sense strand
gcuaauaauggcccgaaca

SEQ ID NO: 1440625 - RNA, 19 nt, Homo sapiens
  misc_RNA (1)...(19): siRNA sense strand
ugacacugcauacagaugu

SEQ ID NO: 1440626 - RNA, 19 nt, Homo sapiens
  misc_RNA (1)...(19): siRNA sense strand
caucaccuauggcaaacag

SEQ ID NO: 1440627 - RNA, 19 nt, Homo sapiens
  misc_RNA (1)...(19): siRNA sense strand
aagaggaggcaacaguauu

SEQ ID NO: 1440628 - RNA, 19 nt, Homo sapiens
  misc_RNA (1)...(19): siRNA sense strand
gaggaggcaacaguauuug

SEQ ID NO: 1440629 - RNA, 19 nt, Homo sapiens
  misc_RNA (1)...(19): siRNA sense strand
ggucuggaaacucuagaug

SEQ ID NO: 1440630 - RNA, 19 nt, Homo sapiens
  misc_RNA (1)...(19): siRNA sense strand
gggcaagaaguuugaggau

SEQ ID NO: 1440631 - RNA, 19 nt, Homo sapiens
  misc_RNA (1)...(19): siRNA sense strand
cuagaugaguuggagaagu

SEQ ID NO: 1440632 - RNA, 19 nt, Homo sapiens
  misc_RNA (1)...(19): siRNA sense strand
uaucuauggcuaauaaugg

SEQ ID NO: 1440633 - RNA, 19 nt, Homo sapiens
  misc_RNA (1)...(19): siRNA sense strand
ccaauggaucucaguucuu

SEQ ID NO: 1440634 - RNA, 19 nt, Homo sapiens
  misc_RNA (1)...(19): siRNA sense strand
caauguuagagguguugua

SEQ ID NO: 1440635 - RNA, 19 nt, Homo sapiens
  misc_RNA (1)...(19): siRNA sense strand
acauaccgaccucuuaaug

SEQ ID NO: 1440636 - RNA, 19 nt, Homo sapiens
  misc_RNA (1)...(19): siRNA sense strand
cagccacauuuggacauga

SEQ ID NO: 1440637 - RNA, 19 nt, Homo sapiens
  misc_RNA (1)...(19): siRNA sense strand
gacauaccgaccucuuaau

SEQ ID NO: 1440638 - RNA, 19 nt, Homo sapiens
  misc_RNA (1)...(19): siRNA sense strand
gaagaaauaugucaacuca

SEQ ID NO: 1440639 - RNA, 19 nt, Homo sapiens
  misc_RNA (1)...(19): siRNA sense strand
ggaccgaggugauugauaa

SEQ ID NO: 1440640 - RNA, 19 nt, Homo sapiens
  misc_RNA (1)...(19): siRNA sense strand
caaacaagcuggacaagaa

SEQ ID NO: 1440641 - RNA, 19 nt, Homo sapiens
  misc_RNA (1)...(19): siRNA sense strand
cagaagagcuuagcaauug

SEQ ID NO: 1440642 - RNA, 19 nt, Homo sapiens
  misc_RNA (1)...(19): siRNA sense strand
gcaaauucguccucgacua

SEQ ID NO: 1440643 - RNA, 19 nt, Homo sapiens
  misc_RNA (1)...(19): siRNA sense strand
gaacuucacaguagccauu

SEQ ID NO: 1440644 - RNA, 19 nt, Homo sapiens
  misc_RNA (1)...(19): siRNA sense strand
gaagaaauguaagaagaag

SEQ ID NO: 1440645 - RNA, 19 nt, Homo sapiens
  misc_RNA (1)...(19): siRNA sense strand
cggaagaaauguaagaaga

SEQ ID NO: 1440646 - RNA, 19 nt, Homo sapiens
  misc_RNA (1)...(19): siRNA sense strand
acagaacggugaagauuga

SEQ ID NO: 1440647 - RNA, 19 nt, Homo sapiens
  misc_RNA (1)...(19): siRNA sense strand
caagaagugugggaccaua

SEQ ID NO: 1440648 - RNA, 19 nt, Homo sapiens
  misc_RNA (1)...(19): siRNA sense strand
ggaagaaauguaagaagaa

SEQ ID NO: 1440649 - RNA, 19 nt, Homo sapiens
  misc_RNA (1)...(19): siRNA sense strand
gcagaagagcuuagcaauu

SEQ ID NO: 1440650 - RNA, 19 nt, Homo sapiens
  misc_RNA (1)...(19): siRNA sense strand
ccaccaagauugaaauuac

SEQ ID NO: 1440651 - RNA, 19 nt, Homo sapiens
  misc_RNA (1)...(19): siRNA sense strand
ggacuucuuugggaaauca

SEQ ID NO: 1440652 - RNA, 19 nt, Homo sapiens
  misc_RNA (1)...(19): siRNA sense strand
caagacagagguugugaaa

SEQ ID NO: 1440653 - RNA, 19 nt, Homo sapiens
  misc_RNA (1)...(19): siRNA sense strand
gagagaucauccaggacua

SEQ ID NO: 1440654 - RNA, 19 nt, Homo sapiens
  misc_RNA (1)...(19): siRNA sense strand
caaauucguccucgacuau

SEQ ID NO: 1440655 - RNA, 19 nt, Homo sapiens
  misc_RNA (1)...(19): siRNA sense strand
caauggagacuaugacaga

SEQ ID NO: 1440656 - RNA, 19 nt, Homo sapiens
  misc_RNA (1)...(19): siRNA sense strand
ggaaccagguguugagcau

SEQ ID NO: 1440657 - RNA, 19 nt, Homo sapiens
  misc_RNA (1)...(19): siRNA sense strand
gaacggugaagauugaugu

SEQ ID NO: 1440658 - RNA, 19 nt, Homo sapiens
  misc_RNA (1)...(19): siRNA sense strand
gcaaggcccagaaccaguu

SEQ ID NO: 1440659 - RNA, 19 nt, Homo sapiens
  misc_RNA (1)...(19): siRNA sense strand
ggaaccugcuagaccuuga

SEQ ID NO: 1440660 - RNA, 19 nt, Homo sapiens
  misc_RNA (1)...(19): siRNA sense strand
gcccaugucuaucauuauc

SEQ ID NO: 1440661 - RNA, 19 nt, Homo sapiens
  misc_RNA (1)...(19): siRNA sense strand
gcaaacaagcuggacaaga

SEQ ID NO: 1440662 - RNA, 19 nt, Homo sapiens
  misc_RNA (1)...(19): siRNA sense strand
ugacagaacggugaagauu

SEQ ID NO: 1440663 - RNA, 19 nt, Homo sapiens
  misc_RNA (1)...(19): siRNA sense strand
cuacuuugcuccugucauc

SEQ ID NO: 1440664 - RNA, 19 nt, Homo sapiens
  misc_RNA (1)...(19): siRNA sense strand
cggugaagauugaugugua

SEQ ID NO: 1440665 - RNA, 19 nt, Homo sapiens
  misc_RNA (1)...(19): siRNA sense strand
gcaaugaggauggcacguu

SEQ ID NO: 1440666 - RNA, 19 nt, Homo sapiens
  misc_RNA (1)...(19): siRNA sense strand
cgucagcgccuccucauug

SEQ ID NO: 1440667 - RNA, 19 nt, Homo sapiens
  misc_RNA (1)...(19): siRNA sense strand
gaagugugggaccauauug

SEQ ID NO: 1440668 - RNA, 19 nt, Homo sapiens
  misc_RNA (1)...(19): siRNA sense strand
cuucccagcuuauggcuuu

SEQ ID NO: 1440669 - RNA, 19 nt, Homo sapiens
  misc_RNA (1)...(19): siRNA sense strand
gaagaagaaauaugucaac

SEQ ID NO: 1440670 - RNA, 19 nt, Homo sapiens
  misc_RNA (1)...(19): siRNA sense strand
ggaagccacgauuucauug

SEQ ID NO: 1440671 - RNA, 19 nt, Homo sapiens
  misc_RNA (1)...(19): siRNA sense strand
gacagaacggugaagauug

SEQ ID NO: 1440672 - RNA, 19 nt, Homo sapiens
  misc_RNA (1)...(19): siRNA sense strand
gcagcugugugcaaacaag

SEQ ID NO: 1440673 - RNA, 19 nt, Homo sapiens
  misc_RNA (1)...(19): siRNA sense strand
uugcccaugucuaucauua

SEQ ID NO: 1440674 - RNA, 19 nt, Homo sapiens
  misc_RNA (1)...(19): siRNA sense strand
ggauggaagccacgauuuc

SEQ ID NO: 1440675 - RNA, 19 nt, Homo sapiens
  misc_RNA (1)...(19): siRNA sense strand
ggacggaccgaggugauug

SEQ ID NO: 1440676 - RNA, 19 nt, Homo sapiens
  misc_RNA (1)...(19): siRNA sense strand
gauggaagccacgauuuca

SEQ ID NO: 1440677 - RNA, 19 nt, Homo sapiens
  misc_RNA (1)...(19): siRNA sense strand
ccucauugcccaugucuau

SEQ ID NO: 1440678 - RNA, 19 nt, Homo sapiens
  misc_RNA (1)...(19): siRNA sense strand
ggugaagauugauguguac

SEQ ID NO: 1440679 - RNA, 19 nt, Homo sapiens
  misc_RNA (1)...(19): siRNA sense strand
gaugugcgcguguccucua

SEQ ID NO: 1440680 - RNA, 19 nt, Homo sapiens
  misc_RNA (1)...(19): siRNA sense strand
uguaggaccagccauguuu

SEQ ID NO: 1440681 - RNA, 19 nt, Homo sapiens
  misc_RNA (1)...(19): siRNA sense strand
cacaguagccauugacuuc

SEQ ID NO: 1440682 - RNA, 19 nt, Homo sapiens
  misc_RNA (1)...(19): siRNA sense strand
aaucugcgcuucgaugugu

SEQ ID NO: 1440683 - RNA, 19 nt, Homo sapiens
  misc_RNA (1)...(19): siRNA sense strand
gggauggaagccacgauuu

SEQ ID NO: 1440684 - RNA, 19 nt, Homo sapiens
  misc_RNA (1)...(19): siRNA sense strand
cguccucgacuauuucuuu

SEQ ID NO: 1440685 - RNA, 19 nt, Homo sapiens
  misc_RNA (1)...(19): siRNA sense strand
caguauaugagguucuuaa

SEQ ID NO: 1440686 - RNA, 19 nt, Homo sapiens
  misc_RNA (1)...(19): siRNA sense strand
ugacagugauaagcucuuc

SEQ ID NO: 1440687 - RNA, 19 nt, Homo sapiens
  misc_RNA (1)...(19): siRNA sense strand
guuggacggugaugaugug

SEQ ID NO: 1440688 - RNA, 19 nt, Homo sapiens
  misc_RNA (1)...(19): siRNA sense strand
gaaaucagaccccuuccuu

SEQ ID NO: 1440689 - RNA, 19 nt, Homo sapiens
  misc_RNA (1)...(19): siRNA sense strand
cuaccucccugcacuacau

SEQ ID NO: 1440690 - RNA, 19 nt, Homo sapiens
  misc_RNA (1)...(19): siRNA sense strand
gagggacacagcugaacuu

SEQ ID NO: 1440691 - RNA, 19 nt, Homo sapiens
  misc_RNA (1)...(19): siRNA sense strand
cgauuucauuggugaguuc

SEQ ID NO: 1440692 - RNA, 19 nt, Homo sapiens
  misc_RNA (1)...(19): siRNA sense strand
gaagagcuuagcaauuguc

SEQ ID NO: 1440693 - RNA, 19 nt, Homo sapiens
  misc_RNA (1)...(19): siRNA sense strand
ggacuaugacagugauaag

SEQ ID NO: 1440694 - RNA, 19 nt, Homo sapiens
  misc_RNA (1)...(19): siRNA sense strand
ccaggacuaugacagugau

SEQ ID NO: 1440695 - RNA, 19 nt, Homo sapiens
  misc_RNA (1)...(19): siRNA sense strand
cacaguauaugagguucuu

SEQ ID NO: 1440696 - RNA, 19 nt, Homo sapiens
  misc_RNA (1)...(19): siRNA sense strand
guacuauguucugcucauc

SEQ ID NO: 1440697 - RNA, 19 nt, Homo sapiens
  misc_RNA (1)...(19): siRNA sense strand
ucugugcaauggagacuau

SEQ ID NO: 1440698 - RNA, 19 nt, Homo sapiens
  misc_RNA (1)...(19): siRNA sense strand
aauucguccucgacuauuu

SEQ ID NO: 1440699 - RNA, 19 nt, Homo sapiens
  misc_RNA (1)...(19): siRNA sense strand
uggaagccacgauuucauu

SEQ ID NO: 1440700 - RNA, 19 nt, Homo sapiens
  misc_RNA (1)...(19): siRNA sense strand
gcgcuucgauguguacaac

SEQ ID NO: 1440701 - RNA, 19 nt, Homo sapiens
  misc_RNA (1)...(19): siRNA sense strand
ucuaugggcccaccuacuu

SEQ ID NO: 1440702 - RNA, 19 nt, Homo sapiens
  misc_RNA (1)...(19): siRNA sense strand
ugcuagaccuugauaccuu

SEQ ID NO: 1440703 - RNA, 19 nt, Homo sapiens
  misc_RNA (1)...(19): siRNA sense strand
guucacaguauaugagguu

SEQ ID NO: 1440704 - RNA, 19 nt, Homo sapiens
  misc_RNA (1)...(19): siRNA sense strand
aaaccaacaucuccaaacc

SEQ ID NO: 1440705 - RNA, 19 nt, Homo sapiens
  misc_RNA (1)...(19): siRNA sense strand
gccaccaagauugaaauua

SEQ ID NO: 1440706 - RNA, 19 nt, Homo sapiens
  misc_RNA (1)...(19): siRNA sense strand
agaagagcuuagcaauugu

SEQ ID NO: 1440707 - RNA, 19 nt, Homo sapiens
  misc_RNA (1)...(19): siRNA sense strand
guccucgacuauuucuuug

SEQ ID NO: 1440708 - RNA, 19 nt, Homo sapiens
  misc_RNA (1)...(19): siRNA sense strand
gugcaaacaagcuggacaa

SEQ ID NO: 1440709 - RNA, 19 nt, Homo sapiens
  misc_RNA (1)...(19): siRNA sense strand
agaagugugggaccauauu

SEQ ID NO: 1440710 - RNA, 19 nt, Homo sapiens
  misc_RNA (1)...(19): siRNA sense strand
uaugucaacucaggaacug

SEQ ID NO: 1440711 - RNA, 19 nt, Homo sapiens
  misc_RNA (1)...(19): siRNA sense strand
aaauaugucaacucaggaa

SEQ ID NO: 1440712 - RNA, 19 nt, Homo sapiens
  misc_RNA (1)...(19): siRNA sense strand
ccucgacuauuucuuugag

SEQ ID NO: 1440713 - RNA, 19 nt, Homo sapiens
  misc_RNA (1)...(19): siRNA sense strand
cgacuauuucuuugaggaa

SEQ ID NO: 1440714 - RNA, 19 nt, Homo sapiens
  misc_RNA (1)...(19): siRNA sense strand
uauaugcgcaccagagaca

SEQ ID NO: 1440715 - RNA, 19 nt, Homo sapiens
  misc_RNA (1)...(19): siRNA sense strand
uugaggcaauggaagaguu

SEQ ID NO: 1440716 - RNA, 19 nt, Homo sapiens
  misc_RNA (1)...(19): siRNA sense strand
agggugugcuggagagcua

SEQ ID NO: 1440717 - RNA, 19 nt, Homo sapiens
  misc_RNA (1)...(19): siRNA sense strand
ugacuucacggcuuccaau

SEQ ID NO: 1440718 - RNA, 19 nt, Homo sapiens
  misc_RNA (1)...(19): siRNA sense strand
gaagccacgauuucauugg

SEQ ID NO: 1440719 - RNA, 19 nt, Homo sapiens
  misc_RNA (1)...(19): siRNA sense strand
cagacuucgugcgcaaauu

SEQ ID NO: 1440720 - RNA, 19 nt, Homo sapiens
  misc_RNA (1)...(19): siRNA sense strand
guaggaccagccauguuug

SEQ ID NO: 1440721 - RNA, 19 nt, Homo sapiens
  misc_RNA (1)...(19): siRNA sense strand
ucauugcccaugucuauca

SEQ ID NO: 1440722 - RNA, 19 nt, Homo sapiens
  misc_RNA (1)...(19): siRNA sense strand
ucugauggcucccaguacu

SEQ ID NO: 1440723 - RNA, 19 nt, Homo sapiens
  misc_RNA (1)...(19): siRNA sense strand
ucucugauggcucccagua

SEQ ID NO: 1440724 - RNA, 19 nt, Homo sapiens
  misc_RNA (1)...(19): siRNA sense strand
gcagccaagaucucugaug

SEQ ID NO: 1440725 - RNA, 19 nt, Homo sapiens
  misc_RNA (1)...(19): siRNA sense strand
gagaucauccaggacuaug

SEQ ID NO: 1440726 - RNA, 19 nt, Homo sapiens
  misc_RNA (1)...(19): siRNA sense strand
ucaaggcagugggagagau

SEQ ID NO: 1440727 - RNA, 19 nt, Homo sapiens
  misc_RNA (1)...(19): siRNA sense strand
ucacaguagccauugacuu

SEQ ID NO: 1440728 - RNA, 19 nt, Homo sapiens
  misc_RNA (1)...(19): siRNA sense strand
agacuucgugcgcaaauuc

SEQ ID NO: 1440729 - RNA, 19 nt, Homo sapiens
  misc_RNA (1)...(19): siRNA sense strand
gaaccugcuagaccuugau

SEQ ID NO: 1440730 - RNA, 19 nt, Homo sapiens
  misc_RNA (1)...(19): siRNA sense strand
ucuguggacucugaauuca

SEQ ID NO: 1440731 - RNA, 19 nt, Homo sapiens
  misc_RNA (1)...(19): siRNA sense strand
gcaagaagugugggaccau

SEQ ID NO: 1440732 - RNA, 19 nt, Homo sapiens
  misc_RNA (1)...(19): siRNA sense strand
ccaugucuaucauuaucgu

SEQ ID NO: 1440733 - RNA, 19 nt, Homo sapiens
  misc_RNA (1)...(19): siRNA sense strand
ugacgcugcucuccuucuc

SEQ ID NO: 1440734 - RNA, 19 nt, Homo sapiens
  misc_RNA (1)...(19): siRNA sense strand
ccucggaagaaauguaaga

SEQ ID NO: 1440735 - RNA, 19 nt, Homo sapiens
  misc_RNA (1)...(19): siRNA sense strand
uaucugaacucuaugcauu

SEQ ID NO: 1440736 - RNA, 19 nt, Homo sapiens
  misc_RNA (1)...(19): siRNA sense strand
gagaaagaguuccacuuca

SEQ ID NO: 1440737 - RNA, 19 nt, Homo sapiens
  misc_RNA (1)...(19): siRNA sense strand
ggagaaagaguuccacuuc

SEQ ID NO: 1440738 - RNA, 19 nt, Homo sapiens
  misc_RNA (1)...(19): siRNA sense strand
agaaagaguuccacuucaa

SEQ ID NO: 1440739 - RNA, 19 nt, Homo sapiens
  misc_RNA (1)...(19): siRNA sense strand
gaaagagucucgacaaaac

SEQ ID NO: 1440740 - RNA, 19 nt, Homo sapiens
  misc_RNA (1)...(19): siRNA sense strand
guggcuaucugaacucuau

SEQ ID NO: 1440741 - RNA, 19 nt, Homo sapiens
  misc_RNA (1)...(19): siRNA sense strand
gaugaaagagucucgacaa

SEQ ID NO: 1440742 - RNA, 19 nt, Homo sapiens
  misc_RNA (1)...(19): siRNA sense strand
ucaacagcgucccguauga

SEQ ID NO: 1440743 - RNA, 19 nt, Homo sapiens
  misc_RNA (1)...(19): siRNA sense strand
ugguggagcuggagaaaga

SEQ ID NO: 1440744 - RNA, 19 nt, Homo sapiens
  misc_RNA (1)...(19): siRNA sense strand
ucacugagcgccagaucaa

SEQ ID NO: 1440745 - RNA, 19 nt, Homo sapiens
  misc_RNA (1)...(19): siRNA sense strand
gaagggcaagggcaugcua

SEQ ID NO: 1440746 - RNA, 19 nt, Homo sapiens
  misc_RNA (1)...(19): siRNA sense strand
cagaaucgccgcaugaagu

SEQ ID NO: 1440747 - RNA, 19 nt, Homo sapiens
  misc_RNA (1)...(19): siRNA sense strand
gggaagaauucaggaagca

SEQ ID NO: 1440748 - RNA, 19 nt, Homo sapiens
  misc_RNA (1)...(19): siRNA sense strand
gaaagaguuccacuucaac

SEQ ID NO: 1440749 - RNA, 19 nt, Homo sapiens
  misc_RNA (1)...(19): siRNA sense strand
ccagcccucuuuggucuaa

SEQ ID NO: 1440750 - RNA, 19 nt, Homo sapiens
  misc_RNA (1)...(19): siRNA sense strand
augaaagagucucgacaaa

SEQ ID NO: 1440751 - RNA, 19 nt, Homo sapiens
  misc_RNA (1)...(19): siRNA sense strand
aagcugcgcuggcgacaag

SEQ ID NO: 1440752 - RNA, 19 nt, Homo sapiens
  misc_RNA (1)...(19): siRNA sense strand
agaaucgccgcaugaagua

SEQ ID NO: 1440753 - RNA, 19 nt, Homo sapiens
  misc_RNA (1)...(19): siRNA sense strand
ggucaacagcgucccguau

SEQ ID NO: 1440754 - RNA, 19 nt, Homo sapiens
  misc_RNA (1)...(19): siRNA sense strand
gcagggcaacggcagcuau

SEQ ID NO: 1440755 - RNA, 19 nt, Homo sapiens
  misc_RNA (1)...(19): siRNA sense strand
cacaguggccaaacaaauc

SEQ ID NO: 1440756 - RNA, 19 nt, Homo sapiens
  misc_RNA (1)...(19): siRNA sense strand
ggagcuggagaaagaguuc

SEQ ID NO: 1440757 - RNA, 19 nt, Homo sapiens
  misc_RNA (1)...(19): siRNA sense strand
ugcauucgcuggucaacag

SEQ ID NO: 1440758 - RNA, 19 nt, Homo sapiens
  misc_RNA (1)...(19): siRNA sense strand
caaaacacaaagcagaaaa

SEQ ID NO: 1440759 - RNA, 19 nt, Homo sapiens
  misc_RNA (1)...(19): siRNA sense strand
gucaacagcgucccguaug

SEQ ID NO: 1440760 - RNA, 19 nt, Homo sapiens
  misc_RNA (1)...(19): siRNA sense strand
gccgguggcuaucugaacu

SEQ ID NO: 1440761 - RNA, 19 nt, Homo sapiens
  misc_RNA (1)...(19): siRNA sense strand
ggcaagggcaugcuaacgu

SEQ ID NO: 1440762 - RNA, 19 nt, Homo sapiens
  misc_RNA (1)...(19): siRNA sense strand
uaucugaacucuaugcauu

SEQ ID NO: 1440763 - RNA, 19 nt, Homo sapiens
  misc_RNA (1)...(19): siRNA sense strand
gagaaagaguuccacuuca

SEQ ID NO: 1440764 - RNA, 19 nt, Homo sapiens
  misc_RNA (1)...(19): siRNA sense strand
ggagaaagaguuccacuuc

SEQ ID NO: 1440765 - RNA, 19 nt, Homo sapiens
  misc_RNA (1)...(19): siRNA sense strand
agaaagaguuccacuucaa

SEQ ID NO: 1440766 - RNA, 19 nt, Homo sapiens
  misc_RNA (1)...(19): siRNA sense strand
gaaagagucucgacaaaac

SEQ ID NO: 1440767 - RNA, 19 nt, Homo sapiens
  misc_RNA (1)...(19): siRNA sense strand
guggcuaucugaacucuau

SEQ ID NO: 1440768 - RNA, 19 nt, Homo sapiens
  misc_RNA (1)...(19): siRNA sense strand
gaugaaagagucucgacaa

SEQ ID NO: 1440769 - RNA, 19 nt, Homo sapiens
  misc_RNA (1)...(19): siRNA sense strand
ucaacagcgucccguauga

SEQ ID NO: 1440770 - RNA, 19 nt, Homo sapiens
  misc_RNA (1)...(19): siRNA sense strand
ugguggagcuggagaaaga

SEQ ID NO: 1440771 - RNA, 19 nt, Homo sapiens
  misc_RNA (1)...(19): siRNA sense strand
ucacugagcgccagaucaa

SEQ ID NO: 1440772 - RNA, 19 nt, Homo sapiens
  misc_RNA (1)...(19): siRNA sense strand
gaagggcaagggcaugcua

SEQ ID NO: 1440773 - RNA, 19 nt, Homo sapiens
  misc_RNA (1)...(19): siRNA sense strand
cagaaucgccgcaugaagu

SEQ ID NO: 1440774 - RNA, 19 nt, Homo sapiens
  misc_RNA (1)...(19): siRNA sense strand
gggaagaauucaggaagca

SEQ ID NO: 1440775 - RNA, 19 nt, Homo sapiens
  misc_RNA (1)...(19): siRNA sense strand
gaaagaguuccacuucaac

SEQ ID NO: 1440776 - RNA, 19 nt, Homo sapiens
  misc_RNA (1)...(19): siRNA sense strand
ccagcccucuuuggucuaa

SEQ ID NO: 1440777 - RNA, 19 nt, Homo sapiens
  misc_RNA (1)...(19): siRNA sense strand
augaaagagucucgacaaa

SEQ ID NO: 1440778 - RNA, 19 nt, Homo sapiens
  misc_RNA (1)...(19): siRNA sense strand
aagcugcgcuggcgacaag

SEQ ID NO: 1440779 - RNA, 19 nt, Homo sapiens
  misc_RNA (1)...(19): siRNA sense strand
agaaucgccgcaugaagua

SEQ ID NO: 1440780 - RNA, 19 nt, Homo sapiens
  misc_RNA (1)...(19): siRNA sense strand
ggucaacagcgucccguau

SEQ ID NO: 1440781 - RNA, 19 nt, Homo sapiens
  misc_RNA (1)...(19): siRNA sense strand
gcagggcaacggcagcuau

SEQ ID NO: 1440782 - RNA, 19 nt, Homo sapiens
  misc_RNA (1)...(19): siRNA sense strand
cacaguggccaaacaaauc

SEQ ID NO: 1440783 - RNA, 19 nt, Homo sapiens
  misc_RNA (1)...(19): siRNA sense strand
ggagcuggagaaagaguuc

SEQ ID NO: 1440784 - RNA, 19 nt, Homo sapiens
  misc_RNA (1)...(19): siRNA sense strand
ugcauucgcuggucaacag

SEQ ID NO: 1440785 - RNA, 19 nt, Homo sapiens
  misc_RNA (1)...(19): siRNA sense strand
caaaacacaaagcagaaaa

SEQ ID NO: 1440786 - RNA, 19 nt, Homo sapiens
  misc_RNA (1)...(19): siRNA sense strand
gucaacagcgucccguaug

SEQ ID NO: 1440787 - RNA, 19 nt, Homo sapiens
  misc_RNA (1)...(19): siRNA sense strand
gccgguggcuaucugaacu

SEQ ID NO: 1440788 - RNA, 19 nt, Homo sapiens
  misc_RNA (1)...(19): siRNA sense strand
ggcaagggcaugcuaacgu

SEQ ID NO: 1440789 - RNA, 19 nt, Homo sapiens
  misc_RNA (1)...(19): siRNA sense strand
uaucugaacucuaugcauu

SEQ ID NO: 1440790 - RNA, 19 nt, Homo sapiens
  misc_RNA (1)...(19): siRNA sense strand
gagaaagaguuccacuuca

SEQ ID NO: 1440791 - RNA, 19 nt, Homo sapiens
  misc_RNA (1)...(19): siRNA sense strand
ggagaaagaguuccacuuc

SEQ ID NO: 1440792 - RNA, 19 nt, Homo sapiens
  misc_RNA (1)...(19): siRNA sense strand
agaaagaguuccacuucaa

SEQ ID NO: 1440793 - RNA, 19 nt, Homo sapiens
  misc_RNA (1)...(19): siRNA sense strand
gaaagagucucgacaaaac

SEQ ID NO: 1440794 - RNA, 19 nt, Homo sapiens
  misc_RNA (1)...(19): siRNA sense strand
guggcuaucugaacucuau

SEQ ID NO: 1440795 - RNA, 19 nt, Homo sapiens
  misc_RNA (1)...(19): siRNA sense strand
ucaacagcgucccguauga

SEQ ID NO: 1440796 - RNA, 19 nt, Homo sapiens
  misc_RNA (1)...(19): siRNA sense strand
ugguggagcuggagaaaga

SEQ ID NO: 1440797 - RNA, 19 nt, Homo sapiens
  misc_RNA (1)...(19): siRNA sense strand
ucacugagcgccagaucaa

SEQ ID NO: 1440798 - RNA, 19 nt, Homo sapiens
  misc_RNA (1)...(19): siRNA sense strand
gaagggcaagggcaugcua

SEQ ID NO: 1440799 - RNA, 19 nt, Homo sapiens
  misc_RNA (1)...(19): siRNA sense strand
cagaaucgccgcaugaagu

SEQ ID NO: 1440800 - RNA, 19 nt, Homo sapiens
  misc_RNA (1)...(19): siRNA sense strand
gggaagaauucaggaagca

SEQ ID NO: 1440801 - RNA, 19 nt, Homo sapiens
  misc_RNA (1)...(19): siRNA sense strand
gaaagaguuccacuucaac

SEQ ID NO: 1440802 - RNA, 19 nt, Homo sapiens
  misc_RNA (1)...(19): siRNA sense strand
ccagcccucuuuggucuaa

SEQ ID NO: 1440803 - RNA, 19 nt, Homo sapiens
  misc_RNA (1)...(19): siRNA sense strand
aagcugcgcuggcgacaag

SEQ ID NO: 1440804 - RNA, 19 nt, Homo sapiens
  misc_RNA (1)...(19): siRNA sense strand
agaaucgccgcaugaagua

SEQ ID NO: 1440805 - RNA, 19 nt, Homo sapiens
  misc_RNA (1)...(19): siRNA sense strand
ggucaacagcgucccguau

SEQ ID NO: 1440806 - RNA, 19 nt, Homo sapiens
  misc_RNA (1)...(19): siRNA sense strand
gcagggcaacggcagcuau

SEQ ID NO: 1440807 - RNA, 19 nt, Homo sapiens
  misc_RNA (1)...(19): siRNA sense strand
ggagcuggagaaagaguuc

SEQ ID NO: 1440808 - RNA, 19 nt, Homo sapiens
  misc_RNA (1)...(19): siRNA sense strand
ugcauucgcuggucaacag

SEQ ID NO: 1440809 - RNA, 19 nt, Homo sapiens
  misc_RNA (1)...(19): siRNA sense strand
ggcaagggcaugcuaacgu

SEQ ID NO: 1440810 - RNA, 19 nt, Homo sapiens
  misc_RNA (1)...(19): siRNA sense strand
caaaacacaaagcagaaaa

SEQ ID NO: 1440811 - RNA, 19 nt, Homo sapiens
  misc_RNA (1)...(19): siRNA sense strand
gucaacagcgucccguaug

SEQ ID NO: 1440812 - RNA, 19 nt, Homo sapiens
  misc_RNA (1)...(19): siRNA sense strand
gccgguggcuaucugaacu

SEQ ID NO: 1440813 - RNA, 19 nt, Homo sapiens
  misc_RNA (1)...(19): siRNA sense strand
uaagaaagcucagccgaaa

SEQ ID NO: 1440814 - RNA, 19 nt, Homo sapiens
  misc_RNA (1)...(19): siRNA sense strand
gcacagaggguuuggcuuu

SEQ ID NO: 1440815 - RNA, 19 nt, Homo sapiens
  misc_RNA (1)...(19): siRNA sense strand
uggcagaccucaccagaua

SEQ ID NO: 1440816 - RNA, 19 nt, Homo sapiens
  misc_RNA (1)...(19): siRNA sense strand
ggagaaagucugugagauu

SEQ ID NO: 1440817 - RNA, 19 nt, Homo sapiens
  misc_RNA (1)...(19): siRNA sense strand
gagaaagucugugagauuc

SEQ ID NO: 1440818 - RNA, 19 nt, Homo sapiens
  misc_RNA (1)...(19): siRNA sense strand
gaaauuagagaauguaugg

SEQ ID NO: 1440819 - RNA, 19 nt, Homo sapiens
  misc_RNA (1)...(19): siRNA sense strand
gcaaugcugauguuugaua

SEQ ID NO: 1440820 - RNA, 19 nt, Homo sapiens
  misc_RNA (1)...(19): siRNA sense strand
uggaagauguaaagcaaua

SEQ ID NO: 1440821 - RNA, 19 nt, Homo sapiens
  misc_RNA (1)...(19): siRNA sense strand
caaugcugauguuugauaa

SEQ ID NO: 1440822 - RNA, 19 nt, Homo sapiens
  misc_RNA (1)...(19): siRNA sense strand
gagaauguauggucaugag

SEQ ID NO: 1440823 - RNA, 19 nt, Homo sapiens
  misc_RNA (1)...(19): siRNA sense strand
gaaagucugugagauucau

SEQ ID NO: 1440824 - RNA, 19 nt, Homo sapiens
  misc_RNA (1)...(19): siRNA sense strand
ugagagaucccacuacgaa

SEQ ID NO: 1440825 - RNA, 19 nt, Homo sapiens
  misc_RNA (1)...(19): siRNA sense strand
gaagaugcaaugcugaugu

SEQ ID NO: 1440826 - RNA, 19 nt, Homo sapiens
  misc_RNA (1)...(19): siRNA sense strand
cagauagccuuagagacua

SEQ ID NO: 1440827 - RNA, 19 nt, Homo sapiens
  misc_RNA (1)...(19): siRNA sense strand
ggagaaauuagagaaugua

SEQ ID NO: 1440828 - RNA, 19 nt, Homo sapiens
  misc_RNA (1)...(19): siRNA sense strand
ccagauagccuuagagacu

SEQ ID NO: 1440829 - RNA, 19 nt, Homo sapiens
  misc_RNA (1)...(19): siRNA sense strand
caacaggcacagaggguuu

SEQ ID NO: 1440830 - RNA, 19 nt, Homo sapiens
  misc_RNA (1)...(19): siRNA sense strand
cagcaaguguagauaaagu

SEQ ID NO: 1440831 - RNA, 19 nt, Homo sapiens
  misc_RNA (1)...(19): siRNA sense strand
gcaaguguagauaaaguau

SEQ ID NO: 1440832 - RNA, 19 nt, Homo sapiens
  misc_RNA (1)...(19): siRNA sense strand
gaacacaguaguggaagau

SEQ ID NO: 1440833 - RNA, 19 nt, Homo sapiens
  misc_RNA (1)...(19): siRNA sense strand
augcaaugcugauguuuga

SEQ ID NO: 1440834 - RNA, 19 nt, Homo sapiens
  misc_RNA (1)...(19): siRNA sense strand
cggauuugcuccaagcuau

SEQ ID NO: 1440835 - RNA, 19 nt, Homo sapiens
  misc_RNA (1)...(19): siRNA sense strand
gguuuggcuuugucacuuu

SEQ ID NO: 1440836 - RNA, 19 nt, Homo sapiens
  misc_RNA (1)...(19): siRNA sense strand
agaaagcucagccgaaaga

SEQ ID NO: 1440837 - RNA, 19 nt, Homo sapiens
  misc_RNA (1)...(19): siRNA sense strand
acacaguaguggaagaugu

SEQ ID NO: 1440838 - RNA, 19 nt, Homo sapiens
  misc_RNA (1)...(19): siRNA sense strand
augaagauguuguggagaa

SEQ ID NO: 1440839 - RNA, 19 nt, Homo sapiens
  misc_RNA (1)...(19): siRNA sense strand
aagaugcaaugcugauguu

SEQ ID NO: 1440840 - RNA, 19 nt, Homo sapiens
  misc_RNA (1)...(19): siRNA sense strand
cccagcaaguguagauaaa

SEQ ID NO: 1440841 - RNA, 19 nt, Homo sapiens
  misc_RNA (1)...(19): siRNA sense strand
gaugcaaugcugauguuug

SEQ ID NO: 1440842 - RNA, 19 nt, Homo sapiens
  misc_RNA (1)...(19): siRNA sense strand
caagguggaagaugcaaug

SEQ ID NO: 1440843 - RNA, 19 nt, Homo sapiens
  misc_RNA (1)...(19): siRNA sense strand
cgaacacaguaguggaaga

SEQ ID NO: 1440844 - RNA, 19 nt, Homo sapiens
  misc_RNA (1)...(19): siRNA sense strand
ccaagauggucacaagaac

SEQ ID NO: 1440845 - RNA, 19 nt, Homo sapiens
  misc_RNA (1)...(19): siRNA sense strand
ugaagauguuguggagaaa

SEQ ID NO: 1440846 - RNA, 19 nt, Homo sapiens
  misc_RNA (1)...(19): siRNA sense strand
gcaauauuucgagcaguuu

SEQ ID NO: 1440847 - RNA, 19 nt, Homo sapiens
  misc_RNA (1)...(19): siRNA sense strand
aguggaagauguaaagcaa

SEQ ID NO: 1440848 - RNA, 19 nt, Homo sapiens
  misc_RNA (1)...(19): siRNA sense strand
ggucacaagaacaaagaaa

SEQ ID NO: 1440849 - RNA, 19 nt, Homo sapiens
  misc_RNA (1)...(19): siRNA sense strand
uggagaaauuagagaaugu

SEQ ID NO: 1440850 - RNA, 19 nt, Homo sapiens
  misc_RNA (1)...(19): siRNA sense strand
gccgaaagaagucauguuc

SEQ ID NO: 1440851 - RNA, 19 nt, Homo sapiens
  misc_RNA (1)...(19): siRNA sense strand
ggguuuggcuuugucacuu

SEQ ID NO: 1440852 - RNA, 19 nt, Homo sapiens
  misc_RNA (1)...(19): siRNA sense strand
cacaguaguggaagaugua

SEQ ID NO: 1440853 - RNA, 19 nt, Homo sapiens
  misc_RNA (1)...(19): siRNA sense strand
caagcuauggcuaucaguu

SEQ ID NO: 1440854 - RNA, 19 nt, Homo sapiens
  misc_RNA (1)...(19): siRNA sense strand
gcuccaagcuauggcuauc

SEQ ID NO: 1440855 - RNA, 19 nt, Homo sapiens
  misc_RNA (1)...(19): siRNA sense strand
ccaacuucguggcgaccua

SEQ ID NO: 1440856 - RNA, 19 nt, Homo sapiens
  misc_RNA (1)...(19): siRNA sense strand
gagagaucccacuacgaaa

SEQ ID NO: 1440857 - RNA, 19 nt, Homo sapiens
  misc_RNA (1)...(19): siRNA sense strand
uagagaauguauggucaug

SEQ ID NO: 1440858 - RNA, 19 nt, Homo sapiens
  misc_RNA (1)...(19): siRNA sense strand
gagcgcaacccaagauggu

SEQ ID NO: 1440859 - RNA, 19 nt, Homo sapiens
  misc_RNA (1)...(19): siRNA sense strand
agcaauauuucgagcaguu

SEQ ID NO: 1440860 - RNA, 19 nt, Homo sapiens
  misc_RNA (1)...(19): siRNA sense strand
caagauggucacaagaaca

SEQ ID NO: 1440861 - RNA, 19 nt, Homo sapiens
  misc_RNA (1)...(19): siRNA sense strand
aauguauggucaugagaga

SEQ ID NO: 1440862 - RNA, 19 nt, Homo sapiens
  misc_RNA (1)...(19): siRNA sense strand
caccagauagccuuagaga

SEQ ID NO: 1440863 - RNA, 19 nt, Homo sapiens
  misc_RNA (1)...(19): siRNA sense strand
cacagaggguuuggcuuug

SEQ ID NO: 1440864 - RNA, 19 nt, Homo sapiens
  misc_RNA (1)...(19): siRNA sense strand
ggaagaugcaaugcugaug

SEQ ID NO: 1440865 - RNA, 19 nt, Homo sapiens
  misc_RNA (1)...(19): siRNA sense strand
cccaagauggucacaagaa

SEQ ID NO: 1440866 - RNA, 19 nt, Homo sapiens
  misc_RNA (1)...(19): siRNA sense strand
gguagaauguaagaaagcu

SEQ ID NO: 1440867 - RNA, 19 nt, Homo sapiens
  misc_RNA (1)...(19): siRNA sense strand
ucugugagauucauuucca

SEQ ID NO: 1440868 - RNA, 19 nt, Homo sapiens
  misc_RNA (1)...(19): siRNA sense strand
guggagaaagucugugaga

SEQ ID NO: 1440869 - RNA, 19 nt, Homo sapiens
  misc_RNA (1)...(19): siRNA sense strand
cggguuaucugcgaacaca

SEQ ID NO: 1440870 - RNA, 19 nt, Homo sapiens
  misc_RNA (1)...(19): siRNA sense strand
ggaagauguaaagcaauau

SEQ ID NO: 1440871 - RNA, 19 nt, Homo sapiens
  misc_RNA (1)...(19): siRNA sense strand
acagaggguuuggcuuugu

SEQ ID NO: 1440872 - RNA, 19 nt, Homo sapiens
  misc_RNA (1)...(19): siRNA sense strand
uuggagaaauuagagaaug

SEQ ID NO: 1440873 - RNA, 19 nt, Homo sapiens
  misc_RNA (1)...(19): siRNA sense strand
gcagacccagcaaguguag

SEQ ID NO: 1440874 - RNA, 19 nt, Homo sapiens
  misc_RNA (1)...(19): siRNA sense strand
uagauuccaagacgauuga

SEQ ID NO: 1440875 - RNA, 19 nt, Homo sapiens
  misc_RNA (1)...(19): siRNA sense strand
aagcucagccgaaagaagu

SEQ ID NO: 1440876 - RNA, 19 nt, Homo sapiens
  misc_RNA (1)...(19): siRNA sense strand
gauguaaagcaauauuucg

SEQ ID NO: 1440877 - RNA, 19 nt, Homo sapiens
  misc_RNA (1)...(19): siRNA sense strand
aagauguuguggagaaagu

SEQ ID NO: 1440878 - RNA, 19 nt, Homo sapiens
  misc_RNA (1)...(19): siRNA sense strand
gaaagcucagccgaaagaa

SEQ ID NO: 1440879 - RNA, 19 nt, Homo sapiens
  misc_RNA (1)...(19): siRNA sense strand
aacccaagauggucacaag

SEQ ID NO: 1440880 - RNA, 19 nt, Homo sapiens
  misc_RNA (1)...(19): siRNA sense strand
gaagauguuguggagaaag

SEQ ID NO: 1440881 - RNA, 19 nt, Homo sapiens
  misc_RNA (1)...(19): siRNA sense strand
caauauuucgagcaguuug

SEQ ID NO: 1440882 - RNA, 19 nt, Homo sapiens
  misc_RNA (1)...(19): siRNA sense strand
ucgcagacccagcaagugu

SEQ ID NO: 1440883 - RNA, 19 nt, Homo sapiens
  misc_RNA (1)...(19): siRNA sense strand
aagauggucacaagaacaa

SEQ ID NO: 1440884 - RNA, 19 nt, Homo sapiens
  misc_RNA (1)...(19): siRNA sense strand
gcaagguggaagaugcaau

SEQ ID NO: 1440885 - RNA, 19 nt, Homo sapiens
  misc_RNA (1)...(19): siRNA sense strand
uggagaaagucugugagau

SEQ ID NO: 1440886 - RNA, 19 nt, Homo sapiens
  misc_RNA (1)...(19): siRNA sense strand
cagaggguuuggcuuuguc

SEQ ID NO: 1440887 - RNA, 19 nt, Homo sapiens
  misc_RNA (1)...(19): siRNA sense strand
uaagaaagcucagccgaaa

SEQ ID NO: 1440888 - RNA, 19 nt, Homo sapiens
  misc_RNA (1)...(19): siRNA sense strand
gcacagaggguuuggcuuu

SEQ ID NO: 1440889 - RNA, 19 nt, Homo sapiens
  misc_RNA (1)...(19): siRNA sense strand
uggcagaccucaccagaua

SEQ ID NO: 1440890 - RNA, 19 nt, Homo sapiens
  misc_RNA (1)...(19): siRNA sense strand
ggagaaagucugugagauu

SEQ ID NO: 1440891 - RNA, 19 nt, Homo sapiens
  misc_RNA (1)...(19): siRNA sense strand
gagaaagucugugagauuc

SEQ ID NO: 1440892 - RNA, 19 nt, Homo sapiens
  misc_RNA (1)...(19): siRNA sense strand
gaaauuagagaauguaugg

SEQ ID NO: 1440893 - RNA, 19 nt, Homo sapiens
  misc_RNA (1)...(19): siRNA sense strand
gcaaugcugauguuugaua

SEQ ID NO: 1440894 - RNA, 19 nt, Homo sapiens
  misc_RNA (1)...(19): siRNA sense strand
uggaagauguaaagcaaua

SEQ ID NO: 1440895 - RNA, 19 nt, Homo sapiens
  misc_RNA (1)...(19): siRNA sense strand
caaugcugauguuugauaa

SEQ ID NO: 1440896 - RNA, 19 nt, Homo sapiens
  misc_RNA (1)...(19): siRNA sense strand
gagaauguauggucaugag

SEQ ID NO: 1440897 - RNA, 19 nt, Homo sapiens
  misc_RNA (1)...(19): siRNA sense strand
gaaagucugugagauucau

SEQ ID NO: 1440898 - RNA, 19 nt, Homo sapiens
  misc_RNA (1)...(19): siRNA sense strand
ugagagaucccacuacgaa

SEQ ID NO: 1440899 - RNA, 19 nt, Homo sapiens
  misc_RNA (1)...(19): siRNA sense strand
gaagaugcaaugcugaugu

SEQ ID NO: 1440900 - RNA, 19 nt, Homo sapiens
  misc_RNA (1)...(19): siRNA sense strand
cagauagccuuagagacua

SEQ ID NO: 1440901 - RNA, 19 nt, Homo sapiens
  misc_RNA (1)...(19): siRNA sense strand
ggagaaauuagagaaugua

SEQ ID NO: 1440902 - RNA, 19 nt, Homo sapiens
  misc_RNA (1)...(19): siRNA sense strand
ccagauagccuuagagacu

SEQ ID NO: 1440903 - RNA, 19 nt, Homo sapiens
  misc_RNA (1)...(19): siRNA sense strand
caacaggcacagaggguuu

SEQ ID NO: 1440904 - RNA, 19 nt, Homo sapiens
  misc_RNA (1)...(19): siRNA sense strand
cagcaaguguagauaaagu

SEQ ID NO: 1440905 - RNA, 19 nt, Homo sapiens
  misc_RNA (1)...(19): siRNA sense strand
gcaaguguagauaaaguau

SEQ ID NO: 1440906 - RNA, 19 nt, Homo sapiens
  misc_RNA (1)...(19): siRNA sense strand
gaacacaguaguggaagau

SEQ ID NO: 1440907 - RNA, 19 nt, Homo sapiens
  misc_RNA (1)...(19): siRNA sense strand
augcaaugcugauguuuga

SEQ ID NO: 1440908 - RNA, 19 nt, Homo sapiens
  misc_RNA (1)...(19): siRNA sense strand
cggauuugcuccaagcuau

SEQ ID NO: 1440909 - RNA, 19 nt, Homo sapiens
  misc_RNA (1)...(19): siRNA sense strand
gguuuggcuuugucacuuu

SEQ ID NO: 1440910 - RNA, 19 nt, Homo sapiens
  misc_RNA (1)...(19): siRNA sense strand
agaaagcucagccgaaaga

SEQ ID NO: 1440911 - RNA, 19 nt, Homo sapiens
  misc_RNA (1)...(19): siRNA sense strand
acacaguaguggaagaugu

SEQ ID NO: 1440912 - RNA, 19 nt, Homo sapiens
  misc_RNA (1)...(19): siRNA sense strand
augaagauguuguggagaa

SEQ ID NO: 1440913 - RNA, 19 nt, Homo sapiens
  misc_RNA (1)...(19): siRNA sense strand
aagaugcaaugcugauguu

SEQ ID NO: 1440914 - RNA, 19 nt, Homo sapiens
  misc_RNA (1)...(19): siRNA sense strand
cccagcaaguguagauaaa

SEQ ID NO: 1440915 - RNA, 19 nt, Homo sapiens
  misc_RNA (1)...(19): siRNA sense strand
gaugcaaugcugauguuug

SEQ ID NO: 1440916 - RNA, 19 nt, Homo sapiens
  misc_RNA (1)...(19): siRNA sense strand
caagguggaagaugcaaug

SEQ ID NO: 1440917 - RNA, 19 nt, Homo sapiens
  misc_RNA (1)...(19): siRNA sense strand
cgaacacaguaguggaaga

SEQ ID NO: 1440918 - RNA, 19 nt, Homo sapiens
  misc_RNA (1)...(19): siRNA sense strand
ccaagauggucacaagaac

SEQ ID NO: 1440919 - RNA, 19 nt, Homo sapiens
  misc_RNA (1)...(19): siRNA sense strand
ugaagauguuguggagaaa

SEQ ID NO: 1440920 - RNA, 19 nt, Homo sapiens
  misc_RNA (1)...(19): siRNA sense strand
gcaauauuucgagcaguuu

SEQ ID NO: 1440921 - RNA, 19 nt, Homo sapiens
  misc_RNA (1)...(19): siRNA sense strand
aguggaagauguaaagcaa

SEQ ID NO: 1440922 - RNA, 19 nt, Homo sapiens
  misc_RNA (1)...(19): siRNA sense strand
ggucacaagaacaaagaaa

SEQ ID NO: 1440923 - RNA, 19 nt, Homo sapiens
  misc_RNA (1)...(19): siRNA sense strand
uggagaaauuagagaaugu

SEQ ID NO: 1440924 - RNA, 19 nt, Homo sapiens
  misc_RNA (1)...(19): siRNA sense strand
gccgaaagaagucauguuc

SEQ ID NO: 1440925 - RNA, 19 nt, Homo sapiens
  misc_RNA (1)...(19): siRNA sense strand
ggguuuggcuuugucacuu

SEQ ID NO: 1440926 - RNA, 19 nt, Homo sapiens
  misc_RNA (1)...(19): siRNA sense strand
cacaguaguggaagaugua

SEQ ID NO: 1440927 - RNA, 19 nt, Homo sapiens
  misc_RNA (1)...(19): siRNA sense strand
caagcuauggcuaucaguu

SEQ ID NO: 1440928 - RNA, 19 nt, Homo sapiens
  misc_RNA (1)...(19): siRNA sense strand
gcuccaagcuauggcuauc

SEQ ID NO: 1440929 - RNA, 19 nt, Homo sapiens
  misc_RNA (1)...(19): siRNA sense strand
ccaacuucguggcgaccua

SEQ ID NO: 1440930 - RNA, 19 nt, Homo sapiens
  misc_RNA (1)...(19): siRNA sense strand
gagagaucccacuacgaaa

SEQ ID NO: 1440931 - RNA, 19 nt, Homo sapiens
  misc_RNA (1)...(19): siRNA sense strand
uagagaauguauggucaug

SEQ ID NO: 1440932 - RNA, 19 nt, Homo sapiens
  misc_RNA (1)...(19): siRNA sense strand
gagcgcaacccaagauggu

SEQ ID NO: 1440933 - RNA, 19 nt, Homo sapiens
  misc_RNA (1)...(19): siRNA sense strand
agcaauauuucgagcaguu

SEQ ID NO: 1440934 - RNA, 19 nt, Homo sapiens
  misc_RNA (1)...(19): siRNA sense strand
caagauggucacaagaaca

SEQ ID NO: 1440935 - RNA, 19 nt, Homo sapiens
  misc_RNA (1)...(19): siRNA sense strand
aauguauggucaugagaga

SEQ ID NO: 1440936 - RNA, 19 nt, Homo sapiens
  misc_RNA (1)...(19): siRNA sense strand
caccagauagccuuagaga

SEQ ID NO: 1440937 - RNA, 19 nt, Homo sapiens
  misc_RNA (1)...(19): siRNA sense strand
cacagaggguuuggcuuug

SEQ ID NO: 1440938 - RNA, 19 nt, Homo sapiens
  misc_RNA (1)...(19): siRNA sense strand
ggaagaugcaaugcugaug

SEQ ID NO: 1440939 - RNA, 19 nt, Homo sapiens
  misc_RNA (1)...(19): siRNA sense strand
cccaagauggucacaagaa

SEQ ID NO: 1440940 - RNA, 19 nt, Homo sapiens
  misc_RNA (1)...(19): siRNA sense strand
gguagaauguaagaaagcu

SEQ ID NO: 1440941 - RNA, 19 nt, Homo sapiens
  misc_RNA (1)...(19): siRNA sense strand
ucugugagauucauuucca

SEQ ID NO: 1440942 - RNA, 19 nt, Homo sapiens
  misc_RNA (1)...(19): siRNA sense strand
guggagaaagucugugaga

SEQ ID NO: 1440943 - RNA, 19 nt, Homo sapiens
  misc_RNA (1)...(19): siRNA sense strand
cggguuaucugcgaacaca

SEQ ID NO: 1440944 - RNA, 19 nt, Homo sapiens
  misc_RNA (1)...(19): siRNA sense strand
ggaagauguaaagcaauau

SEQ ID NO: 1440945 - RNA, 19 nt, Homo sapiens
  misc_RNA (1)...(19): siRNA sense strand
acagaggguuuggcuuugu

SEQ ID NO: 1440946 - RNA, 19 nt, Homo sapiens
  misc_RNA (1)...(19): siRNA sense strand
uuggagaaauuagagaaug

SEQ ID NO: 1440947 - RNA, 19 nt, Homo sapiens
  misc_RNA (1)...(19): siRNA sense strand
gcagacccagcaaguguag

SEQ ID NO: 1440948 - RNA, 19 nt, Homo sapiens
  misc_RNA (1)...(19): siRNA sense strand
uagauuccaagacgauuga

SEQ ID NO: 1440949 - RNA, 19 nt, Homo sapiens
  misc_RNA (1)...(19): siRNA sense strand
aagcucagccgaaagaagu

SEQ ID NO: 1440950 - RNA, 19 nt, Homo sapiens
  misc_RNA (1)...(19): siRNA sense strand
gauguaaagcaauauuucg

SEQ ID NO: 1440951 - RNA, 19 nt, Homo sapiens
  misc_RNA (1)...(19): siRNA sense strand
aagauguuguggagaaagu

SEQ ID NO: 1440952 - RNA, 19 nt, Homo sapiens
  misc_RNA (1)...(19): siRNA sense strand
gaaagcucagccgaaagaa

SEQ ID NO: 1440953 - RNA, 19 nt, Homo sapiens
  misc_RNA (1)...(19): siRNA sense strand
aacccaagauggucacaag

SEQ ID NO: 1440954 - RNA, 19 nt, Homo sapiens
  misc_RNA (1)...(19): siRNA sense strand
gaagauguuguggagaaag

SEQ ID NO: 1440955 - RNA, 19 nt, Homo sapiens
  misc_RNA (1)...(19): siRNA sense strand
caauauuucgagcaguuug

SEQ ID NO: 1440956 - RNA, 19 nt, Homo sapiens
  misc_RNA (1)...(19): siRNA sense strand
ucgcagacccagcaagugu

SEQ ID NO: 1440957 - RNA, 19 nt, Homo sapiens
  misc_RNA (1)...(19): siRNA sense strand
aagauggucacaagaacaa

SEQ ID NO: 1440958 - RNA, 19 nt, Homo sapiens
  misc_RNA (1)...(19): siRNA sense strand
gcaagguggaagaugcaau

SEQ ID NO: 1440959 - RNA, 19 nt, Homo sapiens
  misc_RNA (1)...(19): siRNA sense strand
uggagaaagucugugagau

SEQ ID NO: 1440960 - RNA, 19 nt, Homo sapiens
  misc_RNA (1)...(19): siRNA sense strand
cagaggguuuggcuuuguc

SEQ ID NO: 1440961 - RNA, 19 nt, Homo sapiens
  misc_RNA (1)...(19): siRNA sense strand
gcacgggacuuuguaguga

SEQ ID NO: 1440962 - RNA, 19 nt, Homo sapiens
  misc_RNA (1)...(19): siRNA sense strand
ggaaccagcugcuaucauc

SEQ ID NO: 1440963 - RNA, 19 nt, Homo sapiens
  misc_RNA (1)...(19): siRNA sense strand
caugaccagugccaaauua

SEQ ID NO: 1440964 - RNA, 19 nt, Homo sapiens
  misc_RNA (1)...(19): siRNA sense strand
gcaggaaacaccucaguga

SEQ ID NO: 1440965 - RNA, 19 nt, Homo sapiens
  misc_RNA (1)...(19): siRNA sense strand
gcacugaccccuccaauuu

SEQ ID NO: 1440966 - RNA, 19 nt, Homo sapiens
  misc_RNA (1)...(19): siRNA sense strand
cacggaagcucgguagaua

SEQ ID NO: 1440967 - RNA, 19 nt, Homo sapiens
  misc_RNA (1)...(19): siRNA sense strand
caacggugcuggugacaca

SEQ ID NO: 1440968 - RNA, 19 nt, Homo sapiens
  misc_RNA (1)...(19): siRNA sense strand
ggacggaggaggaguuuca

SEQ ID NO: 1440969 - RNA, 19 nt, Homo sapiens
  misc_RNA (1)...(19): siRNA sense strand
gaaggcaugcccuggauga

SEQ ID NO: 1440970 - RNA, 19 nt, Homo sapiens
  misc_RNA (1)...(19): siRNA sense strand
gaucugcgguuucucugau

SEQ ID NO: 1440971 - RNA, 19 nt, Homo sapiens
  misc_RNA (1)...(19): siRNA sense strand
guucuggacugguguuaug

SEQ ID NO: 1440972 - RNA, 19 nt, Homo sapiens
  misc_RNA (1)...(19): siRNA sense strand
gagaggaggacuacuacaa

SEQ ID NO: 1440973 - RNA, 19 nt, Homo sapiens
  misc_RNA (1)...(19): siRNA sense strand
cuacaacgaugauguucug

SEQ ID NO: 1440974 - RNA, 19 nt, Homo sapiens
  misc_RNA (1)...(19): siRNA sense strand
ggccuugucucagcucuuu

SEQ ID NO: 1440975 - RNA, 19 nt, Homo sapiens
  misc_RNA (1)...(19): siRNA sense strand
gggcagacccuuacaagca

SEQ ID NO: 1440976 - RNA, 19 nt, Homo sapiens
  misc_RNA (1)...(19): siRNA sense strand
gcacacuccugccugucuu

SEQ ID NO: 1440977 - RNA, 19 nt, Homo sapiens
  misc_RNA (1)...(19): siRNA sense strand
ucaaccugcugcgcaaaua

SEQ ID NO: 1440978 - RNA, 19 nt, Homo sapiens
  misc_RNA (1)...(19): siRNA sense strand
gcaggcaccuucguguuca

SEQ ID NO: 1440979 - RNA, 19 nt, Homo sapiens
  misc_RNA (1)...(19): siRNA sense strand
ggucccaccuccucuuugu

SEQ ID NO: 1440980 - RNA, 19 nt, Homo sapiens
  misc_RNA (1)...(19): siRNA sense strand
ggugagaucugcgguuucu

SEQ ID NO: 1440981 - RNA, 19 nt, Homo sapiens
  misc_RNA (1)...(19): siRNA sense strand
gcaagaccuacuucucuga

SEQ ID NO: 1440982 - RNA, 19 nt, Homo sapiens
  misc_RNA (1)...(19): siRNA sense strand
ccauggugcuggagauguu

SEQ ID NO: 1440983 - RNA, 19 nt, Homo sapiens
  misc_RNA (1)...(19): siRNA sense strand
gcaggcacgggacuuugua

SEQ ID NO: 1440984 - RNA, 19 nt, Homo sapiens
  misc_RNA (1)...(19): siRNA sense strand
gcaugaccagugccaaauu

SEQ ID NO: 1440985 - RNA, 19 nt, Homo sapiens
  misc_RNA (1)...(19): siRNA sense strand
gugcuggguuugcgcaaga

SEQ ID NO: 1440986 - RNA, 19 nt, Homo sapiens
  misc_RNA (1)...(19): siRNA sense strand
uagacacgguccacguuga

SEQ ID NO: 1440987 - RNA, 19 nt, Homo sapiens
  misc_RNA (1)...(19): siRNA sense strand
ggaggacgucagccuggua

SEQ ID NO: 1440988 - RNA, 19 nt, Homo sapiens
  misc_RNA (1)...(19): siRNA sense strand
cagcgccucugcaacugaa

SEQ ID NO: 1440989 - RNA, 19 nt, Homo sapiens
  misc_RNA (1)...(19): siRNA sense strand
gcaagacgacccugcaaaa

SEQ ID NO: 1440990 - RNA, 19 nt, Homo sapiens
  misc_RNA (1)...(19): siRNA sense strand
uggcugcccucuacauugu

SEQ ID NO: 1440991 - RNA, 19 nt, Homo sapiens
  misc_RNA (1)...(19): siRNA sense strand
gcgaccagaugaucguauc

SEQ ID NO: 1440992 - RNA, 19 nt, Homo sapiens
  misc_RNA (1)...(19): siRNA sense strand
ggcagacccuuacaagcau

SEQ ID NO: 1440993 - RNA, 19 nt, Homo sapiens
  misc_RNA (1)...(19): siRNA sense strand
gagaccuguugcugcauga

SEQ ID NO: 1440994 - RNA, 19 nt, Homo sapiens
  misc_RNA (1)...(19): siRNA sense strand
ggacuacuacaacgaugau

SEQ ID NO: 1440995 - RNA, 19 nt, Homo sapiens
  misc_RNA (1)...(19): siRNA sense strand
ggaggacuacuacaacgau

SEQ ID NO: 1440996 - RNA, 19 nt, Homo sapiens
  misc_RNA (1)...(19): siRNA sense strand
ugggcaaguuggccuauga

SEQ ID NO: 1440997 - RNA, 19 nt, Homo sapiens
  misc_RNA (1)...(19): siRNA sense strand
cagcugcuaucaucgucaa

SEQ ID NO: 1440998 - RNA, 19 nt, Homo sapiens
  misc_RNA (1)...(19): siRNA sense strand
gcacuccagcgaccagaug

SEQ ID NO: 1440999 - RNA, 19 nt, Homo sapiens
  misc_RNA (1)...(19): siRNA sense strand
caagaccuacuucucugaa

SEQ ID NO: 1441000 - RNA, 19 nt, Homo sapiens
  misc_RNA (1)...(19): siRNA sense strand
cccaggccaucaagaagaa

SEQ ID NO: 1441001 - RNA, 19 nt, Homo sapiens
  misc_RNA (1)...(19): siRNA sense strand
cuacuacaacgaugauguu

SEQ ID NO: 1441002 - RNA, 19 nt, Homo sapiens
  misc_RNA (1)...(19): siRNA sense strand
ggaccuccgagaccuguug

SEQ ID NO: 1441003 - RNA, 19 nt, Homo sapiens
  misc_RNA (1)...(19): siRNA sense strand
gcccaaccuuugcccuaga

SEQ ID NO: 1441004 - RNA, 19 nt, Homo sapiens
  misc_RNA (1)...(19): siRNA sense strand
gagaaugcccaggccauca

SEQ ID NO: 1441005 - RNA, 19 nt, Homo sapiens
  misc_RNA (1)...(19): siRNA sense strand
gcccaggccaucaagaaga

SEQ ID NO: 1441006 - RNA, 19 nt, Homo sapiens
  misc_RNA (1)...(19): siRNA sense strand
cggaaggcaugcccuggau

SEQ ID NO: 1441007 - RNA, 19 nt, Homo sapiens
  misc_RNA (1)...(19): siRNA sense strand
uccuauugcuggcucguuu

SEQ ID NO: 1441008 - RNA, 19 nt, Homo sapiens
  misc_RNA (1)...(19): siRNA sense strand
uggaugcccuggagaaugc

SEQ ID NO: 1441009 - RNA, 19 nt, Homo sapiens
  misc_RNA (1)...(19): siRNA sense strand
auaccuggcugcccucuac

SEQ ID NO: 1441010 - RNA, 19 nt, Homo sapiens
  misc_RNA (1)...(19): siRNA sense strand
auaccaaccugcagaagcu

SEQ ID NO: 1441011 - RNA, 19 nt, Homo sapiens
  misc_RNA (1)...(19): siRNA sense strand
cagggaggagcgccaguuu

SEQ ID NO: 1441012 - RNA, 19 nt, Homo sapiens
  misc_RNA (1)...(19): siRNA sense strand
ccugugauccgcgagagua

SEQ ID NO: 1441013 - RNA, 19 nt, Homo sapiens
  misc_RNA (1)...(19): siRNA sense strand
gaccagugccaaauuacca

SEQ ID NO: 1441014 - RNA, 19 nt, Homo sapiens
  misc_RNA (1)...(19): siRNA sense strand
cucugcaacugaagcuaua

SEQ ID NO: 1441015 - RNA, 19 nt, Homo sapiens
  misc_RNA (1)...(19): siRNA sense strand
ccgcaagaccuacuucucu

SEQ ID NO: 1441016 - RNA, 19 nt, Homo sapiens
  misc_RNA (1)...(19): siRNA sense strand
ccacggaagcucgguagau

SEQ ID NO: 1441017 - RNA, 19 nt, Homo sapiens
  misc_RNA (1)...(19): siRNA sense strand
gaguaccccugaugagcua

SEQ ID NO: 1441018 - RNA, 19 nt, Homo sapiens
  misc_RNA (1)...(19): siRNA sense strand
ggaggggcaccaccagaua

SEQ ID NO: 1441019 - RNA, 19 nt, Homo sapiens
  misc_RNA (1)...(19): siRNA sense strand
cacugcggcuguccaacaa

SEQ ID NO: 1441020 - RNA, 19 nt, Homo sapiens
  misc_RNA (1)...(19): siRNA sense strand
ggacgucagccugguacug

SEQ ID NO: 1441021 - RNA, 19 nt, Homo sapiens
  misc_RNA (1)...(19): siRNA sense strand
gcaucucaaccucgacuuc

SEQ ID NO: 1441022 - RNA, 19 nt, Homo sapiens
  misc_RNA (1)...(19): siRNA sense strand
ccaccucuucuuccacuau

SEQ ID NO: 1441023 - RNA, 19 nt, Homo sapiens
  misc_RNA (1)...(19): siRNA sense strand
ccacguugacccugugauc

SEQ ID NO: 1441024 - RNA, 19 nt, Homo sapiens
  misc_RNA (1)...(19): siRNA sense strand
acucggcccucugccauug

SEQ ID NO: 1441025 - RNA, 19 nt, Homo sapiens
  misc_RNA (1)...(19): siRNA sense strand
gagcugaacguggcguaca

SEQ ID NO: 1441026 - RNA, 19 nt, Homo sapiens
  misc_RNA (1)...(19): siRNA sense strand
gguguugccgugcuaaugg

SEQ ID NO: 1441027 - RNA, 19 nt, Homo sapiens
  misc_RNA (1)...(19): siRNA sense strand
ccacacugcggcuguccaa

SEQ ID NO: 1441028 - RNA, 19 nt, Homo sapiens
  misc_RNA (1)...(19): siRNA sense strand
gcaaaaggugggcaaggaa

SEQ ID NO: 1441029 - RNA, 19 nt, Homo sapiens
  misc_RNA (1)...(19): siRNA sense strand
gcgcaagacgacccugcaa

SEQ ID NO: 1441030 - RNA, 19 nt, Homo sapiens
  misc_RNA (1)...(19): siRNA sense strand
gcacgggacuuuguaguga

SEQ ID NO: 1441031 - RNA, 19 nt, Homo sapiens
  misc_RNA (1)...(19): siRNA sense strand
ggaaccagcugcuaucauc

SEQ ID NO: 1441032 - RNA, 19 nt, Homo sapiens
  misc_RNA (1)...(19): siRNA sense strand
caugaccagugccaaauua

SEQ ID NO: 1441033 - RNA, 19 nt, Homo sapiens
  misc_RNA (1)...(19): siRNA sense strand
gcaggaaacaccucaguga

SEQ ID NO: 1441034 - RNA, 19 nt, Homo sapiens
  misc_RNA (1)...(19): siRNA sense strand
gcacugaccccuccaauuu

SEQ ID NO: 1441035 - RNA, 19 nt, Homo sapiens
  misc_RNA (1)...(19): siRNA sense strand
cacggaagcucgguagaua

SEQ ID NO: 1441036 - RNA, 19 nt, Homo sapiens
  misc_RNA (1)...(19): siRNA sense strand
caacggugcuggugacaca

SEQ ID NO: 1441037 - RNA, 19 nt, Homo sapiens
  misc_RNA (1)...(19): siRNA sense strand
ggacggaggaggaguuuca

SEQ ID NO: 1441038 - RNA, 19 nt, Homo sapiens
  misc_RNA (1)...(19): siRNA sense strand
gaaggcaugcccuggauga

SEQ ID NO: 1441039 - RNA, 19 nt, Homo sapiens
  misc_RNA (1)...(19): siRNA sense strand
gaucugcgguuucucugau

SEQ ID NO: 1441040 - RNA, 19 nt, Homo sapiens
  misc_RNA (1)...(19): siRNA sense strand
guucuggacugguguuaug

SEQ ID NO: 1441041 - RNA, 19 nt, Homo sapiens
  misc_RNA (1)...(19): siRNA sense strand
gagaggaggacuacuacaa

SEQ ID NO: 1441042 - RNA, 19 nt, Homo sapiens
  misc_RNA (1)...(19): siRNA sense strand
cuacaacgaugauguucug

SEQ ID NO: 1441043 - RNA, 19 nt, Homo sapiens
  misc_RNA (1)...(19): siRNA sense strand
ggccuugucucagcucuuu

SEQ ID NO: 1441044 - RNA, 19 nt, Homo sapiens
  misc_RNA (1)...(19): siRNA sense strand
gggcagacccuuacaagca

SEQ ID NO: 1441045 - RNA, 19 nt, Homo sapiens
  misc_RNA (1)...(19): siRNA sense strand
gcacacuccugccugucuu

SEQ ID NO: 1441046 - RNA, 19 nt, Homo sapiens
  misc_RNA (1)...(19): siRNA sense strand
ucaaccugcugcgcaaaua

SEQ ID NO: 1441047 - RNA, 19 nt, Homo sapiens
  misc_RNA (1)...(19): siRNA sense strand
gcaggcaccuucguguuca

SEQ ID NO: 1441048 - RNA, 19 nt, Homo sapiens
  misc_RNA (1)...(19): siRNA sense strand
ggucccaccuccucuuugu

SEQ ID NO: 1441049 - RNA, 19 nt, Homo sapiens
  misc_RNA (1)...(19): siRNA sense strand
ggugagaucugcgguuucu

SEQ ID NO: 1441050 - RNA, 19 nt, Homo sapiens
  misc_RNA (1)...(19): siRNA sense strand
gcaagaccuacuucucuga

SEQ ID NO: 1441051 - RNA, 19 nt, Homo sapiens
  misc_RNA (1)...(19): siRNA sense strand
ccauggugcuggagauguu

SEQ ID NO: 1441052 - RNA, 19 nt, Homo sapiens
  misc_RNA (1)...(19): siRNA sense strand
gcaggcacgggacuuugua

SEQ ID NO: 1441053 - RNA, 19 nt, Homo sapiens
  misc_RNA (1)...(19): siRNA sense strand
gcaugaccagugccaaauu

SEQ ID NO: 1441054 - RNA, 19 nt, Homo sapiens
  misc_RNA (1)...(19): siRNA sense strand
gugcuggguuugcgcaaga

SEQ ID NO: 1441055 - RNA, 19 nt, Homo sapiens
  misc_RNA (1)...(19): siRNA sense strand
uagacacgguccacguuga

SEQ ID NO: 1441056 - RNA, 19 nt, Homo sapiens
  misc_RNA (1)...(19): siRNA sense strand
ggaggacgucagccuggua

SEQ ID NO: 1441057 - RNA, 19 nt, Homo sapiens
  misc_RNA (1)...(19): siRNA sense strand
cagcgccucugcaacugaa

SEQ ID NO: 1441058 - RNA, 19 nt, Homo sapiens
  misc_RNA (1)...(19): siRNA sense strand
ccagauguguuggaagcuu

SEQ ID NO: 1441059 - RNA, 19 nt, Homo sapiens
  misc_RNA (1)...(19): siRNA sense strand
gcaagacgacccugcaaaa

SEQ ID NO: 1441060 - RNA, 19 nt, Homo sapiens
  misc_RNA (1)...(19): siRNA sense strand
uggcugcccucuacauugu

SEQ ID NO: 1441061 - RNA, 19 nt, Homo sapiens
  misc_RNA (1)...(19): siRNA sense strand
gcgaccagaugaucguauc

SEQ ID NO: 1441062 - RNA, 19 nt, Homo sapiens
  misc_RNA (1)...(19): siRNA sense strand
ggcagacccuuacaagcau

SEQ ID NO: 1441063 - RNA, 19 nt, Homo sapiens
  misc_RNA (1)...(19): siRNA sense strand
gagaccuguugcugcauga

SEQ ID NO: 1441064 - RNA, 19 nt, Homo sapiens
  misc_RNA (1)...(19): siRNA sense strand
ggacuacuacaacgaugau

SEQ ID NO: 1441065 - RNA, 19 nt, Homo sapiens
  misc_RNA (1)...(19): siRNA sense strand
ggaggacuacuacaacgau

SEQ ID NO: 1441066 - RNA, 19 nt, Homo sapiens
  misc_RNA (1)...(19): siRNA sense strand
ugggcaaguuggccuauga

SEQ ID NO: 1441067 - RNA, 19 nt, Homo sapiens
  misc_RNA (1)...(19): siRNA sense strand
cagcugcuaucaucgucaa

SEQ ID NO: 1441068 - RNA, 19 nt, Homo sapiens
  misc_RNA (1)...(19): siRNA sense strand
gcccucacauuggugcuuu

SEQ ID NO: 1441069 - RNA, 19 nt, Homo sapiens
  misc_RNA (1)...(19): siRNA sense strand
gcacuccagcgaccagaug

SEQ ID NO: 1441070 - RNA, 19 nt, Homo sapiens
  misc_RNA (1)...(19): siRNA sense strand
caagaccuacuucucugaa

SEQ ID NO: 1441071 - RNA, 19 nt, Homo sapiens
  misc_RNA (1)...(19): siRNA sense strand
cccaggccaucaagaagaa

SEQ ID NO: 1441072 - RNA, 19 nt, Homo sapiens
  misc_RNA (1)...(19): siRNA sense strand
cuacuacaacgaugauguu

SEQ ID NO: 1441073 - RNA, 19 nt, Homo sapiens
  misc_RNA (1)...(19): siRNA sense strand
ggaccuccgagaccuguug

SEQ ID NO: 1441074 - RNA, 19 nt, Homo sapiens
  misc_RNA (1)...(19): siRNA sense strand
gcccaaccuuugcccuaga

SEQ ID NO: 1441075 - RNA, 19 nt, Homo sapiens
  misc_RNA (1)...(19): siRNA sense strand
gagaaugcccaggccauca

SEQ ID NO: 1441076 - RNA, 19 nt, Homo sapiens
  misc_RNA (1)...(19): siRNA sense strand
gcccaggccaucaagaaga

SEQ ID NO: 1441077 - RNA, 19 nt, Homo sapiens
  misc_RNA (1)...(19): siRNA sense strand
cggaaggcaugcccuggau

SEQ ID NO: 1441078 - RNA, 19 nt, Homo sapiens
  misc_RNA (1)...(19): siRNA sense strand
uccuauugcuggcucguuu

SEQ ID NO: 1441079 - RNA, 19 nt, Homo sapiens
  misc_RNA (1)...(19): siRNA sense strand
uggaugcccuggagaaugc

SEQ ID NO: 1441080 - RNA, 19 nt, Homo sapiens
  misc_RNA (1)...(19): siRNA sense strand
auaccuggcugcccucuac

SEQ ID NO: 1441081 - RNA, 19 nt, Homo sapiens
  misc_RNA (1)...(19): siRNA sense strand
auaccaaccugcagaagcu

SEQ ID NO: 1441082 - RNA, 19 nt, Homo sapiens
  misc_RNA (1)...(19): siRNA sense strand
cagggaggagcgccaguuu

SEQ ID NO: 1441083 - RNA, 19 nt, Homo sapiens
  misc_RNA (1)...(19): siRNA sense strand
ccugugauccgcgagagua

SEQ ID NO: 1441084 - RNA, 19 nt, Homo sapiens
  misc_RNA (1)...(19): siRNA sense strand
gaccagugccaaauuacca

SEQ ID NO: 1441085 - RNA, 19 nt, Homo sapiens
  misc_RNA (1)...(19): siRNA sense strand
cucugcaacugaagcuaua

SEQ ID NO: 1441086 - RNA, 19 nt, Homo sapiens
  misc_RNA (1)...(19): siRNA sense strand
ccacggaagcucgguagau

SEQ ID NO: 1441087 - RNA, 19 nt, Homo sapiens
  misc_RNA (1)...(19): siRNA sense strand
ccgcaagaccuacuucucu

SEQ ID NO: 1441088 - RNA, 19 nt, Homo sapiens
  misc_RNA (1)...(19): siRNA sense strand
gaguaccccugaugagcua

SEQ ID NO: 1441089 - RNA, 19 nt, Homo sapiens
  misc_RNA (1)...(19): siRNA sense strand
ggaggggcaccaccagaua

SEQ ID NO: 1441090 - RNA, 19 nt, Homo sapiens
  misc_RNA (1)...(19): siRNA sense strand
cacugcggcuguccaacaa

SEQ ID NO: 1441091 - RNA, 19 nt, Homo sapiens
  misc_RNA (1)...(19): siRNA sense strand
ggacgucagccugguacug

SEQ ID NO: 1441092 - RNA, 19 nt, Homo sapiens
  misc_RNA (1)...(19): siRNA sense strand
gcaucucaaccucgacuuc

SEQ ID NO: 1441093 - RNA, 19 nt, Homo sapiens
  misc_RNA (1)...(19): siRNA sense strand
ccaccucuucuuccacuau

SEQ ID NO: 1441094 - RNA, 19 nt, Homo sapiens
  misc_RNA (1)...(19): siRNA sense strand
ccacguugacccugugauc

SEQ ID NO: 1441095 - RNA, 19 nt, Homo sapiens
  misc_RNA (1)...(19): siRNA sense strand
acucggcccucugccauug

SEQ ID NO: 1441096 - RNA, 19 nt, Homo sapiens
  misc_RNA (1)...(19): siRNA sense strand
gagcugaacguggcguaca

SEQ ID NO: 1441097 - RNA, 19 nt, Homo sapiens
  misc_RNA (1)...(19): siRNA sense strand
gguguugccgugcuaaugg

SEQ ID NO: 1441098 - RNA, 19 nt, Homo sapiens
  misc_RNA (1)...(19): siRNA sense strand
ccacacugcggcuguccaa

SEQ ID NO: 1441099 - RNA, 19 nt, Homo sapiens
  misc_RNA (1)...(19): siRNA sense strand
gcaaaaggugggcaaggaa

SEQ ID NO: 1441100 - RNA, 19 nt, Homo sapiens
  misc_RNA (1)...(19): siRNA sense strand
gcgcaagacgacccugcaa

SEQ ID NO: 1441101 - RNA, 19 nt, Homo sapiens
  misc_RNA (1)...(19): siRNA sense strand
uuaaggagcuugccucaua

SEQ ID NO: 1441102 - RNA, 19 nt, Homo sapiens
  misc_RNA (1)...(19): siRNA sense strand
gugaagcacuuaaggaaua

SEQ ID NO: 1441103 - RNA, 19 nt, Homo sapiens
  misc_RNA (1)...(19): siRNA sense strand
ccagauggcuguucuucua

SEQ ID NO: 1441104 - RNA, 19 nt, Homo sapiens
  misc_RNA (1)...(19): siRNA sense strand
gcaagaacguuaggagaaa

SEQ ID NO: 1441105 - RNA, 19 nt, Homo sapiens
  misc_RNA (1)...(19): siRNA sense strand
guggaaagguuaugacaaa

SEQ ID NO: 1441106 - RNA, 19 nt, Homo sapiens
  misc_RNA (1)...(19): siRNA sense strand
uaaagcaucugccaaugaa

SEQ ID NO: 1441107 - RNA, 19 nt, Homo sapiens
  misc_RNA (1)...(19): siRNA sense strand
gaagaaagaggauggauuc

SEQ ID NO: 1441108 - RNA, 19 nt, Homo sapiens
  misc_RNA (1)...(19): siRNA sense strand
gaaaggguauagugguauu

SEQ ID NO: 1441109 - RNA, 19 nt, Homo sapiens
  misc_RNA (1)...(19): siRNA sense strand
ucaacuagaucgacagaaa

SEQ ID NO: 1441110 - RNA, 19 nt, Homo sapiens
  misc_RNA (1)...(19): siRNA sense strand
gagaaaggcagcuucaauu

SEQ ID NO: 1441111 - RNA, 19 nt, Homo sapiens
  misc_RNA (1)...(19): siRNA sense strand
ccaaaggccuggucucuca

SEQ ID NO: 1441112 - RNA, 19 nt, Homo sapiens
  misc_RNA (1)...(19): siRNA sense strand
aaacugacauggacuacaa

SEQ ID NO: 1441113 - RNA, 19 nt, Homo sapiens
  misc_RNA (1)...(19): siRNA sense strand
gagcucagcccaagggaua

SEQ ID NO: 1441114 - RNA, 19 nt, Homo sapiens
  misc_RNA (1)...(19): siRNA sense strand
gauggcuguucuucuauua

SEQ ID NO: 1441115 - RNA, 19 nt, Homo sapiens
  misc_RNA (1)...(19): siRNA sense strand
gaacagacuggaauacaga

SEQ ID NO: 1441116 - RNA, 19 nt, Homo sapiens
  misc_RNA (1)...(19): siRNA sense strand
cucguucgcuguaauauua

SEQ ID NO: 1441117 - RNA, 19 nt, Homo sapiens
  misc_RNA (1)...(19): siRNA sense strand
gagcuugccucauacaauc

SEQ ID NO: 1441118 - RNA, 19 nt, Homo sapiens
  misc_RNA (1)...(19): siRNA sense strand
aagaugcacuucaccauaa

SEQ ID NO: 1441119 - RNA, 19 nt, Homo sapiens
  misc_RNA (1)...(19): siRNA sense strand
gaacaagacucagauacac

SEQ ID NO: 1441120 - RNA, 19 nt, Homo sapiens
  misc_RNA (1)...(19): siRNA sense strand
ccacuaaugucgcagaugu

SEQ ID NO: 1441121 - RNA, 19 nt, Homo sapiens
  misc_RNA (1)...(19): siRNA sense strand
ggguauagugguauuaaua

SEQ ID NO: 1441122 - RNA, 19 nt, Homo sapiens
  misc_RNA (1)...(19): siRNA sense strand
gcuguaauauuaaguugga

SEQ ID NO: 1441123 - RNA, 19 nt, Homo sapiens
  misc_RNA (1)...(19): siRNA sense strand
ggagaaaggcagcuucaau

SEQ ID NO: 1441124 - RNA, 19 nt, Homo sapiens
  misc_RNA (1)...(19): siRNA sense strand
guaaagcaucugccaauga

SEQ ID NO: 1441125 - RNA, 19 nt, Homo sapiens
  misc_RNA (1)...(19): siRNA sense strand
gaaagguuaugacaaacag

SEQ ID NO: 1441126 - RNA, 19 nt, Homo sapiens
  misc_RNA (1)...(19): siRNA sense strand
cccaagagguuaugauuca

SEQ ID NO: 1441127 - RNA, 19 nt, Homo sapiens
  misc_RNA (1)...(19): siRNA sense strand
ccgaaaggguauaguggua

SEQ ID NO: 1441128 - RNA, 19 nt, Homo sapiens
  misc_RNA (1)...(19): siRNA sense strand
gaacuuccagaucuacaaa

SEQ ID NO: 1441129 - RNA, 19 nt, Homo sapiens
  misc_RNA (1)...(19): siRNA sense strand
ucaagaacuuugugaauac

SEQ ID NO: 1441130 - RNA, 19 nt, Homo sapiens
  misc_RNA (1)...(19): siRNA sense strand
gaauacagaacaagacuca

SEQ ID NO: 1441131 - RNA, 19 nt, Homo sapiens
  misc_RNA (1)...(19): siRNA sense strand
ggugggcaaagaaauauua

SEQ ID NO: 1441132 - RNA, 19 nt, Homo sapiens
  misc_RNA (1)...(19): siRNA sense strand
acagagacauuguagugaa

SEQ ID NO: 1441133 - RNA, 19 nt, Homo sapiens
  misc_RNA (1)...(19): siRNA sense strand
ucuaagaacucuccuaaaa

SEQ ID NO: 1441134 - RNA, 19 nt, Homo sapiens
  misc_RNA (1)...(19): siRNA sense strand
aaaggugggcaaagaaaua

SEQ ID NO: 1441135 - RNA, 19 nt, Homo sapiens
  misc_RNA (1)...(19): siRNA sense strand
gcacuuaaggaauaacaga

SEQ ID NO: 1441136 - RNA, 19 nt, Homo sapiens
  misc_RNA (1)...(19): siRNA sense strand
caauuguacuggaagaaug

SEQ ID NO: 1441137 - RNA, 19 nt, Homo sapiens
  misc_RNA (1)...(19): siRNA sense strand
gaaaggcagcuucaauucu

SEQ ID NO: 1441138 - RNA, 19 nt, Homo sapiens
  misc_RNA (1)...(19): siRNA sense strand
ggaacaggccaaugagaga

SEQ ID NO: 1441139 - RNA, 19 nt, Homo sapiens
  misc_RNA (1)...(19): siRNA sense strand
gcacugaauacagaaguaa

SEQ ID NO: 1441140 - RNA, 19 nt, Homo sapiens
  misc_RNA (1)...(19): siRNA sense strand
ucagauacacccacuaaug

SEQ ID NO: 1441141 - RNA, 19 nt, Homo sapiens
  misc_RNA (1)...(19): siRNA sense strand
ccauaaggcuaacagaaag

SEQ ID NO: 1441142 - RNA, 19 nt, Homo sapiens
  misc_RNA (1)...(19): siRNA sense strand
gaaaggugggcaaagaaau

SEQ ID NO: 1441143 - RNA, 19 nt, Homo sapiens
  misc_RNA (1)...(19): siRNA sense strand
gguaaagcaucugccaaug

SEQ ID NO: 1441144 - RNA, 19 nt, Homo sapiens
  misc_RNA (1)...(19): siRNA sense strand
cacaaagaauauggagaua

SEQ ID NO: 1441145 - RNA, 19 nt, Homo sapiens
  misc_RNA (1)...(19): siRNA sense strand
ccaaugagagagaguguga

SEQ ID NO: 1441146 - RNA, 19 nt, Homo sapiens
  misc_RNA (1)...(19): siRNA sense strand
ggaaagguuaugacaaaca

SEQ ID NO: 1441147 - RNA, 19 nt, Homo sapiens
  misc_RNA (1)...(19): siRNA sense strand
aaacaaugccagaagaaga

SEQ ID NO: 1441148 - RNA, 19 nt, Homo sapiens
  misc_RNA (1)...(19): siRNA sense strand
gcauccauccugccucuuu

SEQ ID NO: 1441149 - RNA, 19 nt, Homo sapiens
  misc_RNA (1)...(19): siRNA sense strand
ugaagcacuuaaggaauaa

SEQ ID NO: 1441150 - RNA, 19 nt, Homo sapiens
  misc_RNA (1)...(19): siRNA sense strand
gagaaacuggacccuauug

SEQ ID NO: 1441151 - RNA, 19 nt, Homo sapiens
  misc_RNA (1)...(19): siRNA sense strand
aaaggcagcuucaauucuc

SEQ ID NO: 1441152 - RNA, 19 nt, Homo sapiens
  misc_RNA (1)...(19): siRNA sense strand
gaaacuggacccuauugca

SEQ ID NO: 1441153 - RNA, 19 nt, Homo sapiens
  misc_RNA (1)...(19): siRNA sense strand
agacaugcauaccucaguu

SEQ ID NO: 1441154 - RNA, 19 nt, Homo sapiens
  misc_RNA (1)...(19): siRNA sense strand
cagauacacccacuaaugu

SEQ ID NO: 1441155 - RNA, 19 nt, Homo sapiens
  misc_RNA (1)...(19): siRNA sense strand
ucaauucucuccgacacaa

SEQ ID NO: 1441156 - RNA, 19 nt, Homo sapiens
  misc_RNA (1)...(19): siRNA sense strand
caagagguuaugauucaaa

SEQ ID NO: 1441157 - RNA, 19 nt, Homo sapiens
  misc_RNA (1)...(19): siRNA sense strand
acaaacaggaugacacuug

SEQ ID NO: 1441158 - RNA, 19 nt, Homo sapiens
  misc_RNA (1)...(19): siRNA sense strand
aaaaugcacugaauacaga

SEQ ID NO: 1441159 - RNA, 19 nt, Homo sapiens
  misc_RNA (1)...(19): siRNA sense strand
ggauggauucacccagaua

SEQ ID NO: 1441160 - RNA, 19 nt, Homo sapiens
  misc_RNA (1)...(19): siRNA sense strand
gagacauuguagugaagaa

SEQ ID NO: 1441161 - RNA, 19 nt, Homo sapiens
  misc_RNA (1)...(19): siRNA sense strand
acacaaagaauauggagau

SEQ ID NO: 1441162 - RNA, 19 nt, Homo sapiens
  misc_RNA (1)...(19): siRNA sense strand
gggcaaagaaauauuacug

SEQ ID NO: 1441163 - RNA, 19 nt, Homo sapiens
  misc_RNA (1)...(19): siRNA sense strand
ggacaacagacaugcauac

SEQ ID NO: 1441164 - RNA, 19 nt, Homo sapiens
  misc_RNA (1)...(19): siRNA sense strand
uugagaaacuggacccuau

SEQ ID NO: 1441165 - RNA, 19 nt, Homo sapiens
  misc_RNA (1)...(19): siRNA sense strand
caaggugacagaagggaaa

SEQ ID NO: 1441166 - RNA, 19 nt, Homo sapiens
  misc_RNA (1)...(19): siRNA sense strand
uauacgaccuuuggacaga

SEQ ID NO: 1441167 - RNA, 19 nt, Homo sapiens
  misc_RNA (1)...(19): siRNA sense strand
gaucucgugugggcuaaug

SEQ ID NO: 1441168 - RNA, 19 nt, Homo sapiens
  misc_RNA (1)...(19): siRNA sense strand
caucaagaacuuugugaau

SEQ ID NO: 1441169 - RNA, 19 nt, Homo sapiens
  misc_RNA (1)...(19): siRNA sense strand
ggcaaagaaauauuacuga

SEQ ID NO: 1441170 - RNA, 19 nt, Homo sapiens
  misc_RNA (1)...(19): siRNA sense strand
ugaaaggugggcaaagaaa

SEQ ID NO: 1441171 - RNA, 19 nt, Homo sapiens
  misc_RNA (1)...(19): siRNA sense strand
agacuggaauacagaacaa

SEQ ID NO: 1441172 - RNA, 19 nt, Homo sapiens
  misc_RNA (1)...(19): siRNA sense strand
gagcagcaccucaugaacu

SEQ ID NO: 1441173 - RNA, 19 nt, Homo sapiens
  misc_RNA (1)...(19): siRNA sense strand
gguauagugguauuaauag

SEQ ID NO: 1441174 - RNA, 19 nt, Homo sapiens
  misc_RNA (1)...(19): siRNA sense strand
ggagcuugccucauacaau

SEQ ID NO: 1441175 - RNA, 19 nt, Homo sapiens
  misc_RNA (1)...(19): siRNA sense strand
agugaaaggugggcaaaga

SEQ ID NO: 1441176 - RNA, 19 nt, Homo sapiens
  misc_RNA (1)...(19): siRNA sense strand
ugaagaaagaggauggauu

SEQ ID NO: 1441177 - RNA, 19 nt, Homo sapiens
  misc_RNA (1)...(19): siRNA sense strand
gcagagaccagccuuuuau

SEQ ID NO: 1441178 - RNA, 19 nt, Homo sapiens
  misc_RNA (1)...(19): siRNA sense strand
gagguugaagcuauuguug

SEQ ID NO: 1441179 - RNA, 19 nt, Homo sapiens
  misc_RNA (1)...(19): siRNA sense strand
cccaggaguuugagguuga

SEQ ID NO: 1441180 - RNA, 19 nt, Homo sapiens
  misc_RNA (1)...(19): siRNA sense strand
ucagaaacuugagaaacug

SEQ ID NO: 1441181 - RNA, 19 nt, Homo sapiens
  misc_RNA (1)...(19): siRNA sense strand
ggguaaagcaucugccaau

SEQ ID NO: 1441182 - RNA, 19 nt, Homo sapiens
  misc_RNA (1)...(19): siRNA sense strand
gaaauaguuaaugcucuga

SEQ ID NO: 1441183 - RNA, 19 nt, Homo sapiens
  misc_RNA (1)...(19): siRNA sense strand
cagagcagcaccucaugaa

SEQ ID NO: 1441184 - RNA, 19 nt, Homo sapiens
  misc_RNA (1)...(19): siRNA sense strand
gcauaccucaguuccaaga

SEQ ID NO: 1441185 - RNA, 19 nt, Homo sapiens
  misc_RNA (1)...(19): siRNA sense strand
ucaaacaaugccagaagaa

SEQ ID NO: 1441186 - RNA, 19 nt, Homo sapiens
  misc_RNA (1)...(19): siRNA sense strand
agugugaggugcugaggaa

SEQ ID NO: 1441187 - RNA, 19 nt, Homo sapiens
  misc_RNA (1)...(19): siRNA sense strand
gguugaagcuauuguugac

SEQ ID NO: 1441188 - RNA, 19 nt, Homo sapiens
  misc_RNA (1)...(19): siRNA sense strand
guuaauugcugggcgaaag

SEQ ID NO: 1441189 - RNA, 19 nt, Homo sapiens
  misc_RNA (1)...(19): siRNA sense strand
caagaacguuaggagaaag

SEQ ID NO: 1441190 - RNA, 19 nt, Homo sapiens
  misc_RNA (1)...(19): siRNA sense strand
ggacaccaucaagaacuuu

SEQ ID NO: 1441191 - RNA, 19 nt, Homo sapiens
  misc_RNA (1)...(19): siRNA sense strand
gugcagaacagacuggaau

SEQ ID NO: 1441192 - RNA, 19 nt, Homo sapiens
  misc_RNA (1)...(19): siRNA sense strand
agaaaggcagcuucaauuc

SEQ ID NO: 1441193 - RNA, 19 nt, Homo sapiens
  misc_RNA (1)...(19): siRNA sense strand
guauuugguucgguggaaa

SEQ ID NO: 1441194 - RNA, 19 nt, Homo sapiens
  misc_RNA (1)...(19): siRNA sense strand
gcuguucuucuauuacauu

SEQ ID NO: 1441195 - RNA, 19 nt, Homo sapiens
  misc_RNA (1)...(19): siRNA sense strand
cauccauccugccucuuug

SEQ ID NO: 1441196 - RNA, 19 nt, Homo sapiens
  misc_RNA (1)...(19): siRNA sense strand
ggaugacacuugggaacca

SEQ ID NO: 1441197 - RNA, 19 nt, Homo sapiens
  misc_RNA (1)...(19): siRNA sense strand
acucagauacacccacuaa

SEQ ID NO: 1441198 - RNA, 19 nt, Homo sapiens
  misc_RNA (1)...(19): siRNA sense strand
ccaagagguuaugauucaa

SEQ ID NO: 1441199 - RNA, 19 nt, Homo sapiens
  misc_RNA (1)...(19): siRNA sense strand
caccauaaggcuaacagaa

SEQ ID NO: 1441200 - RNA, 19 nt, Homo sapiens
  misc_RNA (1)...(19): siRNA sense strand
uaaggagcuugccucauac

SEQ ID NO: 1441201 - RNA, 19 nt, Homo sapiens
  misc_RNA (1)...(19): siRNA sense strand
uuaaggagcuugccucaua

SEQ ID NO: 1441202 - RNA, 19 nt, Homo sapiens
  misc_RNA (1)...(19): siRNA sense strand
gugaagcacuuaaggaaua

SEQ ID NO: 1441203 - RNA, 19 nt, Homo sapiens
  misc_RNA (1)...(19): siRNA sense strand
ccagauggcuguucuucua

SEQ ID NO: 1441204 - RNA, 19 nt, Homo sapiens
  misc_RNA (1)...(19): siRNA sense strand
gcaagaacguuaggagaaa

SEQ ID NO: 1441205 - RNA, 19 nt, Homo sapiens
  misc_RNA (1)...(19): siRNA sense strand
guggaaagguuaugacaaa

SEQ ID NO: 1441206 - RNA, 19 nt, Homo sapiens
  misc_RNA (1)...(19): siRNA sense strand
uaaagcaucugccaaugaa

SEQ ID NO: 1441207 - RNA, 19 nt, Homo sapiens
  misc_RNA (1)...(19): siRNA sense strand
gaagaaagaggauggauuc

SEQ ID NO: 1441208 - RNA, 19 nt, Homo sapiens
  misc_RNA (1)...(19): siRNA sense strand
gaaaggguauagugguauu

SEQ ID NO: 1441209 - RNA, 19 nt, Homo sapiens
  misc_RNA (1)...(19): siRNA sense strand
ucaacuagaucgacagaaa

SEQ ID NO: 1441210 - RNA, 19 nt, Homo sapiens
  misc_RNA (1)...(19): siRNA sense strand
gagaaaggcagcuucaauu

SEQ ID NO: 1441211 - RNA, 19 nt, Homo sapiens
  misc_RNA (1)...(19): siRNA sense strand
ccaaaggccuggucucuca

SEQ ID NO: 1441212 - RNA, 19 nt, Homo sapiens
  misc_RNA (1)...(19): siRNA sense strand
aaacugacauggacuacaa

SEQ ID NO: 1441213 - RNA, 19 nt, Homo sapiens
  misc_RNA (1)...(19): siRNA sense strand
gagcucagcccaagggaua

SEQ ID NO: 1441214 - RNA, 19 nt, Homo sapiens
  misc_RNA (1)...(19): siRNA sense strand
gauggcuguucuucuauua

SEQ ID NO: 1441215 - RNA, 19 nt, Homo sapiens
  misc_RNA (1)...(19): siRNA sense strand
gaacagacuggaauacaga

SEQ ID NO: 1441216 - RNA, 19 nt, Homo sapiens
  misc_RNA (1)...(19): siRNA sense strand
cucguucgcuguaauauua

SEQ ID NO: 1441217 - RNA, 19 nt, Homo sapiens
  misc_RNA (1)...(19): siRNA sense strand
aagaugcacuucaccauaa

SEQ ID NO: 1441218 - RNA, 19 nt, Homo sapiens
  misc_RNA (1)...(19): siRNA sense strand
gaacaagacucagauacac

SEQ ID NO: 1441219 - RNA, 19 nt, Homo sapiens
  misc_RNA (1)...(19): siRNA sense strand
ccacuaaugucgcagaugu

SEQ ID NO: 1441220 - RNA, 19 nt, Homo sapiens
  misc_RNA (1)...(19): siRNA sense strand
ggguauagugguauuaaua

SEQ ID NO: 1441221 - RNA, 19 nt, Homo sapiens
  misc_RNA (1)...(19): siRNA sense strand
gcuguaauauuaaguugga

SEQ ID NO: 1441222 - RNA, 19 nt, Homo sapiens
  misc_RNA (1)...(19): siRNA sense strand
ggagaaaggcagcuucaau

SEQ ID NO: 1441223 - RNA, 19 nt, Homo sapiens
  misc_RNA (1)...(19): siRNA sense strand
guaaagcaucugccaauga

SEQ ID NO: 1441224 - RNA, 19 nt, Homo sapiens
  misc_RNA (1)...(19): siRNA sense strand
gaaagguuaugacaaacag

SEQ ID NO: 1441225 - RNA, 19 nt, Homo sapiens
  misc_RNA (1)...(19): siRNA sense strand
cccaagagguuaugauuca

SEQ ID NO: 1441226 - RNA, 19 nt, Homo sapiens
  misc_RNA (1)...(19): siRNA sense strand
ccgaaaggguauaguggua

SEQ ID NO: 1441227 - RNA, 19 nt, Homo sapiens
  misc_RNA (1)...(19): siRNA sense strand
gaacuuccagaucuacaaa

SEQ ID NO: 1441228 - RNA, 19 nt, Homo sapiens
  misc_RNA (1)...(19): siRNA sense strand
ucaagaacuuugugaauac

SEQ ID NO: 1441229 - RNA, 19 nt, Homo sapiens
  misc_RNA (1)...(19): siRNA sense strand
gaauacagaacaagacuca

SEQ ID NO: 1441230 - RNA, 19 nt, Homo sapiens
  misc_RNA (1)...(19): siRNA sense strand
ggugggcaaagaaauauua

SEQ ID NO: 1441231 - RNA, 19 nt, Homo sapiens
  misc_RNA (1)...(19): siRNA sense strand
acagagacauuguagugaa

SEQ ID NO: 1441232 - RNA, 19 nt, Homo sapiens
  misc_RNA (1)...(19): siRNA sense strand
ucuaagaacucuccuaaaa

SEQ ID NO: 1441233 - RNA, 19 nt, Homo sapiens
  misc_RNA (1)...(19): siRNA sense strand
aaaggugggcaaagaaaua

SEQ ID NO: 1441234 - RNA, 19 nt, Homo sapiens
  misc_RNA (1)...(19): siRNA sense strand
gcacuuaaggaauaacaga

SEQ ID NO: 1441235 - RNA, 19 nt, Homo sapiens
  misc_RNA (1)...(19): siRNA sense strand
caauuguacuggaagaaug

SEQ ID NO: 1441236 - RNA, 19 nt, Homo sapiens
  misc_RNA (1)...(19): siRNA sense strand
gaaaggcagcuucaauucu

SEQ ID NO: 1441237 - RNA, 19 nt, Homo sapiens
  misc_RNA (1)...(19): siRNA sense strand
ggaacaggccaaugagaga

SEQ ID NO: 1441238 - RNA, 19 nt, Homo sapiens
  misc_RNA (1)...(19): siRNA sense strand
gcacugaauacagaaguaa

SEQ ID NO: 1441239 - RNA, 19 nt, Homo sapiens
  misc_RNA (1)...(19): siRNA sense strand
ucagauacacccacuaaug

SEQ ID NO: 1441240 - RNA, 19 nt, Homo sapiens
  misc_RNA (1)...(19): siRNA sense strand
ccauaaggcuaacagaaag

SEQ ID NO: 1441241 - RNA, 19 nt, Homo sapiens
  misc_RNA (1)...(19): siRNA sense strand
gaaaggugggcaaagaaau

SEQ ID NO: 1441242 - RNA, 19 nt, Homo sapiens
  misc_RNA (1)...(19): siRNA sense strand
gguaaagcaucugccaaug

SEQ ID NO: 1441243 - RNA, 19 nt, Homo sapiens
  misc_RNA (1)...(19): siRNA sense strand
ggaaagguuaugacaaaca

SEQ ID NO: 1441244 - RNA, 19 nt, Homo sapiens
  misc_RNA (1)...(19): siRNA sense strand
ccaaugagagagaguguga

SEQ ID NO: 1441245 - RNA, 19 nt, Homo sapiens
  misc_RNA (1)...(19): siRNA sense strand
cacaaagaauauggagaua

SEQ ID NO: 1441246 - RNA, 19 nt, Homo sapiens
  misc_RNA (1)...(19): siRNA sense strand
aaacaaugccagaagaaga

SEQ ID NO: 1441247 - RNA, 19 nt, Homo sapiens
  misc_RNA (1)...(19): siRNA sense strand
gcauccauccugccucuuu

SEQ ID NO: 1441248 - RNA, 19 nt, Homo sapiens
  misc_RNA (1)...(19): siRNA sense strand
ugaagcacuuaaggaauaa

SEQ ID NO: 1441249 - RNA, 19 nt, Homo sapiens
  misc_RNA (1)...(19): siRNA sense strand
gagaaacuggacccuauug

SEQ ID NO: 1441250 - RNA, 19 nt, Homo sapiens
  misc_RNA (1)...(19): siRNA sense strand
aaaggcagcuucaauucuc

SEQ ID NO: 1441251 - RNA, 19 nt, Homo sapiens
  misc_RNA (1)...(19): siRNA sense strand
gaaacuggacccuauugca

SEQ ID NO: 1441252 - RNA, 19 nt, Homo sapiens
  misc_RNA (1)...(19): siRNA sense strand
agacaugcauaccucaguu

SEQ ID NO: 1441253 - RNA, 19 nt, Homo sapiens
  misc_RNA (1)...(19): siRNA sense strand
cagauacacccacuaaugu

SEQ ID NO: 1441254 - RNA, 19 nt, Homo sapiens
  misc_RNA (1)...(19): siRNA sense strand
ucaauucucuccgacacaa

SEQ ID NO: 1441255 - RNA, 19 nt, Homo sapiens
  misc_RNA (1)...(19): siRNA sense strand
caagagguuaugauucaaa

SEQ ID NO: 1441256 - RNA, 19 nt, Homo sapiens
  misc_RNA (1)...(19): siRNA sense strand
gagacauuguagugaagaa

SEQ ID NO: 1441257 - RNA, 19 nt, Homo sapiens
  misc_RNA (1)...(19): siRNA sense strand
acaaacaggaugacacuug

SEQ ID NO: 1441258 - RNA, 19 nt, Homo sapiens
  misc_RNA (1)...(19): siRNA sense strand
aaaaugcacugaauacaga

SEQ ID NO: 1441259 - RNA, 19 nt, Homo sapiens
  misc_RNA (1)...(19): siRNA sense strand
ggauggauucacccagaua

SEQ ID NO: 1441260 - RNA, 19 nt, Homo sapiens
  misc_RNA (1)...(19): siRNA sense strand
acacaaagaauauggagau

SEQ ID NO: 1441261 - RNA, 19 nt, Homo sapiens
  misc_RNA (1)...(19): siRNA sense strand
gggcaaagaaauauuacug

SEQ ID NO: 1441262 - RNA, 19 nt, Homo sapiens
  misc_RNA (1)...(19): siRNA sense strand
ggacaacagacaugcauac

SEQ ID NO: 1441263 - RNA, 19 nt, Homo sapiens
  misc_RNA (1)...(19): siRNA sense strand
uugagaaacuggacccuau

SEQ ID NO: 1441264 - RNA, 19 nt, Homo sapiens
  misc_RNA (1)...(19): siRNA sense strand
caaggugacagaagggaaa

SEQ ID NO: 1441265 - RNA, 19 nt, Homo sapiens
  misc_RNA (1)...(19): siRNA sense strand
uauacgaccuuuggacaga

SEQ ID NO: 1441266 - RNA, 19 nt, Homo sapiens
  misc_RNA (1)...(19): siRNA sense strand
gaucucgugugggcuaaug

SEQ ID NO: 1441267 - RNA, 19 nt, Homo sapiens
  misc_RNA (1)...(19): siRNA sense strand
caucaagaacuuugugaau

SEQ ID NO: 1441268 - RNA, 19 nt, Homo sapiens
  misc_RNA (1)...(19): siRNA sense strand
ggcaaagaaauauuacuga

SEQ ID NO: 1441269 - RNA, 19 nt, Homo sapiens
  misc_RNA (1)...(19): siRNA sense strand
ugaaaggugggcaaagaaa

SEQ ID NO: 1441270 - RNA, 19 nt, Homo sapiens
  misc_RNA (1)...(19): siRNA sense strand
gagcagcaccucaugaacu

SEQ ID NO: 1441271 - RNA, 19 nt, Homo sapiens
  misc_RNA (1)...(19): siRNA sense strand
agacuggaauacagaacaa

SEQ ID NO: 1441272 - RNA, 19 nt, Homo sapiens
  misc_RNA (1)...(19): siRNA sense strand
gguauagugguauuaauag

SEQ ID NO: 1441273 - RNA, 19 nt, Homo sapiens
  misc_RNA (1)...(19): siRNA sense strand
ggagcuugccucauacaau

SEQ ID NO: 1441274 - RNA, 19 nt, Homo sapiens
  misc_RNA (1)...(19): siRNA sense strand
agugaaaggugggcaaaga

SEQ ID NO: 1441275 - RNA, 19 nt, Homo sapiens
  misc_RNA (1)...(19): siRNA sense strand
ugaagaaagaggauggauu

SEQ ID NO: 1441276 - RNA, 19 nt, Homo sapiens
  misc_RNA (1)...(19): siRNA sense strand
gcagagaccagccuuuuau

SEQ ID NO: 1441277 - RNA, 19 nt, Homo sapiens
  misc_RNA (1)...(19): siRNA sense strand
gagguugaagcuauuguug

SEQ ID NO: 1441278 - RNA, 19 nt, Homo sapiens
  misc_RNA (1)...(19): siRNA sense strand
cccaggaguuugagguuga

SEQ ID NO: 1441279 - RNA, 19 nt, Homo sapiens
  misc_RNA (1)...(19): siRNA sense strand
ucagaaacuugagaaacug

SEQ ID NO: 1441280 - RNA, 19 nt, Homo sapiens
  misc_RNA (1)...(19): siRNA sense strand
ggguaaagcaucugccaau

SEQ ID NO: 1441281 - RNA, 19 nt, Homo sapiens
  misc_RNA (1)...(19): siRNA sense strand
gaaauaguuaaugcucuga

SEQ ID NO: 1441282 - RNA, 19 nt, Homo sapiens
  misc_RNA (1)...(19): siRNA sense strand
gcauaccucaguuccaaga

SEQ ID NO: 1441283 - RNA, 19 nt, Homo sapiens
  misc_RNA (1)...(19): siRNA sense strand
cagagcagcaccucaugaa

SEQ ID NO: 1441284 - RNA, 19 nt, Homo sapiens
  misc_RNA (1)...(19): siRNA sense strand
ucaaacaaugccagaagaa

SEQ ID NO: 1441285 - RNA, 19 nt, Homo sapiens
  misc_RNA (1)...(19): siRNA sense strand
agugugaggugcugaggaa

SEQ ID NO: 1441286 - RNA, 19 nt, Homo sapiens
  misc_RNA (1)...(19): siRNA sense strand
gguugaagcuauuguugac

SEQ ID NO: 1441287 - RNA, 19 nt, Homo sapiens
  misc_RNA (1)...(19): siRNA sense strand
guuaauugcugggcgaaag

SEQ ID NO: 1441288 - RNA, 19 nt, Homo sapiens
  misc_RNA (1)...(19): siRNA sense strand
caagaacguuaggagaaag

SEQ ID NO: 1441289 - RNA, 19 nt, Homo sapiens
  misc_RNA (1)...(19): siRNA sense strand
ggacaccaucaagaacuuu

SEQ ID NO: 1441290 - RNA, 19 nt, Homo sapiens
  misc_RNA (1)...(19): siRNA sense strand
gugcagaacagacuggaau

SEQ ID NO: 1441291 - RNA, 19 nt, Homo sapiens
  misc_RNA (1)...(19): siRNA sense strand
agaaaggcagcuucaauuc

SEQ ID NO: 1441292 - RNA, 19 nt, Homo sapiens
  misc_RNA (1)...(19): siRNA sense strand
ggaugacacuugggaacca

SEQ ID NO: 1441293 - RNA, 19 nt, Homo sapiens
  misc_RNA (1)...(19): siRNA sense strand
guauuugguucgguggaaa

SEQ ID NO: 1441294 - RNA, 19 nt, Homo sapiens
  misc_RNA (1)...(19): siRNA sense strand
gcuguucuucuauuacauu

SEQ ID NO: 1441295 - RNA, 19 nt, Homo sapiens
  misc_RNA (1)...(19): siRNA sense strand
cauccauccugccucuuug

SEQ ID NO: 1441296 - RNA, 19 nt, Homo sapiens
  misc_RNA (1)...(19): siRNA sense strand
acucagauacacccacuaa

SEQ ID NO: 1441297 - RNA, 19 nt, Homo sapiens
  misc_RNA (1)...(19): siRNA sense strand
ccaagagguuaugauucaa

SEQ ID NO: 1441298 - RNA, 19 nt, Homo sapiens
  misc_RNA (1)...(19): siRNA sense strand
caccauaaggcuaacagaa

SEQ ID NO: 1441299 - RNA, 19 nt, Homo sapiens
  misc_RNA (1)...(19): siRNA sense strand
agauggcuguucuucuauu

SEQ ID NO: 1441300 - RNA, 19 nt, Homo sapiens
  misc_RNA (1)...(19): siRNA sense strand
uaaggagcuugccucauac

SEQ ID NO: 1441301 - RNA, 19 nt, Homo sapiens
  misc_RNA (1)...(19): siRNA sense strand
ggaccaagcugaccaaaca

SEQ ID NO: 1441302 - RNA, 19 nt, Homo sapiens
  misc_RNA (1)...(19): siRNA sense strand
ccaaacaggucaucgagua

SEQ ID NO: 1441303 - RNA, 19 nt, Homo sapiens
  misc_RNA (1)...(19): siRNA sense strand
ccacagaacuggccaaaca

SEQ ID NO: 1441304 - RNA, 19 nt, Homo sapiens
  misc_RNA (1)...(19): siRNA sense strand
gcucaaaugcuacuacuuu

SEQ ID NO: 1441305 - RNA, 19 nt, Homo sapiens
  misc_RNA (1)...(19): siRNA sense strand
gagcuacaccuucuucauu

SEQ ID NO: 1441306 - RNA, 19 nt, Homo sapiens
  misc_RNA (1)...(19): siRNA sense strand
cgagaaggccuacgagaaa

SEQ ID NO: 1441307 - RNA, 19 nt, Homo sapiens
  misc_RNA (1)...(19): siRNA sense strand
cguaaaagccccaaucuua

SEQ ID NO: 1441308 - RNA, 19 nt, Homo sapiens
  misc_RNA (1)...(19): siRNA sense strand
gcuacuacuuugauuacaa

SEQ ID NO: 1441309 - RNA, 19 nt, Homo sapiens
  misc_RNA (1)...(19): siRNA sense strand
cagugucccuggagcaaua

SEQ ID NO: 1441310 - RNA, 19 nt, Homo sapiens
  misc_RNA (1)...(19): siRNA sense strand
ccaaggacauacagaccaa

SEQ ID NO: 1441311 - RNA, 19 nt, Homo sapiens
  misc_RNA (1)...(19): siRNA sense strand
gagggcagcuacaacaaag

SEQ ID NO: 1441312 - RNA, 19 nt, Homo sapiens
  misc_RNA (1)...(19): siRNA sense strand
ggagggcagcuacaacaaa

SEQ ID NO: 1441313 - RNA, 19 nt, Homo sapiens
  misc_RNA (1)...(19): siRNA sense strand
ccaaacagcagcuaauucu

SEQ ID NO: 1441314 - RNA, 19 nt, Homo sapiens
  misc_RNA (1)...(19): siRNA sense strand
gaagagcugggucgacuca

SEQ ID NO: 1441315 - RNA, 19 nt, Homo sapiens
  misc_RNA (1)...(19): siRNA sense strand
cuacauggcccagcucaaa

SEQ ID NO: 1441316 - RNA, 19 nt, Homo sapiens
  misc_RNA (1)...(19): siRNA sense strand
gcuacaccuucuucauuga

SEQ ID NO: 1441317 - RNA, 19 nt, Homo sapiens
  misc_RNA (1)...(19): siRNA sense strand
gaccaaacagcagcuaauu

SEQ ID NO: 1441318 - RNA, 19 nt, Homo sapiens
  misc_RNA (1)...(19): siRNA sense strand
uggcccagcucaaaugcua

SEQ ID NO: 1441319 - RNA, 19 nt, Homo sapiens
  misc_RNA (1)...(19): siRNA sense strand
gccgagagcuacaccuucu

SEQ ID NO: 1441320 - RNA, 19 nt, Homo sapiens
  misc_RNA (1)...(19): siRNA sense strand
ugacagacuacgccaagaa

SEQ ID NO: 1441321 - RNA, 19 nt, Homo sapiens
  misc_RNA (1)...(19): siRNA sense strand
cuacuacuuugauuacaag

SEQ ID NO: 1441322 - RNA, 19 nt, Homo sapiens
  misc_RNA (1)...(19): siRNA sense strand
gagaaggccuacgagaaaa

SEQ ID NO: 1441323 - RNA, 19 nt, Homo sapiens
  misc_RNA (1)...(19): siRNA sense strand
ccacccggauccucuucuu

SEQ ID NO: 1441324 - RNA, 19 nt, Homo sapiens
  misc_RNA (1)...(19): siRNA sense strand
caaacaggucaucgaguau

SEQ ID NO: 1441325 - RNA, 19 nt, Homo sapiens
  misc_RNA (1)...(19): siRNA sense strand
cggauccucuucuucaaca

SEQ ID NO: 1441326 - RNA, 19 nt, Homo sapiens
  misc_RNA (1)...(19): siRNA sense strand
gggcagcuacaacaaagug

SEQ ID NO: 1441327 - RNA, 19 nt, Homo sapiens
  misc_RNA (1)...(19): siRNA sense strand
ucgagaaggccuacgagaa

SEQ ID NO: 1441328 - RNA, 19 nt, Homo sapiens
  misc_RNA (1)...(19): siRNA sense strand
gacucaagcuaguucuucu

SEQ ID NO: 1441329 - RNA, 19 nt, Homo sapiens
  misc_RNA (1)...(19): siRNA sense strand
agaaccggguggcugaguu

SEQ ID NO: 1441330 - RNA, 19 nt, Homo sapiens
  misc_RNA (1)...(19): siRNA sense strand
agcuacaccuucuucauug

SEQ ID NO: 1441331 - RNA, 19 nt, Homo sapiens
  misc_RNA (1)...(19): siRNA sense strand
ugaccaaacagcagcuaau

SEQ ID NO: 1441332 - RNA, 19 nt, Homo sapiens
  misc_RNA (1)...(19): siRNA sense strand
aaacaggucaucgaguaug

SEQ ID NO: 1441333 - RNA, 19 nt, Homo sapiens
  misc_RNA (1)...(19): siRNA sense strand
cgagagcuacaccuucuuc

SEQ ID NO: 1441334 - RNA, 19 nt, Homo sapiens
  misc_RNA (1)...(19): siRNA sense strand
aauucuggcccgugacaua

SEQ ID NO: 1441335 - RNA, 19 nt, Homo sapiens
  misc_RNA (1)...(19): siRNA sense strand
ggucgacucaagcuaguuc

SEQ ID NO: 1441336 - RNA, 19 nt, Homo sapiens
  misc_RNA (1)...(19): siRNA sense strand
cgacucaagcuaguucuuc

SEQ ID NO: 1441337 - RNA, 19 nt, Homo sapiens
  misc_RNA (1)...(19): siRNA sense strand
guaaaagccccaaucuuag

SEQ ID NO: 1441338 - RNA, 19 nt, Homo sapiens
  misc_RNA (1)...(19): siRNA sense strand
cagcucaaaugcuacuacu

SEQ ID NO: 1441339 - RNA, 19 nt, Homo sapiens
  misc_RNA (1)...(19): siRNA sense strand
gcaucgagaaggccuacga

SEQ ID NO: 1441340 - RNA, 19 nt, Homo sapiens
  misc_RNA (1)...(19): siRNA sense strand
caccauucccuccacagaa

SEQ ID NO: 1441341 - RNA, 19 nt, Homo sapiens
  misc_RNA (1)...(19): siRNA sense strand
gacacuaucagggaugaga

SEQ ID NO: 1441342 - RNA, 19 nt, Homo sapiens
  misc_RNA (1)...(19): siRNA sense strand
ccaccauucccuccacaga

SEQ ID NO: 1441343 - RNA, 19 nt, Homo sapiens
  misc_RNA (1)...(19): siRNA sense strand
cccggcagcuggagaugau

SEQ ID NO: 1441344 - RNA, 19 nt, Homo sapiens
  misc_RNA (1)...(19): siRNA sense strand
gaacaaacaucacaauuac

SEQ ID NO: 1441345 - RNA, 19 nt, Homo sapiens
  misc_RNA (1)...(19): siRNA sense strand
gcacggagaugagauauau

SEQ ID NO: 1441346 - RNA, 19 nt, Homo sapiens
  misc_RNA (1)...(19): siRNA sense strand
gaaaauaucucuucaagga

SEQ ID NO: 1441347 - RNA, 19 nt, Homo sapiens
  misc_RNA (1)...(19): siRNA sense strand
cgagauagcuguacuuuca

SEQ ID NO: 1441348 - RNA, 19 nt, Homo sapiens
  misc_RNA (1)...(19): siRNA sense strand
gcagaagacucccaaguug

SEQ ID NO: 1441349 - RNA, 19 nt, Homo sapiens
  misc_RNA (1)...(19): siRNA sense strand
uauaauagcuccuguaaca

SEQ ID NO: 1441350 - RNA, 19 nt, Homo sapiens
  misc_RNA (1)...(19): siRNA sense strand
guacucaucuguugaauuc

SEQ ID NO: 1441351 - RNA, 19 nt, Homo sapiens
  misc_RNA (1)...(19): siRNA sense strand
gcagagaacaguggaauua

SEQ ID NO: 1441352 - RNA, 19 nt, Homo sapiens
  misc_RNA (1)...(19): siRNA sense strand
guauauggcuggauuauca

SEQ ID NO: 1441353 - RNA, 19 nt, Homo sapiens
  misc_RNA (1)...(19): siRNA sense strand
ccaauuaccgucaagauua

SEQ ID NO: 1441354 - RNA, 19 nt, Homo sapiens
  misc_RNA (1)...(19): siRNA sense strand
gguauggucucuuuguaua

SEQ ID NO: 1441355 - RNA, 19 nt, Homo sapiens
  misc_RNA (1)...(19): siRNA sense strand
aaacaaccacugucaauua

SEQ ID NO: 1441356 - RNA, 19 nt, Homo sapiens
  misc_RNA (1)...(19): siRNA sense strand
gaaguaaccucuccaacuc

SEQ ID NO: 1441357 - RNA, 19 nt, Homo sapiens
  misc_RNA (1)...(19): siRNA sense strand
auacagaccucuaucuuaa

SEQ ID NO: 1441358 - RNA, 19 nt, Homo sapiens
  misc_RNA (1)...(19): siRNA sense strand
aaggaaaucucacuaauga

SEQ ID NO: 1441359 - RNA, 19 nt, Homo sapiens
  misc_RNA (1)...(19): siRNA sense strand
gaaagucaaugguccacaa

SEQ ID NO: 1441360 - RNA, 19 nt, Homo sapiens
  misc_RNA (1)...(19): siRNA sense strand
caagguggauuuacuguga

SEQ ID NO: 1441361 - RNA, 19 nt, Homo sapiens
  misc_RNA (1)...(19): siRNA sense strand
gaacgaggcccagaaguuu

SEQ ID NO: 1441362 - RNA, 19 nt, Homo sapiens
  misc_RNA (1)...(19): siRNA sense strand
gauuaucacuggaagauug

SEQ ID NO: 1441363 - RNA, 19 nt, Homo sapiens
  misc_RNA (1)...(19): siRNA sense strand
caacucaccuaucugguuu

SEQ ID NO: 1441364 - RNA, 19 nt, Homo sapiens
  misc_RNA (1)...(19): siRNA sense strand
caacuuccuugcaauguaa

SEQ ID NO: 1441365 - RNA, 19 nt, Homo sapiens
  misc_RNA (1)...(19): siRNA sense strand
gcagaaacauaagcaauau

SEQ ID NO: 1441366 - RNA, 19 nt, Homo sapiens
  misc_RNA (1)...(19): siRNA sense strand
caccagcucuuacagaaua

SEQ ID NO: 1441367 - RNA, 19 nt, Homo sapiens
  misc_RNA (1)...(19): siRNA sense strand
guaauugucaccugucuua

SEQ ID NO: 1441368 - RNA, 19 nt, Homo sapiens
  misc_RNA (1)...(19): siRNA sense strand
ggauacagaucuuccauuc

SEQ ID NO: 1441369 - RNA, 19 nt, Homo sapiens
  misc_RNA (1)...(19): siRNA sense strand
cuacucaacucccuucuuu

SEQ ID NO: 1441370 - RNA, 19 nt, Homo sapiens
  misc_RNA (1)...(19): siRNA sense strand
gaacugugauguugagaca

SEQ ID NO: 1441371 - RNA, 19 nt, Homo sapiens
  misc_RNA (1)...(19): siRNA sense strand
gaagcaauguucugagugu

SEQ ID NO: 1441372 - RNA, 19 nt, Homo sapiens
  misc_RNA (1)...(19): siRNA sense strand
cagaugggauuugcuaaua

SEQ ID NO: 1441373 - RNA, 19 nt, Homo sapiens
  misc_RNA (1)...(19): siRNA sense strand
acacagauuugccgccuua

SEQ ID NO: 1441374 - RNA, 19 nt, Homo sapiens
  misc_RNA (1)...(19): siRNA sense strand
ggccuuaccucuacauuug

SEQ ID NO: 1441375 - RNA, 19 nt, Homo sapiens
  misc_RNA (1)...(19): siRNA sense strand
gaauugaucucuauuucuc

SEQ ID NO: 1441376 - RNA, 19 nt, Homo sapiens
  misc_RNA (1)...(19): siRNA sense strand
gcgagcaucuggugugaaa

SEQ ID NO: 1441377 - RNA, 19 nt, Homo sapiens
  misc_RNA (1)...(19): siRNA sense strand
gaacuguccuuguggauac

SEQ ID NO: 1441378 - RNA, 19 nt, Homo sapiens
  misc_RNA (1)...(19): siRNA sense strand
ggaaauagagguagaugga

SEQ ID NO: 1441379 - RNA, 19 nt, Homo sapiens
  misc_RNA (1)...(19): siRNA sense strand
gaauugcacucuuuucaua

SEQ ID NO: 1441380 - RNA, 19 nt, Homo sapiens
  misc_RNA (1)...(19): siRNA sense strand
aauguuagcuucucaguau

SEQ ID NO: 1441381 - RNA, 19 nt, Homo sapiens
  misc_RNA (1)...(19): siRNA sense strand
ccuauacugucacuaauaa

SEQ ID NO: 1441382 - RNA, 19 nt, Homo sapiens
  misc_RNA (1)...(19): siRNA sense strand
gauauugccucaggaaaug

SEQ ID NO: 1441383 - RNA, 19 nt, Homo sapiens
  misc_RNA (1)...(19): siRNA sense strand
gagcucagaucacacucua

SEQ ID NO: 1441384 - RNA, 19 nt, Homo sapiens
  misc_RNA (1)...(19): siRNA sense strand
ggaagguguuagccugaua

SEQ ID NO: 1441385 - RNA, 19 nt, Homo sapiens
  misc_RNA (1)...(19): siRNA sense strand
guucuacuuuccuucauua

SEQ ID NO: 1441386 - RNA, 19 nt, Homo sapiens
  misc_RNA (1)...(19): siRNA sense strand
ggaccaggaugcuaaagau

SEQ ID NO: 1441387 - RNA, 19 nt, Homo sapiens
  misc_RNA (1)...(19): siRNA sense strand
ccacgucagucuauauuga

SEQ ID NO: 1441388 - RNA, 19 nt, Homo sapiens
  misc_RNA (1)...(19): siRNA sense strand
ggaagccucuugaccauag

SEQ ID NO: 1441389 - RNA, 19 nt, Homo sapiens
  misc_RNA (1)...(19): siRNA sense strand
ggcauuccaugugauauua

SEQ ID NO: 1441390 - RNA, 19 nt, Homo sapiens
  misc_RNA (1)...(19): siRNA sense strand
gaacuucgggucaccauug

SEQ ID NO: 1441391 - RNA, 19 nt, Homo sapiens
  misc_RNA (1)...(19): siRNA sense strand
caccugaguuuacauauug

SEQ ID NO: 1441392 - RNA, 19 nt, Homo sapiens
  misc_RNA (1)...(19): siRNA sense strand
auacagggcugcacaguga

SEQ ID NO: 1441393 - RNA, 19 nt, Homo sapiens
  misc_RNA (1)...(19): siRNA sense strand
uaucuuaagucaccuuuga

SEQ ID NO: 1441394 - RNA, 19 nt, Homo sapiens
  misc_RNA (1)...(19): siRNA sense strand
gcagugaugccucggauaa

SEQ ID NO: 1441395 - RNA, 19 nt, Homo sapiens
  misc_RNA (1)...(19): siRNA sense strand
caucuauccucuccaagua

SEQ ID NO: 1441396 - RNA, 19 nt, Homo sapiens
  misc_RNA (1)...(19): siRNA sense strand
ggacuauucugcaguucuu

SEQ ID NO: 1441397 - RNA, 19 nt, Homo sapiens
  misc_RNA (1)...(19): siRNA sense strand
aaacaaccauugaggaguu

SEQ ID NO: 1441398 - RNA, 19 nt, Homo sapiens
  misc_RNA (1)...(19): siRNA sense strand
gaacguggaucacagucau

SEQ ID NO: 1441399 - RNA, 19 nt, Homo sapiens
  misc_RNA (1)...(19): siRNA sense strand
caacuuugcuccugguaau

SEQ ID NO: 1441400 - RNA, 19 nt, Homo sapiens
  misc_RNA (1)...(19): siRNA sense strand
gaauugacgucuuggaaag

SEQ ID NO: 1441401 - RNA, 19 nt, Homo sapiens
  misc_RNA (1)...(19): siRNA sense strand
uuccagagcuucacaguuu

SEQ ID NO: 1441402 - RNA, 19 nt, Homo sapiens
  misc_RNA (1)...(19): siRNA sense strand
gucaggacauggaaauaua

SEQ ID NO: 1441403 - RNA, 19 nt, Homo sapiens
  misc_RNA (1)...(19): siRNA sense strand
gaagguggacaguaaugua

SEQ ID NO: 1441404 - RNA, 19 nt, Homo sapiens
  misc_RNA (1)...(19): siRNA sense strand
gaacaccacgucagucuau

SEQ ID NO: 1441405 - RNA, 19 nt, Homo sapiens
  misc_RNA (1)...(19): siRNA sense strand
gguguuagccugauauuau

SEQ ID NO: 1441406 - RNA, 19 nt, Homo sapiens
  misc_RNA (1)...(19): siRNA sense strand
gaacacguguggaccuugu

SEQ ID NO: 1441407 - RNA, 19 nt, Homo sapiens
  misc_RNA (1)...(19): siRNA sense strand
gaaggaggaucuauacacu

SEQ ID NO: 1441408 - RNA, 19 nt, Homo sapiens
  misc_RNA (1)...(19): siRNA sense strand
gcuaucggcuagaucagua

SEQ ID NO: 1441409 - RNA, 19 nt, Homo sapiens
  misc_RNA (1)...(19): siRNA sense strand
gaggauugguguccagauu

SEQ ID NO: 1441410 - RNA, 19 nt, Homo sapiens
  misc_RNA (1)...(19): siRNA sense strand
gggaagcuguuauccuauu

SEQ ID NO: 1441411 - RNA, 19 nt, Homo sapiens
  misc_RNA (1)...(19): siRNA sense strand
ggaaaugagagaauuauag

SEQ ID NO: 1441412 - RNA, 19 nt, Homo sapiens
  misc_RNA (1)...(19): siRNA sense strand
ucaaagggcuguaugugau

SEQ ID NO: 1441413 - RNA, 19 nt, Homo sapiens
  misc_RNA (1)...(19): siRNA sense strand
caaccacugucaauuaugu

SEQ ID NO: 1441414 - RNA, 19 nt, Homo sapiens
  misc_RNA (1)...(19): siRNA sense strand
gaacugauggugucuaaca

SEQ ID NO: 1441415 - RNA, 19 nt, Homo sapiens
  misc_RNA (1)...(19): siRNA sense strand
gaacauugcacauucuugu

SEQ ID NO: 1441416 - RNA, 19 nt, Homo sapiens
  misc_RNA (1)...(19): siRNA sense strand
ggacaguaauguauucuac

SEQ ID NO: 1441417 - RNA, 19 nt, Homo sapiens
  misc_RNA (1)...(19): siRNA sense strand
gacacacucagaaauauua

SEQ ID NO: 1441418 - RNA, 19 nt, Homo sapiens
  misc_RNA (1)...(19): siRNA sense strand
ccagacacacucagaaaua

SEQ ID NO: 1441419 - RNA, 19 nt, Homo sapiens
  misc_RNA (1)...(19): siRNA sense strand
uaaagaauaccaccuguga

SEQ ID NO: 1441420 - RNA, 19 nt, Homo sapiens
  misc_RNA (1)...(19): siRNA sense strand
gaacugcuuuggucugaca

SEQ ID NO: 1441421 - RNA, 19 nt, Homo sapiens
  misc_RNA (1)...(19): siRNA sense strand
gacccgaaauauacaaauu

SEQ ID NO: 1441422 - RNA, 19 nt, Homo sapiens
  misc_RNA (1)...(19): siRNA sense strand
auacagaucuuccauucuu

SEQ ID NO: 1441423 - RNA, 19 nt, Homo sapiens
  misc_RNA (1)...(19): siRNA sense strand
caucguaugucuauugguu

SEQ ID NO: 1441424 - RNA, 19 nt, Homo sapiens
  misc_RNA (1)...(19): siRNA sense strand
gggaacugauggugucuaa

SEQ ID NO: 1441425 - RNA, 19 nt, Homo sapiens
  misc_RNA (1)...(19): siRNA sense strand
ggaaagugaugcaaauacu

SEQ ID NO: 1441426 - RNA, 19 nt, Homo sapiens
  misc_RNA (1)...(19): siRNA sense strand
gcacacgccauccuuguuu

SEQ ID NO: 1441427 - RNA, 19 nt, Homo sapiens
  misc_RNA (1)...(19): siRNA sense strand
guguucaccucaagaguua

SEQ ID NO: 1441428 - RNA, 19 nt, Homo sapiens
  misc_RNA (1)...(19): siRNA sense strand
uccagacacuucuacauua

SEQ ID NO: 1441429 - RNA, 19 nt, Homo sapiens
  misc_RNA (1)...(19): siRNA sense strand
ggagaaaucacaaauagca

SEQ ID NO: 1441430 - RNA, 19 nt, Homo sapiens
  misc_RNA (1)...(19): siRNA sense strand
gaaugugacugugaucaga

SEQ ID NO: 1441431 - RNA, 19 nt, Homo sapiens
  misc_RNA (1)...(19): siRNA sense strand
cuaauacagugauuucuga

SEQ ID NO: 1441432 - RNA, 19 nt, Homo sapiens
  misc_RNA (1)...(19): siRNA sense strand
gaaacuucuuccuuacuug

SEQ ID NO: 1441433 - RNA, 19 nt, Homo sapiens
  misc_RNA (1)...(19): siRNA sense strand
aguagucuguccugaauua

SEQ ID NO: 1441434 - RNA, 19 nt, Homo sapiens
  misc_RNA (1)...(19): siRNA sense strand
ggaguuggguguucuuuac

SEQ ID NO: 1441435 - RNA, 19 nt, Homo sapiens
  misc_RNA (1)...(19): siRNA sense strand
gaauaaugccgaugacuuc

SEQ ID NO: 1441436 - RNA, 19 nt, Homo sapiens
  misc_RNA (1)...(19): siRNA sense strand
ugaacaagauccugaagau

SEQ ID NO: 1441437 - RNA, 19 nt, Homo sapiens
  misc_RNA (1)...(19): siRNA sense strand
gaaacaacgugaucaucca

SEQ ID NO: 1441438 - RNA, 19 nt, Homo sapiens
  misc_RNA (1)...(19): siRNA sense strand
ucaacuuacugcacauuaa

SEQ ID NO: 1441439 - RNA, 19 nt, Homo sapiens
  misc_RNA (1)...(19): siRNA sense strand
uggcugaucucucugauga

SEQ ID NO: 1441440 - RNA, 19 nt, Homo sapiens
  misc_RNA (1)...(19): siRNA sense strand
caaggagaaaucacaaaua

SEQ ID NO: 1441441 - RNA, 19 nt, Homo sapiens
  misc_RNA (1)...(19): siRNA sense strand
gaauuuccgucucuaucaa

SEQ ID NO: 1441442 - RNA, 19 nt, Homo sapiens
  misc_RNA (1)...(19): siRNA sense strand
acauaugucucuuccuuaa

SEQ ID NO: 1441443 - RNA, 19 nt, Homo sapiens
  misc_RNA (1)...(19): siRNA sense strand
ugaugucccuguacaaauu

SEQ ID NO: 1441444 - RNA, 19 nt, Homo sapiens
  misc_RNA (1)...(19): siRNA sense strand
gaacaaacaucacaauuac

SEQ ID NO: 1441445 - RNA, 19 nt, Homo sapiens
  misc_RNA (1)...(19): siRNA sense strand
gcacggagaugagauauau

SEQ ID NO: 1441446 - RNA, 19 nt, Homo sapiens
  misc_RNA (1)...(19): siRNA sense strand
gaaaauaucucuucaagga

SEQ ID NO: 1441447 - RNA, 19 nt, Homo sapiens
  misc_RNA (1)...(19): siRNA sense strand
cgagauagcuguacuuuca

SEQ ID NO: 1441448 - RNA, 19 nt, Homo sapiens
  misc_RNA (1)...(19): siRNA sense strand
gcagaagacucccaaguug

SEQ ID NO: 1441449 - RNA, 19 nt, Homo sapiens
  misc_RNA (1)...(19): siRNA sense strand
uauaauagcuccuguaaca

SEQ ID NO: 1441450 - RNA, 19 nt, Homo sapiens
  misc_RNA (1)...(19): siRNA sense strand
guacucaucuguugaauuc

SEQ ID NO: 1441451 - RNA, 19 nt, Homo sapiens
  misc_RNA (1)...(19): siRNA sense strand
gcagagaacaguggaauua

SEQ ID NO: 1441452 - RNA, 19 nt, Homo sapiens
  misc_RNA (1)...(19): siRNA sense strand
guauauggcuggauuauca

SEQ ID NO: 1441453 - RNA, 19 nt, Homo sapiens
  misc_RNA (1)...(19): siRNA sense strand
ccaauuaccgucaagauua

SEQ ID NO: 1441454 - RNA, 19 nt, Homo sapiens
  misc_RNA (1)...(19): siRNA sense strand
gguauggucucuuuguaua

SEQ ID NO: 1441455 - RNA, 19 nt, Homo sapiens
  misc_RNA (1)...(19): siRNA sense strand
aaacaaccacugucaauua

SEQ ID NO: 1441456 - RNA, 19 nt, Homo sapiens
  misc_RNA (1)...(19): siRNA sense strand
gaaguaaccucuccaacuc

SEQ ID NO: 1441457 - RNA, 19 nt, Homo sapiens
  misc_RNA (1)...(19): siRNA sense strand
auacagaccucuaucuuaa

SEQ ID NO: 1441458 - RNA, 19 nt, Homo sapiens
  misc_RNA (1)...(19): siRNA sense strand
aaggaaaucucacuaauga

SEQ ID NO: 1441459 - RNA, 19 nt, Homo sapiens
  misc_RNA (1)...(19): siRNA sense strand
gaaagucaaugguccacaa

SEQ ID NO: 1441460 - RNA, 19 nt, Homo sapiens
  misc_RNA (1)...(19): siRNA sense strand
caagguggauuuacuguga

SEQ ID NO: 1441461 - RNA, 19 nt, Homo sapiens
  misc_RNA (1)...(19): siRNA sense strand
gaacgaggcccagaaguuu

SEQ ID NO: 1441462 - RNA, 19 nt, Homo sapiens
  misc_RNA (1)...(19): siRNA sense strand
gauuaucacuggaagauug

SEQ ID NO: 1441463 - RNA, 19 nt, Homo sapiens
  misc_RNA (1)...(19): siRNA sense strand
caacucaccuaucugguuu

SEQ ID NO: 1441464 - RNA, 19 nt, Homo sapiens
  misc_RNA (1)...(19): siRNA sense strand
caacuuccuugcaauguaa

SEQ ID NO: 1441465 - RNA, 19 nt, Homo sapiens
  misc_RNA (1)...(19): siRNA sense strand
gcagaaacauaagcaauau

SEQ ID NO: 1441466 - RNA, 19 nt, Homo sapiens
  misc_RNA (1)...(19): siRNA sense strand
caccagcucuuacagaaua

SEQ ID NO: 1441467 - RNA, 19 nt, Homo sapiens
  misc_RNA (1)...(19): siRNA sense strand
guaauugucaccugucuua

SEQ ID NO: 1441468 - RNA, 19 nt, Homo sapiens
  misc_RNA (1)...(19): siRNA sense strand
ggauacagaucuuccauuc

SEQ ID NO: 1441469 - RNA, 19 nt, Homo sapiens
  misc_RNA (1)...(19): siRNA sense strand
cuacucaacucccuucuuu

SEQ ID NO: 1441470 - RNA, 19 nt, Homo sapiens
  misc_RNA (1)...(19): siRNA sense strand
gaacugugauguugagaca

SEQ ID NO: 1441471 - RNA, 19 nt, Homo sapiens
  misc_RNA (1)...(19): siRNA sense strand
gaagcaauguucugagugu

SEQ ID NO: 1441472 - RNA, 19 nt, Homo sapiens
  misc_RNA (1)...(19): siRNA sense strand
cagaugggauuugcuaaua

SEQ ID NO: 1441473 - RNA, 19 nt, Homo sapiens
  misc_RNA (1)...(19): siRNA sense strand
acacagauuugccgccuua

SEQ ID NO: 1441474 - RNA, 19 nt, Homo sapiens
  misc_RNA (1)...(19): siRNA sense strand
ggccuuaccucuacauuug

SEQ ID NO: 1441475 - RNA, 19 nt, Homo sapiens
  misc_RNA (1)...(19): siRNA sense strand
gaauugaucucuauuucuc

SEQ ID NO: 1441476 - RNA, 19 nt, Homo sapiens
  misc_RNA (1)...(19): siRNA sense strand
gcgagcaucuggugugaaa

SEQ ID NO: 1441477 - RNA, 19 nt, Homo sapiens
  misc_RNA (1)...(19): siRNA sense strand
gaacuguccuuguggauac

SEQ ID NO: 1441478 - RNA, 19 nt, Homo sapiens
  misc_RNA (1)...(19): siRNA sense strand
ggaaauagagguagaugga

SEQ ID NO: 1441479 - RNA, 19 nt, Homo sapiens
  misc_RNA (1)...(19): siRNA sense strand
gaauugcacucuuuucaua

SEQ ID NO: 1441480 - RNA, 19 nt, Homo sapiens
  misc_RNA (1)...(19): siRNA sense strand
aauguuagcuucucaguau

SEQ ID NO: 1441481 - RNA, 19 nt, Homo sapiens
  misc_RNA (1)...(19): siRNA sense strand
ccuauacugucacuaauaa

SEQ ID NO: 1441482 - RNA, 19 nt, Homo sapiens
  misc_RNA (1)...(19): siRNA sense strand
gauauugccucaggaaaug

SEQ ID NO: 1441483 - RNA, 19 nt, Homo sapiens
  misc_RNA (1)...(19): siRNA sense strand
gagcucagaucacacucua

SEQ ID NO: 1441484 - RNA, 19 nt, Homo sapiens
  misc_RNA (1)...(19): siRNA sense strand
ggaagguguuagccugaua

SEQ ID NO: 1441485 - RNA, 19 nt, Homo sapiens
  misc_RNA (1)...(19): siRNA sense strand
guucuacuuuccuucauua

SEQ ID NO: 1441486 - RNA, 19 nt, Homo sapiens
  misc_RNA (1)...(19): siRNA sense strand
ggaccaggaugcuaaagau

SEQ ID NO: 1441487 - RNA, 19 nt, Homo sapiens
  misc_RNA (1)...(19): siRNA sense strand
ccacgucagucuauauuga

SEQ ID NO: 1441488 - RNA, 19 nt, Homo sapiens
  misc_RNA (1)...(19): siRNA sense strand
ggaagccucuugaccauag

SEQ ID NO: 1441489 - RNA, 19 nt, Homo sapiens
  misc_RNA (1)...(19): siRNA sense strand
ggcauuccaugugauauua

SEQ ID NO: 1441490 - RNA, 19 nt, Homo sapiens
  misc_RNA (1)...(19): siRNA sense strand
gaacuucgggucaccauug

SEQ ID NO: 1441491 - RNA, 19 nt, Homo sapiens
  misc_RNA (1)...(19): siRNA sense strand
caccugaguuuacauauug

SEQ ID NO: 1441492 - RNA, 19 nt, Homo sapiens
  misc_RNA (1)...(19): siRNA sense strand
auacagggcugcacaguga

SEQ ID NO: 1441493 - RNA, 19 nt, Homo sapiens
  misc_RNA (1)...(19): siRNA sense strand
uaucuuaagucaccuuuga

SEQ ID NO: 1441494 - RNA, 19 nt, Homo sapiens
  misc_RNA (1)...(19): siRNA sense strand
gcagugaugccucggauaa

SEQ ID NO: 1441495 - RNA, 19 nt, Homo sapiens
  misc_RNA (1)...(19): siRNA sense strand
caucuauccucuccaagua

SEQ ID NO: 1441496 - RNA, 19 nt, Homo sapiens
  misc_RNA (1)...(19): siRNA sense strand
ggacuauucugcaguucuu

SEQ ID NO: 1441497 - RNA, 19 nt, Homo sapiens
  misc_RNA (1)...(19): siRNA sense strand
aaacaaccauugaggaguu

SEQ ID NO: 1441498 - RNA, 19 nt, Homo sapiens
  misc_RNA (1)...(19): siRNA sense strand
gaacguggaucacagucau

SEQ ID NO: 1441499 - RNA, 19 nt, Homo sapiens
  misc_RNA (1)...(19): siRNA sense strand
caacuuugcuccugguaau

SEQ ID NO: 1441500 - RNA, 19 nt, Homo sapiens
  misc_RNA (1)...(19): siRNA sense strand
gaauugacgucuuggaaag

SEQ ID NO: 1441501 - RNA, 19 nt, Homo sapiens
  misc_RNA (1)...(19): siRNA sense strand
uuccagagcuucacaguuu

SEQ ID NO: 1441502 - RNA, 19 nt, Homo sapiens
  misc_RNA (1)...(19): siRNA sense strand
gucaggacauggaaauaua

SEQ ID NO: 1441503 - RNA, 19 nt, Homo sapiens
  misc_RNA (1)...(19): siRNA sense strand
gaagguggacaguaaugua

SEQ ID NO: 1441504 - RNA, 19 nt, Homo sapiens
  misc_RNA (1)...(19): siRNA sense strand
gaacaccacgucagucuau

SEQ ID NO: 1441505 - RNA, 19 nt, Homo sapiens
  misc_RNA (1)...(19): siRNA sense strand
gguguuagccugauauuau

SEQ ID NO: 1441506 - RNA, 19 nt, Homo sapiens
  misc_RNA (1)...(19): siRNA sense strand
gaacacguguggaccuugu

SEQ ID NO: 1441507 - RNA, 19 nt, Homo sapiens
  misc_RNA (1)...(19): siRNA sense strand
gaaggaggaucuauacacu

SEQ ID NO: 1441508 - RNA, 19 nt, Homo sapiens
  misc_RNA (1)...(19): siRNA sense strand
gcuaucggcuagaucagua

SEQ ID NO: 1441509 - RNA, 19 nt, Homo sapiens
  misc_RNA (1)...(19): siRNA sense strand
gaggauugguguccagauu

SEQ ID NO: 1441510 - RNA, 19 nt, Homo sapiens
  misc_RNA (1)...(19): siRNA sense strand
gggaagcuguuauccuauu

SEQ ID NO: 1441511 - RNA, 19 nt, Homo sapiens
  misc_RNA (1)...(19): siRNA sense strand
ggaaaugagagaauuauag

SEQ ID NO: 1441512 - RNA, 19 nt, Homo sapiens
  misc_RNA (1)...(19): siRNA sense strand
ucaaagggcuguaugugau

SEQ ID NO: 1441513 - RNA, 19 nt, Homo sapiens
  misc_RNA (1)...(19): siRNA sense strand
caaccacugucaauuaugu

SEQ ID NO: 1441514 - RNA, 19 nt, Homo sapiens
  misc_RNA (1)...(19): siRNA sense strand
gaacugauggugucuaaca

SEQ ID NO: 1441515 - RNA, 19 nt, Homo sapiens
  misc_RNA (1)...(19): siRNA sense strand
gaacauugcacauucuugu

SEQ ID NO: 1441516 - RNA, 19 nt, Homo sapiens
  misc_RNA (1)...(19): siRNA sense strand
ggacaguaauguauucuac

SEQ ID NO: 1441517 - RNA, 19 nt, Homo sapiens
  misc_RNA (1)...(19): siRNA sense strand
gacacacucagaaauauua

SEQ ID NO: 1441518 - RNA, 19 nt, Homo sapiens
  misc_RNA (1)...(19): siRNA sense strand
ccagacacacucagaaaua

SEQ ID NO: 1441519 - RNA, 19 nt, Homo sapiens
  misc_RNA (1)...(19): siRNA sense strand
uaaagaauaccaccuguga

SEQ ID NO: 1441520 - RNA, 19 nt, Homo sapiens
  misc_RNA (1)...(19): siRNA sense strand
gaacugcuuuggucugaca

SEQ ID NO: 1441521 - RNA, 19 nt, Homo sapiens
  misc_RNA (1)...(19): siRNA sense strand
gacccgaaauauacaaauu

SEQ ID NO: 1441522 - RNA, 19 nt, Homo sapiens
  misc_RNA (1)...(19): siRNA sense strand
auacagaucuuccauucuu

SEQ ID NO: 1441523 - RNA, 19 nt, Homo sapiens
  misc_RNA (1)...(19): siRNA sense strand
caucguaugucuauugguu

SEQ ID NO: 1441524 - RNA, 19 nt, Homo sapiens
  misc_RNA (1)...(19): siRNA sense strand
gggaacugauggugucuaa

SEQ ID NO: 1441525 - RNA, 19 nt, Homo sapiens
  misc_RNA (1)...(19): siRNA sense strand
ggaaagugaugcaaauacu

SEQ ID NO: 1441526 - RNA, 19 nt, Homo sapiens
  misc_RNA (1)...(19): siRNA sense strand
gcacacgccauccuuguuu

SEQ ID NO: 1441527 - RNA, 19 nt, Homo sapiens
  misc_RNA (1)...(19): siRNA sense strand
guguucaccucaagaguua

SEQ ID NO: 1441528 - RNA, 19 nt, Homo sapiens
  misc_RNA (1)...(19): siRNA sense strand
uccagacacuucuacauua

SEQ ID NO: 1441529 - RNA, 19 nt, Homo sapiens
  misc_RNA (1)...(19): siRNA sense strand
ggagaaaucacaaauagca

SEQ ID NO: 1441530 - RNA, 19 nt, Homo sapiens
  misc_RNA (1)...(19): siRNA sense strand
gaaugugacugugaucaga

SEQ ID NO: 1441531 - RNA, 19 nt, Homo sapiens
  misc_RNA (1)...(19): siRNA sense strand
cuaauacagugauuucuga

SEQ ID NO: 1441532 - RNA, 19 nt, Homo sapiens
  misc_RNA (1)...(19): siRNA sense strand
gaaacuucuuccuuacuug

SEQ ID NO: 1441533 - RNA, 19 nt, Homo sapiens
  misc_RNA (1)...(19): siRNA sense strand
aguagucuguccugaauua

SEQ ID NO: 1441534 - RNA, 19 nt, Homo sapiens
  misc_RNA (1)...(19): siRNA sense strand
ggaguuggguguucuuuac

SEQ ID NO: 1441535 - RNA, 19 nt, Homo sapiens
  misc_RNA (1)...(19): siRNA sense strand
gaauaaugccgaugacuuc

SEQ ID NO: 1441536 - RNA, 19 nt, Homo sapiens
  misc_RNA (1)...(19): siRNA sense strand
ugaacaagauccugaagau

SEQ ID NO: 1441537 - RNA, 19 nt, Homo sapiens
  misc_RNA (1)...(19): siRNA sense strand
gaaacaacgugaucaucca

SEQ ID NO: 1441538 - RNA, 19 nt, Homo sapiens
  misc_RNA (1)...(19): siRNA sense strand
ucaacuuacugcacauuaa

SEQ ID NO: 1441539 - RNA, 19 nt, Homo sapiens
  misc_RNA (1)...(19): siRNA sense strand
uggcugaucucucugauga

SEQ ID NO: 1441540 - RNA, 19 nt, Homo sapiens
  misc_RNA (1)...(19): siRNA sense strand
caaggagaaaucacaaaua

SEQ ID NO: 1441541 - RNA, 19 nt, Homo sapiens
  misc_RNA (1)...(19): siRNA sense strand
gaauuuccgucucuaucaa

SEQ ID NO: 1441542 - RNA, 19 nt, Homo sapiens
  misc_RNA (1)...(19): siRNA sense strand
acauaugucucuuccuuaa

SEQ ID NO: 1441543 - RNA, 19 nt, Homo sapiens
  misc_RNA (1)...(19): siRNA sense strand
ugaugucccuguacaaauu

SEQ ID NO: 1441544 - RNA, 19 nt, Homo sapiens
  misc_RNA (1)...(19): siRNA sense strand
gauauucaccgauguuuaa

SEQ ID NO: 1441545 - RNA, 19 nt, Homo sapiens
  misc_RNA (1)...(19): siRNA sense strand
gaacaauaaucccaacucu

SEQ ID NO: 1441546 - RNA, 19 nt, Homo sapiens
  misc_RNA (1)...(19): siRNA sense strand
gaagagcaaucccaguaca

SEQ ID NO: 1441547 - RNA, 19 nt, Homo sapiens
  misc_RNA (1)...(19): siRNA sense strand
caacuucaauuacuucuac

SEQ ID NO: 1441548 - RNA, 19 nt, Homo sapiens
  misc_RNA (1)...(19): siRNA sense strand
acaauaaucccaacucuug

SEQ ID NO: 1441549 - RNA, 19 nt, Homo sapiens
  misc_RNA (1)...(19): siRNA sense strand
gaagacccuuugccaguuc

SEQ ID NO: 1441550 - RNA, 19 nt, Homo sapiens
  misc_RNA (1)...(19): siRNA sense strand
guaagggucuuccgcaucu

SEQ ID NO: 1441551 - RNA, 19 nt, Homo sapiens
  misc_RNA (1)...(19): siRNA sense strand
caacgugcccaucgacauu

SEQ ID NO: 1441552 - RNA, 19 nt, Homo sapiens
  misc_RNA (1)...(19): siRNA sense strand
gcucaucuucuuccucuuu

SEQ ID NO: 1441553 - RNA, 19 nt, Homo sapiens
  misc_RNA (1)...(19): siRNA sense strand
cgacgucgcaggacucauu

SEQ ID NO: 1441554 - RNA, 19 nt, Homo sapiens
  misc_RNA (1)...(19): siRNA sense strand
ugaguaagucggaguauau

SEQ ID NO: 1441555 - RNA, 19 nt, Homo sapiens
  misc_RNA (1)...(19): siRNA sense strand
ugaagacccuuugccaguu

SEQ ID NO: 1441556 - RNA, 19 nt, Homo sapiens
  misc_RNA (1)...(19): siRNA sense strand
gcgaggaggccauggagaa

SEQ ID NO: 1441557 - RNA, 19 nt, Homo sapiens
  misc_RNA (1)...(19): siRNA sense strand
gccagcaccucuccucuuc

SEQ ID NO: 1441558 - RNA, 19 nt, Homo sapiens
  misc_RNA (1)...(19): siRNA sense strand
ccaguucccgugauuguuu

SEQ ID NO: 1441559 - RNA, 19 nt, Homo sapiens
  misc_RNA (1)...(19): siRNA sense strand
uggagacgcugccggaguu

SEQ ID NO: 1441560 - RNA, 19 nt, Homo sapiens
  misc_RNA (1)...(19): siRNA sense strand
ccgaggagauccgcuucua

SEQ ID NO: 1441561 - RNA, 19 nt, Homo sapiens
  misc_RNA (1)...(19): siRNA sense strand
ucaugaaccugaucgacau

SEQ ID NO: 1441562 - RNA, 19 nt, Homo sapiens
  misc_RNA (1)...(19): siRNA sense strand
caacucuugugucaacauc

SEQ ID NO: 1441563 - RNA, 19 nt, Homo sapiens
  misc_RNA (1)...(19): siRNA sense strand
gagacgcugugcaucaucu

SEQ ID NO: 1441564 - RNA, 19 nt, Homo sapiens
  misc_RNA (1)...(19): siRNA sense strand
aaucccaacucuuguguca

SEQ ID NO: 1441565 - RNA, 19 nt, Homo sapiens
  misc_RNA (1)...(19): siRNA sense strand
cugaguaagucggaguaua

SEQ ID NO: 1441566 - RNA, 19 nt, Homo sapiens
  misc_RNA (1)...(19): siRNA sense strand
gcaggacucauucgaagca

SEQ ID NO: 1441567 - RNA, 19 nt, Homo sapiens
  misc_RNA (1)...(19): siRNA sense strand
cggaguauauggugaucga

SEQ ID NO: 1441568 - RNA, 19 nt, Homo sapiens
  misc_RNA (1)...(19): siRNA sense strand
gaaccugaucgacauugug

SEQ ID NO: 1441569 - RNA, 19 nt, Homo sapiens
  misc_RNA (1)...(19): siRNA sense strand
gaccaucgcauugccaguu

SEQ ID NO: 1441570 - RNA, 19 nt, Homo sapiens
  misc_RNA (1)...(19): siRNA sense strand
ugggauugcucaucuucuu

SEQ ID NO: 1441571 - RNA, 19 nt, Homo sapiens
  misc_RNA (1)...(19): siRNA sense strand
uggccaucauuccuuauuu

SEQ ID NO: 1441572 - RNA, 19 nt, Homo sapiens
  misc_RNA (1)...(19): siRNA sense strand
caucuucuuccucuuuauu

SEQ ID NO: 1441573 - RNA, 19 nt, Homo sapiens
  misc_RNA (1)...(19): siRNA sense strand
cgacauuguggccaucauu

SEQ ID NO: 1441574 - RNA, 19 nt, Homo sapiens
  misc_RNA (1)...(19): siRNA sense strand
aaagauauucaccgauguu

SEQ ID NO: 1441575 - RNA, 19 nt, Homo sapiens
  misc_RNA (1)...(19): siRNA sense strand
gugauuguuuccaacuuca

SEQ ID NO: 1441576 - RNA, 19 nt, Homo sapiens
  misc_RNA (1)...(19): siRNA sense strand
caucuccauugucaucuuc

SEQ ID NO: 1441577 - RNA, 19 nt, Homo sapiens
  misc_RNA (1)...(19): siRNA sense strand
ggaagagcaaucccaguac

SEQ ID NO: 1441578 - RNA, 19 nt, Homo sapiens
  misc_RNA (1)...(19): siRNA sense strand
ggccaucauuccuuauuuu

SEQ ID NO: 1441579 - RNA, 19 nt, Homo sapiens
  misc_RNA (1)...(19): siRNA sense strand
gcaacgaguacuucuucga

SEQ ID NO: 1441580 - RNA, 19 nt, Homo sapiens
  misc_RNA (1)...(19): siRNA sense strand
uguggcugcucuucgagua

SEQ ID NO: 1441581 - RNA, 19 nt, Homo sapiens
  misc_RNA (1)...(19): siRNA sense strand
aguauauggugaucgaaga

SEQ ID NO: 1441582 - RNA, 19 nt, Homo sapiens
  misc_RNA (1)...(19): siRNA sense strand
cgugauuguuuccaacuuc

SEQ ID NO: 1441583 - RNA, 19 nt, Homo sapiens
  misc_RNA (1)...(19): siRNA sense strand
cucaucuucuuccucuuua

SEQ ID NO: 1441584 - RNA, 19 nt, Homo sapiens
  misc_RNA (1)...(19): siRNA sense strand
aggaggccauggagaaguu

SEQ ID NO: 1441585 - RNA, 19 nt, Homo sapiens
  misc_RNA (1)...(19): siRNA sense strand
agauauucaccgauguuua

SEQ ID NO: 1441586 - RNA, 19 nt, Homo sapiens
  misc_RNA (1)...(19): siRNA sense strand
ugccaucgccggugucuug

SEQ ID NO: 1441587 - RNA, 19 nt, Homo sapiens
  misc_RNA (1)...(19): siRNA sense strand
ucgacgccauccucuacua

SEQ ID NO: 1441588 - RNA, 19 nt, Homo sapiens
  misc_RNA (1)...(19): siRNA sense strand
gagggucauccgccuggua

SEQ ID NO: 1441589 - RNA, 19 nt, Homo sapiens
  misc_RNA (1)...(19): siRNA sense strand
gggagcgcguggucaucaa

SEQ ID NO: 1441590 - RNA, 19 nt, Homo sapiens
  misc_RNA (1)...(19): siRNA sense strand
guaagucggaguauauggu

SEQ ID NO: 1441591 - RNA, 19 nt, Homo sapiens
  misc_RNA (1)...(19): siRNA sense strand
ccaugacaacaguggguua

SEQ ID NO: 1441592 - RNA, 19 nt, Homo sapiens
  misc_RNA (1)...(19): siRNA sense strand
guggagacgcugugcauca

SEQ ID NO: 1441593 - RNA, 19 nt, Homo sapiens
  misc_RNA (1)...(19): siRNA sense strand
ggcgauaugcacccaguga

SEQ ID NO: 1441594 - RNA, 19 nt, Homo sapiens
  misc_RNA (1)...(19): siRNA sense strand
ggaguuccgcgacgagaag

SEQ ID NO: 1441595 - RNA, 19 nt, Homo sapiens
  misc_RNA (1)...(19): siRNA sense strand
ccgcaacgaguacuucuuc

SEQ ID NO: 1441596 - RNA, 19 nt, Homo sapiens
  misc_RNA (1)...(19): siRNA sense strand
cagcaccucuccucuucag

SEQ ID NO: 1441597 - RNA, 19 nt, Homo sapiens
  misc_RNA (1)...(19): siRNA sense strand
cuccagcgcggucuacuuu

SEQ ID NO: 1441598 - RNA, 19 nt, Homo sapiens
  misc_RNA (1)...(19): siRNA sense strand
ugaaccugaucgacauugu

SEQ ID NO: 1441599 - RNA, 19 nt, Homo sapiens
  misc_RNA (1)...(19): siRNA sense strand
acgccauccucuacuacua

SEQ ID NO: 1441600 - RNA, 19 nt, Homo sapiens
  misc_RNA (1)...(19): siRNA sense strand
acucuugugucaacaucaa

SEQ ID NO: 1441601 - RNA, 19 nt, Homo sapiens
  misc_RNA (1)...(19): siRNA sense strand
gacauuguggccaucauuc

SEQ ID NO: 1441602 - RNA, 19 nt, Homo sapiens
  misc_RNA (1)...(19): siRNA sense strand
ggucauccucaucuccauu

SEQ ID NO: 1441603 - RNA, 19 nt, Homo sapiens
  misc_RNA (1)...(19): siRNA sense strand
ucccaacucuugugucaac

SEQ ID NO: 1441604 - RNA, 19 nt, Homo sapiens
  misc_RNA (1)...(19): siRNA sense strand
gcaccacgaacaauaaucc

SEQ ID NO: 1441605 - RNA, 19 nt, Homo sapiens
  misc_RNA (1)...(19): siRNA sense strand
gaguaagucggaguauaug

SEQ ID NO: 1441606 - RNA, 19 nt, Homo sapiens
  misc_RNA (1)...(19): siRNA sense strand
uuguggccaucauuccuua

SEQ ID NO: 1441607 - RNA, 19 nt, Homo sapiens
  misc_RNA (1)...(19): siRNA sense strand
cuucuccgaucccuucuuc

SEQ ID NO: 1441608 - RNA, 19 nt, Homo sapiens
  misc_RNA (1)...(19): siRNA sense strand
guacaugcacgugggaagu

SEQ ID NO: 1441609 - RNA, 19 nt, Homo sapiens
  misc_RNA (1)...(19): siRNA sense strand
ccucaucuccauugucauc

SEQ ID NO: 1441610 - RNA, 19 nt, Homo sapiens
  misc_RNA (1)...(19): siRNA sense strand
ccugcaccacgaacaauaa

SEQ ID NO: 1441611 - RNA, 19 nt, Homo sapiens
  misc_RNA (1)...(19): siRNA sense strand
ccaccugcaccacgaacaa

SEQ ID NO: 1441612 - RNA, 19 nt, Homo sapiens
  misc_RNA (1)...(19): siRNA sense strand
gauugugggaucucucugu

SEQ ID NO: 1441613 - RNA, 19 nt, Homo sapiens
  misc_RNA (1)...(19): siRNA sense strand
ccagcgcggucuacuuugc

SEQ ID NO: 1441614 - RNA, 19 nt, Homo sapiens
  misc_RNA (1)...(19): siRNA sense strand
gccauccucuacuacuauc

SEQ ID NO: 1441615 - RNA, 19 nt, Homo sapiens
  misc_RNA (1)...(19): siRNA sense strand
caauaaucccaacucuugu

SEQ ID NO: 1441616 - RNA, 19 nt, Homo sapiens
  misc_RNA (1)...(19): siRNA sense strand
ugucuugaccaucgcauug

SEQ ID NO: 1441617 - RNA, 19 nt, Homo sapiens
  misc_RNA (1)...(19): siRNA sense strand
gaacuaaucuucucauacu

SEQ ID NO: 1441618 - RNA, 19 nt, Homo sapiens
  misc_RNA (1)...(19): siRNA sense strand
gcagaaagcaguugugaaa

SEQ ID NO: 1441619 - RNA, 19 nt, Homo sapiens
  misc_RNA (1)...(19): siRNA sense strand
ggagagguauccacucaaa

SEQ ID NO: 1441620 - RNA, 19 nt, Homo sapiens
  misc_RNA (1)...(19): siRNA sense strand
ggagauacauugccugugu

SEQ ID NO: 1441621 - RNA, 19 nt, Homo sapiens
  misc_RNA (1)...(19): siRNA sense strand
ggaaaccucucccgauuca

SEQ ID NO: 1441622 - RNA, 19 nt, Homo sapiens
  misc_RNA (1)...(19): siRNA sense strand
gaacugcaauuuccagaag

SEQ ID NO: 1441623 - RNA, 19 nt, Homo sapiens
  misc_RNA (1)...(19): siRNA sense strand
gaagaguucuacagcuuug

SEQ ID NO: 1441624 - RNA, 19 nt, Homo sapiens
  misc_RNA (1)...(19): siRNA sense strand
caucagauccucauauuga

SEQ ID NO: 1441625 - RNA, 19 nt, Homo sapiens
  misc_RNA (1)...(19): siRNA sense strand
gagagccgcuucgauauga

SEQ ID NO: 1441626 - RNA, 19 nt, Homo sapiens
  misc_RNA (1)...(19): siRNA sense strand
gaagugguacucaagcuuu

SEQ ID NO: 1441627 - RNA, 19 nt, Homo sapiens
  misc_RNA (1)...(19): siRNA sense strand
gacaggagcuuggaucuag

SEQ ID NO: 1441628 - RNA, 19 nt, Homo sapiens
  misc_RNA (1)...(19): siRNA sense strand
guacaggacugagcgaugu

SEQ ID NO: 1441629 - RNA, 19 nt, Homo sapiens
  misc_RNA (1)...(19): siRNA sense strand
gaggcaguaugguaauaaa

SEQ ID NO: 1441630 - RNA, 19 nt, Homo sapiens
  misc_RNA (1)...(19): siRNA sense strand
caacaacagggaagagauu

SEQ ID NO: 1441631 - RNA, 19 nt, Homo sapiens
  misc_RNA (1)...(19): siRNA sense strand
cauggcagcugcauagaau

SEQ ID NO: 1441632 - RNA, 19 nt, Homo sapiens
  misc_RNA (1)...(19): siRNA sense strand
gaagguggguggcguuggu

SEQ ID NO: 1441633 - RNA, 19 nt, Homo sapiens
  misc_RNA (1)...(19): siRNA sense strand
gaggaagaguccaacaaca

SEQ ID NO: 1441634 - RNA, 19 nt, Homo sapiens
  misc_RNA (1)...(19): siRNA sense strand
gcagcguggucaacauuug

SEQ ID NO: 1441635 - RNA, 19 nt, Homo sapiens
  misc_RNA (1)...(19): siRNA sense strand
ggaagaguucuacagcuuu

SEQ ID NO: 1441636 - RNA, 19 nt, Homo sapiens
  misc_RNA (1)...(19): siRNA sense strand
gcaggcgguuggagacuga

SEQ ID NO: 1441637 - RNA, 19 nt, Homo sapiens
  misc_RNA (1)...(19): siRNA sense strand
ccaaaugcuucagggagua

SEQ ID NO: 1441638 - RNA, 19 nt, Homo sapiens
  misc_RNA (1)...(19): siRNA sense strand
ggguacaucucuuauccaa

SEQ ID NO: 1441639 - RNA, 19 nt, Homo sapiens
  misc_RNA (1)...(19): siRNA sense strand
gcagauaacaacgaacuug

SEQ ID NO: 1441640 - RNA, 19 nt, Homo sapiens
  misc_RNA (1)...(19): siRNA sense strand
gaagagggguucauuugau

SEQ ID NO: 1441641 - RNA, 19 nt, Homo sapiens
  misc_RNA (1)...(19): siRNA sense strand
gcgagucuaugugugagua

SEQ ID NO: 1441642 - RNA, 19 nt, Homo sapiens
  misc_RNA (1)...(19): siRNA sense strand
gauaacaacgaacuugaug

SEQ ID NO: 1441643 - RNA, 19 nt, Homo sapiens
  misc_RNA (1)...(19): siRNA sense strand
ucacaaguguuaaacugau

SEQ ID NO: 1441644 - RNA, 19 nt, Homo sapiens
  misc_RNA (1)...(19): siRNA sense strand
uaggauggaucagaauauu

SEQ ID NO: 1441645 - RNA, 19 nt, Homo sapiens
  misc_RNA (1)...(19): siRNA sense strand
aaacugauguccauuuuga

SEQ ID NO: 1441646 - RNA, 19 nt, Homo sapiens
  misc_RNA (1)...(19): siRNA sense strand
gguaggauggaucagaaua

SEQ ID NO: 1441647 - RNA, 19 nt, Homo sapiens
  misc_RNA (1)...(19): siRNA sense strand
uggaagaguucuacagcuu

SEQ ID NO: 1441648 - RNA, 19 nt, Homo sapiens
  misc_RNA (1)...(19): siRNA sense strand
ggucaacauuugcuccaau

SEQ ID NO: 1441649 - RNA, 19 nt, Homo sapiens
  misc_RNA (1)...(19): siRNA sense strand
ugaugcaagugauagguuu

SEQ ID NO: 1441650 - RNA, 19 nt, Homo sapiens
  misc_RNA (1)...(19): siRNA sense strand
acugagagccgcuucgaua

SEQ ID NO: 1441651 - RNA, 19 nt, Homo sapiens
  misc_RNA (1)...(19): siRNA sense strand
guuaaacugauguccauuu

SEQ ID NO: 1441652 - RNA, 19 nt, Homo sapiens
  misc_RNA (1)...(19): siRNA sense strand
ggaggcaguaugguaauaa

SEQ ID NO: 1441653 - RNA, 19 nt, Homo sapiens
  misc_RNA (1)...(19): siRNA sense strand
gugaagauccgaggcauga

SEQ ID NO: 1441654 - RNA, 19 nt, Homo sapiens
  misc_RNA (1)...(19): siRNA sense strand
gaagaggcagaaagcaguu

SEQ ID NO: 1441655 - RNA, 19 nt, Homo sapiens
  misc_RNA (1)...(19): siRNA sense strand
ucuuguggcugaugcaauu

SEQ ID NO: 1441656 - RNA, 19 nt, Homo sapiens
  misc_RNA (1)...(19): siRNA sense strand
gaaagcaguugugaaaccu

SEQ ID NO: 1441657 - RNA, 19 nt, Homo sapiens
  misc_RNA (1)...(19): siRNA sense strand
ugcaucagauccucauauu

SEQ ID NO: 1441658 - RNA, 19 nt, Homo sapiens
  misc_RNA (1)...(19): siRNA sense strand
gaggcuacuuggugugguu

SEQ ID NO: 1441659 - RNA, 19 nt, Homo sapiens
  misc_RNA (1)...(19): siRNA sense strand
gcaauuagaagggacagau

SEQ ID NO: 1441660 - RNA, 19 nt, Homo sapiens
  misc_RNA (1)...(19): siRNA sense strand
agauauucguccagacuuu

SEQ ID NO: 1441661 - RNA, 19 nt, Homo sapiens
  misc_RNA (1)...(19): siRNA sense strand
ggcaugaagugguacucaa

SEQ ID NO: 1441662 - RNA, 19 nt, Homo sapiens
  misc_RNA (1)...(19): siRNA sense strand
aucagaauauugccaagua

SEQ ID NO: 1441663 - RNA, 19 nt, Homo sapiens
  misc_RNA (1)...(19): siRNA sense strand
agggacagauuugaacuaa

SEQ ID NO: 1441664 - RNA, 19 nt, Homo sapiens
  misc_RNA (1)...(19): siRNA sense strand
gaaaccaaucguuaugcuu

SEQ ID NO: 1441665 - RNA, 19 nt, Homo sapiens
  misc_RNA (1)...(19): siRNA sense strand
gaagcaugcacccuuggaa

SEQ ID NO: 1441666 - RNA, 19 nt, Homo sapiens
  misc_RNA (1)...(19): siRNA sense strand
guguguaucuggagagcaa

SEQ ID NO: 1441667 - RNA, 19 nt, Homo sapiens
  misc_RNA (1)...(19): siRNA sense strand
ugugaaaccucagcgcauu

SEQ ID NO: 1441668 - RNA, 19 nt, Homo sapiens
  misc_RNA (1)...(19): siRNA sense strand
gaaggguguccaugccaaa

SEQ ID NO: 1441669 - RNA, 19 nt, Homo sapiens
  misc_RNA (1)...(19): siRNA sense strand
gcauggcagcugcauagaa

SEQ ID NO: 1441670 - RNA, 19 nt, Homo sapiens
  misc_RNA (1)...(19): siRNA sense strand
gaagauccgaggcaugaag

SEQ ID NO: 1441671 - RNA, 19 nt, Homo sapiens
  misc_RNA (1)...(19): siRNA sense strand
uaacaacgaacuugaugca

SEQ ID NO: 1441672 - RNA, 19 nt, Homo sapiens
  misc_RNA (1)...(19): siRNA sense strand
caaaggugaagucugcaaa

SEQ ID NO: 1441673 - RNA, 19 nt, Homo sapiens
  misc_RNA (1)...(19): siRNA sense strand
aagugguacucaagcuuua

SEQ ID NO: 1441674 - RNA, 19 nt, Homo sapiens
  misc_RNA (1)...(19): siRNA sense strand
ccaaguacaaggugaagau

SEQ ID NO: 1441675 - RNA, 19 nt, Homo sapiens
  misc_RNA (1)...(19): siRNA sense strand
gaagcuguaucaggagaag

SEQ ID NO: 1441676 - RNA, 19 nt, Homo sapiens
  misc_RNA (1)...(19): siRNA sense strand
cuaggaggcaguaugguaa

SEQ ID NO: 1441677 - RNA, 19 nt, Homo sapiens
  misc_RNA (1)...(19): siRNA sense strand
gaucuaggaggcaguaugg

SEQ ID NO: 1441678 - RNA, 19 nt, Homo sapiens
  misc_RNA (1)...(19): siRNA sense strand
ggaagaguccaacaacaac

SEQ ID NO: 1441679 - RNA, 19 nt, Homo sapiens
  misc_RNA (1)...(19): siRNA sense strand
gcaaugcugacacaacauc

SEQ ID NO: 1441680 - RNA, 19 nt, Homo sapiens
  misc_RNA (1)...(19): siRNA sense strand
guaggauggaucagaauau

SEQ ID NO: 1441681 - RNA, 19 nt, Homo sapiens
  misc_RNA (1)...(19): siRNA sense strand
gggaagagauuuucauugc

SEQ ID NO: 1441682 - RNA, 19 nt, Homo sapiens
  misc_RNA (1)...(19): siRNA sense strand
cgauucacaucaucaucuu

SEQ ID NO: 1441683 - RNA, 19 nt, Homo sapiens
  misc_RNA (1)...(19): siRNA sense strand
ugggagagguauccacuca

SEQ ID NO: 1441684 - RNA, 19 nt, Homo sapiens
  misc_RNA (1)...(19): siRNA sense strand
ggaggaagaguccaacaac

SEQ ID NO: 1441685 - RNA, 19 nt, Homo sapiens
  misc_RNA (1)...(19): siRNA sense strand
gaagaguccaacaacaaca

SEQ ID NO: 1441686 - RNA, 19 nt, Homo sapiens
  misc_RNA (1)...(19): siRNA sense strand
cagauaacaacgaacuuga

SEQ ID NO: 1441687 - RNA, 19 nt, Homo sapiens
  misc_RNA (1)...(19): siRNA sense strand
guguuaaacugauguccau

SEQ ID NO: 1441688 - RNA, 19 nt, Homo sapiens
  misc_RNA (1)...(19): siRNA sense strand
uagaagggacagauuugaa

SEQ ID NO: 1441689 - RNA, 19 nt, Homo sapiens
  misc_RNA (1)...(19): siRNA sense strand
uuacaaagucgaugagagu

SEQ ID NO: 1441690 - RNA, 19 nt, Homo sapiens
  misc_RNA (1)...(19): siRNA sense strand
gcuacuuggugugguuuga

SEQ ID NO: 1441691 - RNA, 19 nt, Homo sapiens
  misc_RNA (1)...(19): siRNA sense strand
cggaugaacugcaauuucc

SEQ ID NO: 1441692 - RNA, 19 nt, Homo sapiens
  misc_RNA (1)...(19): siRNA sense strand
gugauagguuugccaaggu

SEQ ID NO: 1441693 - RNA, 19 nt, Homo sapiens
  misc_RNA (1)...(19): siRNA sense strand
gaugcugcccucaacaaug

SEQ ID NO: 1441694 - RNA, 19 nt, Homo sapiens
  misc_RNA (1)...(19): siRNA sense strand
uuuauuggcuaugucauug

SEQ ID NO: 1441695 - RNA, 19 nt, Homo sapiens
  misc_RNA (1)...(19): siRNA sense strand
ggauggaucagaauauugc

SEQ ID NO: 1441696 - RNA, 19 nt, Homo sapiens
  misc_RNA (1)...(19): siRNA sense strand
ggugaaagccacaggaacu

SEQ ID NO: 1441697 - RNA, 19 nt, Homo sapiens
  misc_RNA (1)...(19): siRNA sense strand
ucuaggaggcaguauggua

SEQ ID NO: 1441698 - RNA, 19 nt, Homo sapiens
  misc_RNA (1)...(19): siRNA sense strand
gauauucguccagacuuug

SEQ ID NO: 1441699 - RNA, 19 nt, Homo sapiens
  misc_RNA (1)...(19): siRNA sense strand
caauuagaagggacagauu

SEQ ID NO: 1441700 - RNA, 19 nt, Homo sapiens
  misc_RNA (1)...(19): siRNA sense strand
guuaaugaaaccaaucguu

SEQ ID NO: 1441701 - RNA, 19 nt, Homo sapiens
  misc_RNA (1)...(19): siRNA sense strand
gcaucagauccucauauug

SEQ ID NO: 1441702 - RNA, 19 nt, Homo sapiens
  misc_RNA (1)...(19): siRNA sense strand
guccagacuuuggcaguug

SEQ ID NO: 1441703 - RNA, 19 nt, Homo sapiens
  misc_RNA (1)...(19): siRNA sense strand
ucuuacggcucaggaauug

SEQ ID NO: 1441704 - RNA, 19 nt, Homo sapiens
  misc_RNA (1)...(19): siRNA sense strand
gauuauccaucaggacaag

SEQ ID NO: 1441705 - RNA, 19 nt, Homo sapiens
  misc_RNA (1)...(19): siRNA sense strand
gaauauugccaaguacaag

SEQ ID NO: 1441706 - RNA, 19 nt, Homo sapiens
  misc_RNA (1)...(19): siRNA sense strand
uuucacaaguguuaaacug

SEQ ID NO: 1441707 - RNA, 19 nt, Homo sapiens
  misc_RNA (1)...(19): siRNA sense strand
gagauauucguccagacuu

SEQ ID NO: 1441708 - RNA, 19 nt, Homo sapiens
  misc_RNA (1)...(19): siRNA sense strand
gagccgcuucgauaugauu

SEQ ID NO: 1441709 - RNA, 19 nt, Homo sapiens
  misc_RNA (1)...(19): siRNA sense strand
caagcuuuauuggcuaugu

SEQ ID NO: 1441710 - RNA, 19 nt, Homo sapiens
  misc_RNA (1)...(19): siRNA sense strand
uccgaggcaugaaguggua

SEQ ID NO: 1441711 - RNA, 19 nt, Homo sapiens
  misc_RNA (1)...(19): siRNA sense strand
gauagcagcguggucaaca

SEQ ID NO: 1441712 - RNA, 19 nt, Homo sapiens
  misc_RNA (1)...(19): siRNA sense strand
cuacagcuuuggcgagucu

SEQ ID NO: 1441713 - RNA, 19 nt, Homo sapiens
  misc_RNA (1)...(19): siRNA sense strand
gggacagauuugaacuaau

SEQ ID NO: 1441714 - RNA, 19 nt, Homo sapiens
  misc_RNA (1)...(19): siRNA sense strand
uuaaguggguacaucucuu

SEQ ID NO: 1441715 - RNA, 19 nt, Homo sapiens
  misc_RNA (1)...(19): siRNA sense strand
cacaaguguuaaacugaug

SEQ ID NO: 1441716 - RNA, 19 nt, Homo sapiens
  misc_RNA (1)...(19): siRNA sense strand
agaaagcaguugugaaacc

SEQ ID NO: 1441717 - RNA, 19 nt, Homo sapiens
  misc_RNA (1)...(19): siRNA sense strand
ccacaaaggugcugaggaa

SEQ ID NO: 1441718 - RNA, 19 nt, Homo sapiens
  misc_RNA (1)...(19): siRNA sense strand
gacauaagguggccaaguu

SEQ ID NO: 1441719 - RNA, 19 nt, Homo sapiens
  misc_RNA (1)...(19): siRNA sense strand
ggaagcagguggcccagaa

SEQ ID NO: 1441720 - RNA, 19 nt, Homo sapiens
  misc_RNA (1)...(19): siRNA sense strand
gcaguguucucccaggaua

SEQ ID NO: 1441721 - RNA, 19 nt, Homo sapiens
  misc_RNA (1)...(19): siRNA sense strand
caaguccacuggcucgaua

SEQ ID NO: 1441722 - RNA, 19 nt, Homo sapiens
  misc_RNA (1)...(19): siRNA sense strand
gaaagaacuuccacuucgu

SEQ ID NO: 1441723 - RNA, 19 nt, Homo sapiens
  misc_RNA (1)...(19): siRNA sense strand
cagcggaacucaucgacuu

SEQ ID NO: 1441724 - RNA, 19 nt, Homo sapiens
  misc_RNA (1)...(19): siRNA sense strand
gcaacgugguccuauggaa

SEQ ID NO: 1441725 - RNA, 19 nt, Homo sapiens
  misc_RNA (1)...(19): siRNA sense strand
gcggccaucucgcccuuua

SEQ ID NO: 1441726 - RNA, 19 nt, Homo sapiens
  misc_RNA (1)...(19): siRNA sense strand
ggaaagagugggaccugaa

SEQ ID NO: 1441727 - RNA, 19 nt, Homo sapiens
  misc_RNA (1)...(19): siRNA sense strand
gagcaccucuguggcauca

SEQ ID NO: 1441728 - RNA, 19 nt, Homo sapiens
  misc_RNA (1)...(19): siRNA sense strand
ggccaacgagcccgucuua

SEQ ID NO: 1441729 - RNA, 19 nt, Homo sapiens
  misc_RNA (1)...(19): siRNA sense strand
cuucuucucugcagugauu

SEQ ID NO: 1441730 - RNA, 19 nt, Homo sapiens
  misc_RNA (1)...(19): siRNA sense strand
ucaaacaccuguggaagca

SEQ ID NO: 1441731 - RNA, 19 nt, Homo sapiens
  misc_RNA (1)...(19): siRNA sense strand
caaaggugcugaggaaugc

SEQ ID NO: 1441732 - RNA, 19 nt, Homo sapiens
  misc_RNA (1)...(19): siRNA sense strand
ggagcacagucggaucaaa

SEQ ID NO: 1441733 - RNA, 19 nt, Homo sapiens
  misc_RNA (1)...(19): siRNA sense strand
ggccuguacugucugugua

SEQ ID NO: 1441734 - RNA, 19 nt, Homo sapiens
  misc_RNA (1)...(19): siRNA sense strand
gcacaccuccucccugaag

SEQ ID NO: 1441735 - RNA, 19 nt, Homo sapiens
  misc_RNA (1)...(19): siRNA sense strand
gccggcaacuucuacauca

SEQ ID NO: 1441736 - RNA, 19 nt, Homo sapiens
  misc_RNA (1)...(19): siRNA sense strand
ccaaguccuuugcccguau

SEQ ID NO: 1441737 - RNA, 19 nt, Homo sapiens
  misc_RNA (1)...(19): siRNA sense strand
gggcccagaucuuccugaa

SEQ ID NO: 1441738 - RNA, 19 nt, Homo sapiens
  misc_RNA (1)...(19): siRNA sense strand
gaaagagugggaccugaag

SEQ ID NO: 1441739 - RNA, 19 nt, Homo sapiens
  misc_RNA (1)...(19): siRNA sense strand
gcagugugcccaccuucaa

SEQ ID NO: 1441740 - RNA, 19 nt, Homo sapiens
  misc_RNA (1)...(19): siRNA sense strand
ugagcgagaugcccugcaa

SEQ ID NO: 1441741 - RNA, 19 nt, Homo sapiens
  misc_RNA (1)...(19): siRNA sense strand
ggacgugcaguaccaagug

SEQ ID NO: 1441742 - RNA, 19 nt, Homo sapiens
  misc_RNA (1)...(19): siRNA sense strand
cgaguacgguggccagaag

SEQ ID NO: 1441743 - RNA, 19 nt, Homo sapiens
  misc_RNA (1)...(19): siRNA sense strand
gcaccucuguggcaucaac

SEQ ID NO: 1441744 - RNA, 19 nt, Homo sapiens
  misc_RNA (1)...(19): siRNA sense strand
gaggagcacagucggauca

SEQ ID NO: 1441745 - RNA, 19 nt, Homo sapiens
  misc_RNA (1)...(19): siRNA sense strand
gagcacagucggaucaaag

SEQ ID NO: 1441746 - RNA, 19 nt, Homo sapiens
  misc_RNA (1)...(19): siRNA sense strand
gcugagauccucgccaaga

SEQ ID NO: 1441747 - RNA, 19 nt, Homo sapiens
  misc_RNA (1)...(19): siRNA sense strand
ggacauaagguggccaagu

SEQ ID NO: 1441748 - RNA, 19 nt, Homo sapiens
  misc_RNA (1)...(19): siRNA sense strand
gaaugcugccggcaacuuc

SEQ ID NO: 1441749 - RNA, 19 nt, Homo sapiens
  misc_RNA (1)...(19): siRNA sense strand
ggaacucaucgacuucuuc

SEQ ID NO: 1441750 - RNA, 19 nt, Homo sapiens
  misc_RNA (1)...(19): siRNA sense strand
ugacagcaccaccagcuau

SEQ ID NO: 1441751 - RNA, 19 nt, Homo sapiens
  misc_RNA (1)...(19): siRNA sense strand
uaccaagugucgccuuuua

SEQ ID NO: 1441752 - RNA, 19 nt, Homo sapiens
  misc_RNA (1)...(19): siRNA sense strand
ccaacaucauccaguuugu

SEQ ID NO: 1441753 - RNA, 19 nt, Homo sapiens
  misc_RNA (1)...(19): siRNA sense strand
ccgguucaaugccaaguau

SEQ ID NO: 1441754 - RNA, 19 nt, Homo sapiens
  misc_RNA (1)...(19): siRNA sense strand
agugggaccugaagccuau

SEQ ID NO: 1441755 - RNA, 19 nt, Homo sapiens
  misc_RNA (1)...(19): siRNA sense strand
ucaucaaggagacacauaa

SEQ ID NO: 1441756 - RNA, 19 nt, Homo sapiens
  misc_RNA (1)...(19): siRNA sense strand
acaaaggugcugaggaaug

SEQ ID NO: 1441757 - RNA, 19 nt, Homo sapiens
  misc_RNA (1)...(19): siRNA sense strand
ggaaugcugccggcaacuu

SEQ ID NO: 1441758 - RNA, 19 nt, Homo sapiens
  misc_RNA (1)...(19): siRNA sense strand
gaucuucgggccuguacug

SEQ ID NO: 1441759 - RNA, 19 nt, Homo sapiens
  misc_RNA (1)...(19): siRNA sense strand
ccucaggagcccaucauga

SEQ ID NO: 1441760 - RNA, 19 nt, Homo sapiens
  misc_RNA (1)...(19): siRNA sense strand
cgccgcaggucaucaagga

SEQ ID NO: 1441761 - RNA, 19 nt, Homo sapiens
  misc_RNA (1)...(19): siRNA sense strand
ccaucucgcccuuuaacuu

SEQ ID NO: 1441762 - RNA, 19 nt, Homo sapiens
  misc_RNA (1)...(19): siRNA sense strand
cccuuuaacuucacugcaa

SEQ ID NO: 1441763 - RNA, 19 nt, Homo sapiens
  misc_RNA (1)...(19): siRNA sense strand
caucucgcccuuuaacuuc

SEQ ID NO: 1441764 - RNA, 19 nt, Homo sapiens
  misc_RNA (1)...(19): siRNA sense strand
gacgugcaguaccaagugu

SEQ ID NO: 1441765 - RNA, 19 nt, Homo sapiens
  misc_RNA (1)...(19): siRNA sense strand
ggagaucuucgggccugua

SEQ ID NO: 1441766 - RNA, 19 nt, Homo sapiens
  misc_RNA (1)...(19): siRNA sense strand
gcacagucggaucaaagug

SEQ ID NO: 1441767 - RNA, 19 nt, Homo sapiens
  misc_RNA (1)...(19): siRNA sense strand
caacaucauccaguuugug

SEQ ID NO: 1441768 - RNA, 19 nt, Homo sapiens
  misc_RNA (1)...(19): siRNA sense strand
cucaggagcccaucaugaa

SEQ ID NO: 1441769 - RNA, 19 nt, Homo sapiens
  misc_RNA (1)...(19): siRNA sense strand
gagccucuggaaccaauga

SEQ ID NO: 1441770 - RNA, 19 nt, Homo sapiens
  misc_RNA (1)...(19): siRNA sense strand
ccaacgagcccgucuuagc

SEQ ID NO: 1441771 - RNA, 19 nt, Homo sapiens
  misc_RNA (1)...(19): siRNA sense strand
gagcccgucuuagccuuca

SEQ ID NO: 1441772 - RNA, 19 nt, Homo sapiens
  misc_RNA (1)...(19): siRNA sense strand
guggccaaguucuguuaug

SEQ ID NO: 1441773 - RNA, 19 nt, Homo sapiens
  misc_RNA (1)...(19): siRNA sense strand
ggagcuacgcguacaugca

SEQ ID NO: 1441774 - RNA, 19 nt, Homo sapiens
  misc_RNA (1)...(19): siRNA sense strand
ccgagccucuggaaccaau

SEQ ID NO: 1441775 - RNA, 19 nt, Homo sapiens
  misc_RNA (1)...(19): siRNA sense strand
uaagguggccaaguucugu

SEQ ID NO: 1441776 - RNA, 19 nt, Homo sapiens
  misc_RNA (1)...(19): siRNA sense strand
ccugaaggcggcagacaug

SEQ ID NO: 1441777 - RNA, 19 nt, Homo sapiens
  misc_RNA (1)...(19): siRNA sense strand
ugacuccgugggcuacuuu

SEQ ID NO: 1441778 - RNA, 19 nt, Homo sapiens
  misc_RNA (1)...(19): siRNA sense strand
aguaccaagugucgccuuu

SEQ ID NO: 1441779 - RNA, 19 nt, Homo sapiens
  misc_RNA (1)...(19): siRNA sense strand
gggcaacgugguccuaugg

SEQ ID NO: 1441780 - RNA, 19 nt, Homo sapiens
  misc_RNA (1)...(19): siRNA sense strand
gacagcaccaccagcuaug

SEQ ID NO: 1441781 - RNA, 19 nt, Homo sapiens
  misc_RNA (1)...(19): siRNA sense strand
gagcgagaugcccugcaaa

SEQ ID NO: 1441782 - RNA, 19 nt, Homo sapiens
  misc_RNA (1)...(19): siRNA sense strand
cuucgggccuguacugucu

SEQ ID NO: 1441783 - RNA, 19 nt, Homo sapiens
  misc_RNA (1)...(19): siRNA sense strand
caaguccuuugcccguauc

SEQ ID NO: 1441784 - RNA, 19 nt, Homo sapiens
  misc_RNA (1)...(19): siRNA sense strand
ccgcucagccuucgaguac

SEQ ID NO: 1441785 - RNA, 19 nt, Homo sapiens
  misc_RNA (1)...(19): siRNA sense strand
ccacaaaggugcugaggaa

SEQ ID NO: 1441786 - RNA, 19 nt, Homo sapiens
  misc_RNA (1)...(19): siRNA sense strand
gacauaagguggccaaguu

SEQ ID NO: 1441787 - RNA, 19 nt, Homo sapiens
  misc_RNA (1)...(19): siRNA sense strand
ggaagcagguggcccagaa

SEQ ID NO: 1441788 - RNA, 19 nt, Homo sapiens
  misc_RNA (1)...(19): siRNA sense strand
gcaguguucucccaggaua

SEQ ID NO: 1441789 - RNA, 19 nt, Homo sapiens
  misc_RNA (1)...(19): siRNA sense strand
caaguccacuggcucgaua

SEQ ID NO: 1441790 - RNA, 19 nt, Homo sapiens
  misc_RNA (1)...(19): siRNA sense strand
gaaagaacuuccacuucgu

SEQ ID NO: 1441791 - RNA, 19 nt, Homo sapiens
  misc_RNA (1)...(19): siRNA sense strand
cagcggaacucaucgacuu

SEQ ID NO: 1441792 - RNA, 19 nt, Homo sapiens
  misc_RNA (1)...(19): siRNA sense strand
gcaacgugguccuauggaa

SEQ ID NO: 1441793 - RNA, 19 nt, Homo sapiens
  misc_RNA (1)...(19): siRNA sense strand
gcggccaucucgcccuuua

SEQ ID NO: 1441794 - RNA, 19 nt, Homo sapiens
  misc_RNA (1)...(19): siRNA sense strand
ggaaagagugggaccugaa

SEQ ID NO: 1441795 - RNA, 19 nt, Homo sapiens
  misc_RNA (1)...(19): siRNA sense strand
gagcaccucuguggcauca

SEQ ID NO: 1441796 - RNA, 19 nt, Homo sapiens
  misc_RNA (1)...(19): siRNA sense strand
ggccaacgagcccgucuua

SEQ ID NO: 1441797 - RNA, 19 nt, Homo sapiens
  misc_RNA (1)...(19): siRNA sense strand
cuucuucucugcagugauu

SEQ ID NO: 1441798 - RNA, 19 nt, Homo sapiens
  misc_RNA (1)...(19): siRNA sense strand
ucaaacaccuguggaagca

SEQ ID NO: 1441799 - RNA, 19 nt, Homo sapiens
  misc_RNA (1)...(19): siRNA sense strand
caaaggugcugaggaaugc

SEQ ID NO: 1441800 - RNA, 19 nt, Homo sapiens
  misc_RNA (1)...(19): siRNA sense strand
ggagcacagucggaucaaa

SEQ ID NO: 1441801 - RNA, 19 nt, Homo sapiens
  misc_RNA (1)...(19): siRNA sense strand
ggccuguacugucugugua

SEQ ID NO: 1441802 - RNA, 19 nt, Homo sapiens
  misc_RNA (1)...(19): siRNA sense strand
gcacaccuccucccugaag

SEQ ID NO: 1441803 - RNA, 19 nt, Homo sapiens
  misc_RNA (1)...(19): siRNA sense strand
gccggcaacuucuacauca

SEQ ID NO: 1441804 - RNA, 19 nt, Homo sapiens
  misc_RNA (1)...(19): siRNA sense strand
ccaaguccuuugcccguau

SEQ ID NO: 1441805 - RNA, 19 nt, Homo sapiens
  misc_RNA (1)...(19): siRNA sense strand
gggcccagaucuuccugaa

SEQ ID NO: 1441806 - RNA, 19 nt, Homo sapiens
  misc_RNA (1)...(19): siRNA sense strand
gaaagagugggaccugaag

SEQ ID NO: 1441807 - RNA, 19 nt, Homo sapiens
  misc_RNA (1)...(19): siRNA sense strand
gcagugugcccaccuucaa

SEQ ID NO: 1441808 - RNA, 19 nt, Homo sapiens
  misc_RNA (1)...(19): siRNA sense strand
ugagcgagaugcccugcaa

SEQ ID NO: 1441809 - RNA, 19 nt, Homo sapiens
  misc_RNA (1)...(19): siRNA sense strand
ggacgugcaguaccaagug

SEQ ID NO: 1441810 - RNA, 19 nt, Homo sapiens
  misc_RNA (1)...(19): siRNA sense strand
cgaguacgguggccagaag

SEQ ID NO: 1441811 - RNA, 19 nt, Homo sapiens
  misc_RNA (1)...(19): siRNA sense strand
gcaccucuguggcaucaac

SEQ ID NO: 1441812 - RNA, 19 nt, Homo sapiens
  misc_RNA (1)...(19): siRNA sense strand
gaggagcacagucggauca

SEQ ID NO: 1441813 - RNA, 19 nt, Homo sapiens
  misc_RNA (1)...(19): siRNA sense strand
gagcacagucggaucaaag

SEQ ID NO: 1441814 - RNA, 19 nt, Homo sapiens
  misc_RNA (1)...(19): siRNA sense strand
gcugagauccucgccaaga

SEQ ID NO: 1441815 - RNA, 19 nt, Homo sapiens
  misc_RNA (1)...(19): siRNA sense strand
ggacauaagguggccaagu

SEQ ID NO: 1441816 - RNA, 19 nt, Homo sapiens
  misc_RNA (1)...(19): siRNA sense strand
gaaugcugccggcaacuuc

SEQ ID NO: 1441817 - RNA, 19 nt, Homo sapiens
  misc_RNA (1)...(19): siRNA sense strand
ggaacucaucgacuucuuc

SEQ ID NO: 1441818 - RNA, 19 nt, Homo sapiens
  misc_RNA (1)...(19): siRNA sense strand
ugacagcaccaccagcuau

SEQ ID NO: 1441819 - RNA, 19 nt, Homo sapiens
  misc_RNA (1)...(19): siRNA sense strand
uaccaagugucgccuuuua

SEQ ID NO: 1441820 - RNA, 19 nt, Homo sapiens
  misc_RNA (1)...(19): siRNA sense strand
ccaacaucauccaguuugu

SEQ ID NO: 1441821 - RNA, 19 nt, Homo sapiens
  misc_RNA (1)...(19): siRNA sense strand
ccgguucaaugccaaguau

SEQ ID NO: 1441822 - RNA, 19 nt, Homo sapiens
  misc_RNA (1)...(19): siRNA sense strand
agugggaccugaagccuau

SEQ ID NO: 1441823 - RNA, 19 nt, Homo sapiens
  misc_RNA (1)...(19): siRNA sense strand
ucaucaaggagacacauaa

SEQ ID NO: 1441824 - RNA, 19 nt, Homo sapiens
  misc_RNA (1)...(19): siRNA sense strand
acaaaggugcugaggaaug

SEQ ID NO: 1441825 - RNA, 19 nt, Homo sapiens
  misc_RNA (1)...(19): siRNA sense strand
ggaaugcugccggcaacuu

SEQ ID NO: 1441826 - RNA, 19 nt, Homo sapiens
  misc_RNA (1)...(19): siRNA sense strand
gaucuucgggccuguacug

SEQ ID NO: 1441827 - RNA, 19 nt, Homo sapiens
  misc_RNA (1)...(19): siRNA sense strand
ccucaggagcccaucauga

SEQ ID NO: 1441828 - RNA, 19 nt, Homo sapiens
  misc_RNA (1)...(19): siRNA sense strand
cgccgcaggucaucaagga

SEQ ID NO: 1441829 - RNA, 19 nt, Homo sapiens
  misc_RNA (1)...(19): siRNA sense strand
ccaucucgcccuuuaacuu

SEQ ID NO: 1441830 - RNA, 19 nt, Homo sapiens
  misc_RNA (1)...(19): siRNA sense strand
cccuuuaacuucacugcaa

SEQ ID NO: 1441831 - RNA, 19 nt, Homo sapiens
  misc_RNA (1)...(19): siRNA sense strand
caucucgcccuuuaacuuc

SEQ ID NO: 1441832 - RNA, 19 nt, Homo sapiens
  misc_RNA (1)...(19): siRNA sense strand
gacgugcaguaccaagugu

SEQ ID NO: 1441833 - RNA, 19 nt, Homo sapiens
  misc_RNA (1)...(19): siRNA sense strand
ggagaucuucgggccugua

SEQ ID NO: 1441834 - RNA, 19 nt, Homo sapiens
  misc_RNA (1)...(19): siRNA sense strand
gcacagucggaucaaagug

SEQ ID NO: 1441835 - RNA, 19 nt, Homo sapiens
  misc_RNA (1)...(19): siRNA sense strand
caacaucauccaguuugug

SEQ ID NO: 1441836 - RNA, 19 nt, Homo sapiens
  misc_RNA (1)...(19): siRNA sense strand
cucaggagcccaucaugaa

SEQ ID NO: 1441837 - RNA, 19 nt, Homo sapiens
  misc_RNA (1)...(19): siRNA sense strand
gagccucuggaaccaauga

SEQ ID NO: 1441838 - RNA, 19 nt, Homo sapiens
  misc_RNA (1)...(19): siRNA sense strand
ccaacgagcccgucuuagc

SEQ ID NO: 1441839 - RNA, 19 nt, Homo sapiens
  misc_RNA (1)...(19): siRNA sense strand
gagcccgucuuagccuuca

SEQ ID NO: 1441840 - RNA, 19 nt, Homo sapiens
  misc_RNA (1)...(19): siRNA sense strand
guggccaaguucuguuaug

SEQ ID NO: 1441841 - RNA, 19 nt, Homo sapiens
  misc_RNA (1)...(19): siRNA sense strand
ggagcuacgcguacaugca

SEQ ID NO: 1441842 - RNA, 19 nt, Homo sapiens
  misc_RNA (1)...(19): siRNA sense strand
ccgagccucuggaaccaau

SEQ ID NO: 1441843 - RNA, 19 nt, Homo sapiens
  misc_RNA (1)...(19): siRNA sense strand
uaagguggccaaguucugu

SEQ ID NO: 1441844 - RNA, 19 nt, Homo sapiens
  misc_RNA (1)...(19): siRNA sense strand
ccugaaggcggcagacaug

SEQ ID NO: 1441845 - RNA, 19 nt, Homo sapiens
  misc_RNA (1)...(19): siRNA sense strand
ugacuccgugggcuacuuu

SEQ ID NO: 1441846 - RNA, 19 nt, Homo sapiens
  misc_RNA (1)...(19): siRNA sense strand
aguaccaagugucgccuuu

SEQ ID NO: 1441847 - RNA, 19 nt, Homo sapiens
  misc_RNA (1)...(19): siRNA sense strand
gggcaacgugguccuaugg

SEQ ID NO: 1441848 - RNA, 19 nt, Homo sapiens
  misc_RNA (1)...(19): siRNA sense strand
gacagcaccaccagcuaug

SEQ ID NO: 1441849 - RNA, 19 nt, Homo sapiens
  misc_RNA (1)...(19): siRNA sense strand
gagcgagaugcccugcaaa

SEQ ID NO: 1441850 - RNA, 19 nt, Homo sapiens
  misc_RNA (1)...(19): siRNA sense strand
cuucgggccuguacugucu

SEQ ID NO: 1441851 - RNA, 19 nt, Homo sapiens
  misc_RNA (1)...(19): siRNA sense strand
caaguccuuugcccguauc

SEQ ID NO: 1441852 - RNA, 19 nt, Homo sapiens
  misc_RNA (1)...(19): siRNA sense strand
ccgcucagccuucgaguac

SEQ ID NO: 1441853 - RNA, 19 nt, Homo sapiens
  misc_RNA (1)...(19): siRNA sense strand
gaacuuggcuucaaacaaa

SEQ ID NO: 1441854 - RNA, 19 nt, Homo sapiens
  misc_RNA (1)...(19): siRNA sense strand
ugaaauaccuccugaagaa

SEQ ID NO: 1441855 - RNA, 19 nt, Homo sapiens
  misc_RNA (1)...(19): siRNA sense strand
gaagaucugugauggguuu

SEQ ID NO: 1441856 - RNA, 19 nt, Homo sapiens
  misc_RNA (1)...(19): siRNA sense strand
caauuuagcugaugauuuc

SEQ ID NO: 1441857 - RNA, 19 nt, Homo sapiens
  misc_RNA (1)...(19): siRNA sense strand
aaacaaagcuuccuagaac

SEQ ID NO: 1441858 - RNA, 19 nt, Homo sapiens
  misc_RNA (1)...(19): siRNA sense strand
gaagaacucucaacaucau

SEQ ID NO: 1441859 - RNA, 19 nt, Homo sapiens
  misc_RNA (1)...(19): siRNA sense strand
caacaucauucugcaauuu

SEQ ID NO: 1441860 - RNA, 19 nt, Homo sapiens
  misc_RNA (1)...(19): siRNA sense strand
gaagugcucuggacuaugg

SEQ ID NO: 1441861 - RNA, 19 nt, Homo sapiens
  misc_RNA (1)...(19): siRNA sense strand
gaggaaacguguacuugaa

SEQ ID NO: 1441862 - RNA, 19 nt, Homo sapiens
  misc_RNA (1)...(19): siRNA sense strand
gaaacaaagcuuccuagaa

SEQ ID NO: 1441863 - RNA, 19 nt, Homo sapiens
  misc_RNA (1)...(19): siRNA sense strand
ucacauuucugaacucgua

SEQ ID NO: 1441864 - RNA, 19 nt, Homo sapiens
  misc_RNA (1)...(19): siRNA sense strand
cagcaggccuugaaacaaa

SEQ ID NO: 1441865 - RNA, 19 nt, Homo sapiens
  misc_RNA (1)...(19): siRNA sense strand
gaagacagacaaugagauu

SEQ ID NO: 1441866 - RNA, 19 nt, Homo sapiens
  misc_RNA (1)...(19): siRNA sense strand
cagaagaacucucaacauc

SEQ ID NO: 1441867 - RNA, 19 nt, Homo sapiens
  misc_RNA (1)...(19): siRNA sense strand
caaacaaacucacauuucu

SEQ ID NO: 1441868 - RNA, 19 nt, Homo sapiens
  misc_RNA (1)...(19): siRNA sense strand
ggaaauccauacccguuug

SEQ ID NO: 1441869 - RNA, 19 nt, Homo sapiens
  misc_RNA (1)...(19): siRNA sense strand
ggaaauuugugaaugaagu

SEQ ID NO: 1441870 - RNA, 19 nt, Homo sapiens
  misc_RNA (1)...(19): siRNA sense strand
gaagcgaggagauguguuu

SEQ ID NO: 1441871 - RNA, 19 nt, Homo sapiens
  misc_RNA (1)...(19): siRNA sense strand
ggaaggagaguuacaggaa

SEQ ID NO: 1441872 - RNA, 19 nt, Homo sapiens
  misc_RNA (1)...(19): siRNA sense strand
gaauauuguugaugccuau

SEQ ID NO: 1441873 - RNA, 19 nt, Homo sapiens
  misc_RNA (1)...(19): siRNA sense strand
ggaauuguccagaugguuu

SEQ ID NO: 1441874 - RNA, 19 nt, Homo sapiens
  misc_RNA (1)...(19): siRNA sense strand
uaacaggaccaauaaauuc

SEQ ID NO: 1441875 - RNA, 19 nt, Homo sapiens
  misc_RNA (1)...(19): siRNA sense strand
cuacaaacaucagcaagaa

SEQ ID NO: 1441876 - RNA, 19 nt, Homo sapiens
  misc_RNA (1)...(19): siRNA sense strand
ggaggaaagucuauaucug

SEQ ID NO: 1441877 - RNA, 19 nt, Homo sapiens
  misc_RNA (1)...(19): siRNA sense strand
gaacaucuuuggcucuucu

SEQ ID NO: 1441878 - RNA, 19 nt, Homo sapiens
  misc_RNA (1)...(19): siRNA sense strand
gagcaaggcauggaacuaa

SEQ ID NO: 1441879 - RNA, 19 nt, Homo sapiens
  misc_RNA (1)...(19): siRNA sense strand
gaaagaagaaauucagaag

SEQ ID NO: 1441880 - RNA, 19 nt, Homo sapiens
  misc_RNA (1)...(19): siRNA sense strand
ugacagaacugaaauaccu

SEQ ID NO: 1441881 - RNA, 19 nt, Homo sapiens
  misc_RNA (1)...(19): siRNA sense strand
gcaagaaguccaaaguuuc

SEQ ID NO: 1441882 - RNA, 19 nt, Homo sapiens
  misc_RNA (1)...(19): siRNA sense strand
ggaaaccaauuuagcugau

SEQ ID NO: 1441883 - RNA, 19 nt, Homo sapiens
  misc_RNA (1)...(19): siRNA sense strand
gcagaugccacacguauca

SEQ ID NO: 1441884 - RNA, 19 nt, Homo sapiens
  misc_RNA (1)...(19): siRNA sense strand
ugaccacagugcaaucuaa

SEQ ID NO: 1441885 - RNA, 19 nt, Homo sapiens
  misc_RNA (1)...(19): siRNA sense strand
cagaagaacauauucauca

SEQ ID NO: 1441886 - RNA, 19 nt, Homo sapiens
  misc_RNA (1)...(19): siRNA sense strand
ggacgaccauggagaagag

SEQ ID NO: 1441887 - RNA, 19 nt, Homo sapiens
  misc_RNA (1)...(19): siRNA sense strand
gguggaagcugcauauugc

SEQ ID NO: 1441888 - RNA, 19 nt, Homo sapiens
  misc_RNA (1)...(19): siRNA sense strand
gaacugacagaacugaaau

SEQ ID NO: 1441889 - RNA, 19 nt, Homo sapiens
  misc_RNA (1)...(19): siRNA sense strand
cguggaugcuucugauuaa

SEQ ID NO: 1441890 - RNA, 19 nt, Homo sapiens
  misc_RNA (1)...(19): siRNA sense strand
ggaauacucauguaaugga

SEQ ID NO: 1441891 - RNA, 19 nt, Homo sapiens
  misc_RNA (1)...(19): siRNA sense strand
agaaacggcacauggaaua

SEQ ID NO: 1441892 - RNA, 19 nt, Homo sapiens
  misc_RNA (1)...(19): siRNA sense strand
gaaaccaauuuagcugaug

SEQ ID NO: 1441893 - RNA, 19 nt, Homo sapiens
  misc_RNA (1)...(19): siRNA sense strand
agcaagaaguccaaaguuu

SEQ ID NO: 1441894 - RNA, 19 nt, Homo sapiens
  misc_RNA (1)...(19): siRNA sense strand
gaagaaauucagaagaaca

SEQ ID NO: 1441895 - RNA, 19 nt, Homo sapiens
  misc_RNA (1)...(19): siRNA sense strand
gaagucagaaggugugaau

SEQ ID NO: 1441896 - RNA, 19 nt, Homo sapiens
  misc_RNA (1)...(19): siRNA sense strand
ggacuauggugaugaacag

SEQ ID NO: 1441897 - RNA, 19 nt, Homo sapiens
  misc_RNA (1)...(19): siRNA sense strand
gcacuuuggaugauucuga

SEQ ID NO: 1441898 - RNA, 19 nt, Homo sapiens
  misc_RNA (1)...(19): siRNA sense strand
guucauagccggugugauc

SEQ ID NO: 1441899 - RNA, 19 nt, Homo sapiens
  misc_RNA (1)...(19): siRNA sense strand
gaaauaccuccugaagaaa

SEQ ID NO: 1441900 - RNA, 19 nt, Homo sapiens
  misc_RNA (1)...(19): siRNA sense strand
gcagcuaccgggagauaaa

SEQ ID NO: 1441901 - RNA, 19 nt, Homo sapiens
  misc_RNA (1)...(19): siRNA sense strand
aaaccaauuuagcugauga

SEQ ID NO: 1441902 - RNA, 19 nt, Homo sapiens
  misc_RNA (1)...(19): siRNA sense strand
caacuuuggagacgucuuu

SEQ ID NO: 1441903 - RNA, 19 nt, Homo sapiens
  misc_RNA (1)...(19): siRNA sense strand
ccuguucgcugugauguuu

SEQ ID NO: 1441904 - RNA, 19 nt, Homo sapiens
  misc_RNA (1)...(19): siRNA sense strand
cugcauauaugaccggaaa

SEQ ID NO: 1441905 - RNA, 19 nt, Homo sapiens
  misc_RNA (1)...(19): siRNA sense strand
ccuggagacuguucuagaa

SEQ ID NO: 1441906 - RNA, 19 nt, Homo sapiens
  misc_RNA (1)...(19): siRNA sense strand
ccaauuuagcugaugauuu

SEQ ID NO: 1441907 - RNA, 19 nt, Homo sapiens
  misc_RNA (1)...(19): siRNA sense strand
uggcgaaucugccgaggaa

SEQ ID NO: 1441908 - RNA, 19 nt, Homo sapiens
  misc_RNA (1)...(19): siRNA sense strand
gaaccagcaggccuugaaa

SEQ ID NO: 1441909 - RNA, 19 nt, Homo sapiens
  misc_RNA (1)...(19): siRNA sense strand
ucaaacaaacucacauuuc

SEQ ID NO: 1441910 - RNA, 19 nt, Homo sapiens
  misc_RNA (1)...(19): siRNA sense strand
cgaaagaagaaauucagaa

SEQ ID NO: 1441911 - RNA, 19 nt, Homo sapiens
  misc_RNA (1)...(19): siRNA sense strand
ggaggauccugugacgaaa

SEQ ID NO: 1441912 - RNA, 19 nt, Homo sapiens
  misc_RNA (1)...(19): siRNA sense strand
cugaugauuucuuuacuga

SEQ ID NO: 1441913 - RNA, 19 nt, Homo sapiens
  misc_RNA (1)...(19): siRNA sense strand
agacagacaaugagauuug

SEQ ID NO: 1441914 - RNA, 19 nt, Homo sapiens
  misc_RNA (1)...(19): siRNA sense strand
gaagaugaaagcugucuac

SEQ ID NO: 1441915 - RNA, 19 nt, Homo sapiens
  misc_RNA (1)...(19): siRNA sense strand
cggguuugaucuacaauga

SEQ ID NO: 1441916 - RNA, 19 nt, Homo sapiens
  misc_RNA (1)...(19): siRNA sense strand
uaucugauccuacuuaugg

SEQ ID NO: 1441917 - RNA, 19 nt, Homo sapiens
  misc_RNA (1)...(19): siRNA sense strand
gcuccuggcugcacuuugg

SEQ ID NO: 1441918 - RNA, 19 nt, Homo sapiens
  misc_RNA (1)...(19): siRNA sense strand
ccuacaccaucaucacuuu

SEQ ID NO: 1441919 - RNA, 19 nt, Homo sapiens
  misc_RNA (1)...(19): siRNA sense strand
acauuuaacaggaccaaua

SEQ ID NO: 1441920 - RNA, 19 nt, Homo sapiens
  misc_RNA (1)...(19): siRNA sense strand
gcugaugauuucuuuacug

SEQ ID NO: 1441921 - RNA, 19 nt, Homo sapiens
  misc_RNA (1)...(19): siRNA sense strand
ugaaagcugucuaccacau

SEQ ID NO: 1441922 - RNA, 19 nt, Homo sapiens
  misc_RNA (1)...(19): siRNA sense strand
cgaggaaacguguacuuga

SEQ ID NO: 1441923 - RNA, 19 nt, Homo sapiens
  misc_RNA (1)...(19): siRNA sense strand
gcuaucugauccuacuuau

SEQ ID NO: 1441924 - RNA, 19 nt, Homo sapiens
  misc_RNA (1)...(19): siRNA sense strand
gguuauggcuuugauuucu

SEQ ID NO: 1441925 - RNA, 19 nt, Homo sapiens
  misc_RNA (1)...(19): siRNA sense strand
ucaacaucauucugcaauu

SEQ ID NO: 1441926 - RNA, 19 nt, Homo sapiens
  misc_RNA (1)...(19): siRNA sense strand
ggaacuuggcuucaaacaa

SEQ ID NO: 1441927 - RNA, 19 nt, Homo sapiens
  misc_RNA (1)...(19): siRNA sense strand
uaacacaaacagagucuca

SEQ ID NO: 1441928 - RNA, 19 nt, Homo sapiens
  misc_RNA (1)...(19): siRNA sense strand
ggugucauccucagccuuu

SEQ ID NO: 1441929 - RNA, 19 nt, Homo sapiens
  misc_RNA (1)...(19): siRNA sense strand
aaaugaagaugucggugau

SEQ ID NO: 1441930 - RNA, 19 nt, Homo sapiens
  misc_RNA (1)...(19): siRNA sense strand
gcgaggagauguguuuguc

SEQ ID NO: 1441931 - RNA, 19 nt, Homo sapiens
  misc_RNA (1)...(19): siRNA sense strand
aaacucacauuucugaacu

SEQ ID NO: 1441932 - RNA, 19 nt, Homo sapiens
  misc_RNA (1)...(19): siRNA sense strand
cauuuaacaggaccaauaa

SEQ ID NO: 1441933 - RNA, 19 nt, Homo sapiens
  misc_RNA (1)...(19): siRNA sense strand
gaagaugccacugagaaca

SEQ ID NO: 1441934 - RNA, 19 nt, Homo sapiens
  misc_RNA (1)...(19): siRNA sense strand
ugauuacccuggagacugu

SEQ ID NO: 1441935 - RNA, 19 nt, Homo sapiens
  misc_RNA (1)...(19): siRNA sense strand
ucaucaaggugcagaagau

SEQ ID NO: 1441936 - RNA, 19 nt, Homo sapiens
  misc_RNA (1)...(19): siRNA sense strand
ugagacggaaaccaauuua

SEQ ID NO: 1441937 - RNA, 19 nt, Homo sapiens
  misc_RNA (1)...(19): siRNA sense strand
ugauuaagccguuuauucu

SEQ ID NO: 1441938 - RNA, 19 nt, Homo sapiens
  misc_RNA (1)...(19): siRNA sense strand
acacggguuugaucuacaa

SEQ ID NO: 1441939 - RNA, 19 nt, Homo sapiens
  misc_RNA (1)...(19): siRNA sense strand
cgacugcacuggguugagu

SEQ ID NO: 1441940 - RNA, 19 nt, Homo sapiens
  misc_RNA (1)...(19): siRNA sense strand
gcucuggacuauggugaug

SEQ ID NO: 1441941 - RNA, 19 nt, Homo sapiens
  misc_RNA (1)...(19): siRNA sense strand
ccacuucaucaacauguuu

SEQ ID NO: 1441942 - RNA, 19 nt, Homo sapiens
  misc_RNA (1)...(19): siRNA sense strand
ggagcaaggcauggaacua

SEQ ID NO: 1441943 - RNA, 19 nt, Homo sapiens
  misc_RNA (1)...(19): siRNA sense strand
gggcugcauuucaaacaca

SEQ ID NO: 1441944 - RNA, 19 nt, Homo sapiens
  misc_RNA (1)...(19): siRNA sense strand
aagaagaugccacugagaa

SEQ ID NO: 1441945 - RNA, 19 nt, Homo sapiens
  misc_RNA (1)...(19): siRNA sense strand
gauuaagccguuuauucuu

SEQ ID NO: 1441946 - RNA, 19 nt, Homo sapiens
  misc_RNA (1)...(19): siRNA sense strand
gugguuauggcuuugauuu

SEQ ID NO: 1441947 - RNA, 19 nt, Homo sapiens
  misc_RNA (1)...(19): siRNA sense strand
cagcaagaaguccaaaguu

SEQ ID NO: 1441948 - RNA, 19 nt, Homo sapiens
  misc_RNA (1)...(19): siRNA sense strand
gacgcuugcucucccagaa

SEQ ID NO: 1441949 - RNA, 19 nt, Homo sapiens
  misc_RNA (1)...(19): siRNA sense strand
ccguggaugcuucugauua

SEQ ID NO: 1441950 - RNA, 19 nt, Homo sapiens
  misc_RNA (1)...(19): siRNA sense strand
gacaguagccauccuucug

SEQ ID NO: 1441951 - RNA, 19 nt, Homo sapiens
  misc_RNA (1)...(19): siRNA sense strand
ugguucaguucaaagauuu

SEQ ID NO: 1441952 - RNA, 19 nt, Homo sapiens
  misc_RNA (1)...(19): siRNA sense strand
gaacauugaaggugauagc

SEQ ID NO: 1441953 - RNA, 19 nt, Homo sapiens
  misc_RNA (1)...(19): siRNA sense strand
gaacuuggcuucaaacaaa

SEQ ID NO: 1441954 - RNA, 19 nt, Homo sapiens
  misc_RNA (1)...(19): siRNA sense strand
ugaaauaccuccugaagaa

SEQ ID NO: 1441955 - RNA, 19 nt, Homo sapiens
  misc_RNA (1)...(19): siRNA sense strand
gaagaucugugauggguuu

SEQ ID NO: 1441956 - RNA, 19 nt, Homo sapiens
  misc_RNA (1)...(19): siRNA sense strand
caauuuagcugaugauuuc

SEQ ID NO: 1441957 - RNA, 19 nt, Homo sapiens
  misc_RNA (1)...(19): siRNA sense strand
aaacaaagcuuccuagaac

SEQ ID NO: 1441958 - RNA, 19 nt, Homo sapiens
  misc_RNA (1)...(19): siRNA sense strand
gaagaacucucaacaucau

SEQ ID NO: 1441959 - RNA, 19 nt, Homo sapiens
  misc_RNA (1)...(19): siRNA sense strand
caacaucauucugcaauuu

SEQ ID NO: 1441960 - RNA, 19 nt, Homo sapiens
  misc_RNA (1)...(19): siRNA sense strand
gaagugcucuggacuaugg

SEQ ID NO: 1441961 - RNA, 19 nt, Homo sapiens
  misc_RNA (1)...(19): siRNA sense strand
gaggaaacguguacuugaa

SEQ ID NO: 1441962 - RNA, 19 nt, Homo sapiens
  misc_RNA (1)...(19): siRNA sense strand
gaaacaaagcuuccuagaa

SEQ ID NO: 1441963 - RNA, 19 nt, Homo sapiens
  misc_RNA (1)...(19): siRNA sense strand
ucacauuucugaacucgua

SEQ ID NO: 1441964 - RNA, 19 nt, Homo sapiens
  misc_RNA (1)...(19): siRNA sense strand
cagcaggccuugaaacaaa

SEQ ID NO: 1441965 - RNA, 19 nt, Homo sapiens
  misc_RNA (1)...(19): siRNA sense strand
gaagacagacaaugagauu

SEQ ID NO: 1441966 - RNA, 19 nt, Homo sapiens
  misc_RNA (1)...(19): siRNA sense strand
cagaagaacucucaacauc

SEQ ID NO: 1441967 - RNA, 19 nt, Homo sapiens
  misc_RNA (1)...(19): siRNA sense strand
caaacaaacucacauuucu

SEQ ID NO: 1441968 - RNA, 19 nt, Homo sapiens
  misc_RNA (1)...(19): siRNA sense strand
ggaaauccauacccguuug

SEQ ID NO: 1441969 - RNA, 19 nt, Homo sapiens
  misc_RNA (1)...(19): siRNA sense strand
ggaaauuugugaaugaagu

SEQ ID NO: 1441970 - RNA, 19 nt, Homo sapiens
  misc_RNA (1)...(19): siRNA sense strand
gaagcgaggagauguguuu

SEQ ID NO: 1441971 - RNA, 19 nt, Homo sapiens
  misc_RNA (1)...(19): siRNA sense strand
ggaaggagaguuacaggaa

SEQ ID NO: 1441972 - RNA, 19 nt, Homo sapiens
  misc_RNA (1)...(19): siRNA sense strand
gaauauuguugaugccuau

SEQ ID NO: 1441973 - RNA, 19 nt, Homo sapiens
  misc_RNA (1)...(19): siRNA sense strand
ggaauuguccagaugguuu

SEQ ID NO: 1441974 - RNA, 19 nt, Homo sapiens
  misc_RNA (1)...(19): siRNA sense strand
uaacaggaccaauaaauuc

SEQ ID NO: 1441975 - RNA, 19 nt, Homo sapiens
  misc_RNA (1)...(19): siRNA sense strand
cuacaaacaucagcaagaa

SEQ ID NO: 1441976 - RNA, 19 nt, Homo sapiens
  misc_RNA (1)...(19): siRNA sense strand
ggaggaaagucuauaucug

SEQ ID NO: 1441977 - RNA, 19 nt, Homo sapiens
  misc_RNA (1)...(19): siRNA sense strand
gaacaucuuuggcucuucu

SEQ ID NO: 1441978 - RNA, 19 nt, Homo sapiens
  misc_RNA (1)...(19): siRNA sense strand
gagcaaggcauggaacuaa

SEQ ID NO: 1441979 - RNA, 19 nt, Homo sapiens
  misc_RNA (1)...(19): siRNA sense strand
gaaagaagaaauucagaag

SEQ ID NO: 1441980 - RNA, 19 nt, Homo sapiens
  misc_RNA (1)...(19): siRNA sense strand
ugacagaacugaaauaccu

SEQ ID NO: 1441981 - RNA, 19 nt, Homo sapiens
  misc_RNA (1)...(19): siRNA sense strand
gcaagaaguccaaaguuuc

SEQ ID NO: 1441982 - RNA, 19 nt, Homo sapiens
  misc_RNA (1)...(19): siRNA sense strand
ggaaaccaauuuagcugau

SEQ ID NO: 1441983 - RNA, 19 nt, Homo sapiens
  misc_RNA (1)...(19): siRNA sense strand
gcagaugccacacguauca

SEQ ID NO: 1441984 - RNA, 19 nt, Homo sapiens
  misc_RNA (1)...(19): siRNA sense strand
ugaccacagugcaaucuaa

SEQ ID NO: 1441985 - RNA, 19 nt, Homo sapiens
  misc_RNA (1)...(19): siRNA sense strand
cagaagaacauauucauca

SEQ ID NO: 1441986 - RNA, 19 nt, Homo sapiens
  misc_RNA (1)...(19): siRNA sense strand
ggacgaccauggagaagag

SEQ ID NO: 1441987 - RNA, 19 nt, Homo sapiens
  misc_RNA (1)...(19): siRNA sense strand
gguggaagcugcauauugc

SEQ ID NO: 1441988 - RNA, 19 nt, Homo sapiens
  misc_RNA (1)...(19): siRNA sense strand
gaacugacagaacugaaau

SEQ ID NO: 1441989 - RNA, 19 nt, Homo sapiens
  misc_RNA (1)...(19): siRNA sense strand
cguggaugcuucugauuaa

SEQ ID NO: 1441990 - RNA, 19 nt, Homo sapiens
  misc_RNA (1)...(19): siRNA sense strand
ggaauacucauguaaugga

SEQ ID NO: 1441991 - RNA, 19 nt, Homo sapiens
  misc_RNA (1)...(19): siRNA sense strand
agaaacggcacauggaaua

SEQ ID NO: 1441992 - RNA, 19 nt, Homo sapiens
  misc_RNA (1)...(19): siRNA sense strand
gaaaccaauuuagcugaug

SEQ ID NO: 1441993 - RNA, 19 nt, Homo sapiens
  misc_RNA (1)...(19): siRNA sense strand
agcaagaaguccaaaguuu

SEQ ID NO: 1441994 - RNA, 19 nt, Homo sapiens
  misc_RNA (1)...(19): siRNA sense strand
gaagaaauucagaagaaca

SEQ ID NO: 1441995 - RNA, 19 nt, Homo sapiens
  misc_RNA (1)...(19): siRNA sense strand
gaagucagaaggugugaau

SEQ ID NO: 1441996 - RNA, 19 nt, Homo sapiens
  misc_RNA (1)...(19): siRNA sense strand
ggacuauggugaugaacag

SEQ ID NO: 1441997 - RNA, 19 nt, Homo sapiens
  misc_RNA (1)...(19): siRNA sense strand
gcacuuuggaugauucuga

SEQ ID NO: 1441998 - RNA, 19 nt, Homo sapiens
  misc_RNA (1)...(19): siRNA sense strand
guucauagccggugugauc

SEQ ID NO: 1441999 - RNA, 19 nt, Homo sapiens
  misc_RNA (1)...(19): siRNA sense strand
gaaauaccuccugaagaaa

SEQ ID NO: 1442000 - RNA, 19 nt, Homo sapiens
  misc_RNA (1)...(19): siRNA sense strand
gcagcuaccgggagauaaa

SEQ ID NO: 1442001 - RNA, 19 nt, Homo sapiens
  misc_RNA (1)...(19): siRNA sense strand
aaaccaauuuagcugauga

SEQ ID NO: 1442002 - RNA, 19 nt, Homo sapiens
  misc_RNA (1)...(19): siRNA sense strand
caacuuuggagacgucuuu

SEQ ID NO: 1442003 - RNA, 19 nt, Homo sapiens
  misc_RNA (1)...(19): siRNA sense strand
ccuguucgcugugauguuu

SEQ ID NO: 1442004 - RNA, 19 nt, Homo sapiens
  misc_RNA (1)...(19): siRNA sense strand
cugcauauaugaccggaaa

SEQ ID NO: 1442005 - RNA, 19 nt, Homo sapiens
  misc_RNA (1)...(19): siRNA sense strand
ccuggagacuguucuagaa

SEQ ID NO: 1442006 - RNA, 19 nt, Homo sapiens
  misc_RNA (1)...(19): siRNA sense strand
ccaauuuagcugaugauuu

SEQ ID NO: 1442007 - RNA, 19 nt, Homo sapiens
  misc_RNA (1)...(19): siRNA sense strand
uggcgaaucugccgaggaa

SEQ ID NO: 1442008 - RNA, 19 nt, Homo sapiens
  misc_RNA (1)...(19): siRNA sense strand
gaaccagcaggccuugaaa

SEQ ID NO: 1442009 - RNA, 19 nt, Homo sapiens
  misc_RNA (1)...(19): siRNA sense strand
ucaaacaaacucacauuuc

SEQ ID NO: 1442010 - RNA, 19 nt, Homo sapiens
  misc_RNA (1)...(19): siRNA sense strand
cgaaagaagaaauucagaa

SEQ ID NO: 1442011 - RNA, 19 nt, Homo sapiens
  misc_RNA (1)...(19): siRNA sense strand
ggaggauccugugacgaaa

SEQ ID NO: 1442012 - RNA, 19 nt, Homo sapiens
  misc_RNA (1)...(19): siRNA sense strand
cugaugauuucuuuacuga

SEQ ID NO: 1442013 - RNA, 19 nt, Homo sapiens
  misc_RNA (1)...(19): siRNA sense strand
agacagacaaugagauuug

SEQ ID NO: 1442014 - RNA, 19 nt, Homo sapiens
  misc_RNA (1)...(19): siRNA sense strand
gaagaugaaagcugucuac

SEQ ID NO: 1442015 - RNA, 19 nt, Homo sapiens
  misc_RNA (1)...(19): siRNA sense strand
cggguuugaucuacaauga

SEQ ID NO: 1442016 - RNA, 19 nt, Homo sapiens
  misc_RNA (1)...(19): siRNA sense strand
uaucugauccuacuuaugg

SEQ ID NO: 1442017 - RNA, 19 nt, Homo sapiens
  misc_RNA (1)...(19): siRNA sense strand
gcuccuggcugcacuuugg

SEQ ID NO: 1442018 - RNA, 19 nt, Homo sapiens
  misc_RNA (1)...(19): siRNA sense strand
ccuacaccaucaucacuuu

SEQ ID NO: 1442019 - RNA, 19 nt, Homo sapiens
  misc_RNA (1)...(19): siRNA sense strand
acauuuaacaggaccaaua

SEQ ID NO: 1442020 - RNA, 19 nt, Homo sapiens
  misc_RNA (1)...(19): siRNA sense strand
gcugaugauuucuuuacug

SEQ ID NO: 1442021 - RNA, 19 nt, Homo sapiens
  misc_RNA (1)...(19): siRNA sense strand
ugaaagcugucuaccacau

SEQ ID NO: 1442022 - RNA, 19 nt, Homo sapiens
  misc_RNA (1)...(19): siRNA sense strand
cgaggaaacguguacuuga

SEQ ID NO: 1442023 - RNA, 19 nt, Homo sapiens
  misc_RNA (1)...(19): siRNA sense strand
gcuaucugauccuacuuau

SEQ ID NO: 1442024 - RNA, 19 nt, Homo sapiens
  misc_RNA (1)...(19): siRNA sense strand
gguuauggcuuugauuucu

SEQ ID NO: 1442025 - RNA, 19 nt, Homo sapiens
  misc_RNA (1)...(19): siRNA sense strand
ucaacaucauucugcaauu

SEQ ID NO: 1442026 - RNA, 19 nt, Homo sapiens
  misc_RNA (1)...(19): siRNA sense strand
ggaacuuggcuucaaacaa

SEQ ID NO: 1442027 - RNA, 19 nt, Homo sapiens
  misc_RNA (1)...(19): siRNA sense strand
uaacacaaacagagucuca

SEQ ID NO: 1442028 - RNA, 19 nt, Homo sapiens
  misc_RNA (1)...(19): siRNA sense strand
ggugucauccucagccuuu

SEQ ID NO: 1442029 - RNA, 19 nt, Homo sapiens
  misc_RNA (1)...(19): siRNA sense strand
aaaugaagaugucggugau

SEQ ID NO: 1442030 - RNA, 19 nt, Homo sapiens
  misc_RNA (1)...(19): siRNA sense strand
gcgaggagauguguuuguc

SEQ ID NO: 1442031 - RNA, 19 nt, Homo sapiens
  misc_RNA (1)...(19): siRNA sense strand
aaacucacauuucugaacu

SEQ ID NO: 1442032 - RNA, 19 nt, Homo sapiens
  misc_RNA (1)...(19): siRNA sense strand
cauuuaacaggaccaauaa

SEQ ID NO: 1442033 - RNA, 19 nt, Homo sapiens
  misc_RNA (1)...(19): siRNA sense strand
gaagaugccacugagaaca

SEQ ID NO: 1442034 - RNA, 19 nt, Homo sapiens
  misc_RNA (1)...(19): siRNA sense strand
ugauuacccuggagacugu

SEQ ID NO: 1442035 - RNA, 19 nt, Homo sapiens
  misc_RNA (1)...(19): siRNA sense strand
ucaucaaggugcagaagau

SEQ ID NO: 1442036 - RNA, 19 nt, Homo sapiens
  misc_RNA (1)...(19): siRNA sense strand
ugagacggaaaccaauuua

SEQ ID NO: 1442037 - RNA, 19 nt, Homo sapiens
  misc_RNA (1)...(19): siRNA sense strand
ugauuaagccguuuauucu

SEQ ID NO: 1442038 - RNA, 19 nt, Homo sapiens
  misc_RNA (1)...(19): siRNA sense strand
acacggguuugaucuacaa

SEQ ID NO: 1442039 - RNA, 19 nt, Homo sapiens
  misc_RNA (1)...(19): siRNA sense strand
cgacugcacuggguugagu

SEQ ID NO: 1442040 - RNA, 19 nt, Homo sapiens
  misc_RNA (1)...(19): siRNA sense strand
gcucuggacuauggugaug

SEQ ID NO: 1442041 - RNA, 19 nt, Homo sapiens
  misc_RNA (1)...(19): siRNA sense strand
ccacuucaucaacauguuu

SEQ ID NO: 1442042 - RNA, 19 nt, Homo sapiens
  misc_RNA (1)...(19): siRNA sense strand
ggagcaaggcauggaacua

SEQ ID NO: 1442043 - RNA, 19 nt, Homo sapiens
  misc_RNA (1)...(19): siRNA sense strand
gggcugcauuucaaacaca

SEQ ID NO: 1442044 - RNA, 19 nt, Homo sapiens
  misc_RNA (1)...(19): siRNA sense strand
aagaagaugccacugagaa

SEQ ID NO: 1442045 - RNA, 19 nt, Homo sapiens
  misc_RNA (1)...(19): siRNA sense strand
gauuaagccguuuauucuu

SEQ ID NO: 1442046 - RNA, 19 nt, Homo sapiens
  misc_RNA (1)...(19): siRNA sense strand
gugguuauggcuuugauuu

SEQ ID NO: 1442047 - RNA, 19 nt, Homo sapiens
  misc_RNA (1)...(19): siRNA sense strand
cagcaagaaguccaaaguu

SEQ ID NO: 1442048 - RNA, 19 nt, Homo sapiens
  misc_RNA (1)...(19): siRNA sense strand
gacgcuugcucucccagaa

SEQ ID NO: 1442049 - RNA, 19 nt, Homo sapiens
  misc_RNA (1)...(19): siRNA sense strand
ccguggaugcuucugauua

SEQ ID NO: 1442050 - RNA, 19 nt, Homo sapiens
  misc_RNA (1)...(19): siRNA sense strand
gacaguagccauccuucug

SEQ ID NO: 1442051 - RNA, 19 nt, Homo sapiens
  misc_RNA (1)...(19): siRNA sense strand
ugguucaguucaaagauuu

SEQ ID NO: 1442052 - RNA, 19 nt, Homo sapiens
  misc_RNA (1)...(19): siRNA sense strand
gaacauugaaggugauagc

SEQ ID NO: 1442053 - RNA, 19 nt, Homo sapiens
  misc_RNA (1)...(19): siRNA sense strand
gaacuuggcuucaaacaaa

SEQ ID NO: 1442054 - RNA, 19 nt, Homo sapiens
  misc_RNA (1)...(19): siRNA sense strand
ugaaauaccuccugaagaa

SEQ ID NO: 1442055 - RNA, 19 nt, Homo sapiens
  misc_RNA (1)...(19): siRNA sense strand
gaagaucugugauggguuu

SEQ ID NO: 1442056 - RNA, 19 nt, Homo sapiens
  misc_RNA (1)...(19): siRNA sense strand
caauuuagcugaugauuuc

SEQ ID NO: 1442057 - RNA, 19 nt, Homo sapiens
  misc_RNA (1)...(19): siRNA sense strand
aaacaaagcuuccuagaac

SEQ ID NO: 1442058 - RNA, 19 nt, Homo sapiens
  misc_RNA (1)...(19): siRNA sense strand
gaagaacucucaacaucau

SEQ ID NO: 1442059 - RNA, 19 nt, Homo sapiens
  misc_RNA (1)...(19): siRNA sense strand
caacaucauucugcaauuu

SEQ ID NO: 1442060 - RNA, 19 nt, Homo sapiens
  misc_RNA (1)...(19): siRNA sense strand
gaagugcucuggacuaugg

SEQ ID NO: 1442061 - RNA, 19 nt, Homo sapiens
  misc_RNA (1)...(19): siRNA sense strand
gaggaaacguguacuugaa

SEQ ID NO: 1442062 - RNA, 19 nt, Homo sapiens
  misc_RNA (1)...(19): siRNA sense strand
gaaacaaagcuuccuagaa

SEQ ID NO: 1442063 - RNA, 19 nt, Homo sapiens
  misc_RNA (1)...(19): siRNA sense strand
ucacauuucugaacucgua

SEQ ID NO: 1442064 - RNA, 19 nt, Homo sapiens
  misc_RNA (1)...(19): siRNA sense strand
cagcaggccuugaaacaaa

SEQ ID NO: 1442065 - RNA, 19 nt, Homo sapiens
  misc_RNA (1)...(19): siRNA sense strand
gaagacagacaaugagauu

SEQ ID NO: 1442066 - RNA, 19 nt, Homo sapiens
  misc_RNA (1)...(19): siRNA sense strand
cagaagaacucucaacauc

SEQ ID NO: 1442067 - RNA, 19 nt, Homo sapiens
  misc_RNA (1)...(19): siRNA sense strand
caaacaaacucacauuucu

SEQ ID NO: 1442068 - RNA, 19 nt, Homo sapiens
  misc_RNA (1)...(19): siRNA sense strand
ggaaauccauacccguuug

SEQ ID NO: 1442069 - RNA, 19 nt, Homo sapiens
  misc_RNA (1)...(19): siRNA sense strand
ggaaauuugugaaugaagu

SEQ ID NO: 1442070 - RNA, 19 nt, Homo sapiens
  misc_RNA (1)...(19): siRNA sense strand
gaagcgaggagauguguuu

SEQ ID NO: 1442071 - RNA, 19 nt, Homo sapiens
  misc_RNA (1)...(19): siRNA sense strand
ggaaggagaguuacaggaa

SEQ ID NO: 1442072 - RNA, 19 nt, Homo sapiens
  misc_RNA (1)...(19): siRNA sense strand
gaauauuguugaugccuau

SEQ ID NO: 1442073 - RNA, 19 nt, Homo sapiens
  misc_RNA (1)...(19): siRNA sense strand
ggaauuguccagaugguuu

SEQ ID NO: 1442074 - RNA, 19 nt, Homo sapiens
  misc_RNA (1)...(19): siRNA sense strand
uaacaggaccaauaaauuc

SEQ ID NO: 1442075 - RNA, 19 nt, Homo sapiens
  misc_RNA (1)...(19): siRNA sense strand
cuacaaacaucagcaagaa

SEQ ID NO: 1442076 - RNA, 19 nt, Homo sapiens
  misc_RNA (1)...(19): siRNA sense strand
ggaggaaagucuauaucug

SEQ ID NO: 1442077 - RNA, 19 nt, Homo sapiens
  misc_RNA (1)...(19): siRNA sense strand
gaacaucuuuggcucuucu

SEQ ID NO: 1442078 - RNA, 19 nt, Homo sapiens
  misc_RNA (1)...(19): siRNA sense strand
gagcaaggcauggaacuaa

SEQ ID NO: 1442079 - RNA, 19 nt, Homo sapiens
  misc_RNA (1)...(19): siRNA sense strand
gaaagaagaaauucagaag

SEQ ID NO: 1442080 - RNA, 19 nt, Homo sapiens
  misc_RNA (1)...(19): siRNA sense strand
ugacagaacugaaauaccu

SEQ ID NO: 1442081 - RNA, 19 nt, Homo sapiens
  misc_RNA (1)...(19): siRNA sense strand
gcaagaaguccaaaguuuc

SEQ ID NO: 1442082 - RNA, 19 nt, Homo sapiens
  misc_RNA (1)...(19): siRNA sense strand
ggaaaccaauuuagcugau

SEQ ID NO: 1442083 - RNA, 19 nt, Homo sapiens
  misc_RNA (1)...(19): siRNA sense strand
gcagaugccacacguauca

SEQ ID NO: 1442084 - RNA, 19 nt, Homo sapiens
  misc_RNA (1)...(19): siRNA sense strand
ugaccacagugcaaucuaa

SEQ ID NO: 1442085 - RNA, 19 nt, Homo sapiens
  misc_RNA (1)...(19): siRNA sense strand
cagaagaacauauucauca

SEQ ID NO: 1442086 - RNA, 19 nt, Homo sapiens
  misc_RNA (1)...(19): siRNA sense strand
ggacgaccauggagaagag

SEQ ID NO: 1442087 - RNA, 19 nt, Homo sapiens
  misc_RNA (1)...(19): siRNA sense strand
gguggaagcugcauauugc

SEQ ID NO: 1442088 - RNA, 19 nt, Homo sapiens
  misc_RNA (1)...(19): siRNA sense strand
gaacugacagaacugaaau

SEQ ID NO: 1442089 - RNA, 19 nt, Homo sapiens
  misc_RNA (1)...(19): siRNA sense strand
cguggaugcuucugauuaa

SEQ ID NO: 1442090 - RNA, 19 nt, Homo sapiens
  misc_RNA (1)...(19): siRNA sense strand
ggaauacucauguaaugga

SEQ ID NO: 1442091 - RNA, 19 nt, Homo sapiens
  misc_RNA (1)...(19): siRNA sense strand
agaaacggcacauggaaua

SEQ ID NO: 1442092 - RNA, 19 nt, Homo sapiens
  misc_RNA (1)...(19): siRNA sense strand
gaaaccaauuuagcugaug

SEQ ID NO: 1442093 - RNA, 19 nt, Homo sapiens
  misc_RNA (1)...(19): siRNA sense strand
agcaagaaguccaaaguuu

SEQ ID NO: 1442094 - RNA, 19 nt, Homo sapiens
  misc_RNA (1)...(19): siRNA sense strand
gaagaaauucagaagaaca

SEQ ID NO: 1442095 - RNA, 19 nt, Homo sapiens
  misc_RNA (1)...(19): siRNA sense strand
gaagucagaaggugugaau

SEQ ID NO: 1442096 - RNA, 19 nt, Homo sapiens
  misc_RNA (1)...(19): siRNA sense strand
ggacuauggugaugaacag

SEQ ID NO: 1442097 - RNA, 19 nt, Homo sapiens
  misc_RNA (1)...(19): siRNA sense strand
gcacuuuggaugauucuga

SEQ ID NO: 1442098 - RNA, 19 nt, Homo sapiens
  misc_RNA (1)...(19): siRNA sense strand
guucauagccggugugauc

SEQ ID NO: 1442099 - RNA, 19 nt, Homo sapiens
  misc_RNA (1)...(19): siRNA sense strand
gaaauaccuccugaagaaa

SEQ ID NO: 1442100 - RNA, 19 nt, Homo sapiens
  misc_RNA (1)...(19): siRNA sense strand
gcagcuaccgggagauaaa

SEQ ID NO: 1442101 - RNA, 19 nt, Homo sapiens
  misc_RNA (1)...(19): siRNA sense strand
aaaccaauuuagcugauga

SEQ ID NO: 1442102 - RNA, 19 nt, Homo sapiens
  misc_RNA (1)...(19): siRNA sense strand
caacuuuggagacgucuuu

SEQ ID NO: 1442103 - RNA, 19 nt, Homo sapiens
  misc_RNA (1)...(19): siRNA sense strand
ccuguucgcugugauguuu

SEQ ID NO: 1442104 - RNA, 19 nt, Homo sapiens
  misc_RNA (1)...(19): siRNA sense strand
cugcauauaugaccggaaa

SEQ ID NO: 1442105 - RNA, 19 nt, Homo sapiens
  misc_RNA (1)...(19): siRNA sense strand
ccuggagacuguucuagaa

SEQ ID NO: 1442106 - RNA, 19 nt, Homo sapiens
  misc_RNA (1)...(19): siRNA sense strand
ccaauuuagcugaugauuu

SEQ ID NO: 1442107 - RNA, 19 nt, Homo sapiens
  misc_RNA (1)...(19): siRNA sense strand
uggcgaaucugccgaggaa

SEQ ID NO: 1442108 - RNA, 19 nt, Homo sapiens
  misc_RNA (1)...(19): siRNA sense strand
gaaccagcaggccuugaaa

SEQ ID NO: 1442109 - RNA, 19 nt, Homo sapiens
  misc_RNA (1)...(19): siRNA sense strand
ucaaacaaacucacauuuc

SEQ ID NO: 1442110 - RNA, 19 nt, Homo sapiens
  misc_RNA (1)...(19): siRNA sense strand
cgaaagaagaaauucagaa

SEQ ID NO: 1442111 - RNA, 19 nt, Homo sapiens
  misc_RNA (1)...(19): siRNA sense strand
ggaggauccugugacgaaa

SEQ ID NO: 1442112 - RNA, 19 nt, Homo sapiens
  misc_RNA (1)...(19): siRNA sense strand
cugaugauuucuuuacuga

SEQ ID NO: 1442113 - RNA, 19 nt, Homo sapiens
  misc_RNA (1)...(19): siRNA sense strand
agacagacaaugagauuug

SEQ ID NO: 1442114 - RNA, 19 nt, Homo sapiens
  misc_RNA (1)...(19): siRNA sense strand
gaagaugaaagcugucuac

SEQ ID NO: 1442115 - RNA, 19 nt, Homo sapiens
  misc_RNA (1)...(19): siRNA sense strand
cggguuugaucuacaauga

SEQ ID NO: 1442116 - RNA, 19 nt, Homo sapiens
  misc_RNA (1)...(19): siRNA sense strand
uaucugauccuacuuaugg

SEQ ID NO: 1442117 - RNA, 19 nt, Homo sapiens
  misc_RNA (1)...(19): siRNA sense strand
gcuccuggcugcacuuugg

SEQ ID NO: 1442118 - RNA, 19 nt, Homo sapiens
  misc_RNA (1)...(19): siRNA sense strand
ccuacaccaucaucacuuu

SEQ ID NO: 1442119 - RNA, 19 nt, Homo sapiens
  misc_RNA (1)...(19): siRNA sense strand
acauuuaacaggaccaaua

SEQ ID NO: 1442120 - RNA, 19 nt, Homo sapiens
  misc_RNA (1)...(19): siRNA sense strand
gcugaugauuucuuuacug

SEQ ID NO: 1442121 - RNA, 19 nt, Homo sapiens
  misc_RNA (1)...(19): siRNA sense strand
ugaaagcugucuaccacau

SEQ ID NO: 1442122 - RNA, 19 nt, Homo sapiens
  misc_RNA (1)...(19): siRNA sense strand
cgaggaaacguguacuuga

SEQ ID NO: 1442123 - RNA, 19 nt, Homo sapiens
  misc_RNA (1)...(19): siRNA sense strand
gcuaucugauccuacuuau

SEQ ID NO: 1442124 - RNA, 19 nt, Homo sapiens
  misc_RNA (1)...(19): siRNA sense strand
gguuauggcuuugauuucu

SEQ ID NO: 1442125 - RNA, 19 nt, Homo sapiens
  misc_RNA (1)...(19): siRNA sense strand
ucaacaucauucugcaauu

SEQ ID NO: 1442126 - RNA, 19 nt, Homo sapiens
  misc_RNA (1)...(19): siRNA sense strand
ggaacuuggcuucaaacaa

SEQ ID NO: 1442127 - RNA, 19 nt, Homo sapiens
  misc_RNA (1)...(19): siRNA sense strand
uaacacaaacagagucuca

SEQ ID NO: 1442128 - RNA, 19 nt, Homo sapiens
  misc_RNA (1)...(19): siRNA sense strand
ggugucauccucagccuuu

SEQ ID NO: 1442129 - RNA, 19 nt, Homo sapiens
  misc_RNA (1)...(19): siRNA sense strand
aaaugaagaugucggugau

SEQ ID NO: 1442130 - RNA, 19 nt, Homo sapiens
  misc_RNA (1)...(19): siRNA sense strand
gcgaggagauguguuuguc

SEQ ID NO: 1442131 - RNA, 19 nt, Homo sapiens
  misc_RNA (1)...(19): siRNA sense strand
aaacucacauuucugaacu

SEQ ID NO: 1442132 - RNA, 19 nt, Homo sapiens
  misc_RNA (1)...(19): siRNA sense strand
cauuuaacaggaccaauaa

SEQ ID NO: 1442133 - RNA, 19 nt, Homo sapiens
  misc_RNA (1)...(19): siRNA sense strand
gaagaugccacugagaaca

SEQ ID NO: 1442134 - RNA, 19 nt, Homo sapiens
  misc_RNA (1)...(19): siRNA sense strand
ugauuacccuggagacugu

SEQ ID NO: 1442135 - RNA, 19 nt, Homo sapiens
  misc_RNA (1)...(19): siRNA sense strand
ucaucaaggugcagaagau

SEQ ID NO: 1442136 - RNA, 19 nt, Homo sapiens
  misc_RNA (1)...(19): siRNA sense strand
ugagacggaaaccaauuua

SEQ ID NO: 1442137 - RNA, 19 nt, Homo sapiens
  misc_RNA (1)...(19): siRNA sense strand
ugauuaagccguuuauucu

SEQ ID NO: 1442138 - RNA, 19 nt, Homo sapiens
  misc_RNA (1)...(19): siRNA sense strand
acacggguuugaucuacaa

SEQ ID NO: 1442139 - RNA, 19 nt, Homo sapiens
  misc_RNA (1)...(19): siRNA sense strand
cgacugcacuggguugagu

SEQ ID NO: 1442140 - RNA, 19 nt, Homo sapiens
  misc_RNA (1)...(19): siRNA sense strand
gcucuggacuauggugaug

SEQ ID NO: 1442141 - RNA, 19 nt, Homo sapiens
  misc_RNA (1)...(19): siRNA sense strand
ccacuucaucaacauguuu

SEQ ID NO: 1442142 - RNA, 19 nt, Homo sapiens
  misc_RNA (1)...(19): siRNA sense strand
ggagcaaggcauggaacua

SEQ ID NO: 1442143 - RNA, 19 nt, Homo sapiens
  misc_RNA (1)...(19): siRNA sense strand
gggcugcauuucaaacaca

SEQ ID NO: 1442144 - RNA, 19 nt, Homo sapiens
  misc_RNA (1)...(19): siRNA sense strand
aagaagaugccacugagaa

SEQ ID NO: 1442145 - RNA, 19 nt, Homo sapiens
  misc_RNA (1)...(19): siRNA sense strand
gauuaagccguuuauucuu

SEQ ID NO: 1442146 - RNA, 19 nt, Homo sapiens
  misc_RNA (1)...(19): siRNA sense strand
gugguuauggcuuugauuu

SEQ ID NO: 1442147 - RNA, 19 nt, Homo sapiens
  misc_RNA (1)...(19): siRNA sense strand
cagcaagaaguccaaaguu

SEQ ID NO: 1442148 - RNA, 19 nt, Homo sapiens
  misc_RNA (1)...(19): siRNA sense strand
gacgcuugcucucccagaa

SEQ ID NO: 1442149 - RNA, 19 nt, Homo sapiens
  misc_RNA (1)...(19): siRNA sense strand
ccguggaugcuucugauua

SEQ ID NO: 1442150 - RNA, 19 nt, Homo sapiens
  misc_RNA (1)...(19): siRNA sense strand
gacaguagccauccuucug

SEQ ID NO: 1442151 - RNA, 19 nt, Homo sapiens
  misc_RNA (1)...(19): siRNA sense strand
ugguucaguucaaagauuu

SEQ ID NO: 1442152 - RNA, 19 nt, Homo sapiens
  misc_RNA (1)...(19): siRNA sense strand
gaacauugaaggugauagc

SEQ ID NO: 1442153 - RNA, 19 nt, Homo sapiens
  misc_RNA (1)...(19): siRNA sense strand
gaacuuggcuucaaacaaa

SEQ ID NO: 1442154 - RNA, 19 nt, Homo sapiens
  misc_RNA (1)...(19): siRNA sense strand
ugaaauaccuccugaagaa

SEQ ID NO: 1442155 - RNA, 19 nt, Homo sapiens
  misc_RNA (1)...(19): siRNA sense strand
gaagaucugugauggguuu

SEQ ID NO: 1442156 - RNA, 19 nt, Homo sapiens
  misc_RNA (1)...(19): siRNA sense strand
caauuuagcugaugauuuc

SEQ ID NO: 1442157 - RNA, 19 nt, Homo sapiens
  misc_RNA (1)...(19): siRNA sense strand
aaacaaagcuuccuagaac

SEQ ID NO: 1442158 - RNA, 19 nt, Homo sapiens
  misc_RNA (1)...(19): siRNA sense strand
gaagaacucucaacaucau

SEQ ID NO: 1442159 - RNA, 19 nt, Homo sapiens
  misc_RNA (1)...(19): siRNA sense strand
caacaucauucugcaauuu

SEQ ID NO: 1442160 - RNA, 19 nt, Homo sapiens
  misc_RNA (1)...(19): siRNA sense strand
gaagugcucuggacuaugg

SEQ ID NO: 1442161 - RNA, 19 nt, Homo sapiens
  misc_RNA (1)...(19): siRNA sense strand
gaggaaacguguacuugaa

SEQ ID NO: 1442162 - RNA, 19 nt, Homo sapiens
  misc_RNA (1)...(19): siRNA sense strand
gaaacaaagcuuccuagaa

SEQ ID NO: 1442163 - RNA, 19 nt, Homo sapiens
  misc_RNA (1)...(19): siRNA sense strand
ucacauuucugaacucgua

SEQ ID NO: 1442164 - RNA, 19 nt, Homo sapiens
  misc_RNA (1)...(19): siRNA sense strand
cagcaggccuugaaacaaa

SEQ ID NO: 1442165 - RNA, 19 nt, Homo sapiens
  misc_RNA (1)...(19): siRNA sense strand
gaagacagacaaugagauu

SEQ ID NO: 1442166 - RNA, 19 nt, Homo sapiens
  misc_RNA (1)...(19): siRNA sense strand
cagaagaacucucaacauc

SEQ ID NO: 1442167 - RNA, 19 nt, Homo sapiens
  misc_RNA (1)...(19): siRNA sense strand
caaacaaacucacauuucu

SEQ ID NO: 1442168 - RNA, 19 nt, Homo sapiens
  misc_RNA (1)...(19): siRNA sense strand
ggaaauccauacccguuug

SEQ ID NO: 1442169 - RNA, 19 nt, Homo sapiens
  misc_RNA (1)...(19): siRNA sense strand
ggaaauuugugaaugaagu

SEQ ID NO: 1442170 - RNA, 19 nt, Homo sapiens
  misc_RNA (1)...(19): siRNA sense strand
gaagcgaggagauguguuu

SEQ ID NO: 1442171 - RNA, 19 nt, Homo sapiens
  misc_RNA (1)...(19): siRNA sense strand
ggaaggagaguuacaggaa

SEQ ID NO: 1442172 - RNA, 19 nt, Homo sapiens
  misc_RNA (1)...(19): siRNA sense strand
gaauauuguugaugccuau

SEQ ID NO: 1442173 - RNA, 19 nt, Homo sapiens
  misc_RNA (1)...(19): siRNA sense strand
ggaauuguccagaugguuu

SEQ ID NO: 1442174 - RNA, 19 nt, Homo sapiens
  misc_RNA (1)...(19): siRNA sense strand
uaacaggaccaauaaauuc

SEQ ID NO: 1442175 - RNA, 19 nt, Homo sapiens
  misc_RNA (1)...(19): siRNA sense strand
cuacaaacaucagcaagaa

SEQ ID NO: 1442176 - RNA, 19 nt, Homo sapiens
  misc_RNA (1)...(19): siRNA sense strand
ggaggaaagucuauaucug

SEQ ID NO: 1442177 - RNA, 19 nt, Homo sapiens
  misc_RNA (1)...(19): siRNA sense strand
gaacaucuuuggcucuucu

SEQ ID NO: 1442178 - RNA, 19 nt, Homo sapiens
  misc_RNA (1)...(19): siRNA sense strand
gagcaaggcauggaacuaa

SEQ ID NO: 1442179 - RNA, 19 nt, Homo sapiens
  misc_RNA (1)...(19): siRNA sense strand
gaaagaagaaauucagaag

SEQ ID NO: 1442180 - RNA, 19 nt, Homo sapiens
  misc_RNA (1)...(19): siRNA sense strand
ugacagaacugaaauaccu

SEQ ID NO: 1442181 - RNA, 19 nt, Homo sapiens
  misc_RNA (1)...(19): siRNA sense strand
gcaagaaguccaaaguuuc

SEQ ID NO: 1442182 - RNA, 19 nt, Homo sapiens
  misc_RNA (1)...(19): siRNA sense strand
ggaaaccaauuuagcugau

SEQ ID NO: 1442183 - RNA, 19 nt, Homo sapiens
  misc_RNA (1)...(19): siRNA sense strand
gcagaugccacacguauca

SEQ ID NO: 1442184 - RNA, 19 nt, Homo sapiens
  misc_RNA (1)...(19): siRNA sense strand
ugaccacagugcaaucuaa

SEQ ID NO: 1442185 - RNA, 19 nt, Homo sapiens
  misc_RNA (1)...(19): siRNA sense strand
cagaagaacauauucauca

SEQ ID NO: 1442186 - RNA, 19 nt, Homo sapiens
  misc_RNA (1)...(19): siRNA sense strand
ggacgaccauggagaagag

SEQ ID NO: 1442187 - RNA, 19 nt, Homo sapiens
  misc_RNA (1)...(19): siRNA sense strand
gguggaagcugcauauugc

SEQ ID NO: 1442188 - RNA, 19 nt, Homo sapiens
  misc_RNA (1)...(19): siRNA sense strand
gaacugacagaacugaaau

SEQ ID NO: 1442189 - RNA, 19 nt, Homo sapiens
  misc_RNA (1)...(19): siRNA sense strand
cguggaugcuucugauuaa

SEQ ID NO: 1442190 - RNA, 19 nt, Homo sapiens
  misc_RNA (1)...(19): siRNA sense strand
ggaauacucauguaaugga

SEQ ID NO: 1442191 - RNA, 19 nt, Homo sapiens
  misc_RNA (1)...(19): siRNA sense strand
agaaacggcacauggaaua

SEQ ID NO: 1442192 - RNA, 19 nt, Homo sapiens
  misc_RNA (1)...(19): siRNA sense strand
gaaaccaauuuagcugaug

SEQ ID NO: 1442193 - RNA, 19 nt, Homo sapiens
  misc_RNA (1)...(19): siRNA sense strand
agcaagaaguccaaaguuu

SEQ ID NO: 1442194 - RNA, 19 nt, Homo sapiens
  misc_RNA (1)...(19): siRNA sense strand
gaagaaauucagaagaaca

SEQ ID NO: 1442195 - RNA, 19 nt, Homo sapiens
  misc_RNA (1)...(19): siRNA sense strand
gaagucagaaggugugaau

SEQ ID NO: 1442196 - RNA, 19 nt, Homo sapiens
  misc_RNA (1)...(19): siRNA sense strand
ggacuauggugaugaacag

SEQ ID NO: 1442197 - RNA, 19 nt, Homo sapiens
  misc_RNA (1)...(19): siRNA sense strand
gcacuuuggaugauucuga

SEQ ID NO: 1442198 - RNA, 19 nt, Homo sapiens
  misc_RNA (1)...(19): siRNA sense strand
guucauagccggugugauc

SEQ ID NO: 1442199 - RNA, 19 nt, Homo sapiens
  misc_RNA (1)...(19): siRNA sense strand
gaaauaccuccugaagaaa

SEQ ID NO: 1442200 - RNA, 19 nt, Homo sapiens
  misc_RNA (1)...(19): siRNA sense strand
gcagcuaccgggagauaaa

SEQ ID NO: 1442201 - RNA, 19 nt, Homo sapiens
  misc_RNA (1)...(19): siRNA sense strand
aaaccaauuuagcugauga

SEQ ID NO: 1442202 - RNA, 19 nt, Homo sapiens
  misc_RNA (1)...(19): siRNA sense strand
caacuuuggagacgucuuu

SEQ ID NO: 1442203 - RNA, 19 nt, Homo sapiens
  misc_RNA (1)...(19): siRNA sense strand
ccuguucgcugugauguuu

SEQ ID NO: 1442204 - RNA, 19 nt, Homo sapiens
  misc_RNA (1)...(19): siRNA sense strand
cugcauauaugaccggaaa

SEQ ID NO: 1442205 - RNA, 19 nt, Homo sapiens
  misc_RNA (1)...(19): siRNA sense strand
ccuggagacuguucuagaa

SEQ ID NO: 1442206 - RNA, 19 nt, Homo sapiens
  misc_RNA (1)...(19): siRNA sense strand
ccaauuuagcugaugauuu

SEQ ID NO: 1442207 - RNA, 19 nt, Homo sapiens
  misc_RNA (1)...(19): siRNA sense strand
uggcgaaucugccgaggaa

SEQ ID NO: 1442208 - RNA, 19 nt, Homo sapiens
  misc_RNA (1)...(19): siRNA sense strand
gaaccagcaggccuugaaa

SEQ ID NO: 1442209 - RNA, 19 nt, Homo sapiens
  misc_RNA (1)...(19): siRNA sense strand
ucaaacaaacucacauuuc

SEQ ID NO: 1442210 - RNA, 19 nt, Homo sapiens
  misc_RNA (1)...(19): siRNA sense strand
cgaaagaagaaauucagaa

SEQ ID NO: 1442211 - RNA, 19 nt, Homo sapiens
  misc_RNA (1)...(19): siRNA sense strand
ggaggauccugugacgaaa

SEQ ID NO: 1442212 - RNA, 19 nt, Homo sapiens
  misc_RNA (1)...(19): siRNA sense strand
cugaugauuucuuuacuga

SEQ ID NO: 1442213 - RNA, 19 nt, Homo sapiens
  misc_RNA (1)...(19): siRNA sense strand
agacagacaaugagauuug

SEQ ID NO: 1442214 - RNA, 19 nt, Homo sapiens
  misc_RNA (1)...(19): siRNA sense strand
gaagaugaaagcugucuac

SEQ ID NO: 1442215 - RNA, 19 nt, Homo sapiens
  misc_RNA (1)...(19): siRNA sense strand
cggguuugaucuacaauga

SEQ ID NO: 1442216 - RNA, 19 nt, Homo sapiens
  misc_RNA (1)...(19): siRNA sense strand
uaucugauccuacuuaugg

SEQ ID NO: 1442217 - RNA, 19 nt, Homo sapiens
  misc_RNA (1)...(19): siRNA sense strand
gcuccuggcugcacuuugg

SEQ ID NO: 1442218 - RNA, 19 nt, Homo sapiens
  misc_RNA (1)...(19): siRNA sense strand
ccuacaccaucaucacuuu

SEQ ID NO: 1442219 - RNA, 19 nt, Homo sapiens
  misc_RNA (1)...(19): siRNA sense strand
acauuuaacaggaccaaua

SEQ ID NO: 1442220 - RNA, 19 nt, Homo sapiens
  misc_RNA (1)...(19): siRNA sense strand
gcugaugauuucuuuacug

SEQ ID NO: 1442221 - RNA, 19 nt, Homo sapiens
  misc_RNA (1)...(19): siRNA sense strand
ugaaagcugucuaccacau

SEQ ID NO: 1442222 - RNA, 19 nt, Homo sapiens
  misc_RNA (1)...(19): siRNA sense strand
cgaggaaacguguacuuga

SEQ ID NO: 1442223 - RNA, 19 nt, Homo sapiens
  misc_RNA (1)...(19): siRNA sense strand
gcuaucugauccuacuuau

SEQ ID NO: 1442224 - RNA, 19 nt, Homo sapiens
  misc_RNA (1)...(19): siRNA sense strand
gguuauggcuuugauuucu

SEQ ID NO: 1442225 - RNA, 19 nt, Homo sapiens
  misc_RNA (1)...(19): siRNA sense strand
ucaacaucauucugcaauu

SEQ ID NO: 1442226 - RNA, 19 nt, Homo sapiens
  misc_RNA (1)...(19): siRNA sense strand
ggaacuuggcuucaaacaa

SEQ ID NO: 1442227 - RNA, 19 nt, Homo sapiens
  misc_RNA (1)...(19): siRNA sense strand
uaacacaaacagagucuca

SEQ ID NO: 1442228 - RNA, 19 nt, Homo sapiens
  misc_RNA (1)...(19): siRNA sense strand
ggugucauccucagccuuu

SEQ ID NO: 1442229 - RNA, 19 nt, Homo sapiens
  misc_RNA (1)...(19): siRNA sense strand
aaaugaagaugucggugau

SEQ ID NO: 1442230 - RNA, 19 nt, Homo sapiens
  misc_RNA (1)...(19): siRNA sense strand
gcgaggagauguguuuguc

SEQ ID NO: 1442231 - RNA, 19 nt, Homo sapiens
  misc_RNA (1)...(19): siRNA sense strand
aaacucacauuucugaacu

SEQ ID NO: 1442232 - RNA, 19 nt, Homo sapiens
  misc_RNA (1)...(19): siRNA sense strand
cauuuaacaggaccaauaa

SEQ ID NO: 1442233 - RNA, 19 nt, Homo sapiens
  misc_RNA (1)...(19): siRNA sense strand
gaagaugccacugagaaca

SEQ ID NO: 1442234 - RNA, 19 nt, Homo sapiens
  misc_RNA (1)...(19): siRNA sense strand
ugauuacccuggagacugu

SEQ ID NO: 1442235 - RNA, 19 nt, Homo sapiens
  misc_RNA (1)...(19): siRNA sense strand
ucaucaaggugcagaagau

SEQ ID NO: 1442236 - RNA, 19 nt, Homo sapiens
  misc_RNA (1)...(19): siRNA sense strand
ugagacggaaaccaauuua

SEQ ID NO: 1442237 - RNA, 19 nt, Homo sapiens
  misc_RNA (1)...(19): siRNA sense strand
ugauuaagccguuuauucu

SEQ ID NO: 1442238 - RNA, 19 nt, Homo sapiens
  misc_RNA (1)...(19): siRNA sense strand
acacggguuugaucuacaa

SEQ ID NO: 1442239 - RNA, 19 nt, Homo sapiens
  misc_RNA (1)...(19): siRNA sense strand
cgacugcacuggguugagu

SEQ ID NO: 1442240 - RNA, 19 nt, Homo sapiens
  misc_RNA (1)...(19): siRNA sense strand
gcucuggacuauggugaug

SEQ ID NO: 1442241 - RNA, 19 nt, Homo sapiens
  misc_RNA (1)...(19): siRNA sense strand
ccacuucaucaacauguuu

SEQ ID NO: 1442242 - RNA, 19 nt, Homo sapiens
  misc_RNA (1)...(19): siRNA sense strand
ggagcaaggcauggaacua

SEQ ID NO: 1442243 - RNA, 19 nt, Homo sapiens
  misc_RNA (1)...(19): siRNA sense strand
gggcugcauuucaaacaca

SEQ ID NO: 1442244 - RNA, 19 nt, Homo sapiens
  misc_RNA (1)...(19): siRNA sense strand
aagaagaugccacugagaa

SEQ ID NO: 1442245 - RNA, 19 nt, Homo sapiens
  misc_RNA (1)...(19): siRNA sense strand
gauuaagccguuuauucuu

SEQ ID NO: 1442246 - RNA, 19 nt, Homo sapiens
  misc_RNA (1)...(19): siRNA sense strand
gugguuauggcuuugauuu

SEQ ID NO: 1442247 - RNA, 19 nt, Homo sapiens
  misc_RNA (1)...(19): siRNA sense strand
cagcaagaaguccaaaguu

SEQ ID NO: 1442248 - RNA, 19 nt, Homo sapiens
  misc_RNA (1)...(19): siRNA sense strand
gacgcuugcucucccagaa

SEQ ID NO: 1442249 - RNA, 19 nt, Homo sapiens
  misc_RNA (1)...(19): siRNA sense strand
ccguggaugcuucugauua

SEQ ID NO: 1442250 - RNA, 19 nt, Homo sapiens
  misc_RNA (1)...(19): siRNA sense strand
gacaguagccauccuucug

SEQ ID NO: 1442251 - RNA, 19 nt, Homo sapiens
  misc_RNA (1)...(19): siRNA sense strand
ugguucaguucaaagauuu

SEQ ID NO: 1442252 - RNA, 19 nt, Homo sapiens
  misc_RNA (1)...(19): siRNA sense strand
gaacauugaaggugauagc

SEQ ID NO: 1442253 - RNA, 19 nt, Homo sapiens
  misc_RNA (1)...(19): siRNA sense strand
gaacuuggcuucaaacaaa

SEQ ID NO: 1442254 - RNA, 19 nt, Homo sapiens
  misc_RNA (1)...(19): siRNA sense strand
ugaaauaccuccugaagaa

SEQ ID NO: 1442255 - RNA, 19 nt, Homo sapiens
  misc_RNA (1)...(19): siRNA sense strand
gaagaucugugauggguuu

SEQ ID NO: 1442256 - RNA, 19 nt, Homo sapiens
  misc_RNA (1)...(19): siRNA sense strand
caauuuagcugaugauuuc

SEQ ID NO: 1442257 - RNA, 19 nt, Homo sapiens
  misc_RNA (1)...(19): siRNA sense strand
aaacaaagcuuccuagaac

SEQ ID NO: 1442258 - RNA, 19 nt, Homo sapiens
  misc_RNA (1)...(19): siRNA sense strand
gaagaacucucaacaucau

SEQ ID NO: 1442259 - RNA, 19 nt, Homo sapiens
  misc_RNA (1)...(19): siRNA sense strand
caacaucauucugcaauuu

SEQ ID NO: 1442260 - RNA, 19 nt, Homo sapiens
  misc_RNA (1)...(19): siRNA sense strand
gaagugcucuggacuaugg

SEQ ID NO: 1442261 - RNA, 19 nt, Homo sapiens
  misc_RNA (1)...(19): siRNA sense strand
gaggaaacguguacuugaa

SEQ ID NO: 1442262 - RNA, 19 nt, Homo sapiens
  misc_RNA (1)...(19): siRNA sense strand
gaaacaaagcuuccuagaa

SEQ ID NO: 1442263 - RNA, 19 nt, Homo sapiens
  misc_RNA (1)...(19): siRNA sense strand
ucacauuucugaacucgua

SEQ ID NO: 1442264 - RNA, 19 nt, Homo sapiens
  misc_RNA (1)...(19): siRNA sense strand
cagcaggccuugaaacaaa

SEQ ID NO: 1442265 - RNA, 19 nt, Homo sapiens
  misc_RNA (1)...(19): siRNA sense strand
gaagacagacaaugagauu

SEQ ID NO: 1442266 - RNA, 19 nt, Homo sapiens
  misc_RNA (1)...(19): siRNA sense strand
cagaagaacucucaacauc

SEQ ID NO: 1442267 - RNA, 19 nt, Homo sapiens
  misc_RNA (1)...(19): siRNA sense strand
caaacaaacucacauuucu

SEQ ID NO: 1442268 - RNA, 19 nt, Homo sapiens
  misc_RNA (1)...(19): siRNA sense strand
ggaaauccauacccguuug

SEQ ID NO: 1442269 - RNA, 19 nt, Homo sapiens
  misc_RNA (1)...(19): siRNA sense strand
ggaaauuugugaaugaagu

SEQ ID NO: 1442270 - RNA, 19 nt, Homo sapiens
  misc_RNA (1)...(19): siRNA sense strand
gaagcgaggagauguguuu

SEQ ID NO: 1442271 - RNA, 19 nt, Homo sapiens
  misc_RNA (1)...(19): siRNA sense strand
ggaaggagaguuacaggaa

SEQ ID NO: 1442272 - RNA, 19 nt, Homo sapiens
  misc_RNA (1)...(19): siRNA sense strand
gaauauuguugaugccuau

SEQ ID NO: 1442273 - RNA, 19 nt, Homo sapiens
  misc_RNA (1)...(19): siRNA sense strand
ggaauuguccagaugguuu

SEQ ID NO: 1442274 - RNA, 19 nt, Homo sapiens
  misc_RNA (1)...(19): siRNA sense strand
uaacaggaccaauaaauuc

SEQ ID NO: 1442275 - RNA, 19 nt, Homo sapiens
  misc_RNA (1)...(19): siRNA sense strand
cuacaaacaucagcaagaa

SEQ ID NO: 1442276 - RNA, 19 nt, Homo sapiens
  misc_RNA (1)...(19): siRNA sense strand
ggaggaaagucuauaucug

SEQ ID NO: 1442277 - RNA, 19 nt, Homo sapiens
  misc_RNA (1)...(19): siRNA sense strand
gaacaucuuuggcucuucu

SEQ ID NO: 1442278 - RNA, 19 nt, Homo sapiens
  misc_RNA (1)...(19): siRNA sense strand
gagcaaggcauggaacuaa

SEQ ID NO: 1442279 - RNA, 19 nt, Homo sapiens
  misc_RNA (1)...(19): siRNA sense strand
gaaagaagaaauucagaag

SEQ ID NO: 1442280 - RNA, 19 nt, Homo sapiens
  misc_RNA (1)...(19): siRNA sense strand
ugacagaacugaaauaccu

SEQ ID NO: 1442281 - RNA, 19 nt, Homo sapiens
  misc_RNA (1)...(19): siRNA sense strand
gcaagaaguccaaaguuuc

SEQ ID NO: 1442282 - RNA, 19 nt, Homo sapiens
  misc_RNA (1)...(19): siRNA sense strand
ggaaaccaauuuagcugau

SEQ ID NO: 1442283 - RNA, 19 nt, Homo sapiens
  misc_RNA (1)...(19): siRNA sense strand
gcagaugccacacguauca

SEQ ID NO: 1442284 - RNA, 19 nt, Homo sapiens
  misc_RNA (1)...(19): siRNA sense strand
ugaccacagugcaaucuaa

SEQ ID NO: 1442285 - RNA, 19 nt, Homo sapiens
  misc_RNA (1)...(19): siRNA sense strand
cagaagaacauauucauca

SEQ ID NO: 1442286 - RNA, 19 nt, Homo sapiens
  misc_RNA (1)...(19): siRNA sense strand
ggacgaccauggagaagag

SEQ ID NO: 1442287 - RNA, 19 nt, Homo sapiens
  misc_RNA (1)...(19): siRNA sense strand
gguggaagcugcauauugc

SEQ ID NO: 1442288 - RNA, 19 nt, Homo sapiens
  misc_RNA (1)...(19): siRNA sense strand
gaacugacagaacugaaau

SEQ ID NO: 1442289 - RNA, 19 nt, Homo sapiens
  misc_RNA (1)...(19): siRNA sense strand
cguggaugcuucugauuaa

SEQ ID NO: 1442290 - RNA, 19 nt, Homo sapiens
  misc_RNA (1)...(19): siRNA sense strand
ggaauacucauguaaugga

SEQ ID NO: 1442291 - RNA, 19 nt, Homo sapiens
  misc_RNA (1)...(19): siRNA sense strand
agaaacggcacauggaaua

SEQ ID NO: 1442292 - RNA, 19 nt, Homo sapiens
  misc_RNA (1)...(19): siRNA sense strand
gaaaccaauuuagcugaug

SEQ ID NO: 1442293 - RNA, 19 nt, Homo sapiens
  misc_RNA (1)...(19): siRNA sense strand
agcaagaaguccaaaguuu

SEQ ID NO: 1442294 - RNA, 19 nt, Homo sapiens
  misc_RNA (1)...(19): siRNA sense strand
gaagaaauucagaagaaca

SEQ ID NO: 1442295 - RNA, 19 nt, Homo sapiens
  misc_RNA (1)...(19): siRNA sense strand
gaagucagaaggugugaau

SEQ ID NO: 1442296 - RNA, 19 nt, Homo sapiens
  misc_RNA (1)...(19): siRNA sense strand
ggacuauggugaugaacag

SEQ ID NO: 1442297 - RNA, 19 nt, Homo sapiens
  misc_RNA (1)...(19): siRNA sense strand
gcacuuuggaugauucuga

SEQ ID NO: 1442298 - RNA, 19 nt, Homo sapiens
  misc_RNA (1)...(19): siRNA sense strand
guucauagccggugugauc

SEQ ID NO: 1442299 - RNA, 19 nt, Homo sapiens
  misc_RNA (1)...(19): siRNA sense strand
gaaauaccuccugaagaaa

SEQ ID NO: 1442300 - RNA, 19 nt, Homo sapiens
  misc_RNA (1)...(19): siRNA sense strand
gcagcuaccgggagauaaa

SEQ ID NO: 1442301 - RNA, 19 nt, Homo sapiens
  misc_RNA (1)...(19): siRNA sense strand
aaaccaauuuagcugauga

SEQ ID NO: 1442302 - RNA, 19 nt, Homo sapiens
  misc_RNA (1)...(19): siRNA sense strand
caacuuuggagacgucuuu

SEQ ID NO: 1442303 - RNA, 19 nt, Homo sapiens
  misc_RNA (1)...(19): siRNA sense strand
ccuguucgcugugauguuu

SEQ ID NO: 1442304 - RNA, 19 nt, Homo sapiens
  misc_RNA (1)...(19): siRNA sense strand
cugcauauaugaccggaaa

SEQ ID NO: 1442305 - RNA, 19 nt, Homo sapiens
  misc_RNA (1)...(19): siRNA sense strand
ccuggagacuguucuagaa

SEQ ID NO: 1442306 - RNA, 19 nt, Homo sapiens
  misc_RNA (1)...(19): siRNA sense strand
ccaauuuagcugaugauuu

SEQ ID NO: 1442307 - RNA, 19 nt, Homo sapiens
  misc_RNA (1)...(19): siRNA sense strand
uggcgaaucugccgaggaa

SEQ ID NO: 1442308 - RNA, 19 nt, Homo sapiens
  misc_RNA (1)...(19): siRNA sense strand
gaaccagcaggccuugaaa

SEQ ID NO: 1442309 - RNA, 19 nt, Homo sapiens
  misc_RNA (1)...(19): siRNA sense strand
ucaaacaaacucacauuuc

SEQ ID NO: 1442310 - RNA, 19 nt, Homo sapiens
  misc_RNA (1)...(19): siRNA sense strand
cgaaagaagaaauucagaa

SEQ ID NO: 1442311 - RNA, 19 nt, Homo sapiens
  misc_RNA (1)...(19): siRNA sense strand
ggaggauccugugacgaaa

SEQ ID NO: 1442312 - RNA, 19 nt, Homo sapiens
  misc_RNA (1)...(19): siRNA sense strand
cugaugauuucuuuacuga

SEQ ID NO: 1442313 - RNA, 19 nt, Homo sapiens
  misc_RNA (1)...(19): siRNA sense strand
agacagacaaugagauuug

SEQ ID NO: 1442314 - RNA, 19 nt, Homo sapiens
  misc_RNA (1)...(19): siRNA sense strand
gaagaugaaagcugucuac

SEQ ID NO: 1442315 - RNA, 19 nt, Homo sapiens
  misc_RNA (1)...(19): siRNA sense strand
cggguuugaucuacaauga

SEQ ID NO: 1442316 - RNA, 19 nt, Homo sapiens
  misc_RNA (1)...(19): siRNA sense strand
uaucugauccuacuuaugg

SEQ ID NO: 1442317 - RNA, 19 nt, Homo sapiens
  misc_RNA (1)...(19): siRNA sense strand
gcuccuggcugcacuuugg

SEQ ID NO: 1442318 - RNA, 19 nt, Homo sapiens
  misc_RNA (1)...(19): siRNA sense strand
ccuacaccaucaucacuuu

SEQ ID NO: 1442319 - RNA, 19 nt, Homo sapiens
  misc_RNA (1)...(19): siRNA sense strand
acauuuaacaggaccaaua

SEQ ID NO: 1442320 - RNA, 19 nt, Homo sapiens
  misc_RNA (1)...(19): siRNA sense strand
gcugaugauuucuuuacug

SEQ ID NO: 1442321 - RNA, 19 nt, Homo sapiens
  misc_RNA (1)...(19): siRNA sense strand
ugaaagcugucuaccacau

SEQ ID NO: 1442322 - RNA, 19 nt, Homo sapiens
  misc_RNA (1)...(19): siRNA sense strand
cgaggaaacguguacuuga

SEQ ID NO: 1442323 - RNA, 19 nt, Homo sapiens
  misc_RNA (1)...(19): siRNA sense strand
gcuaucugauccuacuuau

SEQ ID NO: 1442324 - RNA, 19 nt, Homo sapiens
  misc_RNA (1)...(19): siRNA sense strand
gguuauggcuuugauuucu

SEQ ID NO: 1442325 - RNA, 19 nt, Homo sapiens
  misc_RNA (1)...(19): siRNA sense strand
ucaacaucauucugcaauu

SEQ ID NO: 1442326 - RNA, 19 nt, Homo sapiens
  misc_RNA (1)...(19): siRNA sense strand
ggaacuuggcuucaaacaa

SEQ ID NO: 1442327 - RNA, 19 nt, Homo sapiens
  misc_RNA (1)...(19): siRNA sense strand
uaacacaaacagagucuca

SEQ ID NO: 1442328 - RNA, 19 nt, Homo sapiens
  misc_RNA (1)...(19): siRNA sense strand
ggugucauccucagccuuu

SEQ ID NO: 1442329 - RNA, 19 nt, Homo sapiens
  misc_RNA (1)...(19): siRNA sense strand
aaaugaagaugucggugau

SEQ ID NO: 1442330 - RNA, 19 nt, Homo sapiens
  misc_RNA (1)...(19): siRNA sense strand
gcgaggagauguguuuguc

SEQ ID NO: 1442331 - RNA, 19 nt, Homo sapiens
  misc_RNA (1)...(19): siRNA sense strand
aaacucacauuucugaacu

SEQ ID NO: 1442332 - RNA, 19 nt, Homo sapiens
  misc_RNA (1)...(19): siRNA sense strand
cauuuaacaggaccaauaa

SEQ ID NO: 1442333 - RNA, 19 nt, Homo sapiens
  misc_RNA (1)...(19): siRNA sense strand
gaagaugccacugagaaca

SEQ ID NO: 1442334 - RNA, 19 nt, Homo sapiens
  misc_RNA (1)...(19): siRNA sense strand
ugauuacccuggagacugu

SEQ ID NO: 1442335 - RNA, 19 nt, Homo sapiens
  misc_RNA (1)...(19): siRNA sense strand
ucaucaaggugcagaagau

SEQ ID NO: 1442336 - RNA, 19 nt, Homo sapiens
  misc_RNA (1)...(19): siRNA sense strand
ugagacggaaaccaauuua

SEQ ID NO: 1442337 - RNA, 19 nt, Homo sapiens
  misc_RNA (1)...(19): siRNA sense strand
ugauuaagccguuuauucu

SEQ ID NO: 1442338 - RNA, 19 nt, Homo sapiens
  misc_RNA (1)...(19): siRNA sense strand
acacggguuugaucuacaa

SEQ ID NO: 1442339 - RNA, 19 nt, Homo sapiens
  misc_RNA (1)...(19): siRNA sense strand
cgacugcacuggguugagu

SEQ ID NO: 1442340 - RNA, 19 nt, Homo sapiens
  misc_RNA (1)...(19): siRNA sense strand
gcucuggacuauggugaug

SEQ ID NO: 1442341 - RNA, 19 nt, Homo sapiens
  misc_RNA (1)...(19): siRNA sense strand
ccacuucaucaacauguuu

SEQ ID NO: 1442342 - RNA, 19 nt, Homo sapiens
  misc_RNA (1)...(19): siRNA sense strand
ggagcaaggcauggaacua

SEQ ID NO: 1442343 - RNA, 19 nt, Homo sapiens
  misc_RNA (1)...(19): siRNA sense strand
gggcugcauuucaaacaca

SEQ ID NO: 1442344 - RNA, 19 nt, Homo sapiens
  misc_RNA (1)...(19): siRNA sense strand
aagaagaugccacugagaa

SEQ ID NO: 1442345 - RNA, 19 nt, Homo sapiens
  misc_RNA (1)...(19): siRNA sense strand
gauuaagccguuuauucuu

SEQ ID NO: 1442346 - RNA, 19 nt, Homo sapiens
  misc_RNA (1)...(19): siRNA sense strand
gugguuauggcuuugauuu

SEQ ID NO: 1442347 - RNA, 19 nt, Homo sapiens
  misc_RNA (1)...(19): siRNA sense strand
cagcaagaaguccaaaguu

SEQ ID NO: 1442348 - RNA, 19 nt, Homo sapiens
  misc_RNA (1)...(19): siRNA sense strand
gacgcuugcucucccagaa

SEQ ID NO: 1442349 - RNA, 19 nt, Homo sapiens
  misc_RNA (1)...(19): siRNA sense strand
ccguggaugcuucugauua

SEQ ID NO: 1442350 - RNA, 19 nt, Homo sapiens
  misc_RNA (1)...(19): siRNA sense strand
gacaguagccauccuucug

SEQ ID NO: 1442351 - RNA, 19 nt, Homo sapiens
  misc_RNA (1)...(19): siRNA sense strand
ugguucaguucaaagauuu

SEQ ID NO: 1442352 - RNA, 19 nt, Homo sapiens
  misc_RNA (1)...(19): siRNA sense strand
gaacauugaaggugauagc

SEQ ID NO: 1442353 - RNA, 19 nt, Homo sapiens
  misc_RNA (1)...(19): siRNA sense strand
gaacuuggcuucaaacaaa

SEQ ID NO: 1442354 - RNA, 19 nt, Homo sapiens
  misc_RNA (1)...(19): siRNA sense strand
ugaaauaccuccugaagaa

SEQ ID NO: 1442355 - RNA, 19 nt, Homo sapiens
  misc_RNA (1)...(19): siRNA sense strand
gaagaucugugauggguuu

SEQ ID NO: 1442356 - RNA, 19 nt, Homo sapiens
  misc_RNA (1)...(19): siRNA sense strand
caauuuagcugaugauuuc

SEQ ID NO: 1442357 - RNA, 19 nt, Homo sapiens
  misc_RNA (1)...(19): siRNA sense strand
aaacaaagcuuccuagaac

SEQ ID NO: 1442358 - RNA, 19 nt, Homo sapiens
  misc_RNA (1)...(19): siRNA sense strand
gaagaacucucaacaucau

SEQ ID NO: 1442359 - RNA, 19 nt, Homo sapiens
  misc_RNA (1)...(19): siRNA sense strand
caacaucauucugcaauuu

SEQ ID NO: 1442360 - RNA, 19 nt, Homo sapiens
  misc_RNA (1)...(19): siRNA sense strand
gaagugcucuggacuaugg

SEQ ID NO: 1442361 - RNA, 19 nt, Homo sapiens
  misc_RNA (1)...(19): siRNA sense strand
gaggaaacguguacuugaa

SEQ ID NO: 1442362 - RNA, 19 nt, Homo sapiens
  misc_RNA (1)...(19): siRNA sense strand
gaaacaaagcuuccuagaa

SEQ ID NO: 1442363 - RNA, 19 nt, Homo sapiens
  misc_RNA (1)...(19): siRNA sense strand
ucacauuucugaacucgua

SEQ ID NO: 1442364 - RNA, 19 nt, Homo sapiens
  misc_RNA (1)...(19): siRNA sense strand
cagcaggccuugaaacaaa

SEQ ID NO: 1442365 - RNA, 19 nt, Homo sapiens
  misc_RNA (1)...(19): siRNA sense strand
gaagacagacaaugagauu

SEQ ID NO: 1442366 - RNA, 19 nt, Homo sapiens
  misc_RNA (1)...(19): siRNA sense strand
cagaagaacucucaacauc

SEQ ID NO: 1442367 - RNA, 19 nt, Homo sapiens
  misc_RNA (1)...(19): siRNA sense strand
caaacaaacucacauuucu

SEQ ID NO: 1442368 - RNA, 19 nt, Homo sapiens
  misc_RNA (1)...(19): siRNA sense strand
ggaaauccauacccguuug

SEQ ID NO: 1442369 - RNA, 19 nt, Homo sapiens
  misc_RNA (1)...(19): siRNA sense strand
ggaaauuugugaaugaagu

SEQ ID NO: 1442370 - RNA, 19 nt, Homo sapiens
  misc_RNA (1)...(19): siRNA sense strand
gaagcgaggagauguguuu

SEQ ID NO: 1442371 - RNA, 19 nt, Homo sapiens
  misc_RNA (1)...(19): siRNA sense strand
ggaaggagaguuacaggaa

SEQ ID NO: 1442372 - RNA, 19 nt, Homo sapiens
  misc_RNA (1)...(19): siRNA sense strand
gaauauuguugaugccuau

SEQ ID NO: 1442373 - RNA, 19 nt, Homo sapiens
  misc_RNA (1)...(19): siRNA sense strand
ggaauuguccagaugguuu

SEQ ID NO: 1442374 - RNA, 19 nt, Homo sapiens
  misc_RNA (1)...(19): siRNA sense strand
uaacaggaccaauaaauuc

SEQ ID NO: 1442375 - RNA, 19 nt, Homo sapiens
  misc_RNA (1)...(19): siRNA sense strand
cuacaaacaucagcaagaa

SEQ ID NO: 1442376 - RNA, 19 nt, Homo sapiens
  misc_RNA (1)...(19): siRNA sense strand
ggaggaaagucuauaucug

SEQ ID NO: 1442377 - RNA, 19 nt, Homo sapiens
  misc_RNA (1)...(19): siRNA sense strand
gaacaucuuuggcucuucu

SEQ ID NO: 1442378 - RNA, 19 nt, Homo sapiens
  misc_RNA (1)...(19): siRNA sense strand
gagcaaggcauggaacuaa

SEQ ID NO: 1442379 - RNA, 19 nt, Homo sapiens
  misc_RNA (1)...(19): siRNA sense strand
gaaagaagaaauucagaag

SEQ ID NO: 1442380 - RNA, 19 nt, Homo sapiens
  misc_RNA (1)...(19): siRNA sense strand
ugacagaacugaaauaccu

SEQ ID NO: 1442381 - RNA, 19 nt, Homo sapiens
  misc_RNA (1)...(19): siRNA sense strand
gcaagaaguccaaaguuuc

SEQ ID NO: 1442382 - RNA, 19 nt, Homo sapiens
  misc_RNA (1)...(19): siRNA sense strand
ggaaaccaauuuagcugau

SEQ ID NO: 1442383 - RNA, 19 nt, Homo sapiens
  misc_RNA (1)...(19): siRNA sense strand
gcagaugccacacguauca

SEQ ID NO: 1442384 - RNA, 19 nt, Homo sapiens
  misc_RNA (1)...(19): siRNA sense strand
ugaccacagugcaaucuaa

SEQ ID NO: 1442385 - RNA, 19 nt, Homo sapiens
  misc_RNA (1)...(19): siRNA sense strand
cagaagaacauauucauca

SEQ ID NO: 1442386 - RNA, 19 nt, Homo sapiens
  misc_RNA (1)...(19): siRNA sense strand
ggacgaccauggagaagag

SEQ ID NO: 1442387 - RNA, 19 nt, Homo sapiens
  misc_RNA (1)...(19): siRNA sense strand
gguggaagcugcauauugc

SEQ ID NO: 1442388 - RNA, 19 nt, Homo sapiens
  misc_RNA (1)...(19): siRNA sense strand
gaacugacagaacugaaau

SEQ ID NO: 1442389 - RNA, 19 nt, Homo sapiens
  misc_RNA (1)...(19): siRNA sense strand
cguggaugcuucugauuaa

SEQ ID NO: 1442390 - RNA, 19 nt, Homo sapiens
  misc_RNA (1)...(19): siRNA sense strand
ggaauacucauguaaugga

SEQ ID NO: 1442391 - RNA, 19 nt, Homo sapiens
  misc_RNA (1)...(19): siRNA sense strand
agaaacggcacauggaaua

SEQ ID NO: 1442392 - RNA, 19 nt, Homo sapiens
  misc_RNA (1)...(19): siRNA sense strand
gaaaccaauuuagcugaug

SEQ ID NO: 1442393 - RNA, 19 nt, Homo sapiens
  misc_RNA (1)...(19): siRNA sense strand
agcaagaaguccaaaguuu

SEQ ID NO: 1442394 - RNA, 19 nt, Homo sapiens
  misc_RNA (1)...(19): siRNA sense strand
gaagaaauucagaagaaca

SEQ ID NO: 1442395 - RNA, 19 nt, Homo sapiens
  misc_RNA (1)...(19): siRNA sense strand
gaagucagaaggugugaau

SEQ ID NO: 1442396 - RNA, 19 nt, Homo sapiens
  misc_RNA (1)...(19): siRNA sense strand
ggacuauggugaugaacag

SEQ ID NO: 1442397 - RNA, 19 nt, Homo sapiens
  misc_RNA (1)...(19): siRNA sense strand
gcacuuuggaugauucuga

SEQ ID NO: 1442398 - RNA, 19 nt, Homo sapiens
  misc_RNA (1)...(19): siRNA sense strand
guucauagccggugugauc

SEQ ID NO: 1442399 - RNA, 19 nt, Homo sapiens
  misc_RNA (1)...(19): siRNA sense strand
gaaauaccuccugaagaaa

SEQ ID NO: 1442400 - RNA, 19 nt, Homo sapiens
  misc_RNA (1)...(19): siRNA sense strand
gcagcuaccgggagauaaa

SEQ ID NO: 1442401 - RNA, 19 nt, Homo sapiens
  misc_RNA (1)...(19): siRNA sense strand
aaaccaauuuagcugauga

SEQ ID NO: 1442402 - RNA, 19 nt, Homo sapiens
  misc_RNA (1)...(19): siRNA sense strand
caacuuuggagacgucuuu

SEQ ID NO: 1442403 - RNA, 19 nt, Homo sapiens
  misc_RNA (1)...(19): siRNA sense strand
ccuguucgcugugauguuu

SEQ ID NO: 1442404 - RNA, 19 nt, Homo sapiens
  misc_RNA (1)...(19): siRNA sense strand
cugcauauaugaccggaaa

SEQ ID NO: 1442405 - RNA, 19 nt, Homo sapiens
  misc_RNA (1)...(19): siRNA sense strand
ccuggagacuguucuagaa

SEQ ID NO: 1442406 - RNA, 19 nt, Homo sapiens
  misc_RNA (1)...(19): siRNA sense strand
ccaauuuagcugaugauuu

SEQ ID NO: 1442407 - RNA, 19 nt, Homo sapiens
  misc_RNA (1)...(19): siRNA sense strand
uggcgaaucugccgaggaa

SEQ ID NO: 1442408 - RNA, 19 nt, Homo sapiens
  misc_RNA (1)...(19): siRNA sense strand
gaaccagcaggccuugaaa

SEQ ID NO: 1442409 - RNA, 19 nt, Homo sapiens
  misc_RNA (1)...(19): siRNA sense strand
ucaaacaaacucacauuuc

SEQ ID NO: 1442410 - RNA, 19 nt, Homo sapiens
  misc_RNA (1)...(19): siRNA sense strand
cgaaagaagaaauucagaa

SEQ ID NO: 1442411 - RNA, 19 nt, Homo sapiens
  misc_RNA (1)...(19): siRNA sense strand
ggaggauccugugacgaaa

SEQ ID NO: 1442412 - RNA, 19 nt, Homo sapiens
  misc_RNA (1)...(19): siRNA sense strand
cugaugauuucuuuacuga

SEQ ID NO: 1442413 - RNA, 19 nt, Homo sapiens
  misc_RNA (1)...(19): siRNA sense strand
agacagacaaugagauuug

SEQ ID NO: 1442414 - RNA, 19 nt, Homo sapiens
  misc_RNA (1)...(19): siRNA sense strand
gaagaugaaagcugucuac

SEQ ID NO: 1442415 - RNA, 19 nt, Homo sapiens
  misc_RNA (1)...(19): siRNA sense strand
cggguuugaucuacaauga

SEQ ID NO: 1442416 - RNA, 19 nt, Homo sapiens
  misc_RNA (1)...(19): siRNA sense strand
uaucugauccuacuuaugg

SEQ ID NO: 1442417 - RNA, 19 nt, Homo sapiens
  misc_RNA (1)...(19): siRNA sense strand
gcuccuggcugcacuuugg

SEQ ID NO: 1442418 - RNA, 19 nt, Homo sapiens
  misc_RNA (1)...(19): siRNA sense strand
ccuacaccaucaucacuuu

SEQ ID NO: 1442419 - RNA, 19 nt, Homo sapiens
  misc_RNA (1)...(19): siRNA sense strand
acauuuaacaggaccaaua

SEQ ID NO: 1442420 - RNA, 19 nt, Homo sapiens
  misc_RNA (1)...(19): siRNA sense strand
gcugaugauuucuuuacug

SEQ ID NO: 1442421 - RNA, 19 nt, Homo sapiens
  misc_RNA (1)...(19): siRNA sense strand
ugaaagcugucuaccacau

SEQ ID NO: 1442422 - RNA, 19 nt, Homo sapiens
  misc_RNA (1)...(19): siRNA sense strand
cgaggaaacguguacuuga

SEQ ID NO: 1442423 - RNA, 19 nt, Homo sapiens
  misc_RNA (1)...(19): siRNA sense strand
gcuaucugauccuacuuau

SEQ ID NO: 1442424 - RNA, 19 nt, Homo sapiens
  misc_RNA (1)...(19): siRNA sense strand
gguuauggcuuugauuucu

SEQ ID NO: 1442425 - RNA, 19 nt, Homo sapiens
  misc_RNA (1)...(19): siRNA sense strand
ucaacaucauucugcaauu

SEQ ID NO: 1442426 - RNA, 19 nt, Homo sapiens
  misc_RNA (1)...(19): siRNA sense strand
ggaacuuggcuucaaacaa

SEQ ID NO: 1442427 - RNA, 19 nt, Homo sapiens
  misc_RNA (1)...(19): siRNA sense strand
uaacacaaacagagucuca

SEQ ID NO: 1442428 - RNA, 19 nt, Homo sapiens
  misc_RNA (1)...(19): siRNA sense strand
ggugucauccucagccuuu

SEQ ID NO: 1442429 - RNA, 19 nt, Homo sapiens
  misc_RNA (1)...(19): siRNA sense strand
aaaugaagaugucggugau

SEQ ID NO: 1442430 - RNA, 19 nt, Homo sapiens
  misc_RNA (1)...(19): siRNA sense strand
gcgaggagauguguuuguc

SEQ ID NO: 1442431 - RNA, 19 nt, Homo sapiens
  misc_RNA (1)...(19): siRNA sense strand
aaacucacauuucugaacu

SEQ ID NO: 1442432 - RNA, 19 nt, Homo sapiens
  misc_RNA (1)...(19): siRNA sense strand
cauuuaacaggaccaauaa

SEQ ID NO: 1442433 - RNA, 19 nt, Homo sapiens
  misc_RNA (1)...(19): siRNA sense strand
gaagaugccacugagaaca

SEQ ID NO: 1442434 - RNA, 19 nt, Homo sapiens
  misc_RNA (1)...(19): siRNA sense strand
ugauuacccuggagacugu

SEQ ID NO: 1442435 - RNA, 19 nt, Homo sapiens
  misc_RNA (1)...(19): siRNA sense strand
ucaucaaggugcagaagau

SEQ ID NO: 1442436 - RNA, 19 nt, Homo sapiens
  misc_RNA (1)...(19): siRNA sense strand
ugagacggaaaccaauuua

SEQ ID NO: 1442437 - RNA, 19 nt, Homo sapiens
  misc_RNA (1)...(19): siRNA sense strand
ugauuaagccguuuauucu

SEQ ID NO: 1442438 - RNA, 19 nt, Homo sapiens
  misc_RNA (1)...(19): siRNA sense strand
acacggguuugaucuacaa

SEQ ID NO: 1442439 - RNA, 19 nt, Homo sapiens
  misc_RNA (1)...(19): siRNA sense strand
cgacugcacuggguugagu

SEQ ID NO: 1442440 - RNA, 19 nt, Homo sapiens
  misc_RNA (1)...(19): siRNA sense strand
gcucuggacuauggugaug

SEQ ID NO: 1442441 - RNA, 19 nt, Homo sapiens
  misc_RNA (1)...(19): siRNA sense strand
ccacuucaucaacauguuu

SEQ ID NO: 1442442 - RNA, 19 nt, Homo sapiens
  misc_RNA (1)...(19): siRNA sense strand
ggagcaaggcauggaacua

SEQ ID NO: 1442443 - RNA, 19 nt, Homo sapiens
  misc_RNA (1)...(19): siRNA sense strand
gggcugcauuucaaacaca

SEQ ID NO: 1442444 - RNA, 19 nt, Homo sapiens
  misc_RNA (1)...(19): siRNA sense strand
aagaagaugccacugagaa

SEQ ID NO: 1442445 - RNA, 19 nt, Homo sapiens
  misc_RNA (1)...(19): siRNA sense strand
gauuaagccguuuauucuu

SEQ ID NO: 1442446 - RNA, 19 nt, Homo sapiens
  misc_RNA (1)...(19): siRNA sense strand
gugguuauggcuuugauuu

SEQ ID NO: 1442447 - RNA, 19 nt, Homo sapiens
  misc_RNA (1)...(19): siRNA sense strand
cagcaagaaguccaaaguu

SEQ ID NO: 1442448 - RNA, 19 nt, Homo sapiens
  misc_RNA (1)...(19): siRNA sense strand
gacgcuugcucucccagaa

SEQ ID NO: 1442449 - RNA, 19 nt, Homo sapiens
  misc_RNA (1)...(19): siRNA sense strand
ccguggaugcuucugauua

SEQ ID NO: 1442450 - RNA, 19 nt, Homo sapiens
  misc_RNA (1)...(19): siRNA sense strand
gacaguagccauccuucug

SEQ ID NO: 1442451 - RNA, 19 nt, Homo sapiens
  misc_RNA (1)...(19): siRNA sense strand
ugguucaguucaaagauuu

SEQ ID NO: 1442452 - RNA, 19 nt, Homo sapiens
  misc_RNA (1)...(19): siRNA sense strand
gaacauugaaggugauagc

SEQ ID NO: 1442453 - RNA, 19 nt, Homo sapiens
  misc_RNA (1)...(19): siRNA sense strand
gcagugaccuucaaaguga

SEQ ID NO: 1442454 - RNA, 19 nt, Homo sapiens
  misc_RNA (1)...(19): siRNA sense strand
ggagacagcuuuccagaug

SEQ ID NO: 1442455 - RNA, 19 nt, Homo sapiens
  misc_RNA (1)...(19): siRNA sense strand
ggaaaccucuggacugaaa

SEQ ID NO: 1442456 - RNA, 19 nt, Homo sapiens
  misc_RNA (1)...(19): siRNA sense strand
ccacgggucucgacucuua

SEQ ID NO: 1442457 - RNA, 19 nt, Homo sapiens
  misc_RNA (1)...(19): siRNA sense strand
gugaggagcuucuaucuga

SEQ ID NO: 1442458 - RNA, 19 nt, Homo sapiens
  misc_RNA (1)...(19): siRNA sense strand
caaaggugcuaaagagauu

SEQ ID NO: 1442459 - RNA, 19 nt, Homo sapiens
  misc_RNA (1)...(19): siRNA sense strand
ggacgacgaugauagacuu

SEQ ID NO: 1442460 - RNA, 19 nt, Homo sapiens
  misc_RNA (1)...(19): siRNA sense strand
gaugaaggcuccaaucucu

SEQ ID NO: 1442461 - RNA, 19 nt, Homo sapiens
  misc_RNA (1)...(19): siRNA sense strand
cagaugagcucagcccuaa

SEQ ID NO: 1442462 - RNA, 19 nt, Homo sapiens
  misc_RNA (1)...(19): siRNA sense strand
caagaagacuccaccaagu

SEQ ID NO: 1442463 - RNA, 19 nt, Homo sapiens
  misc_RNA (1)...(19): siRNA sense strand
gcugauggcuggccugaug

SEQ ID NO: 1442464 - RNA, 19 nt, Homo sapiens
  misc_RNA (1)...(19): siRNA sense strand
ugaagaaccugcagaccaa

SEQ ID NO: 1442465 - RNA, 19 nt, Homo sapiens
  misc_RNA (1)...(19): siRNA sense strand
cgaaggagcaguuugaguu

SEQ ID NO: 1442466 - RNA, 19 nt, Homo sapiens
  misc_RNA (1)...(19): siRNA sense strand
ggacagugguguggacaga

SEQ ID NO: 1442467 - RNA, 19 nt, Homo sapiens
  misc_RNA (1)...(19): siRNA sense strand
ggccaaaggugcuaaagag

SEQ ID NO: 1442468 - RNA, 19 nt, Homo sapiens
  misc_RNA (1)...(19): siRNA sense strand
gggccguucuuguccaaua

SEQ ID NO: 1442469 - RNA, 19 nt, Homo sapiens
  misc_RNA (1)...(19): siRNA sense strand
cgacaugguucucaacaag

SEQ ID NO: 1442470 - RNA, 19 nt, Homo sapiens
  misc_RNA (1)...(19): siRNA sense strand
gcaccuacguccugaucga

SEQ ID NO: 1442471 - RNA, 19 nt, Homo sapiens
  misc_RNA (1)...(19): siRNA sense strand
gauggagcacggauucaua

SEQ ID NO: 1442472 - RNA, 19 nt, Homo sapiens
  misc_RNA (1)...(19): siRNA sense strand
gaacagccacagccacuca

SEQ ID NO: 1442473 - RNA, 19 nt, Homo sapiens
  misc_RNA (1)...(19): siRNA sense strand
caagagguccaucgucuga

SEQ ID NO: 1442474 - RNA, 19 nt, Homo sapiens
  misc_RNA (1)...(19): siRNA sense strand
gagacagcuuuccagauga

SEQ ID NO: 1442475 - RNA, 19 nt, Homo sapiens
  misc_RNA (1)...(19): siRNA sense strand
gaggagaacgugcccaaga

SEQ ID NO: 1442476 - RNA, 19 nt, Homo sapiens
  misc_RNA (1)...(19): siRNA sense strand
gcaggacgacgaugauaga

SEQ ID NO: 1442477 - RNA, 19 nt, Homo sapiens
  misc_RNA (1)...(19): siRNA sense strand
gaccagcagugaccuucaa

SEQ ID NO: 1442478 - RNA, 19 nt, Homo sapiens
  misc_RNA (1)...(19): siRNA sense strand
ucaacaagauggccaaagg

SEQ ID NO: 1442479 - RNA, 19 nt, Homo sapiens
  misc_RNA (1)...(19): siRNA sense strand
gcuccaaucucuaccacau

SEQ ID NO: 1442480 - RNA, 19 nt, Homo sapiens
  misc_RNA (1)...(19): siRNA sense strand
gcagaaaaguaaacaagug

SEQ ID NO: 1442481 - RNA, 19 nt, Homo sapiens
  misc_RNA (1)...(19): siRNA sense strand
gccagaagguuccggcaau

SEQ ID NO: 1442482 - RNA, 19 nt, Homo sapiens
  misc_RNA (1)...(19): siRNA sense strand
ccagacguauuccaaagau

SEQ ID NO: 1442483 - RNA, 19 nt, Homo sapiens
  misc_RNA (1)...(19): siRNA sense strand
gaaggagcaguuugaguuc

SEQ ID NO: 1442484 - RNA, 19 nt, Homo sapiens
  misc_RNA (1)...(19): siRNA sense strand
gagagcauccugaccuaug

SEQ ID NO: 1442485 - RNA, 19 nt, Homo sapiens
  misc_RNA (1)...(19): siRNA sense strand
caagaaugcccaggccuuu

SEQ ID NO: 1442486 - RNA, 19 nt, Homo sapiens
  misc_RNA (1)...(19): siRNA sense strand
ucacguggcaggaugacua

SEQ ID NO: 1442487 - RNA, 19 nt, Homo sapiens
  misc_RNA (1)...(19): siRNA sense strand
ggccguucuuguccaauaa

SEQ ID NO: 1442488 - RNA, 19 nt, Homo sapiens
  misc_RNA (1)...(19): siRNA sense strand
gggagagucuggagaacag

SEQ ID NO: 1442489 - RNA, 19 nt, Homo sapiens
  misc_RNA (1)...(19): siRNA sense strand
agacgaaggagcaguuuga

SEQ ID NO: 1442490 - RNA, 19 nt, Homo sapiens
  misc_RNA (1)...(19): siRNA sense strand
cagcgacccuggagcacuu

SEQ ID NO: 1442491 - RNA, 19 nt, Homo sapiens
  misc_RNA (1)...(19): siRNA sense strand
caggaugacuauacucagu

SEQ ID NO: 1442492 - RNA, 19 nt, Homo sapiens
  misc_RNA (1)...(19): siRNA sense strand
gucaagagccagacguauu

SEQ ID NO: 1442493 - RNA, 19 nt, Homo sapiens
  misc_RNA (1)...(19): siRNA sense strand
gcgacggccugcaauugga

SEQ ID NO: 1442494 - RNA, 19 nt, Homo sapiens
  misc_RNA (1)...(19): siRNA sense strand
gcacuugagggaccagaga

SEQ ID NO: 1442495 - RNA, 19 nt, Homo sapiens
  misc_RNA (1)...(19): siRNA sense strand
aggagaacgugcccaagaa

SEQ ID NO: 1442496 - RNA, 19 nt, Homo sapiens
  misc_RNA (1)...(19): siRNA sense strand
ucaagagccagacguauuc

SEQ ID NO: 1442497 - RNA, 19 nt, Homo sapiens
  misc_RNA (1)...(19): siRNA sense strand
ccaaaggugcuaaagagau

SEQ ID NO: 1442498 - RNA, 19 nt, Homo sapiens
  misc_RNA (1)...(19): siRNA sense strand
agaaccggcuggagaagga

SEQ ID NO: 1442499 - RNA, 19 nt, Homo sapiens
  misc_RNA (1)...(19): siRNA sense strand
agucuucccugucuucaga

SEQ ID NO: 1442500 - RNA, 19 nt, Homo sapiens
  misc_RNA (1)...(19): siRNA sense strand
ccgagagcauccugaccua

SEQ ID NO: 1442501 - RNA, 19 nt, Homo sapiens
  misc_RNA (1)...(19): siRNA sense strand
gugcuaaagagauugauau

SEQ ID NO: 1442502 - RNA, 19 nt, Homo sapiens
  misc_RNA (1)...(19): siRNA sense strand
ccgcacacgucacgcauca

SEQ ID NO: 1442503 - RNA, 19 nt, Homo sapiens
  misc_RNA (1)...(19): siRNA sense strand
ccucuggccucaucuacug

SEQ ID NO: 1442504 - RNA, 19 nt, Homo sapiens
  misc_RNA (1)...(19): siRNA sense strand
gagccagacguauuccaaa

SEQ ID NO: 1442505 - RNA, 19 nt, Homo sapiens
  misc_RNA (1)...(19): siRNA sense strand
ugauagacuuuaccaagag

SEQ ID NO: 1442506 - RNA, 19 nt, Homo sapiens
  misc_RNA (1)...(19): siRNA sense strand
ccagaagguuccggcaaug

SEQ ID NO: 1442507 - RNA, 19 nt, Homo sapiens
  misc_RNA (1)...(19): siRNA sense strand
cgacgaugauagacuuuac

SEQ ID NO: 1442508 - RNA, 19 nt, Homo sapiens
  misc_RNA (1)...(19): siRNA sense strand
acaagaaccggcuggagaa

SEQ ID NO: 1442509 - RNA, 19 nt, Homo sapiens
  misc_RNA (1)...(19): siRNA sense strand
augauagacuuuaccaaga

SEQ ID NO: 1442510 - RNA, 19 nt, Homo sapiens
  misc_RNA (1)...(19): siRNA sense strand
ccacaucuaugaggugaac

SEQ ID NO: 1442511 - RNA, 19 nt, Homo sapiens
  misc_RNA (1)...(19): siRNA sense strand
ggagaaggccacaguugac

SEQ ID NO: 1442512 - RNA, 19 nt, Homo sapiens
  misc_RNA (1)...(19): siRNA sense strand
gaggaccaccugaagaaca

SEQ ID NO: 1442513 - RNA, 19 nt, Homo sapiens
  misc_RNA (1)...(19): siRNA sense strand
gaagacuccaccaaguuca

SEQ ID NO: 1442514 - RNA, 19 nt, Homo sapiens
  misc_RNA (1)...(19): siRNA sense strand
aagaagacuccaccaaguu

SEQ ID NO: 1442515 - RNA, 19 nt, Homo sapiens
  misc_RNA (1)...(19): siRNA sense strand
gccacaugauccuguccua

SEQ ID NO: 1442516 - RNA, 19 nt, Homo sapiens
  misc_RNA (1)...(19): siRNA sense strand
ggugcuaaagagauugaua

SEQ ID NO: 1442517 - RNA, 19 nt, Homo sapiens
  misc_RNA (1)...(19): siRNA sense strand
gcaguuccacuuccugagu

SEQ ID NO: 1442518 - RNA, 19 nt, Homo sapiens
  misc_RNA (1)...(19): siRNA sense strand
ucaaagugagcgccaaugu

SEQ ID NO: 1442519 - RNA, 19 nt, Homo sapiens
  misc_RNA (1)...(19): siRNA sense strand
gaaaaguaaacaagugcua

SEQ ID NO: 1442520 - RNA, 19 nt, Homo sapiens
  misc_RNA (1)...(19): siRNA sense strand
aagacaaacuggaggaaac

SEQ ID NO: 1442521 - RNA, 19 nt, Homo sapiens
  misc_RNA (1)...(19): siRNA sense strand
gcaaggcguggaccaugga

SEQ ID NO: 1442522 - RNA, 19 nt, Homo sapiens
  misc_RNA (1)...(19): siRNA sense strand
caguuccacuuccugaguu

SEQ ID NO: 1442523 - RNA, 19 nt, Homo sapiens
  misc_RNA (1)...(19): siRNA sense strand
ugaggagcuucuaucugaa

SEQ ID NO: 1442524 - RNA, 19 nt, Homo sapiens
  misc_RNA (1)...(19): siRNA sense strand
caucuggugugaggacuuc

SEQ ID NO: 1442525 - RNA, 19 nt, Homo sapiens
  misc_RNA (1)...(19): siRNA sense strand
ggaugaaggcuccaaucuc

SEQ ID NO: 1442526 - RNA, 19 nt, Homo sapiens
  misc_RNA (1)...(19): siRNA sense strand
ccacucagacuacaucaac

SEQ ID NO: 1442527 - RNA, 19 nt, Homo sapiens
  misc_RNA (1)...(19): siRNA sense strand
ccacagccacucagacuac

SEQ ID NO: 1442528 - RNA, 19 nt, Homo sapiens
  misc_RNA (1)...(19): siRNA sense strand
gauggaguguuuggaaggu

SEQ ID NO: 1442529 - RNA, 19 nt, Homo sapiens
  misc_RNA (1)...(19): siRNA sense strand
uggagaaggccacaguuga

SEQ ID NO: 1442530 - RNA, 19 nt, Homo sapiens
  misc_RNA (1)...(19): siRNA sense strand
cagcagugaccuucaaagu

SEQ ID NO: 1442531 - RNA, 19 nt, Homo sapiens
  misc_RNA (1)...(19): siRNA sense strand
ggugaacgccauccucaag

SEQ ID NO: 1442532 - RNA, 19 nt, Homo sapiens
  misc_RNA (1)...(19): siRNA sense strand
uggaggaccaccugaagaa

SEQ ID NO: 1442533 - RNA, 19 nt, Homo sapiens
  misc_RNA (1)...(19): siRNA sense strand
ugacaacaaagacaaacug

SEQ ID NO: 1442534 - RNA, 19 nt, Homo sapiens
  misc_RNA (1)...(19): siRNA sense strand
caaagugagcgccaauguc

SEQ ID NO: 1442535 - RNA, 19 nt, Homo sapiens
  misc_RNA (1)...(19): siRNA sense strand
gaugagcucagcccuaagg

SEQ ID NO: 1442536 - RNA, 19 nt, Homo sapiens
  misc_RNA (1)...(19): siRNA sense strand
gagaaggccacaguugaca

SEQ ID NO: 1442537 - RNA, 19 nt, Homo sapiens
  misc_RNA (1)...(19): siRNA sense strand
gacaugguucucaacaaga

SEQ ID NO: 1442538 - RNA, 19 nt, Homo sapiens
  misc_RNA (1)...(19): siRNA sense strand
agagcauccugaccuaugu

SEQ ID NO: 1442539 - RNA, 19 nt, Homo sapiens
  misc_RNA (1)...(19): siRNA sense strand
gagugcaggacgacgauga

SEQ ID NO: 1442540 - RNA, 19 nt, Homo sapiens
  misc_RNA (1)...(19): siRNA sense strand
caacaagauggccaaaggu

SEQ ID NO: 1442541 - RNA, 19 nt, Homo sapiens
  misc_RNA (1)...(19): siRNA sense strand
acaugguucucaacaagau

SEQ ID NO: 1442542 - RNA, 19 nt, Homo sapiens
  misc_RNA (1)...(19): siRNA sense strand
caaucucuaccacaucuau

SEQ ID NO: 1442543 - RNA, 19 nt, Homo sapiens
  misc_RNA (1)...(19): siRNA sense strand
aggaccaccugaagaacaa

SEQ ID NO: 1442544 - RNA, 19 nt, Homo sapiens
  misc_RNA (1)...(19): siRNA sense strand
caaagacaaacuggaggaa

SEQ ID NO: 1442545 - RNA, 19 nt, Homo sapiens
  misc_RNA (1)...(19): siRNA sense strand
cagcgacggccugcaauug

SEQ ID NO: 1442546 - RNA, 19 nt, Homo sapiens
  misc_RNA (1)...(19): siRNA sense strand
aaagacaaacuggaggaaa

SEQ ID NO: 1442547 - RNA, 19 nt, Homo sapiens
  misc_RNA (1)...(19): siRNA sense strand
gccaaaggugcuaaagaga

SEQ ID NO: 1442548 - RNA, 19 nt, Homo sapiens
  misc_RNA (1)...(19): siRNA sense strand
agaagacuccaccaaguuc

SEQ ID NO: 1442549 - RNA, 19 nt, Homo sapiens
  misc_RNA (1)...(19): siRNA sense strand
gugcaggacgacgaugaua

SEQ ID NO: 1442550 - RNA, 19 nt, Homo sapiens
  misc_RNA (1)...(19): siRNA sense strand
ggcaggaugacuauacuca

SEQ ID NO: 1442551 - RNA, 19 nt, Homo sapiens
  misc_RNA (1)...(19): siRNA sense strand
acagugguguggacagaca

SEQ ID NO: 1442552 - RNA, 19 nt, Homo sapiens
  misc_RNA (1)...(19): siRNA sense strand
cuccuggacuuccgcagaa

SEQ ID NO: 1442553 - RNA, 19 nt, Homo sapiens
  misc_RNA (1)...(19): siRNA sense strand
gcagugaccuucaaaguga

SEQ ID NO: 1442554 - RNA, 19 nt, Homo sapiens
  misc_RNA (1)...(19): siRNA sense strand
ggagacagcuuuccagaug

SEQ ID NO: 1442555 - RNA, 19 nt, Homo sapiens
  misc_RNA (1)...(19): siRNA sense strand
ggaaaccucuggacugaaa

SEQ ID NO: 1442556 - RNA, 19 nt, Homo sapiens
  misc_RNA (1)...(19): siRNA sense strand
ccacgggucucgacucuua

SEQ ID NO: 1442557 - RNA, 19 nt, Homo sapiens
  misc_RNA (1)...(19): siRNA sense strand
gugaggagcuucuaucuga

SEQ ID NO: 1442558 - RNA, 19 nt, Homo sapiens
  misc_RNA (1)...(19): siRNA sense strand
caaaggugcuaaagagauu

SEQ ID NO: 1442559 - RNA, 19 nt, Homo sapiens
  misc_RNA (1)...(19): siRNA sense strand
ggacgacgaugauagacuu

SEQ ID NO: 1442560 - RNA, 19 nt, Homo sapiens
  misc_RNA (1)...(19): siRNA sense strand
gaugaaggcuccaaucucu

SEQ ID NO: 1442561 - RNA, 19 nt, Homo sapiens
  misc_RNA (1)...(19): siRNA sense strand
cagaugagcucagcccuaa

SEQ ID NO: 1442562 - RNA, 19 nt, Homo sapiens
  misc_RNA (1)...(19): siRNA sense strand
caagaagacuccaccaagu

SEQ ID NO: 1442563 - RNA, 19 nt, Homo sapiens
  misc_RNA (1)...(19): siRNA sense strand
gcugauggcuggccugaug

SEQ ID NO: 1442564 - RNA, 19 nt, Homo sapiens
  misc_RNA (1)...(19): siRNA sense strand
ugaagaaccugcagaccaa

SEQ ID NO: 1442565 - RNA, 19 nt, Homo sapiens
  misc_RNA (1)...(19): siRNA sense strand
cgaaggagcaguuugaguu

SEQ ID NO: 1442566 - RNA, 19 nt, Homo sapiens
  misc_RNA (1)...(19): siRNA sense strand
ggacagugguguggacaga

SEQ ID NO: 1442567 - RNA, 19 nt, Homo sapiens
  misc_RNA (1)...(19): siRNA sense strand
ggccaaaggugcuaaagag

SEQ ID NO: 1442568 - RNA, 19 nt, Homo sapiens
  misc_RNA (1)...(19): siRNA sense strand
gggccguucuuguccaaua

SEQ ID NO: 1442569 - RNA, 19 nt, Homo sapiens
  misc_RNA (1)...(19): siRNA sense strand
cgacaugguucucaacaag

SEQ ID NO: 1442570 - RNA, 19 nt, Homo sapiens
  misc_RNA (1)...(19): siRNA sense strand
gcaccuacguccugaucga

SEQ ID NO: 1442571 - RNA, 19 nt, Homo sapiens
  misc_RNA (1)...(19): siRNA sense strand
gauggagcacggauucaua

SEQ ID NO: 1442572 - RNA, 19 nt, Homo sapiens
  misc_RNA (1)...(19): siRNA sense strand
gaacagccacagccacuca

SEQ ID NO: 1442573 - RNA, 19 nt, Homo sapiens
  misc_RNA (1)...(19): siRNA sense strand
caagagguccaucgucuga

SEQ ID NO: 1442574 - RNA, 19 nt, Homo sapiens
  misc_RNA (1)...(19): siRNA sense strand
gagacagcuuuccagauga

SEQ ID NO: 1442575 - RNA, 19 nt, Homo sapiens
  misc_RNA (1)...(19): siRNA sense strand
gaggagaacgugcccaaga

SEQ ID NO: 1442576 - RNA, 19 nt, Homo sapiens
  misc_RNA (1)...(19): siRNA sense strand
gcaggacgacgaugauaga

SEQ ID NO: 1442577 - RNA, 19 nt, Homo sapiens
  misc_RNA (1)...(19): siRNA sense strand
gaccagcagugaccuucaa

SEQ ID NO: 1442578 - RNA, 19 nt, Homo sapiens
  misc_RNA (1)...(19): siRNA sense strand
ucaacaagauggccaaagg

SEQ ID NO: 1442579 - RNA, 19 nt, Homo sapiens
  misc_RNA (1)...(19): siRNA sense strand
gcuccaaucucuaccacau

SEQ ID NO: 1442580 - RNA, 19 nt, Homo sapiens
  misc_RNA (1)...(19): siRNA sense strand
gcagaaaaguaaacaagug

SEQ ID NO: 1442581 - RNA, 19 nt, Homo sapiens
  misc_RNA (1)...(19): siRNA sense strand
gccagaagguuccggcaau

SEQ ID NO: 1442582 - RNA, 19 nt, Homo sapiens
  misc_RNA (1)...(19): siRNA sense strand
ccagacguauuccaaagau

SEQ ID NO: 1442583 - RNA, 19 nt, Homo sapiens
  misc_RNA (1)...(19): siRNA sense strand
gaaggagcaguuugaguuc

SEQ ID NO: 1442584 - RNA, 19 nt, Homo sapiens
  misc_RNA (1)...(19): siRNA sense strand
gagagcauccugaccuaug

SEQ ID NO: 1442585 - RNA, 19 nt, Homo sapiens
  misc_RNA (1)...(19): siRNA sense strand
caagaaugcccaggccuuu

SEQ ID NO: 1442586 - RNA, 19 nt, Homo sapiens
  misc_RNA (1)...(19): siRNA sense strand
ucacguggcaggaugacua

SEQ ID NO: 1442587 - RNA, 19 nt, Homo sapiens
  misc_RNA (1)...(19): siRNA sense strand
ggccguucuuguccaauaa

SEQ ID NO: 1442588 - RNA, 19 nt, Homo sapiens
  misc_RNA (1)...(19): siRNA sense strand
gggagagucuggagaacag

SEQ ID NO: 1442589 - RNA, 19 nt, Homo sapiens
  misc_RNA (1)...(19): siRNA sense strand
agacgaaggagcaguuuga

SEQ ID NO: 1442590 - RNA, 19 nt, Homo sapiens
  misc_RNA (1)...(19): siRNA sense strand
cagcgacccuggagcacuu

SEQ ID NO: 1442591 - RNA, 19 nt, Homo sapiens
  misc_RNA (1)...(19): siRNA sense strand
caggaugacuauacucagu

SEQ ID NO: 1442592 - RNA, 19 nt, Homo sapiens
  misc_RNA (1)...(19): siRNA sense strand
gucaagagccagacguauu

SEQ ID NO: 1442593 - RNA, 19 nt, Homo sapiens
  misc_RNA (1)...(19): siRNA sense strand
gcgacggccugcaauugga

SEQ ID NO: 1442594 - RNA, 19 nt, Homo sapiens
  misc_RNA (1)...(19): siRNA sense strand
gcacuugagggaccagaga

SEQ ID NO: 1442595 - RNA, 19 nt, Homo sapiens
  misc_RNA (1)...(19): siRNA sense strand
aggagaacgugcccaagaa

SEQ ID NO: 1442596 - RNA, 19 nt, Homo sapiens
  misc_RNA (1)...(19): siRNA sense strand
ucaagagccagacguauuc

SEQ ID NO: 1442597 - RNA, 19 nt, Homo sapiens
  misc_RNA (1)...(19): siRNA sense strand
ccaaaggugcuaaagagau

SEQ ID NO: 1442598 - RNA, 19 nt, Homo sapiens
  misc_RNA (1)...(19): siRNA sense strand
agaaccggcuggagaagga

SEQ ID NO: 1442599 - RNA, 19 nt, Homo sapiens
  misc_RNA (1)...(19): siRNA sense strand
agucuucccugucuucaga

SEQ ID NO: 1442600 - RNA, 19 nt, Homo sapiens
  misc_RNA (1)...(19): siRNA sense strand
ccgagagcauccugaccua

SEQ ID NO: 1442601 - RNA, 19 nt, Homo sapiens
  misc_RNA (1)...(19): siRNA sense strand
gugcuaaagagauugauau

SEQ ID NO: 1442602 - RNA, 19 nt, Homo sapiens
  misc_RNA (1)...(19): siRNA sense strand
ccgcacacgucacgcauca

SEQ ID NO: 1442603 - RNA, 19 nt, Homo sapiens
  misc_RNA (1)...(19): siRNA sense strand
ccucuggccucaucuacug

SEQ ID NO: 1442604 - RNA, 19 nt, Homo sapiens
  misc_RNA (1)...(19): siRNA sense strand
gagccagacguauuccaaa

SEQ ID NO: 1442605 - RNA, 19 nt, Homo sapiens
  misc_RNA (1)...(19): siRNA sense strand
ugauagacuuuaccaagag

SEQ ID NO: 1442606 - RNA, 19 nt, Homo sapiens
  misc_RNA (1)...(19): siRNA sense strand
ccagaagguuccggcaaug

SEQ ID NO: 1442607 - RNA, 19 nt, Homo sapiens
  misc_RNA (1)...(19): siRNA sense strand
cgacgaugauagacuuuac

SEQ ID NO: 1442608 - RNA, 19 nt, Homo sapiens
  misc_RNA (1)...(19): siRNA sense strand
acaagaaccggcuggagaa

SEQ ID NO: 1442609 - RNA, 19 nt, Homo sapiens
  misc_RNA (1)...(19): siRNA sense strand
augauagacuuuaccaaga

SEQ ID NO: 1442610 - RNA, 19 nt, Homo sapiens
  misc_RNA (1)...(19): siRNA sense strand
ccacaucuaugaggugaac

SEQ ID NO: 1442611 - RNA, 19 nt, Homo sapiens
  misc_RNA (1)...(19): siRNA sense strand
ggagaaggccacaguugac

SEQ ID NO: 1442612 - RNA, 19 nt, Homo sapiens
  misc_RNA (1)...(19): siRNA sense strand
gaggaccaccugaagaaca

SEQ ID NO: 1442613 - RNA, 19 nt, Homo sapiens
  misc_RNA (1)...(19): siRNA sense strand
gaagacuccaccaaguuca

SEQ ID NO: 1442614 - RNA, 19 nt, Homo sapiens
  misc_RNA (1)...(19): siRNA sense strand
aagaagacuccaccaaguu

SEQ ID NO: 1442615 - RNA, 19 nt, Homo sapiens
  misc_RNA (1)...(19): siRNA sense strand
gccacaugauccuguccua

SEQ ID NO: 1442616 - RNA, 19 nt, Homo sapiens
  misc_RNA (1)...(19): siRNA sense strand
ggugcuaaagagauugaua

SEQ ID NO: 1442617 - RNA, 19 nt, Homo sapiens
  misc_RNA (1)...(19): siRNA sense strand
gcaguuccacuuccugagu

SEQ ID NO: 1442618 - RNA, 19 nt, Homo sapiens
  misc_RNA (1)...(19): siRNA sense strand
ucaaagugagcgccaaugu

SEQ ID NO: 1442619 - RNA, 19 nt, Homo sapiens
  misc_RNA (1)...(19): siRNA sense strand
gaaaaguaaacaagugcua

SEQ ID NO: 1442620 - RNA, 19 nt, Homo sapiens
  misc_RNA (1)...(19): siRNA sense strand
aagacaaacuggaggaaac

SEQ ID NO: 1442621 - RNA, 19 nt, Homo sapiens
  misc_RNA (1)...(19): siRNA sense strand
gcaaggcguggaccaugga

SEQ ID NO: 1442622 - RNA, 19 nt, Homo sapiens
  misc_RNA (1)...(19): siRNA sense strand
caguuccacuuccugaguu

SEQ ID NO: 1442623 - RNA, 19 nt, Homo sapiens
  misc_RNA (1)...(19): siRNA sense strand
ugaggagcuucuaucugaa

SEQ ID NO: 1442624 - RNA, 19 nt, Homo sapiens
  misc_RNA (1)...(19): siRNA sense strand
caucuggugugaggacuuc

SEQ ID NO: 1442625 - RNA, 19 nt, Homo sapiens
  misc_RNA (1)...(19): siRNA sense strand
ggaugaaggcuccaaucuc

SEQ ID NO: 1442626 - RNA, 19 nt, Homo sapiens
  misc_RNA (1)...(19): siRNA sense strand
ccacucagacuacaucaac

SEQ ID NO: 1442627 - RNA, 19 nt, Homo sapiens
  misc_RNA (1)...(19): siRNA sense strand
ccacagccacucagacuac

SEQ ID NO: 1442628 - RNA, 19 nt, Homo sapiens
  misc_RNA (1)...(19): siRNA sense strand
gauggaguguuuggaaggu

SEQ ID NO: 1442629 - RNA, 19 nt, Homo sapiens
  misc_RNA (1)...(19): siRNA sense strand
uggagaaggccacaguuga

SEQ ID NO: 1442630 - RNA, 19 nt, Homo sapiens
  misc_RNA (1)...(19): siRNA sense strand
cagcagugaccuucaaagu

SEQ ID NO: 1442631 - RNA, 19 nt, Homo sapiens
  misc_RNA (1)...(19): siRNA sense strand
ggugaacgccauccucaag

SEQ ID NO: 1442632 - RNA, 19 nt, Homo sapiens
  misc_RNA (1)...(19): siRNA sense strand
uggaggaccaccugaagaa

SEQ ID NO: 1442633 - RNA, 19 nt, Homo sapiens
  misc_RNA (1)...(19): siRNA sense strand
ugacaacaaagacaaacug

SEQ ID NO: 1442634 - RNA, 19 nt, Homo sapiens
  misc_RNA (1)...(19): siRNA sense strand
caaagugagcgccaauguc

SEQ ID NO: 1442635 - RNA, 19 nt, Homo sapiens
  misc_RNA (1)...(19): siRNA sense strand
gaugagcucagcccuaagg

SEQ ID NO: 1442636 - RNA, 19 nt, Homo sapiens
  misc_RNA (1)...(19): siRNA sense strand
gagaaggccacaguugaca

SEQ ID NO: 1442637 - RNA, 19 nt, Homo sapiens
  misc_RNA (1)...(19): siRNA sense strand
gacaugguucucaacaaga

SEQ ID NO: 1442638 - RNA, 19 nt, Homo sapiens
  misc_RNA (1)...(19): siRNA sense strand
agagcauccugaccuaugu

SEQ ID NO: 1442639 - RNA, 19 nt, Homo sapiens
  misc_RNA (1)...(19): siRNA sense strand
gagugcaggacgacgauga

SEQ ID NO: 1442640 - RNA, 19 nt, Homo sapiens
  misc_RNA (1)...(19): siRNA sense strand
caacaagauggccaaaggu

SEQ ID NO: 1442641 - RNA, 19 nt, Homo sapiens
  misc_RNA (1)...(19): siRNA sense strand
acaugguucucaacaagau

SEQ ID NO: 1442642 - RNA, 19 nt, Homo sapiens
  misc_RNA (1)...(19): siRNA sense strand
caaucucuaccacaucuau

SEQ ID NO: 1442643 - RNA, 19 nt, Homo sapiens
  misc_RNA (1)...(19): siRNA sense strand
aggaccaccugaagaacaa

SEQ ID NO: 1442644 - RNA, 19 nt, Homo sapiens
  misc_RNA (1)...(19): siRNA sense strand
caaagacaaacuggaggaa

SEQ ID NO: 1442645 - RNA, 19 nt, Homo sapiens
  misc_RNA (1)...(19): siRNA sense strand
cagcgacggccugcaauug

SEQ ID NO: 1442646 - RNA, 19 nt, Homo sapiens
  misc_RNA (1)...(19): siRNA sense strand
aaagacaaacuggaggaaa

SEQ ID NO: 1442647 - RNA, 19 nt, Homo sapiens
  misc_RNA (1)...(19): siRNA sense strand
gccaaaggugcuaaagaga

SEQ ID NO: 1442648 - RNA, 19 nt, Homo sapiens
  misc_RNA (1)...(19): siRNA sense strand
agaagacuccaccaaguuc

SEQ ID NO: 1442649 - RNA, 19 nt, Homo sapiens
  misc_RNA (1)...(19): siRNA sense strand
gugcaggacgacgaugaua

SEQ ID NO: 1442650 - RNA, 19 nt, Homo sapiens
  misc_RNA (1)...(19): siRNA sense strand
ggcaggaugacuauacuca

SEQ ID NO: 1442651 - RNA, 19 nt, Homo sapiens
  misc_RNA (1)...(19): siRNA sense strand
acagugguguggacagaca

SEQ ID NO: 1442652 - RNA, 19 nt, Homo sapiens
  misc_RNA (1)...(19): siRNA sense strand
cuccuggacuuccgcagaa

SEQ ID NO: 1442653 - RNA, 19 nt, Homo sapiens
  misc_RNA (1)...(19): siRNA sense strand
gcagugaccuucaaaguga

SEQ ID NO: 1442654 - RNA, 19 nt, Homo sapiens
  misc_RNA (1)...(19): siRNA sense strand
ggagacagcuuuccagaug

SEQ ID NO: 1442655 - RNA, 19 nt, Homo sapiens
  misc_RNA (1)...(19): siRNA sense strand
ggaaaccucuggacugaaa

SEQ ID NO: 1442656 - RNA, 19 nt, Homo sapiens
  misc_RNA (1)...(19): siRNA sense strand
ccacgggucucgacucuua

SEQ ID NO: 1442657 - RNA, 19 nt, Homo sapiens
  misc_RNA (1)...(19): siRNA sense strand
gugaggagcuucuaucuga

SEQ ID NO: 1442658 - RNA, 19 nt, Homo sapiens
  misc_RNA (1)...(19): siRNA sense strand
caaaggugcuaaagagauu

SEQ ID NO: 1442659 - RNA, 19 nt, Homo sapiens
  misc_RNA (1)...(19): siRNA sense strand
ggacgacgaugauagacuu

SEQ ID NO: 1442660 - RNA, 19 nt, Homo sapiens
  misc_RNA (1)...(19): siRNA sense strand
gaugaaggcuccaaucucu

SEQ ID NO: 1442661 - RNA, 19 nt, Homo sapiens
  misc_RNA (1)...(19): siRNA sense strand
cagaugagcucagcccuaa

SEQ ID NO: 1442662 - RNA, 19 nt, Homo sapiens
  misc_RNA (1)...(19): siRNA sense strand
caagaagacuccaccaagu

SEQ ID NO: 1442663 - RNA, 19 nt, Homo sapiens
  misc_RNA (1)...(19): siRNA sense strand
gcugauggcuggccugaug

SEQ ID NO: 1442664 - RNA, 19 nt, Homo sapiens
  misc_RNA (1)...(19): siRNA sense strand
ugaagaaccugcagaccaa

SEQ ID NO: 1442665 - RNA, 19 nt, Homo sapiens
  misc_RNA (1)...(19): siRNA sense strand
cgaaggagcaguuugaguu

SEQ ID NO: 1442666 - RNA, 19 nt, Homo sapiens
  misc_RNA (1)...(19): siRNA sense strand
ggacagugguguggacaga

SEQ ID NO: 1442667 - RNA, 19 nt, Homo sapiens
  misc_RNA (1)...(19): siRNA sense strand
ggccaaaggugcuaaagag

SEQ ID NO: 1442668 - RNA, 19 nt, Homo sapiens
  misc_RNA (1)...(19): siRNA sense strand
gggccguucuuguccaaua

SEQ ID NO: 1442669 - RNA, 19 nt, Homo sapiens
  misc_RNA (1)...(19): siRNA sense strand
cgacaugguucucaacaag

SEQ ID NO: 1442670 - RNA, 19 nt, Homo sapiens
  misc_RNA (1)...(19): siRNA sense strand
gcaccuacguccugaucga

SEQ ID NO: 1442671 - RNA, 19 nt, Homo sapiens
  misc_RNA (1)...(19): siRNA sense strand
gauggagcacggauucaua

SEQ ID NO: 1442672 - RNA, 19 nt, Homo sapiens
  misc_RNA (1)...(19): siRNA sense strand
gaacagccacagccacuca

SEQ ID NO: 1442673 - RNA, 19 nt, Homo sapiens
  misc_RNA (1)...(19): siRNA sense strand
caagagguccaucgucuga

SEQ ID NO: 1442674 - RNA, 19 nt, Homo sapiens
  misc_RNA (1)...(19): siRNA sense strand
gagacagcuuuccagauga

SEQ ID NO: 1442675 - RNA, 19 nt, Homo sapiens
  misc_RNA (1)...(19): siRNA sense strand
gaggagaacgugcccaaga

SEQ ID NO: 1442676 - RNA, 19 nt, Homo sapiens
  misc_RNA (1)...(19): siRNA sense strand
gcaggacgacgaugauaga

SEQ ID NO: 1442677 - RNA, 19 nt, Homo sapiens
  misc_RNA (1)...(19): siRNA sense strand
gaccagcagugaccuucaa

SEQ ID NO: 1442678 - RNA, 19 nt, Homo sapiens
  misc_RNA (1)...(19): siRNA sense strand
ucaacaagauggccaaagg

SEQ ID NO: 1442679 - RNA, 19 nt, Homo sapiens
  misc_RNA (1)...(19): siRNA sense strand
gcuccaaucucuaccacau

SEQ ID NO: 1442680 - RNA, 19 nt, Homo sapiens
  misc_RNA (1)...(19): siRNA sense strand
gcagaaaaguaaacaagug

SEQ ID NO: 1442681 - RNA, 19 nt, Homo sapiens
  misc_RNA (1)...(19): siRNA sense strand
gccagaagguuccggcaau

SEQ ID NO: 1442682 - RNA, 19 nt, Homo sapiens
  misc_RNA (1)...(19): siRNA sense strand
ccagacguauuccaaagau

SEQ ID NO: 1442683 - RNA, 19 nt, Homo sapiens
  misc_RNA (1)...(19): siRNA sense strand
gaaggagcaguuugaguuc

SEQ ID NO: 1442684 - RNA, 19 nt, Homo sapiens
  misc_RNA (1)...(19): siRNA sense strand
gagagcauccugaccuaug

SEQ ID NO: 1442685 - RNA, 19 nt, Homo sapiens
  misc_RNA (1)...(19): siRNA sense strand
caagaaugcccaggccuuu

SEQ ID NO: 1442686 - RNA, 19 nt, Homo sapiens
  misc_RNA (1)...(19): siRNA sense strand
ucacguggcaggaugacua

SEQ ID NO: 1442687 - RNA, 19 nt, Homo sapiens
  misc_RNA (1)...(19): siRNA sense strand
ggccguucuuguccaauaa

SEQ ID NO: 1442688 - RNA, 19 nt, Homo sapiens
  misc_RNA (1)...(19): siRNA sense strand
gggagagucuggagaacag

SEQ ID NO: 1442689 - RNA, 19 nt, Homo sapiens
  misc_RNA (1)...(19): siRNA sense strand
agacgaaggagcaguuuga

SEQ ID NO: 1442690 - RNA, 19 nt, Homo sapiens
  misc_RNA (1)...(19): siRNA sense strand
cagcgacccuggagcacuu

SEQ ID NO: 1442691 - RNA, 19 nt, Homo sapiens
  misc_RNA (1)...(19): siRNA sense strand
caggaugacuauacucagu

SEQ ID NO: 1442692 - RNA, 19 nt, Homo sapiens
  misc_RNA (1)...(19): siRNA sense strand
gucaagagccagacguauu

SEQ ID NO: 1442693 - RNA, 19 nt, Homo sapiens
  misc_RNA (1)...(19): siRNA sense strand
gcgacggccugcaauugga

SEQ ID NO: 1442694 - RNA, 19 nt, Homo sapiens
  misc_RNA (1)...(19): siRNA sense strand
gcacuugagggaccagaga

SEQ ID NO: 1442695 - RNA, 19 nt, Homo sapiens
  misc_RNA (1)...(19): siRNA sense strand
aggagaacgugcccaagaa

SEQ ID NO: 1442696 - RNA, 19 nt, Homo sapiens
  misc_RNA (1)...(19): siRNA sense strand
ucaagagccagacguauuc

SEQ ID NO: 1442697 - RNA, 19 nt, Homo sapiens
  misc_RNA (1)...(19): siRNA sense strand
ccaaaggugcuaaagagau

SEQ ID NO: 1442698 - RNA, 19 nt, Homo sapiens
  misc_RNA (1)...(19): siRNA sense strand
agaaccggcuggagaagga

SEQ ID NO: 1442699 - RNA, 19 nt, Homo sapiens
  misc_RNA (1)...(19): siRNA sense strand
agucuucccugucuucaga

SEQ ID NO: 1442700 - RNA, 19 nt, Homo sapiens
  misc_RNA (1)...(19): siRNA sense strand
ccgagagcauccugaccua

SEQ ID NO: 1442701 - RNA, 19 nt, Homo sapiens
  misc_RNA (1)...(19): siRNA sense strand
gugcuaaagagauugauau

SEQ ID NO: 1442702 - RNA, 19 nt, Homo sapiens
  misc_RNA (1)...(19): siRNA sense strand
ccgcacacgucacgcauca

SEQ ID NO: 1442703 - RNA, 19 nt, Homo sapiens
  misc_RNA (1)...(19): siRNA sense strand
ccucuggccucaucuacug

SEQ ID NO: 1442704 - RNA, 19 nt, Homo sapiens
  misc_RNA (1)...(19): siRNA sense strand
gagccagacguauuccaaa

SEQ ID NO: 1442705 - RNA, 19 nt, Homo sapiens
  misc_RNA (1)...(19): siRNA sense strand
ugauagacuuuaccaagag

SEQ ID NO: 1442706 - RNA, 19 nt, Homo sapiens
  misc_RNA (1)...(19): siRNA sense strand
ccagaagguuccggcaaug

SEQ ID NO: 1442707 - RNA, 19 nt, Homo sapiens
  misc_RNA (1)...(19): siRNA sense strand
cgacgaugauagacuuuac

SEQ ID NO: 1442708 - RNA, 19 nt, Homo sapiens
  misc_RNA (1)...(19): siRNA sense strand
acaagaaccggcuggagaa

SEQ ID NO: 1442709 - RNA, 19 nt, Homo sapiens
  misc_RNA (1)...(19): siRNA sense strand
augauagacuuuaccaaga

SEQ ID NO: 1442710 - RNA, 19 nt, Homo sapiens
  misc_RNA (1)...(19): siRNA sense strand
ccacaucuaugaggugaac

SEQ ID NO: 1442711 - RNA, 19 nt, Homo sapiens
  misc_RNA (1)...(19): siRNA sense strand
ggagaaggccacaguugac

SEQ ID NO: 1442712 - RNA, 19 nt, Homo sapiens
  misc_RNA (1)...(19): siRNA sense strand
gaggaccaccugaagaaca

SEQ ID NO: 1442713 - RNA, 19 nt, Homo sapiens
  misc_RNA (1)...(19): siRNA sense strand
gaagacuccaccaaguuca

SEQ ID NO: 1442714 - RNA, 19 nt, Homo sapiens
  misc_RNA (1)...(19): siRNA sense strand
aagaagacuccaccaaguu

SEQ ID NO: 1442715 - RNA, 19 nt, Homo sapiens
  misc_RNA (1)...(19): siRNA sense strand
gccacaugauccuguccua

SEQ ID NO: 1442716 - RNA, 19 nt, Homo sapiens
  misc_RNA (1)...(19): siRNA sense strand
ggugcuaaagagauugaua

SEQ ID NO: 1442717 - RNA, 19 nt, Homo sapiens
  misc_RNA (1)...(19): siRNA sense strand
gcaguuccacuuccugagu

SEQ ID NO: 1442718 - RNA, 19 nt, Homo sapiens
  misc_RNA (1)...(19): siRNA sense strand
ucaaagugagcgccaaugu

SEQ ID NO: 1442719 - RNA, 19 nt, Homo sapiens
  misc_RNA (1)...(19): siRNA sense strand
gaaaaguaaacaagugcua

SEQ ID NO: 1442720 - RNA, 19 nt, Homo sapiens
  misc_RNA (1)...(19): siRNA sense strand
aagacaaacuggaggaaac

SEQ ID NO: 1442721 - RNA, 19 nt, Homo sapiens
  misc_RNA (1)...(19): siRNA sense strand
gcaaggcguggaccaugga

SEQ ID NO: 1442722 - RNA, 19 nt, Homo sapiens
  misc_RNA (1)...(19): siRNA sense strand
caguuccacuuccugaguu

SEQ ID NO: 1442723 - RNA, 19 nt, Homo sapiens
  misc_RNA (1)...(19): siRNA sense strand
ugaggagcuucuaucugaa

SEQ ID NO: 1442724 - RNA, 19 nt, Homo sapiens
  misc_RNA (1)...(19): siRNA sense strand
caucuggugugaggacuuc

SEQ ID NO: 1442725 - RNA, 19 nt, Homo sapiens
  misc_RNA (1)...(19): siRNA sense strand
ggaugaaggcuccaaucuc

SEQ ID NO: 1442726 - RNA, 19 nt, Homo sapiens
  misc_RNA (1)...(19): siRNA sense strand
ccacucagacuacaucaac

SEQ ID NO: 1442727 - RNA, 19 nt, Homo sapiens
  misc_RNA (1)...(19): siRNA sense strand
ccacagccacucagacuac

SEQ ID NO: 1442728 - RNA, 19 nt, Homo sapiens
  misc_RNA (1)...(19): siRNA sense strand
gauggaguguuuggaaggu

SEQ ID NO: 1442729 - RNA, 19 nt, Homo sapiens
  misc_RNA (1)...(19): siRNA sense strand
uggagaaggccacaguuga

SEQ ID NO: 1442730 - RNA, 19 nt, Homo sapiens
  misc_RNA (1)...(19): siRNA sense strand
cagcagugaccuucaaagu

SEQ ID NO: 1442731 - RNA, 19 nt, Homo sapiens
  misc_RNA (1)...(19): siRNA sense strand
ggugaacgccauccucaag

SEQ ID NO: 1442732 - RNA, 19 nt, Homo sapiens
  misc_RNA (1)...(19): siRNA sense strand
uggaggaccaccugaagaa

SEQ ID NO: 1442733 - RNA, 19 nt, Homo sapiens
  misc_RNA (1)...(19): siRNA sense strand
ugacaacaaagacaaacug

SEQ ID NO: 1442734 - RNA, 19 nt, Homo sapiens
  misc_RNA (1)...(19): siRNA sense strand
caaagugagcgccaauguc

SEQ ID NO: 1442735 - RNA, 19 nt, Homo sapiens
  misc_RNA (1)...(19): siRNA sense strand
gaugagcucagcccuaagg

SEQ ID NO: 1442736 - RNA, 19 nt, Homo sapiens
  misc_RNA (1)...(19): siRNA sense strand
gagaaggccacaguugaca

SEQ ID NO: 1442737 - RNA, 19 nt, Homo sapiens
  misc_RNA (1)...(19): siRNA sense strand
gacaugguucucaacaaga

SEQ ID NO: 1442738 - RNA, 19 nt, Homo sapiens
  misc_RNA (1)...(19): siRNA sense strand
agagcauccugaccuaugu

SEQ ID NO: 1442739 - RNA, 19 nt, Homo sapiens
  misc_RNA (1)...(19): siRNA sense strand
gagugcaggacgacgauga

SEQ ID NO: 1442740 - RNA, 19 nt, Homo sapiens
  misc_RNA (1)...(19): siRNA sense strand
caacaagauggccaaaggu

SEQ ID NO: 1442741 - RNA, 19 nt, Homo sapiens
  misc_RNA (1)...(19): siRNA sense strand
acaugguucucaacaagau

SEQ ID NO: 1442742 - RNA, 19 nt, Homo sapiens
  misc_RNA (1)...(19): siRNA sense strand
caaucucuaccacaucuau

SEQ ID NO: 1442743 - RNA, 19 nt, Homo sapiens
  misc_RNA (1)...(19): siRNA sense strand
aggaccaccugaagaacaa

SEQ ID NO: 1442744 - RNA, 19 nt, Homo sapiens
  misc_RNA (1)...(19): siRNA sense strand
caaagacaaacuggaggaa

SEQ ID NO: 1442745 - RNA, 19 nt, Homo sapiens
  misc_RNA (1)...(19): siRNA sense strand
cagcgacggccugcaauug

SEQ ID NO: 1442746 - RNA, 19 nt, Homo sapiens
  misc_RNA (1)...(19): siRNA sense strand
aaagacaaacuggaggaaa

SEQ ID NO: 1442747 - RNA, 19 nt, Homo sapiens
  misc_RNA (1)...(19): siRNA sense strand
gccaaaggugcuaaagaga

SEQ ID NO: 1442748 - RNA, 19 nt, Homo sapiens
  misc_RNA (1)...(19): siRNA sense strand
agaagacuccaccaaguuc

SEQ ID NO: 1442749 - RNA, 19 nt, Homo sapiens
  misc_RNA (1)...(19): siRNA sense strand
gugcaggacgacgaugaua

SEQ ID NO: 1442750 - RNA, 19 nt, Homo sapiens
  misc_RNA (1)...(19): siRNA sense strand
ggcaggaugacuauacuca

SEQ ID NO: 1442751 - RNA, 19 nt, Homo sapiens
  misc_RNA (1)...(19): siRNA sense strand
acagugguguggacagaca

SEQ ID NO: 1442752 - RNA, 19 nt, Homo sapiens
  misc_RNA (1)...(19): siRNA sense strand
cuccuggacuuccgcagaa

SEQ ID NO: 1442753 - RNA, 19 nt, Homo sapiens
  misc_RNA (1)...(19): siRNA sense strand
gcagugaccuucaaaguga

SEQ ID NO: 1442754 - RNA, 19 nt, Homo sapiens
  misc_RNA (1)...(19): siRNA sense strand
ggagacagcuuuccagaug

SEQ ID NO: 1442755 - RNA, 19 nt, Homo sapiens
  misc_RNA (1)...(19): siRNA sense strand
ggaaaccucuggacugaaa

SEQ ID NO: 1442756 - RNA, 19 nt, Homo sapiens
  misc_RNA (1)...(19): siRNA sense strand
ccacgggucucgacucuua

SEQ ID NO: 1442757 - RNA, 19 nt, Homo sapiens
  misc_RNA (1)...(19): siRNA sense strand
gugaggagcuucuaucuga

SEQ ID NO: 1442758 - RNA, 19 nt, Homo sapiens
  misc_RNA (1)...(19): siRNA sense strand
caaaggugcuaaagagauu

SEQ ID NO: 1442759 - RNA, 19 nt, Homo sapiens
  misc_RNA (1)...(19): siRNA sense strand
ggacgacgaugauagacuu

SEQ ID NO: 1442760 - RNA, 19 nt, Homo sapiens
  misc_RNA (1)...(19): siRNA sense strand
gaugaaggcuccaaucucu

SEQ ID NO: 1442761 - RNA, 19 nt, Homo sapiens
  misc_RNA (1)...(19): siRNA sense strand
cagaugagcucagcccuaa

SEQ ID NO: 1442762 - RNA, 19 nt, Homo sapiens
  misc_RNA (1)...(19): siRNA sense strand
caagaagacuccaccaagu

SEQ ID NO: 1442763 - RNA, 19 nt, Homo sapiens
  misc_RNA (1)...(19): siRNA sense strand
gcugauggcuggccugaug

SEQ ID NO: 1442764 - RNA, 19 nt, Homo sapiens
  misc_RNA (1)...(19): siRNA sense strand
ugaagaaccugcagaccaa

SEQ ID NO: 1442765 - RNA, 19 nt, Homo sapiens
  misc_RNA (1)...(19): siRNA sense strand
cgaaggagcaguuugaguu

SEQ ID NO: 1442766 - RNA, 19 nt, Homo sapiens
  misc_RNA (1)...(19): siRNA sense strand
ggacagugguguggacaga

SEQ ID NO: 1442767 - RNA, 19 nt, Homo sapiens
  misc_RNA (1)...(19): siRNA sense strand
ggccaaaggugcuaaagag

SEQ ID NO: 1442768 - RNA, 19 nt, Homo sapiens
  misc_RNA (1)...(19): siRNA sense strand
gggccguucuuguccaaua

SEQ ID NO: 1442769 - RNA, 19 nt, Homo sapiens
  misc_RNA (1)...(19): siRNA sense strand
cgacaugguucucaacaag

SEQ ID NO: 1442770 - RNA, 19 nt, Homo sapiens
  misc_RNA (1)...(19): siRNA sense strand
gcaccuacguccugaucga

SEQ ID NO: 1442771 - RNA, 19 nt, Homo sapiens
  misc_RNA (1)...(19): siRNA sense strand
gauggagcacggauucaua

SEQ ID NO: 1442772 - RNA, 19 nt, Homo sapiens
  misc_RNA (1)...(19): siRNA sense strand
gaacagccacagccacuca

SEQ ID NO: 1442773 - RNA, 19 nt, Homo sapiens
  misc_RNA (1)...(19): siRNA sense strand
caagagguccaucgucuga

SEQ ID NO: 1442774 - RNA, 19 nt, Homo sapiens
  misc_RNA (1)...(19): siRNA sense strand
gagacagcuuuccagauga

SEQ ID NO: 1442775 - RNA, 19 nt, Homo sapiens
  misc_RNA (1)...(19): siRNA sense strand
gaggagaacgugcccaaga

SEQ ID NO: 1442776 - RNA, 19 nt, Homo sapiens
  misc_RNA (1)...(19): siRNA sense strand
gcaggacgacgaugauaga

SEQ ID NO: 1442777 - RNA, 19 nt, Homo sapiens
  misc_RNA (1)...(19): siRNA sense strand
gaccagcagugaccuucaa

SEQ ID NO: 1442778 - RNA, 19 nt, Homo sapiens
  misc_RNA (1)...(19): siRNA sense strand
ucaacaagauggccaaagg

SEQ ID NO: 1442779 - RNA, 19 nt, Homo sapiens
  misc_RNA (1)...(19): siRNA sense strand
gcuccaaucucuaccacau

SEQ ID NO: 1442780 - RNA, 19 nt, Homo sapiens
  misc_RNA (1)...(19): siRNA sense strand
gcagaaaaguaaacaagug

SEQ ID NO: 1442781 - RNA, 19 nt, Homo sapiens
  misc_RNA (1)...(19): siRNA sense strand
gccagaagguuccggcaau

SEQ ID NO: 1442782 - RNA, 19 nt, Homo sapiens
  misc_RNA (1)...(19): siRNA sense strand
ccagacguauuccaaagau

SEQ ID NO: 1442783 - RNA, 19 nt, Homo sapiens
  misc_RNA (1)...(19): siRNA sense strand
gaaggagcaguuugaguuc

SEQ ID NO: 1442784 - RNA, 19 nt, Homo sapiens
  misc_RNA (1)...(19): siRNA sense strand
gagagcauccugaccuaug

SEQ ID NO: 1442785 - RNA, 19 nt, Homo sapiens
  misc_RNA (1)...(19): siRNA sense strand
caagaaugcccaggccuuu

SEQ ID NO: 1442786 - RNA, 19 nt, Homo sapiens
  misc_RNA (1)...(19): siRNA sense strand
ucacguggcaggaugacua

SEQ ID NO: 1442787 - RNA, 19 nt, Homo sapiens
  misc_RNA (1)...(19): siRNA sense strand
ggccguucuuguccaauaa

SEQ ID NO: 1442788 - RNA, 19 nt, Homo sapiens
  misc_RNA (1)...(19): siRNA sense strand
gggagagucuggagaacag

SEQ ID NO: 1442789 - RNA, 19 nt, Homo sapiens
  misc_RNA (1)...(19): siRNA sense strand
agacgaaggagcaguuuga

SEQ ID NO: 1442790 - RNA, 19 nt, Homo sapiens
  misc_RNA (1)...(19): siRNA sense strand
cagcgacccuggagcacuu

SEQ ID NO: 1442791 - RNA, 19 nt, Homo sapiens
  misc_RNA (1)...(19): siRNA sense strand
caggaugacuauacucagu

SEQ ID NO: 1442792 - RNA, 19 nt, Homo sapiens
  misc_RNA (1)...(19): siRNA sense strand
gucaagagccagacguauu

SEQ ID NO: 1442793 - RNA, 19 nt, Homo sapiens
  misc_RNA (1)...(19): siRNA sense strand
gcgacggccugcaauugga

SEQ ID NO: 1442794 - RNA, 19 nt, Homo sapiens
  misc_RNA (1)...(19): siRNA sense strand
gcacuugagggaccagaga

SEQ ID NO: 1442795 - RNA, 19 nt, Homo sapiens
  misc_RNA (1)...(19): siRNA sense strand
aggagaacgugcccaagaa

SEQ ID NO: 1442796 - RNA, 19 nt, Homo sapiens
  misc_RNA (1)...(19): siRNA sense strand
ucaagagccagacguauuc

SEQ ID NO: 1442797 - RNA, 19 nt, Homo sapiens
  misc_RNA (1)...(19): siRNA sense strand
ccaaaggugcuaaagagau

SEQ ID NO: 1442798 - RNA, 19 nt, Homo sapiens
  misc_RNA (1)...(19): siRNA sense strand
agaaccggcuggagaagga

SEQ ID NO: 1442799 - RNA, 19 nt, Homo sapiens
  misc_RNA (1)...(19): siRNA sense strand
agucuucccugucuucaga

SEQ ID NO: 1442800 - RNA, 19 nt, Homo sapiens
  misc_RNA (1)...(19): siRNA sense strand
ccgagagcauccugaccua

SEQ ID NO: 1442801 - RNA, 19 nt, Homo sapiens
  misc_RNA (1)...(19): siRNA sense strand
gugcuaaagagauugauau

SEQ ID NO: 1442802 - RNA, 19 nt, Homo sapiens
  misc_RNA (1)...(19): siRNA sense strand
ccgcacacgucacgcauca

SEQ ID NO: 1442803 - RNA, 19 nt, Homo sapiens
  misc_RNA (1)...(19): siRNA sense strand
ccucuggccucaucuacug

SEQ ID NO: 1442804 - RNA, 19 nt, Homo sapiens
  misc_RNA (1)...(19): siRNA sense strand
gagccagacguauuccaaa

SEQ ID NO: 1442805 - RNA, 19 nt, Homo sapiens
  misc_RNA (1)...(19): siRNA sense strand
ugauagacuuuaccaagag

SEQ ID NO: 1442806 - RNA, 19 nt, Homo sapiens
  misc_RNA (1)...(19): siRNA sense strand
ccagaagguuccggcaaug

SEQ ID NO: 1442807 - RNA, 19 nt, Homo sapiens
  misc_RNA (1)...(19): siRNA sense strand
cgacgaugauagacuuuac

SEQ ID NO: 1442808 - RNA, 19 nt, Homo sapiens
  misc_RNA (1)...(19): siRNA sense strand
acaagaaccggcuggagaa

SEQ ID NO: 1442809 - RNA, 19 nt, Homo sapiens
  misc_RNA (1)...(19): siRNA sense strand
augauagacuuuaccaaga

SEQ ID NO: 1442810 - RNA, 19 nt, Homo sapiens
  misc_RNA (1)...(19): siRNA sense strand
ccacaucuaugaggugaac

SEQ ID NO: 1442811 - RNA, 19 nt, Homo sapiens
  misc_RNA (1)...(19): siRNA sense strand
ggagaaggccacaguugac

SEQ ID NO: 1442812 - RNA, 19 nt, Homo sapiens
  misc_RNA (1)...(19): siRNA sense strand
gaggaccaccugaagaaca

SEQ ID NO: 1442813 - RNA, 19 nt, Homo sapiens
  misc_RNA (1)...(19): siRNA sense strand
gaagacuccaccaaguuca

SEQ ID NO: 1442814 - RNA, 19 nt, Homo sapiens
  misc_RNA (1)...(19): siRNA sense strand
aagaagacuccaccaaguu

SEQ ID NO: 1442815 - RNA, 19 nt, Homo sapiens
  misc_RNA (1)...(19): siRNA sense strand
gccacaugauccuguccua

SEQ ID NO: 1442816 - RNA, 19 nt, Homo sapiens
  misc_RNA (1)...(19): siRNA sense strand
ggugcuaaagagauugaua

SEQ ID NO: 1442817 - RNA, 19 nt, Homo sapiens
  misc_RNA (1)...(19): siRNA sense strand
gcaguuccacuuccugagu

SEQ ID NO: 1442818 - RNA, 19 nt, Homo sapiens
  misc_RNA (1)...(19): siRNA sense strand
ucaaagugagcgccaaugu

SEQ ID NO: 1442819 - RNA, 19 nt, Homo sapiens
  misc_RNA (1)...(19): siRNA sense strand
gaaaaguaaacaagugcua

SEQ ID NO: 1442820 - RNA, 19 nt, Homo sapiens
  misc_RNA (1)...(19): siRNA sense strand
aagacaaacuggaggaaac

SEQ ID NO: 1442821 - RNA, 19 nt, Homo sapiens
  misc_RNA (1)...(19): siRNA sense strand
gcaaggcguggaccaugga

SEQ ID NO: 1442822 - RNA, 19 nt, Homo sapiens
  misc_RNA (1)...(19): siRNA sense strand
caguuccacuuccugaguu

SEQ ID NO: 1442823 - RNA, 19 nt, Homo sapiens
  misc_RNA (1)...(19): siRNA sense strand
ugaggagcuucuaucugaa

SEQ ID NO: 1442824 - RNA, 19 nt, Homo sapiens
  misc_RNA (1)...(19): siRNA sense strand
caucuggugugaggacuuc

SEQ ID NO: 1442825 - RNA, 19 nt, Homo sapiens
  misc_RNA (1)...(19): siRNA sense strand
ggaugaaggcuccaaucuc

SEQ ID NO: 1442826 - RNA, 19 nt, Homo sapiens
  misc_RNA (1)...(19): siRNA sense strand
ccacucagacuacaucaac

SEQ ID NO: 1442827 - RNA, 19 nt, Homo sapiens
  misc_RNA (1)...(19): siRNA sense strand
ccacagccacucagacuac

SEQ ID NO: 1442828 - RNA, 19 nt, Homo sapiens
  misc_RNA (1)...(19): siRNA sense strand
gauggaguguuuggaaggu

SEQ ID NO: 1442829 - RNA, 19 nt, Homo sapiens
  misc_RNA (1)...(19): siRNA sense strand
uggagaaggccacaguuga

SEQ ID NO: 1442830 - RNA, 19 nt, Homo sapiens
  misc_RNA (1)...(19): siRNA sense strand
cagcagugaccuucaaagu

SEQ ID NO: 1442831 - RNA, 19 nt, Homo sapiens
  misc_RNA (1)...(19): siRNA sense strand
ggugaacgccauccucaag

SEQ ID NO: 1442832 - RNA, 19 nt, Homo sapiens
  misc_RNA (1)...(19): siRNA sense strand
uggaggaccaccugaagaa

SEQ ID NO: 1442833 - RNA, 19 nt, Homo sapiens
  misc_RNA (1)...(19): siRNA sense strand
ugacaacaaagacaaacug

SEQ ID NO: 1442834 - RNA, 19 nt, Homo sapiens
  misc_RNA (1)...(19): siRNA sense strand
caaagugagcgccaauguc

SEQ ID NO: 1442835 - RNA, 19 nt, Homo sapiens
  misc_RNA (1)...(19): siRNA sense strand
gaugagcucagcccuaagg

SEQ ID NO: 1442836 - RNA, 19 nt, Homo sapiens
  misc_RNA (1)...(19): siRNA sense strand
gagaaggccacaguugaca

SEQ ID NO: 1442837 - RNA, 19 nt, Homo sapiens
  misc_RNA (1)...(19): siRNA sense strand
gacaugguucucaacaaga

SEQ ID NO: 1442838 - RNA, 19 nt, Homo sapiens
  misc_RNA (1)...(19): siRNA sense strand
agagcauccugaccuaugu

SEQ ID NO: 1442839 - RNA, 19 nt, Homo sapiens
  misc_RNA (1)...(19): siRNA sense strand
gagugcaggacgacgauga

SEQ ID NO: 1442840 - RNA, 19 nt, Homo sapiens
  misc_RNA (1)...(19): siRNA sense strand
caacaagauggccaaaggu

SEQ ID NO: 1442841 - RNA, 19 nt, Homo sapiens
  misc_RNA (1)...(19): siRNA sense strand
acaugguucucaacaagau

SEQ ID NO: 1442842 - RNA, 19 nt, Homo sapiens
  misc_RNA (1)...(19): siRNA sense strand
caaucucuaccacaucuau

SEQ ID NO: 1442843 - RNA, 19 nt, Homo sapiens
  misc_RNA (1)...(19): siRNA sense strand
aggaccaccugaagaacaa

SEQ ID NO: 1442844 - RNA, 19 nt, Homo sapiens
  misc_RNA (1)...(19): siRNA sense strand
caaagacaaacuggaggaa

SEQ ID NO: 1442845 - RNA, 19 nt, Homo sapiens
  misc_RNA (1)...(19): siRNA sense strand
cagcgacggccugcaauug

SEQ ID NO: 1442846 - RNA, 19 nt, Homo sapiens
  misc_RNA (1)...(19): siRNA sense strand
aaagacaaacuggaggaaa

SEQ ID NO: 1442847 - RNA, 19 nt, Homo sapiens
  misc_RNA (1)...(19): siRNA sense strand
gccaaaggugcuaaagaga

SEQ ID NO: 1442848 - RNA, 19 nt, Homo sapiens
  misc_RNA (1)...(19): siRNA sense strand
agaagacuccaccaaguuc

SEQ ID NO: 1442849 - RNA, 19 nt, Homo sapiens
  misc_RNA (1)...(19): siRNA sense strand
gugcaggacgacgaugaua

SEQ ID NO: 1442850 - RNA, 19 nt, Homo sapiens
  misc_RNA (1)...(19): siRNA sense strand
ggcaggaugacuauacuca

SEQ ID NO: 1442851 - RNA, 19 nt, Homo sapiens
  misc_RNA (1)...(19): siRNA sense strand
acagugguguggacagaca

SEQ ID NO: 1442852 - RNA, 19 nt, Homo sapiens
  misc_RNA (1)...(19): siRNA sense strand
cuccuggacuuccgcagaa

SEQ ID NO: 1442853 - RNA, 19 nt, Homo sapiens
  misc_RNA (1)...(19): siRNA sense strand
gcagugaccuucaaaguga

SEQ ID NO: 1442854 - RNA, 19 nt, Homo sapiens
  misc_RNA (1)...(19): siRNA sense strand
ggagacagcuuuccagaug

SEQ ID NO: 1442855 - RNA, 19 nt, Homo sapiens
  misc_RNA (1)...(19): siRNA sense strand
ggaaaccucuggacugaaa

SEQ ID NO: 1442856 - RNA, 19 nt, Homo sapiens
  misc_RNA (1)...(19): siRNA sense strand
ccacgggucucgacucuua

SEQ ID NO: 1442857 - RNA, 19 nt, Homo sapiens
  misc_RNA (1)...(19): siRNA sense strand
gugaggagcuucuaucuga

SEQ ID NO: 1442858 - RNA, 19 nt, Homo sapiens
  misc_RNA (1)...(19): siRNA sense strand
caaaggugcuaaagagauu

SEQ ID NO: 1442859 - RNA, 19 nt, Homo sapiens
  misc_RNA (1)...(19): siRNA sense strand
ggacgacgaugauagacuu

SEQ ID NO: 1442860 - RNA, 19 nt, Homo sapiens
  misc_RNA (1)...(19): siRNA sense strand
gaugaaggcuccaaucucu

SEQ ID NO: 1442861 - RNA, 19 nt, Homo sapiens
  misc_RNA (1)...(19): siRNA sense strand
cagaugagcucagcccuaa

SEQ ID NO: 1442862 - RNA, 19 nt, Homo sapiens
  misc_RNA (1)...(19): siRNA sense strand
caagaagacuccaccaagu

SEQ ID NO: 1442863 - RNA, 19 nt, Homo sapiens
  misc_RNA (1)...(19): siRNA sense strand
gcugauggcuggccugaug

SEQ ID NO: 1442864 - RNA, 19 nt, Homo sapiens
  misc_RNA (1)...(19): siRNA sense strand
ugaagaaccugcagaccaa

SEQ ID NO: 1442865 - RNA, 19 nt, Homo sapiens
  misc_RNA (1)...(19): siRNA sense strand
cgaaggagcaguuugaguu

SEQ ID NO: 1442866 - RNA, 19 nt, Homo sapiens
  misc_RNA (1)...(19): siRNA sense strand
ggacagugguguggacaga

SEQ ID NO: 1442867 - RNA, 19 nt, Homo sapiens
  misc_RNA (1)...(19): siRNA sense strand
ggccaaaggugcuaaagag

SEQ ID NO: 1442868 - RNA, 19 nt, Homo sapiens
  misc_RNA (1)...(19): siRNA sense strand
gggccguucuuguccaaua

SEQ ID NO: 1442869 - RNA, 19 nt, Homo sapiens
  misc_RNA (1)...(19): siRNA sense strand
cgacaugguucucaacaag

SEQ ID NO: 1442870 - RNA, 19 nt, Homo sapiens
  misc_RNA (1)...(19): siRNA sense strand
gcaccuacguccugaucga

SEQ ID NO: 1442871 - RNA, 19 nt, Homo sapiens
  misc_RNA (1)...(19): siRNA sense strand
gauggagcacggauucaua

SEQ ID NO: 1442872 - RNA, 19 nt, Homo sapiens
  misc_RNA (1)...(19): siRNA sense strand
gaacagccacagccacuca

SEQ ID NO: 1442873 - RNA, 19 nt, Homo sapiens
  misc_RNA (1)...(19): siRNA sense strand
caagagguccaucgucuga

SEQ ID NO: 1442874 - RNA, 19 nt, Homo sapiens
  misc_RNA (1)...(19): siRNA sense strand
gagacagcuuuccagauga

SEQ ID NO: 1442875 - RNA, 19 nt, Homo sapiens
  misc_RNA (1)...(19): siRNA sense strand
gaggagaacgugcccaaga

SEQ ID NO: 1442876 - RNA, 19 nt, Homo sapiens
  misc_RNA (1)...(19): siRNA sense strand
gcaggacgacgaugauaga

SEQ ID NO: 1442877 - RNA, 19 nt, Homo sapiens
  misc_RNA (1)...(19): siRNA sense strand
gaccagcagugaccuucaa

SEQ ID NO: 1442878 - RNA, 19 nt, Homo sapiens
  misc_RNA (1)...(19): siRNA sense strand
ucaacaagauggccaaagg

SEQ ID NO: 1442879 - RNA, 19 nt, Homo sapiens
  misc_RNA (1)...(19): siRNA sense strand
gcuccaaucucuaccacau

SEQ ID NO: 1442880 - RNA, 19 nt, Homo sapiens
  misc_RNA (1)...(19): siRNA sense strand
gcagaaaaguaaacaagug

SEQ ID NO: 1442881 - RNA, 19 nt, Homo sapiens
  misc_RNA (1)...(19): siRNA sense strand
gccagaagguuccggcaau

SEQ ID NO: 1442882 - RNA, 19 nt, Homo sapiens
  misc_RNA (1)...(19): siRNA sense strand
ccagacguauuccaaagau

SEQ ID NO: 1442883 - RNA, 19 nt, Homo sapiens
  misc_RNA (1)...(19): siRNA sense strand
gaaggagcaguuugaguuc

SEQ ID NO: 1442884 - RNA, 19 nt, Homo sapiens
  misc_RNA (1)...(19): siRNA sense strand
gagagcauccugaccuaug

SEQ ID NO: 1442885 - RNA, 19 nt, Homo sapiens
  misc_RNA (1)...(19): siRNA sense strand
caagaaugcccaggccuuu

SEQ ID NO: 1442886 - RNA, 19 nt, Homo sapiens
  misc_RNA (1)...(19): siRNA sense strand
ucacguggcaggaugacua

SEQ ID NO: 1442887 - RNA, 19 nt, Homo sapiens
  misc_RNA (1)...(19): siRNA sense strand
ggccguucuuguccaauaa

SEQ ID NO: 1442888 - RNA, 19 nt, Homo sapiens
  misc_RNA (1)...(19): siRNA sense strand
gggagagucuggagaacag

SEQ ID NO: 1442889 - RNA, 19 nt, Homo sapiens
  misc_RNA (1)...(19): siRNA sense strand
agacgaaggagcaguuuga

SEQ ID NO: 1442890 - RNA, 19 nt, Homo sapiens
  misc_RNA (1)...(19): siRNA sense strand
cagcgacccuggagcacuu

SEQ ID NO: 1442891 - RNA, 19 nt, Homo sapiens
  misc_RNA (1)...(19): siRNA sense strand
caggaugacuauacucagu

SEQ ID NO: 1442892 - RNA, 19 nt, Homo sapiens
  misc_RNA (1)...(19): siRNA sense strand
gucaagagccagacguauu

SEQ ID NO: 1442893 - RNA, 19 nt, Homo sapiens
  misc_RNA (1)...(19): siRNA sense strand
gcgacggccugcaauugga

SEQ ID NO: 1442894 - RNA, 19 nt, Homo sapiens
  misc_RNA (1)...(19): siRNA sense strand
gcacuugagggaccagaga

SEQ ID NO: 1442895 - RNA, 19 nt, Homo sapiens
  misc_RNA (1)...(19): siRNA sense strand
aggagaacgugcccaagaa

SEQ ID NO: 1442896 - RNA, 19 nt, Homo sapiens
  misc_RNA (1)...(19): siRNA sense strand
ucaagagccagacguauuc

SEQ ID NO: 1442897 - RNA, 19 nt, Homo sapiens
  misc_RNA (1)...(19): siRNA sense strand
ccaaaggugcuaaagagau

SEQ ID NO: 1442898 - RNA, 19 nt, Homo sapiens
  misc_RNA (1)...(19): siRNA sense strand
agaaccggcuggagaagga

SEQ ID NO: 1442899 - RNA, 19 nt, Homo sapiens
  misc_RNA (1)...(19): siRNA sense strand
agucuucccugucuucaga

SEQ ID NO: 1442900 - RNA, 19 nt, Homo sapiens
  misc_RNA (1)...(19): siRNA sense strand
ccgagagcauccugaccua

SEQ ID NO: 1442901 - RNA, 19 nt, Homo sapiens
  misc_RNA (1)...(19): siRNA sense strand
gugcuaaagagauugauau

SEQ ID NO: 1442902 - RNA, 19 nt, Homo sapiens
  misc_RNA (1)...(19): siRNA sense strand
ccgcacacgucacgcauca

SEQ ID NO: 1442903 - RNA, 19 nt, Homo sapiens
  misc_RNA (1)...(19): siRNA sense strand
ccucuggccucaucuacug

SEQ ID NO: 1442904 - RNA, 19 nt, Homo sapiens
  misc_RNA (1)...(19): siRNA sense strand
gagccagacguauuccaaa

SEQ ID NO: 1442905 - RNA, 19 nt, Homo sapiens
  misc_RNA (1)...(19): siRNA sense strand
ugauagacuuuaccaagag

SEQ ID NO: 1442906 - RNA, 19 nt, Homo sapiens
  misc_RNA (1)...(19): siRNA sense strand
ccagaagguuccggcaaug

SEQ ID NO: 1442907 - RNA, 19 nt, Homo sapiens
  misc_RNA (1)...(19): siRNA sense strand
cgacgaugauagacuuuac

SEQ ID NO: 1442908 - RNA, 19 nt, Homo sapiens
  misc_RNA (1)...(19): siRNA sense strand
acaagaaccggcuggagaa

SEQ ID NO: 1442909 - RNA, 19 nt, Homo sapiens
  misc_RNA (1)...(19): siRNA sense strand
augauagacuuuaccaaga

SEQ ID NO: 1442910 - RNA, 19 nt, Homo sapiens
  misc_RNA (1)...(19): siRNA sense strand
ccacaucuaugaggugaac

SEQ ID NO: 1442911 - RNA, 19 nt, Homo sapiens
  misc_RNA (1)...(19): siRNA sense strand
ggagaaggccacaguugac

SEQ ID NO: 1442912 - RNA, 19 nt, Homo sapiens
  misc_RNA (1)...(19): siRNA sense strand
gaggaccaccugaagaaca

SEQ ID NO: 1442913 - RNA, 19 nt, Homo sapiens
  misc_RNA (1)...(19): siRNA sense strand
gaagacuccaccaaguuca

SEQ ID NO: 1442914 - RNA, 19 nt, Homo sapiens
  misc_RNA (1)...(19): siRNA sense strand
aagaagacuccaccaaguu

SEQ ID NO: 1442915 - RNA, 19 nt, Homo sapiens
  misc_RNA (1)...(19): siRNA sense strand
gccacaugauccuguccua

SEQ ID NO: 1442916 - RNA, 19 nt, Homo sapiens
  misc_RNA (1)...(19): siRNA sense strand
ggugcuaaagagauugaua

SEQ ID NO: 1442917 - RNA, 19 nt, Homo sapiens
  misc_RNA (1)...(19): siRNA sense strand
gcaguuccacuuccugagu

SEQ ID NO: 1442918 - RNA, 19 nt, Homo sapiens
  misc_RNA (1)...(19): siRNA sense strand
ucaaagugagcgccaaugu

SEQ ID NO: 1442919 - RNA, 19 nt, Homo sapiens
  misc_RNA (1)...(19): siRNA sense strand
gaaaaguaaacaagugcua

SEQ ID NO: 1442920 - RNA, 19 nt, Homo sapiens
  misc_RNA (1)...(19): siRNA sense strand
aagacaaacuggaggaaac

SEQ ID NO: 1442921 - RNA, 19 nt, Homo sapiens
  misc_RNA (1)...(19): siRNA sense strand
gcaaggcguggaccaugga

SEQ ID NO: 1442922 - RNA, 19 nt, Homo sapiens
  misc_RNA (1)...(19): siRNA sense strand
caguuccacuuccugaguu

SEQ ID NO: 1442923 - RNA, 19 nt, Homo sapiens
  misc_RNA (1)...(19): siRNA sense strand
ugaggagcuucuaucugaa

SEQ ID NO: 1442924 - RNA, 19 nt, Homo sapiens
  misc_RNA (1)...(19): siRNA sense strand
caucuggugugaggacuuc

SEQ ID NO: 1442925 - RNA, 19 nt, Homo sapiens
  misc_RNA (1)...(19): siRNA sense strand
ggaugaaggcuccaaucuc

SEQ ID NO: 1442926 - RNA, 19 nt, Homo sapiens
  misc_RNA (1)...(19): siRNA sense strand
ccacucagacuacaucaac

SEQ ID NO: 1442927 - RNA, 19 nt, Homo sapiens
  misc_RNA (1)...(19): siRNA sense strand
ccacagccacucagacuac

SEQ ID NO: 1442928 - RNA, 19 nt, Homo sapiens
  misc_RNA (1)...(19): siRNA sense strand
gauggaguguuuggaaggu

SEQ ID NO: 1442929 - RNA, 19 nt, Homo sapiens
  misc_RNA (1)...(19): siRNA sense strand
uggagaaggccacaguuga

SEQ ID NO: 1442930 - RNA, 19 nt, Homo sapiens
  misc_RNA (1)...(19): siRNA sense strand
cagcagugaccuucaaagu

SEQ ID NO: 1442931 - RNA, 19 nt, Homo sapiens
  misc_RNA (1)...(19): siRNA sense strand
ggugaacgccauccucaag

SEQ ID NO: 1442932 - RNA, 19 nt, Homo sapiens
  misc_RNA (1)...(19): siRNA sense strand
uggaggaccaccugaagaa

SEQ ID NO: 1442933 - RNA, 19 nt, Homo sapiens
  misc_RNA (1)...(19): siRNA sense strand
ugacaacaaagacaaacug

SEQ ID NO: 1442934 - RNA, 19 nt, Homo sapiens
  misc_RNA (1)...(19): siRNA sense strand
caaagugagcgccaauguc

SEQ ID NO: 1442935 - RNA, 19 nt, Homo sapiens
  misc_RNA (1)...(19): siRNA sense strand
gaugagcucagcccuaagg

SEQ ID NO: 1442936 - RNA, 19 nt, Homo sapiens
  misc_RNA (1)...(19): siRNA sense strand
gagaaggccacaguugaca

SEQ ID NO: 1442937 - RNA, 19 nt, Homo sapiens
  misc_RNA (1)...(19): siRNA sense strand
gacaugguucucaacaaga

SEQ ID NO: 1442938 - RNA, 19 nt, Homo sapiens
  misc_RNA (1)...(19): siRNA sense strand
agagcauccugaccuaugu

SEQ ID NO: 1442939 - RNA, 19 nt, Homo sapiens
  misc_RNA (1)...(19): siRNA sense strand
gagugcaggacgacgauga

SEQ ID NO: 1442940 - RNA, 19 nt, Homo sapiens
  misc_RNA (1)...(19): siRNA sense strand
caacaagauggccaaaggu

SEQ ID NO: 1442941 - RNA, 19 nt, Homo sapiens
  misc_RNA (1)...(19): siRNA sense strand
acaugguucucaacaagau

SEQ ID NO: 1442942 - RNA, 19 nt, Homo sapiens
  misc_RNA (1)...(19): siRNA sense strand
caaucucuaccacaucuau

SEQ ID NO: 1442943 - RNA, 19 nt, Homo sapiens
  misc_RNA (1)...(19): siRNA sense strand
aggaccaccugaagaacaa

SEQ ID NO: 1442944 - RNA, 19 nt, Homo sapiens
  misc_RNA (1)...(19): siRNA sense strand
caaagacaaacuggaggaa

SEQ ID NO: 1442945 - RNA, 19 nt, Homo sapiens
  misc_RNA (1)...(19): siRNA sense strand
cagcgacggccugcaauug

SEQ ID NO: 1442946 - RNA, 19 nt, Homo sapiens
  misc_RNA (1)...(19): siRNA sense strand
aaagacaaacuggaggaaa

SEQ ID NO: 1442947 - RNA, 19 nt, Homo sapiens
  misc_RNA (1)...(19): siRNA sense strand
gccaaaggugcuaaagaga

SEQ ID NO: 1442948 - RNA, 19 nt, Homo sapiens
  misc_RNA (1)...(19): siRNA sense strand
agaagacuccaccaaguuc

SEQ ID NO: 1442949 - RNA, 19 nt, Homo sapiens
  misc_RNA (1)...(19): siRNA sense strand
gugcaggacgacgaugaua

SEQ ID NO: 1442950 - RNA, 19 nt, Homo sapiens
  misc_RNA (1)...(19): siRNA sense strand
ggcaggaugacuauacuca

SEQ ID NO: 1442951 - RNA, 19 nt, Homo sapiens
  misc_RNA (1)...(19): siRNA sense strand
acagugguguggacagaca

SEQ ID NO: 1442952 - RNA, 19 nt, Homo sapiens
  misc_RNA (1)...(19): siRNA sense strand
cuccuggacuuccgcagaa

SEQ ID NO: 1442953 - RNA, 19 nt, Homo sapiens
  misc_RNA (1)...(19): siRNA sense strand
gcagugaccuucaaaguga

SEQ ID NO: 1442954 - RNA, 19 nt, Homo sapiens
  misc_RNA (1)...(19): siRNA sense strand
ggagacagcuuuccagaug

SEQ ID NO: 1442955 - RNA, 19 nt, Homo sapiens
  misc_RNA (1)...(19): siRNA sense strand
ggaaaccucuggacugaaa

SEQ ID NO: 1442956 - RNA, 19 nt, Homo sapiens
  misc_RNA (1)...(19): siRNA sense strand
ccacgggucucgacucuua

SEQ ID NO: 1442957 - RNA, 19 nt, Homo sapiens
  misc_RNA (1)...(19): siRNA sense strand
gugaggagcuucuaucuga

SEQ ID NO: 1442958 - RNA, 19 nt, Homo sapiens
  misc_RNA (1)...(19): siRNA sense strand
caaaggugcuaaagagauu

SEQ ID NO: 1442959 - RNA, 19 nt, Homo sapiens
  misc_RNA (1)...(19): siRNA sense strand
ggacgacgaugauagacuu

SEQ ID NO: 1442960 - RNA, 19 nt, Homo sapiens
  misc_RNA (1)...(19): siRNA sense strand
gaugaaggcuccaaucucu

SEQ ID NO: 1442961 - RNA, 19 nt, Homo sapiens
  misc_RNA (1)...(19): siRNA sense strand
cagaugagcucagcccuaa

SEQ ID NO: 1442962 - RNA, 19 nt, Homo sapiens
  misc_RNA (1)...(19): siRNA sense strand
caagaagacuccaccaagu

SEQ ID NO: 1442963 - RNA, 19 nt, Homo sapiens
  misc_RNA (1)...(19): siRNA sense strand
gcugauggcuggccugaug

SEQ ID NO: 1442964 - RNA, 19 nt, Homo sapiens
  misc_RNA (1)...(19): siRNA sense strand
ugaagaaccugcagaccaa

SEQ ID NO: 1442965 - RNA, 19 nt, Homo sapiens
  misc_RNA (1)...(19): siRNA sense strand
cgaaggagcaguuugaguu

SEQ ID NO: 1442966 - RNA, 19 nt, Homo sapiens
  misc_RNA (1)...(19): siRNA sense strand
ggacagugguguggacaga

SEQ ID NO: 1442967 - RNA, 19 nt, Homo sapiens
  misc_RNA (1)...(19): siRNA sense strand
ggccaaaggugcuaaagag

SEQ ID NO: 1442968 - RNA, 19 nt, Homo sapiens
  misc_RNA (1)...(19): siRNA sense strand
gggccguucuuguccaaua

SEQ ID NO: 1442969 - RNA, 19 nt, Homo sapiens
  misc_RNA (1)...(19): siRNA sense strand
cgacaugguucucaacaag

SEQ ID NO: 1442970 - RNA, 19 nt, Homo sapiens
  misc_RNA (1)...(19): siRNA sense strand
gcaccuacguccugaucga

SEQ ID NO: 1442971 - RNA, 19 nt, Homo sapiens
  misc_RNA (1)...(19): siRNA sense strand
gauggagcacggauucaua

SEQ ID NO: 1442972 - RNA, 19 nt, Homo sapiens
  misc_RNA (1)...(19): siRNA sense strand
gaacagccacagccacuca

SEQ ID NO: 1442973 - RNA, 19 nt, Homo sapiens
  misc_RNA (1)...(19): siRNA sense strand
caagagguccaucgucuga

SEQ ID NO: 1442974 - RNA, 19 nt, Homo sapiens
  misc_RNA (1)...(19): siRNA sense strand
gagacagcuuuccagauga

SEQ ID NO: 1442975 - RNA, 19 nt, Homo sapiens
  misc_RNA (1)...(19): siRNA sense strand
gaggagaacgugcccaaga

SEQ ID NO: 1442976 - RNA, 19 nt, Homo sapiens
  misc_RNA (1)...(19): siRNA sense strand
gcaggacgacgaugauaga

SEQ ID NO: 1442977 - RNA, 19 nt, Homo sapiens
  misc_RNA (1)...(19): siRNA sense strand
gaccagcagugaccuucaa

SEQ ID NO: 1442978 - RNA, 19 nt, Homo sapiens
  misc_RNA (1)...(19): siRNA sense strand
ucaacaagauggccaaagg

SEQ ID NO: 1442979 - RNA, 19 nt, Homo sapiens
  misc_RNA (1)...(19): siRNA sense strand
gcuccaaucucuaccacau

SEQ ID NO: 1442980 - RNA, 19 nt, Homo sapiens
  misc_RNA (1)...(19): siRNA sense strand
gcagaaaaguaaacaagug

SEQ ID NO: 1442981 - RNA, 19 nt, Homo sapiens
  misc_RNA (1)...(19): siRNA sense strand
gccagaagguuccggcaau

SEQ ID NO: 1442982 - RNA, 19 nt, Homo sapiens
  misc_RNA (1)...(19): siRNA sense strand
ccagacguauuccaaagau

SEQ ID NO: 1442983 - RNA, 19 nt, Homo sapiens
  misc_RNA (1)...(19): siRNA sense strand
gaaggagcaguuugaguuc

SEQ ID NO: 1442984 - RNA, 19 nt, Homo sapiens
  misc_RNA (1)...(19): siRNA sense strand
gagagcauccugaccuaug

SEQ ID NO: 1442985 - RNA, 19 nt, Homo sapiens
  misc_RNA (1)...(19): siRNA sense strand
caagaaugcccaggccuuu

SEQ ID NO: 1442986 - RNA, 19 nt, Homo sapiens
  misc_RNA (1)...(19): siRNA sense strand
ucacguggcaggaugacua

SEQ ID NO: 1442987 - RNA, 19 nt, Homo sapiens
  misc_RNA (1)...(19): siRNA sense strand
ggccguucuuguccaauaa

SEQ ID NO: 1442988 - RNA, 19 nt, Homo sapiens
  misc_RNA (1)...(19): siRNA sense strand
gggagagucuggagaacag

SEQ ID NO: 1442989 - RNA, 19 nt, Homo sapiens
  misc_RNA (1)...(19): siRNA sense strand
agacgaaggagcaguuuga

SEQ ID NO: 1442990 - RNA, 19 nt, Homo sapiens
  misc_RNA (1)...(19): siRNA sense strand
cagcgacccuggagcacuu

SEQ ID NO: 1442991 - RNA, 19 nt, Homo sapiens
  misc_RNA (1)...(19): siRNA sense strand
caggaugacuauacucagu

SEQ ID NO: 1442992 - RNA, 19 nt, Homo sapiens
  misc_RNA (1)...(19): siRNA sense strand
gucaagagccagacguauu

SEQ ID NO: 1442993 - RNA, 19 nt, Homo sapiens
  misc_RNA (1)...(19): siRNA sense strand
gcgacggccugcaauugga

SEQ ID NO: 1442994 - RNA, 19 nt, Homo sapiens
  misc_RNA (1)...(19): siRNA sense strand
gcacuugagggaccagaga

SEQ ID NO: 1442995 - RNA, 19 nt, Homo sapiens
  misc_RNA (1)...(19): siRNA sense strand
aggagaacgugcccaagaa

SEQ ID NO: 1442996 - RNA, 19 nt, Homo sapiens
  misc_RNA (1)...(19): siRNA sense strand
ucaagagccagacguauuc

SEQ ID NO: 1442997 - RNA, 19 nt, Homo sapiens
  misc_RNA (1)...(19): siRNA sense strand
ccaaaggugcuaaagagau

SEQ ID NO: 1442998 - RNA, 19 nt, Homo sapiens
  misc_RNA (1)...(19): siRNA sense strand
agaaccggcuggagaagga

SEQ ID NO: 1442999 - RNA, 19 nt, Homo sapiens
  misc_RNA (1)...(19): siRNA sense strand
agucuucccugucuucaga

SEQ ID NO: 1443000 - RNA, 19 nt, Homo sapiens
  misc_RNA (1)...(19): siRNA sense strand
ccgagagcauccugaccua

SEQ ID NO: 1443001 - RNA, 19 nt, Homo sapiens
  misc_RNA (1)...(19): siRNA sense strand
gugcuaaagagauugauau

SEQ ID NO: 1443002 - RNA, 19 nt, Homo sapiens
  misc_RNA (1)...(19): siRNA sense strand
ccgcacacgucacgcauca

SEQ ID NO: 1443003 - RNA, 19 nt, Homo sapiens
  misc_RNA (1)...(19): siRNA sense strand
ccucuggccucaucuacug

SEQ ID NO: 1443004 - RNA, 19 nt, Homo sapiens
  misc_RNA (1)...(19): siRNA sense strand
gagccagacguauuccaaa

SEQ ID NO: 1443005 - RNA, 19 nt, Homo sapiens
  misc_RNA (1)...(19): siRNA sense strand
ugauagacuuuaccaagag

SEQ ID NO: 1443006 - RNA, 19 nt, Homo sapiens
  misc_RNA (1)...(19): siRNA sense strand
ccagaagguuccggcaaug

SEQ ID NO: 1443007 - RNA, 19 nt, Homo sapiens
  misc_RNA (1)...(19): siRNA sense strand
cgacgaugauagacuuuac

SEQ ID NO: 1443008 - RNA, 19 nt, Homo sapiens
  misc_RNA (1)...(19): siRNA sense strand
acaagaaccggcuggagaa

SEQ ID NO: 1443009 - RNA, 19 nt, Homo sapiens
  misc_RNA (1)...(19): siRNA sense strand
augauagacuuuaccaaga

SEQ ID NO: 1443010 - RNA, 19 nt, Homo sapiens
  misc_RNA (1)...(19): siRNA sense strand
ccacaucuaugaggugaac

SEQ ID NO: 1443011 - RNA, 19 nt, Homo sapiens
  misc_RNA (1)...(19): siRNA sense strand
ggagaaggccacaguugac

SEQ ID NO: 1443012 - RNA, 19 nt, Homo sapiens
  misc_RNA (1)...(19): siRNA sense strand
gaggaccaccugaagaaca

SEQ ID NO: 1443013 - RNA, 19 nt, Homo sapiens
  misc_RNA (1)...(19): siRNA sense strand
gaagacuccaccaaguuca

SEQ ID NO: 1443014 - RNA, 19 nt, Homo sapiens
  misc_RNA (1)...(19): siRNA sense strand
aagaagacuccaccaaguu

SEQ ID NO: 1443015 - RNA, 19 nt, Homo sapiens
  misc_RNA (1)...(19): siRNA sense strand
gccacaugauccuguccua

SEQ ID NO: 1443016 - RNA, 19 nt, Homo sapiens
  misc_RNA (1)...(19): siRNA sense strand
ggugcuaaagagauugaua

SEQ ID NO: 1443017 - RNA, 19 nt, Homo sapiens
  misc_RNA (1)...(19): siRNA sense strand
gcaguuccacuuccugagu

SEQ ID NO: 1443018 - RNA, 19 nt, Homo sapiens
  misc_RNA (1)...(19): siRNA sense strand
ucaaagugagcgccaaugu

SEQ ID NO: 1443019 - RNA, 19 nt, Homo sapiens
  misc_RNA (1)...(19): siRNA sense strand
gaaaaguaaacaagugcua

SEQ ID NO: 1443020 - RNA, 19 nt, Homo sapiens
  misc_RNA (1)...(19): siRNA sense strand
aagacaaacuggaggaaac

SEQ ID NO: 1443021 - RNA, 19 nt, Homo sapiens
  misc_RNA (1)...(19): siRNA sense strand
gcaaggcguggaccaugga

SEQ ID NO: 1443022 - RNA, 19 nt, Homo sapiens
  misc_RNA (1)...(19): siRNA sense strand
caguuccacuuccugaguu

SEQ ID NO: 1443023 - RNA, 19 nt, Homo sapiens
  misc_RNA (1)...(19): siRNA sense strand
ugaggagcuucuaucugaa

SEQ ID NO: 1443024 - RNA, 19 nt, Homo sapiens
  misc_RNA (1)...(19): siRNA sense strand
caucuggugugaggacuuc

SEQ ID NO: 1443025 - RNA, 19 nt, Homo sapiens
  misc_RNA (1)...(19): siRNA sense strand
ggaugaaggcuccaaucuc

SEQ ID NO: 1443026 - RNA, 19 nt, Homo sapiens
  misc_RNA (1)...(19): siRNA sense strand
ccacucagacuacaucaac

SEQ ID NO: 1443027 - RNA, 19 nt, Homo sapiens
  misc_RNA (1)...(19): siRNA sense strand
ccacagccacucagacuac

SEQ ID NO: 1443028 - RNA, 19 nt, Homo sapiens
  misc_RNA (1)...(19): siRNA sense strand
gauggaguguuuggaaggu

SEQ ID NO: 1443029 - RNA, 19 nt, Homo sapiens
  misc_RNA (1)...(19): siRNA sense strand
uggagaaggccacaguuga

SEQ ID NO: 1443030 - RNA, 19 nt, Homo sapiens
  misc_RNA (1)...(19): siRNA sense strand
cagcagugaccuucaaagu

SEQ ID NO: 1443031 - RNA, 19 nt, Homo sapiens
  misc_RNA (1)...(19): siRNA sense strand
ggugaacgccauccucaag

SEQ ID NO: 1443032 - RNA, 19 nt, Homo sapiens
  misc_RNA (1)...(19): siRNA sense strand
uggaggaccaccugaagaa

SEQ ID NO: 1443033 - RNA, 19 nt, Homo sapiens
  misc_RNA (1)...(19): siRNA sense strand
ugacaacaaagacaaacug

SEQ ID NO: 1443034 - RNA, 19 nt, Homo sapiens
  misc_RNA (1)...(19): siRNA sense strand
caaagugagcgccaauguc

SEQ ID NO: 1443035 - RNA, 19 nt, Homo sapiens
  misc_RNA (1)...(19): siRNA sense strand
gaugagcucagcccuaagg

SEQ ID NO: 1443036 - RNA, 19 nt, Homo sapiens
  misc_RNA (1)...(19): siRNA sense strand
gagaaggccacaguugaca

SEQ ID NO: 1443037 - RNA, 19 nt, Homo sapiens
  misc_RNA (1)...(19): siRNA sense strand
gacaugguucucaacaaga

SEQ ID NO: 1443038 - RNA, 19 nt, Homo sapiens
  misc_RNA (1)...(19): siRNA sense strand
agagcauccugaccuaugu

SEQ ID NO: 1443039 - RNA, 19 nt, Homo sapiens
  misc_RNA (1)...(19): siRNA sense strand
gagugcaggacgacgauga

SEQ ID NO: 1443040 - RNA, 19 nt, Homo sapiens
  misc_RNA (1)...(19): siRNA sense strand
caacaagauggccaaaggu

SEQ ID NO: 1443041 - RNA, 19 nt, Homo sapiens
  misc_RNA (1)...(19): siRNA sense strand
acaugguucucaacaagau

SEQ ID NO: 1443042 - RNA, 19 nt, Homo sapiens
  misc_RNA (1)...(19): siRNA sense strand
caaucucuaccacaucuau

SEQ ID NO: 1443043 - RNA, 19 nt, Homo sapiens
  misc_RNA (1)...(19): siRNA sense strand
aggaccaccugaagaacaa

SEQ ID NO: 1443044 - RNA, 19 nt, Homo sapiens
  misc_RNA (1)...(19): siRNA sense strand
caaagacaaacuggaggaa

SEQ ID NO: 1443045 - RNA, 19 nt, Homo sapiens
  misc_RNA (1)...(19): siRNA sense strand
cagcgacggccugcaauug

SEQ ID NO: 1443046 - RNA, 19 nt, Homo sapiens
  misc_RNA (1)...(19): siRNA sense strand
aaagacaaacuggaggaaa

SEQ ID NO: 1443047 - RNA, 19 nt, Homo sapiens
  misc_RNA (1)...(19): siRNA sense strand
gccaaaggugcuaaagaga

SEQ ID NO: 1443048 - RNA, 19 nt, Homo sapiens
  misc_RNA (1)...(19): siRNA sense strand
agaagacuccaccaaguuc

SEQ ID NO: 1443049 - RNA, 19 nt, Homo sapiens
  misc_RNA (1)...(19): siRNA sense strand
gugcaggacgacgaugaua

SEQ ID NO: 1443050 - RNA, 19 nt, Homo sapiens
  misc_RNA (1)...(19): siRNA sense strand
ggcaggaugacuauacuca

SEQ ID NO: 1443051 - RNA, 19 nt, Homo sapiens
  misc_RNA (1)...(19): siRNA sense strand
acagugguguggacagaca

SEQ ID NO: 1443052 - RNA, 19 nt, Homo sapiens
  misc_RNA (1)...(19): siRNA sense strand
cuccuggacuuccgcagaa

SEQ ID NO: 1443053 - RNA, 19 nt, Homo sapiens
  misc_RNA (1)...(19): siRNA sense strand
gugcagagcugaacaagga

SEQ ID NO: 1443054 - RNA, 19 nt, Homo sapiens
  misc_RNA (1)...(19): siRNA sense strand
aagaggagaugaaggaauu

SEQ ID NO: 1443055 - RNA, 19 nt, Homo sapiens
  misc_RNA (1)...(19): siRNA sense strand
gaaccaagaguacaagaug

SEQ ID NO: 1443056 - RNA, 19 nt, Homo sapiens
  misc_RNA (1)...(19): siRNA sense strand
gagcuagccuacaugaaga

SEQ ID NO: 1443057 - RNA, 19 nt, Homo sapiens
  misc_RNA (1)...(19): siRNA sense strand
gaagagcuagccuacauga

SEQ ID NO: 1443058 - RNA, 19 nt, Homo sapiens
  misc_RNA (1)...(19): siRNA sense strand
uaccaacacugccaugauu

SEQ ID NO: 1443059 - RNA, 19 nt, Homo sapiens
  misc_RNA (1)...(19): siRNA sense strand
acaaggaggugucuaccaa

SEQ ID NO: 1443060 - RNA, 19 nt, Homo sapiens
  misc_RNA (1)...(19): siRNA sense strand
gagccugaaugaagagcua

SEQ ID NO: 1443061 - RNA, 19 nt, Homo sapiens
  misc_RNA (1)...(19): siRNA sense strand
gaagaagaaccaugaagag

SEQ ID NO: 1443062 - RNA, 19 nt, Homo sapiens
  misc_RNA (1)...(19): siRNA sense strand
gaagagcuccgggacaaga

SEQ ID NO: 1443063 - RNA, 19 nt, Homo sapiens
  misc_RNA (1)...(19): siRNA sense strand
uagccuacaugaagaagaa

SEQ ID NO: 1443064 - RNA, 19 nt, Homo sapiens
  misc_RNA (1)...(19): siRNA sense strand
gcaaugagaagaucaccau

SEQ ID NO: 1443065 - RNA, 19 nt, Homo sapiens
  misc_RNA (1)...(19): siRNA sense strand
gaggagaugaaggaauuua

SEQ ID NO: 1443066 - RNA, 19 nt, Homo sapiens
  misc_RNA (1)...(19): siRNA sense strand
ugaagaagaaccaugaaga

SEQ ID NO: 1443067 - RNA, 19 nt, Homo sapiens
  misc_RNA (1)...(19): siRNA sense strand
agacugaccuggagaugca

SEQ ID NO: 1443068 - RNA, 19 nt, Homo sapiens
  misc_RNA (1)...(19): siRNA sense strand
gaagaggagaugaaggaau

SEQ ID NO: 1443069 - RNA, 19 nt, Homo sapiens
  misc_RNA (1)...(19): siRNA sense strand
ucgagagccugaaugaaga

SEQ ID NO: 1443070 - RNA, 19 nt, Homo sapiens
  misc_RNA (1)...(19): siRNA sense strand
gaugagcucacucugucua

SEQ ID NO: 1443071 - RNA, 19 nt, Homo sapiens
  misc_RNA (1)...(19): siRNA sense strand
gagcucacucugucuaaga

SEQ ID NO: 1443072 - RNA, 19 nt, Homo sapiens
  misc_RNA (1)...(19): siRNA sense strand
gauccugaccgccaccauu

SEQ ID NO: 1443073 - RNA, 19 nt, Homo sapiens
  misc_RNA (1)...(19): siRNA sense strand
gcagaucgagagccugaau

SEQ ID NO: 1443074 - RNA, 19 nt, Homo sapiens
  misc_RNA (1)...(19): siRNA sense strand
uugaagagcuccgggacaa

SEQ ID NO: 1443075 - RNA, 19 nt, Homo sapiens
  misc_RNA (1)...(19): siRNA sense strand
gagacggagugccgcuaug

SEQ ID NO: 1443076 - RNA, 19 nt, Homo sapiens
  misc_RNA (1)...(19): siRNA sense strand
cuauggagguggccuugga

SEQ ID NO: 1443077 - RNA, 19 nt, Homo sapiens
  misc_RNA (1)...(19): siRNA sense strand
acaagaugcugcuggacau

SEQ ID NO: 1443078 - RNA, 19 nt, Homo sapiens
  misc_RNA (1)...(19): siRNA sense strand
augaagagcuagccuacau

SEQ ID NO: 1443079 - RNA, 19 nt, Homo sapiens
  misc_RNA (1)...(19): siRNA sense strand
cuauggagguggccuugga

SEQ ID NO: 1443080 - RNA, 19 nt, Homo sapiens
  misc_RNA (1)...(19): siRNA sense strand
ugacuuuggugcuugugau

SEQ ID NO: 1443081 - RNA, 19 nt, Homo sapiens
  misc_RNA (1)...(19): siRNA sense strand
agcaggagaucgccaccua

SEQ ID NO: 1443082 - RNA, 19 nt, Homo sapiens
  misc_RNA (1)...(19): siRNA sense strand
gagaugaaggaauuuagca

SEQ ID NO: 1443083 - RNA, 19 nt, Homo sapiens
  misc_RNA (1)...(19): siRNA sense strand
cguggugucucuaccuguu

SEQ ID NO: 1443084 - RNA, 19 nt, Homo sapiens
  misc_RNA (1)...(19): siRNA sense strand
gcagauccagggacucauc

SEQ ID NO: 1443085 - RNA, 19 nt, Homo sapiens
  misc_RNA (1)...(19): siRNA sense strand
gaagaucaccaugcagaac

SEQ ID NO: 1443086 - RNA, 19 nt, Homo sapiens
  misc_RNA (1)...(19): siRNA sense strand
gcugguggcuuuguugacu

SEQ ID NO: 1443087 - RNA, 19 nt, Homo sapiens
  misc_RNA (1)...(19): siRNA sense strand
cuacaagaccauugaagag

SEQ ID NO: 1443088 - RNA, 19 nt, Homo sapiens
  misc_RNA (1)...(19): siRNA sense strand
gaucgagagccugaaugaa

SEQ ID NO: 1443089 - RNA, 19 nt, Homo sapiens
  misc_RNA (1)...(19): siRNA sense strand
gggucauccuggagauuga

SEQ ID NO: 1443090 - RNA, 19 nt, Homo sapiens
  misc_RNA (1)...(19): siRNA sense strand
ccuuggagguggcuaugga

SEQ ID NO: 1443091 - RNA, 19 nt, Homo sapiens
  misc_RNA (1)...(19): siRNA sense strand
ugaaggaauuuagcaacca

SEQ ID NO: 1443092 - RNA, 19 nt, Homo sapiens
  misc_RNA (1)...(19): siRNA sense strand
agagcuagccuacaugaag

SEQ ID NO: 1443093 - RNA, 19 nt, Homo sapiens
  misc_RNA (1)...(19): siRNA sense strand
gccagaaccaagaguacaa

SEQ ID NO: 1443094 - RNA, 19 nt, Homo sapiens
  misc_RNA (1)...(19): siRNA sense strand
aaggaggugucuaccaaca

SEQ ID NO: 1443095 - RNA, 19 nt, Homo sapiens
  misc_RNA (1)...(19): siRNA sense strand
cagcagauccagggacuca

SEQ ID NO: 1443096 - RNA, 19 nt, Homo sapiens
  misc_RNA (1)...(19): siRNA sense strand
ccaacacugccaugauuca

SEQ ID NO: 1443097 - RNA, 19 nt, Homo sapiens
  misc_RNA (1)...(19): siRNA sense strand
gaaccaugaagaggagaug

SEQ ID NO: 1443098 - RNA, 19 nt, Homo sapiens
  misc_RNA (1)...(19): siRNA sense strand
cagagaugagggagcagua

SEQ ID NO: 1443099 - RNA, 19 nt, Homo sapiens
  misc_RNA (1)...(19): siRNA sense strand
ggagaugaaggaauuuagc

SEQ ID NO: 1443100 - RNA, 19 nt, Homo sapiens
  misc_RNA (1)...(19): siRNA sense strand
gagaacacgguggcagaga

SEQ ID NO: 1443101 - RNA, 19 nt, Homo sapiens
  misc_RNA (1)...(19): siRNA sense strand
acuacaagaccauugaaga

SEQ ID NO: 1443102 - RNA, 19 nt, Homo sapiens
  misc_RNA (1)...(19): siRNA sense strand
gggaugcugaggaaugguu

SEQ ID NO: 1443103 - RNA, 19 nt, Homo sapiens
  misc_RNA (1)...(19): siRNA sense strand
augagaagaucaccaugca

SEQ ID NO: 1443104 - RNA, 19 nt, Homo sapiens
  misc_RNA (1)...(19): siRNA sense strand
ggcgugagcugugguuuug

SEQ ID NO: 1443105 - RNA, 19 nt, Homo sapiens
  misc_RNA (1)...(19): siRNA sense strand
agaucgagagccugaauga

SEQ ID NO: 1443106 - RNA, 19 nt, Homo sapiens
  misc_RNA (1)...(19): siRNA sense strand
ugguggcuuuguugacuuu

SEQ ID NO: 1443107 - RNA, 19 nt, Homo sapiens
  misc_RNA (1)...(19): siRNA sense strand
ugaacaaggaggugucuac

SEQ ID NO: 1443108 - RNA, 19 nt, Homo sapiens
  misc_RNA (1)...(19): siRNA sense strand
ccuacuacaagaccauuga

SEQ ID NO: 1443109 - RNA, 19 nt, Homo sapiens
  misc_RNA (1)...(19): siRNA sense strand
ucacuggcaaugagaagau

SEQ ID NO: 1443110 - RNA, 19 nt, Homo sapiens
  misc_RNA (1)...(19): siRNA sense strand
gugcagagcugaacaagga

SEQ ID NO: 1443111 - RNA, 19 nt, Homo sapiens
  misc_RNA (1)...(19): siRNA sense strand
aagaggagaugaaggaauu

SEQ ID NO: 1443112 - RNA, 19 nt, Homo sapiens
  misc_RNA (1)...(19): siRNA sense strand
gaaccaagaguacaagaug

SEQ ID NO: 1443113 - RNA, 19 nt, Homo sapiens
  misc_RNA (1)...(19): siRNA sense strand
gagcuagccuacaugaaga

SEQ ID NO: 1443114 - RNA, 19 nt, Homo sapiens
  misc_RNA (1)...(19): siRNA sense strand
gaagagcuagccuacauga

SEQ ID NO: 1443115 - RNA, 19 nt, Homo sapiens
  misc_RNA (1)...(19): siRNA sense strand
uaccaacacugccaugauu

SEQ ID NO: 1443116 - RNA, 19 nt, Homo sapiens
  misc_RNA (1)...(19): siRNA sense strand
acaaggaggugucuaccaa

SEQ ID NO: 1443117 - RNA, 19 nt, Homo sapiens
  misc_RNA (1)...(19): siRNA sense strand
gagccugaaugaagagcua

SEQ ID NO: 1443118 - RNA, 19 nt, Homo sapiens
  misc_RNA (1)...(19): siRNA sense strand
gaagaagaaccaugaagag

SEQ ID NO: 1443119 - RNA, 19 nt, Homo sapiens
  misc_RNA (1)...(19): siRNA sense strand
gaagagcuccgggacaaga

SEQ ID NO: 1443120 - RNA, 19 nt, Homo sapiens
  misc_RNA (1)...(19): siRNA sense strand
uagccuacaugaagaagaa

SEQ ID NO: 1443121 - RNA, 19 nt, Homo sapiens
  misc_RNA (1)...(19): siRNA sense strand
gcaaugagaagaucaccau

SEQ ID NO: 1443122 - RNA, 19 nt, Homo sapiens
  misc_RNA (1)...(19): siRNA sense strand
gaggagaugaaggaauuua

SEQ ID NO: 1443123 - RNA, 19 nt, Homo sapiens
  misc_RNA (1)...(19): siRNA sense strand
ugaagaagaaccaugaaga

SEQ ID NO: 1443124 - RNA, 19 nt, Homo sapiens
  misc_RNA (1)...(19): siRNA sense strand
agacugaccuggagaugca

SEQ ID NO: 1443125 - RNA, 19 nt, Homo sapiens
  misc_RNA (1)...(19): siRNA sense strand
gaagaggagaugaaggaau

SEQ ID NO: 1443126 - RNA, 19 nt, Homo sapiens
  misc_RNA (1)...(19): siRNA sense strand
ucgagagccugaaugaaga

SEQ ID NO: 1443127 - RNA, 19 nt, Homo sapiens
  misc_RNA (1)...(19): siRNA sense strand
gaugagcucacucugucua

SEQ ID NO: 1443128 - RNA, 19 nt, Homo sapiens
  misc_RNA (1)...(19): siRNA sense strand
gagcucacucugucuaaga

SEQ ID NO: 1443129 - RNA, 19 nt, Homo sapiens
  misc_RNA (1)...(19): siRNA sense strand
gauccugaccgccaccauu

SEQ ID NO: 1443130 - RNA, 19 nt, Homo sapiens
  misc_RNA (1)...(19): siRNA sense strand
gcagaucgagagccugaau

SEQ ID NO: 1443131 - RNA, 19 nt, Homo sapiens
  misc_RNA (1)...(19): siRNA sense strand
uugaagagcuccgggacaa

SEQ ID NO: 1443132 - RNA, 19 nt, Homo sapiens
  misc_RNA (1)...(19): siRNA sense strand
gagacggagugccgcuaug

SEQ ID NO: 1443133 - RNA, 19 nt, Homo sapiens
  misc_RNA (1)...(19): siRNA sense strand
cuauggagguggccuugga

SEQ ID NO: 1443134 - RNA, 19 nt, Homo sapiens
  misc_RNA (1)...(19): siRNA sense strand
acaagaugcugcuggacau

SEQ ID NO: 1443135 - RNA, 19 nt, Homo sapiens
  misc_RNA (1)...(19): siRNA sense strand
augaagagcuagccuacau

SEQ ID NO: 1443136 - RNA, 19 nt, Homo sapiens
  misc_RNA (1)...(19): siRNA sense strand
cuauggagguggccuugga

SEQ ID NO: 1443137 - RNA, 19 nt, Homo sapiens
  misc_RNA (1)...(19): siRNA sense strand
ugacuuuggugcuugugau

SEQ ID NO: 1443138 - RNA, 19 nt, Homo sapiens
  misc_RNA (1)...(19): siRNA sense strand
agcaggagaucgccaccua

SEQ ID NO: 1443139 - RNA, 19 nt, Homo sapiens
  misc_RNA (1)...(19): siRNA sense strand
gagaugaaggaauuuagca

SEQ ID NO: 1443140 - RNA, 19 nt, Homo sapiens
  misc_RNA (1)...(19): siRNA sense strand
cguggugucucuaccuguu

SEQ ID NO: 1443141 - RNA, 19 nt, Homo sapiens
  misc_RNA (1)...(19): siRNA sense strand
gcagauccagggacucauc

SEQ ID NO: 1443142 - RNA, 19 nt, Homo sapiens
  misc_RNA (1)...(19): siRNA sense strand
gaagaucaccaugcagaac

SEQ ID NO: 1443143 - RNA, 19 nt, Homo sapiens
  misc_RNA (1)...(19): siRNA sense strand
gcugguggcuuuguugacu

SEQ ID NO: 1443144 - RNA, 19 nt, Homo sapiens
  misc_RNA (1)...(19): siRNA sense strand
cuacaagaccauugaagag

SEQ ID NO: 1443145 - RNA, 19 nt, Homo sapiens
  misc_RNA (1)...(19): siRNA sense strand
gaucgagagccugaaugaa

SEQ ID NO: 1443146 - RNA, 19 nt, Homo sapiens
  misc_RNA (1)...(19): siRNA sense strand
gggucauccuggagauuga

SEQ ID NO: 1443147 - RNA, 19 nt, Homo sapiens
  misc_RNA (1)...(19): siRNA sense strand
ccuuggagguggcuaugga

SEQ ID NO: 1443148 - RNA, 19 nt, Homo sapiens
  misc_RNA (1)...(19): siRNA sense strand
ugaaggaauuuagcaacca

SEQ ID NO: 1443149 - RNA, 19 nt, Homo sapiens
  misc_RNA (1)...(19): siRNA sense strand
agagcuagccuacaugaag

SEQ ID NO: 1443150 - RNA, 19 nt, Homo sapiens
  misc_RNA (1)...(19): siRNA sense strand
ggucgccgcacuucugaug

SEQ ID NO: 1443151 - RNA, 19 nt, Homo sapiens
  misc_RNA (1)...(19): siRNA sense strand
gccagaaccaagaguacaa

SEQ ID NO: 1443152 - RNA, 19 nt, Homo sapiens
  misc_RNA (1)...(19): siRNA sense strand
aaggaggugucuaccaaca

SEQ ID NO: 1443153 - RNA, 19 nt, Homo sapiens
  misc_RNA (1)...(19): siRNA sense strand
cagcagauccagggacuca

SEQ ID NO: 1443154 - RNA, 19 nt, Homo sapiens
  misc_RNA (1)...(19): siRNA sense strand
ccaacacugccaugauuca

SEQ ID NO: 1443155 - RNA, 19 nt, Homo sapiens
  misc_RNA (1)...(19): siRNA sense strand
gaaccaugaagaggagaug

SEQ ID NO: 1443156 - RNA, 19 nt, Homo sapiens
  misc_RNA (1)...(19): siRNA sense strand
cagagaugagggagcagua

SEQ ID NO: 1443157 - RNA, 19 nt, Homo sapiens
  misc_RNA (1)...(19): siRNA sense strand
ggagaugaaggaauuuagc

SEQ ID NO: 1443158 - RNA, 19 nt, Homo sapiens
  misc_RNA (1)...(19): siRNA sense strand
cgacuucuagugccucugu

SEQ ID NO: 1443159 - RNA, 19 nt, Homo sapiens
  misc_RNA (1)...(19): siRNA sense strand
gagaacacgguggcagaga

SEQ ID NO: 1443160 - RNA, 19 nt, Homo sapiens
  misc_RNA (1)...(19): siRNA sense strand
acuacaagaccauugaaga

SEQ ID NO: 1443161 - RNA, 19 nt, Homo sapiens
  misc_RNA (1)...(19): siRNA sense strand
ucuguuaccacgacuucua

SEQ ID NO: 1443162 - RNA, 19 nt, Homo sapiens
  misc_RNA (1)...(19): siRNA sense strand
gggaugcugaggaaugguu

SEQ ID NO: 1443163 - RNA, 19 nt, Homo sapiens
  misc_RNA (1)...(19): siRNA sense strand
augagaagaucaccaugca

SEQ ID NO: 1443164 - RNA, 19 nt, Homo sapiens
  misc_RNA (1)...(19): siRNA sense strand
guuaccaccaccucuaaug

SEQ ID NO: 1443165 - RNA, 19 nt, Homo sapiens
  misc_RNA (1)...(19): siRNA sense strand
ggcgugagcugugguuuug

SEQ ID NO: 1443166 - RNA, 19 nt, Homo sapiens
  misc_RNA (1)...(19): siRNA sense strand
agaucgagagccugaauga

SEQ ID NO: 1443167 - RNA, 19 nt, Homo sapiens
  misc_RNA (1)...(19): siRNA sense strand
ucacuggcaaugagaagau

SEQ ID NO: 1443168 - RNA, 19 nt, Homo sapiens
  misc_RNA (1)...(19): siRNA sense strand
ugaacaaggaggugucuac

SEQ ID NO: 1443169 - RNA, 19 nt, Homo sapiens
  misc_RNA (1)...(19): siRNA sense strand
ugguggcuuuguugacuuu

SEQ ID NO: 1443170 - RNA, 19 nt, Homo sapiens
  misc_RNA (1)...(19): siRNA sense strand
ccuacuacaagaccauuga

SEQ ID NO: 1443171 - RNA, 19 nt, Homo sapiens
  misc_RNA (1)...(19): siRNA sense strand
cgacauagcugaggacuug

SEQ ID NO: 1443172 - RNA, 19 nt, Homo sapiens
  misc_RNA (1)...(19): siRNA sense strand
gacaauaccuacuaugcaa

SEQ ID NO: 1443173 - RNA, 19 nt, Homo sapiens
  misc_RNA (1)...(19): siRNA sense strand
gggaaggccuuggauguuu

SEQ ID NO: 1443174 - RNA, 19 nt, Homo sapiens
  misc_RNA (1)...(19): siRNA sense strand
caagaucgcugacuuuggu

SEQ ID NO: 1443175 - RNA, 19 nt, Homo sapiens
  misc_RNA (1)...(19): siRNA sense strand
gaaauugccauccucaaga

SEQ ID NO: 1443176 - RNA, 19 nt, Homo sapiens
  misc_RNA (1)...(19): siRNA sense strand
ugaagaccaugauacguaa

SEQ ID NO: 1443177 - RNA, 19 nt, Homo sapiens
  misc_RNA (1)...(19): siRNA sense strand
ucaaaccacucucugaaga

SEQ ID NO: 1443178 - RNA, 19 nt, Homo sapiens
  misc_RNA (1)...(19): siRNA sense strand
caaguuggccuacaaugaa

SEQ ID NO: 1443179 - RNA, 19 nt, Homo sapiens
  misc_RNA (1)...(19): siRNA sense strand
caaugaaggugcuguccaa

SEQ ID NO: 1443180 - RNA, 19 nt, Homo sapiens
  misc_RNA (1)...(19): siRNA sense strand
acaguaagaucaagaguca

SEQ ID NO: 1443181 - RNA, 19 nt, Homo sapiens
  misc_RNA (1)...(19): siRNA sense strand
ggaaggccuuggauguuug

SEQ ID NO: 1443182 - RNA, 19 nt, Homo sapiens
  misc_RNA (1)...(19): siRNA sense strand
ucaaaggcaucgaguacuu

SEQ ID NO: 1443183 - RNA, 19 nt, Homo sapiens
  misc_RNA (1)...(19): siRNA sense strand
gagcagguguaccaggaaa

SEQ ID NO: 1443184 - RNA, 19 nt, Homo sapiens
  misc_RNA (1)...(19): siRNA sense strand
gugaagaccaugauacgua

SEQ ID NO: 1443185 - RNA, 19 nt, Homo sapiens
  misc_RNA (1)...(19): siRNA sense strand
ggaagugcccacccucaaa

SEQ ID NO: 1443186 - RNA, 19 nt, Homo sapiens
  misc_RNA (1)...(19): siRNA sense strand
ccaaugaggaccaucugua

SEQ ID NO: 1443187 - RNA, 19 nt, Homo sapiens
  misc_RNA (1)...(19): siRNA sense strand
gaucaaaggcaucgaguac

SEQ ID NO: 1443188 - RNA, 19 nt, Homo sapiens
  misc_RNA (1)...(19): siRNA sense strand
caaaggcaucgaguacuua

SEQ ID NO: 1443189 - RNA, 19 nt, Homo sapiens
  misc_RNA (1)...(19): siRNA sense strand
ggaaauugccauccucaag

SEQ ID NO: 1443190 - RNA, 19 nt, Homo sapiens
  misc_RNA (1)...(19): siRNA sense strand
aguauacccugaaggauga

SEQ ID NO: 1443191 - RNA, 19 nt, Homo sapiens
  misc_RNA (1)...(19): siRNA sense strand
ggaggaacgcucacuguca

SEQ ID NO: 1443192 - RNA, 19 nt, Homo sapiens
  misc_RNA (1)...(19): siRNA sense strand
ggcauggaguccuucauug

SEQ ID NO: 1443193 - RNA, 19 nt, Homo sapiens
  misc_RNA (1)...(19): siRNA sense strand
aaauugccauccucaagaa

SEQ ID NO: 1443194 - RNA, 19 nt, Homo sapiens
  misc_RNA (1)...(19): siRNA sense strand
gggcauggaguccuucauu

SEQ ID NO: 1443195 - RNA, 19 nt, Homo sapiens
  misc_RNA (1)...(19): siRNA sense strand
ccugaaggaugaaauugga

SEQ ID NO: 1443196 - RNA, 19 nt, Homo sapiens
  misc_RNA (1)...(19): siRNA sense strand
guacuuacacuaccagaag

SEQ ID NO: 1443197 - RNA, 19 nt, Homo sapiens
  misc_RNA (1)...(19): siRNA sense strand
ucaaguuggccuacaauga

SEQ ID NO: 1443198 - RNA, 19 nt, Homo sapiens
  misc_RNA (1)...(19): siRNA sense strand
ccuauggugucgucaaguu

SEQ ID NO: 1443199 - RNA, 19 nt, Homo sapiens
  misc_RNA (1)...(19): siRNA sense strand
cauccaccgugacaucaaa

SEQ ID NO: 1443200 - RNA, 19 nt, Homo sapiens
  misc_RNA (1)...(19): siRNA sense strand
gagcggaucauguguuuac

SEQ ID NO: 1443201 - RNA, 19 nt, Homo sapiens
  misc_RNA (1)...(19): siRNA sense strand
gcagguguaccaggaaauu

SEQ ID NO: 1443202 - RNA, 19 nt, Homo sapiens
  misc_RNA (1)...(19): siRNA sense strand
caucaagaucgcugacuuu

SEQ ID NO: 1443203 - RNA, 19 nt, Homo sapiens
  misc_RNA (1)...(19): siRNA sense strand
gaucauccaccgugacauc

SEQ ID NO: 1443204 - RNA, 19 nt, Homo sapiens
  misc_RNA (1)...(19): siRNA sense strand
gcauggaguccuucauugu

SEQ ID NO: 1443205 - RNA, 19 nt, Homo sapiens
  misc_RNA (1)...(19): siRNA sense strand
gugacgcgcuccucuccaa

SEQ ID NO: 1443206 - RNA, 19 nt, Homo sapiens
  misc_RNA (1)...(19): siRNA sense strand
acgagcggaucauguguuu

SEQ ID NO: 1443207 - RNA, 19 nt, Homo sapiens
  misc_RNA (1)...(19): siRNA sense strand
acacuauacugcuuugucu

SEQ ID NO: 1443208 - RNA, 19 nt, Homo sapiens
  misc_RNA (1)...(19): siRNA sense strand
ugguggagguccuggauga

SEQ ID NO: 1443209 - RNA, 19 nt, Homo sapiens
  misc_RNA (1)...(19): siRNA sense strand
gucagcgccuggaaacuug

SEQ ID NO: 1443210 - RNA, 19 nt, Homo sapiens
  misc_RNA (1)...(19): siRNA sense strand
ggacuugaaggaccugauc

SEQ ID NO: 1443211 - RNA, 19 nt, Homo sapiens
  misc_RNA (1)...(19): siRNA sense strand
guacaugguguucgaacug

SEQ ID NO: 1443212 - RNA, 19 nt, Homo sapiens
  misc_RNA (1)...(19): siRNA sense strand
ggccgacaguggagucuca

SEQ ID NO: 1443213 - RNA, 19 nt, Homo sapiens
  misc_RNA (1)...(19): siRNA sense strand
ccucaaaccacucucugaa

SEQ ID NO: 1443214 - RNA, 19 nt, Homo sapiens
  misc_RNA (1)...(19): siRNA sense strand
ccaggcccguuucuacuuc

SEQ ID NO: 1443215 - RNA, 19 nt, Homo sapiens
  misc_RNA (1)...(19): siRNA sense strand
cccguaugcuggacaagaa

SEQ ID NO: 1443216 - RNA, 19 nt, Homo sapiens
  misc_RNA (1)...(19): siRNA sense strand
gcaucgaguacuuacacua

SEQ ID NO: 1443217 - RNA, 19 nt, Homo sapiens
  misc_RNA (1)...(19): siRNA sense strand
ugaaggaugaaauuggaaa

SEQ ID NO: 1443218 - RNA, 19 nt, Homo sapiens
  misc_RNA (1)...(19): siRNA sense strand
uagcugaggacuugaagga

SEQ ID NO: 1443219 - RNA, 19 nt, Homo sapiens
  misc_RNA (1)...(19): siRNA sense strand
gaagugcccacccucaaac

SEQ ID NO: 1443220 - RNA, 19 nt, Homo sapiens
  misc_RNA (1)...(19): siRNA sense strand
gguggcagccuggacauga

SEQ ID NO: 1443221 - RNA, 19 nt, Homo sapiens
  misc_RNA (1)...(19): siRNA sense strand
caauaccuacuaugcaaug

SEQ ID NO: 1443222 - RNA, 19 nt, Homo sapiens
  misc_RNA (1)...(19): siRNA sense strand
acaucaagaucgcugacuu

SEQ ID NO: 1443223 - RNA, 19 nt, Homo sapiens
  misc_RNA (1)...(19): siRNA sense strand
ggaucguggugccggaaau

SEQ ID NO: 1443224 - RNA, 19 nt, Homo sapiens
  misc_RNA (1)...(19): siRNA sense strand
aaguuggccuacaaugaaa

SEQ ID NO: 1443225 - RNA, 19 nt, Homo sapiens
  misc_RNA (1)...(19): siRNA sense strand
gaagaccaugauacguaaa

SEQ ID NO: 1443226 - RNA, 19 nt, Homo sapiens
  misc_RNA (1)...(19): siRNA sense strand
cugaagaccaggcccguuu

SEQ ID NO: 1443227 - RNA, 19 nt, Homo sapiens
  misc_RNA (1)...(19): siRNA sense strand
guggcagccuggacaugaa

SEQ ID NO: 1443228 - RNA, 19 nt, Homo sapiens
  misc_RNA (1)...(19): siRNA sense strand
ugacaauaccuacuaugca

SEQ ID NO: 1443229 - RNA, 19 nt, Homo sapiens
  misc_RNA (1)...(19): siRNA sense strand
gcaagcugucucugcaaga

SEQ ID NO: 1443230 - RNA, 19 nt, Homo sapiens
  misc_RNA (1)...(19): siRNA sense strand
gaccugaucacccguaugc

SEQ ID NO: 1443231 - RNA, 19 nt, Homo sapiens
  misc_RNA (1)...(19): siRNA sense strand
acuauacugcuuugucuuu

SEQ ID NO: 1443232 - RNA, 19 nt, Homo sapiens
  misc_RNA (1)...(19): siRNA sense strand
ggcagcagcagcagcgaaa

SEQ ID NO: 1443233 - RNA, 19 nt, Homo sapiens
  misc_RNA (1)...(19): siRNA sense strand
ugugagcaaugaauucaag

SEQ ID NO: 1443234 - RNA, 19 nt, Homo sapiens
  misc_RNA (1)...(19): siRNA sense strand
ugaggaccaucuguacaug

SEQ ID NO: 1443235 - RNA, 19 nt, Homo sapiens
  misc_RNA (1)...(19): siRNA sense strand
gaaggaugaaauuggaaag

SEQ ID NO: 1443236 - RNA, 19 nt, Homo sapiens
  misc_RNA (1)...(19): siRNA sense strand
auacguaaacgcuccuuug

SEQ ID NO: 1443237 - RNA, 19 nt, Homo sapiens
  misc_RNA (1)...(19): siRNA sense strand
caaugaggaccaucuguac

SEQ ID NO: 1443238 - RNA, 19 nt, Homo sapiens
  misc_RNA (1)...(19): siRNA sense strand
uaccuacuaugcaaugaag

SEQ ID NO: 1443239 - RNA, 19 nt, Homo sapiens
  misc_RNA (1)...(19): siRNA sense strand
ggacgagcggaucaugugu

SEQ ID NO: 1443240 - RNA, 19 nt, Homo sapiens
  misc_RNA (1)...(19): siRNA sense strand
cuauacugcuuugucuuug

SEQ ID NO: 1443241 - RNA, 19 nt, Homo sapiens
  misc_RNA (1)...(19): siRNA sense strand
gugacacuauacugcuuug

SEQ ID NO: 1443242 - RNA, 19 nt, Homo sapiens
  misc_RNA (1)...(19): siRNA sense strand
ugacuuuggugugagcaau

SEQ ID NO: 1443243 - RNA, 19 nt, Homo sapiens
  misc_RNA (1)...(19): siRNA sense strand
ggugugagcaaugaauuca

SEQ ID NO: 1443244 - RNA, 19 nt, Homo sapiens
  misc_RNA (1)...(19): siRNA sense strand
cauggaguccuucauugug

SEQ ID NO: 1443245 - RNA, 19 nt, Homo sapiens
  misc_RNA (1)...(19): siRNA sense strand
gaagaccaggcccguuucu

SEQ ID NO: 1443246 - RNA, 19 nt, Homo sapiens
  misc_RNA (1)...(19): siRNA sense strand
gacgagcggaucauguguu

SEQ ID NO: 1443247 - RNA, 19 nt, Homo sapiens
  misc_RNA (1)...(19): siRNA sense strand
ugucagcgccuggaaacuu

SEQ ID NO: 1443248 - RNA, 19 nt, Homo sapiens
  misc_RNA (1)...(19): siRNA sense strand
gauacguaaacgcuccuuu

SEQ ID NO: 1443249 - RNA, 19 nt, Homo sapiens
  misc_RNA (1)...(19): siRNA sense strand
caucgaguacuuacacuac

SEQ ID NO: 1443250 - RNA, 19 nt, Homo sapiens
  misc_RNA (1)...(19): siRNA sense strand
ucacccguaugcuggacaa

SEQ ID NO: 1443251 - RNA, 19 nt, Homo sapiens
  misc_RNA (1)...(19): siRNA sense strand
cgacauagcugaggacuug

SEQ ID NO: 1443252 - RNA, 19 nt, Homo sapiens
  misc_RNA (1)...(19): siRNA sense strand
gacaauaccuacuaugcaa

SEQ ID NO: 1443253 - RNA, 19 nt, Homo sapiens
  misc_RNA (1)...(19): siRNA sense strand
gggaaggccuuggauguuu

SEQ ID NO: 1443254 - RNA, 19 nt, Homo sapiens
  misc_RNA (1)...(19): siRNA sense strand
caagaucgcugacuuuggu

SEQ ID NO: 1443255 - RNA, 19 nt, Homo sapiens
  misc_RNA (1)...(19): siRNA sense strand
gaaauugccauccucaaga

SEQ ID NO: 1443256 - RNA, 19 nt, Homo sapiens
  misc_RNA (1)...(19): siRNA sense strand
ugaagaccaugauacguaa

SEQ ID NO: 1443257 - RNA, 19 nt, Homo sapiens
  misc_RNA (1)...(19): siRNA sense strand
ucaaaccacucucugaaga

SEQ ID NO: 1443258 - RNA, 19 nt, Homo sapiens
  misc_RNA (1)...(19): siRNA sense strand
caaguuggccuacaaugaa

SEQ ID NO: 1443259 - RNA, 19 nt, Homo sapiens
  misc_RNA (1)...(19): siRNA sense strand
caaugaaggugcuguccaa

SEQ ID NO: 1443260 - RNA, 19 nt, Homo sapiens
  misc_RNA (1)...(19): siRNA sense strand
acaguaagaucaagaguca

SEQ ID NO: 1443261 - RNA, 19 nt, Homo sapiens
  misc_RNA (1)...(19): siRNA sense strand
ggaaggccuuggauguuug

SEQ ID NO: 1443262 - RNA, 19 nt, Homo sapiens
  misc_RNA (1)...(19): siRNA sense strand
ucaaaggcaucgaguacuu

SEQ ID NO: 1443263 - RNA, 19 nt, Homo sapiens
  misc_RNA (1)...(19): siRNA sense strand
gagcagguguaccaggaaa

SEQ ID NO: 1443264 - RNA, 19 nt, Homo sapiens
  misc_RNA (1)...(19): siRNA sense strand
gugaagaccaugauacgua

SEQ ID NO: 1443265 - RNA, 19 nt, Homo sapiens
  misc_RNA (1)...(19): siRNA sense strand
ggaagugcccacccucaaa

SEQ ID NO: 1443266 - RNA, 19 nt, Homo sapiens
  misc_RNA (1)...(19): siRNA sense strand
ccaaugaggaccaucugua

SEQ ID NO: 1443267 - RNA, 19 nt, Homo sapiens
  misc_RNA (1)...(19): siRNA sense strand
gaucaaaggcaucgaguac

SEQ ID NO: 1443268 - RNA, 19 nt, Homo sapiens
  misc_RNA (1)...(19): siRNA sense strand
caaaggcaucgaguacuua

SEQ ID NO: 1443269 - RNA, 19 nt, Homo sapiens
  misc_RNA (1)...(19): siRNA sense strand
ggaaauugccauccucaag

SEQ ID NO: 1443270 - RNA, 19 nt, Homo sapiens
  misc_RNA (1)...(19): siRNA sense strand
aguauacccugaaggauga

SEQ ID NO: 1443271 - RNA, 19 nt, Homo sapiens
  misc_RNA (1)...(19): siRNA sense strand
ggaggaacgcucacuguca

SEQ ID NO: 1443272 - RNA, 19 nt, Homo sapiens
  misc_RNA (1)...(19): siRNA sense strand
ggcauggaguccuucauug

SEQ ID NO: 1443273 - RNA, 19 nt, Homo sapiens
  misc_RNA (1)...(19): siRNA sense strand
aaauugccauccucaagaa

SEQ ID NO: 1443274 - RNA, 19 nt, Homo sapiens
  misc_RNA (1)...(19): siRNA sense strand
gggcauggaguccuucauu

SEQ ID NO: 1443275 - RNA, 19 nt, Homo sapiens
  misc_RNA (1)...(19): siRNA sense strand
ccugaaggaugaaauugga

SEQ ID NO: 1443276 - RNA, 19 nt, Homo sapiens
  misc_RNA (1)...(19): siRNA sense strand
guacuuacacuaccagaag

SEQ ID NO: 1443277 - RNA, 19 nt, Homo sapiens
  misc_RNA (1)...(19): siRNA sense strand
ucaaguuggccuacaauga

SEQ ID NO: 1443278 - RNA, 19 nt, Homo sapiens
  misc_RNA (1)...(19): siRNA sense strand
ccuauggugucgucaaguu

SEQ ID NO: 1443279 - RNA, 19 nt, Homo sapiens
  misc_RNA (1)...(19): siRNA sense strand
cauccaccgugacaucaaa

SEQ ID NO: 1443280 - RNA, 19 nt, Homo sapiens
  misc_RNA (1)...(19): siRNA sense strand
gagcggaucauguguuuac

SEQ ID NO: 1443281 - RNA, 19 nt, Homo sapiens
  misc_RNA (1)...(19): siRNA sense strand
gcagguguaccaggaaauu

SEQ ID NO: 1443282 - RNA, 19 nt, Homo sapiens
  misc_RNA (1)...(19): siRNA sense strand
caucaagaucgcugacuuu

SEQ ID NO: 1443283 - RNA, 19 nt, Homo sapiens
  misc_RNA (1)...(19): siRNA sense strand
gaucauccaccgugacauc

SEQ ID NO: 1443284 - RNA, 19 nt, Homo sapiens
  misc_RNA (1)...(19): siRNA sense strand
gcauggaguccuucauugu

SEQ ID NO: 1443285 - RNA, 19 nt, Homo sapiens
  misc_RNA (1)...(19): siRNA sense strand
gugacgcgcuccucuccaa

SEQ ID NO: 1443286 - RNA, 19 nt, Homo sapiens
  misc_RNA (1)...(19): siRNA sense strand
acgagcggaucauguguuu

SEQ ID NO: 1443287 - RNA, 19 nt, Homo sapiens
  misc_RNA (1)...(19): siRNA sense strand
acacuauacugcuuugucu

SEQ ID NO: 1443288 - RNA, 19 nt, Homo sapiens
  misc_RNA (1)...(19): siRNA sense strand
ugguggagguccuggauga

SEQ ID NO: 1443289 - RNA, 19 nt, Homo sapiens
  misc_RNA (1)...(19): siRNA sense strand
gucagcgccuggaaacuug

SEQ ID NO: 1443290 - RNA, 19 nt, Homo sapiens
  misc_RNA (1)...(19): siRNA sense strand
ggacuugaaggaccugauc

SEQ ID NO: 1443291 - RNA, 19 nt, Homo sapiens
  misc_RNA (1)...(19): siRNA sense strand
guacaugguguucgaacug

SEQ ID NO: 1443292 - RNA, 19 nt, Homo sapiens
  misc_RNA (1)...(19): siRNA sense strand
ggccgacaguggagucuca

SEQ ID NO: 1443293 - RNA, 19 nt, Homo sapiens
  misc_RNA (1)...(19): siRNA sense strand
ccucaaaccacucucugaa

SEQ ID NO: 1443294 - RNA, 19 nt, Homo sapiens
  misc_RNA (1)...(19): siRNA sense strand
ccaggcccguuucuacuuc

SEQ ID NO: 1443295 - RNA, 19 nt, Homo sapiens
  misc_RNA (1)...(19): siRNA sense strand
cccguaugcuggacaagaa

SEQ ID NO: 1443296 - RNA, 19 nt, Homo sapiens
  misc_RNA (1)...(19): siRNA sense strand
gcaucgaguacuuacacua

SEQ ID NO: 1443297 - RNA, 19 nt, Homo sapiens
  misc_RNA (1)...(19): siRNA sense strand
ugaaggaugaaauuggaaa

SEQ ID NO: 1443298 - RNA, 19 nt, Homo sapiens
  misc_RNA (1)...(19): siRNA sense strand
uagcugaggacuugaagga

SEQ ID NO: 1443299 - RNA, 19 nt, Homo sapiens
  misc_RNA (1)...(19): siRNA sense strand
gaagugcccacccucaaac

SEQ ID NO: 1443300 - RNA, 19 nt, Homo sapiens
  misc_RNA (1)...(19): siRNA sense strand
gguggcagccuggacauga

SEQ ID NO: 1443301 - RNA, 19 nt, Homo sapiens
  misc_RNA (1)...(19): siRNA sense strand
caauaccuacuaugcaaug

SEQ ID NO: 1443302 - RNA, 19 nt, Homo sapiens
  misc_RNA (1)...(19): siRNA sense strand
acaucaagaucgcugacuu

SEQ ID NO: 1443303 - RNA, 19 nt, Homo sapiens
  misc_RNA (1)...(19): siRNA sense strand
ggaucguggugccggaaau

SEQ ID NO: 1443304 - RNA, 19 nt, Homo sapiens
  misc_RNA (1)...(19): siRNA sense strand
aaguuggccuacaaugaaa

SEQ ID NO: 1443305 - RNA, 19 nt, Homo sapiens
  misc_RNA (1)...(19): siRNA sense strand
gaagaccaugauacguaaa

SEQ ID NO: 1443306 - RNA, 19 nt, Homo sapiens
  misc_RNA (1)...(19): siRNA sense strand
cugaagaccaggcccguuu

SEQ ID NO: 1443307 - RNA, 19 nt, Homo sapiens
  misc_RNA (1)...(19): siRNA sense strand
guggcagccuggacaugaa

SEQ ID NO: 1443308 - RNA, 19 nt, Homo sapiens
  misc_RNA (1)...(19): siRNA sense strand
ugacaauaccuacuaugca

SEQ ID NO: 1443309 - RNA, 19 nt, Homo sapiens
  misc_RNA (1)...(19): siRNA sense strand
gcaagcugucucugcaaga

SEQ ID NO: 1443310 - RNA, 19 nt, Homo sapiens
  misc_RNA (1)...(19): siRNA sense strand
gaccugaucacccguaugc

SEQ ID NO: 1443311 - RNA, 19 nt, Homo sapiens
  misc_RNA (1)...(19): siRNA sense strand
acuauacugcuuugucuuu

SEQ ID NO: 1443312 - RNA, 19 nt, Homo sapiens
  misc_RNA (1)...(19): siRNA sense strand
ggcagcagcagcagcgaaa

SEQ ID NO: 1443313 - RNA, 19 nt, Homo sapiens
  misc_RNA (1)...(19): siRNA sense strand
ugugagcaaugaauucaag

SEQ ID NO: 1443314 - RNA, 19 nt, Homo sapiens
  misc_RNA (1)...(19): siRNA sense strand
ugaggaccaucuguacaug

SEQ ID NO: 1443315 - RNA, 19 nt, Homo sapiens
  misc_RNA (1)...(19): siRNA sense strand
gaaggaugaaauuggaaag

SEQ ID NO: 1443316 - RNA, 19 nt, Homo sapiens
  misc_RNA (1)...(19): siRNA sense strand
auacguaaacgcuccuuug

SEQ ID NO: 1443317 - RNA, 19 nt, Homo sapiens
  misc_RNA (1)...(19): siRNA sense strand
caaugaggaccaucuguac

SEQ ID NO: 1443318 - RNA, 19 nt, Homo sapiens
  misc_RNA (1)...(19): siRNA sense strand
uaccuacuaugcaaugaag

SEQ ID NO: 1443319 - RNA, 19 nt, Homo sapiens
  misc_RNA (1)...(19): siRNA sense strand
ggacgagcggaucaugugu

SEQ ID NO: 1443320 - RNA, 19 nt, Homo sapiens
  misc_RNA (1)...(19): siRNA sense strand
cuauacugcuuugucuuug

SEQ ID NO: 1443321 - RNA, 19 nt, Homo sapiens
  misc_RNA (1)...(19): siRNA sense strand
gugacacuauacugcuuug

SEQ ID NO: 1443322 - RNA, 19 nt, Homo sapiens
  misc_RNA (1)...(19): siRNA sense strand
ugacuuuggugugagcaau

SEQ ID NO: 1443323 - RNA, 19 nt, Homo sapiens
  misc_RNA (1)...(19): siRNA sense strand
ggugugagcaaugaauuca

SEQ ID NO: 1443324 - RNA, 19 nt, Homo sapiens
  misc_RNA (1)...(19): siRNA sense strand
cauggaguccuucauugug

SEQ ID NO: 1443325 - RNA, 19 nt, Homo sapiens
  misc_RNA (1)...(19): siRNA sense strand
gaagaccaggcccguuucu

SEQ ID NO: 1443326 - RNA, 19 nt, Homo sapiens
  misc_RNA (1)...(19): siRNA sense strand
gacgagcggaucauguguu

SEQ ID NO: 1443327 - RNA, 19 nt, Homo sapiens
  misc_RNA (1)...(19): siRNA sense strand
ugucagcgccuggaaacuu

SEQ ID NO: 1443328 - RNA, 19 nt, Homo sapiens
  misc_RNA (1)...(19): siRNA sense strand
gauacguaaacgcuccuuu

SEQ ID NO: 1443329 - RNA, 19 nt, Homo sapiens
  misc_RNA (1)...(19): siRNA sense strand
caucgaguacuuacacuac

SEQ ID NO: 1443330 - RNA, 19 nt, Homo sapiens
  misc_RNA (1)...(19): siRNA sense strand
ucacccguaugcuggacaa

SEQ ID NO: 1443331 - RNA, 19 nt, Homo sapiens
  misc_RNA (1)...(19): siRNA sense strand
cgacauagcugaggacuug

SEQ ID NO: 1443332 - RNA, 19 nt, Homo sapiens
  misc_RNA (1)...(19): siRNA sense strand
gacaauaccuacuaugcaa

SEQ ID NO: 1443333 - RNA, 19 nt, Homo sapiens
  misc_RNA (1)...(19): siRNA sense strand
gggaaggccuuggauguuu

SEQ ID NO: 1443334 - RNA, 19 nt, Homo sapiens
  misc_RNA (1)...(19): siRNA sense strand
caagaucgcugacuuuggu

SEQ ID NO: 1443335 - RNA, 19 nt, Homo sapiens
  misc_RNA (1)...(19): siRNA sense strand
gaaauugccauccucaaga

SEQ ID NO: 1443336 - RNA, 19 nt, Homo sapiens
  misc_RNA (1)...(19): siRNA sense strand
ugaagaccaugauacguaa

SEQ ID NO: 1443337 - RNA, 19 nt, Homo sapiens
  misc_RNA (1)...(19): siRNA sense strand
ucaaaccacucucugaaga

SEQ ID NO: 1443338 - RNA, 19 nt, Homo sapiens
  misc_RNA (1)...(19): siRNA sense strand
caaguuggccuacaaugaa

SEQ ID NO: 1443339 - RNA, 19 nt, Homo sapiens
  misc_RNA (1)...(19): siRNA sense strand
caaugaaggugcuguccaa

SEQ ID NO: 1443340 - RNA, 19 nt, Homo sapiens
  misc_RNA (1)...(19): siRNA sense strand
acaguaagaucaagaguca

SEQ ID NO: 1443341 - RNA, 19 nt, Homo sapiens
  misc_RNA (1)...(19): siRNA sense strand
ggaaggccuuggauguuug

SEQ ID NO: 1443342 - RNA, 19 nt, Homo sapiens
  misc_RNA (1)...(19): siRNA sense strand
ucaaaggcaucgaguacuu

SEQ ID NO: 1443343 - RNA, 19 nt, Homo sapiens
  misc_RNA (1)...(19): siRNA sense strand
gagcagguguaccaggaaa

SEQ ID NO: 1443344 - RNA, 19 nt, Homo sapiens
  misc_RNA (1)...(19): siRNA sense strand
gugaagaccaugauacgua

SEQ ID NO: 1443345 - RNA, 19 nt, Homo sapiens
  misc_RNA (1)...(19): siRNA sense strand
ggaagugcccacccucaaa

SEQ ID NO: 1443346 - RNA, 19 nt, Homo sapiens
  misc_RNA (1)...(19): siRNA sense strand
ccaaugaggaccaucugua

SEQ ID NO: 1443347 - RNA, 19 nt, Homo sapiens
  misc_RNA (1)...(19): siRNA sense strand
gaucaaaggcaucgaguac

SEQ ID NO: 1443348 - RNA, 19 nt, Homo sapiens
  misc_RNA (1)...(19): siRNA sense strand
caaaggcaucgaguacuua

SEQ ID NO: 1443349 - RNA, 19 nt, Homo sapiens
  misc_RNA (1)...(19): siRNA sense strand
ggaaauugccauccucaag

SEQ ID NO: 1443350 - RNA, 19 nt, Homo sapiens
  misc_RNA (1)...(19): siRNA sense strand
aguauacccugaaggauga

SEQ ID NO: 1443351 - RNA, 19 nt, Homo sapiens
  misc_RNA (1)...(19): siRNA sense strand
ggaggaacgcucacuguca

SEQ ID NO: 1443352 - RNA, 19 nt, Homo sapiens
  misc_RNA (1)...(19): siRNA sense strand
ggcauggaguccuucauug

SEQ ID NO: 1443353 - RNA, 19 nt, Homo sapiens
  misc_RNA (1)...(19): siRNA sense strand
aaauugccauccucaagaa

SEQ ID NO: 1443354 - RNA, 19 nt, Homo sapiens
  misc_RNA (1)...(19): siRNA sense strand
gggcauggaguccuucauu

SEQ ID NO: 1443355 - RNA, 19 nt, Homo sapiens
  misc_RNA (1)...(19): siRNA sense strand
ccugaaggaugaaauugga

SEQ ID NO: 1443356 - RNA, 19 nt, Homo sapiens
  misc_RNA (1)...(19): siRNA sense strand
guacuuacacuaccagaag

SEQ ID NO: 1443357 - RNA, 19 nt, Homo sapiens
  misc_RNA (1)...(19): siRNA sense strand
ucaaguuggccuacaauga

SEQ ID NO: 1443358 - RNA, 19 nt, Homo sapiens
  misc_RNA (1)...(19): siRNA sense strand
ccuauggugucgucaaguu

SEQ ID NO: 1443359 - RNA, 19 nt, Homo sapiens
  misc_RNA (1)...(19): siRNA sense strand
cauccaccgugacaucaaa

SEQ ID NO: 1443360 - RNA, 19 nt, Homo sapiens
  misc_RNA (1)...(19): siRNA sense strand
gagcggaucauguguuuac

SEQ ID NO: 1443361 - RNA, 19 nt, Homo sapiens
  misc_RNA (1)...(19): siRNA sense strand
gcagguguaccaggaaauu

SEQ ID NO: 1443362 - RNA, 19 nt, Homo sapiens
  misc_RNA (1)...(19): siRNA sense strand
caucaagaucgcugacuuu

SEQ ID NO: 1443363 - RNA, 19 nt, Homo sapiens
  misc_RNA (1)...(19): siRNA sense strand
gaucauccaccgugacauc

SEQ ID NO: 1443364 - RNA, 19 nt, Homo sapiens
  misc_RNA (1)...(19): siRNA sense strand
gcauggaguccuucauugu

SEQ ID NO: 1443365 - RNA, 19 nt, Homo sapiens
  misc_RNA (1)...(19): siRNA sense strand
gugacgcgcuccucuccaa

SEQ ID NO: 1443366 - RNA, 19 nt, Homo sapiens
  misc_RNA (1)...(19): siRNA sense strand
acgagcggaucauguguuu

SEQ ID NO: 1443367 - RNA, 19 nt, Homo sapiens
  misc_RNA (1)...(19): siRNA sense strand
acacuauacugcuuugucu

SEQ ID NO: 1443368 - RNA, 19 nt, Homo sapiens
  misc_RNA (1)...(19): siRNA sense strand
ugguggagguccuggauga

SEQ ID NO: 1443369 - RNA, 19 nt, Homo sapiens
  misc_RNA (1)...(19): siRNA sense strand
gucagcgccuggaaacuug

SEQ ID NO: 1443370 - RNA, 19 nt, Homo sapiens
  misc_RNA (1)...(19): siRNA sense strand
ggacuugaaggaccugauc

SEQ ID NO: 1443371 - RNA, 19 nt, Homo sapiens
  misc_RNA (1)...(19): siRNA sense strand
guacaugguguucgaacug

SEQ ID NO: 1443372 - RNA, 19 nt, Homo sapiens
  misc_RNA (1)...(19): siRNA sense strand
ggccgacaguggagucuca

SEQ ID NO: 1443373 - RNA, 19 nt, Homo sapiens
  misc_RNA (1)...(19): siRNA sense strand
ccucaaaccacucucugaa

SEQ ID NO: 1443374 - RNA, 19 nt, Homo sapiens
  misc_RNA (1)...(19): siRNA sense strand
ccaggcccguuucuacuuc

SEQ ID NO: 1443375 - RNA, 19 nt, Homo sapiens
  misc_RNA (1)...(19): siRNA sense strand
cccguaugcuggacaagaa

SEQ ID NO: 1443376 - RNA, 19 nt, Homo sapiens
  misc_RNA (1)...(19): siRNA sense strand
gcaucgaguacuuacacua

SEQ ID NO: 1443377 - RNA, 19 nt, Homo sapiens
  misc_RNA (1)...(19): siRNA sense strand
ugaaggaugaaauuggaaa

SEQ ID NO: 1443378 - RNA, 19 nt, Homo sapiens
  misc_RNA (1)...(19): siRNA sense strand
uagcugaggacuugaagga

SEQ ID NO: 1443379 - RNA, 19 nt, Homo sapiens
  misc_RNA (1)...(19): siRNA sense strand
gaagugcccacccucaaac

SEQ ID NO: 1443380 - RNA, 19 nt, Homo sapiens
  misc_RNA (1)...(19): siRNA sense strand
gguggcagccuggacauga

SEQ ID NO: 1443381 - RNA, 19 nt, Homo sapiens
  misc_RNA (1)...(19): siRNA sense strand
caauaccuacuaugcaaug

SEQ ID NO: 1443382 - RNA, 19 nt, Homo sapiens
  misc_RNA (1)...(19): siRNA sense strand
acaucaagaucgcugacuu

SEQ ID NO: 1443383 - RNA, 19 nt, Homo sapiens
  misc_RNA (1)...(19): siRNA sense strand
ggaucguggugccggaaau

SEQ ID NO: 1443384 - RNA, 19 nt, Homo sapiens
  misc_RNA (1)...(19): siRNA sense strand
aaguuggccuacaaugaaa

SEQ ID NO: 1443385 - RNA, 19 nt, Homo sapiens
  misc_RNA (1)...(19): siRNA sense strand
gaagaccaugauacguaaa

SEQ ID NO: 1443386 - RNA, 19 nt, Homo sapiens
  misc_RNA (1)...(19): siRNA sense strand
cugaagaccaggcccguuu

SEQ ID NO: 1443387 - RNA, 19 nt, Homo sapiens
  misc_RNA (1)...(19): siRNA sense strand
guggcagccuggacaugaa

SEQ ID NO: 1443388 - RNA, 19 nt, Homo sapiens
  misc_RNA (1)...(19): siRNA sense strand
ugacaauaccuacuaugca

SEQ ID NO: 1443389 - RNA, 19 nt, Homo sapiens
  misc_RNA (1)...(19): siRNA sense strand
gcaagcugucucugcaaga

SEQ ID NO: 1443390 - RNA, 19 nt, Homo sapiens
  misc_RNA (1)...(19): siRNA sense strand
gaccugaucacccguaugc

SEQ ID NO: 1443391 - RNA, 19 nt, Homo sapiens
  misc_RNA (1)...(19): siRNA sense strand
acuauacugcuuugucuuu

SEQ ID NO: 1443392 - RNA, 19 nt, Homo sapiens
  misc_RNA (1)...(19): siRNA sense strand
ggcagcagcagcagcgaaa

SEQ ID NO: 1443393 - RNA, 19 nt, Homo sapiens
  misc_RNA (1)...(19): siRNA sense strand
ugugagcaaugaauucaag

SEQ ID NO: 1443394 - RNA, 19 nt, Homo sapiens
  misc_RNA (1)...(19): siRNA sense strand
ugaggaccaucuguacaug

SEQ ID NO: 1443395 - RNA, 19 nt, Homo sapiens
  misc_RNA (1)...(19): siRNA sense strand
gaaggaugaaauuggaaag

SEQ ID NO: 1443396 - RNA, 19 nt, Homo sapiens
  misc_RNA (1)...(19): siRNA sense strand
auacguaaacgcuccuuug

SEQ ID NO: 1443397 - RNA, 19 nt, Homo sapiens
  misc_RNA (1)...(19): siRNA sense strand
caaugaggaccaucuguac

SEQ ID NO: 1443398 - RNA, 19 nt, Homo sapiens
  misc_RNA (1)...(19): siRNA sense strand
uaccuacuaugcaaugaag

SEQ ID NO: 1443399 - RNA, 19 nt, Homo sapiens
  misc_RNA (1)...(19): siRNA sense strand
ggacgagcggaucaugugu

SEQ ID NO: 1443400 - RNA, 19 nt, Homo sapiens
  misc_RNA (1)...(19): siRNA sense strand
cuauacugcuuugucuuug

SEQ ID NO: 1443401 - RNA, 19 nt, Homo sapiens
  misc_RNA (1)...(19): siRNA sense strand
gugacacuauacugcuuug

SEQ ID NO: 1443402 - RNA, 19 nt, Homo sapiens
  misc_RNA (1)...(19): siRNA sense strand
ugacuuuggugugagcaau

SEQ ID NO: 1443403 - RNA, 19 nt, Homo sapiens
  misc_RNA (1)...(19): siRNA sense strand
ggugugagcaaugaauuca

SEQ ID NO: 1443404 - RNA, 19 nt, Homo sapiens
  misc_RNA (1)...(19): siRNA sense strand
cauggaguccuucauugug

SEQ ID NO: 1443405 - RNA, 19 nt, Homo sapiens
  misc_RNA (1)...(19): siRNA sense strand
gaagaccaggcccguuucu

SEQ ID NO: 1443406 - RNA, 19 nt, Homo sapiens
  misc_RNA (1)...(19): siRNA sense strand
gacgagcggaucauguguu

SEQ ID NO: 1443407 - RNA, 19 nt, Homo sapiens
  misc_RNA (1)...(19): siRNA sense strand
ugucagcgccuggaaacuu

SEQ ID NO: 1443408 - RNA, 19 nt, Homo sapiens
  misc_RNA (1)...(19): siRNA sense strand
gauacguaaacgcuccuuu

SEQ ID NO: 1443409 - RNA, 19 nt, Homo sapiens
  misc_RNA (1)...(19): siRNA sense strand
caucgaguacuuacacuac

SEQ ID NO: 1443410 - RNA, 19 nt, Homo sapiens
  misc_RNA (1)...(19): siRNA sense strand
ucacccguaugcuggacaa

SEQ ID NO: 1443411 - RNA, 19 nt, Homo sapiens
  misc_RNA (1)...(19): siRNA sense strand
cgacauagcugaggacuug

SEQ ID NO: 1443412 - RNA, 19 nt, Homo sapiens
  misc_RNA (1)...(19): siRNA sense strand
gacaauaccuacuaugcaa

SEQ ID NO: 1443413 - RNA, 19 nt, Homo sapiens
  misc_RNA (1)...(19): siRNA sense strand
gggaaggccuuggauguuu

SEQ ID NO: 1443414 - RNA, 19 nt, Homo sapiens
  misc_RNA (1)...(19): siRNA sense strand
caagaucgcugacuuuggu

SEQ ID NO: 1443415 - RNA, 19 nt, Homo sapiens
  misc_RNA (1)...(19): siRNA sense strand
gaaauugccauccucaaga

SEQ ID NO: 1443416 - RNA, 19 nt, Homo sapiens
  misc_RNA (1)...(19): siRNA sense strand
ugaagaccaugauacguaa

SEQ ID NO: 1443417 - RNA, 19 nt, Homo sapiens
  misc_RNA (1)...(19): siRNA sense strand
ucaaaccacucucugaaga

SEQ ID NO: 1443418 - RNA, 19 nt, Homo sapiens
  misc_RNA (1)...(19): siRNA sense strand
caaguuggccuacaaugaa

SEQ ID NO: 1443419 - RNA, 19 nt, Homo sapiens
  misc_RNA (1)...(19): siRNA sense strand
caaugaaggugcuguccaa

SEQ ID NO: 1443420 - RNA, 19 nt, Homo sapiens
  misc_RNA (1)...(19): siRNA sense strand
acaguaagaucaagaguca

SEQ ID NO: 1443421 - RNA, 19 nt, Homo sapiens
  misc_RNA (1)...(19): siRNA sense strand
ggaaggccuuggauguuug

SEQ ID NO: 1443422 - RNA, 19 nt, Homo sapiens
  misc_RNA (1)...(19): siRNA sense strand
ucaaaggcaucgaguacuu

SEQ ID NO: 1443423 - RNA, 19 nt, Homo sapiens
  misc_RNA (1)...(19): siRNA sense strand
gagcagguguaccaggaaa

SEQ ID NO: 1443424 - RNA, 19 nt, Homo sapiens
  misc_RNA (1)...(19): siRNA sense strand
gugaagaccaugauacgua

SEQ ID NO: 1443425 - RNA, 19 nt, Homo sapiens
  misc_RNA (1)...(19): siRNA sense strand
ggaagugcccacccucaaa

SEQ ID NO: 1443426 - RNA, 19 nt, Homo sapiens
  misc_RNA (1)...(19): siRNA sense strand
ccaaugaggaccaucugua

SEQ ID NO: 1443427 - RNA, 19 nt, Homo sapiens
  misc_RNA (1)...(19): siRNA sense strand
gaucaaaggcaucgaguac

SEQ ID NO: 1443428 - RNA, 19 nt, Homo sapiens
  misc_RNA (1)...(19): siRNA sense strand
caaaggcaucgaguacuua

SEQ ID NO: 1443429 - RNA, 19 nt, Homo sapiens
  misc_RNA (1)...(19): siRNA sense strand
ggaaauugccauccucaag

SEQ ID NO: 1443430 - RNA, 19 nt, Homo sapiens
  misc_RNA (1)...(19): siRNA sense strand
aguauacccugaaggauga

SEQ ID NO: 1443431 - RNA, 19 nt, Homo sapiens
  misc_RNA (1)...(19): siRNA sense strand
ggaggaacgcucacuguca

SEQ ID NO: 1443432 - RNA, 19 nt, Homo sapiens
  misc_RNA (1)...(19): siRNA sense strand
ggcauggaguccuucauug

SEQ ID NO: 1443433 - RNA, 19 nt, Homo sapiens
  misc_RNA (1)...(19): siRNA sense strand
aaauugccauccucaagaa

SEQ ID NO: 1443434 - RNA, 19 nt, Homo sapiens
  misc_RNA (1)...(19): siRNA sense strand
gggcauggaguccuucauu

SEQ ID NO: 1443435 - RNA, 19 nt, Homo sapiens
  misc_RNA (1)...(19): siRNA sense strand
ccugaaggaugaaauugga

SEQ ID NO: 1443436 - RNA, 19 nt, Homo sapiens
  misc_RNA (1)...(19): siRNA sense strand
guacuuacacuaccagaag

SEQ ID NO: 1443437 - RNA, 19 nt, Homo sapiens
  misc_RNA (1)...(19): siRNA sense strand
ucaaguuggccuacaauga

SEQ ID NO: 1443438 - RNA, 19 nt, Homo sapiens
  misc_RNA (1)...(19): siRNA sense strand
ccuauggugucgucaaguu

SEQ ID NO: 1443439 - RNA, 19 nt, Homo sapiens
  misc_RNA (1)...(19): siRNA sense strand
cauccaccgugacaucaaa

SEQ ID NO: 1443440 - RNA, 19 nt, Homo sapiens
  misc_RNA (1)...(19): siRNA sense strand
gagcggaucauguguuuac

SEQ ID NO: 1443441 - RNA, 19 nt, Homo sapiens
  misc_RNA (1)...(19): siRNA sense strand
gcagguguaccaggaaauu

SEQ ID NO: 1443442 - RNA, 19 nt, Homo sapiens
  misc_RNA (1)...(19): siRNA sense strand
caucaagaucgcugacuuu

SEQ ID NO: 1443443 - RNA, 19 nt, Homo sapiens
  misc_RNA (1)...(19): siRNA sense strand
gaucauccaccgugacauc

SEQ ID NO: 1443444 - RNA, 19 nt, Homo sapiens
  misc_RNA (1)...(19): siRNA sense strand
gcauggaguccuucauugu

SEQ ID NO: 1443445 - RNA, 19 nt, Homo sapiens
  misc_RNA (1)...(19): siRNA sense strand
gugacgcgcuccucuccaa

SEQ ID NO: 1443446 - RNA, 19 nt, Homo sapiens
  misc_RNA (1)...(19): siRNA sense strand
acgagcggaucauguguuu

SEQ ID NO: 1443447 - RNA, 19 nt, Homo sapiens
  misc_RNA (1)...(19): siRNA sense strand
acacuauacugcuuugucu

SEQ ID NO: 1443448 - RNA, 19 nt, Homo sapiens
  misc_RNA (1)...(19): siRNA sense strand
ugguggagguccuggauga

SEQ ID NO: 1443449 - RNA, 19 nt, Homo sapiens
  misc_RNA (1)...(19): siRNA sense strand
gucagcgccuggaaacuug

SEQ ID NO: 1443450 - RNA, 19 nt, Homo sapiens
  misc_RNA (1)...(19): siRNA sense strand
ggacuugaaggaccugauc

SEQ ID NO: 1443451 - RNA, 19 nt, Homo sapiens
  misc_RNA (1)...(19): siRNA sense strand
guacaugguguucgaacug

SEQ ID NO: 1443452 - RNA, 19 nt, Homo sapiens
  misc_RNA (1)...(19): siRNA sense strand
ggccgacaguggagucuca

SEQ ID NO: 1443453 - RNA, 19 nt, Homo sapiens
  misc_RNA (1)...(19): siRNA sense strand
ccucaaaccacucucugaa

SEQ ID NO: 1443454 - RNA, 19 nt, Homo sapiens
  misc_RNA (1)...(19): siRNA sense strand
ccaggcccguuucuacuuc

SEQ ID NO: 1443455 - RNA, 19 nt, Homo sapiens
  misc_RNA (1)...(19): siRNA sense strand
cccguaugcuggacaagaa

SEQ ID NO: 1443456 - RNA, 19 nt, Homo sapiens
  misc_RNA (1)...(19): siRNA sense strand
gcaucgaguacuuacacua

SEQ ID NO: 1443457 - RNA, 19 nt, Homo sapiens
  misc_RNA (1)...(19): siRNA sense strand
ugaaggaugaaauuggaaa

SEQ ID NO: 1443458 - RNA, 19 nt, Homo sapiens
  misc_RNA (1)...(19): siRNA sense strand
uagcugaggacuugaagga

SEQ ID NO: 1443459 - RNA, 19 nt, Homo sapiens
  misc_RNA (1)...(19): siRNA sense strand
gaagugcccacccucaaac

SEQ ID NO: 1443460 - RNA, 19 nt, Homo sapiens
  misc_RNA (1)...(19): siRNA sense strand
gguggcagccuggacauga

SEQ ID NO: 1443461 - RNA, 19 nt, Homo sapiens
  misc_RNA (1)...(19): siRNA sense strand
caauaccuacuaugcaaug

SEQ ID NO: 1443462 - RNA, 19 nt, Homo sapiens
  misc_RNA (1)...(19): siRNA sense strand
acaucaagaucgcugacuu

SEQ ID NO: 1443463 - RNA, 19 nt, Homo sapiens
  misc_RNA (1)...(19): siRNA sense strand
ggaucguggugccggaaau

SEQ ID NO: 1443464 - RNA, 19 nt, Homo sapiens
  misc_RNA (1)...(19): siRNA sense strand
aaguuggccuacaaugaaa

SEQ ID NO: 1443465 - RNA, 19 nt, Homo sapiens
  misc_RNA (1)...(19): siRNA sense strand
gaagaccaugauacguaaa

SEQ ID NO: 1443466 - RNA, 19 nt, Homo sapiens
  misc_RNA (1)...(19): siRNA sense strand
cugaagaccaggcccguuu

SEQ ID NO: 1443467 - RNA, 19 nt, Homo sapiens
  misc_RNA (1)...(19): siRNA sense strand
guggcagccuggacaugaa

SEQ ID NO: 1443468 - RNA, 19 nt, Homo sapiens
  misc_RNA (1)...(19): siRNA sense strand
ugacaauaccuacuaugca

SEQ ID NO: 1443469 - RNA, 19 nt, Homo sapiens
  misc_RNA (1)...(19): siRNA sense strand
gcaagcugucucugcaaga

SEQ ID NO: 1443470 - RNA, 19 nt, Homo sapiens
  misc_RNA (1)...(19): siRNA sense strand
gaccugaucacccguaugc

SEQ ID NO: 1443471 - RNA, 19 nt, Homo sapiens
  misc_RNA (1)...(19): siRNA sense strand
acuauacugcuuugucuuu

SEQ ID NO: 1443472 - RNA, 19 nt, Homo sapiens
  misc_RNA (1)...(19): siRNA sense strand
ggcagcagcagcagcgaaa

SEQ ID NO: 1443473 - RNA, 19 nt, Homo sapiens
  misc_RNA (1)...(19): siRNA sense strand
ugugagcaaugaauucaag

SEQ ID NO: 1443474 - RNA, 19 nt, Homo sapiens
  misc_RNA (1)...(19): siRNA sense strand
ugaggaccaucuguacaug

SEQ ID NO: 1443475 - RNA, 19 nt, Homo sapiens
  misc_RNA (1)...(19): siRNA sense strand
gaaggaugaaauuggaaag

SEQ ID NO: 1443476 - RNA, 19 nt, Homo sapiens
  misc_RNA (1)...(19): siRNA sense strand
auacguaaacgcuccuuug

SEQ ID NO: 1443477 - RNA, 19 nt, Homo sapiens
  misc_RNA (1)...(19): siRNA sense strand
caaugaggaccaucuguac

SEQ ID NO: 1443478 - RNA, 19 nt, Homo sapiens
  misc_RNA (1)...(19): siRNA sense strand
uaccuacuaugcaaugaag

SEQ ID NO: 1443479 - RNA, 19 nt, Homo sapiens
  misc_RNA (1)...(19): siRNA sense strand
ggacgagcggaucaugugu

SEQ ID NO: 1443480 - RNA, 19 nt, Homo sapiens
  misc_RNA (1)...(19): siRNA sense strand
cuauacugcuuugucuuug

SEQ ID NO: 1443481 - RNA, 19 nt, Homo sapiens
  misc_RNA (1)...(19): siRNA sense strand
gugacacuauacugcuuug

SEQ ID NO: 1443482 - RNA, 19 nt, Homo sapiens
  misc_RNA (1)...(19): siRNA sense strand
ugacuuuggugugagcaau

SEQ ID NO: 1443483 - RNA, 19 nt, Homo sapiens
  misc_RNA (1)...(19): siRNA sense strand
ggugugagcaaugaauuca

SEQ ID NO: 1443484 - RNA, 19 nt, Homo sapiens
  misc_RNA (1)...(19): siRNA sense strand
cauggaguccuucauugug

SEQ ID NO: 1443485 - RNA, 19 nt, Homo sapiens
  misc_RNA (1)...(19): siRNA sense strand
gaagaccaggcccguuucu

SEQ ID NO: 1443486 - RNA, 19 nt, Homo sapiens
  misc_RNA (1)...(19): siRNA sense strand
gacgagcggaucauguguu

SEQ ID NO: 1443487 - RNA, 19 nt, Homo sapiens
  misc_RNA (1)...(19): siRNA sense strand
ugucagcgccuggaaacuu

SEQ ID NO: 1443488 - RNA, 19 nt, Homo sapiens
  misc_RNA (1)...(19): siRNA sense strand
gauacguaaacgcuccuuu

SEQ ID NO: 1443489 - RNA, 19 nt, Homo sapiens
  misc_RNA (1)...(19): siRNA sense strand
caucgaguacuuacacuac

SEQ ID NO: 1443490 - RNA, 19 nt, Homo sapiens
  misc_RNA (1)...(19): siRNA sense strand
ucacccguaugcuggacaa

SEQ ID NO: 1443491 - RNA, 19 nt, Homo sapiens
  misc_RNA (1)...(19): siRNA sense strand
cgacauagcugaggacuug

SEQ ID NO: 1443492 - RNA, 19 nt, Homo sapiens
  misc_RNA (1)...(19): siRNA sense strand
gacaauaccuacuaugcaa

SEQ ID NO: 1443493 - RNA, 19 nt, Homo sapiens
  misc_RNA (1)...(19): siRNA sense strand
gggaaggccuuggauguuu

SEQ ID NO: 1443494 - RNA, 19 nt, Homo sapiens
  misc_RNA (1)...(19): siRNA sense strand
caagaucgcugacuuuggu

SEQ ID NO: 1443495 - RNA, 19 nt, Homo sapiens
  misc_RNA (1)...(19): siRNA sense strand
gaaauugccauccucaaga

SEQ ID NO: 1443496 - RNA, 19 nt, Homo sapiens
  misc_RNA (1)...(19): siRNA sense strand
ugaagaccaugauacguaa

SEQ ID NO: 1443497 - RNA, 19 nt, Homo sapiens
  misc_RNA (1)...(19): siRNA sense strand
ucaaaccacucucugaaga

SEQ ID NO: 1443498 - RNA, 19 nt, Homo sapiens
  misc_RNA (1)...(19): siRNA sense strand
caaguuggccuacaaugaa

SEQ ID NO: 1443499 - RNA, 19 nt, Homo sapiens
  misc_RNA (1)...(19): siRNA sense strand
caaugaaggugcuguccaa

SEQ ID NO: 1443500 - RNA, 19 nt, Homo sapiens
  misc_RNA (1)...(19): siRNA sense strand
acaguaagaucaagaguca

SEQ ID NO: 1443501 - RNA, 19 nt, Homo sapiens
  misc_RNA (1)...(19): siRNA sense strand
ggaaggccuuggauguuug

SEQ ID NO: 1443502 - RNA, 19 nt, Homo sapiens
  misc_RNA (1)...(19): siRNA sense strand
ucaaaggcaucgaguacuu

SEQ ID NO: 1443503 - RNA, 19 nt, Homo sapiens
  misc_RNA (1)...(19): siRNA sense strand
gagcagguguaccaggaaa

SEQ ID NO: 1443504 - RNA, 19 nt, Homo sapiens
  misc_RNA (1)...(19): siRNA sense strand
gugaagaccaugauacgua

SEQ ID NO: 1443505 - RNA, 19 nt, Homo sapiens
  misc_RNA (1)...(19): siRNA sense strand
ggaagugcccacccucaaa

SEQ ID NO: 1443506 - RNA, 19 nt, Homo sapiens
  misc_RNA (1)...(19): siRNA sense strand
ccaaugaggaccaucugua

SEQ ID NO: 1443507 - RNA, 19 nt, Homo sapiens
  misc_RNA (1)...(19): siRNA sense strand
gaucaaaggcaucgaguac

SEQ ID NO: 1443508 - RNA, 19 nt, Homo sapiens
  misc_RNA (1)...(19): siRNA sense strand
caaaggcaucgaguacuua

SEQ ID NO: 1443509 - RNA, 19 nt, Homo sapiens
  misc_RNA (1)...(19): siRNA sense strand
ggaaauugccauccucaag

SEQ ID NO: 1443510 - RNA, 19 nt, Homo sapiens
  misc_RNA (1)...(19): siRNA sense strand
aguauacccugaaggauga

SEQ ID NO: 1443511 - RNA, 19 nt, Homo sapiens
  misc_RNA (1)...(19): siRNA sense strand
ggaggaacgcucacuguca

SEQ ID NO: 1443512 - RNA, 19 nt, Homo sapiens
  misc_RNA (1)...(19): siRNA sense strand
ggcauggaguccuucauug

SEQ ID NO: 1443513 - RNA, 19 nt, Homo sapiens
  misc_RNA (1)...(19): siRNA sense strand
aaauugccauccucaagaa

SEQ ID NO: 1443514 - RNA, 19 nt, Homo sapiens
  misc_RNA (1)...(19): siRNA sense strand
gggcauggaguccuucauu

SEQ ID NO: 1443515 - RNA, 19 nt, Homo sapiens
  misc_RNA (1)...(19): siRNA sense strand
ccugaaggaugaaauugga

SEQ ID NO: 1443516 - RNA, 19 nt, Homo sapiens
  misc_RNA (1)...(19): siRNA sense strand
guacuuacacuaccagaag

SEQ ID NO: 1443517 - RNA, 19 nt, Homo sapiens
  misc_RNA (1)...(19): siRNA sense strand
ucaaguuggccuacaauga

SEQ ID NO: 1443518 - RNA, 19 nt, Homo sapiens
  misc_RNA (1)...(19): siRNA sense strand
ccuauggugucgucaaguu

SEQ ID NO: 1443519 - RNA, 19 nt, Homo sapiens
  misc_RNA (1)...(19): siRNA sense strand
cauccaccgugacaucaaa

SEQ ID NO: 1443520 - RNA, 19 nt, Homo sapiens
  misc_RNA (1)...(19): siRNA sense strand
gagcggaucauguguuuac

SEQ ID NO: 1443521 - RNA, 19 nt, Homo sapiens
  misc_RNA (1)...(19): siRNA sense strand
gcagguguaccaggaaauu

SEQ ID NO: 1443522 - RNA, 19 nt, Homo sapiens
  misc_RNA (1)...(19): siRNA sense strand
caucaagaucgcugacuuu

SEQ ID NO: 1443523 - RNA, 19 nt, Homo sapiens
  misc_RNA (1)...(19): siRNA sense strand
gaucauccaccgugacauc

SEQ ID NO: 1443524 - RNA, 19 nt, Homo sapiens
  misc_RNA (1)...(19): siRNA sense strand
gcauggaguccuucauugu

SEQ ID NO: 1443525 - RNA, 19 nt, Homo sapiens
  misc_RNA (1)...(19): siRNA sense strand
gugacgcgcuccucuccaa

SEQ ID NO: 1443526 - RNA, 19 nt, Homo sapiens
  misc_RNA (1)...(19): siRNA sense strand
acgagcggaucauguguuu

SEQ ID NO: 1443527 - RNA, 19 nt, Homo sapiens
  misc_RNA (1)...(19): siRNA sense strand
acacuauacugcuuugucu

SEQ ID NO: 1443528 - RNA, 19 nt, Homo sapiens
  misc_RNA (1)...(19): siRNA sense strand
ugguggagguccuggauga

SEQ ID NO: 1443529 - RNA, 19 nt, Homo sapiens
  misc_RNA (1)...(19): siRNA sense strand
gucagcgccuggaaacuug

SEQ ID NO: 1443530 - RNA, 19 nt, Homo sapiens
  misc_RNA (1)...(19): siRNA sense strand
ggacuugaaggaccugauc

SEQ ID NO: 1443531 - RNA, 19 nt, Homo sapiens
  misc_RNA (1)...(19): siRNA sense strand
guacaugguguucgaacug

SEQ ID NO: 1443532 - RNA, 19 nt, Homo sapiens
  misc_RNA (1)...(19): siRNA sense strand
ggccgacaguggagucuca

SEQ ID NO: 1443533 - RNA, 19 nt, Homo sapiens
  misc_RNA (1)...(19): siRNA sense strand
ccucaaaccacucucugaa

SEQ ID NO: 1443534 - RNA, 19 nt, Homo sapiens
  misc_RNA (1)...(19): siRNA sense strand
ccaggcccguuucuacuuc

SEQ ID NO: 1443535 - RNA, 19 nt, Homo sapiens
  misc_RNA (1)...(19): siRNA sense strand
cccguaugcuggacaagaa

SEQ ID NO: 1443536 - RNA, 19 nt, Homo sapiens
  misc_RNA (1)...(19): siRNA sense strand
gcaucgaguacuuacacua

SEQ ID NO: 1443537 - RNA, 19 nt, Homo sapiens
  misc_RNA (1)...(19): siRNA sense strand
ugaaggaugaaauuggaaa

SEQ ID NO: 1443538 - RNA, 19 nt, Homo sapiens
  misc_RNA (1)...(19): siRNA sense strand
uagcugaggacuugaagga

SEQ ID NO: 1443539 - RNA, 19 nt, Homo sapiens
  misc_RNA (1)...(19): siRNA sense strand
gaagugcccacccucaaac

SEQ ID NO: 1443540 - RNA, 19 nt, Homo sapiens
  misc_RNA (1)...(19): siRNA sense strand
gguggcagccuggacauga

SEQ ID NO: 1443541 - RNA, 19 nt, Homo sapiens
  misc_RNA (1)...(19): siRNA sense strand
caauaccuacuaugcaaug

SEQ ID NO: 1443542 - RNA, 19 nt, Homo sapiens
  misc_RNA (1)...(19): siRNA sense strand
acaucaagaucgcugacuu

SEQ ID NO: 1443543 - RNA, 19 nt, Homo sapiens
  misc_RNA (1)...(19): siRNA sense strand
ggaucguggugccggaaau

SEQ ID NO: 1443544 - RNA, 19 nt, Homo sapiens
  misc_RNA (1)...(19): siRNA sense strand
aaguuggccuacaaugaaa

SEQ ID NO: 1443545 - RNA, 19 nt, Homo sapiens
  misc_RNA (1)...(19): siRNA sense strand
gaagaccaugauacguaaa

SEQ ID NO: 1443546 - RNA, 19 nt, Homo sapiens
  misc_RNA (1)...(19): siRNA sense strand
cugaagaccaggcccguuu

SEQ ID NO: 1443547 - RNA, 19 nt, Homo sapiens
  misc_RNA (1)...(19): siRNA sense strand
guggcagccuggacaugaa

SEQ ID NO: 1443548 - RNA, 19 nt, Homo sapiens
  misc_RNA (1)...(19): siRNA sense strand
ugacaauaccuacuaugca

SEQ ID NO: 1443549 - RNA, 19 nt, Homo sapiens
  misc_RNA (1)...(19): siRNA sense strand
gcaagcugucucugcaaga

SEQ ID NO: 1443550 - RNA, 19 nt, Homo sapiens
  misc_RNA (1)...(19): siRNA sense strand
gaccugaucacccguaugc

SEQ ID NO: 1443551 - RNA, 19 nt, Homo sapiens
  misc_RNA (1)...(19): siRNA sense strand
acuauacugcuuugucuuu

SEQ ID NO: 1443552 - RNA, 19 nt, Homo sapiens
  misc_RNA (1)...(19): siRNA sense strand
ggcagcagcagcagcgaaa

SEQ ID NO: 1443553 - RNA, 19 nt, Homo sapiens
  misc_RNA (1)...(19): siRNA sense strand
ugugagcaaugaauucaag

SEQ ID NO: 1443554 - RNA, 19 nt, Homo sapiens
  misc_RNA (1)...(19): siRNA sense strand
ugaggaccaucuguacaug

SEQ ID NO: 1443555 - RNA, 19 nt, Homo sapiens
  misc_RNA (1)...(19): siRNA sense strand
gaaggaugaaauuggaaag

SEQ ID NO: 1443556 - RNA, 19 nt, Homo sapiens
  misc_RNA (1)...(19): siRNA sense strand
auacguaaacgcuccuuug

SEQ ID NO: 1443557 - RNA, 19 nt, Homo sapiens
  misc_RNA (1)...(19): siRNA sense strand
caaugaggaccaucuguac

SEQ ID NO: 1443558 - RNA, 19 nt, Homo sapiens
  misc_RNA (1)...(19): siRNA sense strand
uaccuacuaugcaaugaag

SEQ ID NO: 1443559 - RNA, 19 nt, Homo sapiens
  misc_RNA (1)...(19): siRNA sense strand
ggacgagcggaucaugugu

SEQ ID NO: 1443560 - RNA, 19 nt, Homo sapiens
  misc_RNA (1)...(19): siRNA sense strand
cuauacugcuuugucuuug

SEQ ID NO: 1443561 - RNA, 19 nt, Homo sapiens
  misc_RNA (1)...(19): siRNA sense strand
gugacacuauacugcuuug

SEQ ID NO: 1443562 - RNA, 19 nt, Homo sapiens
  misc_RNA (1)...(19): siRNA sense strand
ugacuuuggugugagcaau

SEQ ID NO: 1443563 - RNA, 19 nt, Homo sapiens
  misc_RNA (1)...(19): siRNA sense strand
ggugugagcaaugaauuca

SEQ ID NO: 1443564 - RNA, 19 nt, Homo sapiens
  misc_RNA (1)...(19): siRNA sense strand
cauggaguccuucauugug

SEQ ID NO: 1443565 - RNA, 19 nt, Homo sapiens
  misc_RNA (1)...(19): siRNA sense strand
gaagaccaggcccguuucu

SEQ ID NO: 1443566 - RNA, 19 nt, Homo sapiens
  misc_RNA (1)...(19): siRNA sense strand
gacgagcggaucauguguu

SEQ ID NO: 1443567 - RNA, 19 nt, Homo sapiens
  misc_RNA (1)...(19): siRNA sense strand
ugucagcgccuggaaacuu

SEQ ID NO: 1443568 - RNA, 19 nt, Homo sapiens
  misc_RNA (1)...(19): siRNA sense strand
gauacguaaacgcuccuuu

SEQ ID NO: 1443569 - RNA, 19 nt, Homo sapiens
  misc_RNA (1)...(19): siRNA sense strand
caucgaguacuuacacuac

SEQ ID NO: 1443570 - RNA, 19 nt, Homo sapiens
  misc_RNA (1)...(19): siRNA sense strand
ucacccguaugcuggacaa

SEQ ID NO: 1443571 - RNA, 19 nt, Homo sapiens
  misc_RNA (1)...(19): siRNA sense strand
cgacauagcugaggacuug

SEQ ID NO: 1443572 - RNA, 19 nt, Homo sapiens
  misc_RNA (1)...(19): siRNA sense strand
gacaauaccuacuaugcaa

SEQ ID NO: 1443573 - RNA, 19 nt, Homo sapiens
  misc_RNA (1)...(19): siRNA sense strand
gggaaggccuuggauguuu

SEQ ID NO: 1443574 - RNA, 19 nt, Homo sapiens
  misc_RNA (1)...(19): siRNA sense strand
caagaucgcugacuuuggu

SEQ ID NO: 1443575 - RNA, 19 nt, Homo sapiens
  misc_RNA (1)...(19): siRNA sense strand
gaaauugccauccucaaga

SEQ ID NO: 1443576 - RNA, 19 nt, Homo sapiens
  misc_RNA (1)...(19): siRNA sense strand
ugaagaccaugauacguaa

SEQ ID NO: 1443577 - RNA, 19 nt, Homo sapiens
  misc_RNA (1)...(19): siRNA sense strand
ucaaaccacucucugaaga

SEQ ID NO: 1443578 - RNA, 19 nt, Homo sapiens
  misc_RNA (1)...(19): siRNA sense strand
caaguuggccuacaaugaa

SEQ ID NO: 1443579 - RNA, 19 nt, Homo sapiens
  misc_RNA (1)...(19): siRNA sense strand
caaugaaggugcuguccaa

SEQ ID NO: 1443580 - RNA, 19 nt, Homo sapiens
  misc_RNA (1)...(19): siRNA sense strand
acaguaagaucaagaguca

SEQ ID NO: 1443581 - RNA, 19 nt, Homo sapiens
  misc_RNA (1)...(19): siRNA sense strand
ggaaggccuuggauguuug

SEQ ID NO: 1443582 - RNA, 19 nt, Homo sapiens
  misc_RNA (1)...(19): siRNA sense strand
ucaaaggcaucgaguacuu

SEQ ID NO: 1443583 - RNA, 19 nt, Homo sapiens
  misc_RNA (1)...(19): siRNA sense strand
gagcagguguaccaggaaa

SEQ ID NO: 1443584 - RNA, 19 nt, Homo sapiens
  misc_RNA (1)...(19): siRNA sense strand
gugaagaccaugauacgua

SEQ ID NO: 1443585 - RNA, 19 nt, Homo sapiens
  misc_RNA (1)...(19): siRNA sense strand
ggaagugcccacccucaaa

SEQ ID NO: 1443586 - RNA, 19 nt, Homo sapiens
  misc_RNA (1)...(19): siRNA sense strand
ccaaugaggaccaucugua

SEQ ID NO: 1443587 - RNA, 19 nt, Homo sapiens
  misc_RNA (1)...(19): siRNA sense strand
gaucaaaggcaucgaguac

SEQ ID NO: 1443588 - RNA, 19 nt, Homo sapiens
  misc_RNA (1)...(19): siRNA sense strand
caaaggcaucgaguacuua

SEQ ID NO: 1443589 - RNA, 19 nt, Homo sapiens
  misc_RNA (1)...(19): siRNA sense strand
ggaaauugccauccucaag

SEQ ID NO: 1443590 - RNA, 19 nt, Homo sapiens
  misc_RNA (1)...(19): siRNA sense strand
aguauacccugaaggauga

SEQ ID NO: 1443591 - RNA, 19 nt, Homo sapiens
  misc_RNA (1)...(19): siRNA sense strand
ggaggaacgcucacuguca

SEQ ID NO: 1443592 - RNA, 19 nt, Homo sapiens
  misc_RNA (1)...(19): siRNA sense strand
ggcauggaguccuucauug

SEQ ID NO: 1443593 - RNA, 19 nt, Homo sapiens
  misc_RNA (1)...(19): siRNA sense strand
aaauugccauccucaagaa

SEQ ID NO: 1443594 - RNA, 19 nt, Homo sapiens
  misc_RNA (1)...(19): siRNA sense strand
gggcauggaguccuucauu

SEQ ID NO: 1443595 - RNA, 19 nt, Homo sapiens
  misc_RNA (1)...(19): siRNA sense strand
ccugaaggaugaaauugga

SEQ ID NO: 1443596 - RNA, 19 nt, Homo sapiens
  misc_RNA (1)...(19): siRNA sense strand
guacuuacacuaccagaag

SEQ ID NO: 1443597 - RNA, 19 nt, Homo sapiens
  misc_RNA (1)...(19): siRNA sense strand
ucaaguuggccuacaauga

SEQ ID NO: 1443598 - RNA, 19 nt, Homo sapiens
  misc_RNA (1)...(19): siRNA sense strand
ccuauggugucgucaaguu

SEQ ID NO: 1443599 - RNA, 19 nt, Homo sapiens
  misc_RNA (1)...(19): siRNA sense strand
cauccaccgugacaucaaa

SEQ ID NO: 1443600 - RNA, 19 nt, Homo sapiens
  misc_RNA (1)...(19): siRNA sense strand
gagcggaucauguguuuac

SEQ ID NO: 1443601 - RNA, 19 nt, Homo sapiens
  misc_RNA (1)...(19): siRNA sense strand
gcagguguaccaggaaauu

SEQ ID NO: 1443602 - RNA, 19 nt, Homo sapiens
  misc_RNA (1)...(19): siRNA sense strand
caucaagaucgcugacuuu

SEQ ID NO: 1443603 - RNA, 19 nt, Homo sapiens
  misc_RNA (1)...(19): siRNA sense strand
gaucauccaccgugacauc

SEQ ID NO: 1443604 - RNA, 19 nt, Homo sapiens
  misc_RNA (1)...(19): siRNA sense strand
gcauggaguccuucauugu

SEQ ID NO: 1443605 - RNA, 19 nt, Homo sapiens
  misc_RNA (1)...(19): siRNA sense strand
gugacgcgcuccucuccaa

SEQ ID NO: 1443606 - RNA, 19 nt, Homo sapiens
  misc_RNA (1)...(19): siRNA sense strand
acgagcggaucauguguuu

SEQ ID NO: 1443607 - RNA, 19 nt, Homo sapiens
  misc_RNA (1)...(19): siRNA sense strand
acacuauacugcuuugucu

SEQ ID NO: 1443608 - RNA, 19 nt, Homo sapiens
  misc_RNA (1)...(19): siRNA sense strand
ugguggagguccuggauga

SEQ ID NO: 1443609 - RNA, 19 nt, Homo sapiens
  misc_RNA (1)...(19): siRNA sense strand
gucagcgccuggaaacuug

SEQ ID NO: 1443610 - RNA, 19 nt, Homo sapiens
  misc_RNA (1)...(19): siRNA sense strand
ggacuugaaggaccugauc

SEQ ID NO: 1443611 - RNA, 19 nt, Homo sapiens
  misc_RNA (1)...(19): siRNA sense strand
guacaugguguucgaacug

SEQ ID NO: 1443612 - RNA, 19 nt, Homo sapiens
  misc_RNA (1)...(19): siRNA sense strand
ggccgacaguggagucuca

SEQ ID NO: 1443613 - RNA, 19 nt, Homo sapiens
  misc_RNA (1)...(19): siRNA sense strand
ccucaaaccacucucugaa

SEQ ID NO: 1443614 - RNA, 19 nt, Homo sapiens
  misc_RNA (1)...(19): siRNA sense strand
ccaggcccguuucuacuuc

SEQ ID NO: 1443615 - RNA, 19 nt, Homo sapiens
  misc_RNA (1)...(19): siRNA sense strand
cccguaugcuggacaagaa

SEQ ID NO: 1443616 - RNA, 19 nt, Homo sapiens
  misc_RNA (1)...(19): siRNA sense strand
gcaucgaguacuuacacua

SEQ ID NO: 1443617 - RNA, 19 nt, Homo sapiens
  misc_RNA (1)...(19): siRNA sense strand
ugaaggaugaaauuggaaa

SEQ ID NO: 1443618 - RNA, 19 nt, Homo sapiens
  misc_RNA (1)...(19): siRNA sense strand
uagcugaggacuugaagga

SEQ ID NO: 1443619 - RNA, 19 nt, Homo sapiens
  misc_RNA (1)...(19): siRNA sense strand
gaagugcccacccucaaac

SEQ ID NO: 1443620 - RNA, 19 nt, Homo sapiens
  misc_RNA (1)...(19): siRNA sense strand
gguggcagccuggacauga

SEQ ID NO: 1443621 - RNA, 19 nt, Homo sapiens
  misc_RNA (1)...(19): siRNA sense strand
caauaccuacuaugcaaug

SEQ ID NO: 1443622 - RNA, 19 nt, Homo sapiens
  misc_RNA (1)...(19): siRNA sense strand
acaucaagaucgcugacuu

SEQ ID NO: 1443623 - RNA, 19 nt, Homo sapiens
  misc_RNA (1)...(19): siRNA sense strand
ggaucguggugccggaaau

SEQ ID NO: 1443624 - RNA, 19 nt, Homo sapiens
  misc_RNA (1)...(19): siRNA sense strand
aaguuggccuacaaugaaa

SEQ ID NO: 1443625 - RNA, 19 nt, Homo sapiens
  misc_RNA (1)...(19): siRNA sense strand
gaagaccaugauacguaaa

SEQ ID NO: 1443626 - RNA, 19 nt, Homo sapiens
  misc_RNA (1)...(19): siRNA sense strand
cugaagaccaggcccguuu

SEQ ID NO: 1443627 - RNA, 19 nt, Homo sapiens
  misc_RNA (1)...(19): siRNA sense strand
guggcagccuggacaugaa

SEQ ID NO: 1443628 - RNA, 19 nt, Homo sapiens
  misc_RNA (1)...(19): siRNA sense strand
ugacaauaccuacuaugca

SEQ ID NO: 1443629 - RNA, 19 nt, Homo sapiens
  misc_RNA (1)...(19): siRNA sense strand
gcaagcugucucugcaaga

SEQ ID NO: 1443630 - RNA, 19 nt, Homo sapiens
  misc_RNA (1)...(19): siRNA sense strand
gaccugaucacccguaugc

SEQ ID NO: 1443631 - RNA, 19 nt, Homo sapiens
  misc_RNA (1)...(19): siRNA sense strand
acuauacugcuuugucuuu

SEQ ID NO: 1443632 - RNA, 19 nt, Homo sapiens
  misc_RNA (1)...(19): siRNA sense strand
ggcagcagcagcagcgaaa

SEQ ID NO: 1443633 - RNA, 19 nt, Homo sapiens
  misc_RNA (1)...(19): siRNA sense strand
ugugagcaaugaauucaag

SEQ ID NO: 1443634 - RNA, 19 nt, Homo sapiens
  misc_RNA (1)...(19): siRNA sense strand
ugaggaccaucuguacaug

SEQ ID NO: 1443635 - RNA, 19 nt, Homo sapiens
  misc_RNA (1)...(19): siRNA sense strand
gaaggaugaaauuggaaag

SEQ ID NO: 1443636 - RNA, 19 nt, Homo sapiens
  misc_RNA (1)...(19): siRNA sense strand
auacguaaacgcuccuuug

SEQ ID NO: 1443637 - RNA, 19 nt, Homo sapiens
  misc_RNA (1)...(19): siRNA sense strand
caaugaggaccaucuguac

SEQ ID NO: 1443638 - RNA, 19 nt, Homo sapiens
  misc_RNA (1)...(19): siRNA sense strand
uaccuacuaugcaaugaag

SEQ ID NO: 1443639 - RNA, 19 nt, Homo sapiens
  misc_RNA (1)...(19): siRNA sense strand
ggacgagcggaucaugugu

SEQ ID NO: 1443640 - RNA, 19 nt, Homo sapiens
  misc_RNA (1)...(19): siRNA sense strand
cuauacugcuuugucuuug

SEQ ID NO: 1443641 - RNA, 19 nt, Homo sapiens
  misc_RNA (1)...(19): siRNA sense strand
gugacacuauacugcuuug

SEQ ID NO: 1443642 - RNA, 19 nt, Homo sapiens
  misc_RNA (1)...(19): siRNA sense strand
ugacuuuggugugagcaau

SEQ ID NO: 1443643 - RNA, 19 nt, Homo sapiens
  misc_RNA (1)...(19): siRNA sense strand
ggugugagcaaugaauuca

SEQ ID NO: 1443644 - RNA, 19 nt, Homo sapiens
  misc_RNA (1)...(19): siRNA sense strand
cauggaguccuucauugug

SEQ ID NO: 1443645 - RNA, 19 nt, Homo sapiens
  misc_RNA (1)...(19): siRNA sense strand
gaagaccaggcccguuucu

SEQ ID NO: 1443646 - RNA, 19 nt, Homo sapiens
  misc_RNA (1)...(19): siRNA sense strand
gacgagcggaucauguguu

SEQ ID NO: 1443647 - RNA, 19 nt, Homo sapiens
  misc_RNA (1)...(19): siRNA sense strand
ugucagcgccuggaaacuu

SEQ ID NO: 1443648 - RNA, 19 nt, Homo sapiens
  misc_RNA (1)...(19): siRNA sense strand
gauacguaaacgcuccuuu

SEQ ID NO: 1443649 - RNA, 19 nt, Homo sapiens
  misc_RNA (1)...(19): siRNA sense strand
caucgaguacuuacacuac

SEQ ID NO: 1443650 - RNA, 19 nt, Homo sapiens
  misc_RNA (1)...(19): siRNA sense strand
ucacccguaugcuggacaa

SEQ ID NO: 1443651 - RNA, 19 nt, Homo sapiens
  misc_RNA (1)...(19): siRNA sense strand
cgacauagcugaggacuug

SEQ ID NO: 1443652 - RNA, 19 nt, Homo sapiens
  misc_RNA (1)...(19): siRNA sense strand
gacaauaccuacuaugcaa

SEQ ID NO: 1443653 - RNA, 19 nt, Homo sapiens
  misc_RNA (1)...(19): siRNA sense strand
gggaaggccuuggauguuu

SEQ ID NO: 1443654 - RNA, 19 nt, Homo sapiens
  misc_RNA (1)...(19): siRNA sense strand
caagaucgcugacuuuggu

SEQ ID NO: 1443655 - RNA, 19 nt, Homo sapiens
  misc_RNA (1)...(19): siRNA sense strand
gaaauugccauccucaaga

SEQ ID NO: 1443656 - RNA, 19 nt, Homo sapiens
  misc_RNA (1)...(19): siRNA sense strand
ugaagaccaugauacguaa

SEQ ID NO: 1443657 - RNA, 19 nt, Homo sapiens
  misc_RNA (1)...(19): siRNA sense strand
ucaaaccacucucugaaga

SEQ ID NO: 1443658 - RNA, 19 nt, Homo sapiens
  misc_RNA (1)...(19): siRNA sense strand
caaguuggccuacaaugaa

SEQ ID NO: 1443659 - RNA, 19 nt, Homo sapiens
  misc_RNA (1)...(19): siRNA sense strand
caaugaaggugcuguccaa

SEQ ID NO: 1443660 - RNA, 19 nt, Homo sapiens
  misc_RNA (1)...(19): siRNA sense strand
acaguaagaucaagaguca

SEQ ID NO: 1443661 - RNA, 19 nt, Homo sapiens
  misc_RNA (1)...(19): siRNA sense strand
ggaaggccuuggauguuug

SEQ ID NO: 1443662 - RNA, 19 nt, Homo sapiens
  misc_RNA (1)...(19): siRNA sense strand
ucaaaggcaucgaguacuu

SEQ ID NO: 1443663 - RNA, 19 nt, Homo sapiens
  misc_RNA (1)...(19): siRNA sense strand
gagcagguguaccaggaaa

SEQ ID NO: 1443664 - RNA, 19 nt, Homo sapiens
  misc_RNA (1)...(19): siRNA sense strand
gugaagaccaugauacgua

SEQ ID NO: 1443665 - RNA, 19 nt, Homo sapiens
  misc_RNA (1)...(19): siRNA sense strand
ggaagugcccacccucaaa

SEQ ID NO: 1443666 - RNA, 19 nt, Homo sapiens
  misc_RNA (1)...(19): siRNA sense strand
ccaaugaggaccaucugua

SEQ ID NO: 1443667 - RNA, 19 nt, Homo sapiens
  misc_RNA (1)...(19): siRNA sense strand
gaucaaaggcaucgaguac

SEQ ID NO: 1443668 - RNA, 19 nt, Homo sapiens
  misc_RNA (1)...(19): siRNA sense strand
caaaggcaucgaguacuua

SEQ ID NO: 1443669 - RNA, 19 nt, Homo sapiens
  misc_RNA (1)...(19): siRNA sense strand
ggaaauugccauccucaag

SEQ ID NO: 1443670 - RNA, 19 nt, Homo sapiens
  misc_RNA (1)...(19): siRNA sense strand
aguauacccugaaggauga

SEQ ID NO: 1443671 - RNA, 19 nt, Homo sapiens
  misc_RNA (1)...(19): siRNA sense strand
ggaggaacgcucacuguca

SEQ ID NO: 1443672 - RNA, 19 nt, Homo sapiens
  misc_RNA (1)...(19): siRNA sense strand
ggcauggaguccuucauug

SEQ ID NO: 1443673 - RNA, 19 nt, Homo sapiens
  misc_RNA (1)...(19): siRNA sense strand
aaauugccauccucaagaa

SEQ ID NO: 1443674 - RNA, 19 nt, Homo sapiens
  misc_RNA (1)...(19): siRNA sense strand
gggcauggaguccuucauu

SEQ ID NO: 1443675 - RNA, 19 nt, Homo sapiens
  misc_RNA (1)...(19): siRNA sense strand
ccugaaggaugaaauugga

SEQ ID NO: 1443676 - RNA, 19 nt, Homo sapiens
  misc_RNA (1)...(19): siRNA sense strand
guacuuacacuaccagaag

SEQ ID NO: 1443677 - RNA, 19 nt, Homo sapiens
  misc_RNA (1)...(19): siRNA sense strand
ucaaguuggccuacaauga

SEQ ID NO: 1443678 - RNA, 19 nt, Homo sapiens
  misc_RNA (1)...(19): siRNA sense strand
ccuauggugucgucaaguu

SEQ ID NO: 1443679 - RNA, 19 nt, Homo sapiens
  misc_RNA (1)...(19): siRNA sense strand
cauccaccgugacaucaaa

SEQ ID NO: 1443680 - RNA, 19 nt, Homo sapiens
  misc_RNA (1)...(19): siRNA sense strand
gagcggaucauguguuuac

SEQ ID NO: 1443681 - RNA, 19 nt, Homo sapiens
  misc_RNA (1)...(19): siRNA sense strand
gcagguguaccaggaaauu

SEQ ID NO: 1443682 - RNA, 19 nt, Homo sapiens
  misc_RNA (1)...(19): siRNA sense strand
caucaagaucgcugacuuu

SEQ ID NO: 1443683 - RNA, 19 nt, Homo sapiens
  misc_RNA (1)...(19): siRNA sense strand
gaucauccaccgugacauc

SEQ ID NO: 1443684 - RNA, 19 nt, Homo sapiens
  misc_RNA (1)...(19): siRNA sense strand
gcauggaguccuucauugu

SEQ ID NO: 1443685 - RNA, 19 nt, Homo sapiens
  misc_RNA (1)...(19): siRNA sense strand
gugacgcgcuccucuccaa

SEQ ID NO: 1443686 - RNA, 19 nt, Homo sapiens
  misc_RNA (1)...(19): siRNA sense strand
acgagcggaucauguguuu

SEQ ID NO: 1443687 - RNA, 19 nt, Homo sapiens
  misc_RNA (1)...(19): siRNA sense strand
acacuauacugcuuugucu

SEQ ID NO: 1443688 - RNA, 19 nt, Homo sapiens
  misc_RNA (1)...(19): siRNA sense strand
ugguggagguccuggauga

SEQ ID NO: 1443689 - RNA, 19 nt, Homo sapiens
  misc_RNA (1)...(19): siRNA sense strand
gucagcgccuggaaacuug

SEQ ID NO: 1443690 - RNA, 19 nt, Homo sapiens
  misc_RNA (1)...(19): siRNA sense strand
ggacuugaaggaccugauc

SEQ ID NO: 1443691 - RNA, 19 nt, Homo sapiens
  misc_RNA (1)...(19): siRNA sense strand
guacaugguguucgaacug

SEQ ID NO: 1443692 - RNA, 19 nt, Homo sapiens
  misc_RNA (1)...(19): siRNA sense strand
ggccgacaguggagucuca

SEQ ID NO: 1443693 - RNA, 19 nt, Homo sapiens
  misc_RNA (1)...(19): siRNA sense strand
ccucaaaccacucucugaa

SEQ ID NO: 1443694 - RNA, 19 nt, Homo sapiens
  misc_RNA (1)...(19): siRNA sense strand
ccaggcccguuucuacuuc

SEQ ID NO: 1443695 - RNA, 19 nt, Homo sapiens
  misc_RNA (1)...(19): siRNA sense strand
cccguaugcuggacaagaa

SEQ ID NO: 1443696 - RNA, 19 nt, Homo sapiens
  misc_RNA (1)...(19): siRNA sense strand
gcaucgaguacuuacacua

SEQ ID NO: 1443697 - RNA, 19 nt, Homo sapiens
  misc_RNA (1)...(19): siRNA sense strand
ugaaggaugaaauuggaaa

SEQ ID NO: 1443698 - RNA, 19 nt, Homo sapiens
  misc_RNA (1)...(19): siRNA sense strand
uagcugaggacuugaagga

SEQ ID NO: 1443699 - RNA, 19 nt, Homo sapiens
  misc_RNA (1)...(19): siRNA sense strand
gaagugcccacccucaaac

SEQ ID NO: 1443700 - RNA, 19 nt, Homo sapiens
  misc_RNA (1)...(19): siRNA sense strand
gguggcagccuggacauga

SEQ ID NO: 1443701 - RNA, 19 nt, Homo sapiens
  misc_RNA (1)...(19): siRNA sense strand
caauaccuacuaugcaaug

SEQ ID NO: 1443702 - RNA, 19 nt, Homo sapiens
  misc_RNA (1)...(19): siRNA sense strand
acaucaagaucgcugacuu

SEQ ID NO: 1443703 - RNA, 19 nt, Homo sapiens
  misc_RNA (1)...(19): siRNA sense strand
ggaucguggugccggaaau

SEQ ID NO: 1443704 - RNA, 19 nt, Homo sapiens
  misc_RNA (1)...(19): siRNA sense strand
aaguuggccuacaaugaaa

SEQ ID NO: 1443705 - RNA, 19 nt, Homo sapiens
  misc_RNA (1)...(19): siRNA sense strand
gaagaccaugauacguaaa

SEQ ID NO: 1443706 - RNA, 19 nt, Homo sapiens
  misc_RNA (1)...(19): siRNA sense strand
cugaagaccaggcccguuu

SEQ ID NO: 1443707 - RNA, 19 nt, Homo sapiens
  misc_RNA (1)...(19): siRNA sense strand
guggcagccuggacaugaa

SEQ ID NO: 1443708 - RNA, 19 nt, Homo sapiens
  misc_RNA (1)...(19): siRNA sense strand
ugacaauaccuacuaugca

SEQ ID NO: 1443709 - RNA, 19 nt, Homo sapiens
  misc_RNA (1)...(19): siRNA sense strand
gcaagcugucucugcaaga

SEQ ID NO: 1443710 - RNA, 19 nt, Homo sapiens
  misc_RNA (1)...(19): siRNA sense strand
gaccugaucacccguaugc

SEQ ID NO: 1443711 - RNA, 19 nt, Homo sapiens
  misc_RNA (1)...(19): siRNA sense strand
acuauacugcuuugucuuu

SEQ ID NO: 1443712 - RNA, 19 nt, Homo sapiens
  misc_RNA (1)...(19): siRNA sense strand
ggcagcagcagcagcgaaa

SEQ ID NO: 1443713 - RNA, 19 nt, Homo sapiens
  misc_RNA (1)...(19): siRNA sense strand
ugugagcaaugaauucaag

SEQ ID NO: 1443714 - RNA, 19 nt, Homo sapiens
  misc_RNA (1)...(19): siRNA sense strand
ugaggaccaucuguacaug

SEQ ID NO: 1443715 - RNA, 19 nt, Homo sapiens
  misc_RNA (1)...(19): siRNA sense strand
gaaggaugaaauuggaaag

SEQ ID NO: 1443716 - RNA, 19 nt, Homo sapiens
  misc_RNA (1)...(19): siRNA sense strand
auacguaaacgcuccuuug

SEQ ID NO: 1443717 - RNA, 19 nt, Homo sapiens
  misc_RNA (1)...(19): siRNA sense strand
caaugaggaccaucuguac

SEQ ID NO: 1443718 - RNA, 19 nt, Homo sapiens
  misc_RNA (1)...(19): siRNA sense strand
uaccuacuaugcaaugaag

SEQ ID NO: 1443719 - RNA, 19 nt, Homo sapiens
  misc_RNA (1)...(19): siRNA sense strand
ggacgagcggaucaugugu

SEQ ID NO: 1443720 - RNA, 19 nt, Homo sapiens
  misc_RNA (1)...(19): siRNA sense strand
cuauacugcuuugucuuug

SEQ ID NO: 1443721 - RNA, 19 nt, Homo sapiens
  misc_RNA (1)...(19): siRNA sense strand
gugacacuauacugcuuug

SEQ ID NO: 1443722 - RNA, 19 nt, Homo sapiens
  misc_RNA (1)...(19): siRNA sense strand
ugacuuuggugugagcaau

SEQ ID NO: 1443723 - RNA, 19 nt, Homo sapiens
  misc_RNA (1)...(19): siRNA sense strand
ggugugagcaaugaauuca

SEQ ID NO: 1443724 - RNA, 19 nt, Homo sapiens
  misc_RNA (1)...(19): siRNA sense strand
cauggaguccuucauugug

SEQ ID NO: 1443725 - RNA, 19 nt, Homo sapiens
  misc_RNA (1)...(19): siRNA sense strand
gaagaccaggcccguuucu

SEQ ID NO: 1443726 - RNA, 19 nt, Homo sapiens
  misc_RNA (1)...(19): siRNA sense strand
gacgagcggaucauguguu

SEQ ID NO: 1443727 - RNA, 19 nt, Homo sapiens
  misc_RNA (1)...(19): siRNA sense strand
ugucagcgccuggaaacuu

SEQ ID NO: 1443728 - RNA, 19 nt, Homo sapiens
  misc_RNA (1)...(19): siRNA sense strand
gauacguaaacgcuccuuu

SEQ ID NO: 1443729 - RNA, 19 nt, Homo sapiens
  misc_RNA (1)...(19): siRNA sense strand
caucgaguacuuacacuac

SEQ ID NO: 1443730 - RNA, 19 nt, Homo sapiens
  misc_RNA (1)...(19): siRNA sense strand
ucacccguaugcuggacaa

SEQ ID NO: 1443731 - RNA, 19 nt, Homo sapiens
  misc_RNA (1)...(19): siRNA sense strand
cgacauagcugaggacuug

SEQ ID NO: 1443732 - RNA, 19 nt, Homo sapiens
  misc_RNA (1)...(19): siRNA sense strand
gacaauaccuacuaugcaa

SEQ ID NO: 1443733 - RNA, 19 nt, Homo sapiens
  misc_RNA (1)...(19): siRNA sense strand
gggaaggccuuggauguuu

SEQ ID NO: 1443734 - RNA, 19 nt, Homo sapiens
  misc_RNA (1)...(19): siRNA sense strand
caagaucgcugacuuuggu

SEQ ID NO: 1443735 - RNA, 19 nt, Homo sapiens
  misc_RNA (1)...(19): siRNA sense strand
gaaauugccauccucaaga

SEQ ID NO: 1443736 - RNA, 19 nt, Homo sapiens
  misc_RNA (1)...(19): siRNA sense strand
ugaagaccaugauacguaa

SEQ ID NO: 1443737 - RNA, 19 nt, Homo sapiens
  misc_RNA (1)...(19): siRNA sense strand
ucaaaccacucucugaaga

SEQ ID NO: 1443738 - RNA, 19 nt, Homo sapiens
  misc_RNA (1)...(19): siRNA sense strand
caaguuggccuacaaugaa

SEQ ID NO: 1443739 - RNA, 19 nt, Homo sapiens
  misc_RNA (1)...(19): siRNA sense strand
caaugaaggugcuguccaa

SEQ ID NO: 1443740 - RNA, 19 nt, Homo sapiens
  misc_RNA (1)...(19): siRNA sense strand
acaguaagaucaagaguca

SEQ ID NO: 1443741 - RNA, 19 nt, Homo sapiens
  misc_RNA (1)...(19): siRNA sense strand
ggaaggccuuggauguuug

SEQ ID NO: 1443742 - RNA, 19 nt, Homo sapiens
  misc_RNA (1)...(19): siRNA sense strand
ucaaaggcaucgaguacuu

SEQ ID NO: 1443743 - RNA, 19 nt, Homo sapiens
  misc_RNA (1)...(19): siRNA sense strand
gagcagguguaccaggaaa

SEQ ID NO: 1443744 - RNA, 19 nt, Homo sapiens
  misc_RNA (1)...(19): siRNA sense strand
gugaagaccaugauacgua

SEQ ID NO: 1443745 - RNA, 19 nt, Homo sapiens
  misc_RNA (1)...(19): siRNA sense strand
ggaagugcccacccucaaa

SEQ ID NO: 1443746 - RNA, 19 nt, Homo sapiens
  misc_RNA (1)...(19): siRNA sense strand
ccaaugaggaccaucugua

SEQ ID NO: 1443747 - RNA, 19 nt, Homo sapiens
  misc_RNA (1)...(19): siRNA sense strand
gaucaaaggcaucgaguac

SEQ ID NO: 1443748 - RNA, 19 nt, Homo sapiens
  misc_RNA (1)...(19): siRNA sense strand
caaaggcaucgaguacuua

SEQ ID NO: 1443749 - RNA, 19 nt, Homo sapiens
  misc_RNA (1)...(19): siRNA sense strand
ggaaauugccauccucaag

SEQ ID NO: 1443750 - RNA, 19 nt, Homo sapiens
  misc_RNA (1)...(19): siRNA sense strand
aguauacccugaaggauga

SEQ ID NO: 1443751 - RNA, 19 nt, Homo sapiens
  misc_RNA (1)...(19): siRNA sense strand
ggaggaacgcucacuguca

SEQ ID NO: 1443752 - RNA, 19 nt, Homo sapiens
  misc_RNA (1)...(19): siRNA sense strand
ggcauggaguccuucauug

SEQ ID NO: 1443753 - RNA, 19 nt, Homo sapiens
  misc_RNA (1)...(19): siRNA sense strand
aaauugccauccucaagaa

SEQ ID NO: 1443754 - RNA, 19 nt, Homo sapiens
  misc_RNA (1)...(19): siRNA sense strand
gggcauggaguccuucauu

SEQ ID NO: 1443755 - RNA, 19 nt, Homo sapiens
  misc_RNA (1)...(19): siRNA sense strand
ccugaaggaugaaauugga

SEQ ID NO: 1443756 - RNA, 19 nt, Homo sapiens
  misc_RNA (1)...(19): siRNA sense strand
guacuuacacuaccagaag

SEQ ID NO: 1443757 - RNA, 19 nt, Homo sapiens
  misc_RNA (1)...(19): siRNA sense strand
ucaaguuggccuacaauga

SEQ ID NO: 1443758 - RNA, 19 nt, Homo sapiens
  misc_RNA (1)...(19): siRNA sense strand
ccuauggugucgucaaguu

SEQ ID NO: 1443759 - RNA, 19 nt, Homo sapiens
  misc_RNA (1)...(19): siRNA sense strand
cauccaccgugacaucaaa

SEQ ID NO: 1443760 - RNA, 19 nt, Homo sapiens
  misc_RNA (1)...(19): siRNA sense strand
gagcggaucauguguuuac

SEQ ID NO: 1443761 - RNA, 19 nt, Homo sapiens
  misc_RNA (1)...(19): siRNA sense strand
gcagguguaccaggaaauu

SEQ ID NO: 1443762 - RNA, 19 nt, Homo sapiens
  misc_RNA (1)...(19): siRNA sense strand
caucaagaucgcugacuuu

SEQ ID NO: 1443763 - RNA, 19 nt, Homo sapiens
  misc_RNA (1)...(19): siRNA sense strand
gaucauccaccgugacauc

SEQ ID NO: 1443764 - RNA, 19 nt, Homo sapiens
  misc_RNA (1)...(19): siRNA sense strand
gcauggaguccuucauugu

SEQ ID NO: 1443765 - RNA, 19 nt, Homo sapiens
  misc_RNA (1)...(19): siRNA sense strand
gugacgcgcuccucuccaa

SEQ ID NO: 1443766 - RNA, 19 nt, Homo sapiens
  misc_RNA (1)...(19): siRNA sense strand
acgagcggaucauguguuu

SEQ ID NO: 1443767 - RNA, 19 nt, Homo sapiens
  misc_RNA (1)...(19): siRNA sense strand
acacuauacugcuuugucu

SEQ ID NO: 1443768 - RNA, 19 nt, Homo sapiens
  misc_RNA (1)...(19): siRNA sense strand
ugguggagguccuggauga

SEQ ID NO: 1443769 - RNA, 19 nt, Homo sapiens
  misc_RNA (1)...(19): siRNA sense strand
gucagcgccuggaaacuug

SEQ ID NO: 1443770 - RNA, 19 nt, Homo sapiens
  misc_RNA (1)...(19): siRNA sense strand
ggacuugaaggaccugauc

SEQ ID NO: 1443771 - RNA, 19 nt, Homo sapiens
  misc_RNA (1)...(19): siRNA sense strand
guacaugguguucgaacug

SEQ ID NO: 1443772 - RNA, 19 nt, Homo sapiens
  misc_RNA (1)...(19): siRNA sense strand
ggccgacaguggagucuca

SEQ ID NO: 1443773 - RNA, 19 nt, Homo sapiens
  misc_RNA (1)...(19): siRNA sense strand
ccucaaaccacucucugaa

SEQ ID NO: 1443774 - RNA, 19 nt, Homo sapiens
  misc_RNA (1)...(19): siRNA sense strand
ccaggcccguuucuacuuc

SEQ ID NO: 1443775 - RNA, 19 nt, Homo sapiens
  misc_RNA (1)...(19): siRNA sense strand
cccguaugcuggacaagaa

SEQ ID NO: 1443776 - RNA, 19 nt, Homo sapiens
  misc_RNA (1)...(19): siRNA sense strand
gcaucgaguacuuacacua

SEQ ID NO: 1443777 - RNA, 19 nt, Homo sapiens
  misc_RNA (1)...(19): siRNA sense strand
ugaaggaugaaauuggaaa

SEQ ID NO: 1443778 - RNA, 19 nt, Homo sapiens
  misc_RNA (1)...(19): siRNA sense strand
uagcugaggacuugaagga

SEQ ID NO: 1443779 - RNA, 19 nt, Homo sapiens
  misc_RNA (1)...(19): siRNA sense strand
gaagugcccacccucaaac

SEQ ID NO: 1443780 - RNA, 19 nt, Homo sapiens
  misc_RNA (1)...(19): siRNA sense strand
gguggcagccuggacauga

SEQ ID NO: 1443781 - RNA, 19 nt, Homo sapiens
  misc_RNA (1)...(19): siRNA sense strand
caauaccuacuaugcaaug

SEQ ID NO: 1443782 - RNA, 19 nt, Homo sapiens
  misc_RNA (1)...(19): siRNA sense strand
acaucaagaucgcugacuu

SEQ ID NO: 1443783 - RNA, 19 nt, Homo sapiens
  misc_RNA (1)...(19): siRNA sense strand
ggaucguggugccggaaau

SEQ ID NO: 1443784 - RNA, 19 nt, Homo sapiens
  misc_RNA (1)...(19): siRNA sense strand
aaguuggccuacaaugaaa

SEQ ID NO: 1443785 - RNA, 19 nt, Homo sapiens
  misc_RNA (1)...(19): siRNA sense strand
gaagaccaugauacguaaa

SEQ ID NO: 1443786 - RNA, 19 nt, Homo sapiens
  misc_RNA (1)...(19): siRNA sense strand
cugaagaccaggcccguuu

SEQ ID NO: 1443787 - RNA, 19 nt, Homo sapiens
  misc_RNA (1)...(19): siRNA sense strand
guggcagccuggacaugaa

SEQ ID NO: 1443788 - RNA, 19 nt, Homo sapiens
  misc_RNA (1)...(19): siRNA sense strand
ugacaauaccuacuaugca

SEQ ID NO: 1443789 - RNA, 19 nt, Homo sapiens
  misc_RNA (1)...(19): siRNA sense strand
gcaagcugucucugcaaga

SEQ ID NO: 1443790 - RNA, 19 nt, Homo sapiens
  misc_RNA (1)...(19): siRNA sense strand
gaccugaucacccguaugc

SEQ ID NO: 1443791 - RNA, 19 nt, Homo sapiens
  misc_RNA (1)...(19): siRNA sense strand
acuauacugcuuugucuuu

SEQ ID NO: 1443792 - RNA, 19 nt, Homo sapiens
  misc_RNA (1)...(19): siRNA sense strand
ggcagcagcagcagcgaaa

SEQ ID NO: 1443793 - RNA, 19 nt, Homo sapiens
  misc_RNA (1)...(19): siRNA sense strand
ugugagcaaugaauucaag

SEQ ID NO: 1443794 - RNA, 19 nt, Homo sapiens
  misc_RNA (1)...(19): siRNA sense strand
ugaggaccaucuguacaug

SEQ ID NO: 1443795 - RNA, 19 nt, Homo sapiens
  misc_RNA (1)...(19): siRNA sense strand
gaaggaugaaauuggaaag

SEQ ID NO: 1443796 - RNA, 19 nt, Homo sapiens
  misc_RNA (1)...(19): siRNA sense strand
auacguaaacgcuccuuug

SEQ ID NO: 1443797 - RNA, 19 nt, Homo sapiens
  misc_RNA (1)...(19): siRNA sense strand
caaugaggaccaucuguac

SEQ ID NO: 1443798 - RNA, 19 nt, Homo sapiens
  misc_RNA (1)...(19): siRNA sense strand
uaccuacuaugcaaugaag

SEQ ID NO: 1443799 - RNA, 19 nt, Homo sapiens
  misc_RNA (1)...(19): siRNA sense strand
ggacgagcggaucaugugu

SEQ ID NO: 1443800 - RNA, 19 nt, Homo sapiens
  misc_RNA (1)...(19): siRNA sense strand
cuauacugcuuugucuuug

SEQ ID NO: 1443801 - RNA, 19 nt, Homo sapiens
  misc_RNA (1)...(19): siRNA sense strand
gugacacuauacugcuuug

SEQ ID NO: 1443802 - RNA, 19 nt, Homo sapiens
  misc_RNA (1)...(19): siRNA sense strand
ugacuuuggugugagcaau

SEQ ID NO: 1443803 - RNA, 19 nt, Homo sapiens
  misc_RNA (1)...(19): siRNA sense strand
ggugugagcaaugaauuca

SEQ ID NO: 1443804 - RNA, 19 nt, Homo sapiens
  misc_RNA (1)...(19): siRNA sense strand
cauggaguccuucauugug

SEQ ID NO: 1443805 - RNA, 19 nt, Homo sapiens
  misc_RNA (1)...(19): siRNA sense strand
gaagaccaggcccguuucu

SEQ ID NO: 1443806 - RNA, 19 nt, Homo sapiens
  misc_RNA (1)...(19): siRNA sense strand
gacgagcggaucauguguu

SEQ ID NO: 1443807 - RNA, 19 nt, Homo sapiens
  misc_RNA (1)...(19): siRNA sense strand
ugucagcgccuggaaacuu

SEQ ID NO: 1443808 - RNA, 19 nt, Homo sapiens
  misc_RNA (1)...(19): siRNA sense strand
gauacguaaacgcuccuuu

SEQ ID NO: 1443809 - RNA, 19 nt, Homo sapiens
  misc_RNA (1)...(19): siRNA sense strand
caucgaguacuuacacuac

SEQ ID NO: 1443810 - RNA, 19 nt, Homo sapiens
  misc_RNA (1)...(19): siRNA sense strand
ucacccguaugcuggacaa

SEQ ID NO: 1443811 - RNA, 19 nt, Homo sapiens
  misc_RNA (1)...(19): siRNA sense strand
cgacauagcugaggacuug

SEQ ID NO: 1443812 - RNA, 19 nt, Homo sapiens
  misc_RNA (1)...(19): siRNA sense strand
gacaauaccuacuaugcaa

SEQ ID NO: 1443813 - RNA, 19 nt, Homo sapiens
  misc_RNA (1)...(19): siRNA sense strand
gggaaggccuuggauguuu

SEQ ID NO: 1443814 - RNA, 19 nt, Homo sapiens
  misc_RNA (1)...(19): siRNA sense strand
caagaucgcugacuuuggu

SEQ ID NO: 1443815 - RNA, 19 nt, Homo sapiens
  misc_RNA (1)...(19): siRNA sense strand
gaaauugccauccucaaga

SEQ ID NO: 1443816 - RNA, 19 nt, Homo sapiens
  misc_RNA (1)...(19): siRNA sense strand
ugaagaccaugauacguaa

SEQ ID NO: 1443817 - RNA, 19 nt, Homo sapiens
  misc_RNA (1)...(19): siRNA sense strand
ucaaaccacucucugaaga

SEQ ID NO: 1443818 - RNA, 19 nt, Homo sapiens
  misc_RNA (1)...(19): siRNA sense strand
caaguuggccuacaaugaa

SEQ ID NO: 1443819 - RNA, 19 nt, Homo sapiens
  misc_RNA (1)...(19): siRNA sense strand
caaugaaggugcuguccaa

SEQ ID NO: 1443820 - RNA, 19 nt, Homo sapiens
  misc_RNA (1)...(19): siRNA sense strand
acaguaagaucaagaguca

SEQ ID NO: 1443821 - RNA, 19 nt, Homo sapiens
  misc_RNA (1)...(19): siRNA sense strand
ggaaggccuuggauguuug

SEQ ID NO: 1443822 - RNA, 19 nt, Homo sapiens
  misc_RNA (1)...(19): siRNA sense strand
ucaaaggcaucgaguacuu

SEQ ID NO: 1443823 - RNA, 19 nt, Homo sapiens
  misc_RNA (1)...(19): siRNA sense strand
gagcagguguaccaggaaa

SEQ ID NO: 1443824 - RNA, 19 nt, Homo sapiens
  misc_RNA (1)...(19): siRNA sense strand
gugaagaccaugauacgua

SEQ ID NO: 1443825 - RNA, 19 nt, Homo sapiens
  misc_RNA (1)...(19): siRNA sense strand
ggaagugcccacccucaaa

SEQ ID NO: 1443826 - RNA, 19 nt, Homo sapiens
  misc_RNA (1)...(19): siRNA sense strand
ccaaugaggaccaucugua

SEQ ID NO: 1443827 - RNA, 19 nt, Homo sapiens
  misc_RNA (1)...(19): siRNA sense strand
gaucaaaggcaucgaguac

SEQ ID NO: 1443828 - RNA, 19 nt, Homo sapiens
  misc_RNA (1)...(19): siRNA sense strand
caaaggcaucgaguacuua

SEQ ID NO: 1443829 - RNA, 19 nt, Homo sapiens
  misc_RNA (1)...(19): siRNA sense strand
ggaaauugccauccucaag

SEQ ID NO: 1443830 - RNA, 19 nt, Homo sapiens
  misc_RNA (1)...(19): siRNA sense strand
aguauacccugaaggauga

SEQ ID NO: 1443831 - RNA, 19 nt, Homo sapiens
  misc_RNA (1)...(19): siRNA sense strand
ggaggaacgcucacuguca

SEQ ID NO: 1443832 - RNA, 19 nt, Homo sapiens
  misc_RNA (1)...(19): siRNA sense strand
ggcauggaguccuucauug

SEQ ID NO: 1443833 - RNA, 19 nt, Homo sapiens
  misc_RNA (1)...(19): siRNA sense strand
aaauugccauccucaagaa

SEQ ID NO: 1443834 - RNA, 19 nt, Homo sapiens
  misc_RNA (1)...(19): siRNA sense strand
gggcauggaguccuucauu

SEQ ID NO: 1443835 - RNA, 19 nt, Homo sapiens
  misc_RNA (1)...(19): siRNA sense strand
ccugaaggaugaaauugga

SEQ ID NO: 1443836 - RNA, 19 nt, Homo sapiens
  misc_RNA (1)...(19): siRNA sense strand
guacuuacacuaccagaag

SEQ ID NO: 1443837 - RNA, 19 nt, Homo sapiens
  misc_RNA (1)...(19): siRNA sense strand
ucaaguuggccuacaauga

SEQ ID NO: 1443838 - RNA, 19 nt, Homo sapiens
  misc_RNA (1)...(19): siRNA sense strand
ccuauggugucgucaaguu

SEQ ID NO: 1443839 - RNA, 19 nt, Homo sapiens
  misc_RNA (1)...(19): siRNA sense strand
cauccaccgugacaucaaa

SEQ ID NO: 1443840 - RNA, 19 nt, Homo sapiens
  misc_RNA (1)...(19): siRNA sense strand
gagcggaucauguguuuac

SEQ ID NO: 1443841 - RNA, 19 nt, Homo sapiens
  misc_RNA (1)...(19): siRNA sense strand
gcagguguaccaggaaauu

SEQ ID NO: 1443842 - RNA, 19 nt, Homo sapiens
  misc_RNA (1)...(19): siRNA sense strand
caucaagaucgcugacuuu

SEQ ID NO: 1443843 - RNA, 19 nt, Homo sapiens
  misc_RNA (1)...(19): siRNA sense strand
gaucauccaccgugacauc

SEQ ID NO: 1443844 - RNA, 19 nt, Homo sapiens
  misc_RNA (1)...(19): siRNA sense strand
gcauggaguccuucauugu

SEQ ID NO: 1443845 - RNA, 19 nt, Homo sapiens
  misc_RNA (1)...(19): siRNA sense strand
gugacgcgcuccucuccaa

SEQ ID NO: 1443846 - RNA, 19 nt, Homo sapiens
  misc_RNA (1)...(19): siRNA sense strand
acgagcggaucauguguuu

SEQ ID NO: 1443847 - RNA, 19 nt, Homo sapiens
  misc_RNA (1)...(19): siRNA sense strand
acacuauacugcuuugucu

SEQ ID NO: 1443848 - RNA, 19 nt, Homo sapiens
  misc_RNA (1)...(19): siRNA sense strand
ugguggagguccuggauga

SEQ ID NO: 1443849 - RNA, 19 nt, Homo sapiens
  misc_RNA (1)...(19): siRNA sense strand
gucagcgccuggaaacuug

SEQ ID NO: 1443850 - RNA, 19 nt, Homo sapiens
  misc_RNA (1)...(19): siRNA sense strand
ggacuugaaggaccugauc

SEQ ID NO: 1443851 - RNA, 19 nt, Homo sapiens
  misc_RNA (1)...(19): siRNA sense strand
guacaugguguucgaacug

SEQ ID NO: 1443852 - RNA, 19 nt, Homo sapiens
  misc_RNA (1)...(19): siRNA sense strand
ggccgacaguggagucuca

SEQ ID NO: 1443853 - RNA, 19 nt, Homo sapiens
  misc_RNA (1)...(19): siRNA sense strand
ccucaaaccacucucugaa

SEQ ID NO: 1443854 - RNA, 19 nt, Homo sapiens
  misc_RNA (1)...(19): siRNA sense strand
ccaggcccguuucuacuuc

SEQ ID NO: 1443855 - RNA, 19 nt, Homo sapiens
  misc_RNA (1)...(19): siRNA sense strand
cccguaugcuggacaagaa

SEQ ID NO: 1443856 - RNA, 19 nt, Homo sapiens
  misc_RNA (1)...(19): siRNA sense strand
gcaucgaguacuuacacua

SEQ ID NO: 1443857 - RNA, 19 nt, Homo sapiens
  misc_RNA (1)...(19): siRNA sense strand
ugaaggaugaaauuggaaa

SEQ ID NO: 1443858 - RNA, 19 nt, Homo sapiens
  misc_RNA (1)...(19): siRNA sense strand
uagcugaggacuugaagga

SEQ ID NO: 1443859 - RNA, 19 nt, Homo sapiens
  misc_RNA (1)...(19): siRNA sense strand
gaagugcccacccucaaac

SEQ ID NO: 1443860 - RNA, 19 nt, Homo sapiens
  misc_RNA (1)...(19): siRNA sense strand
gguggcagccuggacauga

SEQ ID NO: 1443861 - RNA, 19 nt, Homo sapiens
  misc_RNA (1)...(19): siRNA sense strand
caauaccuacuaugcaaug

SEQ ID NO: 1443862 - RNA, 19 nt, Homo sapiens
  misc_RNA (1)...(19): siRNA sense strand
acaucaagaucgcugacuu

SEQ ID NO: 1443863 - RNA, 19 nt, Homo sapiens
  misc_RNA (1)...(19): siRNA sense strand
ggaucguggugccggaaau

SEQ ID NO: 1443864 - RNA, 19 nt, Homo sapiens
  misc_RNA (1)...(19): siRNA sense strand
aaguuggccuacaaugaaa

SEQ ID NO: 1443865 - RNA, 19 nt, Homo sapiens
  misc_RNA (1)...(19): siRNA sense strand
gaagaccaugauacguaaa

SEQ ID NO: 1443866 - RNA, 19 nt, Homo sapiens
  misc_RNA (1)...(19): siRNA sense strand
cugaagaccaggcccguuu

SEQ ID NO: 1443867 - RNA, 19 nt, Homo sapiens
  misc_RNA (1)...(19): siRNA sense strand
guggcagccuggacaugaa

SEQ ID NO: 1443868 - RNA, 19 nt, Homo sapiens
  misc_RNA (1)...(19): siRNA sense strand
ugacaauaccuacuaugca

SEQ ID NO: 1443869 - RNA, 19 nt, Homo sapiens
  misc_RNA (1)...(19): siRNA sense strand
gcaagcugucucugcaaga

SEQ ID NO: 1443870 - RNA, 19 nt, Homo sapiens
  misc_RNA (1)...(19): siRNA sense strand
gaccugaucacccguaugc

SEQ ID NO: 1443871 - RNA, 19 nt, Homo sapiens
  misc_RNA (1)...(19): siRNA sense strand
acuauacugcuuugucuuu

SEQ ID NO: 1443872 - RNA, 19 nt, Homo sapiens
  misc_RNA (1)...(19): siRNA sense strand
ggcagcagcagcagcgaaa

SEQ ID NO: 1443873 - RNA, 19 nt, Homo sapiens
  misc_RNA (1)...(19): siRNA sense strand
ugugagcaaugaauucaag

SEQ ID NO: 1443874 - RNA, 19 nt, Homo sapiens
  misc_RNA (1)...(19): siRNA sense strand
ugaggaccaucuguacaug

SEQ ID NO: 1443875 - RNA, 19 nt, Homo sapiens
  misc_RNA (1)...(19): siRNA sense strand
gaaggaugaaauuggaaag

SEQ ID NO: 1443876 - RNA, 19 nt, Homo sapiens
  misc_RNA (1)...(19): siRNA sense strand
auacguaaacgcuccuuug

SEQ ID NO: 1443877 - RNA, 19 nt, Homo sapiens
  misc_RNA (1)...(19): siRNA sense strand
caaugaggaccaucuguac

SEQ ID NO: 1443878 - RNA, 19 nt, Homo sapiens
  misc_RNA (1)...(19): siRNA sense strand
uaccuacuaugcaaugaag

SEQ ID NO: 1443879 - RNA, 19 nt, Homo sapiens
  misc_RNA (1)...(19): siRNA sense strand
ggacgagcggaucaugugu

SEQ ID NO: 1443880 - RNA, 19 nt, Homo sapiens
  misc_RNA (1)...(19): siRNA sense strand
cuauacugcuuugucuuug

SEQ ID NO: 1443881 - RNA, 19 nt, Homo sapiens
  misc_RNA (1)...(19): siRNA sense strand
gugacacuauacugcuuug

SEQ ID NO: 1443882 - RNA, 19 nt, Homo sapiens
  misc_RNA (1)...(19): siRNA sense strand
ugacuuuggugugagcaau

SEQ ID NO: 1443883 - RNA, 19 nt, Homo sapiens
  misc_RNA (1)...(19): siRNA sense strand
ggugugagcaaugaauuca

SEQ ID NO: 1443884 - RNA, 19 nt, Homo sapiens
  misc_RNA (1)...(19): siRNA sense strand
cauggaguccuucauugug

SEQ ID NO: 1443885 - RNA, 19 nt, Homo sapiens
  misc_RNA (1)...(19): siRNA sense strand
gaagaccaggcccguuucu

SEQ ID NO: 1443886 - RNA, 19 nt, Homo sapiens
  misc_RNA (1)...(19): siRNA sense strand
gacgagcggaucauguguu

SEQ ID NO: 1443887 - RNA, 19 nt, Homo sapiens
  misc_RNA (1)...(19): siRNA sense strand
ugucagcgccuggaaacuu

SEQ ID NO: 1443888 - RNA, 19 nt, Homo sapiens
  misc_RNA (1)...(19): siRNA sense strand
gauacguaaacgcuccuuu

SEQ ID NO: 1443889 - RNA, 19 nt, Homo sapiens
  misc_RNA (1)...(19): siRNA sense strand
caucgaguacuuacacuac

SEQ ID NO: 1443890 - RNA, 19 nt, Homo sapiens
  misc_RNA (1)...(19): siRNA sense strand
ucacccguaugcuggacaa

SEQ ID NO: 1443891 - RNA, 19 nt, Homo sapiens
  misc_RNA (1)...(19): siRNA sense strand
cgacauagcugaggacuug

SEQ ID NO: 1443892 - RNA, 19 nt, Homo sapiens
  misc_RNA (1)...(19): siRNA sense strand
gacaauaccuacuaugcaa

SEQ ID NO: 1443893 - RNA, 19 nt, Homo sapiens
  misc_RNA (1)...(19): siRNA sense strand
gggaaggccuuggauguuu

SEQ ID NO: 1443894 - RNA, 19 nt, Homo sapiens
  misc_RNA (1)...(19): siRNA sense strand
caagaucgcugacuuuggu

SEQ ID NO: 1443895 - RNA, 19 nt, Homo sapiens
  misc_RNA (1)...(19): siRNA sense strand
gaaauugccauccucaaga

SEQ ID NO: 1443896 - RNA, 19 nt, Homo sapiens
  misc_RNA (1)...(19): siRNA sense strand
ugaagaccaugauacguaa

SEQ ID NO: 1443897 - RNA, 19 nt, Homo sapiens
  misc_RNA (1)...(19): siRNA sense strand
ucaaaccacucucugaaga

SEQ ID NO: 1443898 - RNA, 19 nt, Homo sapiens
  misc_RNA (1)...(19): siRNA sense strand
caaguuggccuacaaugaa

SEQ ID NO: 1443899 - RNA, 19 nt, Homo sapiens
  misc_RNA (1)...(19): siRNA sense strand
caaugaaggugcuguccaa

SEQ ID NO: 1443900 - RNA, 19 nt, Homo sapiens
  misc_RNA (1)...(19): siRNA sense strand
acaguaagaucaagaguca

SEQ ID NO: 1443901 - RNA, 19 nt, Homo sapiens
  misc_RNA (1)...(19): siRNA sense strand
ggaaggccuuggauguuug

SEQ ID NO: 1443902 - RNA, 19 nt, Homo sapiens
  misc_RNA (1)...(19): siRNA sense strand
ucaaaggcaucgaguacuu

SEQ ID NO: 1443903 - RNA, 19 nt, Homo sapiens
  misc_RNA (1)...(19): siRNA sense strand
gagcagguguaccaggaaa

SEQ ID NO: 1443904 - RNA, 19 nt, Homo sapiens
  misc_RNA (1)...(19): siRNA sense strand
gugaagaccaugauacgua

SEQ ID NO: 1443905 - RNA, 19 nt, Homo sapiens
  misc_RNA (1)...(19): siRNA sense strand
ggaagugcccacccucaaa

SEQ ID NO: 1443906 - RNA, 19 nt, Homo sapiens
  misc_RNA (1)...(19): siRNA sense strand
ccaaugaggaccaucugua

SEQ ID NO: 1443907 - RNA, 19 nt, Homo sapiens
  misc_RNA (1)...(19): siRNA sense strand
gaucaaaggcaucgaguac

SEQ ID NO: 1443908 - RNA, 19 nt, Homo sapiens
  misc_RNA (1)...(19): siRNA sense strand
caaaggcaucgaguacuua

SEQ ID NO: 1443909 - RNA, 19 nt, Homo sapiens
  misc_RNA (1)...(19): siRNA sense strand
ggaaauugccauccucaag

SEQ ID NO: 1443910 - RNA, 19 nt, Homo sapiens
  misc_RNA (1)...(19): siRNA sense strand
aguauacccugaaggauga

SEQ ID NO: 1443911 - RNA, 19 nt, Homo sapiens
  misc_RNA (1)...(19): siRNA sense strand
ggaggaacgcucacuguca

SEQ ID NO: 1443912 - RNA, 19 nt, Homo sapiens
  misc_RNA (1)...(19): siRNA sense strand
ggcauggaguccuucauug

SEQ ID NO: 1443913 - RNA, 19 nt, Homo sapiens
  misc_RNA (1)...(19): siRNA sense strand
aaauugccauccucaagaa

SEQ ID NO: 1443914 - RNA, 19 nt, Homo sapiens
  misc_RNA (1)...(19): siRNA sense strand
gggcauggaguccuucauu

SEQ ID NO: 1443915 - RNA, 19 nt, Homo sapiens
  misc_RNA (1)...(19): siRNA sense strand
ccugaaggaugaaauugga

SEQ ID NO: 1443916 - RNA, 19 nt, Homo sapiens
  misc_RNA (1)...(19): siRNA sense strand
guacuuacacuaccagaag

SEQ ID NO: 1443917 - RNA, 19 nt, Homo sapiens
  misc_RNA (1)...(19): siRNA sense strand
ucaaguuggccuacaauga

SEQ ID NO: 1443918 - RNA, 19 nt, Homo sapiens
  misc_RNA (1)...(19): siRNA sense strand
ccuauggugucgucaaguu

SEQ ID NO: 1443919 - RNA, 19 nt, Homo sapiens
  misc_RNA (1)...(19): siRNA sense strand
cauccaccgugacaucaaa

SEQ ID NO: 1443920 - RNA, 19 nt, Homo sapiens
  misc_RNA (1)...(19): siRNA sense strand
gagcggaucauguguuuac

SEQ ID NO: 1443921 - RNA, 19 nt, Homo sapiens
  misc_RNA (1)...(19): siRNA sense strand
gcagguguaccaggaaauu

SEQ ID NO: 1443922 - RNA, 19 nt, Homo sapiens
  misc_RNA (1)...(19): siRNA sense strand
caucaagaucgcugacuuu

SEQ ID NO: 1443923 - RNA, 19 nt, Homo sapiens
  misc_RNA (1)...(19): siRNA sense strand
gaucauccaccgugacauc

SEQ ID NO: 1443924 - RNA, 19 nt, Homo sapiens
  misc_RNA (1)...(19): siRNA sense strand
gcauggaguccuucauugu

SEQ ID NO: 1443925 - RNA, 19 nt, Homo sapiens
  misc_RNA (1)...(19): siRNA sense strand
gugacgcgcuccucuccaa

SEQ ID NO: 1443926 - RNA, 19 nt, Homo sapiens
  misc_RNA (1)...(19): siRNA sense strand
acgagcggaucauguguuu

SEQ ID NO: 1443927 - RNA, 19 nt, Homo sapiens
  misc_RNA (1)...(19): siRNA sense strand
acacuauacugcuuugucu

SEQ ID NO: 1443928 - RNA, 19 nt, Homo sapiens
  misc_RNA (1)...(19): siRNA sense strand
ugguggagguccuggauga

SEQ ID NO: 1443929 - RNA, 19 nt, Homo sapiens
  misc_RNA (1)...(19): siRNA sense strand
gucagcgccuggaaacuug

SEQ ID NO: 1443930 - RNA, 19 nt, Homo sapiens
  misc_RNA (1)...(19): siRNA sense strand
ggacuugaaggaccugauc

SEQ ID NO: 1443931 - RNA, 19 nt, Homo sapiens
  misc_RNA (1)...(19): siRNA sense strand
guacaugguguucgaacug

SEQ ID NO: 1443932 - RNA, 19 nt, Homo sapiens
  misc_RNA (1)...(19): siRNA sense strand
ggccgacaguggagucuca

SEQ ID NO: 1443933 - RNA, 19 nt, Homo sapiens
  misc_RNA (1)...(19): siRNA sense strand
ccucaaaccacucucugaa

SEQ ID NO: 1443934 - RNA, 19 nt, Homo sapiens
  misc_RNA (1)...(19): siRNA sense strand
ccaggcccguuucuacuuc

SEQ ID NO: 1443935 - RNA, 19 nt, Homo sapiens
  misc_RNA (1)...(19): siRNA sense strand
cccguaugcuggacaagaa

SEQ ID NO: 1443936 - RNA, 19 nt, Homo sapiens
  misc_RNA (1)...(19): siRNA sense strand
gcaucgaguacuuacacua

SEQ ID NO: 1443937 - RNA, 19 nt, Homo sapiens
  misc_RNA (1)...(19): siRNA sense strand
ugaaggaugaaauuggaaa

SEQ ID NO: 1443938 - RNA, 19 nt, Homo sapiens
  misc_RNA (1)...(19): siRNA sense strand
uagcugaggacuugaagga

SEQ ID NO: 1443939 - RNA, 19 nt, Homo sapiens
  misc_RNA (1)...(19): siRNA sense strand
gaagugcccacccucaaac

SEQ ID NO: 1443940 - RNA, 19 nt, Homo sapiens
  misc_RNA (1)...(19): siRNA sense strand
gguggcagccuggacauga

SEQ ID NO: 1443941 - RNA, 19 nt, Homo sapiens
  misc_RNA (1)...(19): siRNA sense strand
caauaccuacuaugcaaug

SEQ ID NO: 1443942 - RNA, 19 nt, Homo sapiens
  misc_RNA (1)...(19): siRNA sense strand
acaucaagaucgcugacuu

SEQ ID NO: 1443943 - RNA, 19 nt, Homo sapiens
  misc_RNA (1)...(19): siRNA sense strand
ggaucguggugccggaaau

SEQ ID NO: 1443944 - RNA, 19 nt, Homo sapiens
  misc_RNA (1)...(19): siRNA sense strand
aaguuggccuacaaugaaa

SEQ ID NO: 1443945 - RNA, 19 nt, Homo sapiens
  misc_RNA (1)...(19): siRNA sense strand
gaagaccaugauacguaaa

SEQ ID NO: 1443946 - RNA, 19 nt, Homo sapiens
  misc_RNA (1)...(19): siRNA sense strand
cugaagaccaggcccguuu

SEQ ID NO: 1443947 - RNA, 19 nt, Homo sapiens
  misc_RNA (1)...(19): siRNA sense strand
guggcagccuggacaugaa

SEQ ID NO: 1443948 - RNA, 19 nt, Homo sapiens
  misc_RNA (1)...(19): siRNA sense strand
ugacaauaccuacuaugca

SEQ ID NO: 1443949 - RNA, 19 nt, Homo sapiens
  misc_RNA (1)...(19): siRNA sense strand
gcaagcugucucugcaaga

SEQ ID NO: 1443950 - RNA, 19 nt, Homo sapiens
  misc_RNA (1)...(19): siRNA sense strand
gaccugaucacccguaugc

SEQ ID NO: 1443951 - RNA, 19 nt, Homo sapiens
  misc_RNA (1)...(19): siRNA sense strand
acuauacugcuuugucuuu

SEQ ID NO: 1443952 - RNA, 19 nt, Homo sapiens
  misc_RNA (1)...(19): siRNA sense strand
ggcagcagcagcagcgaaa

SEQ ID NO: 1443953 - RNA, 19 nt, Homo sapiens
  misc_RNA (1)...(19): siRNA sense strand
ugugagcaaugaauucaag

SEQ ID NO: 1443954 - RNA, 19 nt, Homo sapiens
  misc_RNA (1)...(19): siRNA sense strand
ugaggaccaucuguacaug

SEQ ID NO: 1443955 - RNA, 19 nt, Homo sapiens
  misc_RNA (1)...(19): siRNA sense strand
gaaggaugaaauuggaaag

SEQ ID NO: 1443956 - RNA, 19 nt, Homo sapiens
  misc_RNA (1)...(19): siRNA sense strand
auacguaaacgcuccuuug

SEQ ID NO: 1443957 - RNA, 19 nt, Homo sapiens
  misc_RNA (1)...(19): siRNA sense strand
caaugaggaccaucuguac

SEQ ID NO: 1443958 - RNA, 19 nt, Homo sapiens
  misc_RNA (1)...(19): siRNA sense strand
uaccuacuaugcaaugaag

SEQ ID NO: 1443959 - RNA, 19 nt, Homo sapiens
  misc_RNA (1)...(19): siRNA sense strand
ggacgagcggaucaugugu

SEQ ID NO: 1443960 - RNA, 19 nt, Homo sapiens
  misc_RNA (1)...(19): siRNA sense strand
cuauacugcuuugucuuug

SEQ ID NO: 1443961 - RNA, 19 nt, Homo sapiens
  misc_RNA (1)...(19): siRNA sense strand
gugacacuauacugcuuug

SEQ ID NO: 1443962 - RNA, 19 nt, Homo sapiens
  misc_RNA (1)...(19): siRNA sense strand
ugacuuuggugugagcaau

SEQ ID NO: 1443963 - RNA, 19 nt, Homo sapiens
  misc_RNA (1)...(19): siRNA sense strand
ggugugagcaaugaauuca

SEQ ID NO: 1443964 - RNA, 19 nt, Homo sapiens
  misc_RNA (1)...(19): siRNA sense strand
cauggaguccuucauugug

SEQ ID NO: 1443965 - RNA, 19 nt, Homo sapiens
  misc_RNA (1)...(19): siRNA sense strand
gaagaccaggcccguuucu

SEQ ID NO: 1443966 - RNA, 19 nt, Homo sapiens
  misc_RNA (1)...(19): siRNA sense strand
gacgagcggaucauguguu

SEQ ID NO: 1443967 - RNA, 19 nt, Homo sapiens
  misc_RNA (1)...(19): siRNA sense strand
ugucagcgccuggaaacuu

SEQ ID NO: 1443968 - RNA, 19 nt, Homo sapiens
  misc_RNA (1)...(19): siRNA sense strand
gauacguaaacgcuccuuu

SEQ ID NO: 1443969 - RNA, 19 nt, Homo sapiens
  misc_RNA (1)...(19): siRNA sense strand
caucgaguacuuacacuac

SEQ ID NO: 1443970 - RNA, 19 nt, Homo sapiens
  misc_RNA (1)...(19): siRNA sense strand
ucacccguaugcuggacaa

SEQ ID NO: 1443971 - RNA, 19 nt, Homo sapiens
  misc_RNA (1)...(19): siRNA sense strand
cgacauagcugaggacuug

SEQ ID NO: 1443972 - RNA, 19 nt, Homo sapiens
  misc_RNA (1)...(19): siRNA sense strand
gacaauaccuacuaugcaa

SEQ ID NO: 1443973 - RNA, 19 nt, Homo sapiens
  misc_RNA (1)...(19): siRNA sense strand
gggaaggccuuggauguuu

SEQ ID NO: 1443974 - RNA, 19 nt, Homo sapiens
  misc_RNA (1)...(19): siRNA sense strand
caagaucgcugacuuuggu

SEQ ID NO: 1443975 - RNA, 19 nt, Homo sapiens
  misc_RNA (1)...(19): siRNA sense strand
gaaauugccauccucaaga

SEQ ID NO: 1443976 - RNA, 19 nt, Homo sapiens
  misc_RNA (1)...(19): siRNA sense strand
ugaagaccaugauacguaa

SEQ ID NO: 1443977 - RNA, 19 nt, Homo sapiens
  misc_RNA (1)...(19): siRNA sense strand
ucaaaccacucucugaaga

SEQ ID NO: 1443978 - RNA, 19 nt, Homo sapiens
  misc_RNA (1)...(19): siRNA sense strand
caaguuggccuacaaugaa

SEQ ID NO: 1443979 - RNA, 19 nt, Homo sapiens
  misc_RNA (1)...(19): siRNA sense strand
caaugaaggugcuguccaa

SEQ ID NO: 1443980 - RNA, 19 nt, Homo sapiens
  misc_RNA (1)...(19): siRNA sense strand
acaguaagaucaagaguca

SEQ ID NO: 1443981 - RNA, 19 nt, Homo sapiens
  misc_RNA (1)...(19): siRNA sense strand
ggaaggccuuggauguuug

SEQ ID NO: 1443982 - RNA, 19 nt, Homo sapiens
  misc_RNA (1)...(19): siRNA sense strand
ucaaaggcaucgaguacuu

SEQ ID NO: 1443983 - RNA, 19 nt, Homo sapiens
  misc_RNA (1)...(19): siRNA sense strand
gagcagguguaccaggaaa

SEQ ID NO: 1443984 - RNA, 19 nt, Homo sapiens
  misc_RNA (1)...(19): siRNA sense strand
gugaagaccaugauacgua

SEQ ID NO: 1443985 - RNA, 19 nt, Homo sapiens
  misc_RNA (1)...(19): siRNA sense strand
ggaagugcccacccucaaa

SEQ ID NO: 1443986 - RNA, 19 nt, Homo sapiens
  misc_RNA (1)...(19): siRNA sense strand
ccaaugaggaccaucugua

SEQ ID NO: 1443987 - RNA, 19 nt, Homo sapiens
  misc_RNA (1)...(19): siRNA sense strand
gaucaaaggcaucgaguac

SEQ ID NO: 1443988 - RNA, 19 nt, Homo sapiens
  misc_RNA (1)...(19): siRNA sense strand
caaaggcaucgaguacuua

SEQ ID NO: 1443989 - RNA, 19 nt, Homo sapiens
  misc_RNA (1)...(19): siRNA sense strand
ggaaauugccauccucaag

SEQ ID NO: 1443990 - RNA, 19 nt, Homo sapiens
  misc_RNA (1)...(19): siRNA sense strand
aguauacccugaaggauga

SEQ ID NO: 1443991 - RNA, 19 nt, Homo sapiens
  misc_RNA (1)...(19): siRNA sense strand
ggaggaacgcucacuguca

SEQ ID NO: 1443992 - RNA, 19 nt, Homo sapiens
  misc_RNA (1)...(19): siRNA sense strand
ggcauggaguccuucauug

SEQ ID NO: 1443993 - RNA, 19 nt, Homo sapiens
  misc_RNA (1)...(19): siRNA sense strand
aaauugccauccucaagaa

SEQ ID NO: 1443994 - RNA, 19 nt, Homo sapiens
  misc_RNA (1)...(19): siRNA sense strand
gggcauggaguccuucauu

SEQ ID NO: 1443995 - RNA, 19 nt, Homo sapiens
  misc_RNA (1)...(19): siRNA sense strand
ccugaaggaugaaauugga

SEQ ID NO: 1443996 - RNA, 19 nt, Homo sapiens
  misc_RNA (1)...(19): siRNA sense strand
guacuuacacuaccagaag

SEQ ID NO: 1443997 - RNA, 19 nt, Homo sapiens
  misc_RNA (1)...(19): siRNA sense strand
ucaaguuggccuacaauga

SEQ ID NO: 1443998 - RNA, 19 nt, Homo sapiens
  misc_RNA (1)...(19): siRNA sense strand
ccuauggugucgucaaguu

SEQ ID NO: 1443999 - RNA, 19 nt, Homo sapiens
  misc_RNA (1)...(19): siRNA sense strand
cauccaccgugacaucaaa

SEQ ID NO: 1444000 - RNA, 19 nt, Homo sapiens
  misc_RNA (1)...(19): siRNA sense strand
gagcggaucauguguuuac

SEQ ID NO: 1444001 - RNA, 19 nt, Homo sapiens
  misc_RNA (1)...(19): siRNA sense strand
gcagguguaccaggaaauu

SEQ ID NO: 1444002 - RNA, 19 nt, Homo sapiens
  misc_RNA (1)...(19): siRNA sense strand
caucaagaucgcugacuuu

SEQ ID NO: 1444003 - RNA, 19 nt, Homo sapiens
  misc_RNA (1)...(19): siRNA sense strand
gaucauccaccgugacauc

SEQ ID NO: 1444004 - RNA, 19 nt, Homo sapiens
  misc_RNA (1)...(19): siRNA sense strand
gcauggaguccuucauugu

SEQ ID NO: 1444005 - RNA, 19 nt, Homo sapiens
  misc_RNA (1)...(19): siRNA sense strand
gugacgcgcuccucuccaa

SEQ ID NO: 1444006 - RNA, 19 nt, Homo sapiens
  misc_RNA (1)...(19): siRNA sense strand
acgagcggaucauguguuu

SEQ ID NO: 1444007 - RNA, 19 nt, Homo sapiens
  misc_RNA (1)...(19): siRNA sense strand
acacuauacugcuuugucu

SEQ ID NO: 1444008 - RNA, 19 nt, Homo sapiens
  misc_RNA (1)...(19): siRNA sense strand
ugguggagguccuggauga

SEQ ID NO: 1444009 - RNA, 19 nt, Homo sapiens
  misc_RNA (1)...(19): siRNA sense strand
gucagcgccuggaaacuug

SEQ ID NO: 1444010 - RNA, 19 nt, Homo sapiens
  misc_RNA (1)...(19): siRNA sense strand
ggacuugaaggaccugauc

SEQ ID NO: 1444011 - RNA, 19 nt, Homo sapiens
  misc_RNA (1)...(19): siRNA sense strand
guacaugguguucgaacug

SEQ ID NO: 1444012 - RNA, 19 nt, Homo sapiens
  misc_RNA (1)...(19): siRNA sense strand
ggccgacaguggagucuca

SEQ ID NO: 1444013 - RNA, 19 nt, Homo sapiens
  misc_RNA (1)...(19): siRNA sense strand
ccucaaaccacucucugaa

SEQ ID NO: 1444014 - RNA, 19 nt, Homo sapiens
  misc_RNA (1)...(19): siRNA sense strand
ccaggcccguuucuacuuc

SEQ ID NO: 1444015 - RNA, 19 nt, Homo sapiens
  misc_RNA (1)...(19): siRNA sense strand
cccguaugcuggacaagaa

SEQ ID NO: 1444016 - RNA, 19 nt, Homo sapiens
  misc_RNA (1)...(19): siRNA sense strand
gcaucgaguacuuacacua

SEQ ID NO: 1444017 - RNA, 19 nt, Homo sapiens
  misc_RNA (1)...(19): siRNA sense strand
ugaaggaugaaauuggaaa

SEQ ID NO: 1444018 - RNA, 19 nt, Homo sapiens
  misc_RNA (1)...(19): siRNA sense strand
uagcugaggacuugaagga

SEQ ID NO: 1444019 - RNA, 19 nt, Homo sapiens
  misc_RNA (1)...(19): siRNA sense strand
gaagugcccacccucaaac

SEQ ID NO: 1444020 - RNA, 19 nt, Homo sapiens
  misc_RNA (1)...(19): siRNA sense strand
gguggcagccuggacauga

SEQ ID NO: 1444021 - RNA, 19 nt, Homo sapiens
  misc_RNA (1)...(19): siRNA sense strand
caauaccuacuaugcaaug

SEQ ID NO: 1444022 - RNA, 19 nt, Homo sapiens
  misc_RNA (1)...(19): siRNA sense strand
acaucaagaucgcugacuu

SEQ ID NO: 1444023 - RNA, 19 nt, Homo sapiens
  misc_RNA (1)...(19): siRNA sense strand
ggaucguggugccggaaau

SEQ ID NO: 1444024 - RNA, 19 nt, Homo sapiens
  misc_RNA (1)...(19): siRNA sense strand
aaguuggccuacaaugaaa

SEQ ID NO: 1444025 - RNA, 19 nt, Homo sapiens
  misc_RNA (1)...(19): siRNA sense strand
gaagaccaugauacguaaa

SEQ ID NO: 1444026 - RNA, 19 nt, Homo sapiens
  misc_RNA (1)...(19): siRNA sense strand
cugaagaccaggcccguuu

SEQ ID NO: 1444027 - RNA, 19 nt, Homo sapiens
  misc_RNA (1)...(19): siRNA sense strand
guggcagccuggacaugaa

SEQ ID NO: 1444028 - RNA, 19 nt, Homo sapiens
  misc_RNA (1)...(19): siRNA sense strand
ugacaauaccuacuaugca

SEQ ID NO: 1444029 - RNA, 19 nt, Homo sapiens
  misc_RNA (1)...(19): siRNA sense strand
gcaagcugucucugcaaga

SEQ ID NO: 1444030 - RNA, 19 nt, Homo sapiens
  misc_RNA (1)...(19): siRNA sense strand
gaccugaucacccguaugc

SEQ ID NO: 1444031 - RNA, 19 nt, Homo sapiens
  misc_RNA (1)...(19): siRNA sense strand
acuauacugcuuugucuuu

SEQ ID NO: 1444032 - RNA, 19 nt, Homo sapiens
  misc_RNA (1)...(19): siRNA sense strand
ggcagcagcagcagcgaaa

SEQ ID NO: 1444033 - RNA, 19 nt, Homo sapiens
  misc_RNA (1)...(19): siRNA sense strand
ugugagcaaugaauucaag

SEQ ID NO: 1444034 - RNA, 19 nt, Homo sapiens
  misc_RNA (1)...(19): siRNA sense strand
ugaggaccaucuguacaug

SEQ ID NO: 1444035 - RNA, 19 nt, Homo sapiens
  misc_RNA (1)...(19): siRNA sense strand
gaaggaugaaauuggaaag

SEQ ID NO: 1444036 - RNA, 19 nt, Homo sapiens
  misc_RNA (1)...(19): siRNA sense strand
auacguaaacgcuccuuug

SEQ ID NO: 1444037 - RNA, 19 nt, Homo sapiens
  misc_RNA (1)...(19): siRNA sense strand
caaugaggaccaucuguac

SEQ ID NO: 1444038 - RNA, 19 nt, Homo sapiens
  misc_RNA (1)...(19): siRNA sense strand
uaccuacuaugcaaugaag

SEQ ID NO: 1444039 - RNA, 19 nt, Homo sapiens
  misc_RNA (1)...(19): siRNA sense strand
ggacgagcggaucaugugu

SEQ ID NO: 1444040 - RNA, 19 nt, Homo sapiens
  misc_RNA (1)...(19): siRNA sense strand
cuauacugcuuugucuuug

SEQ ID NO: 1444041 - RNA, 19 nt, Homo sapiens
  misc_RNA (1)...(19): siRNA sense strand
gugacacuauacugcuuug

SEQ ID NO: 1444042 - RNA, 19 nt, Homo sapiens
  misc_RNA (1)...(19): siRNA sense strand
ugacuuuggugugagcaau

SEQ ID NO: 1444043 - RNA, 19 nt, Homo sapiens
  misc_RNA (1)...(19): siRNA sense strand
ggugugagcaaugaauuca

SEQ ID NO: 1444044 - RNA, 19 nt, Homo sapiens
  misc_RNA (1)...(19): siRNA sense strand
cauggaguccuucauugug

SEQ ID NO: 1444045 - RNA, 19 nt, Homo sapiens
  misc_RNA (1)...(19): siRNA sense strand
gaagaccaggcccguuucu

SEQ ID NO: 1444046 - RNA, 19 nt, Homo sapiens
  misc_RNA (1)...(19): siRNA sense strand
gacgagcggaucauguguu

SEQ ID NO: 1444047 - RNA, 19 nt, Homo sapiens
  misc_RNA (1)...(19): siRNA sense strand
ugucagcgccuggaaacuu

SEQ ID NO: 1444048 - RNA, 19 nt, Homo sapiens
  misc_RNA (1)...(19): siRNA sense strand
gauacguaaacgcuccuuu

SEQ ID NO: 1444049 - RNA, 19 nt, Homo sapiens
  misc_RNA (1)...(19): siRNA sense strand
caucgaguacuuacacuac

SEQ ID NO: 1444050 - RNA, 19 nt, Homo sapiens
  misc_RNA (1)...(19): siRNA sense strand
ucacccguaugcuggacaa

SEQ ID NO: 1444051 - RNA, 19 nt, Homo sapiens
  misc_RNA (1)...(19): siRNA sense strand
cgacauagcugaggacuug

SEQ ID NO: 1444052 - RNA, 19 nt, Homo sapiens
  misc_RNA (1)...(19): siRNA sense strand
gacaauaccuacuaugcaa

SEQ ID NO: 1444053 - RNA, 19 nt, Homo sapiens
  misc_RNA (1)...(19): siRNA sense strand
gggaaggccuuggauguuu

SEQ ID NO: 1444054 - RNA, 19 nt, Homo sapiens
  misc_RNA (1)...(19): siRNA sense strand
caagaucgcugacuuuggu

SEQ ID NO: 1444055 - RNA, 19 nt, Homo sapiens
  misc_RNA (1)...(19): siRNA sense strand
gaaauugccauccucaaga

SEQ ID NO: 1444056 - RNA, 19 nt, Homo sapiens
  misc_RNA (1)...(19): siRNA sense strand
ugaagaccaugauacguaa

SEQ ID NO: 1444057 - RNA, 19 nt, Homo sapiens
  misc_RNA (1)...(19): siRNA sense strand
ucaaaccacucucugaaga

SEQ ID NO: 1444058 - RNA, 19 nt, Homo sapiens
  misc_RNA (1)...(19): siRNA sense strand
caaguuggccuacaaugaa

SEQ ID NO: 1444059 - RNA, 19 nt, Homo sapiens
  misc_RNA (1)...(19): siRNA sense strand
caaugaaggugcuguccaa

SEQ ID NO: 1444060 - RNA, 19 nt, Homo sapiens
  misc_RNA (1)...(19): siRNA sense strand
acaguaagaucaagaguca

SEQ ID NO: 1444061 - RNA, 19 nt, Homo sapiens
  misc_RNA (1)...(19): siRNA sense strand
ggaaggccuuggauguuug

SEQ ID NO: 1444062 - RNA, 19 nt, Homo sapiens
  misc_RNA (1)...(19): siRNA sense strand
ucaaaggcaucgaguacuu

SEQ ID NO: 1444063 - RNA, 19 nt, Homo sapiens
  misc_RNA (1)...(19): siRNA sense strand
gagcagguguaccaggaaa

SEQ ID NO: 1444064 - RNA, 19 nt, Homo sapiens
  misc_RNA (1)...(19): siRNA sense strand
gugaagaccaugauacgua

SEQ ID NO: 1444065 - RNA, 19 nt, Homo sapiens
  misc_RNA (1)...(19): siRNA sense strand
ggaagugcccacccucaaa

SEQ ID NO: 1444066 - RNA, 19 nt, Homo sapiens
  misc_RNA (1)...(19): siRNA sense strand
ccaaugaggaccaucugua

SEQ ID NO: 1444067 - RNA, 19 nt, Homo sapiens
  misc_RNA (1)...(19): siRNA sense strand
gaucaaaggcaucgaguac

SEQ ID NO: 1444068 - RNA, 19 nt, Homo sapiens
  misc_RNA (1)...(19): siRNA sense strand
caaaggcaucgaguacuua

SEQ ID NO: 1444069 - RNA, 19 nt, Homo sapiens
  misc_RNA (1)...(19): siRNA sense strand
ggaaauugccauccucaag

SEQ ID NO: 1444070 - RNA, 19 nt, Homo sapiens
  misc_RNA (1)...(19): siRNA sense strand
aguauacccugaaggauga

SEQ ID NO: 1444071 - RNA, 19 nt, Homo sapiens
  misc_RNA (1)...(19): siRNA sense strand
ggaggaacgcucacuguca

SEQ ID NO: 1444072 - RNA, 19 nt, Homo sapiens
  misc_RNA (1)...(19): siRNA sense strand
ggcauggaguccuucauug

SEQ ID NO: 1444073 - RNA, 19 nt, Homo sapiens
  misc_RNA (1)...(19): siRNA sense strand
aaauugccauccucaagaa

SEQ ID NO: 1444074 - RNA, 19 nt, Homo sapiens
  misc_RNA (1)...(19): siRNA sense strand
gggcauggaguccuucauu

SEQ ID NO: 1444075 - RNA, 19 nt, Homo sapiens
  misc_RNA (1)...(19): siRNA sense strand
ccugaaggaugaaauugga

SEQ ID NO: 1444076 - RNA, 19 nt, Homo sapiens
  misc_RNA (1)...(19): siRNA sense strand
guacuuacacuaccagaag

SEQ ID NO: 1444077 - RNA, 19 nt, Homo sapiens
  misc_RNA (1)...(19): siRNA sense strand
ucaaguuggccuacaauga

SEQ ID NO: 1444078 - RNA, 19 nt, Homo sapiens
  misc_RNA (1)...(19): siRNA sense strand
ccuauggugucgucaaguu

SEQ ID NO: 1444079 - RNA, 19 nt, Homo sapiens
  misc_RNA (1)...(19): siRNA sense strand
cauccaccgugacaucaaa

SEQ ID NO: 1444080 - RNA, 19 nt, Homo sapiens
  misc_RNA (1)...(19): siRNA sense strand
gagcggaucauguguuuac

SEQ ID NO: 1444081 - RNA, 19 nt, Homo sapiens
  misc_RNA (1)...(19): siRNA sense strand
gcagguguaccaggaaauu

SEQ ID NO: 1444082 - RNA, 19 nt, Homo sapiens
  misc_RNA (1)...(19): siRNA sense strand
caucaagaucgcugacuuu

SEQ ID NO: 1444083 - RNA, 19 nt, Homo sapiens
  misc_RNA (1)...(19): siRNA sense strand
gaucauccaccgugacauc

SEQ ID NO: 1444084 - RNA, 19 nt, Homo sapiens
  misc_RNA (1)...(19): siRNA sense strand
gcauggaguccuucauugu

SEQ ID NO: 1444085 - RNA, 19 nt, Homo sapiens
  misc_RNA (1)...(19): siRNA sense strand
gugacgcgcuccucuccaa

SEQ ID NO: 1444086 - RNA, 19 nt, Homo sapiens
  misc_RNA (1)...(19): siRNA sense strand
acgagcggaucauguguuu

SEQ ID NO: 1444087 - RNA, 19 nt, Homo sapiens
  misc_RNA (1)...(19): siRNA sense strand
acacuauacugcuuugucu

SEQ ID NO: 1444088 - RNA, 19 nt, Homo sapiens
  misc_RNA (1)...(19): siRNA sense strand
ugguggagguccuggauga

SEQ ID NO: 1444089 - RNA, 19 nt, Homo sapiens
  misc_RNA (1)...(19): siRNA sense strand
gucagcgccuggaaacuug

SEQ ID NO: 1444090 - RNA, 19 nt, Homo sapiens
  misc_RNA (1)...(19): siRNA sense strand
ggacuugaaggaccugauc

SEQ ID NO: 1444091 - RNA, 19 nt, Homo sapiens
  misc_RNA (1)...(19): siRNA sense strand
guacaugguguucgaacug

SEQ ID NO: 1444092 - RNA, 19 nt, Homo sapiens
  misc_RNA (1)...(19): siRNA sense strand
ggccgacaguggagucuca

SEQ ID NO: 1444093 - RNA, 19 nt, Homo sapiens
  misc_RNA (1)...(19): siRNA sense strand
ccucaaaccacucucugaa

SEQ ID NO: 1444094 - RNA, 19 nt, Homo sapiens
  misc_RNA (1)...(19): siRNA sense strand
ccaggcccguuucuacuuc

SEQ ID NO: 1444095 - RNA, 19 nt, Homo sapiens
  misc_RNA (1)...(19): siRNA sense strand
cccguaugcuggacaagaa

SEQ ID NO: 1444096 - RNA, 19 nt, Homo sapiens
  misc_RNA (1)...(19): siRNA sense strand
gcaucgaguacuuacacua

SEQ ID NO: 1444097 - RNA, 19 nt, Homo sapiens
  misc_RNA (1)...(19): siRNA sense strand
ugaaggaugaaauuggaaa

SEQ ID NO: 1444098 - RNA, 19 nt, Homo sapiens
  misc_RNA (1)...(19): siRNA sense strand
uagcugaggacuugaagga

SEQ ID NO: 1444099 - RNA, 19 nt, Homo sapiens
  misc_RNA (1)...(19): siRNA sense strand
gaagugcccacccucaaac

SEQ ID NO: 1444100 - RNA, 19 nt, Homo sapiens
  misc_RNA (1)...(19): siRNA sense strand
gguggcagccuggacauga

SEQ ID NO: 1444101 - RNA, 19 nt, Homo sapiens
  misc_RNA (1)...(19): siRNA sense strand
caauaccuacuaugcaaug

SEQ ID NO: 1444102 - RNA, 19 nt, Homo sapiens
  misc_RNA (1)...(19): siRNA sense strand
acaucaagaucgcugacuu

SEQ ID NO: 1444103 - RNA, 19 nt, Homo sapiens
  misc_RNA (1)...(19): siRNA sense strand
ggaucguggugccggaaau

SEQ ID NO: 1444104 - RNA, 19 nt, Homo sapiens
  misc_RNA (1)...(19): siRNA sense strand
aaguuggccuacaaugaaa

SEQ ID NO: 1444105 - RNA, 19 nt, Homo sapiens
  misc_RNA (1)...(19): siRNA sense strand
gaagaccaugauacguaaa

SEQ ID NO: 1444106 - RNA, 19 nt, Homo sapiens
  misc_RNA (1)...(19): siRNA sense strand
cugaagaccaggcccguuu

SEQ ID NO: 1444107 - RNA, 19 nt, Homo sapiens
  misc_RNA (1)...(19): siRNA sense strand
guggcagccuggacaugaa

SEQ ID NO: 1444108 - RNA, 19 nt, Homo sapiens
  misc_RNA (1)...(19): siRNA sense strand
ugacaauaccuacuaugca

SEQ ID NO: 1444109 - RNA, 19 nt, Homo sapiens
  misc_RNA (1)...(19): siRNA sense strand
gcaagcugucucugcaaga

SEQ ID NO: 1444110 - RNA, 19 nt, Homo sapiens
  misc_RNA (1)...(19): siRNA sense strand
gaccugaucacccguaugc

SEQ ID NO: 1444111 - RNA, 19 nt, Homo sapiens
  misc_RNA (1)...(19): siRNA sense strand
acuauacugcuuugucuuu

SEQ ID NO: 1444112 - RNA, 19 nt, Homo sapiens
  misc_RNA (1)...(19): siRNA sense strand
ggcagcagcagcagcgaaa

SEQ ID NO: 1444113 - RNA, 19 nt, Homo sapiens
  misc_RNA (1)...(19): siRNA sense strand
ugugagcaaugaauucaag

SEQ ID NO: 1444114 - RNA, 19 nt, Homo sapiens
  misc_RNA (1)...(19): siRNA sense strand
ugaggaccaucuguacaug

SEQ ID NO: 1444115 - RNA, 19 nt, Homo sapiens
  misc_RNA (1)...(19): siRNA sense strand
gaaggaugaaauuggaaag

SEQ ID NO: 1444116 - RNA, 19 nt, Homo sapiens
  misc_RNA (1)...(19): siRNA sense strand
auacguaaacgcuccuuug

SEQ ID NO: 1444117 - RNA, 19 nt, Homo sapiens
  misc_RNA (1)...(19): siRNA sense strand
caaugaggaccaucuguac

SEQ ID NO: 1444118 - RNA, 19 nt, Homo sapiens
  misc_RNA (1)...(19): siRNA sense strand
uaccuacuaugcaaugaag

SEQ ID NO: 1444119 - RNA, 19 nt, Homo sapiens
  misc_RNA (1)...(19): siRNA sense strand
ggacgagcggaucaugugu

SEQ ID NO: 1444120 - RNA, 19 nt, Homo sapiens
  misc_RNA (1)...(19): siRNA sense strand
cuauacugcuuugucuuug

SEQ ID NO: 1444121 - RNA, 19 nt, Homo sapiens
  misc_RNA (1)...(19): siRNA sense strand
gugacacuauacugcuuug

SEQ ID NO: 1444122 - RNA, 19 nt, Homo sapiens
  misc_RNA (1)...(19): siRNA sense strand
ugacuuuggugugagcaau

SEQ ID NO: 1444123 - RNA, 19 nt, Homo sapiens
  misc_RNA (1)...(19): siRNA sense strand
ggugugagcaaugaauuca

SEQ ID NO: 1444124 - RNA, 19 nt, Homo sapiens
  misc_RNA (1)...(19): siRNA sense strand
cauggaguccuucauugug

SEQ ID NO: 1444125 - RNA, 19 nt, Homo sapiens
  misc_RNA (1)...(19): siRNA sense strand
gaagaccaggcccguuucu

SEQ ID NO: 1444126 - RNA, 19 nt, Homo sapiens
  misc_RNA (1)...(19): siRNA sense strand
gacgagcggaucauguguu

SEQ ID NO: 1444127 - RNA, 19 nt, Homo sapiens
  misc_RNA (1)...(19): siRNA sense strand
ugucagcgccuggaaacuu

SEQ ID NO: 1444128 - RNA, 19 nt, Homo sapiens
  misc_RNA (1)...(19): siRNA sense strand
gauacguaaacgcuccuuu

SEQ ID NO: 1444129 - RNA, 19 nt, Homo sapiens
  misc_RNA (1)...(19): siRNA sense strand
caucgaguacuuacacuac

SEQ ID NO: 1444130 - RNA, 19 nt, Homo sapiens
  misc_RNA (1)...(19): siRNA sense strand
ucacccguaugcuggacaa

SEQ ID NO: 1444131 - RNA, 19 nt, Homo sapiens
  misc_RNA (1)...(19): siRNA sense strand
cgacauagcugaggacuug

SEQ ID NO: 1444132 - RNA, 19 nt, Homo sapiens
  misc_RNA (1)...(19): siRNA sense strand
gacaauaccuacuaugcaa

SEQ ID NO: 1444133 - RNA, 19 nt, Homo sapiens
  misc_RNA (1)...(19): siRNA sense strand
gggaaggccuuggauguuu

SEQ ID NO: 1444134 - RNA, 19 nt, Homo sapiens
  misc_RNA (1)...(19): siRNA sense strand
caagaucgcugacuuuggu

SEQ ID NO: 1444135 - RNA, 19 nt, Homo sapiens
  misc_RNA (1)...(19): siRNA sense strand
gaaauugccauccucaaga

SEQ ID NO: 1444136 - RNA, 19 nt, Homo sapiens
  misc_RNA (1)...(19): siRNA sense strand
ugaagaccaugauacguaa

SEQ ID NO: 1444137 - RNA, 19 nt, Homo sapiens
  misc_RNA (1)...(19): siRNA sense strand
ucaaaccacucucugaaga

SEQ ID NO: 1444138 - RNA, 19 nt, Homo sapiens
  misc_RNA (1)...(19): siRNA sense strand
caaguuggccuacaaugaa

SEQ ID NO: 1444139 - RNA, 19 nt, Homo sapiens
  misc_RNA (1)...(19): siRNA sense strand
caaugaaggugcuguccaa

SEQ ID NO: 1444140 - RNA, 19 nt, Homo sapiens
  misc_RNA (1)...(19): siRNA sense strand
acaguaagaucaagaguca

SEQ ID NO: 1444141 - RNA, 19 nt, Homo sapiens
  misc_RNA (1)...(19): siRNA sense strand
ggaaggccuuggauguuug

SEQ ID NO: 1444142 - RNA, 19 nt, Homo sapiens
  misc_RNA (1)...(19): siRNA sense strand
ucaaaggcaucgaguacuu

SEQ ID NO: 1444143 - RNA, 19 nt, Homo sapiens
  misc_RNA (1)...(19): siRNA sense strand
gagcagguguaccaggaaa

SEQ ID NO: 1444144 - RNA, 19 nt, Homo sapiens
  misc_RNA (1)...(19): siRNA sense strand
gugaagaccaugauacgua

SEQ ID NO: 1444145 - RNA, 19 nt, Homo sapiens
  misc_RNA (1)...(19): siRNA sense strand
ggaagugcccacccucaaa

SEQ ID NO: 1444146 - RNA, 19 nt, Homo sapiens
  misc_RNA (1)...(19): siRNA sense strand
ccaaugaggaccaucugua

SEQ ID NO: 1444147 - RNA, 19 nt, Homo sapiens
  misc_RNA (1)...(19): siRNA sense strand
gaucaaaggcaucgaguac

SEQ ID NO: 1444148 - RNA, 19 nt, Homo sapiens
  misc_RNA (1)...(19): siRNA sense strand
caaaggcaucgaguacuua

SEQ ID NO: 1444149 - RNA, 19 nt, Homo sapiens
  misc_RNA (1)...(19): siRNA sense strand
ggaaauugccauccucaag

SEQ ID NO: 1444150 - RNA, 19 nt, Homo sapiens
  misc_RNA (1)...(19): siRNA sense strand
aguauacccugaaggauga

SEQ ID NO: 1444151 - RNA, 19 nt, Homo sapiens
  misc_RNA (1)...(19): siRNA sense strand
ggaggaacgcucacuguca

SEQ ID NO: 1444152 - RNA, 19 nt, Homo sapiens
  misc_RNA (1)...(19): siRNA sense strand
ggcauggaguccuucauug

SEQ ID NO: 1444153 - RNA, 19 nt, Homo sapiens
  misc_RNA (1)...(19): siRNA sense strand
aaauugccauccucaagaa

SEQ ID NO: 1444154 - RNA, 19 nt, Homo sapiens
  misc_RNA (1)...(19): siRNA sense strand
gggcauggaguccuucauu

SEQ ID NO: 1444155 - RNA, 19 nt, Homo sapiens
  misc_RNA (1)...(19): siRNA sense strand
ccugaaggaugaaauugga

SEQ ID NO: 1444156 - RNA, 19 nt, Homo sapiens
  misc_RNA (1)...(19): siRNA sense strand
guacuuacacuaccagaag

SEQ ID NO: 1444157 - RNA, 19 nt, Homo sapiens
  misc_RNA (1)...(19): siRNA sense strand
ucaaguuggccuacaauga

SEQ ID NO: 1444158 - RNA, 19 nt, Homo sapiens
  misc_RNA (1)...(19): siRNA sense strand
ccuauggugucgucaaguu

SEQ ID NO: 1444159 - RNA, 19 nt, Homo sapiens
  misc_RNA (1)...(19): siRNA sense strand
cauccaccgugacaucaaa

SEQ ID NO: 1444160 - RNA, 19 nt, Homo sapiens
  misc_RNA (1)...(19): siRNA sense strand
gagcggaucauguguuuac

SEQ ID NO: 1444161 - RNA, 19 nt, Homo sapiens
  misc_RNA (1)...(19): siRNA sense strand
gcagguguaccaggaaauu

SEQ ID NO: 1444162 - RNA, 19 nt, Homo sapiens
  misc_RNA (1)...(19): siRNA sense strand
caucaagaucgcugacuuu

SEQ ID NO: 1444163 - RNA, 19 nt, Homo sapiens
  misc_RNA (1)...(19): siRNA sense strand
gaucauccaccgugacauc

SEQ ID NO: 1444164 - RNA, 19 nt, Homo sapiens
  misc_RNA (1)...(19): siRNA sense strand
gcauggaguccuucauugu

SEQ ID NO: 1444165 - RNA, 19 nt, Homo sapiens
  misc_RNA (1)...(19): siRNA sense strand
gugacgcgcuccucuccaa

SEQ ID NO: 1444166 - RNA, 19 nt, Homo sapiens
  misc_RNA (1)...(19): siRNA sense strand
acgagcggaucauguguuu

SEQ ID NO: 1444167 - RNA, 19 nt, Homo sapiens
  misc_RNA (1)...(19): siRNA sense strand
acacuauacugcuuugucu

SEQ ID NO: 1444168 - RNA, 19 nt, Homo sapiens
  misc_RNA (1)...(19): siRNA sense strand
ugguggagguccuggauga

SEQ ID NO: 1444169 - RNA, 19 nt, Homo sapiens
  misc_RNA (1)...(19): siRNA sense strand
gucagcgccuggaaacuug

SEQ ID NO: 1444170 - RNA, 19 nt, Homo sapiens
  misc_RNA (1)...(19): siRNA sense strand
ggacuugaaggaccugauc

SEQ ID NO: 1444171 - RNA, 19 nt, Homo sapiens
  misc_RNA (1)...(19): siRNA sense strand
guacaugguguucgaacug

SEQ ID NO: 1444172 - RNA, 19 nt, Homo sapiens
  misc_RNA (1)...(19): siRNA sense strand
ggccgacaguggagucuca

SEQ ID NO: 1444173 - RNA, 19 nt, Homo sapiens
  misc_RNA (1)...(19): siRNA sense strand
ccucaaaccacucucugaa

SEQ ID NO: 1444174 - RNA, 19 nt, Homo sapiens
  misc_RNA (1)...(19): siRNA sense strand
ccaggcccguuucuacuuc

SEQ ID NO: 1444175 - RNA, 19 nt, Homo sapiens
  misc_RNA (1)...(19): siRNA sense strand
cccguaugcuggacaagaa

SEQ ID NO: 1444176 - RNA, 19 nt, Homo sapiens
  misc_RNA (1)...(19): siRNA sense strand
gcaucgaguacuuacacua

SEQ ID NO: 1444177 - RNA, 19 nt, Homo sapiens
  misc_RNA (1)...(19): siRNA sense strand
ugaaggaugaaauuggaaa

SEQ ID NO: 1444178 - RNA, 19 nt, Homo sapiens
  misc_RNA (1)...(19): siRNA sense strand
uagcugaggacuugaagga

SEQ ID NO: 1444179 - RNA, 19 nt, Homo sapiens
  misc_RNA (1)...(19): siRNA sense strand
gaagugcccacccucaaac

SEQ ID NO: 1444180 - RNA, 19 nt, Homo sapiens
  misc_RNA (1)...(19): siRNA sense strand
gguggcagccuggacauga

SEQ ID NO: 1444181 - RNA, 19 nt, Homo sapiens
  misc_RNA (1)...(19): siRNA sense strand
caauaccuacuaugcaaug

SEQ ID NO: 1444182 - RNA, 19 nt, Homo sapiens
  misc_RNA (1)...(19): siRNA sense strand
acaucaagaucgcugacuu

SEQ ID NO: 1444183 - RNA, 19 nt, Homo sapiens
  misc_RNA (1)...(19): siRNA sense strand
ggaucguggugccggaaau

SEQ ID NO: 1444184 - RNA, 19 nt, Homo sapiens
  misc_RNA (1)...(19): siRNA sense strand
aaguuggccuacaaugaaa

SEQ ID NO: 1444185 - RNA, 19 nt, Homo sapiens
  misc_RNA (1)...(19): siRNA sense strand
gaagaccaugauacguaaa

SEQ ID NO: 1444186 - RNA, 19 nt, Homo sapiens
  misc_RNA (1)...(19): siRNA sense strand
cugaagaccaggcccguuu

SEQ ID NO: 1444187 - RNA, 19 nt, Homo sapiens
  misc_RNA (1)...(19): siRNA sense strand
guggcagccuggacaugaa

SEQ ID NO: 1444188 - RNA, 19 nt, Homo sapiens
  misc_RNA (1)...(19): siRNA sense strand
ugacaauaccuacuaugca

SEQ ID NO: 1444189 - RNA, 19 nt, Homo sapiens
  misc_RNA (1)...(19): siRNA sense strand
gcaagcugucucugcaaga

SEQ ID NO: 1444190 - RNA, 19 nt, Homo sapiens
  misc_RNA (1)...(19): siRNA sense strand
gaccugaucacccguaugc

SEQ ID NO: 1444191 - RNA, 19 nt, Homo sapiens
  misc_RNA (1)...(19): siRNA sense strand
acuauacugcuuugucuuu

SEQ ID NO: 1444192 - RNA, 19 nt, Homo sapiens
  misc_RNA (1)...(19): siRNA sense strand
ggcagcagcagcagcgaaa

SEQ ID NO: 1444193 - RNA, 19 nt, Homo sapiens
  misc_RNA (1)...(19): siRNA sense strand
ugugagcaaugaauucaag

SEQ ID NO: 1444194 - RNA, 19 nt, Homo sapiens
  misc_RNA (1)...(19): siRNA sense strand
ugaggaccaucuguacaug

SEQ ID NO: 1444195 - RNA, 19 nt, Homo sapiens
  misc_RNA (1)...(19): siRNA sense strand
gaaggaugaaauuggaaag

SEQ ID NO: 1444196 - RNA, 19 nt, Homo sapiens
  misc_RNA (1)...(19): siRNA sense strand
auacguaaacgcuccuuug

SEQ ID NO: 1444197 - RNA, 19 nt, Homo sapiens
  misc_RNA (1)...(19): siRNA sense strand
caaugaggaccaucuguac

SEQ ID NO: 1444198 - RNA, 19 nt, Homo sapiens
  misc_RNA (1)...(19): siRNA sense strand
uaccuacuaugcaaugaag

SEQ ID NO: 1444199 - RNA, 19 nt, Homo sapiens
  misc_RNA (1)...(19): siRNA sense strand
ggacgagcggaucaugugu

SEQ ID NO: 1444200 - RNA, 19 nt, Homo sapiens
  misc_RNA (1)...(19): siRNA sense strand
cuauacugcuuugucuuug

SEQ ID NO: 1444201 - RNA, 19 nt, Homo sapiens
  misc_RNA (1)...(19): siRNA sense strand
gugacacuauacugcuuug

SEQ ID NO: 1444202 - RNA, 19 nt, Homo sapiens
  misc_RNA (1)...(19): siRNA sense strand
ugacuuuggugugagcaau

SEQ ID NO: 1444203 - RNA, 19 nt, Homo sapiens
  misc_RNA (1)...(19): siRNA sense strand
ggugugagcaaugaauuca

SEQ ID NO: 1444204 - RNA, 19 nt, Homo sapiens
  misc_RNA (1)...(19): siRNA sense strand
cauggaguccuucauugug

SEQ ID NO: 1444205 - RNA, 19 nt, Homo sapiens
  misc_RNA (1)...(19): siRNA sense strand
gaagaccaggcccguuucu

SEQ ID NO: 1444206 - RNA, 19 nt, Homo sapiens
  misc_RNA (1)...(19): siRNA sense strand
gacgagcggaucauguguu

SEQ ID NO: 1444207 - RNA, 19 nt, Homo sapiens
  misc_RNA (1)...(19): siRNA sense strand
ugucagcgccuggaaacuu

SEQ ID NO: 1444208 - RNA, 19 nt, Homo sapiens
  misc_RNA (1)...(19): siRNA sense strand
gauacguaaacgcuccuuu

SEQ ID NO: 1444209 - RNA, 19 nt, Homo sapiens
  misc_RNA (1)...(19): siRNA sense strand
caucgaguacuuacacuac

SEQ ID NO: 1444210 - RNA, 19 nt, Homo sapiens
  misc_RNA (1)...(19): siRNA sense strand
ucacccguaugcuggacaa

SEQ ID NO: 1444211 - RNA, 19 nt, Homo sapiens
  misc_RNA (1)...(19): siRNA sense strand
cgacauagcugaggacuug

SEQ ID NO: 1444212 - RNA, 19 nt, Homo sapiens
  misc_RNA (1)...(19): siRNA sense strand
gacaauaccuacuaugcaa

SEQ ID NO: 1444213 - RNA, 19 nt, Homo sapiens
  misc_RNA (1)...(19): siRNA sense strand
gggaaggccuuggauguuu

SEQ ID NO: 1444214 - RNA, 19 nt, Homo sapiens
  misc_RNA (1)...(19): siRNA sense strand
caagaucgcugacuuuggu

SEQ ID NO: 1444215 - RNA, 19 nt, Homo sapiens
  misc_RNA (1)...(19): siRNA sense strand
gaaauugccauccucaaga

SEQ ID NO: 1444216 - RNA, 19 nt, Homo sapiens
  misc_RNA (1)...(19): siRNA sense strand
ugaagaccaugauacguaa

SEQ ID NO: 1444217 - RNA, 19 nt, Homo sapiens
  misc_RNA (1)...(19): siRNA sense strand
ucaaaccacucucugaaga

SEQ ID NO: 1444218 - RNA, 19 nt, Homo sapiens
  misc_RNA (1)...(19): siRNA sense strand
caaguuggccuacaaugaa

SEQ ID NO: 1444219 - RNA, 19 nt, Homo sapiens
  misc_RNA (1)...(19): siRNA sense strand
caaugaaggugcuguccaa

SEQ ID NO: 1444220 - RNA, 19 nt, Homo sapiens
  misc_RNA (1)...(19): siRNA sense strand
acaguaagaucaagaguca

SEQ ID NO: 1444221 - RNA, 19 nt, Homo sapiens
  misc_RNA (1)...(19): siRNA sense strand
ggaaggccuuggauguuug

SEQ ID NO: 1444222 - RNA, 19 nt, Homo sapiens
  misc_RNA (1)...(19): siRNA sense strand
ucaaaggcaucgaguacuu

SEQ ID NO: 1444223 - RNA, 19 nt, Homo sapiens
  misc_RNA (1)...(19): siRNA sense strand
gagcagguguaccaggaaa

SEQ ID NO: 1444224 - RNA, 19 nt, Homo sapiens
  misc_RNA (1)...(19): siRNA sense strand
gugaagaccaugauacgua

SEQ ID NO: 1444225 - RNA, 19 nt, Homo sapiens
  misc_RNA (1)...(19): siRNA sense strand
ggaagugcccacccucaaa

SEQ ID NO: 1444226 - RNA, 19 nt, Homo sapiens
  misc_RNA (1)...(19): siRNA sense strand
ccaaugaggaccaucugua

SEQ ID NO: 1444227 - RNA, 19 nt, Homo sapiens
  misc_RNA (1)...(19): siRNA sense strand
gaucaaaggcaucgaguac

SEQ ID NO: 1444228 - RNA, 19 nt, Homo sapiens
  misc_RNA (1)...(19): siRNA sense strand
caaaggcaucgaguacuua

SEQ ID NO: 1444229 - RNA, 19 nt, Homo sapiens
  misc_RNA (1)...(19): siRNA sense strand
ggaaauugccauccucaag

SEQ ID NO: 1444230 - RNA, 19 nt, Homo sapiens
  misc_RNA (1)...(19): siRNA sense strand
aguauacccugaaggauga

SEQ ID NO: 1444231 - RNA, 19 nt, Homo sapiens
  misc_RNA (1)...(19): siRNA sense strand
ggaggaacgcucacuguca

SEQ ID NO: 1444232 - RNA, 19 nt, Homo sapiens
  misc_RNA (1)...(19): siRNA sense strand
ggcauggaguccuucauug

SEQ ID NO: 1444233 - RNA, 19 nt, Homo sapiens
  misc_RNA (1)...(19): siRNA sense strand
aaauugccauccucaagaa

SEQ ID NO: 1444234 - RNA, 19 nt, Homo sapiens
  misc_RNA (1)...(19): siRNA sense strand
gggcauggaguccuucauu

SEQ ID NO: 1444235 - RNA, 19 nt, Homo sapiens
  misc_RNA (1)...(19): siRNA sense strand
ccugaaggaugaaauugga

SEQ ID NO: 1444236 - RNA, 19 nt, Homo sapiens
  misc_RNA (1)...(19): siRNA sense strand
guacuuacacuaccagaag

SEQ ID NO: 1444237 - RNA, 19 nt, Homo sapiens
  misc_RNA (1)...(19): siRNA sense strand
ucaaguuggccuacaauga

SEQ ID NO: 1444238 - RNA, 19 nt, Homo sapiens
  misc_RNA (1)...(19): siRNA sense strand
ccuauggugucgucaaguu

SEQ ID NO: 1444239 - RNA, 19 nt, Homo sapiens
  misc_RNA (1)...(19): siRNA sense strand
cauccaccgugacaucaaa

SEQ ID NO: 1444240 - RNA, 19 nt, Homo sapiens
  misc_RNA (1)...(19): siRNA sense strand
gagcggaucauguguuuac

SEQ ID NO: 1444241 - RNA, 19 nt, Homo sapiens
  misc_RNA (1)...(19): siRNA sense strand
gcagguguaccaggaaauu

SEQ ID NO: 1444242 - RNA, 19 nt, Homo sapiens
  misc_RNA (1)...(19): siRNA sense strand
caucaagaucgcugacuuu

SEQ ID NO: 1444243 - RNA, 19 nt, Homo sapiens
  misc_RNA (1)...(19): siRNA sense strand
gaucauccaccgugacauc

SEQ ID NO: 1444244 - RNA, 19 nt, Homo sapiens
  misc_RNA (1)...(19): siRNA sense strand
gcauggaguccuucauugu

SEQ ID NO: 1444245 - RNA, 19 nt, Homo sapiens
  misc_RNA (1)...(19): siRNA sense strand
gugacgcgcuccucuccaa

SEQ ID NO: 1444246 - RNA, 19 nt, Homo sapiens
  misc_RNA (1)...(19): siRNA sense strand
acgagcggaucauguguuu

SEQ ID NO: 1444247 - RNA, 19 nt, Homo sapiens
  misc_RNA (1)...(19): siRNA sense strand
acacuauacugcuuugucu

SEQ ID NO: 1444248 - RNA, 19 nt, Homo sapiens
  misc_RNA (1)...(19): siRNA sense strand
ugguggagguccuggauga

SEQ ID NO: 1444249 - RNA, 19 nt, Homo sapiens
  misc_RNA (1)...(19): siRNA sense strand
gucagcgccuggaaacuug

SEQ ID NO: 1444250 - RNA, 19 nt, Homo sapiens
  misc_RNA (1)...(19): siRNA sense strand
ggacuugaaggaccugauc

SEQ ID NO: 1444251 - RNA, 19 nt, Homo sapiens
  misc_RNA (1)...(19): siRNA sense strand
guacaugguguucgaacug

SEQ ID NO: 1444252 - RNA, 19 nt, Homo sapiens
  misc_RNA (1)...(19): siRNA sense strand
ggccgacaguggagucuca

SEQ ID NO: 1444253 - RNA, 19 nt, Homo sapiens
  misc_RNA (1)...(19): siRNA sense strand
ccucaaaccacucucugaa

SEQ ID NO: 1444254 - RNA, 19 nt, Homo sapiens
  misc_RNA (1)...(19): siRNA sense strand
ccaggcccguuucuacuuc

SEQ ID NO: 1444255 - RNA, 19 nt, Homo sapiens
  misc_RNA (1)...(19): siRNA sense strand
cccguaugcuggacaagaa

SEQ ID NO: 1444256 - RNA, 19 nt, Homo sapiens
  misc_RNA (1)...(19): siRNA sense strand
gcaucgaguacuuacacua

SEQ ID NO: 1444257 - RNA, 19 nt, Homo sapiens
  misc_RNA (1)...(19): siRNA sense strand
ugaaggaugaaauuggaaa

SEQ ID NO: 1444258 - RNA, 19 nt, Homo sapiens
  misc_RNA (1)...(19): siRNA sense strand
uagcugaggacuugaagga

SEQ ID NO: 1444259 - RNA, 19 nt, Homo sapiens
  misc_RNA (1)...(19): siRNA sense strand
gaagugcccacccucaaac

SEQ ID NO: 1444260 - RNA, 19 nt, Homo sapiens
  misc_RNA (1)...(19): siRNA sense strand
gguggcagccuggacauga

SEQ ID NO: 1444261 - RNA, 19 nt, Homo sapiens
  misc_RNA (1)...(19): siRNA sense strand
caauaccuacuaugcaaug

SEQ ID NO: 1444262 - RNA, 19 nt, Homo sapiens
  misc_RNA (1)...(19): siRNA sense strand
acaucaagaucgcugacuu

SEQ ID NO: 1444263 - RNA, 19 nt, Homo sapiens
  misc_RNA (1)...(19): siRNA sense strand
ggaucguggugccggaaau

SEQ ID NO: 1444264 - RNA, 19 nt, Homo sapiens
  misc_RNA (1)...(19): siRNA sense strand
aaguuggccuacaaugaaa

SEQ ID NO: 1444265 - RNA, 19 nt, Homo sapiens
  misc_RNA (1)...(19): siRNA sense strand
gaagaccaugauacguaaa

SEQ ID NO: 1444266 - RNA, 19 nt, Homo sapiens
  misc_RNA (1)...(19): siRNA sense strand
cugaagaccaggcccguuu

SEQ ID NO: 1444267 - RNA, 19 nt, Homo sapiens
  misc_RNA (1)...(19): siRNA sense strand
guggcagccuggacaugaa

SEQ ID NO: 1444268 - RNA, 19 nt, Homo sapiens
  misc_RNA (1)...(19): siRNA sense strand
ugacaauaccuacuaugca

SEQ ID NO: 1444269 - RNA, 19 nt, Homo sapiens
  misc_RNA (1)...(19): siRNA sense strand
gcaagcugucucugcaaga

SEQ ID NO: 1444270 - RNA, 19 nt, Homo sapiens
  misc_RNA (1)...(19): siRNA sense strand
gaccugaucacccguaugc

SEQ ID NO: 1444271 - RNA, 19 nt, Homo sapiens
  misc_RNA (1)...(19): siRNA sense strand
acuauacugcuuugucuuu

SEQ ID NO: 1444272 - RNA, 19 nt, Homo sapiens
  misc_RNA (1)...(19): siRNA sense strand
ggcagcagcagcagcgaaa

SEQ ID NO: 1444273 - RNA, 19 nt, Homo sapiens
  misc_RNA (1)...(19): siRNA sense strand
ugugagcaaugaauucaag

SEQ ID NO: 1444274 - RNA, 19 nt, Homo sapiens
  misc_RNA (1)...(19): siRNA sense strand
ugaggaccaucuguacaug

SEQ ID NO: 1444275 - RNA, 19 nt, Homo sapiens
  misc_RNA (1)...(19): siRNA sense strand
gaaggaugaaauuggaaag

SEQ ID NO: 1444276 - RNA, 19 nt, Homo sapiens
  misc_RNA (1)...(19): siRNA sense strand
auacguaaacgcuccuuug

SEQ ID NO: 1444277 - RNA, 19 nt, Homo sapiens
  misc_RNA (1)...(19): siRNA sense strand
caaugaggaccaucuguac

SEQ ID NO: 1444278 - RNA, 19 nt, Homo sapiens
  misc_RNA (1)...(19): siRNA sense strand
uaccuacuaugcaaugaag

SEQ ID NO: 1444279 - RNA, 19 nt, Homo sapiens
  misc_RNA (1)...(19): siRNA sense strand
ggacgagcggaucaugugu

SEQ ID NO: 1444280 - RNA, 19 nt, Homo sapiens
  misc_RNA (1)...(19): siRNA sense strand
cuauacugcuuugucuuug

SEQ ID NO: 1444281 - RNA, 19 nt, Homo sapiens
  misc_RNA (1)...(19): siRNA sense strand
gugacacuauacugcuuug

SEQ ID NO: 1444282 - RNA, 19 nt, Homo sapiens
  misc_RNA (1)...(19): siRNA sense strand
ugacuuuggugugagcaau

SEQ ID NO: 1444283 - RNA, 19 nt, Homo sapiens
  misc_RNA (1)...(19): siRNA sense strand
ggugugagcaaugaauuca

SEQ ID NO: 1444284 - RNA, 19 nt, Homo sapiens
  misc_RNA (1)...(19): siRNA sense strand
cauggaguccuucauugug

SEQ ID NO: 1444285 - RNA, 19 nt, Homo sapiens
  misc_RNA (1)...(19): siRNA sense strand
gaagaccaggcccguuucu

SEQ ID NO: 1444286 - RNA, 19 nt, Homo sapiens
  misc_RNA (1)...(19): siRNA sense strand
gacgagcggaucauguguu

SEQ ID NO: 1444287 - RNA, 19 nt, Homo sapiens
  misc_RNA (1)...(19): siRNA sense strand
ugucagcgccuggaaacuu

SEQ ID NO: 1444288 - RNA, 19 nt, Homo sapiens
  misc_RNA (1)...(19): siRNA sense strand
gauacguaaacgcuccuuu

SEQ ID NO: 1444289 - RNA, 19 nt, Homo sapiens
  misc_RNA (1)...(19): siRNA sense strand
caucgaguacuuacacuac

SEQ ID NO: 1444290 - RNA, 19 nt, Homo sapiens
  misc_RNA (1)...(19): siRNA sense strand
ucacccguaugcuggacaa

SEQ ID NO: 1444291 - RNA, 19 nt, Homo sapiens
  misc_RNA (1)...(19): siRNA sense strand
gaacuacacagucaucuuu

SEQ ID NO: 1444292 - RNA, 19 nt, Homo sapiens
  misc_RNA (1)...(19): siRNA sense strand
ggacagcaguucccgaaga

SEQ ID NO: 1444293 - RNA, 19 nt, Homo sapiens
  misc_RNA (1)...(19): siRNA sense strand
gaaacucugucauucauca

SEQ ID NO: 1444294 - RNA, 19 nt, Homo sapiens
  misc_RNA (1)...(19): siRNA sense strand
ggaucaaguuuauacagua

SEQ ID NO: 1444295 - RNA, 19 nt, Homo sapiens
  misc_RNA (1)...(19): siRNA sense strand
gagaaacacuggacuucau

SEQ ID NO: 1444296 - RNA, 19 nt, Homo sapiens
  misc_RNA (1)...(19): siRNA sense strand
gaugaaugccacaacuuua

SEQ ID NO: 1444297 - RNA, 19 nt, Homo sapiens
  misc_RNA (1)...(19): siRNA sense strand
gaagcuggcaugguacuua

SEQ ID NO: 1444298 - RNA, 19 nt, Homo sapiens
  misc_RNA (1)...(19): siRNA sense strand
gaugagcccugguucacaa

SEQ ID NO: 1444299 - RNA, 19 nt, Homo sapiens
  misc_RNA (1)...(19): siRNA sense strand
acacuggacuucauuucua

SEQ ID NO: 1444300 - RNA, 19 nt, Homo sapiens
  misc_RNA (1)...(19): siRNA sense strand
agaaaucgcugucgaacau

SEQ ID NO: 1444301 - RNA, 19 nt, Homo sapiens
  misc_RNA (1)...(19): siRNA sense strand
gagccacacuuucuucaug

SEQ ID NO: 1444302 - RNA, 19 nt, Homo sapiens
  misc_RNA (1)...(19): siRNA sense strand
uagcauggaugacauugaa

SEQ ID NO: 1444303 - RNA, 19 nt, Homo sapiens
  misc_RNA (1)...(19): siRNA sense strand
gcaagaugcccauuugaug

SEQ ID NO: 1444304 - RNA, 19 nt, Homo sapiens
  misc_RNA (1)...(19): siRNA sense strand
gauguucugcagucuauua

SEQ ID NO: 1444305 - RNA, 19 nt, Homo sapiens
  misc_RNA (1)...(19): siRNA sense strand
cacaguggcugacuucuug

SEQ ID NO: 1444306 - RNA, 19 nt, Homo sapiens
  misc_RNA (1)...(19): siRNA sense strand
ggccagcgaugccguuauu

SEQ ID NO: 1444307 - RNA, 19 nt, Homo sapiens
  misc_RNA (1)...(19): siRNA sense strand
gaccaguccuuucucuuug

SEQ ID NO: 1444308 - RNA, 19 nt, Homo sapiens
  misc_RNA (1)...(19): siRNA sense strand
aaacugacauggcgaucaa

SEQ ID NO: 1444309 - RNA, 19 nt, Homo sapiens
  misc_RNA (1)...(19): siRNA sense strand
gcugaugguuucccaguug

SEQ ID NO: 1444310 - RNA, 19 nt, Homo sapiens
  misc_RNA (1)...(19): siRNA sense strand
cgagacacacuuuauauug

SEQ ID NO: 1444311 - RNA, 19 nt, Homo sapiens
  misc_RNA (1)...(19): siRNA sense strand
caaagacucgggucaggua

SEQ ID NO: 1444312 - RNA, 19 nt, Homo sapiens
  misc_RNA (1)...(19): siRNA sense strand
ccacgcagcucaauagcau

SEQ ID NO: 1444313 - RNA, 19 nt, Homo sapiens
  misc_RNA (1)...(19): siRNA sense strand
gaaaggcaagcauaaagau

SEQ ID NO: 1444314 - RNA, 19 nt, Homo sapiens
  misc_RNA (1)...(19): siRNA sense strand
uggcagggaucaaguuuau

SEQ ID NO: 1444315 - RNA, 19 nt, Homo sapiens
  misc_RNA (1)...(19): siRNA sense strand
gaacgacagcguauuacug

SEQ ID NO: 1444316 - RNA, 19 nt, Homo sapiens
  misc_RNA (1)...(19): siRNA sense strand
uuaauacugucgacuauca

SEQ ID NO: 1444317 - RNA, 19 nt, Homo sapiens
  misc_RNA (1)...(19): siRNA sense strand
ccagcgaugccguuauuua

SEQ ID NO: 1444318 - RNA, 19 nt, Homo sapiens
  misc_RNA (1)...(19): siRNA sense strand
gagacacacuuuauauugc

SEQ ID NO: 1444319 - RNA, 19 nt, Homo sapiens
  misc_RNA (1)...(19): siRNA sense strand
gaacagaaaacuccagauu

SEQ ID NO: 1444320 - RNA, 19 nt, Homo sapiens
  misc_RNA (1)...(19): siRNA sense strand
caaaggacgguuuaaggaa

SEQ ID NO: 1444321 - RNA, 19 nt, Homo sapiens
  misc_RNA (1)...(19): siRNA sense strand
gaaacacuggacuucauuu

SEQ ID NO: 1444322 - RNA, 19 nt, Homo sapiens
  misc_RNA (1)...(19): siRNA sense strand
gaucugcccuucgcacaau

SEQ ID NO: 1444323 - RNA, 19 nt, Homo sapiens
  misc_RNA (1)...(19): siRNA sense strand
cgagaaaacugugcuauga

SEQ ID NO: 1444324 - RNA, 19 nt, Homo sapiens
  misc_RNA (1)...(19): siRNA sense strand
uaccagaacuacacaguca

SEQ ID NO: 1444325 - RNA, 19 nt, Homo sapiens
  misc_RNA (1)...(19): siRNA sense strand
ucaaggcaauauccgguuu

SEQ ID NO: 1444326 - RNA, 19 nt, Homo sapiens
  misc_RNA (1)...(19): siRNA sense strand
gggaucaaguuuauacagu

SEQ ID NO: 1444327 - RNA, 19 nt, Homo sapiens
  misc_RNA (1)...(19): siRNA sense strand
ucaaucccauguguagaua

SEQ ID NO: 1444328 - RNA, 19 nt, Homo sapiens
  misc_RNA (1)...(19): siRNA sense strand
uauaaaaccuccaucgauu

SEQ ID NO: 1444329 - RNA, 19 nt, Homo sapiens
  misc_RNA (1)...(19): siRNA sense strand
gcagggaucaaguuuauac

SEQ ID NO: 1444330 - RNA, 19 nt, Homo sapiens
  misc_RNA (1)...(19): siRNA sense strand
ucaaaggacgguuuaagga

SEQ ID NO: 1444331 - RNA, 19 nt, Homo sapiens
  misc_RNA (1)...(19): siRNA sense strand
ugaguaccuuagaauauga

SEQ ID NO: 1444332 - RNA, 19 nt, Homo sapiens
  misc_RNA (1)...(19): siRNA sense strand
gcccaaaacagaaguaaua

SEQ ID NO: 1444333 - RNA, 19 nt, Homo sapiens
  misc_RNA (1)...(19): siRNA sense strand
aagcuggcaugguacuuaa

SEQ ID NO: 1444334 - RNA, 19 nt, Homo sapiens
  misc_RNA (1)...(19): siRNA sense strand
aaaucgcugucgaacauaa

SEQ ID NO: 1444335 - RNA, 19 nt, Homo sapiens
  misc_RNA (1)...(19): siRNA sense strand
ugaaaggcaagcauaaaga

SEQ ID NO: 1444336 - RNA, 19 nt, Homo sapiens
  misc_RNA (1)...(19): siRNA sense strand
gagcccugguucacaaaga

SEQ ID NO: 1444337 - RNA, 19 nt, Homo sapiens
  misc_RNA (1)...(19): siRNA sense strand
aagaaacgaugagaugguu

SEQ ID NO: 1444338 - RNA, 19 nt, Homo sapiens
  misc_RNA (1)...(19): siRNA sense strand
gaugaugaaccccuuaaua

SEQ ID NO: 1444339 - RNA, 19 nt, Homo sapiens
  misc_RNA (1)...(19): siRNA sense strand
agaccaguccuuucucuuu

SEQ ID NO: 1444340 - RNA, 19 nt, Homo sapiens
  misc_RNA (1)...(19): siRNA sense strand
guugaguaccuuagaauau

SEQ ID NO: 1444341 - RNA, 19 nt, Homo sapiens
  misc_RNA (1)...(19): siRNA sense strand
gauugaagccuacaaccau

SEQ ID NO: 1444342 - RNA, 19 nt, Homo sapiens
  misc_RNA (1)...(19): siRNA sense strand
ggagaaacacuggacuuca

SEQ ID NO: 1444343 - RNA, 19 nt, Homo sapiens
  misc_RNA (1)...(19): siRNA sense strand
cagcgaugccguuauuuau

SEQ ID NO: 1444344 - RNA, 19 nt, Homo sapiens
  misc_RNA (1)...(19): siRNA sense strand
aaaccaauguugcccucuu

SEQ ID NO: 1444345 - RNA, 19 nt, Homo sapiens
  misc_RNA (1)...(19): siRNA sense strand
gcaagcauaaagaugaaug

SEQ ID NO: 1444346 - RNA, 19 nt, Homo sapiens
  misc_RNA (1)...(19): siRNA sense strand
cacuggacuucauuucuaa

SEQ ID NO: 1444347 - RNA, 19 nt, Homo sapiens
  misc_RNA (1)...(19): siRNA sense strand
gaaaucgcugucgaacaua

SEQ ID NO: 1444348 - RNA, 19 nt, Homo sapiens
  misc_RNA (1)...(19): siRNA sense strand
acacuuucuucaugccaua

SEQ ID NO: 1444349 - RNA, 19 nt, Homo sapiens
  misc_RNA (1)...(19): siRNA sense strand
gguugaguaccuuagaaua

SEQ ID NO: 1444350 - RNA, 19 nt, Homo sapiens
  misc_RNA (1)...(19): siRNA sense strand
cagcugauguugaaaauuc

SEQ ID NO: 1444351 - RNA, 19 nt, Homo sapiens
  misc_RNA (1)...(19): siRNA sense strand
guauucaaaggacgguuua

SEQ ID NO: 1444352 - RNA, 19 nt, Homo sapiens
  misc_RNA (1)...(19): siRNA sense strand
aagcaugggugauggaucu

SEQ ID NO: 1444353 - RNA, 19 nt, Homo sapiens
  misc_RNA (1)...(19): siRNA sense strand
uuaguggccuggcaagaug

SEQ ID NO: 1444354 - RNA, 19 nt, Homo sapiens
  misc_RNA (1)...(19): siRNA sense strand
aaagaugaaugccacaacu

SEQ ID NO: 1444355 - RNA, 19 nt, Homo sapiens
  misc_RNA (1)...(19): siRNA sense strand
guugagggcagucagcuuu

SEQ ID NO: 1444356 - RNA, 19 nt, Homo sapiens
  misc_RNA (1)...(19): siRNA sense strand
gaaacugacauggcgauca

SEQ ID NO: 1444357 - RNA, 19 nt, Homo sapiens
  misc_RNA (1)...(19): siRNA sense strand
cgacagcguauuacuggaa

SEQ ID NO: 1444358 - RNA, 19 nt, Homo sapiens
  misc_RNA (1)...(19): siRNA sense strand
cucugaagcuggcauggua

SEQ ID NO: 1444359 - RNA, 19 nt, Homo sapiens
  misc_RNA (1)...(19): siRNA sense strand
gaauauggaaacuaugucu

SEQ ID NO: 1444360 - RNA, 19 nt, Homo sapiens
  misc_RNA (1)...(19): siRNA sense strand
cagcuuuccugaagaugau

SEQ ID NO: 1444361 - RNA, 19 nt, Homo sapiens
  misc_RNA (1)...(19): siRNA sense strand
agaaaacugugcuaugaaa

SEQ ID NO: 1444362 - RNA, 19 nt, Homo sapiens
  misc_RNA (1)...(19): siRNA sense strand
ccuuaauacugucgacuau

SEQ ID NO: 1444363 - RNA, 19 nt, Homo sapiens
  misc_RNA (1)...(19): siRNA sense strand
uuugaacgacagcguauua

SEQ ID NO: 1444364 - RNA, 19 nt, Homo sapiens
  misc_RNA (1)...(19): siRNA sense strand
gcauuuagcauggaugaca

SEQ ID NO: 1444365 - RNA, 19 nt, Homo sapiens
  misc_RNA (1)...(19): siRNA sense strand
ucugcugucugugcauuua

SEQ ID NO: 1444366 - RNA, 19 nt, Homo sapiens
  misc_RNA (1)...(19): siRNA sense strand
uaaaugaaaugcccaaaac

SEQ ID NO: 1444367 - RNA, 19 nt, Homo sapiens
  misc_RNA (1)...(19): siRNA sense strand
gcguauuacuggaagagau

SEQ ID NO: 1444368 - RNA, 19 nt, Homo sapiens
  misc_RNA (1)...(19): siRNA sense strand
ugucauucaucaaaucuca

SEQ ID NO: 1444369 - RNA, 19 nt, Homo sapiens
  misc_RNA (1)...(19): siRNA sense strand
gaagacaaagugccaaagc

SEQ ID NO: 1444370 - RNA, 19 nt, Homo sapiens
  misc_RNA (1)...(19): siRNA sense strand
aaccaauguugcccucuuu

SEQ ID NO: 1444371 - RNA, 19 nt, Homo sapiens
  misc_RNA (1)...(19): siRNA sense strand
uugaguaccuuagaauaug

SEQ ID NO: 1444372 - RNA, 19 nt, Homo sapiens
  misc_RNA (1)...(19): siRNA sense strand
gaaugccacaacuuuauca

SEQ ID NO: 1444373 - RNA, 19 nt, Homo sapiens
  misc_RNA (1)...(19): siRNA sense strand
agaugaaugccacaacuuu

SEQ ID NO: 1444374 - RNA, 19 nt, Homo sapiens
  misc_RNA (1)...(19): siRNA sense strand
ugucgacuaucacuauuca

SEQ ID NO: 1444375 - RNA, 19 nt, Homo sapiens
  misc_RNA (1)...(19): siRNA sense strand
uuaaaguucuggcaaagac

SEQ ID NO: 1444376 - RNA, 19 nt, Homo sapiens
  misc_RNA (1)...(19): siRNA sense strand
ugacauggcgaucaagaca

SEQ ID NO: 1444377 - RNA, 19 nt, Homo sapiens
  misc_RNA (1)...(19): siRNA sense strand
ccaguccuuucucuuugaa

SEQ ID NO: 1444378 - RNA, 19 nt, Homo sapiens
  misc_RNA (1)...(19): siRNA sense strand
gcauucaaucccaugugua

SEQ ID NO: 1444379 - RNA, 19 nt, Homo sapiens
  misc_RNA (1)...(19): siRNA sense strand
caagaaacgaugagauggu

SEQ ID NO: 1444380 - RNA, 19 nt, Homo sapiens
  misc_RNA (1)...(19): siRNA sense strand
aaggcaagcauaaagauga

SEQ ID NO: 1444381 - RNA, 19 nt, Homo sapiens
  misc_RNA (1)...(19): siRNA sense strand
caucuuuguuggcucugaa

SEQ ID NO: 1444382 - RNA, 19 nt, Homo sapiens
  misc_RNA (1)...(19): siRNA sense strand
uaaaggcucggcugaacug

SEQ ID NO: 1444383 - RNA, 19 nt, Homo sapiens
  misc_RNA (1)...(19): siRNA sense strand
gaugggaagcuguauucug

SEQ ID NO: 1444384 - RNA, 19 nt, Homo sapiens
  misc_RNA (1)...(19): siRNA sense strand
gagaaaucgcugucgaaca

SEQ ID NO: 1444385 - RNA, 19 nt, Homo sapiens
  misc_RNA (1)...(19): siRNA sense strand
aggcaagcauaaagaugaa

SEQ ID NO: 1444386 - RNA, 19 nt, Homo sapiens
  misc_RNA (1)...(19): siRNA sense strand
cuacacagucaucuuuguu

SEQ ID NO: 1444387 - RNA, 19 nt, Homo sapiens
  misc_RNA (1)...(19): siRNA sense strand
ggacgcccuucaggcaaug

SEQ ID NO: 1444388 - RNA, 19 nt, Homo sapiens
  misc_RNA (1)...(19): siRNA sense strand
guucugcagucuauuacag

SEQ ID NO: 1444389 - RNA, 19 nt, Homo sapiens
  misc_RNA (1)...(19): siRNA sense strand
gacagcaguucccgaagac

SEQ ID NO: 1444390 - RNA, 19 nt, Homo sapiens
  misc_RNA (1)...(19): siRNA sense strand
guucugcugucugugcauu

SEQ ID NO: 1444391 - RNA, 19 nt, Homo sapiens
  misc_RNA (1)...(19): siRNA sense strand
gaacuacacagucaucuuu

SEQ ID NO: 1444392 - RNA, 19 nt, Homo sapiens
  misc_RNA (1)...(19): siRNA sense strand
ggacagcaguucccgaaga

SEQ ID NO: 1444393 - RNA, 19 nt, Homo sapiens
  misc_RNA (1)...(19): siRNA sense strand
gaaacucugucauucauca

SEQ ID NO: 1444394 - RNA, 19 nt, Homo sapiens
  misc_RNA (1)...(19): siRNA sense strand
ggaucaaguuuauacagua

SEQ ID NO: 1444395 - RNA, 19 nt, Homo sapiens
  misc_RNA (1)...(19): siRNA sense strand
gagaaacacuggacuucau

SEQ ID NO: 1444396 - RNA, 19 nt, Homo sapiens
  misc_RNA (1)...(19): siRNA sense strand
gaugaaugccacaacuuua

SEQ ID NO: 1444397 - RNA, 19 nt, Homo sapiens
  misc_RNA (1)...(19): siRNA sense strand
gaagcuggcaugguacuua

SEQ ID NO: 1444398 - RNA, 19 nt, Homo sapiens
  misc_RNA (1)...(19): siRNA sense strand
gaugagcccugguucacaa

SEQ ID NO: 1444399 - RNA, 19 nt, Homo sapiens
  misc_RNA (1)...(19): siRNA sense strand
acacuggacuucauuucua

SEQ ID NO: 1444400 - RNA, 19 nt, Homo sapiens
  misc_RNA (1)...(19): siRNA sense strand
agaaaucgcugucgaacau

SEQ ID NO: 1444401 - RNA, 19 nt, Homo sapiens
  misc_RNA (1)...(19): siRNA sense strand
gagccacacuuucuucaug

SEQ ID NO: 1444402 - RNA, 19 nt, Homo sapiens
  misc_RNA (1)...(19): siRNA sense strand
uagcauggaugacauugaa

SEQ ID NO: 1444403 - RNA, 19 nt, Homo sapiens
  misc_RNA (1)...(19): siRNA sense strand
gcaagaugcccauuugaug

SEQ ID NO: 1444404 - RNA, 19 nt, Homo sapiens
  misc_RNA (1)...(19): siRNA sense strand
gauguucugcagucuauua

SEQ ID NO: 1444405 - RNA, 19 nt, Homo sapiens
  misc_RNA (1)...(19): siRNA sense strand
cacaguggcugacuucuug

SEQ ID NO: 1444406 - RNA, 19 nt, Homo sapiens
  misc_RNA (1)...(19): siRNA sense strand
ggccagcgaugccguuauu

SEQ ID NO: 1444407 - RNA, 19 nt, Homo sapiens
  misc_RNA (1)...(19): siRNA sense strand
gaccaguccuuucucuuug

SEQ ID NO: 1444408 - RNA, 19 nt, Homo sapiens
  misc_RNA (1)...(19): siRNA sense strand
aaacugacauggcgaucaa

SEQ ID NO: 1444409 - RNA, 19 nt, Homo sapiens
  misc_RNA (1)...(19): siRNA sense strand
gcugaugguuucccaguug

SEQ ID NO: 1444410 - RNA, 19 nt, Homo sapiens
  misc_RNA (1)...(19): siRNA sense strand
cgagacacacuuuauauug

SEQ ID NO: 1444411 - RNA, 19 nt, Homo sapiens
  misc_RNA (1)...(19): siRNA sense strand
caaagacucgggucaggua

SEQ ID NO: 1444412 - RNA, 19 nt, Homo sapiens
  misc_RNA (1)...(19): siRNA sense strand
ccacgcagcucaauagcau

SEQ ID NO: 1444413 - RNA, 19 nt, Homo sapiens
  misc_RNA (1)...(19): siRNA sense strand
gaaaggcaagcauaaagau

SEQ ID NO: 1444414 - RNA, 19 nt, Homo sapiens
  misc_RNA (1)...(19): siRNA sense strand
uggcagggaucaaguuuau

SEQ ID NO: 1444415 - RNA, 19 nt, Homo sapiens
  misc_RNA (1)...(19): siRNA sense strand
gaacgacagcguauuacug

SEQ ID NO: 1444416 - RNA, 19 nt, Homo sapiens
  misc_RNA (1)...(19): siRNA sense strand
uuaauacugucgacuauca

SEQ ID NO: 1444417 - RNA, 19 nt, Homo sapiens
  misc_RNA (1)...(19): siRNA sense strand
ccagcgaugccguuauuua

SEQ ID NO: 1444418 - RNA, 19 nt, Homo sapiens
  misc_RNA (1)...(19): siRNA sense strand
gagacacacuuuauauugc

SEQ ID NO: 1444419 - RNA, 19 nt, Homo sapiens
  misc_RNA (1)...(19): siRNA sense strand
gaacagaaaacuccagauu

SEQ ID NO: 1444420 - RNA, 19 nt, Homo sapiens
  misc_RNA (1)...(19): siRNA sense strand
caaaggacgguuuaaggaa

SEQ ID NO: 1444421 - RNA, 19 nt, Homo sapiens
  misc_RNA (1)...(19): siRNA sense strand
gaaacacuggacuucauuu

SEQ ID NO: 1444422 - RNA, 19 nt, Homo sapiens
  misc_RNA (1)...(19): siRNA sense strand
gaucugcccuucgcacaau

SEQ ID NO: 1444423 - RNA, 19 nt, Homo sapiens
  misc_RNA (1)...(19): siRNA sense strand
cgagaaaacugugcuauga

SEQ ID NO: 1444424 - RNA, 19 nt, Homo sapiens
  misc_RNA (1)...(19): siRNA sense strand
uaccagaacuacacaguca

SEQ ID NO: 1444425 - RNA, 19 nt, Homo sapiens
  misc_RNA (1)...(19): siRNA sense strand
ucaaggcaauauccgguuu

SEQ ID NO: 1444426 - RNA, 19 nt, Homo sapiens
  misc_RNA (1)...(19): siRNA sense strand
gggaucaaguuuauacagu

SEQ ID NO: 1444427 - RNA, 19 nt, Homo sapiens
  misc_RNA (1)...(19): siRNA sense strand
ucaaucccauguguagaua

SEQ ID NO: 1444428 - RNA, 19 nt, Homo sapiens
  misc_RNA (1)...(19): siRNA sense strand
uauaaaaccuccaucgauu

SEQ ID NO: 1444429 - RNA, 19 nt, Homo sapiens
  misc_RNA (1)...(19): siRNA sense strand
gcagggaucaaguuuauac

SEQ ID NO: 1444430 - RNA, 19 nt, Homo sapiens
  misc_RNA (1)...(19): siRNA sense strand
ucaaaggacgguuuaagga

SEQ ID NO: 1444431 - RNA, 19 nt, Homo sapiens
  misc_RNA (1)...(19): siRNA sense strand
ugaguaccuuagaauauga

SEQ ID NO: 1444432 - RNA, 19 nt, Homo sapiens
  misc_RNA (1)...(19): siRNA sense strand
gcccaaaacagaaguaaua

SEQ ID NO: 1444433 - RNA, 19 nt, Homo sapiens
  misc_RNA (1)...(19): siRNA sense strand
aagcuggcaugguacuuaa

SEQ ID NO: 1444434 - RNA, 19 nt, Homo sapiens
  misc_RNA (1)...(19): siRNA sense strand
aaaucgcugucgaacauaa

SEQ ID NO: 1444435 - RNA, 19 nt, Homo sapiens
  misc_RNA (1)...(19): siRNA sense strand
ugaaaggcaagcauaaaga

SEQ ID NO: 1444436 - RNA, 19 nt, Homo sapiens
  misc_RNA (1)...(19): siRNA sense strand
gagcccugguucacaaaga

SEQ ID NO: 1444437 - RNA, 19 nt, Homo sapiens
  misc_RNA (1)...(19): siRNA sense strand
aagaaacgaugagaugguu

SEQ ID NO: 1444438 - RNA, 19 nt, Homo sapiens
  misc_RNA (1)...(19): siRNA sense strand
gaugaugaaccccuuaaua

SEQ ID NO: 1444439 - RNA, 19 nt, Homo sapiens
  misc_RNA (1)...(19): siRNA sense strand
agaccaguccuuucucuuu

SEQ ID NO: 1444440 - RNA, 19 nt, Homo sapiens
  misc_RNA (1)...(19): siRNA sense strand
guugaguaccuuagaauau

SEQ ID NO: 1444441 - RNA, 19 nt, Homo sapiens
  misc_RNA (1)...(19): siRNA sense strand
gauugaagccuacaaccau

SEQ ID NO: 1444442 - RNA, 19 nt, Homo sapiens
  misc_RNA (1)...(19): siRNA sense strand
ggagaaacacuggacuuca

SEQ ID NO: 1444443 - RNA, 19 nt, Homo sapiens
  misc_RNA (1)...(19): siRNA sense strand
cagcgaugccguuauuuau

SEQ ID NO: 1444444 - RNA, 19 nt, Homo sapiens
  misc_RNA (1)...(19): siRNA sense strand
aaaccaauguugcccucuu

SEQ ID NO: 1444445 - RNA, 19 nt, Homo sapiens
  misc_RNA (1)...(19): siRNA sense strand
gcaagcauaaagaugaaug

SEQ ID NO: 1444446 - RNA, 19 nt, Homo sapiens
  misc_RNA (1)...(19): siRNA sense strand
cacuggacuucauuucuaa

SEQ ID NO: 1444447 - RNA, 19 nt, Homo sapiens
  misc_RNA (1)...(19): siRNA sense strand
gaaaucgcugucgaacaua

SEQ ID NO: 1444448 - RNA, 19 nt, Homo sapiens
  misc_RNA (1)...(19): siRNA sense strand
acacuuucuucaugccaua

SEQ ID NO: 1444449 - RNA, 19 nt, Homo sapiens
  misc_RNA (1)...(19): siRNA sense strand
gguugaguaccuuagaaua

SEQ ID NO: 1444450 - RNA, 19 nt, Homo sapiens
  misc_RNA (1)...(19): siRNA sense strand
cagcugauguugaaaauuc

SEQ ID NO: 1444451 - RNA, 19 nt, Homo sapiens
  misc_RNA (1)...(19): siRNA sense strand
guauucaaaggacgguuua

SEQ ID NO: 1444452 - RNA, 19 nt, Homo sapiens
  misc_RNA (1)...(19): siRNA sense strand
aagcaugggugauggaucu

SEQ ID NO: 1444453 - RNA, 19 nt, Homo sapiens
  misc_RNA (1)...(19): siRNA sense strand
uuaguggccuggcaagaug

SEQ ID NO: 1444454 - RNA, 19 nt, Homo sapiens
  misc_RNA (1)...(19): siRNA sense strand
aaagaugaaugccacaacu

SEQ ID NO: 1444455 - RNA, 19 nt, Homo sapiens
  misc_RNA (1)...(19): siRNA sense strand
guugagggcagucagcuuu

SEQ ID NO: 1444456 - RNA, 19 nt, Homo sapiens
  misc_RNA (1)...(19): siRNA sense strand
gaaacugacauggcgauca

SEQ ID NO: 1444457 - RNA, 19 nt, Homo sapiens
  misc_RNA (1)...(19): siRNA sense strand
cgacagcguauuacuggaa

SEQ ID NO: 1444458 - RNA, 19 nt, Homo sapiens
  misc_RNA (1)...(19): siRNA sense strand
cucugaagcuggcauggua

SEQ ID NO: 1444459 - RNA, 19 nt, Homo sapiens
  misc_RNA (1)...(19): siRNA sense strand
gaauauggaaacuaugucu

SEQ ID NO: 1444460 - RNA, 19 nt, Homo sapiens
  misc_RNA (1)...(19): siRNA sense strand
cagcuuuccugaagaugau

SEQ ID NO: 1444461 - RNA, 19 nt, Homo sapiens
  misc_RNA (1)...(19): siRNA sense strand
agaaaacugugcuaugaaa

SEQ ID NO: 1444462 - RNA, 19 nt, Homo sapiens
  misc_RNA (1)...(19): siRNA sense strand
ccuuaauacugucgacuau

SEQ ID NO: 1444463 - RNA, 19 nt, Homo sapiens
  misc_RNA (1)...(19): siRNA sense strand
uuugaacgacagcguauua

SEQ ID NO: 1444464 - RNA, 19 nt, Homo sapiens
  misc_RNA (1)...(19): siRNA sense strand
gcauuuagcauggaugaca

SEQ ID NO: 1444465 - RNA, 19 nt, Homo sapiens
  misc_RNA (1)...(19): siRNA sense strand
ucugcugucugugcauuua

SEQ ID NO: 1444466 - RNA, 19 nt, Homo sapiens
  misc_RNA (1)...(19): siRNA sense strand
uaaaugaaaugcccaaaac

SEQ ID NO: 1444467 - RNA, 19 nt, Homo sapiens
  misc_RNA (1)...(19): siRNA sense strand
gcguauuacuggaagagau

SEQ ID NO: 1444468 - RNA, 19 nt, Homo sapiens
  misc_RNA (1)...(19): siRNA sense strand
ugucauucaucaaaucuca

SEQ ID NO: 1444469 - RNA, 19 nt, Homo sapiens
  misc_RNA (1)...(19): siRNA sense strand
gaagacaaagugccaaagc

SEQ ID NO: 1444470 - RNA, 19 nt, Homo sapiens
  misc_RNA (1)...(19): siRNA sense strand
aaccaauguugcccucuuu

SEQ ID NO: 1444471 - RNA, 19 nt, Homo sapiens
  misc_RNA (1)...(19): siRNA sense strand
uugaguaccuuagaauaug

SEQ ID NO: 1444472 - RNA, 19 nt, Homo sapiens
  misc_RNA (1)...(19): siRNA sense strand
gaaugccacaacuuuauca

SEQ ID NO: 1444473 - RNA, 19 nt, Homo sapiens
  misc_RNA (1)...(19): siRNA sense strand
agaugaaugccacaacuuu

SEQ ID NO: 1444474 - RNA, 19 nt, Homo sapiens
  misc_RNA (1)...(19): siRNA sense strand
ugucgacuaucacuauuca

SEQ ID NO: 1444475 - RNA, 19 nt, Homo sapiens
  misc_RNA (1)...(19): siRNA sense strand
uuaaaguucuggcaaagac

SEQ ID NO: 1444476 - RNA, 19 nt, Homo sapiens
  misc_RNA (1)...(19): siRNA sense strand
ugacauggcgaucaagaca

SEQ ID NO: 1444477 - RNA, 19 nt, Homo sapiens
  misc_RNA (1)...(19): siRNA sense strand
ccaguccuuucucuuugaa

SEQ ID NO: 1444478 - RNA, 19 nt, Homo sapiens
  misc_RNA (1)...(19): siRNA sense strand
gcauucaaucccaugugua

SEQ ID NO: 1444479 - RNA, 19 nt, Homo sapiens
  misc_RNA (1)...(19): siRNA sense strand
caagaaacgaugagauggu

SEQ ID NO: 1444480 - RNA, 19 nt, Homo sapiens
  misc_RNA (1)...(19): siRNA sense strand
aaggcaagcauaaagauga

SEQ ID NO: 1444481 - RNA, 19 nt, Homo sapiens
  misc_RNA (1)...(19): siRNA sense strand
caucuuuguuggcucugaa

SEQ ID NO: 1444482 - RNA, 19 nt, Homo sapiens
  misc_RNA (1)...(19): siRNA sense strand
uaaaggcucggcugaacug

SEQ ID NO: 1444483 - RNA, 19 nt, Homo sapiens
  misc_RNA (1)...(19): siRNA sense strand
gaugggaagcuguauucug

SEQ ID NO: 1444484 - RNA, 19 nt, Homo sapiens
  misc_RNA (1)...(19): siRNA sense strand
gagaaaucgcugucgaaca

SEQ ID NO: 1444485 - RNA, 19 nt, Homo sapiens
  misc_RNA (1)...(19): siRNA sense strand
aggcaagcauaaagaugaa

SEQ ID NO: 1444486 - RNA, 19 nt, Homo sapiens
  misc_RNA (1)...(19): siRNA sense strand
cuacacagucaucuuuguu

SEQ ID NO: 1444487 - RNA, 19 nt, Homo sapiens
  misc_RNA (1)...(19): siRNA sense strand
ggacgcccuucaggcaaug

SEQ ID NO: 1444488 - RNA, 19 nt, Homo sapiens
  misc_RNA (1)...(19): siRNA sense strand
guucugcagucuauuacag

SEQ ID NO: 1444489 - RNA, 19 nt, Homo sapiens
  misc_RNA (1)...(19): siRNA sense strand
gacagcaguucccgaagac

SEQ ID NO: 1444490 - RNA, 19 nt, Homo sapiens
  misc_RNA (1)...(19): siRNA sense strand
guucugcugucugugcauu

SEQ ID NO: 1444491 - RNA, 19 nt, Homo sapiens
  misc_RNA (1)...(19): siRNA sense strand
gaacuacacagucaucuuu

SEQ ID NO: 1444492 - RNA, 19 nt, Homo sapiens
  misc_RNA (1)...(19): siRNA sense strand
ggacagcaguucccgaaga

SEQ ID NO: 1444493 - RNA, 19 nt, Homo sapiens
  misc_RNA (1)...(19): siRNA sense strand
gaaacucugucauucauca

SEQ ID NO: 1444494 - RNA, 19 nt, Homo sapiens
  misc_RNA (1)...(19): siRNA sense strand
ggaucaaguuuauacagua

SEQ ID NO: 1444495 - RNA, 19 nt, Homo sapiens
  misc_RNA (1)...(19): siRNA sense strand
gagaaacacuggacuucau

SEQ ID NO: 1444496 - RNA, 19 nt, Homo sapiens
  misc_RNA (1)...(19): siRNA sense strand
gaugaaugccacaacuuua

SEQ ID NO: 1444497 - RNA, 19 nt, Homo sapiens
  misc_RNA (1)...(19): siRNA sense strand
gaagcuggcaugguacuua

SEQ ID NO: 1444498 - RNA, 19 nt, Homo sapiens
  misc_RNA (1)...(19): siRNA sense strand
gaugagcccugguucacaa

SEQ ID NO: 1444499 - RNA, 19 nt, Homo sapiens
  misc_RNA (1)...(19): siRNA sense strand
acacuggacuucauuucua

SEQ ID NO: 1444500 - RNA, 19 nt, Homo sapiens
  misc_RNA (1)...(19): siRNA sense strand
agaaaucgcugucgaacau

SEQ ID NO: 1444501 - RNA, 19 nt, Homo sapiens
  misc_RNA (1)...(19): siRNA sense strand
gagccacacuuucuucaug

SEQ ID NO: 1444502 - RNA, 19 nt, Homo sapiens
  misc_RNA (1)...(19): siRNA sense strand
uagcauggaugacauugaa

SEQ ID NO: 1444503 - RNA, 19 nt, Homo sapiens
  misc_RNA (1)...(19): siRNA sense strand
gcaagaugcccauuugaug

SEQ ID NO: 1444504 - RNA, 19 nt, Homo sapiens
  misc_RNA (1)...(19): siRNA sense strand
gauguucugcagucuauua

SEQ ID NO: 1444505 - RNA, 19 nt, Homo sapiens
  misc_RNA (1)...(19): siRNA sense strand
cacaguggcugacuucuug

SEQ ID NO: 1444506 - RNA, 19 nt, Homo sapiens
  misc_RNA (1)...(19): siRNA sense strand
ggccagcgaugccguuauu

SEQ ID NO: 1444507 - RNA, 19 nt, Homo sapiens
  misc_RNA (1)...(19): siRNA sense strand
gaccaguccuuucucuuug

SEQ ID NO: 1444508 - RNA, 19 nt, Homo sapiens
  misc_RNA (1)...(19): siRNA sense strand
aaacugacauggcgaucaa

SEQ ID NO: 1444509 - RNA, 19 nt, Homo sapiens
  misc_RNA (1)...(19): siRNA sense strand
gcugaugguuucccaguug

SEQ ID NO: 1444510 - RNA, 19 nt, Homo sapiens
  misc_RNA (1)...(19): siRNA sense strand
cgagacacacuuuauauug

SEQ ID NO: 1444511 - RNA, 19 nt, Homo sapiens
  misc_RNA (1)...(19): siRNA sense strand
caaagacucgggucaggua

SEQ ID NO: 1444512 - RNA, 19 nt, Homo sapiens
  misc_RNA (1)...(19): siRNA sense strand
ccacgcagcucaauagcau

SEQ ID NO: 1444513 - RNA, 19 nt, Homo sapiens
  misc_RNA (1)...(19): siRNA sense strand
gaaaggcaagcauaaagau

SEQ ID NO: 1444514 - RNA, 19 nt, Homo sapiens
  misc_RNA (1)...(19): siRNA sense strand
uggcagggaucaaguuuau

SEQ ID NO: 1444515 - RNA, 19 nt, Homo sapiens
  misc_RNA (1)...(19): siRNA sense strand
gaacgacagcguauuacug

SEQ ID NO: 1444516 - RNA, 19 nt, Homo sapiens
  misc_RNA (1)...(19): siRNA sense strand
uuaauacugucgacuauca

SEQ ID NO: 1444517 - RNA, 19 nt, Homo sapiens
  misc_RNA (1)...(19): siRNA sense strand
ccagcgaugccguuauuua

SEQ ID NO: 1444518 - RNA, 19 nt, Homo sapiens
  misc_RNA (1)...(19): siRNA sense strand
gagacacacuuuauauugc

SEQ ID NO: 1444519 - RNA, 19 nt, Homo sapiens
  misc_RNA (1)...(19): siRNA sense strand
gaacagaaaacuccagauu

SEQ ID NO: 1444520 - RNA, 19 nt, Homo sapiens
  misc_RNA (1)...(19): siRNA sense strand
caaaggacgguuuaaggaa

SEQ ID NO: 1444521 - RNA, 19 nt, Homo sapiens
  misc_RNA (1)...(19): siRNA sense strand
gaaacacuggacuucauuu

SEQ ID NO: 1444522 - RNA, 19 nt, Homo sapiens
  misc_RNA (1)...(19): siRNA sense strand
gaucugcccuucgcacaau

SEQ ID NO: 1444523 - RNA, 19 nt, Homo sapiens
  misc_RNA (1)...(19): siRNA sense strand
cgagaaaacugugcuauga

SEQ ID NO: 1444524 - RNA, 19 nt, Homo sapiens
  misc_RNA (1)...(19): siRNA sense strand
uaccagaacuacacaguca

SEQ ID NO: 1444525 - RNA, 19 nt, Homo sapiens
  misc_RNA (1)...(19): siRNA sense strand
ucaaggcaauauccgguuu

SEQ ID NO: 1444526 - RNA, 19 nt, Homo sapiens
  misc_RNA (1)...(19): siRNA sense strand
gggaucaaguuuauacagu

SEQ ID NO: 1444527 - RNA, 19 nt, Homo sapiens
  misc_RNA (1)...(19): siRNA sense strand
ucaaucccauguguagaua

SEQ ID NO: 1444528 - RNA, 19 nt, Homo sapiens
  misc_RNA (1)...(19): siRNA sense strand
uauaaaaccuccaucgauu

SEQ ID NO: 1444529 - RNA, 19 nt, Homo sapiens
  misc_RNA (1)...(19): siRNA sense strand
gcagggaucaaguuuauac

SEQ ID NO: 1444530 - RNA, 19 nt, Homo sapiens
  misc_RNA (1)...(19): siRNA sense strand
ucaaaggacgguuuaagga

SEQ ID NO: 1444531 - RNA, 19 nt, Homo sapiens
  misc_RNA (1)...(19): siRNA sense strand
ugaguaccuuagaauauga

SEQ ID NO: 1444532 - RNA, 19 nt, Homo sapiens
  misc_RNA (1)...(19): siRNA sense strand
gcccaaaacagaaguaaua

SEQ ID NO: 1444533 - RNA, 19 nt, Homo sapiens
  misc_RNA (1)...(19): siRNA sense strand
aagcuggcaugguacuuaa

SEQ ID NO: 1444534 - RNA, 19 nt, Homo sapiens
  misc_RNA (1)...(19): siRNA sense strand
aaaucgcugucgaacauaa

SEQ ID NO: 1444535 - RNA, 19 nt, Homo sapiens
  misc_RNA (1)...(19): siRNA sense strand
ugaaaggcaagcauaaaga

SEQ ID NO: 1444536 - RNA, 19 nt, Homo sapiens
  misc_RNA (1)...(19): siRNA sense strand
gagcccugguucacaaaga

SEQ ID NO: 1444537 - RNA, 19 nt, Homo sapiens
  misc_RNA (1)...(19): siRNA sense strand
aagaaacgaugagaugguu

SEQ ID NO: 1444538 - RNA, 19 nt, Homo sapiens
  misc_RNA (1)...(19): siRNA sense strand
gaugaugaaccccuuaaua

SEQ ID NO: 1444539 - RNA, 19 nt, Homo sapiens
  misc_RNA (1)...(19): siRNA sense strand
agaccaguccuuucucuuu

SEQ ID NO: 1444540 - RNA, 19 nt, Homo sapiens
  misc_RNA (1)...(19): siRNA sense strand
guugaguaccuuagaauau

SEQ ID NO: 1444541 - RNA, 19 nt, Homo sapiens
  misc_RNA (1)...(19): siRNA sense strand
gauugaagccuacaaccau

SEQ ID NO: 1444542 - RNA, 19 nt, Homo sapiens
  misc_RNA (1)...(19): siRNA sense strand
ggagaaacacuggacuuca

SEQ ID NO: 1444543 - RNA, 19 nt, Homo sapiens
  misc_RNA (1)...(19): siRNA sense strand
cagcgaugccguuauuuau

SEQ ID NO: 1444544 - RNA, 19 nt, Homo sapiens
  misc_RNA (1)...(19): siRNA sense strand
aaaccaauguugcccucuu

SEQ ID NO: 1444545 - RNA, 19 nt, Homo sapiens
  misc_RNA (1)...(19): siRNA sense strand
gcaagcauaaagaugaaug

SEQ ID NO: 1444546 - RNA, 19 nt, Homo sapiens
  misc_RNA (1)...(19): siRNA sense strand
cacuggacuucauuucuaa

SEQ ID NO: 1444547 - RNA, 19 nt, Homo sapiens
  misc_RNA (1)...(19): siRNA sense strand
gaaaucgcugucgaacaua

SEQ ID NO: 1444548 - RNA, 19 nt, Homo sapiens
  misc_RNA (1)...(19): siRNA sense strand
acacuuucuucaugccaua

SEQ ID NO: 1444549 - RNA, 19 nt, Homo sapiens
  misc_RNA (1)...(19): siRNA sense strand
gguugaguaccuuagaaua

SEQ ID NO: 1444550 - RNA, 19 nt, Homo sapiens
  misc_RNA (1)...(19): siRNA sense strand
cagcugauguugaaaauuc

SEQ ID NO: 1444551 - RNA, 19 nt, Homo sapiens
  misc_RNA (1)...(19): siRNA sense strand
guauucaaaggacgguuua

SEQ ID NO: 1444552 - RNA, 19 nt, Homo sapiens
  misc_RNA (1)...(19): siRNA sense strand
aagcaugggugauggaucu

SEQ ID NO: 1444553 - RNA, 19 nt, Homo sapiens
  misc_RNA (1)...(19): siRNA sense strand
uuaguggccuggcaagaug

SEQ ID NO: 1444554 - RNA, 19 nt, Homo sapiens
  misc_RNA (1)...(19): siRNA sense strand
aaagaugaaugccacaacu

SEQ ID NO: 1444555 - RNA, 19 nt, Homo sapiens
  misc_RNA (1)...(19): siRNA sense strand
guugagggcagucagcuuu

SEQ ID NO: 1444556 - RNA, 19 nt, Homo sapiens
  misc_RNA (1)...(19): siRNA sense strand
gaaacugacauggcgauca

SEQ ID NO: 1444557 - RNA, 19 nt, Homo sapiens
  misc_RNA (1)...(19): siRNA sense strand
cgacagcguauuacuggaa

SEQ ID NO: 1444558 - RNA, 19 nt, Homo sapiens
  misc_RNA (1)...(19): siRNA sense strand
cucugaagcuggcauggua

SEQ ID NO: 1444559 - RNA, 19 nt, Homo sapiens
  misc_RNA (1)...(19): siRNA sense strand
gaauauggaaacuaugucu

SEQ ID NO: 1444560 - RNA, 19 nt, Homo sapiens
  misc_RNA (1)...(19): siRNA sense strand
cagcuuuccugaagaugau

SEQ ID NO: 1444561 - RNA, 19 nt, Homo sapiens
  misc_RNA (1)...(19): siRNA sense strand
agaaaacugugcuaugaaa

SEQ ID NO: 1444562 - RNA, 19 nt, Homo sapiens
  misc_RNA (1)...(19): siRNA sense strand
ccuuaauacugucgacuau

SEQ ID NO: 1444563 - RNA, 19 nt, Homo sapiens
  misc_RNA (1)...(19): siRNA sense strand
uuugaacgacagcguauua

SEQ ID NO: 1444564 - RNA, 19 nt, Homo sapiens
  misc_RNA (1)...(19): siRNA sense strand
gcauuuagcauggaugaca

SEQ ID NO: 1444565 - RNA, 19 nt, Homo sapiens
  misc_RNA (1)...(19): siRNA sense strand
ucugcugucugugcauuua

SEQ ID NO: 1444566 - RNA, 19 nt, Homo sapiens
  misc_RNA (1)...(19): siRNA sense strand
uaaaugaaaugcccaaaac

SEQ ID NO: 1444567 - RNA, 19 nt, Homo sapiens
  misc_RNA (1)...(19): siRNA sense strand
gcguauuacuggaagagau

SEQ ID NO: 1444568 - RNA, 19 nt, Homo sapiens
  misc_RNA (1)...(19): siRNA sense strand
ugucauucaucaaaucuca

SEQ ID NO: 1444569 - RNA, 19 nt, Homo sapiens
  misc_RNA (1)...(19): siRNA sense strand
gaagacaaagugccaaagc

SEQ ID NO: 1444570 - RNA, 19 nt, Homo sapiens
  misc_RNA (1)...(19): siRNA sense strand
aaccaauguugcccucuuu

SEQ ID NO: 1444571 - RNA, 19 nt, Homo sapiens
  misc_RNA (1)...(19): siRNA sense strand
uugaguaccuuagaauaug

SEQ ID NO: 1444572 - RNA, 19 nt, Homo sapiens
  misc_RNA (1)...(19): siRNA sense strand
gaaugccacaacuuuauca

SEQ ID NO: 1444573 - RNA, 19 nt, Homo sapiens
  misc_RNA (1)...(19): siRNA sense strand
agaugaaugccacaacuuu

SEQ ID NO: 1444574 - RNA, 19 nt, Homo sapiens
  misc_RNA (1)...(19): siRNA sense strand
ugucgacuaucacuauuca

SEQ ID NO: 1444575 - RNA, 19 nt, Homo sapiens
  misc_RNA (1)...(19): siRNA sense strand
uuaaaguucuggcaaagac

SEQ ID NO: 1444576 - RNA, 19 nt, Homo sapiens
  misc_RNA (1)...(19): siRNA sense strand
ugacauggcgaucaagaca

SEQ ID NO: 1444577 - RNA, 19 nt, Homo sapiens
  misc_RNA (1)...(19): siRNA sense strand
ccaguccuuucucuuugaa

SEQ ID NO: 1444578 - RNA, 19 nt, Homo sapiens
  misc_RNA (1)...(19): siRNA sense strand
gcauucaaucccaugugua

SEQ ID NO: 1444579 - RNA, 19 nt, Homo sapiens
  misc_RNA (1)...(19): siRNA sense strand
caagaaacgaugagauggu

SEQ ID NO: 1444580 - RNA, 19 nt, Homo sapiens
  misc_RNA (1)...(19): siRNA sense strand
aaggcaagcauaaagauga

SEQ ID NO: 1444581 - RNA, 19 nt, Homo sapiens
  misc_RNA (1)...(19): siRNA sense strand
caucuuuguuggcucugaa

SEQ ID NO: 1444582 - RNA, 19 nt, Homo sapiens
  misc_RNA (1)...(19): siRNA sense strand
uaaaggcucggcugaacug

SEQ ID NO: 1444583 - RNA, 19 nt, Homo sapiens
  misc_RNA (1)...(19): siRNA sense strand
gaugggaagcuguauucug

SEQ ID NO: 1444584 - RNA, 19 nt, Homo sapiens
  misc_RNA (1)...(19): siRNA sense strand
gagaaaucgcugucgaaca

SEQ ID NO: 1444585 - RNA, 19 nt, Homo sapiens
  misc_RNA (1)...(19): siRNA sense strand
aggcaagcauaaagaugaa

SEQ ID NO: 1444586 - RNA, 19 nt, Homo sapiens
  misc_RNA (1)...(19): siRNA sense strand
cuacacagucaucuuuguu

SEQ ID NO: 1444587 - RNA, 19 nt, Homo sapiens
  misc_RNA (1)...(19): siRNA sense strand
ggacgcccuucaggcaaug

SEQ ID NO: 1444588 - RNA, 19 nt, Homo sapiens
  misc_RNA (1)...(19): siRNA sense strand
guucugcagucuauuacag

SEQ ID NO: 1444589 - RNA, 19 nt, Homo sapiens
  misc_RNA (1)...(19): siRNA sense strand
gacagcaguucccgaagac

SEQ ID NO: 1444590 - RNA, 19 nt, Homo sapiens
  misc_RNA (1)...(19): siRNA sense strand
guucugcugucugugcauu

SEQ ID NO: 1444591 - RNA, 19 nt, Homo sapiens
  misc_RNA (1)...(19): siRNA sense strand
gaacuacacagucaucuuu

SEQ ID NO: 1444592 - RNA, 19 nt, Homo sapiens
  misc_RNA (1)...(19): siRNA sense strand
ggacagcaguucccgaaga

SEQ ID NO: 1444593 - RNA, 19 nt, Homo sapiens
  misc_RNA (1)...(19): siRNA sense strand
gaaacucugucauucauca

SEQ ID NO: 1444594 - RNA, 19 nt, Homo sapiens
  misc_RNA (1)...(19): siRNA sense strand
ggaucaaguuuauacagua

SEQ ID NO: 1444595 - RNA, 19 nt, Homo sapiens
  misc_RNA (1)...(19): siRNA sense strand
gagaaacacuggacuucau

SEQ ID NO: 1444596 - RNA, 19 nt, Homo sapiens
  misc_RNA (1)...(19): siRNA sense strand
gaugaaugccacaacuuua

SEQ ID NO: 1444597 - RNA, 19 nt, Homo sapiens
  misc_RNA (1)...(19): siRNA sense strand
gaagcuggcaugguacuua

SEQ ID NO: 1444598 - RNA, 19 nt, Homo sapiens
  misc_RNA (1)...(19): siRNA sense strand
gaugagcccugguucacaa

SEQ ID NO: 1444599 - RNA, 19 nt, Homo sapiens
  misc_RNA (1)...(19): siRNA sense strand
acacuggacuucauuucua

SEQ ID NO: 1444600 - RNA, 19 nt, Homo sapiens
  misc_RNA (1)...(19): siRNA sense strand
agaaaucgcugucgaacau

SEQ ID NO: 1444601 - RNA, 19 nt, Homo sapiens
  misc_RNA (1)...(19): siRNA sense strand
gagccacacuuucuucaug

SEQ ID NO: 1444602 - RNA, 19 nt, Homo sapiens
  misc_RNA (1)...(19): siRNA sense strand
uagcauggaugacauugaa

SEQ ID NO: 1444603 - RNA, 19 nt, Homo sapiens
  misc_RNA (1)...(19): siRNA sense strand
gcaagaugcccauuugaug

SEQ ID NO: 1444604 - RNA, 19 nt, Homo sapiens
  misc_RNA (1)...(19): siRNA sense strand
gauguucugcagucuauua

SEQ ID NO: 1444605 - RNA, 19 nt, Homo sapiens
  misc_RNA (1)...(19): siRNA sense strand
cacaguggcugacuucuug

SEQ ID NO: 1444606 - RNA, 19 nt, Homo sapiens
  misc_RNA (1)...(19): siRNA sense strand
ggccagcgaugccguuauu

SEQ ID NO: 1444607 - RNA, 19 nt, Homo sapiens
  misc_RNA (1)...(19): siRNA sense strand
gaccaguccuuucucuuug

SEQ ID NO: 1444608 - RNA, 19 nt, Homo sapiens
  misc_RNA (1)...(19): siRNA sense strand
aaacugacauggcgaucaa

SEQ ID NO: 1444609 - RNA, 19 nt, Homo sapiens
  misc_RNA (1)...(19): siRNA sense strand
gcugaugguuucccaguug

SEQ ID NO: 1444610 - RNA, 19 nt, Homo sapiens
  misc_RNA (1)...(19): siRNA sense strand
cgagacacacuuuauauug

SEQ ID NO: 1444611 - RNA, 19 nt, Homo sapiens
  misc_RNA (1)...(19): siRNA sense strand
caaagacucgggucaggua

SEQ ID NO: 1444612 - RNA, 19 nt, Homo sapiens
  misc_RNA (1)...(19): siRNA sense strand
ccacgcagcucaauagcau

SEQ ID NO: 1444613 - RNA, 19 nt, Homo sapiens
  misc_RNA (1)...(19): siRNA sense strand
gaaaggcaagcauaaagau

SEQ ID NO: 1444614 - RNA, 19 nt, Homo sapiens
  misc_RNA (1)...(19): siRNA sense strand
uggcagggaucaaguuuau

SEQ ID NO: 1444615 - RNA, 19 nt, Homo sapiens
  misc_RNA (1)...(19): siRNA sense strand
gaacgacagcguauuacug

SEQ ID NO: 1444616 - RNA, 19 nt, Homo sapiens
  misc_RNA (1)...(19): siRNA sense strand
uuaauacugucgacuauca

SEQ ID NO: 1444617 - RNA, 19 nt, Homo sapiens
  misc_RNA (1)...(19): siRNA sense strand
ccagcgaugccguuauuua

SEQ ID NO: 1444618 - RNA, 19 nt, Homo sapiens
  misc_RNA (1)...(19): siRNA sense strand
gagacacacuuuauauugc

SEQ ID NO: 1444619 - RNA, 19 nt, Homo sapiens
  misc_RNA (1)...(19): siRNA sense strand
gaacagaaaacuccagauu

SEQ ID NO: 1444620 - RNA, 19 nt, Homo sapiens
  misc_RNA (1)...(19): siRNA sense strand
caaaggacgguuuaaggaa

SEQ ID NO: 1444621 - RNA, 19 nt, Homo sapiens
  misc_RNA (1)...(19): siRNA sense strand
gaaacacuggacuucauuu

SEQ ID NO: 1444622 - RNA, 19 nt, Homo sapiens
  misc_RNA (1)...(19): siRNA sense strand
gaucugcccuucgcacaau

SEQ ID NO: 1444623 - RNA, 19 nt, Homo sapiens
  misc_RNA (1)...(19): siRNA sense strand
cgagaaaacugugcuauga

SEQ ID NO: 1444624 - RNA, 19 nt, Homo sapiens
  misc_RNA (1)...(19): siRNA sense strand
uaccagaacuacacaguca

SEQ ID NO: 1444625 - RNA, 19 nt, Homo sapiens
  misc_RNA (1)...(19): siRNA sense strand
ucaaggcaauauccgguuu

SEQ ID NO: 1444626 - RNA, 19 nt, Homo sapiens
  misc_RNA (1)...(19): siRNA sense strand
gggaucaaguuuauacagu

SEQ ID NO: 1444627 - RNA, 19 nt, Homo sapiens
  misc_RNA (1)...(19): siRNA sense strand
ucaaucccauguguagaua

SEQ ID NO: 1444628 - RNA, 19 nt, Homo sapiens
  misc_RNA (1)...(19): siRNA sense strand
uauaaaaccuccaucgauu

SEQ ID NO: 1444629 - RNA, 19 nt, Homo sapiens
  misc_RNA (1)...(19): siRNA sense strand
gcagggaucaaguuuauac

SEQ ID NO: 1444630 - RNA, 19 nt, Homo sapiens
  misc_RNA (1)...(19): siRNA sense strand
ucaaaggacgguuuaagga

SEQ ID NO: 1444631 - RNA, 19 nt, Homo sapiens
  misc_RNA (1)...(19): siRNA sense strand
ugaguaccuuagaauauga

SEQ ID NO: 1444632 - RNA, 19 nt, Homo sapiens
  misc_RNA (1)...(19): siRNA sense strand
gcccaaaacagaaguaaua

SEQ ID NO: 1444633 - RNA, 19 nt, Homo sapiens
  misc_RNA (1)...(19): siRNA sense strand
aagcuggcaugguacuuaa

SEQ ID NO: 1444634 - RNA, 19 nt, Homo sapiens
  misc_RNA (1)...(19): siRNA sense strand
aaaucgcugucgaacauaa

SEQ ID NO: 1444635 - RNA, 19 nt, Homo sapiens
  misc_RNA (1)...(19): siRNA sense strand
ugaaaggcaagcauaaaga

SEQ ID NO: 1444636 - RNA, 19 nt, Homo sapiens
  misc_RNA (1)...(19): siRNA sense strand
gagcccugguucacaaaga

SEQ ID NO: 1444637 - RNA, 19 nt, Homo sapiens
  misc_RNA (1)...(19): siRNA sense strand
aagaaacgaugagaugguu

SEQ ID NO: 1444638 - RNA, 19 nt, Homo sapiens
  misc_RNA (1)...(19): siRNA sense strand
gaugaugaaccccuuaaua

SEQ ID NO: 1444639 - RNA, 19 nt, Homo sapiens
  misc_RNA (1)...(19): siRNA sense strand
agaccaguccuuucucuuu

SEQ ID NO: 1444640 - RNA, 19 nt, Homo sapiens
  misc_RNA (1)...(19): siRNA sense strand
guugaguaccuuagaauau

SEQ ID NO: 1444641 - RNA, 19 nt, Homo sapiens
  misc_RNA (1)...(19): siRNA sense strand
gauugaagccuacaaccau

SEQ ID NO: 1444642 - RNA, 19 nt, Homo sapiens
  misc_RNA (1)...(19): siRNA sense strand
ggagaaacacuggacuuca

SEQ ID NO: 1444643 - RNA, 19 nt, Homo sapiens
  misc_RNA (1)...(19): siRNA sense strand
cagcgaugccguuauuuau

SEQ ID NO: 1444644 - RNA, 19 nt, Homo sapiens
  misc_RNA (1)...(19): siRNA sense strand
aaaccaauguugcccucuu

SEQ ID NO: 1444645 - RNA, 19 nt, Homo sapiens
  misc_RNA (1)...(19): siRNA sense strand
gcaagcauaaagaugaaug

SEQ ID NO: 1444646 - RNA, 19 nt, Homo sapiens
  misc_RNA (1)...(19): siRNA sense strand
cacuggacuucauuucuaa

SEQ ID NO: 1444647 - RNA, 19 nt, Homo sapiens
  misc_RNA (1)...(19): siRNA sense strand
gaaaucgcugucgaacaua

SEQ ID NO: 1444648 - RNA, 19 nt, Homo sapiens
  misc_RNA (1)...(19): siRNA sense strand
acacuuucuucaugccaua

SEQ ID NO: 1444649 - RNA, 19 nt, Homo sapiens
  misc_RNA (1)...(19): siRNA sense strand
gguugaguaccuuagaaua

SEQ ID NO: 1444650 - RNA, 19 nt, Homo sapiens
  misc_RNA (1)...(19): siRNA sense strand
cagcugauguugaaaauuc

SEQ ID NO: 1444651 - RNA, 19 nt, Homo sapiens
  misc_RNA (1)...(19): siRNA sense strand
guauucaaaggacgguuua

SEQ ID NO: 1444652 - RNA, 19 nt, Homo sapiens
  misc_RNA (1)...(19): siRNA sense strand
aagcaugggugauggaucu

SEQ ID NO: 1444653 - RNA, 19 nt, Homo sapiens
  misc_RNA (1)...(19): siRNA sense strand
uuaguggccuggcaagaug

SEQ ID NO: 1444654 - RNA, 19 nt, Homo sapiens
  misc_RNA (1)...(19): siRNA sense strand
aaagaugaaugccacaacu

SEQ ID NO: 1444655 - RNA, 19 nt, Homo sapiens
  misc_RNA (1)...(19): siRNA sense strand
guugagggcagucagcuuu

SEQ ID NO: 1444656 - RNA, 19 nt, Homo sapiens
  misc_RNA (1)...(19): siRNA sense strand
gaaacugacauggcgauca

SEQ ID NO: 1444657 - RNA, 19 nt, Homo sapiens
  misc_RNA (1)...(19): siRNA sense strand
cgacagcguauuacuggaa

SEQ ID NO: 1444658 - RNA, 19 nt, Homo sapiens
  misc_RNA (1)...(19): siRNA sense strand
cucugaagcuggcauggua

SEQ ID NO: 1444659 - RNA, 19 nt, Homo sapiens
  misc_RNA (1)...(19): siRNA sense strand
gaauauggaaacuaugucu

SEQ ID NO: 1444660 - RNA, 19 nt, Homo sapiens
  misc_RNA (1)...(19): siRNA sense strand
cagcuuuccugaagaugau

SEQ ID NO: 1444661 - RNA, 19 nt, Homo sapiens
  misc_RNA (1)...(19): siRNA sense strand
agaaaacugugcuaugaaa

SEQ ID NO: 1444662 - RNA, 19 nt, Homo sapiens
  misc_RNA (1)...(19): siRNA sense strand
ccuuaauacugucgacuau

SEQ ID NO: 1444663 - RNA, 19 nt, Homo sapiens
  misc_RNA (1)...(19): siRNA sense strand
uuugaacgacagcguauua

SEQ ID NO: 1444664 - RNA, 19 nt, Homo sapiens
  misc_RNA (1)...(19): siRNA sense strand
gcauuuagcauggaugaca

SEQ ID NO: 1444665 - RNA, 19 nt, Homo sapiens
  misc_RNA (1)...(19): siRNA sense strand
ucugcugucugugcauuua

SEQ ID NO: 1444666 - RNA, 19 nt, Homo sapiens
  misc_RNA (1)...(19): siRNA sense strand
uaaaugaaaugcccaaaac

SEQ ID NO: 1444667 - RNA, 19 nt, Homo sapiens
  misc_RNA (1)...(19): siRNA sense strand
gcguauuacuggaagagau

SEQ ID NO: 1444668 - RNA, 19 nt, Homo sapiens
  misc_RNA (1)...(19): siRNA sense strand
ugucauucaucaaaucuca

SEQ ID NO: 1444669 - RNA, 19 nt, Homo sapiens
  misc_RNA (1)...(19): siRNA sense strand
gaagacaaagugccaaagc

SEQ ID NO: 1444670 - RNA, 19 nt, Homo sapiens
  misc_RNA (1)...(19): siRNA sense strand
aaccaauguugcccucuuu

SEQ ID NO: 1444671 - RNA, 19 nt, Homo sapiens
  misc_RNA (1)...(19): siRNA sense strand
uugaguaccuuagaauaug

SEQ ID NO: 1444672 - RNA, 19 nt, Homo sapiens
  misc_RNA (1)...(19): siRNA sense strand
gaaugccacaacuuuauca

SEQ ID NO: 1444673 - RNA, 19 nt, Homo sapiens
  misc_RNA (1)...(19): siRNA sense strand
agaugaaugccacaacuuu

SEQ ID NO: 1444674 - RNA, 19 nt, Homo sapiens
  misc_RNA (1)...(19): siRNA sense strand
ugucgacuaucacuauuca

SEQ ID NO: 1444675 - RNA, 19 nt, Homo sapiens
  misc_RNA (1)...(19): siRNA sense strand
uuaaaguucuggcaaagac

SEQ ID NO: 1444676 - RNA, 19 nt, Homo sapiens
  misc_RNA (1)...(19): siRNA sense strand
ugacauggcgaucaagaca

SEQ ID NO: 1444677 - RNA, 19 nt, Homo sapiens
  misc_RNA (1)...(19): siRNA sense strand
ccaguccuuucucuuugaa

SEQ ID NO: 1444678 - RNA, 19 nt, Homo sapiens
  misc_RNA (1)...(19): siRNA sense strand
gcauucaaucccaugugua

SEQ ID NO: 1444679 - RNA, 19 nt, Homo sapiens
  misc_RNA (1)...(19): siRNA sense strand
caagaaacgaugagauggu

SEQ ID NO: 1444680 - RNA, 19 nt, Homo sapiens
  misc_RNA (1)...(19): siRNA sense strand
aaggcaagcauaaagauga

SEQ ID NO: 1444681 - RNA, 19 nt, Homo sapiens
  misc_RNA (1)...(19): siRNA sense strand
caucuuuguuggcucugaa

SEQ ID NO: 1444682 - RNA, 19 nt, Homo sapiens
  misc_RNA (1)...(19): siRNA sense strand
uaaaggcucggcugaacug

SEQ ID NO: 1444683 - RNA, 19 nt, Homo sapiens
  misc_RNA (1)...(19): siRNA sense strand
gaugggaagcuguauucug

SEQ ID NO: 1444684 - RNA, 19 nt, Homo sapiens
  misc_RNA (1)...(19): siRNA sense strand
gagaaaucgcugucgaaca

SEQ ID NO: 1444685 - RNA, 19 nt, Homo sapiens
  misc_RNA (1)...(19): siRNA sense strand
aggcaagcauaaagaugaa

SEQ ID NO: 1444686 - RNA, 19 nt, Homo sapiens
  misc_RNA (1)...(19): siRNA sense strand
cuacacagucaucuuuguu

SEQ ID NO: 1444687 - RNA, 19 nt, Homo sapiens
  misc_RNA (1)...(19): siRNA sense strand
ggacgcccuucaggcaaug

SEQ ID NO: 1444688 - RNA, 19 nt, Homo sapiens
  misc_RNA (1)...(19): siRNA sense strand
guucugcagucuauuacag

SEQ ID NO: 1444689 - RNA, 19 nt, Homo sapiens
  misc_RNA (1)...(19): siRNA sense strand
gacagcaguucccgaagac

SEQ ID NO: 1444690 - RNA, 19 nt, Homo sapiens
  misc_RNA (1)...(19): siRNA sense strand
guucugcugucugugcauu

SEQ ID NO: 1444691 - RNA, 19 nt, Homo sapiens
  misc_RNA (1)...(19): siRNA sense strand
gaacuacacagucaucuuu

SEQ ID NO: 1444692 - RNA, 19 nt, Homo sapiens
  misc_RNA (1)...(19): siRNA sense strand
ggacagcaguucccgaaga

SEQ ID NO: 1444693 - RNA, 19 nt, Homo sapiens
  misc_RNA (1)...(19): siRNA sense strand
gaaacucugucauucauca

SEQ ID NO: 1444694 - RNA, 19 nt, Homo sapiens
  misc_RNA (1)...(19): siRNA sense strand
ggaucaaguuuauacagua

SEQ ID NO: 1444695 - RNA, 19 nt, Homo sapiens
  misc_RNA (1)...(19): siRNA sense strand
gagaaacacuggacuucau

SEQ ID NO: 1444696 - RNA, 19 nt, Homo sapiens
  misc_RNA (1)...(19): siRNA sense strand
gaugaaugccacaacuuua

SEQ ID NO: 1444697 - RNA, 19 nt, Homo sapiens
  misc_RNA (1)...(19): siRNA sense strand
gaagcuggcaugguacuua

SEQ ID NO: 1444698 - RNA, 19 nt, Homo sapiens
  misc_RNA (1)...(19): siRNA sense strand
gaugagcccugguucacaa

SEQ ID NO: 1444699 - RNA, 19 nt, Homo sapiens
  misc_RNA (1)...(19): siRNA sense strand
acacuggacuucauuucua

SEQ ID NO: 1444700 - RNA, 19 nt, Homo sapiens
  misc_RNA (1)...(19): siRNA sense strand
agaaaucgcugucgaacau

SEQ ID NO: 1444701 - RNA, 19 nt, Homo sapiens
  misc_RNA (1)...(19): siRNA sense strand
gagccacacuuucuucaug

SEQ ID NO: 1444702 - RNA, 19 nt, Homo sapiens
  misc_RNA (1)...(19): siRNA sense strand
uagcauggaugacauugaa

SEQ ID NO: 1444703 - RNA, 19 nt, Homo sapiens
  misc_RNA (1)...(19): siRNA sense strand
gcaagaugcccauuugaug

SEQ ID NO: 1444704 - RNA, 19 nt, Homo sapiens
  misc_RNA (1)...(19): siRNA sense strand
gauguucugcagucuauua

SEQ ID NO: 1444705 - RNA, 19 nt, Homo sapiens
  misc_RNA (1)...(19): siRNA sense strand
cacaguggcugacuucuug

SEQ ID NO: 1444706 - RNA, 19 nt, Homo sapiens
  misc_RNA (1)...(19): siRNA sense strand
ggccagcgaugccguuauu

SEQ ID NO: 1444707 - RNA, 19 nt, Homo sapiens
  misc_RNA (1)...(19): siRNA sense strand
gaccaguccuuucucuuug

SEQ ID NO: 1444708 - RNA, 19 nt, Homo sapiens
  misc_RNA (1)...(19): siRNA sense strand
aaacugacauggcgaucaa

SEQ ID NO: 1444709 - RNA, 19 nt, Homo sapiens
  misc_RNA (1)...(19): siRNA sense strand
gcugaugguuucccaguug

SEQ ID NO: 1444710 - RNA, 19 nt, Homo sapiens
  misc_RNA (1)...(19): siRNA sense strand
cgagacacacuuuauauug

SEQ ID NO: 1444711 - RNA, 19 nt, Homo sapiens
  misc_RNA (1)...(19): siRNA sense strand
caaagacucgggucaggua

SEQ ID NO: 1444712 - RNA, 19 nt, Homo sapiens
  misc_RNA (1)...(19): siRNA sense strand
ccacgcagcucaauagcau

SEQ ID NO: 1444713 - RNA, 19 nt, Homo sapiens
  misc_RNA (1)...(19): siRNA sense strand
gaaaggcaagcauaaagau

SEQ ID NO: 1444714 - RNA, 19 nt, Homo sapiens
  misc_RNA (1)...(19): siRNA sense strand
uggcagggaucaaguuuau

SEQ ID NO: 1444715 - RNA, 19 nt, Homo sapiens
  misc_RNA (1)...(19): siRNA sense strand
gaacgacagcguauuacug

SEQ ID NO: 1444716 - RNA, 19 nt, Homo sapiens
  misc_RNA (1)...(19): siRNA sense strand
uuaauacugucgacuauca

SEQ ID NO: 1444717 - RNA, 19 nt, Homo sapiens
  misc_RNA (1)...(19): siRNA sense strand
ccagcgaugccguuauuua

SEQ ID NO: 1444718 - RNA, 19 nt, Homo sapiens
  misc_RNA (1)...(19): siRNA sense strand
gagacacacuuuauauugc

SEQ ID NO: 1444719 - RNA, 19 nt, Homo sapiens
  misc_RNA (1)...(19): siRNA sense strand
gaacagaaaacuccagauu

SEQ ID NO: 1444720 - RNA, 19 nt, Homo sapiens
  misc_RNA (1)...(19): siRNA sense strand
caaaggacgguuuaaggaa

SEQ ID NO: 1444721 - RNA, 19 nt, Homo sapiens
  misc_RNA (1)...(19): siRNA sense strand
gaaacacuggacuucauuu

SEQ ID NO: 1444722 - RNA, 19 nt, Homo sapiens
  misc_RNA (1)...(19): siRNA sense strand
gaucugcccuucgcacaau

SEQ ID NO: 1444723 - RNA, 19 nt, Homo sapiens
  misc_RNA (1)...(19): siRNA sense strand
cgagaaaacugugcuauga

SEQ ID NO: 1444724 - RNA, 19 nt, Homo sapiens
  misc_RNA (1)...(19): siRNA sense strand
uaccagaacuacacaguca

SEQ ID NO: 1444725 - RNA, 19 nt, Homo sapiens
  misc_RNA (1)...(19): siRNA sense strand
ucaaggcaauauccgguuu

SEQ ID NO: 1444726 - RNA, 19 nt, Homo sapiens
  misc_RNA (1)...(19): siRNA sense strand
gggaucaaguuuauacagu

SEQ ID NO: 1444727 - RNA, 19 nt, Homo sapiens
  misc_RNA (1)...(19): siRNA sense strand
ucaaucccauguguagaua

SEQ ID NO: 1444728 - RNA, 19 nt, Homo sapiens
  misc_RNA (1)...(19): siRNA sense strand
uauaaaaccuccaucgauu

SEQ ID NO: 1444729 - RNA, 19 nt, Homo sapiens
  misc_RNA (1)...(19): siRNA sense strand
gcagggaucaaguuuauac

SEQ ID NO: 1444730 - RNA, 19 nt, Homo sapiens
  misc_RNA (1)...(19): siRNA sense strand
ucaaaggacgguuuaagga

SEQ ID NO: 1444731 - RNA, 19 nt, Homo sapiens
  misc_RNA (1)...(19): siRNA sense strand
ugaguaccuuagaauauga

SEQ ID NO: 1444732 - RNA, 19 nt, Homo sapiens
  misc_RNA (1)...(19): siRNA sense strand
gcccaaaacagaaguaaua

SEQ ID NO: 1444733 - RNA, 19 nt, Homo sapiens
  misc_RNA (1)...(19): siRNA sense strand
aagcuggcaugguacuuaa

SEQ ID NO: 1444734 - RNA, 19 nt, Homo sapiens
  misc_RNA (1)...(19): siRNA sense strand
aaaucgcugucgaacauaa

SEQ ID NO: 1444735 - RNA, 19 nt, Homo sapiens
  misc_RNA (1)...(19): siRNA sense strand
ugaaaggcaagcauaaaga

SEQ ID NO: 1444736 - RNA, 19 nt, Homo sapiens
  misc_RNA (1)...(19): siRNA sense strand
gagcccugguucacaaaga

SEQ ID NO: 1444737 - RNA, 19 nt, Homo sapiens
  misc_RNA (1)...(19): siRNA sense strand
aagaaacgaugagaugguu

SEQ ID NO: 1444738 - RNA, 19 nt, Homo sapiens
  misc_RNA (1)...(19): siRNA sense strand
gaugaugaaccccuuaaua

SEQ ID NO: 1444739 - RNA, 19 nt, Homo sapiens
  misc_RNA (1)...(19): siRNA sense strand
agaccaguccuuucucuuu

SEQ ID NO: 1444740 - RNA, 19 nt, Homo sapiens
  misc_RNA (1)...(19): siRNA sense strand
guugaguaccuuagaauau

SEQ ID NO: 1444741 - RNA, 19 nt, Homo sapiens
  misc_RNA (1)...(19): siRNA sense strand
gauugaagccuacaaccau

SEQ ID NO: 1444742 - RNA, 19 nt, Homo sapiens
  misc_RNA (1)...(19): siRNA sense strand
ggagaaacacuggacuuca

SEQ ID NO: 1444743 - RNA, 19 nt, Homo sapiens
  misc_RNA (1)...(19): siRNA sense strand
cagcgaugccguuauuuau

SEQ ID NO: 1444744 - RNA, 19 nt, Homo sapiens
  misc_RNA (1)...(19): siRNA sense strand
aaaccaauguugcccucuu

SEQ ID NO: 1444745 - RNA, 19 nt, Homo sapiens
  misc_RNA (1)...(19): siRNA sense strand
gcaagcauaaagaugaaug

SEQ ID NO: 1444746 - RNA, 19 nt, Homo sapiens
  misc_RNA (1)...(19): siRNA sense strand
cacuggacuucauuucuaa

SEQ ID NO: 1444747 - RNA, 19 nt, Homo sapiens
  misc_RNA (1)...(19): siRNA sense strand
gaaaucgcugucgaacaua

SEQ ID NO: 1444748 - RNA, 19 nt, Homo sapiens
  misc_RNA (1)...(19): siRNA sense strand
acacuuucuucaugccaua

SEQ ID NO: 1444749 - RNA, 19 nt, Homo sapiens
  misc_RNA (1)...(19): siRNA sense strand
gguugaguaccuuagaaua

SEQ ID NO: 1444750 - RNA, 19 nt, Homo sapiens
  misc_RNA (1)...(19): siRNA sense strand
cagcugauguugaaaauuc

SEQ ID NO: 1444751 - RNA, 19 nt, Homo sapiens
  misc_RNA (1)...(19): siRNA sense strand
guauucaaaggacgguuua

SEQ ID NO: 1444752 - RNA, 19 nt, Homo sapiens
  misc_RNA (1)...(19): siRNA sense strand
aagcaugggugauggaucu

SEQ ID NO: 1444753 - RNA, 19 nt, Homo sapiens
  misc_RNA (1)...(19): siRNA sense strand
uuaguggccuggcaagaug

SEQ ID NO: 1444754 - RNA, 19 nt, Homo sapiens
  misc_RNA (1)...(19): siRNA sense strand
aaagaugaaugccacaacu

SEQ ID NO: 1444755 - RNA, 19 nt, Homo sapiens
  misc_RNA (1)...(19): siRNA sense strand
guugagggcagucagcuuu

SEQ ID NO: 1444756 - RNA, 19 nt, Homo sapiens
  misc_RNA (1)...(19): siRNA sense strand
gaaacugacauggcgauca

SEQ ID NO: 1444757 - RNA, 19 nt, Homo sapiens
  misc_RNA (1)...(19): siRNA sense strand
cgacagcguauuacuggaa

SEQ ID NO: 1444758 - RNA, 19 nt, Homo sapiens
  misc_RNA (1)...(19): siRNA sense strand
cucugaagcuggcauggua

SEQ ID NO: 1444759 - RNA, 19 nt, Homo sapiens
  misc_RNA (1)...(19): siRNA sense strand
gaauauggaaacuaugucu

SEQ ID NO: 1444760 - RNA, 19 nt, Homo sapiens
  misc_RNA (1)...(19): siRNA sense strand
cagcuuuccugaagaugau

SEQ ID NO: 1444761 - RNA, 19 nt, Homo sapiens
  misc_RNA (1)...(19): siRNA sense strand
agaaaacugugcuaugaaa

SEQ ID NO: 1444762 - RNA, 19 nt, Homo sapiens
  misc_RNA (1)...(19): siRNA sense strand
ccuuaauacugucgacuau

SEQ ID NO: 1444763 - RNA, 19 nt, Homo sapiens
  misc_RNA (1)...(19): siRNA sense strand
uuugaacgacagcguauua

SEQ ID NO: 1444764 - RNA, 19 nt, Homo sapiens
  misc_RNA (1)...(19): siRNA sense strand
gcauuuagcauggaugaca

SEQ ID NO: 1444765 - RNA, 19 nt, Homo sapiens
  misc_RNA (1)...(19): siRNA sense strand
ucugcugucugugcauuua

SEQ ID NO: 1444766 - RNA, 19 nt, Homo sapiens
  misc_RNA (1)...(19): siRNA sense strand
uaaaugaaaugcccaaaac

SEQ ID NO: 1444767 - RNA, 19 nt, Homo sapiens
  misc_RNA (1)...(19): siRNA sense strand
gcguauuacuggaagagau

SEQ ID NO: 1444768 - RNA, 19 nt, Homo sapiens
  misc_RNA (1)...(19): siRNA sense strand
ugucauucaucaaaucuca

SEQ ID NO: 1444769 - RNA, 19 nt, Homo sapiens
  misc_RNA (1)...(19): siRNA sense strand
gaagacaaagugccaaagc

SEQ ID NO: 1444770 - RNA, 19 nt, Homo sapiens
  misc_RNA (1)...(19): siRNA sense strand
aaccaauguugcccucuuu

SEQ ID NO: 1444771 - RNA, 19 nt, Homo sapiens
  misc_RNA (1)...(19): siRNA sense strand
uugaguaccuuagaauaug

SEQ ID NO: 1444772 - RNA, 19 nt, Homo sapiens
  misc_RNA (1)...(19): siRNA sense strand
gaaugccacaacuuuauca

SEQ ID NO: 1444773 - RNA, 19 nt, Homo sapiens
  misc_RNA (1)...(19): siRNA sense strand
agaugaaugccacaacuuu

SEQ ID NO: 1444774 - RNA, 19 nt, Homo sapiens
  misc_RNA (1)...(19): siRNA sense strand
ugucgacuaucacuauuca

SEQ ID NO: 1444775 - RNA, 19 nt, Homo sapiens
  misc_RNA (1)...(19): siRNA sense strand
uuaaaguucuggcaaagac

SEQ ID NO: 1444776 - RNA, 19 nt, Homo sapiens
  misc_RNA (1)...(19): siRNA sense strand
ugacauggcgaucaagaca

SEQ ID NO: 1444777 - RNA, 19 nt, Homo sapiens
  misc_RNA (1)...(19): siRNA sense strand
ccaguccuuucucuuugaa

SEQ ID NO: 1444778 - RNA, 19 nt, Homo sapiens
  misc_RNA (1)...(19): siRNA sense strand
gcauucaaucccaugugua

SEQ ID NO: 1444779 - RNA, 19 nt, Homo sapiens
  misc_RNA (1)...(19): siRNA sense strand
caagaaacgaugagauggu

SEQ ID NO: 1444780 - RNA, 19 nt, Homo sapiens
  misc_RNA (1)...(19): siRNA sense strand
aaggcaagcauaaagauga

SEQ ID NO: 1444781 - RNA, 19 nt, Homo sapiens
  misc_RNA (1)...(19): siRNA sense strand
caucuuuguuggcucugaa

SEQ ID NO: 1444782 - RNA, 19 nt, Homo sapiens
  misc_RNA (1)...(19): siRNA sense strand
uaaaggcucggcugaacug

SEQ ID NO: 1444783 - RNA, 19 nt, Homo sapiens
  misc_RNA (1)...(19): siRNA sense strand
gaugggaagcuguauucug

SEQ ID NO: 1444784 - RNA, 19 nt, Homo sapiens
  misc_RNA (1)...(19): siRNA sense strand
gagaaaucgcugucgaaca

SEQ ID NO: 1444785 - RNA, 19 nt, Homo sapiens
  misc_RNA (1)...(19): siRNA sense strand
aggcaagcauaaagaugaa

SEQ ID NO: 1444786 - RNA, 19 nt, Homo sapiens
  misc_RNA (1)...(19): siRNA sense strand
cuacacagucaucuuuguu

SEQ ID NO: 1444787 - RNA, 19 nt, Homo sapiens
  misc_RNA (1)...(19): siRNA sense strand
ggacgcccuucaggcaaug

SEQ ID NO: 1444788 - RNA, 19 nt, Homo sapiens
  misc_RNA (1)...(19): siRNA sense strand
guucugcagucuauuacag

SEQ ID NO: 1444789 - RNA, 19 nt, Homo sapiens
  misc_RNA (1)...(19): siRNA sense strand
gacagcaguucccgaagac

SEQ ID NO: 1444790 - RNA, 19 nt, Homo sapiens
  misc_RNA (1)...(19): siRNA sense strand
guucugcugucugugcauu

SEQ ID NO: 1444791 - RNA, 19 nt, Homo sapiens
  misc_RNA (1)...(19): siRNA sense strand
gaacuacacagucaucuuu

SEQ ID NO: 1444792 - RNA, 19 nt, Homo sapiens
  misc_RNA (1)...(19): siRNA sense strand
ggacagcaguucccgaaga

SEQ ID NO: 1444793 - RNA, 19 nt, Homo sapiens
  misc_RNA (1)...(19): siRNA sense strand
gaaacucugucauucauca

SEQ ID NO: 1444794 - RNA, 19 nt, Homo sapiens
  misc_RNA (1)...(19): siRNA sense strand
ggaucaaguuuauacagua

SEQ ID NO: 1444795 - RNA, 19 nt, Homo sapiens
  misc_RNA (1)...(19): siRNA sense strand
gagaaacacuggacuucau

SEQ ID NO: 1444796 - RNA, 19 nt, Homo sapiens
  misc_RNA (1)...(19): siRNA sense strand
gaugaaugccacaacuuua

SEQ ID NO: 1444797 - RNA, 19 nt, Homo sapiens
  misc_RNA (1)...(19): siRNA sense strand
gaagcuggcaugguacuua

SEQ ID NO: 1444798 - RNA, 19 nt, Homo sapiens
  misc_RNA (1)...(19): siRNA sense strand
gaugagcccugguucacaa

SEQ ID NO: 1444799 - RNA, 19 nt, Homo sapiens
  misc_RNA (1)...(19): siRNA sense strand
acacuggacuucauuucua

SEQ ID NO: 1444800 - RNA, 19 nt, Homo sapiens
  misc_RNA (1)...(19): siRNA sense strand
agaaaucgcugucgaacau

SEQ ID NO: 1444801 - RNA, 19 nt, Homo sapiens
  misc_RNA (1)...(19): siRNA sense strand
gagccacacuuucuucaug

SEQ ID NO: 1444802 - RNA, 19 nt, Homo sapiens
  misc_RNA (1)...(19): siRNA sense strand
uagcauggaugacauugaa

SEQ ID NO: 1444803 - RNA, 19 nt, Homo sapiens
  misc_RNA (1)...(19): siRNA sense strand
gcaagaugcccauuugaug

SEQ ID NO: 1444804 - RNA, 19 nt, Homo sapiens
  misc_RNA (1)...(19): siRNA sense strand
gauguucugcagucuauua

SEQ ID NO: 1444805 - RNA, 19 nt, Homo sapiens
  misc_RNA (1)...(19): siRNA sense strand
cacaguggcugacuucuug

SEQ ID NO: 1444806 - RNA, 19 nt, Homo sapiens
  misc_RNA (1)...(19): siRNA sense strand
ggccagcgaugccguuauu

SEQ ID NO: 1444807 - RNA, 19 nt, Homo sapiens
  misc_RNA (1)...(19): siRNA sense strand
gaccaguccuuucucuuug

SEQ ID NO: 1444808 - RNA, 19 nt, Homo sapiens
  misc_RNA (1)...(19): siRNA sense strand
aaacugacauggcgaucaa

SEQ ID NO: 1444809 - RNA, 19 nt, Homo sapiens
  misc_RNA (1)...(19): siRNA sense strand
gcugaugguuucccaguug

SEQ ID NO: 1444810 - RNA, 19 nt, Homo sapiens
  misc_RNA (1)...(19): siRNA sense strand
cgagacacacuuuauauug

SEQ ID NO: 1444811 - RNA, 19 nt, Homo sapiens
  misc_RNA (1)...(19): siRNA sense strand
caaagacucgggucaggua

SEQ ID NO: 1444812 - RNA, 19 nt, Homo sapiens
  misc_RNA (1)...(19): siRNA sense strand
ccacgcagcucaauagcau

SEQ ID NO: 1444813 - RNA, 19 nt, Homo sapiens
  misc_RNA (1)...(19): siRNA sense strand
gaaaggcaagcauaaagau

SEQ ID NO: 1444814 - RNA, 19 nt, Homo sapiens
  misc_RNA (1)...(19): siRNA sense strand
uggcagggaucaaguuuau

SEQ ID NO: 1444815 - RNA, 19 nt, Homo sapiens
  misc_RNA (1)...(19): siRNA sense strand
gaacgacagcguauuacug

SEQ ID NO: 1444816 - RNA, 19 nt, Homo sapiens
  misc_RNA (1)...(19): siRNA sense strand
uuaauacugucgacuauca

SEQ ID NO: 1444817 - RNA, 19 nt, Homo sapiens
  misc_RNA (1)...(19): siRNA sense strand
ccagcgaugccguuauuua

SEQ ID NO: 1444818 - RNA, 19 nt, Homo sapiens
  misc_RNA (1)...(19): siRNA sense strand
gagacacacuuuauauugc

SEQ ID NO: 1444819 - RNA, 19 nt, Homo sapiens
  misc_RNA (1)...(19): siRNA sense strand
gaacagaaaacuccagauu

SEQ ID NO: 1444820 - RNA, 19 nt, Homo sapiens
  misc_RNA (1)...(19): siRNA sense strand
caaaggacgguuuaaggaa

SEQ ID NO: 1444821 - RNA, 19 nt, Homo sapiens
  misc_RNA (1)...(19): siRNA sense strand
gaaacacuggacuucauuu

SEQ ID NO: 1444822 - RNA, 19 nt, Homo sapiens
  misc_RNA (1)...(19): siRNA sense strand
gaucugcccuucgcacaau

SEQ ID NO: 1444823 - RNA, 19 nt, Homo sapiens
  misc_RNA (1)...(19): siRNA sense strand
cgagaaaacugugcuauga

SEQ ID NO: 1444824 - RNA, 19 nt, Homo sapiens
  misc_RNA (1)...(19): siRNA sense strand
uaccagaacuacacaguca

SEQ ID NO: 1444825 - RNA, 19 nt, Homo sapiens
  misc_RNA (1)...(19): siRNA sense strand
ucaaggcaauauccgguuu

SEQ ID NO: 1444826 - RNA, 19 nt, Homo sapiens
  misc_RNA (1)...(19): siRNA sense strand
gggaucaaguuuauacagu

SEQ ID NO: 1444827 - RNA, 19 nt, Homo sapiens
  misc_RNA (1)...(19): siRNA sense strand
ucaaucccauguguagaua

SEQ ID NO: 1444828 - RNA, 19 nt, Homo sapiens
  misc_RNA (1)...(19): siRNA sense strand
uauaaaaccuccaucgauu

SEQ ID NO: 1444829 - RNA, 19 nt, Homo sapiens
  misc_RNA (1)...(19): siRNA sense strand
gcagggaucaaguuuauac

SEQ ID NO: 1444830 - RNA, 19 nt, Homo sapiens
  misc_RNA (1)...(19): siRNA sense strand
ucaaaggacgguuuaagga

SEQ ID NO: 1444831 - RNA, 19 nt, Homo sapiens
  misc_RNA (1)...(19): siRNA sense strand
ugaguaccuuagaauauga

SEQ ID NO: 1444832 - RNA, 19 nt, Homo sapiens
  misc_RNA (1)...(19): siRNA sense strand
gcccaaaacagaaguaaua

SEQ ID NO: 1444833 - RNA, 19 nt, Homo sapiens
  misc_RNA (1)...(19): siRNA sense strand
aagcuggcaugguacuuaa

SEQ ID NO: 1444834 - RNA, 19 nt, Homo sapiens
  misc_RNA (1)...(19): siRNA sense strand
aaaucgcugucgaacauaa

SEQ ID NO: 1444835 - RNA, 19 nt, Homo sapiens
  misc_RNA (1)...(19): siRNA sense strand
ugaaaggcaagcauaaaga

SEQ ID NO: 1444836 - RNA, 19 nt, Homo sapiens
  misc_RNA (1)...(19): siRNA sense strand
gagcccugguucacaaaga

SEQ ID NO: 1444837 - RNA, 19 nt, Homo sapiens
  misc_RNA (1)...(19): siRNA sense strand
aagaaacgaugagaugguu

SEQ ID NO: 1444838 - RNA, 19 nt, Homo sapiens
  misc_RNA (1)...(19): siRNA sense strand
gaugaugaaccccuuaaua

SEQ ID NO: 1444839 - RNA, 19 nt, Homo sapiens
  misc_RNA (1)...(19): siRNA sense strand
agaccaguccuuucucuuu

SEQ ID NO: 1444840 - RNA, 19 nt, Homo sapiens
  misc_RNA (1)...(19): siRNA sense strand
guugaguaccuuagaauau

SEQ ID NO: 1444841 - RNA, 19 nt, Homo sapiens
  misc_RNA (1)...(19): siRNA sense strand
gauugaagccuacaaccau

SEQ ID NO: 1444842 - RNA, 19 nt, Homo sapiens
  misc_RNA (1)...(19): siRNA sense strand
ggagaaacacuggacuuca

SEQ ID NO: 1444843 - RNA, 19 nt, Homo sapiens
  misc_RNA (1)...(19): siRNA sense strand
cagcgaugccguuauuuau

SEQ ID NO: 1444844 - RNA, 19 nt, Homo sapiens
  misc_RNA (1)...(19): siRNA sense strand
aaaccaauguugcccucuu

SEQ ID NO: 1444845 - RNA, 19 nt, Homo sapiens
  misc_RNA (1)...(19): siRNA sense strand
gcaagcauaaagaugaaug

SEQ ID NO: 1444846 - RNA, 19 nt, Homo sapiens
  misc_RNA (1)...(19): siRNA sense strand
cacuggacuucauuucuaa

SEQ ID NO: 1444847 - RNA, 19 nt, Homo sapiens
  misc_RNA (1)...(19): siRNA sense strand
gaaaucgcugucgaacaua

SEQ ID NO: 1444848 - RNA, 19 nt, Homo sapiens
  misc_RNA (1)...(19): siRNA sense strand
acacuuucuucaugccaua

SEQ ID NO: 1444849 - RNA, 19 nt, Homo sapiens
  misc_RNA (1)...(19): siRNA sense strand
gguugaguaccuuagaaua

SEQ ID NO: 1444850 - RNA, 19 nt, Homo sapiens
  misc_RNA (1)...(19): siRNA sense strand
cagcugauguugaaaauuc

SEQ ID NO: 1444851 - RNA, 19 nt, Homo sapiens
  misc_RNA (1)...(19): siRNA sense strand
guauucaaaggacgguuua

SEQ ID NO: 1444852 - RNA, 19 nt, Homo sapiens
  misc_RNA (1)...(19): siRNA sense strand
aagcaugggugauggaucu

SEQ ID NO: 1444853 - RNA, 19 nt, Homo sapiens
  misc_RNA (1)...(19): siRNA sense strand
uuaguggccuggcaagaug

SEQ ID NO: 1444854 - RNA, 19 nt, Homo sapiens
  misc_RNA (1)...(19): siRNA sense strand
aaagaugaaugccacaacu

SEQ ID NO: 1444855 - RNA, 19 nt, Homo sapiens
  misc_RNA (1)...(19): siRNA sense strand
guugagggcagucagcuuu

SEQ ID NO: 1444856 - RNA, 19 nt, Homo sapiens
  misc_RNA (1)...(19): siRNA sense strand
gaaacugacauggcgauca

SEQ ID NO: 1444857 - RNA, 19 nt, Homo sapiens
  misc_RNA (1)...(19): siRNA sense strand
cgacagcguauuacuggaa

SEQ ID NO: 1444858 - RNA, 19 nt, Homo sapiens
  misc_RNA (1)...(19): siRNA sense strand
cucugaagcuggcauggua

SEQ ID NO: 1444859 - RNA, 19 nt, Homo sapiens
  misc_RNA (1)...(19): siRNA sense strand
gaauauggaaacuaugucu

SEQ ID NO: 1444860 - RNA, 19 nt, Homo sapiens
  misc_RNA (1)...(19): siRNA sense strand
cagcuuuccugaagaugau

SEQ ID NO: 1444861 - RNA, 19 nt, Homo sapiens
  misc_RNA (1)...(19): siRNA sense strand
agaaaacugugcuaugaaa

SEQ ID NO: 1444862 - RNA, 19 nt, Homo sapiens
  misc_RNA (1)...(19): siRNA sense strand
ccuuaauacugucgacuau

SEQ ID NO: 1444863 - RNA, 19 nt, Homo sapiens
  misc_RNA (1)...(19): siRNA sense strand
uuugaacgacagcguauua

SEQ ID NO: 1444864 - RNA, 19 nt, Homo sapiens
  misc_RNA (1)...(19): siRNA sense strand
gcauuuagcauggaugaca

SEQ ID NO: 1444865 - RNA, 19 nt, Homo sapiens
  misc_RNA (1)...(19): siRNA sense strand
ucugcugucugugcauuua

SEQ ID NO: 1444866 - RNA, 19 nt, Homo sapiens
  misc_RNA (1)...(19): siRNA sense strand
uaaaugaaaugcccaaaac

SEQ ID NO: 1444867 - RNA, 19 nt, Homo sapiens
  misc_RNA (1)...(19): siRNA sense strand
gcguauuacuggaagagau

SEQ ID NO: 1444868 - RNA, 19 nt, Homo sapiens
  misc_RNA (1)...(19): siRNA sense strand
ugucauucaucaaaucuca

SEQ ID NO: 1444869 - RNA, 19 nt, Homo sapiens
  misc_RNA (1)...(19): siRNA sense strand
gaagacaaagugccaaagc

SEQ ID NO: 1444870 - RNA, 19 nt, Homo sapiens
  misc_RNA (1)...(19): siRNA sense strand
aaccaauguugcccucuuu

SEQ ID NO: 1444871 - RNA, 19 nt, Homo sapiens
  misc_RNA (1)...(19): siRNA sense strand
uugaguaccuuagaauaug

SEQ ID NO: 1444872 - RNA, 19 nt, Homo sapiens
  misc_RNA (1)...(19): siRNA sense strand
gaaugccacaacuuuauca

SEQ ID NO: 1444873 - RNA, 19 nt, Homo sapiens
  misc_RNA (1)...(19): siRNA sense strand
agaugaaugccacaacuuu

SEQ ID NO: 1444874 - RNA, 19 nt, Homo sapiens
  misc_RNA (1)...(19): siRNA sense strand
ugucgacuaucacuauuca

SEQ ID NO: 1444875 - RNA, 19 nt, Homo sapiens
  misc_RNA (1)...(19): siRNA sense strand
uuaaaguucuggcaaagac

SEQ ID NO: 1444876 - RNA, 19 nt, Homo sapiens
  misc_RNA (1)...(19): siRNA sense strand
ugacauggcgaucaagaca

SEQ ID NO: 1444877 - RNA, 19 nt, Homo sapiens
  misc_RNA (1)...(19): siRNA sense strand
ccaguccuuucucuuugaa

SEQ ID NO: 1444878 - RNA, 19 nt, Homo sapiens
  misc_RNA (1)...(19): siRNA sense strand
gcauucaaucccaugugua

SEQ ID NO: 1444879 - RNA, 19 nt, Homo sapiens
  misc_RNA (1)...(19): siRNA sense strand
caagaaacgaugagauggu

SEQ ID NO: 1444880 - RNA, 19 nt, Homo sapiens
  misc_RNA (1)...(19): siRNA sense strand
aaggcaagcauaaagauga

SEQ ID NO: 1444881 - RNA, 19 nt, Homo sapiens
  misc_RNA (1)...(19): siRNA sense strand
caucuuuguuggcucugaa

SEQ ID NO: 1444882 - RNA, 19 nt, Homo sapiens
  misc_RNA (1)...(19): siRNA sense strand
uaaaggcucggcugaacug

SEQ ID NO: 1444883 - RNA, 19 nt, Homo sapiens
  misc_RNA (1)...(19): siRNA sense strand
gaugggaagcuguauucug

SEQ ID NO: 1444884 - RNA, 19 nt, Homo sapiens
  misc_RNA (1)...(19): siRNA sense strand
gagaaaucgcugucgaaca

SEQ ID NO: 1444885 - RNA, 19 nt, Homo sapiens
  misc_RNA (1)...(19): siRNA sense strand
aggcaagcauaaagaugaa

SEQ ID NO: 1444886 - RNA, 19 nt, Homo sapiens
  misc_RNA (1)...(19): siRNA sense strand
cuacacagucaucuuuguu

SEQ ID NO: 1444887 - RNA, 19 nt, Homo sapiens
  misc_RNA (1)...(19): siRNA sense strand
ggacgcccuucaggcaaug

SEQ ID NO: 1444888 - RNA, 19 nt, Homo sapiens
  misc_RNA (1)...(19): siRNA sense strand
guucugcagucuauuacag

SEQ ID NO: 1444889 - RNA, 19 nt, Homo sapiens
  misc_RNA (1)...(19): siRNA sense strand
gacagcaguucccgaagac

SEQ ID NO: 1444890 - RNA, 19 nt, Homo sapiens
  misc_RNA (1)...(19): siRNA sense strand
guucugcugucugugcauu

SEQ ID NO: 1444891 - RNA, 19 nt, Homo sapiens
  misc_RNA (1)...(19): siRNA sense strand
gaacuacacagucaucuuu

SEQ ID NO: 1444892 - RNA, 19 nt, Homo sapiens
  misc_RNA (1)...(19): siRNA sense strand
ggacagcaguucccgaaga

SEQ ID NO: 1444893 - RNA, 19 nt, Homo sapiens
  misc_RNA (1)...(19): siRNA sense strand
gaaacucugucauucauca

SEQ ID NO: 1444894 - RNA, 19 nt, Homo sapiens
  misc_RNA (1)...(19): siRNA sense strand
ggaucaaguuuauacagua

SEQ ID NO: 1444895 - RNA, 19 nt, Homo sapiens
  misc_RNA (1)...(19): siRNA sense strand
gagaaacacuggacuucau

SEQ ID NO: 1444896 - RNA, 19 nt, Homo sapiens
  misc_RNA (1)...(19): siRNA sense strand
gaugaaugccacaacuuua

SEQ ID NO: 1444897 - RNA, 19 nt, Homo sapiens
  misc_RNA (1)...(19): siRNA sense strand
gaagcuggcaugguacuua

SEQ ID NO: 1444898 - RNA, 19 nt, Homo sapiens
  misc_RNA (1)...(19): siRNA sense strand
gaugagcccugguucacaa

SEQ ID NO: 1444899 - RNA, 19 nt, Homo sapiens
  misc_RNA (1)...(19): siRNA sense strand
acacuggacuucauuucua

SEQ ID NO: 1444900 - RNA, 19 nt, Homo sapiens
  misc_RNA (1)...(19): siRNA sense strand
agaaaucgcugucgaacau

SEQ ID NO: 1444901 - RNA, 19 nt, Homo sapiens
  misc_RNA (1)...(19): siRNA sense strand
gagccacacuuucuucaug

SEQ ID NO: 1444902 - RNA, 19 nt, Homo sapiens
  misc_RNA (1)...(19): siRNA sense strand
uagcauggaugacauugaa

SEQ ID NO: 1444903 - RNA, 19 nt, Homo sapiens
  misc_RNA (1)...(19): siRNA sense strand
gcaagaugcccauuugaug

SEQ ID NO: 1444904 - RNA, 19 nt, Homo sapiens
  misc_RNA (1)...(19): siRNA sense strand
gauguucugcagucuauua

SEQ ID NO: 1444905 - RNA, 19 nt, Homo sapiens
  misc_RNA (1)...(19): siRNA sense strand
cacaguggcugacuucuug

SEQ ID NO: 1444906 - RNA, 19 nt, Homo sapiens
  misc_RNA (1)...(19): siRNA sense strand
ggccagcgaugccguuauu

SEQ ID NO: 1444907 - RNA, 19 nt, Homo sapiens
  misc_RNA (1)...(19): siRNA sense strand
gaccaguccuuucucuuug

SEQ ID NO: 1444908 - RNA, 19 nt, Homo sapiens
  misc_RNA (1)...(19): siRNA sense strand
aaacugacauggcgaucaa

SEQ ID NO: 1444909 - RNA, 19 nt, Homo sapiens
  misc_RNA (1)...(19): siRNA sense strand
gcugaugguuucccaguug

SEQ ID NO: 1444910 - RNA, 19 nt, Homo sapiens
  misc_RNA (1)...(19): siRNA sense strand
cgagacacacuuuauauug

SEQ ID NO: 1444911 - RNA, 19 nt, Homo sapiens
  misc_RNA (1)...(19): siRNA sense strand
caaagacucgggucaggua

SEQ ID NO: 1444912 - RNA, 19 nt, Homo sapiens
  misc_RNA (1)...(19): siRNA sense strand
ccacgcagcucaauagcau

SEQ ID NO: 1444913 - RNA, 19 nt, Homo sapiens
  misc_RNA (1)...(19): siRNA sense strand
gaaaggcaagcauaaagau

SEQ ID NO: 1444914 - RNA, 19 nt, Homo sapiens
  misc_RNA (1)...(19): siRNA sense strand
uggcagggaucaaguuuau

SEQ ID NO: 1444915 - RNA, 19 nt, Homo sapiens
  misc_RNA (1)...(19): siRNA sense strand
gaacgacagcguauuacug

SEQ ID NO: 1444916 - RNA, 19 nt, Homo sapiens
  misc_RNA (1)...(19): siRNA sense strand
uuaauacugucgacuauca

SEQ ID NO: 1444917 - RNA, 19 nt, Homo sapiens
  misc_RNA (1)...(19): siRNA sense strand
ccagcgaugccguuauuua

SEQ ID NO: 1444918 - RNA, 19 nt, Homo sapiens
  misc_RNA (1)...(19): siRNA sense strand
gagacacacuuuauauugc

SEQ ID NO: 1444919 - RNA, 19 nt, Homo sapiens
  misc_RNA (1)...(19): siRNA sense strand
gaacagaaaacuccagauu

SEQ ID NO: 1444920 - RNA, 19 nt, Homo sapiens
  misc_RNA (1)...(19): siRNA sense strand
caaaggacgguuuaaggaa

SEQ ID NO: 1444921 - RNA, 19 nt, Homo sapiens
  misc_RNA (1)...(19): siRNA sense strand
gaaacacuggacuucauuu

SEQ ID NO: 1444922 - RNA, 19 nt, Homo sapiens
  misc_RNA (1)...(19): siRNA sense strand
gaucugcccuucgcacaau

SEQ ID NO: 1444923 - RNA, 19 nt, Homo sapiens
  misc_RNA (1)...(19): siRNA sense strand
cgagaaaacugugcuauga

SEQ ID NO: 1444924 - RNA, 19 nt, Homo sapiens
  misc_RNA (1)...(19): siRNA sense strand
uaccagaacuacacaguca

SEQ ID NO: 1444925 - RNA, 19 nt, Homo sapiens
  misc_RNA (1)...(19): siRNA sense strand
ucaaggcaauauccgguuu

SEQ ID NO: 1444926 - RNA, 19 nt, Homo sapiens
  misc_RNA (1)...(19): siRNA sense strand
gggaucaaguuuauacagu

SEQ ID NO: 1444927 - RNA, 19 nt, Homo sapiens
  misc_RNA (1)...(19): siRNA sense strand
ucaaucccauguguagaua

SEQ ID NO: 1444928 - RNA, 19 nt, Homo sapiens
  misc_RNA (1)...(19): siRNA sense strand
uauaaaaccuccaucgauu

SEQ ID NO: 1444929 - RNA, 19 nt, Homo sapiens
  misc_RNA (1)...(19): siRNA sense strand
gcagggaucaaguuuauac

SEQ ID NO: 1444930 - RNA, 19 nt, Homo sapiens
  misc_RNA (1)...(19): siRNA sense strand
ucaaaggacgguuuaagga

SEQ ID NO: 1444931 - RNA, 19 nt, Homo sapiens
  misc_RNA (1)...(19): siRNA sense strand
ugaguaccuuagaauauga

SEQ ID NO: 1444932 - RNA, 19 nt, Homo sapiens
  misc_RNA (1)...(19): siRNA sense strand
gcccaaaacagaaguaaua

SEQ ID NO: 1444933 - RNA, 19 nt, Homo sapiens
  misc_RNA (1)...(19): siRNA sense strand
aagcuggcaugguacuuaa

SEQ ID NO: 1444934 - RNA, 19 nt, Homo sapiens
  misc_RNA (1)...(19): siRNA sense strand
aaaucgcugucgaacauaa

SEQ ID NO: 1444935 - RNA, 19 nt, Homo sapiens
  misc_RNA (1)...(19): siRNA sense strand
ugaaaggcaagcauaaaga

SEQ ID NO: 1444936 - RNA, 19 nt, Homo sapiens
  misc_RNA (1)...(19): siRNA sense strand
gagcccugguucacaaaga

SEQ ID NO: 1444937 - RNA, 19 nt, Homo sapiens
  misc_RNA (1)...(19): siRNA sense strand
aagaaacgaugagaugguu

SEQ ID NO: 1444938 - RNA, 19 nt, Homo sapiens
  misc_RNA (1)...(19): siRNA sense strand
gaugaugaaccccuuaaua

SEQ ID NO: 1444939 - RNA, 19 nt, Homo sapiens
  misc_RNA (1)...(19): siRNA sense strand
agaccaguccuuucucuuu

SEQ ID NO: 1444940 - RNA, 19 nt, Homo sapiens
  misc_RNA (1)...(19): siRNA sense strand
guugaguaccuuagaauau

SEQ ID NO: 1444941 - RNA, 19 nt, Homo sapiens
  misc_RNA (1)...(19): siRNA sense strand
gauugaagccuacaaccau

SEQ ID NO: 1444942 - RNA, 19 nt, Homo sapiens
  misc_RNA (1)...(19): siRNA sense strand
ggagaaacacuggacuuca

SEQ ID NO: 1444943 - RNA, 19 nt, Homo sapiens
  misc_RNA (1)...(19): siRNA sense strand
cagcgaugccguuauuuau

SEQ ID NO: 1444944 - RNA, 19 nt, Homo sapiens
  misc_RNA (1)...(19): siRNA sense strand
aaaccaauguugcccucuu

SEQ ID NO: 1444945 - RNA, 19 nt, Homo sapiens
  misc_RNA (1)...(19): siRNA sense strand
gcaagcauaaagaugaaug

SEQ ID NO: 1444946 - RNA, 19 nt, Homo sapiens
  misc_RNA (1)...(19): siRNA sense strand
cacuggacuucauuucuaa

SEQ ID NO: 1444947 - RNA, 19 nt, Homo sapiens
  misc_RNA (1)...(19): siRNA sense strand
gaaaucgcugucgaacaua

SEQ ID NO: 1444948 - RNA, 19 nt, Homo sapiens
  misc_RNA (1)...(19): siRNA sense strand
acacuuucuucaugccaua

SEQ ID NO: 1444949 - RNA, 19 nt, Homo sapiens
  misc_RNA (1)...(19): siRNA sense strand
gguugaguaccuuagaaua

SEQ ID NO: 1444950 - RNA, 19 nt, Homo sapiens
  misc_RNA (1)...(19): siRNA sense strand
cagcugauguugaaaauuc

SEQ ID NO: 1444951 - RNA, 19 nt, Homo sapiens
  misc_RNA (1)...(19): siRNA sense strand
guauucaaaggacgguuua

SEQ ID NO: 1444952 - RNA, 19 nt, Homo sapiens
  misc_RNA (1)...(19): siRNA sense strand
aagcaugggugauggaucu

SEQ ID NO: 1444953 - RNA, 19 nt, Homo sapiens
  misc_RNA (1)...(19): siRNA sense strand
uuaguggccuggcaagaug

SEQ ID NO: 1444954 - RNA, 19 nt, Homo sapiens
  misc_RNA (1)...(19): siRNA sense strand
aaagaugaaugccacaacu

SEQ ID NO: 1444955 - RNA, 19 nt, Homo sapiens
  misc_RNA (1)...(19): siRNA sense strand
guugagggcagucagcuuu

SEQ ID NO: 1444956 - RNA, 19 nt, Homo sapiens
  misc_RNA (1)...(19): siRNA sense strand
gaaacugacauggcgauca

SEQ ID NO: 1444957 - RNA, 19 nt, Homo sapiens
  misc_RNA (1)...(19): siRNA sense strand
cgacagcguauuacuggaa

SEQ ID NO: 1444958 - RNA, 19 nt, Homo sapiens
  misc_RNA (1)...(19): siRNA sense strand
cucugaagcuggcauggua

SEQ ID NO: 1444959 - RNA, 19 nt, Homo sapiens
  misc_RNA (1)...(19): siRNA sense strand
gaauauggaaacuaugucu

SEQ ID NO: 1444960 - RNA, 19 nt, Homo sapiens
  misc_RNA (1)...(19): siRNA sense strand
cagcuuuccugaagaugau

SEQ ID NO: 1444961 - RNA, 19 nt, Homo sapiens
  misc_RNA (1)...(19): siRNA sense strand
agaaaacugugcuaugaaa

SEQ ID NO: 1444962 - RNA, 19 nt, Homo sapiens
  misc_RNA (1)...(19): siRNA sense strand
ccuuaauacugucgacuau

SEQ ID NO: 1444963 - RNA, 19 nt, Homo sapiens
  misc_RNA (1)...(19): siRNA sense strand
uuugaacgacagcguauua

SEQ ID NO: 1444964 - RNA, 19 nt, Homo sapiens
  misc_RNA (1)...(19): siRNA sense strand
gcauuuagcauggaugaca

SEQ ID NO: 1444965 - RNA, 19 nt, Homo sapiens
  misc_RNA (1)...(19): siRNA sense strand
ucugcugucugugcauuua

SEQ ID NO: 1444966 - RNA, 19 nt, Homo sapiens
  misc_RNA (1)...(19): siRNA sense strand
uaaaugaaaugcccaaaac

SEQ ID NO: 1444967 - RNA, 19 nt, Homo sapiens
  misc_RNA (1)...(19): siRNA sense strand
gcguauuacuggaagagau

SEQ ID NO: 1444968 - RNA, 19 nt, Homo sapiens
  misc_RNA (1)...(19): siRNA sense strand
ugucauucaucaaaucuca

SEQ ID NO: 1444969 - RNA, 19 nt, Homo sapiens
  misc_RNA (1)...(19): siRNA sense strand
gaagacaaagugccaaagc

SEQ ID NO: 1444970 - RNA, 19 nt, Homo sapiens
  misc_RNA (1)...(19): siRNA sense strand
aaccaauguugcccucuuu

SEQ ID NO: 1444971 - RNA, 19 nt, Homo sapiens
  misc_RNA (1)...(19): siRNA sense strand
uugaguaccuuagaauaug

SEQ ID NO: 1444972 - RNA, 19 nt, Homo sapiens
  misc_RNA (1)...(19): siRNA sense strand
gaaugccacaacuuuauca

SEQ ID NO: 1444973 - RNA, 19 nt, Homo sapiens
  misc_RNA (1)...(19): siRNA sense strand
agaugaaugccacaacuuu

SEQ ID NO: 1444974 - RNA, 19 nt, Homo sapiens
  misc_RNA (1)...(19): siRNA sense strand
ugucgacuaucacuauuca

SEQ ID NO: 1444975 - RNA, 19 nt, Homo sapiens
  misc_RNA (1)...(19): siRNA sense strand
uuaaaguucuggcaaagac

SEQ ID NO: 1444976 - RNA, 19 nt, Homo sapiens
  misc_RNA (1)...(19): siRNA sense strand
ugacauggcgaucaagaca

SEQ ID NO: 1444977 - RNA, 19 nt, Homo sapiens
  misc_RNA (1)...(19): siRNA sense strand
ccaguccuuucucuuugaa

SEQ ID NO: 1444978 - RNA, 19 nt, Homo sapiens
  misc_RNA (1)...(19): siRNA sense strand
gcauucaaucccaugugua

SEQ ID NO: 1444979 - RNA, 19 nt, Homo sapiens
  misc_RNA (1)...(19): siRNA sense strand
caagaaacgaugagauggu

SEQ ID NO: 1444980 - RNA, 19 nt, Homo sapiens
  misc_RNA (1)...(19): siRNA sense strand
aaggcaagcauaaagauga

SEQ ID NO: 1444981 - RNA, 19 nt, Homo sapiens
  misc_RNA (1)...(19): siRNA sense strand
caucuuuguuggcucugaa

SEQ ID NO: 1444982 - RNA, 19 nt, Homo sapiens
  misc_RNA (1)...(19): siRNA sense strand
uaaaggcucggcugaacug

SEQ ID NO: 1444983 - RNA, 19 nt, Homo sapiens
  misc_RNA (1)...(19): siRNA sense strand
gaugggaagcuguauucug

SEQ ID NO: 1444984 - RNA, 19 nt, Homo sapiens
  misc_RNA (1)...(19): siRNA sense strand
gagaaaucgcugucgaaca

SEQ ID NO: 1444985 - RNA, 19 nt, Homo sapiens
  misc_RNA (1)...(19): siRNA sense strand
aggcaagcauaaagaugaa

SEQ ID NO: 1444986 - RNA, 19 nt, Homo sapiens
  misc_RNA (1)...(19): siRNA sense strand
cuacacagucaucuuuguu

SEQ ID NO: 1444987 - RNA, 19 nt, Homo sapiens
  misc_RNA (1)...(19): siRNA sense strand
ggacgcccuucaggcaaug

SEQ ID NO: 1444988 - RNA, 19 nt, Homo sapiens
  misc_RNA (1)...(19): siRNA sense strand
guucugcagucuauuacag

SEQ ID NO: 1444989 - RNA, 19 nt, Homo sapiens
  misc_RNA (1)...(19): siRNA sense strand
gacagcaguucccgaagac

SEQ ID NO: 1444990 - RNA, 19 nt, Homo sapiens
  misc_RNA (1)...(19): siRNA sense strand
guucugcugucugugcauu

SEQ ID NO: 1444991 - RNA, 19 nt, Homo sapiens
  misc_RNA (1)...(19): siRNA sense strand
gaacuacacagucaucuuu

SEQ ID NO: 1444992 - RNA, 19 nt, Homo sapiens
  misc_RNA (1)...(19): siRNA sense strand
ggacagcaguucccgaaga

SEQ ID NO: 1444993 - RNA, 19 nt, Homo sapiens
  misc_RNA (1)...(19): siRNA sense strand
gaaacucugucauucauca

SEQ ID NO: 1444994 - RNA, 19 nt, Homo sapiens
  misc_RNA (1)...(19): siRNA sense strand
ggaucaaguuuauacagua

SEQ ID NO: 1444995 - RNA, 19 nt, Homo sapiens
  misc_RNA (1)...(19): siRNA sense strand
gagaaacacuggacuucau

SEQ ID NO: 1444996 - RNA, 19 nt, Homo sapiens
  misc_RNA (1)...(19): siRNA sense strand
gaugaaugccacaacuuua

SEQ ID NO: 1444997 - RNA, 19 nt, Homo sapiens
  misc_RNA (1)...(19): siRNA sense strand
gaagcuggcaugguacuua

SEQ ID NO: 1444998 - RNA, 19 nt, Homo sapiens
  misc_RNA (1)...(19): siRNA sense strand
gaugagcccugguucacaa

SEQ ID NO: 1444999 - RNA, 19 nt, Homo sapiens
  misc_RNA (1)...(19): siRNA sense strand
acacuggacuucauuucua

SEQ ID NO: 1445000 - RNA, 19 nt, Homo sapiens
  misc_RNA (1)...(19): siRNA sense strand
agaaaucgcugucgaacau

SEQ ID NO: 1445001 - RNA, 19 nt, Homo sapiens
  misc_RNA (1)...(19): siRNA sense strand
gagccacacuuucuucaug

SEQ ID NO: 1445002 - RNA, 19 nt, Homo sapiens
  misc_RNA (1)...(19): siRNA sense strand
uagcauggaugacauugaa

SEQ ID NO: 1445003 - RNA, 19 nt, Homo sapiens
  misc_RNA (1)...(19): siRNA sense strand
gcaagaugcccauuugaug

SEQ ID NO: 1445004 - RNA, 19 nt, Homo sapiens
  misc_RNA (1)...(19): siRNA sense strand
gauguucugcagucuauua

SEQ ID NO: 1445005 - RNA, 19 nt, Homo sapiens
  misc_RNA (1)...(19): siRNA sense strand
cacaguggcugacuucuug

SEQ ID NO: 1445006 - RNA, 19 nt, Homo sapiens
  misc_RNA (1)...(19): siRNA sense strand
ggccagcgaugccguuauu

SEQ ID NO: 1445007 - RNA, 19 nt, Homo sapiens
  misc_RNA (1)...(19): siRNA sense strand
gaccaguccuuucucuuug

SEQ ID NO: 1445008 - RNA, 19 nt, Homo sapiens
  misc_RNA (1)...(19): siRNA sense strand
aaacugacauggcgaucaa

SEQ ID NO: 1445009 - RNA, 19 nt, Homo sapiens
  misc_RNA (1)...(19): siRNA sense strand
gcugaugguuucccaguug

SEQ ID NO: 1445010 - RNA, 19 nt, Homo sapiens
  misc_RNA (1)...(19): siRNA sense strand
cgagacacacuuuauauug

SEQ ID NO: 1445011 - RNA, 19 nt, Homo sapiens
  misc_RNA (1)...(19): siRNA sense strand
caaagacucgggucaggua

SEQ ID NO: 1445012 - RNA, 19 nt, Homo sapiens
  misc_RNA (1)...(19): siRNA sense strand
ccacgcagcucaauagcau

SEQ ID NO: 1445013 - RNA, 19 nt, Homo sapiens
  misc_RNA (1)...(19): siRNA sense strand
gaaaggcaagcauaaagau

SEQ ID NO: 1445014 - RNA, 19 nt, Homo sapiens
  misc_RNA (1)...(19): siRNA sense strand
uggcagggaucaaguuuau

SEQ ID NO: 1445015 - RNA, 19 nt, Homo sapiens
  misc_RNA (1)...(19): siRNA sense strand
gaacgacagcguauuacug

SEQ ID NO: 1445016 - RNA, 19 nt, Homo sapiens
  misc_RNA (1)...(19): siRNA sense strand
uuaauacugucgacuauca

SEQ ID NO: 1445017 - RNA, 19 nt, Homo sapiens
  misc_RNA (1)...(19): siRNA sense strand
ccagcgaugccguuauuua

SEQ ID NO: 1445018 - RNA, 19 nt, Homo sapiens
  misc_RNA (1)...(19): siRNA sense strand
gagacacacuuuauauugc

SEQ ID NO: 1445019 - RNA, 19 nt, Homo sapiens
  misc_RNA (1)...(19): siRNA sense strand
gaacagaaaacuccagauu

SEQ ID NO: 1445020 - RNA, 19 nt, Homo sapiens
  misc_RNA (1)...(19): siRNA sense strand
caaaggacgguuuaaggaa

SEQ ID NO: 1445021 - RNA, 19 nt, Homo sapiens
  misc_RNA (1)...(19): siRNA sense strand
gaaacacuggacuucauuu

SEQ ID NO: 1445022 - RNA, 19 nt, Homo sapiens
  misc_RNA (1)...(19): siRNA sense strand
gaucugcccuucgcacaau

SEQ ID NO: 1445023 - RNA, 19 nt, Homo sapiens
  misc_RNA (1)...(19): siRNA sense strand
cgagaaaacugugcuauga

SEQ ID NO: 1445024 - RNA, 19 nt, Homo sapiens
  misc_RNA (1)...(19): siRNA sense strand
uaccagaacuacacaguca

SEQ ID NO: 1445025 - RNA, 19 nt, Homo sapiens
  misc_RNA (1)...(19): siRNA sense strand
ucaaggcaauauccgguuu

SEQ ID NO: 1445026 - RNA, 19 nt, Homo sapiens
  misc_RNA (1)...(19): siRNA sense strand
gggaucaaguuuauacagu

SEQ ID NO: 1445027 - RNA, 19 nt, Homo sapiens
  misc_RNA (1)...(19): siRNA sense strand
ucaaucccauguguagaua

SEQ ID NO: 1445028 - RNA, 19 nt, Homo sapiens
  misc_RNA (1)...(19): siRNA sense strand
uauaaaaccuccaucgauu

SEQ ID NO: 1445029 - RNA, 19 nt, Homo sapiens
  misc_RNA (1)...(19): siRNA sense strand
gcagggaucaaguuuauac

SEQ ID NO: 1445030 - RNA, 19 nt, Homo sapiens
  misc_RNA (1)...(19): siRNA sense strand
ucaaaggacgguuuaagga

SEQ ID NO: 1445031 - RNA, 19 nt, Homo sapiens
  misc_RNA (1)...(19): siRNA sense strand
ugaguaccuuagaauauga

SEQ ID NO: 1445032 - RNA, 19 nt, Homo sapiens
  misc_RNA (1)...(19): siRNA sense strand
gcccaaaacagaaguaaua

SEQ ID NO: 1445033 - RNA, 19 nt, Homo sapiens
  misc_RNA (1)...(19): siRNA sense strand
aagcuggcaugguacuuaa

SEQ ID NO: 1445034 - RNA, 19 nt, Homo sapiens
  misc_RNA (1)...(19): siRNA sense strand
aaaucgcugucgaacauaa

SEQ ID NO: 1445035 - RNA, 19 nt, Homo sapiens
  misc_RNA (1)...(19): siRNA sense strand
ugaaaggcaagcauaaaga

SEQ ID NO: 1445036 - RNA, 19 nt, Homo sapiens
  misc_RNA (1)...(19): siRNA sense strand
gagcccugguucacaaaga

SEQ ID NO: 1445037 - RNA, 19 nt, Homo sapiens
  misc_RNA (1)...(19): siRNA sense strand
aagaaacgaugagaugguu

SEQ ID NO: 1445038 - RNA, 19 nt, Homo sapiens
  misc_RNA (1)...(19): siRNA sense strand
gaugaugaaccccuuaaua

SEQ ID NO: 1445039 - RNA, 19 nt, Homo sapiens
  misc_RNA (1)...(19): siRNA sense strand
agaccaguccuuucucuuu

SEQ ID NO: 1445040 - RNA, 19 nt, Homo sapiens
  misc_RNA (1)...(19): siRNA sense strand
guugaguaccuuagaauau

SEQ ID NO: 1445041 - RNA, 19 nt, Homo sapiens
  misc_RNA (1)...(19): siRNA sense strand
gauugaagccuacaaccau

SEQ ID NO: 1445042 - RNA, 19 nt, Homo sapiens
  misc_RNA (1)...(19): siRNA sense strand
ggagaaacacuggacuuca

SEQ ID NO: 1445043 - RNA, 19 nt, Homo sapiens
  misc_RNA (1)...(19): siRNA sense strand
cagcgaugccguuauuuau

SEQ ID NO: 1445044 - RNA, 19 nt, Homo sapiens
  misc_RNA (1)...(19): siRNA sense strand
aaaccaauguugcccucuu

SEQ ID NO: 1445045 - RNA, 19 nt, Homo sapiens
  misc_RNA (1)...(19): siRNA sense strand
gcaagcauaaagaugaaug

SEQ ID NO: 1445046 - RNA, 19 nt, Homo sapiens
  misc_RNA (1)...(19): siRNA sense strand
cacuggacuucauuucuaa

SEQ ID NO: 1445047 - RNA, 19 nt, Homo sapiens
  misc_RNA (1)...(19): siRNA sense strand
gaaaucgcugucgaacaua

SEQ ID NO: 1445048 - RNA, 19 nt, Homo sapiens
  misc_RNA (1)...(19): siRNA sense strand
acacuuucuucaugccaua

SEQ ID NO: 1445049 - RNA, 19 nt, Homo sapiens
  misc_RNA (1)...(19): siRNA sense strand
gguugaguaccuuagaaua

SEQ ID NO: 1445050 - RNA, 19 nt, Homo sapiens
  misc_RNA (1)...(19): siRNA sense strand
cagcugauguugaaaauuc

SEQ ID NO: 1445051 - RNA, 19 nt, Homo sapiens
  misc_RNA (1)...(19): siRNA sense strand
guauucaaaggacgguuua

SEQ ID NO: 1445052 - RNA, 19 nt, Homo sapiens
  misc_RNA (1)...(19): siRNA sense strand
aagcaugggugauggaucu

SEQ ID NO: 1445053 - RNA, 19 nt, Homo sapiens
  misc_RNA (1)...(19): siRNA sense strand
uuaguggccuggcaagaug

SEQ ID NO: 1445054 - RNA, 19 nt, Homo sapiens
  misc_RNA (1)...(19): siRNA sense strand
aaagaugaaugccacaacu

SEQ ID NO: 1445055 - RNA, 19 nt, Homo sapiens
  misc_RNA (1)...(19): siRNA sense strand
guugagggcagucagcuuu

SEQ ID NO: 1445056 - RNA, 19 nt, Homo sapiens
  misc_RNA (1)...(19): siRNA sense strand
gaaacugacauggcgauca

SEQ ID NO: 1445057 - RNA, 19 nt, Homo sapiens
  misc_RNA (1)...(19): siRNA sense strand
cgacagcguauuacuggaa

SEQ ID NO: 1445058 - RNA, 19 nt, Homo sapiens
  misc_RNA (1)...(19): siRNA sense strand
cucugaagcuggcauggua

SEQ ID NO: 1445059 - RNA, 19 nt, Homo sapiens
  misc_RNA (1)...(19): siRNA sense strand
gaauauggaaacuaugucu

SEQ ID NO: 1445060 - RNA, 19 nt, Homo sapiens
  misc_RNA (1)...(19): siRNA sense strand
cagcuuuccugaagaugau

SEQ ID NO: 1445061 - RNA, 19 nt, Homo sapiens
  misc_RNA (1)...(19): siRNA sense strand
agaaaacugugcuaugaaa

SEQ ID NO: 1445062 - RNA, 19 nt, Homo sapiens
  misc_RNA (1)...(19): siRNA sense strand
ccuuaauacugucgacuau

SEQ ID NO: 1445063 - RNA, 19 nt, Homo sapiens
  misc_RNA (1)...(19): siRNA sense strand
uuugaacgacagcguauua

SEQ ID NO: 1445064 - RNA, 19 nt, Homo sapiens
  misc_RNA (1)...(19): siRNA sense strand
gcauuuagcauggaugaca

SEQ ID NO: 1445065 - RNA, 19 nt, Homo sapiens
  misc_RNA (1)...(19): siRNA sense strand
ucugcugucugugcauuua

SEQ ID NO: 1445066 - RNA, 19 nt, Homo sapiens
  misc_RNA (1)...(19): siRNA sense strand
uaaaugaaaugcccaaaac

SEQ ID NO: 1445067 - RNA, 19 nt, Homo sapiens
  misc_RNA (1)...(19): siRNA sense strand
gcguauuacuggaagagau

SEQ ID NO: 1445068 - RNA, 19 nt, Homo sapiens
  misc_RNA (1)...(19): siRNA sense strand
ugucauucaucaaaucuca

SEQ ID NO: 1445069 - RNA, 19 nt, Homo sapiens
  misc_RNA (1)...(19): siRNA sense strand
gaagacaaagugccaaagc

SEQ ID NO: 1445070 - RNA, 19 nt, Homo sapiens
  misc_RNA (1)...(19): siRNA sense strand
aaccaauguugcccucuuu

SEQ ID NO: 1445071 - RNA, 19 nt, Homo sapiens
  misc_RNA (1)...(19): siRNA sense strand
uugaguaccuuagaauaug

SEQ ID NO: 1445072 - RNA, 19 nt, Homo sapiens
  misc_RNA (1)...(19): siRNA sense strand
gaaugccacaacuuuauca

SEQ ID NO: 1445073 - RNA, 19 nt, Homo sapiens
  misc_RNA (1)...(19): siRNA sense strand
agaugaaugccacaacuuu

SEQ ID NO: 1445074 - RNA, 19 nt, Homo sapiens
  misc_RNA (1)...(19): siRNA sense strand
ugucgacuaucacuauuca

SEQ ID NO: 1445075 - RNA, 19 nt, Homo sapiens
  misc_RNA (1)...(19): siRNA sense strand
uuaaaguucuggcaaagac

SEQ ID NO: 1445076 - RNA, 19 nt, Homo sapiens
  misc_RNA (1)...(19): siRNA sense strand
ugacauggcgaucaagaca

SEQ ID NO: 1445077 - RNA, 19 nt, Homo sapiens
  misc_RNA (1)...(19): siRNA sense strand
ccaguccuuucucuuugaa

SEQ ID NO: 1445078 - RNA, 19 nt, Homo sapiens
  misc_RNA (1)...(19): siRNA sense strand
gcauucaaucccaugugua

SEQ ID NO: 1445079 - RNA, 19 nt, Homo sapiens
  misc_RNA (1)...(19): siRNA sense strand
caagaaacgaugagauggu

SEQ ID NO: 1445080 - RNA, 19 nt, Homo sapiens
  misc_RNA (1)...(19): siRNA sense strand
aaggcaagcauaaagauga

SEQ ID NO: 1445081 - RNA, 19 nt, Homo sapiens
  misc_RNA (1)...(19): siRNA sense strand
caucuuuguuggcucugaa

SEQ ID NO: 1445082 - RNA, 19 nt, Homo sapiens
  misc_RNA (1)...(19): siRNA sense strand
uaaaggcucggcugaacug

SEQ ID NO: 1445083 - RNA, 19 nt, Homo sapiens
  misc_RNA (1)...(19): siRNA sense strand
gaugggaagcuguauucug

SEQ ID NO: 1445084 - RNA, 19 nt, Homo sapiens
  misc_RNA (1)...(19): siRNA sense strand
gagaaaucgcugucgaaca

SEQ ID NO: 1445085 - RNA, 19 nt, Homo sapiens
  misc_RNA (1)...(19): siRNA sense strand
aggcaagcauaaagaugaa

SEQ ID NO: 1445086 - RNA, 19 nt, Homo sapiens
  misc_RNA (1)...(19): siRNA sense strand
cuacacagucaucuuuguu

SEQ ID NO: 1445087 - RNA, 19 nt, Homo sapiens
  misc_RNA (1)...(19): siRNA sense strand
ggacgcccuucaggcaaug

SEQ ID NO: 1445088 - RNA, 19 nt, Homo sapiens
  misc_RNA (1)...(19): siRNA sense strand
guucugcagucuauuacag

SEQ ID NO: 1445089 - RNA, 19 nt, Homo sapiens
  misc_RNA (1)...(19): siRNA sense strand
gacagcaguucccgaagac

SEQ ID NO: 1445090 - RNA, 19 nt, Homo sapiens
  misc_RNA (1)...(19): siRNA sense strand
guucugcugucugugcauu

SEQ ID NO: 1445091 - RNA, 19 nt, Homo sapiens
  misc_RNA (1)...(19): siRNA sense strand
gaacuacacagucaucuuu

SEQ ID NO: 1445092 - RNA, 19 nt, Homo sapiens
  misc_RNA (1)...(19): siRNA sense strand
ggacagcaguucccgaaga

SEQ ID NO: 1445093 - RNA, 19 nt, Homo sapiens
  misc_RNA (1)...(19): siRNA sense strand
gaaacucugucauucauca

SEQ ID NO: 1445094 - RNA, 19 nt, Homo sapiens
  misc_RNA (1)...(19): siRNA sense strand
ggaucaaguuuauacagua

SEQ ID NO: 1445095 - RNA, 19 nt, Homo sapiens
  misc_RNA (1)...(19): siRNA sense strand
gagaaacacuggacuucau

SEQ ID NO: 1445096 - RNA, 19 nt, Homo sapiens
  misc_RNA (1)...(19): siRNA sense strand
gaugaaugccacaacuuua

SEQ ID NO: 1445097 - RNA, 19 nt, Homo sapiens
  misc_RNA (1)...(19): siRNA sense strand
gaagcuggcaugguacuua

SEQ ID NO: 1445098 - RNA, 19 nt, Homo sapiens
  misc_RNA (1)...(19): siRNA sense strand
gaugagcccugguucacaa

SEQ ID NO: 1445099 - RNA, 19 nt, Homo sapiens
  misc_RNA (1)...(19): siRNA sense strand
acacuggacuucauuucua

SEQ ID NO: 1445100 - RNA, 19 nt, Homo sapiens
  misc_RNA (1)...(19): siRNA sense strand
agaaaucgcugucgaacau

SEQ ID NO: 1445101 - RNA, 19 nt, Homo sapiens
  misc_RNA (1)...(19): siRNA sense strand
gagccacacuuucuucaug

SEQ ID NO: 1445102 - RNA, 19 nt, Homo sapiens
  misc_RNA (1)...(19): siRNA sense strand
uagcauggaugacauugaa

SEQ ID NO: 1445103 - RNA, 19 nt, Homo sapiens
  misc_RNA (1)...(19): siRNA sense strand
gcaagaugcccauuugaug

SEQ ID NO: 1445104 - RNA, 19 nt, Homo sapiens
  misc_RNA (1)...(19): siRNA sense strand
gauguucugcagucuauua

SEQ ID NO: 1445105 - RNA, 19 nt, Homo sapiens
  misc_RNA (1)...(19): siRNA sense strand
cacaguggcugacuucuug

SEQ ID NO: 1445106 - RNA, 19 nt, Homo sapiens
  misc_RNA (1)...(19): siRNA sense strand
ggccagcgaugccguuauu

SEQ ID NO: 1445107 - RNA, 19 nt, Homo sapiens
  misc_RNA (1)...(19): siRNA sense strand
gaccaguccuuucucuuug

SEQ ID NO: 1445108 - RNA, 19 nt, Homo sapiens
  misc_RNA (1)...(19): siRNA sense strand
aaacugacauggcgaucaa

SEQ ID NO: 1445109 - RNA, 19 nt, Homo sapiens
  misc_RNA (1)...(19): siRNA sense strand
gcugaugguuucccaguug

SEQ ID NO: 1445110 - RNA, 19 nt, Homo sapiens
  misc_RNA (1)...(19): siRNA sense strand
cgagacacacuuuauauug

SEQ ID NO: 1445111 - RNA, 19 nt, Homo sapiens
  misc_RNA (1)...(19): siRNA sense strand
caaagacucgggucaggua

SEQ ID NO: 1445112 - RNA, 19 nt, Homo sapiens
  misc_RNA (1)...(19): siRNA sense strand
ccacgcagcucaauagcau

SEQ ID NO: 1445113 - RNA, 19 nt, Homo sapiens
  misc_RNA (1)...(19): siRNA sense strand
gaaaggcaagcauaaagau

SEQ ID NO: 1445114 - RNA, 19 nt, Homo sapiens
  misc_RNA (1)...(19): siRNA sense strand
uggcagggaucaaguuuau

SEQ ID NO: 1445115 - RNA, 19 nt, Homo sapiens
  misc_RNA (1)...(19): siRNA sense strand
gaacgacagcguauuacug

SEQ ID NO: 1445116 - RNA, 19 nt, Homo sapiens
  misc_RNA (1)...(19): siRNA sense strand
uuaauacugucgacuauca

SEQ ID NO: 1445117 - RNA, 19 nt, Homo sapiens
  misc_RNA (1)...(19): siRNA sense strand
ccagcgaugccguuauuua

SEQ ID NO: 1445118 - RNA, 19 nt, Homo sapiens
  misc_RNA (1)...(19): siRNA sense strand
gagacacacuuuauauugc

SEQ ID NO: 1445119 - RNA, 19 nt, Homo sapiens
  misc_RNA (1)...(19): siRNA sense strand
gaacagaaaacuccagauu

SEQ ID NO: 1445120 - RNA, 19 nt, Homo sapiens
  misc_RNA (1)...(19): siRNA sense strand
caaaggacgguuuaaggaa

SEQ ID NO: 1445121 - RNA, 19 nt, Homo sapiens
  misc_RNA (1)...(19): siRNA sense strand
gaaacacuggacuucauuu

SEQ ID NO: 1445122 - RNA, 19 nt, Homo sapiens
  misc_RNA (1)...(19): siRNA sense strand
gaucugcccuucgcacaau

SEQ ID NO: 1445123 - RNA, 19 nt, Homo sapiens
  misc_RNA (1)...(19): siRNA sense strand
cgagaaaacugugcuauga

SEQ ID NO: 1445124 - RNA, 19 nt, Homo sapiens
  misc_RNA (1)...(19): siRNA sense strand
uaccagaacuacacaguca

SEQ ID NO: 1445125 - RNA, 19 nt, Homo sapiens
  misc_RNA (1)...(19): siRNA sense strand
ucaaggcaauauccgguuu

SEQ ID NO: 1445126 - RNA, 19 nt, Homo sapiens
  misc_RNA (1)...(19): siRNA sense strand
gggaucaaguuuauacagu

SEQ ID NO: 1445127 - RNA, 19 nt, Homo sapiens
  misc_RNA (1)...(19): siRNA sense strand
ucaaucccauguguagaua

SEQ ID NO: 1445128 - RNA, 19 nt, Homo sapiens
  misc_RNA (1)...(19): siRNA sense strand
uauaaaaccuccaucgauu

SEQ ID NO: 1445129 - RNA, 19 nt, Homo sapiens
  misc_RNA (1)...(19): siRNA sense strand
gcagggaucaaguuuauac

SEQ ID NO: 1445130 - RNA, 19 nt, Homo sapiens
  misc_RNA (1)...(19): siRNA sense strand
ucaaaggacgguuuaagga

SEQ ID NO: 1445131 - RNA, 19 nt, Homo sapiens
  misc_RNA (1)...(19): siRNA sense strand
ugaguaccuuagaauauga

SEQ ID NO: 1445132 - RNA, 19 nt, Homo sapiens
  misc_RNA (1)...(19): siRNA sense strand
gcccaaaacagaaguaaua

SEQ ID NO: 1445133 - RNA, 19 nt, Homo sapiens
  misc_RNA (1)...(19): siRNA sense strand
aagcuggcaugguacuuaa

SEQ ID NO: 1445134 - RNA, 19 nt, Homo sapiens
  misc_RNA (1)...(19): siRNA sense strand
aaaucgcugucgaacauaa

SEQ ID NO: 1445135 - RNA, 19 nt, Homo sapiens
  misc_RNA (1)...(19): siRNA sense strand
ugaaaggcaagcauaaaga

SEQ ID NO: 1445136 - RNA, 19 nt, Homo sapiens
  misc_RNA (1)...(19): siRNA sense strand
gagcccugguucacaaaga

SEQ ID NO: 1445137 - RNA, 19 nt, Homo sapiens
  misc_RNA (1)...(19): siRNA sense strand
aagaaacgaugagaugguu

SEQ ID NO: 1445138 - RNA, 19 nt, Homo sapiens
  misc_RNA (1)...(19): siRNA sense strand
gaugaugaaccccuuaaua

SEQ ID NO: 1445139 - RNA, 19 nt, Homo sapiens
  misc_RNA (1)...(19): siRNA sense strand
agaccaguccuuucucuuu

SEQ ID NO: 1445140 - RNA, 19 nt, Homo sapiens
  misc_RNA (1)...(19): siRNA sense strand
guugaguaccuuagaauau

SEQ ID NO: 1445141 - RNA, 19 nt, Homo sapiens
  misc_RNA (1)...(19): siRNA sense strand
gauugaagccuacaaccau

SEQ ID NO: 1445142 - RNA, 19 nt, Homo sapiens
  misc_RNA (1)...(19): siRNA sense strand
ggagaaacacuggacuuca

SEQ ID NO: 1445143 - RNA, 19 nt, Homo sapiens
  misc_RNA (1)...(19): siRNA sense strand
cagcgaugccguuauuuau

SEQ ID NO: 1445144 - RNA, 19 nt, Homo sapiens
  misc_RNA (1)...(19): siRNA sense strand
aaaccaauguugcccucuu

SEQ ID NO: 1445145 - RNA, 19 nt, Homo sapiens
  misc_RNA (1)...(19): siRNA sense strand
gcaagcauaaagaugaaug

SEQ ID NO: 1445146 - RNA, 19 nt, Homo sapiens
  misc_RNA (1)...(19): siRNA sense strand
cacuggacuucauuucuaa

SEQ ID NO: 1445147 - RNA, 19 nt, Homo sapiens
  misc_RNA (1)...(19): siRNA sense strand
gaaaucgcugucgaacaua

SEQ ID NO: 1445148 - RNA, 19 nt, Homo sapiens
  misc_RNA (1)...(19): siRNA sense strand
acacuuucuucaugccaua

SEQ ID NO: 1445149 - RNA, 19 nt, Homo sapiens
  misc_RNA (1)...(19): siRNA sense strand
gguugaguaccuuagaaua

SEQ ID NO: 1445150 - RNA, 19 nt, Homo sapiens
  misc_RNA (1)...(19): siRNA sense strand
cagcugauguugaaaauuc

SEQ ID NO: 1445151 - RNA, 19 nt, Homo sapiens
  misc_RNA (1)...(19): siRNA sense strand
guauucaaaggacgguuua

SEQ ID NO: 1445152 - RNA, 19 nt, Homo sapiens
  misc_RNA (1)...(19): siRNA sense strand
aagcaugggugauggaucu

SEQ ID NO: 1445153 - RNA, 19 nt, Homo sapiens
  misc_RNA (1)...(19): siRNA sense strand
uuaguggccuggcaagaug

SEQ ID NO: 1445154 - RNA, 19 nt, Homo sapiens
  misc_RNA (1)...(19): siRNA sense strand
aaagaugaaugccacaacu

SEQ ID NO: 1445155 - RNA, 19 nt, Homo sapiens
  misc_RNA (1)...(19): siRNA sense strand
guugagggcagucagcuuu

SEQ ID NO: 1445156 - RNA, 19 nt, Homo sapiens
  misc_RNA (1)...(19): siRNA sense strand
gaaacugacauggcgauca

SEQ ID NO: 1445157 - RNA, 19 nt, Homo sapiens
  misc_RNA (1)...(19): siRNA sense strand
cgacagcguauuacuggaa

SEQ ID NO: 1445158 - RNA, 19 nt, Homo sapiens
  misc_RNA (1)...(19): siRNA sense strand
cucugaagcuggcauggua

SEQ ID NO: 1445159 - RNA, 19 nt, Homo sapiens
  misc_RNA (1)...(19): siRNA sense strand
gaauauggaaacuaugucu

SEQ ID NO: 1445160 - RNA, 19 nt, Homo sapiens
  misc_RNA (1)...(19): siRNA sense strand
cagcuuuccugaagaugau

SEQ ID NO: 1445161 - RNA, 19 nt, Homo sapiens
  misc_RNA (1)...(19): siRNA sense strand
agaaaacugugcuaugaaa

SEQ ID NO: 1445162 - RNA, 19 nt, Homo sapiens
  misc_RNA (1)...(19): siRNA sense strand
ccuuaauacugucgacuau

SEQ ID NO: 1445163 - RNA, 19 nt, Homo sapiens
  misc_RNA (1)...(19): siRNA sense strand
uuugaacgacagcguauua

SEQ ID NO: 1445164 - RNA, 19 nt, Homo sapiens
  misc_RNA (1)...(19): siRNA sense strand
gcauuuagcauggaugaca

SEQ ID NO: 1445165 - RNA, 19 nt, Homo sapiens
  misc_RNA (1)...(19): siRNA sense strand
ucugcugucugugcauuua

SEQ ID NO: 1445166 - RNA, 19 nt, Homo sapiens
  misc_RNA (1)...(19): siRNA sense strand
uaaaugaaaugcccaaaac

SEQ ID NO: 1445167 - RNA, 19 nt, Homo sapiens
  misc_RNA (1)...(19): siRNA sense strand
gcguauuacuggaagagau

SEQ ID NO: 1445168 - RNA, 19 nt, Homo sapiens
  misc_RNA (1)...(19): siRNA sense strand
ugucauucaucaaaucuca

SEQ ID NO: 1445169 - RNA, 19 nt, Homo sapiens
  misc_RNA (1)...(19): siRNA sense strand
gaagacaaagugccaaagc

SEQ ID NO: 1445170 - RNA, 19 nt, Homo sapiens
  misc_RNA (1)...(19): siRNA sense strand
aaccaauguugcccucuuu

SEQ ID NO: 1445171 - RNA, 19 nt, Homo sapiens
  misc_RNA (1)...(19): siRNA sense strand
uugaguaccuuagaauaug

SEQ ID NO: 1445172 - RNA, 19 nt, Homo sapiens
  misc_RNA (1)...(19): siRNA sense strand
gaaugccacaacuuuauca

SEQ ID NO: 1445173 - RNA, 19 nt, Homo sapiens
  misc_RNA (1)...(19): siRNA sense strand
agaugaaugccacaacuuu

SEQ ID NO: 1445174 - RNA, 19 nt, Homo sapiens
  misc_RNA (1)...(19): siRNA sense strand
ugucgacuaucacuauuca

SEQ ID NO: 1445175 - RNA, 19 nt, Homo sapiens
  misc_RNA (1)...(19): siRNA sense strand
uuaaaguucuggcaaagac

SEQ ID NO: 1445176 - RNA, 19 nt, Homo sapiens
  misc_RNA (1)...(19): siRNA sense strand
ugacauggcgaucaagaca

SEQ ID NO: 1445177 - RNA, 19 nt, Homo sapiens
  misc_RNA (1)...(19): siRNA sense strand
ccaguccuuucucuuugaa

SEQ ID NO: 1445178 - RNA, 19 nt, Homo sapiens
  misc_RNA (1)...(19): siRNA sense strand
gcauucaaucccaugugua

SEQ ID NO: 1445179 - RNA, 19 nt, Homo sapiens
  misc_RNA (1)...(19): siRNA sense strand
caagaaacgaugagauggu

SEQ ID NO: 1445180 - RNA, 19 nt, Homo sapiens
  misc_RNA (1)...(19): siRNA sense strand
aaggcaagcauaaagauga

SEQ ID NO: 1445181 - RNA, 19 nt, Homo sapiens
  misc_RNA (1)...(19): siRNA sense strand
caucuuuguuggcucugaa

SEQ ID NO: 1445182 - RNA, 19 nt, Homo sapiens
  misc_RNA (1)...(19): siRNA sense strand
uaaaggcucggcugaacug

SEQ ID NO: 1445183 - RNA, 19 nt, Homo sapiens
  misc_RNA (1)...(19): siRNA sense strand
gaugggaagcuguauucug

SEQ ID NO: 1445184 - RNA, 19 nt, Homo sapiens
  misc_RNA (1)...(19): siRNA sense strand
gagaaaucgcugucgaaca

SEQ ID NO: 1445185 - RNA, 19 nt, Homo sapiens
  misc_RNA (1)...(19): siRNA sense strand
aggcaagcauaaagaugaa

SEQ ID NO: 1445186 - RNA, 19 nt, Homo sapiens
  misc_RNA (1)...(19): siRNA sense strand
cuacacagucaucuuuguu

SEQ ID NO: 1445187 - RNA, 19 nt, Homo sapiens
  misc_RNA (1)...(19): siRNA sense strand
ggacgcccuucaggcaaug

SEQ ID NO: 1445188 - RNA, 19 nt, Homo sapiens
  misc_RNA (1)...(19): siRNA sense strand
guucugcagucuauuacag

SEQ ID NO: 1445189 - RNA, 19 nt, Homo sapiens
  misc_RNA (1)...(19): siRNA sense strand
gacagcaguucccgaagac

SEQ ID NO: 1445190 - RNA, 19 nt, Homo sapiens
  misc_RNA (1)...(19): siRNA sense strand
guucugcugucugugcauu

SEQ ID NO: 1445191 - RNA, 19 nt, Homo sapiens
  misc_RNA (1)...(19): siRNA sense strand
gaacuacacagucaucuuu

SEQ ID NO: 1445192 - RNA, 19 nt, Homo sapiens
  misc_RNA (1)...(19): siRNA sense strand
ggacagcaguucccgaaga

SEQ ID NO: 1445193 - RNA, 19 nt, Homo sapiens
  misc_RNA (1)...(19): siRNA sense strand
gaaacucugucauucauca

SEQ ID NO: 1445194 - RNA, 19 nt, Homo sapiens
  misc_RNA (1)...(19): siRNA sense strand
ggaucaaguuuauacagua

SEQ ID NO: 1445195 - RNA, 19 nt, Homo sapiens
  misc_RNA (1)...(19): siRNA sense strand
gagaaacacuggacuucau

SEQ ID NO: 1445196 - RNA, 19 nt, Homo sapiens
  misc_RNA (1)...(19): siRNA sense strand
gaugaaugccacaacuuua

SEQ ID NO: 1445197 - RNA, 19 nt, Homo sapiens
  misc_RNA (1)...(19): siRNA sense strand
gaagcuggcaugguacuua

SEQ ID NO: 1445198 - RNA, 19 nt, Homo sapiens
  misc_RNA (1)...(19): siRNA sense strand
gaugagcccugguucacaa

SEQ ID NO: 1445199 - RNA, 19 nt, Homo sapiens
  misc_RNA (1)...(19): siRNA sense strand
acacuggacuucauuucua

SEQ ID NO: 1445200 - RNA, 19 nt, Homo sapiens
  misc_RNA (1)...(19): siRNA sense strand
agaaaucgcugucgaacau

SEQ ID NO: 1445201 - RNA, 19 nt, Homo sapiens
  misc_RNA (1)...(19): siRNA sense strand
gagccacacuuucuucaug

SEQ ID NO: 1445202 - RNA, 19 nt, Homo sapiens
  misc_RNA (1)...(19): siRNA sense strand
uagcauggaugacauugaa

SEQ ID NO: 1445203 - RNA, 19 nt, Homo sapiens
  misc_RNA (1)...(19): siRNA sense strand
gcaagaugcccauuugaug

SEQ ID NO: 1445204 - RNA, 19 nt, Homo sapiens
  misc_RNA (1)...(19): siRNA sense strand
gauguucugcagucuauua

SEQ ID NO: 1445205 - RNA, 19 nt, Homo sapiens
  misc_RNA (1)...(19): siRNA sense strand
cacaguggcugacuucuug

SEQ ID NO: 1445206 - RNA, 19 nt, Homo sapiens
  misc_RNA (1)...(19): siRNA sense strand
ggccagcgaugccguuauu

SEQ ID NO: 1445207 - RNA, 19 nt, Homo sapiens
  misc_RNA (1)...(19): siRNA sense strand
gaccaguccuuucucuuug

SEQ ID NO: 1445208 - RNA, 19 nt, Homo sapiens
  misc_RNA (1)...(19): siRNA sense strand
aaacugacauggcgaucaa

SEQ ID NO: 1445209 - RNA, 19 nt, Homo sapiens
  misc_RNA (1)...(19): siRNA sense strand
gcugaugguuucccaguug

SEQ ID NO: 1445210 - RNA, 19 nt, Homo sapiens
  misc_RNA (1)...(19): siRNA sense strand
cgagacacacuuuauauug

SEQ ID NO: 1445211 - RNA, 19 nt, Homo sapiens
  misc_RNA (1)...(19): siRNA sense strand
caaagacucgggucaggua

SEQ ID NO: 1445212 - RNA, 19 nt, Homo sapiens
  misc_RNA (1)...(19): siRNA sense strand
ccacgcagcucaauagcau

SEQ ID NO: 1445213 - RNA, 19 nt, Homo sapiens
  misc_RNA (1)...(19): siRNA sense strand
gaaaggcaagcauaaagau

SEQ ID NO: 1445214 - RNA, 19 nt, Homo sapiens
  misc_RNA (1)...(19): siRNA sense strand
uggcagggaucaaguuuau

SEQ ID NO: 1445215 - RNA, 19 nt, Homo sapiens
  misc_RNA (1)...(19): siRNA sense strand
gaacgacagcguauuacug

SEQ ID NO: 1445216 - RNA, 19 nt, Homo sapiens
  misc_RNA (1)...(19): siRNA sense strand
uuaauacugucgacuauca

SEQ ID NO: 1445217 - RNA, 19 nt, Homo sapiens
  misc_RNA (1)...(19): siRNA sense strand
ccagcgaugccguuauuua

SEQ ID NO: 1445218 - RNA, 19 nt, Homo sapiens
  misc_RNA (1)...(19): siRNA sense strand
gagacacacuuuauauugc

SEQ ID NO: 1445219 - RNA, 19 nt, Homo sapiens
  misc_RNA (1)...(19): siRNA sense strand
gaacagaaaacuccagauu

SEQ ID NO: 1445220 - RNA, 19 nt, Homo sapiens
  misc_RNA (1)...(19): siRNA sense strand
caaaggacgguuuaaggaa

SEQ ID NO: 1445221 - RNA, 19 nt, Homo sapiens
  misc_RNA (1)...(19): siRNA sense strand
gaaacacuggacuucauuu

SEQ ID NO: 1445222 - RNA, 19 nt, Homo sapiens
  misc_RNA (1)...(19): siRNA sense strand
gaucugcccuucgcacaau

SEQ ID NO: 1445223 - RNA, 19 nt, Homo sapiens
  misc_RNA (1)...(19): siRNA sense strand
cgagaaaacugugcuauga

SEQ ID NO: 1445224 - RNA, 19 nt, Homo sapiens
  misc_RNA (1)...(19): siRNA sense strand
uaccagaacuacacaguca

SEQ ID NO: 1445225 - RNA, 19 nt, Homo sapiens
  misc_RNA (1)...(19): siRNA sense strand
ucaaggcaauauccgguuu

SEQ ID NO: 1445226 - RNA, 19 nt, Homo sapiens
  misc_RNA (1)...(19): siRNA sense strand
gggaucaaguuuauacagu

SEQ ID NO: 1445227 - RNA, 19 nt, Homo sapiens
  misc_RNA (1)...(19): siRNA sense strand
ucaaucccauguguagaua

SEQ ID NO: 1445228 - RNA, 19 nt, Homo sapiens
  misc_RNA (1)...(19): siRNA sense strand
uauaaaaccuccaucgauu

SEQ ID NO: 1445229 - RNA, 19 nt, Homo sapiens
  misc_RNA (1)...(19): siRNA sense strand
gcagggaucaaguuuauac

SEQ ID NO: 1445230 - RNA, 19 nt, Homo sapiens
  misc_RNA (1)...(19): siRNA sense strand
ucaaaggacgguuuaagga

SEQ ID NO: 1445231 - RNA, 19 nt, Homo sapiens
  misc_RNA (1)...(19): siRNA sense strand
ugaguaccuuagaauauga

SEQ ID NO: 1445232 - RNA, 19 nt, Homo sapiens
  misc_RNA (1)...(19): siRNA sense strand
gcccaaaacagaaguaaua

SEQ ID NO: 1445233 - RNA, 19 nt, Homo sapiens
  misc_RNA (1)...(19): siRNA sense strand
aagcuggcaugguacuuaa

SEQ ID NO: 1445234 - RNA, 19 nt, Homo sapiens
  misc_RNA (1)...(19): siRNA sense strand
aaaucgcugucgaacauaa

SEQ ID NO: 1445235 - RNA, 19 nt, Homo sapiens
  misc_RNA (1)...(19): siRNA sense strand
ugaaaggcaagcauaaaga

SEQ ID NO: 1445236 - RNA, 19 nt, Homo sapiens
  misc_RNA (1)...(19): siRNA sense strand
gagcccugguucacaaaga

SEQ ID NO: 1445237 - RNA, 19 nt, Homo sapiens
  misc_RNA (1)...(19): siRNA sense strand
aagaaacgaugagaugguu

SEQ ID NO: 1445238 - RNA, 19 nt, Homo sapiens
  misc_RNA (1)...(19): siRNA sense strand
gaugaugaaccccuuaaua

SEQ ID NO: 1445239 - RNA, 19 nt, Homo sapiens
  misc_RNA (1)...(19): siRNA sense strand
agaccaguccuuucucuuu

SEQ ID NO: 1445240 - RNA, 19 nt, Homo sapiens
  misc_RNA (1)...(19): siRNA sense strand
guugaguaccuuagaauau

SEQ ID NO: 1445241 - RNA, 19 nt, Homo sapiens
  misc_RNA (1)...(19): siRNA sense strand
gauugaagccuacaaccau

SEQ ID NO: 1445242 - RNA, 19 nt, Homo sapiens
  misc_RNA (1)...(19): siRNA sense strand
ggagaaacacuggacuuca

SEQ ID NO: 1445243 - RNA, 19 nt, Homo sapiens
  misc_RNA (1)...(19): siRNA sense strand
cagcgaugccguuauuuau

SEQ ID NO: 1445244 - RNA, 19 nt, Homo sapiens
  misc_RNA (1)...(19): siRNA sense strand
aaaccaauguugcccucuu

SEQ ID NO: 1445245 - RNA, 19 nt, Homo sapiens
  misc_RNA (1)...(19): siRNA sense strand
gcaagcauaaagaugaaug

SEQ ID NO: 1445246 - RNA, 19 nt, Homo sapiens
  misc_RNA (1)...(19): siRNA sense strand
cacuggacuucauuucuaa

SEQ ID NO: 1445247 - RNA, 19 nt, Homo sapiens
  misc_RNA (1)...(19): siRNA sense strand
gaaaucgcugucgaacaua

SEQ ID NO: 1445248 - RNA, 19 nt, Homo sapiens
  misc_RNA (1)...(19): siRNA sense strand
acacuuucuucaugccaua

SEQ ID NO: 1445249 - RNA, 19 nt, Homo sapiens
  misc_RNA (1)...(19): siRNA sense strand
gguugaguaccuuagaaua

SEQ ID NO: 1445250 - RNA, 19 nt, Homo sapiens
  misc_RNA (1)...(19): siRNA sense strand
cagcugauguugaaaauuc

SEQ ID NO: 1445251 - RNA, 19 nt, Homo sapiens
  misc_RNA (1)...(19): siRNA sense strand
guauucaaaggacgguuua

SEQ ID NO: 1445252 - RNA, 19 nt, Homo sapiens
  misc_RNA (1)...(19): siRNA sense strand
aagcaugggugauggaucu

SEQ ID NO: 1445253 - RNA, 19 nt, Homo sapiens
  misc_RNA (1)...(19): siRNA sense strand
uuaguggccuggcaagaug

SEQ ID NO: 1445254 - RNA, 19 nt, Homo sapiens
  misc_RNA (1)...(19): siRNA sense strand
aaagaugaaugccacaacu

SEQ ID NO: 1445255 - RNA, 19 nt, Homo sapiens
  misc_RNA (1)...(19): siRNA sense strand
guugagggcagucagcuuu

SEQ ID NO: 1445256 - RNA, 19 nt, Homo sapiens
  misc_RNA (1)...(19): siRNA sense strand
gaaacugacauggcgauca

SEQ ID NO: 1445257 - RNA, 19 nt, Homo sapiens
  misc_RNA (1)...(19): siRNA sense strand
cgacagcguauuacuggaa

SEQ ID NO: 1445258 - RNA, 19 nt, Homo sapiens
  misc_RNA (1)...(19): siRNA sense strand
cucugaagcuggcauggua

SEQ ID NO: 1445259 - RNA, 19 nt, Homo sapiens
  misc_RNA (1)...(19): siRNA sense strand
gaauauggaaacuaugucu

SEQ ID NO: 1445260 - RNA, 19 nt, Homo sapiens
  misc_RNA (1)...(19): siRNA sense strand
cagcuuuccugaagaugau

SEQ ID NO: 1445261 - RNA, 19 nt, Homo sapiens
  misc_RNA (1)...(19): siRNA sense strand
agaaaacugugcuaugaaa

SEQ ID NO: 1445262 - RNA, 19 nt, Homo sapiens
  misc_RNA (1)...(19): siRNA sense strand
ccuuaauacugucgacuau

SEQ ID NO: 1445263 - RNA, 19 nt, Homo sapiens
  misc_RNA (1)...(19): siRNA sense strand
uuugaacgacagcguauua

SEQ ID NO: 1445264 - RNA, 19 nt, Homo sapiens
  misc_RNA (1)...(19): siRNA sense strand
gcauuuagcauggaugaca

SEQ ID NO: 1445265 - RNA, 19 nt, Homo sapiens
  misc_RNA (1)...(19): siRNA sense strand
ucugcugucugugcauuua

SEQ ID NO: 1445266 - RNA, 19 nt, Homo sapiens
  misc_RNA (1)...(19): siRNA sense strand
uaaaugaaaugcccaaaac

SEQ ID NO: 1445267 - RNA, 19 nt, Homo sapiens
  misc_RNA (1)...(19): siRNA sense strand
gcguauuacuggaagagau

SEQ ID NO: 1445268 - RNA, 19 nt, Homo sapiens
  misc_RNA (1)...(19): siRNA sense strand
ugucauucaucaaaucuca

SEQ ID NO: 1445269 - RNA, 19 nt, Homo sapiens
  misc_RNA (1)...(19): siRNA sense strand
gaagacaaagugccaaagc

SEQ ID NO: 1445270 - RNA, 19 nt, Homo sapiens
  misc_RNA (1)...(19): siRNA sense strand
aaccaauguugcccucuuu

SEQ ID NO: 1445271 - RNA, 19 nt, Homo sapiens
  misc_RNA (1)...(19): siRNA sense strand
uugaguaccuuagaauaug

SEQ ID NO: 1445272 - RNA, 19 nt, Homo sapiens
  misc_RNA (1)...(19): siRNA sense strand
gaaugccacaacuuuauca

SEQ ID NO: 1445273 - RNA, 19 nt, Homo sapiens
  misc_RNA (1)...(19): siRNA sense strand
agaugaaugccacaacuuu

SEQ ID NO: 1445274 - RNA, 19 nt, Homo sapiens
  misc_RNA (1)...(19): siRNA sense strand
ugucgacuaucacuauuca

SEQ ID NO: 1445275 - RNA, 19 nt, Homo sapiens
  misc_RNA (1)...(19): siRNA sense strand
uuaaaguucuggcaaagac

SEQ ID NO: 1445276 - RNA, 19 nt, Homo sapiens
  misc_RNA (1)...(19): siRNA sense strand
ugacauggcgaucaagaca

SEQ ID NO: 1445277 - RNA, 19 nt, Homo sapiens
  misc_RNA (1)...(19): siRNA sense strand
ccaguccuuucucuuugaa

SEQ ID NO: 1445278 - RNA, 19 nt, Homo sapiens
  misc_RNA (1)...(19): siRNA sense strand
gcauucaaucccaugugua

SEQ ID NO: 1445279 - RNA, 19 nt, Homo sapiens
  misc_RNA (1)...(19): siRNA sense strand
caagaaacgaugagauggu

SEQ ID NO: 1445280 - RNA, 19 nt, Homo sapiens
  misc_RNA (1)...(19): siRNA sense strand
aaggcaagcauaaagauga

SEQ ID NO: 1445281 - RNA, 19 nt, Homo sapiens
  misc_RNA (1)...(19): siRNA sense strand
caucuuuguuggcucugaa

SEQ ID NO: 1445282 - RNA, 19 nt, Homo sapiens
  misc_RNA (1)...(19): siRNA sense strand
uaaaggcucggcugaacug

SEQ ID NO: 1445283 - RNA, 19 nt, Homo sapiens
  misc_RNA (1)...(19): siRNA sense strand
gaugggaagcuguauucug

SEQ ID NO: 1445284 - RNA, 19 nt, Homo sapiens
  misc_RNA (1)...(19): siRNA sense strand
gagaaaucgcugucgaaca

SEQ ID NO: 1445285 - RNA, 19 nt, Homo sapiens
  misc_RNA (1)...(19): siRNA sense strand
aggcaagcauaaagaugaa

SEQ ID NO: 1445286 - RNA, 19 nt, Homo sapiens
  misc_RNA (1)...(19): siRNA sense strand
cuacacagucaucuuuguu

SEQ ID NO: 1445287 - RNA, 19 nt, Homo sapiens
  misc_RNA (1)...(19): siRNA sense strand
ggacgcccuucaggcaaug

SEQ ID NO: 1445288 - RNA, 19 nt, Homo sapiens
  misc_RNA (1)...(19): siRNA sense strand
guucugcagucuauuacag

SEQ ID NO: 1445289 - RNA, 19 nt, Homo sapiens
  misc_RNA (1)...(19): siRNA sense strand
gacagcaguucccgaagac

SEQ ID NO: 1445290 - RNA, 19 nt, Homo sapiens
  misc_RNA (1)...(19): siRNA sense strand
guucugcugucugugcauu

SEQ ID NO: 1445291 - RNA, 19 nt, Homo sapiens
  misc_RNA (1)...(19): siRNA sense strand
gaacuacacagucaucuuu

SEQ ID NO: 1445292 - RNA, 19 nt, Homo sapiens
  misc_RNA (1)...(19): siRNA sense strand
ggacagcaguucccgaaga

SEQ ID NO: 1445293 - RNA, 19 nt, Homo sapiens
  misc_RNA (1)...(19): siRNA sense strand
gaaacucugucauucauca

SEQ ID NO: 1445294 - RNA, 19 nt, Homo sapiens
  misc_RNA (1)...(19): siRNA sense strand
ggaucaaguuuauacagua

SEQ ID NO: 1445295 - RNA, 19 nt, Homo sapiens
  misc_RNA (1)...(19): siRNA sense strand
gagaaacacuggacuucau

SEQ ID NO: 1445296 - RNA, 19 nt, Homo sapiens
  misc_RNA (1)...(19): siRNA sense strand
gaugaaugccacaacuuua

SEQ ID NO: 1445297 - RNA, 19 nt, Homo sapiens
  misc_RNA (1)...(19): siRNA sense strand
gaagcuggcaugguacuua

SEQ ID NO: 1445298 - RNA, 19 nt, Homo sapiens
  misc_RNA (1)...(19): siRNA sense strand
gaugagcccugguucacaa

SEQ ID NO: 1445299 - RNA, 19 nt, Homo sapiens
  misc_RNA (1)...(19): siRNA sense strand
acacuggacuucauuucua

SEQ ID NO: 1445300 - RNA, 19 nt, Homo sapiens
  misc_RNA (1)...(19): siRNA sense strand
agaaaucgcugucgaacau

SEQ ID NO: 1445301 - RNA, 19 nt, Homo sapiens
  misc_RNA (1)...(19): siRNA sense strand
gagccacacuuucuucaug

SEQ ID NO: 1445302 - RNA, 19 nt, Homo sapiens
  misc_RNA (1)...(19): siRNA sense strand
uagcauggaugacauugaa

SEQ ID NO: 1445303 - RNA, 19 nt, Homo sapiens
  misc_RNA (1)...(19): siRNA sense strand
gcaagaugcccauuugaug

SEQ ID NO: 1445304 - RNA, 19 nt, Homo sapiens
  misc_RNA (1)...(19): siRNA sense strand
gauguucugcagucuauua

SEQ ID NO: 1445305 - RNA, 19 nt, Homo sapiens
  misc_RNA (1)...(19): siRNA sense strand
cacaguggcugacuucuug

SEQ ID NO: 1445306 - RNA, 19 nt, Homo sapiens
  misc_RNA (1)...(19): siRNA sense strand
ggccagcgaugccguuauu

SEQ ID NO: 1445307 - RNA, 19 nt, Homo sapiens
  misc_RNA (1)...(19): siRNA sense strand
gaccaguccuuucucuuug

SEQ ID NO: 1445308 - RNA, 19 nt, Homo sapiens
  misc_RNA (1)...(19): siRNA sense strand
aaacugacauggcgaucaa

SEQ ID NO: 1445309 - RNA, 19 nt, Homo sapiens
  misc_RNA (1)...(19): siRNA sense strand
gcugaugguuucccaguug

SEQ ID NO: 1445310 - RNA, 19 nt, Homo sapiens
  misc_RNA (1)...(19): siRNA sense strand
cgagacacacuuuauauug

SEQ ID NO: 1445311 - RNA, 19 nt, Homo sapiens
  misc_RNA (1)...(19): siRNA sense strand
caaagacucgggucaggua

SEQ ID NO: 1445312 - RNA, 19 nt, Homo sapiens
  misc_RNA (1)...(19): siRNA sense strand
ccacgcagcucaauagcau

SEQ ID NO: 1445313 - RNA, 19 nt, Homo sapiens
  misc_RNA (1)...(19): siRNA sense strand
gaaaggcaagcauaaagau

SEQ ID NO: 1445314 - RNA, 19 nt, Homo sapiens
  misc_RNA (1)...(19): siRNA sense strand
uggcagggaucaaguuuau

SEQ ID NO: 1445315 - RNA, 19 nt, Homo sapiens
  misc_RNA (1)...(19): siRNA sense strand
gaacgacagcguauuacug

SEQ ID NO: 1445316 - RNA, 19 nt, Homo sapiens
  misc_RNA (1)...(19): siRNA sense strand
uuaauacugucgacuauca

SEQ ID NO: 1445317 - RNA, 19 nt, Homo sapiens
  misc_RNA (1)...(19): siRNA sense strand
ccagcgaugccguuauuua

SEQ ID NO: 1445318 - RNA, 19 nt, Homo sapiens
  misc_RNA (1)...(19): siRNA sense strand
gagacacacuuuauauugc

SEQ ID NO: 1445319 - RNA, 19 nt, Homo sapiens
  misc_RNA (1)...(19): siRNA sense strand
gaacagaaaacuccagauu

SEQ ID NO: 1445320 - RNA, 19 nt, Homo sapiens
  misc_RNA (1)...(19): siRNA sense strand
caaaggacgguuuaaggaa

SEQ ID NO: 1445321 - RNA, 19 nt, Homo sapiens
  misc_RNA (1)...(19): siRNA sense strand
gaaacacuggacuucauuu

SEQ ID NO: 1445322 - RNA, 19 nt, Homo sapiens
  misc_RNA (1)...(19): siRNA sense strand
gaucugcccuucgcacaau

SEQ ID NO: 1445323 - RNA, 19 nt, Homo sapiens
  misc_RNA (1)...(19): siRNA sense strand
cgagaaaacugugcuauga

SEQ ID NO: 1445324 - RNA, 19 nt, Homo sapiens
  misc_RNA (1)...(19): siRNA sense strand
uaccagaacuacacaguca

SEQ ID NO: 1445325 - RNA, 19 nt, Homo sapiens
  misc_RNA (1)...(19): siRNA sense strand
ucaaggcaauauccgguuu

SEQ ID NO: 1445326 - RNA, 19 nt, Homo sapiens
  misc_RNA (1)...(19): siRNA sense strand
gggaucaaguuuauacagu

SEQ ID NO: 1445327 - RNA, 19 nt, Homo sapiens
  misc_RNA (1)...(19): siRNA sense strand
ucaaucccauguguagaua

SEQ ID NO: 1445328 - RNA, 19 nt, Homo sapiens
  misc_RNA (1)...(19): siRNA sense strand
uauaaaaccuccaucgauu

SEQ ID NO: 1445329 - RNA, 19 nt, Homo sapiens
  misc_RNA (1)...(19): siRNA sense strand
gcagggaucaaguuuauac

SEQ ID NO: 1445330 - RNA, 19 nt, Homo sapiens
  misc_RNA (1)...(19): siRNA sense strand
ucaaaggacgguuuaagga

SEQ ID NO: 1445331 - RNA, 19 nt, Homo sapiens
  misc_RNA (1)...(19): siRNA sense strand
ugaguaccuuagaauauga

SEQ ID NO: 1445332 - RNA, 19 nt, Homo sapiens
  misc_RNA (1)...(19): siRNA sense strand
gcccaaaacagaaguaaua

SEQ ID NO: 1445333 - RNA, 19 nt, Homo sapiens
  misc_RNA (1)...(19): siRNA sense strand
aagcuggcaugguacuuaa

SEQ ID NO: 1445334 - RNA, 19 nt, Homo sapiens
  misc_RNA (1)...(19): siRNA sense strand
aaaucgcugucgaacauaa

SEQ ID NO: 1445335 - RNA, 19 nt, Homo sapiens
  misc_RNA (1)...(19): siRNA sense strand
ugaaaggcaagcauaaaga

SEQ ID NO: 1445336 - RNA, 19 nt, Homo sapiens
  misc_RNA (1)...(19): siRNA sense strand
gagcccugguucacaaaga

SEQ ID NO: 1445337 - RNA, 19 nt, Homo sapiens
  misc_RNA (1)...(19): siRNA sense strand
aagaaacgaugagaugguu

SEQ ID NO: 1445338 - RNA, 19 nt, Homo sapiens
  misc_RNA (1)...(19): siRNA sense strand
gaugaugaaccccuuaaua

SEQ ID NO: 1445339 - RNA, 19 nt, Homo sapiens
  misc_RNA (1)...(19): siRNA sense strand
agaccaguccuuucucuuu

SEQ ID NO: 1445340 - RNA, 19 nt, Homo sapiens
  misc_RNA (1)...(19): siRNA sense strand
guugaguaccuuagaauau

SEQ ID NO: 1445341 - RNA, 19 nt, Homo sapiens
  misc_RNA (1)...(19): siRNA sense strand
gauugaagccuacaaccau

SEQ ID NO: 1445342 - RNA, 19 nt, Homo sapiens
  misc_RNA (1)...(19): siRNA sense strand
ggagaaacacuggacuuca

SEQ ID NO: 1445343 - RNA, 19 nt, Homo sapiens
  misc_RNA (1)...(19): siRNA sense strand
cagcgaugccguuauuuau

SEQ ID NO: 1445344 - RNA, 19 nt, Homo sapiens
  misc_RNA (1)...(19): siRNA sense strand
aaaccaauguugcccucuu

SEQ ID NO: 1445345 - RNA, 19 nt, Homo sapiens
  misc_RNA (1)...(19): siRNA sense strand
gcaagcauaaagaugaaug

SEQ ID NO: 1445346 - RNA, 19 nt, Homo sapiens
  misc_RNA (1)...(19): siRNA sense strand
cacuggacuucauuucuaa

SEQ ID NO: 1445347 - RNA, 19 nt, Homo sapiens
  misc_RNA (1)...(19): siRNA sense strand
gaaaucgcugucgaacaua

SEQ ID NO: 1445348 - RNA, 19 nt, Homo sapiens
  misc_RNA (1)...(19): siRNA sense strand
acacuuucuucaugccaua

SEQ ID NO: 1445349 - RNA, 19 nt, Homo sapiens
  misc_RNA (1)...(19): siRNA sense strand
gguugaguaccuuagaaua

SEQ ID NO: 1445350 - RNA, 19 nt, Homo sapiens
  misc_RNA (1)...(19): siRNA sense strand
cagcugauguugaaaauuc

SEQ ID NO: 1445351 - RNA, 19 nt, Homo sapiens
  misc_RNA (1)...(19): siRNA sense strand
guauucaaaggacgguuua

SEQ ID NO: 1445352 - RNA, 19 nt, Homo sapiens
  misc_RNA (1)...(19): siRNA sense strand
aagcaugggugauggaucu

SEQ ID NO: 1445353 - RNA, 19 nt, Homo sapiens
  misc_RNA (1)...(19): siRNA sense strand
uuaguggccuggcaagaug

SEQ ID NO: 1445354 - RNA, 19 nt, Homo sapiens
  misc_RNA (1)...(19): siRNA sense strand
aaagaugaaugccacaacu

SEQ ID NO: 1445355 - RNA, 19 nt, Homo sapiens
  misc_RNA (1)...(19): siRNA sense strand
guugagggcagucagcuuu

SEQ ID NO: 1445356 - RNA, 19 nt, Homo sapiens
  misc_RNA (1)...(19): siRNA sense strand
gaaacugacauggcgauca

SEQ ID NO: 1445357 - RNA, 19 nt, Homo sapiens
  misc_RNA (1)...(19): siRNA sense strand
cgacagcguauuacuggaa

SEQ ID NO: 1445358 - RNA, 19 nt, Homo sapiens
  misc_RNA (1)...(19): siRNA sense strand
cucugaagcuggcauggua

SEQ ID NO: 1445359 - RNA, 19 nt, Homo sapiens
  misc_RNA (1)...(19): siRNA sense strand
gaauauggaaacuaugucu

SEQ ID NO: 1445360 - RNA, 19 nt, Homo sapiens
  misc_RNA (1)...(19): siRNA sense strand
cagcuuuccugaagaugau

SEQ ID NO: 1445361 - RNA, 19 nt, Homo sapiens
  misc_RNA (1)...(19): siRNA sense strand
agaaaacugugcuaugaaa

SEQ ID NO: 1445362 - RNA, 19 nt, Homo sapiens
  misc_RNA (1)...(19): siRNA sense strand
ccuuaauacugucgacuau

SEQ ID NO: 1445363 - RNA, 19 nt, Homo sapiens
  misc_RNA (1)...(19): siRNA sense strand
uuugaacgacagcguauua

SEQ ID NO: 1445364 - RNA, 19 nt, Homo sapiens
  misc_RNA (1)...(19): siRNA sense strand
gcauuuagcauggaugaca

SEQ ID NO: 1445365 - RNA, 19 nt, Homo sapiens
  misc_RNA (1)...(19): siRNA sense strand
ucugcugucugugcauuua

SEQ ID NO: 1445366 - RNA, 19 nt, Homo sapiens
  misc_RNA (1)...(19): siRNA sense strand
uaaaugaaaugcccaaaac

SEQ ID NO: 1445367 - RNA, 19 nt, Homo sapiens
  misc_RNA (1)...(19): siRNA sense strand
gcguauuacuggaagagau

SEQ ID NO: 1445368 - RNA, 19 nt, Homo sapiens
  misc_RNA (1)...(19): siRNA sense strand
ugucauucaucaaaucuca

SEQ ID NO: 1445369 - RNA, 19 nt, Homo sapiens
  misc_RNA (1)...(19): siRNA sense strand
gaagacaaagugccaaagc

SEQ ID NO: 1445370 - RNA, 19 nt, Homo sapiens
  misc_RNA (1)...(19): siRNA sense strand
aaccaauguugcccucuuu

SEQ ID NO: 1445371 - RNA, 19 nt, Homo sapiens
  misc_RNA (1)...(19): siRNA sense strand
uugaguaccuuagaauaug

SEQ ID NO: 1445372 - RNA, 19 nt, Homo sapiens
  misc_RNA (1)...(19): siRNA sense strand
gaaugccacaacuuuauca

SEQ ID NO: 1445373 - RNA, 19 nt, Homo sapiens
  misc_RNA (1)...(19): siRNA sense strand
agaugaaugccacaacuuu

SEQ ID NO: 1445374 - RNA, 19 nt, Homo sapiens
  misc_RNA (1)...(19): siRNA sense strand
ugucgacuaucacuauuca

SEQ ID NO: 1445375 - RNA, 19 nt, Homo sapiens
  misc_RNA (1)...(19): siRNA sense strand
uuaaaguucuggcaaagac

SEQ ID NO: 1445376 - RNA, 19 nt, Homo sapiens
  misc_RNA (1)...(19): siRNA sense strand
ugacauggcgaucaagaca

SEQ ID NO: 1445377 - RNA, 19 nt, Homo sapiens
  misc_RNA (1)...(19): siRNA sense strand
ccaguccuuucucuuugaa

SEQ ID NO: 1445378 - RNA, 19 nt, Homo sapiens
  misc_RNA (1)...(19): siRNA sense strand
gcauucaaucccaugugua

SEQ ID NO: 1445379 - RNA, 19 nt, Homo sapiens
  misc_RNA (1)...(19): siRNA sense strand
caagaaacgaugagauggu

SEQ ID NO: 1445380 - RNA, 19 nt, Homo sapiens
  misc_RNA (1)...(19): siRNA sense strand
aaggcaagcauaaagauga

SEQ ID NO: 1445381 - RNA, 19 nt, Homo sapiens
  misc_RNA (1)...(19): siRNA sense strand
caucuuuguuggcucugaa

SEQ ID NO: 1445382 - RNA, 19 nt, Homo sapiens
  misc_RNA (1)...(19): siRNA sense strand
uaaaggcucggcugaacug

SEQ ID NO: 1445383 - RNA, 19 nt, Homo sapiens
  misc_RNA (1)...(19): siRNA sense strand
gaugggaagcuguauucug

SEQ ID NO: 1445384 - RNA, 19 nt, Homo sapiens
  misc_RNA (1)...(19): siRNA sense strand
gagaaaucgcugucgaaca

SEQ ID NO: 1445385 - RNA, 19 nt, Homo sapiens
  misc_RNA (1)...(19): siRNA sense strand
aggcaagcauaaagaugaa

SEQ ID NO: 1445386 - RNA, 19 nt, Homo sapiens
  misc_RNA (1)...(19): siRNA sense strand
cuacacagucaucuuuguu

SEQ ID NO: 1445387 - RNA, 19 nt, Homo sapiens
  misc_RNA (1)...(19): siRNA sense strand
ggacgcccuucaggcaaug

SEQ ID NO: 1445388 - RNA, 19 nt, Homo sapiens
  misc_RNA (1)...(19): siRNA sense strand
guucugcagucuauuacag

SEQ ID NO: 1445389 - RNA, 19 nt, Homo sapiens
  misc_RNA (1)...(19): siRNA sense strand
gacagcaguucccgaagac

SEQ ID NO: 1445390 - RNA, 19 nt, Homo sapiens
  misc_RNA (1)...(19): siRNA sense strand
guucugcugucugugcauu

SEQ ID NO: 1445391 - RNA, 19 nt, Homo sapiens
  misc_RNA (1)...(19): siRNA sense strand
gaacuacacagucaucuuu

SEQ ID NO: 1445392 - RNA, 19 nt, Homo sapiens
  misc_RNA (1)...(19): siRNA sense strand
ggacagcaguucccgaaga

SEQ ID NO: 1445393 - RNA, 19 nt, Homo sapiens
  misc_RNA (1)...(19): siRNA sense strand
gaaacucugucauucauca

SEQ ID NO: 1445394 - RNA, 19 nt, Homo sapiens
  misc_RNA (1)...(19): siRNA sense strand
ggaucaaguuuauacagua

SEQ ID NO: 1445395 - RNA, 19 nt, Homo sapiens
  misc_RNA (1)...(19): siRNA sense strand
gagaaacacuggacuucau

SEQ ID NO: 1445396 - RNA, 19 nt, Homo sapiens
  misc_RNA (1)...(19): siRNA sense strand
gaugaaugccacaacuuua

SEQ ID NO: 1445397 - RNA, 19 nt, Homo sapiens
  misc_RNA (1)...(19): siRNA sense strand
gaagcuggcaugguacuua

SEQ ID NO: 1445398 - RNA, 19 nt, Homo sapiens
  misc_RNA (1)...(19): siRNA sense strand
gaugagcccugguucacaa

SEQ ID NO: 1445399 - RNA, 19 nt, Homo sapiens
  misc_RNA (1)...(19): siRNA sense strand
acacuggacuucauuucua

SEQ ID NO: 1445400 - RNA, 19 nt, Homo sapiens
  misc_RNA (1)...(19): siRNA sense strand
agaaaucgcugucgaacau

SEQ ID NO: 1445401 - RNA, 19 nt, Homo sapiens
  misc_RNA (1)...(19): siRNA sense strand
gagccacacuuucuucaug

SEQ ID NO: 1445402 - RNA, 19 nt, Homo sapiens
  misc_RNA (1)...(19): siRNA sense strand
uagcauggaugacauugaa

SEQ ID NO: 1445403 - RNA, 19 nt, Homo sapiens
  misc_RNA (1)...(19): siRNA sense strand
gcaagaugcccauuugaug

SEQ ID NO: 1445404 - RNA, 19 nt, Homo sapiens
  misc_RNA (1)...(19): siRNA sense strand
gauguucugcagucuauua

SEQ ID NO: 1445405 - RNA, 19 nt, Homo sapiens
  misc_RNA (1)...(19): siRNA sense strand
cacaguggcugacuucuug

SEQ ID NO: 1445406 - RNA, 19 nt, Homo sapiens
  misc_RNA (1)...(19): siRNA sense strand
ggccagcgaugccguuauu

SEQ ID NO: 1445407 - RNA, 19 nt, Homo sapiens
  misc_RNA (1)...(19): siRNA sense strand
gaccaguccuuucucuuug

SEQ ID NO: 1445408 - RNA, 19 nt, Homo sapiens
  misc_RNA (1)...(19): siRNA sense strand
aaacugacauggcgaucaa

SEQ ID NO: 1445409 - RNA, 19 nt, Homo sapiens
  misc_RNA (1)...(19): siRNA sense strand
gcugaugguuucccaguug

SEQ ID NO: 1445410 - RNA, 19 nt, Homo sapiens
  misc_RNA (1)...(19): siRNA sense strand
cgagacacacuuuauauug

SEQ ID NO: 1445411 - RNA, 19 nt, Homo sapiens
  misc_RNA (1)...(19): siRNA sense strand
caaagacucgggucaggua

SEQ ID NO: 1445412 - RNA, 19 nt, Homo sapiens
  misc_RNA (1)...(19): siRNA sense strand
ccacgcagcucaauagcau

SEQ ID NO: 1445413 - RNA, 19 nt, Homo sapiens
  misc_RNA (1)...(19): siRNA sense strand
gaaaggcaagcauaaagau

SEQ ID NO: 1445414 - RNA, 19 nt, Homo sapiens
  misc_RNA (1)...(19): siRNA sense strand
uggcagggaucaaguuuau

SEQ ID NO: 1445415 - RNA, 19 nt, Homo sapiens
  misc_RNA (1)...(19): siRNA sense strand
gaacgacagcguauuacug

SEQ ID NO: 1445416 - RNA, 19 nt, Homo sapiens
  misc_RNA (1)...(19): siRNA sense strand
uuaauacugucgacuauca

SEQ ID NO: 1445417 - RNA, 19 nt, Homo sapiens
  misc_RNA (1)...(19): siRNA sense strand
ccagcgaugccguuauuua

SEQ ID NO: 1445418 - RNA, 19 nt, Homo sapiens
  misc_RNA (1)...(19): siRNA sense strand
gagacacacuuuauauugc

SEQ ID NO: 1445419 - RNA, 19 nt, Homo sapiens
  misc_RNA (1)...(19): siRNA sense strand
gaacagaaaacuccagauu

SEQ ID NO: 1445420 - RNA, 19 nt, Homo sapiens
  misc_RNA (1)...(19): siRNA sense strand
caaaggacgguuuaaggaa

SEQ ID NO: 1445421 - RNA, 19 nt, Homo sapiens
  misc_RNA (1)...(19): siRNA sense strand
gaaacacuggacuucauuu

SEQ ID NO: 1445422 - RNA, 19 nt, Homo sapiens
  misc_RNA (1)...(19): siRNA sense strand
gaucugcccuucgcacaau

SEQ ID NO: 1445423 - RNA, 19 nt, Homo sapiens
  misc_RNA (1)...(19): siRNA sense strand
cgagaaaacugugcuauga

SEQ ID NO: 1445424 - RNA, 19 nt, Homo sapiens
  misc_RNA (1)...(19): siRNA sense strand
uaccagaacuacacaguca

SEQ ID NO: 1445425 - RNA, 19 nt, Homo sapiens
  misc_RNA (1)...(19): siRNA sense strand
ucaaggcaauauccgguuu

SEQ ID NO: 1445426 - RNA, 19 nt, Homo sapiens
  misc_RNA (1)...(19): siRNA sense strand
gggaucaaguuuauacagu

SEQ ID NO: 1445427 - RNA, 19 nt, Homo sapiens
  misc_RNA (1)...(19): siRNA sense strand
ucaaucccauguguagaua

SEQ ID NO: 1445428 - RNA, 19 nt, Homo sapiens
  misc_RNA (1)...(19): siRNA sense strand
uauaaaaccuccaucgauu

SEQ ID NO: 1445429 - RNA, 19 nt, Homo sapiens
  misc_RNA (1)...(19): siRNA sense strand
gcagggaucaaguuuauac

SEQ ID NO: 1445430 - RNA, 19 nt, Homo sapiens
  misc_RNA (1)...(19): siRNA sense strand
ucaaaggacgguuuaagga

SEQ ID NO: 1445431 - RNA, 19 nt, Homo sapiens
  misc_RNA (1)...(19): siRNA sense strand
ugaguaccuuagaauauga

SEQ ID NO: 1445432 - RNA, 19 nt, Homo sapiens
  misc_RNA (1)...(19): siRNA sense strand
gcccaaaacagaaguaaua

SEQ ID NO: 1445433 - RNA, 19 nt, Homo sapiens
  misc_RNA (1)...(19): siRNA sense strand
aagcuggcaugguacuuaa

SEQ ID NO: 1445434 - RNA, 19 nt, Homo sapiens
  misc_RNA (1)...(19): siRNA sense strand
aaaucgcugucgaacauaa

SEQ ID NO: 1445435 - RNA, 19 nt, Homo sapiens
  misc_RNA (1)...(19): siRNA sense strand
ugaaaggcaagcauaaaga

SEQ ID NO: 1445436 - RNA, 19 nt, Homo sapiens
  misc_RNA (1)...(19): siRNA sense strand
gagcccugguucacaaaga

SEQ ID NO: 1445437 - RNA, 19 nt, Homo sapiens
  misc_RNA (1)...(19): siRNA sense strand
aagaaacgaugagaugguu

SEQ ID NO: 1445438 - RNA, 19 nt, Homo sapiens
  misc_RNA (1)...(19): siRNA sense strand
gaugaugaaccccuuaaua

SEQ ID NO: 1445439 - RNA, 19 nt, Homo sapiens
  misc_RNA (1)...(19): siRNA sense strand
agaccaguccuuucucuuu

SEQ ID NO: 1445440 - RNA, 19 nt, Homo sapiens
  misc_RNA (1)...(19): siRNA sense strand
guugaguaccuuagaauau

SEQ ID NO: 1445441 - RNA, 19 nt, Homo sapiens
  misc_RNA (1)...(19): siRNA sense strand
gauugaagccuacaaccau

SEQ ID NO: 1445442 - RNA, 19 nt, Homo sapiens
  misc_RNA (1)...(19): siRNA sense strand
ggagaaacacuggacuuca

SEQ ID NO: 1445443 - RNA, 19 nt, Homo sapiens
  misc_RNA (1)...(19): siRNA sense strand
cagcgaugccguuauuuau

SEQ ID NO: 1445444 - RNA, 19 nt, Homo sapiens
  misc_RNA (1)...(19): siRNA sense strand
aaaccaauguugcccucuu

SEQ ID NO: 1445445 - RNA, 19 nt, Homo sapiens
  misc_RNA (1)...(19): siRNA sense strand
gcaagcauaaagaugaaug

SEQ ID NO: 1445446 - RNA, 19 nt, Homo sapiens
  misc_RNA (1)...(19): siRNA sense strand
cacuggacuucauuucuaa

SEQ ID NO: 1445447 - RNA, 19 nt, Homo sapiens
  misc_RNA (1)...(19): siRNA sense strand
gaaaucgcugucgaacaua

SEQ ID NO: 1445448 - RNA, 19 nt, Homo sapiens
  misc_RNA (1)...(19): siRNA sense strand
acacuuucuucaugccaua

SEQ ID NO: 1445449 - RNA, 19 nt, Homo sapiens
  misc_RNA (1)...(19): siRNA sense strand
gguugaguaccuuagaaua

SEQ ID NO: 1445450 - RNA, 19 nt, Homo sapiens
  misc_RNA (1)...(19): siRNA sense strand
cagcugauguugaaaauuc

SEQ ID NO: 1445451 - RNA, 19 nt, Homo sapiens
  misc_RNA (1)...(19): siRNA sense strand
guauucaaaggacgguuua

SEQ ID NO: 1445452 - RNA, 19 nt, Homo sapiens
  misc_RNA (1)...(19): siRNA sense strand
aagcaugggugauggaucu

SEQ ID NO: 1445453 - RNA, 19 nt, Homo sapiens
  misc_RNA (1)...(19): siRNA sense strand
uuaguggccuggcaagaug

SEQ ID NO: 1445454 - RNA, 19 nt, Homo sapiens
  misc_RNA (1)...(19): siRNA sense strand
aaagaugaaugccacaacu

SEQ ID NO: 1445455 - RNA, 19 nt, Homo sapiens
  misc_RNA (1)...(19): siRNA sense strand
guugagggcagucagcuuu

SEQ ID NO: 1445456 - RNA, 19 nt, Homo sapiens
  misc_RNA (1)...(19): siRNA sense strand
gaaacugacauggcgauca

SEQ ID NO: 1445457 - RNA, 19 nt, Homo sapiens
  misc_RNA (1)...(19): siRNA sense strand
cgacagcguauuacuggaa

SEQ ID NO: 1445458 - RNA, 19 nt, Homo sapiens
  misc_RNA (1)...(19): siRNA sense strand
cucugaagcuggcauggua

SEQ ID NO: 1445459 - RNA, 19 nt, Homo sapiens
  misc_RNA (1)...(19): siRNA sense strand
gaauauggaaacuaugucu

SEQ ID NO: 1445460 - RNA, 19 nt, Homo sapiens
  misc_RNA (1)...(19): siRNA sense strand
cagcuuuccugaagaugau

SEQ ID NO: 1445461 - RNA, 19 nt, Homo sapiens
  misc_RNA (1)...(19): siRNA sense strand
agaaaacugugcuaugaaa

SEQ ID NO: 1445462 - RNA, 19 nt, Homo sapiens
  misc_RNA (1)...(19): siRNA sense strand
ccuuaauacugucgacuau

SEQ ID NO: 1445463 - RNA, 19 nt, Homo sapiens
  misc_RNA (1)...(19): siRNA sense strand
uuugaacgacagcguauua

SEQ ID NO: 1445464 - RNA, 19 nt, Homo sapiens
  misc_RNA (1)...(19): siRNA sense strand
gcauuuagcauggaugaca

SEQ ID NO: 1445465 - RNA, 19 nt, Homo sapiens
  misc_RNA (1)...(19): siRNA sense strand
ucugcugucugugcauuua

SEQ ID NO: 1445466 - RNA, 19 nt, Homo sapiens
  misc_RNA (1)...(19): siRNA sense strand
uaaaugaaaugcccaaaac

SEQ ID NO: 1445467 - RNA, 19 nt, Homo sapiens
  misc_RNA (1)...(19): siRNA sense strand
gcguauuacuggaagagau

SEQ ID NO: 1445468 - RNA, 19 nt, Homo sapiens
  misc_RNA (1)...(19): siRNA sense strand
ugucauucaucaaaucuca

SEQ ID NO: 1445469 - RNA, 19 nt, Homo sapiens
  misc_RNA (1)...(19): siRNA sense strand
gaagacaaagugccaaagc

SEQ ID NO: 1445470 - RNA, 19 nt, Homo sapiens
  misc_RNA (1)...(19): siRNA sense strand
aaccaauguugcccucuuu

SEQ ID NO: 1445471 - RNA, 19 nt, Homo sapiens
  misc_RNA (1)...(19): siRNA sense strand
uugaguaccuuagaauaug

SEQ ID NO: 1445472 - RNA, 19 nt, Homo sapiens
  misc_RNA (1)...(19): siRNA sense strand
gaaugccacaacuuuauca

SEQ ID NO: 1445473 - RNA, 19 nt, Homo sapiens
  misc_RNA (1)...(19): siRNA sense strand
agaugaaugccacaacuuu

SEQ ID NO: 1445474 - RNA, 19 nt, Homo sapiens
  misc_RNA (1)...(19): siRNA sense strand
ugucgacuaucacuauuca

SEQ ID NO: 1445475 - RNA, 19 nt, Homo sapiens
  misc_RNA (1)...(19): siRNA sense strand
uuaaaguucuggcaaagac

SEQ ID NO: 1445476 - RNA, 19 nt, Homo sapiens
  misc_RNA (1)...(19): siRNA sense strand
ugacauggcgaucaagaca

SEQ ID NO: 1445477 - RNA, 19 nt, Homo sapiens
  misc_RNA (1)...(19): siRNA sense strand
ccaguccuuucucuuugaa

SEQ ID NO: 1445478 - RNA, 19 nt, Homo sapiens
  misc_RNA (1)...(19): siRNA sense strand
gcauucaaucccaugugua

SEQ ID NO: 1445479 - RNA, 19 nt, Homo sapiens
  misc_RNA (1)...(19): siRNA sense strand
caagaaacgaugagauggu

SEQ ID NO: 1445480 - RNA, 19 nt, Homo sapiens
  misc_RNA (1)...(19): siRNA sense strand
aaggcaagcauaaagauga

SEQ ID NO: 1445481 - RNA, 19 nt, Homo sapiens
  misc_RNA (1)...(19): siRNA sense strand
caucuuuguuggcucugaa

SEQ ID NO: 1445482 - RNA, 19 nt, Homo sapiens
  misc_RNA (1)...(19): siRNA sense strand
uaaaggcucggcugaacug

SEQ ID NO: 1445483 - RNA, 19 nt, Homo sapiens
  misc_RNA (1)...(19): siRNA sense strand
gaugggaagcuguauucug

SEQ ID NO: 1445484 - RNA, 19 nt, Homo sapiens
  misc_RNA (1)...(19): siRNA sense strand
gagaaaucgcugucgaaca

SEQ ID NO: 1445485 - RNA, 19 nt, Homo sapiens
  misc_RNA (1)...(19): siRNA sense strand
aggcaagcauaaagaugaa

SEQ ID NO: 1445486 - RNA, 19 nt, Homo sapiens
  misc_RNA (1)...(19): siRNA sense strand
cuacacagucaucuuuguu

SEQ ID NO: 1445487 - RNA, 19 nt, Homo sapiens
  misc_RNA (1)...(19): siRNA sense strand
ggacgcccuucaggcaaug

SEQ ID NO: 1445488 - RNA, 19 nt, Homo sapiens
  misc_RNA (1)...(19): siRNA sense strand
guucugcagucuauuacag

SEQ ID NO: 1445489 - RNA, 19 nt, Homo sapiens
  misc_RNA (1)...(19): siRNA sense strand
gacagcaguucccgaagac

SEQ ID NO: 1445490 - RNA, 19 nt, Homo sapiens
  misc_RNA (1)...(19): siRNA sense strand
guucugcugucugugcauu

SEQ ID NO: 1445491 - RNA, 19 nt, Homo sapiens
  misc_RNA (1)...(19): siRNA sense strand
gaacuacacagucaucuuu

SEQ ID NO: 1445492 - RNA, 19 nt, Homo sapiens
  misc_RNA (1)...(19): siRNA sense strand
ggacagcaguucccgaaga

SEQ ID NO: 1445493 - RNA, 19 nt, Homo sapiens
  misc_RNA (1)...(19): siRNA sense strand
gaaacucugucauucauca

SEQ ID NO: 1445494 - RNA, 19 nt, Homo sapiens
  misc_RNA (1)...(19): siRNA sense strand
ggaucaaguuuauacagua

SEQ ID NO: 1445495 - RNA, 19 nt, Homo sapiens
  misc_RNA (1)...(19): siRNA sense strand
gagaaacacuggacuucau

SEQ ID NO: 1445496 - RNA, 19 nt, Homo sapiens
  misc_RNA (1)...(19): siRNA sense strand
gaugaaugccacaacuuua

SEQ ID NO: 1445497 - RNA, 19 nt, Homo sapiens
  misc_RNA (1)...(19): siRNA sense strand
gaagcuggcaugguacuua

SEQ ID NO: 1445498 - RNA, 19 nt, Homo sapiens
  misc_RNA (1)...(19): siRNA sense strand
gaugagcccugguucacaa

SEQ ID NO: 1445499 - RNA, 19 nt, Homo sapiens
  misc_RNA (1)...(19): siRNA sense strand
acacuggacuucauuucua

SEQ ID NO: 1445500 - RNA, 19 nt, Homo sapiens
  misc_RNA (1)...(19): siRNA sense strand
agaaaucgcugucgaacau

SEQ ID NO: 1445501 - RNA, 19 nt, Homo sapiens
  misc_RNA (1)...(19): siRNA sense strand
gagccacacuuucuucaug

SEQ ID NO: 1445502 - RNA, 19 nt, Homo sapiens
  misc_RNA (1)...(19): siRNA sense strand
uagcauggaugacauugaa

SEQ ID NO: 1445503 - RNA, 19 nt, Homo sapiens
  misc_RNA (1)...(19): siRNA sense strand
gcaagaugcccauuugaug

SEQ ID NO: 1445504 - RNA, 19 nt, Homo sapiens
  misc_RNA (1)...(19): siRNA sense strand
gauguucugcagucuauua

SEQ ID NO: 1445505 - RNA, 19 nt, Homo sapiens
  misc_RNA (1)...(19): siRNA sense strand
cacaguggcugacuucuug

SEQ ID NO: 1445506 - RNA, 19 nt, Homo sapiens
  misc_RNA (1)...(19): siRNA sense strand
ggccagcgaugccguuauu

SEQ ID NO: 1445507 - RNA, 19 nt, Homo sapiens
  misc_RNA (1)...(19): siRNA sense strand
gaccaguccuuucucuuug

SEQ ID NO: 1445508 - RNA, 19 nt, Homo sapiens
  misc_RNA (1)...(19): siRNA sense strand
aaacugacauggcgaucaa

SEQ ID NO: 1445509 - RNA, 19 nt, Homo sapiens
  misc_RNA (1)...(19): siRNA sense strand
gcugaugguuucccaguug

SEQ ID NO: 1445510 - RNA, 19 nt, Homo sapiens
  misc_RNA (1)...(19): siRNA sense strand
cgagacacacuuuauauug

SEQ ID NO: 1445511 - RNA, 19 nt, Homo sapiens
  misc_RNA (1)...(19): siRNA sense strand
caaagacucgggucaggua

SEQ ID NO: 1445512 - RNA, 19 nt, Homo sapiens
  misc_RNA (1)...(19): siRNA sense strand
ccacgcagcucaauagcau

SEQ ID NO: 1445513 - RNA, 19 nt, Homo sapiens
  misc_RNA (1)...(19): siRNA sense strand
gaaaggcaagcauaaagau

SEQ ID NO: 1445514 - RNA, 19 nt, Homo sapiens
  misc_RNA (1)...(19): siRNA sense strand
uggcagggaucaaguuuau

SEQ ID NO: 1445515 - RNA, 19 nt, Homo sapiens
  misc_RNA (1)...(19): siRNA sense strand
gaacgacagcguauuacug

SEQ ID NO: 1445516 - RNA, 19 nt, Homo sapiens
  misc_RNA (1)...(19): siRNA sense strand
uuaauacugucgacuauca

SEQ ID NO: 1445517 - RNA, 19 nt, Homo sapiens
  misc_RNA (1)...(19): siRNA sense strand
ccagcgaugccguuauuua

SEQ ID NO: 1445518 - RNA, 19 nt, Homo sapiens
  misc_RNA (1)...(19): siRNA sense strand
gagacacacuuuauauugc

SEQ ID NO: 1445519 - RNA, 19 nt, Homo sapiens
  misc_RNA (1)...(19): siRNA sense strand
gaacagaaaacuccagauu

SEQ ID NO: 1445520 - RNA, 19 nt, Homo sapiens
  misc_RNA (1)...(19): siRNA sense strand
caaaggacgguuuaaggaa

SEQ ID NO: 1445521 - RNA, 19 nt, Homo sapiens
  misc_RNA (1)...(19): siRNA sense strand
gaaacacuggacuucauuu

SEQ ID NO: 1445522 - RNA, 19 nt, Homo sapiens
  misc_RNA (1)...(19): siRNA sense strand
gaucugcccuucgcacaau

SEQ ID NO: 1445523 - RNA, 19 nt, Homo sapiens
  misc_RNA (1)...(19): siRNA sense strand
cgagaaaacugugcuauga

SEQ ID NO: 1445524 - RNA, 19 nt, Homo sapiens
  misc_RNA (1)...(19): siRNA sense strand
uaccagaacuacacaguca

SEQ ID NO: 1445525 - RNA, 19 nt, Homo sapiens
  misc_RNA (1)...(19): siRNA sense strand
ucaaggcaauauccgguuu

SEQ ID NO: 1445526 - RNA, 19 nt, Homo sapiens
  misc_RNA (1)...(19): siRNA sense strand
gggaucaaguuuauacagu

SEQ ID NO: 1445527 - RNA, 19 nt, Homo sapiens
  misc_RNA (1)...(19): siRNA sense strand
ucaaucccauguguagaua

SEQ ID NO: 1445528 - RNA, 19 nt, Homo sapiens
  misc_RNA (1)...(19): siRNA sense strand
uauaaaaccuccaucgauu

SEQ ID NO: 1445529 - RNA, 19 nt, Homo sapiens
  misc_RNA (1)...(19): siRNA sense strand
gcagggaucaaguuuauac

SEQ ID NO: 1445530 - RNA, 19 nt, Homo sapiens
  misc_RNA (1)...(19): siRNA sense strand
ucaaaggacgguuuaagga

SEQ ID NO: 1445531 - RNA, 19 nt, Homo sapiens
  misc_RNA (1)...(19): siRNA sense strand
ugaguaccuuagaauauga

SEQ ID NO: 1445532 - RNA, 19 nt, Homo sapiens
  misc_RNA (1)...(19): siRNA sense strand
gcccaaaacagaaguaaua

SEQ ID NO: 1445533 - RNA, 19 nt, Homo sapiens
  misc_RNA (1)...(19): siRNA sense strand
aagcuggcaugguacuuaa

SEQ ID NO: 1445534 - RNA, 19 nt, Homo sapiens
  misc_RNA (1)...(19): siRNA sense strand
aaaucgcugucgaacauaa

SEQ ID NO: 1445535 - RNA, 19 nt, Homo sapiens
  misc_RNA (1)...(19): siRNA sense strand
ugaaaggcaagcauaaaga

SEQ ID NO: 1445536 - RNA, 19 nt, Homo sapiens
  misc_RNA (1)...(19): siRNA sense strand
gagcccugguucacaaaga

SEQ ID NO: 1445537 - RNA, 19 nt, Homo sapiens
  misc_RNA (1)...(19): siRNA sense strand
aagaaacgaugagaugguu

SEQ ID NO: 1445538 - RNA, 19 nt, Homo sapiens
  misc_RNA (1)...(19): siRNA sense strand
gaugaugaaccccuuaaua

SEQ ID NO: 1445539 - RNA, 19 nt, Homo sapiens
  misc_RNA (1)...(19): siRNA sense strand
agaccaguccuuucucuuu

SEQ ID NO: 1445540 - RNA, 19 nt, Homo sapiens
  misc_RNA (1)...(19): siRNA sense strand
guugaguaccuuagaauau

SEQ ID NO: 1445541 - RNA, 19 nt, Homo sapiens
  misc_RNA (1)...(19): siRNA sense strand
gauugaagccuacaaccau

SEQ ID NO: 1445542 - RNA, 19 nt, Homo sapiens
  misc_RNA (1)...(19): siRNA sense strand
ggagaaacacuggacuuca

SEQ ID NO: 1445543 - RNA, 19 nt, Homo sapiens
  misc_RNA (1)...(19): siRNA sense strand
cagcgaugccguuauuuau

SEQ ID NO: 1445544 - RNA, 19 nt, Homo sapiens
  misc_RNA (1)...(19): siRNA sense strand
aaaccaauguugcccucuu

SEQ ID NO: 1445545 - RNA, 19 nt, Homo sapiens
  misc_RNA (1)...(19): siRNA sense strand
gcaagcauaaagaugaaug

SEQ ID NO: 1445546 - RNA, 19 nt, Homo sapiens
  misc_RNA (1)...(19): siRNA sense strand
cacuggacuucauuucuaa

SEQ ID NO: 1445547 - RNA, 19 nt, Homo sapiens
  misc_RNA (1)...(19): siRNA sense strand
gaaaucgcugucgaacaua

SEQ ID NO: 1445548 - RNA, 19 nt, Homo sapiens
  misc_RNA (1)...(19): siRNA sense strand
acacuuucuucaugccaua

SEQ ID NO: 1445549 - RNA, 19 nt, Homo sapiens
  misc_RNA (1)...(19): siRNA sense strand
gguugaguaccuuagaaua

SEQ ID NO: 1445550 - RNA, 19 nt, Homo sapiens
  misc_RNA (1)...(19): siRNA sense strand
cagcugauguugaaaauuc

SEQ ID NO: 1445551 - RNA, 19 nt, Homo sapiens
  misc_RNA (1)...(19): siRNA sense strand
guauucaaaggacgguuua

SEQ ID NO: 1445552 - RNA, 19 nt, Homo sapiens
  misc_RNA (1)...(19): siRNA sense strand
aagcaugggugauggaucu

SEQ ID NO: 1445553 - RNA, 19 nt, Homo sapiens
  misc_RNA (1)...(19): siRNA sense strand
uuaguggccuggcaagaug

SEQ ID NO: 1445554 - RNA, 19 nt, Homo sapiens
  misc_RNA (1)...(19): siRNA sense strand
aaagaugaaugccacaacu

SEQ ID NO: 1445555 - RNA, 19 nt, Homo sapiens
  misc_RNA (1)...(19): siRNA sense strand
guugagggcagucagcuuu

SEQ ID NO: 1445556 - RNA, 19 nt, Homo sapiens
  misc_RNA (1)...(19): siRNA sense strand
gaaacugacauggcgauca

SEQ ID NO: 1445557 - RNA, 19 nt, Homo sapiens
  misc_RNA (1)...(19): siRNA sense strand
cgacagcguauuacuggaa

SEQ ID NO: 1445558 - RNA, 19 nt, Homo sapiens
  misc_RNA (1)...(19): siRNA sense strand
cucugaagcuggcauggua

SEQ ID NO: 1445559 - RNA, 19 nt, Homo sapiens
  misc_RNA (1)...(19): siRNA sense strand
gaauauggaaacuaugucu

SEQ ID NO: 1445560 - RNA, 19 nt, Homo sapiens
  misc_RNA (1)...(19): siRNA sense strand
cagcuuuccugaagaugau

SEQ ID NO: 1445561 - RNA, 19 nt, Homo sapiens
  misc_RNA (1)...(19): siRNA sense strand
agaaaacugugcuaugaaa

SEQ ID NO: 1445562 - RNA, 19 nt, Homo sapiens
  misc_RNA (1)...(19): siRNA sense strand
ccuuaauacugucgacuau

SEQ ID NO: 1445563 - RNA, 19 nt, Homo sapiens
  misc_RNA (1)...(19): siRNA sense strand
uuugaacgacagcguauua

SEQ ID NO: 1445564 - RNA, 19 nt, Homo sapiens
  misc_RNA (1)...(19): siRNA sense strand
gcauuuagcauggaugaca

SEQ ID NO: 1445565 - RNA, 19 nt, Homo sapiens
  misc_RNA (1)...(19): siRNA sense strand
ucugcugucugugcauuua

SEQ ID NO: 1445566 - RNA, 19 nt, Homo sapiens
  misc_RNA (1)...(19): siRNA sense strand
uaaaugaaaugcccaaaac

SEQ ID NO: 1445567 - RNA, 19 nt, Homo sapiens
  misc_RNA (1)...(19): siRNA sense strand
gcguauuacuggaagagau

SEQ ID NO: 1445568 - RNA, 19 nt, Homo sapiens
  misc_RNA (1)...(19): siRNA sense strand
ugucauucaucaaaucuca

SEQ ID NO: 1445569 - RNA, 19 nt, Homo sapiens
  misc_RNA (1)...(19): siRNA sense strand
gaagacaaagugccaaagc

SEQ ID NO: 1445570 - RNA, 19 nt, Homo sapiens
  misc_RNA (1)...(19): siRNA sense strand
aaccaauguugcccucuuu

SEQ ID NO: 1445571 - RNA, 19 nt, Homo sapiens
  misc_RNA (1)...(19): siRNA sense strand
uugaguaccuuagaauaug

SEQ ID NO: 1445572 - RNA, 19 nt, Homo sapiens
  misc_RNA (1)...(19): siRNA sense strand
gaaugccacaacuuuauca

SEQ ID NO: 1445573 - RNA, 19 nt, Homo sapiens
  misc_RNA (1)...(19): siRNA sense strand
agaugaaugccacaacuuu

SEQ ID NO: 1445574 - RNA, 19 nt, Homo sapiens
  misc_RNA (1)...(19): siRNA sense strand
ugucgacuaucacuauuca

SEQ ID NO: 1445575 - RNA, 19 nt, Homo sapiens
  misc_RNA (1)...(19): siRNA sense strand
uuaaaguucuggcaaagac

SEQ ID NO: 1445576 - RNA, 19 nt, Homo sapiens
  misc_RNA (1)...(19): siRNA sense strand
ugacauggcgaucaagaca

SEQ ID NO: 1445577 - RNA, 19 nt, Homo sapiens
  misc_RNA (1)...(19): siRNA sense strand
ccaguccuuucucuuugaa

SEQ ID NO: 1445578 - RNA, 19 nt, Homo sapiens
  misc_RNA (1)...(19): siRNA sense strand
gcauucaaucccaugugua

SEQ ID NO: 1445579 - RNA, 19 nt, Homo sapiens
  misc_RNA (1)...(19): siRNA sense strand
caagaaacgaugagauggu

SEQ ID NO: 1445580 - RNA, 19 nt, Homo sapiens
  misc_RNA (1)...(19): siRNA sense strand
aaggcaagcauaaagauga

SEQ ID NO: 1445581 - RNA, 19 nt, Homo sapiens
  misc_RNA (1)...(19): siRNA sense strand
caucuuuguuggcucugaa

SEQ ID NO: 1445582 - RNA, 19 nt, Homo sapiens
  misc_RNA (1)...(19): siRNA sense strand
uaaaggcucggcugaacug

SEQ ID NO: 1445583 - RNA, 19 nt, Homo sapiens
  misc_RNA (1)...(19): siRNA sense strand
gaugggaagcuguauucug

SEQ ID NO: 1445584 - RNA, 19 nt, Homo sapiens
  misc_RNA (1)...(19): siRNA sense strand
gagaaaucgcugucgaaca

SEQ ID NO: 1445585 - RNA, 19 nt, Homo sapiens
  misc_RNA (1)...(19): siRNA sense strand
aggcaagcauaaagaugaa

SEQ ID NO: 1445586 - RNA, 19 nt, Homo sapiens
  misc_RNA (1)...(19): siRNA sense strand
cuacacagucaucuuuguu

SEQ ID NO: 1445587 - RNA, 19 nt, Homo sapiens
  misc_RNA (1)...(19): siRNA sense strand
ggacgcccuucaggcaaug

SEQ ID NO: 1445588 - RNA, 19 nt, Homo sapiens
  misc_RNA (1)...(19): siRNA sense strand
guucugcagucuauuacag

SEQ ID NO: 1445589 - RNA, 19 nt, Homo sapiens
  misc_RNA (1)...(19): siRNA sense strand
gacagcaguucccgaagac

SEQ ID NO: 1445590 - RNA, 19 nt, Homo sapiens
  misc_RNA (1)...(19): siRNA sense strand
guucugcugucugugcauu

SEQ ID NO: 1445591 - RNA, 19 nt, Homo sapiens
  misc_RNA (1)...(19): siRNA sense strand
gaacuacacagucaucuuu

SEQ ID NO: 1445592 - RNA, 19 nt, Homo sapiens
  misc_RNA (1)...(19): siRNA sense strand
ggacagcaguucccgaaga

SEQ ID NO: 1445593 - RNA, 19 nt, Homo sapiens
  misc_RNA (1)...(19): siRNA sense strand
gaaacucugucauucauca

SEQ ID NO: 1445594 - RNA, 19 nt, Homo sapiens
  misc_RNA (1)...(19): siRNA sense strand
ggaucaaguuuauacagua

SEQ ID NO: 1445595 - RNA, 19 nt, Homo sapiens
  misc_RNA (1)...(19): siRNA sense strand
gagaaacacuggacuucau

SEQ ID NO: 1445596 - RNA, 19 nt, Homo sapiens
  misc_RNA (1)...(19): siRNA sense strand
gaugaaugccacaacuuua

SEQ ID NO: 1445597 - RNA, 19 nt, Homo sapiens
  misc_RNA (1)...(19): siRNA sense strand
gaagcuggcaugguacuua

SEQ ID NO: 1445598 - RNA, 19 nt, Homo sapiens
  misc_RNA (1)...(19): siRNA sense strand
gaugagcccugguucacaa

SEQ ID NO: 1445599 - RNA, 19 nt, Homo sapiens
  misc_RNA (1)...(19): siRNA sense strand
acacuggacuucauuucua

SEQ ID NO: 1445600 - RNA, 19 nt, Homo sapiens
  misc_RNA (1)...(19): siRNA sense strand
agaaaucgcugucgaacau

SEQ ID NO: 1445601 - RNA, 19 nt, Homo sapiens
  misc_RNA (1)...(19): siRNA sense strand
gagccacacuuucuucaug

SEQ ID NO: 1445602 - RNA, 19 nt, Homo sapiens
  misc_RNA (1)...(19): siRNA sense strand
uagcauggaugacauugaa

SEQ ID NO: 1445603 - RNA, 19 nt, Homo sapiens
  misc_RNA (1)...(19): siRNA sense strand
gcaagaugcccauuugaug

SEQ ID NO: 1445604 - RNA, 19 nt, Homo sapiens
  misc_RNA (1)...(19): siRNA sense strand
gauguucugcagucuauua

SEQ ID NO: 1445605 - RNA, 19 nt, Homo sapiens
  misc_RNA (1)...(19): siRNA sense strand
cacaguggcugacuucuug

SEQ ID NO: 1445606 - RNA, 19 nt, Homo sapiens
  misc_RNA (1)...(19): siRNA sense strand
ggccagcgaugccguuauu

SEQ ID NO: 1445607 - RNA, 19 nt, Homo sapiens
  misc_RNA (1)...(19): siRNA sense strand
gaccaguccuuucucuuug

SEQ ID NO: 1445608 - RNA, 19 nt, Homo sapiens
  misc_RNA (1)...(19): siRNA sense strand
aaacugacauggcgaucaa

SEQ ID NO: 1445609 - RNA, 19 nt, Homo sapiens
  misc_RNA (1)...(19): siRNA sense strand
gcugaugguuucccaguug

SEQ ID NO: 1445610 - RNA, 19 nt, Homo sapiens
  misc_RNA (1)...(19): siRNA sense strand
cgagacacacuuuauauug

SEQ ID NO: 1445611 - RNA, 19 nt, Homo sapiens
  misc_RNA (1)...(19): siRNA sense strand
caaagacucgggucaggua

SEQ ID NO: 1445612 - RNA, 19 nt, Homo sapiens
  misc_RNA (1)...(19): siRNA sense strand
ccacgcagcucaauagcau

SEQ ID NO: 1445613 - RNA, 19 nt, Homo sapiens
  misc_RNA (1)...(19): siRNA sense strand
gaaaggcaagcauaaagau

SEQ ID NO: 1445614 - RNA, 19 nt, Homo sapiens
  misc_RNA (1)...(19): siRNA sense strand
uggcagggaucaaguuuau

SEQ ID NO: 1445615 - RNA, 19 nt, Homo sapiens
  misc_RNA (1)...(19): siRNA sense strand
gaacgacagcguauuacug

SEQ ID NO: 1445616 - RNA, 19 nt, Homo sapiens
  misc_RNA (1)...(19): siRNA sense strand
uuaauacugucgacuauca

SEQ ID NO: 1445617 - RNA, 19 nt, Homo sapiens
  misc_RNA (1)...(19): siRNA sense strand
ccagcgaugccguuauuua

SEQ ID NO: 1445618 - RNA, 19 nt, Homo sapiens
  misc_RNA (1)...(19): siRNA sense strand
gagacacacuuuauauugc

SEQ ID NO: 1445619 - RNA, 19 nt, Homo sapiens
  misc_RNA (1)...(19): siRNA sense strand
gaacagaaaacuccagauu

SEQ ID NO: 1445620 - RNA, 19 nt, Homo sapiens
  misc_RNA (1)...(19): siRNA sense strand
caaaggacgguuuaaggaa

SEQ ID NO: 1445621 - RNA, 19 nt, Homo sapiens
  misc_RNA (1)...(19): siRNA sense strand
gaaacacuggacuucauuu

SEQ ID NO: 1445622 - RNA, 19 nt, Homo sapiens
  misc_RNA (1)...(19): siRNA sense strand
gaucugcccuucgcacaau

SEQ ID NO: 1445623 - RNA, 19 nt, Homo sapiens
  misc_RNA (1)...(19): siRNA sense strand
cgagaaaacugugcuauga

SEQ ID NO: 1445624 - RNA, 19 nt, Homo sapiens
  misc_RNA (1)...(19): siRNA sense strand
uaccagaacuacacaguca

SEQ ID NO: 1445625 - RNA, 19 nt, Homo sapiens
  misc_RNA (1)...(19): siRNA sense strand
ucaaggcaauauccgguuu

SEQ ID NO: 1445626 - RNA, 19 nt, Homo sapiens
  misc_RNA (1)...(19): siRNA sense strand
gggaucaaguuuauacagu

SEQ ID NO: 1445627 - RNA, 19 nt, Homo sapiens
  misc_RNA (1)...(19): siRNA sense strand
ucaaucccauguguagaua

SEQ ID NO: 1445628 - RNA, 19 nt, Homo sapiens
  misc_RNA (1)...(19): siRNA sense strand
uauaaaaccuccaucgauu

SEQ ID NO: 1445629 - RNA, 19 nt, Homo sapiens
  misc_RNA (1)...(19): siRNA sense strand
gcagggaucaaguuuauac

SEQ ID NO: 1445630 - RNA, 19 nt, Homo sapiens
  misc_RNA (1)...(19): siRNA sense strand
ucaaaggacgguuuaagga

SEQ ID NO: 1445631 - RNA, 19 nt, Homo sapiens
  misc_RNA (1)...(19): siRNA sense strand
ugaguaccuuagaauauga

SEQ ID NO: 1445632 - RNA, 19 nt, Homo sapiens
  misc_RNA (1)...(19): siRNA sense strand
gcccaaaacagaaguaaua

SEQ ID NO: 1445633 - RNA, 19 nt, Homo sapiens
  misc_RNA (1)...(19): siRNA sense strand
aagcuggcaugguacuuaa

SEQ ID NO: 1445634 - RNA, 19 nt, Homo sapiens
  misc_RNA (1)...(19): siRNA sense strand
aaaucgcugucgaacauaa

SEQ ID NO: 1445635 - RNA, 19 nt, Homo sapiens
  misc_RNA (1)...(19): siRNA sense strand
ugaaaggcaagcauaaaga

SEQ ID NO: 1445636 - RNA, 19 nt, Homo sapiens
  misc_RNA (1)...(19): siRNA sense strand
gagcccugguucacaaaga

SEQ ID NO: 1445637 - RNA, 19 nt, Homo sapiens
  misc_RNA (1)...(19): siRNA sense strand
aagaaacgaugagaugguu

SEQ ID NO: 1445638 - RNA, 19 nt, Homo sapiens
  misc_RNA (1)...(19): siRNA sense strand
gaugaugaaccccuuaaua

SEQ ID NO: 1445639 - RNA, 19 nt, Homo sapiens
  misc_RNA (1)...(19): siRNA sense strand
agaccaguccuuucucuuu

SEQ ID NO: 1445640 - RNA, 19 nt, Homo sapiens
  misc_RNA (1)...(19): siRNA sense strand
guugaguaccuuagaauau

SEQ ID NO: 1445641 - RNA, 19 nt, Homo sapiens
  misc_RNA (1)...(19): siRNA sense strand
gauugaagccuacaaccau

SEQ ID NO: 1445642 - RNA, 19 nt, Homo sapiens
  misc_RNA (1)...(19): siRNA sense strand
ggagaaacacuggacuuca

SEQ ID NO: 1445643 - RNA, 19 nt, Homo sapiens
  misc_RNA (1)...(19): siRNA sense strand
cagcgaugccguuauuuau

SEQ ID NO: 1445644 - RNA, 19 nt, Homo sapiens
  misc_RNA (1)...(19): siRNA sense strand
aaaccaauguugcccucuu

SEQ ID NO: 1445645 - RNA, 19 nt, Homo sapiens
  misc_RNA (1)...(19): siRNA sense strand
gcaagcauaaagaugaaug

SEQ ID NO: 1445646 - RNA, 19 nt, Homo sapiens
  misc_RNA (1)...(19): siRNA sense strand
cacuggacuucauuucuaa

SEQ ID NO: 1445647 - RNA, 19 nt, Homo sapiens
  misc_RNA (1)...(19): siRNA sense strand
gaaaucgcugucgaacaua

SEQ ID NO: 1445648 - RNA, 19 nt, Homo sapiens
  misc_RNA (1)...(19): siRNA sense strand
acacuuucuucaugccaua

SEQ ID NO: 1445649 - RNA, 19 nt, Homo sapiens
  misc_RNA (1)...(19): siRNA sense strand
gguugaguaccuuagaaua

SEQ ID NO: 1445650 - RNA, 19 nt, Homo sapiens
  misc_RNA (1)...(19): siRNA sense strand
cagcugauguugaaaauuc

SEQ ID NO: 1445651 - RNA, 19 nt, Homo sapiens
  misc_RNA (1)...(19): siRNA sense strand
guauucaaaggacgguuua

SEQ ID NO: 1445652 - RNA, 19 nt, Homo sapiens
  misc_RNA (1)...(19): siRNA sense strand
aagcaugggugauggaucu

SEQ ID NO: 1445653 - RNA, 19 nt, Homo sapiens
  misc_RNA (1)...(19): siRNA sense strand
uuaguggccuggcaagaug

SEQ ID NO: 1445654 - RNA, 19 nt, Homo sapiens
  misc_RNA (1)...(19): siRNA sense strand
aaagaugaaugccacaacu

SEQ ID NO: 1445655 - RNA, 19 nt, Homo sapiens
  misc_RNA (1)...(19): siRNA sense strand
guugagggcagucagcuuu

SEQ ID NO: 1445656 - RNA, 19 nt, Homo sapiens
  misc_RNA (1)...(19): siRNA sense strand
gaaacugacauggcgauca

SEQ ID NO: 1445657 - RNA, 19 nt, Homo sapiens
  misc_RNA (1)...(19): siRNA sense strand
cgacagcguauuacuggaa

SEQ ID NO: 1445658 - RNA, 19 nt, Homo sapiens
  misc_RNA (1)...(19): siRNA sense strand
cucugaagcuggcauggua

SEQ ID NO: 1445659 - RNA, 19 nt, Homo sapiens
  misc_RNA (1)...(19): siRNA sense strand
gaauauggaaacuaugucu

SEQ ID NO: 1445660 - RNA, 19 nt, Homo sapiens
  misc_RNA (1)...(19): siRNA sense strand
cagcuuuccugaagaugau

SEQ ID NO: 1445661 - RNA, 19 nt, Homo sapiens
  misc_RNA (1)...(19): siRNA sense strand
agaaaacugugcuaugaaa

SEQ ID NO: 1445662 - RNA, 19 nt, Homo sapiens
  misc_RNA (1)...(19): siRNA sense strand
ccuuaauacugucgacuau

SEQ ID NO: 1445663 - RNA, 19 nt, Homo sapiens
  misc_RNA (1)...(19): siRNA sense strand
uuugaacgacagcguauua

SEQ ID NO: 1445664 - RNA, 19 nt, Homo sapiens
  misc_RNA (1)...(19): siRNA sense strand
gcauuuagcauggaugaca

SEQ ID NO: 1445665 - RNA, 19 nt, Homo sapiens
  misc_RNA (1)...(19): siRNA sense strand
ucugcugucugugcauuua

SEQ ID NO: 1445666 - RNA, 19 nt, Homo sapiens
  misc_RNA (1)...(19): siRNA sense strand
uaaaugaaaugcccaaaac

SEQ ID NO: 1445667 - RNA, 19 nt, Homo sapiens
  misc_RNA (1)...(19): siRNA sense strand
gcguauuacuggaagagau

SEQ ID NO: 1445668 - RNA, 19 nt, Homo sapiens
  misc_RNA (1)...(19): siRNA sense strand
ugucauucaucaaaucuca

SEQ ID NO: 1445669 - RNA, 19 nt, Homo sapiens
  misc_RNA (1)...(19): siRNA sense strand
gaagacaaagugccaaagc

SEQ ID NO: 1445670 - RNA, 19 nt, Homo sapiens
  misc_RNA (1)...(19): siRNA sense strand
aaccaauguugcccucuuu

SEQ ID NO: 1445671 - RNA, 19 nt, Homo sapiens
  misc_RNA (1)...(19): siRNA sense strand
uugaguaccuuagaauaug

SEQ ID NO: 1445672 - RNA, 19 nt, Homo sapiens
  misc_RNA (1)...(19): siRNA sense strand
gaaugccacaacuuuauca

SEQ ID NO: 1445673 - RNA, 19 nt, Homo sapiens
  misc_RNA (1)...(19): siRNA sense strand
agaugaaugccacaacuuu

SEQ ID NO: 1445674 - RNA, 19 nt, Homo sapiens
  misc_RNA (1)...(19): siRNA sense strand
ugucgacuaucacuauuca

SEQ ID NO: 1445675 - RNA, 19 nt, Homo sapiens
  misc_RNA (1)...(19): siRNA sense strand
uuaaaguucuggcaaagac

SEQ ID NO: 1445676 - RNA, 19 nt, Homo sapiens
  misc_RNA (1)...(19): siRNA sense strand
ugacauggcgaucaagaca

SEQ ID NO: 1445677 - RNA, 19 nt, Homo sapiens
  misc_RNA (1)...(19): siRNA sense strand
ccaguccuuucucuuugaa

SEQ ID NO: 1445678 - RNA, 19 nt, Homo sapiens
  misc_RNA (1)...(19): siRNA sense strand
gcauucaaucccaugugua

SEQ ID NO: 1445679 - RNA, 19 nt, Homo sapiens
  misc_RNA (1)...(19): siRNA sense strand
caagaaacgaugagauggu

SEQ ID NO: 1445680 - RNA, 19 nt, Homo sapiens
  misc_RNA (1)...(19): siRNA sense strand
aaggcaagcauaaagauga

SEQ ID NO: 1445681 - RNA, 19 nt, Homo sapiens
  misc_RNA (1)...(19): siRNA sense strand
caucuuuguuggcucugaa

SEQ ID NO: 1445682 - RNA, 19 nt, Homo sapiens
  misc_RNA (1)...(19): siRNA sense strand
uaaaggcucggcugaacug

SEQ ID NO: 1445683 - RNA, 19 nt, Homo sapiens
  misc_RNA (1)...(19): siRNA sense strand
gaugggaagcuguauucug

SEQ ID NO: 1445684 - RNA, 19 nt, Homo sapiens
  misc_RNA (1)...(19): siRNA sense strand
gagaaaucgcugucgaaca

SEQ ID NO: 1445685 - RNA, 19 nt, Homo sapiens
  misc_RNA (1)...(19): siRNA sense strand
aggcaagcauaaagaugaa

SEQ ID NO: 1445686 - RNA, 19 nt, Homo sapiens
  misc_RNA (1)...(19): siRNA sense strand
cuacacagucaucuuuguu

SEQ ID NO: 1445687 - RNA, 19 nt, Homo sapiens
  misc_RNA (1)...(19): siRNA sense strand
ggacgcccuucaggcaaug

SEQ ID NO: 1445688 - RNA, 19 nt, Homo sapiens
  misc_RNA (1)...(19): siRNA sense strand
guucugcagucuauuacag

SEQ ID NO: 1445689 - RNA, 19 nt, Homo sapiens
  misc_RNA (1)...(19): siRNA sense strand
gacagcaguucccgaagac

SEQ ID NO: 1445690 - RNA, 19 nt, Homo sapiens
  misc_RNA (1)...(19): siRNA sense strand
guucugcugucugugcauu

SEQ ID NO: 1445691 - RNA, 19 nt, Homo sapiens
  misc_RNA (1)...(19): siRNA sense strand
gaacuacacagucaucuuu

SEQ ID NO: 1445692 - RNA, 19 nt, Homo sapiens
  misc_RNA (1)...(19): siRNA sense strand
ggacagcaguucccgaaga

SEQ ID NO: 1445693 - RNA, 19 nt, Homo sapiens
  misc_RNA (1)...(19): siRNA sense strand
gaaacucugucauucauca

SEQ ID NO: 1445694 - RNA, 19 nt, Homo sapiens
  misc_RNA (1)...(19): siRNA sense strand
ggaucaaguuuauacagua

SEQ ID NO: 1445695 - RNA, 19 nt, Homo sapiens
  misc_RNA (1)...(19): siRNA sense strand
gagaaacacuggacuucau

SEQ ID NO: 1445696 - RNA, 19 nt, Homo sapiens
  misc_RNA (1)...(19): siRNA sense strand
gaugaaugccacaacuuua

SEQ ID NO: 1445697 - RNA, 19 nt, Homo sapiens
  misc_RNA (1)...(19): siRNA sense strand
gaagcuggcaugguacuua

SEQ ID NO: 1445698 - RNA, 19 nt, Homo sapiens
  misc_RNA (1)...(19): siRNA sense strand
gaugagcccugguucacaa

SEQ ID NO: 1445699 - RNA, 19 nt, Homo sapiens
  misc_RNA (1)...(19): siRNA sense strand
acacuggacuucauuucua

SEQ ID NO: 1445700 - RNA, 19 nt, Homo sapiens
  misc_RNA (1)...(19): siRNA sense strand
agaaaucgcugucgaacau

SEQ ID NO: 1445701 - RNA, 19 nt, Homo sapiens
  misc_RNA (1)...(19): siRNA sense strand
gagccacacuuucuucaug

SEQ ID NO: 1445702 - RNA, 19 nt, Homo sapiens
  misc_RNA (1)...(19): siRNA sense strand
uagcauggaugacauugaa

SEQ ID NO: 1445703 - RNA, 19 nt, Homo sapiens
  misc_RNA (1)...(19): siRNA sense strand
gcaagaugcccauuugaug

SEQ ID NO: 1445704 - RNA, 19 nt, Homo sapiens
  misc_RNA (1)...(19): siRNA sense strand
gauguucugcagucuauua

SEQ ID NO: 1445705 - RNA, 19 nt, Homo sapiens
  misc_RNA (1)...(19): siRNA sense strand
cacaguggcugacuucuug

SEQ ID NO: 1445706 - RNA, 19 nt, Homo sapiens
  misc_RNA (1)...(19): siRNA sense strand
ggccagcgaugccguuauu

SEQ ID NO: 1445707 - RNA, 19 nt, Homo sapiens
  misc_RNA (1)...(19): siRNA sense strand
gaccaguccuuucucuuug

SEQ ID NO: 1445708 - RNA, 19 nt, Homo sapiens
  misc_RNA (1)...(19): siRNA sense strand
aaacugacauggcgaucaa

SEQ ID NO: 1445709 - RNA, 19 nt, Homo sapiens
  misc_RNA (1)...(19): siRNA sense strand
gcugaugguuucccaguug

SEQ ID NO: 1445710 - RNA, 19 nt, Homo sapiens
  misc_RNA (1)...(19): siRNA sense strand
cgagacacacuuuauauug

SEQ ID NO: 1445711 - RNA, 19 nt, Homo sapiens
  misc_RNA (1)...(19): siRNA sense strand
caaagacucgggucaggua

SEQ ID NO: 1445712 - RNA, 19 nt, Homo sapiens
  misc_RNA (1)...(19): siRNA sense strand
ccacgcagcucaauagcau

SEQ ID NO: 1445713 - RNA, 19 nt, Homo sapiens
  misc_RNA (1)...(19): siRNA sense strand
gaaaggcaagcauaaagau

SEQ ID NO: 1445714 - RNA, 19 nt, Homo sapiens
  misc_RNA (1)...(19): siRNA sense strand
uggcagggaucaaguuuau

SEQ ID NO: 1445715 - RNA, 19 nt, Homo sapiens
  misc_RNA (1)...(19): siRNA sense strand
gaacgacagcguauuacug

SEQ ID NO: 1445716 - RNA, 19 nt, Homo sapiens
  misc_RNA (1)...(19): siRNA sense strand
uuaauacugucgacuauca

SEQ ID NO: 1445717 - RNA, 19 nt, Homo sapiens
  misc_RNA (1)...(19): siRNA sense strand
ccagcgaugccguuauuua

SEQ ID NO: 1445718 - RNA, 19 nt, Homo sapiens
  misc_RNA (1)...(19): siRNA sense strand
gagacacacuuuauauugc

SEQ ID NO: 1445719 - RNA, 19 nt, Homo sapiens
  misc_RNA (1)...(19): siRNA sense strand
gaacagaaaacuccagauu

SEQ ID NO: 1445720 - RNA, 19 nt, Homo sapiens
  misc_RNA (1)...(19): siRNA sense strand
caaaggacgguuuaaggaa

SEQ ID NO: 1445721 - RNA, 19 nt, Homo sapiens
  misc_RNA (1)...(19): siRNA sense strand
gaaacacuggacuucauuu

SEQ ID NO: 1445722 - RNA, 19 nt, Homo sapiens
  misc_RNA (1)...(19): siRNA sense strand
gaucugcccuucgcacaau

SEQ ID NO: 1445723 - RNA, 19 nt, Homo sapiens
  misc_RNA (1)...(19): siRNA sense strand
cgagaaaacugugcuauga

SEQ ID NO: 1445724 - RNA, 19 nt, Homo sapiens
  misc_RNA (1)...(19): siRNA sense strand
uaccagaacuacacaguca

SEQ ID NO: 1445725 - RNA, 19 nt, Homo sapiens
  misc_RNA (1)...(19): siRNA sense strand
ucaaggcaauauccgguuu

SEQ ID NO: 1445726 - RNA, 19 nt, Homo sapiens
  misc_RNA (1)...(19): siRNA sense strand
gggaucaaguuuauacagu

SEQ ID NO: 1445727 - RNA, 19 nt, Homo sapiens
  misc_RNA (1)...(19): siRNA sense strand
ucaaucccauguguagaua

SEQ ID NO: 1445728 - RNA, 19 nt, Homo sapiens
  misc_RNA (1)...(19): siRNA sense strand
uauaaaaccuccaucgauu

SEQ ID NO: 1445729 - RNA, 19 nt, Homo sapiens
  misc_RNA (1)...(19): siRNA sense strand
gcagggaucaaguuuauac

SEQ ID NO: 1445730 - RNA, 19 nt, Homo sapiens
  misc_RNA (1)...(19): siRNA sense strand
ucaaaggacgguuuaagga

SEQ ID NO: 1445731 - RNA, 19 nt, Homo sapiens
  misc_RNA (1)...(19): siRNA sense strand
ugaguaccuuagaauauga

SEQ ID NO: 1445732 - RNA, 19 nt, Homo sapiens
  misc_RNA (1)...(19): siRNA sense strand
gcccaaaacagaaguaaua

SEQ ID NO: 1445733 - RNA, 19 nt, Homo sapiens
  misc_RNA (1)...(19): siRNA sense strand
aagcuggcaugguacuuaa

SEQ ID NO: 1445734 - RNA, 19 nt, Homo sapiens
  misc_RNA (1)...(19): siRNA sense strand
aaaucgcugucgaacauaa

SEQ ID NO: 1445735 - RNA, 19 nt, Homo sapiens
  misc_RNA (1)...(19): siRNA sense strand
ugaaaggcaagcauaaaga

SEQ ID NO: 1445736 - RNA, 19 nt, Homo sapiens
  misc_RNA (1)...(19): siRNA sense strand
gagcccugguucacaaaga

SEQ ID NO: 1445737 - RNA, 19 nt, Homo sapiens
  misc_RNA (1)...(19): siRNA sense strand
aagaaacgaugagaugguu

SEQ ID NO: 1445738 - RNA, 19 nt, Homo sapiens
  misc_RNA (1)...(19): siRNA sense strand
gaugaugaaccccuuaaua

SEQ ID NO: 1445739 - RNA, 19 nt, Homo sapiens
  misc_RNA (1)...(19): siRNA sense strand
agaccaguccuuucucuuu

SEQ ID NO: 1445740 - RNA, 19 nt, Homo sapiens
  misc_RNA (1)...(19): siRNA sense strand
guugaguaccuuagaauau

SEQ ID NO: 1445741 - RNA, 19 nt, Homo sapiens
  misc_RNA (1)...(19): siRNA sense strand
gauugaagccuacaaccau

SEQ ID NO: 1445742 - RNA, 19 nt, Homo sapiens
  misc_RNA (1)...(19): siRNA sense strand
ggagaaacacuggacuuca

SEQ ID NO: 1445743 - RNA, 19 nt, Homo sapiens
  misc_RNA (1)...(19): siRNA sense strand
cagcgaugccguuauuuau

SEQ ID NO: 1445744 - RNA, 19 nt, Homo sapiens
  misc_RNA (1)...(19): siRNA sense strand
aaaccaauguugcccucuu

SEQ ID NO: 1445745 - RNA, 19 nt, Homo sapiens
  misc_RNA (1)...(19): siRNA sense strand
gcaagcauaaagaugaaug

SEQ ID NO: 1445746 - RNA, 19 nt, Homo sapiens
  misc_RNA (1)...(19): siRNA sense strand
cacuggacuucauuucuaa

SEQ ID NO: 1445747 - RNA, 19 nt, Homo sapiens
  misc_RNA (1)...(19): siRNA sense strand
gaaaucgcugucgaacaua

SEQ ID NO: 1445748 - RNA, 19 nt, Homo sapiens
  misc_RNA (1)...(19): siRNA sense strand
acacuuucuucaugccaua

SEQ ID NO: 1445749 - RNA, 19 nt, Homo sapiens
  misc_RNA (1)...(19): siRNA sense strand
gguugaguaccuuagaaua

SEQ ID NO: 1445750 - RNA, 19 nt, Homo sapiens
  misc_RNA (1)...(19): siRNA sense strand
cagcugauguugaaaauuc

SEQ ID NO: 1445751 - RNA, 19 nt, Homo sapiens
  misc_RNA (1)...(19): siRNA sense strand
guauucaaaggacgguuua

SEQ ID NO: 1445752 - RNA, 19 nt, Homo sapiens
  misc_RNA (1)...(19): siRNA sense strand
aagcaugggugauggaucu

SEQ ID NO: 1445753 - RNA, 19 nt, Homo sapiens
  misc_RNA (1)...(19): siRNA sense strand
uuaguggccuggcaagaug

SEQ ID NO: 1445754 - RNA, 19 nt, Homo sapiens
  misc_RNA (1)...(19): siRNA sense strand
aaagaugaaugccacaacu

SEQ ID NO: 1445755 - RNA, 19 nt, Homo sapiens
  misc_RNA (1)...(19): siRNA sense strand
guugagggcagucagcuuu

SEQ ID NO: 1445756 - RNA, 19 nt, Homo sapiens
  misc_RNA (1)...(19): siRNA sense strand
gaaacugacauggcgauca

SEQ ID NO: 1445757 - RNA, 19 nt, Homo sapiens
  misc_RNA (1)...(19): siRNA sense strand
cgacagcguauuacuggaa

SEQ ID NO: 1445758 - RNA, 19 nt, Homo sapiens
  misc_RNA (1)...(19): siRNA sense strand
cucugaagcuggcauggua

SEQ ID NO: 1445759 - RNA, 19 nt, Homo sapiens
  misc_RNA (1)...(19): siRNA sense strand
gaauauggaaacuaugucu

SEQ ID NO: 1445760 - RNA, 19 nt, Homo sapiens
  misc_RNA (1)...(19): siRNA sense strand
cagcuuuccugaagaugau

SEQ ID NO: 1445761 - RNA, 19 nt, Homo sapiens
  misc_RNA (1)...(19): siRNA sense strand
agaaaacugugcuaugaaa

SEQ ID NO: 1445762 - RNA, 19 nt, Homo sapiens
  misc_RNA (1)...(19): siRNA sense strand
ccuuaauacugucgacuau

SEQ ID NO: 1445763 - RNA, 19 nt, Homo sapiens
  misc_RNA (1)...(19): siRNA sense strand
uuugaacgacagcguauua

SEQ ID NO: 1445764 - RNA, 19 nt, Homo sapiens
  misc_RNA (1)...(19): siRNA sense strand
gcauuuagcauggaugaca

SEQ ID NO: 1445765 - RNA, 19 nt, Homo sapiens
  misc_RNA (1)...(19): siRNA sense strand
ucugcugucugugcauuua

SEQ ID NO: 1445766 - RNA, 19 nt, Homo sapiens
  misc_RNA (1)...(19): siRNA sense strand
uaaaugaaaugcccaaaac

SEQ ID NO: 1445767 - RNA, 19 nt, Homo sapiens
  misc_RNA (1)...(19): siRNA sense strand
gcguauuacuggaagagau

SEQ ID NO: 1445768 - RNA, 19 nt, Homo sapiens
  misc_RNA (1)...(19): siRNA sense strand
ugucauucaucaaaucuca

SEQ ID NO: 1445769 - RNA, 19 nt, Homo sapiens
  misc_RNA (1)...(19): siRNA sense strand
gaagacaaagugccaaagc

SEQ ID NO: 1445770 - RNA, 19 nt, Homo sapiens
  misc_RNA (1)...(19): siRNA sense strand
aaccaauguugcccucuuu

SEQ ID NO: 1445771 - RNA, 19 nt, Homo sapiens
  misc_RNA (1)...(19): siRNA sense strand
uugaguaccuuagaauaug

SEQ ID NO: 1445772 - RNA, 19 nt, Homo sapiens
  misc_RNA (1)...(19): siRNA sense strand
gaaugccacaacuuuauca

SEQ ID NO: 1445773 - RNA, 19 nt, Homo sapiens
  misc_RNA (1)...(19): siRNA sense strand
agaugaaugccacaacuuu

SEQ ID NO: 1445774 - RNA, 19 nt, Homo sapiens
  misc_RNA (1)...(19): siRNA sense strand
ugucgacuaucacuauuca

SEQ ID NO: 1445775 - RNA, 19 nt, Homo sapiens
  misc_RNA (1)...(19): siRNA sense strand
uuaaaguucuggcaaagac

SEQ ID NO: 1445776 - RNA, 19 nt, Homo sapiens
  misc_RNA (1)...(19): siRNA sense strand
ugacauggcgaucaagaca

SEQ ID NO: 1445777 - RNA, 19 nt, Homo sapiens
  misc_RNA (1)...(19): siRNA sense strand
ccaguccuuucucuuugaa

SEQ ID NO: 1445778 - RNA, 19 nt, Homo sapiens
  misc_RNA (1)...(19): siRNA sense strand
gcauucaaucccaugugua

SEQ ID NO: 1445779 - RNA, 19 nt, Homo sapiens
  misc_RNA (1)...(19): siRNA sense strand
caagaaacgaugagauggu

SEQ ID NO: 1445780 - RNA, 19 nt, Homo sapiens
  misc_RNA (1)...(19): siRNA sense strand
aaggcaagcauaaagauga

SEQ ID NO: 1445781 - RNA, 19 nt, Homo sapiens
  misc_RNA (1)...(19): siRNA sense strand
caucuuuguuggcucugaa

SEQ ID NO: 1445782 - RNA, 19 nt, Homo sapiens
  misc_RNA (1)...(19): siRNA sense strand
uaaaggcucggcugaacug

SEQ ID NO: 1445783 - RNA, 19 nt, Homo sapiens
  misc_RNA (1)...(19): siRNA sense strand
gaugggaagcuguauucug

SEQ ID NO: 1445784 - RNA, 19 nt, Homo sapiens
  misc_RNA (1)...(19): siRNA sense strand
gagaaaucgcugucgaaca

SEQ ID NO: 1445785 - RNA, 19 nt, Homo sapiens
  misc_RNA (1)...(19): siRNA sense strand
aggcaagcauaaagaugaa

SEQ ID NO: 1445786 - RNA, 19 nt, Homo sapiens
  misc_RNA (1)...(19): siRNA sense strand
cuacacagucaucuuuguu

SEQ ID NO: 1445787 - RNA, 19 nt, Homo sapiens
  misc_RNA (1)...(19): siRNA sense strand
ggacgcccuucaggcaaug

SEQ ID NO: 1445788 - RNA, 19 nt, Homo sapiens
  misc_RNA (1)...(19): siRNA sense strand
guucugcagucuauuacag

SEQ ID NO: 1445789 - RNA, 19 nt, Homo sapiens
  misc_RNA (1)...(19): siRNA sense strand
gacagcaguucccgaagac

SEQ ID NO: 1445790 - RNA, 19 nt, Homo sapiens
  misc_RNA (1)...(19): siRNA sense strand
guucugcugucugugcauu

SEQ ID NO: 1445791 - RNA, 19 nt, Homo sapiens
  misc_RNA (1)...(19): siRNA sense strand
gaacuacacagucaucuuu

SEQ ID NO: 1445792 - RNA, 19 nt, Homo sapiens
  misc_RNA (1)...(19): siRNA sense strand
ggacagcaguucccgaaga

SEQ ID NO: 1445793 - RNA, 19 nt, Homo sapiens
  misc_RNA (1)...(19): siRNA sense strand
gaaacucugucauucauca

SEQ ID NO: 1445794 - RNA, 19 nt, Homo sapiens
  misc_RNA (1)...(19): siRNA sense strand
ggaucaaguuuauacagua

SEQ ID NO: 1445795 - RNA, 19 nt, Homo sapiens
  misc_RNA (1)...(19): siRNA sense strand
gagaaacacuggacuucau

SEQ ID NO: 1445796 - RNA, 19 nt, Homo sapiens
  misc_RNA (1)...(19): siRNA sense strand
gaugaaugccacaacuuua

SEQ ID NO: 1445797 - RNA, 19 nt, Homo sapiens
  misc_RNA (1)...(19): siRNA sense strand
gaagcuggcaugguacuua

SEQ ID NO: 1445798 - RNA, 19 nt, Homo sapiens
  misc_RNA (1)...(19): siRNA sense strand
gaugagcccugguucacaa

SEQ ID NO: 1445799 - RNA, 19 nt, Homo sapiens
  misc_RNA (1)...(19): siRNA sense strand
acacuggacuucauuucua

SEQ ID NO: 1445800 - RNA, 19 nt, Homo sapiens
  misc_RNA (1)...(19): siRNA sense strand
agaaaucgcugucgaacau

SEQ ID NO: 1445801 - RNA, 19 nt, Homo sapiens
  misc_RNA (1)...(19): siRNA sense strand
gagccacacuuucuucaug

SEQ ID NO: 1445802 - RNA, 19 nt, Homo sapiens
  misc_RNA (1)...(19): siRNA sense strand
uagcauggaugacauugaa

SEQ ID NO: 1445803 - RNA, 19 nt, Homo sapiens
  misc_RNA (1)...(19): siRNA sense strand
gcaagaugcccauuugaug

SEQ ID NO: 1445804 - RNA, 19 nt, Homo sapiens
  misc_RNA (1)...(19): siRNA sense strand
gauguucugcagucuauua

SEQ ID NO: 1445805 - RNA, 19 nt, Homo sapiens
  misc_RNA (1)...(19): siRNA sense strand
cacaguggcugacuucuug

SEQ ID NO: 1445806 - RNA, 19 nt, Homo sapiens
  misc_RNA (1)...(19): siRNA sense strand
ggccagcgaugccguuauu

SEQ ID NO: 1445807 - RNA, 19 nt, Homo sapiens
  misc_RNA (1)...(19): siRNA sense strand
gaccaguccuuucucuuug

SEQ ID NO: 1445808 - RNA, 19 nt, Homo sapiens
  misc_RNA (1)...(19): siRNA sense strand
aaacugacauggcgaucaa

SEQ ID NO: 1445809 - RNA, 19 nt, Homo sapiens
  misc_RNA (1)...(19): siRNA sense strand
gcugaugguuucccaguug

SEQ ID NO: 1445810 - RNA, 19 nt, Homo sapiens
  misc_RNA (1)...(19): siRNA sense strand
cgagacacacuuuauauug

SEQ ID NO: 1445811 - RNA, 19 nt, Homo sapiens
  misc_RNA (1)...(19): siRNA sense strand
caaagacucgggucaggua

SEQ ID NO: 1445812 - RNA, 19 nt, Homo sapiens
  misc_RNA (1)...(19): siRNA sense strand
ccacgcagcucaauagcau

SEQ ID NO: 1445813 - RNA, 19 nt, Homo sapiens
  misc_RNA (1)...(19): siRNA sense strand
gaaaggcaagcauaaagau

SEQ ID NO: 1445814 - RNA, 19 nt, Homo sapiens
  misc_RNA (1)...(19): siRNA sense strand
uggcagggaucaaguuuau

SEQ ID NO: 1445815 - RNA, 19 nt, Homo sapiens
  misc_RNA (1)...(19): siRNA sense strand
gaacgacagcguauuacug

SEQ ID NO: 1445816 - RNA, 19 nt, Homo sapiens
  misc_RNA (1)...(19): siRNA sense strand
uuaauacugucgacuauca

SEQ ID NO: 1445817 - RNA, 19 nt, Homo sapiens
  misc_RNA (1)...(19): siRNA sense strand
ccagcgaugccguuauuua

SEQ ID NO: 1445818 - RNA, 19 nt, Homo sapiens
  misc_RNA (1)...(19): siRNA sense strand
gagacacacuuuauauugc

SEQ ID NO: 1445819 - RNA, 19 nt, Homo sapiens
  misc_RNA (1)...(19): siRNA sense strand
gaacagaaaacuccagauu

SEQ ID NO: 1445820 - RNA, 19 nt, Homo sapiens
  misc_RNA (1)...(19): siRNA sense strand
caaaggacgguuuaaggaa

SEQ ID NO: 1445821 - RNA, 19 nt, Homo sapiens
  misc_RNA (1)...(19): siRNA sense strand
gaaacacuggacuucauuu

SEQ ID NO: 1445822 - RNA, 19 nt, Homo sapiens
  misc_RNA (1)...(19): siRNA sense strand
gaucugcccuucgcacaau

SEQ ID NO: 1445823 - RNA, 19 nt, Homo sapiens
  misc_RNA (1)...(19): siRNA sense strand
cgagaaaacugugcuauga

SEQ ID NO: 1445824 - RNA, 19 nt, Homo sapiens
  misc_RNA (1)...(19): siRNA sense strand
uaccagaacuacacaguca

SEQ ID NO: 1445825 - RNA, 19 nt, Homo sapiens
  misc_RNA (1)...(19): siRNA sense strand
ucaaggcaauauccgguuu

SEQ ID NO: 1445826 - RNA, 19 nt, Homo sapiens
  misc_RNA (1)...(19): siRNA sense strand
gggaucaaguuuauacagu

SEQ ID NO: 1445827 - RNA, 19 nt, Homo sapiens
  misc_RNA (1)...(19): siRNA sense strand
ucaaucccauguguagaua

SEQ ID NO: 1445828 - RNA, 19 nt, Homo sapiens
  misc_RNA (1)...(19): siRNA sense strand
uauaaaaccuccaucgauu

SEQ ID NO: 1445829 - RNA, 19 nt, Homo sapiens
  misc_RNA (1)...(19): siRNA sense strand
gcagggaucaaguuuauac

SEQ ID NO: 1445830 - RNA, 19 nt, Homo sapiens
  misc_RNA (1)...(19): siRNA sense strand
ucaaaggacgguuuaagga

SEQ ID NO: 1445831 - RNA, 19 nt, Homo sapiens
  misc_RNA (1)...(19): siRNA sense strand
ugaguaccuuagaauauga

SEQ ID NO: 1445832 - RNA, 19 nt, Homo sapiens
  misc_RNA (1)...(19): siRNA sense strand
gcccaaaacagaaguaaua

SEQ ID NO: 1445833 - RNA, 19 nt, Homo sapiens
  misc_RNA (1)...(19): siRNA sense strand
aagcuggcaugguacuuaa

SEQ ID NO: 1445834 - RNA, 19 nt, Homo sapiens
  misc_RNA (1)...(19): siRNA sense strand
aaaucgcugucgaacauaa

SEQ ID NO: 1445835 - RNA, 19 nt, Homo sapiens
  misc_RNA (1)...(19): siRNA sense strand
ugaaaggcaagcauaaaga

SEQ ID NO: 1445836 - RNA, 19 nt, Homo sapiens
  misc_RNA (1)...(19): siRNA sense strand
gagcccugguucacaaaga

SEQ ID NO: 1445837 - RNA, 19 nt, Homo sapiens
  misc_RNA (1)...(19): siRNA sense strand
aagaaacgaugagaugguu

SEQ ID NO: 1445838 - RNA, 19 nt, Homo sapiens
  misc_RNA (1)...(19): siRNA sense strand
gaugaugaaccccuuaaua

SEQ ID NO: 1445839 - RNA, 19 nt, Homo sapiens
  misc_RNA (1)...(19): siRNA sense strand
agaccaguccuuucucuuu

SEQ ID NO: 1445840 - RNA, 19 nt, Homo sapiens
  misc_RNA (1)...(19): siRNA sense strand
guugaguaccuuagaauau

SEQ ID NO: 1445841 - RNA, 19 nt, Homo sapiens
  misc_RNA (1)...(19): siRNA sense strand
gauugaagccuacaaccau

SEQ ID NO: 1445842 - RNA, 19 nt, Homo sapiens
  misc_RNA (1)...(19): siRNA sense strand
ggagaaacacuggacuuca

SEQ ID NO: 1445843 - RNA, 19 nt, Homo sapiens
  misc_RNA (1)...(19): siRNA sense strand
cagcgaugccguuauuuau

SEQ ID NO: 1445844 - RNA, 19 nt, Homo sapiens
  misc_RNA (1)...(19): siRNA sense strand
aaaccaauguugcccucuu

SEQ ID NO: 1445845 - RNA, 19 nt, Homo sapiens
  misc_RNA (1)...(19): siRNA sense strand
gcaagcauaaagaugaaug

SEQ ID NO: 1445846 - RNA, 19 nt, Homo sapiens
  misc_RNA (1)...(19): siRNA sense strand
cacuggacuucauuucuaa

SEQ ID NO: 1445847 - RNA, 19 nt, Homo sapiens
  misc_RNA (1)...(19): siRNA sense strand
gaaaucgcugucgaacaua

SEQ ID NO: 1445848 - RNA, 19 nt, Homo sapiens
  misc_RNA (1)...(19): siRNA sense strand
acacuuucuucaugccaua

SEQ ID NO: 1445849 - RNA, 19 nt, Homo sapiens
  misc_RNA (1)...(19): siRNA sense strand
gguugaguaccuuagaaua

SEQ ID NO: 1445850 - RNA, 19 nt, Homo sapiens
  misc_RNA (1)...(19): siRNA sense strand
cagcugauguugaaaauuc

SEQ ID NO: 1445851 - RNA, 19 nt, Homo sapiens
  misc_RNA (1)...(19): siRNA sense strand
guauucaaaggacgguuua

SEQ ID NO: 1445852 - RNA, 19 nt, Homo sapiens
  misc_RNA (1)...(19): siRNA sense strand
aagcaugggugauggaucu

SEQ ID NO: 1445853 - RNA, 19 nt, Homo sapiens
  misc_RNA (1)...(19): siRNA sense strand
uuaguggccuggcaagaug

SEQ ID NO: 1445854 - RNA, 19 nt, Homo sapiens
  misc_RNA (1)...(19): siRNA sense strand
aaagaugaaugccacaacu

SEQ ID NO: 1445855 - RNA, 19 nt, Homo sapiens
  misc_RNA (1)...(19): siRNA sense strand
guugagggcagucagcuuu

SEQ ID NO: 1445856 - RNA, 19 nt, Homo sapiens
  misc_RNA (1)...(19): siRNA sense strand
gaaacugacauggcgauca

SEQ ID NO: 1445857 - RNA, 19 nt, Homo sapiens
  misc_RNA (1)...(19): siRNA sense strand
cgacagcguauuacuggaa

SEQ ID NO: 1445858 - RNA, 19 nt, Homo sapiens
  misc_RNA (1)...(19): siRNA sense strand
cucugaagcuggcauggua

SEQ ID NO: 1445859 - RNA, 19 nt, Homo sapiens
  misc_RNA (1)...(19): siRNA sense strand
gaauauggaaacuaugucu

SEQ ID NO: 1445860 - RNA, 19 nt, Homo sapiens
  misc_RNA (1)...(19): siRNA sense strand
cagcuuuccugaagaugau

SEQ ID NO: 1445861 - RNA, 19 nt, Homo sapiens
  misc_RNA (1)...(19): siRNA sense strand
agaaaacugugcuaugaaa

SEQ ID NO: 1445862 - RNA, 19 nt, Homo sapiens
  misc_RNA (1)...(19): siRNA sense strand
ccuuaauacugucgacuau

SEQ ID NO: 1445863 - RNA, 19 nt, Homo sapiens
  misc_RNA (1)...(19): siRNA sense strand
uuugaacgacagcguauua

SEQ ID NO: 1445864 - RNA, 19 nt, Homo sapiens
  misc_RNA (1)...(19): siRNA sense strand
gcauuuagcauggaugaca

SEQ ID NO: 1445865 - RNA, 19 nt, Homo sapiens
  misc_RNA (1)...(19): siRNA sense strand
ucugcugucugugcauuua

SEQ ID NO: 1445866 - RNA, 19 nt, Homo sapiens
  misc_RNA (1)...(19): siRNA sense strand
uaaaugaaaugcccaaaac

SEQ ID NO: 1445867 - RNA, 19 nt, Homo sapiens
  misc_RNA (1)...(19): siRNA sense strand
gcguauuacuggaagagau

SEQ ID NO: 1445868 - RNA, 19 nt, Homo sapiens
  misc_RNA (1)...(19): siRNA sense strand
ugucauucaucaaaucuca

SEQ ID NO: 1445869 - RNA, 19 nt, Homo sapiens
  misc_RNA (1)...(19): siRNA sense strand
gaagacaaagugccaaagc

SEQ ID NO: 1445870 - RNA, 19 nt, Homo sapiens
  misc_RNA (1)...(19): siRNA sense strand
aaccaauguugcccucuuu

SEQ ID NO: 1445871 - RNA, 19 nt, Homo sapiens
  misc_RNA (1)...(19): siRNA sense strand
uugaguaccuuagaauaug

SEQ ID NO: 1445872 - RNA, 19 nt, Homo sapiens
  misc_RNA (1)...(19): siRNA sense strand
gaaugccacaacuuuauca

SEQ ID NO: 1445873 - RNA, 19 nt, Homo sapiens
  misc_RNA (1)...(19): siRNA sense strand
agaugaaugccacaacuuu

SEQ ID NO: 1445874 - RNA, 19 nt, Homo sapiens
  misc_RNA (1)...(19): siRNA sense strand
ugucgacuaucacuauuca

SEQ ID NO: 1445875 - RNA, 19 nt, Homo sapiens
  misc_RNA (1)...(19): siRNA sense strand
uuaaaguucuggcaaagac

SEQ ID NO: 1445876 - RNA, 19 nt, Homo sapiens
  misc_RNA (1)...(19): siRNA sense strand
ugacauggcgaucaagaca

SEQ ID NO: 1445877 - RNA, 19 nt, Homo sapiens
  misc_RNA (1)...(19): siRNA sense strand
ccaguccuuucucuuugaa

SEQ ID NO: 1445878 - RNA, 19 nt, Homo sapiens
  misc_RNA (1)...(19): siRNA sense strand
gcauucaaucccaugugua

SEQ ID NO: 1445879 - RNA, 19 nt, Homo sapiens
  misc_RNA (1)...(19): siRNA sense strand
caagaaacgaugagauggu

SEQ ID NO: 1445880 - RNA, 19 nt, Homo sapiens
  misc_RNA (1)...(19): siRNA sense strand
aaggcaagcauaaagauga

SEQ ID NO: 1445881 - RNA, 19 nt, Homo sapiens
  misc_RNA (1)...(19): siRNA sense strand
caucuuuguuggcucugaa

SEQ ID NO: 1445882 - RNA, 19 nt, Homo sapiens
  misc_RNA (1)...(19): siRNA sense strand
uaaaggcucggcugaacug

SEQ ID NO: 1445883 - RNA, 19 nt, Homo sapiens
  misc_RNA (1)...(19): siRNA sense strand
gaugggaagcuguauucug

SEQ ID NO: 1445884 - RNA, 19 nt, Homo sapiens
  misc_RNA (1)...(19): siRNA sense strand
gagaaaucgcugucgaaca

SEQ ID NO: 1445885 - RNA, 19 nt, Homo sapiens
  misc_RNA (1)...(19): siRNA sense strand
aggcaagcauaaagaugaa

SEQ ID NO: 1445886 - RNA, 19 nt, Homo sapiens
  misc_RNA (1)...(19): siRNA sense strand
cuacacagucaucuuuguu

SEQ ID NO: 1445887 - RNA, 19 nt, Homo sapiens
  misc_RNA (1)...(19): siRNA sense strand
ggacgcccuucaggcaaug

SEQ ID NO: 1445888 - RNA, 19 nt, Homo sapiens
  misc_RNA (1)...(19): siRNA sense strand
guucugcagucuauuacag

SEQ ID NO: 1445889 - RNA, 19 nt, Homo sapiens
  misc_RNA (1)...(19): siRNA sense strand
gacagcaguucccgaagac

SEQ ID NO: 1445890 - RNA, 19 nt, Homo sapiens
  misc_RNA (1)...(19): siRNA sense strand
guucugcugucugugcauu

SEQ ID NO: 1445891 - RNA, 19 nt, Homo sapiens
  misc_RNA (1)...(19): siRNA sense strand
gaacuacacagucaucuuu

SEQ ID NO: 1445892 - RNA, 19 nt, Homo sapiens
  misc_RNA (1)...(19): siRNA sense strand
ggacagcaguucccgaaga

SEQ ID NO: 1445893 - RNA, 19 nt, Homo sapiens
  misc_RNA (1)...(19): siRNA sense strand
gaaacucugucauucauca

SEQ ID NO: 1445894 - RNA, 19 nt, Homo sapiens
  misc_RNA (1)...(19): siRNA sense strand
ggaucaaguuuauacagua

SEQ ID NO: 1445895 - RNA, 19 nt, Homo sapiens
  misc_RNA (1)...(19): siRNA sense strand
gagaaacacuggacuucau

SEQ ID NO: 1445896 - RNA, 19 nt, Homo sapiens
  misc_RNA (1)...(19): siRNA sense strand
gaugaaugccacaacuuua

SEQ ID NO: 1445897 - RNA, 19 nt, Homo sapiens
  misc_RNA (1)...(19): siRNA sense strand
gaagcuggcaugguacuua

SEQ ID NO: 1445898 - RNA, 19 nt, Homo sapiens
  misc_RNA (1)...(19): siRNA sense strand
gaugagcccugguucacaa

SEQ ID NO: 1445899 - RNA, 19 nt, Homo sapiens
  misc_RNA (1)...(19): siRNA sense strand
acacuggacuucauuucua

SEQ ID NO: 1445900 - RNA, 19 nt, Homo sapiens
  misc_RNA (1)...(19): siRNA sense strand
agaaaucgcugucgaacau

SEQ ID NO: 1445901 - RNA, 19 nt, Homo sapiens
  misc_RNA (1)...(19): siRNA sense strand
gagccacacuuucuucaug

SEQ ID NO: 1445902 - RNA, 19 nt, Homo sapiens
  misc_RNA (1)...(19): siRNA sense strand
uagcauggaugacauugaa

SEQ ID NO: 1445903 - RNA, 19 nt, Homo sapiens
  misc_RNA (1)...(19): siRNA sense strand
gcaagaugcccauuugaug

SEQ ID NO: 1445904 - RNA, 19 nt, Homo sapiens
  misc_RNA (1)...(19): siRNA sense strand
gauguucugcagucuauua

SEQ ID NO: 1445905 - RNA, 19 nt, Homo sapiens
  misc_RNA (1)...(19): siRNA sense strand
cacaguggcugacuucuug

SEQ ID NO: 1445906 - RNA, 19 nt, Homo sapiens
  misc_RNA (1)...(19): siRNA sense strand
ggccagcgaugccguuauu

SEQ ID NO: 1445907 - RNA, 19 nt, Homo sapiens
  misc_RNA (1)...(19): siRNA sense strand
gaccaguccuuucucuuug

SEQ ID NO: 1445908 - RNA, 19 nt, Homo sapiens
  misc_RNA (1)...(19): siRNA sense strand
aaacugacauggcgaucaa

SEQ ID NO: 1445909 - RNA, 19 nt, Homo sapiens
  misc_RNA (1)...(19): siRNA sense strand
gcugaugguuucccaguug

SEQ ID NO: 1445910 - RNA, 19 nt, Homo sapiens
  misc_RNA (1)...(19): siRNA sense strand
cgagacacacuuuauauug

SEQ ID NO: 1445911 - RNA, 19 nt, Homo sapiens
  misc_RNA (1)...(19): siRNA sense strand
caaagacucgggucaggua

SEQ ID NO: 1445912 - RNA, 19 nt, Homo sapiens
  misc_RNA (1)...(19): siRNA sense strand
ccacgcagcucaauagcau

SEQ ID NO: 1445913 - RNA, 19 nt, Homo sapiens
  misc_RNA (1)...(19): siRNA sense strand
gaaaggcaagcauaaagau

SEQ ID NO: 1445914 - RNA, 19 nt, Homo sapiens
  misc_RNA (1)...(19): siRNA sense strand
uggcagggaucaaguuuau

SEQ ID NO: 1445915 - RNA, 19 nt, Homo sapiens
  misc_RNA (1)...(19): siRNA sense strand
gaacgacagcguauuacug

SEQ ID NO: 1445916 - RNA, 19 nt, Homo sapiens
  misc_RNA (1)...(19): siRNA sense strand
uuaauacugucgacuauca

SEQ ID NO: 1445917 - RNA, 19 nt, Homo sapiens
  misc_RNA (1)...(19): siRNA sense strand
ccagcgaugccguuauuua

SEQ ID NO: 1445918 - RNA, 19 nt, Homo sapiens
  misc_RNA (1)...(19): siRNA sense strand
gagacacacuuuauauugc

SEQ ID NO: 1445919 - RNA, 19 nt, Homo sapiens
  misc_RNA (1)...(19): siRNA sense strand
gaacagaaaacuccagauu

SEQ ID NO: 1445920 - RNA, 19 nt, Homo sapiens
  misc_RNA (1)...(19): siRNA sense strand
caaaggacgguuuaaggaa

SEQ ID NO: 1445921 - RNA, 19 nt, Homo sapiens
  misc_RNA (1)...(19): siRNA sense strand
gaaacacuggacuucauuu

SEQ ID NO: 1445922 - RNA, 19 nt, Homo sapiens
  misc_RNA (1)...(19): siRNA sense strand
gaucugcccuucgcacaau

SEQ ID NO: 1445923 - RNA, 19 nt, Homo sapiens
  misc_RNA (1)...(19): siRNA sense strand
cgagaaaacugugcuauga

SEQ ID NO: 1445924 - RNA, 19 nt, Homo sapiens
  misc_RNA (1)...(19): siRNA sense strand
uaccagaacuacacaguca

SEQ ID NO: 1445925 - RNA, 19 nt, Homo sapiens
  misc_RNA (1)...(19): siRNA sense strand
ucaaggcaauauccgguuu

SEQ ID NO: 1445926 - RNA, 19 nt, Homo sapiens
  misc_RNA (1)...(19): siRNA sense strand
gggaucaaguuuauacagu

SEQ ID NO: 1445927 - RNA, 19 nt, Homo sapiens
  misc_RNA (1)...(19): siRNA sense strand
ucaaucccauguguagaua

SEQ ID NO: 1445928 - RNA, 19 nt, Homo sapiens
  misc_RNA (1)...(19): siRNA sense strand
uauaaaaccuccaucgauu

SEQ ID NO: 1445929 - RNA, 19 nt, Homo sapiens
  misc_RNA (1)...(19): siRNA sense strand
gcagggaucaaguuuauac

SEQ ID NO: 1445930 - RNA, 19 nt, Homo sapiens
  misc_RNA (1)...(19): siRNA sense strand
ucaaaggacgguuuaagga

SEQ ID NO: 1445931 - RNA, 19 nt, Homo sapiens
  misc_RNA (1)...(19): siRNA sense strand
ugaguaccuuagaauauga

SEQ ID NO: 1445932 - RNA, 19 nt, Homo sapiens
  misc_RNA (1)...(19): siRNA sense strand
gcccaaaacagaaguaaua

SEQ ID NO: 1445933 - RNA, 19 nt, Homo sapiens
  misc_RNA (1)...(19): siRNA sense strand
aagcuggcaugguacuuaa

SEQ ID NO: 1445934 - RNA, 19 nt, Homo sapiens
  misc_RNA (1)...(19): siRNA sense strand
aaaucgcugucgaacauaa

SEQ ID NO: 1445935 - RNA, 19 nt, Homo sapiens
  misc_RNA (1)...(19): siRNA sense strand
ugaaaggcaagcauaaaga

SEQ ID NO: 1445936 - RNA, 19 nt, Homo sapiens
  misc_RNA (1)...(19): siRNA sense strand
gagcccugguucacaaaga

SEQ ID NO: 1445937 - RNA, 19 nt, Homo sapiens
  misc_RNA (1)...(19): siRNA sense strand
aagaaacgaugagaugguu

SEQ ID NO: 1445938 - RNA, 19 nt, Homo sapiens
  misc_RNA (1)...(19): siRNA sense strand
gaugaugaaccccuuaaua

SEQ ID NO: 1445939 - RNA, 19 nt, Homo sapiens
  misc_RNA (1)...(19): siRNA sense strand
agaccaguccuuucucuuu

SEQ ID NO: 1445940 - RNA, 19 nt, Homo sapiens
  misc_RNA (1)...(19): siRNA sense strand
guugaguaccuuagaauau

SEQ ID NO: 1445941 - RNA, 19 nt, Homo sapiens
  misc_RNA (1)...(19): siRNA sense strand
gauugaagccuacaaccau

SEQ ID NO: 1445942 - RNA, 19 nt, Homo sapiens
  misc_RNA (1)...(19): siRNA sense strand
ggagaaacacuggacuuca

SEQ ID NO: 1445943 - RNA, 19 nt, Homo sapiens
  misc_RNA (1)...(19): siRNA sense strand
cagcgaugccguuauuuau

SEQ ID NO: 1445944 - RNA, 19 nt, Homo sapiens
  misc_RNA (1)...(19): siRNA sense strand
aaaccaauguugcccucuu

SEQ ID NO: 1445945 - RNA, 19 nt, Homo sapiens
  misc_RNA (1)...(19): siRNA sense strand
gcaagcauaaagaugaaug

SEQ ID NO: 1445946 - RNA, 19 nt, Homo sapiens
  misc_RNA (1)...(19): siRNA sense strand
cacuggacuucauuucuaa

SEQ ID NO: 1445947 - RNA, 19 nt, Homo sapiens
  misc_RNA (1)...(19): siRNA sense strand
gaaaucgcugucgaacaua

SEQ ID NO: 1445948 - RNA, 19 nt, Homo sapiens
  misc_RNA (1)...(19): siRNA sense strand
acacuuucuucaugccaua

SEQ ID NO: 1445949 - RNA, 19 nt, Homo sapiens
  misc_RNA (1)...(19): siRNA sense strand
gguugaguaccuuagaaua

SEQ ID NO: 1445950 - RNA, 19 nt, Homo sapiens
  misc_RNA (1)...(19): siRNA sense strand
cagcugauguugaaaauuc

SEQ ID NO: 1445951 - RNA, 19 nt, Homo sapiens
  misc_RNA (1)...(19): siRNA sense strand
guauucaaaggacgguuua

SEQ ID NO: 1445952 - RNA, 19 nt, Homo sapiens
  misc_RNA (1)...(19): siRNA sense strand
aagcaugggugauggaucu

SEQ ID NO: 1445953 - RNA, 19 nt, Homo sapiens
  misc_RNA (1)...(19): siRNA sense strand
uuaguggccuggcaagaug

SEQ ID NO: 1445954 - RNA, 19 nt, Homo sapiens
  misc_RNA (1)...(19): siRNA sense strand
aaagaugaaugccacaacu

SEQ ID NO: 1445955 - RNA, 19 nt, Homo sapiens
  misc_RNA (1)...(19): siRNA sense strand
guugagggcagucagcuuu

SEQ ID NO: 1445956 - RNA, 19 nt, Homo sapiens
  misc_RNA (1)...(19): siRNA sense strand
gaaacugacauggcgauca

SEQ ID NO: 1445957 - RNA, 19 nt, Homo sapiens
  misc_RNA (1)...(19): siRNA sense strand
cgacagcguauuacuggaa

SEQ ID NO: 1445958 - RNA, 19 nt, Homo sapiens
  misc_RNA (1)...(19): siRNA sense strand
cucugaagcuggcauggua

SEQ ID NO: 1445959 - RNA, 19 nt, Homo sapiens
  misc_RNA (1)...(19): siRNA sense strand
gaauauggaaacuaugucu

SEQ ID NO: 1445960 - RNA, 19 nt, Homo sapiens
  misc_RNA (1)...(19): siRNA sense strand
cagcuuuccugaagaugau

SEQ ID NO: 1445961 - RNA, 19 nt, Homo sapiens
  misc_RNA (1)...(19): siRNA sense strand
agaaaacugugcuaugaaa

SEQ ID NO: 1445962 - RNA, 19 nt, Homo sapiens
  misc_RNA (1)...(19): siRNA sense strand
ccuuaauacugucgacuau

SEQ ID NO: 1445963 - RNA, 19 nt, Homo sapiens
  misc_RNA (1)...(19): siRNA sense strand
uuugaacgacagcguauua

SEQ ID NO: 1445964 - RNA, 19 nt, Homo sapiens
  misc_RNA (1)...(19): siRNA sense strand
gcauuuagcauggaugaca

SEQ ID NO: 1445965 - RNA, 19 nt, Homo sapiens
  misc_RNA (1)...(19): siRNA sense strand
ucugcugucugugcauuua

SEQ ID NO: 1445966 - RNA, 19 nt, Homo sapiens
  misc_RNA (1)...(19): siRNA sense strand
uaaaugaaaugcccaaaac

SEQ ID NO: 1445967 - RNA, 19 nt, Homo sapiens
  misc_RNA (1)...(19): siRNA sense strand
gcguauuacuggaagagau

SEQ ID NO: 1445968 - RNA, 19 nt, Homo sapiens
  misc_RNA (1)...(19): siRNA sense strand
ugucauucaucaaaucuca

SEQ ID NO: 1445969 - RNA, 19 nt, Homo sapiens
  misc_RNA (1)...(19): siRNA sense strand
gaagacaaagugccaaagc

SEQ ID NO: 1445970 - RNA, 19 nt, Homo sapiens
  misc_RNA (1)...(19): siRNA sense strand
aaccaauguugcccucuuu

SEQ ID NO: 1445971 - RNA, 19 nt, Homo sapiens
  misc_RNA (1)...(19): siRNA sense strand
uugaguaccuuagaauaug

SEQ ID NO: 1445972 - RNA, 19 nt, Homo sapiens
  misc_RNA (1)...(19): siRNA sense strand
gaaugccacaacuuuauca

SEQ ID NO: 1445973 - RNA, 19 nt, Homo sapiens
  misc_RNA (1)...(19): siRNA sense strand
agaugaaugccacaacuuu

SEQ ID NO: 1445974 - RNA, 19 nt, Homo sapiens
  misc_RNA (1)...(19): siRNA sense strand
ugucgacuaucacuauuca

SEQ ID NO: 1445975 - RNA, 19 nt, Homo sapiens
  misc_RNA (1)...(19): siRNA sense strand
uuaaaguucuggcaaagac

SEQ ID NO: 1445976 - RNA, 19 nt, Homo sapiens
  misc_RNA (1)...(19): siRNA sense strand
ugacauggcgaucaagaca

SEQ ID NO: 1445977 - RNA, 19 nt, Homo sapiens
  misc_RNA (1)...(19): siRNA sense strand
ccaguccuuucucuuugaa

SEQ ID NO: 1445978 - RNA, 19 nt, Homo sapiens
  misc_RNA (1)...(19): siRNA sense strand
gcauucaaucccaugugua

SEQ ID NO: 1445979 - RNA, 19 nt, Homo sapiens
  misc_RNA (1)...(19): siRNA sense strand
caagaaacgaugagauggu

SEQ ID NO: 1445980 - RNA, 19 nt, Homo sapiens
  misc_RNA (1)...(19): siRNA sense strand
aaggcaagcauaaagauga

SEQ ID NO: 1445981 - RNA, 19 nt, Homo sapiens
  misc_RNA (1)...(19): siRNA sense strand
caucuuuguuggcucugaa

SEQ ID NO: 1445982 - RNA, 19 nt, Homo sapiens
  misc_RNA (1)...(19): siRNA sense strand
uaaaggcucggcugaacug

SEQ ID NO: 1445983 - RNA, 19 nt, Homo sapiens
  misc_RNA (1)...(19): siRNA sense strand
gaugggaagcuguauucug

SEQ ID NO: 1445984 - RNA, 19 nt, Homo sapiens
  misc_RNA (1)...(19): siRNA sense strand
gagaaaucgcugucgaaca

SEQ ID NO: 1445985 - RNA, 19 nt, Homo sapiens
  misc_RNA (1)...(19): siRNA sense strand
aggcaagcauaaagaugaa

SEQ ID NO: 1445986 - RNA, 19 nt, Homo sapiens
  misc_RNA (1)...(19): siRNA sense strand
cuacacagucaucuuuguu

SEQ ID NO: 1445987 - RNA, 19 nt, Homo sapiens
  misc_RNA (1)...(19): siRNA sense strand
ggacgcccuucaggcaaug

SEQ ID NO: 1445988 - RNA, 19 nt, Homo sapiens
  misc_RNA (1)...(19): siRNA sense strand
guucugcagucuauuacag

SEQ ID NO: 1445989 - RNA, 19 nt, Homo sapiens
  misc_RNA (1)...(19): siRNA sense strand
gacagcaguucccgaagac

SEQ ID NO: 1445990 - RNA, 19 nt, Homo sapiens
  misc_RNA (1)...(19): siRNA sense strand
guucugcugucugugcauu

SEQ ID NO: 1445991 - RNA, 19 nt, Homo sapiens
  misc_RNA (1)...(19): siRNA sense strand
gaacuacacagucaucuuu

SEQ ID NO: 1445992 - RNA, 19 nt, Homo sapiens
  misc_RNA (1)...(19): siRNA sense strand
ggacagcaguucccgaaga

SEQ ID NO: 1445993 - RNA, 19 nt, Homo sapiens
  misc_RNA (1)...(19): siRNA sense strand
gaaacucugucauucauca

SEQ ID NO: 1445994 - RNA, 19 nt, Homo sapiens
  misc_RNA (1)...(19): siRNA sense strand
ggaucaaguuuauacagua

SEQ ID NO: 1445995 - RNA, 19 nt, Homo sapiens
  misc_RNA (1)...(19): siRNA sense strand
gagaaacacuggacuucau

SEQ ID NO: 1445996 - RNA, 19 nt, Homo sapiens
  misc_RNA (1)...(19): siRNA sense strand
gaugaaugccacaacuuua

SEQ ID NO: 1445997 - RNA, 19 nt, Homo sapiens
  misc_RNA (1)...(19): siRNA sense strand
gaagcuggcaugguacuua

SEQ ID NO: 1445998 - RNA, 19 nt, Homo sapiens
  misc_RNA (1)...(19): siRNA sense strand
gaugagcccugguucacaa

SEQ ID NO: 1445999 - RNA, 19 nt, Homo sapiens
  misc_RNA (1)...(19): siRNA sense strand
acacuggacuucauuucua

SEQ ID NO: 1446000 - RNA, 19 nt, Homo sapiens
  misc_RNA (1)...(19): siRNA sense strand
agaaaucgcugucgaacau

SEQ ID NO: 1446001 - RNA, 19 nt, Homo sapiens
  misc_RNA (1)...(19): siRNA sense strand
gagccacacuuucuucaug

SEQ ID NO: 1446002 - RNA, 19 nt, Homo sapiens
  misc_RNA (1)...(19): siRNA sense strand
uagcauggaugacauugaa

SEQ ID NO: 1446003 - RNA, 19 nt, Homo sapiens
  misc_RNA (1)...(19): siRNA sense strand
gcaagaugcccauuugaug

SEQ ID NO: 1446004 - RNA, 19 nt, Homo sapiens
  misc_RNA (1)...(19): siRNA sense strand
gauguucugcagucuauua

SEQ ID NO: 1446005 - RNA, 19 nt, Homo sapiens
  misc_RNA (1)...(19): siRNA sense strand
cacaguggcugacuucuug

SEQ ID NO: 1446006 - RNA, 19 nt, Homo sapiens
  misc_RNA (1)...(19): siRNA sense strand
ggccagcgaugccguuauu

SEQ ID NO: 1446007 - RNA, 19 nt, Homo sapiens
  misc_RNA (1)...(19): siRNA sense strand
gaccaguccuuucucuuug

SEQ ID NO: 1446008 - RNA, 19 nt, Homo sapiens
  misc_RNA (1)...(19): siRNA sense strand
aaacugacauggcgaucaa

SEQ ID NO: 1446009 - RNA, 19 nt, Homo sapiens
  misc_RNA (1)...(19): siRNA sense strand
gcugaugguuucccaguug

SEQ ID NO: 1446010 - RNA, 19 nt, Homo sapiens
  misc_RNA (1)...(19): siRNA sense strand
cgagacacacuuuauauug

SEQ ID NO: 1446011 - RNA, 19 nt, Homo sapiens
  misc_RNA (1)...(19): siRNA sense strand
caaagacucgggucaggua

SEQ ID NO: 1446012 - RNA, 19 nt, Homo sapiens
  misc_RNA (1)...(19): siRNA sense strand
ccacgcagcucaauagcau

SEQ ID NO: 1446013 - RNA, 19 nt, Homo sapiens
  misc_RNA (1)...(19): siRNA sense strand
gaaaggcaagcauaaagau

SEQ ID NO: 1446014 - RNA, 19 nt, Homo sapiens
  misc_RNA (1)...(19): siRNA sense strand
uggcagggaucaaguuuau

SEQ ID NO: 1446015 - RNA, 19 nt, Homo sapiens
  misc_RNA (1)...(19): siRNA sense strand
gaacgacagcguauuacug

SEQ ID NO: 1446016 - RNA, 19 nt, Homo sapiens
  misc_RNA (1)...(19): siRNA sense strand
uuaauacugucgacuauca

SEQ ID NO: 1446017 - RNA, 19 nt, Homo sapiens
  misc_RNA (1)...(19): siRNA sense strand
ccagcgaugccguuauuua

SEQ ID NO: 1446018 - RNA, 19 nt, Homo sapiens
  misc_RNA (1)...(19): siRNA sense strand
gagacacacuuuauauugc

SEQ ID NO: 1446019 - RNA, 19 nt, Homo sapiens
  misc_RNA (1)...(19): siRNA sense strand
gaacagaaaacuccagauu

SEQ ID NO: 1446020 - RNA, 19 nt, Homo sapiens
  misc_RNA (1)...(19): siRNA sense strand
caaaggacgguuuaaggaa

SEQ ID NO: 1446021 - RNA, 19 nt, Homo sapiens
  misc_RNA (1)...(19): siRNA sense strand
gaaacacuggacuucauuu

SEQ ID NO: 1446022 - RNA, 19 nt, Homo sapiens
  misc_RNA (1)...(19): siRNA sense strand
gaucugcccuucgcacaau

SEQ ID NO: 1446023 - RNA, 19 nt, Homo sapiens
  misc_RNA (1)...(19): siRNA sense strand
cgagaaaacugugcuauga

SEQ ID NO: 1446024 - RNA, 19 nt, Homo sapiens
  misc_RNA (1)...(19): siRNA sense strand
uaccagaacuacacaguca

SEQ ID NO: 1446025 - RNA, 19 nt, Homo sapiens
  misc_RNA (1)...(19): siRNA sense strand
ucaaggcaauauccgguuu

SEQ ID NO: 1446026 - RNA, 19 nt, Homo sapiens
  misc_RNA (1)...(19): siRNA sense strand
gggaucaaguuuauacagu

SEQ ID NO: 1446027 - RNA, 19 nt, Homo sapiens
  misc_RNA (1)...(19): siRNA sense strand
ucaaucccauguguagaua

SEQ ID NO: 1446028 - RNA, 19 nt, Homo sapiens
  misc_RNA (1)...(19): siRNA sense strand
uauaaaaccuccaucgauu

SEQ ID NO: 1446029 - RNA, 19 nt, Homo sapiens
  misc_RNA (1)...(19): siRNA sense strand
gcagggaucaaguuuauac

SEQ ID NO: 1446030 - RNA, 19 nt, Homo sapiens
  misc_RNA (1)...(19): siRNA sense strand
ucaaaggacgguuuaagga

SEQ ID NO: 1446031 - RNA, 19 nt, Homo sapiens
  misc_RNA (1)...(19): siRNA sense strand
ugaguaccuuagaauauga

SEQ ID NO: 1446032 - RNA, 19 nt, Homo sapiens
  misc_RNA (1)...(19): siRNA sense strand
gcccaaaacagaaguaaua

SEQ ID NO: 1446033 - RNA, 19 nt, Homo sapiens
  misc_RNA (1)...(19): siRNA sense strand
aagcuggcaugguacuuaa

SEQ ID NO: 1446034 - RNA, 19 nt, Homo sapiens
  misc_RNA (1)...(19): siRNA sense strand
aaaucgcugucgaacauaa

SEQ ID NO: 1446035 - RNA, 19 nt, Homo sapiens
  misc_RNA (1)...(19): siRNA sense strand
ugaaaggcaagcauaaaga

SEQ ID NO: 1446036 - RNA, 19 nt, Homo sapiens
  misc_RNA (1)...(19): siRNA sense strand
gagcccugguucacaaaga

SEQ ID NO: 1446037 - RNA, 19 nt, Homo sapiens
  misc_RNA (1)...(19): siRNA sense strand
aagaaacgaugagaugguu

SEQ ID NO: 1446038 - RNA, 19 nt, Homo sapiens
  misc_RNA (1)...(19): siRNA sense strand
gaugaugaaccccuuaaua

SEQ ID NO: 1446039 - RNA, 19 nt, Homo sapiens
  misc_RNA (1)...(19): siRNA sense strand
agaccaguccuuucucuuu

SEQ ID NO: 1446040 - RNA, 19 nt, Homo sapiens
  misc_RNA (1)...(19): siRNA sense strand
guugaguaccuuagaauau

SEQ ID NO: 1446041 - RNA, 19 nt, Homo sapiens
  misc_RNA (1)...(19): siRNA sense strand
gauugaagccuacaaccau

SEQ ID NO: 1446042 - RNA, 19 nt, Homo sapiens
  misc_RNA (1)...(19): siRNA sense strand
ggagaaacacuggacuuca

SEQ ID NO: 1446043 - RNA, 19 nt, Homo sapiens
  misc_RNA (1)...(19): siRNA sense strand
cagcgaugccguuauuuau

SEQ ID NO: 1446044 - RNA, 19 nt, Homo sapiens
  misc_RNA (1)...(19): siRNA sense strand
aaaccaauguugcccucuu

SEQ ID NO: 1446045 - RNA, 19 nt, Homo sapiens
  misc_RNA (1)...(19): siRNA sense strand
gcaagcauaaagaugaaug

SEQ ID NO: 1446046 - RNA, 19 nt, Homo sapiens
  misc_RNA (1)...(19): siRNA sense strand
cacuggacuucauuucuaa

SEQ ID NO: 1446047 - RNA, 19 nt, Homo sapiens
  misc_RNA (1)...(19): siRNA sense strand
gaaaucgcugucgaacaua

SEQ ID NO: 1446048 - RNA, 19 nt, Homo sapiens
  misc_RNA (1)...(19): siRNA sense strand
acacuuucuucaugccaua

SEQ ID NO: 1446049 - RNA, 19 nt, Homo sapiens
  misc_RNA (1)...(19): siRNA sense strand
gguugaguaccuuagaaua

SEQ ID NO: 1446050 - RNA, 19 nt, Homo sapiens
  misc_RNA (1)...(19): siRNA sense strand
cagcugauguugaaaauuc

SEQ ID NO: 1446051 - RNA, 19 nt, Homo sapiens
  misc_RNA (1)...(19): siRNA sense strand
guauucaaaggacgguuua

SEQ ID NO: 1446052 - RNA, 19 nt, Homo sapiens
  misc_RNA (1)...(19): siRNA sense strand
aagcaugggugauggaucu

SEQ ID NO: 1446053 - RNA, 19 nt, Homo sapiens
  misc_RNA (1)...(19): siRNA sense strand
uuaguggccuggcaagaug

SEQ ID NO: 1446054 - RNA, 19 nt, Homo sapiens
  misc_RNA (1)...(19): siRNA sense strand
aaagaugaaugccacaacu

SEQ ID NO: 1446055 - RNA, 19 nt, Homo sapiens
  misc_RNA (1)...(19): siRNA sense strand
guugagggcagucagcuuu

SEQ ID NO: 1446056 - RNA, 19 nt, Homo sapiens
  misc_RNA (1)...(19): siRNA sense strand
gaaacugacauggcgauca

SEQ ID NO: 1446057 - RNA, 19 nt, Homo sapiens
  misc_RNA (1)...(19): siRNA sense strand
cgacagcguauuacuggaa

SEQ ID NO: 1446058 - RNA, 19 nt, Homo sapiens
  misc_RNA (1)...(19): siRNA sense strand
cucugaagcuggcauggua

SEQ ID NO: 1446059 - RNA, 19 nt, Homo sapiens
  misc_RNA (1)...(19): siRNA sense strand
gaauauggaaacuaugucu

SEQ ID NO: 1446060 - RNA, 19 nt, Homo sapiens
  misc_RNA (1)...(19): siRNA sense strand
cagcuuuccugaagaugau

SEQ ID NO: 1446061 - RNA, 19 nt, Homo sapiens
  misc_RNA (1)...(19): siRNA sense strand
agaaaacugugcuaugaaa

SEQ ID NO: 1446062 - RNA, 19 nt, Homo sapiens
  misc_RNA (1)...(19): siRNA sense strand
ccuuaauacugucgacuau

SEQ ID NO: 1446063 - RNA, 19 nt, Homo sapiens
  misc_RNA (1)...(19): siRNA sense strand
uuugaacgacagcguauua

SEQ ID NO: 1446064 - RNA, 19 nt, Homo sapiens
  misc_RNA (1)...(19): siRNA sense strand
gcauuuagcauggaugaca

SEQ ID NO: 1446065 - RNA, 19 nt, Homo sapiens
  misc_RNA (1)...(19): siRNA sense strand
ucugcugucugugcauuua

SEQ ID NO: 1446066 - RNA, 19 nt, Homo sapiens
  misc_RNA (1)...(19): siRNA sense strand
uaaaugaaaugcccaaaac

SEQ ID NO: 1446067 - RNA, 19 nt, Homo sapiens
  misc_RNA (1)...(19): siRNA sense strand
gcguauuacuggaagagau

SEQ ID NO: 1446068 - RNA, 19 nt, Homo sapiens
  misc_RNA (1)...(19): siRNA sense strand
ugucauucaucaaaucuca

SEQ ID NO: 1446069 - RNA, 19 nt, Homo sapiens
  misc_RNA (1)...(19): siRNA sense strand
gaagacaaagugccaaagc

SEQ ID NO: 1446070 - RNA, 19 nt, Homo sapiens
  misc_RNA (1)...(19): siRNA sense strand
aaccaauguugcccucuuu

SEQ ID NO: 1446071 - RNA, 19 nt, Homo sapiens
  misc_RNA (1)...(19): siRNA sense strand
uugaguaccuuagaauaug

SEQ ID NO: 1446072 - RNA, 19 nt, Homo sapiens
  misc_RNA (1)...(19): siRNA sense strand
gaaugccacaacuuuauca

SEQ ID NO: 1446073 - RNA, 19 nt, Homo sapiens
  misc_RNA (1)...(19): siRNA sense strand
agaugaaugccacaacuuu

SEQ ID NO: 1446074 - RNA, 19 nt, Homo sapiens
  misc_RNA (1)...(19): siRNA sense strand
ugucgacuaucacuauuca

SEQ ID NO: 1446075 - RNA, 19 nt, Homo sapiens
  misc_RNA (1)...(19): siRNA sense strand
uuaaaguucuggcaaagac

SEQ ID NO: 1446076 - RNA, 19 nt, Homo sapiens
  misc_RNA (1)...(19): siRNA sense strand
ugacauggcgaucaagaca

SEQ ID NO: 1446077 - RNA, 19 nt, Homo sapiens
  misc_RNA (1)...(19): siRNA sense strand
ccaguccuuucucuuugaa

SEQ ID NO: 1446078 - RNA, 19 nt, Homo sapiens
  misc_RNA (1)...(19): siRNA sense strand
gcauucaaucccaugugua

SEQ ID NO: 1446079 - RNA, 19 nt, Homo sapiens
  misc_RNA (1)...(19): siRNA sense strand
caagaaacgaugagauggu

SEQ ID NO: 1446080 - RNA, 19 nt, Homo sapiens
  misc_RNA (1)...(19): siRNA sense strand
aaggcaagcauaaagauga

SEQ ID NO: 1446081 - RNA, 19 nt, Homo sapiens
  misc_RNA (1)...(19): siRNA sense strand
caucuuuguuggcucugaa

SEQ ID NO: 1446082 - RNA, 19 nt, Homo sapiens
  misc_RNA (1)...(19): siRNA sense strand
uaaaggcucggcugaacug

SEQ ID NO: 1446083 - RNA, 19 nt, Homo sapiens
  misc_RNA (1)...(19): siRNA sense strand
gaugggaagcuguauucug

SEQ ID NO: 1446084 - RNA, 19 nt, Homo sapiens
  misc_RNA (1)...(19): siRNA sense strand
gagaaaucgcugucgaaca

SEQ ID NO: 1446085 - RNA, 19 nt, Homo sapiens
  misc_RNA (1)...(19): siRNA sense strand
aggcaagcauaaagaugaa

SEQ ID NO: 1446086 - RNA, 19 nt, Homo sapiens
  misc_RNA (1)...(19): siRNA sense strand
cuacacagucaucuuuguu

SEQ ID NO: 1446087 - RNA, 19 nt, Homo sapiens
  misc_RNA (1)...(19): siRNA sense strand
ggacgcccuucaggcaaug

SEQ ID NO: 1446088 - RNA, 19 nt, Homo sapiens
  misc_RNA (1)...(19): siRNA sense strand
guucugcagucuauuacag

SEQ ID NO: 1446089 - RNA, 19 nt, Homo sapiens
  misc_RNA (1)...(19): siRNA sense strand
gacagcaguucccgaagac

SEQ ID NO: 1446090 - RNA, 19 nt, Homo sapiens
  misc_RNA (1)...(19): siRNA sense strand
guucugcugucugugcauu

SEQ ID NO: 1446091 - RNA, 19 nt, Homo sapiens
  misc_RNA (1)...(19): siRNA sense strand
gaacuacacagucaucuuu

SEQ ID NO: 1446092 - RNA, 19 nt, Homo sapiens
  misc_RNA (1)...(19): siRNA sense strand
ggacagcaguucccgaaga

SEQ ID NO: 1446093 - RNA, 19 nt, Homo sapiens
  misc_RNA (1)...(19): siRNA sense strand
gaaacucugucauucauca

SEQ ID NO: 1446094 - RNA, 19 nt, Homo sapiens
  misc_RNA (1)...(19): siRNA sense strand
ggaucaaguuuauacagua

SEQ ID NO: 1446095 - RNA, 19 nt, Homo sapiens
  misc_RNA (1)...(19): siRNA sense strand
gagaaacacuggacuucau

SEQ ID NO: 1446096 - RNA, 19 nt, Homo sapiens
  misc_RNA (1)...(19): siRNA sense strand
gaugaaugccacaacuuua

SEQ ID NO: 1446097 - RNA, 19 nt, Homo sapiens
  misc_RNA (1)...(19): siRNA sense strand
gaagcuggcaugguacuua

SEQ ID NO: 1446098 - RNA, 19 nt, Homo sapiens
  misc_RNA (1)...(19): siRNA sense strand
gaugagcccugguucacaa

SEQ ID NO: 1446099 - RNA, 19 nt, Homo sapiens
  misc_RNA (1)...(19): siRNA sense strand
acacuggacuucauuucua

SEQ ID NO: 1446100 - RNA, 19 nt, Homo sapiens
  misc_RNA (1)...(19): siRNA sense strand
agaaaucgcugucgaacau

SEQ ID NO: 1446101 - RNA, 19 nt, Homo sapiens
  misc_RNA (1)...(19): siRNA sense strand
gagccacacuuucuucaug

SEQ ID NO: 1446102 - RNA, 19 nt, Homo sapiens
  misc_RNA (1)...(19): siRNA sense strand
uagcauggaugacauugaa

SEQ ID NO: 1446103 - RNA, 19 nt, Homo sapiens
  misc_RNA (1)...(19): siRNA sense strand
gcaagaugcccauuugaug

SEQ ID NO: 1446104 - RNA, 19 nt, Homo sapiens
  misc_RNA (1)...(19): siRNA sense strand
gauguucugcagucuauua

SEQ ID NO: 1446105 - RNA, 19 nt, Homo sapiens
  misc_RNA (1)...(19): siRNA sense strand
cacaguggcugacuucuug

SEQ ID NO: 1446106 - RNA, 19 nt, Homo sapiens
  misc_RNA (1)...(19): siRNA sense strand
ggccagcgaugccguuauu

SEQ ID NO: 1446107 - RNA, 19 nt, Homo sapiens
  misc_RNA (1)...(19): siRNA sense strand
gaccaguccuuucucuuug

SEQ ID NO: 1446108 - RNA, 19 nt, Homo sapiens
  misc_RNA (1)...(19): siRNA sense strand
aaacugacauggcgaucaa

SEQ ID NO: 1446109 - RNA, 19 nt, Homo sapiens
  misc_RNA (1)...(19): siRNA sense strand
gcugaugguuucccaguug

SEQ ID NO: 1446110 - RNA, 19 nt, Homo sapiens
  misc_RNA (1)...(19): siRNA sense strand
cgagacacacuuuauauug

SEQ ID NO: 1446111 - RNA, 19 nt, Homo sapiens
  misc_RNA (1)...(19): siRNA sense strand
caaagacucgggucaggua

SEQ ID NO: 1446112 - RNA, 19 nt, Homo sapiens
  misc_RNA (1)...(19): siRNA sense strand
ccacgcagcucaauagcau

SEQ ID NO: 1446113 - RNA, 19 nt, Homo sapiens
  misc_RNA (1)...(19): siRNA sense strand
gaaaggcaagcauaaagau

SEQ ID NO: 1446114 - RNA, 19 nt, Homo sapiens
  misc_RNA (1)...(19): siRNA sense strand
uggcagggaucaaguuuau

SEQ ID NO: 1446115 - RNA, 19 nt, Homo sapiens
  misc_RNA (1)...(19): siRNA sense strand
gaacgacagcguauuacug

SEQ ID NO: 1446116 - RNA, 19 nt, Homo sapiens
  misc_RNA (1)...(19): siRNA sense strand
uuaauacugucgacuauca

SEQ ID NO: 1446117 - RNA, 19 nt, Homo sapiens
  misc_RNA (1)...(19): siRNA sense strand
ccagcgaugccguuauuua

SEQ ID NO: 1446118 - RNA, 19 nt, Homo sapiens
  misc_RNA (1)...(19): siRNA sense strand
gagacacacuuuauauugc

SEQ ID NO: 1446119 - RNA, 19 nt, Homo sapiens
  misc_RNA (1)...(19): siRNA sense strand
gaacagaaaacuccagauu

SEQ ID NO: 1446120 - RNA, 19 nt, Homo sapiens
  misc_RNA (1)...(19): siRNA sense strand
caaaggacgguuuaaggaa

SEQ ID NO: 1446121 - RNA, 19 nt, Homo sapiens
  misc_RNA (1)...(19): siRNA sense strand
gaaacacuggacuucauuu

SEQ ID NO: 1446122 - RNA, 19 nt, Homo sapiens
  misc_RNA (1)...(19): siRNA sense strand
gaucugcccuucgcacaau

SEQ ID NO: 1446123 - RNA, 19 nt, Homo sapiens
  misc_RNA (1)...(19): siRNA sense strand
cgagaaaacugugcuauga

SEQ ID NO: 1446124 - RNA, 19 nt, Homo sapiens
  misc_RNA (1)...(19): siRNA sense strand
uaccagaacuacacaguca

SEQ ID NO: 1446125 - RNA, 19 nt, Homo sapiens
  misc_RNA (1)...(19): siRNA sense strand
ucaaggcaauauccgguuu

SEQ ID NO: 1446126 - RNA, 19 nt, Homo sapiens
  misc_RNA (1)...(19): siRNA sense strand
gggaucaaguuuauacagu

SEQ ID NO: 1446127 - RNA, 19 nt, Homo sapiens
  misc_RNA (1)...(19): siRNA sense strand
ucaaucccauguguagaua

SEQ ID NO: 1446128 - RNA, 19 nt, Homo sapiens
  misc_RNA (1)...(19): siRNA sense strand
uauaaaaccuccaucgauu

SEQ ID NO: 1446129 - RNA, 19 nt, Homo sapiens
  misc_RNA (1)...(19): siRNA sense strand
gcagggaucaaguuuauac

SEQ ID NO: 1446130 - RNA, 19 nt, Homo sapiens
  misc_RNA (1)...(19): siRNA sense strand
ucaaaggacgguuuaagga

SEQ ID NO: 1446131 - RNA, 19 nt, Homo sapiens
  misc_RNA (1)...(19): siRNA sense strand
ugaguaccuuagaauauga

SEQ ID NO: 1446132 - RNA, 19 nt, Homo sapiens
  misc_RNA (1)...(19): siRNA sense strand
gcccaaaacagaaguaaua

SEQ ID NO: 1446133 - RNA, 19 nt, Homo sapiens
  misc_RNA (1)...(19): siRNA sense strand
aagcuggcaugguacuuaa

SEQ ID NO: 1446134 - RNA, 19 nt, Homo sapiens
  misc_RNA (1)...(19): siRNA sense strand
aaaucgcugucgaacauaa

SEQ ID NO: 1446135 - RNA, 19 nt, Homo sapiens
  misc_RNA (1)...(19): siRNA sense strand
ugaaaggcaagcauaaaga

SEQ ID NO: 1446136 - RNA, 19 nt, Homo sapiens
  misc_RNA (1)...(19): siRNA sense strand
gagcccugguucacaaaga

SEQ ID NO: 1446137 - RNA, 19 nt, Homo sapiens
  misc_RNA (1)...(19): siRNA sense strand
aagaaacgaugagaugguu

SEQ ID NO: 1446138 - RNA, 19 nt, Homo sapiens
  misc_RNA (1)...(19): siRNA sense strand
gaugaugaaccccuuaaua

SEQ ID NO: 1446139 - RNA, 19 nt, Homo sapiens
  misc_RNA (1)...(19): siRNA sense strand
agaccaguccuuucucuuu

SEQ ID NO: 1446140 - RNA, 19 nt, Homo sapiens
  misc_RNA (1)...(19): siRNA sense strand
guugaguaccuuagaauau

SEQ ID NO: 1446141 - RNA, 19 nt, Homo sapiens
  misc_RNA (1)...(19): siRNA sense strand
gauugaagccuacaaccau

SEQ ID NO: 1446142 - RNA, 19 nt, Homo sapiens
  misc_RNA (1)...(19): siRNA sense strand
ggagaaacacuggacuuca

SEQ ID NO: 1446143 - RNA, 19 nt, Homo sapiens
  misc_RNA (1)...(19): siRNA sense strand
cagcgaugccguuauuuau

SEQ ID NO: 1446144 - RNA, 19 nt, Homo sapiens
  misc_RNA (1)...(19): siRNA sense strand
aaaccaauguugcccucuu

SEQ ID NO: 1446145 - RNA, 19 nt, Homo sapiens
  misc_RNA (1)...(19): siRNA sense strand
gcaagcauaaagaugaaug

SEQ ID NO: 1446146 - RNA, 19 nt, Homo sapiens
  misc_RNA (1)...(19): siRNA sense strand
cacuggacuucauuucuaa

SEQ ID NO: 1446147 - RNA, 19 nt, Homo sapiens
  misc_RNA (1)...(19): siRNA sense strand
gaaaucgcugucgaacaua

SEQ ID NO: 1446148 - RNA, 19 nt, Homo sapiens
  misc_RNA (1)...(19): siRNA sense strand
acacuuucuucaugccaua

SEQ ID NO: 1446149 - RNA, 19 nt, Homo sapiens
  misc_RNA (1)...(19): siRNA sense strand
gguugaguaccuuagaaua

SEQ ID NO: 1446150 - RNA, 19 nt, Homo sapiens
  misc_RNA (1)...(19): siRNA sense strand
cagcugauguugaaaauuc

SEQ ID NO: 1446151 - RNA, 19 nt, Homo sapiens
  misc_RNA (1)...(19): siRNA sense strand
guauucaaaggacgguuua

SEQ ID NO: 1446152 - RNA, 19 nt, Homo sapiens
  misc_RNA (1)...(19): siRNA sense strand
aagcaugggugauggaucu

SEQ ID NO: 1446153 - RNA, 19 nt, Homo sapiens
  misc_RNA (1)...(19): siRNA sense strand
uuaguggccuggcaagaug

SEQ ID NO: 1446154 - RNA, 19 nt, Homo sapiens
  misc_RNA (1)...(19): siRNA sense strand
aaagaugaaugccacaacu

SEQ ID NO: 1446155 - RNA, 19 nt, Homo sapiens
  misc_RNA (1)...(19): siRNA sense strand
guugagggcagucagcuuu

SEQ ID NO: 1446156 - RNA, 19 nt, Homo sapiens
  misc_RNA (1)...(19): siRNA sense strand
gaaacugacauggcgauca

SEQ ID NO: 1446157 - RNA, 19 nt, Homo sapiens
  misc_RNA (1)...(19): siRNA sense strand
cgacagcguauuacuggaa

SEQ ID NO: 1446158 - RNA, 19 nt, Homo sapiens
  misc_RNA (1)...(19): siRNA sense strand
cucugaagcuggcauggua

SEQ ID NO: 1446159 - RNA, 19 nt, Homo sapiens
  misc_RNA (1)...(19): siRNA sense strand
gaauauggaaacuaugucu

SEQ ID NO: 1446160 - RNA, 19 nt, Homo sapiens
  misc_RNA (1)...(19): siRNA sense strand
cagcuuuccugaagaugau

SEQ ID NO: 1446161 - RNA, 19 nt, Homo sapiens
  misc_RNA (1)...(19): siRNA sense strand
agaaaacugugcuaugaaa

SEQ ID NO: 1446162 - RNA, 19 nt, Homo sapiens
  misc_RNA (1)...(19): siRNA sense strand
ccuuaauacugucgacuau

SEQ ID NO: 1446163 - RNA, 19 nt, Homo sapiens
  misc_RNA (1)...(19): siRNA sense strand
uuugaacgacagcguauua

SEQ ID NO: 1446164 - RNA, 19 nt, Homo sapiens
  misc_RNA (1)...(19): siRNA sense strand
gcauuuagcauggaugaca

SEQ ID NO: 1446165 - RNA, 19 nt, Homo sapiens
  misc_RNA (1)...(19): siRNA sense strand
ucugcugucugugcauuua

SEQ ID NO: 1446166 - RNA, 19 nt, Homo sapiens
  misc_RNA (1)...(19): siRNA sense strand
uaaaugaaaugcccaaaac

SEQ ID NO: 1446167 - RNA, 19 nt, Homo sapiens
  misc_RNA (1)...(19): siRNA sense strand
gcguauuacuggaagagau

SEQ ID NO: 1446168 - RNA, 19 nt, Homo sapiens
  misc_RNA (1)...(19): siRNA sense strand
ugucauucaucaaaucuca

SEQ ID NO: 1446169 - RNA, 19 nt, Homo sapiens
  misc_RNA (1)...(19): siRNA sense strand
gaagacaaagugccaaagc

SEQ ID NO: 1446170 - RNA, 19 nt, Homo sapiens
  misc_RNA (1)...(19): siRNA sense strand
aaccaauguugcccucuuu

SEQ ID NO: 1446171 - RNA, 19 nt, Homo sapiens
  misc_RNA (1)...(19): siRNA sense strand
uugaguaccuuagaauaug

SEQ ID NO: 1446172 - RNA, 19 nt, Homo sapiens
  misc_RNA (1)...(19): siRNA sense strand
gaaugccacaacuuuauca

SEQ ID NO: 1446173 - RNA, 19 nt, Homo sapiens
  misc_RNA (1)...(19): siRNA sense strand
agaugaaugccacaacuuu

SEQ ID NO: 1446174 - RNA, 19 nt, Homo sapiens
  misc_RNA (1)...(19): siRNA sense strand
ugucgacuaucacuauuca

SEQ ID NO: 1446175 - RNA, 19 nt, Homo sapiens
  misc_RNA (1)...(19): siRNA sense strand
uuaaaguucuggcaaagac

SEQ ID NO: 1446176 - RNA, 19 nt, Homo sapiens
  misc_RNA (1)...(19): siRNA sense strand
ugacauggcgaucaagaca

SEQ ID NO: 1446177 - RNA, 19 nt, Homo sapiens
  misc_RNA (1)...(19): siRNA sense strand
ccaguccuuucucuuugaa

SEQ ID NO: 1446178 - RNA, 19 nt, Homo sapiens
  misc_RNA (1)...(19): siRNA sense strand
gcauucaaucccaugugua

SEQ ID NO: 1446179 - RNA, 19 nt, Homo sapiens
  misc_RNA (1)...(19): siRNA sense strand
caagaaacgaugagauggu

SEQ ID NO: 1446180 - RNA, 19 nt, Homo sapiens
  misc_RNA (1)...(19): siRNA sense strand
aaggcaagcauaaagauga

SEQ ID NO: 1446181 - RNA, 19 nt, Homo sapiens
  misc_RNA (1)...(19): siRNA sense strand
caucuuuguuggcucugaa

SEQ ID NO: 1446182 - RNA, 19 nt, Homo sapiens
  misc_RNA (1)...(19): siRNA sense strand
uaaaggcucggcugaacug

SEQ ID NO: 1446183 - RNA, 19 nt, Homo sapiens
  misc_RNA (1)...(19): siRNA sense strand
gaugggaagcuguauucug

SEQ ID NO: 1446184 - RNA, 19 nt, Homo sapiens
  misc_RNA (1)...(19): siRNA sense strand
gagaaaucgcugucgaaca

SEQ ID NO: 1446185 - RNA, 19 nt, Homo sapiens
  misc_RNA (1)...(19): siRNA sense strand
aggcaagcauaaagaugaa

SEQ ID NO: 1446186 - RNA, 19 nt, Homo sapiens
  misc_RNA (1)...(19): siRNA sense strand
cuacacagucaucuuuguu

SEQ ID NO: 1446187 - RNA, 19 nt, Homo sapiens
  misc_RNA (1)...(19): siRNA sense strand
ggacgcccuucaggcaaug

SEQ ID NO: 1446188 - RNA, 19 nt, Homo sapiens
  misc_RNA (1)...(19): siRNA sense strand
guucugcagucuauuacag

SEQ ID NO: 1446189 - RNA, 19 nt, Homo sapiens
  misc_RNA (1)...(19): siRNA sense strand
gacagcaguucccgaagac

SEQ ID NO: 1446190 - RNA, 19 nt, Homo sapiens
  misc_RNA (1)...(19): siRNA sense strand
guucugcugucugugcauu

SEQ ID NO: 1446191 - RNA, 19 nt, Homo sapiens
  misc_RNA (1)...(19): siRNA sense strand
gaacuacacagucaucuuu

SEQ ID NO: 1446192 - RNA, 19 nt, Homo sapiens
  misc_RNA (1)...(19): siRNA sense strand
ggacagcaguucccgaaga

SEQ ID NO: 1446193 - RNA, 19 nt, Homo sapiens
  misc_RNA (1)...(19): siRNA sense strand
gaaacucugucauucauca

SEQ ID NO: 1446194 - RNA, 19 nt, Homo sapiens
  misc_RNA (1)...(19): siRNA sense strand
ggaucaaguuuauacagua

SEQ ID NO: 1446195 - RNA, 19 nt, Homo sapiens
  misc_RNA (1)...(19): siRNA sense strand
gagaaacacuggacuucau

SEQ ID NO: 1446196 - RNA, 19 nt, Homo sapiens
  misc_RNA (1)...(19): siRNA sense strand
gaugaaugccacaacuuua

SEQ ID NO: 1446197 - RNA, 19 nt, Homo sapiens
  misc_RNA (1)...(19): siRNA sense strand
gaagcuggcaugguacuua

SEQ ID NO: 1446198 - RNA, 19 nt, Homo sapiens
  misc_RNA (1)...(19): siRNA sense strand
gaugagcccugguucacaa

SEQ ID NO: 1446199 - RNA, 19 nt, Homo sapiens
  misc_RNA (1)...(19): siRNA sense strand
acacuggacuucauuucua

SEQ ID NO: 1446200 - RNA, 19 nt, Homo sapiens
  misc_RNA (1)...(19): siRNA sense strand
agaaaucgcugucgaacau

SEQ ID NO: 1446201 - RNA, 19 nt, Homo sapiens
  misc_RNA (1)...(19): siRNA sense strand
gagccacacuuucuucaug

SEQ ID NO: 1446202 - RNA, 19 nt, Homo sapiens
  misc_RNA (1)...(19): siRNA sense strand
uagcauggaugacauugaa

SEQ ID NO: 1446203 - RNA, 19 nt, Homo sapiens
  misc_RNA (1)...(19): siRNA sense strand
gcaagaugcccauuugaug

SEQ ID NO: 1446204 - RNA, 19 nt, Homo sapiens
  misc_RNA (1)...(19): siRNA sense strand
gauguucugcagucuauua

SEQ ID NO: 1446205 - RNA, 19 nt, Homo sapiens
  misc_RNA (1)...(19): siRNA sense strand
cacaguggcugacuucuug

SEQ ID NO: 1446206 - RNA, 19 nt, Homo sapiens
  misc_RNA (1)...(19): siRNA sense strand
ggccagcgaugccguuauu

SEQ ID NO: 1446207 - RNA, 19 nt, Homo sapiens
  misc_RNA (1)...(19): siRNA sense strand
gaccaguccuuucucuuug

SEQ ID NO: 1446208 - RNA, 19 nt, Homo sapiens
  misc_RNA (1)...(19): siRNA sense strand
aaacugacauggcgaucaa

SEQ ID NO: 1446209 - RNA, 19 nt, Homo sapiens
  misc_RNA (1)...(19): siRNA sense strand
gcugaugguuucccaguug

SEQ ID NO: 1446210 - RNA, 19 nt, Homo sapiens
  misc_RNA (1)...(19): siRNA sense strand
cgagacacacuuuauauug

SEQ ID NO: 1446211 - RNA, 19 nt, Homo sapiens
  misc_RNA (1)...(19): siRNA sense strand
caaagacucgggucaggua

SEQ ID NO: 1446212 - RNA, 19 nt, Homo sapiens
  misc_RNA (1)...(19): siRNA sense strand
ccacgcagcucaauagcau

SEQ ID NO: 1446213 - RNA, 19 nt, Homo sapiens
  misc_RNA (1)...(19): siRNA sense strand
gaaaggcaagcauaaagau

SEQ ID NO: 1446214 - RNA, 19 nt, Homo sapiens
  misc_RNA (1)...(19): siRNA sense strand
uggcagggaucaaguuuau

SEQ ID NO: 1446215 - RNA, 19 nt, Homo sapiens
  misc_RNA (1)...(19): siRNA sense strand
gaacgacagcguauuacug

SEQ ID NO: 1446216 - RNA, 19 nt, Homo sapiens
  misc_RNA (1)...(19): siRNA sense strand
uuaauacugucgacuauca

SEQ ID NO: 1446217 - RNA, 19 nt, Homo sapiens
  misc_RNA (1)...(19): siRNA sense strand
ccagcgaugccguuauuua

SEQ ID NO: 1446218 - RNA, 19 nt, Homo sapiens
  misc_RNA (1)...(19): siRNA sense strand
gagacacacuuuauauugc

SEQ ID NO: 1446219 - RNA, 19 nt, Homo sapiens
  misc_RNA (1)...(19): siRNA sense strand
gaacagaaaacuccagauu

SEQ ID NO: 1446220 - RNA, 19 nt, Homo sapiens
  misc_RNA (1)...(19): siRNA sense strand
caaaggacgguuuaaggaa

SEQ ID NO: 1446221 - RNA, 19 nt, Homo sapiens
  misc_RNA (1)...(19): siRNA sense strand
gaaacacuggacuucauuu

SEQ ID NO: 1446222 - RNA, 19 nt, Homo sapiens
  misc_RNA (1)...(19): siRNA sense strand
gaucugcccuucgcacaau

SEQ ID NO: 1446223 - RNA, 19 nt, Homo sapiens
  misc_RNA (1)...(19): siRNA sense strand
cgagaaaacugugcuauga

SEQ ID NO: 1446224 - RNA, 19 nt, Homo sapiens
  misc_RNA (1)...(19): siRNA sense strand
uaccagaacuacacaguca

SEQ ID NO: 1446225 - RNA, 19 nt, Homo sapiens
  misc_RNA (1)...(19): siRNA sense strand
ucaaggcaauauccgguuu

SEQ ID NO: 1446226 - RNA, 19 nt, Homo sapiens
  misc_RNA (1)...(19): siRNA sense strand
gggaucaaguuuauacagu

SEQ ID NO: 1446227 - RNA, 19 nt, Homo sapiens
  misc_RNA (1)...(19): siRNA sense strand
ucaaucccauguguagaua

SEQ ID NO: 1446228 - RNA, 19 nt, Homo sapiens
  misc_RNA (1)...(19): siRNA sense strand
uauaaaaccuccaucgauu

SEQ ID NO: 1446229 - RNA, 19 nt, Homo sapiens
  misc_RNA (1)...(19): siRNA sense strand
gcagggaucaaguuuauac

SEQ ID NO: 1446230 - RNA, 19 nt, Homo sapiens
  misc_RNA (1)...(19): siRNA sense strand
ucaaaggacgguuuaagga

SEQ ID NO: 1446231 - RNA, 19 nt, Homo sapiens
  misc_RNA (1)...(19): siRNA sense strand
ugaguaccuuagaauauga

SEQ ID NO: 1446232 - RNA, 19 nt, Homo sapiens
  misc_RNA (1)...(19): siRNA sense strand
gcccaaaacagaaguaaua

SEQ ID NO: 1446233 - RNA, 19 nt, Homo sapiens
  misc_RNA (1)...(19): siRNA sense strand
aagcuggcaugguacuuaa

SEQ ID NO: 1446234 - RNA, 19 nt, Homo sapiens
  misc_RNA (1)...(19): siRNA sense strand
aaaucgcugucgaacauaa

SEQ ID NO: 1446235 - RNA, 19 nt, Homo sapiens
  misc_RNA (1)...(19): siRNA sense strand
ugaaaggcaagcauaaaga

SEQ ID NO: 1446236 - RNA, 19 nt, Homo sapiens
  misc_RNA (1)...(19): siRNA sense strand
gagcccugguucacaaaga

SEQ ID NO: 1446237 - RNA, 19 nt, Homo sapiens
  misc_RNA (1)...(19): siRNA sense strand
aagaaacgaugagaugguu

SEQ ID NO: 1446238 - RNA, 19 nt, Homo sapiens
  misc_RNA (1)...(19): siRNA sense strand
gaugaugaaccccuuaaua

SEQ ID NO: 1446239 - RNA, 19 nt, Homo sapiens
  misc_RNA (1)...(19): siRNA sense strand
agaccaguccuuucucuuu

SEQ ID NO: 1446240 - RNA, 19 nt, Homo sapiens
  misc_RNA (1)...(19): siRNA sense strand
guugaguaccuuagaauau

SEQ ID NO: 1446241 - RNA, 19 nt, Homo sapiens
  misc_RNA (1)...(19): siRNA sense strand
gauugaagccuacaaccau

SEQ ID NO: 1446242 - RNA, 19 nt, Homo sapiens
  misc_RNA (1)...(19): siRNA sense strand
ggagaaacacuggacuuca

SEQ ID NO: 1446243 - RNA, 19 nt, Homo sapiens
  misc_RNA (1)...(19): siRNA sense strand
cagcgaugccguuauuuau

SEQ ID NO: 1446244 - RNA, 19 nt, Homo sapiens
  misc_RNA (1)...(19): siRNA sense strand
aaaccaauguugcccucuu

SEQ ID NO: 1446245 - RNA, 19 nt, Homo sapiens
  misc_RNA (1)...(19): siRNA sense strand
gcaagcauaaagaugaaug

SEQ ID NO: 1446246 - RNA, 19 nt, Homo sapiens
  misc_RNA (1)...(19): siRNA sense strand
cacuggacuucauuucuaa

SEQ ID NO: 1446247 - RNA, 19 nt, Homo sapiens
  misc_RNA (1)...(19): siRNA sense strand
gaaaucgcugucgaacaua

SEQ ID NO: 1446248 - RNA, 19 nt, Homo sapiens
  misc_RNA (1)...(19): siRNA sense strand
acacuuucuucaugccaua

SEQ ID NO: 1446249 - RNA, 19 nt, Homo sapiens
  misc_RNA (1)...(19): siRNA sense strand
gguugaguaccuuagaaua

SEQ ID NO: 1446250 - RNA, 19 nt, Homo sapiens
  misc_RNA (1)...(19): siRNA sense strand
cagcugauguugaaaauuc

SEQ ID NO: 1446251 - RNA, 19 nt, Homo sapiens
  misc_RNA (1)...(19): siRNA sense strand
guauucaaaggacgguuua

SEQ ID NO: 1446252 - RNA, 19 nt, Homo sapiens
  misc_RNA (1)...(19): siRNA sense strand
aagcaugggugauggaucu

SEQ ID NO: 1446253 - RNA, 19 nt, Homo sapiens
  misc_RNA (1)...(19): siRNA sense strand
uuaguggccuggcaagaug

SEQ ID NO: 1446254 - RNA, 19 nt, Homo sapiens
  misc_RNA (1)...(19): siRNA sense strand
aaagaugaaugccacaacu

SEQ ID NO: 1446255 - RNA, 19 nt, Homo sapiens
  misc_RNA (1)...(19): siRNA sense strand
guugagggcagucagcuuu

SEQ ID NO: 1446256 - RNA, 19 nt, Homo sapiens
  misc_RNA (1)...(19): siRNA sense strand
gaaacugacauggcgauca

SEQ ID NO: 1446257 - RNA, 19 nt, Homo sapiens
  misc_RNA (1)...(19): siRNA sense strand
cgacagcguauuacuggaa

SEQ ID NO: 1446258 - RNA, 19 nt, Homo sapiens
  misc_RNA (1)...(19): siRNA sense strand
cucugaagcuggcauggua

SEQ ID NO: 1446259 - RNA, 19 nt, Homo sapiens
  misc_RNA (1)...(19): siRNA sense strand
gaauauggaaacuaugucu

SEQ ID NO: 1446260 - RNA, 19 nt, Homo sapiens
  misc_RNA (1)...(19): siRNA sense strand
cagcuuuccugaagaugau

SEQ ID NO: 1446261 - RNA, 19 nt, Homo sapiens
  misc_RNA (1)...(19): siRNA sense strand
agaaaacugugcuaugaaa

SEQ ID NO: 1446262 - RNA, 19 nt, Homo sapiens
  misc_RNA (1)...(19): siRNA sense strand
ccuuaauacugucgacuau

SEQ ID NO: 1446263 - RNA, 19 nt, Homo sapiens
  misc_RNA (1)...(19): siRNA sense strand
uuugaacgacagcguauua

SEQ ID NO: 1446264 - RNA, 19 nt, Homo sapiens
  misc_RNA (1)...(19): siRNA sense strand
gcauuuagcauggaugaca

SEQ ID NO: 1446265 - RNA, 19 nt, Homo sapiens
  misc_RNA (1)...(19): siRNA sense strand
ucugcugucugugcauuua

SEQ ID NO: 1446266 - RNA, 19 nt, Homo sapiens
  misc_RNA (1)...(19): siRNA sense strand
uaaaugaaaugcccaaaac

SEQ ID NO: 1446267 - RNA, 19 nt, Homo sapiens
  misc_RNA (1)...(19): siRNA sense strand
gcguauuacuggaagagau

SEQ ID NO: 1446268 - RNA, 19 nt, Homo sapiens
  misc_RNA (1)...(19): siRNA sense strand
ugucauucaucaaaucuca

SEQ ID NO: 1446269 - RNA, 19 nt, Homo sapiens
  misc_RNA (1)...(19): siRNA sense strand
gaagacaaagugccaaagc

SEQ ID NO: 1446270 - RNA, 19 nt, Homo sapiens
  misc_RNA (1)...(19): siRNA sense strand
aaccaauguugcccucuuu

SEQ ID NO: 1446271 - RNA, 19 nt, Homo sapiens
  misc_RNA (1)...(19): siRNA sense strand
uugaguaccuuagaauaug

SEQ ID NO: 1446272 - RNA, 19 nt, Homo sapiens
  misc_RNA (1)...(19): siRNA sense strand
gaaugccacaacuuuauca

SEQ ID NO: 1446273 - RNA, 19 nt, Homo sapiens
  misc_RNA (1)...(19): siRNA sense strand
agaugaaugccacaacuuu

SEQ ID NO: 1446274 - RNA, 19 nt, Homo sapiens
  misc_RNA (1)...(19): siRNA sense strand
ugucgacuaucacuauuca

SEQ ID NO: 1446275 - RNA, 19 nt, Homo sapiens
  misc_RNA (1)...(19): siRNA sense strand
uuaaaguucuggcaaagac

SEQ ID NO: 1446276 - RNA, 19 nt, Homo sapiens
  misc_RNA (1)...(19): siRNA sense strand
ugacauggcgaucaagaca

SEQ ID NO: 1446277 - RNA, 19 nt, Homo sapiens
  misc_RNA (1)...(19): siRNA sense strand
ccaguccuuucucuuugaa

SEQ ID NO: 1446278 - RNA, 19 nt, Homo sapiens
  misc_RNA (1)...(19): siRNA sense strand
gcauucaaucccaugugua

SEQ ID NO: 1446279 - RNA, 19 nt, Homo sapiens
  misc_RNA (1)...(19): siRNA sense strand
caagaaacgaugagauggu

SEQ ID NO: 1446280 - RNA, 19 nt, Homo sapiens
  misc_RNA (1)...(19): siRNA sense strand
aaggcaagcauaaagauga

SEQ ID NO: 1446281 - RNA, 19 nt, Homo sapiens
  misc_RNA (1)...(19): siRNA sense strand
caucuuuguuggcucugaa

SEQ ID NO: 1446282 - RNA, 19 nt, Homo sapiens
  misc_RNA (1)...(19): siRNA sense strand
uaaaggcucggcugaacug

SEQ ID NO: 1446283 - RNA, 19 nt, Homo sapiens
  misc_RNA (1)...(19): siRNA sense strand
gaugggaagcuguauucug

SEQ ID NO: 1446284 - RNA, 19 nt, Homo sapiens
  misc_RNA (1)...(19): siRNA sense strand
gagaaaucgcugucgaaca

SEQ ID NO: 1446285 - RNA, 19 nt, Homo sapiens
  misc_RNA (1)...(19): siRNA sense strand
aggcaagcauaaagaugaa

SEQ ID NO: 1446286 - RNA, 19 nt, Homo sapiens
  misc_RNA (1)...(19): siRNA sense strand
cuacacagucaucuuuguu

SEQ ID NO: 1446287 - RNA, 19 nt, Homo sapiens
  misc_RNA (1)...(19): siRNA sense strand
ggacgcccuucaggcaaug

SEQ ID NO: 1446288 - RNA, 19 nt, Homo sapiens
  misc_RNA (1)...(19): siRNA sense strand
guucugcagucuauuacag

SEQ ID NO: 1446289 - RNA, 19 nt, Homo sapiens
  misc_RNA (1)...(19): siRNA sense strand
gacagcaguucccgaagac

SEQ ID NO: 1446290 - RNA, 19 nt, Homo sapiens
  misc_RNA (1)...(19): siRNA sense strand
guucugcugucugugcauu

SEQ ID NO: 1446291 - RNA, 19 nt, Homo sapiens
  misc_RNA (1)...(19): siRNA sense strand
gaacuacacagucaucuuu

SEQ ID NO: 1446292 - RNA, 19 nt, Homo sapiens
  misc_RNA (1)...(19): siRNA sense strand
ggacagcaguucccgaaga

SEQ ID NO: 1446293 - RNA, 19 nt, Homo sapiens
  misc_RNA (1)...(19): siRNA sense strand
gaaacucugucauucauca

SEQ ID NO: 1446294 - RNA, 19 nt, Homo sapiens
  misc_RNA (1)...(19): siRNA sense strand
ggaucaaguuuauacagua

SEQ ID NO: 1446295 - RNA, 19 nt, Homo sapiens
  misc_RNA (1)...(19): siRNA sense strand
gagaaacacuggacuucau

SEQ ID NO: 1446296 - RNA, 19 nt, Homo sapiens
  misc_RNA (1)...(19): siRNA sense strand
gaugaaugccacaacuuua

SEQ ID NO: 1446297 - RNA, 19 nt, Homo sapiens
  misc_RNA (1)...(19): siRNA sense strand
gaagcuggcaugguacuua

SEQ ID NO: 1446298 - RNA, 19 nt, Homo sapiens
  misc_RNA (1)...(19): siRNA sense strand
gaugagcccugguucacaa

SEQ ID NO: 1446299 - RNA, 19 nt, Homo sapiens
  misc_RNA (1)...(19): siRNA sense strand
acacuggacuucauuucua

SEQ ID NO: 1446300 - RNA, 19 nt, Homo sapiens
  misc_RNA (1)...(19): siRNA sense strand
agaaaucgcugucgaacau

SEQ ID NO: 1446301 - RNA, 19 nt, Homo sapiens
  misc_RNA (1)...(19): siRNA sense strand
gagccacacuuucuucaug

SEQ ID NO: 1446302 - RNA, 19 nt, Homo sapiens
  misc_RNA (1)...(19): siRNA sense strand
uagcauggaugacauugaa

SEQ ID NO: 1446303 - RNA, 19 nt, Homo sapiens
  misc_RNA (1)...(19): siRNA sense strand
gcaagaugcccauuugaug

SEQ ID NO: 1446304 - RNA, 19 nt, Homo sapiens
  misc_RNA (1)...(19): siRNA sense strand
gauguucugcagucuauua

SEQ ID NO: 1446305 - RNA, 19 nt, Homo sapiens
  misc_RNA (1)...(19): siRNA sense strand
cacaguggcugacuucuug

SEQ ID NO: 1446306 - RNA, 19 nt, Homo sapiens
  misc_RNA (1)...(19): siRNA sense strand
ggccagcgaugccguuauu

SEQ ID NO: 1446307 - RNA, 19 nt, Homo sapiens
  misc_RNA (1)...(19): siRNA sense strand
gaccaguccuuucucuuug

SEQ ID NO: 1446308 - RNA, 19 nt, Homo sapiens
  misc_RNA (1)...(19): siRNA sense strand
aaacugacauggcgaucaa

SEQ ID NO: 1446309 - RNA, 19 nt, Homo sapiens
  misc_RNA (1)...(19): siRNA sense strand
gcugaugguuucccaguug

SEQ ID NO: 1446310 - RNA, 19 nt, Homo sapiens
  misc_RNA (1)...(19): siRNA sense strand
cgagacacacuuuauauug

SEQ ID NO: 1446311 - RNA, 19 nt, Homo sapiens
  misc_RNA (1)...(19): siRNA sense strand
caaagacucgggucaggua

SEQ ID NO: 1446312 - RNA, 19 nt, Homo sapiens
  misc_RNA (1)...(19): siRNA sense strand
ccacgcagcucaauagcau

SEQ ID NO: 1446313 - RNA, 19 nt, Homo sapiens
  misc_RNA (1)...(19): siRNA sense strand
gaaaggcaagcauaaagau

SEQ ID NO: 1446314 - RNA, 19 nt, Homo sapiens
  misc_RNA (1)...(19): siRNA sense strand
uggcagggaucaaguuuau

SEQ ID NO: 1446315 - RNA, 19 nt, Homo sapiens
  misc_RNA (1)...(19): siRNA sense strand
gaacgacagcguauuacug

SEQ ID NO: 1446316 - RNA, 19 nt, Homo sapiens
  misc_RNA (1)...(19): siRNA sense strand
uuaauacugucgacuauca

SEQ ID NO: 1446317 - RNA, 19 nt, Homo sapiens
  misc_RNA (1)...(19): siRNA sense strand
ccagcgaugccguuauuua

SEQ ID NO: 1446318 - RNA, 19 nt, Homo sapiens
  misc_RNA (1)...(19): siRNA sense strand
gagacacacuuuauauugc

SEQ ID NO: 1446319 - RNA, 19 nt, Homo sapiens
  misc_RNA (1)...(19): siRNA sense strand
gaacagaaaacuccagauu

SEQ ID NO: 1446320 - RNA, 19 nt, Homo sapiens
  misc_RNA (1)...(19): siRNA sense strand
caaaggacgguuuaaggaa

SEQ ID NO: 1446321 - RNA, 19 nt, Homo sapiens
  misc_RNA (1)...(19): siRNA sense strand
gaaacacuggacuucauuu

SEQ ID NO: 1446322 - RNA, 19 nt, Homo sapiens
  misc_RNA (1)...(19): siRNA sense strand
gaucugcccuucgcacaau

SEQ ID NO: 1446323 - RNA, 19 nt, Homo sapiens
  misc_RNA (1)...(19): siRNA sense strand
cgagaaaacugugcuauga

SEQ ID NO: 1446324 - RNA, 19 nt, Homo sapiens
  misc_RNA (1)...(19): siRNA sense strand
uaccagaacuacacaguca

SEQ ID NO: 1446325 - RNA, 19 nt, Homo sapiens
  misc_RNA (1)...(19): siRNA sense strand
ucaaggcaauauccgguuu

SEQ ID NO: 1446326 - RNA, 19 nt, Homo sapiens
  misc_RNA (1)...(19): siRNA sense strand
gggaucaaguuuauacagu

SEQ ID NO: 1446327 - RNA, 19 nt, Homo sapiens
  misc_RNA (1)...(19): siRNA sense strand
ucaaucccauguguagaua

SEQ ID NO: 1446328 - RNA, 19 nt, Homo sapiens
  misc_RNA (1)...(19): siRNA sense strand
uauaaaaccuccaucgauu

SEQ ID NO: 1446329 - RNA, 19 nt, Homo sapiens
  misc_RNA (1)...(19): siRNA sense strand
gcagggaucaaguuuauac

SEQ ID NO: 1446330 - RNA, 19 nt, Homo sapiens
  misc_RNA (1)...(19): siRNA sense strand
ucaaaggacgguuuaagga

SEQ ID NO: 1446331 - RNA, 19 nt, Homo sapiens
  misc_RNA (1)...(19): siRNA sense strand
ugaguaccuuagaauauga

SEQ ID NO: 1446332 - RNA, 19 nt, Homo sapiens
  misc_RNA (1)...(19): siRNA sense strand
gcccaaaacagaaguaaua

SEQ ID NO: 1446333 - RNA, 19 nt, Homo sapiens
  misc_RNA (1)...(19): siRNA sense strand
aagcuggcaugguacuuaa

SEQ ID NO: 1446334 - RNA, 19 nt, Homo sapiens
  misc_RNA (1)...(19): siRNA sense strand
aaaucgcugucgaacauaa

SEQ ID NO: 1446335 - RNA, 19 nt, Homo sapiens
  misc_RNA (1)...(19): siRNA sense strand
ugaaaggcaagcauaaaga

SEQ ID NO: 1446336 - RNA, 19 nt, Homo sapiens
  misc_RNA (1)...(19): siRNA sense strand
gagcccugguucacaaaga

SEQ ID NO: 1446337 - RNA, 19 nt, Homo sapiens
  misc_RNA (1)...(19): siRNA sense strand
aagaaacgaugagaugguu

SEQ ID NO: 1446338 - RNA, 19 nt, Homo sapiens
  misc_RNA (1)...(19): siRNA sense strand
gaugaugaaccccuuaaua

SEQ ID NO: 1446339 - RNA, 19 nt, Homo sapiens
  misc_RNA (1)...(19): siRNA sense strand
agaccaguccuuucucuuu

SEQ ID NO: 1446340 - RNA, 19 nt, Homo sapiens
  misc_RNA (1)...(19): siRNA sense strand
guugaguaccuuagaauau

SEQ ID NO: 1446341 - RNA, 19 nt, Homo sapiens
  misc_RNA (1)...(19): siRNA sense strand
gauugaagccuacaaccau

SEQ ID NO: 1446342 - RNA, 19 nt, Homo sapiens
  misc_RNA (1)...(19): siRNA sense strand
ggagaaacacuggacuuca

SEQ ID NO: 1446343 - RNA, 19 nt, Homo sapiens
  misc_RNA (1)...(19): siRNA sense strand
cagcgaugccguuauuuau

SEQ ID NO: 1446344 - RNA, 19 nt, Homo sapiens
  misc_RNA (1)...(19): siRNA sense strand
aaaccaauguugcccucuu

SEQ ID NO: 1446345 - RNA, 19 nt, Homo sapiens
  misc_RNA (1)...(19): siRNA sense strand
gcaagcauaaagaugaaug

SEQ ID NO: 1446346 - RNA, 19 nt, Homo sapiens
  misc_RNA (1)...(19): siRNA sense strand
cacuggacuucauuucuaa

SEQ ID NO: 1446347 - RNA, 19 nt, Homo sapiens
  misc_RNA (1)...(19): siRNA sense strand
gaaaucgcugucgaacaua

SEQ ID NO: 1446348 - RNA, 19 nt, Homo sapiens
  misc_RNA (1)...(19): siRNA sense strand
acacuuucuucaugccaua

SEQ ID NO: 1446349 - RNA, 19 nt, Homo sapiens
  misc_RNA (1)...(19): siRNA sense strand
gguugaguaccuuagaaua

SEQ ID NO: 1446350 - RNA, 19 nt, Homo sapiens
  misc_RNA (1)...(19): siRNA sense strand
cagcugauguugaaaauuc

SEQ ID NO: 1446351 - RNA, 19 nt, Homo sapiens
  misc_RNA (1)...(19): siRNA sense strand
guauucaaaggacgguuua

SEQ ID NO: 1446352 - RNA, 19 nt, Homo sapiens
  misc_RNA (1)...(19): siRNA sense strand
aagcaugggugauggaucu

SEQ ID NO: 1446353 - RNA, 19 nt, Homo sapiens
  misc_RNA (1)...(19): siRNA sense strand
uuaguggccuggcaagaug

SEQ ID NO: 1446354 - RNA, 19 nt, Homo sapiens
  misc_RNA (1)...(19): siRNA sense strand
aaagaugaaugccacaacu

SEQ ID NO: 1446355 - RNA, 19 nt, Homo sapiens
  misc_RNA (1)...(19): siRNA sense strand
guugagggcagucagcuuu

SEQ ID NO: 1446356 - RNA, 19 nt, Homo sapiens
  misc_RNA (1)...(19): siRNA sense strand
gaaacugacauggcgauca

SEQ ID NO: 1446357 - RNA, 19 nt, Homo sapiens
  misc_RNA (1)...(19): siRNA sense strand
cgacagcguauuacuggaa

SEQ ID NO: 1446358 - RNA, 19 nt, Homo sapiens
  misc_RNA (1)...(19): siRNA sense strand
cucugaagcuggcauggua

SEQ ID NO: 1446359 - RNA, 19 nt, Homo sapiens
  misc_RNA (1)...(19): siRNA sense strand
gaauauggaaacuaugucu

SEQ ID NO: 1446360 - RNA, 19 nt, Homo sapiens
  misc_RNA (1)...(19): siRNA sense strand
cagcuuuccugaagaugau

SEQ ID NO: 1446361 - RNA, 19 nt, Homo sapiens
  misc_RNA (1)...(19): siRNA sense strand
agaaaacugugcuaugaaa

SEQ ID NO: 1446362 - RNA, 19 nt, Homo sapiens
  misc_RNA (1)...(19): siRNA sense strand
ccuuaauacugucgacuau

SEQ ID NO: 1446363 - RNA, 19 nt, Homo sapiens
  misc_RNA (1)...(19): siRNA sense strand
uuugaacgacagcguauua

SEQ ID NO: 1446364 - RNA, 19 nt, Homo sapiens
  misc_RNA (1)...(19): siRNA sense strand
gcauuuagcauggaugaca

SEQ ID NO: 1446365 - RNA, 19 nt, Homo sapiens
  misc_RNA (1)...(19): siRNA sense strand
ucugcugucugugcauuua

SEQ ID NO: 1446366 - RNA, 19 nt, Homo sapiens
  misc_RNA (1)...(19): siRNA sense strand
uaaaugaaaugcccaaaac

SEQ ID NO: 1446367 - RNA, 19 nt, Homo sapiens
  misc_RNA (1)...(19): siRNA sense strand
gcguauuacuggaagagau

SEQ ID NO: 1446368 - RNA, 19 nt, Homo sapiens
  misc_RNA (1)...(19): siRNA sense strand
ugucauucaucaaaucuca

SEQ ID NO: 1446369 - RNA, 19 nt, Homo sapiens
  misc_RNA (1)...(19): siRNA sense strand
gaagacaaagugccaaagc

SEQ ID NO: 1446370 - RNA, 19 nt, Homo sapiens
  misc_RNA (1)...(19): siRNA sense strand
aaccaauguugcccucuuu

SEQ ID NO: 1446371 - RNA, 19 nt, Homo sapiens
  misc_RNA (1)...(19): siRNA sense strand
uugaguaccuuagaauaug

SEQ ID NO: 1446372 - RNA, 19 nt, Homo sapiens
  misc_RNA (1)...(19): siRNA sense strand
gaaugccacaacuuuauca

SEQ ID NO: 1446373 - RNA, 19 nt, Homo sapiens
  misc_RNA (1)...(19): siRNA sense strand
agaugaaugccacaacuuu

SEQ ID NO: 1446374 - RNA, 19 nt, Homo sapiens
  misc_RNA (1)...(19): siRNA sense strand
ugucgacuaucacuauuca

SEQ ID NO: 1446375 - RNA, 19 nt, Homo sapiens
  misc_RNA (1)...(19): siRNA sense strand
uuaaaguucuggcaaagac

SEQ ID NO: 1446376 - RNA, 19 nt, Homo sapiens
  misc_RNA (1)...(19): siRNA sense strand
ugacauggcgaucaagaca

SEQ ID NO: 1446377 - RNA, 19 nt, Homo sapiens
  misc_RNA (1)...(19): siRNA sense strand
ccaguccuuucucuuugaa

SEQ ID NO: 1446378 - RNA, 19 nt, Homo sapiens
  misc_RNA (1)...(19): siRNA sense strand
gcauucaaucccaugugua

SEQ ID NO: 1446379 - RNA, 19 nt, Homo sapiens
  misc_RNA (1)...(19): siRNA sense strand
caagaaacgaugagauggu

SEQ ID NO: 1446380 - RNA, 19 nt, Homo sapiens
  misc_RNA (1)...(19): siRNA sense strand
aaggcaagcauaaagauga

SEQ ID NO: 1446381 - RNA, 19 nt, Homo sapiens
  misc_RNA (1)...(19): siRNA sense strand
caucuuuguuggcucugaa

SEQ ID NO: 1446382 - RNA, 19 nt, Homo sapiens
  misc_RNA (1)...(19): siRNA sense strand
uaaaggcucggcugaacug

SEQ ID NO: 1446383 - RNA, 19 nt, Homo sapiens
  misc_RNA (1)...(19): siRNA sense strand
gaugggaagcuguauucug

SEQ ID NO: 1446384 - RNA, 19 nt, Homo sapiens
  misc_RNA (1)...(19): siRNA sense strand
gagaaaucgcugucgaaca

SEQ ID NO: 1446385 - RNA, 19 nt, Homo sapiens
  misc_RNA (1)...(19): siRNA sense strand
aggcaagcauaaagaugaa

SEQ ID NO: 1446386 - RNA, 19 nt, Homo sapiens
  misc_RNA (1)...(19): siRNA sense strand
cuacacagucaucuuuguu

SEQ ID NO: 1446387 - RNA, 19 nt, Homo sapiens
  misc_RNA (1)...(19): siRNA sense strand
ggacgcccuucaggcaaug

SEQ ID NO: 1446388 - RNA, 19 nt, Homo sapiens
  misc_RNA (1)...(19): siRNA sense strand
guucugcagucuauuacag

SEQ ID NO: 1446389 - RNA, 19 nt, Homo sapiens
  misc_RNA (1)...(19): siRNA sense strand
gacagcaguucccgaagac

SEQ ID NO: 1446390 - RNA, 19 nt, Homo sapiens
  misc_RNA (1)...(19): siRNA sense strand
guucugcugucugugcauu

SEQ ID NO: 1446391 - RNA, 19 nt, Homo sapiens
  misc_RNA (1)...(19): siRNA sense strand
gaacuacacagucaucuuu

SEQ ID NO: 1446392 - RNA, 19 nt, Homo sapiens
  misc_RNA (1)...(19): siRNA sense strand
ggacagcaguucccgaaga

SEQ ID NO: 1446393 - RNA, 19 nt, Homo sapiens
  misc_RNA (1)...(19): siRNA sense strand
gaaacucugucauucauca

SEQ ID NO: 1446394 - RNA, 19 nt, Homo sapiens
  misc_RNA (1)...(19): siRNA sense strand
ggaucaaguuuauacagua

SEQ ID NO: 1446395 - RNA, 19 nt, Homo sapiens
  misc_RNA (1)...(19): siRNA sense strand
gagaaacacuggacuucau

SEQ ID NO: 1446396 - RNA, 19 nt, Homo sapiens
  misc_RNA (1)...(19): siRNA sense strand
gaugaaugccacaacuuua

SEQ ID NO: 1446397 - RNA, 19 nt, Homo sapiens
  misc_RNA (1)...(19): siRNA sense strand
gaagcuggcaugguacuua

SEQ ID NO: 1446398 - RNA, 19 nt, Homo sapiens
  misc_RNA (1)...(19): siRNA sense strand
gaugagcccugguucacaa

SEQ ID NO: 1446399 - RNA, 19 nt, Homo sapiens
  misc_RNA (1)...(19): siRNA sense strand
acacuggacuucauuucua

SEQ ID NO: 1446400 - RNA, 19 nt, Homo sapiens
  misc_RNA (1)...(19): siRNA sense strand
agaaaucgcugucgaacau

SEQ ID NO: 1446401 - RNA, 19 nt, Homo sapiens
  misc_RNA (1)...(19): siRNA sense strand
gagccacacuuucuucaug

SEQ ID NO: 1446402 - RNA, 19 nt, Homo sapiens
  misc_RNA (1)...(19): siRNA sense strand
uagcauggaugacauugaa

SEQ ID NO: 1446403 - RNA, 19 nt, Homo sapiens
  misc_RNA (1)...(19): siRNA sense strand
gcaagaugcccauuugaug

SEQ ID NO: 1446404 - RNA, 19 nt, Homo sapiens
  misc_RNA (1)...(19): siRNA sense strand
gauguucugcagucuauua

SEQ ID NO: 1446405 - RNA, 19 nt, Homo sapiens
  misc_RNA (1)...(19): siRNA sense strand
cacaguggcugacuucuug

SEQ ID NO: 1446406 - RNA, 19 nt, Homo sapiens
  misc_RNA (1)...(19): siRNA sense strand
ggccagcgaugccguuauu

SEQ ID NO: 1446407 - RNA, 19 nt, Homo sapiens
  misc_RNA (1)...(19): siRNA sense strand
gaccaguccuuucucuuug

SEQ ID NO: 1446408 - RNA, 19 nt, Homo sapiens
  misc_RNA (1)...(19): siRNA sense strand
aaacugacauggcgaucaa

SEQ ID NO: 1446409 - RNA, 19 nt, Homo sapiens
  misc_RNA (1)...(19): siRNA sense strand
gcugaugguuucccaguug

SEQ ID NO: 1446410 - RNA, 19 nt, Homo sapiens
  misc_RNA (1)...(19): siRNA sense strand
cgagacacacuuuauauug

SEQ ID NO: 1446411 - RNA, 19 nt, Homo sapiens
  misc_RNA (1)...(19): siRNA sense strand
caaagacucgggucaggua

SEQ ID NO: 1446412 - RNA, 19 nt, Homo sapiens
  misc_RNA (1)...(19): siRNA sense strand
ccacgcagcucaauagcau

SEQ ID NO: 1446413 - RNA, 19 nt, Homo sapiens
  misc_RNA (1)...(19): siRNA sense strand
gaaaggcaagcauaaagau

SEQ ID NO: 1446414 - RNA, 19 nt, Homo sapiens
  misc_RNA (1)...(19): siRNA sense strand
uggcagggaucaaguuuau

SEQ ID NO: 1446415 - RNA, 19 nt, Homo sapiens
  misc_RNA (1)...(19): siRNA sense strand
gaacgacagcguauuacug

SEQ ID NO: 1446416 - RNA, 19 nt, Homo sapiens
  misc_RNA (1)...(19): siRNA sense strand
uuaauacugucgacuauca

SEQ ID NO: 1446417 - RNA, 19 nt, Homo sapiens
  misc_RNA (1)...(19): siRNA sense strand
ccagcgaugccguuauuua

SEQ ID NO: 1446418 - RNA, 19 nt, Homo sapiens
  misc_RNA (1)...(19): siRNA sense strand
gagacacacuuuauauugc

SEQ ID NO: 1446419 - RNA, 19 nt, Homo sapiens
  misc_RNA (1)...(19): siRNA sense strand
gaacagaaaacuccagauu

SEQ ID NO: 1446420 - RNA, 19 nt, Homo sapiens
  misc_RNA (1)...(19): siRNA sense strand
caaaggacgguuuaaggaa

SEQ ID NO: 1446421 - RNA, 19 nt, Homo sapiens
  misc_RNA (1)...(19): siRNA sense strand
gaaacacuggacuucauuu

SEQ ID NO: 1446422 - RNA, 19 nt, Homo sapiens
  misc_RNA (1)...(19): siRNA sense strand
gaucugcccuucgcacaau

SEQ ID NO: 1446423 - RNA, 19 nt, Homo sapiens
  misc_RNA (1)...(19): siRNA sense strand
cgagaaaacugugcuauga

SEQ ID NO: 1446424 - RNA, 19 nt, Homo sapiens
  misc_RNA (1)...(19): siRNA sense strand
uaccagaacuacacaguca

SEQ ID NO: 1446425 - RNA, 19 nt, Homo sapiens
  misc_RNA (1)...(19): siRNA sense strand
ucaaggcaauauccgguuu

SEQ ID NO: 1446426 - RNA, 19 nt, Homo sapiens
  misc_RNA (1)...(19): siRNA sense strand
gggaucaaguuuauacagu

SEQ ID NO: 1446427 - RNA, 19 nt, Homo sapiens
  misc_RNA (1)...(19): siRNA sense strand
ucaaucccauguguagaua

SEQ ID NO: 1446428 - RNA, 19 nt, Homo sapiens
  misc_RNA (1)...(19): siRNA sense strand
uauaaaaccuccaucgauu

SEQ ID NO: 1446429 - RNA, 19 nt, Homo sapiens
  misc_RNA (1)...(19): siRNA sense strand
gcagggaucaaguuuauac

SEQ ID NO: 1446430 - RNA, 19 nt, Homo sapiens
  misc_RNA (1)...(19): siRNA sense strand
ucaaaggacgguuuaagga

SEQ ID NO: 1446431 - RNA, 19 nt, Homo sapiens
  misc_RNA (1)...(19): siRNA sense strand
ugaguaccuuagaauauga

SEQ ID NO: 1446432 - RNA, 19 nt, Homo sapiens
  misc_RNA (1)...(19): siRNA sense strand
gcccaaaacagaaguaaua

SEQ ID NO: 1446433 - RNA, 19 nt, Homo sapiens
  misc_RNA (1)...(19): siRNA sense strand
aagcuggcaugguacuuaa

SEQ ID NO: 1446434 - RNA, 19 nt, Homo sapiens
  misc_RNA (1)...(19): siRNA sense strand
aaaucgcugucgaacauaa

SEQ ID NO: 1446435 - RNA, 19 nt, Homo sapiens
  misc_RNA (1)...(19): siRNA sense strand
ugaaaggcaagcauaaaga

SEQ ID NO: 1446436 - RNA, 19 nt, Homo sapiens
  misc_RNA (1)...(19): siRNA sense strand
gagcccugguucacaaaga

SEQ ID NO: 1446437 - RNA, 19 nt, Homo sapiens
  misc_RNA (1)...(19): siRNA sense strand
aagaaacgaugagaugguu

SEQ ID NO: 1446438 - RNA, 19 nt, Homo sapiens
  misc_RNA (1)...(19): siRNA sense strand
gaugaugaaccccuuaaua

SEQ ID NO: 1446439 - RNA, 19 nt, Homo sapiens
  misc_RNA (1)...(19): siRNA sense strand
agaccaguccuuucucuuu

SEQ ID NO: 1446440 - RNA, 19 nt, Homo sapiens
  misc_RNA (1)...(19): siRNA sense strand
guugaguaccuuagaauau

SEQ ID NO: 1446441 - RNA, 19 nt, Homo sapiens
  misc_RNA (1)...(19): siRNA sense strand
gauugaagccuacaaccau

SEQ ID NO: 1446442 - RNA, 19 nt, Homo sapiens
  misc_RNA (1)...(19): siRNA sense strand
ggagaaacacuggacuuca

SEQ ID NO: 1446443 - RNA, 19 nt, Homo sapiens
  misc_RNA (1)...(19): siRNA sense strand
cagcgaugccguuauuuau

SEQ ID NO: 1446444 - RNA, 19 nt, Homo sapiens
  misc_RNA (1)...(19): siRNA sense strand
aaaccaauguugcccucuu

SEQ ID NO: 1446445 - RNA, 19 nt, Homo sapiens
  misc_RNA (1)...(19): siRNA sense strand
gcaagcauaaagaugaaug

SEQ ID NO: 1446446 - RNA, 19 nt, Homo sapiens
  misc_RNA (1)...(19): siRNA sense strand
cacuggacuucauuucuaa

SEQ ID NO: 1446447 - RNA, 19 nt, Homo sapiens
  misc_RNA (1)...(19): siRNA sense strand
gaaaucgcugucgaacaua

SEQ ID NO: 1446448 - RNA, 19 nt, Homo sapiens
  misc_RNA (1)...(19): siRNA sense strand
acacuuucuucaugccaua

SEQ ID NO: 1446449 - RNA, 19 nt, Homo sapiens
  misc_RNA (1)...(19): siRNA sense strand
gguugaguaccuuagaaua

SEQ ID NO: 1446450 - RNA, 19 nt, Homo sapiens
  misc_RNA (1)...(19): siRNA sense strand
cagcugauguugaaaauuc

SEQ ID NO: 1446451 - RNA, 19 nt, Homo sapiens
  misc_RNA (1)...(19): siRNA sense strand
guauucaaaggacgguuua

SEQ ID NO: 1446452 - RNA, 19 nt, Homo sapiens
  misc_RNA (1)...(19): siRNA sense strand
aagcaugggugauggaucu

SEQ ID NO: 1446453 - RNA, 19 nt, Homo sapiens
  misc_RNA (1)...(19): siRNA sense strand
uuaguggccuggcaagaug

SEQ ID NO: 1446454 - RNA, 19 nt, Homo sapiens
  misc_RNA (1)...(19): siRNA sense strand
aaagaugaaugccacaacu

SEQ ID NO: 1446455 - RNA, 19 nt, Homo sapiens
  misc_RNA (1)...(19): siRNA sense strand
guugagggcagucagcuuu

SEQ ID NO: 1446456 - RNA, 19 nt, Homo sapiens
  misc_RNA (1)...(19): siRNA sense strand
gaaacugacauggcgauca

SEQ ID NO: 1446457 - RNA, 19 nt, Homo sapiens
  misc_RNA (1)...(19): siRNA sense strand
cgacagcguauuacuggaa

SEQ ID NO: 1446458 - RNA, 19 nt, Homo sapiens
  misc_RNA (1)...(19): siRNA sense strand
cucugaagcuggcauggua

SEQ ID NO: 1446459 - RNA, 19 nt, Homo sapiens
  misc_RNA (1)...(19): siRNA sense strand
gaauauggaaacuaugucu

SEQ ID NO: 1446460 - RNA, 19 nt, Homo sapiens
  misc_RNA (1)...(19): siRNA sense strand
cagcuuuccugaagaugau

SEQ ID NO: 1446461 - RNA, 19 nt, Homo sapiens
  misc_RNA (1)...(19): siRNA sense strand
agaaaacugugcuaugaaa

SEQ ID NO: 1446462 - RNA, 19 nt, Homo sapiens
  misc_RNA (1)...(19): siRNA sense strand
ccuuaauacugucgacuau

SEQ ID NO: 1446463 - RNA, 19 nt, Homo sapiens
  misc_RNA (1)...(19): siRNA sense strand
uuugaacgacagcguauua

SEQ ID NO: 1446464 - RNA, 19 nt, Homo sapiens
  misc_RNA (1)...(19): siRNA sense strand
gcauuuagcauggaugaca

SEQ ID NO: 1446465 - RNA, 19 nt, Homo sapiens
  misc_RNA (1)...(19): siRNA sense strand
ucugcugucugugcauuua

SEQ ID NO: 1446466 - RNA, 19 nt, Homo sapiens
  misc_RNA (1)...(19): siRNA sense strand
uaaaugaaaugcccaaaac

SEQ ID NO: 1446467 - RNA, 19 nt, Homo sapiens
  misc_RNA (1)...(19): siRNA sense strand
gcguauuacuggaagagau

SEQ ID NO: 1446468 - RNA, 19 nt, Homo sapiens
  misc_RNA (1)...(19): siRNA sense strand
ugucauucaucaaaucuca

SEQ ID NO: 1446469 - RNA, 19 nt, Homo sapiens
  misc_RNA (1)...(19): siRNA sense strand
gaagacaaagugccaaagc

SEQ ID NO: 1446470 - RNA, 19 nt, Homo sapiens
  misc_RNA (1)...(19): siRNA sense strand
aaccaauguugcccucuuu

SEQ ID NO: 1446471 - RNA, 19 nt, Homo sapiens
  misc_RNA (1)...(19): siRNA sense strand
uugaguaccuuagaauaug

SEQ ID NO: 1446472 - RNA, 19 nt, Homo sapiens
  misc_RNA (1)...(19): siRNA sense strand
gaaugccacaacuuuauca

SEQ ID NO: 1446473 - RNA, 19 nt, Homo sapiens
  misc_RNA (1)...(19): siRNA sense strand
agaugaaugccacaacuuu

SEQ ID NO: 1446474 - RNA, 19 nt, Homo sapiens
  misc_RNA (1)...(19): siRNA sense strand
ugucgacuaucacuauuca

SEQ ID NO: 1446475 - RNA, 19 nt, Homo sapiens
  misc_RNA (1)...(19): siRNA sense strand
uuaaaguucuggcaaagac

SEQ ID NO: 1446476 - RNA, 19 nt, Homo sapiens
  misc_RNA (1)...(19): siRNA sense strand
ugacauggcgaucaagaca

SEQ ID NO: 1446477 - RNA, 19 nt, Homo sapiens
  misc_RNA (1)...(19): siRNA sense strand
ccaguccuuucucuuugaa

SEQ ID NO: 1446478 - RNA, 19 nt, Homo sapiens
  misc_RNA (1)...(19): siRNA sense strand
gcauucaaucccaugugua

SEQ ID NO: 1446479 - RNA, 19 nt, Homo sapiens
  misc_RNA (1)...(19): siRNA sense strand
caagaaacgaugagauggu

SEQ ID NO: 1446480 - RNA, 19 nt, Homo sapiens
  misc_RNA (1)...(19): siRNA sense strand
aaggcaagcauaaagauga

SEQ ID NO: 1446481 - RNA, 19 nt, Homo sapiens
  misc_RNA (1)...(19): siRNA sense strand
caucuuuguuggcucugaa

SEQ ID NO: 1446482 - RNA, 19 nt, Homo sapiens
  misc_RNA (1)...(19): siRNA sense strand
uaaaggcucggcugaacug

SEQ ID NO: 1446483 - RNA, 19 nt, Homo sapiens
  misc_RNA (1)...(19): siRNA sense strand
gaugggaagcuguauucug

SEQ ID NO: 1446484 - RNA, 19 nt, Homo sapiens
  misc_RNA (1)...(19): siRNA sense strand
gagaaaucgcugucgaaca

SEQ ID NO: 1446485 - RNA, 19 nt, Homo sapiens
  misc_RNA (1)...(19): siRNA sense strand
aggcaagcauaaagaugaa

SEQ ID NO: 1446486 - RNA, 19 nt, Homo sapiens
  misc_RNA (1)...(19): siRNA sense strand
cuacacagucaucuuuguu

SEQ ID NO: 1446487 - RNA, 19 nt, Homo sapiens
  misc_RNA (1)...(19): siRNA sense strand
ggacgcccuucaggcaaug

SEQ ID NO: 1446488 - RNA, 19 nt, Homo sapiens
  misc_RNA (1)...(19): siRNA sense strand
guucugcagucuauuacag

SEQ ID NO: 1446489 - RNA, 19 nt, Homo sapiens
  misc_RNA (1)...(19): siRNA sense strand
gacagcaguucccgaagac

SEQ ID NO: 1446490 - RNA, 19 nt, Homo sapiens
  misc_RNA (1)...(19): siRNA sense strand
guucugcugucugugcauu

SEQ ID NO: 1446491 - RNA, 19 nt, Homo sapiens
  misc_RNA (1)...(19): siRNA sense strand
gaacuacacagucaucuuu

SEQ ID NO: 1446492 - RNA, 19 nt, Homo sapiens
  misc_RNA (1)...(19): siRNA sense strand
ggacagcaguucccgaaga

SEQ ID NO: 1446493 - RNA, 19 nt, Homo sapiens
  misc_RNA (1)...(19): siRNA sense strand
gaaacucugucauucauca

SEQ ID NO: 1446494 - RNA, 19 nt, Homo sapiens
  misc_RNA (1)...(19): siRNA sense strand
ggaucaaguuuauacagua

SEQ ID NO: 1446495 - RNA, 19 nt, Homo sapiens
  misc_RNA (1)...(19): siRNA sense strand
gagaaacacuggacuucau

SEQ ID NO: 1446496 - RNA, 19 nt, Homo sapiens
  misc_RNA (1)...(19): siRNA sense strand
gaugaaugccacaacuuua

SEQ ID NO: 1446497 - RNA, 19 nt, Homo sapiens
  misc_RNA (1)...(19): siRNA sense strand
gaagcuggcaugguacuua

SEQ ID NO: 1446498 - RNA, 19 nt, Homo sapiens
  misc_RNA (1)...(19): siRNA sense strand
gaugagcccugguucacaa

SEQ ID NO: 1446499 - RNA, 19 nt, Homo sapiens
  misc_RNA (1)...(19): siRNA sense strand
acacuggacuucauuucua

SEQ ID NO: 1446500 - RNA, 19 nt, Homo sapiens
  misc_RNA (1)...(19): siRNA sense strand
agaaaucgcugucgaacau

SEQ ID NO: 1446501 - RNA, 19 nt, Homo sapiens
  misc_RNA (1)...(19): siRNA sense strand
gagccacacuuucuucaug

SEQ ID NO: 1446502 - RNA, 19 nt, Homo sapiens
  misc_RNA (1)...(19): siRNA sense strand
uagcauggaugacauugaa

SEQ ID NO: 1446503 - RNA, 19 nt, Homo sapiens
  misc_RNA (1)...(19): siRNA sense strand
gcaagaugcccauuugaug

SEQ ID NO: 1446504 - RNA, 19 nt, Homo sapiens
  misc_RNA (1)...(19): siRNA sense strand
gauguucugcagucuauua

SEQ ID NO: 1446505 - RNA, 19 nt, Homo sapiens
  misc_RNA (1)...(19): siRNA sense strand
cacaguggcugacuucuug

SEQ ID NO: 1446506 - RNA, 19 nt, Homo sapiens
  misc_RNA (1)...(19): siRNA sense strand
ggccagcgaugccguuauu

SEQ ID NO: 1446507 - RNA, 19 nt, Homo sapiens
  misc_RNA (1)...(19): siRNA sense strand
gaccaguccuuucucuuug

SEQ ID NO: 1446508 - RNA, 19 nt, Homo sapiens
  misc_RNA (1)...(19): siRNA sense strand
aaacugacauggcgaucaa

SEQ ID NO: 1446509 - RNA, 19 nt, Homo sapiens
  misc_RNA (1)...(19): siRNA sense strand
gcugaugguuucccaguug

SEQ ID NO: 1446510 - RNA, 19 nt, Homo sapiens
  misc_RNA (1)...(19): siRNA sense strand
cgagacacacuuuauauug

SEQ ID NO: 1446511 - RNA, 19 nt, Homo sapiens
  misc_RNA (1)...(19): siRNA sense strand
caaagacucgggucaggua

SEQ ID NO: 1446512 - RNA, 19 nt, Homo sapiens
  misc_RNA (1)...(19): siRNA sense strand
ccacgcagcucaauagcau

SEQ ID NO: 1446513 - RNA, 19 nt, Homo sapiens
  misc_RNA (1)...(19): siRNA sense strand
gaaaggcaagcauaaagau

SEQ ID NO: 1446514 - RNA, 19 nt, Homo sapiens
  misc_RNA (1)...(19): siRNA sense strand
uggcagggaucaaguuuau

SEQ ID NO: 1446515 - RNA, 19 nt, Homo sapiens
  misc_RNA (1)...(19): siRNA sense strand
gaacgacagcguauuacug

SEQ ID NO: 1446516 - RNA, 19 nt, Homo sapiens
  misc_RNA (1)...(19): siRNA sense strand
uuaauacugucgacuauca

SEQ ID NO: 1446517 - RNA, 19 nt, Homo sapiens
  misc_RNA (1)...(19): siRNA sense strand
ccagcgaugccguuauuua

SEQ ID NO: 1446518 - RNA, 19 nt, Homo sapiens
  misc_RNA (1)...(19): siRNA sense strand
gagacacacuuuauauugc

SEQ ID NO: 1446519 - RNA, 19 nt, Homo sapiens
  misc_RNA (1)...(19): siRNA sense strand
gaacagaaaacuccagauu

SEQ ID NO: 1446520 - RNA, 19 nt, Homo sapiens
  misc_RNA (1)...(19): siRNA sense strand
caaaggacgguuuaaggaa

SEQ ID NO: 1446521 - RNA, 19 nt, Homo sapiens
  misc_RNA (1)...(19): siRNA sense strand
gaaacacuggacuucauuu

SEQ ID NO: 1446522 - RNA, 19 nt, Homo sapiens
  misc_RNA (1)...(19): siRNA sense strand
gaucugcccuucgcacaau

SEQ ID NO: 1446523 - RNA, 19 nt, Homo sapiens
  misc_RNA (1)...(19): siRNA sense strand
cgagaaaacugugcuauga

SEQ ID NO: 1446524 - RNA, 19 nt, Homo sapiens
  misc_RNA (1)...(19): siRNA sense strand
uaccagaacuacacaguca

SEQ ID NO: 1446525 - RNA, 19 nt, Homo sapiens
  misc_RNA (1)...(19): siRNA sense strand
ucaaggcaauauccgguuu

SEQ ID NO: 1446526 - RNA, 19 nt, Homo sapiens
  misc_RNA (1)...(19): siRNA sense strand
gggaucaaguuuauacagu

SEQ ID NO: 1446527 - RNA, 19 nt, Homo sapiens
  misc_RNA (1)...(19): siRNA sense strand
ucaaucccauguguagaua

SEQ ID NO: 1446528 - RNA, 19 nt, Homo sapiens
  misc_RNA (1)...(19): siRNA sense strand
uauaaaaccuccaucgauu

SEQ ID NO: 1446529 - RNA, 19 nt, Homo sapiens
  misc_RNA (1)...(19): siRNA sense strand
gcagggaucaaguuuauac

SEQ ID NO: 1446530 - RNA, 19 nt, Homo sapiens
  misc_RNA (1)...(19): siRNA sense strand
ucaaaggacgguuuaagga

SEQ ID NO: 1446531 - RNA, 19 nt, Homo sapiens
  misc_RNA (1)...(19): siRNA sense strand
ugaguaccuuagaauauga

SEQ ID NO: 1446532 - RNA, 19 nt, Homo sapiens
  misc_RNA (1)...(19): siRNA sense strand
gcccaaaacagaaguaaua

SEQ ID NO: 1446533 - RNA, 19 nt, Homo sapiens
  misc_RNA (1)...(19): siRNA sense strand
aagcuggcaugguacuuaa

SEQ ID NO: 1446534 - RNA, 19 nt, Homo sapiens
  misc_RNA (1)...(19): siRNA sense strand
aaaucgcugucgaacauaa

SEQ ID NO: 1446535 - RNA, 19 nt, Homo sapiens
  misc_RNA (1)...(19): siRNA sense strand
ugaaaggcaagcauaaaga

SEQ ID NO: 1446536 - RNA, 19 nt, Homo sapiens
  misc_RNA (1)...(19): siRNA sense strand
gagcccugguucacaaaga

SEQ ID NO: 1446537 - RNA, 19 nt, Homo sapiens
  misc_RNA (1)...(19): siRNA sense strand
aagaaacgaugagaugguu

SEQ ID NO: 1446538 - RNA, 19 nt, Homo sapiens
  misc_RNA (1)...(19): siRNA sense strand
gaugaugaaccccuuaaua

SEQ ID NO: 1446539 - RNA, 19 nt, Homo sapiens
  misc_RNA (1)...(19): siRNA sense strand
agaccaguccuuucucuuu

SEQ ID NO: 1446540 - RNA, 19 nt, Homo sapiens
  misc_RNA (1)...(19): siRNA sense strand
guugaguaccuuagaauau

SEQ ID NO: 1446541 - RNA, 19 nt, Homo sapiens
  misc_RNA (1)...(19): siRNA sense strand
gauugaagccuacaaccau

SEQ ID NO: 1446542 - RNA, 19 nt, Homo sapiens
  misc_RNA (1)...(19): siRNA sense strand
ggagaaacacuggacuuca

SEQ ID NO: 1446543 - RNA, 19 nt, Homo sapiens
  misc_RNA (1)...(19): siRNA sense strand
cagcgaugccguuauuuau

SEQ ID NO: 1446544 - RNA, 19 nt, Homo sapiens
  misc_RNA (1)...(19): siRNA sense strand
aaaccaauguugcccucuu

SEQ ID NO: 1446545 - RNA, 19 nt, Homo sapiens
  misc_RNA (1)...(19): siRNA sense strand
gcaagcauaaagaugaaug

SEQ ID NO: 1446546 - RNA, 19 nt, Homo sapiens
  misc_RNA (1)...(19): siRNA sense strand
cacuggacuucauuucuaa

SEQ ID NO: 1446547 - RNA, 19 nt, Homo sapiens
  misc_RNA (1)...(19): siRNA sense strand
gaaaucgcugucgaacaua

SEQ ID NO: 1446548 - RNA, 19 nt, Homo sapiens
  misc_RNA (1)...(19): siRNA sense strand
acacuuucuucaugccaua

SEQ ID NO: 1446549 - RNA, 19 nt, Homo sapiens
  misc_RNA (1)...(19): siRNA sense strand
gguugaguaccuuagaaua

SEQ ID NO: 1446550 - RNA, 19 nt, Homo sapiens
  misc_RNA (1)...(19): siRNA sense strand
cagcugauguugaaaauuc

SEQ ID NO: 1446551 - RNA, 19 nt, Homo sapiens
  misc_RNA (1)...(19): siRNA sense strand
guauucaaaggacgguuua

SEQ ID NO: 1446552 - RNA, 19 nt, Homo sapiens
  misc_RNA (1)...(19): siRNA sense strand
aagcaugggugauggaucu

SEQ ID NO: 1446553 - RNA, 19 nt, Homo sapiens
  misc_RNA (1)...(19): siRNA sense strand
uuaguggccuggcaagaug

SEQ ID NO: 1446554 - RNA, 19 nt, Homo sapiens
  misc_RNA (1)...(19): siRNA sense strand
aaagaugaaugccacaacu

SEQ ID NO: 1446555 - RNA, 19 nt, Homo sapiens
  misc_RNA (1)...(19): siRNA sense strand
guugagggcagucagcuuu

SEQ ID NO: 1446556 - RNA, 19 nt, Homo sapiens
  misc_RNA (1)...(19): siRNA sense strand
gaaacugacauggcgauca

SEQ ID NO: 1446557 - RNA, 19 nt, Homo sapiens
  misc_RNA (1)...(19): siRNA sense strand
cgacagcguauuacuggaa

SEQ ID NO: 1446558 - RNA, 19 nt, Homo sapiens
  misc_RNA (1)...(19): siRNA sense strand
cucugaagcuggcauggua

SEQ ID NO: 1446559 - RNA, 19 nt, Homo sapiens
  misc_RNA (1)...(19): siRNA sense strand
gaauauggaaacuaugucu

SEQ ID NO: 1446560 - RNA, 19 nt, Homo sapiens
  misc_RNA (1)...(19): siRNA sense strand
cagcuuuccugaagaugau

SEQ ID NO: 1446561 - RNA, 19 nt, Homo sapiens
  misc_RNA (1)...(19): siRNA sense strand
agaaaacugugcuaugaaa

SEQ ID NO: 1446562 - RNA, 19 nt, Homo sapiens
  misc_RNA (1)...(19): siRNA sense strand
ccuuaauacugucgacuau

SEQ ID NO: 1446563 - RNA, 19 nt, Homo sapiens
  misc_RNA (1)...(19): siRNA sense strand
uuugaacgacagcguauua

SEQ ID NO: 1446564 - RNA, 19 nt, Homo sapiens
  misc_RNA (1)...(19): siRNA sense strand
gcauuuagcauggaugaca

SEQ ID NO: 1446565 - RNA, 19 nt, Homo sapiens
  misc_RNA (1)...(19): siRNA sense strand
ucugcugucugugcauuua

SEQ ID NO: 1446566 - RNA, 19 nt, Homo sapiens
  misc_RNA (1)...(19): siRNA sense strand
uaaaugaaaugcccaaaac

SEQ ID NO: 1446567 - RNA, 19 nt, Homo sapiens
  misc_RNA (1)...(19): siRNA sense strand
gcguauuacuggaagagau

SEQ ID NO: 1446568 - RNA, 19 nt, Homo sapiens
  misc_RNA (1)...(19): siRNA sense strand
ugucauucaucaaaucuca

SEQ ID NO: 1446569 - RNA, 19 nt, Homo sapiens
  misc_RNA (1)...(19): siRNA sense strand
gaagacaaagugccaaagc

SEQ ID NO: 1446570 - RNA, 19 nt, Homo sapiens
  misc_RNA (1)...(19): siRNA sense strand
aaccaauguugcccucuuu

SEQ ID NO: 1446571 - RNA, 19 nt, Homo sapiens
  misc_RNA (1)...(19): siRNA sense strand
uugaguaccuuagaauaug

SEQ ID NO: 1446572 - RNA, 19 nt, Homo sapiens
  misc_RNA (1)...(19): siRNA sense strand
gaaugccacaacuuuauca

SEQ ID NO: 1446573 - RNA, 19 nt, Homo sapiens
  misc_RNA (1)...(19): siRNA sense strand
agaugaaugccacaacuuu

SEQ ID NO: 1446574 - RNA, 19 nt, Homo sapiens
  misc_RNA (1)...(19): siRNA sense strand
ugucgacuaucacuauuca

SEQ ID NO: 1446575 - RNA, 19 nt, Homo sapiens
  misc_RNA (1)...(19): siRNA sense strand
uuaaaguucuggcaaagac

SEQ ID NO: 1446576 - RNA, 19 nt, Homo sapiens
  misc_RNA (1)...(19): siRNA sense strand
ugacauggcgaucaagaca

SEQ ID NO: 1446577 - RNA, 19 nt, Homo sapiens
  misc_RNA (1)...(19): siRNA sense strand
ccaguccuuucucuuugaa

SEQ ID NO: 1446578 - RNA, 19 nt, Homo sapiens
  misc_RNA (1)...(19): siRNA sense strand
gcauucaaucccaugugua

SEQ ID NO: 1446579 - RNA, 19 nt, Homo sapiens
  misc_RNA (1)...(19): siRNA sense strand
caagaaacgaugagauggu

SEQ ID NO: 1446580 - RNA, 19 nt, Homo sapiens
  misc_RNA (1)...(19): siRNA sense strand
aaggcaagcauaaagauga

SEQ ID NO: 1446581 - RNA, 19 nt, Homo sapiens
  misc_RNA (1)...(19): siRNA sense strand
caucuuuguuggcucugaa

SEQ ID NO: 1446582 - RNA, 19 nt, Homo sapiens
  misc_RNA (1)...(19): siRNA sense strand
uaaaggcucggcugaacug

SEQ ID NO: 1446583 - RNA, 19 nt, Homo sapiens
  misc_RNA (1)...(19): siRNA sense strand
gaugggaagcuguauucug

SEQ ID NO: 1446584 - RNA, 19 nt, Homo sapiens
  misc_RNA (1)...(19): siRNA sense strand
gagaaaucgcugucgaaca

SEQ ID NO: 1446585 - RNA, 19 nt, Homo sapiens
  misc_RNA (1)...(19): siRNA sense strand
aggcaagcauaaagaugaa

SEQ ID NO: 1446586 - RNA, 19 nt, Homo sapiens
  misc_RNA (1)...(19): siRNA sense strand
cuacacagucaucuuuguu

SEQ ID NO: 1446587 - RNA, 19 nt, Homo sapiens
  misc_RNA (1)...(19): siRNA sense strand
ggacgcccuucaggcaaug

SEQ ID NO: 1446588 - RNA, 19 nt, Homo sapiens
  misc_RNA (1)...(19): siRNA sense strand
guucugcagucuauuacag

SEQ ID NO: 1446589 - RNA, 19 nt, Homo sapiens
  misc_RNA (1)...(19): siRNA sense strand
gacagcaguucccgaagac

SEQ ID NO: 1446590 - RNA, 19 nt, Homo sapiens
  misc_RNA (1)...(19): siRNA sense strand
guucugcugucugugcauu

SEQ ID NO: 1446591 - RNA, 19 nt, Homo sapiens
  misc_RNA (1)...(19): siRNA sense strand
gaacuacacagucaucuuu

SEQ ID NO: 1446592 - RNA, 19 nt, Homo sapiens
  misc_RNA (1)...(19): siRNA sense strand
ggacagcaguucccgaaga

SEQ ID NO: 1446593 - RNA, 19 nt, Homo sapiens
  misc_RNA (1)...(19): siRNA sense strand
gaaacucugucauucauca

SEQ ID NO: 1446594 - RNA, 19 nt, Homo sapiens
  misc_RNA (1)...(19): siRNA sense strand
ggaucaaguuuauacagua

SEQ ID NO: 1446595 - RNA, 19 nt, Homo sapiens
  misc_RNA (1)...(19): siRNA sense strand
gagaaacacuggacuucau

SEQ ID NO: 1446596 - RNA, 19 nt, Homo sapiens
  misc_RNA (1)...(19): siRNA sense strand
gaugaaugccacaacuuua

SEQ ID NO: 1446597 - RNA, 19 nt, Homo sapiens
  misc_RNA (1)...(19): siRNA sense strand
gaagcuggcaugguacuua

SEQ ID NO: 1446598 - RNA, 19 nt, Homo sapiens
  misc_RNA (1)...(19): siRNA sense strand
gaugagcccugguucacaa

SEQ ID NO: 1446599 - RNA, 19 nt, Homo sapiens
  misc_RNA (1)...(19): siRNA sense strand
acacuggacuucauuucua

SEQ ID NO: 1446600 - RNA, 19 nt, Homo sapiens
  misc_RNA (1)...(19): siRNA sense strand
agaaaucgcugucgaacau

SEQ ID NO: 1446601 - RNA, 19 nt, Homo sapiens
  misc_RNA (1)...(19): siRNA sense strand
gagccacacuuucuucaug

SEQ ID NO: 1446602 - RNA, 19 nt, Homo sapiens
  misc_RNA (1)...(19): siRNA sense strand
uagcauggaugacauugaa

SEQ ID NO: 1446603 - RNA, 19 nt, Homo sapiens
  misc_RNA (1)...(19): siRNA sense strand
gcaagaugcccauuugaug

SEQ ID NO: 1446604 - RNA, 19 nt, Homo sapiens
  misc_RNA (1)...(19): siRNA sense strand
gauguucugcagucuauua

SEQ ID NO: 1446605 - RNA, 19 nt, Homo sapiens
  misc_RNA (1)...(19): siRNA sense strand
cacaguggcugacuucuug

SEQ ID NO: 1446606 - RNA, 19 nt, Homo sapiens
  misc_RNA (1)...(19): siRNA sense strand
ggccagcgaugccguuauu

SEQ ID NO: 1446607 - RNA, 19 nt, Homo sapiens
  misc_RNA (1)...(19): siRNA sense strand
gaccaguccuuucucuuug

SEQ ID NO: 1446608 - RNA, 19 nt, Homo sapiens
  misc_RNA (1)...(19): siRNA sense strand
aaacugacauggcgaucaa

SEQ ID NO: 1446609 - RNA, 19 nt, Homo sapiens
  misc_RNA (1)...(19): siRNA sense strand
gcugaugguuucccaguug

SEQ ID NO: 1446610 - RNA, 19 nt, Homo sapiens
  misc_RNA (1)...(19): siRNA sense strand
cgagacacacuuuauauug

SEQ ID NO: 1446611 - RNA, 19 nt, Homo sapiens
  misc_RNA (1)...(19): siRNA sense strand
caaagacucgggucaggua

SEQ ID NO: 1446612 - RNA, 19 nt, Homo sapiens
  misc_RNA (1)...(19): siRNA sense strand
ccacgcagcucaauagcau

SEQ ID NO: 1446613 - RNA, 19 nt, Homo sapiens
  misc_RNA (1)...(19): siRNA sense strand
gaaaggcaagcauaaagau

SEQ ID NO: 1446614 - RNA, 19 nt, Homo sapiens
  misc_RNA (1)...(19): siRNA sense strand
uggcagggaucaaguuuau

SEQ ID NO: 1446615 - RNA, 19 nt, Homo sapiens
  misc_RNA (1)...(19): siRNA sense strand
gaacgacagcguauuacug

SEQ ID NO: 1446616 - RNA, 19 nt, Homo sapiens
  misc_RNA (1)...(19): siRNA sense strand
uuaauacugucgacuauca

SEQ ID NO: 1446617 - RNA, 19 nt, Homo sapiens
  misc_RNA (1)...(19): siRNA sense strand
ccagcgaugccguuauuua

SEQ ID NO: 1446618 - RNA, 19 nt, Homo sapiens
  misc_RNA (1)...(19): siRNA sense strand
gagacacacuuuauauugc

SEQ ID NO: 1446619 - RNA, 19 nt, Homo sapiens
  misc_RNA (1)...(19): siRNA sense strand
gaacagaaaacuccagauu

SEQ ID NO: 1446620 - RNA, 19 nt, Homo sapiens
  misc_RNA (1)...(19): siRNA sense strand
caaaggacgguuuaaggaa

SEQ ID NO: 1446621 - RNA, 19 nt, Homo sapiens
  misc_RNA (1)...(19): siRNA sense strand
gaaacacuggacuucauuu

SEQ ID NO: 1446622 - RNA, 19 nt, Homo sapiens
  misc_RNA (1)...(19): siRNA sense strand
gaucugcccuucgcacaau

SEQ ID NO: 1446623 - RNA, 19 nt, Homo sapiens
  misc_RNA (1)...(19): siRNA sense strand
cgagaaaacugugcuauga

SEQ ID NO: 1446624 - RNA, 19 nt, Homo sapiens
  misc_RNA (1)...(19): siRNA sense strand
uaccagaacuacacaguca

SEQ ID NO: 1446625 - RNA, 19 nt, Homo sapiens
  misc_RNA (1)...(19): siRNA sense strand
ucaaggcaauauccgguuu

SEQ ID NO: 1446626 - RNA, 19 nt, Homo sapiens
  misc_RNA (1)...(19): siRNA sense strand
gggaucaaguuuauacagu

SEQ ID NO: 1446627 - RNA, 19 nt, Homo sapiens
  misc_RNA (1)...(19): siRNA sense strand
ucaaucccauguguagaua

SEQ ID NO: 1446628 - RNA, 19 nt, Homo sapiens
  misc_RNA (1)...(19): siRNA sense strand
uauaaaaccuccaucgauu

SEQ ID NO: 1446629 - RNA, 19 nt, Homo sapiens
  misc_RNA (1)...(19): siRNA sense strand
gcagggaucaaguuuauac

SEQ ID NO: 1446630 - RNA, 19 nt, Homo sapiens
  misc_RNA (1)...(19): siRNA sense strand
ucaaaggacgguuuaagga

SEQ ID NO: 1446631 - RNA, 19 nt, Homo sapiens
  misc_RNA (1)...(19): siRNA sense strand
ugaguaccuuagaauauga

SEQ ID NO: 1446632 - RNA, 19 nt, Homo sapiens
  misc_RNA (1)...(19): siRNA sense strand
gcccaaaacagaaguaaua

SEQ ID NO: 1446633 - RNA, 19 nt, Homo sapiens
  misc_RNA (1)...(19): siRNA sense strand
aagcuggcaugguacuuaa

SEQ ID NO: 1446634 - RNA, 19 nt, Homo sapiens
  misc_RNA (1)...(19): siRNA sense strand
aaaucgcugucgaacauaa

SEQ ID NO: 1446635 - RNA, 19 nt, Homo sapiens
  misc_RNA (1)...(19): siRNA sense strand
ugaaaggcaagcauaaaga

SEQ ID NO: 1446636 - RNA, 19 nt, Homo sapiens
  misc_RNA (1)...(19): siRNA sense strand
gagcccugguucacaaaga

SEQ ID NO: 1446637 - RNA, 19 nt, Homo sapiens
  misc_RNA (1)...(19): siRNA sense strand
aagaaacgaugagaugguu

SEQ ID NO: 1446638 - RNA, 19 nt, Homo sapiens
  misc_RNA (1)...(19): siRNA sense strand
gaugaugaaccccuuaaua

SEQ ID NO: 1446639 - RNA, 19 nt, Homo sapiens
  misc_RNA (1)...(19): siRNA sense strand
agaccaguccuuucucuuu

SEQ ID NO: 1446640 - RNA, 19 nt, Homo sapiens
  misc_RNA (1)...(19): siRNA sense strand
guugaguaccuuagaauau

SEQ ID NO: 1446641 - RNA, 19 nt, Homo sapiens
  misc_RNA (1)...(19): siRNA sense strand
gauugaagccuacaaccau

SEQ ID NO: 1446642 - RNA, 19 nt, Homo sapiens
  misc_RNA (1)...(19): siRNA sense strand
ggagaaacacuggacuuca

SEQ ID NO: 1446643 - RNA, 19 nt, Homo sapiens
  misc_RNA (1)...(19): siRNA sense strand
cagcgaugccguuauuuau

SEQ ID NO: 1446644 - RNA, 19 nt, Homo sapiens
  misc_RNA (1)...(19): siRNA sense strand
aaaccaauguugcccucuu

SEQ ID NO: 1446645 - RNA, 19 nt, Homo sapiens
  misc_RNA (1)...(19): siRNA sense strand
gcaagcauaaagaugaaug

SEQ ID NO: 1446646 - RNA, 19 nt, Homo sapiens
  misc_RNA (1)...(19): siRNA sense strand
cacuggacuucauuucuaa

SEQ ID NO: 1446647 - RNA, 19 nt, Homo sapiens
  misc_RNA (1)...(19): siRNA sense strand
gaaaucgcugucgaacaua

SEQ ID NO: 1446648 - RNA, 19 nt, Homo sapiens
  misc_RNA (1)...(19): siRNA sense strand
acacuuucuucaugccaua

SEQ ID NO: 1446649 - RNA, 19 nt, Homo sapiens
  misc_RNA (1)...(19): siRNA sense strand
gguugaguaccuuagaaua

SEQ ID NO: 1446650 - RNA, 19 nt, Homo sapiens
  misc_RNA (1)...(19): siRNA sense strand
cagcugauguugaaaauuc

SEQ ID NO: 1446651 - RNA, 19 nt, Homo sapiens
  misc_RNA (1)...(19): siRNA sense strand
guauucaaaggacgguuua

SEQ ID NO: 1446652 - RNA, 19 nt, Homo sapiens
  misc_RNA (1)...(19): siRNA sense strand
aagcaugggugauggaucu

SEQ ID NO: 1446653 - RNA, 19 nt, Homo sapiens
  misc_RNA (1)...(19): siRNA sense strand
uuaguggccuggcaagaug

SEQ ID NO: 1446654 - RNA, 19 nt, Homo sapiens
  misc_RNA (1)...(19): siRNA sense strand
aaagaugaaugccacaacu

SEQ ID NO: 1446655 - RNA, 19 nt, Homo sapiens
  misc_RNA (1)...(19): siRNA sense strand
guugagggcagucagcuuu

SEQ ID NO: 1446656 - RNA, 19 nt, Homo sapiens
  misc_RNA (1)...(19): siRNA sense strand
gaaacugacauggcgauca

SEQ ID NO: 1446657 - RNA, 19 nt, Homo sapiens
  misc_RNA (1)...(19): siRNA sense strand
cgacagcguauuacuggaa

SEQ ID NO: 1446658 - RNA, 19 nt, Homo sapiens
  misc_RNA (1)...(19): siRNA sense strand
cucugaagcuggcauggua

SEQ ID NO: 1446659 - RNA, 19 nt, Homo sapiens
  misc_RNA (1)...(19): siRNA sense strand
gaauauggaaacuaugucu

SEQ ID NO: 1446660 - RNA, 19 nt, Homo sapiens
  misc_RNA (1)...(19): siRNA sense strand
cagcuuuccugaagaugau

SEQ ID NO: 1446661 - RNA, 19 nt, Homo sapiens
  misc_RNA (1)...(19): siRNA sense strand
agaaaacugugcuaugaaa

SEQ ID NO: 1446662 - RNA, 19 nt, Homo sapiens
  misc_RNA (1)...(19): siRNA sense strand
ccuuaauacugucgacuau

SEQ ID NO: 1446663 - RNA, 19 nt, Homo sapiens
  misc_RNA (1)...(19): siRNA sense strand
uuugaacgacagcguauua

SEQ ID NO: 1446664 - RNA, 19 nt, Homo sapiens
  misc_RNA (1)...(19): siRNA sense strand
gcauuuagcauggaugaca

SEQ ID NO: 1446665 - RNA, 19 nt, Homo sapiens
  misc_RNA (1)...(19): siRNA sense strand
ucugcugucugugcauuua

SEQ ID NO: 1446666 - RNA, 19 nt, Homo sapiens
  misc_RNA (1)...(19): siRNA sense strand
uaaaugaaaugcccaaaac

SEQ ID NO: 1446667 - RNA, 19 nt, Homo sapiens
  misc_RNA (1)...(19): siRNA sense strand
gcguauuacuggaagagau

SEQ ID NO: 1446668 - RNA, 19 nt, Homo sapiens
  misc_RNA (1)...(19): siRNA sense strand
ugucauucaucaaaucuca

SEQ ID NO: 1446669 - RNA, 19 nt, Homo sapiens
  misc_RNA (1)...(19): siRNA sense strand
gaagacaaagugccaaagc

SEQ ID NO: 1446670 - RNA, 19 nt, Homo sapiens
  misc_RNA (1)...(19): siRNA sense strand
aaccaauguugcccucuuu

SEQ ID NO: 1446671 - RNA, 19 nt, Homo sapiens
  misc_RNA (1)...(19): siRNA sense strand
uugaguaccuuagaauaug

SEQ ID NO: 1446672 - RNA, 19 nt, Homo sapiens
  misc_RNA (1)...(19): siRNA sense strand
gaaugccacaacuuuauca

SEQ ID NO: 1446673 - RNA, 19 nt, Homo sapiens
  misc_RNA (1)...(19): siRNA sense strand
agaugaaugccacaacuuu

SEQ ID NO: 1446674 - RNA, 19 nt, Homo sapiens
  misc_RNA (1)...(19): siRNA sense strand
ugucgacuaucacuauuca

SEQ ID NO: 1446675 - RNA, 19 nt, Homo sapiens
  misc_RNA (1)...(19): siRNA sense strand
uuaaaguucuggcaaagac

SEQ ID NO: 1446676 - RNA, 19 nt, Homo sapiens
  misc_RNA (1)...(19): siRNA sense strand
ugacauggcgaucaagaca

SEQ ID NO: 1446677 - RNA, 19 nt, Homo sapiens
  misc_RNA (1)...(19): siRNA sense strand
ccaguccuuucucuuugaa

SEQ ID NO: 1446678 - RNA, 19 nt, Homo sapiens
  misc_RNA (1)...(19): siRNA sense strand
gcauucaaucccaugugua

SEQ ID NO: 1446679 - RNA, 19 nt, Homo sapiens
  misc_RNA (1)...(19): siRNA sense strand
caagaaacgaugagauggu

SEQ ID NO: 1446680 - RNA, 19 nt, Homo sapiens
  misc_RNA (1)...(19): siRNA sense strand
aaggcaagcauaaagauga

SEQ ID NO: 1446681 - RNA, 19 nt, Homo sapiens
  misc_RNA (1)...(19): siRNA sense strand
caucuuuguuggcucugaa

SEQ ID NO: 1446682 - RNA, 19 nt, Homo sapiens
  misc_RNA (1)...(19): siRNA sense strand
uaaaggcucggcugaacug

SEQ ID NO: 1446683 - RNA, 19 nt, Homo sapiens
  misc_RNA (1)...(19): siRNA sense strand
gaugggaagcuguauucug

SEQ ID NO: 1446684 - RNA, 19 nt, Homo sapiens
  misc_RNA (1)...(19): siRNA sense strand
gagaaaucgcugucgaaca

SEQ ID NO: 1446685 - RNA, 19 nt, Homo sapiens
  misc_RNA (1)...(19): siRNA sense strand
aggcaagcauaaagaugaa

SEQ ID NO: 1446686 - RNA, 19 nt, Homo sapiens
  misc_RNA (1)...(19): siRNA sense strand
cuacacagucaucuuuguu

SEQ ID NO: 1446687 - RNA, 19 nt, Homo sapiens
  misc_RNA (1)...(19): siRNA sense strand
ggacgcccuucaggcaaug

SEQ ID NO: 1446688 - RNA, 19 nt, Homo sapiens
  misc_RNA (1)...(19): siRNA sense strand
guucugcagucuauuacag

SEQ ID NO: 1446689 - RNA, 19 nt, Homo sapiens
  misc_RNA (1)...(19): siRNA sense strand
gacagcaguucccgaagac

SEQ ID NO: 1446690 - RNA, 19 nt, Homo sapiens
  misc_RNA (1)...(19): siRNA sense strand
guucugcugucugugcauu

SEQ ID NO: 1446691 - RNA, 19 nt, Homo sapiens
  misc_RNA (1)...(19): siRNA sense strand
gaacuacacagucaucuuu

SEQ ID NO: 1446692 - RNA, 19 nt, Homo sapiens
  misc_RNA (1)...(19): siRNA sense strand
ggacagcaguucccgaaga

SEQ ID NO: 1446693 - RNA, 19 nt, Homo sapiens
  misc_RNA (1)...(19): siRNA sense strand
gaaacucugucauucauca

SEQ ID NO: 1446694 - RNA, 19 nt, Homo sapiens
  misc_RNA (1)...(19): siRNA sense strand
ggaucaaguuuauacagua

SEQ ID NO: 1446695 - RNA, 19 nt, Homo sapiens
  misc_RNA (1)...(19): siRNA sense strand
gagaaacacuggacuucau

SEQ ID NO: 1446696 - RNA, 19 nt, Homo sapiens
  misc_RNA (1)...(19): siRNA sense strand
gaugaaugccacaacuuua

SEQ ID NO: 1446697 - RNA, 19 nt, Homo sapiens
  misc_RNA (1)...(19): siRNA sense strand
gaagcuggcaugguacuua

SEQ ID NO: 1446698 - RNA, 19 nt, Homo sapiens
  misc_RNA (1)...(19): siRNA sense strand
gaugagcccugguucacaa

SEQ ID NO: 1446699 - RNA, 19 nt, Homo sapiens
  misc_RNA (1)...(19): siRNA sense strand
acacuggacuucauuucua

SEQ ID NO: 1446700 - RNA, 19 nt, Homo sapiens
  misc_RNA (1)...(19): siRNA sense strand
agaaaucgcugucgaacau

SEQ ID NO: 1446701 - RNA, 19 nt, Homo sapiens
  misc_RNA (1)...(19): siRNA sense strand
gagccacacuuucuucaug

SEQ ID NO: 1446702 - RNA, 19 nt, Homo sapiens
  misc_RNA (1)...(19): siRNA sense strand
uagcauggaugacauugaa

SEQ ID NO: 1446703 - RNA, 19 nt, Homo sapiens
  misc_RNA (1)...(19): siRNA sense strand
gcaagaugcccauuugaug

SEQ ID NO: 1446704 - RNA, 19 nt, Homo sapiens
  misc_RNA (1)...(19): siRNA sense strand
gauguucugcagucuauua

SEQ ID NO: 1446705 - RNA, 19 nt, Homo sapiens
  misc_RNA (1)...(19): siRNA sense strand
cacaguggcugacuucuug

SEQ ID NO: 1446706 - RNA, 19 nt, Homo sapiens
  misc_RNA (1)...(19): siRNA sense strand
ggccagcgaugccguuauu

SEQ ID NO: 1446707 - RNA, 19 nt, Homo sapiens
  misc_RNA (1)...(19): siRNA sense strand
gaccaguccuuucucuuug

SEQ ID NO: 1446708 - RNA, 19 nt, Homo sapiens
  misc_RNA (1)...(19): siRNA sense strand
aaacugacauggcgaucaa

SEQ ID NO: 1446709 - RNA, 19 nt, Homo sapiens
  misc_RNA (1)...(19): siRNA sense strand
gcugaugguuucccaguug

SEQ ID NO: 1446710 - RNA, 19 nt, Homo sapiens
  misc_RNA (1)...(19): siRNA sense strand
cgagacacacuuuauauug

SEQ ID NO: 1446711 - RNA, 19 nt, Homo sapiens
  misc_RNA (1)...(19): siRNA sense strand
caaagacucgggucaggua

SEQ ID NO: 1446712 - RNA, 19 nt, Homo sapiens
  misc_RNA (1)...(19): siRNA sense strand
ccacgcagcucaauagcau

SEQ ID NO: 1446713 - RNA, 19 nt, Homo sapiens
  misc_RNA (1)...(19): siRNA sense strand
gaaaggcaagcauaaagau

SEQ ID NO: 1446714 - RNA, 19 nt, Homo sapiens
  misc_RNA (1)...(19): siRNA sense strand
uggcagggaucaaguuuau

SEQ ID NO: 1446715 - RNA, 19 nt, Homo sapiens
  misc_RNA (1)...(19): siRNA sense strand
gaacgacagcguauuacug

SEQ ID NO: 1446716 - RNA, 19 nt, Homo sapiens
  misc_RNA (1)...(19): siRNA sense strand
uuaauacugucgacuauca

SEQ ID NO: 1446717 - RNA, 19 nt, Homo sapiens
  misc_RNA (1)...(19): siRNA sense strand
ccagcgaugccguuauuua

SEQ ID NO: 1446718 - RNA, 19 nt, Homo sapiens
  misc_RNA (1)...(19): siRNA sense strand
gagacacacuuuauauugc

SEQ ID NO: 1446719 - RNA, 19 nt, Homo sapiens
  misc_RNA (1)...(19): siRNA sense strand
gaacagaaaacuccagauu

SEQ ID NO: 1446720 - RNA, 19 nt, Homo sapiens
  misc_RNA (1)...(19): siRNA sense strand
caaaggacgguuuaaggaa

SEQ ID NO: 1446721 - RNA, 19 nt, Homo sapiens
  misc_RNA (1)...(19): siRNA sense strand
gaaacacuggacuucauuu

SEQ ID NO: 1446722 - RNA, 19 nt, Homo sapiens
  misc_RNA (1)...(19): siRNA sense strand
gaucugcccuucgcacaau

SEQ ID NO: 1446723 - RNA, 19 nt, Homo sapiens
  misc_RNA (1)...(19): siRNA sense strand
cgagaaaacugugcuauga

SEQ ID NO: 1446724 - RNA, 19 nt, Homo sapiens
  misc_RNA (1)...(19): siRNA sense strand
uaccagaacuacacaguca

SEQ ID NO: 1446725 - RNA, 19 nt, Homo sapiens
  misc_RNA (1)...(19): siRNA sense strand
ucaaggcaauauccgguuu

SEQ ID NO: 1446726 - RNA, 19 nt, Homo sapiens
  misc_RNA (1)...(19): siRNA sense strand
gggaucaaguuuauacagu

SEQ ID NO: 1446727 - RNA, 19 nt, Homo sapiens
  misc_RNA (1)...(19): siRNA sense strand
ucaaucccauguguagaua

SEQ ID NO: 1446728 - RNA, 19 nt, Homo sapiens
  misc_RNA (1)...(19): siRNA sense strand
uauaaaaccuccaucgauu

SEQ ID NO: 1446729 - RNA, 19 nt, Homo sapiens
  misc_RNA (1)...(19): siRNA sense strand
gcagggaucaaguuuauac

SEQ ID NO: 1446730 - RNA, 19 nt, Homo sapiens
  misc_RNA (1)...(19): siRNA sense strand
ucaaaggacgguuuaagga

SEQ ID NO: 1446731 - RNA, 19 nt, Homo sapiens
  misc_RNA (1)...(19): siRNA sense strand
ugaguaccuuagaauauga

SEQ ID NO: 1446732 - RNA, 19 nt, Homo sapiens
  misc_RNA (1)...(19): siRNA sense strand
gcccaaaacagaaguaaua

SEQ ID NO: 1446733 - RNA, 19 nt, Homo sapiens
  misc_RNA (1)...(19): siRNA sense strand
aagcuggcaugguacuuaa

SEQ ID NO: 1446734 - RNA, 19 nt, Homo sapiens
  misc_RNA (1)...(19): siRNA sense strand
aaaucgcugucgaacauaa

SEQ ID NO: 1446735 - RNA, 19 nt, Homo sapiens
  misc_RNA (1)...(19): siRNA sense strand
ugaaaggcaagcauaaaga

SEQ ID NO: 1446736 - RNA, 19 nt, Homo sapiens
  misc_RNA (1)...(19): siRNA sense strand
gagcccugguucacaaaga

SEQ ID NO: 1446737 - RNA, 19 nt, Homo sapiens
  misc_RNA (1)...(19): siRNA sense strand
aagaaacgaugagaugguu

SEQ ID NO: 1446738 - RNA, 19 nt, Homo sapiens
  misc_RNA (1)...(19): siRNA sense strand
gaugaugaaccccuuaaua

SEQ ID NO: 1446739 - RNA, 19 nt, Homo sapiens
  misc_RNA (1)...(19): siRNA sense strand
agaccaguccuuucucuuu

SEQ ID NO: 1446740 - RNA, 19 nt, Homo sapiens
  misc_RNA (1)...(19): siRNA sense strand
guugaguaccuuagaauau

SEQ ID NO: 1446741 - RNA, 19 nt, Homo sapiens
  misc_RNA (1)...(19): siRNA sense strand
gauugaagccuacaaccau

SEQ ID NO: 1446742 - RNA, 19 nt, Homo sapiens
  misc_RNA (1)...(19): siRNA sense strand
ggagaaacacuggacuuca

SEQ ID NO: 1446743 - RNA, 19 nt, Homo sapiens
  misc_RNA (1)...(19): siRNA sense strand
cagcgaugccguuauuuau

SEQ ID NO: 1446744 - RNA, 19 nt, Homo sapiens
  misc_RNA (1)...(19): siRNA sense strand
aaaccaauguugcccucuu

SEQ ID NO: 1446745 - RNA, 19 nt, Homo sapiens
  misc_RNA (1)...(19): siRNA sense strand
gcaagcauaaagaugaaug

SEQ ID NO: 1446746 - RNA, 19 nt, Homo sapiens
  misc_RNA (1)...(19): siRNA sense strand
cacuggacuucauuucuaa

SEQ ID NO: 1446747 - RNA, 19 nt, Homo sapiens
  misc_RNA (1)...(19): siRNA sense strand
gaaaucgcugucgaacaua

SEQ ID NO: 1446748 - RNA, 19 nt, Homo sapiens
  misc_RNA (1)...(19): siRNA sense strand
acacuuucuucaugccaua

SEQ ID NO: 1446749 - RNA, 19 nt, Homo sapiens
  misc_RNA (1)...(19): siRNA sense strand
gguugaguaccuuagaaua

SEQ ID NO: 1446750 - RNA, 19 nt, Homo sapiens
  misc_RNA (1)...(19): siRNA sense strand
cagcugauguugaaaauuc

SEQ ID NO: 1446751 - RNA, 19 nt, Homo sapiens
  misc_RNA (1)...(19): siRNA sense strand
guauucaaaggacgguuua

SEQ ID NO: 1446752 - RNA, 19 nt, Homo sapiens
  misc_RNA (1)...(19): siRNA sense strand
aagcaugggugauggaucu

SEQ ID NO: 1446753 - RNA, 19 nt, Homo sapiens
  misc_RNA (1)...(19): siRNA sense strand
uuaguggccuggcaagaug

SEQ ID NO: 1446754 - RNA, 19 nt, Homo sapiens
  misc_RNA (1)...(19): siRNA sense strand
aaagaugaaugccacaacu

SEQ ID NO: 1446755 - RNA, 19 nt, Homo sapiens
  misc_RNA (1)...(19): siRNA sense strand
guugagggcagucagcuuu

SEQ ID NO: 1446756 - RNA, 19 nt, Homo sapiens
  misc_RNA (1)...(19): siRNA sense strand
gaaacugacauggcgauca

SEQ ID NO: 1446757 - RNA, 19 nt, Homo sapiens
  misc_RNA (1)...(19): siRNA sense strand
cgacagcguauuacuggaa

SEQ ID NO: 1446758 - RNA, 19 nt, Homo sapiens
  misc_RNA (1)...(19): siRNA sense strand
cucugaagcuggcauggua

SEQ ID NO: 1446759 - RNA, 19 nt, Homo sapiens
  misc_RNA (1)...(19): siRNA sense strand
gaauauggaaacuaugucu

SEQ ID NO: 1446760 - RNA, 19 nt, Homo sapiens
  misc_RNA (1)...(19): siRNA sense strand
cagcuuuccugaagaugau

SEQ ID NO: 1446761 - RNA, 19 nt, Homo sapiens
  misc_RNA (1)...(19): siRNA sense strand
agaaaacugugcuaugaaa

SEQ ID NO: 1446762 - RNA, 19 nt, Homo sapiens
  misc_RNA (1)...(19): siRNA sense strand
ccuuaauacugucgacuau

SEQ ID NO: 1446763 - RNA, 19 nt, Homo sapiens
  misc_RNA (1)...(19): siRNA sense strand
uuugaacgacagcguauua

SEQ ID NO: 1446764 - RNA, 19 nt, Homo sapiens
  misc_RNA (1)...(19): siRNA sense strand
gcauuuagcauggaugaca

SEQ ID NO: 1446765 - RNA, 19 nt, Homo sapiens
  misc_RNA (1)...(19): siRNA sense strand
ucugcugucugugcauuua

SEQ ID NO: 1446766 - RNA, 19 nt, Homo sapiens
  misc_RNA (1)...(19): siRNA sense strand
uaaaugaaaugcccaaaac

SEQ ID NO: 1446767 - RNA, 19 nt, Homo sapiens
  misc_RNA (1)...(19): siRNA sense strand
gcguauuacuggaagagau

SEQ ID NO: 1446768 - RNA, 19 nt, Homo sapiens
  misc_RNA (1)...(19): siRNA sense strand
ugucauucaucaaaucuca

SEQ ID NO: 1446769 - RNA, 19 nt, Homo sapiens
  misc_RNA (1)...(19): siRNA sense strand
gaagacaaagugccaaagc

SEQ ID NO: 1446770 - RNA, 19 nt, Homo sapiens
  misc_RNA (1)...(19): siRNA sense strand
aaccaauguugcccucuuu

SEQ ID NO: 1446771 - RNA, 19 nt, Homo sapiens
  misc_RNA (1)...(19): siRNA sense strand
uugaguaccuuagaauaug

SEQ ID NO: 1446772 - RNA, 19 nt, Homo sapiens
  misc_RNA (1)...(19): siRNA sense strand
gaaugccacaacuuuauca

SEQ ID NO: 1446773 - RNA, 19 nt, Homo sapiens
  misc_RNA (1)...(19): siRNA sense strand
agaugaaugccacaacuuu

SEQ ID NO: 1446774 - RNA, 19 nt, Homo sapiens
  misc_RNA (1)...(19): siRNA sense strand
ugucgacuaucacuauuca

SEQ ID NO: 1446775 - RNA, 19 nt, Homo sapiens
  misc_RNA (1)...(19): siRNA sense strand
uuaaaguucuggcaaagac

SEQ ID NO: 1446776 - RNA, 19 nt, Homo sapiens
  misc_RNA (1)...(19): siRNA sense strand
ugacauggcgaucaagaca

SEQ ID NO: 1446777 - RNA, 19 nt, Homo sapiens
  misc_RNA (1)...(19): siRNA sense strand
ccaguccuuucucuuugaa

SEQ ID NO: 1446778 - RNA, 19 nt, Homo sapiens
  misc_RNA (1)...(19): siRNA sense strand
gcauucaaucccaugugua

SEQ ID NO: 1446779 - RNA, 19 nt, Homo sapiens
  misc_RNA (1)...(19): siRNA sense strand
caagaaacgaugagauggu

SEQ ID NO: 1446780 - RNA, 19 nt, Homo sapiens
  misc_RNA (1)...(19): siRNA sense strand
aaggcaagcauaaagauga

SEQ ID NO: 1446781 - RNA, 19 nt, Homo sapiens
  misc_RNA (1)...(19): siRNA sense strand
caucuuuguuggcucugaa

SEQ ID NO: 1446782 - RNA, 19 nt, Homo sapiens
  misc_RNA (1)...(19): siRNA sense strand
uaaaggcucggcugaacug

SEQ ID NO: 1446783 - RNA, 19 nt, Homo sapiens
  misc_RNA (1)...(19): siRNA sense strand
gaugggaagcuguauucug

SEQ ID NO: 1446784 - RNA, 19 nt, Homo sapiens
  misc_RNA (1)...(19): siRNA sense strand
gagaaaucgcugucgaaca

SEQ ID NO: 1446785 - RNA, 19 nt, Homo sapiens
  misc_RNA (1)...(19): siRNA sense strand
aggcaagcauaaagaugaa

SEQ ID NO: 1446786 - RNA, 19 nt, Homo sapiens
  misc_RNA (1)...(19): siRNA sense strand
cuacacagucaucuuuguu

SEQ ID NO: 1446787 - RNA, 19 nt, Homo sapiens
  misc_RNA (1)...(19): siRNA sense strand
ggacgcccuucaggcaaug

SEQ ID NO: 1446788 - RNA, 19 nt, Homo sapiens
  misc_RNA (1)...(19): siRNA sense strand
guucugcagucuauuacag

SEQ ID NO: 1446789 - RNA, 19 nt, Homo sapiens
  misc_RNA (1)...(19): siRNA sense strand
gacagcaguucccgaagac

SEQ ID NO: 1446790 - RNA, 19 nt, Homo sapiens
  misc_RNA (1)...(19): siRNA sense strand
guucugcugucugugcauu

SEQ ID NO: 1446791 - RNA, 19 nt, Homo sapiens
  misc_RNA (1)...(19): siRNA sense strand
gaacuacacagucaucuuu

SEQ ID NO: 1446792 - RNA, 19 nt, Homo sapiens
  misc_RNA (1)...(19): siRNA sense strand
ggacagcaguucccgaaga

SEQ ID NO: 1446793 - RNA, 19 nt, Homo sapiens
  misc_RNA (1)...(19): siRNA sense strand
gaaacucugucauucauca

SEQ ID NO: 1446794 - RNA, 19 nt, Homo sapiens
  misc_RNA (1)...(19): siRNA sense strand
ggaucaaguuuauacagua

SEQ ID NO: 1446795 - RNA, 19 nt, Homo sapiens
  misc_RNA (1)...(19): siRNA sense strand
gagaaacacuggacuucau

SEQ ID NO: 1446796 - RNA, 19 nt, Homo sapiens
  misc_RNA (1)...(19): siRNA sense strand
gaugaaugccacaacuuua

SEQ ID NO: 1446797 - RNA, 19 nt, Homo sapiens
  misc_RNA (1)...(19): siRNA sense strand
gaagcuggcaugguacuua

SEQ ID NO: 1446798 - RNA, 19 nt, Homo sapiens
  misc_RNA (1)...(19): siRNA sense strand
gaugagcccugguucacaa

SEQ ID NO: 1446799 - RNA, 19 nt, Homo sapiens
  misc_RNA (1)...(19): siRNA sense strand
acacuggacuucauuucua

SEQ ID NO: 1446800 - RNA, 19 nt, Homo sapiens
  misc_RNA (1)...(19): siRNA sense strand
agaaaucgcugucgaacau

SEQ ID NO: 1446801 - RNA, 19 nt, Homo sapiens
  misc_RNA (1)...(19): siRNA sense strand
gagccacacuuucuucaug

SEQ ID NO: 1446802 - RNA, 19 nt, Homo sapiens
  misc_RNA (1)...(19): siRNA sense strand
uagcauggaugacauugaa

SEQ ID NO: 1446803 - RNA, 19 nt, Homo sapiens
  misc_RNA (1)...(19): siRNA sense strand
gcaagaugcccauuugaug

SEQ ID NO: 1446804 - RNA, 19 nt, Homo sapiens
  misc_RNA (1)...(19): siRNA sense strand
gauguucugcagucuauua

SEQ ID NO: 1446805 - RNA, 19 nt, Homo sapiens
  misc_RNA (1)...(19): siRNA sense strand
cacaguggcugacuucuug

SEQ ID NO: 1446806 - RNA, 19 nt, Homo sapiens
  misc_RNA (1)...(19): siRNA sense strand
ggccagcgaugccguuauu

SEQ ID NO: 1446807 - RNA, 19 nt, Homo sapiens
  misc_RNA (1)...(19): siRNA sense strand
gaccaguccuuucucuuug

SEQ ID NO: 1446808 - RNA, 19 nt, Homo sapiens
  misc_RNA (1)...(19): siRNA sense strand
aaacugacauggcgaucaa

SEQ ID NO: 1446809 - RNA, 19 nt, Homo sapiens
  misc_RNA (1)...(19): siRNA sense strand
gcugaugguuucccaguug

SEQ ID NO: 1446810 - RNA, 19 nt, Homo sapiens
  misc_RNA (1)...(19): siRNA sense strand
cgagacacacuuuauauug

SEQ ID NO: 1446811 - RNA, 19 nt, Homo sapiens
  misc_RNA (1)...(19): siRNA sense strand
caaagacucgggucaggua

SEQ ID NO: 1446812 - RNA, 19 nt, Homo sapiens
  misc_RNA (1)...(19): siRNA sense strand
ccacgcagcucaauagcau

SEQ ID NO: 1446813 - RNA, 19 nt, Homo sapiens
  misc_RNA (1)...(19): siRNA sense strand
gaaaggcaagcauaaagau

SEQ ID NO: 1446814 - RNA, 19 nt, Homo sapiens
  misc_RNA (1)...(19): siRNA sense strand
uggcagggaucaaguuuau

SEQ ID NO: 1446815 - RNA, 19 nt, Homo sapiens
  misc_RNA (1)...(19): siRNA sense strand
gaacgacagcguauuacug

SEQ ID NO: 1446816 - RNA, 19 nt, Homo sapiens
  misc_RNA (1)...(19): siRNA sense strand
uuaauacugucgacuauca

SEQ ID NO: 1446817 - RNA, 19 nt, Homo sapiens
  misc_RNA (1)...(19): siRNA sense strand
ccagcgaugccguuauuua

SEQ ID NO: 1446818 - RNA, 19 nt, Homo sapiens
  misc_RNA (1)...(19): siRNA sense strand
gagacacacuuuauauugc

SEQ ID NO: 1446819 - RNA, 19 nt, Homo sapiens
  misc_RNA (1)...(19): siRNA sense strand
gaacagaaaacuccagauu

SEQ ID NO: 1446820 - RNA, 19 nt, Homo sapiens
  misc_RNA (1)...(19): siRNA sense strand
caaaggacgguuuaaggaa

SEQ ID NO: 1446821 - RNA, 19 nt, Homo sapiens
  misc_RNA (1)...(19): siRNA sense strand
gaaacacuggacuucauuu

SEQ ID NO: 1446822 - RNA, 19 nt, Homo sapiens
  misc_RNA (1)...(19): siRNA sense strand
gaucugcccuucgcacaau

SEQ ID NO: 1446823 - RNA, 19 nt, Homo sapiens
  misc_RNA (1)...(19): siRNA sense strand
cgagaaaacugugcuauga

SEQ ID NO: 1446824 - RNA, 19 nt, Homo sapiens
  misc_RNA (1)...(19): siRNA sense strand
uaccagaacuacacaguca

SEQ ID NO: 1446825 - RNA, 19 nt, Homo sapiens
  misc_RNA (1)...(19): siRNA sense strand
ucaaggcaauauccgguuu

SEQ ID NO: 1446826 - RNA, 19 nt, Homo sapiens
  misc_RNA (1)...(19): siRNA sense strand
gggaucaaguuuauacagu

SEQ ID NO: 1446827 - RNA, 19 nt, Homo sapiens
  misc_RNA (1)...(19): siRNA sense strand
ucaaucccauguguagaua

SEQ ID NO: 1446828 - RNA, 19 nt, Homo sapiens
  misc_RNA (1)...(19): siRNA sense strand
uauaaaaccuccaucgauu

SEQ ID NO: 1446829 - RNA, 19 nt, Homo sapiens
  misc_RNA (1)...(19): siRNA sense strand
gcagggaucaaguuuauac

SEQ ID NO: 1446830 - RNA, 19 nt, Homo sapiens
  misc_RNA (1)...(19): siRNA sense strand
ucaaaggacgguuuaagga

SEQ ID NO: 1446831 - RNA, 19 nt, Homo sapiens
  misc_RNA (1)...(19): siRNA sense strand
ugaguaccuuagaauauga

SEQ ID NO: 1446832 - RNA, 19 nt, Homo sapiens
  misc_RNA (1)...(19): siRNA sense strand
gcccaaaacagaaguaaua

SEQ ID NO: 1446833 - RNA, 19 nt, Homo sapiens
  misc_RNA (1)...(19): siRNA sense strand
aagcuggcaugguacuuaa

SEQ ID NO: 1446834 - RNA, 19 nt, Homo sapiens
  misc_RNA (1)...(19): siRNA sense strand
aaaucgcugucgaacauaa

SEQ ID NO: 1446835 - RNA, 19 nt, Homo sapiens
  misc_RNA (1)...(19): siRNA sense strand
ugaaaggcaagcauaaaga

SEQ ID NO: 1446836 - RNA, 19 nt, Homo sapiens
  misc_RNA (1)...(19): siRNA sense strand
gagcccugguucacaaaga

SEQ ID NO: 1446837 - RNA, 19 nt, Homo sapiens
  misc_RNA (1)...(19): siRNA sense strand
aagaaacgaugagaugguu

SEQ ID NO: 1446838 - RNA, 19 nt, Homo sapiens
  misc_RNA (1)...(19): siRNA sense strand
gaugaugaaccccuuaaua

SEQ ID NO: 1446839 - RNA, 19 nt, Homo sapiens
  misc_RNA (1)...(19): siRNA sense strand
agaccaguccuuucucuuu

SEQ ID NO: 1446840 - RNA, 19 nt, Homo sapiens
  misc_RNA (1)...(19): siRNA sense strand
guugaguaccuuagaauau

SEQ ID NO: 1446841 - RNA, 19 nt, Homo sapiens
  misc_RNA (1)...(19): siRNA sense strand
gauugaagccuacaaccau

SEQ ID NO: 1446842 - RNA, 19 nt, Homo sapiens
  misc_RNA (1)...(19): siRNA sense strand
ggagaaacacuggacuuca

SEQ ID NO: 1446843 - RNA, 19 nt, Homo sapiens
  misc_RNA (1)...(19): siRNA sense strand
cagcgaugccguuauuuau

SEQ ID NO: 1446844 - RNA, 19 nt, Homo sapiens
  misc_RNA (1)...(19): siRNA sense strand
aaaccaauguugcccucuu

SEQ ID NO: 1446845 - RNA, 19 nt, Homo sapiens
  misc_RNA (1)...(19): siRNA sense strand
gcaagcauaaagaugaaug

SEQ ID NO: 1446846 - RNA, 19 nt, Homo sapiens
  misc_RNA (1)...(19): siRNA sense strand
cacuggacuucauuucuaa

SEQ ID NO: 1446847 - RNA, 19 nt, Homo sapiens
  misc_RNA (1)...(19): siRNA sense strand
gaaaucgcugucgaacaua

SEQ ID NO: 1446848 - RNA, 19 nt, Homo sapiens
  misc_RNA (1)...(19): siRNA sense strand
acacuuucuucaugccaua

SEQ ID NO: 1446849 - RNA, 19 nt, Homo sapiens
  misc_RNA (1)...(19): siRNA sense strand
gguugaguaccuuagaaua

SEQ ID NO: 1446850 - RNA, 19 nt, Homo sapiens
  misc_RNA (1)...(19): siRNA sense strand
cagcugauguugaaaauuc

SEQ ID NO: 1446851 - RNA, 19 nt, Homo sapiens
  misc_RNA (1)...(19): siRNA sense strand
guauucaaaggacgguuua

SEQ ID NO: 1446852 - RNA, 19 nt, Homo sapiens
  misc_RNA (1)...(19): siRNA sense strand
aagcaugggugauggaucu

SEQ ID NO: 1446853 - RNA, 19 nt, Homo sapiens
  misc_RNA (1)...(19): siRNA sense strand
uuaguggccuggcaagaug

SEQ ID NO: 1446854 - RNA, 19 nt, Homo sapiens
  misc_RNA (1)...(19): siRNA sense strand
aaagaugaaugccacaacu

SEQ ID NO: 1446855 - RNA, 19 nt, Homo sapiens
  misc_RNA (1)...(19): siRNA sense strand
guugagggcagucagcuuu

SEQ ID NO: 1446856 - RNA, 19 nt, Homo sapiens
  misc_RNA (1)...(19): siRNA sense strand
gaaacugacauggcgauca

SEQ ID NO: 1446857 - RNA, 19 nt, Homo sapiens
  misc_RNA (1)...(19): siRNA sense strand
cgacagcguauuacuggaa

SEQ ID NO: 1446858 - RNA, 19 nt, Homo sapiens
  misc_RNA (1)...(19): siRNA sense strand
cucugaagcuggcauggua

SEQ ID NO: 1446859 - RNA, 19 nt, Homo sapiens
  misc_RNA (1)...(19): siRNA sense strand
gaauauggaaacuaugucu

SEQ ID NO: 1446860 - RNA, 19 nt, Homo sapiens
  misc_RNA (1)...(19): siRNA sense strand
cagcuuuccugaagaugau

SEQ ID NO: 1446861 - RNA, 19 nt, Homo sapiens
  misc_RNA (1)...(19): siRNA sense strand
agaaaacugugcuaugaaa

SEQ ID NO: 1446862 - RNA, 19 nt, Homo sapiens
  misc_RNA (1)...(19): siRNA sense strand
ccuuaauacugucgacuau

SEQ ID NO: 1446863 - RNA, 19 nt, Homo sapiens
  misc_RNA (1)...(19): siRNA sense strand
uuugaacgacagcguauua

SEQ ID NO: 1446864 - RNA, 19 nt, Homo sapiens
  misc_RNA (1)...(19): siRNA sense strand
gcauuuagcauggaugaca

SEQ ID NO: 1446865 - RNA, 19 nt, Homo sapiens
  misc_RNA (1)...(19): siRNA sense strand
ucugcugucugugcauuua

SEQ ID NO: 1446866 - RNA, 19 nt, Homo sapiens
  misc_RNA (1)...(19): siRNA sense strand
uaaaugaaaugcccaaaac

SEQ ID NO: 1446867 - RNA, 19 nt, Homo sapiens
  misc_RNA (1)...(19): siRNA sense strand
gcguauuacuggaagagau

SEQ ID NO: 1446868 - RNA, 19 nt, Homo sapiens
  misc_RNA (1)...(19): siRNA sense strand
ugucauucaucaaaucuca

SEQ ID NO: 1446869 - RNA, 19 nt, Homo sapiens
  misc_RNA (1)...(19): siRNA sense strand
gaagacaaagugccaaagc

SEQ ID NO: 1446870 - RNA, 19 nt, Homo sapiens
  misc_RNA (1)...(19): siRNA sense strand
aaccaauguugcccucuuu

SEQ ID NO: 1446871 - RNA, 19 nt, Homo sapiens
  misc_RNA (1)...(19): siRNA sense strand
uugaguaccuuagaauaug

SEQ ID NO: 1446872 - RNA, 19 nt, Homo sapiens
  misc_RNA (1)...(19): siRNA sense strand
gaaugccacaacuuuauca

SEQ ID NO: 1446873 - RNA, 19 nt, Homo sapiens
  misc_RNA (1)...(19): siRNA sense strand
agaugaaugccacaacuuu

SEQ ID NO: 1446874 - RNA, 19 nt, Homo sapiens
  misc_RNA (1)...(19): siRNA sense strand
ugucgacuaucacuauuca

SEQ ID NO: 1446875 - RNA, 19 nt, Homo sapiens
  misc_RNA (1)...(19): siRNA sense strand
uuaaaguucuggcaaagac

SEQ ID NO: 1446876 - RNA, 19 nt, Homo sapiens
  misc_RNA (1)...(19): siRNA sense strand
ugacauggcgaucaagaca

SEQ ID NO: 1446877 - RNA, 19 nt, Homo sapiens
  misc_RNA (1)...(19): siRNA sense strand
ccaguccuuucucuuugaa

SEQ ID NO: 1446878 - RNA, 19 nt, Homo sapiens
  misc_RNA (1)...(19): siRNA sense strand
gcauucaaucccaugugua

SEQ ID NO: 1446879 - RNA, 19 nt, Homo sapiens
  misc_RNA (1)...(19): siRNA sense strand
caagaaacgaugagauggu

SEQ ID NO: 1446880 - RNA, 19 nt, Homo sapiens
  misc_RNA (1)...(19): siRNA sense strand
aaggcaagcauaaagauga

SEQ ID NO: 1446881 - RNA, 19 nt, Homo sapiens
  misc_RNA (1)...(19): siRNA sense strand
caucuuuguuggcucugaa

SEQ ID NO: 1446882 - RNA, 19 nt, Homo sapiens
  misc_RNA (1)...(19): siRNA sense strand
uaaaggcucggcugaacug

SEQ ID NO: 1446883 - RNA, 19 nt, Homo sapiens
  misc_RNA (1)...(19): siRNA sense strand
gaugggaagcuguauucug

SEQ ID NO: 1446884 - RNA, 19 nt, Homo sapiens
  misc_RNA (1)...(19): siRNA sense strand
gagaaaucgcugucgaaca

SEQ ID NO: 1446885 - RNA, 19 nt, Homo sapiens
  misc_RNA (1)...(19): siRNA sense strand
aggcaagcauaaagaugaa

SEQ ID NO: 1446886 - RNA, 19 nt, Homo sapiens
  misc_RNA (1)...(19): siRNA sense strand
cuacacagucaucuuuguu

SEQ ID NO: 1446887 - RNA, 19 nt, Homo sapiens
  misc_RNA (1)...(19): siRNA sense strand
ggacgcccuucaggcaaug

SEQ ID NO: 1446888 - RNA, 19 nt, Homo sapiens
  misc_RNA (1)...(19): siRNA sense strand
guucugcagucuauuacag

SEQ ID NO: 1446889 - RNA, 19 nt, Homo sapiens
  misc_RNA (1)...(19): siRNA sense strand
gacagcaguucccgaagac

SEQ ID NO: 1446890 - RNA, 19 nt, Homo sapiens
  misc_RNA (1)...(19): siRNA sense strand
guucugcugucugugcauu

SEQ ID NO: 1446891 - RNA, 19 nt, Homo sapiens
  misc_RNA (1)...(19): siRNA sense strand
gaacuacacagucaucuuu

SEQ ID NO: 1446892 - RNA, 19 nt, Homo sapiens
  misc_RNA (1)...(19): siRNA sense strand
ggacagcaguucccgaaga

SEQ ID NO: 1446893 - RNA, 19 nt, Homo sapiens
  misc_RNA (1)...(19): siRNA sense strand
gaaacucugucauucauca

SEQ ID NO: 1446894 - RNA, 19 nt, Homo sapiens
  misc_RNA (1)...(19): siRNA sense strand
ggaucaaguuuauacagua

SEQ ID NO: 1446895 - RNA, 19 nt, Homo sapiens
  misc_RNA (1)...(19): siRNA sense strand
gagaaacacuggacuucau

SEQ ID NO: 1446896 - RNA, 19 nt, Homo sapiens
  misc_RNA (1)...(19): siRNA sense strand
gaugaaugccacaacuuua

SEQ ID NO: 1446897 - RNA, 19 nt, Homo sapiens
  misc_RNA (1)...(19): siRNA sense strand
gaagcuggcaugguacuua

SEQ ID NO: 1446898 - RNA, 19 nt, Homo sapiens
  misc_RNA (1)...(19): siRNA sense strand
gaugagcccugguucacaa

SEQ ID NO: 1446899 - RNA, 19 nt, Homo sapiens
  misc_RNA (1)...(19): siRNA sense strand
acacuggacuucauuucua

SEQ ID NO: 1446900 - RNA, 19 nt, Homo sapiens
  misc_RNA (1)...(19): siRNA sense strand
agaaaucgcugucgaacau

SEQ ID NO: 1446901 - RNA, 19 nt, Homo sapiens
  misc_RNA (1)...(19): siRNA sense strand
gagccacacuuucuucaug

SEQ ID NO: 1446902 - RNA, 19 nt, Homo sapiens
  misc_RNA (1)...(19): siRNA sense strand
uagcauggaugacauugaa

SEQ ID NO: 1446903 - RNA, 19 nt, Homo sapiens
  misc_RNA (1)...(19): siRNA sense strand
gcaagaugcccauuugaug

SEQ ID NO: 1446904 - RNA, 19 nt, Homo sapiens
  misc_RNA (1)...(19): siRNA sense strand
gauguucugcagucuauua

SEQ ID NO: 1446905 - RNA, 19 nt, Homo sapiens
  misc_RNA (1)...(19): siRNA sense strand
cacaguggcugacuucuug

SEQ ID NO: 1446906 - RNA, 19 nt, Homo sapiens
  misc_RNA (1)...(19): siRNA sense strand
ggccagcgaugccguuauu

SEQ ID NO: 1446907 - RNA, 19 nt, Homo sapiens
  misc_RNA (1)...(19): siRNA sense strand
gaccaguccuuucucuuug

SEQ ID NO: 1446908 - RNA, 19 nt, Homo sapiens
  misc_RNA (1)...(19): siRNA sense strand
aaacugacauggcgaucaa

SEQ ID NO: 1446909 - RNA, 19 nt, Homo sapiens
  misc_RNA (1)...(19): siRNA sense strand
gcugaugguuucccaguug

SEQ ID NO: 1446910 - RNA, 19 nt, Homo sapiens
  misc_RNA (1)...(19): siRNA sense strand
cgagacacacuuuauauug

SEQ ID NO: 1446911 - RNA, 19 nt, Homo sapiens
  misc_RNA (1)...(19): siRNA sense strand
caaagacucgggucaggua

SEQ ID NO: 1446912 - RNA, 19 nt, Homo sapiens
  misc_RNA (1)...(19): siRNA sense strand
ccacgcagcucaauagcau

SEQ ID NO: 1446913 - RNA, 19 nt, Homo sapiens
  misc_RNA (1)...(19): siRNA sense strand
gaaaggcaagcauaaagau

SEQ ID NO: 1446914 - RNA, 19 nt, Homo sapiens
  misc_RNA (1)...(19): siRNA sense strand
uggcagggaucaaguuuau

SEQ ID NO: 1446915 - RNA, 19 nt, Homo sapiens
  misc_RNA (1)...(19): siRNA sense strand
gaacgacagcguauuacug

SEQ ID NO: 1446916 - RNA, 19 nt, Homo sapiens
  misc_RNA (1)...(19): siRNA sense strand
uuaauacugucgacuauca

SEQ ID NO: 1446917 - RNA, 19 nt, Homo sapiens
  misc_RNA (1)...(19): siRNA sense strand
ccagcgaugccguuauuua

SEQ ID NO: 1446918 - RNA, 19 nt, Homo sapiens
  misc_RNA (1)...(19): siRNA sense strand
gagacacacuuuauauugc

SEQ ID NO: 1446919 - RNA, 19 nt, Homo sapiens
  misc_RNA (1)...(19): siRNA sense strand
gaacagaaaacuccagauu

SEQ ID NO: 1446920 - RNA, 19 nt, Homo sapiens
  misc_RNA (1)...(19): siRNA sense strand
caaaggacgguuuaaggaa

SEQ ID NO: 1446921 - RNA, 19 nt, Homo sapiens
  misc_RNA (1)...(19): siRNA sense strand
gaaacacuggacuucauuu

SEQ ID NO: 1446922 - RNA, 19 nt, Homo sapiens
  misc_RNA (1)...(19): siRNA sense strand
gaucugcccuucgcacaau

SEQ ID NO: 1446923 - RNA, 19 nt, Homo sapiens
  misc_RNA (1)...(19): siRNA sense strand
cgagaaaacugugcuauga

SEQ ID NO: 1446924 - RNA, 19 nt, Homo sapiens
  misc_RNA (1)...(19): siRNA sense strand
uaccagaacuacacaguca

SEQ ID NO: 1446925 - RNA, 19 nt, Homo sapiens
  misc_RNA (1)...(19): siRNA sense strand
ucaaggcaauauccgguuu

SEQ ID NO: 1446926 - RNA, 19 nt, Homo sapiens
  misc_RNA (1)...(19): siRNA sense strand
gggaucaaguuuauacagu

SEQ ID NO: 1446927 - RNA, 19 nt, Homo sapiens
  misc_RNA (1)...(19): siRNA sense strand
ucaaucccauguguagaua

SEQ ID NO: 1446928 - RNA, 19 nt, Homo sapiens
  misc_RNA (1)...(19): siRNA sense strand
uauaaaaccuccaucgauu

SEQ ID NO: 1446929 - RNA, 19 nt, Homo sapiens
  misc_RNA (1)...(19): siRNA sense strand
gcagggaucaaguuuauac

SEQ ID NO: 1446930 - RNA, 19 nt, Homo sapiens
  misc_RNA (1)...(19): siRNA sense strand
ucaaaggacgguuuaagga

SEQ ID NO: 1446931 - RNA, 19 nt, Homo sapiens
  misc_RNA (1)...(19): siRNA sense strand
ugaguaccuuagaauauga

SEQ ID NO: 1446932 - RNA, 19 nt, Homo sapiens
  misc_RNA (1)...(19): siRNA sense strand
gcccaaaacagaaguaaua

SEQ ID NO: 1446933 - RNA, 19 nt, Homo sapiens
  misc_RNA (1)...(19): siRNA sense strand
aagcuggcaugguacuuaa

SEQ ID NO: 1446934 - RNA, 19 nt, Homo sapiens
  misc_RNA (1)...(19): siRNA sense strand
aaaucgcugucgaacauaa

SEQ ID NO: 1446935 - RNA, 19 nt, Homo sapiens
  misc_RNA (1)...(19): siRNA sense strand
ugaaaggcaagcauaaaga

SEQ ID NO: 1446936 - RNA, 19 nt, Homo sapiens
  misc_RNA (1)...(19): siRNA sense strand
gagcccugguucacaaaga

SEQ ID NO: 1446937 - RNA, 19 nt, Homo sapiens
  misc_RNA (1)...(19): siRNA sense strand
aagaaacgaugagaugguu

SEQ ID NO: 1446938 - RNA, 19 nt, Homo sapiens
  misc_RNA (1)...(19): siRNA sense strand
gaugaugaaccccuuaaua

SEQ ID NO: 1446939 - RNA, 19 nt, Homo sapiens
  misc_RNA (1)...(19): siRNA sense strand
agaccaguccuuucucuuu

SEQ ID NO: 1446940 - RNA, 19 nt, Homo sapiens
  misc_RNA (1)...(19): siRNA sense strand
guugaguaccuuagaauau

SEQ ID NO: 1446941 - RNA, 19 nt, Homo sapiens
  misc_RNA (1)...(19): siRNA sense strand
gauugaagccuacaaccau

SEQ ID NO: 1446942 - RNA, 19 nt, Homo sapiens
  misc_RNA (1)...(19): siRNA sense strand
ggagaaacacuggacuuca

SEQ ID NO: 1446943 - RNA, 19 nt, Homo sapiens
  misc_RNA (1)...(19): siRNA sense strand
cagcgaugccguuauuuau

SEQ ID NO: 1446944 - RNA, 19 nt, Homo sapiens
  misc_RNA (1)...(19): siRNA sense strand
aaaccaauguugcccucuu

SEQ ID NO: 1446945 - RNA, 19 nt, Homo sapiens
  misc_RNA (1)...(19): siRNA sense strand
gcaagcauaaagaugaaug

SEQ ID NO: 1446946 - RNA, 19 nt, Homo sapiens
  misc_RNA (1)...(19): siRNA sense strand
cacuggacuucauuucuaa

SEQ ID NO: 1446947 - RNA, 19 nt, Homo sapiens
  misc_RNA (1)...(19): siRNA sense strand
gaaaucgcugucgaacaua

SEQ ID NO: 1446948 - RNA, 19 nt, Homo sapiens
  misc_RNA (1)...(19): siRNA sense strand
acacuuucuucaugccaua

SEQ ID NO: 1446949 - RNA, 19 nt, Homo sapiens
  misc_RNA (1)...(19): siRNA sense strand
gguugaguaccuuagaaua

SEQ ID NO: 1446950 - RNA, 19 nt, Homo sapiens
  misc_RNA (1)...(19): siRNA sense strand
cagcugauguugaaaauuc

SEQ ID NO: 1446951 - RNA, 19 nt, Homo sapiens
  misc_RNA (1)...(19): siRNA sense strand
guauucaaaggacgguuua

SEQ ID NO: 1446952 - RNA, 19 nt, Homo sapiens
  misc_RNA (1)...(19): siRNA sense strand
aagcaugggugauggaucu

SEQ ID NO: 1446953 - RNA, 19 nt, Homo sapiens
  misc_RNA (1)...(19): siRNA sense strand
uuaguggccuggcaagaug

SEQ ID NO: 1446954 - RNA, 19 nt, Homo sapiens
  misc_RNA (1)...(19): siRNA sense strand
aaagaugaaugccacaacu

SEQ ID NO: 1446955 - RNA, 19 nt, Homo sapiens
  misc_RNA (1)...(19): siRNA sense strand
guugagggcagucagcuuu

SEQ ID NO: 1446956 - RNA, 19 nt, Homo sapiens
  misc_RNA (1)...(19): siRNA sense strand
gaaacugacauggcgauca

SEQ ID NO: 1446957 - RNA, 19 nt, Homo sapiens
  misc_RNA (1)...(19): siRNA sense strand
cgacagcguauuacuggaa

SEQ ID NO: 1446958 - RNA, 19 nt, Homo sapiens
  misc_RNA (1)...(19): siRNA sense strand
cucugaagcuggcauggua

SEQ ID NO: 1446959 - RNA, 19 nt, Homo sapiens
  misc_RNA (1)...(19): siRNA sense strand
gaauauggaaacuaugucu

SEQ ID NO: 1446960 - RNA, 19 nt, Homo sapiens
  misc_RNA (1)...(19): siRNA sense strand
cagcuuuccugaagaugau

SEQ ID NO: 1446961 - RNA, 19 nt, Homo sapiens
  misc_RNA (1)...(19): siRNA sense strand
agaaaacugugcuaugaaa

SEQ ID NO: 1446962 - RNA, 19 nt, Homo sapiens
  misc_RNA (1)...(19): siRNA sense strand
ccuuaauacugucgacuau

SEQ ID NO: 1446963 - RNA, 19 nt, Homo sapiens
  misc_RNA (1)...(19): siRNA sense strand
uuugaacgacagcguauua

SEQ ID NO: 1446964 - RNA, 19 nt, Homo sapiens
  misc_RNA (1)...(19): siRNA sense strand
gcauuuagcauggaugaca

SEQ ID NO: 1446965 - RNA, 19 nt, Homo sapiens
  misc_RNA (1)...(19): siRNA sense strand
ucugcugucugugcauuua

SEQ ID NO: 1446966 - RNA, 19 nt, Homo sapiens
  misc_RNA (1)...(19): siRNA sense strand
uaaaugaaaugcccaaaac

SEQ ID NO: 1446967 - RNA, 19 nt, Homo sapiens
  misc_RNA (1)...(19): siRNA sense strand
gcguauuacuggaagagau

SEQ ID NO: 1446968 - RNA, 19 nt, Homo sapiens
  misc_RNA (1)...(19): siRNA sense strand
ugucauucaucaaaucuca

SEQ ID NO: 1446969 - RNA, 19 nt, Homo sapiens
  misc_RNA (1)...(19): siRNA sense strand
gaagacaaagugccaaagc

SEQ ID NO: 1446970 - RNA, 19 nt, Homo sapiens
  misc_RNA (1)...(19): siRNA sense strand
aaccaauguugcccucuuu

SEQ ID NO: 1446971 - RNA, 19 nt, Homo sapiens
  misc_RNA (1)...(19): siRNA sense strand
uugaguaccuuagaauaug

SEQ ID NO: 1446972 - RNA, 19 nt, Homo sapiens
  misc_RNA (1)...(19): siRNA sense strand
gaaugccacaacuuuauca

SEQ ID NO: 1446973 - RNA, 19 nt, Homo sapiens
  misc_RNA (1)...(19): siRNA sense strand
agaugaaugccacaacuuu

SEQ ID NO: 1446974 - RNA, 19 nt, Homo sapiens
  misc_RNA (1)...(19): siRNA sense strand
ugucgacuaucacuauuca

SEQ ID NO: 1446975 - RNA, 19 nt, Homo sapiens
  misc_RNA (1)...(19): siRNA sense strand
uuaaaguucuggcaaagac

SEQ ID NO: 1446976 - RNA, 19 nt, Homo sapiens
  misc_RNA (1)...(19): siRNA sense strand
ugacauggcgaucaagaca

SEQ ID NO: 1446977 - RNA, 19 nt, Homo sapiens
  misc_RNA (1)...(19): siRNA sense strand
ccaguccuuucucuuugaa

SEQ ID NO: 1446978 - RNA, 19 nt, Homo sapiens
  misc_RNA (1)...(19): siRNA sense strand
gcauucaaucccaugugua

SEQ ID NO: 1446979 - RNA, 19 nt, Homo sapiens
  misc_RNA (1)...(19): siRNA sense strand
caagaaacgaugagauggu

SEQ ID NO: 1446980 - RNA, 19 nt, Homo sapiens
  misc_RNA (1)...(19): siRNA sense strand
aaggcaagcauaaagauga

SEQ ID NO: 1446981 - RNA, 19 nt, Homo sapiens
  misc_RNA (1)...(19): siRNA sense strand
caucuuuguuggcucugaa

SEQ ID NO: 1446982 - RNA, 19 nt, Homo sapiens
  misc_RNA (1)...(19): siRNA sense strand
uaaaggcucggcugaacug

SEQ ID NO: 1446983 - RNA, 19 nt, Homo sapiens
  misc_RNA (1)...(19): siRNA sense strand
gaugggaagcuguauucug

SEQ ID NO: 1446984 - RNA, 19 nt, Homo sapiens
  misc_RNA (1)...(19): siRNA sense strand
gagaaaucgcugucgaaca

SEQ ID NO: 1446985 - RNA, 19 nt, Homo sapiens
  misc_RNA (1)...(19): siRNA sense strand
aggcaagcauaaagaugaa

SEQ ID NO: 1446986 - RNA, 19 nt, Homo sapiens
  misc_RNA (1)...(19): siRNA sense strand
cuacacagucaucuuuguu

SEQ ID NO: 1446987 - RNA, 19 nt, Homo sapiens
  misc_RNA (1)...(19): siRNA sense strand
ggacgcccuucaggcaaug

SEQ ID NO: 1446988 - RNA, 19 nt, Homo sapiens
  misc_RNA (1)...(19): siRNA sense strand
guucugcagucuauuacag

SEQ ID NO: 1446989 - RNA, 19 nt, Homo sapiens
  misc_RNA (1)...(19): siRNA sense strand
gacagcaguucccgaagac

SEQ ID NO: 1446990 - RNA, 19 nt, Homo sapiens
  misc_RNA (1)...(19): siRNA sense strand
guucugcugucugugcauu

SEQ ID NO: 1446991 - RNA, 19 nt, Homo sapiens
  misc_RNA (1)...(19): siRNA sense strand
gaacuacacagucaucuuu

SEQ ID NO: 1446992 - RNA, 19 nt, Homo sapiens
  misc_RNA (1)...(19): siRNA sense strand
ggacagcaguucccgaaga

SEQ ID NO: 1446993 - RNA, 19 nt, Homo sapiens
  misc_RNA (1)...(19): siRNA sense strand
gaaacucugucauucauca

SEQ ID NO: 1446994 - RNA, 19 nt, Homo sapiens
  misc_RNA (1)...(19): siRNA sense strand
ggaucaaguuuauacagua

SEQ ID NO: 1446995 - RNA, 19 nt, Homo sapiens
  misc_RNA (1)...(19): siRNA sense strand
gagaaacacuggacuucau

SEQ ID NO: 1446996 - RNA, 19 nt, Homo sapiens
  misc_RNA (1)...(19): siRNA sense strand
gaugaaugccacaacuuua

SEQ ID NO: 1446997 - RNA, 19 nt, Homo sapiens
  misc_RNA (1)...(19): siRNA sense strand
gaagcuggcaugguacuua

SEQ ID NO: 1446998 - RNA, 19 nt, Homo sapiens
  misc_RNA (1)...(19): siRNA sense strand
gaugagcccugguucacaa

SEQ ID NO: 1446999 - RNA, 19 nt, Homo sapiens
  misc_RNA (1)...(19): siRNA sense strand
acacuggacuucauuucua

SEQ ID NO: 1447000 - RNA, 19 nt, Homo sapiens
  misc_RNA (1)...(19): siRNA sense strand
agaaaucgcugucgaacau

SEQ ID NO: 1447001 - RNA, 19 nt, Homo sapiens
  misc_RNA (1)...(19): siRNA sense strand
gagccacacuuucuucaug

SEQ ID NO: 1447002 - RNA, 19 nt, Homo sapiens
  misc_RNA (1)...(19): siRNA sense strand
uagcauggaugacauugaa

SEQ ID NO: 1447003 - RNA, 19 nt, Homo sapiens
  misc_RNA (1)...(19): siRNA sense strand
gcaagaugcccauuugaug

SEQ ID NO: 1447004 - RNA, 19 nt, Homo sapiens
  misc_RNA (1)...(19): siRNA sense strand
gauguucugcagucuauua

SEQ ID NO: 1447005 - RNA, 19 nt, Homo sapiens
  misc_RNA (1)...(19): siRNA sense strand
cacaguggcugacuucuug

SEQ ID NO: 1447006 - RNA, 19 nt, Homo sapiens
  misc_RNA (1)...(19): siRNA sense strand
ggccagcgaugccguuauu

SEQ ID NO: 1447007 - RNA, 19 nt, Homo sapiens
  misc_RNA (1)...(19): siRNA sense strand
gaccaguccuuucucuuug

SEQ ID NO: 1447008 - RNA, 19 nt, Homo sapiens
  misc_RNA (1)...(19): siRNA sense strand
aaacugacauggcgaucaa

SEQ ID NO: 1447009 - RNA, 19 nt, Homo sapiens
  misc_RNA (1)...(19): siRNA sense strand
gcugaugguuucccaguug

SEQ ID NO: 1447010 - RNA, 19 nt, Homo sapiens
  misc_RNA (1)...(19): siRNA sense strand
cgagacacacuuuauauug

SEQ ID NO: 1447011 - RNA, 19 nt, Homo sapiens
  misc_RNA (1)...(19): siRNA sense strand
caaagacucgggucaggua

SEQ ID NO: 1447012 - RNA, 19 nt, Homo sapiens
  misc_RNA (1)...(19): siRNA sense strand
ccacgcagcucaauagcau

SEQ ID NO: 1447013 - RNA, 19 nt, Homo sapiens
  misc_RNA (1)...(19): siRNA sense strand
gaaaggcaagcauaaagau

SEQ ID NO: 1447014 - RNA, 19 nt, Homo sapiens
  misc_RNA (1)...(19): siRNA sense strand
uggcagggaucaaguuuau

SEQ ID NO: 1447015 - RNA, 19 nt, Homo sapiens
  misc_RNA (1)...(19): siRNA sense strand
gaacgacagcguauuacug

SEQ ID NO: 1447016 - RNA, 19 nt, Homo sapiens
  misc_RNA (1)...(19): siRNA sense strand
uuaauacugucgacuauca

SEQ ID NO: 1447017 - RNA, 19 nt, Homo sapiens
  misc_RNA (1)...(19): siRNA sense strand
ccagcgaugccguuauuua

SEQ ID NO: 1447018 - RNA, 19 nt, Homo sapiens
  misc_RNA (1)...(19): siRNA sense strand
gagacacacuuuauauugc

SEQ ID NO: 1447019 - RNA, 19 nt, Homo sapiens
  misc_RNA (1)...(19): siRNA sense strand
gaacagaaaacuccagauu

SEQ ID NO: 1447020 - RNA, 19 nt, Homo sapiens
  misc_RNA (1)...(19): siRNA sense strand
caaaggacgguuuaaggaa

SEQ ID NO: 1447021 - RNA, 19 nt, Homo sapiens
  misc_RNA (1)...(19): siRNA sense strand
gaaacacuggacuucauuu

SEQ ID NO: 1447022 - RNA, 19 nt, Homo sapiens
  misc_RNA (1)...(19): siRNA sense strand
gaucugcccuucgcacaau

SEQ ID NO: 1447023 - RNA, 19 nt, Homo sapiens
  misc_RNA (1)...(19): siRNA sense strand
cgagaaaacugugcuauga

SEQ ID NO: 1447024 - RNA, 19 nt, Homo sapiens
  misc_RNA (1)...(19): siRNA sense strand
uaccagaacuacacaguca

SEQ ID NO: 1447025 - RNA, 19 nt, Homo sapiens
  misc_RNA (1)...(19): siRNA sense strand
ucaaggcaauauccgguuu

SEQ ID NO: 1447026 - RNA, 19 nt, Homo sapiens
  misc_RNA (1)...(19): siRNA sense strand
gggaucaaguuuauacagu

SEQ ID NO: 1447027 - RNA, 19 nt, Homo sapiens
  misc_RNA (1)...(19): siRNA sense strand
ucaaucccauguguagaua

SEQ ID NO: 1447028 - RNA, 19 nt, Homo sapiens
  misc_RNA (1)...(19): siRNA sense strand
uauaaaaccuccaucgauu

SEQ ID NO: 1447029 - RNA, 19 nt, Homo sapiens
  misc_RNA (1)...(19): siRNA sense strand
gcagggaucaaguuuauac

SEQ ID NO: 1447030 - RNA, 19 nt, Homo sapiens
  misc_RNA (1)...(19): siRNA sense strand
ucaaaggacgguuuaagga

SEQ ID NO: 1447031 - RNA, 19 nt, Homo sapiens
  misc_RNA (1)...(19): siRNA sense strand
ugaguaccuuagaauauga

SEQ ID NO: 1447032 - RNA, 19 nt, Homo sapiens
  misc_RNA (1)...(19): siRNA sense strand
gcccaaaacagaaguaaua

SEQ ID NO: 1447033 - RNA, 19 nt, Homo sapiens
  misc_RNA (1)...(19): siRNA sense strand
aagcuggcaugguacuuaa

SEQ ID NO: 1447034 - RNA, 19 nt, Homo sapiens
  misc_RNA (1)...(19): siRNA sense strand
aaaucgcugucgaacauaa

SEQ ID NO: 1447035 - RNA, 19 nt, Homo sapiens
  misc_RNA (1)...(19): siRNA sense strand
ugaaaggcaagcauaaaga

SEQ ID NO: 1447036 - RNA, 19 nt, Homo sapiens
  misc_RNA (1)...(19): siRNA sense strand
gagcccugguucacaaaga

SEQ ID NO: 1447037 - RNA, 19 nt, Homo sapiens
  misc_RNA (1)...(19): siRNA sense strand
aagaaacgaugagaugguu

SEQ ID NO: 1447038 - RNA, 19 nt, Homo sapiens
  misc_RNA (1)...(19): siRNA sense strand
gaugaugaaccccuuaaua

SEQ ID NO: 1447039 - RNA, 19 nt, Homo sapiens
  misc_RNA (1)...(19): siRNA sense strand
agaccaguccuuucucuuu

SEQ ID NO: 1447040 - RNA, 19 nt, Homo sapiens
  misc_RNA (1)...(19): siRNA sense strand
guugaguaccuuagaauau

SEQ ID NO: 1447041 - RNA, 19 nt, Homo sapiens
  misc_RNA (1)...(19): siRNA sense strand
gauugaagccuacaaccau

SEQ ID NO: 1447042 - RNA, 19 nt, Homo sapiens
  misc_RNA (1)...(19): siRNA sense strand
ggagaaacacuggacuuca

SEQ ID NO: 1447043 - RNA, 19 nt, Homo sapiens
  misc_RNA (1)...(19): siRNA sense strand
cagcgaugccguuauuuau

SEQ ID NO: 1447044 - RNA, 19 nt, Homo sapiens
  misc_RNA (1)...(19): siRNA sense strand
aaaccaauguugcccucuu

SEQ ID NO: 1447045 - RNA, 19 nt, Homo sapiens
  misc_RNA (1)...(19): siRNA sense strand
gcaagcauaaagaugaaug

SEQ ID NO: 1447046 - RNA, 19 nt, Homo sapiens
  misc_RNA (1)...(19): siRNA sense strand
cacuggacuucauuucuaa

SEQ ID NO: 1447047 - RNA, 19 nt, Homo sapiens
  misc_RNA (1)...(19): siRNA sense strand
gaaaucgcugucgaacaua

SEQ ID NO: 1447048 - RNA, 19 nt, Homo sapiens
  misc_RNA (1)...(19): siRNA sense strand
acacuuucuucaugccaua

SEQ ID NO: 1447049 - RNA, 19 nt, Homo sapiens
  misc_RNA (1)...(19): siRNA sense strand
gguugaguaccuuagaaua

SEQ ID NO: 1447050 - RNA, 19 nt, Homo sapiens
  misc_RNA (1)...(19): siRNA sense strand
cagcugauguugaaaauuc

SEQ ID NO: 1447051 - RNA, 19 nt, Homo sapiens
  misc_RNA (1)...(19): siRNA sense strand
guauucaaaggacgguuua

SEQ ID NO: 1447052 - RNA, 19 nt, Homo sapiens
  misc_RNA (1)...(19): siRNA sense strand
aagcaugggugauggaucu

SEQ ID NO: 1447053 - RNA, 19 nt, Homo sapiens
  misc_RNA (1)...(19): siRNA sense strand
uuaguggccuggcaagaug

SEQ ID NO: 1447054 - RNA, 19 nt, Homo sapiens
  misc_RNA (1)...(19): siRNA sense strand
aaagaugaaugccacaacu

SEQ ID NO: 1447055 - RNA, 19 nt, Homo sapiens
  misc_RNA (1)...(19): siRNA sense strand
guugagggcagucagcuuu

SEQ ID NO: 1447056 - RNA, 19 nt, Homo sapiens
  misc_RNA (1)...(19): siRNA sense strand
gaaacugacauggcgauca

SEQ ID NO: 1447057 - RNA, 19 nt, Homo sapiens
  misc_RNA (1)...(19): siRNA sense strand
cgacagcguauuacuggaa

SEQ ID NO: 1447058 - RNA, 19 nt, Homo sapiens
  misc_RNA (1)...(19): siRNA sense strand
cucugaagcuggcauggua

SEQ ID NO: 1447059 - RNA, 19 nt, Homo sapiens
  misc_RNA (1)...(19): siRNA sense strand
gaauauggaaacuaugucu

SEQ ID NO: 1447060 - RNA, 19 nt, Homo sapiens
  misc_RNA (1)...(19): siRNA sense strand
cagcuuuccugaagaugau

SEQ ID NO: 1447061 - RNA, 19 nt, Homo sapiens
  misc_RNA (1)...(19): siRNA sense strand
agaaaacugugcuaugaaa

SEQ ID NO: 1447062 - RNA, 19 nt, Homo sapiens
  misc_RNA (1)...(19): siRNA sense strand
ccuuaauacugucgacuau

SEQ ID NO: 1447063 - RNA, 19 nt, Homo sapiens
  misc_RNA (1)...(19): siRNA sense strand
uuugaacgacagcguauua

SEQ ID NO: 1447064 - RNA, 19 nt, Homo sapiens
  misc_RNA (1)...(19): siRNA sense strand
gcauuuagcauggaugaca

SEQ ID NO: 1447065 - RNA, 19 nt, Homo sapiens
  misc_RNA (1)...(19): siRNA sense strand
ucugcugucugugcauuua

SEQ ID NO: 1447066 - RNA, 19 nt, Homo sapiens
  misc_RNA (1)...(19): siRNA sense strand
uaaaugaaaugcccaaaac

SEQ ID NO: 1447067 - RNA, 19 nt, Homo sapiens
  misc_RNA (1)...(19): siRNA sense strand
gcguauuacuggaagagau

SEQ ID NO: 1447068 - RNA, 19 nt, Homo sapiens
  misc_RNA (1)...(19): siRNA sense strand
ugucauucaucaaaucuca

SEQ ID NO: 1447069 - RNA, 19 nt, Homo sapiens
  misc_RNA (1)...(19): siRNA sense strand
gaagacaaagugccaaagc

SEQ ID NO: 1447070 - RNA, 19 nt, Homo sapiens
  misc_RNA (1)...(19): siRNA sense strand
aaccaauguugcccucuuu

SEQ ID NO: 1447071 - RNA, 19 nt, Homo sapiens
  misc_RNA (1)...(19): siRNA sense strand
uugaguaccuuagaauaug

SEQ ID NO: 1447072 - RNA, 19 nt, Homo sapiens
  misc_RNA (1)...(19): siRNA sense strand
gaaugccacaacuuuauca

SEQ ID NO: 1447073 - RNA, 19 nt, Homo sapiens
  misc_RNA (1)...(19): siRNA sense strand
agaugaaugccacaacuuu

SEQ ID NO: 1447074 - RNA, 19 nt, Homo sapiens
  misc_RNA (1)...(19): siRNA sense strand
ugucgacuaucacuauuca

SEQ ID NO: 1447075 - RNA, 19 nt, Homo sapiens
  misc_RNA (1)...(19): siRNA sense strand
uuaaaguucuggcaaagac

SEQ ID NO: 1447076 - RNA, 19 nt, Homo sapiens
  misc_RNA (1)...(19): siRNA sense strand
ugacauggcgaucaagaca

SEQ ID NO: 1447077 - RNA, 19 nt, Homo sapiens
  misc_RNA (1)...(19): siRNA sense strand
ccaguccuuucucuuugaa

SEQ ID NO: 1447078 - RNA, 19 nt, Homo sapiens
  misc_RNA (1)...(19): siRNA sense strand
gcauucaaucccaugugua

SEQ ID NO: 1447079 - RNA, 19 nt, Homo sapiens
  misc_RNA (1)...(19): siRNA sense strand
caagaaacgaugagauggu

SEQ ID NO: 1447080 - RNA, 19 nt, Homo sapiens
  misc_RNA (1)...(19): siRNA sense strand
aaggcaagcauaaagauga

SEQ ID NO: 1447081 - RNA, 19 nt, Homo sapiens
  misc_RNA (1)...(19): siRNA sense strand
caucuuuguuggcucugaa

SEQ ID NO: 1447082 - RNA, 19 nt, Homo sapiens
  misc_RNA (1)...(19): siRNA sense strand
uaaaggcucggcugaacug

SEQ ID NO: 1447083 - RNA, 19 nt, Homo sapiens
  misc_RNA (1)...(19): siRNA sense strand
gaugggaagcuguauucug

SEQ ID NO: 1447084 - RNA, 19 nt, Homo sapiens
  misc_RNA (1)...(19): siRNA sense strand
gagaaaucgcugucgaaca

SEQ ID NO: 1447085 - RNA, 19 nt, Homo sapiens
  misc_RNA (1)...(19): siRNA sense strand
aggcaagcauaaagaugaa

SEQ ID NO: 1447086 - RNA, 19 nt, Homo sapiens
  misc_RNA (1)...(19): siRNA sense strand
cuacacagucaucuuuguu

SEQ ID NO: 1447087 - RNA, 19 nt, Homo sapiens
  misc_RNA (1)...(19): siRNA sense strand
ggacgcccuucaggcaaug

SEQ ID NO: 1447088 - RNA, 19 nt, Homo sapiens
  misc_RNA (1)...(19): siRNA sense strand
guucugcagucuauuacag

SEQ ID NO: 1447089 - RNA, 19 nt, Homo sapiens
  misc_RNA (1)...(19): siRNA sense strand
gacagcaguucccgaagac

SEQ ID NO: 1447090 - RNA, 19 nt, Homo sapiens
  misc_RNA (1)...(19): siRNA sense strand
guucugcugucugugcauu

SEQ ID NO: 1447091 - RNA, 19 nt, Homo sapiens
  misc_RNA (1)...(19): siRNA sense strand
gaacuacacagucaucuuu

SEQ ID NO: 1447092 - RNA, 19 nt, Homo sapiens
  misc_RNA (1)...(19): siRNA sense strand
ggacagcaguucccgaaga

SEQ ID NO: 1447093 - RNA, 19 nt, Homo sapiens
  misc_RNA (1)...(19): siRNA sense strand
gaaacucugucauucauca

SEQ ID NO: 1447094 - RNA, 19 nt, Homo sapiens
  misc_RNA (1)...(19): siRNA sense strand
ggaucaaguuuauacagua

SEQ ID NO: 1447095 - RNA, 19 nt, Homo sapiens
  misc_RNA (1)...(19): siRNA sense strand
gagaaacacuggacuucau

SEQ ID NO: 1447096 - RNA, 19 nt, Homo sapiens
  misc_RNA (1)...(19): siRNA sense strand
gaugaaugccacaacuuua

SEQ ID NO: 1447097 - RNA, 19 nt, Homo sapiens
  misc_RNA (1)...(19): siRNA sense strand
gaagcuggcaugguacuua

SEQ ID NO: 1447098 - RNA, 19 nt, Homo sapiens
  misc_RNA (1)...(19): siRNA sense strand
gaugagcccugguucacaa

SEQ ID NO: 1447099 - RNA, 19 nt, Homo sapiens
  misc_RNA (1)...(19): siRNA sense strand
acacuggacuucauuucua

SEQ ID NO: 1447100 - RNA, 19 nt, Homo sapiens
  misc_RNA (1)...(19): siRNA sense strand
agaaaucgcugucgaacau

SEQ ID NO: 1447101 - RNA, 19 nt, Homo sapiens
  misc_RNA (1)...(19): siRNA sense strand
gagccacacuuucuucaug

SEQ ID NO: 1447102 - RNA, 19 nt, Homo sapiens
  misc_RNA (1)...(19): siRNA sense strand
uagcauggaugacauugaa

SEQ ID NO: 1447103 - RNA, 19 nt, Homo sapiens
  misc_RNA (1)...(19): siRNA sense strand
gcaagaugcccauuugaug

SEQ ID NO: 1447104 - RNA, 19 nt, Homo sapiens
  misc_RNA (1)...(19): siRNA sense strand
gauguucugcagucuauua

SEQ ID NO: 1447105 - RNA, 19 nt, Homo sapiens
  misc_RNA (1)...(19): siRNA sense strand
cacaguggcugacuucuug

SEQ ID NO: 1447106 - RNA, 19 nt, Homo sapiens
  misc_RNA (1)...(19): siRNA sense strand
ggccagcgaugccguuauu

SEQ ID NO: 1447107 - RNA, 19 nt, Homo sapiens
  misc_RNA (1)...(19): siRNA sense strand
gaccaguccuuucucuuug

SEQ ID NO: 1447108 - RNA, 19 nt, Homo sapiens
  misc_RNA (1)...(19): siRNA sense strand
aaacugacauggcgaucaa

SEQ ID NO: 1447109 - RNA, 19 nt, Homo sapiens
  misc_RNA (1)...(19): siRNA sense strand
gcugaugguuucccaguug

SEQ ID NO: 1447110 - RNA, 19 nt, Homo sapiens
  misc_RNA (1)...(19): siRNA sense strand
cgagacacacuuuauauug

SEQ ID NO: 1447111 - RNA, 19 nt, Homo sapiens
  misc_RNA (1)...(19): siRNA sense strand
caaagacucgggucaggua

SEQ ID NO: 1447112 - RNA, 19 nt, Homo sapiens
  misc_RNA (1)...(19): siRNA sense strand
ccacgcagcucaauagcau

SEQ ID NO: 1447113 - RNA, 19 nt, Homo sapiens
  misc_RNA (1)...(19): siRNA sense strand
gaaaggcaagcauaaagau

SEQ ID NO: 1447114 - RNA, 19 nt, Homo sapiens
  misc_RNA (1)...(19): siRNA sense strand
uggcagggaucaaguuuau

SEQ ID NO: 1447115 - RNA, 19 nt, Homo sapiens
  misc_RNA (1)...(19): siRNA sense strand
gaacgacagcguauuacug

SEQ ID NO: 1447116 - RNA, 19 nt, Homo sapiens
  misc_RNA (1)...(19): siRNA sense strand
uuaauacugucgacuauca

SEQ ID NO: 1447117 - RNA, 19 nt, Homo sapiens
  misc_RNA (1)...(19): siRNA sense strand
ccagcgaugccguuauuua

SEQ ID NO: 1447118 - RNA, 19 nt, Homo sapiens
  misc_RNA (1)...(19): siRNA sense strand
gagacacacuuuauauugc

SEQ ID NO: 1447119 - RNA, 19 nt, Homo sapiens
  misc_RNA (1)...(19): siRNA sense strand
gaacagaaaacuccagauu

SEQ ID NO: 1447120 - RNA, 19 nt, Homo sapiens
  misc_RNA (1)...(19): siRNA sense strand
caaaggacgguuuaaggaa

SEQ ID NO: 1447121 - RNA, 19 nt, Homo sapiens
  misc_RNA (1)...(19): siRNA sense strand
gaaacacuggacuucauuu

SEQ ID NO: 1447122 - RNA, 19 nt, Homo sapiens
  misc_RNA (1)...(19): siRNA sense strand
gaucugcccuucgcacaau

SEQ ID NO: 1447123 - RNA, 19 nt, Homo sapiens
  misc_RNA (1)...(19): siRNA sense strand
cgagaaaacugugcuauga

SEQ ID NO: 1447124 - RNA, 19 nt, Homo sapiens
  misc_RNA (1)...(19): siRNA sense strand
uaccagaacuacacaguca

SEQ ID NO: 1447125 - RNA, 19 nt, Homo sapiens
  misc_RNA (1)...(19): siRNA sense strand
ucaaggcaauauccgguuu

SEQ ID NO: 1447126 - RNA, 19 nt, Homo sapiens
  misc_RNA (1)...(19): siRNA sense strand
gggaucaaguuuauacagu

SEQ ID NO: 1447127 - RNA, 19 nt, Homo sapiens
  misc_RNA (1)...(19): siRNA sense strand
ucaaucccauguguagaua

SEQ ID NO: 1447128 - RNA, 19 nt, Homo sapiens
  misc_RNA (1)...(19): siRNA sense strand
uauaaaaccuccaucgauu

SEQ ID NO: 1447129 - RNA, 19 nt, Homo sapiens
  misc_RNA (1)...(19): siRNA sense strand
gcagggaucaaguuuauac

SEQ ID NO: 1447130 - RNA, 19 nt, Homo sapiens
  misc_RNA (1)...(19): siRNA sense strand
ucaaaggacgguuuaagga

SEQ ID NO: 1447131 - RNA, 19 nt, Homo sapiens
  misc_RNA (1)...(19): siRNA sense strand
ugaguaccuuagaauauga

SEQ ID NO: 1447132 - RNA, 19 nt, Homo sapiens
  misc_RNA (1)...(19): siRNA sense strand
gcccaaaacagaaguaaua

SEQ ID NO: 1447133 - RNA, 19 nt, Homo sapiens
  misc_RNA (1)...(19): siRNA sense strand
aagcuggcaugguacuuaa

SEQ ID NO: 1447134 - RNA, 19 nt, Homo sapiens
  misc_RNA (1)...(19): siRNA sense strand
aaaucgcugucgaacauaa

SEQ ID NO: 1447135 - RNA, 19 nt, Homo sapiens
  misc_RNA (1)...(19): siRNA sense strand
ugaaaggcaagcauaaaga

SEQ ID NO: 1447136 - RNA, 19 nt, Homo sapiens
  misc_RNA (1)...(19): siRNA sense strand
gagcccugguucacaaaga

SEQ ID NO: 1447137 - RNA, 19 nt, Homo sapiens
  misc_RNA (1)...(19): siRNA sense strand
aagaaacgaugagaugguu

SEQ ID NO: 1447138 - RNA, 19 nt, Homo sapiens
  misc_RNA (1)...(19): siRNA sense strand
gaugaugaaccccuuaaua

SEQ ID NO: 1447139 - RNA, 19 nt, Homo sapiens
  misc_RNA (1)...(19): siRNA sense strand
agaccaguccuuucucuuu

SEQ ID NO: 1447140 - RNA, 19 nt, Homo sapiens
  misc_RNA (1)...(19): siRNA sense strand
guugaguaccuuagaauau

SEQ ID NO: 1447141 - RNA, 19 nt, Homo sapiens
  misc_RNA (1)...(19): siRNA sense strand
gauugaagccuacaaccau

SEQ ID NO: 1447142 - RNA, 19 nt, Homo sapiens
  misc_RNA (1)...(19): siRNA sense strand
ggagaaacacuggacuuca

SEQ ID NO: 1447143 - RNA, 19 nt, Homo sapiens
  misc_RNA (1)...(19): siRNA sense strand
cagcgaugccguuauuuau

SEQ ID NO: 1447144 - RNA, 19 nt, Homo sapiens
  misc_RNA (1)...(19): siRNA sense strand
aaaccaauguugcccucuu

SEQ ID NO: 1447145 - RNA, 19 nt, Homo sapiens
  misc_RNA (1)...(19): siRNA sense strand
gcaagcauaaagaugaaug

SEQ ID NO: 1447146 - RNA, 19 nt, Homo sapiens
  misc_RNA (1)...(19): siRNA sense strand
cacuggacuucauuucuaa

SEQ ID NO: 1447147 - RNA, 19 nt, Homo sapiens
  misc_RNA (1)...(19): siRNA sense strand
gaaaucgcugucgaacaua

SEQ ID NO: 1447148 - RNA, 19 nt, Homo sapiens
  misc_RNA (1)...(19): siRNA sense strand
acacuuucuucaugccaua

SEQ ID NO: 1447149 - RNA, 19 nt, Homo sapiens
  misc_RNA (1)...(19): siRNA sense strand
gguugaguaccuuagaaua

SEQ ID NO: 1447150 - RNA, 19 nt, Homo sapiens
  misc_RNA (1)...(19): siRNA sense strand
cagcugauguugaaaauuc

SEQ ID NO: 1447151 - RNA, 19 nt, Homo sapiens
  misc_RNA (1)...(19): siRNA sense strand
guauucaaaggacgguuua

SEQ ID NO: 1447152 - RNA, 19 nt, Homo sapiens
  misc_RNA (1)...(19): siRNA sense strand
aagcaugggugauggaucu

SEQ ID NO: 1447153 - RNA, 19 nt, Homo sapiens
  misc_RNA (1)...(19): siRNA sense strand
uuaguggccuggcaagaug

SEQ ID NO: 1447154 - RNA, 19 nt, Homo sapiens
  misc_RNA (1)...(19): siRNA sense strand
aaagaugaaugccacaacu

SEQ ID NO: 1447155 - RNA, 19 nt, Homo sapiens
  misc_RNA (1)...(19): siRNA sense strand
guugagggcagucagcuuu

SEQ ID NO: 1447156 - RNA, 19 nt, Homo sapiens
  misc_RNA (1)...(19): siRNA sense strand
gaaacugacauggcgauca

SEQ ID NO: 1447157 - RNA, 19 nt, Homo sapiens
  misc_RNA (1)...(19): siRNA sense strand
cgacagcguauuacuggaa

SEQ ID NO: 1447158 - RNA, 19 nt, Homo sapiens
  misc_RNA (1)...(19): siRNA sense strand
cucugaagcuggcauggua

SEQ ID NO: 1447159 - RNA, 19 nt, Homo sapiens
  misc_RNA (1)...(19): siRNA sense strand
gaauauggaaacuaugucu

SEQ ID NO: 1447160 - RNA, 19 nt, Homo sapiens
  misc_RNA (1)...(19): siRNA sense strand
cagcuuuccugaagaugau

SEQ ID NO: 1447161 - RNA, 19 nt, Homo sapiens
  misc_RNA (1)...(19): siRNA sense strand
agaaaacugugcuaugaaa

SEQ ID NO: 1447162 - RNA, 19 nt, Homo sapiens
  misc_RNA (1)...(19): siRNA sense strand
ccuuaauacugucgacuau

SEQ ID NO: 1447163 - RNA, 19 nt, Homo sapiens
  misc_RNA (1)...(19): siRNA sense strand
uuugaacgacagcguauua

SEQ ID NO: 1447164 - RNA, 19 nt, Homo sapiens
  misc_RNA (1)...(19): siRNA sense strand
gcauuuagcauggaugaca

SEQ ID NO: 1447165 - RNA, 19 nt, Homo sapiens
  misc_RNA (1)...(19): siRNA sense strand
ucugcugucugugcauuua

SEQ ID NO: 1447166 - RNA, 19 nt, Homo sapiens
  misc_RNA (1)...(19): siRNA sense strand
uaaaugaaaugcccaaaac

SEQ ID NO: 1447167 - RNA, 19 nt, Homo sapiens
  misc_RNA (1)...(19): siRNA sense strand
gcguauuacuggaagagau

SEQ ID NO: 1447168 - RNA, 19 nt, Homo sapiens
  misc_RNA (1)...(19): siRNA sense strand
ugucauucaucaaaucuca

SEQ ID NO: 1447169 - RNA, 19 nt, Homo sapiens
  misc_RNA (1)...(19): siRNA sense strand
gaagacaaagugccaaagc

SEQ ID NO: 1447170 - RNA, 19 nt, Homo sapiens
  misc_RNA (1)...(19): siRNA sense strand
aaccaauguugcccucuuu

SEQ ID NO: 1447171 - RNA, 19 nt, Homo sapiens
  misc_RNA (1)...(19): siRNA sense strand
uugaguaccuuagaauaug

SEQ ID NO: 1447172 - RNA, 19 nt, Homo sapiens
  misc_RNA (1)...(19): siRNA sense strand
gaaugccacaacuuuauca

SEQ ID NO: 1447173 - RNA, 19 nt, Homo sapiens
  misc_RNA (1)...(19): siRNA sense strand
agaugaaugccacaacuuu

SEQ ID NO: 1447174 - RNA, 19 nt, Homo sapiens
  misc_RNA (1)...(19): siRNA sense strand
ugucgacuaucacuauuca

SEQ ID NO: 1447175 - RNA, 19 nt, Homo sapiens
  misc_RNA (1)...(19): siRNA sense strand
uuaaaguucuggcaaagac

SEQ ID NO: 1447176 - RNA, 19 nt, Homo sapiens
  misc_RNA (1)...(19): siRNA sense strand
ugacauggcgaucaagaca

SEQ ID NO: 1447177 - RNA, 19 nt, Homo sapiens
  misc_RNA (1)...(19): siRNA sense strand
ccaguccuuucucuuugaa

SEQ ID NO: 1447178 - RNA, 19 nt, Homo sapiens
  misc_RNA (1)...(19): siRNA sense strand
gcauucaaucccaugugua

SEQ ID NO: 1447179 - RNA, 19 nt, Homo sapiens
  misc_RNA (1)...(19): siRNA sense strand
caagaaacgaugagauggu

SEQ ID NO: 1447180 - RNA, 19 nt, Homo sapiens
  misc_RNA (1)...(19): siRNA sense strand
aaggcaagcauaaagauga

SEQ ID NO: 1447181 - RNA, 19 nt, Homo sapiens
  misc_RNA (1)...(19): siRNA sense strand
caucuuuguuggcucugaa

SEQ ID NO: 1447182 - RNA, 19 nt, Homo sapiens
  misc_RNA (1)...(19): siRNA sense strand
uaaaggcucggcugaacug

SEQ ID NO: 1447183 - RNA, 19 nt, Homo sapiens
  misc_RNA (1)...(19): siRNA sense strand
gaugggaagcuguauucug

SEQ ID NO: 1447184 - RNA, 19 nt, Homo sapiens
  misc_RNA (1)...(19): siRNA sense strand
gagaaaucgcugucgaaca

SEQ ID NO: 1447185 - RNA, 19 nt, Homo sapiens
  misc_RNA (1)...(19): siRNA sense strand
aggcaagcauaaagaugaa

SEQ ID NO: 1447186 - RNA, 19 nt, Homo sapiens
  misc_RNA (1)...(19): siRNA sense strand
cuacacagucaucuuuguu

SEQ ID NO: 1447187 - RNA, 19 nt, Homo sapiens
  misc_RNA (1)...(19): siRNA sense strand
ggacgcccuucaggcaaug

SEQ ID NO: 1447188 - RNA, 19 nt, Homo sapiens
  misc_RNA (1)...(19): siRNA sense strand
guucugcagucuauuacag

SEQ ID NO: 1447189 - RNA, 19 nt, Homo sapiens
  misc_RNA (1)...(19): siRNA sense strand
gacagcaguucccgaagac

SEQ ID NO: 1447190 - RNA, 19 nt, Homo sapiens
  misc_RNA (1)...(19): siRNA sense strand
guucugcugucugugcauu

SEQ ID NO: 1447191 - RNA, 19 nt, Homo sapiens
  misc_RNA (1)...(19): siRNA sense strand
gaacuacacagucaucuuu

SEQ ID NO: 1447192 - RNA, 19 nt, Homo sapiens
  misc_RNA (1)...(19): siRNA sense strand
ggacagcaguucccgaaga

SEQ ID NO: 1447193 - RNA, 19 nt, Homo sapiens
  misc_RNA (1)...(19): siRNA sense strand
gaaacucugucauucauca

SEQ ID NO: 1447194 - RNA, 19 nt, Homo sapiens
  misc_RNA (1)...(19): siRNA sense strand
ggaucaaguuuauacagua

SEQ ID NO: 1447195 - RNA, 19 nt, Homo sapiens
  misc_RNA (1)...(19): siRNA sense strand
gagaaacacuggacuucau

SEQ ID NO: 1447196 - RNA, 19 nt, Homo sapiens
  misc_RNA (1)...(19): siRNA sense strand
gaugaaugccacaacuuua

SEQ ID NO: 1447197 - RNA, 19 nt, Homo sapiens
  misc_RNA (1)...(19): siRNA sense strand
gaagcuggcaugguacuua

SEQ ID NO: 1447198 - RNA, 19 nt, Homo sapiens
  misc_RNA (1)...(19): siRNA sense strand
gaugagcccugguucacaa

SEQ ID NO: 1447199 - RNA, 19 nt, Homo sapiens
  misc_RNA (1)...(19): siRNA sense strand
acacuggacuucauuucua

SEQ ID NO: 1447200 - RNA, 19 nt, Homo sapiens
  misc_RNA (1)...(19): siRNA sense strand
agaaaucgcugucgaacau

SEQ ID NO: 1447201 - RNA, 19 nt, Homo sapiens
  misc_RNA (1)...(19): siRNA sense strand
gagccacacuuucuucaug

SEQ ID NO: 1447202 - RNA, 19 nt, Homo sapiens
  misc_RNA (1)...(19): siRNA sense strand
uagcauggaugacauugaa

SEQ ID NO: 1447203 - RNA, 19 nt, Homo sapiens
  misc_RNA (1)...(19): siRNA sense strand
gcaagaugcccauuugaug

SEQ ID NO: 1447204 - RNA, 19 nt, Homo sapiens
  misc_RNA (1)...(19): siRNA sense strand
gauguucugcagucuauua

SEQ ID NO: 1447205 - RNA, 19 nt, Homo sapiens
  misc_RNA (1)...(19): siRNA sense strand
cacaguggcugacuucuug

SEQ ID NO: 1447206 - RNA, 19 nt, Homo sapiens
  misc_RNA (1)...(19): siRNA sense strand
ggccagcgaugccguuauu

SEQ ID NO: 1447207 - RNA, 19 nt, Homo sapiens
  misc_RNA (1)...(19): siRNA sense strand
gaccaguccuuucucuuug

SEQ ID NO: 1447208 - RNA, 19 nt, Homo sapiens
  misc_RNA (1)...(19): siRNA sense strand
aaacugacauggcgaucaa

SEQ ID NO: 1447209 - RNA, 19 nt, Homo sapiens
  misc_RNA (1)...(19): siRNA sense strand
gcugaugguuucccaguug

SEQ ID NO: 1447210 - RNA, 19 nt, Homo sapiens
  misc_RNA (1)...(19): siRNA sense strand
cgagacacacuuuauauug

SEQ ID NO: 1447211 - RNA, 19 nt, Homo sapiens
  misc_RNA (1)...(19): siRNA sense strand
caaagacucgggucaggua

SEQ ID NO: 1447212 - RNA, 19 nt, Homo sapiens
  misc_RNA (1)...(19): siRNA sense strand
ccacgcagcucaauagcau

SEQ ID NO: 1447213 - RNA, 19 nt, Homo sapiens
  misc_RNA (1)...(19): siRNA sense strand
gaaaggcaagcauaaagau

SEQ ID NO: 1447214 - RNA, 19 nt, Homo sapiens
  misc_RNA (1)...(19): siRNA sense strand
uggcagggaucaaguuuau

SEQ ID NO: 1447215 - RNA, 19 nt, Homo sapiens
  misc_RNA (1)...(19): siRNA sense strand
gaacgacagcguauuacug

SEQ ID NO: 1447216 - RNA, 19 nt, Homo sapiens
  misc_RNA (1)...(19): siRNA sense strand
uuaauacugucgacuauca

SEQ ID NO: 1447217 - RNA, 19 nt, Homo sapiens
  misc_RNA (1)...(19): siRNA sense strand
ccagcgaugccguuauuua

SEQ ID NO: 1447218 - RNA, 19 nt, Homo sapiens
  misc_RNA (1)...(19): siRNA sense strand
gagacacacuuuauauugc

SEQ ID NO: 1447219 - RNA, 19 nt, Homo sapiens
  misc_RNA (1)...(19): siRNA sense strand
gaacagaaaacuccagauu

SEQ ID NO: 1447220 - RNA, 19 nt, Homo sapiens
  misc_RNA (1)...(19): siRNA sense strand
caaaggacgguuuaaggaa

SEQ ID NO: 1447221 - RNA, 19 nt, Homo sapiens
  misc_RNA (1)...(19): siRNA sense strand
gaaacacuggacuucauuu

SEQ ID NO: 1447222 - RNA, 19 nt, Homo sapiens
  misc_RNA (1)...(19): siRNA sense strand
gaucugcccuucgcacaau

SEQ ID NO: 1447223 - RNA, 19 nt, Homo sapiens
  misc_RNA (1)...(19): siRNA sense strand
cgagaaaacugugcuauga

SEQ ID NO: 1447224 - RNA, 19 nt, Homo sapiens
  misc_RNA (1)...(19): siRNA sense strand
uaccagaacuacacaguca

SEQ ID NO: 1447225 - RNA, 19 nt, Homo sapiens
  misc_RNA (1)...(19): siRNA sense strand
ucaaggcaauauccgguuu

SEQ ID NO: 1447226 - RNA, 19 nt, Homo sapiens
  misc_RNA (1)...(19): siRNA sense strand
gggaucaaguuuauacagu

SEQ ID NO: 1447227 - RNA, 19 nt, Homo sapiens
  misc_RNA (1)...(19): siRNA sense strand
ucaaucccauguguagaua

SEQ ID NO: 1447228 - RNA, 19 nt, Homo sapiens
  misc_RNA (1)...(19): siRNA sense strand
uauaaaaccuccaucgauu

SEQ ID NO: 1447229 - RNA, 19 nt, Homo sapiens
  misc_RNA (1)...(19): siRNA sense strand
gcagggaucaaguuuauac

SEQ ID NO: 1447230 - RNA, 19 nt, Homo sapiens
  misc_RNA (1)...(19): siRNA sense strand
ucaaaggacgguuuaagga

SEQ ID NO: 1447231 - RNA, 19 nt, Homo sapiens
  misc_RNA (1)...(19): siRNA sense strand
ugaguaccuuagaauauga

SEQ ID NO: 1447232 - RNA, 19 nt, Homo sapiens
  misc_RNA (1)...(19): siRNA sense strand
gcccaaaacagaaguaaua

SEQ ID NO: 1447233 - RNA, 19 nt, Homo sapiens
  misc_RNA (1)...(19): siRNA sense strand
aagcuggcaugguacuuaa

SEQ ID NO: 1447234 - RNA, 19 nt, Homo sapiens
  misc_RNA (1)...(19): siRNA sense strand
aaaucgcugucgaacauaa

SEQ ID NO: 1447235 - RNA, 19 nt, Homo sapiens
  misc_RNA (1)...(19): siRNA sense strand
ugaaaggcaagcauaaaga

SEQ ID NO: 1447236 - RNA, 19 nt, Homo sapiens
  misc_RNA (1)...(19): siRNA sense strand
gagcccugguucacaaaga

SEQ ID NO: 1447237 - RNA, 19 nt, Homo sapiens
  misc_RNA (1)...(19): siRNA sense strand
aagaaacgaugagaugguu

SEQ ID NO: 1447238 - RNA, 19 nt, Homo sapiens
  misc_RNA (1)...(19): siRNA sense strand
gaugaugaaccccuuaaua

SEQ ID NO: 1447239 - RNA, 19 nt, Homo sapiens
  misc_RNA (1)...(19): siRNA sense strand
agaccaguccuuucucuuu

SEQ ID NO: 1447240 - RNA, 19 nt, Homo sapiens
  misc_RNA (1)...(19): siRNA sense strand
guugaguaccuuagaauau

SEQ ID NO: 1447241 - RNA, 19 nt, Homo sapiens
  misc_RNA (1)...(19): siRNA sense strand
gauugaagccuacaaccau

SEQ ID NO: 1447242 - RNA, 19 nt, Homo sapiens
  misc_RNA (1)...(19): siRNA sense strand
ggagaaacacuggacuuca

SEQ ID NO: 1447243 - RNA, 19 nt, Homo sapiens
  misc_RNA (1)...(19): siRNA sense strand
cagcgaugccguuauuuau

SEQ ID NO: 1447244 - RNA, 19 nt, Homo sapiens
  misc_RNA (1)...(19): siRNA sense strand
aaaccaauguugcccucuu

SEQ ID NO: 1447245 - RNA, 19 nt, Homo sapiens
  misc_RNA (1)...(19): siRNA sense strand
gcaagcauaaagaugaaug

SEQ ID NO: 1447246 - RNA, 19 nt, Homo sapiens
  misc_RNA (1)...(19): siRNA sense strand
cacuggacuucauuucuaa

SEQ ID NO: 1447247 - RNA, 19 nt, Homo sapiens
  misc_RNA (1)...(19): siRNA sense strand
gaaaucgcugucgaacaua

SEQ ID NO: 1447248 - RNA, 19 nt, Homo sapiens
  misc_RNA (1)...(19): siRNA sense strand
acacuuucuucaugccaua

SEQ ID NO: 1447249 - RNA, 19 nt, Homo sapiens
  misc_RNA (1)...(19): siRNA sense strand
gguugaguaccuuagaaua

SEQ ID NO: 1447250 - RNA, 19 nt, Homo sapiens
  misc_RNA (1)...(19): siRNA sense strand
cagcugauguugaaaauuc

SEQ ID NO: 1447251 - RNA, 19 nt, Homo sapiens
  misc_RNA (1)...(19): siRNA sense strand
guauucaaaggacgguuua

SEQ ID NO: 1447252 - RNA, 19 nt, Homo sapiens
  misc_RNA (1)...(19): siRNA sense strand
aagcaugggugauggaucu

SEQ ID NO: 1447253 - RNA, 19 nt, Homo sapiens
  misc_RNA (1)...(19): siRNA sense strand
uuaguggccuggcaagaug

SEQ ID NO: 1447254 - RNA, 19 nt, Homo sapiens
  misc_RNA (1)...(19): siRNA sense strand
aaagaugaaugccacaacu

SEQ ID NO: 1447255 - RNA, 19 nt, Homo sapiens
  misc_RNA (1)...(19): siRNA sense strand
guugagggcagucagcuuu

SEQ ID NO: 1447256 - RNA, 19 nt, Homo sapiens
  misc_RNA (1)...(19): siRNA sense strand
gaaacugacauggcgauca

SEQ ID NO: 1447257 - RNA, 19 nt, Homo sapiens
  misc_RNA (1)...(19): siRNA sense strand
cgacagcguauuacuggaa

SEQ ID NO: 1447258 - RNA, 19 nt, Homo sapiens
  misc_RNA (1)...(19): siRNA sense strand
cucugaagcuggcauggua

SEQ ID NO: 1447259 - RNA, 19 nt, Homo sapiens
  misc_RNA (1)...(19): siRNA sense strand
gaauauggaaacuaugucu

SEQ ID NO: 1447260 - RNA, 19 nt, Homo sapiens
  misc_RNA (1)...(19): siRNA sense strand
cagcuuuccugaagaugau

SEQ ID NO: 1447261 - RNA, 19 nt, Homo sapiens
  misc_RNA (1)...(19): siRNA sense strand
agaaaacugugcuaugaaa

SEQ ID NO: 1447262 - RNA, 19 nt, Homo sapiens
  misc_RNA (1)...(19): siRNA sense strand
ccuuaauacugucgacuau

SEQ ID NO: 1447263 - RNA, 19 nt, Homo sapiens
  misc_RNA (1)...(19): siRNA sense strand
uuugaacgacagcguauua

SEQ ID NO: 1447264 - RNA, 19 nt, Homo sapiens
  misc_RNA (1)...(19): siRNA sense strand
gcauuuagcauggaugaca

SEQ ID NO: 1447265 - RNA, 19 nt, Homo sapiens
  misc_RNA (1)...(19): siRNA sense strand
ucugcugucugugcauuua

SEQ ID NO: 1447266 - RNA, 19 nt, Homo sapiens
  misc_RNA (1)...(19): siRNA sense strand
uaaaugaaaugcccaaaac

SEQ ID NO: 1447267 - RNA, 19 nt, Homo sapiens
  misc_RNA (1)...(19): siRNA sense strand
gcguauuacuggaagagau

SEQ ID NO: 1447268 - RNA, 19 nt, Homo sapiens
  misc_RNA (1)...(19): siRNA sense strand
ugucauucaucaaaucuca

SEQ ID NO: 1447269 - RNA, 19 nt, Homo sapiens
  misc_RNA (1)...(19): siRNA sense strand
gaagacaaagugccaaagc

SEQ ID NO: 1447270 - RNA, 19 nt, Homo sapiens
  misc_RNA (1)...(19): siRNA sense strand
aaccaauguugcccucuuu

SEQ ID NO: 1447271 - RNA, 19 nt, Homo sapiens
  misc_RNA (1)...(19): siRNA sense strand
uugaguaccuuagaauaug

SEQ ID NO: 1447272 - RNA, 19 nt, Homo sapiens
  misc_RNA (1)...(19): siRNA sense strand
gaaugccacaacuuuauca

SEQ ID NO: 1447273 - RNA, 19 nt, Homo sapiens
  misc_RNA (1)...(19): siRNA sense strand
agaugaaugccacaacuuu

SEQ ID NO: 1447274 - RNA, 19 nt, Homo sapiens
  misc_RNA (1)...(19): siRNA sense strand
ugucgacuaucacuauuca

SEQ ID NO: 1447275 - RNA, 19 nt, Homo sapiens
  misc_RNA (1)...(19): siRNA sense strand
uuaaaguucuggcaaagac

SEQ ID NO: 1447276 - RNA, 19 nt, Homo sapiens
  misc_RNA (1)...(19): siRNA sense strand
ugacauggcgaucaagaca

SEQ ID NO: 1447277 - RNA, 19 nt, Homo sapiens
  misc_RNA (1)...(19): siRNA sense strand
ccaguccuuucucuuugaa

SEQ ID NO: 1447278 - RNA, 19 nt, Homo sapiens
  misc_RNA (1)...(19): siRNA sense strand
gcauucaaucccaugugua

SEQ ID NO: 1447279 - RNA, 19 nt, Homo sapiens
  misc_RNA (1)...(19): siRNA sense strand
caagaaacgaugagauggu

SEQ ID NO: 1447280 - RNA, 19 nt, Homo sapiens
  misc_RNA (1)...(19): siRNA sense strand
aaggcaagcauaaagauga

SEQ ID NO: 1447281 - RNA, 19 nt, Homo sapiens
  misc_RNA (1)...(19): siRNA sense strand
caucuuuguuggcucugaa

SEQ ID NO: 1447282 - RNA, 19 nt, Homo sapiens
  misc_RNA (1)...(19): siRNA sense strand
uaaaggcucggcugaacug

SEQ ID NO: 1447283 - RNA, 19 nt, Homo sapiens
  misc_RNA (1)...(19): siRNA sense strand
gaugggaagcuguauucug

SEQ ID NO: 1447284 - RNA, 19 nt, Homo sapiens
  misc_RNA (1)...(19): siRNA sense strand
gagaaaucgcugucgaaca

SEQ ID NO: 1447285 - RNA, 19 nt, Homo sapiens
  misc_RNA (1)...(19): siRNA sense strand
aggcaagcauaaagaugaa

SEQ ID NO: 1447286 - RNA, 19 nt, Homo sapiens
  misc_RNA (1)...(19): siRNA sense strand
cuacacagucaucuuuguu

SEQ ID NO: 1447287 - RNA, 19 nt, Homo sapiens
  misc_RNA (1)...(19): siRNA sense strand
ggacgcccuucaggcaaug

SEQ ID NO: 1447288 - RNA, 19 nt, Homo sapiens
  misc_RNA (1)...(19): siRNA sense strand
guucugcagucuauuacag

SEQ ID NO: 1447289 - RNA, 19 nt, Homo sapiens
  misc_RNA (1)...(19): siRNA sense strand
gacagcaguucccgaagac

SEQ ID NO: 1447290 - RNA, 19 nt, Homo sapiens
  misc_RNA (1)...(19): siRNA sense strand
guucugcugucugugcauu

SEQ ID NO: 1447291 - RNA, 19 nt, Homo sapiens
  misc_RNA (1)...(19): siRNA sense strand
ucacggaacuggagaagga

SEQ ID NO: 1447292 - RNA, 19 nt, Homo sapiens
  misc_RNA (1)...(19): siRNA sense strand
gcaccaacuucacuaccaa

SEQ ID NO: 1447293 - RNA, 19 nt, Homo sapiens
  misc_RNA (1)...(19): siRNA sense strand
gaccauaggauuacaacuu

SEQ ID NO: 1447294 - RNA, 19 nt, Homo sapiens
  misc_RNA (1)...(19): siRNA sense strand
ccaagcagcucacggaacu

SEQ ID NO: 1447295 - RNA, 19 nt, Homo sapiens
  misc_RNA (1)...(19): siRNA sense strand
ggaugaaagucaaaagaaa

SEQ ID NO: 1447296 - RNA, 19 nt, Homo sapiens
  misc_RNA (1)...(19): siRNA sense strand
accauaggauuacaacuuu

SEQ ID NO: 1447297 - RNA, 19 nt, Homo sapiens
  misc_RNA (1)...(19): siRNA sense strand
gagggucucuugcccaucu

SEQ ID NO: 1447298 - RNA, 19 nt, Homo sapiens
  misc_RNA (1)...(19): siRNA sense strand
gaacuucagugcgccuuac

SEQ ID NO: 1447299 - RNA, 19 nt, Homo sapiens
  misc_RNA (1)...(19): siRNA sense strand
cagggaaaguuggagagua

SEQ ID NO: 1447300 - RNA, 19 nt, Homo sapiens
  misc_RNA (1)...(19): siRNA sense strand
caacgagacccaagugaag

SEQ ID NO: 1447301 - RNA, 19 nt, Homo sapiens
  misc_RNA (1)...(19): siRNA sense strand
caaaagaaacccucccaaa

SEQ ID NO: 1447302 - RNA, 19 nt, Homo sapiens
  misc_RNA (1)...(19): siRNA sense strand
aaaagaaacccucccaaaa

SEQ ID NO: 1447303 - RNA, 19 nt, Homo sapiens
  misc_RNA (1)...(19): siRNA sense strand
ggacaaugcaagaaugaac

SEQ ID NO: 1447304 - RNA, 19 nt, Homo sapiens
  misc_RNA (1)...(19): siRNA sense strand
ggaguuccacuucaacaag

SEQ ID NO: 1447305 - RNA, 19 nt, Homo sapiens
  misc_RNA (1)...(19): siRNA sense strand
caaguugugguccaagcua

SEQ ID NO: 1447306 - RNA, 19 nt, Homo sapiens
  misc_RNA (1)...(19): siRNA sense strand
ucaacgagacccaagugaa

SEQ ID NO: 1447307 - RNA, 19 nt, Homo sapiens
  misc_RNA (1)...(19): siRNA sense strand
uuccagaaccgccgaauga

SEQ ID NO: 1447308 - RNA, 19 nt, Homo sapiens
  misc_RNA (1)...(19): siRNA sense strand
caagcuauggcucacagaa

SEQ ID NO: 1447309 - RNA, 19 nt, Homo sapiens
  misc_RNA (1)...(19): siRNA sense strand
gcggucagcgccaacaguu

SEQ ID NO: 1447310 - RNA, 19 nt, Homo sapiens
  misc_RNA (1)...(19): siRNA sense strand
cgacgaccgcuuccuagug

SEQ ID NO: 1447311 - RNA, 19 nt, Homo sapiens
  misc_RNA (1)...(19): siRNA sense strand
gcucaacgagacccaagug

SEQ ID NO: 1447312 - RNA, 19 nt, Homo sapiens
  misc_RNA (1)...(19): siRNA sense strand
ccauaggauuacaacuuuc

SEQ ID NO: 1447313 - RNA, 19 nt, Homo sapiens
  misc_RNA (1)...(19): siRNA sense strand
agggaaaguuggagaguac

SEQ ID NO: 1447314 - RNA, 19 nt, Homo sapiens
  misc_RNA (1)...(19): siRNA sense strand
uuacagccccuacgcguua

SEQ ID NO: 1447315 - RNA, 19 nt, Homo sapiens
  misc_RNA (1)...(19): siRNA sense strand
aagaaacccucccaaaaca

SEQ ID NO: 1447316 - RNA, 19 nt, Homo sapiens
  misc_RNA (1)...(19): siRNA sense strand
aaaagaaacgugagaagga

SEQ ID NO: 1447317 - RNA, 19 nt, Homo sapiens
  misc_RNA (1)...(19): siRNA sense strand
ccgcaucggagacaucuuc

SEQ ID NO: 1447318 - RNA, 19 nt, Homo sapiens
  misc_RNA (1)...(19): siRNA sense strand
cgacgagaaggccgaggaa

SEQ ID NO: 1447319 - RNA, 19 nt, Homo sapiens
  misc_RNA (1)...(19): siRNA sense strand
ccagaaccgccgaaugaag

SEQ ID NO: 1447320 - RNA, 19 nt, Homo sapiens
  misc_RNA (1)...(19): siRNA sense strand
augcaagaaugaacuccuu

SEQ ID NO: 1447321 - RNA, 19 nt, Homo sapiens
  misc_RNA (1)...(19): siRNA sense strand
gaccauaggauuacaacuu

SEQ ID NO: 1447322 - RNA, 19 nt, Homo sapiens
  misc_RNA (1)...(19): siRNA sense strand
accauaggauuacaacuuu

SEQ ID NO: 1447323 - RNA, 19 nt, Homo sapiens
  misc_RNA (1)...(19): siRNA sense strand
gaacuucagugcgccuuac

SEQ ID NO: 1447324 - RNA, 19 nt, Homo sapiens
  misc_RNA (1)...(19): siRNA sense strand
caaguugugguccaagcua

SEQ ID NO: 1447325 - RNA, 19 nt, Homo sapiens
  misc_RNA (1)...(19): siRNA sense strand
caagcuauggcucacagaa

SEQ ID NO: 1447326 - RNA, 19 nt, Homo sapiens
  misc_RNA (1)...(19): siRNA sense strand
gcggucagcgccaacaguu

SEQ ID NO: 1447327 - RNA, 19 nt, Homo sapiens
  misc_RNA (1)...(19): siRNA sense strand
cgacgaccgcuuccuagug

SEQ ID NO: 1447328 - RNA, 19 nt, Homo sapiens
  misc_RNA (1)...(19): siRNA sense strand
ccauaggauuacaacuuuc

SEQ ID NO: 1447329 - RNA, 19 nt, Homo sapiens
  misc_RNA (1)...(19): siRNA sense strand
uuacagccccuacgcguua

SEQ ID NO: 1447330 - RNA, 19 nt, Homo sapiens
  misc_RNA (1)...(19): siRNA sense strand
ccgcaucggagacaucuuc

SEQ ID NO: 1447331 - RNA, 19 nt, Homo sapiens
  misc_RNA (1)...(19): siRNA sense strand
gaaaugugguacaaucaua

SEQ ID NO: 1447332 - RNA, 19 nt, Homo sapiens
  misc_RNA (1)...(19): siRNA sense strand
caacuuugcuccuguaauu

SEQ ID NO: 1447333 - RNA, 19 nt, Homo sapiens
  misc_RNA (1)...(19): siRNA sense strand
gaagaaaugugguacaauc

SEQ ID NO: 1447334 - RNA, 19 nt, Homo sapiens
  misc_RNA (1)...(19): siRNA sense strand
aaggauaucucacgaauuu

SEQ ID NO: 1447335 - RNA, 19 nt, Homo sapiens
  misc_RNA (1)...(19): siRNA sense strand
ggauggagaugauguaaga

SEQ ID NO: 1447336 - RNA, 19 nt, Homo sapiens
  misc_RNA (1)...(19): siRNA sense strand
uggaagaacugaaguaauu

SEQ ID NO: 1447337 - RNA, 19 nt, Homo sapiens
  misc_RNA (1)...(19): siRNA sense strand
gaaaguuuauucuggacua

SEQ ID NO: 1447338 - RNA, 19 nt, Homo sapiens
  misc_RNA (1)...(19): siRNA sense strand
gaaaucuucuugacagaga

SEQ ID NO: 1447339 - RNA, 19 nt, Homo sapiens
  misc_RNA (1)...(19): siRNA sense strand
ggaaggauaucucacgaau

SEQ ID NO: 1447340 - RNA, 19 nt, Homo sapiens
  misc_RNA (1)...(19): siRNA sense strand
ucugaaaucuguacaacua

SEQ ID NO: 1447341 - RNA, 19 nt, Homo sapiens
  misc_RNA (1)...(19): siRNA sense strand
gcagaggaauuaaacuguu

SEQ ID NO: 1447342 - RNA, 19 nt, Homo sapiens
  misc_RNA (1)...(19): siRNA sense strand
acaaggaguuggaaauaaa

SEQ ID NO: 1447343 - RNA, 19 nt, Homo sapiens
  misc_RNA (1)...(19): siRNA sense strand
aaagagacauugugcaguu

SEQ ID NO: 1447344 - RNA, 19 nt, Homo sapiens
  misc_RNA (1)...(19): siRNA sense strand
ugacagaacaaucaaagua

SEQ ID NO: 1447345 - RNA, 19 nt, Homo sapiens
  misc_RNA (1)...(19): siRNA sense strand
guuacagacucaaauauga

SEQ ID NO: 1447346 - RNA, 19 nt, Homo sapiens
  misc_RNA (1)...(19): siRNA sense strand
guacaaggaguuggaaaua

SEQ ID NO: 1447347 - RNA, 19 nt, Homo sapiens
  misc_RNA (1)...(19): siRNA sense strand
gggaagaaaugugguacaa

SEQ ID NO: 1447348 - RNA, 19 nt, Homo sapiens
  misc_RNA (1)...(19): siRNA sense strand
ggagaaauuguucaagauu

SEQ ID NO: 1447349 - RNA, 19 nt, Homo sapiens
  misc_RNA (1)...(19): siRNA sense strand
cgaacaaauuggacaagaa

SEQ ID NO: 1447350 - RNA, 19 nt, Homo sapiens
  misc_RNA (1)...(19): siRNA sense strand
gaucucagucagagcauua

SEQ ID NO: 1447351 - RNA, 19 nt, Homo sapiens
  misc_RNA (1)...(19): siRNA sense strand
caguuucucuccuauauga

SEQ ID NO: 1447352 - RNA, 19 nt, Homo sapiens
  misc_RNA (1)...(19): siRNA sense strand
ugagaucccugagcaguuu

SEQ ID NO: 1447353 - RNA, 19 nt, Homo sapiens
  misc_RNA (1)...(19): siRNA sense strand
gggauuauauugacagaag

SEQ ID NO: 1447354 - RNA, 19 nt, Homo sapiens
  misc_RNA (1)...(19): siRNA sense strand
gaaaauaugcugaaagaga

SEQ ID NO: 1447355 - RNA, 19 nt, Homo sapiens
  misc_RNA (1)...(19): siRNA sense strand
gaagaacugaaguaauuga

SEQ ID NO: 1447356 - RNA, 19 nt, Homo sapiens
  misc_RNA (1)...(19): siRNA sense strand
cgaauuggauggagaugau

SEQ ID NO: 1447357 - RNA, 19 nt, Homo sapiens
  misc_RNA (1)...(19): siRNA sense strand
gaacaaauuggacaagaag

SEQ ID NO: 1447358 - RNA, 19 nt, Homo sapiens
  misc_RNA (1)...(19): siRNA sense strand
gggagaaauuguucaagau

SEQ ID NO: 1447359 - RNA, 19 nt, Homo sapiens
  misc_RNA (1)...(19): siRNA sense strand
ucacgaauuugcuuugaau

SEQ ID NO: 1447360 - RNA, 19 nt, Homo sapiens
  misc_RNA (1)...(19): siRNA sense strand
ucacaguggcuauugauuu

SEQ ID NO: 1447361 - RNA, 19 nt, Homo sapiens
  misc_RNA (1)...(19): siRNA sense strand
ggaccgagauggaagucau

SEQ ID NO: 1447362 - RNA, 19 nt, Homo sapiens
  misc_RNA (1)...(19): siRNA sense strand
cuacaugaauccuuaccaa

SEQ ID NO: 1447363 - RNA, 19 nt, Homo sapiens
  misc_RNA (1)...(19): siRNA sense strand
ccacuucccuccacuacau

SEQ ID NO: 1447364 - RNA, 19 nt, Homo sapiens
  misc_RNA (1)...(19): siRNA sense strand
gagauggaagucaugauuu

SEQ ID NO: 1447365 - RNA, 19 nt, Homo sapiens
  misc_RNA (1)...(19): siRNA sense strand
uacaaggaguuggaaauaa

SEQ ID NO: 1447366 - RNA, 19 nt, Homo sapiens
  misc_RNA (1)...(19): siRNA sense strand
aaggauggcucccaguauu

SEQ ID NO: 1447367 - RNA, 19 nt, Homo sapiens
  misc_RNA (1)...(19): siRNA sense strand
caacugaaugccuauggua

SEQ ID NO: 1447368 - RNA, 19 nt, Homo sapiens
  misc_RNA (1)...(19): siRNA sense strand
uaaagaauggagagaguuu

SEQ ID NO: 1447369 - RNA, 19 nt, Homo sapiens
  misc_RNA (1)...(19): siRNA sense strand
gagagaaucuucguuuuga

SEQ ID NO: 1447370 - RNA, 19 nt, Homo sapiens
  misc_RNA (1)...(19): siRNA sense strand
cagcagaauuugaugcaau

SEQ ID NO: 1447371 - RNA, 19 nt, Homo sapiens
  misc_RNA (1)...(19): siRNA sense strand
uaaaggauggcucccagua

SEQ ID NO: 1447372 - RNA, 19 nt, Homo sapiens
  misc_RNA (1)...(19): siRNA sense strand
ugucuuauauguacaagga

SEQ ID NO: 1447373 - RNA, 19 nt, Homo sapiens
  misc_RNA (1)...(19): siRNA sense strand
gauggcaguuuuacaauuu

SEQ ID NO: 1447374 - RNA, 19 nt, Homo sapiens
  misc_RNA (1)...(19): siRNA sense strand
gcgaacaaauuggacaaga

SEQ ID NO: 1447375 - RNA, 19 nt, Homo sapiens
  misc_RNA (1)...(19): siRNA sense strand
ggagagaguuuggaagaac

SEQ ID NO: 1447376 - RNA, 19 nt, Homo sapiens
  misc_RNA (1)...(19): siRNA sense strand
guuuccagcucuaggauuu

SEQ ID NO: 1447377 - RNA, 19 nt, Homo sapiens
  misc_RNA (1)...(19): siRNA sense strand
ggagggacgcaaaucaauu

SEQ ID NO: 1447378 - RNA, 19 nt, Homo sapiens
  misc_RNA (1)...(19): siRNA sense strand
cagaggaauuaaacuguug

SEQ ID NO: 1447379 - RNA, 19 nt, Homo sapiens
  misc_RNA (1)...(19): siRNA sense strand
ucagauccuuuccuuguau

SEQ ID NO: 1447380 - RNA, 19 nt, Homo sapiens
  misc_RNA (1)...(19): siRNA sense strand
cuaaggaguccauaguuaa

SEQ ID NO: 1447381 - RNA, 19 nt, Homo sapiens
  misc_RNA (1)...(19): siRNA sense strand
gcagucacaauucaacgua

SEQ ID NO: 1447382 - RNA, 19 nt, Homo sapiens
  misc_RNA (1)...(19): siRNA sense strand
ugggagaaauuguucaaga

SEQ ID NO: 1447383 - RNA, 19 nt, Homo sapiens
  misc_RNA (1)...(19): siRNA sense strand
ugacuuguaugauguugau

SEQ ID NO: 1447384 - RNA, 19 nt, Homo sapiens
  misc_RNA (1)...(19): siRNA sense strand
agauaugcuucuucuguaa

SEQ ID NO: 1447385 - RNA, 19 nt, Homo sapiens
  misc_RNA (1)...(19): siRNA sense strand
gaagauggcaguuuuacaa

SEQ ID NO: 1447386 - RNA, 19 nt, Homo sapiens
  misc_RNA (1)...(19): siRNA sense strand
gaauggagagaguuuggaa

SEQ ID NO: 1447387 - RNA, 19 nt, Homo sapiens
  misc_RNA (1)...(19): siRNA sense strand
guaaugaagauggcaguuu

SEQ ID NO: 1447388 - RNA, 19 nt, Homo sapiens
  misc_RNA (1)...(19): siRNA sense strand
gaaauaaagaauggagaga

SEQ ID NO: 1447389 - RNA, 19 nt, Homo sapiens
  misc_RNA (1)...(19): siRNA sense strand
uaauggagacuaugacaga

SEQ ID NO: 1447390 - RNA, 19 nt, Homo sapiens
  misc_RNA (1)...(19): siRNA sense strand
gaaguuucauuccuugacu

SEQ ID NO: 1447391 - RNA, 19 nt, Homo sapiens
  misc_RNA (1)...(19): siRNA sense strand
cgagauggaagucaugauu

SEQ ID NO: 1447392 - RNA, 19 nt, Homo sapiens
  misc_RNA (1)...(19): siRNA sense strand
caaucaaaguagaggugua

SEQ ID NO: 1447393 - RNA, 19 nt, Homo sapiens
  misc_RNA (1)...(19): siRNA sense strand
acagaacaaucaaaguaga

SEQ ID NO: 1447394 - RNA, 19 nt, Homo sapiens
  misc_RNA (1)...(19): siRNA sense strand
ugauccaauuugugucuua

SEQ ID NO: 1447395 - RNA, 19 nt, Homo sapiens
  misc_RNA (1)...(19): siRNA sense strand
gaaaccacauacugagcau

SEQ ID NO: 1447396 - RNA, 19 nt, Homo sapiens
  misc_RNA (1)...(19): siRNA sense strand
uccacuacaugaauccuua

SEQ ID NO: 1447397 - RNA, 19 nt, Homo sapiens
  misc_RNA (1)...(19): siRNA sense strand
ggacuucuuuggaaaauca

SEQ ID NO: 1447398 - RNA, 19 nt, Homo sapiens
  misc_RNA (1)...(19): siRNA sense strand
gaaggauaucucacgaauu

SEQ ID NO: 1447399 - RNA, 19 nt, Homo sapiens
  misc_RNA (1)...(19): siRNA sense strand
agucacaauucaacguaua

SEQ ID NO: 1447400 - RNA, 19 nt, Homo sapiens
  misc_RNA (1)...(19): siRNA sense strand
cuagagggcagucacaauu

SEQ ID NO: 1447401 - RNA, 19 nt, Homo sapiens
  misc_RNA (1)...(19): siRNA sense strand
gauccaauuugugucuuau

SEQ ID NO: 1447402 - RNA, 19 nt, Homo sapiens
  misc_RNA (1)...(19): siRNA sense strand
uaaugaagauggcaguuuu

SEQ ID NO: 1447403 - RNA, 19 nt, Homo sapiens
  misc_RNA (1)...(19): siRNA sense strand
uauaugagguggugaaucc

SEQ ID NO: 1447404 - RNA, 19 nt, Homo sapiens
  misc_RNA (1)...(19): siRNA sense strand
gagcaguuucucuccuaua

SEQ ID NO: 1447405 - RNA, 19 nt, Homo sapiens
  misc_RNA (1)...(19): siRNA sense strand
gauaugcuucuucuguaaa

SEQ ID NO: 1447406 - RNA, 19 nt, Homo sapiens
  misc_RNA (1)...(19): siRNA sense strand
gcucuaggauuuggugcaa

SEQ ID NO: 1447407 - RNA, 19 nt, Homo sapiens
  misc_RNA (1)...(19): siRNA sense strand
gagaauuuacaacaagcua

SEQ ID NO: 1447408 - RNA, 19 nt, Homo sapiens
  misc_RNA (1)...(19): siRNA sense strand
uagauuggcuaaagauguc

SEQ ID NO: 1447409 - RNA, 19 nt, Homo sapiens
  misc_RNA (1)...(19): siRNA sense strand
ccuaugguauggcacuaaa

SEQ ID NO: 1447410 - RNA, 19 nt, Homo sapiens
  misc_RNA (1)...(19): siRNA sense strand
caugaauccuuaccaacug

SEQ ID NO: 1447411 - RNA, 19 nt, Homo sapiens
  misc_RNA (1)...(19): siRNA sense strand
uuuacucucuuucuuggua

SEQ ID NO: 1447412 - RNA, 19 nt, Homo sapiens
  misc_RNA (1)...(19): siRNA sense strand
aauaaagaauggagagagu

SEQ ID NO: 1447413 - RNA, 19 nt, Homo sapiens
  misc_RNA (1)...(19): siRNA sense strand
uaugagagcccgaggaauc

SEQ ID NO: 1447414 - RNA, 19 nt, Homo sapiens
  misc_RNA (1)...(19): siRNA sense strand
agauggaagucaugauuuc

SEQ ID NO: 1447415 - RNA, 19 nt, Homo sapiens
  misc_RNA (1)...(19): siRNA sense strand
ggaagaacugaaguaauug

SEQ ID NO: 1447416 - RNA, 19 nt, Homo sapiens
  misc_RNA (1)...(19): siRNA sense strand
ggaguuggaaauaaagaau

SEQ ID NO: 1447417 - RNA, 19 nt, Homo sapiens
  misc_RNA (1)...(19): siRNA sense strand
caccaacuuugcuccugua

SEQ ID NO: 1447418 - RNA, 19 nt, Homo sapiens
  misc_RNA (1)...(19): siRNA sense strand
uauaugggcccaccaacuu

SEQ ID NO: 1447419 - RNA, 19 nt, Homo sapiens
  misc_RNA (1)...(19): siRNA sense strand
ucagucagagcauuaugua

SEQ ID NO: 1447420 - RNA, 19 nt, Homo sapiens
  misc_RNA (1)...(19): siRNA sense strand
aaucagauccuuuccuugu

SEQ ID NO: 1447421 - RNA, 19 nt, Homo sapiens
  misc_RNA (1)...(19): siRNA sense strand
caacuuauccaaacaugac

SEQ ID NO: 1447422 - RNA, 19 nt, Homo sapiens
  misc_RNA (1)...(19): siRNA sense strand
gagacauugugcaguuugu

SEQ ID NO: 1447423 - RNA, 19 nt, Homo sapiens
  misc_RNA (1)...(19): siRNA sense strand
cagauauggcccagacuaa

SEQ ID NO: 1447424 - RNA, 19 nt, Homo sapiens
  misc_RNA (1)...(19): siRNA sense strand
ugugguacaaucauacuua

SEQ ID NO: 1447425 - RNA, 19 nt, Homo sapiens
  misc_RNA (1)...(19): siRNA sense strand
ucaaagagccccaacuuau

SEQ ID NO: 1447426 - RNA, 19 nt, Homo sapiens
  misc_RNA (1)...(19): siRNA sense strand
guuaaugccucaaaacuuc

SEQ ID NO: 1447427 - RNA, 19 nt, Homo sapiens
  misc_RNA (1)...(19): siRNA sense strand
ucaaaguagagguguauga

SEQ ID NO: 1447428 - RNA, 19 nt, Homo sapiens
  misc_RNA (1)...(19): siRNA sense strand
gacagaacaaucaaaguag

SEQ ID NO: 1447429 - RNA, 19 nt, Homo sapiens
  misc_RNA (1)...(19): siRNA sense strand
ucagauauggcccagacua

SEQ ID NO: 1447430 - RNA, 19 nt, Homo sapiens
  misc_RNA (1)...(19): siRNA sense strand
uaaggaguccauaguuaau

SEQ ID NO: 1447431 - RNA, 19 nt, Homo sapiens
  misc_RNA (1)...(19): siRNA sense strand
ucauggaccucuucccuua

SEQ ID NO: 1447432 - RNA, 19 nt, Homo sapiens
  misc_RNA (1)...(19): siRNA sense strand
ucaacaaccuaaugucaga

SEQ ID NO: 1447433 - RNA, 19 nt, Homo sapiens
  misc_RNA (1)...(19): siRNA sense strand
cagggaacauguuugagaa

SEQ ID NO: 1447434 - RNA, 19 nt, Homo sapiens
  misc_RNA (1)...(19): siRNA sense strand
ccucuaagcucucccuauc

SEQ ID NO: 1447435 - RNA, 19 nt, Homo sapiens
  misc_RNA (1)...(19): siRNA sense strand
gggaacauguuugagaaug

SEQ ID NO: 1447436 - RNA, 19 nt, Homo sapiens
  misc_RNA (1)...(19): siRNA sense strand
gcucagggaacauguuuga

SEQ ID NO: 1447437 - RNA, 19 nt, Homo sapiens
  misc_RNA (1)...(19): siRNA sense strand
ggaacauguuugagaaugg

SEQ ID NO: 1447438 - RNA, 19 nt, Homo sapiens
  misc_RNA (1)...(19): siRNA sense strand
augcugaccuugagugaaa

SEQ ID NO: 1447439 - RNA, 19 nt, Homo sapiens
  misc_RNA (1)...(19): siRNA sense strand
gaccuugagugaaaucuac

SEQ ID NO: 1447440 - RNA, 19 nt, Homo sapiens
  misc_RNA (1)...(19): siRNA sense strand
gccacucgcugucuuucaa

SEQ ID NO: 1447441 - RNA, 19 nt, Homo sapiens
  misc_RNA (1)...(19): siRNA sense strand
uauucccgcucuuugcuua

SEQ ID NO: 1447442 - RNA, 19 nt, Homo sapiens
  misc_RNA (1)...(19): siRNA sense strand
gaaaucuaccaguggauca

SEQ ID NO: 1447443 - RNA, 19 nt, Homo sapiens
  misc_RNA (1)...(19): siRNA sense strand
caucaacaaccuaauguca

SEQ ID NO: 1447444 - RNA, 19 nt, Homo sapiens
  misc_RNA (1)...(19): siRNA sense strand
ccaagccaccguauuccua

SEQ ID NO: 1447445 - RNA, 19 nt, Homo sapiens
  misc_RNA (1)...(19): siRNA sense strand
ucagggaacauguuugaga

SEQ ID NO: 1447446 - RNA, 19 nt, Homo sapiens
  misc_RNA (1)...(19): siRNA sense strand
caacuucaaccacccuuuc

SEQ ID NO: 1447447 - RNA, 19 nt, Homo sapiens
  misc_RNA (1)...(19): siRNA sense strand
uccuauaucucacucauca

SEQ ID NO: 1447448 - RNA, 19 nt, Homo sapiens
  misc_RNA (1)...(19): siRNA sense strand
cagcucagggaacauguuu

SEQ ID NO: 1447449 - RNA, 19 nt, Homo sapiens
  misc_RNA (1)...(19): siRNA sense strand
gacaccagcaccucccaaa

SEQ ID NO: 1447450 - RNA, 19 nt, Homo sapiens
  misc_RNA (1)...(19): siRNA sense strand
caagccaccguauuccuau

SEQ ID NO: 1447451 - RNA, 19 nt, Homo sapiens
  misc_RNA (1)...(19): siRNA sense strand
aagccaccguauuccuaua

SEQ ID NO: 1447452 - RNA, 19 nt, Homo sapiens
  misc_RNA (1)...(19): siRNA sense strand
aaccuaaugucagaacaga

SEQ ID NO: 1447453 - RNA, 19 nt, Homo sapiens
  misc_RNA (1)...(19): siRNA sense strand
cgggcaagaugcugaccuu

SEQ ID NO: 1447454 - RNA, 19 nt, Homo sapiens
  misc_RNA (1)...(19): siRNA sense strand
ccaccguauuccuauaucu

SEQ ID NO: 1447455 - RNA, 19 nt, Homo sapiens
  misc_RNA (1)...(19): siRNA sense strand
gacccugaauccucuaagc

SEQ ID NO: 1447456 - RNA, 19 nt, Homo sapiens
  misc_RNA (1)...(19): siRNA sense strand
ggaccucuucccuuacuac

SEQ ID NO: 1447457 - RNA, 19 nt, Homo sapiens
  misc_RNA (1)...(19): siRNA sense strand
ccaaggacggcuggguuua

SEQ ID NO: 1447458 - RNA, 19 nt, Homo sapiens
  misc_RNA (1)...(19): siRNA sense strand
ggacggcuggguuuacuac

SEQ ID NO: 1447459 - RNA, 19 nt, Homo sapiens
  misc_RNA (1)...(19): siRNA sense strand
gggaggagagaaccaccaa

SEQ ID NO: 1447460 - RNA, 19 nt, Homo sapiens
  misc_RNA (1)...(19): siRNA sense strand
ccaaggacggcuggguuua

SEQ ID NO: 1447461 - RNA, 19 nt, Homo sapiens
  misc_RNA (1)...(19): siRNA sense strand
ggacggcuggguuuacuac

SEQ ID NO: 1447462 - RNA, 19 nt, Homo sapiens
  misc_RNA (1)...(19): siRNA sense strand
gggaggagagaaccaccaa

SEQ ID NO: 1447463 - RNA, 19 nt, Homo sapiens
  misc_RNA (1)...(19): siRNA sense strand
ccaaggacggcuggguuua

SEQ ID NO: 1447464 - RNA, 19 nt, Homo sapiens
  misc_RNA (1)...(19): siRNA sense strand
ggacggcuggguuuacuac

SEQ ID NO: 1447465 - RNA, 19 nt, Homo sapiens
  misc_RNA (1)...(19): siRNA sense strand
gggaggagagaaccaccaa

SEQ ID NO: 1447466 - RNA, 19 nt, Homo sapiens
  misc_RNA (1)...(19): siRNA sense strand
ccaaggacggcuggguuua

SEQ ID NO: 1447467 - RNA, 19 nt, Homo sapiens
  misc_RNA (1)...(19): siRNA sense strand
ggacggcuggguuuacuac

SEQ ID NO: 1447468 - RNA, 19 nt, Homo sapiens
  misc_RNA (1)...(19): siRNA sense strand
gggaggagagaaccaccaa

SEQ ID NO: 1447469 - RNA, 19 nt, Homo sapiens
  misc_RNA (1)...(19): siRNA sense strand
ccaaggacggcuggguuua

SEQ ID NO: 1447470 - RNA, 19 nt, Homo sapiens
  misc_RNA (1)...(19): siRNA sense strand
ggacggcuggguuuacuac

SEQ ID NO: 1447471 - RNA, 19 nt, Homo sapiens
  misc_RNA (1)...(19): siRNA sense strand
gggaggagagaaccaccaa

SEQ ID NO: 1447472 - RNA, 19 nt, Homo sapiens
  misc_RNA (1)...(19): siRNA sense strand
ccaaggacggcuggguuua

SEQ ID NO: 1447473 - RNA, 19 nt, Homo sapiens
  misc_RNA (1)...(19): siRNA sense strand
ggacggcuggguuuacuac

SEQ ID NO: 1447474 - RNA, 19 nt, Homo sapiens
  misc_RNA (1)...(19): siRNA sense strand
gggaggagagaaccaccaa

SEQ ID NO: 1447475 - RNA, 19 nt, Homo sapiens
  misc_RNA (1)...(19): siRNA sense strand
ccaaggacggcuggguuua

SEQ ID NO: 1447476 - RNA, 19 nt, Homo sapiens
  misc_RNA (1)...(19): siRNA sense strand
ggacggcuggguuuacuac

SEQ ID NO: 1447477 - RNA, 19 nt, Homo sapiens
  misc_RNA (1)...(19): siRNA sense strand
gggaggagagaaccaccaa

SEQ ID NO: 1447478 - RNA, 19 nt, Homo sapiens
  misc_RNA (1)...(19): siRNA sense strand
gaaguggacugaauguuua

SEQ ID NO: 1447479 - RNA, 19 nt, Homo sapiens
  misc_RNA (1)...(19): siRNA sense strand
ggacagaaauuacuucaau

SEQ ID NO: 1447480 - RNA, 19 nt, Homo sapiens
  misc_RNA (1)...(19): siRNA sense strand
ggacaaauguguguugaau

SEQ ID NO: 1447481 - RNA, 19 nt, Homo sapiens
  misc_RNA (1)...(19): siRNA sense strand
ggaaguggacugaauguuu

SEQ ID NO: 1447482 - RNA, 19 nt, Homo sapiens
  misc_RNA (1)...(19): siRNA sense strand
gcauauacauggacaaauc

SEQ ID NO: 1447483 - RNA, 19 nt, Homo sapiens
  misc_RNA (1)...(19): siRNA sense strand
caagacagacugcagguua

SEQ ID NO: 1447484 - RNA, 19 nt, Homo sapiens
  misc_RNA (1)...(19): siRNA sense strand
gcacaggacuggauuuacu

SEQ ID NO: 1447485 - RNA, 19 nt, Homo sapiens
  misc_RNA (1)...(19): siRNA sense strand
ucaauuugccugacauuua

SEQ ID NO: 1447486 - RNA, 19 nt, Homo sapiens
  misc_RNA (1)...(19): siRNA sense strand
gaaaguguauucauuaucc

SEQ ID NO: 1447487 - RNA, 19 nt, Homo sapiens
  misc_RNA (1)...(19): siRNA sense strand
gcugaaggauuaaacaaug

SEQ ID NO: 1447488 - RNA, 19 nt, Homo sapiens
  misc_RNA (1)...(19): siRNA sense strand
caauuugccugacauuuau

SEQ ID NO: 1447489 - RNA, 19 nt, Homo sapiens
  misc_RNA (1)...(19): siRNA sense strand
agaaaugacuucaguaucu

SEQ ID NO: 1447490 - RNA, 19 nt, Homo sapiens
  misc_RNA (1)...(19): siRNA sense strand
ugaaugaaguagacaaaga

SEQ ID NO: 1447491 - RNA, 19 nt, Homo sapiens
  misc_RNA (1)...(19): siRNA sense strand
gcgccuaacugaauacaug

SEQ ID NO: 1447492 - RNA, 19 nt, Homo sapiens
  misc_RNA (1)...(19): siRNA sense strand
ggaauuacacaaaguugaa

SEQ ID NO: 1447493 - RNA, 19 nt, Homo sapiens
  misc_RNA (1)...(19): siRNA sense strand
acaaagacauggagagugu

SEQ ID NO: 1447494 - RNA, 19 nt, Homo sapiens
  misc_RNA (1)...(19): siRNA sense strand
gaagcucugugcccucuau

SEQ ID NO: 1447495 - RNA, 19 nt, Homo sapiens
  misc_RNA (1)...(19): siRNA sense strand
gagcacaggacuggauuua

SEQ ID NO: 1447496 - RNA, 19 nt, Homo sapiens
  misc_RNA (1)...(19): siRNA sense strand
gaaaugacuucaguaucug

SEQ ID NO: 1447497 - RNA, 19 nt, Homo sapiens
  misc_RNA (1)...(19): siRNA sense strand
gaaaggaugcaguguguag

SEQ ID NO: 1447498 - RNA, 19 nt, Homo sapiens
  misc_RNA (1)...(19): siRNA sense strand
ccaauggcaucaagaaaca

SEQ ID NO: 1447499 - RNA, 19 nt, Homo sapiens
  misc_RNA (1)...(19): siRNA sense strand
gaaggcuacauucaagaua

SEQ ID NO: 1447500 - RNA, 19 nt, Homo sapiens
  misc_RNA (1)...(19): siRNA sense strand
gaauguuuauacaguguug

SEQ ID NO: 1447501 - RNA, 19 nt, Homo sapiens
  misc_RNA (1)...(19): siRNA sense strand
auacuuaccucauccacaa

SEQ ID NO: 1447502 - RNA, 19 nt, Homo sapiens
  misc_RNA (1)...(19): siRNA sense strand
gcccagauguauaauuuua

SEQ ID NO: 1447503 - RNA, 19 nt, Homo sapiens
  misc_RNA (1)...(19): siRNA sense strand
gaagaacagcaaacagaug

SEQ ID NO: 1447504 - RNA, 19 nt, Homo sapiens
  misc_RNA (1)...(19): siRNA sense strand
cugcccagauguauaauuu

SEQ ID NO: 1447505 - RNA, 19 nt, Homo sapiens
  misc_RNA (1)...(19): siRNA sense strand
acaaagagcagcccgcaaa

SEQ ID NO: 1447506 - RNA, 19 nt, Homo sapiens
  misc_RNA (1)...(19): siRNA sense strand
agagauagaucaagcuagu

SEQ ID NO: 1447507 - RNA, 19 nt, Homo sapiens
  misc_RNA (1)...(19): siRNA sense strand
ggagagauagaucaagcua

SEQ ID NO: 1447508 - RNA, 19 nt, Homo sapiens
  misc_RNA (1)...(19): siRNA sense strand
cgaugccaguuauauuuaa

SEQ ID NO: 1447509 - RNA, 19 nt, Homo sapiens
  misc_RNA (1)...(19): siRNA sense strand
cuacagcgccuaacugaau

SEQ ID NO: 1447510 - RNA, 19 nt, Homo sapiens
  misc_RNA (1)...(19): siRNA sense strand
gaacacaaugaggcauaua

SEQ ID NO: 1447511 - RNA, 19 nt, Homo sapiens
  misc_RNA (1)...(19): siRNA sense strand
gaaaugccagugccggauu

SEQ ID NO: 1447512 - RNA, 19 nt, Homo sapiens
  misc_RNA (1)...(19): siRNA sense strand
aaggcuacauucaagauaa

SEQ ID NO: 1447513 - RNA, 19 nt, Homo sapiens
  misc_RNA (1)...(19): siRNA sense strand
agaucaagcuagugaagaa

SEQ ID NO: 1447514 - RNA, 19 nt, Homo sapiens
  misc_RNA (1)...(19): siRNA sense strand
ccagaaaugacuucaguau

SEQ ID NO: 1447515 - RNA, 19 nt, Homo sapiens
  misc_RNA (1)...(19): siRNA sense strand
gaaaauguauuggaaugga

SEQ ID NO: 1447516 - RNA, 19 nt, Homo sapiens
  misc_RNA (1)...(19): siRNA sense strand
guauggcaauguggaaauu

SEQ ID NO: 1447517 - RNA, 19 nt, Homo sapiens
  misc_RNA (1)...(19): siRNA sense strand
uuaaugagccucugagcuu

SEQ ID NO: 1447518 - RNA, 19 nt, Homo sapiens
  misc_RNA (1)...(19): siRNA sense strand
ugaaguagacaaagacaug

SEQ ID NO: 1447519 - RNA, 19 nt, Homo sapiens
  misc_RNA (1)...(19): siRNA sense strand
caaguuugccuucuccuau

SEQ ID NO: 1447520 - RNA, 19 nt, Homo sapiens
  misc_RNA (1)...(19): siRNA sense strand
caaaguugaaggcuacauu

SEQ ID NO: 1447521 - RNA, 19 nt, Homo sapiens
  misc_RNA (1)...(19): siRNA sense strand
uggaaaggaugcagugugu

SEQ ID NO: 1447522 - RNA, 19 nt, Homo sapiens
  misc_RNA (1)...(19): siRNA sense strand
ggagcauacuuaccucauc

SEQ ID NO: 1447523 - RNA, 19 nt, Homo sapiens
  misc_RNA (1)...(19): siRNA sense strand
cacgaugccaguuauauuu

SEQ ID NO: 1447524 - RNA, 19 nt, Homo sapiens
  misc_RNA (1)...(19): siRNA sense strand
gaagaguguagaagcagaa

SEQ ID NO: 1447525 - RNA, 19 nt, Homo sapiens
  misc_RNA (1)...(19): siRNA sense strand
gcuacugggacagaaauua

SEQ ID NO: 1447526 - RNA, 19 nt, Homo sapiens
  misc_RNA (1)...(19): siRNA sense strand
ggcaauguggaaauuauaa

SEQ ID NO: 1447527 - RNA, 19 nt, Homo sapiens
  misc_RNA (1)...(19): siRNA sense strand
gaagcagaacccaaaggaa

SEQ ID NO: 1447528 - RNA, 19 nt, Homo sapiens
  misc_RNA (1)...(19): siRNA sense strand
gaucacgaugccaguuaua

SEQ ID NO: 1447529 - RNA, 19 nt, Homo sapiens
  misc_RNA (1)...(19): siRNA sense strand
uaucugcuguugcuucuca

SEQ ID NO: 1447530 - RNA, 19 nt, Homo sapiens
  misc_RNA (1)...(19): siRNA sense strand
cauggaaaauggagagaua

SEQ ID NO: 1447531 - RNA, 19 nt, Homo sapiens
  misc_RNA (1)...(19): siRNA sense strand
aagaagaacagcaaacaga

SEQ ID NO: 1447532 - RNA, 19 nt, Homo sapiens
  misc_RNA (1)...(19): siRNA sense strand
gaacccaaaggaaccauca

SEQ ID NO: 1447533 - RNA, 19 nt, Homo sapiens
  misc_RNA (1)...(19): siRNA sense strand
caagaaacacagaacaagu

SEQ ID NO: 1447534 - RNA, 19 nt, Homo sapiens
  misc_RNA (1)...(19): siRNA sense strand
uacagcgccuaacugaaua

SEQ ID NO: 1447535 - RNA, 19 nt, Homo sapiens
  misc_RNA (1)...(19): siRNA sense strand
uaugggaaguggacugaau

SEQ ID NO: 1447536 - RNA, 19 nt, Homo sapiens
  misc_RNA (1)...(19): siRNA sense strand
ggagcuccuugaacacaau

SEQ ID NO: 1447537 - RNA, 19 nt, Homo sapiens
  misc_RNA (1)...(19): siRNA sense strand
uuucauggcucuaucuauc

SEQ ID NO: 1447538 - RNA, 19 nt, Homo sapiens
  misc_RNA (1)...(19): siRNA sense strand
ucacgaugccaguuauauu

SEQ ID NO: 1447539 - RNA, 19 nt, Homo sapiens
  misc_RNA (1)...(19): siRNA sense strand
cgaacaguauggcaaugug

SEQ ID NO: 1447540 - RNA, 19 nt, Homo sapiens
  misc_RNA (1)...(19): siRNA sense strand
acaaugaggcauauacaug

SEQ ID NO: 1447541 - RNA, 19 nt, Homo sapiens
  misc_RNA (1)...(19): siRNA sense strand
ccuuggagcuccuugaaca

SEQ ID NO: 1447542 - RNA, 19 nt, Homo sapiens
  misc_RNA (1)...(19): siRNA sense strand
cugaaggauuaaacaauga

SEQ ID NO: 1447543 - RNA, 19 nt, Homo sapiens
  misc_RNA (1)...(19): siRNA sense strand
aagaaacacagaacaaguu

SEQ ID NO: 1447544 - RNA, 19 nt, Homo sapiens
  misc_RNA (1)...(19): siRNA sense strand
cugaauacauggagcauac

SEQ ID NO: 1447545 - RNA, 19 nt, Homo sapiens
  misc_RNA (1)...(19): siRNA sense strand
gccggauucugaaagugua

SEQ ID NO: 1447546 - RNA, 19 nt, Homo sapiens
  misc_RNA (1)...(19): siRNA sense strand
auacagaagagaagaagaa

SEQ ID NO: 1447547 - RNA, 19 nt, Homo sapiens
  misc_RNA (1)...(19): siRNA sense strand
gaauacauggagcauacuu

SEQ ID NO: 1447548 - RNA, 19 nt, Homo sapiens
  misc_RNA (1)...(19): siRNA sense strand
aagaacagcaaacagauga

SEQ ID NO: 1447549 - RNA, 19 nt, Homo sapiens
  misc_RNA (1)...(19): siRNA sense strand
gaucgaacaguauggcaau

SEQ ID NO: 1447550 - RNA, 19 nt, Homo sapiens
  misc_RNA (1)...(19): siRNA sense strand
uguagaagcagaacccaaa

SEQ ID NO: 1447551 - RNA, 19 nt, Homo sapiens
  misc_RNA (1)...(19): siRNA sense strand
gaagaagaacagcaaacag

SEQ ID NO: 1447552 - RNA, 19 nt, Homo sapiens
  misc_RNA (1)...(19): siRNA sense strand
cugaggaguuggaugaaau

SEQ ID NO: 1447553 - RNA, 19 nt, Homo sapiens
  misc_RNA (1)...(19): siRNA sense strand
ccacaagacuggggacaaa

SEQ ID NO: 1447554 - RNA, 19 nt, Homo sapiens
  misc_RNA (1)...(19): siRNA sense strand
gacaaauguguguugaauu

SEQ ID NO: 1447555 - RNA, 19 nt, Homo sapiens
  misc_RNA (1)...(19): siRNA sense strand
guauuggaauggaacuauc

SEQ ID NO: 1447556 - RNA, 19 nt, Homo sapiens
  misc_RNA (1)...(19): siRNA sense strand
gacaucagagccauggaaa

SEQ ID NO: 1447557 - RNA, 19 nt, Homo sapiens
  misc_RNA (1)...(19): siRNA sense strand
gagagugugauucccaaga

SEQ ID NO: 1447558 - RNA, 19 nt, Homo sapiens
  misc_RNA (1)...(19): siRNA sense strand
ggacugaauguuuauacag

SEQ ID NO: 1447559 - RNA, 19 nt, Homo sapiens
  misc_RNA (1)...(19): siRNA sense strand
ugaacacaaugaggcauau

SEQ ID NO: 1447560 - RNA, 19 nt, Homo sapiens
  misc_RNA (1)...(19): siRNA sense strand
ggaaaggaugcagugugua

SEQ ID NO: 1447561 - RNA, 19 nt, Homo sapiens
  misc_RNA (1)...(19): siRNA sense strand
cagaaaauguauuggaaug

SEQ ID NO: 1447562 - RNA, 19 nt, Homo sapiens
  misc_RNA (1)...(19): siRNA sense strand
ccaaucagugcauuucaug

SEQ ID NO: 1447563 - RNA, 19 nt, Homo sapiens
  misc_RNA (1)...(19): siRNA sense strand
agacauggagagugugauu

SEQ ID NO: 1447564 - RNA, 19 nt, Homo sapiens
  misc_RNA (1)...(19): siRNA sense strand
gaaugaaguagacaaagac

SEQ ID NO: 1447565 - RNA, 19 nt, Homo sapiens
  misc_RNA (1)...(19): siRNA sense strand
cugccacguuugacgcuua

SEQ ID NO: 1447566 - RNA, 19 nt, Homo sapiens
  misc_RNA (1)...(19): siRNA sense strand
ccugcugugugcauaauau

SEQ ID NO: 1447567 - RNA, 19 nt, Homo sapiens
  misc_RNA (1)...(19): siRNA sense strand
aagaucacgaugccaguua

SEQ ID NO: 1447568 - RNA, 19 nt, Homo sapiens
  misc_RNA (1)...(19): siRNA sense strand
caaggccaguucacucucu

SEQ ID NO: 1447569 - RNA, 19 nt, Homo sapiens
  misc_RNA (1)...(19): siRNA sense strand
gcagcuacugggacagaaa

SEQ ID NO: 1447570 - RNA, 19 nt, Homo sapiens
  misc_RNA (1)...(19): siRNA sense strand
guccuaaucccuacaaugg

SEQ ID NO: 1447571 - RNA, 19 nt, Homo sapiens
  misc_RNA (1)...(19): siRNA sense strand
aaacagguccaagucagaa

SEQ ID NO: 1447572 - RNA, 19 nt, Homo sapiens
  misc_RNA (1)...(19): siRNA sense strand
gaucaagcuagugaagaaa

SEQ ID NO: 1447573 - RNA, 19 nt, Homo sapiens
  misc_RNA (1)...(19): siRNA sense strand
cagaagagaagaagaacag

SEQ ID NO: 1447574 - RNA, 19 nt, Homo sapiens
  misc_RNA (1)...(19): siRNA sense strand
aggcuacauucaagauaaa

SEQ ID NO: 1447575 - RNA, 19 nt, Homo sapiens
  misc_RNA (1)...(19): siRNA sense strand
guagcugcguuugcuguau

SEQ ID NO: 1447576 - RNA, 19 nt, Homo sapiens
  misc_RNA (1)...(19): siRNA sense strand
ugacaucagagccauggaa

SEQ ID NO: 1447577 - RNA, 19 nt, Homo sapiens
  misc_RNA (1)...(19): siRNA sense strand
agauagaucaagcuaguga

SEQ ID NO: 1447578 - RNA, 19 nt, Homo sapiens
  misc_RNA (1)...(19): siRNA sense strand
gaaguggacugaauguuua

SEQ ID NO: 1447579 - RNA, 19 nt, Homo sapiens
  misc_RNA (1)...(19): siRNA sense strand
ggacagaaauuacuucaau

SEQ ID NO: 1447580 - RNA, 19 nt, Homo sapiens
  misc_RNA (1)...(19): siRNA sense strand
ggacaaauguguguugaau

SEQ ID NO: 1447581 - RNA, 19 nt, Homo sapiens
  misc_RNA (1)...(19): siRNA sense strand
ggaaguggacugaauguuu

SEQ ID NO: 1447582 - RNA, 19 nt, Homo sapiens
  misc_RNA (1)...(19): siRNA sense strand
gcauauacauggacaaauc

SEQ ID NO: 1447583 - RNA, 19 nt, Homo sapiens
  misc_RNA (1)...(19): siRNA sense strand
caagacagacugcagguua

SEQ ID NO: 1447584 - RNA, 19 nt, Homo sapiens
  misc_RNA (1)...(19): siRNA sense strand
gcacaggacuggauuuacu

SEQ ID NO: 1447585 - RNA, 19 nt, Homo sapiens
  misc_RNA (1)...(19): siRNA sense strand
ucaauuugccugacauuua

SEQ ID NO: 1447586 - RNA, 19 nt, Homo sapiens
  misc_RNA (1)...(19): siRNA sense strand
gaaaguguauucauuaucc

SEQ ID NO: 1447587 - RNA, 19 nt, Homo sapiens
  misc_RNA (1)...(19): siRNA sense strand
gcugaaggauuaaacaaug

SEQ ID NO: 1447588 - RNA, 19 nt, Homo sapiens
  misc_RNA (1)...(19): siRNA sense strand
caauuugccugacauuuau

SEQ ID NO: 1447589 - RNA, 19 nt, Homo sapiens
  misc_RNA (1)...(19): siRNA sense strand
cacugaacaucaugaauua

SEQ ID NO: 1447590 - RNA, 19 nt, Homo sapiens
  misc_RNA (1)...(19): siRNA sense strand
agaaaugacuucaguaucu

SEQ ID NO: 1447591 - RNA, 19 nt, Homo sapiens
  misc_RNA (1)...(19): siRNA sense strand
ugaaugaaguagacaaaga

SEQ ID NO: 1447592 - RNA, 19 nt, Homo sapiens
  misc_RNA (1)...(19): siRNA sense strand
gcgccuaacugaauacaug

SEQ ID NO: 1447593 - RNA, 19 nt, Homo sapiens
  misc_RNA (1)...(19): siRNA sense strand
ccacugaacaucaugaauu

SEQ ID NO: 1447594 - RNA, 19 nt, Homo sapiens
  misc_RNA (1)...(19): siRNA sense strand
acaaagacauggagagugu

SEQ ID NO: 1447595 - RNA, 19 nt, Homo sapiens
  misc_RNA (1)...(19): siRNA sense strand
gaagcucugugcccucuau

SEQ ID NO: 1447596 - RNA, 19 nt, Homo sapiens
  misc_RNA (1)...(19): siRNA sense strand
ggaauuacacaaaguugaa

SEQ ID NO: 1447597 - RNA, 19 nt, Homo sapiens
  misc_RNA (1)...(19): siRNA sense strand
gagcacaggacuggauuua

SEQ ID NO: 1447598 - RNA, 19 nt, Homo sapiens
  misc_RNA (1)...(19): siRNA sense strand
gaaaugacuucaguaucug

SEQ ID NO: 1447599 - RNA, 19 nt, Homo sapiens
  misc_RNA (1)...(19): siRNA sense strand
ccaauggcaucaagaaaca

SEQ ID NO: 1447600 - RNA, 19 nt, Homo sapiens
  misc_RNA (1)...(19): siRNA sense strand
gaaaggaugcaguguguag

SEQ ID NO: 1447601 - RNA, 19 nt, Homo sapiens
  misc_RNA (1)...(19): siRNA sense strand
ggagagcauuugggcagua

SEQ ID NO: 1447602 - RNA, 19 nt, Homo sapiens
  misc_RNA (1)...(19): siRNA sense strand
gaaaggucccugaguagau

SEQ ID NO: 1447603 - RNA, 19 nt, Homo sapiens
  misc_RNA (1)...(19): siRNA sense strand
gaauguuuauacaguguug

SEQ ID NO: 1447604 - RNA, 19 nt, Homo sapiens
  misc_RNA (1)...(19): siRNA sense strand
gaaggcuacauucaagaua

SEQ ID NO: 1447605 - RNA, 19 nt, Homo sapiens
  misc_RNA (1)...(19): siRNA sense strand
auacuuaccucauccacaa

SEQ ID NO: 1447606 - RNA, 19 nt, Homo sapiens
  misc_RNA (1)...(19): siRNA sense strand
gcccagauguauaauuuua

SEQ ID NO: 1447607 - RNA, 19 nt, Homo sapiens
  misc_RNA (1)...(19): siRNA sense strand
gaagaacagcaaacagaug

SEQ ID NO: 1447608 - RNA, 19 nt, Homo sapiens
  misc_RNA (1)...(19): siRNA sense strand
gaggacgaguucuaugaug

SEQ ID NO: 1447609 - RNA, 19 nt, Homo sapiens
  misc_RNA (1)...(19): siRNA sense strand
acaaagagcagcccgcaaa

SEQ ID NO: 1447610 - RNA, 19 nt, Homo sapiens
  misc_RNA (1)...(19): siRNA sense strand
agagauagaucaagcuagu

SEQ ID NO: 1447611 - RNA, 19 nt, Homo sapiens
  misc_RNA (1)...(19): siRNA sense strand
ggagagauagaucaagcua

SEQ ID NO: 1447612 - RNA, 19 nt, Homo sapiens
  misc_RNA (1)...(19): siRNA sense strand
cugcccagauguauaauuu

SEQ ID NO: 1447613 - RNA, 19 nt, Homo sapiens
  misc_RNA (1)...(19): siRNA sense strand
cgaugccaguuauauuuaa

SEQ ID NO: 1447614 - RNA, 19 nt, Homo sapiens
  misc_RNA (1)...(19): siRNA sense strand
uggagacgcuggccacuga

SEQ ID NO: 1447615 - RNA, 19 nt, Homo sapiens
  misc_RNA (1)...(19): siRNA sense strand
cuacagcgccuaacugaau

SEQ ID NO: 1447616 - RNA, 19 nt, Homo sapiens
  misc_RNA (1)...(19): siRNA sense strand
aaaggucccugaguagauu

SEQ ID NO: 1447617 - RNA, 19 nt, Homo sapiens
  misc_RNA (1)...(19): siRNA sense strand
gaaaugccagugccggauu

SEQ ID NO: 1447618 - RNA, 19 nt, Homo sapiens
  misc_RNA (1)...(19): siRNA sense strand
gaacacaaugaggcauaua

SEQ ID NO: 1447619 - RNA, 19 nt, Homo sapiens
  misc_RNA (1)...(19): siRNA sense strand
uccgaaaggucccugagua

SEQ ID NO: 1447620 - RNA, 19 nt, Homo sapiens
  misc_RNA (1)...(19): siRNA sense strand
agaucaagcuagugaagaa

SEQ ID NO: 1447621 - RNA, 19 nt, Homo sapiens
  misc_RNA (1)...(19): siRNA sense strand
aaggcuacauucaagauaa

SEQ ID NO: 1447622 - RNA, 19 nt, Homo sapiens
  misc_RNA (1)...(19): siRNA sense strand
ccagaaaugacuucaguau

SEQ ID NO: 1447623 - RNA, 19 nt, Homo sapiens
  misc_RNA (1)...(19): siRNA sense strand
gaaaauguauuggaaugga

SEQ ID NO: 1447624 - RNA, 19 nt, Homo sapiens
  misc_RNA (1)...(19): siRNA sense strand
gcgaggacgaguucuauga

SEQ ID NO: 1447625 - RNA, 19 nt, Homo sapiens
  misc_RNA (1)...(19): siRNA sense strand
guauggcaauguggaaauu

SEQ ID NO: 1447626 - RNA, 19 nt, Homo sapiens
  misc_RNA (1)...(19): siRNA sense strand
ugacagcacgcuccuuuga

SEQ ID NO: 1447627 - RNA, 19 nt, Homo sapiens
  misc_RNA (1)...(19): siRNA sense strand
ugaaguagacaaagacaug

SEQ ID NO: 1447628 - RNA, 19 nt, Homo sapiens
  misc_RNA (1)...(19): siRNA sense strand
caaaguugaaggcuacauu

SEQ ID NO: 1447629 - RNA, 19 nt, Homo sapiens
  misc_RNA (1)...(19): siRNA sense strand
uggaaaggaugcagugugu

SEQ ID NO: 1447630 - RNA, 19 nt, Homo sapiens
  misc_RNA (1)...(19): siRNA sense strand
ggagcauacuuaccucauc

SEQ ID NO: 1447631 - RNA, 19 nt, Homo sapiens
  misc_RNA (1)...(19): siRNA sense strand
uuaaugagccucugagcuu

SEQ ID NO: 1447632 - RNA, 19 nt, Homo sapiens
  misc_RNA (1)...(19): siRNA sense strand
caaguuugccuucuccuau

SEQ ID NO: 1447633 - RNA, 19 nt, Homo sapiens
  misc_RNA (1)...(19): siRNA sense strand
cacgaugccaguuauauuu

SEQ ID NO: 1447634 - RNA, 19 nt, Homo sapiens
  misc_RNA (1)...(19): siRNA sense strand
gaagaguguagaagcagaa

SEQ ID NO: 1447635 - RNA, 19 nt, Homo sapiens
  misc_RNA (1)...(19): siRNA sense strand
gcuacugggacagaaauua

SEQ ID NO: 1447636 - RNA, 19 nt, Homo sapiens
  misc_RNA (1)...(19): siRNA sense strand
ggcaauguggaaauuauaa

SEQ ID NO: 1447637 - RNA, 19 nt, Homo sapiens
  misc_RNA (1)...(19): siRNA sense strand
gaagcagaacccaaaggaa

SEQ ID NO: 1447638 - RNA, 19 nt, Homo sapiens
  misc_RNA (1)...(19): siRNA sense strand
cacagaauguccgaagaaa

SEQ ID NO: 1447639 - RNA, 19 nt, Homo sapiens
  misc_RNA (1)...(19): siRNA sense strand
gaucacgaugccaguuaua

SEQ ID NO: 1447640 - RNA, 19 nt, Homo sapiens
  misc_RNA (1)...(19): siRNA sense strand
caagaaacacagaacaagu

SEQ ID NO: 1447641 - RNA, 19 nt, Homo sapiens
  misc_RNA (1)...(19): siRNA sense strand
cauggaaaauggagagaua

SEQ ID NO: 1447642 - RNA, 19 nt, Homo sapiens
  misc_RNA (1)...(19): siRNA sense strand
aagaagaacagcaaacaga

SEQ ID NO: 1447643 - RNA, 19 nt, Homo sapiens
  misc_RNA (1)...(19): siRNA sense strand
uaaauuggaacaagagcaa

SEQ ID NO: 1447644 - RNA, 19 nt, Homo sapiens
  misc_RNA (1)...(19): siRNA sense strand
gaacccaaaggaaccauca

SEQ ID NO: 1447645 - RNA, 19 nt, Homo sapiens
  misc_RNA (1)...(19): siRNA sense strand
uaucugcuguugcuucuca

SEQ ID NO: 1447646 - RNA, 19 nt, Homo sapiens
  misc_RNA (1)...(19): siRNA sense strand
uacagcgccuaacugaaua

SEQ ID NO: 1447647 - RNA, 19 nt, Homo sapiens
  misc_RNA (1)...(19): siRNA sense strand
uaugggaaguggacugaau

SEQ ID NO: 1447648 - RNA, 19 nt, Homo sapiens
  misc_RNA (1)...(19): siRNA sense strand
ggagcuccuugaacacaau

SEQ ID NO: 1447649 - RNA, 19 nt, Homo sapiens
  misc_RNA (1)...(19): siRNA sense strand
uuucauggcucuaucuauc

SEQ ID NO: 1447650 - RNA, 19 nt, Homo sapiens
  misc_RNA (1)...(19): siRNA sense strand
aagaaacacagaacaaguu

SEQ ID NO: 1447651 - RNA, 19 nt, Homo sapiens
  misc_RNA (1)...(19): siRNA sense strand
cgaacaguauggcaaugug

SEQ ID NO: 1447652 - RNA, 19 nt, Homo sapiens
  misc_RNA (1)...(19): siRNA sense strand
acaaugaggcauauacaug

SEQ ID NO: 1447653 - RNA, 19 nt, Homo sapiens
  misc_RNA (1)...(19): siRNA sense strand
ccuuggagcuccuugaaca

SEQ ID NO: 1447654 - RNA, 19 nt, Homo sapiens
  misc_RNA (1)...(19): siRNA sense strand
cugaaggauuaaacaauga

SEQ ID NO: 1447655 - RNA, 19 nt, Homo sapiens
  misc_RNA (1)...(19): siRNA sense strand
ucacgaugccaguuauauu

SEQ ID NO: 1447656 - RNA, 19 nt, Homo sapiens
  misc_RNA (1)...(19): siRNA sense strand
cugaauacauggagcauac

SEQ ID NO: 1447657 - RNA, 19 nt, Homo sapiens
  misc_RNA (1)...(19): siRNA sense strand
gccggauucugaaagugua

SEQ ID NO: 1447658 - RNA, 19 nt, Homo sapiens
  misc_RNA (1)...(19): siRNA sense strand
auacagaagagaagaagaa

SEQ ID NO: 1447659 - RNA, 19 nt, Homo sapiens
  misc_RNA (1)...(19): siRNA sense strand
gaagaggaaggagagcauu

SEQ ID NO: 1447660 - RNA, 19 nt, Homo sapiens
  misc_RNA (1)...(19): siRNA sense strand
gagcauuugggcaguagaa

SEQ ID NO: 1447661 - RNA, 19 nt, Homo sapiens
  misc_RNA (1)...(19): siRNA sense strand
aagaacagcaaacagauga

SEQ ID NO: 1447662 - RNA, 19 nt, Homo sapiens
  misc_RNA (1)...(19): siRNA sense strand
gaucgaacaguauggcaau

SEQ ID NO: 1447663 - RNA, 19 nt, Homo sapiens
  misc_RNA (1)...(19): siRNA sense strand
uguagaagcagaacccaaa

SEQ ID NO: 1447664 - RNA, 19 nt, Homo sapiens
  misc_RNA (1)...(19): siRNA sense strand
gaauacauggagcauacuu

SEQ ID NO: 1447665 - RNA, 19 nt, Homo sapiens
  misc_RNA (1)...(19): siRNA sense strand
gaagaagaacagcaaacag

SEQ ID NO: 1447666 - RNA, 19 nt, Homo sapiens
  misc_RNA (1)...(19): siRNA sense strand
cugaggaguuggaugaaau

SEQ ID NO: 1447667 - RNA, 19 nt, Homo sapiens
  misc_RNA (1)...(19): siRNA sense strand
acacagaauguccgaagaa

SEQ ID NO: 1447668 - RNA, 19 nt, Homo sapiens
  misc_RNA (1)...(19): siRNA sense strand
gacaaauguguguugaauu

SEQ ID NO: 1447669 - RNA, 19 nt, Homo sapiens
  misc_RNA (1)...(19): siRNA sense strand
ccacaagacuggggacaaa

SEQ ID NO: 1447670 - RNA, 19 nt, Homo sapiens
  misc_RNA (1)...(19): siRNA sense strand
guauuggaauggaacuauc

SEQ ID NO: 1447671 - RNA, 19 nt, Homo sapiens
  misc_RNA (1)...(19): siRNA sense strand
gacaucagagccauggaaa

SEQ ID NO: 1447672 - RNA, 19 nt, Homo sapiens
  misc_RNA (1)...(19): siRNA sense strand
gagagugugauucccaaga

SEQ ID NO: 1447673 - RNA, 19 nt, Homo sapiens
  misc_RNA (1)...(19): siRNA sense strand
ggacugaauguuuauacag

SEQ ID NO: 1447674 - RNA, 19 nt, Homo sapiens
  misc_RNA (1)...(19): siRNA sense strand
augaugcgcugucagauuc

SEQ ID NO: 1447675 - RNA, 19 nt, Homo sapiens
  misc_RNA (1)...(19): siRNA sense strand
ugaacacaaugaggcauau

SEQ ID NO: 1447676 - RNA, 19 nt, Homo sapiens
  misc_RNA (1)...(19): siRNA sense strand
cgaaaggucccugaguaga

SEQ ID NO: 1447677 - RNA, 19 nt, Homo sapiens
  misc_RNA (1)...(19): siRNA sense strand
ggaaaggaugcagugugua

SEQ ID NO: 1447678 - RNA, 19 nt, Homo sapiens
  misc_RNA (1)...(19): siRNA sense strand
gaaguggacugaauguuua

SEQ ID NO: 1447679 - RNA, 19 nt, Homo sapiens
  misc_RNA (1)...(19): siRNA sense strand
ggacagaaauuacuucaau

SEQ ID NO: 1447680 - RNA, 19 nt, Homo sapiens
  misc_RNA (1)...(19): siRNA sense strand
ggacaaauguguguugaau

SEQ ID NO: 1447681 - RNA, 19 nt, Homo sapiens
  misc_RNA (1)...(19): siRNA sense strand
ggaaguggacugaauguuu

SEQ ID NO: 1447682 - RNA, 19 nt, Homo sapiens
  misc_RNA (1)...(19): siRNA sense strand
gcauauacauggacaaauc

SEQ ID NO: 1447683 - RNA, 19 nt, Homo sapiens
  misc_RNA (1)...(19): siRNA sense strand
caagacagacugcagguua

SEQ ID NO: 1447684 - RNA, 19 nt, Homo sapiens
  misc_RNA (1)...(19): siRNA sense strand
gcacaggacuggauuuacu

SEQ ID NO: 1447685 - RNA, 19 nt, Homo sapiens
  misc_RNA (1)...(19): siRNA sense strand
ucaauuugccugacauuua

SEQ ID NO: 1447686 - RNA, 19 nt, Homo sapiens
  misc_RNA (1)...(19): siRNA sense strand
gaaaguguauucauuaucc

SEQ ID NO: 1447687 - RNA, 19 nt, Homo sapiens
  misc_RNA (1)...(19): siRNA sense strand
gcugaaggauuaaacaaug

SEQ ID NO: 1447688 - RNA, 19 nt, Homo sapiens
  misc_RNA (1)...(19): siRNA sense strand
caauuugccugacauuuau

SEQ ID NO: 1447689 - RNA, 19 nt, Homo sapiens
  misc_RNA (1)...(19): siRNA sense strand
cacugaacaucaugaauua

SEQ ID NO: 1447690 - RNA, 19 nt, Homo sapiens
  misc_RNA (1)...(19): siRNA sense strand
agaaaugacuucaguaucu

SEQ ID NO: 1447691 - RNA, 19 nt, Homo sapiens
  misc_RNA (1)...(19): siRNA sense strand
ugaaugaaguagacaaaga

SEQ ID NO: 1447692 - RNA, 19 nt, Homo sapiens
  misc_RNA (1)...(19): siRNA sense strand
gcgccuaacugaauacaug

SEQ ID NO: 1447693 - RNA, 19 nt, Homo sapiens
  misc_RNA (1)...(19): siRNA sense strand
ccacugaacaucaugaauu

SEQ ID NO: 1447694 - RNA, 19 nt, Homo sapiens
  misc_RNA (1)...(19): siRNA sense strand
acaaagacauggagagugu

SEQ ID NO: 1447695 - RNA, 19 nt, Homo sapiens
  misc_RNA (1)...(19): siRNA sense strand
gaagcucugugcccucuau

SEQ ID NO: 1447696 - RNA, 19 nt, Homo sapiens
  misc_RNA (1)...(19): siRNA sense strand
ggaauuacacaaaguugaa

SEQ ID NO: 1447697 - RNA, 19 nt, Homo sapiens
  misc_RNA (1)...(19): siRNA sense strand
gagcacaggacuggauuua

SEQ ID NO: 1447698 - RNA, 19 nt, Homo sapiens
  misc_RNA (1)...(19): siRNA sense strand
gaaaugacuucaguaucug

SEQ ID NO: 1447699 - RNA, 19 nt, Homo sapiens
  misc_RNA (1)...(19): siRNA sense strand
ccaauggcaucaagaaaca

SEQ ID NO: 1447700 - RNA, 19 nt, Homo sapiens
  misc_RNA (1)...(19): siRNA sense strand
gaaaggaugcaguguguag

SEQ ID NO: 1447701 - RNA, 19 nt, Homo sapiens
  misc_RNA (1)...(19): siRNA sense strand
ggagagcauuugggcagua

SEQ ID NO: 1447702 - RNA, 19 nt, Homo sapiens
  misc_RNA (1)...(19): siRNA sense strand
gaaaggucccugaguagau

SEQ ID NO: 1447703 - RNA, 19 nt, Homo sapiens
  misc_RNA (1)...(19): siRNA sense strand
gaauguuuauacaguguug

SEQ ID NO: 1447704 - RNA, 19 nt, Homo sapiens
  misc_RNA (1)...(19): siRNA sense strand
gaaggcuacauucaagaua

SEQ ID NO: 1447705 - RNA, 19 nt, Homo sapiens
  misc_RNA (1)...(19): siRNA sense strand
auacuuaccucauccacaa

SEQ ID NO: 1447706 - RNA, 19 nt, Homo sapiens
  misc_RNA (1)...(19): siRNA sense strand
gcccagauguauaauuuua

SEQ ID NO: 1447707 - RNA, 19 nt, Homo sapiens
  misc_RNA (1)...(19): siRNA sense strand
gaagaacagcaaacagaug

SEQ ID NO: 1447708 - RNA, 19 nt, Homo sapiens
  misc_RNA (1)...(19): siRNA sense strand
gaggacgaguucuaugaug

SEQ ID NO: 1447709 - RNA, 19 nt, Homo sapiens
  misc_RNA (1)...(19): siRNA sense strand
acaaagagcagcccgcaaa

SEQ ID NO: 1447710 - RNA, 19 nt, Homo sapiens
  misc_RNA (1)...(19): siRNA sense strand
agagauagaucaagcuagu

SEQ ID NO: 1447711 - RNA, 19 nt, Homo sapiens
  misc_RNA (1)...(19): siRNA sense strand
ggagagauagaucaagcua

SEQ ID NO: 1447712 - RNA, 19 nt, Homo sapiens
  misc_RNA (1)...(19): siRNA sense strand
cugcccagauguauaauuu

SEQ ID NO: 1447713 - RNA, 19 nt, Homo sapiens
  misc_RNA (1)...(19): siRNA sense strand
cgaugccaguuauauuuaa

SEQ ID NO: 1447714 - RNA, 19 nt, Homo sapiens
  misc_RNA (1)...(19): siRNA sense strand
uggagacgcuggccacuga

SEQ ID NO: 1447715 - RNA, 19 nt, Homo sapiens
  misc_RNA (1)...(19): siRNA sense strand
cuacagcgccuaacugaau

SEQ ID NO: 1447716 - RNA, 19 nt, Homo sapiens
  misc_RNA (1)...(19): siRNA sense strand
aaaggucccugaguagauu

SEQ ID NO: 1447717 - RNA, 19 nt, Homo sapiens
  misc_RNA (1)...(19): siRNA sense strand
gaaaugccagugccggauu

SEQ ID NO: 1447718 - RNA, 19 nt, Homo sapiens
  misc_RNA (1)...(19): siRNA sense strand
gaacacaaugaggcauaua

SEQ ID NO: 1447719 - RNA, 19 nt, Homo sapiens
  misc_RNA (1)...(19): siRNA sense strand
uccgaaaggucccugagua

SEQ ID NO: 1447720 - RNA, 19 nt, Homo sapiens
  misc_RNA (1)...(19): siRNA sense strand
agaucaagcuagugaagaa

SEQ ID NO: 1447721 - RNA, 19 nt, Homo sapiens
  misc_RNA (1)...(19): siRNA sense strand
aaggcuacauucaagauaa

SEQ ID NO: 1447722 - RNA, 19 nt, Homo sapiens
  misc_RNA (1)...(19): siRNA sense strand
ccagaaaugacuucaguau

SEQ ID NO: 1447723 - RNA, 19 nt, Homo sapiens
  misc_RNA (1)...(19): siRNA sense strand
gaaaauguauuggaaugga

SEQ ID NO: 1447724 - RNA, 19 nt, Homo sapiens
  misc_RNA (1)...(19): siRNA sense strand
gcgaggacgaguucuauga

SEQ ID NO: 1447725 - RNA, 19 nt, Homo sapiens
  misc_RNA (1)...(19): siRNA sense strand
guauggcaauguggaaauu

SEQ ID NO: 1447726 - RNA, 19 nt, Homo sapiens
  misc_RNA (1)...(19): siRNA sense strand
ugacagcacgcuccuuuga

SEQ ID NO: 1447727 - RNA, 19 nt, Homo sapiens
  misc_RNA (1)...(19): siRNA sense strand
ugaaguagacaaagacaug

SEQ ID NO: 1447728 - RNA, 19 nt, Homo sapiens
  misc_RNA (1)...(19): siRNA sense strand
caaaguugaaggcuacauu

SEQ ID NO: 1447729 - RNA, 19 nt, Homo sapiens
  misc_RNA (1)...(19): siRNA sense strand
uggaaaggaugcagugugu

SEQ ID NO: 1447730 - RNA, 19 nt, Homo sapiens
  misc_RNA (1)...(19): siRNA sense strand
ggagcauacuuaccucauc

SEQ ID NO: 1447731 - RNA, 19 nt, Homo sapiens
  misc_RNA (1)...(19): siRNA sense strand
uuaaugagccucugagcuu

SEQ ID NO: 1447732 - RNA, 19 nt, Homo sapiens
  misc_RNA (1)...(19): siRNA sense strand
caaguuugccuucuccuau

SEQ ID NO: 1447733 - RNA, 19 nt, Homo sapiens
  misc_RNA (1)...(19): siRNA sense strand
cacgaugccaguuauauuu

SEQ ID NO: 1447734 - RNA, 19 nt, Homo sapiens
  misc_RNA (1)...(19): siRNA sense strand
gaagaguguagaagcagaa

SEQ ID NO: 1447735 - RNA, 19 nt, Homo sapiens
  misc_RNA (1)...(19): siRNA sense strand
gcuacugggacagaaauua

SEQ ID NO: 1447736 - RNA, 19 nt, Homo sapiens
  misc_RNA (1)...(19): siRNA sense strand
ggcaauguggaaauuauaa

SEQ ID NO: 1447737 - RNA, 19 nt, Homo sapiens
  misc_RNA (1)...(19): siRNA sense strand
gaagcagaacccaaaggaa

SEQ ID NO: 1447738 - RNA, 19 nt, Homo sapiens
  misc_RNA (1)...(19): siRNA sense strand
cacagaauguccgaagaaa

SEQ ID NO: 1447739 - RNA, 19 nt, Homo sapiens
  misc_RNA (1)...(19): siRNA sense strand
gaucacgaugccaguuaua

SEQ ID NO: 1447740 - RNA, 19 nt, Homo sapiens
  misc_RNA (1)...(19): siRNA sense strand
caagaaacacagaacaagu

SEQ ID NO: 1447741 - RNA, 19 nt, Homo sapiens
  misc_RNA (1)...(19): siRNA sense strand
cauggaaaauggagagaua

SEQ ID NO: 1447742 - RNA, 19 nt, Homo sapiens
  misc_RNA (1)...(19): siRNA sense strand
aagaagaacagcaaacaga

SEQ ID NO: 1447743 - RNA, 19 nt, Homo sapiens
  misc_RNA (1)...(19): siRNA sense strand
uaaauuggaacaagagcaa

SEQ ID NO: 1447744 - RNA, 19 nt, Homo sapiens
  misc_RNA (1)...(19): siRNA sense strand
gaacccaaaggaaccauca

SEQ ID NO: 1447745 - RNA, 19 nt, Homo sapiens
  misc_RNA (1)...(19): siRNA sense strand
uaucugcuguugcuucuca

SEQ ID NO: 1447746 - RNA, 19 nt, Homo sapiens
  misc_RNA (1)...(19): siRNA sense strand
uacagcgccuaacugaaua

SEQ ID NO: 1447747 - RNA, 19 nt, Homo sapiens
  misc_RNA (1)...(19): siRNA sense strand
uaugggaaguggacugaau

SEQ ID NO: 1447748 - RNA, 19 nt, Homo sapiens
  misc_RNA (1)...(19): siRNA sense strand
ggagcuccuugaacacaau

SEQ ID NO: 1447749 - RNA, 19 nt, Homo sapiens
  misc_RNA (1)...(19): siRNA sense strand
uuucauggcucuaucuauc

SEQ ID NO: 1447750 - RNA, 19 nt, Homo sapiens
  misc_RNA (1)...(19): siRNA sense strand
aagaaacacagaacaaguu

SEQ ID NO: 1447751 - RNA, 19 nt, Homo sapiens
  misc_RNA (1)...(19): siRNA sense strand
cgaacaguauggcaaugug

SEQ ID NO: 1447752 - RNA, 19 nt, Homo sapiens
  misc_RNA (1)...(19): siRNA sense strand
acaaugaggcauauacaug

SEQ ID NO: 1447753 - RNA, 19 nt, Homo sapiens
  misc_RNA (1)...(19): siRNA sense strand
ccuuggagcuccuugaaca

SEQ ID NO: 1447754 - RNA, 19 nt, Homo sapiens
  misc_RNA (1)...(19): siRNA sense strand
cugaaggauuaaacaauga

SEQ ID NO: 1447755 - RNA, 19 nt, Homo sapiens
  misc_RNA (1)...(19): siRNA sense strand
ucacgaugccaguuauauu

SEQ ID NO: 1447756 - RNA, 19 nt, Homo sapiens
  misc_RNA (1)...(19): siRNA sense strand
cugaauacauggagcauac

SEQ ID NO: 1447757 - RNA, 19 nt, Homo sapiens
  misc_RNA (1)...(19): siRNA sense strand
gccggauucugaaagugua

SEQ ID NO: 1447758 - RNA, 19 nt, Homo sapiens
  misc_RNA (1)...(19): siRNA sense strand
auacagaagagaagaagaa

SEQ ID NO: 1447759 - RNA, 19 nt, Homo sapiens
  misc_RNA (1)...(19): siRNA sense strand
gaagaggaaggagagcauu

SEQ ID NO: 1447760 - RNA, 19 nt, Homo sapiens
  misc_RNA (1)...(19): siRNA sense strand
gagcauuugggcaguagaa

SEQ ID NO: 1447761 - RNA, 19 nt, Homo sapiens
  misc_RNA (1)...(19): siRNA sense strand
aagaacagcaaacagauga

SEQ ID NO: 1447762 - RNA, 19 nt, Homo sapiens
  misc_RNA (1)...(19): siRNA sense strand
gaucgaacaguauggcaau

SEQ ID NO: 1447763 - RNA, 19 nt, Homo sapiens
  misc_RNA (1)...(19): siRNA sense strand
uguagaagcagaacccaaa

SEQ ID NO: 1447764 - RNA, 19 nt, Homo sapiens
  misc_RNA (1)...(19): siRNA sense strand
gaauacauggagcauacuu

SEQ ID NO: 1447765 - RNA, 19 nt, Homo sapiens
  misc_RNA (1)...(19): siRNA sense strand
gaagaagaacagcaaacag

SEQ ID NO: 1447766 - RNA, 19 nt, Homo sapiens
  misc_RNA (1)...(19): siRNA sense strand
cugaggaguuggaugaaau

SEQ ID NO: 1447767 - RNA, 19 nt, Homo sapiens
  misc_RNA (1)...(19): siRNA sense strand
acacagaauguccgaagaa

SEQ ID NO: 1447768 - RNA, 19 nt, Homo sapiens
  misc_RNA (1)...(19): siRNA sense strand
gacaaauguguguugaauu

SEQ ID NO: 1447769 - RNA, 19 nt, Homo sapiens
  misc_RNA (1)...(19): siRNA sense strand
ccacaagacuggggacaaa

SEQ ID NO: 1447770 - RNA, 19 nt, Homo sapiens
  misc_RNA (1)...(19): siRNA sense strand
guauuggaauggaacuauc

SEQ ID NO: 1447771 - RNA, 19 nt, Homo sapiens
  misc_RNA (1)...(19): siRNA sense strand
gacaucagagccauggaaa

SEQ ID NO: 1447772 - RNA, 19 nt, Homo sapiens
  misc_RNA (1)...(19): siRNA sense strand
gagagugugauucccaaga

SEQ ID NO: 1447773 - RNA, 19 nt, Homo sapiens
  misc_RNA (1)...(19): siRNA sense strand
ggacugaauguuuauacag

SEQ ID NO: 1447774 - RNA, 19 nt, Homo sapiens
  misc_RNA (1)...(19): siRNA sense strand
augaugcgcugucagauuc

SEQ ID NO: 1447775 - RNA, 19 nt, Homo sapiens
  misc_RNA (1)...(19): siRNA sense strand
ugaacacaaugaggcauau

SEQ ID NO: 1447776 - RNA, 19 nt, Homo sapiens
  misc_RNA (1)...(19): siRNA sense strand
cgaaaggucccugaguaga

SEQ ID NO: 1447777 - RNA, 19 nt, Homo sapiens
  misc_RNA (1)...(19): siRNA sense strand
ggaaaggaugcagugugua

SEQ ID NO: 1447778 - RNA, 19 nt, Homo sapiens
  misc_RNA (1)...(19): siRNA sense strand
gaucgcagcccauuaugaa

SEQ ID NO: 1447779 - RNA, 19 nt, Homo sapiens
  misc_RNA (1)...(19): siRNA sense strand
ggaaggcugucuaccugaa

SEQ ID NO: 1447780 - RNA, 19 nt, Homo sapiens
  misc_RNA (1)...(19): siRNA sense strand
ucgcagaagugcaccuaaa

SEQ ID NO: 1447781 - RNA, 19 nt, Homo sapiens
  misc_RNA (1)...(19): siRNA sense strand
ggaggaagccagaaucaac

SEQ ID NO: 1447782 - RNA, 19 nt, Homo sapiens
  misc_RNA (1)...(19): siRNA sense strand
ucuacuaccuguacuguca

SEQ ID NO: 1447783 - RNA, 19 nt, Homo sapiens
  misc_RNA (1)...(19): siRNA sense strand
gagcgaucgcagcccauua

SEQ ID NO: 1447784 - RNA, 19 nt, Homo sapiens
  misc_RNA (1)...(19): siRNA sense strand
gggcugggcucuacuaccu

SEQ ID NO: 1447785 - RNA, 19 nt, Homo sapiens
  misc_RNA (1)...(19): siRNA sense strand
gaggaagccagaaucaaca

SEQ ID NO: 1447786 - RNA, 19 nt, Homo sapiens
  misc_RNA (1)...(19): siRNA sense strand
acugucaggugcacuuuga

SEQ ID NO: 1447787 - RNA, 19 nt, Homo sapiens
  misc_RNA (1)...(19): siRNA sense strand
gcagaagugcaccuaaagg

SEQ ID NO: 1447788 - RNA, 19 nt, Homo sapiens
  misc_RNA (1)...(19): siRNA sense strand
gaaaacacgggcucgaaga

SEQ ID NO: 1447789 - RNA, 19 nt, Homo sapiens
  misc_RNA (1)...(19): siRNA sense strand
gguguggacgggacaguga

SEQ ID NO: 1447790 - RNA, 19 nt, Homo sapiens
  misc_RNA (1)...(19): siRNA sense strand
ggacccgucggaacugaau

SEQ ID NO: 1447791 - RNA, 19 nt, Homo sapiens
  misc_RNA (1)...(19): siRNA sense strand
cgcagcccauuaugaaguu

SEQ ID NO: 1447792 - RNA, 19 nt, Homo sapiens
  misc_RNA (1)...(19): siRNA sense strand
gacagaagaaagccaggau

SEQ ID NO: 1447793 - RNA, 19 nt, Homo sapiens
  misc_RNA (1)...(19): siRNA sense strand
cuaguucggccucgcagaa

SEQ ID NO: 1447794 - RNA, 19 nt, Homo sapiens
  misc_RNA (1)...(19): siRNA sense strand
caggacccgucggaacuga

SEQ ID NO: 1447795 - RNA, 19 nt, Homo sapiens
  misc_RNA (1)...(19): siRNA sense strand
cgaucgcagcccauuauga

SEQ ID NO: 1447796 - RNA, 19 nt, Homo sapiens
  misc_RNA (1)...(19): siRNA sense strand
gucaggugcacuuugauga

SEQ ID NO: 1447797 - RNA, 19 nt, Homo sapiens
  misc_RNA (1)...(19): siRNA sense strand
guacugucaggugcacuuu

SEQ ID NO: 1447798 - RNA, 19 nt, Homo sapiens
  misc_RNA (1)...(19): siRNA sense strand
gggaggaagccagaaucaa

SEQ ID NO: 1447799 - RNA, 19 nt, Homo sapiens
  misc_RNA (1)...(19): siRNA sense strand
ggaacugaauccccagaca

SEQ ID NO: 1447800 - RNA, 19 nt, Homo sapiens
  misc_RNA (1)...(19): siRNA sense strand
gaucgcagcccauuaugaa

SEQ ID NO: 1447801 - RNA, 19 nt, Homo sapiens
  misc_RNA (1)...(19): siRNA sense strand
ucgcagaagugcaccuaaa

SEQ ID NO: 1447802 - RNA, 19 nt, Homo sapiens
  misc_RNA (1)...(19): siRNA sense strand
gagcgaucgcagcccauua

SEQ ID NO: 1447803 - RNA, 19 nt, Homo sapiens
  misc_RNA (1)...(19): siRNA sense strand
gcagaagugcaccuaaagg

SEQ ID NO: 1447804 - RNA, 19 nt, Homo sapiens
  misc_RNA (1)...(19): siRNA sense strand
gaaaacacgggcucgaaga

SEQ ID NO: 1447805 - RNA, 19 nt, Homo sapiens
  misc_RNA (1)...(19): siRNA sense strand
ggacccgucggaacugaau

SEQ ID NO: 1447806 - RNA, 19 nt, Homo sapiens
  misc_RNA (1)...(19): siRNA sense strand
cgcagcccauuaugaaguu

SEQ ID NO: 1447807 - RNA, 19 nt, Homo sapiens
  misc_RNA (1)...(19): siRNA sense strand
gacagaagaaagccaggau

SEQ ID NO: 1447808 - RNA, 19 nt, Homo sapiens
  misc_RNA (1)...(19): siRNA sense strand
cuaguucggccucgcagaa

SEQ ID NO: 1447809 - RNA, 19 nt, Homo sapiens
  misc_RNA (1)...(19): siRNA sense strand
caggacccgucggaacuga

SEQ ID NO: 1447810 - RNA, 19 nt, Homo sapiens
  misc_RNA (1)...(19): siRNA sense strand
ggaacugaauccccagaca

SEQ ID NO: 1447811 - RNA, 19 nt, Homo sapiens
  misc_RNA (1)...(19): siRNA sense strand
cgaucgcagcccauuauga

SEQ ID NO: 1447812 - RNA, 19 nt, Homo sapiens
  misc_RNA (1)...(19): siRNA sense strand
gaucgcagcccauuaugaa

SEQ ID NO: 1447813 - RNA, 19 nt, Homo sapiens
  misc_RNA (1)...(19): siRNA sense strand
ggaaggcugucuaccugaa

SEQ ID NO: 1447814 - RNA, 19 nt, Homo sapiens
  misc_RNA (1)...(19): siRNA sense strand
ucgcagaagugcaccuaaa

SEQ ID NO: 1447815 - RNA, 19 nt, Homo sapiens
  misc_RNA (1)...(19): siRNA sense strand
ggaggaagccagaaucaac

SEQ ID NO: 1447816 - RNA, 19 nt, Homo sapiens
  misc_RNA (1)...(19): siRNA sense strand
ucuacuaccuguacuguca

SEQ ID NO: 1447817 - RNA, 19 nt, Homo sapiens
  misc_RNA (1)...(19): siRNA sense strand
gagcgaucgcagcccauua

SEQ ID NO: 1447818 - RNA, 19 nt, Homo sapiens
  misc_RNA (1)...(19): siRNA sense strand
gggcugggcucuacuaccu

SEQ ID NO: 1447819 - RNA, 19 nt, Homo sapiens
  misc_RNA (1)...(19): siRNA sense strand
gaggaagccagaaucaaca

SEQ ID NO: 1447820 - RNA, 19 nt, Homo sapiens
  misc_RNA (1)...(19): siRNA sense strand
acugucaggugcacuuuga

SEQ ID NO: 1447821 - RNA, 19 nt, Homo sapiens
  misc_RNA (1)...(19): siRNA sense strand
gcagaagugcaccuaaagg

SEQ ID NO: 1447822 - RNA, 19 nt, Homo sapiens
  misc_RNA (1)...(19): siRNA sense strand
gaaaacacgggcucgaaga

SEQ ID NO: 1447823 - RNA, 19 nt, Homo sapiens
  misc_RNA (1)...(19): siRNA sense strand
gguguggacgggacaguga

SEQ ID NO: 1447824 - RNA, 19 nt, Homo sapiens
  misc_RNA (1)...(19): siRNA sense strand
ggacccgucggaacugaau

SEQ ID NO: 1447825 - RNA, 19 nt, Homo sapiens
  misc_RNA (1)...(19): siRNA sense strand
cgcagcccauuaugaaguu

SEQ ID NO: 1447826 - RNA, 19 nt, Homo sapiens
  misc_RNA (1)...(19): siRNA sense strand
gacagaagaaagccaggau

SEQ ID NO: 1447827 - RNA, 19 nt, Homo sapiens
  misc_RNA (1)...(19): siRNA sense strand
cuaguucggccucgcagaa

SEQ ID NO: 1447828 - RNA, 19 nt, Homo sapiens
  misc_RNA (1)...(19): siRNA sense strand
caggacccgucggaacuga

SEQ ID NO: 1447829 - RNA, 19 nt, Homo sapiens
  misc_RNA (1)...(19): siRNA sense strand
cgaucgcagcccauuauga

SEQ ID NO: 1447830 - RNA, 19 nt, Homo sapiens
  misc_RNA (1)...(19): siRNA sense strand
gucaggugcacuuugauga

SEQ ID NO: 1447831 - RNA, 19 nt, Homo sapiens
  misc_RNA (1)...(19): siRNA sense strand
guacugucaggugcacuuu

SEQ ID NO: 1447832 - RNA, 19 nt, Homo sapiens
  misc_RNA (1)...(19): siRNA sense strand
gggaggaagccagaaucaa

SEQ ID NO: 1447833 - RNA, 19 nt, Homo sapiens
  misc_RNA (1)...(19): siRNA sense strand
ggaacugaauccccagaca

SEQ ID NO: 1447834 - RNA, 19 nt, Homo sapiens
  misc_RNA (1)...(19): siRNA sense strand
gaucgcagcccauuaugaa

SEQ ID NO: 1447835 - RNA, 19 nt, Homo sapiens
  misc_RNA (1)...(19): siRNA sense strand
ucgcagaagugcaccuaaa

SEQ ID NO: 1447836 - RNA, 19 nt, Homo sapiens
  misc_RNA (1)...(19): siRNA sense strand
gagcgaucgcagcccauua

SEQ ID NO: 1447837 - RNA, 19 nt, Homo sapiens
  misc_RNA (1)...(19): siRNA sense strand
gcagaagugcaccuaaagg

SEQ ID NO: 1447838 - RNA, 19 nt, Homo sapiens
  misc_RNA (1)...(19): siRNA sense strand
gaaaacacgggcucgaaga

SEQ ID NO: 1447839 - RNA, 19 nt, Homo sapiens
  misc_RNA (1)...(19): siRNA sense strand
ggacccgucggaacugaau

SEQ ID NO: 1447840 - RNA, 19 nt, Homo sapiens
  misc_RNA (1)...(19): siRNA sense strand
cgcagcccauuaugaaguu

SEQ ID NO: 1447841 - RNA, 19 nt, Homo sapiens
  misc_RNA (1)...(19): siRNA sense strand
gacagaagaaagccaggau

SEQ ID NO: 1447842 - RNA, 19 nt, Homo sapiens
  misc_RNA (1)...(19): siRNA sense strand
cuaguucggccucgcagaa

SEQ ID NO: 1447843 - RNA, 19 nt, Homo sapiens
  misc_RNA (1)...(19): siRNA sense strand
caggacccgucggaacuga

SEQ ID NO: 1447844 - RNA, 19 nt, Homo sapiens
  misc_RNA (1)...(19): siRNA sense strand
ggaacugaauccccagaca

SEQ ID NO: 1447845 - RNA, 19 nt, Homo sapiens
  misc_RNA (1)...(19): siRNA sense strand
cgaucgcagcccauuauga

SEQ ID NO: 1447846 - RNA, 19 nt, Homo sapiens
  misc_RNA (1)...(19): siRNA sense strand
gagcagaucggacagaaga

SEQ ID NO: 1447847 - RNA, 19 nt, Homo sapiens
  misc_RNA (1)...(19): siRNA sense strand
ggacagaagauccgcaaga

SEQ ID NO: 1447848 - RNA, 19 nt, Homo sapiens
  misc_RNA (1)...(19): siRNA sense strand
gacagaagauccgcaagau

SEQ ID NO: 1447849 - RNA, 19 nt, Homo sapiens
  misc_RNA (1)...(19): siRNA sense strand
ggaccugccugacgcaucu

SEQ ID NO: 1447850 - RNA, 19 nt, Homo sapiens
  misc_RNA (1)...(19): siRNA sense strand
caacgucaccggugucuuc

SEQ ID NO: 1447851 - RNA, 19 nt, Homo sapiens
  misc_RNA (1)...(19): siRNA sense strand
gccacgggcugcucauguu

SEQ ID NO: 1447852 - RNA, 19 nt, Homo sapiens
  misc_RNA (1)...(19): siRNA sense strand
ugaccuuccucaucuccua

SEQ ID NO: 1447853 - RNA, 19 nt, Homo sapiens
  misc_RNA (1)...(19): siRNA sense strand
caccuucgcugccacagau

SEQ ID NO: 1447854 - RNA, 19 nt, Homo sapiens
  misc_RNA (1)...(19): siRNA sense strand
uggcaucgauccuauuugg

SEQ ID NO: 1447855 - RNA, 19 nt, Homo sapiens
  misc_RNA (1)...(19): siRNA sense strand
ccucaacuccuucaagaug

SEQ ID NO: 1447856 - RNA, 19 nt, Homo sapiens
  misc_RNA (1)...(19): siRNA sense strand
gugcagguccacaagauga

SEQ ID NO: 1447857 - RNA, 19 nt, Homo sapiens
  misc_RNA (1)...(19): siRNA sense strand
gggccuggaugaugaagag

SEQ ID NO: 1447858 - RNA, 19 nt, Homo sapiens
  misc_RNA (1)...(19): siRNA sense strand
gugagcagaucggacagaa

SEQ ID NO: 1447859 - RNA, 19 nt, Homo sapiens
  misc_RNA (1)...(19): siRNA sense strand
gagaaccgaccggcuguga

SEQ ID NO: 1447860 - RNA, 19 nt, Homo sapiens
  misc_RNA (1)...(19): siRNA sense strand
gcuaccugcuccugcuuau

SEQ ID NO: 1447861 - RNA, 19 nt, Homo sapiens
  misc_RNA (1)...(19): siRNA sense strand
gagccagccacguggauga

SEQ ID NO: 1447862 - RNA, 19 nt, Homo sapiens
  misc_RNA (1)...(19): siRNA sense strand
ccaugguccuugcggagaa

SEQ ID NO: 1447863 - RNA, 19 nt, Homo sapiens
  misc_RNA (1)...(19): siRNA sense strand
cagucuggcuggagugaug

SEQ ID NO: 1447864 - RNA, 19 nt, Homo sapiens
  misc_RNA (1)...(19): siRNA sense strand
gcaagaucacggacugcuu

SEQ ID NO: 1447865 - RNA, 19 nt, Homo sapiens
  misc_RNA (1)...(19): siRNA sense strand
ugcugggacucuucgguua

SEQ ID NO: 1447866 - RNA, 19 nt, Homo sapiens
  misc_RNA (1)...(19): siRNA sense strand
caucuacaccggcuucauc

SEQ ID NO: 1447867 - RNA, 19 nt, Homo sapiens
  misc_RNA (1)...(19): siRNA sense strand
ggugauggagggacucuca

SEQ ID NO: 1447868 - RNA, 19 nt, Homo sapiens
  misc_RNA (1)...(19): siRNA sense strand
uggcuggagugaugcauuc

SEQ ID NO: 1447869 - RNA, 19 nt, Homo sapiens
  misc_RNA (1)...(19): siRNA sense strand
ccagcauccucauccacuu

SEQ ID NO: 1447870 - RNA, 19 nt, Homo sapiens
  misc_RNA (1)...(19): siRNA sense strand
ccguguaccuggcccugaa

SEQ ID NO: 1447871 - RNA, 19 nt, Homo sapiens
  misc_RNA (1)...(19): siRNA sense strand
ccacguggaugaccuuccu

SEQ ID NO: 1447872 - RNA, 19 nt, Homo sapiens
  misc_RNA (1)...(19): siRNA sense strand
ucaaccacgugcacuuugg

SEQ ID NO: 1447873 - RNA, 19 nt, Homo sapiens
  misc_RNA (1)...(19): siRNA sense strand
cuacaacgagugcuucagu

SEQ ID NO: 1447874 - RNA, 19 nt, Homo sapiens
  misc_RNA (1)...(19): siRNA sense strand
cucaacuccuucaagauga

SEQ ID NO: 1447875 - RNA, 19 nt, Homo sapiens
  misc_RNA (1)...(19): siRNA sense strand
uuccucaacuccuucaaga

SEQ ID NO: 1447876 - RNA, 19 nt, Homo sapiens
  misc_RNA (1)...(19): siRNA sense strand
caagaugaaggccguguac

SEQ ID NO: 1447877 - RNA, 19 nt, Homo sapiens
  misc_RNA (1)...(19): siRNA sense strand
acaccggcuucaucuacaa

SEQ ID NO: 1447878 - RNA, 19 nt, Homo sapiens
  misc_RNA (1)...(19): siRNA sense strand
ggccuguucuccaucuaca

SEQ ID NO: 1447879 - RNA, 19 nt, Homo sapiens
  misc_RNA (1)...(19): siRNA sense strand
ccuguuugcugugauguuc

SEQ ID NO: 1447880 - RNA, 19 nt, Homo sapiens
  misc_RNA (1)...(19): siRNA sense strand
ucaucaacauguuccucuu

SEQ ID NO: 1447881 - RNA, 19 nt, Homo sapiens
  misc_RNA (1)...(19): siRNA sense strand
ccuacaccaucaucaccuu

SEQ ID NO: 1447882 - RNA, 19 nt, Homo sapiens
  misc_RNA (1)...(19): siRNA sense strand
caucaacauguuccucuuc

SEQ ID NO: 1447883 - RNA, 19 nt, Homo sapiens
  misc_RNA (1)...(19): siRNA sense strand
ccacuucaucaacauguuc

SEQ ID NO: 1447884 - RNA, 19 nt, Homo sapiens
  misc_RNA (1)...(19): siRNA sense strand
cuacaccggcuucaucuac

SEQ ID NO: 1447885 - RNA, 19 nt, Homo sapiens
  misc_RNA (1)...(19): siRNA sense strand
gagcagaucggacagaaga

SEQ ID NO: 1447886 - RNA, 19 nt, Homo sapiens
  misc_RNA (1)...(19): siRNA sense strand
ggacagaagauccgcaaga

SEQ ID NO: 1447887 - RNA, 19 nt, Homo sapiens
  misc_RNA (1)...(19): siRNA sense strand
gacagaagauccgcaagau

SEQ ID NO: 1447888 - RNA, 19 nt, Homo sapiens
  misc_RNA (1)...(19): siRNA sense strand
ggaccugccugacgcaucu

SEQ ID NO: 1447889 - RNA, 19 nt, Homo sapiens
  misc_RNA (1)...(19): siRNA sense strand
caacgucaccggugucuuc

SEQ ID NO: 1447890 - RNA, 19 nt, Homo sapiens
  misc_RNA (1)...(19): siRNA sense strand
gccacgggcugcucauguu

SEQ ID NO: 1447891 - RNA, 19 nt, Homo sapiens
  misc_RNA (1)...(19): siRNA sense strand
caccuucgcugccacagau

SEQ ID NO: 1447892 - RNA, 19 nt, Homo sapiens
  misc_RNA (1)...(19): siRNA sense strand
uggcaucgauccuauuugg

SEQ ID NO: 1447893 - RNA, 19 nt, Homo sapiens
  misc_RNA (1)...(19): siRNA sense strand
ccucaacuccuucaagaug

SEQ ID NO: 1447894 - RNA, 19 nt, Homo sapiens
  misc_RNA (1)...(19): siRNA sense strand
gugcagguccacaagauga

SEQ ID NO: 1447895 - RNA, 19 nt, Homo sapiens
  misc_RNA (1)...(19): siRNA sense strand
gggccuggaugaugaagag

SEQ ID NO: 1447896 - RNA, 19 nt, Homo sapiens
  misc_RNA (1)...(19): siRNA sense strand
gugagcagaucggacagaa

SEQ ID NO: 1447897 - RNA, 19 nt, Homo sapiens
  misc_RNA (1)...(19): siRNA sense strand
gagaaccgaccggcuguga

SEQ ID NO: 1447898 - RNA, 19 nt, Homo sapiens
  misc_RNA (1)...(19): siRNA sense strand
gcuaccugcuccugcuuau

SEQ ID NO: 1447899 - RNA, 19 nt, Homo sapiens
  misc_RNA (1)...(19): siRNA sense strand
ccaugguccuugcggagaa

SEQ ID NO: 1447900 - RNA, 19 nt, Homo sapiens
  misc_RNA (1)...(19): siRNA sense strand
cagucuggcuggagugaug

SEQ ID NO: 1447901 - RNA, 19 nt, Homo sapiens
  misc_RNA (1)...(19): siRNA sense strand
gcaagaucacggacugcuu

SEQ ID NO: 1447902 - RNA, 19 nt, Homo sapiens
  misc_RNA (1)...(19): siRNA sense strand
ugcugggacucuucgguua

SEQ ID NO: 1447903 - RNA, 19 nt, Homo sapiens
  misc_RNA (1)...(19): siRNA sense strand
caucuacaccggcuucauc

SEQ ID NO: 1447904 - RNA, 19 nt, Homo sapiens
  misc_RNA (1)...(19): siRNA sense strand
ggugauggagggacucuca

SEQ ID NO: 1447905 - RNA, 19 nt, Homo sapiens
  misc_RNA (1)...(19): siRNA sense strand
uggcuggagugaugcauuc

SEQ ID NO: 1447906 - RNA, 19 nt, Homo sapiens
  misc_RNA (1)...(19): siRNA sense strand
ccagcauccucauccacuu

SEQ ID NO: 1447907 - RNA, 19 nt, Homo sapiens
  misc_RNA (1)...(19): siRNA sense strand
ccguguaccuggcccugaa

SEQ ID NO: 1447908 - RNA, 19 nt, Homo sapiens
  misc_RNA (1)...(19): siRNA sense strand
ucaaccacgugcacuuugg

SEQ ID NO: 1447909 - RNA, 19 nt, Homo sapiens
  misc_RNA (1)...(19): siRNA sense strand
cuacaacgagugcuucagu

SEQ ID NO: 1447910 - RNA, 19 nt, Homo sapiens
  misc_RNA (1)...(19): siRNA sense strand
cucaacuccuucaagauga

SEQ ID NO: 1447911 - RNA, 19 nt, Homo sapiens
  misc_RNA (1)...(19): siRNA sense strand
uuccucaacuccuucaaga

SEQ ID NO: 1447912 - RNA, 19 nt, Homo sapiens
  misc_RNA (1)...(19): siRNA sense strand
caagaugaaggccguguac

SEQ ID NO: 1447913 - RNA, 19 nt, Homo sapiens
  misc_RNA (1)...(19): siRNA sense strand
acaccggcuucaucuacaa

SEQ ID NO: 1447914 - RNA, 19 nt, Homo sapiens
  misc_RNA (1)...(19): siRNA sense strand
ggccuguucuccaucuaca

SEQ ID NO: 1447915 - RNA, 19 nt, Homo sapiens
  misc_RNA (1)...(19): siRNA sense strand
ccuguuugcugugauguuc

SEQ ID NO: 1447916 - RNA, 19 nt, Homo sapiens
  misc_RNA (1)...(19): siRNA sense strand
ucaucaacauguuccucuu

SEQ ID NO: 1447917 - RNA, 19 nt, Homo sapiens
  misc_RNA (1)...(19): siRNA sense strand
ccuacaccaucaucaccuu

SEQ ID NO: 1447918 - RNA, 19 nt, Homo sapiens
  misc_RNA (1)...(19): siRNA sense strand
caucaacauguuccucuuc

SEQ ID NO: 1447919 - RNA, 19 nt, Homo sapiens
  misc_RNA (1)...(19): siRNA sense strand
ccacuucaucaacauguuc

SEQ ID NO: 1447920 - RNA, 19 nt, Homo sapiens
  misc_RNA (1)...(19): siRNA sense strand
cuacaccggcuucaucuac

SEQ ID NO: 1447921 - RNA, 19 nt, Homo sapiens
  misc_RNA (1)...(19): siRNA sense strand
gaacauacccuuagaagaa

SEQ ID NO: 1447922 - RNA, 19 nt, Homo sapiens
  misc_RNA (1)...(19): siRNA sense strand
ccaaagaaaucuccaguuu

SEQ ID NO: 1447923 - RNA, 19 nt, Homo sapiens
  misc_RNA (1)...(19): siRNA sense strand
ccaauaaucucuuaacaga

SEQ ID NO: 1447924 - RNA, 19 nt, Homo sapiens
  misc_RNA (1)...(19): siRNA sense strand
ugaaggaucuaauagcuua

SEQ ID NO: 1447925 - RNA, 19 nt, Homo sapiens
  misc_RNA (1)...(19): siRNA sense strand
gaaagaagguaugcagauu

SEQ ID NO: 1447926 - RNA, 19 nt, Homo sapiens
  misc_RNA (1)...(19): siRNA sense strand
ccaaaguuaucaagucuua

SEQ ID NO: 1447927 - RNA, 19 nt, Homo sapiens
  misc_RNA (1)...(19): siRNA sense strand
ggcaauaugucucaacuaa

SEQ ID NO: 1447928 - RNA, 19 nt, Homo sapiens
  misc_RNA (1)...(19): siRNA sense strand
gccauuaucuucauguuaa

SEQ ID NO: 1447929 - RNA, 19 nt, Homo sapiens
  misc_RNA (1)...(19): siRNA sense strand
ugaauuauccugcaacaua

SEQ ID NO: 1447930 - RNA, 19 nt, Homo sapiens
  misc_RNA (1)...(19): siRNA sense strand
caaauguucuuacuuccua

SEQ ID NO: 1447931 - RNA, 19 nt, Homo sapiens
  misc_RNA (1)...(19): siRNA sense strand
caacauaacucugcugauc

SEQ ID NO: 1447932 - RNA, 19 nt, Homo sapiens
  misc_RNA (1)...(19): siRNA sense strand
gcuagaagauaacaaaugu

SEQ ID NO: 1447933 - RNA, 19 nt, Homo sapiens
  misc_RNA (1)...(19): siRNA sense strand
ugaagucucugcaacaauu

SEQ ID NO: 1447934 - RNA, 19 nt, Homo sapiens
  misc_RNA (1)...(19): siRNA sense strand
gaaacaacuuggaauucuu

SEQ ID NO: 1447935 - RNA, 19 nt, Homo sapiens
  misc_RNA (1)...(19): siRNA sense strand
guuaucaagucuuaccuua

SEQ ID NO: 1447936 - RNA, 19 nt, Homo sapiens
  misc_RNA (1)...(19): siRNA sense strand
cuaaagaccuaucccagaa

SEQ ID NO: 1447937 - RNA, 19 nt, Homo sapiens
  misc_RNA (1)...(19): siRNA sense strand
gaucugcccugguaucuca

SEQ ID NO: 1447938 - RNA, 19 nt, Homo sapiens
  misc_RNA (1)...(19): siRNA sense strand
gaaaugacuacacagauga

SEQ ID NO: 1447939 - RNA, 19 nt, Homo sapiens
  misc_RNA (1)...(19): siRNA sense strand
uggcgaaacuucaaacaaa

SEQ ID NO: 1447940 - RNA, 19 nt, Homo sapiens
  misc_RNA (1)...(19): siRNA sense strand
ucaaaugugugcuagaaga

SEQ ID NO: 1447941 - RNA, 19 nt, Homo sapiens
  misc_RNA (1)...(19): siRNA sense strand
ugaaaugacuacacagaug

SEQ ID NO: 1447942 - RNA, 19 nt, Homo sapiens
  misc_RNA (1)...(19): siRNA sense strand
cagcuggacuucagagauu

SEQ ID NO: 1447943 - RNA, 19 nt, Homo sapiens
  misc_RNA (1)...(19): siRNA sense strand
gaggaacccuacuaaagga

SEQ ID NO: 1447944 - RNA, 19 nt, Homo sapiens
  misc_RNA (1)...(19): siRNA sense strand
cagaagaugaggucaauaa

SEQ ID NO: 1447945 - RNA, 19 nt, Homo sapiens
  misc_RNA (1)...(19): siRNA sense strand
gccaauugcucauuugaau

SEQ ID NO: 1447946 - RNA, 19 nt, Homo sapiens
  misc_RNA (1)...(19): siRNA sense strand
caggaggacuuauuuggaa

SEQ ID NO: 1447947 - RNA, 19 nt, Homo sapiens
  misc_RNA (1)...(19): siRNA sense strand
uuagagggcuggccugauu

SEQ ID NO: 1447948 - RNA, 19 nt, Homo sapiens
  misc_RNA (1)...(19): siRNA sense strand
gaugaagucucugcaacaa

SEQ ID NO: 1447949 - RNA, 19 nt, Homo sapiens
  misc_RNA (1)...(19): siRNA sense strand
ggaauucuuucauuaggau

SEQ ID NO: 1447950 - RNA, 19 nt, Homo sapiens
  misc_RNA (1)...(19): siRNA sense strand
gaauuggaauacuuggauu

SEQ ID NO: 1447951 - RNA, 19 nt, Homo sapiens
  misc_RNA (1)...(19): siRNA sense strand
cugcaacaauuggauauua

SEQ ID NO: 1447952 - RNA, 19 nt, Homo sapiens
  misc_RNA (1)...(19): siRNA sense strand
uagcaaaucuggaacuauc

SEQ ID NO: 1447953 - RNA, 19 nt, Homo sapiens
  misc_RNA (1)...(19): siRNA sense strand
uaucaaaugugugcuagaa

SEQ ID NO: 1447954 - RNA, 19 nt, Homo sapiens
  misc_RNA (1)...(19): siRNA sense strand
ugacagagcaagcaaagaa

SEQ ID NO: 1447955 - RNA, 19 nt, Homo sapiens
  misc_RNA (1)...(19): siRNA sense strand
uaucugagcuuuggacuuc

SEQ ID NO: 1447956 - RNA, 19 nt, Homo sapiens
  misc_RNA (1)...(19): siRNA sense strand
aguaucaagugaaguguua

SEQ ID NO: 1447957 - RNA, 19 nt, Homo sapiens
  misc_RNA (1)...(19): siRNA sense strand
gggcuggccugauucuuau

SEQ ID NO: 1447958 - RNA, 19 nt, Homo sapiens
  misc_RNA (1)...(19): siRNA sense strand
ucacaugucugaauuaucc

SEQ ID NO: 1447959 - RNA, 19 nt, Homo sapiens
  misc_RNA (1)...(19): siRNA sense strand
uagcagccuuucuguauug

SEQ ID NO: 1447960 - RNA, 19 nt, Homo sapiens
  misc_RNA (1)...(19): siRNA sense strand
cuacacagaugaagucucu

SEQ ID NO: 1447961 - RNA, 19 nt, Homo sapiens
  misc_RNA (1)...(19): siRNA sense strand
aagaagguaugcagauuug

SEQ ID NO: 1447962 - RNA, 19 nt, Homo sapiens
  misc_RNA (1)...(19): siRNA sense strand
ggagacuguucuuggacua

SEQ ID NO: 1447963 - RNA, 19 nt, Homo sapiens
  misc_RNA (1)...(19): siRNA sense strand
gaccaaguaucaagugaag

SEQ ID NO: 1447964 - RNA, 19 nt, Homo sapiens
  misc_RNA (1)...(19): siRNA sense strand
gcaaaucuggaacuaucua

SEQ ID NO: 1447965 - RNA, 19 nt, Homo sapiens
  misc_RNA (1)...(19): siRNA sense strand
cacaaucucuuucaugaag

SEQ ID NO: 1447966 - RNA, 19 nt, Homo sapiens
  misc_RNA (1)...(19): siRNA sense strand
gcaagagcauuguggaaaa

SEQ ID NO: 1447967 - RNA, 19 nt, Homo sapiens
  misc_RNA (1)...(19): siRNA sense strand
aaaggagacuguucuugga

SEQ ID NO: 1447968 - RNA, 19 nt, Homo sapiens
  misc_RNA (1)...(19): siRNA sense strand
ugaaacaacuuggaauucu

SEQ ID NO: 1447969 - RNA, 19 nt, Homo sapiens
  misc_RNA (1)...(19): siRNA sense strand
ccaguuucaugcauuuauu

SEQ ID NO: 1447970 - RNA, 19 nt, Homo sapiens
  misc_RNA (1)...(19): siRNA sense strand
caauguugcuuucaauucu

SEQ ID NO: 1447971 - RNA, 19 nt, Homo sapiens
  misc_RNA (1)...(19): siRNA sense strand
gcaauaugucucaacuaaa

SEQ ID NO: 1447972 - RNA, 19 nt, Homo sapiens
  misc_RNA (1)...(19): siRNA sense strand
gagcaccacacacuuagaa

SEQ ID NO: 1447973 - RNA, 19 nt, Homo sapiens
  misc_RNA (1)...(19): siRNA sense strand
ggaauuggaauacuuggau

SEQ ID NO: 1447974 - RNA, 19 nt, Homo sapiens
  misc_RNA (1)...(19): siRNA sense strand
ccaggaacauacccuuaga

SEQ ID NO: 1447975 - RNA, 19 nt, Homo sapiens
  misc_RNA (1)...(19): siRNA sense strand
ucagcgauguguucgguuu

SEQ ID NO: 1447976 - RNA, 19 nt, Homo sapiens
  misc_RNA (1)...(19): siRNA sense strand
guugagcaccacacacuua

SEQ ID NO: 1447977 - RNA, 19 nt, Homo sapiens
  misc_RNA (1)...(19): siRNA sense strand
acuuggaccugucauuuaa

SEQ ID NO: 1447978 - RNA, 19 nt, Homo sapiens
  misc_RNA (1)...(19): siRNA sense strand
guuaauacuucagaucaga

SEQ ID NO: 1447979 - RNA, 19 nt, Homo sapiens
  misc_RNA (1)...(19): siRNA sense strand
uagcugaaaugacuacaca

SEQ ID NO: 1447980 - RNA, 19 nt, Homo sapiens
  misc_RNA (1)...(19): siRNA sense strand
agucuuaccuuaaacaaca

SEQ ID NO: 1447981 - RNA, 19 nt, Homo sapiens
  misc_RNA (1)...(19): siRNA sense strand
aaugugugcuagaagauaa

SEQ ID NO: 1447982 - RNA, 19 nt, Homo sapiens
  misc_RNA (1)...(19): siRNA sense strand
cagagcaagcaaagaaaua

SEQ ID NO: 1447983 - RNA, 19 nt, Homo sapiens
  misc_RNA (1)...(19): siRNA sense strand
gcaguuaucacaagcucaa

SEQ ID NO: 1447984 - RNA, 19 nt, Homo sapiens
  misc_RNA (1)...(19): siRNA sense strand
ccgcaguacuccauuccua

SEQ ID NO: 1447985 - RNA, 19 nt, Homo sapiens
  misc_RNA (1)...(19): siRNA sense strand
gcgcagggccaggaacaua

SEQ ID NO: 1447986 - RNA, 19 nt, Homo sapiens
  misc_RNA (1)...(19): siRNA sense strand
uuccagagcugccagaaga

SEQ ID NO: 1447987 - RNA, 19 nt, Homo sapiens
  misc_RNA (1)...(19): siRNA sense strand
ggcgaaacuucaaacaaau

SEQ ID NO: 1447988 - RNA, 19 nt, Homo sapiens
  misc_RNA (1)...(19): siRNA sense strand
acaaguuggugaagauuuc

SEQ ID NO: 1447989 - RNA, 19 nt, Homo sapiens
  misc_RNA (1)...(19): siRNA sense strand
uaagggcagccauuaauau

SEQ ID NO: 1447990 - RNA, 19 nt, Homo sapiens
  misc_RNA (1)...(19): siRNA sense strand
aaagaagguaugcagauuu

SEQ ID NO: 1447991 - RNA, 19 nt, Homo sapiens
  misc_RNA (1)...(19): siRNA sense strand
ggaacauacccuuagaaga

SEQ ID NO: 1447992 - RNA, 19 nt, Homo sapiens
  misc_RNA (1)...(19): siRNA sense strand
ucuguaagcuaugaugaaa

SEQ ID NO: 1447993 - RNA, 19 nt, Homo sapiens
  misc_RNA (1)...(19): siRNA sense strand
ucugacaucuuaucacugu

SEQ ID NO: 1447994 - RNA, 19 nt, Homo sapiens
  misc_RNA (1)...(19): siRNA sense strand
ugagggccuucaagacuuu

SEQ ID NO: 1447995 - RNA, 19 nt, Homo sapiens
  misc_RNA (1)...(19): siRNA sense strand
ccaauugcucauuugaaua

SEQ ID NO: 1447996 - RNA, 19 nt, Homo sapiens
  misc_RNA (1)...(19): siRNA sense strand
gaacccuacuaaaggacuu

SEQ ID NO: 1447997 - RNA, 19 nt, Homo sapiens
  misc_RNA (1)...(19): siRNA sense strand
gaagaugaggucaauaaaa

SEQ ID NO: 1447998 - RNA, 19 nt, Homo sapiens
  misc_RNA (1)...(19): siRNA sense strand
gccagaagaugaggucaau

SEQ ID NO: 1447999 - RNA, 19 nt, Homo sapiens
  misc_RNA (1)...(19): siRNA sense strand
uaacuuaagggcagccauu

SEQ ID NO: 1448000 - RNA, 19 nt, Homo sapiens
  misc_RNA (1)...(19): siRNA sense strand
gugggcaccuuacugaguu

SEQ ID NO: 1448001 - RNA, 19 nt, Homo sapiens
  misc_RNA (1)...(19): siRNA sense strand
caugaaggaucuaauagcu

SEQ ID NO: 1448002 - RNA, 19 nt, Homo sapiens
  misc_RNA (1)...(19): siRNA sense strand
ccaacuuuguccagaguga

SEQ ID NO: 1448003 - RNA, 19 nt, Homo sapiens
  misc_RNA (1)...(19): siRNA sense strand
ccaaguaucaagugaagug

SEQ ID NO: 1448004 - RNA, 19 nt, Homo sapiens
  misc_RNA (1)...(19): siRNA sense strand
ccugugagcuaggagaauu

SEQ ID NO: 1448005 - RNA, 19 nt, Homo sapiens
  misc_RNA (1)...(19): siRNA sense strand
ccagaaaacaacaaucuua

SEQ ID NO: 1448006 - RNA, 19 nt, Homo sapiens
  misc_RNA (1)...(19): siRNA sense strand
agaauucuguaagcuauga

SEQ ID NO: 1448007 - RNA, 19 nt, Homo sapiens
  misc_RNA (1)...(19): siRNA sense strand
cuggaacuaucuaauauca

SEQ ID NO: 1448008 - RNA, 19 nt, Homo sapiens
  misc_RNA (1)...(19): siRNA sense strand
uaaguauucuggcgaaacu

SEQ ID NO: 1448009 - RNA, 19 nt, Homo sapiens
  misc_RNA (1)...(19): siRNA sense strand
gaguuggagacacuuauuu

SEQ ID NO: 1448010 - RNA, 19 nt, Homo sapiens
  misc_RNA (1)...(19): siRNA sense strand
ggcaagagcauuguggaaa

SEQ ID NO: 1448011 - RNA, 19 nt, Homo sapiens
  misc_RNA (1)...(19): siRNA sense strand
gggugaagaaugaauuauu

SEQ ID NO: 1448012 - RNA, 19 nt, Homo sapiens
  misc_RNA (1)...(19): siRNA sense strand
uagaggaacccuacuaaag

SEQ ID NO: 1448013 - RNA, 19 nt, Homo sapiens
  misc_RNA (1)...(19): siRNA sense strand
uauagaggaacccuacuaa

SEQ ID NO: 1448014 - RNA, 19 nt, Homo sapiens
  misc_RNA (1)...(19): siRNA sense strand
uuggacuucugacaucuua

SEQ ID NO: 1448015 - RNA, 19 nt, Homo sapiens
  misc_RNA (1)...(19): siRNA sense strand
cagauuugccuucaugaga

SEQ ID NO: 1448016 - RNA, 19 nt, Homo sapiens
  misc_RNA (1)...(19): siRNA sense strand
gcuuuggacuucugacauc

SEQ ID NO: 1448017 - RNA, 19 nt, Homo sapiens
  misc_RNA (1)...(19): siRNA sense strand
gcugaaaugacuacacaga

SEQ ID NO: 1448018 - RNA, 19 nt, Homo sapiens
  misc_RNA (1)...(19): siRNA sense strand
gaaaauugugggcaccuua

SEQ ID NO: 1448019 - RNA, 19 nt, Homo sapiens
  misc_RNA (1)...(19): siRNA sense strand
ucaagacuguagcaaaucu

SEQ ID NO: 1448020 - RNA, 19 nt, Homo sapiens
  misc_RNA (1)...(19): siRNA sense strand
gauuugccuucaugagaga

SEQ ID NO: 1448021 - RNA, 19 nt, Homo sapiens
  misc_RNA (1)...(19): siRNA sense strand
gaaaggagaccaugucaaa

SEQ ID NO: 1448022 - RNA, 19 nt, Homo sapiens
  misc_RNA (1)...(19): siRNA sense strand
aggaagagcucugaaauua

SEQ ID NO: 1448023 - RNA, 19 nt, Homo sapiens
  misc_RNA (1)...(19): siRNA sense strand
ggacucauaugcaagauug

SEQ ID NO: 1448024 - RNA, 19 nt, Homo sapiens
  misc_RNA (1)...(19): siRNA sense strand
ggaauggacucauaugcaa

SEQ ID NO: 1448025 - RNA, 19 nt, Homo sapiens
  misc_RNA (1)...(19): siRNA sense strand
gcagaagagugguacuuug

SEQ ID NO: 1448026 - RNA, 19 nt, Homo sapiens
  misc_RNA (1)...(19): siRNA sense strand
gaaguuuacuggauuucuu

SEQ ID NO: 1448027 - RNA, 19 nt, Homo sapiens
  misc_RNA (1)...(19): siRNA sense strand
gaagagugguacuuuggaa

SEQ ID NO: 1448028 - RNA, 19 nt, Homo sapiens
  misc_RNA (1)...(19): siRNA sense strand
caaaggaaguuuacuggau

SEQ ID NO: 1448029 - RNA, 19 nt, Homo sapiens
  misc_RNA (1)...(19): siRNA sense strand
gcucugaaauuaccaaauc

SEQ ID NO: 1448030 - RNA, 19 nt, Homo sapiens
  misc_RNA (1)...(19): siRNA sense strand
gaacaaaggaaguuuacug

SEQ ID NO: 1448031 - RNA, 19 nt, Homo sapiens
  misc_RNA (1)...(19): siRNA sense strand
gaaauuaccaaaucuugug

SEQ ID NO: 1448032 - RNA, 19 nt, Homo sapiens
  misc_RNA (1)...(19): siRNA sense strand
aaaggaaguuuacuggauu

SEQ ID NO: 1448033 - RNA, 19 nt, Homo sapiens
  misc_RNA (1)...(19): siRNA sense strand
gaaggaagagcucugaaau

SEQ ID NO: 1448034 - RNA, 19 nt, Homo sapiens
  misc_RNA (1)...(19): siRNA sense strand
gacagaagaugaccugagu

SEQ ID NO: 1448035 - RNA, 19 nt, Homo sapiens
  misc_RNA (1)...(19): siRNA sense strand
gaagagcucugaaauuacc

SEQ ID NO: 1448036 - RNA, 19 nt, Homo sapiens
  misc_RNA (1)...(19): siRNA sense strand
gaagcccgcuccuugacaa

SEQ ID NO: 1448037 - RNA, 19 nt, Homo sapiens
  misc_RNA (1)...(19): siRNA sense strand
gaacagcucggaaggagau

SEQ ID NO: 1448038 - RNA, 19 nt, Homo sapiens
  misc_RNA (1)...(19): siRNA sense strand
ugauugggaugauaugaaa

SEQ ID NO: 1448039 - RNA, 19 nt, Homo sapiens
  misc_RNA (1)...(19): siRNA sense strand
caacuggagagacagguua

SEQ ID NO: 1448040 - RNA, 19 nt, Homo sapiens
  misc_RNA (1)...(19): siRNA sense strand
ggagagacagguuacauuc

SEQ ID NO: 1448041 - RNA, 19 nt, Homo sapiens
  misc_RNA (1)...(19): siRNA sense strand
cggauuggcccgauugaua

SEQ ID NO: 1448042 - RNA, 19 nt, Homo sapiens
  misc_RNA (1)...(19): siRNA sense strand
gaagaacgccccacuuuug

SEQ ID NO: 1448043 - RNA, 19 nt, Homo sapiens
  misc_RNA (1)...(19): siRNA sense strand
cagaagaugaccugaguuu

SEQ ID NO: 1448044 - RNA, 19 nt, Homo sapiens
  misc_RNA (1)...(19): siRNA sense strand
aagcgcagaucaugaagaa

SEQ ID NO: 1448045 - RNA, 19 nt, Homo sapiens
  misc_RNA (1)...(19): siRNA sense strand
acaucgagcgcaugaauua

SEQ ID NO: 1448046 - RNA, 19 nt, Homo sapiens
  misc_RNA (1)...(19): siRNA sense strand
gcgcaugaauuauauccau

SEQ ID NO: 1448047 - RNA, 19 nt, Homo sapiens
  misc_RNA (1)...(19): siRNA sense strand
caaaggugccuauucacuu

SEQ ID NO: 1448048 - RNA, 19 nt, Homo sapiens
  misc_RNA (1)...(19): siRNA sense strand
acagguggcugcaggaaug

SEQ ID NO: 1448049 - RNA, 19 nt, Homo sapiens
  misc_RNA (1)...(19): siRNA sense strand
gcaauguaaggauaaagaa

SEQ ID NO: 1448050 - RNA, 19 nt, Homo sapiens
  misc_RNA (1)...(19): siRNA sense strand
ugacaaugguggauacuac

SEQ ID NO: 1448051 - RNA, 19 nt, Homo sapiens
  misc_RNA (1)...(19): siRNA sense strand
gauagaagacaaugaguac

SEQ ID NO: 1448052 - RNA, 19 nt, Homo sapiens
  misc_RNA (1)...(19): siRNA sense strand
uaccaaaucuuguggacau

SEQ ID NO: 1448053 - RNA, 19 nt, Homo sapiens
  misc_RNA (1)...(19): siRNA sense strand
gacaaugaguacacagcaa

SEQ ID NO: 1448054 - RNA, 19 nt, Homo sapiens
  misc_RNA (1)...(19): siRNA sense strand
caagacaaggugcaaaguu

SEQ ID NO: 1448055 - RNA, 19 nt, Homo sapiens
  misc_RNA (1)...(19): siRNA sense strand
aagacaaggugcaaaguuc

SEQ ID NO: 1448056 - RNA, 19 nt, Homo sapiens
  misc_RNA (1)...(19): siRNA sense strand
gaagaugaccugaguuuuc

SEQ ID NO: 1448057 - RNA, 19 nt, Homo sapiens
  misc_RNA (1)...(19): siRNA sense strand
ggagaaggaagagcucuga

SEQ ID NO: 1448058 - RNA, 19 nt, Homo sapiens
  misc_RNA (1)...(19): siRNA sense strand
gccaaggacucaccgucuu

SEQ ID NO: 1448059 - RNA, 19 nt, Homo sapiens
  misc_RNA (1)...(19): siRNA sense strand
cagguuacauucccagcaa

SEQ ID NO: 1448060 - RNA, 19 nt, Homo sapiens
  misc_RNA (1)...(19): siRNA sense strand
ccgaguauaugaacaaagg

SEQ ID NO: 1448061 - RNA, 19 nt, Homo sapiens
  misc_RNA (1)...(19): siRNA sense strand
ugauagaagacaaugagua

SEQ ID NO: 1448062 - RNA, 19 nt, Homo sapiens
  misc_RNA (1)...(19): siRNA sense strand
gcgaucagcaaacauucua

SEQ ID NO: 1448063 - RNA, 19 nt, Homo sapiens
  misc_RNA (1)...(19): siRNA sense strand
agagguaccuuucuuaucc

SEQ ID NO: 1448064 - RNA, 19 nt, Homo sapiens
  misc_RNA (1)...(19): siRNA sense strand
guacacagcaagacaaggu

SEQ ID NO: 1448065 - RNA, 19 nt, Homo sapiens
  misc_RNA (1)...(19): siRNA sense strand
ugugugcaauguaaggaua

SEQ ID NO: 1448066 - RNA, 19 nt, Homo sapiens
  misc_RNA (1)...(19): siRNA sense strand
gugaacucuucgucucaua

SEQ ID NO: 1448067 - RNA, 19 nt, Homo sapiens
  misc_RNA (1)...(19): siRNA sense strand
ggauuggcccgauugauag

SEQ ID NO: 1448068 - RNA, 19 nt, Homo sapiens
  misc_RNA (1)...(19): siRNA sense strand
cgcaugaauuauauccaua

SEQ ID NO: 1448069 - RNA, 19 nt, Homo sapiens
  misc_RNA (1)...(19): siRNA sense strand
ucuaugcaguggugucuga

SEQ ID NO: 1448070 - RNA, 19 nt, Homo sapiens
  misc_RNA (1)...(19): siRNA sense strand
ggauaaagaagcaacaaaa

SEQ ID NO: 1448071 - RNA, 19 nt, Homo sapiens
  misc_RNA (1)...(19): siRNA sense strand
ccaaaggaagagugccaua

SEQ ID NO: 1448072 - RNA, 19 nt, Homo sapiens
  misc_RNA (1)...(19): siRNA sense strand
ccaaggacucaccgucuuu

SEQ ID NO: 1448073 - RNA, 19 nt, Homo sapiens
  misc_RNA (1)...(19): siRNA sense strand
gaauggaaacacaaaagua

SEQ ID NO: 1448074 - RNA, 19 nt, Homo sapiens
  misc_RNA (1)...(19): siRNA sense strand
cagcuauuguccuuuggaa

SEQ ID NO: 1448075 - RNA, 19 nt, Homo sapiens
  misc_RNA (1)...(19): siRNA sense strand
gaggaagcgcagaucauga

SEQ ID NO: 1448076 - RNA, 19 nt, Homo sapiens
  misc_RNA (1)...(19): siRNA sense strand
acacaaaaguagccauaaa

SEQ ID NO: 1448077 - RNA, 19 nt, Homo sapiens
  misc_RNA (1)...(19): siRNA sense strand
gggaauggacucauaugca

SEQ ID NO: 1448078 - RNA, 19 nt, Homo sapiens
  misc_RNA (1)...(19): siRNA sense strand
ucgagcgcaugaauuauau

SEQ ID NO: 1448079 - RNA, 19 nt, Homo sapiens
  misc_RNA (1)...(19): siRNA sense strand
aaggaaguuuacuggauuu

SEQ ID NO: 1448080 - RNA, 19 nt, Homo sapiens
  misc_RNA (1)...(19): siRNA sense strand
agaaggaagagcucugaaa

SEQ ID NO: 1448081 - RNA, 19 nt, Homo sapiens
  misc_RNA (1)...(19): siRNA sense strand
ggaagagcucugaaauuac

SEQ ID NO: 1448082 - RNA, 19 nt, Homo sapiens
  misc_RNA (1)...(19): siRNA sense strand
guuacauucccagcaauua

SEQ ID NO: 1448083 - RNA, 19 nt, Homo sapiens
  misc_RNA (1)...(19): siRNA sense strand
agucugacguguggucuuu

SEQ ID NO: 1448084 - RNA, 19 nt, Homo sapiens
  misc_RNA (1)...(19): siRNA sense strand
gaagcgcagaucaugaaga

SEQ ID NO: 1448085 - RNA, 19 nt, Homo sapiens
  misc_RNA (1)...(19): siRNA sense strand
ggcagaagagugguacuuu

SEQ ID NO: 1448086 - RNA, 19 nt, Homo sapiens
  misc_RNA (1)...(19): siRNA sense strand
gaguauaugaacaaaggaa

SEQ ID NO: 1448087 - RNA, 19 nt, Homo sapiens
  misc_RNA (1)...(19): siRNA sense strand
aaggaagagcucugaaauu

SEQ ID NO: 1448088 - RNA, 19 nt, Homo sapiens
  misc_RNA (1)...(19): siRNA sense strand
gcaugaauuauauccauag

SEQ ID NO: 1448089 - RNA, 19 nt, Homo sapiens
  misc_RNA (1)...(19): siRNA sense strand
gcuauuguccuuuggaaac

SEQ ID NO: 1448090 - RNA, 19 nt, Homo sapiens
  misc_RNA (1)...(19): siRNA sense strand
cuuaaaagauggagaagga

SEQ ID NO: 1448091 - RNA, 19 nt, Homo sapiens
  misc_RNA (1)...(19): siRNA sense strand
cuugacaacuggagagaca

SEQ ID NO: 1448092 - RNA, 19 nt, Homo sapiens
  misc_RNA (1)...(19): siRNA sense strand
gaucagcaaacauucuagu

SEQ ID NO: 1448093 - RNA, 19 nt, Homo sapiens
  misc_RNA (1)...(19): siRNA sense strand
gcacagguggcugcaggaa

SEQ ID NO: 1448094 - RNA, 19 nt, Homo sapiens
  misc_RNA (1)...(19): siRNA sense strand
gugauugggaugauaugaa

SEQ ID NO: 1448095 - RNA, 19 nt, Homo sapiens
  misc_RNA (1)...(19): siRNA sense strand
uuacauucccagcaauuau

SEQ ID NO: 1448096 - RNA, 19 nt, Homo sapiens
  misc_RNA (1)...(19): siRNA sense strand
agaagacaaugaguacaca

SEQ ID NO: 1448097 - RNA, 19 nt, Homo sapiens
  misc_RNA (1)...(19): siRNA sense strand
uuacaucgagcgcaugaau

SEQ ID NO: 1448098 - RNA, 19 nt, Homo sapiens
  misc_RNA (1)...(19): siRNA sense strand
ucaccgaguauaugaacaa

SEQ ID NO: 1448099 - RNA, 19 nt, Homo sapiens
  misc_RNA (1)...(19): siRNA sense strand
cuacaucgucaccgaguau

SEQ ID NO: 1448100 - RNA, 19 nt, Homo sapiens
  misc_RNA (1)...(19): siRNA sense strand
ugaggaagcgcagaucaug

SEQ ID NO: 1448101 - RNA, 19 nt, Homo sapiens
  misc_RNA (1)...(19): siRNA sense strand
cagcagcuuguacaacauu

SEQ ID NO: 1448102 - RNA, 19 nt, Homo sapiens
  misc_RNA (1)...(19): siRNA sense strand
aaggagaccaugucaaaca

SEQ ID NO: 1448103 - RNA, 19 nt, Homo sapiens
  misc_RNA (1)...(19): siRNA sense strand
cagaagagugguacuuugg

SEQ ID NO: 1448104 - RNA, 19 nt, Homo sapiens
  misc_RNA (1)...(19): siRNA sense strand
ccaaaggugccuauucacu

SEQ ID NO: 1448105 - RNA, 19 nt, Homo sapiens
  misc_RNA (1)...(19): siRNA sense strand
gcaagacaaggugcaaagu

SEQ ID NO: 1448106 - RNA, 19 nt, Homo sapiens
  misc_RNA (1)...(19): siRNA sense strand
gagaaggaagagcucugaa

SEQ ID NO: 1448107 - RNA, 19 nt, Homo sapiens
  misc_RNA (1)...(19): siRNA sense strand
ucgcaaacuugacaauggu

SEQ ID NO: 1448108 - RNA, 19 nt, Homo sapiens
  misc_RNA (1)...(19): siRNA sense strand
ggaagcccgcuccuugaca

SEQ ID NO: 1448109 - RNA, 19 nt, Homo sapiens
  misc_RNA (1)...(19): siRNA sense strand
caccgaguauaugaacaaa

SEQ ID NO: 1448110 - RNA, 19 nt, Homo sapiens
  misc_RNA (1)...(19): siRNA sense strand
gaagcacggacagaagaug

SEQ ID NO: 1448111 - RNA, 19 nt, Homo sapiens
  misc_RNA (1)...(19): siRNA sense strand
aggaagcgcagaucaugaa

SEQ ID NO: 1448112 - RNA, 19 nt, Homo sapiens
  misc_RNA (1)...(19): siRNA sense strand
uucagcagcuuguacaaca

SEQ ID NO: 1448113 - RNA, 19 nt, Homo sapiens
  misc_RNA (1)...(19): siRNA sense strand
gagugaaaccaccaaaggu

SEQ ID NO: 1448114 - RNA, 19 nt, Homo sapiens
  misc_RNA (1)...(19): siRNA sense strand
aaacuuggccgaaaagaug

SEQ ID NO: 1448115 - RNA, 19 nt, Homo sapiens
  misc_RNA (1)...(19): siRNA sense strand
gguuacauucccagcaauu

SEQ ID NO: 1448116 - RNA, 19 nt, Homo sapiens
  misc_RNA (1)...(19): siRNA sense strand
cugcaggaauggcuuacau

SEQ ID NO: 1448117 - RNA, 19 nt, Homo sapiens
  misc_RNA (1)...(19): siRNA sense strand
cugaggagcccaucuacau

SEQ ID NO: 1448118 - RNA, 19 nt, Homo sapiens
  misc_RNA (1)...(19): siRNA sense strand
uaccuggaauggaaacaca

SEQ ID NO: 1448119 - RNA, 19 nt, Homo sapiens
  misc_RNA (1)...(19): siRNA sense strand
ggcccuuuaugacuaugaa

SEQ ID NO: 1448120 - RNA, 19 nt, Homo sapiens
  misc_RNA (1)...(19): siRNA sense strand
uggcuccaguugacucuau

SEQ ID NO: 1448121 - RNA, 19 nt, Homo sapiens
  misc_RNA (1)...(19): siRNA sense strand
gaaaggagaccaugucaaa

SEQ ID NO: 1448122 - RNA, 19 nt, Homo sapiens
  misc_RNA (1)...(19): siRNA sense strand
aggaagagcucugaaauua

SEQ ID NO: 1448123 - RNA, 19 nt, Homo sapiens
  misc_RNA (1)...(19): siRNA sense strand
ggacucauaugcaagauug

SEQ ID NO: 1448124 - RNA, 19 nt, Homo sapiens
  misc_RNA (1)...(19): siRNA sense strand
ggaauggacucauaugcaa

SEQ ID NO: 1448125 - RNA, 19 nt, Homo sapiens
  misc_RNA (1)...(19): siRNA sense strand
gcagaagagugguacuuug

SEQ ID NO: 1448126 - RNA, 19 nt, Homo sapiens
  misc_RNA (1)...(19): siRNA sense strand
gaaguuuacuggauuucuu

SEQ ID NO: 1448127 - RNA, 19 nt, Homo sapiens
  misc_RNA (1)...(19): siRNA sense strand
gaagagugguacuuuggaa

SEQ ID NO: 1448128 - RNA, 19 nt, Homo sapiens
  misc_RNA (1)...(19): siRNA sense strand
caaaggaaguuuacuggau

SEQ ID NO: 1448129 - RNA, 19 nt, Homo sapiens
  misc_RNA (1)...(19): siRNA sense strand
gcucugaaauuaccaaauc

SEQ ID NO: 1448130 - RNA, 19 nt, Homo sapiens
  misc_RNA (1)...(19): siRNA sense strand
gaacaaaggaaguuuacug

SEQ ID NO: 1448131 - RNA, 19 nt, Homo sapiens
  misc_RNA (1)...(19): siRNA sense strand
gaaauuaccaaaucuugug

SEQ ID NO: 1448132 - RNA, 19 nt, Homo sapiens
  misc_RNA (1)...(19): siRNA sense strand
aaaggaaguuuacuggauu

SEQ ID NO: 1448133 - RNA, 19 nt, Homo sapiens
  misc_RNA (1)...(19): siRNA sense strand
gaaggaagagcucugaaau

SEQ ID NO: 1448134 - RNA, 19 nt, Homo sapiens
  misc_RNA (1)...(19): siRNA sense strand
gacagaagaugaccugagu

SEQ ID NO: 1448135 - RNA, 19 nt, Homo sapiens
  misc_RNA (1)...(19): siRNA sense strand
gaagagcucugaaauuacc

SEQ ID NO: 1448136 - RNA, 19 nt, Homo sapiens
  misc_RNA (1)...(19): siRNA sense strand
gaagcccgcuccuugacaa

SEQ ID NO: 1448137 - RNA, 19 nt, Homo sapiens
  misc_RNA (1)...(19): siRNA sense strand
gaacagcucggaaggagau

SEQ ID NO: 1448138 - RNA, 19 nt, Homo sapiens
  misc_RNA (1)...(19): siRNA sense strand
ugauugggaugauaugaaa

SEQ ID NO: 1448139 - RNA, 19 nt, Homo sapiens
  misc_RNA (1)...(19): siRNA sense strand
caacuggagagacagguua

SEQ ID NO: 1448140 - RNA, 19 nt, Homo sapiens
  misc_RNA (1)...(19): siRNA sense strand
ggagagacagguuacauuc

SEQ ID NO: 1448141 - RNA, 19 nt, Homo sapiens
  misc_RNA (1)...(19): siRNA sense strand
cggauuggcccgauugaua

SEQ ID NO: 1448142 - RNA, 19 nt, Homo sapiens
  misc_RNA (1)...(19): siRNA sense strand
gaagaacgccccacuuuug

SEQ ID NO: 1448143 - RNA, 19 nt, Homo sapiens
  misc_RNA (1)...(19): siRNA sense strand
cagaagaugaccugaguuu

SEQ ID NO: 1448144 - RNA, 19 nt, Homo sapiens
  misc_RNA (1)...(19): siRNA sense strand
aagcgcagaucaugaagaa

SEQ ID NO: 1448145 - RNA, 19 nt, Homo sapiens
  misc_RNA (1)...(19): siRNA sense strand
acaucgagcgcaugaauua

SEQ ID NO: 1448146 - RNA, 19 nt, Homo sapiens
  misc_RNA (1)...(19): siRNA sense strand
gcgcaugaauuauauccau

SEQ ID NO: 1448147 - RNA, 19 nt, Homo sapiens
  misc_RNA (1)...(19): siRNA sense strand
caaaggugccuauucacuu

SEQ ID NO: 1448148 - RNA, 19 nt, Homo sapiens
  misc_RNA (1)...(19): siRNA sense strand
acagguggcugcaggaaug

SEQ ID NO: 1448149 - RNA, 19 nt, Homo sapiens
  misc_RNA (1)...(19): siRNA sense strand
gcaauguaaggauaaagaa

SEQ ID NO: 1448150 - RNA, 19 nt, Homo sapiens
  misc_RNA (1)...(19): siRNA sense strand
ugacaaugguggauacuac

SEQ ID NO: 1448151 - RNA, 19 nt, Homo sapiens
  misc_RNA (1)...(19): siRNA sense strand
gauagaagacaaugaguac

SEQ ID NO: 1448152 - RNA, 19 nt, Homo sapiens
  misc_RNA (1)...(19): siRNA sense strand
uaccaaaucuuguggacau

SEQ ID NO: 1448153 - RNA, 19 nt, Homo sapiens
  misc_RNA (1)...(19): siRNA sense strand
gacaaugaguacacagcaa

SEQ ID NO: 1448154 - RNA, 19 nt, Homo sapiens
  misc_RNA (1)...(19): siRNA sense strand
caagacaaggugcaaaguu

SEQ ID NO: 1448155 - RNA, 19 nt, Homo sapiens
  misc_RNA (1)...(19): siRNA sense strand
aagacaaggugcaaaguuc

SEQ ID NO: 1448156 - RNA, 19 nt, Homo sapiens
  misc_RNA (1)...(19): siRNA sense strand
gaagaugaccugaguuuuc

SEQ ID NO: 1448157 - RNA, 19 nt, Homo sapiens
  misc_RNA (1)...(19): siRNA sense strand
ggagaaggaagagcucuga

SEQ ID NO: 1448158 - RNA, 19 nt, Homo sapiens
  misc_RNA (1)...(19): siRNA sense strand
gccaaggacucaccgucuu

SEQ ID NO: 1448159 - RNA, 19 nt, Homo sapiens
  misc_RNA (1)...(19): siRNA sense strand
cagguuacauucccagcaa

SEQ ID NO: 1448160 - RNA, 19 nt, Homo sapiens
  misc_RNA (1)...(19): siRNA sense strand
ccgaguauaugaacaaagg

SEQ ID NO: 1448161 - RNA, 19 nt, Homo sapiens
  misc_RNA (1)...(19): siRNA sense strand
ugauagaagacaaugagua

SEQ ID NO: 1448162 - RNA, 19 nt, Homo sapiens
  misc_RNA (1)...(19): siRNA sense strand
gcgaucagcaaacauucua

SEQ ID NO: 1448163 - RNA, 19 nt, Homo sapiens
  misc_RNA (1)...(19): siRNA sense strand
agagguaccuuucuuaucc

SEQ ID NO: 1448164 - RNA, 19 nt, Homo sapiens
  misc_RNA (1)...(19): siRNA sense strand
guacacagcaagacaaggu

SEQ ID NO: 1448165 - RNA, 19 nt, Homo sapiens
  misc_RNA (1)...(19): siRNA sense strand
ugugugcaauguaaggaua

SEQ ID NO: 1448166 - RNA, 19 nt, Homo sapiens
  misc_RNA (1)...(19): siRNA sense strand
gugaacucuucgucucaua

SEQ ID NO: 1448167 - RNA, 19 nt, Homo sapiens
  misc_RNA (1)...(19): siRNA sense strand
ggauuggcccgauugauag

SEQ ID NO: 1448168 - RNA, 19 nt, Homo sapiens
  misc_RNA (1)...(19): siRNA sense strand
cgcaugaauuauauccaua

SEQ ID NO: 1448169 - RNA, 19 nt, Homo sapiens
  misc_RNA (1)...(19): siRNA sense strand
ucuaugcaguggugucuga

SEQ ID NO: 1448170 - RNA, 19 nt, Homo sapiens
  misc_RNA (1)...(19): siRNA sense strand
ggauaaagaagcaacaaaa

SEQ ID NO: 1448171 - RNA, 19 nt, Homo sapiens
  misc_RNA (1)...(19): siRNA sense strand
ccaaaggaagagugccaua

SEQ ID NO: 1448172 - RNA, 19 nt, Homo sapiens
  misc_RNA (1)...(19): siRNA sense strand
ccaaggacucaccgucuuu

SEQ ID NO: 1448173 - RNA, 19 nt, Homo sapiens
  misc_RNA (1)...(19): siRNA sense strand
gaauggaaacacaaaagua

SEQ ID NO: 1448174 - RNA, 19 nt, Homo sapiens
  misc_RNA (1)...(19): siRNA sense strand
cagcuauuguccuuuggaa

SEQ ID NO: 1448175 - RNA, 19 nt, Homo sapiens
  misc_RNA (1)...(19): siRNA sense strand
gaggaagcgcagaucauga

SEQ ID NO: 1448176 - RNA, 19 nt, Homo sapiens
  misc_RNA (1)...(19): siRNA sense strand
acacaaaaguagccauaaa

SEQ ID NO: 1448177 - RNA, 19 nt, Homo sapiens
  misc_RNA (1)...(19): siRNA sense strand
gggaauggacucauaugca

SEQ ID NO: 1448178 - RNA, 19 nt, Homo sapiens
  misc_RNA (1)...(19): siRNA sense strand
ucgagcgcaugaauuauau

SEQ ID NO: 1448179 - RNA, 19 nt, Homo sapiens
  misc_RNA (1)...(19): siRNA sense strand
aaggaaguuuacuggauuu

SEQ ID NO: 1448180 - RNA, 19 nt, Homo sapiens
  misc_RNA (1)...(19): siRNA sense strand
agaaggaagagcucugaaa

SEQ ID NO: 1448181 - RNA, 19 nt, Homo sapiens
  misc_RNA (1)...(19): siRNA sense strand
ggaagagcucugaaauuac

SEQ ID NO: 1448182 - RNA, 19 nt, Homo sapiens
  misc_RNA (1)...(19): siRNA sense strand
guuacauucccagcaauua

SEQ ID NO: 1448183 - RNA, 19 nt, Homo sapiens
  misc_RNA (1)...(19): siRNA sense strand
agucugacguguggucuuu

SEQ ID NO: 1448184 - RNA, 19 nt, Homo sapiens
  misc_RNA (1)...(19): siRNA sense strand
gaagcgcagaucaugaaga

SEQ ID NO: 1448185 - RNA, 19 nt, Homo sapiens
  misc_RNA (1)...(19): siRNA sense strand
ggcagaagagugguacuuu

SEQ ID NO: 1448186 - RNA, 19 nt, Homo sapiens
  misc_RNA (1)...(19): siRNA sense strand
gaguauaugaacaaaggaa

SEQ ID NO: 1448187 - RNA, 19 nt, Homo sapiens
  misc_RNA (1)...(19): siRNA sense strand
aaggaagagcucugaaauu

SEQ ID NO: 1448188 - RNA, 19 nt, Homo sapiens
  misc_RNA (1)...(19): siRNA sense strand
gcaugaauuauauccauag

SEQ ID NO: 1448189 - RNA, 19 nt, Homo sapiens
  misc_RNA (1)...(19): siRNA sense strand
gcuauuguccuuuggaaac

SEQ ID NO: 1448190 - RNA, 19 nt, Homo sapiens
  misc_RNA (1)...(19): siRNA sense strand
cuuaaaagauggagaagga

SEQ ID NO: 1448191 - RNA, 19 nt, Homo sapiens
  misc_RNA (1)...(19): siRNA sense strand
cuugacaacuggagagaca

SEQ ID NO: 1448192 - RNA, 19 nt, Homo sapiens
  misc_RNA (1)...(19): siRNA sense strand
gaucagcaaacauucuagu

SEQ ID NO: 1448193 - RNA, 19 nt, Homo sapiens
  misc_RNA (1)...(19): siRNA sense strand
gcacagguggcugcaggaa

SEQ ID NO: 1448194 - RNA, 19 nt, Homo sapiens
  misc_RNA (1)...(19): siRNA sense strand
gugauugggaugauaugaa

SEQ ID NO: 1448195 - RNA, 19 nt, Homo sapiens
  misc_RNA (1)...(19): siRNA sense strand
uuacauucccagcaauuau

SEQ ID NO: 1448196 - RNA, 19 nt, Homo sapiens
  misc_RNA (1)...(19): siRNA sense strand
agaagacaaugaguacaca

SEQ ID NO: 1448197 - RNA, 19 nt, Homo sapiens
  misc_RNA (1)...(19): siRNA sense strand
uuacaucgagcgcaugaau

SEQ ID NO: 1448198 - RNA, 19 nt, Homo sapiens
  misc_RNA (1)...(19): siRNA sense strand
ucaccgaguauaugaacaa

SEQ ID NO: 1448199 - RNA, 19 nt, Homo sapiens
  misc_RNA (1)...(19): siRNA sense strand
cuacaucgucaccgaguau

SEQ ID NO: 1448200 - RNA, 19 nt, Homo sapiens
  misc_RNA (1)...(19): siRNA sense strand
ugaggaagcgcagaucaug

SEQ ID NO: 1448201 - RNA, 19 nt, Homo sapiens
  misc_RNA (1)...(19): siRNA sense strand
cagcagcuuguacaacauu

SEQ ID NO: 1448202 - RNA, 19 nt, Homo sapiens
  misc_RNA (1)...(19): siRNA sense strand
aaggagaccaugucaaaca

SEQ ID NO: 1448203 - RNA, 19 nt, Homo sapiens
  misc_RNA (1)...(19): siRNA sense strand
cagaagagugguacuuugg

SEQ ID NO: 1448204 - RNA, 19 nt, Homo sapiens
  misc_RNA (1)...(19): siRNA sense strand
ccaaaggugccuauucacu

SEQ ID NO: 1448205 - RNA, 19 nt, Homo sapiens
  misc_RNA (1)...(19): siRNA sense strand
gcaagacaaggugcaaagu

SEQ ID NO: 1448206 - RNA, 19 nt, Homo sapiens
  misc_RNA (1)...(19): siRNA sense strand
gagaaggaagagcucugaa

SEQ ID NO: 1448207 - RNA, 19 nt, Homo sapiens
  misc_RNA (1)...(19): siRNA sense strand
ucgcaaacuugacaauggu

SEQ ID NO: 1448208 - RNA, 19 nt, Homo sapiens
  misc_RNA (1)...(19): siRNA sense strand
ggaagcccgcuccuugaca

SEQ ID NO: 1448209 - RNA, 19 nt, Homo sapiens
  misc_RNA (1)...(19): siRNA sense strand
caccgaguauaugaacaaa

SEQ ID NO: 1448210 - RNA, 19 nt, Homo sapiens
  misc_RNA (1)...(19): siRNA sense strand
gaagcacggacagaagaug

SEQ ID NO: 1448211 - RNA, 19 nt, Homo sapiens
  misc_RNA (1)...(19): siRNA sense strand
aggaagcgcagaucaugaa

SEQ ID NO: 1448212 - RNA, 19 nt, Homo sapiens
  misc_RNA (1)...(19): siRNA sense strand
uucagcagcuuguacaaca

SEQ ID NO: 1448213 - RNA, 19 nt, Homo sapiens
  misc_RNA (1)...(19): siRNA sense strand
gagugaaaccaccaaaggu

SEQ ID NO: 1448214 - RNA, 19 nt, Homo sapiens
  misc_RNA (1)...(19): siRNA sense strand
aaacuuggccgaaaagaug

SEQ ID NO: 1448215 - RNA, 19 nt, Homo sapiens
  misc_RNA (1)...(19): siRNA sense strand
gguuacauucccagcaauu

SEQ ID NO: 1448216 - RNA, 19 nt, Homo sapiens
  misc_RNA (1)...(19): siRNA sense strand
cugcaggaauggcuuacau

SEQ ID NO: 1448217 - RNA, 19 nt, Homo sapiens
  misc_RNA (1)...(19): siRNA sense strand
cugaggagcccaucuacau

SEQ ID NO: 1448218 - RNA, 19 nt, Homo sapiens
  misc_RNA (1)...(19): siRNA sense strand
uaccuggaauggaaacaca

SEQ ID NO: 1448219 - RNA, 19 nt, Homo sapiens
  misc_RNA (1)...(19): siRNA sense strand
ggcccuuuaugacuaugaa

SEQ ID NO: 1448220 - RNA, 19 nt, Homo sapiens
  misc_RNA (1)...(19): siRNA sense strand
uggcuccaguugacucuau

SEQ ID NO: 1448221 - RNA, 19 nt, Homo sapiens
  misc_RNA (1)...(19): siRNA sense strand
gaaaggagaccaugucaaa

SEQ ID NO: 1448222 - RNA, 19 nt, Homo sapiens
  misc_RNA (1)...(19): siRNA sense strand
aggaagagcucugaaauua

SEQ ID NO: 1448223 - RNA, 19 nt, Homo sapiens
  misc_RNA (1)...(19): siRNA sense strand
ggacucauaugcaagauug

SEQ ID NO: 1448224 - RNA, 19 nt, Homo sapiens
  misc_RNA (1)...(19): siRNA sense strand
ggaauggacucauaugcaa

SEQ ID NO: 1448225 - RNA, 19 nt, Homo sapiens
  misc_RNA (1)...(19): siRNA sense strand
gcagaagagugguacuuug

SEQ ID NO: 1448226 - RNA, 19 nt, Homo sapiens
  misc_RNA (1)...(19): siRNA sense strand
gaaguuuacuggauuucuu

SEQ ID NO: 1448227 - RNA, 19 nt, Homo sapiens
  misc_RNA (1)...(19): siRNA sense strand
gaagagugguacuuuggaa

SEQ ID NO: 1448228 - RNA, 19 nt, Homo sapiens
  misc_RNA (1)...(19): siRNA sense strand
caaaggaaguuuacuggau

SEQ ID NO: 1448229 - RNA, 19 nt, Homo sapiens
  misc_RNA (1)...(19): siRNA sense strand
gcucugaaauuaccaaauc

SEQ ID NO: 1448230 - RNA, 19 nt, Homo sapiens
  misc_RNA (1)...(19): siRNA sense strand
gaacaaaggaaguuuacug

SEQ ID NO: 1448231 - RNA, 19 nt, Homo sapiens
  misc_RNA (1)...(19): siRNA sense strand
gaaauuaccaaaucuugug

SEQ ID NO: 1448232 - RNA, 19 nt, Homo sapiens
  misc_RNA (1)...(19): siRNA sense strand
aaaggaaguuuacuggauu

SEQ ID NO: 1448233 - RNA, 19 nt, Homo sapiens
  misc_RNA (1)...(19): siRNA sense strand
gaaggaagagcucugaaau

SEQ ID NO: 1448234 - RNA, 19 nt, Homo sapiens
  misc_RNA (1)...(19): siRNA sense strand
gacagaagaugaccugagu

SEQ ID NO: 1448235 - RNA, 19 nt, Homo sapiens
  misc_RNA (1)...(19): siRNA sense strand
gaagagcucugaaauuacc

SEQ ID NO: 1448236 - RNA, 19 nt, Homo sapiens
  misc_RNA (1)...(19): siRNA sense strand
gaagcccgcuccuugacaa

SEQ ID NO: 1448237 - RNA, 19 nt, Homo sapiens
  misc_RNA (1)...(19): siRNA sense strand
gaacagcucggaaggagau

SEQ ID NO: 1448238 - RNA, 19 nt, Homo sapiens
  misc_RNA (1)...(19): siRNA sense strand
ugauugggaugauaugaaa

SEQ ID NO: 1448239 - RNA, 19 nt, Homo sapiens
  misc_RNA (1)...(19): siRNA sense strand
caacuggagagacagguua

SEQ ID NO: 1448240 - RNA, 19 nt, Homo sapiens
  misc_RNA (1)...(19): siRNA sense strand
ggagagacagguuacauuc

SEQ ID NO: 1448241 - RNA, 19 nt, Homo sapiens
  misc_RNA (1)...(19): siRNA sense strand
cggauuggcccgauugaua

SEQ ID NO: 1448242 - RNA, 19 nt, Homo sapiens
  misc_RNA (1)...(19): siRNA sense strand
gaagaacgccccacuuuug

SEQ ID NO: 1448243 - RNA, 19 nt, Homo sapiens
  misc_RNA (1)...(19): siRNA sense strand
cagaagaugaccugaguuu

SEQ ID NO: 1448244 - RNA, 19 nt, Homo sapiens
  misc_RNA (1)...(19): siRNA sense strand
aagcgcagaucaugaagaa

SEQ ID NO: 1448245 - RNA, 19 nt, Homo sapiens
  misc_RNA (1)...(19): siRNA sense strand
acaucgagcgcaugaauua

SEQ ID NO: 1448246 - RNA, 19 nt, Homo sapiens
  misc_RNA (1)...(19): siRNA sense strand
gcgcaugaauuauauccau

SEQ ID NO: 1448247 - RNA, 19 nt, Homo sapiens
  misc_RNA (1)...(19): siRNA sense strand
caaaggugccuauucacuu

SEQ ID NO: 1448248 - RNA, 19 nt, Homo sapiens
  misc_RNA (1)...(19): siRNA sense strand
acagguggcugcaggaaug

SEQ ID NO: 1448249 - RNA, 19 nt, Homo sapiens
  misc_RNA (1)...(19): siRNA sense strand
gcaauguaaggauaaagaa

SEQ ID NO: 1448250 - RNA, 19 nt, Homo sapiens
  misc_RNA (1)...(19): siRNA sense strand
ugacaaugguggauacuac

SEQ ID NO: 1448251 - RNA, 19 nt, Homo sapiens
  misc_RNA (1)...(19): siRNA sense strand
gauagaagacaaugaguac

SEQ ID NO: 1448252 - RNA, 19 nt, Homo sapiens
  misc_RNA (1)...(19): siRNA sense strand
uaccaaaucuuguggacau

SEQ ID NO: 1448253 - RNA, 19 nt, Homo sapiens
  misc_RNA (1)...(19): siRNA sense strand
gacaaugaguacacagcaa

SEQ ID NO: 1448254 - RNA, 19 nt, Homo sapiens
  misc_RNA (1)...(19): siRNA sense strand
caagacaaggugcaaaguu

SEQ ID NO: 1448255 - RNA, 19 nt, Homo sapiens
  misc_RNA (1)...(19): siRNA sense strand
aagacaaggugcaaaguuc

SEQ ID NO: 1448256 - RNA, 19 nt, Homo sapiens
  misc_RNA (1)...(19): siRNA sense strand
gaagaugaccugaguuuuc

SEQ ID NO: 1448257 - RNA, 19 nt, Homo sapiens
  misc_RNA (1)...(19): siRNA sense strand
ggagaaggaagagcucuga

SEQ ID NO: 1448258 - RNA, 19 nt, Homo sapiens
  misc_RNA (1)...(19): siRNA sense strand
gccaaggacucaccgucuu

SEQ ID NO: 1448259 - RNA, 19 nt, Homo sapiens
  misc_RNA (1)...(19): siRNA sense strand
cagguuacauucccagcaa

SEQ ID NO: 1448260 - RNA, 19 nt, Homo sapiens
  misc_RNA (1)...(19): siRNA sense strand
ccgaguauaugaacaaagg

SEQ ID NO: 1448261 - RNA, 19 nt, Homo sapiens
  misc_RNA (1)...(19): siRNA sense strand
ugauagaagacaaugagua

SEQ ID NO: 1448262 - RNA, 19 nt, Homo sapiens
  misc_RNA (1)...(19): siRNA sense strand
gcgaucagcaaacauucua

SEQ ID NO: 1448263 - RNA, 19 nt, Homo sapiens
  misc_RNA (1)...(19): siRNA sense strand
agagguaccuuucuuaucc

SEQ ID NO: 1448264 - RNA, 19 nt, Homo sapiens
  misc_RNA (1)...(19): siRNA sense strand
guacacagcaagacaaggu

SEQ ID NO: 1448265 - RNA, 19 nt, Homo sapiens
  misc_RNA (1)...(19): siRNA sense strand
ugugugcaauguaaggaua

SEQ ID NO: 1448266 - RNA, 19 nt, Homo sapiens
  misc_RNA (1)...(19): siRNA sense strand
gugaacucuucgucucaua

SEQ ID NO: 1448267 - RNA, 19 nt, Homo sapiens
  misc_RNA (1)...(19): siRNA sense strand
ggauuggcccgauugauag

SEQ ID NO: 1448268 - RNA, 19 nt, Homo sapiens
  misc_RNA (1)...(19): siRNA sense strand
cgcaugaauuauauccaua

SEQ ID NO: 1448269 - RNA, 19 nt, Homo sapiens
  misc_RNA (1)...(19): siRNA sense strand
ucuaugcaguggugucuga

SEQ ID NO: 1448270 - RNA, 19 nt, Homo sapiens
  misc_RNA (1)...(19): siRNA sense strand
ggauaaagaagcaacaaaa

SEQ ID NO: 1448271 - RNA, 19 nt, Homo sapiens
  misc_RNA (1)...(19): siRNA sense strand
ccaaaggaagagugccaua

SEQ ID NO: 1448272 - RNA, 19 nt, Homo sapiens
  misc_RNA (1)...(19): siRNA sense strand
ccaaggacucaccgucuuu

SEQ ID NO: 1448273 - RNA, 19 nt, Homo sapiens
  misc_RNA (1)...(19): siRNA sense strand
gaauggaaacacaaaagua

SEQ ID NO: 1448274 - RNA, 19 nt, Homo sapiens
  misc_RNA (1)...(19): siRNA sense strand
cagcuauuguccuuuggaa

SEQ ID NO: 1448275 - RNA, 19 nt, Homo sapiens
  misc_RNA (1)...(19): siRNA sense strand
gaggaagcgcagaucauga

SEQ ID NO: 1448276 - RNA, 19 nt, Homo sapiens
  misc_RNA (1)...(19): siRNA sense strand
acacaaaaguagccauaaa

SEQ ID NO: 1448277 - RNA, 19 nt, Homo sapiens
  misc_RNA (1)...(19): siRNA sense strand
gggaauggacucauaugca

SEQ ID NO: 1448278 - RNA, 19 nt, Homo sapiens
  misc_RNA (1)...(19): siRNA sense strand
ucgagcgcaugaauuauau

SEQ ID NO: 1448279 - RNA, 19 nt, Homo sapiens
  misc_RNA (1)...(19): siRNA sense strand
aaggaaguuuacuggauuu

SEQ ID NO: 1448280 - RNA, 19 nt, Homo sapiens
  misc_RNA (1)...(19): siRNA sense strand
agaaggaagagcucugaaa

SEQ ID NO: 1448281 - RNA, 19 nt, Homo sapiens
  misc_RNA (1)...(19): siRNA sense strand
ggaagagcucugaaauuac

SEQ ID NO: 1448282 - RNA, 19 nt, Homo sapiens
  misc_RNA (1)...(19): siRNA sense strand
guuacauucccagcaauua

SEQ ID NO: 1448283 - RNA, 19 nt, Homo sapiens
  misc_RNA (1)...(19): siRNA sense strand
agucugacguguggucuuu

SEQ ID NO: 1448284 - RNA, 19 nt, Homo sapiens
  misc_RNA (1)...(19): siRNA sense strand
gaagcgcagaucaugaaga

SEQ ID NO: 1448285 - RNA, 19 nt, Homo sapiens
  misc_RNA (1)...(19): siRNA sense strand
ggcagaagagugguacuuu

SEQ ID NO: 1448286 - RNA, 19 nt, Homo sapiens
  misc_RNA (1)...(19): siRNA sense strand
gaguauaugaacaaaggaa

SEQ ID NO: 1448287 - RNA, 19 nt, Homo sapiens
  misc_RNA (1)...(19): siRNA sense strand
aaggaagagcucugaaauu

SEQ ID NO: 1448288 - RNA, 19 nt, Homo sapiens
  misc_RNA (1)...(19): siRNA sense strand
gcaugaauuauauccauag

SEQ ID NO: 1448289 - RNA, 19 nt, Homo sapiens
  misc_RNA (1)...(19): siRNA sense strand
gcuauuguccuuuggaaac

SEQ ID NO: 1448290 - RNA, 19 nt, Homo sapiens
  misc_RNA (1)...(19): siRNA sense strand
cuuaaaagauggagaagga

SEQ ID NO: 1448291 - RNA, 19 nt, Homo sapiens
  misc_RNA (1)...(19): siRNA sense strand
cuugacaacuggagagaca

SEQ ID NO: 1448292 - RNA, 19 nt, Homo sapiens
  misc_RNA (1)...(19): siRNA sense strand
gaucagcaaacauucuagu

SEQ ID NO: 1448293 - RNA, 19 nt, Homo sapiens
  misc_RNA (1)...(19): siRNA sense strand
gcacagguggcugcaggaa

SEQ ID NO: 1448294 - RNA, 19 nt, Homo sapiens
  misc_RNA (1)...(19): siRNA sense strand
gugauugggaugauaugaa

SEQ ID NO: 1448295 - RNA, 19 nt, Homo sapiens
  misc_RNA (1)...(19): siRNA sense strand
uuacauucccagcaauuau

SEQ ID NO: 1448296 - RNA, 19 nt, Homo sapiens
  misc_RNA (1)...(19): siRNA sense strand
agaagacaaugaguacaca

SEQ ID NO: 1448297 - RNA, 19 nt, Homo sapiens
  misc_RNA (1)...(19): siRNA sense strand
uuacaucgagcgcaugaau

SEQ ID NO: 1448298 - RNA, 19 nt, Homo sapiens
  misc_RNA (1)...(19): siRNA sense strand
ucaccgaguauaugaacaa

SEQ ID NO: 1448299 - RNA, 19 nt, Homo sapiens
  misc_RNA (1)...(19): siRNA sense strand
cuacaucgucaccgaguau

SEQ ID NO: 1448300 - RNA, 19 nt, Homo sapiens
  misc_RNA (1)...(19): siRNA sense strand
ugaggaagcgcagaucaug

SEQ ID NO: 1448301 - RNA, 19 nt, Homo sapiens
  misc_RNA (1)...(19): siRNA sense strand
cagcagcuuguacaacauu

SEQ ID NO: 1448302 - RNA, 19 nt, Homo sapiens
  misc_RNA (1)...(19): siRNA sense strand
aaggagaccaugucaaaca

SEQ ID NO: 1448303 - RNA, 19 nt, Homo sapiens
  misc_RNA (1)...(19): siRNA sense strand
cagaagagugguacuuugg

SEQ ID NO: 1448304 - RNA, 19 nt, Homo sapiens
  misc_RNA (1)...(19): siRNA sense strand
ccaaaggugccuauucacu

SEQ ID NO: 1448305 - RNA, 19 nt, Homo sapiens
  misc_RNA (1)...(19): siRNA sense strand
gcaagacaaggugcaaagu

SEQ ID NO: 1448306 - RNA, 19 nt, Homo sapiens
  misc_RNA (1)...(19): siRNA sense strand
gagaaggaagagcucugaa

SEQ ID NO: 1448307 - RNA, 19 nt, Homo sapiens
  misc_RNA (1)...(19): siRNA sense strand
ucgcaaacuugacaauggu

SEQ ID NO: 1448308 - RNA, 19 nt, Homo sapiens
  misc_RNA (1)...(19): siRNA sense strand
ggaagcccgcuccuugaca

SEQ ID NO: 1448309 - RNA, 19 nt, Homo sapiens
  misc_RNA (1)...(19): siRNA sense strand
caccgaguauaugaacaaa

SEQ ID NO: 1448310 - RNA, 19 nt, Homo sapiens
  misc_RNA (1)...(19): siRNA sense strand
gaagcacggacagaagaug

SEQ ID NO: 1448311 - RNA, 19 nt, Homo sapiens
  misc_RNA (1)...(19): siRNA sense strand
aggaagcgcagaucaugaa

SEQ ID NO: 1448312 - RNA, 19 nt, Homo sapiens
  misc_RNA (1)...(19): siRNA sense strand
uucagcagcuuguacaaca

SEQ ID NO: 1448313 - RNA, 19 nt, Homo sapiens
  misc_RNA (1)...(19): siRNA sense strand
gagugaaaccaccaaaggu

SEQ ID NO: 1448314 - RNA, 19 nt, Homo sapiens
  misc_RNA (1)...(19): siRNA sense strand
aaacuuggccgaaaagaug

SEQ ID NO: 1448315 - RNA, 19 nt, Homo sapiens
  misc_RNA (1)...(19): siRNA sense strand
gguuacauucccagcaauu

SEQ ID NO: 1448316 - RNA, 19 nt, Homo sapiens
  misc_RNA (1)...(19): siRNA sense strand
cugcaggaauggcuuacau

SEQ ID NO: 1448317 - RNA, 19 nt, Homo sapiens
  misc_RNA (1)...(19): siRNA sense strand
cugaggagcccaucuacau

SEQ ID NO: 1448318 - RNA, 19 nt, Homo sapiens
  misc_RNA (1)...(19): siRNA sense strand
uaccuggaauggaaacaca

SEQ ID NO: 1448319 - RNA, 19 nt, Homo sapiens
  misc_RNA (1)...(19): siRNA sense strand
ggcccuuuaugacuaugaa

SEQ ID NO: 1448320 - RNA, 19 nt, Homo sapiens
  misc_RNA (1)...(19): siRNA sense strand
uggcuccaguugacucuau

SEQ ID NO: 1448321 - RNA, 19 nt, Homo sapiens
  misc_RNA (1)...(19): siRNA sense strand
ggaaguugcucacaauuga

SEQ ID NO: 1448322 - RNA, 19 nt, Homo sapiens
  misc_RNA (1)...(19): siRNA sense strand
acaaaucgcccaucagaua

SEQ ID NO: 1448323 - RNA, 19 nt, Homo sapiens
  misc_RNA (1)...(19): siRNA sense strand
ucagacagcuucaugaaug

SEQ ID NO: 1448324 - RNA, 19 nt, Homo sapiens
  misc_RNA (1)...(19): siRNA sense strand
ggacaaaucgcccaucaga

SEQ ID NO: 1448325 - RNA, 19 nt, Homo sapiens
  misc_RNA (1)...(19): siRNA sense strand
gaacuucucugggaucuac

SEQ ID NO: 1448326 - RNA, 19 nt, Homo sapiens
  misc_RNA (1)...(19): siRNA sense strand
ggaaggagcagucaguguu

SEQ ID NO: 1448327 - RNA, 19 nt, Homo sapiens
  misc_RNA (1)...(19): siRNA sense strand
gcaagagaaugugcaguau

SEQ ID NO: 1448328 - RNA, 19 nt, Homo sapiens
  misc_RNA (1)...(19): siRNA sense strand
gggcugagaugcuggacaa

SEQ ID NO: 1448329 - RNA, 19 nt, Homo sapiens
  misc_RNA (1)...(19): siRNA sense strand
gagacacacuuguuguaug

SEQ ID NO: 1448330 - RNA, 19 nt, Homo sapiens
  misc_RNA (1)...(19): siRNA sense strand
caaaagcacccacgcauua

SEQ ID NO: 1448331 - RNA, 19 nt, Homo sapiens
  misc_RNA (1)...(19): siRNA sense strand
gaggcuggcuuuccuuuca

SEQ ID NO: 1448332 - RNA, 19 nt, Homo sapiens
  misc_RNA (1)...(19): siRNA sense strand
ugugaaggauguccaguuu

SEQ ID NO: 1448333 - RNA, 19 nt, Homo sapiens
  misc_RNA (1)...(19): siRNA sense strand
ugccagcgaugaugagaua

SEQ ID NO: 1448334 - RNA, 19 nt, Homo sapiens
  misc_RNA (1)...(19): siRNA sense strand
gaggaacacuuugaugcaa

SEQ ID NO: 1448335 - RNA, 19 nt, Homo sapiens
  misc_RNA (1)...(19): siRNA sense strand
ugucagcgcuggagaaaca

SEQ ID NO: 1448336 - RNA, 19 nt, Homo sapiens
  misc_RNA (1)...(19): siRNA sense strand
gggaucaguuuguguuuua

SEQ ID NO: 1448337 - RNA, 19 nt, Homo sapiens
  misc_RNA (1)...(19): siRNA sense strand
caacaucucugugcuugag

SEQ ID NO: 1448338 - RNA, 19 nt, Homo sapiens
  misc_RNA (1)...(19): siRNA sense strand
agacacacuuguuguaugu

SEQ ID NO: 1448339 - RNA, 19 nt, Homo sapiens
  misc_RNA (1)...(19): siRNA sense strand
gcuggaaguugcucacaau

SEQ ID NO: 1448340 - RNA, 19 nt, Homo sapiens
  misc_RNA (1)...(19): siRNA sense strand
gaaggagcagucaguguug

SEQ ID NO: 1448341 - RNA, 19 nt, Homo sapiens
  misc_RNA (1)...(19): siRNA sense strand
gccaauaccugguguucca

SEQ ID NO: 1448342 - RNA, 19 nt, Homo sapiens
  misc_RNA (1)...(19): siRNA sense strand
gccagagaguggucuuuga

SEQ ID NO: 1448343 - RNA, 19 nt, Homo sapiens
  misc_RNA (1)...(19): siRNA sense strand
gcauggagaacauucgauu

SEQ ID NO: 1448344 - RNA, 19 nt, Homo sapiens
  misc_RNA (1)...(19): siRNA sense strand
agcagggcauggaguauua

SEQ ID NO: 1448345 - RNA, 19 nt, Homo sapiens
  misc_RNA (1)...(19): siRNA sense strand
ggagacacacuuguuguau

SEQ ID NO: 1448346 - RNA, 19 nt, Homo sapiens
  misc_RNA (1)...(19): siRNA sense strand
uuaugaggaugacugcuuu

SEQ ID NO: 1448347 - RNA, 19 nt, Homo sapiens
  misc_RNA (1)...(19): siRNA sense strand
gaacgcauggagaacauuc

SEQ ID NO: 1448348 - RNA, 19 nt, Homo sapiens
  misc_RNA (1)...(19): siRNA sense strand
ugaaggauguccaguuugc

SEQ ID NO: 1448349 - RNA, 19 nt, Homo sapiens
  misc_RNA (1)...(19): siRNA sense strand
gcaguaugcuggccuugac

SEQ ID NO: 1448350 - RNA, 19 nt, Homo sapiens
  misc_RNA (1)...(19): siRNA sense strand
gaagacaccacuguuacug

SEQ ID NO: 1448351 - RNA, 19 nt, Homo sapiens
  misc_RNA (1)...(19): siRNA sense strand
gggcuuugcgguacuacua

SEQ ID NO: 1448352 - RNA, 19 nt, Homo sapiens
  misc_RNA (1)...(19): siRNA sense strand
gccgaguccuucuuucaga

SEQ ID NO: 1448353 - RNA, 19 nt, Homo sapiens
  misc_RNA (1)...(19): siRNA sense strand
ggagucagacagcuucaug

SEQ ID NO: 1448354 - RNA, 19 nt, Homo sapiens
  misc_RNA (1)...(19): siRNA sense strand
ggaggaacacuuugaugca

SEQ ID NO: 1448355 - RNA, 19 nt, Homo sapiens
  misc_RNA (1)...(19): siRNA sense strand
ucaagcagggcauggagua

SEQ ID NO: 1448356 - RNA, 19 nt, Homo sapiens
  misc_RNA (1)...(19): siRNA sense strand
agacaccacuguuacugau

SEQ ID NO: 1448357 - RNA, 19 nt, Homo sapiens
  misc_RNA (1)...(19): siRNA sense strand
ccucaguggugguagaugu

SEQ ID NO: 1448358 - RNA, 19 nt, Homo sapiens
  misc_RNA (1)...(19): siRNA sense strand
ccacuugauuggucaguac

SEQ ID NO: 1448359 - RNA, 19 nt, Homo sapiens
  misc_RNA (1)...(19): siRNA sense strand
gaugggcuuugcgguacua

SEQ ID NO: 1448360 - RNA, 19 nt, Homo sapiens
  misc_RNA (1)...(19): siRNA sense strand
gcaguacccaucucugauc

SEQ ID NO: 1448361 - RNA, 19 nt, Homo sapiens
  misc_RNA (1)...(19): siRNA sense strand
aagagaaugugcaguaugc

SEQ ID NO: 1448362 - RNA, 19 nt, Homo sapiens
  misc_RNA (1)...(19): siRNA sense strand
gcacucggagacacacuug

SEQ ID NO: 1448363 - RNA, 19 nt, Homo sapiens
  misc_RNA (1)...(19): siRNA sense strand
cugagaugcuggacaaauc

SEQ ID NO: 1448364 - RNA, 19 nt, Homo sapiens
  misc_RNA (1)...(19): siRNA sense strand
ggccuugacuuugaagcaa

SEQ ID NO: 1448365 - RNA, 19 nt, Homo sapiens
  misc_RNA (1)...(19): siRNA sense strand
caagagaaugugcaguaug

SEQ ID NO: 1448366 - RNA, 19 nt, Homo sapiens
  misc_RNA (1)...(19): siRNA sense strand
gugagcuccucucggauga

SEQ ID NO: 1448367 - RNA, 19 nt, Homo sapiens
  misc_RNA (1)...(19): siRNA sense strand
acaccacuguuacugaugu

SEQ ID NO: 1448368 - RNA, 19 nt, Homo sapiens
  misc_RNA (1)...(19): siRNA sense strand
uggcagcccuccagauaag

SEQ ID NO: 1448369 - RNA, 19 nt, Homo sapiens
  misc_RNA (1)...(19): siRNA sense strand
gcugagcccagaccaaugu

SEQ ID NO: 1448370 - RNA, 19 nt, Homo sapiens
  misc_RNA (1)...(19): siRNA sense strand
augcuggccuugacuuuga

SEQ ID NO: 1448371 - RNA, 19 nt, Homo sapiens
  misc_RNA (1)...(19): siRNA sense strand
cggagacacacuuguugua

SEQ ID NO: 1448372 - RNA, 19 nt, Homo sapiens
  misc_RNA (1)...(19): siRNA sense strand
gcacccacgcauuaucaga

SEQ ID NO: 1448373 - RNA, 19 nt, Homo sapiens
  misc_RNA (1)...(19): siRNA sense strand
gugccuguaugacugguau

SEQ ID NO: 1448374 - RNA, 19 nt, Homo sapiens
  misc_RNA (1)...(19): siRNA sense strand
guauuaccgugcccucaag

SEQ ID NO: 1448375 - RNA, 19 nt, Homo sapiens
  misc_RNA (1)...(19): siRNA sense strand
ccucaugguggcacaguuu

SEQ ID NO: 1448376 - RNA, 19 nt, Homo sapiens
  misc_RNA (1)...(19): siRNA sense strand
agcaagagaaugugcagua

SEQ ID NO: 1448377 - RNA, 19 nt, Homo sapiens
  misc_RNA (1)...(19): siRNA sense strand
ccaccaggaugugaaggau

SEQ ID NO: 1448378 - RNA, 19 nt, Homo sapiens
  misc_RNA (1)...(19): siRNA sense strand
uguuguauguggcagagaa

SEQ ID NO: 1448379 - RNA, 19 nt, Homo sapiens
  misc_RNA (1)...(19): siRNA sense strand
auacaucccucaggugaag

SEQ ID NO: 1448380 - RNA, 19 nt, Homo sapiens
  misc_RNA (1)...(19): siRNA sense strand
gccacuugauuggucagua

SEQ ID NO: 1448381 - RNA, 19 nt, Homo sapiens
  misc_RNA (1)...(19): siRNA sense strand
cagccaugcuuugcaagau

SEQ ID NO: 1448382 - RNA, 19 nt, Homo sapiens
  misc_RNA (1)...(19): siRNA sense strand
caaaucgcccaucagauac

SEQ ID NO: 1448383 - RNA, 19 nt, Homo sapiens
  misc_RNA (1)...(19): siRNA sense strand
gcugagaugcuggacaaau

SEQ ID NO: 1448384 - RNA, 19 nt, Homo sapiens
  misc_RNA (1)...(19): siRNA sense strand
caagagcuucaaccuguca

SEQ ID NO: 1448385 - RNA, 19 nt, Homo sapiens
  misc_RNA (1)...(19): siRNA sense strand
gauacaucccucaggugaa

SEQ ID NO: 1448386 - RNA, 19 nt, Homo sapiens
  misc_RNA (1)...(19): siRNA sense strand
gucaguacccagagaccua

SEQ ID NO: 1448387 - RNA, 19 nt, Homo sapiens
  misc_RNA (1)...(19): siRNA sense strand
caugguggcuucauuuccu

SEQ ID NO: 1448388 - RNA, 19 nt, Homo sapiens
  misc_RNA (1)...(19): siRNA sense strand
gagaugcuggugugguguu

SEQ ID NO: 1448389 - RNA, 19 nt, Homo sapiens
  misc_RNA (1)...(19): siRNA sense strand
gagucagacagcuucauga

SEQ ID NO: 1448390 - RNA, 19 nt, Homo sapiens
  misc_RNA (1)...(19): siRNA sense strand
gugaagacaccacuguuac

SEQ ID NO: 1448391 - RNA, 19 nt, Homo sapiens
  misc_RNA (1)...(19): siRNA sense strand
agaagaaccggaagcucaa

SEQ ID NO: 1448392 - RNA, 19 nt, Homo sapiens
  misc_RNA (1)...(19): siRNA sense strand
uggaaguugcucacaauug

SEQ ID NO: 1448393 - RNA, 19 nt, Homo sapiens
  misc_RNA (1)...(19): siRNA sense strand
gagcuccucucggaugacu

SEQ ID NO: 1448394 - RNA, 19 nt, Homo sapiens
  misc_RNA (1)...(19): siRNA sense strand
cuggacaaaucgcccauca

SEQ ID NO: 1448395 - RNA, 19 nt, Homo sapiens
  misc_RNA (1)...(19): siRNA sense strand
gguggaggcuggcuuuccu

SEQ ID NO: 1448396 - RNA, 19 nt, Homo sapiens
  misc_RNA (1)...(19): siRNA sense strand
guaugcuggccuugacuuu

SEQ ID NO: 1448397 - RNA, 19 nt, Homo sapiens
  misc_RNA (1)...(19): siRNA sense strand
gggaaggagcagucagugu

SEQ ID NO: 1448398 - RNA, 19 nt, Homo sapiens
  misc_RNA (1)...(19): siRNA sense strand
gcaacaucucugugcuuga

SEQ ID NO: 1448399 - RNA, 19 nt, Homo sapiens
  misc_RNA (1)...(19): siRNA sense strand
cuucauuuccugccacuug

SEQ ID NO: 1448400 - RNA, 19 nt, Homo sapiens
  misc_RNA (1)...(19): siRNA sense strand
accaggaugugaaggaugu

SEQ ID NO: 1448401 - RNA, 19 nt, Homo sapiens
  misc_RNA (1)...(19): siRNA sense strand
acacccagccuaccuccaa

SEQ ID NO: 1448402 - RNA, 19 nt, Homo sapiens
  misc_RNA (1)...(19): siRNA sense strand
ugucgagaguggcaacauc

SEQ ID NO: 1448403 - RNA, 19 nt, Homo sapiens
  misc_RNA (1)...(19): siRNA sense strand
agguggagguggagucaga

SEQ ID NO: 1448404 - RNA, 19 nt, Homo sapiens
  misc_RNA (1)...(19): siRNA sense strand
aauaccugguguuccauga

SEQ ID NO: 1448405 - RNA, 19 nt, Homo sapiens
  misc_RNA (1)...(19): siRNA sense strand
cugcaguacccaucucuga

SEQ ID NO: 1448406 - RNA, 19 nt, Homo sapiens
  misc_RNA (1)...(19): siRNA sense strand
gggacucagugguguuugc

SEQ ID NO: 1448407 - RNA, 19 nt, Homo sapiens
  misc_RNA (1)...(19): siRNA sense strand
ucccagccaugcuuugcaa

SEQ ID NO: 1448408 - RNA, 19 nt, Homo sapiens
  misc_RNA (1)...(19): siRNA sense strand
ggucaaagcugauaacuca

SEQ ID NO: 1448409 - RNA, 19 nt, Homo sapiens
  misc_RNA (1)...(19): siRNA sense strand
cgacuggcaugcauuggua

SEQ ID NO: 1448410 - RNA, 19 nt, Homo sapiens
  misc_RNA (1)...(19): siRNA sense strand
ggagugcgccuacgaguga

SEQ ID NO: 1448411 - RNA, 19 nt, Homo sapiens
  misc_RNA (1)...(19): siRNA sense strand
ggaaagggcugcgggaacu

SEQ ID NO: 1448412 - RNA, 19 nt, Homo sapiens
  misc_RNA (1)...(19): siRNA sense strand
ggugaacgcuuuggccauu

SEQ ID NO: 1448413 - RNA, 19 nt, Homo sapiens
  misc_RNA (1)...(19): siRNA sense strand
ggacgcugcuggugaacga

SEQ ID NO: 1448414 - RNA, 19 nt, Homo sapiens
  misc_RNA (1)...(19): siRNA sense strand
ccaccacgcucaggauuca

SEQ ID NO: 1448415 - RNA, 19 nt, Homo sapiens
  misc_RNA (1)...(19): siRNA sense strand
cuacgaaggccgugcuuug

SEQ ID NO: 1448416 - RNA, 19 nt, Homo sapiens
  misc_RNA (1)...(19): siRNA sense strand
aggauucacuccacuacga

SEQ ID NO: 1448417 - RNA, 19 nt, Homo sapiens
  misc_RNA (1)...(19): siRNA sense strand
ccgcuacucuacaagcaau

SEQ ID NO: 1448418 - RNA, 19 nt, Homo sapiens
  misc_RNA (1)...(19): siRNA sense strand
gaacugcaccgcggagacu

SEQ ID NO: 1448419 - RNA, 19 nt, Homo sapiens
  misc_RNA (1)...(19): siRNA sense strand
cgacaucaucuucaaggau

SEQ ID NO: 1448420 - RNA, 19 nt, Homo sapiens
  misc_RNA (1)...(19): siRNA sense strand
ccauugccgugaugaacau

SEQ ID NO: 1448421 - RNA, 19 nt, Homo sapiens
  misc_RNA (1)...(19): siRNA sense strand
ugaccgagcguuguaagga

SEQ ID NO: 1448422 - RNA, 19 nt, Homo sapiens
  misc_RNA (1)...(19): siRNA sense strand
ggauucacuccacuacgaa

SEQ ID NO: 1448423 - RNA, 19 nt, Homo sapiens
  misc_RNA (1)...(19): siRNA sense strand
gcuacucuacaagcaauuu

SEQ ID NO: 1448424 - RNA, 19 nt, Homo sapiens
  misc_RNA (1)...(19): siRNA sense strand
acgauguccuggccucuug

SEQ ID NO: 1448425 - RNA, 19 nt, Homo sapiens
  misc_RNA (1)...(19): siRNA sense strand
gggaccucgugcccaacua

SEQ ID NO: 1448426 - RNA, 19 nt, Homo sapiens
  misc_RNA (1)...(19): siRNA sense strand
acgggacgcugcuggugaa

SEQ ID NO: 1448427 - RNA, 19 nt, Homo sapiens
  misc_RNA (1)...(19): siRNA sense strand
gugaacgcuuuggccauug

SEQ ID NO: 1448428 - RNA, 19 nt, Homo sapiens
  misc_RNA (1)...(19): siRNA sense strand
ucgacugggucuacuacga

SEQ ID NO: 1448429 - RNA, 19 nt, Homo sapiens
  misc_RNA (1)...(19): siRNA sense strand
gaacacuucucgagacuuu

SEQ ID NO: 1448430 - RNA, 19 nt, Homo sapiens
  misc_RNA (1)...(19): siRNA sense strand
gcauguaacuucaagguuu

SEQ ID NO: 1448431 - RNA, 19 nt, Homo sapiens
  misc_RNA (1)...(19): siRNA sense strand
gauaugagcuggccucugu

SEQ ID NO: 1448432 - RNA, 19 nt, Homo sapiens
  misc_RNA (1)...(19): siRNA sense strand
gaaaucagcgcuucuggua

SEQ ID NO: 1448433 - RNA, 19 nt, Homo sapiens
  misc_RNA (1)...(19): siRNA sense strand
gaucuugccuuguaaauag

SEQ ID NO: 1448434 - RNA, 19 nt, Homo sapiens
  misc_RNA (1)...(19): siRNA sense strand
caaauuaugugguagcuau

SEQ ID NO: 1448435 - RNA, 19 nt, Homo sapiens
  misc_RNA (1)...(19): siRNA sense strand
gaaauggaguggcuggauu

SEQ ID NO: 1448436 - RNA, 19 nt, Homo sapiens
  misc_RNA (1)...(19): siRNA sense strand
gaacucggaugaucugaau

SEQ ID NO: 1448437 - RNA, 19 nt, Homo sapiens
  misc_RNA (1)...(19): siRNA sense strand
ucauagaucuugccuugua

SEQ ID NO: 1448438 - RNA, 19 nt, Homo sapiens
  misc_RNA (1)...(19): siRNA sense strand
acaaagaacuggaaagugu

SEQ ID NO: 1448439 - RNA, 19 nt, Homo sapiens
  misc_RNA (1)...(19): siRNA sense strand
gaacauuccugugcaacaa

SEQ ID NO: 1448440 - RNA, 19 nt, Homo sapiens
  misc_RNA (1)...(19): siRNA sense strand
gcgaaugcccagaguauua

SEQ ID NO: 1448441 - RNA, 19 nt, Homo sapiens
  misc_RNA (1)...(19): siRNA sense strand
gaacaacgccuggaggauu

SEQ ID NO: 1448442 - RNA, 19 nt, Homo sapiens
  misc_RNA (1)...(19): siRNA sense strand
ggacaguucuacagacaug

SEQ ID NO: 1448443 - RNA, 19 nt, Homo sapiens
  misc_RNA (1)...(19): siRNA sense strand
gaccaaacguggacaguuc

SEQ ID NO: 1448444 - RNA, 19 nt, Homo sapiens
  misc_RNA (1)...(19): siRNA sense strand
cauguaacuucaagguuua

SEQ ID NO: 1448445 - RNA, 19 nt, Homo sapiens
  misc_RNA (1)...(19): siRNA sense strand
caacagcgccugcgucaga

SEQ ID NO: 1448446 - RNA, 19 nt, Homo sapiens
  misc_RNA (1)...(19): siRNA sense strand
gaacccagcccuucagaga

SEQ ID NO: 1448447 - RNA, 19 nt, Homo sapiens
  misc_RNA (1)...(19): siRNA sense strand
ggacgaugauggcauguca

SEQ ID NO: 1448448 - RNA, 19 nt, Homo sapiens
  misc_RNA (1)...(19): siRNA sense strand
gcagccaccuggacgauga

SEQ ID NO: 1448449 - RNA, 19 nt, Homo sapiens
  misc_RNA (1)...(19): siRNA sense strand
uggcaaacauucauucuau

SEQ ID NO: 1448450 - RNA, 19 nt, Homo sapiens
  misc_RNA (1)...(19): siRNA sense strand
gaccagcucccuacacuuu

SEQ ID NO: 1448451 - RNA, 19 nt, Homo sapiens
  misc_RNA (1)...(19): siRNA sense strand
ggagagagcacagaguuug

SEQ ID NO: 1448452 - RNA, 19 nt, Homo sapiens
  misc_RNA (1)...(19): siRNA sense strand
gcuaucagcucuugaaagc

SEQ ID NO: 1448453 - RNA, 19 nt, Homo sapiens
  misc_RNA (1)...(19): siRNA sense strand
gcaaacauucauucuauuc

SEQ ID NO: 1448454 - RNA, 19 nt, Homo sapiens
  misc_RNA (1)...(19): siRNA sense strand
ggaugagaaucuucagguu

SEQ ID NO: 1448455 - RNA, 19 nt, Homo sapiens
  misc_RNA (1)...(19): siRNA sense strand
cauuacagcuuauagaaag

SEQ ID NO: 1448456 - RNA, 19 nt, Homo sapiens
  misc_RNA (1)...(19): siRNA sense strand
gcaaaguuaucagguguca

SEQ ID NO: 1448457 - RNA, 19 nt, Homo sapiens
  misc_RNA (1)...(19): siRNA sense strand
gcaaagacugcaaaguuau

SEQ ID NO: 1448458 - RNA, 19 nt, Homo sapiens
  misc_RNA (1)...(19): siRNA sense strand
ggaggucuaugccagugaa

SEQ ID NO: 1448459 - RNA, 19 nt, Homo sapiens
  misc_RNA (1)...(19): siRNA sense strand
gcaugucaguguacacaga

SEQ ID NO: 1448460 - RNA, 19 nt, Homo sapiens
  misc_RNA (1)...(19): siRNA sense strand
ggagcaguuucgaauagaa

SEQ ID NO: 1448461 - RNA, 19 nt, Homo sapiens
  misc_RNA (1)...(19): siRNA sense strand
caacaucaaugagaaguac

SEQ ID NO: 1448462 - RNA, 19 nt, Homo sapiens
  misc_RNA (1)...(19): siRNA sense strand
guagaaacuuugaagaaac

SEQ ID NO: 1448463 - RNA, 19 nt, Homo sapiens
  misc_RNA (1)...(19): siRNA sense strand
acacuuuaauggagacuuu

SEQ ID NO: 1448464 - RNA, 19 nt, Homo sapiens
  misc_RNA (1)...(19): siRNA sense strand
ccagcucccuacacuuuaa

SEQ ID NO: 1448465 - RNA, 19 nt, Homo sapiens
  misc_RNA (1)...(19): siRNA sense strand
uggaaaguguaucaaguuu

SEQ ID NO: 1448466 - RNA, 19 nt, Homo sapiens
  misc_RNA (1)...(19): siRNA sense strand
gauaaggugaagucaguaa

SEQ ID NO: 1448467 - RNA, 19 nt, Homo sapiens
  misc_RNA (1)...(19): siRNA sense strand
gagcuggccucuguucuca

SEQ ID NO: 1448468 - RNA, 19 nt, Homo sapiens
  misc_RNA (1)...(19): siRNA sense strand
ggcaaacauucauucuauu

SEQ ID NO: 1448469 - RNA, 19 nt, Homo sapiens
  misc_RNA (1)...(19): siRNA sense strand
gaugauggcaugucagugu

SEQ ID NO: 1448470 - RNA, 19 nt, Homo sapiens
  misc_RNA (1)...(19): siRNA sense strand
ugaaugccgagauauauuu

SEQ ID NO: 1448471 - RNA, 19 nt, Homo sapiens
  misc_RNA (1)...(19): siRNA sense strand
cccacaagcuccagcauug

SEQ ID NO: 1448472 - RNA, 19 nt, Homo sapiens
  misc_RNA (1)...(19): siRNA sense strand
gggcaggcauugagauaca

SEQ ID NO: 1448473 - RNA, 19 nt, Homo sapiens
  misc_RNA (1)...(19): siRNA sense strand
uaccaaagacuagaucaua

SEQ ID NO: 1448474 - RNA, 19 nt, Homo sapiens
  misc_RNA (1)...(19): siRNA sense strand
gcaauccgaccaccugcua

SEQ ID NO: 1448475 - RNA, 19 nt, Homo sapiens
  misc_RNA (1)...(19): siRNA sense strand
uauagaaaguguugaaugc

SEQ ID NO: 1448476 - RNA, 19 nt, Homo sapiens
  misc_RNA (1)...(19): siRNA sense strand
aagauaaggugaagucagu

SEQ ID NO: 1448477 - RNA, 19 nt, Homo sapiens
  misc_RNA (1)...(19): siRNA sense strand
cgacagcugugcaccauac

SEQ ID NO: 1448478 - RNA, 19 nt, Homo sapiens
  misc_RNA (1)...(19): siRNA sense strand
cuaguacacugcucagaug

SEQ ID NO: 1448479 - RNA, 19 nt, Homo sapiens
  misc_RNA (1)...(19): siRNA sense strand
caaagaacuggaaagugua

SEQ ID NO: 1448480 - RNA, 19 nt, Homo sapiens
  misc_RNA (1)...(19): siRNA sense strand
cuggaucacugacaaagaa

SEQ ID NO: 1448481 - RNA, 19 nt, Homo sapiens
  misc_RNA (1)...(19): siRNA sense strand
caacaacgccaaggagaga

SEQ ID NO: 1448482 - RNA, 19 nt, Homo sapiens
  misc_RNA (1)...(19): siRNA sense strand
caaagaggagaguggagua

SEQ ID NO: 1448483 - RNA, 19 nt, Homo sapiens
  misc_RNA (1)...(19): siRNA sense strand
gccgucagcugucugcuau

SEQ ID NO: 1448484 - RNA, 19 nt, Homo sapiens
  misc_RNA (1)...(19): siRNA sense strand
ggaauugugggaacguauu

SEQ ID NO: 1448485 - RNA, 19 nt, Homo sapiens
  misc_RNA (1)...(19): siRNA sense strand
aggagucucuuguuaaugu

SEQ ID NO: 1448486 - RNA, 19 nt, Homo sapiens
  misc_RNA (1)...(19): siRNA sense strand
cauagaucuugccuuguaa

SEQ ID NO: 1448487 - RNA, 19 nt, Homo sapiens
  misc_RNA (1)...(19): siRNA sense strand
guggagcaguuucgaauag

SEQ ID NO: 1448488 - RNA, 19 nt, Homo sapiens
  misc_RNA (1)...(19): siRNA sense strand
ggauuuccaacaucaauga

SEQ ID NO: 1448489 - RNA, 19 nt, Homo sapiens
  misc_RNA (1)...(19): siRNA sense strand
aacaacgccuggaggauuu

SEQ ID NO: 1448490 - RNA, 19 nt, Homo sapiens
  misc_RNA (1)...(19): siRNA sense strand
aaucagcgcuucugguagu

SEQ ID NO: 1448491 - RNA, 19 nt, Homo sapiens
  misc_RNA (1)...(19): siRNA sense strand
ggagccaucuggauaugag

SEQ ID NO: 1448492 - RNA, 19 nt, Homo sapiens
  misc_RNA (1)...(19): siRNA sense strand
gaacguugcccaguguuuc

SEQ ID NO: 1448493 - RNA, 19 nt, Homo sapiens
  misc_RNA (1)...(19): siRNA sense strand
guucgauucuucucuguca

SEQ ID NO: 1448494 - RNA, 19 nt, Homo sapiens
  misc_RNA (1)...(19): siRNA sense strand
cgucagcugucugcuauga

SEQ ID NO: 1448495 - RNA, 19 nt, Homo sapiens
  misc_RNA (1)...(19): siRNA sense strand
ucagguuccuuuccuugaa

SEQ ID NO: 1448496 - RNA, 19 nt, Homo sapiens
  misc_RNA (1)...(19): siRNA sense strand
gaggagccaucuggauaug

SEQ ID NO: 1448497 - RNA, 19 nt, Homo sapiens
  misc_RNA (1)...(19): siRNA sense strand
ggaaaagcauacucaggaa

SEQ ID NO: 1448498 - RNA, 19 nt, Homo sapiens
  misc_RNA (1)...(19): siRNA sense strand
uuacagacuucacaucaag

SEQ ID NO: 1448499 - RNA, 19 nt, Homo sapiens
  misc_RNA (1)...(19): siRNA sense strand
ggcauuggcuaagcucuug

SEQ ID NO: 1448500 - RNA, 19 nt, Homo sapiens
  misc_RNA (1)...(19): siRNA sense strand
gaggauggguuuugauaug

SEQ ID NO: 1448501 - RNA, 19 nt, Homo sapiens
  misc_RNA (1)...(19): siRNA sense strand
guauucugcuccaguuguu

SEQ ID NO: 1448502 - RNA, 19 nt, Homo sapiens
  misc_RNA (1)...(19): siRNA sense strand
acagucauguucucugcua

SEQ ID NO: 1448503 - RNA, 19 nt, Homo sapiens
  misc_RNA (1)...(19): siRNA sense strand
ucucgagacuuucccaaug

SEQ ID NO: 1448504 - RNA, 19 nt, Homo sapiens
  misc_RNA (1)...(19): siRNA sense strand
gagauauauuucagcuuca

SEQ ID NO: 1448505 - RNA, 19 nt, Homo sapiens
  misc_RNA (1)...(19): siRNA sense strand
gcuccagcauugaccuuga

SEQ ID NO: 1448506 - RNA, 19 nt, Homo sapiens
  misc_RNA (1)...(19): siRNA sense strand
uuagcacccuccagaugua

SEQ ID NO: 1448507 - RNA, 19 nt, Homo sapiens
  misc_RNA (1)...(19): siRNA sense strand
ugucugugcuucugaaauc

SEQ ID NO: 1448508 - RNA, 19 nt, Homo sapiens
  misc_RNA (1)...(19): siRNA sense strand
ugucaagaguggcugaaga

SEQ ID NO: 1448509 - RNA, 19 nt, Homo sapiens
  misc_RNA (1)...(19): siRNA sense strand
ucaguguucuccucaguuc

SEQ ID NO: 1448510 - RNA, 19 nt, Homo sapiens
  misc_RNA (1)...(19): siRNA sense strand
gguagugcaugcuguggau

SEQ ID NO: 1448511 - RNA, 19 nt, Homo sapiens
  misc_RNA (1)...(19): siRNA sense strand
gaucucuucucauuugcau

SEQ ID NO: 1448512 - RNA, 19 nt, Homo sapiens
  misc_RNA (1)...(19): siRNA sense strand
gaacuggauaagcccauug

SEQ ID NO: 1448513 - RNA, 19 nt, Homo sapiens
  misc_RNA (1)...(19): siRNA sense strand
acugugaaguuguguuuau

SEQ ID NO: 1448514 - RNA, 19 nt, Homo sapiens
  misc_RNA (1)...(19): siRNA sense strand
ggaccaaacguggacaguu

SEQ ID NO: 1448515 - RNA, 19 nt, Homo sapiens
  misc_RNA (1)...(19): siRNA sense strand
ggagaguggaguagaggaa

SEQ ID NO: 1448516 - RNA, 19 nt, Homo sapiens
  misc_RNA (1)...(19): siRNA sense strand
ggagaacucggaugaucug

SEQ ID NO: 1448517 - RNA, 19 nt, Homo sapiens
  misc_RNA (1)...(19): siRNA sense strand
ccaggccaaucagaucuuu

SEQ ID NO: 1448518 - RNA, 19 nt, Homo sapiens
  misc_RNA (1)...(19): siRNA sense strand
aguguugaaugccgagaua

SEQ ID NO: 1448519 - RNA, 19 nt, Homo sapiens
  misc_RNA (1)...(19): siRNA sense strand
ggagucucuuguuaauguu

SEQ ID NO: 1448520 - RNA, 19 nt, Homo sapiens
  misc_RNA (1)...(19): siRNA sense strand
ugacaaagaacuggaaagu

SEQ ID NO: 1448521 - RNA, 19 nt, Homo sapiens
  misc_RNA (1)...(19): siRNA sense strand
ggaaggccaucugcaacca

SEQ ID NO: 1448522 - RNA, 19 nt, Homo sapiens
  misc_RNA (1)...(19): siRNA sense strand
acauguuaguggaagauaa

SEQ ID NO: 1448523 - RNA, 19 nt, Homo sapiens
  misc_RNA (1)...(19): siRNA sense strand
gcucaguguucuccucagu

SEQ ID NO: 1448524 - RNA, 19 nt, Homo sapiens
  misc_RNA (1)...(19): siRNA sense strand
cugaggagccaucuggaua

SEQ ID NO: 1448525 - RNA, 19 nt, Homo sapiens
  misc_RNA (1)...(19): siRNA sense strand
gacuagaucauacgacaau

SEQ ID NO: 1448526 - RNA, 19 nt, Homo sapiens
  misc_RNA (1)...(19): siRNA sense strand
gaacuggaaaguguaucaa

SEQ ID NO: 1448527 - RNA, 19 nt, Homo sapiens
  misc_RNA (1)...(19): siRNA sense strand
gcaggaggccaccaaagag

SEQ ID NO: 1448528 - RNA, 19 nt, Homo sapiens
  misc_RNA (1)...(19): siRNA sense strand
ccaaggucaucauagaucu

SEQ ID NO: 1448529 - RNA, 19 nt, Homo sapiens
  misc_RNA (1)...(19): siRNA sense strand
gaacacuucucgagacuuu

SEQ ID NO: 1448530 - RNA, 19 nt, Homo sapiens
  misc_RNA (1)...(19): siRNA sense strand
gcauguaacuucaagguuu

SEQ ID NO: 1448531 - RNA, 19 nt, Homo sapiens
  misc_RNA (1)...(19): siRNA sense strand
gauaugagcuggccucugu

SEQ ID NO: 1448532 - RNA, 19 nt, Homo sapiens
  misc_RNA (1)...(19): siRNA sense strand
gaaaucagcgcuucuggua

SEQ ID NO: 1448533 - RNA, 19 nt, Homo sapiens
  misc_RNA (1)...(19): siRNA sense strand
gaucuugccuuguaaauag

SEQ ID NO: 1448534 - RNA, 19 nt, Homo sapiens
  misc_RNA (1)...(19): siRNA sense strand
caaauuaugugguagcuau

SEQ ID NO: 1448535 - RNA, 19 nt, Homo sapiens
  misc_RNA (1)...(19): siRNA sense strand
gaaauggaguggcuggauu

SEQ ID NO: 1448536 - RNA, 19 nt, Homo sapiens
  misc_RNA (1)...(19): siRNA sense strand
gaacucggaugaucugaau

SEQ ID NO: 1448537 - RNA, 19 nt, Homo sapiens
  misc_RNA (1)...(19): siRNA sense strand
ucauagaucuugccuugua

SEQ ID NO: 1448538 - RNA, 19 nt, Homo sapiens
  misc_RNA (1)...(19): siRNA sense strand
acaaagaacuggaaagugu

SEQ ID NO: 1448539 - RNA, 19 nt, Homo sapiens
  misc_RNA (1)...(19): siRNA sense strand
gaacauuccugugcaacaa

SEQ ID NO: 1448540 - RNA, 19 nt, Homo sapiens
  misc_RNA (1)...(19): siRNA sense strand
gcgaaugcccagaguauua

SEQ ID NO: 1448541 - RNA, 19 nt, Homo sapiens
  misc_RNA (1)...(19): siRNA sense strand
gaacaacgccuggaggauu

SEQ ID NO: 1448542 - RNA, 19 nt, Homo sapiens
  misc_RNA (1)...(19): siRNA sense strand
ggacaguucuacagacaug

SEQ ID NO: 1448543 - RNA, 19 nt, Homo sapiens
  misc_RNA (1)...(19): siRNA sense strand
gaccaaacguggacaguuc

SEQ ID NO: 1448544 - RNA, 19 nt, Homo sapiens
  misc_RNA (1)...(19): siRNA sense strand
cauguaacuucaagguuua

SEQ ID NO: 1448545 - RNA, 19 nt, Homo sapiens
  misc_RNA (1)...(19): siRNA sense strand
caacagcgccugcgucaga

SEQ ID NO: 1448546 - RNA, 19 nt, Homo sapiens
  misc_RNA (1)...(19): siRNA sense strand
gaacccagcccuucagaga

SEQ ID NO: 1448547 - RNA, 19 nt, Homo sapiens
  misc_RNA (1)...(19): siRNA sense strand
ggacgaugauggcauguca

SEQ ID NO: 1448548 - RNA, 19 nt, Homo sapiens
  misc_RNA (1)...(19): siRNA sense strand
gcagccaccuggacgauga

SEQ ID NO: 1448549 - RNA, 19 nt, Homo sapiens
  misc_RNA (1)...(19): siRNA sense strand
uggcaaacauucauucuau

SEQ ID NO: 1448550 - RNA, 19 nt, Homo sapiens
  misc_RNA (1)...(19): siRNA sense strand
gaccagcucccuacacuuu

SEQ ID NO: 1448551 - RNA, 19 nt, Homo sapiens
  misc_RNA (1)...(19): siRNA sense strand
ggagagagcacagaguuug

SEQ ID NO: 1448552 - RNA, 19 nt, Homo sapiens
  misc_RNA (1)...(19): siRNA sense strand
gcuaucagcucuugaaagc

SEQ ID NO: 1448553 - RNA, 19 nt, Homo sapiens
  misc_RNA (1)...(19): siRNA sense strand
gcaaacauucauucuauuc

SEQ ID NO: 1448554 - RNA, 19 nt, Homo sapiens
  misc_RNA (1)...(19): siRNA sense strand
ggaugagaaucuucagguu

SEQ ID NO: 1448555 - RNA, 19 nt, Homo sapiens
  misc_RNA (1)...(19): siRNA sense strand
cauuacagcuuauagaaag

SEQ ID NO: 1448556 - RNA, 19 nt, Homo sapiens
  misc_RNA (1)...(19): siRNA sense strand
gcaaaguuaucagguguca

SEQ ID NO: 1448557 - RNA, 19 nt, Homo sapiens
  misc_RNA (1)...(19): siRNA sense strand
gcaaagacugcaaaguuau

SEQ ID NO: 1448558 - RNA, 19 nt, Homo sapiens
  misc_RNA (1)...(19): siRNA sense strand
ggaggucuaugccagugaa

SEQ ID NO: 1448559 - RNA, 19 nt, Homo sapiens
  misc_RNA (1)...(19): siRNA sense strand
gcaugucaguguacacaga

SEQ ID NO: 1448560 - RNA, 19 nt, Homo sapiens
  misc_RNA (1)...(19): siRNA sense strand
ggagcaguuucgaauagaa

SEQ ID NO: 1448561 - RNA, 19 nt, Homo sapiens
  misc_RNA (1)...(19): siRNA sense strand
caacaucaaugagaaguac

SEQ ID NO: 1448562 - RNA, 19 nt, Homo sapiens
  misc_RNA (1)...(19): siRNA sense strand
guagaaacuuugaagaaac

SEQ ID NO: 1448563 - RNA, 19 nt, Homo sapiens
  misc_RNA (1)...(19): siRNA sense strand
acacuuuaauggagacuuu

SEQ ID NO: 1448564 - RNA, 19 nt, Homo sapiens
  misc_RNA (1)...(19): siRNA sense strand
ccagcucccuacacuuuaa

SEQ ID NO: 1448565 - RNA, 19 nt, Homo sapiens
  misc_RNA (1)...(19): siRNA sense strand
uggaaaguguaucaaguuu

SEQ ID NO: 1448566 - RNA, 19 nt, Homo sapiens
  misc_RNA (1)...(19): siRNA sense strand
gauaaggugaagucaguaa

SEQ ID NO: 1448567 - RNA, 19 nt, Homo sapiens
  misc_RNA (1)...(19): siRNA sense strand
gagcuggccucuguucuca

SEQ ID NO: 1448568 - RNA, 19 nt, Homo sapiens
  misc_RNA (1)...(19): siRNA sense strand
ggcaaacauucauucuauu

SEQ ID NO: 1448569 - RNA, 19 nt, Homo sapiens
  misc_RNA (1)...(19): siRNA sense strand
gaugauggcaugucagugu

SEQ ID NO: 1448570 - RNA, 19 nt, Homo sapiens
  misc_RNA (1)...(19): siRNA sense strand
ugaaugccgagauauauuu

SEQ ID NO: 1448571 - RNA, 19 nt, Homo sapiens
  misc_RNA (1)...(19): siRNA sense strand
cccacaagcuccagcauug

SEQ ID NO: 1448572 - RNA, 19 nt, Homo sapiens
  misc_RNA (1)...(19): siRNA sense strand
gggcaggcauugagauaca

SEQ ID NO: 1448573 - RNA, 19 nt, Homo sapiens
  misc_RNA (1)...(19): siRNA sense strand
uaccaaagacuagaucaua

SEQ ID NO: 1448574 - RNA, 19 nt, Homo sapiens
  misc_RNA (1)...(19): siRNA sense strand
gcaauccgaccaccugcua

SEQ ID NO: 1448575 - RNA, 19 nt, Homo sapiens
  misc_RNA (1)...(19): siRNA sense strand
uauagaaaguguugaaugc

SEQ ID NO: 1448576 - RNA, 19 nt, Homo sapiens
  misc_RNA (1)...(19): siRNA sense strand
aagauaaggugaagucagu

SEQ ID NO: 1448577 - RNA, 19 nt, Homo sapiens
  misc_RNA (1)...(19): siRNA sense strand
cgacagcugugcaccauac

SEQ ID NO: 1448578 - RNA, 19 nt, Homo sapiens
  misc_RNA (1)...(19): siRNA sense strand
cuaguacacugcucagaug

SEQ ID NO: 1448579 - RNA, 19 nt, Homo sapiens
  misc_RNA (1)...(19): siRNA sense strand
caaagaacuggaaagugua

SEQ ID NO: 1448580 - RNA, 19 nt, Homo sapiens
  misc_RNA (1)...(19): siRNA sense strand
cuggaucacugacaaagaa

SEQ ID NO: 1448581 - RNA, 19 nt, Homo sapiens
  misc_RNA (1)...(19): siRNA sense strand
caacaacgccaaggagaga

SEQ ID NO: 1448582 - RNA, 19 nt, Homo sapiens
  misc_RNA (1)...(19): siRNA sense strand
caaagaggagaguggagua

SEQ ID NO: 1448583 - RNA, 19 nt, Homo sapiens
  misc_RNA (1)...(19): siRNA sense strand
gccgucagcugucugcuau

SEQ ID NO: 1448584 - RNA, 19 nt, Homo sapiens
  misc_RNA (1)...(19): siRNA sense strand
ggaauugugggaacguauu

SEQ ID NO: 1448585 - RNA, 19 nt, Homo sapiens
  misc_RNA (1)...(19): siRNA sense strand
aggagucucuuguuaaugu

SEQ ID NO: 1448586 - RNA, 19 nt, Homo sapiens
  misc_RNA (1)...(19): siRNA sense strand
cauagaucuugccuuguaa

SEQ ID NO: 1448587 - RNA, 19 nt, Homo sapiens
  misc_RNA (1)...(19): siRNA sense strand
guggagcaguuucgaauag

SEQ ID NO: 1448588 - RNA, 19 nt, Homo sapiens
  misc_RNA (1)...(19): siRNA sense strand
ggauuuccaacaucaauga

SEQ ID NO: 1448589 - RNA, 19 nt, Homo sapiens
  misc_RNA (1)...(19): siRNA sense strand
aacaacgccuggaggauuu

SEQ ID NO: 1448590 - RNA, 19 nt, Homo sapiens
  misc_RNA (1)...(19): siRNA sense strand
aaucagcgcuucugguagu

SEQ ID NO: 1448591 - RNA, 19 nt, Homo sapiens
  misc_RNA (1)...(19): siRNA sense strand
ggagccaucuggauaugag

SEQ ID NO: 1448592 - RNA, 19 nt, Homo sapiens
  misc_RNA (1)...(19): siRNA sense strand
gaacguugcccaguguuuc

SEQ ID NO: 1448593 - RNA, 19 nt, Homo sapiens
  misc_RNA (1)...(19): siRNA sense strand
guucgauucuucucuguca

SEQ ID NO: 1448594 - RNA, 19 nt, Homo sapiens
  misc_RNA (1)...(19): siRNA sense strand
cgucagcugucugcuauga

SEQ ID NO: 1448595 - RNA, 19 nt, Homo sapiens
  misc_RNA (1)...(19): siRNA sense strand
ucagguuccuuuccuugaa

SEQ ID NO: 1448596 - RNA, 19 nt, Homo sapiens
  misc_RNA (1)...(19): siRNA sense strand
gaggagccaucuggauaug

SEQ ID NO: 1448597 - RNA, 19 nt, Homo sapiens
  misc_RNA (1)...(19): siRNA sense strand
ggaaaagcauacucaggaa

SEQ ID NO: 1448598 - RNA, 19 nt, Homo sapiens
  misc_RNA (1)...(19): siRNA sense strand
uuacagacuucacaucaag

SEQ ID NO: 1448599 - RNA, 19 nt, Homo sapiens
  misc_RNA (1)...(19): siRNA sense strand
ggcauuggcuaagcucuug

SEQ ID NO: 1448600 - RNA, 19 nt, Homo sapiens
  misc_RNA (1)...(19): siRNA sense strand
gaggauggguuuugauaug

SEQ ID NO: 1448601 - RNA, 19 nt, Homo sapiens
  misc_RNA (1)...(19): siRNA sense strand
guauucugcuccaguuguu

SEQ ID NO: 1448602 - RNA, 19 nt, Homo sapiens
  misc_RNA (1)...(19): siRNA sense strand
acagucauguucucugcua

SEQ ID NO: 1448603 - RNA, 19 nt, Homo sapiens
  misc_RNA (1)...(19): siRNA sense strand
ucucgagacuuucccaaug

SEQ ID NO: 1448604 - RNA, 19 nt, Homo sapiens
  misc_RNA (1)...(19): siRNA sense strand
gagauauauuucagcuuca

SEQ ID NO: 1448605 - RNA, 19 nt, Homo sapiens
  misc_RNA (1)...(19): siRNA sense strand
gcuccagcauugaccuuga

SEQ ID NO: 1448606 - RNA, 19 nt, Homo sapiens
  misc_RNA (1)...(19): siRNA sense strand
uuagcacccuccagaugua

SEQ ID NO: 1448607 - RNA, 19 nt, Homo sapiens
  misc_RNA (1)...(19): siRNA sense strand
ugucugugcuucugaaauc

SEQ ID NO: 1448608 - RNA, 19 nt, Homo sapiens
  misc_RNA (1)...(19): siRNA sense strand
ugucaagaguggcugaaga

SEQ ID NO: 1448609 - RNA, 19 nt, Homo sapiens
  misc_RNA (1)...(19): siRNA sense strand
ucaguguucuccucaguuc

SEQ ID NO: 1448610 - RNA, 19 nt, Homo sapiens
  misc_RNA (1)...(19): siRNA sense strand
gguagugcaugcuguggau

SEQ ID NO: 1448611 - RNA, 19 nt, Homo sapiens
  misc_RNA (1)...(19): siRNA sense strand
gaucucuucucauuugcau

SEQ ID NO: 1448612 - RNA, 19 nt, Homo sapiens
  misc_RNA (1)...(19): siRNA sense strand
gaacuggauaagcccauug

SEQ ID NO: 1448613 - RNA, 19 nt, Homo sapiens
  misc_RNA (1)...(19): siRNA sense strand
acugugaaguuguguuuau

SEQ ID NO: 1448614 - RNA, 19 nt, Homo sapiens
  misc_RNA (1)...(19): siRNA sense strand
ggaccaaacguggacaguu

SEQ ID NO: 1448615 - RNA, 19 nt, Homo sapiens
  misc_RNA (1)...(19): siRNA sense strand
ggagaguggaguagaggaa

SEQ ID NO: 1448616 - RNA, 19 nt, Homo sapiens
  misc_RNA (1)...(19): siRNA sense strand
ggagaacucggaugaucug

SEQ ID NO: 1448617 - RNA, 19 nt, Homo sapiens
  misc_RNA (1)...(19): siRNA sense strand
ccaggccaaucagaucuuu

SEQ ID NO: 1448618 - RNA, 19 nt, Homo sapiens
  misc_RNA (1)...(19): siRNA sense strand
aguguugaaugccgagaua

SEQ ID NO: 1448619 - RNA, 19 nt, Homo sapiens
  misc_RNA (1)...(19): siRNA sense strand
ggagucucuuguuaauguu

SEQ ID NO: 1448620 - RNA, 19 nt, Homo sapiens
  misc_RNA (1)...(19): siRNA sense strand
ugacaaagaacuggaaagu

SEQ ID NO: 1448621 - RNA, 19 nt, Homo sapiens
  misc_RNA (1)...(19): siRNA sense strand
ggaaggccaucugcaacca

SEQ ID NO: 1448622 - RNA, 19 nt, Homo sapiens
  misc_RNA (1)...(19): siRNA sense strand
acauguuaguggaagauaa

SEQ ID NO: 1448623 - RNA, 19 nt, Homo sapiens
  misc_RNA (1)...(19): siRNA sense strand
gcucaguguucuccucagu

SEQ ID NO: 1448624 - RNA, 19 nt, Homo sapiens
  misc_RNA (1)...(19): siRNA sense strand
cugaggagccaucuggaua

SEQ ID NO: 1448625 - RNA, 19 nt, Homo sapiens
  misc_RNA (1)...(19): siRNA sense strand
gacuagaucauacgacaau

SEQ ID NO: 1448626 - RNA, 19 nt, Homo sapiens
  misc_RNA (1)...(19): siRNA sense strand
gaacuggaaaguguaucaa

SEQ ID NO: 1448627 - RNA, 19 nt, Homo sapiens
  misc_RNA (1)...(19): siRNA sense strand
gcaggaggccaccaaagag

SEQ ID NO: 1448628 - RNA, 19 nt, Homo sapiens
  misc_RNA (1)...(19): siRNA sense strand
ccaaggucaucauagaucu

SEQ ID NO: 1448629 - RNA, 19 nt, Homo sapiens
  misc_RNA (1)...(19): siRNA sense strand
gaacacuucucgagacuuu

SEQ ID NO: 1448630 - RNA, 19 nt, Homo sapiens
  misc_RNA (1)...(19): siRNA sense strand
gcauguaacuucaagguuu

SEQ ID NO: 1448631 - RNA, 19 nt, Homo sapiens
  misc_RNA (1)...(19): siRNA sense strand
gauaugagcuggccucugu

SEQ ID NO: 1448632 - RNA, 19 nt, Homo sapiens
  misc_RNA (1)...(19): siRNA sense strand
gaaaucagcgcuucuggua

SEQ ID NO: 1448633 - RNA, 19 nt, Homo sapiens
  misc_RNA (1)...(19): siRNA sense strand
gaucuugccuuguaaauag

SEQ ID NO: 1448634 - RNA, 19 nt, Homo sapiens
  misc_RNA (1)...(19): siRNA sense strand
caaauuaugugguagcuau

SEQ ID NO: 1448635 - RNA, 19 nt, Homo sapiens
  misc_RNA (1)...(19): siRNA sense strand
gaaauggaguggcuggauu

SEQ ID NO: 1448636 - RNA, 19 nt, Homo sapiens
  misc_RNA (1)...(19): siRNA sense strand
gaacucggaugaucugaau

SEQ ID NO: 1448637 - RNA, 19 nt, Homo sapiens
  misc_RNA (1)...(19): siRNA sense strand
ucauagaucuugccuugua

SEQ ID NO: 1448638 - RNA, 19 nt, Homo sapiens
  misc_RNA (1)...(19): siRNA sense strand
acaaagaacuggaaagugu

SEQ ID NO: 1448639 - RNA, 19 nt, Homo sapiens
  misc_RNA (1)...(19): siRNA sense strand
gaacauuccugugcaacaa

SEQ ID NO: 1448640 - RNA, 19 nt, Homo sapiens
  misc_RNA (1)...(19): siRNA sense strand
gcgaaugcccagaguauua

SEQ ID NO: 1448641 - RNA, 19 nt, Homo sapiens
  misc_RNA (1)...(19): siRNA sense strand
gaacaacgccuggaggauu

SEQ ID NO: 1448642 - RNA, 19 nt, Homo sapiens
  misc_RNA (1)...(19): siRNA sense strand
ggacaguucuacagacaug

SEQ ID NO: 1448643 - RNA, 19 nt, Homo sapiens
  misc_RNA (1)...(19): siRNA sense strand
gaccaaacguggacaguuc

SEQ ID NO: 1448644 - RNA, 19 nt, Homo sapiens
  misc_RNA (1)...(19): siRNA sense strand
cauguaacuucaagguuua

SEQ ID NO: 1448645 - RNA, 19 nt, Homo sapiens
  misc_RNA (1)...(19): siRNA sense strand
caacagcgccugcgucaga

SEQ ID NO: 1448646 - RNA, 19 nt, Homo sapiens
  misc_RNA (1)...(19): siRNA sense strand
gaacccagcccuucagaga

SEQ ID NO: 1448647 - RNA, 19 nt, Homo sapiens
  misc_RNA (1)...(19): siRNA sense strand
ggacgaugauggcauguca

SEQ ID NO: 1448648 - RNA, 19 nt, Homo sapiens
  misc_RNA (1)...(19): siRNA sense strand
gcagccaccuggacgauga

SEQ ID NO: 1448649 - RNA, 19 nt, Homo sapiens
  misc_RNA (1)...(19): siRNA sense strand
uggcaaacauucauucuau

SEQ ID NO: 1448650 - RNA, 19 nt, Homo sapiens
  misc_RNA (1)...(19): siRNA sense strand
gaccagcucccuacacuuu

SEQ ID NO: 1448651 - RNA, 19 nt, Homo sapiens
  misc_RNA (1)...(19): siRNA sense strand
ggagagagcacagaguuug

SEQ ID NO: 1448652 - RNA, 19 nt, Homo sapiens
  misc_RNA (1)...(19): siRNA sense strand
gcuaucagcucuugaaagc

SEQ ID NO: 1448653 - RNA, 19 nt, Homo sapiens
  misc_RNA (1)...(19): siRNA sense strand
gcaaacauucauucuauuc

SEQ ID NO: 1448654 - RNA, 19 nt, Homo sapiens
  misc_RNA (1)...(19): siRNA sense strand
ggaugagaaucuucagguu

SEQ ID NO: 1448655 - RNA, 19 nt, Homo sapiens
  misc_RNA (1)...(19): siRNA sense strand
cauuacagcuuauagaaag

SEQ ID NO: 1448656 - RNA, 19 nt, Homo sapiens
  misc_RNA (1)...(19): siRNA sense strand
gcaaaguuaucagguguca

SEQ ID NO: 1448657 - RNA, 19 nt, Homo sapiens
  misc_RNA (1)...(19): siRNA sense strand
gcaaagacugcaaaguuau

SEQ ID NO: 1448658 - RNA, 19 nt, Homo sapiens
  misc_RNA (1)...(19): siRNA sense strand
ggaggucuaugccagugaa

SEQ ID NO: 1448659 - RNA, 19 nt, Homo sapiens
  misc_RNA (1)...(19): siRNA sense strand
gcaugucaguguacacaga

SEQ ID NO: 1448660 - RNA, 19 nt, Homo sapiens
  misc_RNA (1)...(19): siRNA sense strand
ggagcaguuucgaauagaa

SEQ ID NO: 1448661 - RNA, 19 nt, Homo sapiens
  misc_RNA (1)...(19): siRNA sense strand
caacaucaaugagaaguac

SEQ ID NO: 1448662 - RNA, 19 nt, Homo sapiens
  misc_RNA (1)...(19): siRNA sense strand
guagaaacuuugaagaaac

SEQ ID NO: 1448663 - RNA, 19 nt, Homo sapiens
  misc_RNA (1)...(19): siRNA sense strand
acacuuuaauggagacuuu

SEQ ID NO: 1448664 - RNA, 19 nt, Homo sapiens
  misc_RNA (1)...(19): siRNA sense strand
ccagcucccuacacuuuaa

SEQ ID NO: 1448665 - RNA, 19 nt, Homo sapiens
  misc_RNA (1)...(19): siRNA sense strand
uggaaaguguaucaaguuu

SEQ ID NO: 1448666 - RNA, 19 nt, Homo sapiens
  misc_RNA (1)...(19): siRNA sense strand
gauaaggugaagucaguaa

SEQ ID NO: 1448667 - RNA, 19 nt, Homo sapiens
  misc_RNA (1)...(19): siRNA sense strand
gagcuggccucuguucuca

SEQ ID NO: 1448668 - RNA, 19 nt, Homo sapiens
  misc_RNA (1)...(19): siRNA sense strand
ggcaaacauucauucuauu

SEQ ID NO: 1448669 - RNA, 19 nt, Homo sapiens
  misc_RNA (1)...(19): siRNA sense strand
gaugauggcaugucagugu

SEQ ID NO: 1448670 - RNA, 19 nt, Homo sapiens
  misc_RNA (1)...(19): siRNA sense strand
ugaaugccgagauauauuu

SEQ ID NO: 1448671 - RNA, 19 nt, Homo sapiens
  misc_RNA (1)...(19): siRNA sense strand
cccacaagcuccagcauug

SEQ ID NO: 1448672 - RNA, 19 nt, Homo sapiens
  misc_RNA (1)...(19): siRNA sense strand
gggcaggcauugagauaca

SEQ ID NO: 1448673 - RNA, 19 nt, Homo sapiens
  misc_RNA (1)...(19): siRNA sense strand
uaccaaagacuagaucaua

SEQ ID NO: 1448674 - RNA, 19 nt, Homo sapiens
  misc_RNA (1)...(19): siRNA sense strand
gcaauccgaccaccugcua

SEQ ID NO: 1448675 - RNA, 19 nt, Homo sapiens
  misc_RNA (1)...(19): siRNA sense strand
uauagaaaguguugaaugc

SEQ ID NO: 1448676 - RNA, 19 nt, Homo sapiens
  misc_RNA (1)...(19): siRNA sense strand
aagauaaggugaagucagu

SEQ ID NO: 1448677 - RNA, 19 nt, Homo sapiens
  misc_RNA (1)...(19): siRNA sense strand
cgacagcugugcaccauac

SEQ ID NO: 1448678 - RNA, 19 nt, Homo sapiens
  misc_RNA (1)...(19): siRNA sense strand
cuaguacacugcucagaug

SEQ ID NO: 1448679 - RNA, 19 nt, Homo sapiens
  misc_RNA (1)...(19): siRNA sense strand
caaagaacuggaaagugua

SEQ ID NO: 1448680 - RNA, 19 nt, Homo sapiens
  misc_RNA (1)...(19): siRNA sense strand
cuggaucacugacaaagaa

SEQ ID NO: 1448681 - RNA, 19 nt, Homo sapiens
  misc_RNA (1)...(19): siRNA sense strand
caacaacgccaaggagaga

SEQ ID NO: 1448682 - RNA, 19 nt, Homo sapiens
  misc_RNA (1)...(19): siRNA sense strand
caaagaggagaguggagua

SEQ ID NO: 1448683 - RNA, 19 nt, Homo sapiens
  misc_RNA (1)...(19): siRNA sense strand
gccgucagcugucugcuau

SEQ ID NO: 1448684 - RNA, 19 nt, Homo sapiens
  misc_RNA (1)...(19): siRNA sense strand
ggaauugugggaacguauu

SEQ ID NO: 1448685 - RNA, 19 nt, Homo sapiens
  misc_RNA (1)...(19): siRNA sense strand
aggagucucuuguuaaugu

SEQ ID NO: 1448686 - RNA, 19 nt, Homo sapiens
  misc_RNA (1)...(19): siRNA sense strand
cauagaucuugccuuguaa

SEQ ID NO: 1448687 - RNA, 19 nt, Homo sapiens
  misc_RNA (1)...(19): siRNA sense strand
guggagcaguuucgaauag

SEQ ID NO: 1448688 - RNA, 19 nt, Homo sapiens
  misc_RNA (1)...(19): siRNA sense strand
ggauuuccaacaucaauga

SEQ ID NO: 1448689 - RNA, 19 nt, Homo sapiens
  misc_RNA (1)...(19): siRNA sense strand
aacaacgccuggaggauuu

SEQ ID NO: 1448690 - RNA, 19 nt, Homo sapiens
  misc_RNA (1)...(19): siRNA sense strand
aaucagcgcuucugguagu

SEQ ID NO: 1448691 - RNA, 19 nt, Homo sapiens
  misc_RNA (1)...(19): siRNA sense strand
ggagccaucuggauaugag

SEQ ID NO: 1448692 - RNA, 19 nt, Homo sapiens
  misc_RNA (1)...(19): siRNA sense strand
gaacguugcccaguguuuc

SEQ ID NO: 1448693 - RNA, 19 nt, Homo sapiens
  misc_RNA (1)...(19): siRNA sense strand
guucgauucuucucuguca

SEQ ID NO: 1448694 - RNA, 19 nt, Homo sapiens
  misc_RNA (1)...(19): siRNA sense strand
cgucagcugucugcuauga

SEQ ID NO: 1448695 - RNA, 19 nt, Homo sapiens
  misc_RNA (1)...(19): siRNA sense strand
ucagguuccuuuccuugaa

SEQ ID NO: 1448696 - RNA, 19 nt, Homo sapiens
  misc_RNA (1)...(19): siRNA sense strand
gaggagccaucuggauaug

SEQ ID NO: 1448697 - RNA, 19 nt, Homo sapiens
  misc_RNA (1)...(19): siRNA sense strand
ggaaaagcauacucaggaa

SEQ ID NO: 1448698 - RNA, 19 nt, Homo sapiens
  misc_RNA (1)...(19): siRNA sense strand
uuacagacuucacaucaag

SEQ ID NO: 1448699 - RNA, 19 nt, Homo sapiens
  misc_RNA (1)...(19): siRNA sense strand
ggcauuggcuaagcucuug

SEQ ID NO: 1448700 - RNA, 19 nt, Homo sapiens
  misc_RNA (1)...(19): siRNA sense strand
gaggauggguuuugauaug

SEQ ID NO: 1448701 - RNA, 19 nt, Homo sapiens
  misc_RNA (1)...(19): siRNA sense strand
guauucugcuccaguuguu

SEQ ID NO: 1448702 - RNA, 19 nt, Homo sapiens
  misc_RNA (1)...(19): siRNA sense strand
acagucauguucucugcua

SEQ ID NO: 1448703 - RNA, 19 nt, Homo sapiens
  misc_RNA (1)...(19): siRNA sense strand
ucucgagacuuucccaaug

SEQ ID NO: 1448704 - RNA, 19 nt, Homo sapiens
  misc_RNA (1)...(19): siRNA sense strand
gagauauauuucagcuuca

SEQ ID NO: 1448705 - RNA, 19 nt, Homo sapiens
  misc_RNA (1)...(19): siRNA sense strand
gcuccagcauugaccuuga

SEQ ID NO: 1448706 - RNA, 19 nt, Homo sapiens
  misc_RNA (1)...(19): siRNA sense strand
uuagcacccuccagaugua

SEQ ID NO: 1448707 - RNA, 19 nt, Homo sapiens
  misc_RNA (1)...(19): siRNA sense strand
ugucugugcuucugaaauc

SEQ ID NO: 1448708 - RNA, 19 nt, Homo sapiens
  misc_RNA (1)...(19): siRNA sense strand
ugucaagaguggcugaaga

SEQ ID NO: 1448709 - RNA, 19 nt, Homo sapiens
  misc_RNA (1)...(19): siRNA sense strand
ucaguguucuccucaguuc

SEQ ID NO: 1448710 - RNA, 19 nt, Homo sapiens
  misc_RNA (1)...(19): siRNA sense strand
gguagugcaugcuguggau

SEQ ID NO: 1448711 - RNA, 19 nt, Homo sapiens
  misc_RNA (1)...(19): siRNA sense strand
gaucucuucucauuugcau

SEQ ID NO: 1448712 - RNA, 19 nt, Homo sapiens
  misc_RNA (1)...(19): siRNA sense strand
gaacuggauaagcccauug

SEQ ID NO: 1448713 - RNA, 19 nt, Homo sapiens
  misc_RNA (1)...(19): siRNA sense strand
acugugaaguuguguuuau

SEQ ID NO: 1448714 - RNA, 19 nt, Homo sapiens
  misc_RNA (1)...(19): siRNA sense strand
ggaccaaacguggacaguu

SEQ ID NO: 1448715 - RNA, 19 nt, Homo sapiens
  misc_RNA (1)...(19): siRNA sense strand
ggagaguggaguagaggaa

SEQ ID NO: 1448716 - RNA, 19 nt, Homo sapiens
  misc_RNA (1)...(19): siRNA sense strand
ggagaacucggaugaucug

SEQ ID NO: 1448717 - RNA, 19 nt, Homo sapiens
  misc_RNA (1)...(19): siRNA sense strand
ccaggccaaucagaucuuu

SEQ ID NO: 1448718 - RNA, 19 nt, Homo sapiens
  misc_RNA (1)...(19): siRNA sense strand
aguguugaaugccgagaua

SEQ ID NO: 1448719 - RNA, 19 nt, Homo sapiens
  misc_RNA (1)...(19): siRNA sense strand
ggagucucuuguuaauguu

SEQ ID NO: 1448720 - RNA, 19 nt, Homo sapiens
  misc_RNA (1)...(19): siRNA sense strand
ugacaaagaacuggaaagu

SEQ ID NO: 1448721 - RNA, 19 nt, Homo sapiens
  misc_RNA (1)...(19): siRNA sense strand
ggaaggccaucugcaacca

SEQ ID NO: 1448722 - RNA, 19 nt, Homo sapiens
  misc_RNA (1)...(19): siRNA sense strand
acauguuaguggaagauaa

SEQ ID NO: 1448723 - RNA, 19 nt, Homo sapiens
  misc_RNA (1)...(19): siRNA sense strand
gcucaguguucuccucagu

SEQ ID NO: 1448724 - RNA, 19 nt, Homo sapiens
  misc_RNA (1)...(19): siRNA sense strand
cugaggagccaucuggaua

SEQ ID NO: 1448725 - RNA, 19 nt, Homo sapiens
  misc_RNA (1)...(19): siRNA sense strand
gacuagaucauacgacaau

SEQ ID NO: 1448726 - RNA, 19 nt, Homo sapiens
  misc_RNA (1)...(19): siRNA sense strand
gaacuggaaaguguaucaa

SEQ ID NO: 1448727 - RNA, 19 nt, Homo sapiens
  misc_RNA (1)...(19): siRNA sense strand
gcaggaggccaccaaagag

SEQ ID NO: 1448728 - RNA, 19 nt, Homo sapiens
  misc_RNA (1)...(19): siRNA sense strand
ccaaggucaucauagaucu

SEQ ID NO: 1448729 - RNA, 19 nt, Homo sapiens
  misc_RNA (1)...(19): siRNA sense strand
gaacacuucucgagacuuu

SEQ ID NO: 1448730 - RNA, 19 nt, Homo sapiens
  misc_RNA (1)...(19): siRNA sense strand
gcauguaacuucaagguuu

SEQ ID NO: 1448731 - RNA, 19 nt, Homo sapiens
  misc_RNA (1)...(19): siRNA sense strand
gauaugagcuggccucugu

SEQ ID NO: 1448732 - RNA, 19 nt, Homo sapiens
  misc_RNA (1)...(19): siRNA sense strand
gaaaucagcgcuucuggua

SEQ ID NO: 1448733 - RNA, 19 nt, Homo sapiens
  misc_RNA (1)...(19): siRNA sense strand
gaucuugccuuguaaauag

SEQ ID NO: 1448734 - RNA, 19 nt, Homo sapiens
  misc_RNA (1)...(19): siRNA sense strand
caaauuaugugguagcuau

SEQ ID NO: 1448735 - RNA, 19 nt, Homo sapiens
  misc_RNA (1)...(19): siRNA sense strand
gaaauggaguggcuggauu

SEQ ID NO: 1448736 - RNA, 19 nt, Homo sapiens
  misc_RNA (1)...(19): siRNA sense strand
gaacucggaugaucugaau

SEQ ID NO: 1448737 - RNA, 19 nt, Homo sapiens
  misc_RNA (1)...(19): siRNA sense strand
ucauagaucuugccuugua

SEQ ID NO: 1448738 - RNA, 19 nt, Homo sapiens
  misc_RNA (1)...(19): siRNA sense strand
acaaagaacuggaaagugu

SEQ ID NO: 1448739 - RNA, 19 nt, Homo sapiens
  misc_RNA (1)...(19): siRNA sense strand
gaacauuccugugcaacaa

SEQ ID NO: 1448740 - RNA, 19 nt, Homo sapiens
  misc_RNA (1)...(19): siRNA sense strand
gcgaaugcccagaguauua

SEQ ID NO: 1448741 - RNA, 19 nt, Homo sapiens
  misc_RNA (1)...(19): siRNA sense strand
gaacaacgccuggaggauu

SEQ ID NO: 1448742 - RNA, 19 nt, Homo sapiens
  misc_RNA (1)...(19): siRNA sense strand
ggacaguucuacagacaug

SEQ ID NO: 1448743 - RNA, 19 nt, Homo sapiens
  misc_RNA (1)...(19): siRNA sense strand
gaccaaacguggacaguuc

SEQ ID NO: 1448744 - RNA, 19 nt, Homo sapiens
  misc_RNA (1)...(19): siRNA sense strand
cauguaacuucaagguuua

SEQ ID NO: 1448745 - RNA, 19 nt, Homo sapiens
  misc_RNA (1)...(19): siRNA sense strand
caacagcgccugcgucaga

SEQ ID NO: 1448746 - RNA, 19 nt, Homo sapiens
  misc_RNA (1)...(19): siRNA sense strand
gaacccagcccuucagaga

SEQ ID NO: 1448747 - RNA, 19 nt, Homo sapiens
  misc_RNA (1)...(19): siRNA sense strand
ggacgaugauggcauguca

SEQ ID NO: 1448748 - RNA, 19 nt, Homo sapiens
  misc_RNA (1)...(19): siRNA sense strand
gcagccaccuggacgauga

SEQ ID NO: 1448749 - RNA, 19 nt, Homo sapiens
  misc_RNA (1)...(19): siRNA sense strand
uggcaaacauucauucuau

SEQ ID NO: 1448750 - RNA, 19 nt, Homo sapiens
  misc_RNA (1)...(19): siRNA sense strand
gaccagcucccuacacuuu

SEQ ID NO: 1448751 - RNA, 19 nt, Homo sapiens
  misc_RNA (1)...(19): siRNA sense strand
ggagagagcacagaguuug

SEQ ID NO: 1448752 - RNA, 19 nt, Homo sapiens
  misc_RNA (1)...(19): siRNA sense strand
gcuaucagcucuugaaagc

SEQ ID NO: 1448753 - RNA, 19 nt, Homo sapiens
  misc_RNA (1)...(19): siRNA sense strand
gcaaacauucauucuauuc

SEQ ID NO: 1448754 - RNA, 19 nt, Homo sapiens
  misc_RNA (1)...(19): siRNA sense strand
ggaugagaaucuucagguu

SEQ ID NO: 1448755 - RNA, 19 nt, Homo sapiens
  misc_RNA (1)...(19): siRNA sense strand
cauuacagcuuauagaaag

SEQ ID NO: 1448756 - RNA, 19 nt, Homo sapiens
  misc_RNA (1)...(19): siRNA sense strand
gcaaaguuaucagguguca

SEQ ID NO: 1448757 - RNA, 19 nt, Homo sapiens
  misc_RNA (1)...(19): siRNA sense strand
gcaaagacugcaaaguuau

SEQ ID NO: 1448758 - RNA, 19 nt, Homo sapiens
  misc_RNA (1)...(19): siRNA sense strand
ggaggucuaugccagugaa

SEQ ID NO: 1448759 - RNA, 19 nt, Homo sapiens
  misc_RNA (1)...(19): siRNA sense strand
gcaugucaguguacacaga

SEQ ID NO: 1448760 - RNA, 19 nt, Homo sapiens
  misc_RNA (1)...(19): siRNA sense strand
ggagcaguuucgaauagaa

SEQ ID NO: 1448761 - RNA, 19 nt, Homo sapiens
  misc_RNA (1)...(19): siRNA sense strand
caacaucaaugagaaguac

SEQ ID NO: 1448762 - RNA, 19 nt, Homo sapiens
  misc_RNA (1)...(19): siRNA sense strand
guagaaacuuugaagaaac

SEQ ID NO: 1448763 - RNA, 19 nt, Homo sapiens
  misc_RNA (1)...(19): siRNA sense strand
acacuuuaauggagacuuu

SEQ ID NO: 1448764 - RNA, 19 nt, Homo sapiens
  misc_RNA (1)...(19): siRNA sense strand
ccagcucccuacacuuuaa

SEQ ID NO: 1448765 - RNA, 19 nt, Homo sapiens
  misc_RNA (1)...(19): siRNA sense strand
uggaaaguguaucaaguuu

SEQ ID NO: 1448766 - RNA, 19 nt, Homo sapiens
  misc_RNA (1)...(19): siRNA sense strand
gauaaggugaagucaguaa

SEQ ID NO: 1448767 - RNA, 19 nt, Homo sapiens
  misc_RNA (1)...(19): siRNA sense strand
gagcuggccucuguucuca

SEQ ID NO: 1448768 - RNA, 19 nt, Homo sapiens
  misc_RNA (1)...(19): siRNA sense strand
ggcaaacauucauucuauu

SEQ ID NO: 1448769 - RNA, 19 nt, Homo sapiens
  misc_RNA (1)...(19): siRNA sense strand
gaugauggcaugucagugu

SEQ ID NO: 1448770 - RNA, 19 nt, Homo sapiens
  misc_RNA (1)...(19): siRNA sense strand
ugaaugccgagauauauuu

SEQ ID NO: 1448771 - RNA, 19 nt, Homo sapiens
  misc_RNA (1)...(19): siRNA sense strand
cccacaagcuccagcauug

SEQ ID NO: 1448772 - RNA, 19 nt, Homo sapiens
  misc_RNA (1)...(19): siRNA sense strand
gggcaggcauugagauaca

SEQ ID NO: 1448773 - RNA, 19 nt, Homo sapiens
  misc_RNA (1)...(19): siRNA sense strand
uaccaaagacuagaucaua

SEQ ID NO: 1448774 - RNA, 19 nt, Homo sapiens
  misc_RNA (1)...(19): siRNA sense strand
gcaauccgaccaccugcua

SEQ ID NO: 1448775 - RNA, 19 nt, Homo sapiens
  misc_RNA (1)...(19): siRNA sense strand
uauagaaaguguugaaugc

SEQ ID NO: 1448776 - RNA, 19 nt, Homo sapiens
  misc_RNA (1)...(19): siRNA sense strand
aagauaaggugaagucagu

SEQ ID NO: 1448777 - RNA, 19 nt, Homo sapiens
  misc_RNA (1)...(19): siRNA sense strand
cgacagcugugcaccauac

SEQ ID NO: 1448778 - RNA, 19 nt, Homo sapiens
  misc_RNA (1)...(19): siRNA sense strand
cuaguacacugcucagaug

SEQ ID NO: 1448779 - RNA, 19 nt, Homo sapiens
  misc_RNA (1)...(19): siRNA sense strand
caaagaacuggaaagugua

SEQ ID NO: 1448780 - RNA, 19 nt, Homo sapiens
  misc_RNA (1)...(19): siRNA sense strand
cuggaucacugacaaagaa

SEQ ID NO: 1448781 - RNA, 19 nt, Homo sapiens
  misc_RNA (1)...(19): siRNA sense strand
caacaacgccaaggagaga

SEQ ID NO: 1448782 - RNA, 19 nt, Homo sapiens
  misc_RNA (1)...(19): siRNA sense strand
caaagaggagaguggagua

SEQ ID NO: 1448783 - RNA, 19 nt, Homo sapiens
  misc_RNA (1)...(19): siRNA sense strand
gccgucagcugucugcuau

SEQ ID NO: 1448784 - RNA, 19 nt, Homo sapiens
  misc_RNA (1)...(19): siRNA sense strand
ggaauugugggaacguauu

SEQ ID NO: 1448785 - RNA, 19 nt, Homo sapiens
  misc_RNA (1)...(19): siRNA sense strand
aggagucucuuguuaaugu

SEQ ID NO: 1448786 - RNA, 19 nt, Homo sapiens
  misc_RNA (1)...(19): siRNA sense strand
cauagaucuugccuuguaa

SEQ ID NO: 1448787 - RNA, 19 nt, Homo sapiens
  misc_RNA (1)...(19): siRNA sense strand
guggagcaguuucgaauag

SEQ ID NO: 1448788 - RNA, 19 nt, Homo sapiens
  misc_RNA (1)...(19): siRNA sense strand
ggauuuccaacaucaauga

SEQ ID NO: 1448789 - RNA, 19 nt, Homo sapiens
  misc_RNA (1)...(19): siRNA sense strand
aacaacgccuggaggauuu

SEQ ID NO: 1448790 - RNA, 19 nt, Homo sapiens
  misc_RNA (1)...(19): siRNA sense strand
aaucagcgcuucugguagu

SEQ ID NO: 1448791 - RNA, 19 nt, Homo sapiens
  misc_RNA (1)...(19): siRNA sense strand
ggagccaucuggauaugag

SEQ ID NO: 1448792 - RNA, 19 nt, Homo sapiens
  misc_RNA (1)...(19): siRNA sense strand
gaacguugcccaguguuuc

SEQ ID NO: 1448793 - RNA, 19 nt, Homo sapiens
  misc_RNA (1)...(19): siRNA sense strand
guucgauucuucucuguca

SEQ ID NO: 1448794 - RNA, 19 nt, Homo sapiens
  misc_RNA (1)...(19): siRNA sense strand
cgucagcugucugcuauga

SEQ ID NO: 1448795 - RNA, 19 nt, Homo sapiens
  misc_RNA (1)...(19): siRNA sense strand
ucagguuccuuuccuugaa

SEQ ID NO: 1448796 - RNA, 19 nt, Homo sapiens
  misc_RNA (1)...(19): siRNA sense strand
gaggagccaucuggauaug

SEQ ID NO: 1448797 - RNA, 19 nt, Homo sapiens
  misc_RNA (1)...(19): siRNA sense strand
ggaaaagcauacucaggaa

SEQ ID NO: 1448798 - RNA, 19 nt, Homo sapiens
  misc_RNA (1)...(19): siRNA sense strand
uuacagacuucacaucaag

SEQ ID NO: 1448799 - RNA, 19 nt, Homo sapiens
  misc_RNA (1)...(19): siRNA sense strand
ggcauuggcuaagcucuug

SEQ ID NO: 1448800 - RNA, 19 nt, Homo sapiens
  misc_RNA (1)...(19): siRNA sense strand
gaggauggguuuugauaug

SEQ ID NO: 1448801 - RNA, 19 nt, Homo sapiens
  misc_RNA (1)...(19): siRNA sense strand
guauucugcuccaguuguu

SEQ ID NO: 1448802 - RNA, 19 nt, Homo sapiens
  misc_RNA (1)...(19): siRNA sense strand
acagucauguucucugcua

SEQ ID NO: 1448803 - RNA, 19 nt, Homo sapiens
  misc_RNA (1)...(19): siRNA sense strand
ucucgagacuuucccaaug

SEQ ID NO: 1448804 - RNA, 19 nt, Homo sapiens
  misc_RNA (1)...(19): siRNA sense strand
gagauauauuucagcuuca

SEQ ID NO: 1448805 - RNA, 19 nt, Homo sapiens
  misc_RNA (1)...(19): siRNA sense strand
gcuccagcauugaccuuga

SEQ ID NO: 1448806 - RNA, 19 nt, Homo sapiens
  misc_RNA (1)...(19): siRNA sense strand
uuagcacccuccagaugua

SEQ ID NO: 1448807 - RNA, 19 nt, Homo sapiens
  misc_RNA (1)...(19): siRNA sense strand
ugucugugcuucugaaauc

SEQ ID NO: 1448808 - RNA, 19 nt, Homo sapiens
  misc_RNA (1)...(19): siRNA sense strand
ugucaagaguggcugaaga

SEQ ID NO: 1448809 - RNA, 19 nt, Homo sapiens
  misc_RNA (1)...(19): siRNA sense strand
ucaguguucuccucaguuc

SEQ ID NO: 1448810 - RNA, 19 nt, Homo sapiens
  misc_RNA (1)...(19): siRNA sense strand
gguagugcaugcuguggau

SEQ ID NO: 1448811 - RNA, 19 nt, Homo sapiens
  misc_RNA (1)...(19): siRNA sense strand
gaucucuucucauuugcau

SEQ ID NO: 1448812 - RNA, 19 nt, Homo sapiens
  misc_RNA (1)...(19): siRNA sense strand
gaacuggauaagcccauug

SEQ ID NO: 1448813 - RNA, 19 nt, Homo sapiens
  misc_RNA (1)...(19): siRNA sense strand
acugugaaguuguguuuau

SEQ ID NO: 1448814 - RNA, 19 nt, Homo sapiens
  misc_RNA (1)...(19): siRNA sense strand
ggaccaaacguggacaguu

SEQ ID NO: 1448815 - RNA, 19 nt, Homo sapiens
  misc_RNA (1)...(19): siRNA sense strand
ggagaguggaguagaggaa

SEQ ID NO: 1448816 - RNA, 19 nt, Homo sapiens
  misc_RNA (1)...(19): siRNA sense strand
ggagaacucggaugaucug

SEQ ID NO: 1448817 - RNA, 19 nt, Homo sapiens
  misc_RNA (1)...(19): siRNA sense strand
ccaggccaaucagaucuuu

SEQ ID NO: 1448818 - RNA, 19 nt, Homo sapiens
  misc_RNA (1)...(19): siRNA sense strand
aguguugaaugccgagaua

SEQ ID NO: 1448819 - RNA, 19 nt, Homo sapiens
  misc_RNA (1)...(19): siRNA sense strand
ggagucucuuguuaauguu

SEQ ID NO: 1448820 - RNA, 19 nt, Homo sapiens
  misc_RNA (1)...(19): siRNA sense strand
ugacaaagaacuggaaagu

SEQ ID NO: 1448821 - RNA, 19 nt, Homo sapiens
  misc_RNA (1)...(19): siRNA sense strand
ggaaggccaucugcaacca

SEQ ID NO: 1448822 - RNA, 19 nt, Homo sapiens
  misc_RNA (1)...(19): siRNA sense strand
acauguuaguggaagauaa

SEQ ID NO: 1448823 - RNA, 19 nt, Homo sapiens
  misc_RNA (1)...(19): siRNA sense strand
gcucaguguucuccucagu

SEQ ID NO: 1448824 - RNA, 19 nt, Homo sapiens
  misc_RNA (1)...(19): siRNA sense strand
cugaggagccaucuggaua

SEQ ID NO: 1448825 - RNA, 19 nt, Homo sapiens
  misc_RNA (1)...(19): siRNA sense strand
gacuagaucauacgacaau

SEQ ID NO: 1448826 - RNA, 19 nt, Homo sapiens
  misc_RNA (1)...(19): siRNA sense strand
gaacuggaaaguguaucaa

SEQ ID NO: 1448827 - RNA, 19 nt, Homo sapiens
  misc_RNA (1)...(19): siRNA sense strand
gcaggaggccaccaaagag

SEQ ID NO: 1448828 - RNA, 19 nt, Homo sapiens
  misc_RNA (1)...(19): siRNA sense strand
ccaaggucaucauagaucu

SEQ ID NO: 1448829 - RNA, 19 nt, Homo sapiens
  misc_RNA (1)...(19): siRNA sense strand
gaacacuucucgagacuuu

SEQ ID NO: 1448830 - RNA, 19 nt, Homo sapiens
  misc_RNA (1)...(19): siRNA sense strand
gcauguaacuucaagguuu

SEQ ID NO: 1448831 - RNA, 19 nt, Homo sapiens
  misc_RNA (1)...(19): siRNA sense strand
gauaugagcuggccucugu

SEQ ID NO: 1448832 - RNA, 19 nt, Homo sapiens
  misc_RNA (1)...(19): siRNA sense strand
gaaaucagcgcuucuggua

SEQ ID NO: 1448833 - RNA, 19 nt, Homo sapiens
  misc_RNA (1)...(19): siRNA sense strand
gaucuugccuuguaaauag

SEQ ID NO: 1448834 - RNA, 19 nt, Homo sapiens
  misc_RNA (1)...(19): siRNA sense strand
caaauuaugugguagcuau

SEQ ID NO: 1448835 - RNA, 19 nt, Homo sapiens
  misc_RNA (1)...(19): siRNA sense strand
gaaauggaguggcuggauu

SEQ ID NO: 1448836 - RNA, 19 nt, Homo sapiens
  misc_RNA (1)...(19): siRNA sense strand
gaacucggaugaucugaau

SEQ ID NO: 1448837 - RNA, 19 nt, Homo sapiens
  misc_RNA (1)...(19): siRNA sense strand
ucauagaucuugccuugua

SEQ ID NO: 1448838 - RNA, 19 nt, Homo sapiens
  misc_RNA (1)...(19): siRNA sense strand
acaaagaacuggaaagugu

SEQ ID NO: 1448839 - RNA, 19 nt, Homo sapiens
  misc_RNA (1)...(19): siRNA sense strand
gaacauuccugugcaacaa

SEQ ID NO: 1448840 - RNA, 19 nt, Homo sapiens
  misc_RNA (1)...(19): siRNA sense strand
gcgaaugcccagaguauua

SEQ ID NO: 1448841 - RNA, 19 nt, Homo sapiens
  misc_RNA (1)...(19): siRNA sense strand
gaacaacgccuggaggauu

SEQ ID NO: 1448842 - RNA, 19 nt, Homo sapiens
  misc_RNA (1)...(19): siRNA sense strand
ggacaguucuacagacaug

SEQ ID NO: 1448843 - RNA, 19 nt, Homo sapiens
  misc_RNA (1)...(19): siRNA sense strand
gaccaaacguggacaguuc

SEQ ID NO: 1448844 - RNA, 19 nt, Homo sapiens
  misc_RNA (1)...(19): siRNA sense strand
cauguaacuucaagguuua

SEQ ID NO: 1448845 - RNA, 19 nt, Homo sapiens
  misc_RNA (1)...(19): siRNA sense strand
caacagcgccugcgucaga

SEQ ID NO: 1448846 - RNA, 19 nt, Homo sapiens
  misc_RNA (1)...(19): siRNA sense strand
gaacccagcccuucagaga

SEQ ID NO: 1448847 - RNA, 19 nt, Homo sapiens
  misc_RNA (1)...(19): siRNA sense strand
ggacgaugauggcauguca

SEQ ID NO: 1448848 - RNA, 19 nt, Homo sapiens
  misc_RNA (1)...(19): siRNA sense strand
gcagccaccuggacgauga

SEQ ID NO: 1448849 - RNA, 19 nt, Homo sapiens
  misc_RNA (1)...(19): siRNA sense strand
uggcaaacauucauucuau

SEQ ID NO: 1448850 - RNA, 19 nt, Homo sapiens
  misc_RNA (1)...(19): siRNA sense strand
gaccagcucccuacacuuu

SEQ ID NO: 1448851 - RNA, 19 nt, Homo sapiens
  misc_RNA (1)...(19): siRNA sense strand
ggagagagcacagaguuug

SEQ ID NO: 1448852 - RNA, 19 nt, Homo sapiens
  misc_RNA (1)...(19): siRNA sense strand
gcuaucagcucuugaaagc

SEQ ID NO: 1448853 - RNA, 19 nt, Homo sapiens
  misc_RNA (1)...(19): siRNA sense strand
gcaaacauucauucuauuc

SEQ ID NO: 1448854 - RNA, 19 nt, Homo sapiens
  misc_RNA (1)...(19): siRNA sense strand
ggaugagaaucuucagguu

SEQ ID NO: 1448855 - RNA, 19 nt, Homo sapiens
  misc_RNA (1)...(19): siRNA sense strand
cauuacagcuuauagaaag

SEQ ID NO: 1448856 - RNA, 19 nt, Homo sapiens
  misc_RNA (1)...(19): siRNA sense strand
gcaaaguuaucagguguca

SEQ ID NO: 1448857 - RNA, 19 nt, Homo sapiens
  misc_RNA (1)...(19): siRNA sense strand
gcaaagacugcaaaguuau

SEQ ID NO: 1448858 - RNA, 19 nt, Homo sapiens
  misc_RNA (1)...(19): siRNA sense strand
ggaggucuaugccagugaa

SEQ ID NO: 1448859 - RNA, 19 nt, Homo sapiens
  misc_RNA (1)...(19): siRNA sense strand
gcaugucaguguacacaga

SEQ ID NO: 1448860 - RNA, 19 nt, Homo sapiens
  misc_RNA (1)...(19): siRNA sense strand
ggagcaguuucgaauagaa

SEQ ID NO: 1448861 - RNA, 19 nt, Homo sapiens
  misc_RNA (1)...(19): siRNA sense strand
caacaucaaugagaaguac

SEQ ID NO: 1448862 - RNA, 19 nt, Homo sapiens
  misc_RNA (1)...(19): siRNA sense strand
guagaaacuuugaagaaac

SEQ ID NO: 1448863 - RNA, 19 nt, Homo sapiens
  misc_RNA (1)...(19): siRNA sense strand
acacuuuaauggagacuuu

SEQ ID NO: 1448864 - RNA, 19 nt, Homo sapiens
  misc_RNA (1)...(19): siRNA sense strand
ccagcucccuacacuuuaa

SEQ ID NO: 1448865 - RNA, 19 nt, Homo sapiens
  misc_RNA (1)...(19): siRNA sense strand
uggaaaguguaucaaguuu

SEQ ID NO: 1448866 - RNA, 19 nt, Homo sapiens
  misc_RNA (1)...(19): siRNA sense strand
gauaaggugaagucaguaa

SEQ ID NO: 1448867 - RNA, 19 nt, Homo sapiens
  misc_RNA (1)...(19): siRNA sense strand
gagcuggccucuguucuca

SEQ ID NO: 1448868 - RNA, 19 nt, Homo sapiens
  misc_RNA (1)...(19): siRNA sense strand
ggcaaacauucauucuauu

SEQ ID NO: 1448869 - RNA, 19 nt, Homo sapiens
  misc_RNA (1)...(19): siRNA sense strand
gaugauggcaugucagugu

SEQ ID NO: 1448870 - RNA, 19 nt, Homo sapiens
  misc_RNA (1)...(19): siRNA sense strand
ugaaugccgagauauauuu

SEQ ID NO: 1448871 - RNA, 19 nt, Homo sapiens
  misc_RNA (1)...(19): siRNA sense strand
cccacaagcuccagcauug

SEQ ID NO: 1448872 - RNA, 19 nt, Homo sapiens
  misc_RNA (1)...(19): siRNA sense strand
gggcaggcauugagauaca

SEQ ID NO: 1448873 - RNA, 19 nt, Homo sapiens
  misc_RNA (1)...(19): siRNA sense strand
uaccaaagacuagaucaua

SEQ ID NO: 1448874 - RNA, 19 nt, Homo sapiens
  misc_RNA (1)...(19): siRNA sense strand
gcaauccgaccaccugcua

SEQ ID NO: 1448875 - RNA, 19 nt, Homo sapiens
  misc_RNA (1)...(19): siRNA sense strand
uauagaaaguguugaaugc

SEQ ID NO: 1448876 - RNA, 19 nt, Homo sapiens
  misc_RNA (1)...(19): siRNA sense strand
aagauaaggugaagucagu

SEQ ID NO: 1448877 - RNA, 19 nt, Homo sapiens
  misc_RNA (1)...(19): siRNA sense strand
cgacagcugugcaccauac

SEQ ID NO: 1448878 - RNA, 19 nt, Homo sapiens
  misc_RNA (1)...(19): siRNA sense strand
cuaguacacugcucagaug

SEQ ID NO: 1448879 - RNA, 19 nt, Homo sapiens
  misc_RNA (1)...(19): siRNA sense strand
caaagaacuggaaagugua

SEQ ID NO: 1448880 - RNA, 19 nt, Homo sapiens
  misc_RNA (1)...(19): siRNA sense strand
cuggaucacugacaaagaa

SEQ ID NO: 1448881 - RNA, 19 nt, Homo sapiens
  misc_RNA (1)...(19): siRNA sense strand
caacaacgccaaggagaga

SEQ ID NO: 1448882 - RNA, 19 nt, Homo sapiens
  misc_RNA (1)...(19): siRNA sense strand
caaagaggagaguggagua

SEQ ID NO: 1448883 - RNA, 19 nt, Homo sapiens
  misc_RNA (1)...(19): siRNA sense strand
gccgucagcugucugcuau

SEQ ID NO: 1448884 - RNA, 19 nt, Homo sapiens
  misc_RNA (1)...(19): siRNA sense strand
ggaauugugggaacguauu

SEQ ID NO: 1448885 - RNA, 19 nt, Homo sapiens
  misc_RNA (1)...(19): siRNA sense strand
aggagucucuuguuaaugu

SEQ ID NO: 1448886 - RNA, 19 nt, Homo sapiens
  misc_RNA (1)...(19): siRNA sense strand
cauagaucuugccuuguaa

SEQ ID NO: 1448887 - RNA, 19 nt, Homo sapiens
  misc_RNA (1)...(19): siRNA sense strand
guggagcaguuucgaauag

SEQ ID NO: 1448888 - RNA, 19 nt, Homo sapiens
  misc_RNA (1)...(19): siRNA sense strand
ggauuuccaacaucaauga

SEQ ID NO: 1448889 - RNA, 19 nt, Homo sapiens
  misc_RNA (1)...(19): siRNA sense strand
aacaacgccuggaggauuu

SEQ ID NO: 1448890 - RNA, 19 nt, Homo sapiens
  misc_RNA (1)...(19): siRNA sense strand
aaucagcgcuucugguagu

SEQ ID NO: 1448891 - RNA, 19 nt, Homo sapiens
  misc_RNA (1)...(19): siRNA sense strand
ggagccaucuggauaugag

SEQ ID NO: 1448892 - RNA, 19 nt, Homo sapiens
  misc_RNA (1)...(19): siRNA sense strand
gaacguugcccaguguuuc

SEQ ID NO: 1448893 - RNA, 19 nt, Homo sapiens
  misc_RNA (1)...(19): siRNA sense strand
guucgauucuucucuguca

SEQ ID NO: 1448894 - RNA, 19 nt, Homo sapiens
  misc_RNA (1)...(19): siRNA sense strand
cgucagcugucugcuauga

SEQ ID NO: 1448895 - RNA, 19 nt, Homo sapiens
  misc_RNA (1)...(19): siRNA sense strand
ucagguuccuuuccuugaa

SEQ ID NO: 1448896 - RNA, 19 nt, Homo sapiens
  misc_RNA (1)...(19): siRNA sense strand
gaggagccaucuggauaug

SEQ ID NO: 1448897 - RNA, 19 nt, Homo sapiens
  misc_RNA (1)...(19): siRNA sense strand
ggaaaagcauacucaggaa

SEQ ID NO: 1448898 - RNA, 19 nt, Homo sapiens
  misc_RNA (1)...(19): siRNA sense strand
uuacagacuucacaucaag

SEQ ID NO: 1448899 - RNA, 19 nt, Homo sapiens
  misc_RNA (1)...(19): siRNA sense strand
ggcauuggcuaagcucuug

SEQ ID NO: 1448900 - RNA, 19 nt, Homo sapiens
  misc_RNA (1)...(19): siRNA sense strand
gaggauggguuuugauaug

SEQ ID NO: 1448901 - RNA, 19 nt, Homo sapiens
  misc_RNA (1)...(19): siRNA sense strand
guauucugcuccaguuguu

SEQ ID NO: 1448902 - RNA, 19 nt, Homo sapiens
  misc_RNA (1)...(19): siRNA sense strand
acagucauguucucugcua

SEQ ID NO: 1448903 - RNA, 19 nt, Homo sapiens
  misc_RNA (1)...(19): siRNA sense strand
ucucgagacuuucccaaug

SEQ ID NO: 1448904 - RNA, 19 nt, Homo sapiens
  misc_RNA (1)...(19): siRNA sense strand
gagauauauuucagcuuca

SEQ ID NO: 1448905 - RNA, 19 nt, Homo sapiens
  misc_RNA (1)...(19): siRNA sense strand
gcuccagcauugaccuuga

SEQ ID NO: 1448906 - RNA, 19 nt, Homo sapiens
  misc_RNA (1)...(19): siRNA sense strand
uuagcacccuccagaugua

SEQ ID NO: 1448907 - RNA, 19 nt, Homo sapiens
  misc_RNA (1)...(19): siRNA sense strand
ugucugugcuucugaaauc

SEQ ID NO: 1448908 - RNA, 19 nt, Homo sapiens
  misc_RNA (1)...(19): siRNA sense strand
ugucaagaguggcugaaga

SEQ ID NO: 1448909 - RNA, 19 nt, Homo sapiens
  misc_RNA (1)...(19): siRNA sense strand
ucaguguucuccucaguuc

SEQ ID NO: 1448910 - RNA, 19 nt, Homo sapiens
  misc_RNA (1)...(19): siRNA sense strand
gguagugcaugcuguggau

SEQ ID NO: 1448911 - RNA, 19 nt, Homo sapiens
  misc_RNA (1)...(19): siRNA sense strand
gaucucuucucauuugcau

SEQ ID NO: 1448912 - RNA, 19 nt, Homo sapiens
  misc_RNA (1)...(19): siRNA sense strand
gaacuggauaagcccauug

SEQ ID NO: 1448913 - RNA, 19 nt, Homo sapiens
  misc_RNA (1)...(19): siRNA sense strand
acugugaaguuguguuuau

SEQ ID NO: 1448914 - RNA, 19 nt, Homo sapiens
  misc_RNA (1)...(19): siRNA sense strand
ggaccaaacguggacaguu

SEQ ID NO: 1448915 - RNA, 19 nt, Homo sapiens
  misc_RNA (1)...(19): siRNA sense strand
ggagaguggaguagaggaa

SEQ ID NO: 1448916 - RNA, 19 nt, Homo sapiens
  misc_RNA (1)...(19): siRNA sense strand
ggagaacucggaugaucug

SEQ ID NO: 1448917 - RNA, 19 nt, Homo sapiens
  misc_RNA (1)...(19): siRNA sense strand
ccaggccaaucagaucuuu

SEQ ID NO: 1448918 - RNA, 19 nt, Homo sapiens
  misc_RNA (1)...(19): siRNA sense strand
aguguugaaugccgagaua

SEQ ID NO: 1448919 - RNA, 19 nt, Homo sapiens
  misc_RNA (1)...(19): siRNA sense strand
ggagucucuuguuaauguu

SEQ ID NO: 1448920 - RNA, 19 nt, Homo sapiens
  misc_RNA (1)...(19): siRNA sense strand
ugacaaagaacuggaaagu

SEQ ID NO: 1448921 - RNA, 19 nt, Homo sapiens
  misc_RNA (1)...(19): siRNA sense strand
ggaaggccaucugcaacca

SEQ ID NO: 1448922 - RNA, 19 nt, Homo sapiens
  misc_RNA (1)...(19): siRNA sense strand
acauguuaguggaagauaa

SEQ ID NO: 1448923 - RNA, 19 nt, Homo sapiens
  misc_RNA (1)...(19): siRNA sense strand
gcucaguguucuccucagu

SEQ ID NO: 1448924 - RNA, 19 nt, Homo sapiens
  misc_RNA (1)...(19): siRNA sense strand
cugaggagccaucuggaua

SEQ ID NO: 1448925 - RNA, 19 nt, Homo sapiens
  misc_RNA (1)...(19): siRNA sense strand
gacuagaucauacgacaau

SEQ ID NO: 1448926 - RNA, 19 nt, Homo sapiens
  misc_RNA (1)...(19): siRNA sense strand
gaacuggaaaguguaucaa

SEQ ID NO: 1448927 - RNA, 19 nt, Homo sapiens
  misc_RNA (1)...(19): siRNA sense strand
gcaggaggccaccaaagag

SEQ ID NO: 1448928 - RNA, 19 nt, Homo sapiens
  misc_RNA (1)...(19): siRNA sense strand
ccaaggucaucauagaucu

SEQ ID NO: 1448929 - RNA, 19 nt, Homo sapiens
  misc_RNA (1)...(19): siRNA sense strand
gaacacuucucgagacuuu

SEQ ID NO: 1448930 - RNA, 19 nt, Homo sapiens
  misc_RNA (1)...(19): siRNA sense strand
gcauguaacuucaagguuu

SEQ ID NO: 1448931 - RNA, 19 nt, Homo sapiens
  misc_RNA (1)...(19): siRNA sense strand
gauaugagcuggccucugu

SEQ ID NO: 1448932 - RNA, 19 nt, Homo sapiens
  misc_RNA (1)...(19): siRNA sense strand
gaaaucagcgcuucuggua

SEQ ID NO: 1448933 - RNA, 19 nt, Homo sapiens
  misc_RNA (1)...(19): siRNA sense strand
gaucuugccuuguaaauag

SEQ ID NO: 1448934 - RNA, 19 nt, Homo sapiens
  misc_RNA (1)...(19): siRNA sense strand
caaauuaugugguagcuau

SEQ ID NO: 1448935 - RNA, 19 nt, Homo sapiens
  misc_RNA (1)...(19): siRNA sense strand
gaaauggaguggcuggauu

SEQ ID NO: 1448936 - RNA, 19 nt, Homo sapiens
  misc_RNA (1)...(19): siRNA sense strand
gaacucggaugaucugaau

SEQ ID NO: 1448937 - RNA, 19 nt, Homo sapiens
  misc_RNA (1)...(19): siRNA sense strand
ucauagaucuugccuugua

SEQ ID NO: 1448938 - RNA, 19 nt, Homo sapiens
  misc_RNA (1)...(19): siRNA sense strand
acaaagaacuggaaagugu

SEQ ID NO: 1448939 - RNA, 19 nt, Homo sapiens
  misc_RNA (1)...(19): siRNA sense strand
gaacauuccugugcaacaa

SEQ ID NO: 1448940 - RNA, 19 nt, Homo sapiens
  misc_RNA (1)...(19): siRNA sense strand
gcgaaugcccagaguauua

SEQ ID NO: 1448941 - RNA, 19 nt, Homo sapiens
  misc_RNA (1)...(19): siRNA sense strand
gaacaacgccuggaggauu

SEQ ID NO: 1448942 - RNA, 19 nt, Homo sapiens
  misc_RNA (1)...(19): siRNA sense strand
ggacaguucuacagacaug

SEQ ID NO: 1448943 - RNA, 19 nt, Homo sapiens
  misc_RNA (1)...(19): siRNA sense strand
gaccaaacguggacaguuc

SEQ ID NO: 1448944 - RNA, 19 nt, Homo sapiens
  misc_RNA (1)...(19): siRNA sense strand
cauguaacuucaagguuua

SEQ ID NO: 1448945 - RNA, 19 nt, Homo sapiens
  misc_RNA (1)...(19): siRNA sense strand
caacagcgccugcgucaga

SEQ ID NO: 1448946 - RNA, 19 nt, Homo sapiens
  misc_RNA (1)...(19): siRNA sense strand
gaacccagcccuucagaga

SEQ ID NO: 1448947 - RNA, 19 nt, Homo sapiens
  misc_RNA (1)...(19): siRNA sense strand
ggacgaugauggcauguca

SEQ ID NO: 1448948 - RNA, 19 nt, Homo sapiens
  misc_RNA (1)...(19): siRNA sense strand
gcagccaccuggacgauga

SEQ ID NO: 1448949 - RNA, 19 nt, Homo sapiens
  misc_RNA (1)...(19): siRNA sense strand
uggcaaacauucauucuau

SEQ ID NO: 1448950 - RNA, 19 nt, Homo sapiens
  misc_RNA (1)...(19): siRNA sense strand
gaccagcucccuacacuuu

SEQ ID NO: 1448951 - RNA, 19 nt, Homo sapiens
  misc_RNA (1)...(19): siRNA sense strand
ggagagagcacagaguuug

SEQ ID NO: 1448952 - RNA, 19 nt, Homo sapiens
  misc_RNA (1)...(19): siRNA sense strand
gcuaucagcucuugaaagc

SEQ ID NO: 1448953 - RNA, 19 nt, Homo sapiens
  misc_RNA (1)...(19): siRNA sense strand
gcaaacauucauucuauuc

SEQ ID NO: 1448954 - RNA, 19 nt, Homo sapiens
  misc_RNA (1)...(19): siRNA sense strand
ggaugagaaucuucagguu

SEQ ID NO: 1448955 - RNA, 19 nt, Homo sapiens
  misc_RNA (1)...(19): siRNA sense strand
cauuacagcuuauagaaag

SEQ ID NO: 1448956 - RNA, 19 nt, Homo sapiens
  misc_RNA (1)...(19): siRNA sense strand
gcaaaguuaucagguguca

SEQ ID NO: 1448957 - RNA, 19 nt, Homo sapiens
  misc_RNA (1)...(19): siRNA sense strand
gcaaagacugcaaaguuau

SEQ ID NO: 1448958 - RNA, 19 nt, Homo sapiens
  misc_RNA (1)...(19): siRNA sense strand
ggaggucuaugccagugaa

SEQ ID NO: 1448959 - RNA, 19 nt, Homo sapiens
  misc_RNA (1)...(19): siRNA sense strand
gcaugucaguguacacaga

SEQ ID NO: 1448960 - RNA, 19 nt, Homo sapiens
  misc_RNA (1)...(19): siRNA sense strand
ggagcaguuucgaauagaa

SEQ ID NO: 1448961 - RNA, 19 nt, Homo sapiens
  misc_RNA (1)...(19): siRNA sense strand
caacaucaaugagaaguac

SEQ ID NO: 1448962 - RNA, 19 nt, Homo sapiens
  misc_RNA (1)...(19): siRNA sense strand
guagaaacuuugaagaaac

SEQ ID NO: 1448963 - RNA, 19 nt, Homo sapiens
  misc_RNA (1)...(19): siRNA sense strand
acacuuuaauggagacuuu

SEQ ID NO: 1448964 - RNA, 19 nt, Homo sapiens
  misc_RNA (1)...(19): siRNA sense strand
ccagcucccuacacuuuaa

SEQ ID NO: 1448965 - RNA, 19 nt, Homo sapiens
  misc_RNA (1)...(19): siRNA sense strand
uggaaaguguaucaaguuu

SEQ ID NO: 1448966 - RNA, 19 nt, Homo sapiens
  misc_RNA (1)...(19): siRNA sense strand
gauaaggugaagucaguaa

SEQ ID NO: 1448967 - RNA, 19 nt, Homo sapiens
  misc_RNA (1)...(19): siRNA sense strand
gagcuggccucuguucuca

SEQ ID NO: 1448968 - RNA, 19 nt, Homo sapiens
  misc_RNA (1)...(19): siRNA sense strand
ggcaaacauucauucuauu

SEQ ID NO: 1448969 - RNA, 19 nt, Homo sapiens
  misc_RNA (1)...(19): siRNA sense strand
gaugauggcaugucagugu

SEQ ID NO: 1448970 - RNA, 19 nt, Homo sapiens
  misc_RNA (1)...(19): siRNA sense strand
ugaaugccgagauauauuu

SEQ ID NO: 1448971 - RNA, 19 nt, Homo sapiens
  misc_RNA (1)...(19): siRNA sense strand
cccacaagcuccagcauug

SEQ ID NO: 1448972 - RNA, 19 nt, Homo sapiens
  misc_RNA (1)...(19): siRNA sense strand
gggcaggcauugagauaca

SEQ ID NO: 1448973 - RNA, 19 nt, Homo sapiens
  misc_RNA (1)...(19): siRNA sense strand
uaccaaagacuagaucaua

SEQ ID NO: 1448974 - RNA, 19 nt, Homo sapiens
  misc_RNA (1)...(19): siRNA sense strand
gcaauccgaccaccugcua

SEQ ID NO: 1448975 - RNA, 19 nt, Homo sapiens
  misc_RNA (1)...(19): siRNA sense strand
uauagaaaguguugaaugc

SEQ ID NO: 1448976 - RNA, 19 nt, Homo sapiens
  misc_RNA (1)...(19): siRNA sense strand
aagauaaggugaagucagu

SEQ ID NO: 1448977 - RNA, 19 nt, Homo sapiens
  misc_RNA (1)...(19): siRNA sense strand
cgacagcugugcaccauac

SEQ ID NO: 1448978 - RNA, 19 nt, Homo sapiens
  misc_RNA (1)...(19): siRNA sense strand
cuaguacacugcucagaug

SEQ ID NO: 1448979 - RNA, 19 nt, Homo sapiens
  misc_RNA (1)...(19): siRNA sense strand
caaagaacuggaaagugua

SEQ ID NO: 1448980 - RNA, 19 nt, Homo sapiens
  misc_RNA (1)...(19): siRNA sense strand
cuggaucacugacaaagaa

SEQ ID NO: 1448981 - RNA, 19 nt, Homo sapiens
  misc_RNA (1)...(19): siRNA sense strand
caacaacgccaaggagaga

SEQ ID NO: 1448982 - RNA, 19 nt, Homo sapiens
  misc_RNA (1)...(19): siRNA sense strand
caaagaggagaguggagua

SEQ ID NO: 1448983 - RNA, 19 nt, Homo sapiens
  misc_RNA (1)...(19): siRNA sense strand
gccgucagcugucugcuau

SEQ ID NO: 1448984 - RNA, 19 nt, Homo sapiens
  misc_RNA (1)...(19): siRNA sense strand
ggaauugugggaacguauu

SEQ ID NO: 1448985 - RNA, 19 nt, Homo sapiens
  misc_RNA (1)...(19): siRNA sense strand
aggagucucuuguuaaugu

SEQ ID NO: 1448986 - RNA, 19 nt, Homo sapiens
  misc_RNA (1)...(19): siRNA sense strand
cauagaucuugccuuguaa

SEQ ID NO: 1448987 - RNA, 19 nt, Homo sapiens
  misc_RNA (1)...(19): siRNA sense strand
guggagcaguuucgaauag

SEQ ID NO: 1448988 - RNA, 19 nt, Homo sapiens
  misc_RNA (1)...(19): siRNA sense strand
ggauuuccaacaucaauga

SEQ ID NO: 1448989 - RNA, 19 nt, Homo sapiens
  misc_RNA (1)...(19): siRNA sense strand
aacaacgccuggaggauuu

SEQ ID NO: 1448990 - RNA, 19 nt, Homo sapiens
  misc_RNA (1)...(19): siRNA sense strand
aaucagcgcuucugguagu

SEQ ID NO: 1448991 - RNA, 19 nt, Homo sapiens
  misc_RNA (1)...(19): siRNA sense strand
ggagccaucuggauaugag

SEQ ID NO: 1448992 - RNA, 19 nt, Homo sapiens
  misc_RNA (1)...(19): siRNA sense strand
gaacguugcccaguguuuc

SEQ ID NO: 1448993 - RNA, 19 nt, Homo sapiens
  misc_RNA (1)...(19): siRNA sense strand
guucgauucuucucuguca

SEQ ID NO: 1448994 - RNA, 19 nt, Homo sapiens
  misc_RNA (1)...(19): siRNA sense strand
cgucagcugucugcuauga

SEQ ID NO: 1448995 - RNA, 19 nt, Homo sapiens
  misc_RNA (1)...(19): siRNA sense strand
ucagguuccuuuccuugaa

SEQ ID NO: 1448996 - RNA, 19 nt, Homo sapiens
  misc_RNA (1)...(19): siRNA sense strand
gaggagccaucuggauaug

SEQ ID NO: 1448997 - RNA, 19 nt, Homo sapiens
  misc_RNA (1)...(19): siRNA sense strand
ggaaaagcauacucaggaa

SEQ ID NO: 1448998 - RNA, 19 nt, Homo sapiens
  misc_RNA (1)...(19): siRNA sense strand
uuacagacuucacaucaag

SEQ ID NO: 1448999 - RNA, 19 nt, Homo sapiens
  misc_RNA (1)...(19): siRNA sense strand
ggcauuggcuaagcucuug

SEQ ID NO: 1449000 - RNA, 19 nt, Homo sapiens
  misc_RNA (1)...(19): siRNA sense strand
gaggauggguuuugauaug

SEQ ID NO: 1449001 - RNA, 19 nt, Homo sapiens
  misc_RNA (1)...(19): siRNA sense strand
guauucugcuccaguuguu

SEQ ID NO: 1449002 - RNA, 19 nt, Homo sapiens
  misc_RNA (1)...(19): siRNA sense strand
acagucauguucucugcua

SEQ ID NO: 1449003 - RNA, 19 nt, Homo sapiens
  misc_RNA (1)...(19): siRNA sense strand
ucucgagacuuucccaaug

SEQ ID NO: 1449004 - RNA, 19 nt, Homo sapiens
  misc_RNA (1)...(19): siRNA sense strand
gagauauauuucagcuuca

SEQ ID NO: 1449005 - RNA, 19 nt, Homo sapiens
  misc_RNA (1)...(19): siRNA sense strand
gcuccagcauugaccuuga

SEQ ID NO: 1449006 - RNA, 19 nt, Homo sapiens
  misc_RNA (1)...(19): siRNA sense strand
uuagcacccuccagaugua

SEQ ID NO: 1449007 - RNA, 19 nt, Homo sapiens
  misc_RNA (1)...(19): siRNA sense strand
ugucugugcuucugaaauc

SEQ ID NO: 1449008 - RNA, 19 nt, Homo sapiens
  misc_RNA (1)...(19): siRNA sense strand
ugucaagaguggcugaaga

SEQ ID NO: 1449009 - RNA, 19 nt, Homo sapiens
  misc_RNA (1)...(19): siRNA sense strand
ucaguguucuccucaguuc

SEQ ID NO: 1449010 - RNA, 19 nt, Homo sapiens
  misc_RNA (1)...(19): siRNA sense strand
gguagugcaugcuguggau

SEQ ID NO: 1449011 - RNA, 19 nt, Homo sapiens
  misc_RNA (1)...(19): siRNA sense strand
gaucucuucucauuugcau

SEQ ID NO: 1449012 - RNA, 19 nt, Homo sapiens
  misc_RNA (1)...(19): siRNA sense strand
gaacuggauaagcccauug

SEQ ID NO: 1449013 - RNA, 19 nt, Homo sapiens
  misc_RNA (1)...(19): siRNA sense strand
acugugaaguuguguuuau

SEQ ID NO: 1449014 - RNA, 19 nt, Homo sapiens
  misc_RNA (1)...(19): siRNA sense strand
ggaccaaacguggacaguu

SEQ ID NO: 1449015 - RNA, 19 nt, Homo sapiens
  misc_RNA (1)...(19): siRNA sense strand
ggagaguggaguagaggaa

SEQ ID NO: 1449016 - RNA, 19 nt, Homo sapiens
  misc_RNA (1)...(19): siRNA sense strand
ggagaacucggaugaucug

SEQ ID NO: 1449017 - RNA, 19 nt, Homo sapiens
  misc_RNA (1)...(19): siRNA sense strand
ccaggccaaucagaucuuu

SEQ ID NO: 1449018 - RNA, 19 nt, Homo sapiens
  misc_RNA (1)...(19): siRNA sense strand
aguguugaaugccgagaua

SEQ ID NO: 1449019 - RNA, 19 nt, Homo sapiens
  misc_RNA (1)...(19): siRNA sense strand
ggagucucuuguuaauguu

SEQ ID NO: 1449020 - RNA, 19 nt, Homo sapiens
  misc_RNA (1)...(19): siRNA sense strand
ugacaaagaacuggaaagu

SEQ ID NO: 1449021 - RNA, 19 nt, Homo sapiens
  misc_RNA (1)...(19): siRNA sense strand
ggaaggccaucugcaacca

SEQ ID NO: 1449022 - RNA, 19 nt, Homo sapiens
  misc_RNA (1)...(19): siRNA sense strand
acauguuaguggaagauaa

SEQ ID NO: 1449023 - RNA, 19 nt, Homo sapiens
  misc_RNA (1)...(19): siRNA sense strand
gcucaguguucuccucagu

SEQ ID NO: 1449024 - RNA, 19 nt, Homo sapiens
  misc_RNA (1)...(19): siRNA sense strand
cugaggagccaucuggaua

SEQ ID NO: 1449025 - RNA, 19 nt, Homo sapiens
  misc_RNA (1)...(19): siRNA sense strand
gacuagaucauacgacaau

SEQ ID NO: 1449026 - RNA, 19 nt, Homo sapiens
  misc_RNA (1)...(19): siRNA sense strand
gaacuggaaaguguaucaa

SEQ ID NO: 1449027 - RNA, 19 nt, Homo sapiens
  misc_RNA (1)...(19): siRNA sense strand
gcaggaggccaccaaagag

SEQ ID NO: 1449028 - RNA, 19 nt, Homo sapiens
  misc_RNA (1)...(19): siRNA sense strand
ccaaggucaucauagaucu

SEQ ID NO: 1449029 - RNA, 19 nt, Homo sapiens
  misc_RNA (1)...(19): siRNA sense strand
gagaagaaaugaaacugaa

SEQ ID NO: 1449030 - RNA, 19 nt, Homo sapiens
  misc_RNA (1)...(19): siRNA sense strand
gaaggcaacuccagucaga

SEQ ID NO: 1449031 - RNA, 19 nt, Homo sapiens
  misc_RNA (1)...(19): siRNA sense strand
gaaauaagcgugccguuca

SEQ ID NO: 1449032 - RNA, 19 nt, Homo sapiens
  misc_RNA (1)...(19): siRNA sense strand
gaaacacuacccaauaauu

SEQ ID NO: 1449033 - RNA, 19 nt, Homo sapiens
  misc_RNA (1)...(19): siRNA sense strand
aaauaugccugaaacacua

SEQ ID NO: 1449034 - RNA, 19 nt, Homo sapiens
  misc_RNA (1)...(19): siRNA sense strand
cugaaacacuacccaauaa

SEQ ID NO: 1449035 - RNA, 19 nt, Homo sapiens
  misc_RNA (1)...(19): siRNA sense strand
gaaacaccaacuauacaaa

SEQ ID NO: 1449036 - RNA, 19 nt, Homo sapiens
  misc_RNA (1)...(19): siRNA sense strand
ggaagugcccuagaagaaa

SEQ ID NO: 1449037 - RNA, 19 nt, Homo sapiens
  misc_RNA (1)...(19): siRNA sense strand
agucagaacagcagaaaua

SEQ ID NO: 1449038 - RNA, 19 nt, Homo sapiens
  misc_RNA (1)...(19): siRNA sense strand
gaagaaacagucacucaag

SEQ ID NO: 1449039 - RNA, 19 nt, Homo sapiens
  misc_RNA (1)...(19): siRNA sense strand
gggaagugcccuagaagaa

SEQ ID NO: 1449040 - RNA, 19 nt, Homo sapiens
  misc_RNA (1)...(19): siRNA sense strand
gaagugcccuagaagaaaa

SEQ ID NO: 1449041 - RNA, 19 nt, Homo sapiens
  misc_RNA (1)...(19): siRNA sense strand
ucacgguggugucuuucua

SEQ ID NO: 1449042 - RNA, 19 nt, Homo sapiens
  misc_RNA (1)...(19): siRNA sense strand
ccugaaacacuacccaaua

SEQ ID NO: 1449043 - RNA, 19 nt, Homo sapiens
  misc_RNA (1)...(19): siRNA sense strand
aagaaacagucacucaaga

SEQ ID NO: 1449044 - RNA, 19 nt, Homo sapiens
  misc_RNA (1)...(19): siRNA sense strand
ggaagaaggagaugaacuc

SEQ ID NO: 1449045 - RNA, 19 nt, Homo sapiens
  misc_RNA (1)...(19): siRNA sense strand
cgccuuacuucuugccuua

SEQ ID NO: 1449046 - RNA, 19 nt, Homo sapiens
  misc_RNA (1)...(19): siRNA sense strand
aaacacuacccaauaauuc

SEQ ID NO: 1449047 - RNA, 19 nt, Homo sapiens
  misc_RNA (1)...(19): siRNA sense strand
ucaaagaaacugguuacuu

SEQ ID NO: 1449048 - RNA, 19 nt, Homo sapiens
  misc_RNA (1)...(19): siRNA sense strand
agucacgccuuacuucuug

SEQ ID NO: 1449049 - RNA, 19 nt, Homo sapiens
  misc_RNA (1)...(19): siRNA sense strand
gaugaacuccaacuugcaa

SEQ ID NO: 1449050 - RNA, 19 nt, Homo sapiens
  misc_RNA (1)...(19): siRNA sense strand
ugaaacaccaacuauacaa

SEQ ID NO: 1449051 - RNA, 19 nt, Homo sapiens
  misc_RNA (1)...(19): siRNA sense strand
gagaaggcaacuccaguca

SEQ ID NO: 1449052 - RNA, 19 nt, Homo sapiens
  misc_RNA (1)...(19): siRNA sense strand
cagugaaacaccaacuaua

SEQ ID NO: 1449053 - RNA, 19 nt, Homo sapiens
  misc_RNA (1)...(19): siRNA sense strand
cagaagaaacagucacuca

SEQ ID NO: 1449054 - RNA, 19 nt, Homo sapiens
  misc_RNA (1)...(19): siRNA sense strand
agggagcagucacgccuua

SEQ ID NO: 1449055 - RNA, 19 nt, Homo sapiens
  misc_RNA (1)...(19): siRNA sense strand
gacagugaaacaccaacua

SEQ ID NO: 1449056 - RNA, 19 nt, Homo sapiens
  misc_RNA (1)...(19): siRNA sense strand
gugacuuuguuucgaugua

SEQ ID NO: 1449057 - RNA, 19 nt, Homo sapiens
  misc_RNA (1)...(19): siRNA sense strand
gacaucuaauucagaggaa

SEQ ID NO: 1449058 - RNA, 19 nt, Homo sapiens
  misc_RNA (1)...(19): siRNA sense strand
ugacuuuguuucgauguau

SEQ ID NO: 1449059 - RNA, 19 nt, Homo sapiens
  misc_RNA (1)...(19): siRNA sense strand
gaacuccaacuugcaauac

SEQ ID NO: 1449060 - RNA, 19 nt, Homo sapiens
  misc_RNA (1)...(19): siRNA sense strand
ggaaagcugcuggcugcaa

SEQ ID NO: 1449061 - RNA, 19 nt, Homo sapiens
  misc_RNA (1)...(19): siRNA sense strand
ugaacuccaacuugcaaua

SEQ ID NO: 1449062 - RNA, 19 nt, Homo sapiens
  misc_RNA (1)...(19): siRNA sense strand
gagcagucacgccuuacuu

SEQ ID NO: 1449063 - RNA, 19 nt, Homo sapiens
  misc_RNA (1)...(19): siRNA sense strand
cagaacagcagaaauaagc

SEQ ID NO: 1449064 - RNA, 19 nt, Homo sapiens
  misc_RNA (1)...(19): siRNA sense strand
cuauucagcuggcauugca

SEQ ID NO: 1449065 - RNA, 19 nt, Homo sapiens
  misc_RNA (1)...(19): siRNA sense strand
gacuuuguuucgauguauu

SEQ ID NO: 1449066 - RNA, 19 nt, Homo sapiens
  misc_RNA (1)...(19): siRNA sense strand
agagaagaaaugaaacuga

SEQ ID NO: 1449067 - RNA, 19 nt, Homo sapiens
  misc_RNA (1)...(19): siRNA sense strand
gccucacgguggugucuuu

SEQ ID NO: 1449068 - RNA, 19 nt, Homo sapiens
  misc_RNA (1)...(19): siRNA sense strand
uuccauggcuucucagcuu

SEQ ID NO: 1449069 - RNA, 19 nt, Homo sapiens
  misc_RNA (1)...(19): siRNA sense strand
acaaauaucacuggaugga

SEQ ID NO: 1449070 - RNA, 19 nt, Homo sapiens
  misc_RNA (1)...(19): siRNA sense strand
agaagaaacagucacucaa

SEQ ID NO: 1449071 - RNA, 19 nt, Homo sapiens
  misc_RNA (1)...(19): siRNA sense strand
gccaugggacaucuaauuc

SEQ ID NO: 1449072 - RNA, 19 nt, Homo sapiens
  misc_RNA (1)...(19): siRNA sense strand
cgccaugggacaucuaauu

SEQ ID NO: 1449073 - RNA, 19 nt, Homo sapiens
  misc_RNA (1)...(19): siRNA sense strand
cauggcuucucagcuuuaa

SEQ ID NO: 1449074 - RNA, 19 nt, Homo sapiens
  misc_RNA (1)...(19): siRNA sense strand
gugaaacaccaacuauaca

SEQ ID NO: 1449075 - RNA, 19 nt, Homo sapiens
  misc_RNA (1)...(19): siRNA sense strand
gcagacagugaaacaccaa

SEQ ID NO: 1449076 - RNA, 19 nt, Homo sapiens
  misc_RNA (1)...(19): siRNA sense strand
ggucaaagaaacugguuac

SEQ ID NO: 1449077 - RNA, 19 nt, Homo sapiens
  misc_RNA (1)...(19): siRNA sense strand
gucagaacagcagaaauaa

SEQ ID NO: 1449078 - RNA, 19 nt, Homo sapiens
  misc_RNA (1)...(19): siRNA sense strand
caugggacaucuaauucag

SEQ ID NO: 1449079 - RNA, 19 nt, Homo sapiens
  misc_RNA (1)...(19): siRNA sense strand
ccauggcuucucagcuuua

SEQ ID NO: 1449080 - RNA, 19 nt, Homo sapiens
  misc_RNA (1)...(19): siRNA sense strand
aaaggaucuuacacauuug

SEQ ID NO: 1449081 - RNA, 19 nt, Homo sapiens
  misc_RNA (1)...(19): siRNA sense strand
acagugaaacaccaacuau

SEQ ID NO: 1449082 - RNA, 19 nt, Homo sapiens
  misc_RNA (1)...(19): siRNA sense strand
caucuaauucagaggaaga

SEQ ID NO: 1449083 - RNA, 19 nt, Homo sapiens
  misc_RNA (1)...(19): siRNA sense strand
gaaacugaaggaguguguu

SEQ ID NO: 1449084 - RNA, 19 nt, Homo sapiens
  misc_RNA (1)...(19): siRNA sense strand
ugaaacacuacccaauaau

SEQ ID NO: 1449085 - RNA, 19 nt, Homo sapiens
  misc_RNA (1)...(19): siRNA sense strand
gauugcagacagugaaaca

SEQ ID NO: 1449086 - RNA, 19 nt, Homo sapiens
  misc_RNA (1)...(19): siRNA sense strand
guucaggguccagaagaaa

SEQ ID NO: 1449087 - RNA, 19 nt, Homo sapiens
  misc_RNA (1)...(19): siRNA sense strand
cguucaggguccagaagaa

SEQ ID NO: 1449088 - RNA, 19 nt, Homo sapiens
  misc_RNA (1)...(19): siRNA sense strand
agaggaagaagguccaugu

SEQ ID NO: 1449089 - RNA, 19 nt, Homo sapiens
  misc_RNA (1)...(19): siRNA sense strand
ccagucagaacagcagaaa

SEQ ID NO: 1449090 - RNA, 19 nt, Homo sapiens
  misc_RNA (1)...(19): siRNA sense strand
ccaugggacaucuaauuca

SEQ ID NO: 1449091 - RNA, 19 nt, Homo sapiens
  misc_RNA (1)...(19): siRNA sense strand
gcagucacgccuuacuucu

SEQ ID NO: 1449092 - RNA, 19 nt, Homo sapiens
  misc_RNA (1)...(19): siRNA sense strand
ggaugacuccacagaaagg

SEQ ID NO: 1449093 - RNA, 19 nt, Homo sapiens
  misc_RNA (1)...(19): siRNA sense strand
ggucagguuuuauauacug

SEQ ID NO: 1449094 - RNA, 19 nt, Homo sapiens
  misc_RNA (1)...(19): siRNA sense strand
gagaaaaugcacaaauauc

SEQ ID NO: 1449095 - RNA, 19 nt, Homo sapiens
  misc_RNA (1)...(19): siRNA sense strand
caagagaaaaugcacaaau

SEQ ID NO: 1449096 - RNA, 19 nt, Homo sapiens
  misc_RNA (1)...(19): siRNA sense strand
ggaucuuacacauuuguuc

SEQ ID NO: 1449097 - RNA, 19 nt, Homo sapiens
  misc_RNA (1)...(19): siRNA sense strand
cauaagaccuccguguuua

SEQ ID NO: 1449098 - RNA, 19 nt, Homo sapiens
  misc_RNA (1)...(19): siRNA sense strand
gaacaaauuuaggguggaa

SEQ ID NO: 1449099 - RNA, 19 nt, Homo sapiens
  misc_RNA (1)...(19): siRNA sense strand
cgacaccgguucucuauca

SEQ ID NO: 1449100 - RNA, 19 nt, Homo sapiens
  misc_RNA (1)...(19): siRNA sense strand
gcaaguccauucagaaguc

SEQ ID NO: 1449101 - RNA, 19 nt, Homo sapiens
  misc_RNA (1)...(19): siRNA sense strand
ugaagucgcucaguacauu

SEQ ID NO: 1449102 - RNA, 19 nt, Homo sapiens
  misc_RNA (1)...(19): siRNA sense strand
ggaagaaagagaaauaauc

SEQ ID NO: 1449103 - RNA, 19 nt, Homo sapiens
  misc_RNA (1)...(19): siRNA sense strand
gaagaagggacucugauca

SEQ ID NO: 1449104 - RNA, 19 nt, Homo sapiens
  misc_RNA (1)...(19): siRNA sense strand
uaaucaaacugaccaugaa

SEQ ID NO: 1449105 - RNA, 19 nt, Homo sapiens
  misc_RNA (1)...(19): siRNA sense strand
gaagaggaagaaagagaaa

SEQ ID NO: 1449106 - RNA, 19 nt, Homo sapiens
  misc_RNA (1)...(19): siRNA sense strand
gacagcaaguccauucaga

SEQ ID NO: 1449107 - RNA, 19 nt, Homo sapiens
  misc_RNA (1)...(19): siRNA sense strand
ggccacuucuacaaucaua

SEQ ID NO: 1449108 - RNA, 19 nt, Homo sapiens
  misc_RNA (1)...(19): siRNA sense strand
gaagucgcucaguacauua

SEQ ID NO: 1449109 - RNA, 19 nt, Homo sapiens
  misc_RNA (1)...(19): siRNA sense strand
gcgaguacccgcugauuuc

SEQ ID NO: 1449110 - RNA, 19 nt, Homo sapiens
  misc_RNA (1)...(19): siRNA sense strand
gaggaagaaagagaaauaa

SEQ ID NO: 1449111 - RNA, 19 nt, Homo sapiens
  misc_RNA (1)...(19): siRNA sense strand
agaggaagaaagagaaaua

SEQ ID NO: 1449112 - RNA, 19 nt, Homo sapiens
  misc_RNA (1)...(19): siRNA sense strand
gugagaagaucgccaggau

SEQ ID NO: 1449113 - RNA, 19 nt, Homo sapiens
  misc_RNA (1)...(19): siRNA sense strand
ucauaagaccuccguguuu

SEQ ID NO: 1449114 - RNA, 19 nt, Homo sapiens
  misc_RNA (1)...(19): siRNA sense strand
cccaugaagucgcucagua

SEQ ID NO: 1449115 - RNA, 19 nt, Homo sapiens
  misc_RNA (1)...(19): siRNA sense strand
ucagaagucggagcucuua

SEQ ID NO: 1449116 - RNA, 19 nt, Homo sapiens
  misc_RNA (1)...(19): siRNA sense strand
cucaguacauuaaguuuga

SEQ ID NO: 1449117 - RNA, 19 nt, Homo sapiens
  misc_RNA (1)...(19): siRNA sense strand
ggaagaagggacucugauc

SEQ ID NO: 1449118 - RNA, 19 nt, Homo sapiens
  misc_RNA (1)...(19): siRNA sense strand
gcucuuaggccugcugaaa

SEQ ID NO: 1449119 - RNA, 19 nt, Homo sapiens
  misc_RNA (1)...(19): siRNA sense strand
gagacaccgugaggaagaa

SEQ ID NO: 1449120 - RNA, 19 nt, Homo sapiens
  misc_RNA (1)...(19): siRNA sense strand
caacggccacuucuacaau

SEQ ID NO: 1449121 - RNA, 19 nt, Homo sapiens
  misc_RNA (1)...(19): siRNA sense strand
gcugagacaccgugaggaa

SEQ ID NO: 1449122 - RNA, 19 nt, Homo sapiens
  misc_RNA (1)...(19): siRNA sense strand
gaggaagaagggacucuga

SEQ ID NO: 1449123 - RNA, 19 nt, Homo sapiens
  misc_RNA (1)...(19): siRNA sense strand
gcucaguacauuaaguuug

SEQ ID NO: 1449124 - RNA, 19 nt, Homo sapiens
  misc_RNA (1)...(19): siRNA sense strand
ugccggugcuggacaguuu

SEQ ID NO: 1449125 - RNA, 19 nt, Homo sapiens
  misc_RNA (1)...(19): siRNA sense strand
gcugguggaggccaaguaa

SEQ ID NO: 1449126 - RNA, 19 nt, Homo sapiens
  misc_RNA (1)...(19): siRNA sense strand
ucacccugcugcugaacaa

SEQ ID NO: 1449127 - RNA, 19 nt, Homo sapiens
  misc_RNA (1)...(19): siRNA sense strand
gaagauggccccagugagu

SEQ ID NO: 1449128 - RNA, 19 nt, Homo sapiens
  misc_RNA (1)...(19): siRNA sense strand
agaagggacucugaucauc

SEQ ID NO: 1449129 - RNA, 19 nt, Homo sapiens
  misc_RNA (1)...(19): siRNA sense strand
cagcugaugcggaccaaga

SEQ ID NO: 1449130 - RNA, 19 nt, Homo sapiens
  misc_RNA (1)...(19): siRNA sense strand
ugagacaccgugaggaaga

SEQ ID NO: 1449131 - RNA, 19 nt, Homo sapiens
  misc_RNA (1)...(19): siRNA sense strand
agaagaggaagaaagagaa

SEQ ID NO: 1449132 - RNA, 19 nt, Homo sapiens
  misc_RNA (1)...(19): siRNA sense strand
auaaucaaacugaccauga

SEQ ID NO: 1449133 - RNA, 19 nt, Homo sapiens
  misc_RNA (1)...(19): siRNA sense strand
aaaagaagaggaagaaaga

SEQ ID NO: 1449134 - RNA, 19 nt, Homo sapiens
  misc_RNA (1)...(19): siRNA sense strand
aagaagaggaagaaagaga

SEQ ID NO: 1449135 - RNA, 19 nt, Homo sapiens
  misc_RNA (1)...(19): siRNA sense strand
uaucaacggccacuucuac

SEQ ID NO: 1449136 - RNA, 19 nt, Homo sapiens
  misc_RNA (1)...(19): siRNA sense strand
ccaagagcgacgccaguug

SEQ ID NO: 1449137 - RNA, 19 nt, Homo sapiens
  misc_RNA (1)...(19): siRNA sense strand
cguguuuacuccagccuau

SEQ ID NO: 1449138 - RNA, 19 nt, Homo sapiens
  misc_RNA (1)...(19): siRNA sense strand
cagcaaguccauucagaag

SEQ ID NO: 1449139 - RNA, 19 nt, Homo sapiens
  misc_RNA (1)...(19): siRNA sense strand
ggcgacaccgguucucuau

SEQ ID NO: 1449140 - RNA, 19 nt, Homo sapiens
  misc_RNA (1)...(19): siRNA sense strand
gacaccgguucucuaucaa

SEQ ID NO: 1449141 - RNA, 19 nt, Homo sapiens
  misc_RNA (1)...(19): siRNA sense strand
aagggacucugaucaucga

SEQ ID NO: 1449142 - RNA, 19 nt, Homo sapiens
  misc_RNA (1)...(19): siRNA sense strand
ccugauggaagcugacuug

SEQ ID NO: 1449143 - RNA, 19 nt, Homo sapiens
  misc_RNA (1)...(19): siRNA sense strand
ucaacggccacuucuacaa

SEQ ID NO: 1449144 - RNA, 19 nt, Homo sapiens
  misc_RNA (1)...(19): siRNA sense strand
ccacuucuacaaucauaag

SEQ ID NO: 1449145 - RNA, 19 nt, Homo sapiens
  misc_RNA (1)...(19): siRNA sense strand
cccugcugcugaacaaauu

SEQ ID NO: 1449146 - RNA, 19 nt, Homo sapiens
  misc_RNA (1)...(19): siRNA sense strand
acagcaaguccauucagaa

SEQ ID NO: 1449147 - RNA, 19 nt, Homo sapiens
  misc_RNA (1)...(19): siRNA sense strand
gcaaguccauucagaaguc

SEQ ID NO: 1449148 - RNA, 19 nt, Homo sapiens
  misc_RNA (1)...(19): siRNA sense strand
gaagaagggacucugauca

SEQ ID NO: 1449149 - RNA, 19 nt, Homo sapiens
  misc_RNA (1)...(19): siRNA sense strand
gacagcaaguccauucaga

SEQ ID NO: 1449150 - RNA, 19 nt, Homo sapiens
  misc_RNA (1)...(19): siRNA sense strand
ucagaagucggagcucuua

SEQ ID NO: 1449151 - RNA, 19 nt, Homo sapiens
  misc_RNA (1)...(19): siRNA sense strand
ggaagaagggacucugauc

SEQ ID NO: 1449152 - RNA, 19 nt, Homo sapiens
  misc_RNA (1)...(19): siRNA sense strand
gcucuuaggccugcugaaa

SEQ ID NO: 1449153 - RNA, 19 nt, Homo sapiens
  misc_RNA (1)...(19): siRNA sense strand
gagacaccgugaggaagaa

SEQ ID NO: 1449154 - RNA, 19 nt, Homo sapiens
  misc_RNA (1)...(19): siRNA sense strand
gcugagacaccgugaggaa

SEQ ID NO: 1449155 - RNA, 19 nt, Homo sapiens
  misc_RNA (1)...(19): siRNA sense strand
gaggaagaagggacucuga

SEQ ID NO: 1449156 - RNA, 19 nt, Homo sapiens
  misc_RNA (1)...(19): siRNA sense strand
agaagggacucugaucauc

SEQ ID NO: 1449157 - RNA, 19 nt, Homo sapiens
  misc_RNA (1)...(19): siRNA sense strand
cagcugaugcggaccaaga

SEQ ID NO: 1449158 - RNA, 19 nt, Homo sapiens
  misc_RNA (1)...(19): siRNA sense strand
ugagacaccgugaggaaga

SEQ ID NO: 1449159 - RNA, 19 nt, Homo sapiens
  misc_RNA (1)...(19): siRNA sense strand
cagcaaguccauucagaag

SEQ ID NO: 1449160 - RNA, 19 nt, Homo sapiens
  misc_RNA (1)...(19): siRNA sense strand
ccaagagcgacgccaguug

SEQ ID NO: 1449161 - RNA, 19 nt, Homo sapiens
  misc_RNA (1)...(19): siRNA sense strand
aagggacucugaucaucga

SEQ ID NO: 1449162 - RNA, 19 nt, Homo sapiens
  misc_RNA (1)...(19): siRNA sense strand
acagcaaguccauucagaa

SEQ ID NO: 1449163 - RNA, 19 nt, Homo sapiens
  misc_RNA (1)...(19): siRNA sense strand
ggaaacagccaguguggaa

SEQ ID NO: 1449164 - RNA, 19 nt, Homo sapiens
  misc_RNA (1)...(19): siRNA sense strand
cgaaugaacuauaccaaca

SEQ ID NO: 1449165 - RNA, 19 nt, Homo sapiens
  misc_RNA (1)...(19): siRNA sense strand
gaacuauaccaacaaauuc

SEQ ID NO: 1449166 - RNA, 19 nt, Homo sapiens
  misc_RNA (1)...(19): siRNA sense strand
gcacugggaacaugaacua

SEQ ID NO: 1449167 - RNA, 19 nt, Homo sapiens
  misc_RNA (1)...(19): siRNA sense strand
gggacaagcuaauggugaa

SEQ ID NO: 1449168 - RNA, 19 nt, Homo sapiens
  misc_RNA (1)...(19): siRNA sense strand
uugcaggacucaccacaua

SEQ ID NO: 1449169 - RNA, 19 nt, Homo sapiens
  misc_RNA (1)...(19): siRNA sense strand
gggcacaccugacaguugu

SEQ ID NO: 1449170 - RNA, 19 nt, Homo sapiens
  misc_RNA (1)...(19): siRNA sense strand
ggacaggaguuugcaccuu

SEQ ID NO: 1449171 - RNA, 19 nt, Homo sapiens
  misc_RNA (1)...(19): siRNA sense strand
ggacugagcuuuggggaaa

SEQ ID NO: 1449172 - RNA, 19 nt, Homo sapiens
  misc_RNA (1)...(19): siRNA sense strand
ccaagaaccgaaugaacua

SEQ ID NO: 1449173 - RNA, 19 nt, Homo sapiens
  misc_RNA (1)...(19): siRNA sense strand
gcaaguuuaugcaccucuu

SEQ ID NO: 1449174 - RNA, 19 nt, Homo sapiens
  misc_RNA (1)...(19): siRNA sense strand
gaucugggacugagcuuug

SEQ ID NO: 1449175 - RNA, 19 nt, Homo sapiens
  misc_RNA (1)...(19): siRNA sense strand
ugacaucucuuugguggau

SEQ ID NO: 1449176 - RNA, 19 nt, Homo sapiens
  misc_RNA (1)...(19): siRNA sense strand
ggagacuacuucauuuacu

SEQ ID NO: 1449177 - RNA, 19 nt, Homo sapiens
  misc_RNA (1)...(19): siRNA sense strand
ugagugcagugaaaucaga

SEQ ID NO: 1449178 - RNA, 19 nt, Homo sapiens
  misc_RNA (1)...(19): siRNA sense strand
gcucugcacugggaacaug

SEQ ID NO: 1449179 - RNA, 19 nt, Homo sapiens
  misc_RNA (1)...(19): siRNA sense strand
gagacuacuucauuuacuc

SEQ ID NO: 1449180 - RNA, 19 nt, Homo sapiens
  misc_RNA (1)...(19): siRNA sense strand
gaaugaacuauaccaacaa

SEQ ID NO: 1449181 - RNA, 19 nt, Homo sapiens
  misc_RNA (1)...(19): siRNA sense strand
cuucacaucagcaaguuua

SEQ ID NO: 1449182 - RNA, 19 nt, Homo sapiens
  misc_RNA (1)...(19): siRNA sense strand
ucgggagacuacuucauuu

SEQ ID NO: 1449183 - RNA, 19 nt, Homo sapiens
  misc_RNA (1)...(19): siRNA sense strand
gaaacagccaguguggaaa

SEQ ID NO: 1449184 - RNA, 19 nt, Homo sapiens
  misc_RNA (1)...(19): siRNA sense strand
caagcaggccgaccaaaca

SEQ ID NO: 1449185 - RNA, 19 nt, Homo sapiens
  misc_RNA (1)...(19): siRNA sense strand
caaguuuaugcaccucuua

SEQ ID NO: 1449186 - RNA, 19 nt, Homo sapiens
  misc_RNA (1)...(19): siRNA sense strand
caaacaagccagacuccau

SEQ ID NO: 1449187 - RNA, 19 nt, Homo sapiens
  misc_RNA (1)...(19): siRNA sense strand
cgggagacuacuucauuua

SEQ ID NO: 1449188 - RNA, 19 nt, Homo sapiens
  misc_RNA (1)...(19): siRNA sense strand
ucagugacaucucuuuggu

SEQ ID NO: 1449189 - RNA, 19 nt, Homo sapiens
  misc_RNA (1)...(19): siRNA sense strand
caacaaauuccugcugauc

SEQ ID NO: 1449190 - RNA, 19 nt, Homo sapiens
  misc_RNA (1)...(19): siRNA sense strand
acaucucuuugguggauua

SEQ ID NO: 1449191 - RNA, 19 nt, Homo sapiens
  misc_RNA (1)...(19): siRNA sense strand
gcaagaaggggacaagcua

SEQ ID NO: 1449192 - RNA, 19 nt, Homo sapiens
  misc_RNA (1)...(19): siRNA sense strand
ccaacaaauuccugcugau

SEQ ID NO: 1449193 - RNA, 19 nt, Homo sapiens
  misc_RNA (1)...(19): siRNA sense strand
cuuuggagccuucuuacua

SEQ ID NO: 1449194 - RNA, 19 nt, Homo sapiens
  misc_RNA (1)...(19): siRNA sense strand
uuuggagccuucuuacuau

SEQ ID NO: 1449195 - RNA, 19 nt, Homo sapiens
  misc_RNA (1)...(19): siRNA sense strand
aagaaccgaaugaacuaua

SEQ ID NO: 1449196 - RNA, 19 nt, Homo sapiens
  misc_RNA (1)...(19): siRNA sense strand
aaacagccaguguggaaau

SEQ ID NO: 1449197 - RNA, 19 nt, Homo sapiens
  misc_RNA (1)...(19): siRNA sense strand
gucgggagacuacuucauu

SEQ ID NO: 1449198 - RNA, 19 nt, Homo sapiens
  misc_RNA (1)...(19): siRNA sense strand
ggucaucaccaagguaaca

SEQ ID NO: 1449199 - RNA, 19 nt, Homo sapiens
  misc_RNA (1)...(19): siRNA sense strand
uuggagccuucuuacuaua

SEQ ID NO: 1449200 - RNA, 19 nt, Homo sapiens
  misc_RNA (1)...(19): siRNA sense strand
ggaguuugcaccuucacau

SEQ ID NO: 1449201 - RNA, 19 nt, Homo sapiens
  misc_RNA (1)...(19): siRNA sense strand
caagucuguaugcgaagua

SEQ ID NO: 1449202 - RNA, 19 nt, Homo sapiens
  misc_RNA (1)...(19): siRNA sense strand
gggagacuacuucauuuac

SEQ ID NO: 1449203 - RNA, 19 nt, Homo sapiens
  misc_RNA (1)...(19): siRNA sense strand
gccaagggcacaccugaca

SEQ ID NO: 1449204 - RNA, 19 nt, Homo sapiens
  misc_RNA (1)...(19): siRNA sense strand
agaaccgaaugaacuauac

SEQ ID NO: 1449205 - RNA, 19 nt, Homo sapiens
  misc_RNA (1)...(19): siRNA sense strand
uccgugggaugaccucuga

SEQ ID NO: 1449206 - RNA, 19 nt, Homo sapiens
  misc_RNA (1)...(19): siRNA sense strand
caagggcacaccugacagu

SEQ ID NO: 1449207 - RNA, 19 nt, Homo sapiens
  misc_RNA (1)...(19): siRNA sense strand
cuucuuuggagccuucuua

SEQ ID NO: 1449208 - RNA, 19 nt, Homo sapiens
  misc_RNA (1)...(19): siRNA sense strand
guuccaggcucuaaaagga

SEQ ID NO: 1449209 - RNA, 19 nt, Homo sapiens
  misc_RNA (1)...(19): siRNA sense strand
ugagacaaacucccacaca

SEQ ID NO: 1449210 - RNA, 19 nt, Homo sapiens
  misc_RNA (1)...(19): siRNA sense strand
ccaagucuguaugcgaagu

SEQ ID NO: 1449211 - RNA, 19 nt, Homo sapiens
  misc_RNA (1)...(19): siRNA sense strand
caagaaccgaaugaacuau

SEQ ID NO: 1449212 - RNA, 19 nt, Homo sapiens
  misc_RNA (1)...(19): siRNA sense strand
gagccauguucuccuugca

SEQ ID NO: 1449213 - RNA, 19 nt, Homo sapiens
  misc_RNA (1)...(19): siRNA sense strand
gcaggaagauugcgagaaa

SEQ ID NO: 1449214 - RNA, 19 nt, Homo sapiens
  misc_RNA (1)...(19): siRNA sense strand
caucaugccugccaacuga

SEQ ID NO: 1449215 - RNA, 19 nt, Homo sapiens
  misc_RNA (1)...(19): siRNA sense strand
gcaacagaaucaaacacaa

SEQ ID NO: 1449216 - RNA, 19 nt, Homo sapiens
  misc_RNA (1)...(19): siRNA sense strand
gaaccuccacccugcauau

SEQ ID NO: 1449217 - RNA, 19 nt, Homo sapiens
  misc_RNA (1)...(19): siRNA sense strand
aaacuguacucaccugugu

SEQ ID NO: 1449218 - RNA, 19 nt, Homo sapiens
  misc_RNA (1)...(19): siRNA sense strand
cacaagggcucagaaguca

SEQ ID NO: 1449219 - RNA, 19 nt, Homo sapiens
  misc_RNA (1)...(19): siRNA sense strand
gaagauugcgagaaaggau

SEQ ID NO: 1449220 - RNA, 19 nt, Homo sapiens
  misc_RNA (1)...(19): siRNA sense strand
ccaagcagcguguucugaa

SEQ ID NO: 1449221 - RNA, 19 nt, Homo sapiens
  misc_RNA (1)...(19): siRNA sense strand
caacagaaucaaacacaag

SEQ ID NO: 1449222 - RNA, 19 nt, Homo sapiens
  misc_RNA (1)...(19): siRNA sense strand
gggauagucuguucaucag

SEQ ID NO: 1449223 - RNA, 19 nt, Homo sapiens
  misc_RNA (1)...(19): siRNA sense strand
caagcagcguguucugaag

SEQ ID NO: 1449224 - RNA, 19 nt, Homo sapiens
  misc_RNA (1)...(19): siRNA sense strand
caaaagcgcaacagaauca

SEQ ID NO: 1449225 - RNA, 19 nt, Homo sapiens
  misc_RNA (1)...(19): siRNA sense strand
cagcguguucugaaguaua

SEQ ID NO: 1449226 - RNA, 19 nt, Homo sapiens
  misc_RNA (1)...(19): siRNA sense strand
gggcucagaagucaucaug

SEQ ID NO: 1449227 - RNA, 19 nt, Homo sapiens
  misc_RNA (1)...(19): siRNA sense strand
acacaagggcucagaaguc

SEQ ID NO: 1449228 - RNA, 19 nt, Homo sapiens
  misc_RNA (1)...(19): siRNA sense strand
ucugaaguauaucuuggaa

SEQ ID NO: 1449229 - RNA, 19 nt, Homo sapiens
  misc_RNA (1)...(19): siRNA sense strand
gcagcguguucugaaguau

SEQ ID NO: 1449230 - RNA, 19 nt, Homo sapiens
  misc_RNA (1)...(19): siRNA sense strand
caagggcucagaagucauc

SEQ ID NO: 1449231 - RNA, 19 nt, Homo sapiens
  misc_RNA (1)...(19): siRNA sense strand
caaacacaagggcucagaa

SEQ ID NO: 1449232 - RNA, 19 nt, Homo sapiens
  misc_RNA (1)...(19): siRNA sense strand
ggaaccuccacccugcaua

SEQ ID NO: 1449233 - RNA, 19 nt, Homo sapiens
  misc_RNA (1)...(19): siRNA sense strand
ggaagauugcgagaaagga

SEQ ID NO: 1449234 - RNA, 19 nt, Homo sapiens
  misc_RNA (1)...(19): siRNA sense strand
uguguacaaugcaggaaga

SEQ ID NO: 1449235 - RNA, 19 nt, Homo sapiens
  misc_RNA (1)...(19): siRNA sense strand
ugggauagucuguucauca

SEQ ID NO: 1449236 - RNA, 19 nt, Homo sapiens
  misc_RNA (1)...(19): siRNA sense strand
ucugugggauagucuguuc

SEQ ID NO: 1449237 - RNA, 19 nt, Homo sapiens
  misc_RNA (1)...(19): siRNA sense strand
aaacacaagggcucagaag

SEQ ID NO: 1449238 - RNA, 19 nt, Homo sapiens
  misc_RNA (1)...(19): siRNA sense strand
agcagcguguucugaagua

SEQ ID NO: 1449239 - RNA, 19 nt, Homo sapiens
  misc_RNA (1)...(19): siRNA sense strand
agcguguucugaaguauau

SEQ ID NO: 1449240 - RNA, 19 nt, Homo sapiens
  misc_RNA (1)...(19): siRNA sense strand
ggauuucagugcuguuccu

SEQ ID NO: 1449241 - RNA, 19 nt, Homo sapiens
  misc_RNA (1)...(19): siRNA sense strand
caaauaagauaugcuguuc

SEQ ID NO: 1449242 - RNA, 19 nt, Homo sapiens
  misc_RNA (1)...(19): siRNA sense strand
gaaucaaggucugugagaa

SEQ ID NO: 1449243 - RNA, 19 nt, Homo sapiens
  misc_RNA (1)...(19): siRNA sense strand
gagaagcgacccagcauag

SEQ ID NO: 1449244 - RNA, 19 nt, Homo sapiens
  misc_RNA (1)...(19): siRNA sense strand
ccaccacuguucauauuuc

SEQ ID NO: 1449245 - RNA, 19 nt, Homo sapiens
  misc_RNA (1)...(19): siRNA sense strand
gaagcgacccagcauagau

SEQ ID NO: 1449246 - RNA, 19 nt, Homo sapiens
  misc_RNA (1)...(19): siRNA sense strand
ccaaaagugugaaacaaau

SEQ ID NO: 1449247 - RNA, 19 nt, Homo sapiens
  misc_RNA (1)...(19): siRNA sense strand
aauaagauaugcuguucag

SEQ ID NO: 1449248 - RNA, 19 nt, Homo sapiens
  misc_RNA (1)...(19): siRNA sense strand
ugugggaacauuuguauga

SEQ ID NO: 1449249 - RNA, 19 nt, Homo sapiens
  misc_RNA (1)...(19): siRNA sense strand
guucauauuuccaaaagug

SEQ ID NO: 1449250 - RNA, 19 nt, Homo sapiens
  misc_RNA (1)...(19): siRNA sense strand
gcauccaccacuguucaua

SEQ ID NO: 1449251 - RNA, 19 nt, Homo sapiens
  misc_RNA (1)...(19): siRNA sense strand
ugagaagcgacccagcaua

SEQ ID NO: 1449252 - RNA, 19 nt, Homo sapiens
  misc_RNA (1)...(19): siRNA sense strand
ccacuguucauauuuccaa

SEQ ID NO: 1449253 - RNA, 19 nt, Homo sapiens
  misc_RNA (1)...(19): siRNA sense strand
auccaccacuguucauauu

SEQ ID NO: 1449254 - RNA, 19 nt, Homo sapiens
  misc_RNA (1)...(19): siRNA sense strand
cauccaccacuguucauau

SEQ ID NO: 1449255 - RNA, 19 nt, Homo sapiens
  misc_RNA (1)...(19): siRNA sense strand
gaacagcacugaaauccuu

SEQ ID NO: 1449256 - RNA, 19 nt, Homo sapiens
  misc_RNA (1)...(19): siRNA sense strand
caaauaagauaugcuguuc

SEQ ID NO: 1449257 - RNA, 19 nt, Homo sapiens
  misc_RNA (1)...(19): siRNA sense strand
gaaucaaggucugugagaa

SEQ ID NO: 1449258 - RNA, 19 nt, Homo sapiens
  misc_RNA (1)...(19): siRNA sense strand
gguuacaccugcagacuau

SEQ ID NO: 1449259 - RNA, 19 nt, Homo sapiens
  misc_RNA (1)...(19): siRNA sense strand
gagaagcgacccagcauag

SEQ ID NO: 1449260 - RNA, 19 nt, Homo sapiens
  misc_RNA (1)...(19): siRNA sense strand
gaaaggagggcaagcaaaa

SEQ ID NO: 1449261 - RNA, 19 nt, Homo sapiens
  misc_RNA (1)...(19): siRNA sense strand
ccaccacuguucauauuuc

SEQ ID NO: 1449262 - RNA, 19 nt, Homo sapiens
  misc_RNA (1)...(19): siRNA sense strand
gaagcgacccagcauagau

SEQ ID NO: 1449263 - RNA, 19 nt, Homo sapiens
  misc_RNA (1)...(19): siRNA sense strand
gaaggaggaacagcacuga

SEQ ID NO: 1449264 - RNA, 19 nt, Homo sapiens
  misc_RNA (1)...(19): siRNA sense strand
ggaggaacagcacugaaau

SEQ ID NO: 1449265 - RNA, 19 nt, Homo sapiens
  misc_RNA (1)...(19): siRNA sense strand
ccaaaagugugaaacaaau

SEQ ID NO: 1449266 - RNA, 19 nt, Homo sapiens
  misc_RNA (1)...(19): siRNA sense strand
aauaagauaugcuguucag

SEQ ID NO: 1449267 - RNA, 19 nt, Homo sapiens
  misc_RNA (1)...(19): siRNA sense strand
ugugggaacauuuguauga

SEQ ID NO: 1449268 - RNA, 19 nt, Homo sapiens
  misc_RNA (1)...(19): siRNA sense strand
gaggaacagcacugaaauc

SEQ ID NO: 1449269 - RNA, 19 nt, Homo sapiens
  misc_RNA (1)...(19): siRNA sense strand
ugaaaggagggcaagcaaa

SEQ ID NO: 1449270 - RNA, 19 nt, Homo sapiens
  misc_RNA (1)...(19): siRNA sense strand
guucauauuuccaaaagug

SEQ ID NO: 1449271 - RNA, 19 nt, Homo sapiens
  misc_RNA (1)...(19): siRNA sense strand
ugagaagcgacccagcaua

SEQ ID NO: 1449272 - RNA, 19 nt, Homo sapiens
  misc_RNA (1)...(19): siRNA sense strand
gcauccaccacuguucaua

SEQ ID NO: 1449273 - RNA, 19 nt, Homo sapiens
  misc_RNA (1)...(19): siRNA sense strand
gcaaaaguguaggacaaau

SEQ ID NO: 1449274 - RNA, 19 nt, Homo sapiens
  misc_RNA (1)...(19): siRNA sense strand
ccacuguucauauuuccaa

SEQ ID NO: 1449275 - RNA, 19 nt, Homo sapiens
  misc_RNA (1)...(19): siRNA sense strand
aggaggaacagcacugaaa

SEQ ID NO: 1449276 - RNA, 19 nt, Homo sapiens
  misc_RNA (1)...(19): siRNA sense strand
auccaccacuguucauauu

SEQ ID NO: 1449277 - RNA, 19 nt, Homo sapiens
  misc_RNA (1)...(19): siRNA sense strand
caaaaguguaggacaaauu

SEQ ID NO: 1449278 - RNA, 19 nt, Homo sapiens
  misc_RNA (1)...(19): siRNA sense strand
gugaaaggagggcaagcaa

SEQ ID NO: 1449279 - RNA, 19 nt, Homo sapiens
  misc_RNA (1)...(19): siRNA sense strand
cauccaccacuguucauau

SEQ ID NO: 1449280 - RNA, 19 nt, Homo sapiens
  misc_RNA (1)...(19): siRNA sense strand
ugcagacuaucccacagaa

SEQ ID NO: 1449281 - RNA, 19 nt, Homo sapiens
  misc_RNA (1)...(19): siRNA sense strand
aagcaaaaguguaggacaa

SEQ ID NO: 1449282 - RNA, 19 nt, Homo sapiens
  misc_RNA (1)...(19): siRNA sense strand
aauccuuucucgcaaucuu

SEQ ID NO: 1449283 - RNA, 19 nt, Homo sapiens
  misc_RNA (1)...(19): siRNA sense strand
gaaaugagaugucugaagu

SEQ ID NO: 1449284 - RNA, 19 nt, Homo sapiens
  misc_RNA (1)...(19): siRNA sense strand
agaaaucucuggucguuua

SEQ ID NO: 1449285 - RNA, 19 nt, Homo sapiens
  misc_RNA (1)...(19): siRNA sense strand
gaaacuagcucaacguaag

SEQ ID NO: 1449286 - RNA, 19 nt, Homo sapiens
  misc_RNA (1)...(19): siRNA sense strand
caauggagguugaugguaa

SEQ ID NO: 1449287 - RNA, 19 nt, Homo sapiens
  misc_RNA (1)...(19): siRNA sense strand
ucaauuggcucaucagcua

SEQ ID NO: 1449288 - RNA, 19 nt, Homo sapiens
  misc_RNA (1)...(19): siRNA sense strand
gaaucacacugucagagua

SEQ ID NO: 1449289 - RNA, 19 nt, Homo sapiens
  misc_RNA (1)...(19): siRNA sense strand
gacgaaagcuaaggaaauu

SEQ ID NO: 1449290 - RNA, 19 nt, Homo sapiens
  misc_RNA (1)...(19): siRNA sense strand
gauaucaaaugggacuuua

SEQ ID NO: 1449291 - RNA, 19 nt, Homo sapiens
  misc_RNA (1)...(19): siRNA sense strand
gaagaggacagcuuuggua

SEQ ID NO: 1449292 - RNA, 19 nt, Homo sapiens
  misc_RNA (1)...(19): siRNA sense strand
guaaacgugucugcucuua

SEQ ID NO: 1449293 - RNA, 19 nt, Homo sapiens
  misc_RNA (1)...(19): siRNA sense strand
ggagguugaugguaaggua

SEQ ID NO: 1449294 - RNA, 19 nt, Homo sapiens
  misc_RNA (1)...(19): siRNA sense strand
gaaagcacauuugguuaug

SEQ ID NO: 1449295 - RNA, 19 nt, Homo sapiens
  misc_RNA (1)...(19): siRNA sense strand
caaagaugauuuccuacaa

SEQ ID NO: 1449296 - RNA, 19 nt, Homo sapiens
  misc_RNA (1)...(19): siRNA sense strand
ggaauuaugauaccucuga

SEQ ID NO: 1449297 - RNA, 19 nt, Homo sapiens
  misc_RNA (1)...(19): siRNA sense strand
cgaauugguuggagagauu

SEQ ID NO: 1449298 - RNA, 19 nt, Homo sapiens
  misc_RNA (1)...(19): siRNA sense strand
ggugaaaugucuuggaaau

SEQ ID NO: 1449299 - RNA, 19 nt, Homo sapiens
  misc_RNA (1)...(19): siRNA sense strand
gaagaagaccuggcagaaa

SEQ ID NO: 1449300 - RNA, 19 nt, Homo sapiens
  misc_RNA (1)...(19): siRNA sense strand
gacauccucuauaaacuuu

SEQ ID NO: 1449301 - RNA, 19 nt, Homo sapiens
  misc_RNA (1)...(19): siRNA sense strand
ugggagacauccucuauaa

SEQ ID NO: 1449302 - RNA, 19 nt, Homo sapiens
  misc_RNA (1)...(19): siRNA sense strand
gacaaacacuucacagagu

SEQ ID NO: 1449303 - RNA, 19 nt, Homo sapiens
  misc_RNA (1)...(19): siRNA sense strand
aaagaaagcacauuugguu

SEQ ID NO: 1449304 - RNA, 19 nt, Homo sapiens
  misc_RNA (1)...(19): siRNA sense strand
gccaauaccuccaauaugc

SEQ ID NO: 1449305 - RNA, 19 nt, Homo sapiens
  misc_RNA (1)...(19): siRNA sense strand
ggacgaaagcuaaggaaau

SEQ ID NO: 1449306 - RNA, 19 nt, Homo sapiens
  misc_RNA (1)...(19): siRNA sense strand
aagaagaccuggcagaaau

SEQ ID NO: 1449307 - RNA, 19 nt, Homo sapiens
  misc_RNA (1)...(19): siRNA sense strand
gguaagguagagucaauua

SEQ ID NO: 1449308 - RNA, 19 nt, Homo sapiens
  misc_RNA (1)...(19): siRNA sense strand
ggaugaauacuaugacaaa

SEQ ID NO: 1449309 - RNA, 19 nt, Homo sapiens
  misc_RNA (1)...(19): siRNA sense strand
ugaaaugccugcagauagu

SEQ ID NO: 1449310 - RNA, 19 nt, Homo sapiens
  misc_RNA (1)...(19): siRNA sense strand
uagcagagauaucaaaugg

SEQ ID NO: 1449311 - RNA, 19 nt, Homo sapiens
  misc_RNA (1)...(19): siRNA sense strand
uaugauaccucugauguug

SEQ ID NO: 1449312 - RNA, 19 nt, Homo sapiens
  misc_RNA (1)...(19): siRNA sense strand
gaagggagugucagcauug

SEQ ID NO: 1449313 - RNA, 19 nt, Homo sapiens
  misc_RNA (1)...(19): siRNA sense strand
gggaugcuguccaacauga

SEQ ID NO: 1449314 - RNA, 19 nt, Homo sapiens
  misc_RNA (1)...(19): siRNA sense strand
ggagacauuuauggaauug

SEQ ID NO: 1449315 - RNA, 19 nt, Homo sapiens
  misc_RNA (1)...(19): siRNA sense strand
gaugauuuccuacaacaaa

SEQ ID NO: 1449316 - RNA, 19 nt, Homo sapiens
  misc_RNA (1)...(19): siRNA sense strand
cacagucucuauccaagua

SEQ ID NO: 1449317 - RNA, 19 nt, Homo sapiens
  misc_RNA (1)...(19): siRNA sense strand
agaacucgcuuaucaaaca

SEQ ID NO: 1449318 - RNA, 19 nt, Homo sapiens
  misc_RNA (1)...(19): siRNA sense strand
gcggagacauuuauggaau

SEQ ID NO: 1449319 - RNA, 19 nt, Homo sapiens
  misc_RNA (1)...(19): siRNA sense strand
gauaaagaaagcacauuug

SEQ ID NO: 1449320 - RNA, 19 nt, Homo sapiens
  misc_RNA (1)...(19): siRNA sense strand
ucuuggagcuugaauuuga

SEQ ID NO: 1449321 - RNA, 19 nt, Homo sapiens
  misc_RNA (1)...(19): siRNA sense strand
ggagacauccucuauaaac

SEQ ID NO: 1449322 - RNA, 19 nt, Homo sapiens
  misc_RNA (1)...(19): siRNA sense strand
uauaaacuuuccuccauga

SEQ ID NO: 1449323 - RNA, 19 nt, Homo sapiens
  misc_RNA (1)...(19): siRNA sense strand
agugagaacucgcuuauca

SEQ ID NO: 1449324 - RNA, 19 nt, Homo sapiens
  misc_RNA (1)...(19): siRNA sense strand
gaggaaaugagaugucuga

SEQ ID NO: 1449325 - RNA, 19 nt, Homo sapiens
  misc_RNA (1)...(19): siRNA sense strand
ccaaguauucuaacaguga

SEQ ID NO: 1449326 - RNA, 19 nt, Homo sapiens
  misc_RNA (1)...(19): siRNA sense strand
gaaagauggugaggcaaag

SEQ ID NO: 1449327 - RNA, 19 nt, Homo sapiens
  misc_RNA (1)...(19): siRNA sense strand
uguaugagcuggugagagu

SEQ ID NO: 1449328 - RNA, 19 nt, Homo sapiens
  misc_RNA (1)...(19): siRNA sense strand
uccguagccuugaagauua

SEQ ID NO: 1449329 - RNA, 19 nt, Homo sapiens
  misc_RNA (1)...(19): siRNA sense strand
ucaaggauccacugaaaga

SEQ ID NO: 1449330 - RNA, 19 nt, Homo sapiens
  misc_RNA (1)...(19): siRNA sense strand
gaaagagaagggaguguca

SEQ ID NO: 1449331 - RNA, 19 nt, Homo sapiens
  misc_RNA (1)...(19): siRNA sense strand
uguaggauguggugaaaga

SEQ ID NO: 1449332 - RNA, 19 nt, Homo sapiens
  misc_RNA (1)...(19): siRNA sense strand
ucccagagcucacaaugga

SEQ ID NO: 1449333 - RNA, 19 nt, Homo sapiens
  misc_RNA (1)...(19): siRNA sense strand
gagcuugguccuggcauua

SEQ ID NO: 1449334 - RNA, 19 nt, Homo sapiens
  misc_RNA (1)...(19): siRNA sense strand
uaaaaucacucuggaggua

SEQ ID NO: 1449335 - RNA, 19 nt, Homo sapiens
  misc_RNA (1)...(19): siRNA sense strand
gcugaggcccuuagagaaa

SEQ ID NO: 1449336 - RNA, 19 nt, Homo sapiens
  misc_RNA (1)...(19): siRNA sense strand
uaagguagagucaauuaug

SEQ ID NO: 1449337 - RNA, 19 nt, Homo sapiens
  misc_RNA (1)...(19): siRNA sense strand
ggugaaagaggaaaugaga

SEQ ID NO: 1449338 - RNA, 19 nt, Homo sapiens
  misc_RNA (1)...(19): siRNA sense strand
aagguagagucaauuauga

SEQ ID NO: 1449339 - RNA, 19 nt, Homo sapiens
  misc_RNA (1)...(19): siRNA sense strand
acaaacacuucacagaguu

SEQ ID NO: 1449340 - RNA, 19 nt, Homo sapiens
  misc_RNA (1)...(19): siRNA sense strand
uuggagagauuauucgauu

SEQ ID NO: 1449341 - RNA, 19 nt, Homo sapiens
  misc_RNA (1)...(19): siRNA sense strand
gggaggaacuacugcuauc

SEQ ID NO: 1449342 - RNA, 19 nt, Homo sapiens
  misc_RNA (1)...(19): siRNA sense strand
gcugaaaugccugcagaua

SEQ ID NO: 1449343 - RNA, 19 nt, Homo sapiens
  misc_RNA (1)...(19): siRNA sense strand
ggacuuuacaccuugcaaa

SEQ ID NO: 1449344 - RNA, 19 nt, Homo sapiens
  misc_RNA (1)...(19): siRNA sense strand
guaaucaucuauguaggau

SEQ ID NO: 1449345 - RNA, 19 nt, Homo sapiens
  misc_RNA (1)...(19): siRNA sense strand
ugacauggcuacuauucag

SEQ ID NO: 1449346 - RNA, 19 nt, Homo sapiens
  misc_RNA (1)...(19): siRNA sense strand
gcuugaauuugaaggugua

SEQ ID NO: 1449347 - RNA, 19 nt, Homo sapiens
  misc_RNA (1)...(19): siRNA sense strand
ugagaacucgcuuaucaaa

SEQ ID NO: 1449348 - RNA, 19 nt, Homo sapiens
  misc_RNA (1)...(19): siRNA sense strand
uggaaauccugaaagagaa

SEQ ID NO: 1449349 - RNA, 19 nt, Homo sapiens
  misc_RNA (1)...(19): siRNA sense strand
ugaaaccacugcccagagu

SEQ ID NO: 1449350 - RNA, 19 nt, Homo sapiens
  misc_RNA (1)...(19): siRNA sense strand
ccaacaugauugcauuuua

SEQ ID NO: 1449351 - RNA, 19 nt, Homo sapiens
  misc_RNA (1)...(19): siRNA sense strand
ugaaagaggaaaugagaug

SEQ ID NO: 1449352 - RNA, 19 nt, Homo sapiens
  misc_RNA (1)...(19): siRNA sense strand
ugaaagauggugaggcaaa

SEQ ID NO: 1449353 - RNA, 19 nt, Homo sapiens
  misc_RNA (1)...(19): siRNA sense strand
ucuauaaacuuuccuccau

SEQ ID NO: 1449354 - RNA, 19 nt, Homo sapiens
  misc_RNA (1)...(19): siRNA sense strand
gaagauaaagaaagcacau

SEQ ID NO: 1449355 - RNA, 19 nt, Homo sapiens
  misc_RNA (1)...(19): siRNA sense strand
ggaaaugagaugucugaag

SEQ ID NO: 1449356 - RNA, 19 nt, Homo sapiens
  misc_RNA (1)...(19): siRNA sense strand
aaaugggacuuuacaccuu

SEQ ID NO: 1449357 - RNA, 19 nt, Homo sapiens
  misc_RNA (1)...(19): siRNA sense strand
gagacauccucuauaaacu

SEQ ID NO: 1449358 - RNA, 19 nt, Homo sapiens
  misc_RNA (1)...(19): siRNA sense strand
caaaauggauauacuccuu

SEQ ID NO: 1449359 - RNA, 19 nt, Homo sapiens
  misc_RNA (1)...(19): siRNA sense strand
uaaggaaauucugcaggaa

SEQ ID NO: 1449360 - RNA, 19 nt, Homo sapiens
  misc_RNA (1)...(19): siRNA sense strand
agaagggagugucagcauu

SEQ ID NO: 1449361 - RNA, 19 nt, Homo sapiens
  misc_RNA (1)...(19): siRNA sense strand
gagaagccucuauuuauac

SEQ ID NO: 1449362 - RNA, 19 nt, Homo sapiens
  misc_RNA (1)...(19): siRNA sense strand
ccucugauguugucuugga

SEQ ID NO: 1449363 - RNA, 19 nt, Homo sapiens
  misc_RNA (1)...(19): siRNA sense strand
uagcucaacguaagcauuu

SEQ ID NO: 1449364 - RNA, 19 nt, Homo sapiens
  misc_RNA (1)...(19): siRNA sense strand
gagcaggcagggugaaaug

SEQ ID NO: 1449365 - RNA, 19 nt, Homo sapiens
  misc_RNA (1)...(19): siRNA sense strand
ggaaucacacugucagagu

SEQ ID NO: 1449366 - RNA, 19 nt, Homo sapiens
  misc_RNA (1)...(19): siRNA sense strand
cggagacauuuauggaauu

SEQ ID NO: 1449367 - RNA, 19 nt, Homo sapiens
  misc_RNA (1)...(19): siRNA sense strand
gaauugguuggagagauua

SEQ ID NO: 1449368 - RNA, 19 nt, Homo sapiens
  misc_RNA (1)...(19): siRNA sense strand
ggauauacuccuuaugaca

SEQ ID NO: 1449369 - RNA, 19 nt, Homo sapiens
  misc_RNA (1)...(19): siRNA sense strand
gaagaccuggcagaaauug

SEQ ID NO: 1449370 - RNA, 19 nt, Homo sapiens
  misc_RNA (1)...(19): siRNA sense strand
ugaaaugucuuggaaaucc

SEQ ID NO: 1449371 - RNA, 19 nt, Homo sapiens
  misc_RNA (1)...(19): siRNA sense strand
gaauuaugauaccucugau

SEQ ID NO: 1449372 - RNA, 19 nt, Homo sapiens
  misc_RNA (1)...(19): siRNA sense strand
ggcagaaauuguacagcuu

SEQ ID NO: 1449373 - RNA, 19 nt, Homo sapiens
  misc_RNA (1)...(19): siRNA sense strand
guauaugcgugccuuggau

SEQ ID NO: 1449374 - RNA, 19 nt, Homo sapiens
  misc_RNA (1)...(19): siRNA sense strand
ucagaguacuuccgugaca

SEQ ID NO: 1449375 - RNA, 19 nt, Homo sapiens
  misc_RNA (1)...(19): siRNA sense strand
ccaaaauacucgaugaaga

SEQ ID NO: 1449376 - RNA, 19 nt, Homo sapiens
  misc_RNA (1)...(19): siRNA sense strand
uauguaggauguggugaaa

SEQ ID NO: 1449377 - RNA, 19 nt, Homo sapiens
  misc_RNA (1)...(19): siRNA sense strand
aagaaagcacauuugguua

SEQ ID NO: 1449378 - RNA, 19 nt, Homo sapiens
  misc_RNA (1)...(19): siRNA sense strand
agaaagcacauuugguuau

SEQ ID NO: 1449379 - RNA, 19 nt, Homo sapiens
  misc_RNA (1)...(19): siRNA sense strand
ugccuuggaugaauacuau

SEQ ID NO: 1449380 - RNA, 19 nt, Homo sapiens
  misc_RNA (1)...(19): siRNA sense strand
gaaagaggaaaugagaugu

SEQ ID NO: 1449381 - RNA, 19 nt, Homo sapiens
  misc_RNA (1)...(19): siRNA sense strand
uagagucaauuaugaagag

SEQ ID NO: 1449382 - RNA, 19 nt, Homo sapiens
  misc_RNA (1)...(19): siRNA sense strand
agaccuggcagaaauugua

SEQ ID NO: 1449383 - RNA, 19 nt, Homo sapiens
  misc_RNA (1)...(19): siRNA sense strand
ggaauucucucuacaguga

SEQ ID NO: 1449384 - RNA, 19 nt, Homo sapiens
  misc_RNA (1)...(19): siRNA sense strand
ggaaucaccugguccuuaa

SEQ ID NO: 1449385 - RNA, 19 nt, Homo sapiens
  misc_RNA (1)...(19): siRNA sense strand
uggaggagcucguggauaa

SEQ ID NO: 1449386 - RNA, 19 nt, Homo sapiens
  misc_RNA (1)...(19): siRNA sense strand
caaugagaauguugucaaa

SEQ ID NO: 1449387 - RNA, 19 nt, Homo sapiens
  misc_RNA (1)...(19): siRNA sense strand
gggaaucaccugguccuua

SEQ ID NO: 1449388 - RNA, 19 nt, Homo sapiens
  misc_RNA (1)...(19): siRNA sense strand
acacacccauugaagaauu

SEQ ID NO: 1449389 - RNA, 19 nt, Homo sapiens
  misc_RNA (1)...(19): siRNA sense strand
ugacacacccauugaagaa

SEQ ID NO: 1449390 - RNA, 19 nt, Homo sapiens
  misc_RNA (1)...(19): siRNA sense strand
caugaacucuguguacgaa

SEQ ID NO: 1449391 - RNA, 19 nt, Homo sapiens
  misc_RNA (1)...(19): siRNA sense strand
gcgaaggcagaaaucaaua

SEQ ID NO: 1449392 - RNA, 19 nt, Homo sapiens
  misc_RNA (1)...(19): siRNA sense strand
gaugaugacgggcuacaau

SEQ ID NO: 1449393 - RNA, 19 nt, Homo sapiens
  misc_RNA (1)...(19): siRNA sense strand
caaggaaucgccgugauga

SEQ ID NO: 1449394 - RNA, 19 nt, Homo sapiens
  misc_RNA (1)...(19): siRNA sense strand
guacgaacgccaaggaauc

SEQ ID NO: 1449395 - RNA, 19 nt, Homo sapiens
  misc_RNA (1)...(19): siRNA sense strand
gaugacgggcuacaauaau

SEQ ID NO: 1449396 - RNA, 19 nt, Homo sapiens
  misc_RNA (1)...(19): siRNA sense strand
acaaugagggcuuuggauu

SEQ ID NO: 1449397 - RNA, 19 nt, Homo sapiens
  misc_RNA (1)...(19): siRNA sense strand
caaugagggcuuuggauuc

SEQ ID NO: 1449398 - RNA, 19 nt, Homo sapiens
  misc_RNA (1)...(19): siRNA sense strand
ugaugacgggcuacaauaa

SEQ ID NO: 1449399 - RNA, 19 nt, Homo sapiens
  misc_RNA (1)...(19): siRNA sense strand
ugagaauguugucaaaguc

SEQ ID NO: 1449400 - RNA, 19 nt, Homo sapiens
  misc_RNA (1)...(19): siRNA sense strand
agacggugguccugcagaa

SEQ ID NO: 1449401 - RNA, 19 nt, Homo sapiens
  misc_RNA (1)...(19): siRNA sense strand
cgacaccgccaggaagaaa

SEQ ID NO: 1449402 - RNA, 19 nt, Homo sapiens
  misc_RNA (1)...(19): siRNA sense strand
ccaaggaaucgccgugaug

SEQ ID NO: 1449403 - RNA, 19 nt, Homo sapiens
  misc_RNA (1)...(19): siRNA sense strand
acaggcagguggugaacau

SEQ ID NO: 1449404 - RNA, 19 nt, Homo sapiens
  misc_RNA (1)...(19): siRNA sense strand
gaagaauucacaccaacac

SEQ ID NO: 1449405 - RNA, 19 nt, Homo sapiens
  misc_RNA (1)...(19): siRNA sense strand
augagaauguugucaaagu

SEQ ID NO: 1449406 - RNA, 19 nt, Homo sapiens
  misc_RNA (1)...(19): siRNA sense strand
ggacuucuugauugagguu

SEQ ID NO: 1449407 - RNA, 19 nt, Homo sapiens
  misc_RNA (1)...(19): siRNA sense strand
gccaaggaaucgccgugau

SEQ ID NO: 1449408 - RNA, 19 nt, Homo sapiens
  misc_RNA (1)...(19): siRNA sense strand
gagguuaacaaugagaaug

SEQ ID NO: 1449409 - RNA, 19 nt, Homo sapiens
  misc_RNA (1)...(19): siRNA sense strand
ccggaauucucucuacagu

SEQ ID NO: 1449410 - RNA, 19 nt, Homo sapiens
  misc_RNA (1)...(19): siRNA sense strand
gugaugacgcccacuguuc

SEQ ID NO: 1449411 - RNA, 19 nt, Homo sapiens
  misc_RNA (1)...(19): siRNA sense strand
gacgacaccgccaggaaga

SEQ ID NO: 1449412 - RNA, 19 nt, Homo sapiens
  misc_RNA (1)...(19): siRNA sense strand
ggcagguggugaacaugau

SEQ ID NO: 1449413 - RNA, 19 nt, Homo sapiens
  misc_RNA (1)...(19): siRNA sense strand
gauaaacccgaggagauag

SEQ ID NO: 1449414 - RNA, 19 nt, Homo sapiens
  misc_RNA (1)...(19): siRNA sense strand
agacaugaacucuguguac

SEQ ID NO: 1449415 - RNA, 19 nt, Homo sapiens
  misc_RNA (1)...(19): siRNA sense strand
ggaggagcucguggauaaa

SEQ ID NO: 1449416 - RNA, 19 nt, Homo sapiens
  misc_RNA (1)...(19): siRNA sense strand
cgaaggcagaaaucaauag

SEQ ID NO: 1449417 - RNA, 19 nt, Homo sapiens
  misc_RNA (1)...(19): siRNA sense strand
gaggagcucguggauaaag

SEQ ID NO: 1449418 - RNA, 19 nt, Homo sapiens
  misc_RNA (1)...(19): siRNA sense strand
aaagcugacacacccauug

SEQ ID NO: 1449419 - RNA, 19 nt, Homo sapiens
  misc_RNA (1)...(19): siRNA sense strand
augacgggcuacaauaaug

SEQ ID NO: 1449420 - RNA, 19 nt, Homo sapiens
  misc_RNA (1)...(19): siRNA sense strand
caaagcugacacacccauu

SEQ ID NO: 1449421 - RNA, 19 nt, Homo sapiens
  misc_RNA (1)...(19): siRNA sense strand
gacaaugagggcuuuggau

SEQ ID NO: 1449422 - RNA, 19 nt, Homo sapiens
  misc_RNA (1)...(19): siRNA sense strand
ucacaccaacaccggcuuu

SEQ ID NO: 1449423 - RNA, 19 nt, Homo sapiens
  misc_RNA (1)...(19): siRNA sense strand
aagcugacacacccauuga

SEQ ID NO: 1449424 - RNA, 19 nt, Homo sapiens
  misc_RNA (1)...(19): siRNA sense strand
gcugacacacccauugaag

SEQ ID NO: 1449425 - RNA, 19 nt, Homo sapiens
  misc_RNA (1)...(19): siRNA sense strand
aaugagggcuuuggauucg

SEQ ID NO: 1449426 - RNA, 19 nt, Homo sapiens
  misc_RNA (1)...(19): siRNA sense strand
ggaauucucucuacaguga

SEQ ID NO: 1449427 - RNA, 19 nt, Homo sapiens
  misc_RNA (1)...(19): siRNA sense strand
ggaaucaccugguccuuaa

SEQ ID NO: 1449428 - RNA, 19 nt, Homo sapiens
  misc_RNA (1)...(19): siRNA sense strand
uggaggagcucguggauaa

SEQ ID NO: 1449429 - RNA, 19 nt, Homo sapiens
  misc_RNA (1)...(19): siRNA sense strand
caaugagaauguugucaaa

SEQ ID NO: 1449430 - RNA, 19 nt, Homo sapiens
  misc_RNA (1)...(19): siRNA sense strand
gggaaucaccugguccuua

SEQ ID NO: 1449431 - RNA, 19 nt, Homo sapiens
  misc_RNA (1)...(19): siRNA sense strand
acacacccauugaagaauu

SEQ ID NO: 1449432 - RNA, 19 nt, Homo sapiens
  misc_RNA (1)...(19): siRNA sense strand
ugacacacccauugaagaa

SEQ ID NO: 1449433 - RNA, 19 nt, Homo sapiens
  misc_RNA (1)...(19): siRNA sense strand
caugaacucuguguacgaa

SEQ ID NO: 1449434 - RNA, 19 nt, Homo sapiens
  misc_RNA (1)...(19): siRNA sense strand
gcgaaggcagaaaucaaua

SEQ ID NO: 1449435 - RNA, 19 nt, Homo sapiens
  misc_RNA (1)...(19): siRNA sense strand
gaugaugacgggcuacaau

SEQ ID NO: 1449436 - RNA, 19 nt, Homo sapiens
  misc_RNA (1)...(19): siRNA sense strand
caaggaaucgccgugauga

SEQ ID NO: 1449437 - RNA, 19 nt, Homo sapiens
  misc_RNA (1)...(19): siRNA sense strand
guacgaacgccaaggaauc

SEQ ID NO: 1449438 - RNA, 19 nt, Homo sapiens
  misc_RNA (1)...(19): siRNA sense strand
gaugacgggcuacaauaau

SEQ ID NO: 1449439 - RNA, 19 nt, Homo sapiens
  misc_RNA (1)...(19): siRNA sense strand
acaaugagggcuuuggauu

SEQ ID NO: 1449440 - RNA, 19 nt, Homo sapiens
  misc_RNA (1)...(19): siRNA sense strand
caaugagggcuuuggauuc

SEQ ID NO: 1449441 - RNA, 19 nt, Homo sapiens
  misc_RNA (1)...(19): siRNA sense strand
ugaugacgggcuacaauaa

SEQ ID NO: 1449442 - RNA, 19 nt, Homo sapiens
  misc_RNA (1)...(19): siRNA sense strand
ugagaauguugucaaaguc

SEQ ID NO: 1449443 - RNA, 19 nt, Homo sapiens
  misc_RNA (1)...(19): siRNA sense strand
agacggugguccugcagaa

SEQ ID NO: 1449444 - RNA, 19 nt, Homo sapiens
  misc_RNA (1)...(19): siRNA sense strand
cgacaccgccaggaagaaa

SEQ ID NO: 1449445 - RNA, 19 nt, Homo sapiens
  misc_RNA (1)...(19): siRNA sense strand
ccaaggaaucgccgugaug

SEQ ID NO: 1449446 - RNA, 19 nt, Homo sapiens
  misc_RNA (1)...(19): siRNA sense strand
acaggcagguggugaacau

SEQ ID NO: 1449447 - RNA, 19 nt, Homo sapiens
  misc_RNA (1)...(19): siRNA sense strand
gaagaauucacaccaacac

SEQ ID NO: 1449448 - RNA, 19 nt, Homo sapiens
  misc_RNA (1)...(19): siRNA sense strand
augagaauguugucaaagu

SEQ ID NO: 1449449 - RNA, 19 nt, Homo sapiens
  misc_RNA (1)...(19): siRNA sense strand
ggacuucuugauugagguu

SEQ ID NO: 1449450 - RNA, 19 nt, Homo sapiens
  misc_RNA (1)...(19): siRNA sense strand
gccaaggaaucgccgugau

SEQ ID NO: 1449451 - RNA, 19 nt, Homo sapiens
  misc_RNA (1)...(19): siRNA sense strand
gagguuaacaaugagaaug

SEQ ID NO: 1449452 - RNA, 19 nt, Homo sapiens
  misc_RNA (1)...(19): siRNA sense strand
ccggaauucucucuacagu

SEQ ID NO: 1449453 - RNA, 19 nt, Homo sapiens
  misc_RNA (1)...(19): siRNA sense strand
gugaugacgcccacuguuc

SEQ ID NO: 1449454 - RNA, 19 nt, Homo sapiens
  misc_RNA (1)...(19): siRNA sense strand
gacgacaccgccaggaaga

SEQ ID NO: 1449455 - RNA, 19 nt, Homo sapiens
  misc_RNA (1)...(19): siRNA sense strand
ggcagguggugaacaugau

SEQ ID NO: 1449456 - RNA, 19 nt, Homo sapiens
  misc_RNA (1)...(19): siRNA sense strand
gauaaacccgaggagauag

SEQ ID NO: 1449457 - RNA, 19 nt, Homo sapiens
  misc_RNA (1)...(19): siRNA sense strand
agacaugaacucuguguac

SEQ ID NO: 1449458 - RNA, 19 nt, Homo sapiens
  misc_RNA (1)...(19): siRNA sense strand
ggaggagcucguggauaaa

SEQ ID NO: 1449459 - RNA, 19 nt, Homo sapiens
  misc_RNA (1)...(19): siRNA sense strand
cgaaggcagaaaucaauag

SEQ ID NO: 1449460 - RNA, 19 nt, Homo sapiens
  misc_RNA (1)...(19): siRNA sense strand
gaggagcucguggauaaag

SEQ ID NO: 1449461 - RNA, 19 nt, Homo sapiens
  misc_RNA (1)...(19): siRNA sense strand
aaagcugacacacccauug

SEQ ID NO: 1449462 - RNA, 19 nt, Homo sapiens
  misc_RNA (1)...(19): siRNA sense strand
augacgggcuacaauaaug

SEQ ID NO: 1449463 - RNA, 19 nt, Homo sapiens
  misc_RNA (1)...(19): siRNA sense strand
caaagcugacacacccauu

SEQ ID NO: 1449464 - RNA, 19 nt, Homo sapiens
  misc_RNA (1)...(19): siRNA sense strand
gacaaugagggcuuuggau

SEQ ID NO: 1449465 - RNA, 19 nt, Homo sapiens
  misc_RNA (1)...(19): siRNA sense strand
ucacaccaacaccggcuuu

SEQ ID NO: 1449466 - RNA, 19 nt, Homo sapiens
  misc_RNA (1)...(19): siRNA sense strand
aagcugacacacccauuga

SEQ ID NO: 1449467 - RNA, 19 nt, Homo sapiens
  misc_RNA (1)...(19): siRNA sense strand
gcugacacacccauugaag

SEQ ID NO: 1449468 - RNA, 19 nt, Homo sapiens
  misc_RNA (1)...(19): siRNA sense strand
aaugagggcuuuggauucg

SEQ ID NO: 1449469 - RNA, 19 nt, Homo sapiens
  misc_RNA (1)...(19): siRNA sense strand
gaagaugucugcugaugau

SEQ ID NO: 1449470 - RNA, 19 nt, Homo sapiens
  misc_RNA (1)...(19): siRNA sense strand
gaaguaacaccauauauca

SEQ ID NO: 1449471 - RNA, 19 nt, Homo sapiens
  misc_RNA (1)...(19): siRNA sense strand
caagaagccaucauuagua

SEQ ID NO: 1449472 - RNA, 19 nt, Homo sapiens
  misc_RNA (1)...(19): siRNA sense strand
gaucugaccuuacauuugc

SEQ ID NO: 1449473 - RNA, 19 nt, Homo sapiens
  misc_RNA (1)...(19): siRNA sense strand
gaagaucaucccucucaaa

SEQ ID NO: 1449474 - RNA, 19 nt, Homo sapiens
  misc_RNA (1)...(19): siRNA sense strand
ucucuaggcugcauguuaa

SEQ ID NO: 1449475 - RNA, 19 nt, Homo sapiens
  misc_RNA (1)...(19): siRNA sense strand
ccauggaccugcacucuug

SEQ ID NO: 1449476 - RNA, 19 nt, Homo sapiens
  misc_RNA (1)...(19): siRNA sense strand
gaucaucccucucaaaaug

SEQ ID NO: 1449477 - RNA, 19 nt, Homo sapiens
  misc_RNA (1)...(19): siRNA sense strand
cauccgaaaucuauacuug

SEQ ID NO: 1449478 - RNA, 19 nt, Homo sapiens
  misc_RNA (1)...(19): siRNA sense strand
gaggugaggcuuacuauuc

SEQ ID NO: 1449479 - RNA, 19 nt, Homo sapiens
  misc_RNA (1)...(19): siRNA sense strand
gaagccaucauuaguauca

SEQ ID NO: 1449480 - RNA, 19 nt, Homo sapiens
  misc_RNA (1)...(19): siRNA sense strand
cugcugagcugaucaagga

SEQ ID NO: 1449481 - RNA, 19 nt, Homo sapiens
  misc_RNA (1)...(19): siRNA sense strand
cgaagccgauuguauuugu

SEQ ID NO: 1449482 - RNA, 19 nt, Homo sapiens
  misc_RNA (1)...(19): siRNA sense strand
uaucaagaagccaucauua

SEQ ID NO: 1449483 - RNA, 19 nt, Homo sapiens
  misc_RNA (1)...(19): siRNA sense strand
aagaagccaucauuaguau

SEQ ID NO: 1449484 - RNA, 19 nt, Homo sapiens
  misc_RNA (1)...(19): siRNA sense strand
ggaccaggauacuuguuca

SEQ ID NO: 1449485 - RNA, 19 nt, Homo sapiens
  misc_RNA (1)...(19): siRNA sense strand
cgagaaguaacaccauaua

SEQ ID NO: 1449486 - RNA, 19 nt, Homo sapiens
  misc_RNA (1)...(19): siRNA sense strand
gaucaaggaagucucucua

SEQ ID NO: 1449487 - RNA, 19 nt, Homo sapiens
  misc_RNA (1)...(19): siRNA sense strand
aggauuugcugcucuauga

SEQ ID NO: 1449488 - RNA, 19 nt, Homo sapiens
  misc_RNA (1)...(19): siRNA sense strand
guaacaccauauaucaaga

SEQ ID NO: 1449489 - RNA, 19 nt, Homo sapiens
  misc_RNA (1)...(19): siRNA sense strand
caaguucauccgagaagua

SEQ ID NO: 1449490 - RNA, 19 nt, Homo sapiens
  misc_RNA (1)...(19): siRNA sense strand
gagaaguaacaccauauau

SEQ ID NO: 1449491 - RNA, 19 nt, Homo sapiens
  misc_RNA (1)...(19): siRNA sense strand
guaugggacugcuuguaug

SEQ ID NO: 1449492 - RNA, 19 nt, Homo sapiens
  misc_RNA (1)...(19): siRNA sense strand
caagaggugaggcuuacua

SEQ ID NO: 1449493 - RNA, 19 nt, Homo sapiens
  misc_RNA (1)...(19): siRNA sense strand
ggaagaucaucccucucaa

SEQ ID NO: 1449494 - RNA, 19 nt, Homo sapiens
  misc_RNA (1)...(19): siRNA sense strand
ucaagaagccaucauuagu

SEQ ID NO: 1449495 - RNA, 19 nt, Homo sapiens
  misc_RNA (1)...(19): siRNA sense strand
ggcuuacuauucacuauga

SEQ ID NO: 1449496 - RNA, 19 nt, Homo sapiens
  misc_RNA (1)...(19): siRNA sense strand
agaaggauuugcugcucua

SEQ ID NO: 1449497 - RNA, 19 nt, Homo sapiens
  misc_RNA (1)...(19): siRNA sense strand
ggaucugaccuuacauuug

SEQ ID NO: 1449498 - RNA, 19 nt, Homo sapiens
  misc_RNA (1)...(19): siRNA sense strand
guccgaagccgauuguauu

SEQ ID NO: 1449499 - RNA, 19 nt, Homo sapiens
  misc_RNA (1)...(19): siRNA sense strand
ccacagcuacccacuuguu

SEQ ID NO: 1449500 - RNA, 19 nt, Homo sapiens
  misc_RNA (1)...(19): siRNA sense strand
gaggcuuacuauucacuau

SEQ ID NO: 1449501 - RNA, 19 nt, Homo sapiens
  misc_RNA (1)...(19): siRNA sense strand
cauguuaaauggccaagag

SEQ ID NO: 1449502 - RNA, 19 nt, Homo sapiens
  misc_RNA (1)...(19): siRNA sense strand
ugccacagcuacccacuug

SEQ ID NO: 1449503 - RNA, 19 nt, Homo sapiens
  misc_RNA (1)...(19): siRNA sense strand
gaagccgauuguauuugug

SEQ ID NO: 1449504 - RNA, 19 nt, Homo sapiens
  misc_RNA (1)...(19): siRNA sense strand
aaaacuagaugguggaaga

SEQ ID NO: 1449505 - RNA, 19 nt, Homo sapiens
  misc_RNA (1)...(19): siRNA sense strand
agaaguaacaccauauauc

SEQ ID NO: 1449506 - RNA, 19 nt, Homo sapiens
  misc_RNA (1)...(19): siRNA sense strand
agggagaacugaccaugga

SEQ ID NO: 1449507 - RNA, 19 nt, Homo sapiens
  misc_RNA (1)...(19): siRNA sense strand
uugaaaggcugaagauguc

SEQ ID NO: 1449508 - RNA, 19 nt, Homo sapiens
  misc_RNA (1)...(19): siRNA sense strand
ggagacacaucgggaucug

SEQ ID NO: 1449509 - RNA, 19 nt, Homo sapiens
  misc_RNA (1)...(19): siRNA sense strand
ggccaagaggugaggcuua

SEQ ID NO: 1449510 - RNA, 19 nt, Homo sapiens
  misc_RNA (1)...(19): siRNA sense strand
gaccuuacauuugcuacca

SEQ ID NO: 1449511 - RNA, 19 nt, Homo sapiens
  misc_RNA (1)...(19): siRNA sense strand
uccgagaaguaacaccaua

SEQ ID NO: 1449512 - RNA, 19 nt, Homo sapiens
  misc_RNA (1)...(19): siRNA sense strand
ucccuuggaucugaccuua

SEQ ID NO: 1449513 - RNA, 19 nt, Homo sapiens
  misc_RNA (1)...(19): siRNA sense strand
gugcuuugcugcuagaaac

SEQ ID NO: 1449514 - RNA, 19 nt, Homo sapiens
  misc_RNA (1)...(19): siRNA sense strand
gccaagaggugaggcuuac

SEQ ID NO: 1449515 - RNA, 19 nt, Homo sapiens
  misc_RNA (1)...(19): siRNA sense strand
auggagaccuguccucaug

SEQ ID NO: 1449516 - RNA, 19 nt, Homo sapiens
  misc_RNA (1)...(19): siRNA sense strand
cggccaaagucacucguau

SEQ ID NO: 1449517 - RNA, 19 nt, Homo sapiens
  misc_RNA (1)...(19): siRNA sense strand
uccgaaaucuauacuugga

SEQ ID NO: 1449518 - RNA, 19 nt, Homo sapiens
  misc_RNA (1)...(19): siRNA sense strand
ccuuggaucugaccuuaca

SEQ ID NO: 1449519 - RNA, 19 nt, Homo sapiens
  misc_RNA (1)...(19): siRNA sense strand
ucauggcugugacugagaa

SEQ ID NO: 1449520 - RNA, 19 nt, Homo sapiens
  misc_RNA (1)...(19): siRNA sense strand
gcaccaaggacaggaagau

SEQ ID NO: 1449521 - RNA, 19 nt, Homo sapiens
  misc_RNA (1)...(19): siRNA sense strand
cguaugggacugcuuguau

SEQ ID NO: 1449522 - RNA, 19 nt, Homo sapiens
  misc_RNA (1)...(19): siRNA sense strand
cugaagaugucugcugaug

SEQ ID NO: 1449523 - RNA, 19 nt, Homo sapiens
  misc_RNA (1)...(19): siRNA sense strand
caucauuaguaucagaucu

SEQ ID NO: 1449524 - RNA, 19 nt, Homo sapiens
  misc_RNA (1)...(19): siRNA sense strand
ugaagaugucugcugauga

SEQ ID NO: 1449525 - RNA, 19 nt, Homo sapiens
  misc_RNA (1)...(19): siRNA sense strand
gcugcucuaugacuguaug

SEQ ID NO: 1449526 - RNA, 19 nt, Homo sapiens
  misc_RNA (1)...(19): siRNA sense strand
gccaaagucacucguaugg

SEQ ID NO: 1449527 - RNA, 19 nt, Homo sapiens
  misc_RNA (1)...(19): siRNA sense strand
aggugaggcuuacuauuca

SEQ ID NO: 1449528 - RNA, 19 nt, Homo sapiens
  misc_RNA (1)...(19): siRNA sense strand
gguggaagacagcaaugga

SEQ ID NO: 1449529 - RNA, 19 nt, Homo sapiens
  misc_RNA (1)...(19): siRNA sense strand
gcuccagcagcauauugua

SEQ ID NO: 1449530 - RNA, 19 nt, Homo sapiens
  misc_RNA (1)...(19): siRNA sense strand
aggaagaucaucccucuca

SEQ ID NO: 1449531 - RNA, 19 nt, Homo sapiens
  misc_RNA (1)...(19): siRNA sense strand
ggccugggcaucagcauca

SEQ ID NO: 1449532 - RNA, 19 nt, Homo sapiens
  misc_RNA (1)...(19): siRNA sense strand
aaaaugugcuuugcugcua

SEQ ID NO: 1449533 - RNA, 19 nt, Homo sapiens
  misc_RNA (1)...(19): siRNA sense strand
gaugguggaagacagcaau

SEQ ID NO: 1449534 - RNA, 19 nt, Homo sapiens
  misc_RNA (1)...(19): siRNA sense strand
ggucaaguucauccgagaa

SEQ ID NO: 1449535 - RNA, 19 nt, Homo sapiens
  misc_RNA (1)...(19): siRNA sense strand
aagcaugccggaucuggaa

SEQ ID NO: 1449536 - RNA, 19 nt, Homo sapiens
  misc_RNA (1)...(19): siRNA sense strand
uuugaaaggcugaagaugu

SEQ ID NO: 1449537 - RNA, 19 nt, Homo sapiens
  misc_RNA (1)...(19): siRNA sense strand
guucauccgagaaguaaca

SEQ ID NO: 1449538 - RNA, 19 nt, Homo sapiens
  misc_RNA (1)...(19): siRNA sense strand
ggccaaagucacucguaug

SEQ ID NO: 1449539 - RNA, 19 nt, Homo sapiens
  misc_RNA (1)...(19): siRNA sense strand
uaugggacugcuuguauga

SEQ ID NO: 1449540 - RNA, 19 nt, Homo sapiens
  misc_RNA (1)...(19): siRNA sense strand
ccaaggacaggaagaucau

SEQ ID NO: 1449541 - RNA, 19 nt, Homo sapiens
  misc_RNA (1)...(19): siRNA sense strand
uaggcugcauguuaaaugg

SEQ ID NO: 1449542 - RNA, 19 nt, Homo sapiens
  misc_RNA (1)...(19): siRNA sense strand
gaaguaacaccauauauca

SEQ ID NO: 1449543 - RNA, 19 nt, Homo sapiens
  misc_RNA (1)...(19): siRNA sense strand
caagaagccaucauuagua

SEQ ID NO: 1449544 - RNA, 19 nt, Homo sapiens
  misc_RNA (1)...(19): siRNA sense strand
gaagaucaucccucucaaa

SEQ ID NO: 1449545 - RNA, 19 nt, Homo sapiens
  misc_RNA (1)...(19): siRNA sense strand
gaucaucccucucaaaaug

SEQ ID NO: 1449546 - RNA, 19 nt, Homo sapiens
  misc_RNA (1)...(19): siRNA sense strand
gaagccaucauuaguauca

SEQ ID NO: 1449547 - RNA, 19 nt, Homo sapiens
  misc_RNA (1)...(19): siRNA sense strand
uaucaagaagccaucauua

SEQ ID NO: 1449548 - RNA, 19 nt, Homo sapiens
  misc_RNA (1)...(19): siRNA sense strand
aagaagccaucauuaguau

SEQ ID NO: 1449549 - RNA, 19 nt, Homo sapiens
  misc_RNA (1)...(19): siRNA sense strand
cgagaaguaacaccauaua

SEQ ID NO: 1449550 - RNA, 19 nt, Homo sapiens
  misc_RNA (1)...(19): siRNA sense strand
guaacaccauauaucaaga

SEQ ID NO: 1449551 - RNA, 19 nt, Homo sapiens
  misc_RNA (1)...(19): siRNA sense strand
caaguucauccgagaagua

SEQ ID NO: 1449552 - RNA, 19 nt, Homo sapiens
  misc_RNA (1)...(19): siRNA sense strand
gagaaguaacaccauauau

SEQ ID NO: 1449553 - RNA, 19 nt, Homo sapiens
  misc_RNA (1)...(19): siRNA sense strand
ggaagaucaucccucucaa

SEQ ID NO: 1449554 - RNA, 19 nt, Homo sapiens
  misc_RNA (1)...(19): siRNA sense strand
ucaagaagccaucauuagu

SEQ ID NO: 1449555 - RNA, 19 nt, Homo sapiens
  misc_RNA (1)...(19): siRNA sense strand
agaaguaacaccauauauc

SEQ ID NO: 1449556 - RNA, 19 nt, Homo sapiens
  misc_RNA (1)...(19): siRNA sense strand
uccgagaaguaacaccaua

SEQ ID NO: 1449557 - RNA, 19 nt, Homo sapiens
  misc_RNA (1)...(19): siRNA sense strand
gugcuuugcugcuagaaac

SEQ ID NO: 1449558 - RNA, 19 nt, Homo sapiens
  misc_RNA (1)...(19): siRNA sense strand
gcaccaaggacaggaagau

SEQ ID NO: 1449559 - RNA, 19 nt, Homo sapiens
  misc_RNA (1)...(19): siRNA sense strand
caucauuaguaucagaucu

SEQ ID NO: 1449560 - RNA, 19 nt, Homo sapiens
  misc_RNA (1)...(19): siRNA sense strand
ggccugggcaucagcauca

SEQ ID NO: 1449561 - RNA, 19 nt, Homo sapiens
  misc_RNA (1)...(19): siRNA sense strand
aaaaugugcuuugcugcua

SEQ ID NO: 1449562 - RNA, 19 nt, Homo sapiens
  misc_RNA (1)...(19): siRNA sense strand
aggaagaucaucccucuca

SEQ ID NO: 1449563 - RNA, 19 nt, Homo sapiens
  misc_RNA (1)...(19): siRNA sense strand
ggucaaguucauccgagaa

SEQ ID NO: 1449564 - RNA, 19 nt, Homo sapiens
  misc_RNA (1)...(19): siRNA sense strand
guucauccgagaaguaaca

SEQ ID NO: 1449565 - RNA, 19 nt, Homo sapiens
  misc_RNA (1)...(19): siRNA sense strand
aagcaugccggaucuggaa

SEQ ID NO: 1449566 - RNA, 19 nt, Homo sapiens
  misc_RNA (1)...(19): siRNA sense strand
ccaaggacaggaagaucau

SEQ ID NO: 1449567 - RNA, 19 nt, Homo sapiens
  misc_RNA (1)...(19): siRNA sense strand
ggaccaagcugaagaaggu

SEQ ID NO: 1449568 - RNA, 19 nt, Homo sapiens
  misc_RNA (1)...(19): siRNA sense strand
caagggaggucucuuccaa

SEQ ID NO: 1449569 - RNA, 19 nt, Homo sapiens
  misc_RNA (1)...(19): siRNA sense strand
cagagaaccuagcugguaa

SEQ ID NO: 1449570 - RNA, 19 nt, Homo sapiens
  misc_RNA (1)...(19): siRNA sense strand
agacacaauucuuugcaua

SEQ ID NO: 1449571 - RNA, 19 nt, Homo sapiens
  misc_RNA (1)...(19): siRNA sense strand
gagauucuaucaccacugu

SEQ ID NO: 1449572 - RNA, 19 nt, Homo sapiens
  misc_RNA (1)...(19): siRNA sense strand
gcaaagggaccaagcugaa

SEQ ID NO: 1449573 - RNA, 19 nt, Homo sapiens
  misc_RNA (1)...(19): siRNA sense strand
ugaagaaggugaccaacau

SEQ ID NO: 1449574 - RNA, 19 nt, Homo sapiens
  misc_RNA (1)...(19): siRNA sense strand
gaaggugaccaacauuaau

SEQ ID NO: 1449575 - RNA, 19 nt, Homo sapiens
  misc_RNA (1)...(19): siRNA sense strand
gaagaaggugaccaacauu

SEQ ID NO: 1449576 - RNA, 19 nt, Homo sapiens
  misc_RNA (1)...(19): siRNA sense strand
ggucuuucuuggaugauuu

SEQ ID NO: 1449577 - RNA, 19 nt, Homo sapiens
  misc_RNA (1)...(19): siRNA sense strand
ccuaauaccaccagcagua

SEQ ID NO: 1449578 - RNA, 19 nt, Homo sapiens
  misc_RNA (1)...(19): siRNA sense strand
ccacagagacacaauucuu

SEQ ID NO: 1449579 - RNA, 19 nt, Homo sapiens
  misc_RNA (1)...(19): siRNA sense strand
ucagagaaccuagcuggua

SEQ ID NO: 1449580 - RNA, 19 nt, Homo sapiens
  misc_RNA (1)...(19): siRNA sense strand
ccacaccucugccuaugca

SEQ ID NO: 1449581 - RNA, 19 nt, Homo sapiens
  misc_RNA (1)...(19): siRNA sense strand
uaaacacuuucagaggaua

SEQ ID NO: 1449582 - RNA, 19 nt, Homo sapiens
  misc_RNA (1)...(19): siRNA sense strand
acaauucuuugcauaggaa

SEQ ID NO: 1449583 - RNA, 19 nt, Homo sapiens
  misc_RNA (1)...(19): siRNA sense strand
aagaaggugaccaacauua

SEQ ID NO: 1449584 - RNA, 19 nt, Homo sapiens
  misc_RNA (1)...(19): siRNA sense strand
agacuuuccugcuccagaa

SEQ ID NO: 1449585 - RNA, 19 nt, Homo sapiens
  misc_RNA (1)...(19): siRNA sense strand
ggaccucucucggccuaau

SEQ ID NO: 1449586 - RNA, 19 nt, Homo sapiens
  misc_RNA (1)...(19): siRNA sense strand
agaaggugaccaacauuaa

SEQ ID NO: 1449587 - RNA, 19 nt, Homo sapiens
  misc_RNA (1)...(19): siRNA sense strand
gagacacaauucuuugcau

SEQ ID NO: 1449588 - RNA, 19 nt, Homo sapiens
  misc_RNA (1)...(19): siRNA sense strand
ccaaggaugguucagagaa

SEQ ID NO: 1449589 - RNA, 19 nt, Homo sapiens
  misc_RNA (1)...(19): siRNA sense strand
ccacauuucaucaggcaaa

SEQ ID NO: 1449590 - RNA, 19 nt, Homo sapiens
  misc_RNA (1)...(19): siRNA sense strand
cacagagacacaauucuuu

SEQ ID NO: 1449591 - RNA, 19 nt, Homo sapiens
  misc_RNA (1)...(19): siRNA sense strand
ccagaagaauauaaacacu

SEQ ID NO: 1449592 - RNA, 19 nt, Homo sapiens
  misc_RNA (1)...(19): siRNA sense strand
cccaaggccuccaguaucu

SEQ ID NO: 1449593 - RNA, 19 nt, Homo sapiens
  misc_RNA (1)...(19): siRNA sense strand
ucaccacuguccggucuuu

SEQ ID NO: 1449594 - RNA, 19 nt, Homo sapiens
  misc_RNA (1)...(19): siRNA sense strand
uaucagaacaggaccaagu

SEQ ID NO: 1449595 - RNA, 19 nt, Homo sapiens
  misc_RNA (1)...(19): siRNA sense strand
ccugaggaauggccacaga

SEQ ID NO: 1449596 - RNA, 19 nt, Homo sapiens
  misc_RNA (1)...(19): siRNA sense strand
caccaccugugauccgaaa

SEQ ID NO: 1449597 - RNA, 19 nt, Homo sapiens
  misc_RNA (1)...(19): siRNA sense strand
gcaguacgggcaugaagca

SEQ ID NO: 1449598 - RNA, 19 nt, Homo sapiens
  misc_RNA (1)...(19): siRNA sense strand
acagagacacaauucuuug

SEQ ID NO: 1449599 - RNA, 19 nt, Homo sapiens
  misc_RNA (1)...(19): siRNA sense strand
auaaacacuuucagaggau

SEQ ID NO: 1449600 - RNA, 19 nt, Homo sapiens
  misc_RNA (1)...(19): siRNA sense strand
aggaauggccacagagauu

SEQ ID NO: 1449601 - RNA, 19 nt, Homo sapiens
  misc_RNA (1)...(19): siRNA sense strand
ccgaaugcaugggucagaa

SEQ ID NO: 1449602 - RNA, 19 nt, Homo sapiens
  misc_RNA (1)...(19): siRNA sense strand
cacaauucuuugcauagga

SEQ ID NO: 1449603 - RNA, 19 nt, Homo sapiens
  misc_RNA (1)...(19): siRNA sense strand
gguaagccagcccugcaaa

SEQ ID NO: 1449604 - RNA, 19 nt, Homo sapiens
  misc_RNA (1)...(19): siRNA sense strand
gucaaaguauuccuuccau

SEQ ID NO: 1449605 - RNA, 19 nt, Homo sapiens
  misc_RNA (1)...(19): siRNA sense strand
acacagagcagcccaagcu

SEQ ID NO: 1449606 - RNA, 19 nt, Homo sapiens
  misc_RNA (1)...(19): siRNA sense strand
ggccacagagauucuauca

SEQ ID NO: 1449607 - RNA, 19 nt, Homo sapiens
  misc_RNA (1)...(19): siRNA sense strand
gugcucccauccucgagaa

SEQ ID NO: 1449608 - RNA, 19 nt, Homo sapiens
  misc_RNA (1)...(19): siRNA sense strand
aaagggaccaagcugaaga

SEQ ID NO: 1449609 - RNA, 19 nt, Homo sapiens
  misc_RNA (1)...(19): siRNA sense strand
aggaagcagugguggcuau

SEQ ID NO: 1449610 - RNA, 19 nt, Homo sapiens
  misc_RNA (1)...(19): siRNA sense strand
gagccaaggaugguucaga

SEQ ID NO: 1449611 - RNA, 19 nt, Homo sapiens
  misc_RNA (1)...(19): siRNA sense strand
gaggaauggccacagagau

SEQ ID NO: 1449612 - RNA, 19 nt, Homo sapiens
  misc_RNA (1)...(19): siRNA sense strand
gacacaauucuuugcauag

SEQ ID NO: 1449613 - RNA, 19 nt, Homo sapiens
  misc_RNA (1)...(19): siRNA sense strand
gggccucacucccagaacu

SEQ ID NO: 1449614 - RNA, 19 nt, Homo sapiens
  misc_RNA (1)...(19): siRNA sense strand
acacaauucuuugcauagg

SEQ ID NO: 1449615 - RNA, 19 nt, Homo sapiens
  misc_RNA (1)...(19): siRNA sense strand
uuacaggacauuugcaaag

SEQ ID NO: 1449616 - RNA, 19 nt, Homo sapiens
  misc_RNA (1)...(19): siRNA sense strand
guaagccagcccugcaaau

SEQ ID NO: 1449617 - RNA, 19 nt, Homo sapiens
  misc_RNA (1)...(19): siRNA sense strand
gcccaagggaggucucuuc

SEQ ID NO: 1449618 - RNA, 19 nt, Homo sapiens
  misc_RNA (1)...(19): siRNA sense strand
uaagccagcccugcaaauc

SEQ ID NO: 1449619 - RNA, 19 nt, Homo sapiens
  misc_RNA (1)...(19): siRNA sense strand
uguccggucuuucuuggau

SEQ ID NO: 1449620 - RNA, 19 nt, Homo sapiens
  misc_RNA (1)...(19): siRNA sense strand
ugaggaauggccacagaga

SEQ ID NO: 1449621 - RNA, 19 nt, Homo sapiens
  misc_RNA (1)...(19): siRNA sense strand
gaccucucucggccuaaua

SEQ ID NO: 1449622 - RNA, 19 nt, Homo sapiens
  misc_RNA (1)...(19): siRNA sense strand
ccaccugugauccgaaaug

SEQ ID NO: 1449623 - RNA, 19 nt, Homo sapiens
  misc_RNA (1)...(19): siRNA sense strand
ccaccgacgccuggacaaa

SEQ ID NO: 1449624 - RNA, 19 nt, Homo sapiens
  misc_RNA (1)...(19): siRNA sense strand
aaggugaccaacauuaaug

SEQ ID NO: 1449625 - RNA, 19 nt, Homo sapiens
  misc_RNA (1)...(19): siRNA sense strand
uuccuuccauccaguagaa

SEQ ID NO: 1449626 - RNA, 19 nt, Homo sapiens
  misc_RNA (1)...(19): siRNA sense strand
ccaccaccauaccgaaugc

SEQ ID NO: 1449627 - RNA, 19 nt, Homo sapiens
  misc_RNA (1)...(19): siRNA sense strand
gcauugaacuuuacuuuga

SEQ ID NO: 1449628 - RNA, 19 nt, Homo sapiens
  misc_RNA (1)...(19): siRNA sense strand
gacagugcauugaacuuua

SEQ ID NO: 1449629 - RNA, 19 nt, Homo sapiens
  misc_RNA (1)...(19): siRNA sense strand
gcagagggagguaucuuua

SEQ ID NO: 1449630 - RNA, 19 nt, Homo sapiens
  misc_RNA (1)...(19): siRNA sense strand
ggaaugcaucuacaucaua

SEQ ID NO: 1449631 - RNA, 19 nt, Homo sapiens
  misc_RNA (1)...(19): siRNA sense strand
gaaugcaucuacaucauag

SEQ ID NO: 1449632 - RNA, 19 nt, Homo sapiens
  misc_RNA (1)...(19): siRNA sense strand
ggaagauuucuauggauua

SEQ ID NO: 1449633 - RNA, 19 nt, Homo sapiens
  misc_RNA (1)...(19): siRNA sense strand
gcaaaccaccucagaaaca

SEQ ID NO: 1449634 - RNA, 19 nt, Homo sapiens
  misc_RNA (1)...(19): siRNA sense strand
cauagaagccgcuccaaga

SEQ ID NO: 1449635 - RNA, 19 nt, Homo sapiens
  misc_RNA (1)...(19): siRNA sense strand
gagugcaaauuugaucaua

SEQ ID NO: 1449636 - RNA, 19 nt, Homo sapiens
  misc_RNA (1)...(19): siRNA sense strand
gaugaaaaguacucuauug

SEQ ID NO: 1449637 - RNA, 19 nt, Homo sapiens
  misc_RNA (1)...(19): siRNA sense strand
ccaacuaucccagcaagua

SEQ ID NO: 1449638 - RNA, 19 nt, Homo sapiens
  misc_RNA (1)...(19): siRNA sense strand
auggagagcuggaaucuau

SEQ ID NO: 1449639 - RNA, 19 nt, Homo sapiens
  misc_RNA (1)...(19): siRNA sense strand
uggaagauuucuauggauu

SEQ ID NO: 1449640 - RNA, 19 nt, Homo sapiens
  misc_RNA (1)...(19): siRNA sense strand
gaaaaguacucuauugaac

SEQ ID NO: 1449641 - RNA, 19 nt, Homo sapiens
  misc_RNA (1)...(19): siRNA sense strand
gggaaugcaucuacaucau

SEQ ID NO: 1449642 - RNA, 19 nt, Homo sapiens
  misc_RNA (1)...(19): siRNA sense strand
aagcaaaccaccucagaaa

SEQ ID NO: 1449643 - RNA, 19 nt, Homo sapiens
  misc_RNA (1)...(19): siRNA sense strand
gaaaggaacagaaaagcaa

SEQ ID NO: 1449644 - RNA, 19 nt, Homo sapiens
  misc_RNA (1)...(19): siRNA sense strand
guuuaaucauccuccauuu

SEQ ID NO: 1449645 - RNA, 19 nt, Homo sapiens
  misc_RNA (1)...(19): siRNA sense strand
gugcauugaacuuuacuuu

SEQ ID NO: 1449646 - RNA, 19 nt, Homo sapiens
  misc_RNA (1)...(19): siRNA sense strand
caacuaucccagcaaguau

SEQ ID NO: 1449647 - RNA, 19 nt, Homo sapiens
  misc_RNA (1)...(19): siRNA sense strand
ccaagacagugcauugaac

SEQ ID NO: 1449648 - RNA, 19 nt, Homo sapiens
  misc_RNA (1)...(19): siRNA sense strand
gcuccaagacagugcauug

SEQ ID NO: 1449649 - RNA, 19 nt, Homo sapiens
  misc_RNA (1)...(19): siRNA sense strand
agacagugcauugaacuuu

SEQ ID NO: 1449650 - RNA, 19 nt, Homo sapiens
  misc_RNA (1)...(19): siRNA sense strand
aguggaagauuucuaugga

SEQ ID NO: 1449651 - RNA, 19 nt, Homo sapiens
  misc_RNA (1)...(19): siRNA sense strand
ggacguuucuguggacaac

SEQ ID NO: 1449652 - RNA, 19 nt, Homo sapiens
  misc_RNA (1)...(19): siRNA sense strand
uuaaucauccuccauuugu

SEQ ID NO: 1449653 - RNA, 19 nt, Homo sapiens
  misc_RNA (1)...(19): siRNA sense strand
ucagcucgauacaauuuca

SEQ ID NO: 1449654 - RNA, 19 nt, Homo sapiens
  misc_RNA (1)...(19): siRNA sense strand
gaccgggaaugcaucuaca

SEQ ID NO: 1449655 - RNA, 19 nt, Homo sapiens
  misc_RNA (1)...(19): siRNA sense strand
uguagcaaguuuaaucauc

SEQ ID NO: 1449656 - RNA, 19 nt, Homo sapiens
  misc_RNA (1)...(19): siRNA sense strand
uauugaaguucgagaugga

SEQ ID NO: 1449657 - RNA, 19 nt, Homo sapiens
  misc_RNA (1)...(19): siRNA sense strand
cagaaacacagaagucagu

SEQ ID NO: 1449658 - RNA, 19 nt, Homo sapiens
  misc_RNA (1)...(19): siRNA sense strand
uuucagcucgauacaauuu

SEQ ID NO: 1449659 - RNA, 19 nt, Homo sapiens
  misc_RNA (1)...(19): siRNA sense strand
aaagcaaaccaccucagaa

SEQ ID NO: 1449660 - RNA, 19 nt, Homo sapiens
  misc_RNA (1)...(19): siRNA sense strand
guggaagauuucuauggau

SEQ ID NO: 1449661 - RNA, 19 nt, Homo sapiens
  misc_RNA (1)...(19): siRNA sense strand
caaaauccaccugucauaa

SEQ ID NO: 1449662 - RNA, 19 nt, Homo sapiens
  misc_RNA (1)...(19): siRNA sense strand
ggagagcuggaaucuaugg

SEQ ID NO: 1449663 - RNA, 19 nt, Homo sapiens
  misc_RNA (1)...(19): siRNA sense strand
caaaccaccucagaaacac

SEQ ID NO: 1449664 - RNA, 19 nt, Homo sapiens
  misc_RNA (1)...(19): siRNA sense strand
ucagugcaguguggaacuu

SEQ ID NO: 1449665 - RNA, 19 nt, Homo sapiens
  misc_RNA (1)...(19): siRNA sense strand
aaauccaccugucauaaaa

SEQ ID NO: 1449666 - RNA, 19 nt, Homo sapiens
  misc_RNA (1)...(19): siRNA sense strand
caacaaaauccaccuguca

SEQ ID NO: 1449667 - RNA, 19 nt, Homo sapiens
  misc_RNA (1)...(19): siRNA sense strand
agauggaccuuuuggcuuu

SEQ ID NO: 1449668 - RNA, 19 nt, Homo sapiens
  misc_RNA (1)...(19): siRNA sense strand
caaccaagaaaggaacaga

SEQ ID NO: 1449669 - RNA, 19 nt, Homo sapiens
  misc_RNA (1)...(19): siRNA sense strand
cauauugaaguucgagaug

SEQ ID NO: 1449670 - RNA, 19 nt, Homo sapiens
  misc_RNA (1)...(19): siRNA sense strand
cuuuaccucucccaacuau

SEQ ID NO: 1449671 - RNA, 19 nt, Homo sapiens
  misc_RNA (1)...(19): siRNA sense strand
ggagugcaaauuugaucau

SEQ ID NO: 1449672 - RNA, 19 nt, Homo sapiens
  misc_RNA (1)...(19): siRNA sense strand
gauggagagcuggaaucua

SEQ ID NO: 1449673 - RNA, 19 nt, Homo sapiens
  misc_RNA (1)...(19): siRNA sense strand
ucuugggagugcaaauuug

SEQ ID NO: 1449674 - RNA, 19 nt, Homo sapiens
  misc_RNA (1)...(19): siRNA sense strand
gaaguucgagauggaccuu

SEQ ID NO: 1449675 - RNA, 19 nt, Homo sapiens
  misc_RNA (1)...(19): siRNA sense strand
caagacagugcauugaacu

SEQ ID NO: 1449676 - RNA, 19 nt, Homo sapiens
  misc_RNA (1)...(19): siRNA sense strand
uggcuuuucuccaauaauu

SEQ ID NO: 1449677 - RNA, 19 nt, Homo sapiens
  misc_RNA (1)...(19): siRNA sense strand
acagugcauugaacuuuac

SEQ ID NO: 1449678 - RNA, 19 nt, Homo sapiens
  misc_RNA (1)...(19): siRNA sense strand
ccucagaaacacagaaguc

SEQ ID NO: 1449679 - RNA, 19 nt, Homo sapiens
  misc_RNA (1)...(19): siRNA sense strand
uaaucauccuccauuuguc

SEQ ID NO: 1449680 - RNA, 19 nt, Homo sapiens
  misc_RNA (1)...(19): siRNA sense strand
gcauugaacuuuacuuuga

SEQ ID NO: 1449681 - RNA, 19 nt, Homo sapiens
  misc_RNA (1)...(19): siRNA sense strand
gacagugcauugaacuuua

SEQ ID NO: 1449682 - RNA, 19 nt, Homo sapiens
  misc_RNA (1)...(19): siRNA sense strand
gcagagggagguaucuuua

SEQ ID NO: 1449683 - RNA, 19 nt, Homo sapiens
  misc_RNA (1)...(19): siRNA sense strand
ggaaugcaucuacaucaua

SEQ ID NO: 1449684 - RNA, 19 nt, Homo sapiens
  misc_RNA (1)...(19): siRNA sense strand
gaaugcaucuacaucauag

SEQ ID NO: 1449685 - RNA, 19 nt, Homo sapiens
  misc_RNA (1)...(19): siRNA sense strand
ggaagauuucuauggauua

SEQ ID NO: 1449686 - RNA, 19 nt, Homo sapiens
  misc_RNA (1)...(19): siRNA sense strand
gcaaaccaccucagaaaca

SEQ ID NO: 1449687 - RNA, 19 nt, Homo sapiens
  misc_RNA (1)...(19): siRNA sense strand
cauagaagccgcuccaaga

SEQ ID NO: 1449688 - RNA, 19 nt, Homo sapiens
  misc_RNA (1)...(19): siRNA sense strand
gagugcaaauuugaucaua

SEQ ID NO: 1449689 - RNA, 19 nt, Homo sapiens
  misc_RNA (1)...(19): siRNA sense strand
gaugaaaaguacucuauug

SEQ ID NO: 1449690 - RNA, 19 nt, Homo sapiens
  misc_RNA (1)...(19): siRNA sense strand
ccaacuaucccagcaagua

SEQ ID NO: 1449691 - RNA, 19 nt, Homo sapiens
  misc_RNA (1)...(19): siRNA sense strand
auggagagcuggaaucuau

SEQ ID NO: 1449692 - RNA, 19 nt, Homo sapiens
  misc_RNA (1)...(19): siRNA sense strand
uggaagauuucuauggauu

SEQ ID NO: 1449693 - RNA, 19 nt, Homo sapiens
  misc_RNA (1)...(19): siRNA sense strand
gaaaaguacucuauugaac

SEQ ID NO: 1449694 - RNA, 19 nt, Homo sapiens
  misc_RNA (1)...(19): siRNA sense strand
gggaaugcaucuacaucau

SEQ ID NO: 1449695 - RNA, 19 nt, Homo sapiens
  misc_RNA (1)...(19): siRNA sense strand
aagcaaaccaccucagaaa

SEQ ID NO: 1449696 - RNA, 19 nt, Homo sapiens
  misc_RNA (1)...(19): siRNA sense strand
gaaaggaacagaaaagcaa

SEQ ID NO: 1449697 - RNA, 19 nt, Homo sapiens
  misc_RNA (1)...(19): siRNA sense strand
guuuaaucauccuccauuu

SEQ ID NO: 1449698 - RNA, 19 nt, Homo sapiens
  misc_RNA (1)...(19): siRNA sense strand
gugcauugaacuuuacuuu

SEQ ID NO: 1449699 - RNA, 19 nt, Homo sapiens
  misc_RNA (1)...(19): siRNA sense strand
caacuaucccagcaaguau

SEQ ID NO: 1449700 - RNA, 19 nt, Homo sapiens
  misc_RNA (1)...(19): siRNA sense strand
ccaagacagugcauugaac

SEQ ID NO: 1449701 - RNA, 19 nt, Homo sapiens
  misc_RNA (1)...(19): siRNA sense strand
gcuccaagacagugcauug

SEQ ID NO: 1449702 - RNA, 19 nt, Homo sapiens
  misc_RNA (1)...(19): siRNA sense strand
agacagugcauugaacuuu

SEQ ID NO: 1449703 - RNA, 19 nt, Homo sapiens
  misc_RNA (1)...(19): siRNA sense strand
aguggaagauuucuaugga

SEQ ID NO: 1449704 - RNA, 19 nt, Homo sapiens
  misc_RNA (1)...(19): siRNA sense strand
ggacguuucuguggacaac

SEQ ID NO: 1449705 - RNA, 19 nt, Homo sapiens
  misc_RNA (1)...(19): siRNA sense strand
uuaaucauccuccauuugu

SEQ ID NO: 1449706 - RNA, 19 nt, Homo sapiens
  misc_RNA (1)...(19): siRNA sense strand
ucagcucgauacaauuuca

SEQ ID NO: 1449707 - RNA, 19 nt, Homo sapiens
  misc_RNA (1)...(19): siRNA sense strand
gaccgggaaugcaucuaca

SEQ ID NO: 1449708 - RNA, 19 nt, Homo sapiens
  misc_RNA (1)...(19): siRNA sense strand
uguagcaaguuuaaucauc

SEQ ID NO: 1449709 - RNA, 19 nt, Homo sapiens
  misc_RNA (1)...(19): siRNA sense strand
uauugaaguucgagaugga

SEQ ID NO: 1449710 - RNA, 19 nt, Homo sapiens
  misc_RNA (1)...(19): siRNA sense strand
cagaaacacagaagucagu

SEQ ID NO: 1449711 - RNA, 19 nt, Homo sapiens
  misc_RNA (1)...(19): siRNA sense strand
uuucagcucgauacaauuu

SEQ ID NO: 1449712 - RNA, 19 nt, Homo sapiens
  misc_RNA (1)...(19): siRNA sense strand
aaagcaaaccaccucagaa

SEQ ID NO: 1449713 - RNA, 19 nt, Homo sapiens
  misc_RNA (1)...(19): siRNA sense strand
guggaagauuucuauggau

SEQ ID NO: 1449714 - RNA, 19 nt, Homo sapiens
  misc_RNA (1)...(19): siRNA sense strand
caaaauccaccugucauaa

SEQ ID NO: 1449715 - RNA, 19 nt, Homo sapiens
  misc_RNA (1)...(19): siRNA sense strand
ggagagcuggaaucuaugg

SEQ ID NO: 1449716 - RNA, 19 nt, Homo sapiens
  misc_RNA (1)...(19): siRNA sense strand
caaaccaccucagaaacac

SEQ ID NO: 1449717 - RNA, 19 nt, Homo sapiens
  misc_RNA (1)...(19): siRNA sense strand
ucagugcaguguggaacuu

SEQ ID NO: 1449718 - RNA, 19 nt, Homo sapiens
  misc_RNA (1)...(19): siRNA sense strand
aaauccaccugucauaaaa

SEQ ID NO: 1449719 - RNA, 19 nt, Homo sapiens
  misc_RNA (1)...(19): siRNA sense strand
caacaaaauccaccuguca

SEQ ID NO: 1449720 - RNA, 19 nt, Homo sapiens
  misc_RNA (1)...(19): siRNA sense strand
agauggaccuuuuggcuuu

SEQ ID NO: 1449721 - RNA, 19 nt, Homo sapiens
  misc_RNA (1)...(19): siRNA sense strand
caaccaagaaaggaacaga

SEQ ID NO: 1449722 - RNA, 19 nt, Homo sapiens
  misc_RNA (1)...(19): siRNA sense strand
cauauugaaguucgagaug

SEQ ID NO: 1449723 - RNA, 19 nt, Homo sapiens
  misc_RNA (1)...(19): siRNA sense strand
cuuuaccucucccaacuau

SEQ ID NO: 1449724 - RNA, 19 nt, Homo sapiens
  misc_RNA (1)...(19): siRNA sense strand
ggagugcaaauuugaucau

SEQ ID NO: 1449725 - RNA, 19 nt, Homo sapiens
  misc_RNA (1)...(19): siRNA sense strand
gauggagagcuggaaucua

SEQ ID NO: 1449726 - RNA, 19 nt, Homo sapiens
  misc_RNA (1)...(19): siRNA sense strand
ucuugggagugcaaauuug

SEQ ID NO: 1449727 - RNA, 19 nt, Homo sapiens
  misc_RNA (1)...(19): siRNA sense strand
gaaguucgagauggaccuu

SEQ ID NO: 1449728 - RNA, 19 nt, Homo sapiens
  misc_RNA (1)...(19): siRNA sense strand
caagacagugcauugaacu

SEQ ID NO: 1449729 - RNA, 19 nt, Homo sapiens
  misc_RNA (1)...(19): siRNA sense strand
uggcuuuucuccaauaauu

SEQ ID NO: 1449730 - RNA, 19 nt, Homo sapiens
  misc_RNA (1)...(19): siRNA sense strand
acagugcauugaacuuuac

SEQ ID NO: 1449731 - RNA, 19 nt, Homo sapiens
  misc_RNA (1)...(19): siRNA sense strand
ccucagaaacacagaaguc

SEQ ID NO: 1449732 - RNA, 19 nt, Homo sapiens
  misc_RNA (1)...(19): siRNA sense strand
uaaucauccuccauuuguc

SEQ ID NO: 1449733 - RNA, 19 nt, Homo sapiens
  misc_RNA (1)...(19): siRNA sense strand
gcauugaacuuuacuuuga

SEQ ID NO: 1449734 - RNA, 19 nt, Homo sapiens
  misc_RNA (1)...(19): siRNA sense strand
gacagugcauugaacuuua

SEQ ID NO: 1449735 - RNA, 19 nt, Homo sapiens
  misc_RNA (1)...(19): siRNA sense strand
gcagagggagguaucuuua

SEQ ID NO: 1449736 - RNA, 19 nt, Homo sapiens
  misc_RNA (1)...(19): siRNA sense strand
ggaaugcaucuacaucaua

SEQ ID NO: 1449737 - RNA, 19 nt, Homo sapiens
  misc_RNA (1)...(19): siRNA sense strand
gaaugcaucuacaucauag

SEQ ID NO: 1449738 - RNA, 19 nt, Homo sapiens
  misc_RNA (1)...(19): siRNA sense strand
ggaagauuucuauggauua

SEQ ID NO: 1449739 - RNA, 19 nt, Homo sapiens
  misc_RNA (1)...(19): siRNA sense strand
gcaaaccaccucagaaaca

SEQ ID NO: 1449740 - RNA, 19 nt, Homo sapiens
  misc_RNA (1)...(19): siRNA sense strand
cauagaagccgcuccaaga

SEQ ID NO: 1449741 - RNA, 19 nt, Homo sapiens
  misc_RNA (1)...(19): siRNA sense strand
gagugcaaauuugaucaua

SEQ ID NO: 1449742 - RNA, 19 nt, Homo sapiens
  misc_RNA (1)...(19): siRNA sense strand
gaugaaaaguacucuauug

SEQ ID NO: 1449743 - RNA, 19 nt, Homo sapiens
  misc_RNA (1)...(19): siRNA sense strand
ccaacuaucccagcaagua

SEQ ID NO: 1449744 - RNA, 19 nt, Homo sapiens
  misc_RNA (1)...(19): siRNA sense strand
auggagagcuggaaucuau

SEQ ID NO: 1449745 - RNA, 19 nt, Homo sapiens
  misc_RNA (1)...(19): siRNA sense strand
uggaagauuucuauggauu

SEQ ID NO: 1449746 - RNA, 19 nt, Homo sapiens
  misc_RNA (1)...(19): siRNA sense strand
gaaaaguacucuauugaac

SEQ ID NO: 1449747 - RNA, 19 nt, Homo sapiens
  misc_RNA (1)...(19): siRNA sense strand
gggaaugcaucuacaucau

SEQ ID NO: 1449748 - RNA, 19 nt, Homo sapiens
  misc_RNA (1)...(19): siRNA sense strand
aagcaaaccaccucagaaa

SEQ ID NO: 1449749 - RNA, 19 nt, Homo sapiens
  misc_RNA (1)...(19): siRNA sense strand
gaaaggaacagaaaagcaa

SEQ ID NO: 1449750 - RNA, 19 nt, Homo sapiens
  misc_RNA (1)...(19): siRNA sense strand
guuuaaucauccuccauuu

SEQ ID NO: 1449751 - RNA, 19 nt, Homo sapiens
  misc_RNA (1)...(19): siRNA sense strand
gugcauugaacuuuacuuu

SEQ ID NO: 1449752 - RNA, 19 nt, Homo sapiens
  misc_RNA (1)...(19): siRNA sense strand
caacuaucccagcaaguau

SEQ ID NO: 1449753 - RNA, 19 nt, Homo sapiens
  misc_RNA (1)...(19): siRNA sense strand
ccaagacagugcauugaac

SEQ ID NO: 1449754 - RNA, 19 nt, Homo sapiens
  misc_RNA (1)...(19): siRNA sense strand
gcuccaagacagugcauug

SEQ ID NO: 1449755 - RNA, 19 nt, Homo sapiens
  misc_RNA (1)...(19): siRNA sense strand
agacagugcauugaacuuu

SEQ ID NO: 1449756 - RNA, 19 nt, Homo sapiens
  misc_RNA (1)...(19): siRNA sense strand
aguggaagauuucuaugga

SEQ ID NO: 1449757 - RNA, 19 nt, Homo sapiens
  misc_RNA (1)...(19): siRNA sense strand
ggacguuucuguggacaac

SEQ ID NO: 1449758 - RNA, 19 nt, Homo sapiens
  misc_RNA (1)...(19): siRNA sense strand
uuaaucauccuccauuugu

SEQ ID NO: 1449759 - RNA, 19 nt, Homo sapiens
  misc_RNA (1)...(19): siRNA sense strand
ucagcucgauacaauuuca

SEQ ID NO: 1449760 - RNA, 19 nt, Homo sapiens
  misc_RNA (1)...(19): siRNA sense strand
gaccgggaaugcaucuaca

SEQ ID NO: 1449761 - RNA, 19 nt, Homo sapiens
  misc_RNA (1)...(19): siRNA sense strand
uguagcaaguuuaaucauc

SEQ ID NO: 1449762 - RNA, 19 nt, Homo sapiens
  misc_RNA (1)...(19): siRNA sense strand
uauugaaguucgagaugga

SEQ ID NO: 1449763 - RNA, 19 nt, Homo sapiens
  misc_RNA (1)...(19): siRNA sense strand
cagaaacacagaagucagu

SEQ ID NO: 1449764 - RNA, 19 nt, Homo sapiens
  misc_RNA (1)...(19): siRNA sense strand
uuucagcucgauacaauuu

SEQ ID NO: 1449765 - RNA, 19 nt, Homo sapiens
  misc_RNA (1)...(19): siRNA sense strand
aaagcaaaccaccucagaa

SEQ ID NO: 1449766 - RNA, 19 nt, Homo sapiens
  misc_RNA (1)...(19): siRNA sense strand
guggaagauuucuauggau

SEQ ID NO: 1449767 - RNA, 19 nt, Homo sapiens
  misc_RNA (1)...(19): siRNA sense strand
caaaauccaccugucauaa

SEQ ID NO: 1449768 - RNA, 19 nt, Homo sapiens
  misc_RNA (1)...(19): siRNA sense strand
ggagagcuggaaucuaugg

SEQ ID NO: 1449769 - RNA, 19 nt, Homo sapiens
  misc_RNA (1)...(19): siRNA sense strand
caaaccaccucagaaacac

SEQ ID NO: 1449770 - RNA, 19 nt, Homo sapiens
  misc_RNA (1)...(19): siRNA sense strand
ucagugcaguguggaacuu

SEQ ID NO: 1449771 - RNA, 19 nt, Homo sapiens
  misc_RNA (1)...(19): siRNA sense strand
aaauccaccugucauaaaa

SEQ ID NO: 1449772 - RNA, 19 nt, Homo sapiens
  misc_RNA (1)...(19): siRNA sense strand
caacaaaauccaccuguca

SEQ ID NO: 1449773 - RNA, 19 nt, Homo sapiens
  misc_RNA (1)...(19): siRNA sense strand
agauggaccuuuuggcuuu

SEQ ID NO: 1449774 - RNA, 19 nt, Homo sapiens
  misc_RNA (1)...(19): siRNA sense strand
caaccaagaaaggaacaga

SEQ ID NO: 1449775 - RNA, 19 nt, Homo sapiens
  misc_RNA (1)...(19): siRNA sense strand
cauauugaaguucgagaug

SEQ ID NO: 1449776 - RNA, 19 nt, Homo sapiens
  misc_RNA (1)...(19): siRNA sense strand
cuuuaccucucccaacuau

SEQ ID NO: 1449777 - RNA, 19 nt, Homo sapiens
  misc_RNA (1)...(19): siRNA sense strand
ggagugcaaauuugaucau

SEQ ID NO: 1449778 - RNA, 19 nt, Homo sapiens
  misc_RNA (1)...(19): siRNA sense strand
gauggagagcuggaaucua

SEQ ID NO: 1449779 - RNA, 19 nt, Homo sapiens
  misc_RNA (1)...(19): siRNA sense strand
ucuugggagugcaaauuug

SEQ ID NO: 1449780 - RNA, 19 nt, Homo sapiens
  misc_RNA (1)...(19): siRNA sense strand
gaaguucgagauggaccuu

SEQ ID NO: 1449781 - RNA, 19 nt, Homo sapiens
  misc_RNA (1)...(19): siRNA sense strand
caagacagugcauugaacu

SEQ ID NO: 1449782 - RNA, 19 nt, Homo sapiens
  misc_RNA (1)...(19): siRNA sense strand
uggcuuuucuccaauaauu

SEQ ID NO: 1449783 - RNA, 19 nt, Homo sapiens
  misc_RNA (1)...(19): siRNA sense strand
acagugcauugaacuuuac

SEQ ID NO: 1449784 - RNA, 19 nt, Homo sapiens
  misc_RNA (1)...(19): siRNA sense strand
ccucagaaacacagaaguc

SEQ ID NO: 1449785 - RNA, 19 nt, Homo sapiens
  misc_RNA (1)...(19): siRNA sense strand
uaaucauccuccauuuguc

SEQ ID NO: 1449786 - RNA, 19 nt, Homo sapiens
  misc_RNA (1)...(19): siRNA sense strand
ggaggcacauggagaaauu

SEQ ID NO: 1449787 - RNA, 19 nt, Homo sapiens
  misc_RNA (1)...(19): siRNA sense strand
gcgcguagguaauggauuu

SEQ ID NO: 1449788 - RNA, 19 nt, Homo sapiens
  misc_RNA (1)...(19): siRNA sense strand
gagaggaguucauuacuuc

SEQ ID NO: 1449789 - RNA, 19 nt, Homo sapiens
  misc_RNA (1)...(19): siRNA sense strand
ggagaggaguucauuacuu

SEQ ID NO: 1449790 - RNA, 19 nt, Homo sapiens
  misc_RNA (1)...(19): siRNA sense strand
gccauggcaucuaaauuua

SEQ ID NO: 1449791 - RNA, 19 nt, Homo sapiens
  misc_RNA (1)...(19): siRNA sense strand
acucagggcccauuaauua

SEQ ID NO: 1449792 - RNA, 19 nt, Homo sapiens
  misc_RNA (1)...(19): siRNA sense strand
ggccauggcaucuaaauuu

SEQ ID NO: 1449793 - RNA, 19 nt, Homo sapiens
  misc_RNA (1)...(19): siRNA sense strand
ucagguguauacaauguua

SEQ ID NO: 1449794 - RNA, 19 nt, Homo sapiens
  misc_RNA (1)...(19): siRNA sense strand
gaaagaaugccaaggaagu

SEQ ID NO: 1449795 - RNA, 19 nt, Homo sapiens
  misc_RNA (1)...(19): siRNA sense strand
ggaggaggcuauagcaauc

SEQ ID NO: 1449796 - RNA, 19 nt, Homo sapiens
  misc_RNA (1)...(19): siRNA sense strand
ggaugaccuugccagaaua

SEQ ID NO: 1449797 - RNA, 19 nt, Homo sapiens
  misc_RNA (1)...(19): siRNA sense strand
gaaggaggcacauggagaa

SEQ ID NO: 1449798 - RNA, 19 nt, Homo sapiens
  misc_RNA (1)...(19): siRNA sense strand
ugaaugaugccguuucuaa

SEQ ID NO: 1449799 - RNA, 19 nt, Homo sapiens
  misc_RNA (1)...(19): siRNA sense strand
gaagugguacaauuuaaug

SEQ ID NO: 1449800 - RNA, 19 nt, Homo sapiens
  misc_RNA (1)...(19): siRNA sense strand
guuauucccuguucucgaa

SEQ ID NO: 1449801 - RNA, 19 nt, Homo sapiens
  misc_RNA (1)...(19): siRNA sense strand
gaaugaugccguuucuaaa

SEQ ID NO: 1449802 - RNA, 19 nt, Homo sapiens
  misc_RNA (1)...(19): siRNA sense strand
gaacucaaguauguguguu

SEQ ID NO: 1449803 - RNA, 19 nt, Homo sapiens
  misc_RNA (1)...(19): siRNA sense strand
cggccuugcuccauuuaua

SEQ ID NO: 1449804 - RNA, 19 nt, Homo sapiens
  misc_RNA (1)...(19): siRNA sense strand
cggaagugguacaauuuaa

SEQ ID NO: 1449805 - RNA, 19 nt, Homo sapiens
  misc_RNA (1)...(19): siRNA sense strand
ccaaguauggcauugauga

SEQ ID NO: 1449806 - RNA, 19 nt, Homo sapiens
  misc_RNA (1)...(19): siRNA sense strand
gcacucaugaagagacuuu

SEQ ID NO: 1449807 - RNA, 19 nt, Homo sapiens
  misc_RNA (1)...(19): siRNA sense strand
gauguuggguuagcagguu

SEQ ID NO: 1449808 - RNA, 19 nt, Homo sapiens
  misc_RNA (1)...(19): siRNA sense strand
gggaggcaauuuguacuga

SEQ ID NO: 1449809 - RNA, 19 nt, Homo sapiens
  misc_RNA (1)...(19): siRNA sense strand
ggaagugguacaauuuaau

SEQ ID NO: 1449810 - RNA, 19 nt, Homo sapiens
  misc_RNA (1)...(19): siRNA sense strand
caaggagaggaguucauua

SEQ ID NO: 1449811 - RNA, 19 nt, Homo sapiens
  misc_RNA (1)...(19): siRNA sense strand
gaacuacucagggcccauu

SEQ ID NO: 1449812 - RNA, 19 nt, Homo sapiens
  misc_RNA (1)...(19): siRNA sense strand
cgucaacgaaggauuaauu

SEQ ID NO: 1449813 - RNA, 19 nt, Homo sapiens
  misc_RNA (1)...(19): siRNA sense strand
gagaaacaggugaaugaug

SEQ ID NO: 1449814 - RNA, 19 nt, Homo sapiens
  misc_RNA (1)...(19): siRNA sense strand
ucgaaagaaugccaaggaa

SEQ ID NO: 1449815 - RNA, 19 nt, Homo sapiens
  misc_RNA (1)...(19): siRNA sense strand
gcugugcacucaugaagag

SEQ ID NO: 1449816 - RNA, 19 nt, Homo sapiens
  misc_RNA (1)...(19): siRNA sense strand
ccgaggccaugaagaagaa

SEQ ID NO: 1449817 - RNA, 19 nt, Homo sapiens
  misc_RNA (1)...(19): siRNA sense strand
guauggcauugaugaguau

SEQ ID NO: 1449818 - RNA, 19 nt, Homo sapiens
  misc_RNA (1)...(19): siRNA sense strand
aguauggcauugaugagua

SEQ ID NO: 1449819 - RNA, 19 nt, Homo sapiens
  misc_RNA (1)...(19): siRNA sense strand
gaccuugccagaauaauca

SEQ ID NO: 1449820 - RNA, 19 nt, Homo sapiens
  misc_RNA (1)...(19): siRNA sense strand
aggaugaccuugccagaau

SEQ ID NO: 1449821 - RNA, 19 nt, Homo sapiens
  misc_RNA (1)...(19): siRNA sense strand
uggagaaacaggugaauga

SEQ ID NO: 1449822 - RNA, 19 nt, Homo sapiens
  misc_RNA (1)...(19): siRNA sense strand
ggaggcaauuuguacugau

SEQ ID NO: 1449823 - RNA, 19 nt, Homo sapiens
  misc_RNA (1)...(19): siRNA sense strand
ccaaggagaggaguucauu

SEQ ID NO: 1449824 - RNA, 19 nt, Homo sapiens
  misc_RNA (1)...(19): siRNA sense strand
uagaaaagguggagaaaca

SEQ ID NO: 1449825 - RNA, 19 nt, Homo sapiens
  misc_RNA (1)...(19): siRNA sense strand
ggacagacuuguguuugcu

SEQ ID NO: 1449826 - RNA, 19 nt, Homo sapiens
  misc_RNA (1)...(19): siRNA sense strand
gcagcaaacucugugaaaa

SEQ ID NO: 1449827 - RNA, 19 nt, Homo sapiens
  misc_RNA (1)...(19): siRNA sense strand
gaggcaauuuguacugauc

SEQ ID NO: 1449828 - RNA, 19 nt, Homo sapiens
  misc_RNA (1)...(19): siRNA sense strand
aaagaaugccaaggaagua

SEQ ID NO: 1449829 - RNA, 19 nt, Homo sapiens
  misc_RNA (1)...(19): siRNA sense strand
ggugaagccugccgaagac

SEQ ID NO: 1449830 - RNA, 19 nt, Homo sapiens
  misc_RNA (1)...(19): siRNA sense strand
gaugaccuugccagaauaa

SEQ ID NO: 1449831 - RNA, 19 nt, Homo sapiens
  misc_RNA (1)...(19): siRNA sense strand
uggcaccaguuaucaaguu

SEQ ID NO: 1449832 - RNA, 19 nt, Homo sapiens
  misc_RNA (1)...(19): siRNA sense strand
caacguggaccaggcugua

SEQ ID NO: 1449833 - RNA, 19 nt, Homo sapiens
  misc_RNA (1)...(19): siRNA sense strand
guucaacaacuacaggaaa

SEQ ID NO: 1449834 - RNA, 19 nt, Homo sapiens
  misc_RNA (1)...(19): siRNA sense strand
agaauaaucacagcugaaa

SEQ ID NO: 1449835 - RNA, 19 nt, Homo sapiens
  misc_RNA (1)...(19): siRNA sense strand
acaauguuauucccuguuc

SEQ ID NO: 1449836 - RNA, 19 nt, Homo sapiens
  misc_RNA (1)...(19): siRNA sense strand
ggugaaugaugccguuucu

SEQ ID NO: 1449837 - RNA, 19 nt, Homo sapiens
  misc_RNA (1)...(19): siRNA sense strand
gcuguacugucguggugaa

SEQ ID NO: 1449838 - RNA, 19 nt, Homo sapiens
  misc_RNA (1)...(19): siRNA sense strand
uggcgucaacgaaggauua

SEQ ID NO: 1449839 - RNA, 19 nt, Homo sapiens
  misc_RNA (1)...(19): siRNA sense strand
ggaaaacgacaccaacuug

SEQ ID NO: 1449840 - RNA, 19 nt, Homo sapiens
  misc_RNA (1)...(19): siRNA sense strand
gcaccacgcagcaaacucu

SEQ ID NO: 1449841 - RNA, 19 nt, Homo sapiens
  misc_RNA (1)...(19): siRNA sense strand
caacgaaggauuaauuucc

SEQ ID NO: 1449842 - RNA, 19 nt, Homo sapiens
  misc_RNA (1)...(19): siRNA sense strand
ugggauuccuucaggugua

SEQ ID NO: 1449843 - RNA, 19 nt, Homo sapiens
  misc_RNA (1)...(19): siRNA sense strand
ggaacucaaguaugugugu

SEQ ID NO: 1449844 - RNA, 19 nt, Homo sapiens
  misc_RNA (1)...(19): siRNA sense strand
cuucagguguauacaaugu

SEQ ID NO: 1449845 - RNA, 19 nt, Homo sapiens
  misc_RNA (1)...(19): siRNA sense strand
gggauuccuucagguguau

SEQ ID NO: 1449846 - RNA, 19 nt, Homo sapiens
  misc_RNA (1)...(19): siRNA sense strand
ucggaagugguacaauuua

SEQ ID NO: 1449847 - RNA, 19 nt, Homo sapiens
  misc_RNA (1)...(19): siRNA sense strand
uaauggauuugaggaagga

SEQ ID NO: 1449848 - RNA, 19 nt, Homo sapiens
  misc_RNA (1)...(19): siRNA sense strand
ugaaaagggucucuaugga

SEQ ID NO: 1449849 - RNA, 19 nt, Homo sapiens
  misc_RNA (1)...(19): siRNA sense strand
ggagaaacaggugaaugau

SEQ ID NO: 1449850 - RNA, 19 nt, Homo sapiens
  misc_RNA (1)...(19): siRNA sense strand
guccaaguauggcauugau

SEQ ID NO: 1449851 - RNA, 19 nt, Homo sapiens
  misc_RNA (1)...(19): siRNA sense strand
caacaacuacaggaaagau

SEQ ID NO: 1449852 - RNA, 19 nt, Homo sapiens
  misc_RNA (1)...(19): siRNA sense strand
gucaacgaaggauuaauuu

SEQ ID NO: 1449853 - RNA, 19 nt, Homo sapiens
  misc_RNA (1)...(19): siRNA sense strand
uaggaacacuggacagacu

SEQ ID NO: 1449854 - RNA, 19 nt, Homo sapiens
  misc_RNA (1)...(19): siRNA sense strand
ccucugguguccaaaauuu

SEQ ID NO: 1449855 - RNA, 19 nt, Homo sapiens
  misc_RNA (1)...(19): siRNA sense strand
cgcagcugauguuggguua

SEQ ID NO: 1449856 - RNA, 19 nt, Homo sapiens
  misc_RNA (1)...(19): siRNA sense strand
aggcguggcugcagucauc

SEQ ID NO: 1449857 - RNA, 19 nt, Homo sapiens
  misc_RNA (1)...(19): siRNA sense strand
aauaaucacagcugaaagu

SEQ ID NO: 1449858 - RNA, 19 nt, Homo sapiens
  misc_RNA (1)...(19): siRNA sense strand
uuuacugguucaacaacua

SEQ ID NO: 1449859 - RNA, 19 nt, Homo sapiens
  misc_RNA (1)...(19): siRNA sense strand
ggaacacuggacagacuug

SEQ ID NO: 1449860 - RNA, 19 nt, Homo sapiens
  misc_RNA (1)...(19): siRNA sense strand
auacagaggaggaggcuau

SEQ ID NO: 1449861 - RNA, 19 nt, Homo sapiens
  misc_RNA (1)...(19): siRNA sense strand
cagaauaaucacagcugaa

SEQ ID NO: 1449862 - RNA, 19 nt, Homo sapiens
  misc_RNA (1)...(19): siRNA sense strand
gaggaggaggcuauagcaa

SEQ ID NO: 1449863 - RNA, 19 nt, Homo sapiens
  misc_RNA (1)...(19): siRNA sense strand
uggcagagcagcuggaagu

SEQ ID NO: 1449864 - RNA, 19 nt, Homo sapiens
  misc_RNA (1)...(19): siRNA sense strand
gaauaaucacagcugaaag

SEQ ID NO: 1449865 - RNA, 19 nt, Homo sapiens
  misc_RNA (1)...(19): siRNA sense strand
gggccauggcaucuaaauu

SEQ ID NO: 1449866 - RNA, 19 nt, Homo sapiens
  misc_RNA (1)...(19): siRNA sense strand
ggcaccaguuaucaaguuc

SEQ ID NO: 1449867 - RNA, 19 nt, Homo sapiens
  misc_RNA (1)...(19): siRNA sense strand
ggaaguaggggaggcaauu

SEQ ID NO: 1449868 - RNA, 19 nt, Homo sapiens
  misc_RNA (1)...(19): siRNA sense strand
guaucuggaacucaaguau

SEQ ID NO: 1449869 - RNA, 19 nt, Homo sapiens
  misc_RNA (1)...(19): siRNA sense strand
cgagagggguccaaguaug

SEQ ID NO: 1449870 - RNA, 19 nt, Homo sapiens
  misc_RNA (1)...(19): siRNA sense strand
gcuggaagugggcaugguu

SEQ ID NO: 1449871 - RNA, 19 nt, Homo sapiens
  misc_RNA (1)...(19): siRNA sense strand
caccaguuaucaaguucga

SEQ ID NO: 1449872 - RNA, 19 nt, Homo sapiens
  misc_RNA (1)...(19): siRNA sense strand
cuacucagggcccauuaau

SEQ ID NO: 1449873 - RNA, 19 nt, Homo sapiens
  misc_RNA (1)...(19): siRNA sense strand
ucgccgaggccaugaagaa

SEQ ID NO: 1449874 - RNA, 19 nt, Homo sapiens
  misc_RNA (1)...(19): siRNA sense strand
gaacacuggacagacuugu

SEQ ID NO: 1449875 - RNA, 19 nt, Homo sapiens
  misc_RNA (1)...(19): siRNA sense strand
cuugcuccauuuauaguau

SEQ ID NO: 1449876 - RNA, 19 nt, Homo sapiens
  misc_RNA (1)...(19): siRNA sense strand
gccgaggccaugaagaaga

SEQ ID NO: 1449877 - RNA, 19 nt, Homo sapiens
  misc_RNA (1)...(19): siRNA sense strand
ugaccuugccagaauaauc

SEQ ID NO: 1449878 - RNA, 19 nt, Homo sapiens
  misc_RNA (1)...(19): siRNA sense strand
ucaacgaaggauuaauuuc

SEQ ID NO: 1449879 - RNA, 19 nt, Homo sapiens
  misc_RNA (1)...(19): siRNA sense strand
ggaggcacauggagaaauu

SEQ ID NO: 1449880 - RNA, 19 nt, Homo sapiens
  misc_RNA (1)...(19): siRNA sense strand
gcgcguagguaauggauuu

SEQ ID NO: 1449881 - RNA, 19 nt, Homo sapiens
  misc_RNA (1)...(19): siRNA sense strand
gagaggaguucauuacuuc

SEQ ID NO: 1449882 - RNA, 19 nt, Homo sapiens
  misc_RNA (1)...(19): siRNA sense strand
ggagaggaguucauuacuu

SEQ ID NO: 1449883 - RNA, 19 nt, Homo sapiens
  misc_RNA (1)...(19): siRNA sense strand
gccauggcaucuaaauuua

SEQ ID NO: 1449884 - RNA, 19 nt, Homo sapiens
  misc_RNA (1)...(19): siRNA sense strand
acucagggcccauuaauua

SEQ ID NO: 1449885 - RNA, 19 nt, Homo sapiens
  misc_RNA (1)...(19): siRNA sense strand
ggccauggcaucuaaauuu

SEQ ID NO: 1449886 - RNA, 19 nt, Homo sapiens
  misc_RNA (1)...(19): siRNA sense strand
ucagguguauacaauguua

SEQ ID NO: 1449887 - RNA, 19 nt, Homo sapiens
  misc_RNA (1)...(19): siRNA sense strand
gaaagaaugccaaggaagu

SEQ ID NO: 1449888 - RNA, 19 nt, Homo sapiens
  misc_RNA (1)...(19): siRNA sense strand
ggaggaggcuauagcaauc

SEQ ID NO: 1449889 - RNA, 19 nt, Homo sapiens
  misc_RNA (1)...(19): siRNA sense strand
ggaugaccuugccagaaua

SEQ ID NO: 1449890 - RNA, 19 nt, Homo sapiens
  misc_RNA (1)...(19): siRNA sense strand
gaaggaggcacauggagaa

SEQ ID NO: 1449891 - RNA, 19 nt, Homo sapiens
  misc_RNA (1)...(19): siRNA sense strand
ugaaugaugccguuucuaa

SEQ ID NO: 1449892 - RNA, 19 nt, Homo sapiens
  misc_RNA (1)...(19): siRNA sense strand
gaagugguacaauuuaaug

SEQ ID NO: 1449893 - RNA, 19 nt, Homo sapiens
  misc_RNA (1)...(19): siRNA sense strand
guuauucccuguucucgaa

SEQ ID NO: 1449894 - RNA, 19 nt, Homo sapiens
  misc_RNA (1)...(19): siRNA sense strand
gaaugaugccguuucuaaa

SEQ ID NO: 1449895 - RNA, 19 nt, Homo sapiens
  misc_RNA (1)...(19): siRNA sense strand
gaacucaaguauguguguu

SEQ ID NO: 1449896 - RNA, 19 nt, Homo sapiens
  misc_RNA (1)...(19): siRNA sense strand
cggccuugcuccauuuaua

SEQ ID NO: 1449897 - RNA, 19 nt, Homo sapiens
  misc_RNA (1)...(19): siRNA sense strand
cggaagugguacaauuuaa

SEQ ID NO: 1449898 - RNA, 19 nt, Homo sapiens
  misc_RNA (1)...(19): siRNA sense strand
ccaaguauggcauugauga

SEQ ID NO: 1449899 - RNA, 19 nt, Homo sapiens
  misc_RNA (1)...(19): siRNA sense strand
gcacucaugaagagacuuu

SEQ ID NO: 1449900 - RNA, 19 nt, Homo sapiens
  misc_RNA (1)...(19): siRNA sense strand
gauguuggguuagcagguu

SEQ ID NO: 1449901 - RNA, 19 nt, Homo sapiens
  misc_RNA (1)...(19): siRNA sense strand
gggaggcaauuuguacuga

SEQ ID NO: 1449902 - RNA, 19 nt, Homo sapiens
  misc_RNA (1)...(19): siRNA sense strand
ggaagugguacaauuuaau

SEQ ID NO: 1449903 - RNA, 19 nt, Homo sapiens
  misc_RNA (1)...(19): siRNA sense strand
caaggagaggaguucauua

SEQ ID NO: 1449904 - RNA, 19 nt, Homo sapiens
  misc_RNA (1)...(19): siRNA sense strand
gaacuacucagggcccauu

SEQ ID NO: 1449905 - RNA, 19 nt, Homo sapiens
  misc_RNA (1)...(19): siRNA sense strand
cgucaacgaaggauuaauu

SEQ ID NO: 1449906 - RNA, 19 nt, Homo sapiens
  misc_RNA (1)...(19): siRNA sense strand
gagaaacaggugaaugaug

SEQ ID NO: 1449907 - RNA, 19 nt, Homo sapiens
  misc_RNA (1)...(19): siRNA sense strand
ucgaaagaaugccaaggaa

SEQ ID NO: 1449908 - RNA, 19 nt, Homo sapiens
  misc_RNA (1)...(19): siRNA sense strand
gcugugcacucaugaagag

SEQ ID NO: 1449909 - RNA, 19 nt, Homo sapiens
  misc_RNA (1)...(19): siRNA sense strand
ccgaggccaugaagaagaa

SEQ ID NO: 1449910 - RNA, 19 nt, Homo sapiens
  misc_RNA (1)...(19): siRNA sense strand
guauggcauugaugaguau

SEQ ID NO: 1449911 - RNA, 19 nt, Homo sapiens
  misc_RNA (1)...(19): siRNA sense strand
aguauggcauugaugagua

SEQ ID NO: 1449912 - RNA, 19 nt, Homo sapiens
  misc_RNA (1)...(19): siRNA sense strand
gaccuugccagaauaauca

SEQ ID NO: 1449913 - RNA, 19 nt, Homo sapiens
  misc_RNA (1)...(19): siRNA sense strand
aggaugaccuugccagaau

SEQ ID NO: 1449914 - RNA, 19 nt, Homo sapiens
  misc_RNA (1)...(19): siRNA sense strand
uggagaaacaggugaauga

SEQ ID NO: 1449915 - RNA, 19 nt, Homo sapiens
  misc_RNA (1)...(19): siRNA sense strand
ggaggcaauuuguacugau

SEQ ID NO: 1449916 - RNA, 19 nt, Homo sapiens
  misc_RNA (1)...(19): siRNA sense strand
ccaaggagaggaguucauu

SEQ ID NO: 1449917 - RNA, 19 nt, Homo sapiens
  misc_RNA (1)...(19): siRNA sense strand
uagaaaagguggagaaaca

SEQ ID NO: 1449918 - RNA, 19 nt, Homo sapiens
  misc_RNA (1)...(19): siRNA sense strand
ggacagacuuguguuugcu

SEQ ID NO: 1449919 - RNA, 19 nt, Homo sapiens
  misc_RNA (1)...(19): siRNA sense strand
gcagcaaacucugugaaaa

SEQ ID NO: 1449920 - RNA, 19 nt, Homo sapiens
  misc_RNA (1)...(19): siRNA sense strand
gaggcaauuuguacugauc

SEQ ID NO: 1449921 - RNA, 19 nt, Homo sapiens
  misc_RNA (1)...(19): siRNA sense strand
aaagaaugccaaggaagua

SEQ ID NO: 1449922 - RNA, 19 nt, Homo sapiens
  misc_RNA (1)...(19): siRNA sense strand
ggugaagccugccgaagac

SEQ ID NO: 1449923 - RNA, 19 nt, Homo sapiens
  misc_RNA (1)...(19): siRNA sense strand
gaugaccuugccagaauaa

SEQ ID NO: 1449924 - RNA, 19 nt, Homo sapiens
  misc_RNA (1)...(19): siRNA sense strand
uggcaccaguuaucaaguu

SEQ ID NO: 1449925 - RNA, 19 nt, Homo sapiens
  misc_RNA (1)...(19): siRNA sense strand
caacguggaccaggcugua

SEQ ID NO: 1449926 - RNA, 19 nt, Homo sapiens
  misc_RNA (1)...(19): siRNA sense strand
guucaacaacuacaggaaa

SEQ ID NO: 1449927 - RNA, 19 nt, Homo sapiens
  misc_RNA (1)...(19): siRNA sense strand
agaauaaucacagcugaaa

SEQ ID NO: 1449928 - RNA, 19 nt, Homo sapiens
  misc_RNA (1)...(19): siRNA sense strand
acaauguuauucccuguuc

SEQ ID NO: 1449929 - RNA, 19 nt, Homo sapiens
  misc_RNA (1)...(19): siRNA sense strand
ggugaaugaugccguuucu

SEQ ID NO: 1449930 - RNA, 19 nt, Homo sapiens
  misc_RNA (1)...(19): siRNA sense strand
gcuguacugucguggugaa

SEQ ID NO: 1449931 - RNA, 19 nt, Homo sapiens
  misc_RNA (1)...(19): siRNA sense strand
uggcgucaacgaaggauua

SEQ ID NO: 1449932 - RNA, 19 nt, Homo sapiens
  misc_RNA (1)...(19): siRNA sense strand
ggaaaacgacaccaacuug

SEQ ID NO: 1449933 - RNA, 19 nt, Homo sapiens
  misc_RNA (1)...(19): siRNA sense strand
gcaccacgcagcaaacucu

SEQ ID NO: 1449934 - RNA, 19 nt, Homo sapiens
  misc_RNA (1)...(19): siRNA sense strand
caacgaaggauuaauuucc

SEQ ID NO: 1449935 - RNA, 19 nt, Homo sapiens
  misc_RNA (1)...(19): siRNA sense strand
ugggauuccuucaggugua

SEQ ID NO: 1449936 - RNA, 19 nt, Homo sapiens
  misc_RNA (1)...(19): siRNA sense strand
ggaacucaaguaugugugu

SEQ ID NO: 1449937 - RNA, 19 nt, Homo sapiens
  misc_RNA (1)...(19): siRNA sense strand
cuucagguguauacaaugu

SEQ ID NO: 1449938 - RNA, 19 nt, Homo sapiens
  misc_RNA (1)...(19): siRNA sense strand
gggauuccuucagguguau

SEQ ID NO: 1449939 - RNA, 19 nt, Homo sapiens
  misc_RNA (1)...(19): siRNA sense strand
ucggaagugguacaauuua

SEQ ID NO: 1449940 - RNA, 19 nt, Homo sapiens
  misc_RNA (1)...(19): siRNA sense strand
uaauggauuugaggaagga

SEQ ID NO: 1449941 - RNA, 19 nt, Homo sapiens
  misc_RNA (1)...(19): siRNA sense strand
ugaaaagggucucuaugga

SEQ ID NO: 1449942 - RNA, 19 nt, Homo sapiens
  misc_RNA (1)...(19): siRNA sense strand
ggagaaacaggugaaugau

SEQ ID NO: 1449943 - RNA, 19 nt, Homo sapiens
  misc_RNA (1)...(19): siRNA sense strand
guccaaguauggcauugau

SEQ ID NO: 1449944 - RNA, 19 nt, Homo sapiens
  misc_RNA (1)...(19): siRNA sense strand
caacaacuacaggaaagau

SEQ ID NO: 1449945 - RNA, 19 nt, Homo sapiens
  misc_RNA (1)...(19): siRNA sense strand
gucaacgaaggauuaauuu

SEQ ID NO: 1449946 - RNA, 19 nt, Homo sapiens
  misc_RNA (1)...(19): siRNA sense strand
uaggaacacuggacagacu

SEQ ID NO: 1449947 - RNA, 19 nt, Homo sapiens
  misc_RNA (1)...(19): siRNA sense strand
ccucugguguccaaaauuu

SEQ ID NO: 1449948 - RNA, 19 nt, Homo sapiens
  misc_RNA (1)...(19): siRNA sense strand
cgcagcugauguuggguua

SEQ ID NO: 1449949 - RNA, 19 nt, Homo sapiens
  misc_RNA (1)...(19): siRNA sense strand
aggcguggcugcagucauc

SEQ ID NO: 1449950 - RNA, 19 nt, Homo sapiens
  misc_RNA (1)...(19): siRNA sense strand
aauaaucacagcugaaagu

SEQ ID NO: 1449951 - RNA, 19 nt, Homo sapiens
  misc_RNA (1)...(19): siRNA sense strand
uuuacugguucaacaacua

SEQ ID NO: 1449952 - RNA, 19 nt, Homo sapiens
  misc_RNA (1)...(19): siRNA sense strand
ggaacacuggacagacuug

SEQ ID NO: 1449953 - RNA, 19 nt, Homo sapiens
  misc_RNA (1)...(19): siRNA sense strand
auacagaggaggaggcuau

SEQ ID NO: 1449954 - RNA, 19 nt, Homo sapiens
  misc_RNA (1)...(19): siRNA sense strand
cagaauaaucacagcugaa

SEQ ID NO: 1449955 - RNA, 19 nt, Homo sapiens
  misc_RNA (1)...(19): siRNA sense strand
gaggaggaggcuauagcaa

SEQ ID NO: 1449956 - RNA, 19 nt, Homo sapiens
  misc_RNA (1)...(19): siRNA sense strand
uggcagagcagcuggaagu

SEQ ID NO: 1449957 - RNA, 19 nt, Homo sapiens
  misc_RNA (1)...(19): siRNA sense strand
gaauaaucacagcugaaag

SEQ ID NO: 1449958 - RNA, 19 nt, Homo sapiens
  misc_RNA (1)...(19): siRNA sense strand
gggccauggcaucuaaauu

SEQ ID NO: 1449959 - RNA, 19 nt, Homo sapiens
  misc_RNA (1)...(19): siRNA sense strand
ggcaccaguuaucaaguuc

SEQ ID NO: 1449960 - RNA, 19 nt, Homo sapiens
  misc_RNA (1)...(19): siRNA sense strand
ggaaguaggggaggcaauu

SEQ ID NO: 1449961 - RNA, 19 nt, Homo sapiens
  misc_RNA (1)...(19): siRNA sense strand
guaucuggaacucaaguau

SEQ ID NO: 1449962 - RNA, 19 nt, Homo sapiens
  misc_RNA (1)...(19): siRNA sense strand
cgagagggguccaaguaug

SEQ ID NO: 1449963 - RNA, 19 nt, Homo sapiens
  misc_RNA (1)...(19): siRNA sense strand
gcuggaagugggcaugguu

SEQ ID NO: 1449964 - RNA, 19 nt, Homo sapiens
  misc_RNA (1)...(19): siRNA sense strand
caccaguuaucaaguucga

SEQ ID NO: 1449965 - RNA, 19 nt, Homo sapiens
  misc_RNA (1)...(19): siRNA sense strand
cuacucagggcccauuaau

SEQ ID NO: 1449966 - RNA, 19 nt, Homo sapiens
  misc_RNA (1)...(19): siRNA sense strand
ucgccgaggccaugaagaa

SEQ ID NO: 1449967 - RNA, 19 nt, Homo sapiens
  misc_RNA (1)...(19): siRNA sense strand
gaacacuggacagacuugu

SEQ ID NO: 1449968 - RNA, 19 nt, Homo sapiens
  misc_RNA (1)...(19): siRNA sense strand
cuugcuccauuuauaguau

SEQ ID NO: 1449969 - RNA, 19 nt, Homo sapiens
  misc_RNA (1)...(19): siRNA sense strand
gccgaggccaugaagaaga

SEQ ID NO: 1449970 - RNA, 19 nt, Homo sapiens
  misc_RNA (1)...(19): siRNA sense strand
ugaccuugccagaauaauc

SEQ ID NO: 1449971 - RNA, 19 nt, Homo sapiens
  misc_RNA (1)...(19): siRNA sense strand
ucaacgaaggauuaauuuc

SEQ ID NO: 1449972 - RNA, 19 nt, Homo sapiens
  misc_RNA (1)...(19): siRNA sense strand
gaaguuaggucaagaugaa

SEQ ID NO: 1449973 - RNA, 19 nt, Homo sapiens
  misc_RNA (1)...(19): siRNA sense strand
ggaaauaacuacuaagcaa

SEQ ID NO: 1449974 - RNA, 19 nt, Homo sapiens
  misc_RNA (1)...(19): siRNA sense strand
gaagauagagagaccauaa

SEQ ID NO: 1449975 - RNA, 19 nt, Homo sapiens
  misc_RNA (1)...(19): siRNA sense strand
gaagugaauuguugccauu

SEQ ID NO: 1449976 - RNA, 19 nt, Homo sapiens
  misc_RNA (1)...(19): siRNA sense strand
gaacaucuucuaccucuuu

SEQ ID NO: 1449977 - RNA, 19 nt, Homo sapiens
  misc_RNA (1)...(19): siRNA sense strand
ggugagaacuugcccauug

SEQ ID NO: 1449978 - RNA, 19 nt, Homo sapiens
  misc_RNA (1)...(19): siRNA sense strand
gaaaggacccgaagugaau

SEQ ID NO: 1449979 - RNA, 19 nt, Homo sapiens
  misc_RNA (1)...(19): siRNA sense strand
ggaauuagacagugugaaa

SEQ ID NO: 1449980 - RNA, 19 nt, Homo sapiens
  misc_RNA (1)...(19): siRNA sense strand
gauagagagaccauaauua

SEQ ID NO: 1449981 - RNA, 19 nt, Homo sapiens
  misc_RNA (1)...(19): siRNA sense strand
uaugguggcugacagauuu

SEQ ID NO: 1449982 - RNA, 19 nt, Homo sapiens
  misc_RNA (1)...(19): siRNA sense strand
gcucuagcuucuguaauua

SEQ ID NO: 1449983 - RNA, 19 nt, Homo sapiens
  misc_RNA (1)...(19): siRNA sense strand
gaauuguugccauuucuua

SEQ ID NO: 1449984 - RNA, 19 nt, Homo sapiens
  misc_RNA (1)...(19): siRNA sense strand
gaaccuacuuaaagacugu

SEQ ID NO: 1449985 - RNA, 19 nt, Homo sapiens
  misc_RNA (1)...(19): siRNA sense strand
aggaugaccuugagacuuu

SEQ ID NO: 1449986 - RNA, 19 nt, Homo sapiens
  misc_RNA (1)...(19): siRNA sense strand
gauccuaauuacuugcaua

SEQ ID NO: 1449987 - RNA, 19 nt, Homo sapiens
  misc_RNA (1)...(19): siRNA sense strand
ccuaauuacuugcauagaa

SEQ ID NO: 1449988 - RNA, 19 nt, Homo sapiens
  misc_RNA (1)...(19): siRNA sense strand
gaacuugcccauugaagau

SEQ ID NO: 1449989 - RNA, 19 nt, Homo sapiens
  misc_RNA (1)...(19): siRNA sense strand
uggcaaaugauccuaauua

SEQ ID NO: 1449990 - RNA, 19 nt, Homo sapiens
  misc_RNA (1)...(19): siRNA sense strand
ggcucuagcuucuguaauu

SEQ ID NO: 1449991 - RNA, 19 nt, Homo sapiens
  misc_RNA (1)...(19): siRNA sense strand
gacccgaagugaauuguug

SEQ ID NO: 1449992 - RNA, 19 nt, Homo sapiens
  misc_RNA (1)...(19): siRNA sense strand
ggaagagacuguuguucgu

SEQ ID NO: 1449993 - RNA, 19 nt, Homo sapiens
  misc_RNA (1)...(19): siRNA sense strand
ugaagaugagguacuauua

SEQ ID NO: 1449994 - RNA, 19 nt, Homo sapiens
  misc_RNA (1)...(19): siRNA sense strand
uaaagacugugaagcugaa

SEQ ID NO: 1449995 - RNA, 19 nt, Homo sapiens
  misc_RNA (1)...(19): siRNA sense strand
ccaacaaccucaugaaacu

SEQ ID NO: 1449996 - RNA, 19 nt, Homo sapiens
  misc_RNA (1)...(19): siRNA sense strand
gugaaacgcuuagcaagug

SEQ ID NO: 1449997 - RNA, 19 nt, Homo sapiens
  misc_RNA (1)...(19): siRNA sense strand
gaauaucaucuccaauuug

SEQ ID NO: 1449998 - RNA, 19 nt, Homo sapiens
  misc_RNA (1)...(19): siRNA sense strand
caaaucggcucuagcuucu

SEQ ID NO: 1449999 - RNA, 19 nt, Homo sapiens
  misc_RNA (1)...(19): siRNA sense strand
gucaggaaauaacuacuaa

SEQ ID NO: 1450000 - RNA, 19 nt, Homo sapiens
  misc_RNA (1)...(19): siRNA sense strand
gaagaugagguacuauuag

SEQ ID NO: 1450001 - RNA, 19 nt, Homo sapiens
  misc_RNA (1)...(19): siRNA sense strand
gcaaauguucgcuucaaug

SEQ ID NO: 1450002 - RNA, 19 nt, Homo sapiens
  misc_RNA (1)...(19): siRNA sense strand
gcugaauucuuuauguaug

SEQ ID NO: 1450003 - RNA, 19 nt, Homo sapiens
  misc_RNA (1)...(19): siRNA sense strand
gacguucguuugaauauca

SEQ ID NO: 1450004 - RNA, 19 nt, Homo sapiens
  misc_RNA (1)...(19): siRNA sense strand
cgacucaacaguauuaaga

SEQ ID NO: 1450005 - RNA, 19 nt, Homo sapiens
  misc_RNA (1)...(19): siRNA sense strand
gcacaggaagcuauaagug

SEQ ID NO: 1450006 - RNA, 19 nt, Homo sapiens
  misc_RNA (1)...(19): siRNA sense strand
uaaaagaacuuggugagaa

SEQ ID NO: 1450007 - RNA, 19 nt, Homo sapiens
  misc_RNA (1)...(19): siRNA sense strand
cugagcagcugggaaauuu

SEQ ID NO: 1450008 - RNA, 19 nt, Homo sapiens
  misc_RNA (1)...(19): siRNA sense strand
ugaugaagaugagguacua

SEQ ID NO: 1450009 - RNA, 19 nt, Homo sapiens
  misc_RNA (1)...(19): siRNA sense strand
ugaaauuguuccacuguuc

SEQ ID NO: 1450010 - RNA, 19 nt, Homo sapiens
  misc_RNA (1)...(19): siRNA sense strand
gcaaaugcugcccaucgua

SEQ ID NO: 1450011 - RNA, 19 nt, Homo sapiens
  misc_RNA (1)...(19): siRNA sense strand
guaaaugaagugauuggaa

SEQ ID NO: 1450012 - RNA, 19 nt, Homo sapiens
  misc_RNA (1)...(19): siRNA sense strand
ggaagcuugugucaguauu

SEQ ID NO: 1450013 - RNA, 19 nt, Homo sapiens
  misc_RNA (1)...(19): siRNA sense strand
gugagaacuugcccauuga

SEQ ID NO: 1450014 - RNA, 19 nt, Homo sapiens
  misc_RNA (1)...(19): siRNA sense strand
ggaugaguguccugacguu

SEQ ID NO: 1450015 - RNA, 19 nt, Homo sapiens
  misc_RNA (1)...(19): siRNA sense strand
gagguacuauuagcucuug

SEQ ID NO: 1450016 - RNA, 19 nt, Homo sapiens
  misc_RNA (1)...(19): siRNA sense strand
ggucaggaaauaacuacua

SEQ ID NO: 1450017 - RNA, 19 nt, Homo sapiens
  misc_RNA (1)...(19): siRNA sense strand
uaguggagcuggcagaaga

SEQ ID NO: 1450018 - RNA, 19 nt, Homo sapiens
  misc_RNA (1)...(19): siRNA sense strand
guaauuaugggauugucua

SEQ ID NO: 1450019 - RNA, 19 nt, Homo sapiens
  misc_RNA (1)...(19): siRNA sense strand
gaaauuguuccacuguuca

SEQ ID NO: 1450020 - RNA, 19 nt, Homo sapiens
  misc_RNA (1)...(19): siRNA sense strand
guagaaaggacccgaagug

SEQ ID NO: 1450021 - RNA, 19 nt, Homo sapiens
  misc_RNA (1)...(19): siRNA sense strand
gaccaauucuagauaccaa

SEQ ID NO: 1450022 - RNA, 19 nt, Homo sapiens
  misc_RNA (1)...(19): siRNA sense strand
gcauagaaugaccacuuua

SEQ ID NO: 1450023 - RNA, 19 nt, Homo sapiens
  misc_RNA (1)...(19): siRNA sense strand
gguguggaauucuuugaug

SEQ ID NO: 1450024 - RNA, 19 nt, Homo sapiens
  misc_RNA (1)...(19): siRNA sense strand
gacaagcagcagaagauaa

SEQ ID NO: 1450025 - RNA, 19 nt, Homo sapiens
  misc_RNA (1)...(19): siRNA sense strand
gagaccaaguagcaaaugu

SEQ ID NO: 1450026 - RNA, 19 nt, Homo sapiens
  misc_RNA (1)...(19): siRNA sense strand
gagaagcugccaccaacaa

SEQ ID NO: 1450027 - RNA, 19 nt, Homo sapiens
  misc_RNA (1)...(19): siRNA sense strand
gcaaagaaaauaccauuga

SEQ ID NO: 1450028 - RNA, 19 nt, Homo sapiens
  misc_RNA (1)...(19): siRNA sense strand
acaagcagcagaagauaaa

SEQ ID NO: 1450029 - RNA, 19 nt, Homo sapiens
  misc_RNA (1)...(19): siRNA sense strand
agugggagguccugacuuu

SEQ ID NO: 1450030 - RNA, 19 nt, Homo sapiens
  misc_RNA (1)...(19): siRNA sense strand
ucgacgagcuccgcaauga

SEQ ID NO: 1450031 - RNA, 19 nt, Homo sapiens
  misc_RNA (1)...(19): siRNA sense strand
caaauguucgcuucaaugu

SEQ ID NO: 1450032 - RNA, 19 nt, Homo sapiens
  misc_RNA (1)...(19): siRNA sense strand
agaaagccauggguccuaa

SEQ ID NO: 1450033 - RNA, 19 nt, Homo sapiens
  misc_RNA (1)...(19): siRNA sense strand
ugucaguauugcccaguua

SEQ ID NO: 1450034 - RNA, 19 nt, Homo sapiens
  misc_RNA (1)...(19): siRNA sense strand
ccaaucaacaugucaaauc

SEQ ID NO: 1450035 - RNA, 19 nt, Homo sapiens
  misc_RNA (1)...(19): siRNA sense strand
uguggaagcuugugucagu

SEQ ID NO: 1450036 - RNA, 19 nt, Homo sapiens
  misc_RNA (1)...(19): siRNA sense strand
ccacuuuauucugcauuaa

SEQ ID NO: 1450037 - RNA, 19 nt, Homo sapiens
  misc_RNA (1)...(19): siRNA sense strand
ggcaaaugauccuaauuac

SEQ ID NO: 1450038 - RNA, 19 nt, Homo sapiens
  misc_RNA (1)...(19): siRNA sense strand
guggaauucuuugaugaaa

SEQ ID NO: 1450039 - RNA, 19 nt, Homo sapiens
  misc_RNA (1)...(19): siRNA sense strand
uagcucaguuaaaggauga

SEQ ID NO: 1450040 - RNA, 19 nt, Homo sapiens
  misc_RNA (1)...(19): siRNA sense strand
ucuggaagcuuauuuugua

SEQ ID NO: 1450041 - RNA, 19 nt, Homo sapiens
  misc_RNA (1)...(19): siRNA sense strand
cuacagaaguuaggucaag

SEQ ID NO: 1450042 - RNA, 19 nt, Homo sapiens
  misc_RNA (1)...(19): siRNA sense strand
uagcaaauguucgcuucaa

SEQ ID NO: 1450043 - RNA, 19 nt, Homo sapiens
  misc_RNA (1)...(19): siRNA sense strand
caaaugcugcccaucguau

SEQ ID NO: 1450044 - RNA, 19 nt, Homo sapiens
  misc_RNA (1)...(19): siRNA sense strand
auuaugggauugucuacua

SEQ ID NO: 1450045 - RNA, 19 nt, Homo sapiens
  misc_RNA (1)...(19): siRNA sense strand
uuucuuagcucaguuaaag

SEQ ID NO: 1450046 - RNA, 19 nt, Homo sapiens
  misc_RNA (1)...(19): siRNA sense strand
ggccaaaucucuacaaaag

SEQ ID NO: 1450047 - RNA, 19 nt, Homo sapiens
  misc_RNA (1)...(19): siRNA sense strand
gagcagcugggaaauuuca

SEQ ID NO: 1450048 - RNA, 19 nt, Homo sapiens
  misc_RNA (1)...(19): siRNA sense strand
ugcauagaaugaccacuuu

SEQ ID NO: 1450049 - RNA, 19 nt, Homo sapiens
  misc_RNA (1)...(19): siRNA sense strand
gcaaaugauccuaauuacu

SEQ ID NO: 1450050 - RNA, 19 nt, Homo sapiens
  misc_RNA (1)...(19): siRNA sense strand
ggguggagauggagaugau

SEQ ID NO: 1450051 - RNA, 19 nt, Homo sapiens
  misc_RNA (1)...(19): siRNA sense strand
gcacuuggaguagaaagga

SEQ ID NO: 1450052 - RNA, 19 nt, Homo sapiens
  misc_RNA (1)...(19): siRNA sense strand
caaucaacaugucaaaucg

SEQ ID NO: 1450053 - RNA, 19 nt, Homo sapiens
  misc_RNA (1)...(19): siRNA sense strand
cgacaagcagcagaagaua

SEQ ID NO: 1450054 - RNA, 19 nt, Homo sapiens
  misc_RNA (1)...(19): siRNA sense strand
guguggaauucuuugauga

SEQ ID NO: 1450055 - RNA, 19 nt, Homo sapiens
  misc_RNA (1)...(19): siRNA sense strand
cauagaaugaccacuuuau

SEQ ID NO: 1450056 - RNA, 19 nt, Homo sapiens
  misc_RNA (1)...(19): siRNA sense strand
cuguugcucuggaagcuua

SEQ ID NO: 1450057 - RNA, 19 nt, Homo sapiens
  misc_RNA (1)...(19): siRNA sense strand
gaagugaagccaguacuac

SEQ ID NO: 1450058 - RNA, 19 nt, Homo sapiens
  misc_RNA (1)...(19): siRNA sense strand
gaaaauaccauugaacauc

SEQ ID NO: 1450059 - RNA, 19 nt, Homo sapiens
  misc_RNA (1)...(19): siRNA sense strand
ggugaugccuacacuucga

SEQ ID NO: 1450060 - RNA, 19 nt, Homo sapiens
  misc_RNA (1)...(19): siRNA sense strand
gaagcuugugucaguauug

SEQ ID NO: 1450061 - RNA, 19 nt, Homo sapiens
  misc_RNA (1)...(19): siRNA sense strand
gugaaauuguuccacuguu

SEQ ID NO: 1450062 - RNA, 19 nt, Homo sapiens
  misc_RNA (1)...(19): siRNA sense strand
caauguggccaaaucucua

SEQ ID NO: 1450063 - RNA, 19 nt, Homo sapiens
  misc_RNA (1)...(19): siRNA sense strand
agaaaggacccgaagugaa

SEQ ID NO: 1450064 - RNA, 19 nt, Homo sapiens
  misc_RNA (1)...(19): siRNA sense strand
guuugaauaucaucuccaa

SEQ ID NO: 1450065 - RNA, 19 nt, Homo sapiens
  misc_RNA (1)...(19): siRNA sense strand
uucagaaccuacuuaaaga

SEQ ID NO: 1450066 - RNA, 19 nt, Homo sapiens
  misc_RNA (1)...(19): siRNA sense strand
guucaccucucgcacaucu

SEQ ID NO: 1450067 - RNA, 19 nt, Homo sapiens
  misc_RNA (1)...(19): siRNA sense strand
caacaaccucaugaaacua

SEQ ID NO: 1450068 - RNA, 19 nt, Homo sapiens
  misc_RNA (1)...(19): siRNA sense strand
gcucguggaccauguauac

SEQ ID NO: 1450069 - RNA, 19 nt, Homo sapiens
  misc_RNA (1)...(19): siRNA sense strand
ccuagcacuuggaguagaa

SEQ ID NO: 1450070 - RNA, 19 nt, Homo sapiens
  misc_RNA (1)...(19): siRNA sense strand
gggauugucuacuauuuug

SEQ ID NO: 1450071 - RNA, 19 nt, Homo sapiens
  misc_RNA (1)...(19): siRNA sense strand
agauagagagaccauaauu

SEQ ID NO: 1450072 - RNA, 19 nt, Homo sapiens
  misc_RNA (1)...(19): siRNA sense strand
gaaguuaggucaagaugaa

SEQ ID NO: 1450073 - RNA, 19 nt, Homo sapiens
  misc_RNA (1)...(19): siRNA sense strand
ggaaauaacuacuaagcaa

SEQ ID NO: 1450074 - RNA, 19 nt, Homo sapiens
  misc_RNA (1)...(19): siRNA sense strand
gaagauagagagaccauaa

SEQ ID NO: 1450075 - RNA, 19 nt, Homo sapiens
  misc_RNA (1)...(19): siRNA sense strand
gaagugaauuguugccauu

SEQ ID NO: 1450076 - RNA, 19 nt, Homo sapiens
  misc_RNA (1)...(19): siRNA sense strand
gaacaucuucuaccucuuu

SEQ ID NO: 1450077 - RNA, 19 nt, Homo sapiens
  misc_RNA (1)...(19): siRNA sense strand
ggugagaacuugcccauug

SEQ ID NO: 1450078 - RNA, 19 nt, Homo sapiens
  misc_RNA (1)...(19): siRNA sense strand
gaaaggacccgaagugaau

SEQ ID NO: 1450079 - RNA, 19 nt, Homo sapiens
  misc_RNA (1)...(19): siRNA sense strand
ggaauuagacagugugaaa

SEQ ID NO: 1450080 - RNA, 19 nt, Homo sapiens
  misc_RNA (1)...(19): siRNA sense strand
gauagagagaccauaauua

SEQ ID NO: 1450081 - RNA, 19 nt, Homo sapiens
  misc_RNA (1)...(19): siRNA sense strand
uaugguggcugacagauuu

SEQ ID NO: 1450082 - RNA, 19 nt, Homo sapiens
  misc_RNA (1)...(19): siRNA sense strand
gcucuagcuucuguaauua

SEQ ID NO: 1450083 - RNA, 19 nt, Homo sapiens
  misc_RNA (1)...(19): siRNA sense strand
gaauuguugccauuucuua

SEQ ID NO: 1450084 - RNA, 19 nt, Homo sapiens
  misc_RNA (1)...(19): siRNA sense strand
gaaccuacuuaaagacugu

SEQ ID NO: 1450085 - RNA, 19 nt, Homo sapiens
  misc_RNA (1)...(19): siRNA sense strand
aggaugaccuugagacuuu

SEQ ID NO: 1450086 - RNA, 19 nt, Homo sapiens
  misc_RNA (1)...(19): siRNA sense strand
gauccuaauuacuugcaua

SEQ ID NO: 1450087 - RNA, 19 nt, Homo sapiens
  misc_RNA (1)...(19): siRNA sense strand
ccuaauuacuugcauagaa

SEQ ID NO: 1450088 - RNA, 19 nt, Homo sapiens
  misc_RNA (1)...(19): siRNA sense strand
gaacuugcccauugaagau

SEQ ID NO: 1450089 - RNA, 19 nt, Homo sapiens
  misc_RNA (1)...(19): siRNA sense strand
uggcaaaugauccuaauua

SEQ ID NO: 1450090 - RNA, 19 nt, Homo sapiens
  misc_RNA (1)...(19): siRNA sense strand
ggcucuagcuucuguaauu

SEQ ID NO: 1450091 - RNA, 19 nt, Homo sapiens
  misc_RNA (1)...(19): siRNA sense strand
gacccgaagugaauuguug

SEQ ID NO: 1450092 - RNA, 19 nt, Homo sapiens
  misc_RNA (1)...(19): siRNA sense strand
ggaagagacuguuguucgu

SEQ ID NO: 1450093 - RNA, 19 nt, Homo sapiens
  misc_RNA (1)...(19): siRNA sense strand
ugaagaugagguacuauua

SEQ ID NO: 1450094 - RNA, 19 nt, Homo sapiens
  misc_RNA (1)...(19): siRNA sense strand
uaaagacugugaagcugaa

SEQ ID NO: 1450095 - RNA, 19 nt, Homo sapiens
  misc_RNA (1)...(19): siRNA sense strand
ccaacaaccucaugaaacu

SEQ ID NO: 1450096 - RNA, 19 nt, Homo sapiens
  misc_RNA (1)...(19): siRNA sense strand
gugaaacgcuuagcaagug

SEQ ID NO: 1450097 - RNA, 19 nt, Homo sapiens
  misc_RNA (1)...(19): siRNA sense strand
gaauaucaucuccaauuug

SEQ ID NO: 1450098 - RNA, 19 nt, Homo sapiens
  misc_RNA (1)...(19): siRNA sense strand
caaaucggcucuagcuucu

SEQ ID NO: 1450099 - RNA, 19 nt, Homo sapiens
  misc_RNA (1)...(19): siRNA sense strand
gucaggaaauaacuacuaa

SEQ ID NO: 1450100 - RNA, 19 nt, Homo sapiens
  misc_RNA (1)...(19): siRNA sense strand
gaagaugagguacuauuag

SEQ ID NO: 1450101 - RNA, 19 nt, Homo sapiens
  misc_RNA (1)...(19): siRNA sense strand
gcaaauguucgcuucaaug

SEQ ID NO: 1450102 - RNA, 19 nt, Homo sapiens
  misc_RNA (1)...(19): siRNA sense strand
gcugaauucuuuauguaug

SEQ ID NO: 1450103 - RNA, 19 nt, Homo sapiens
  misc_RNA (1)...(19): siRNA sense strand
gacguucguuugaauauca

SEQ ID NO: 1450104 - RNA, 19 nt, Homo sapiens
  misc_RNA (1)...(19): siRNA sense strand
cgacucaacaguauuaaga

SEQ ID NO: 1450105 - RNA, 19 nt, Homo sapiens
  misc_RNA (1)...(19): siRNA sense strand
gcacaggaagcuauaagug

SEQ ID NO: 1450106 - RNA, 19 nt, Homo sapiens
  misc_RNA (1)...(19): siRNA sense strand
uaaaagaacuuggugagaa

SEQ ID NO: 1450107 - RNA, 19 nt, Homo sapiens
  misc_RNA (1)...(19): siRNA sense strand
cugagcagcugggaaauuu

SEQ ID NO: 1450108 - RNA, 19 nt, Homo sapiens
  misc_RNA (1)...(19): siRNA sense strand
ugaugaagaugagguacua

SEQ ID NO: 1450109 - RNA, 19 nt, Homo sapiens
  misc_RNA (1)...(19): siRNA sense strand
ugaaauuguuccacuguuc

SEQ ID NO: 1450110 - RNA, 19 nt, Homo sapiens
  misc_RNA (1)...(19): siRNA sense strand
gcaaaugcugcccaucgua

SEQ ID NO: 1450111 - RNA, 19 nt, Homo sapiens
  misc_RNA (1)...(19): siRNA sense strand
guaaaugaagugauuggaa

SEQ ID NO: 1450112 - RNA, 19 nt, Homo sapiens
  misc_RNA (1)...(19): siRNA sense strand
ggaagcuugugucaguauu

SEQ ID NO: 1450113 - RNA, 19 nt, Homo sapiens
  misc_RNA (1)...(19): siRNA sense strand
gugagaacuugcccauuga

SEQ ID NO: 1450114 - RNA, 19 nt, Homo sapiens
  misc_RNA (1)...(19): siRNA sense strand
ggaugaguguccugacguu

SEQ ID NO: 1450115 - RNA, 19 nt, Homo sapiens
  misc_RNA (1)...(19): siRNA sense strand
gagguacuauuagcucuug

SEQ ID NO: 1450116 - RNA, 19 nt, Homo sapiens
  misc_RNA (1)...(19): siRNA sense strand
ggucaggaaauaacuacua

SEQ ID NO: 1450117 - RNA, 19 nt, Homo sapiens
  misc_RNA (1)...(19): siRNA sense strand
uaguggagcuggcagaaga

SEQ ID NO: 1450118 - RNA, 19 nt, Homo sapiens
  misc_RNA (1)...(19): siRNA sense strand
guaauuaugggauugucua

SEQ ID NO: 1450119 - RNA, 19 nt, Homo sapiens
  misc_RNA (1)...(19): siRNA sense strand
gaaauuguuccacuguuca

SEQ ID NO: 1450120 - RNA, 19 nt, Homo sapiens
  misc_RNA (1)...(19): siRNA sense strand
guagaaaggacccgaagug

SEQ ID NO: 1450121 - RNA, 19 nt, Homo sapiens
  misc_RNA (1)...(19): siRNA sense strand
gaccaauucuagauaccaa

SEQ ID NO: 1450122 - RNA, 19 nt, Homo sapiens
  misc_RNA (1)...(19): siRNA sense strand
gcauagaaugaccacuuua

SEQ ID NO: 1450123 - RNA, 19 nt, Homo sapiens
  misc_RNA (1)...(19): siRNA sense strand
gguguggaauucuuugaug

SEQ ID NO: 1450124 - RNA, 19 nt, Homo sapiens
  misc_RNA (1)...(19): siRNA sense strand
gacaagcagcagaagauaa

SEQ ID NO: 1450125 - RNA, 19 nt, Homo sapiens
  misc_RNA (1)...(19): siRNA sense strand
gagaccaaguagcaaaugu

SEQ ID NO: 1450126 - RNA, 19 nt, Homo sapiens
  misc_RNA (1)...(19): siRNA sense strand
gagaagcugccaccaacaa

SEQ ID NO: 1450127 - RNA, 19 nt, Homo sapiens
  misc_RNA (1)...(19): siRNA sense strand
gcaaagaaaauaccauuga

SEQ ID NO: 1450128 - RNA, 19 nt, Homo sapiens
  misc_RNA (1)...(19): siRNA sense strand
acaagcagcagaagauaaa

SEQ ID NO: 1450129 - RNA, 19 nt, Homo sapiens
  misc_RNA (1)...(19): siRNA sense strand
agugggagguccugacuuu

SEQ ID NO: 1450130 - RNA, 19 nt, Homo sapiens
  misc_RNA (1)...(19): siRNA sense strand
ucgacgagcuccgcaauga

SEQ ID NO: 1450131 - RNA, 19 nt, Homo sapiens
  misc_RNA (1)...(19): siRNA sense strand
caaauguucgcuucaaugu

SEQ ID NO: 1450132 - RNA, 19 nt, Homo sapiens
  misc_RNA (1)...(19): siRNA sense strand
agaaagccauggguccuaa

SEQ ID NO: 1450133 - RNA, 19 nt, Homo sapiens
  misc_RNA (1)...(19): siRNA sense strand
ugucaguauugcccaguua

SEQ ID NO: 1450134 - RNA, 19 nt, Homo sapiens
  misc_RNA (1)...(19): siRNA sense strand
ccaaucaacaugucaaauc

SEQ ID NO: 1450135 - RNA, 19 nt, Homo sapiens
  misc_RNA (1)...(19): siRNA sense strand
uguggaagcuugugucagu

SEQ ID NO: 1450136 - RNA, 19 nt, Homo sapiens
  misc_RNA (1)...(19): siRNA sense strand
ccacuuuauucugcauuaa

SEQ ID NO: 1450137 - RNA, 19 nt, Homo sapiens
  misc_RNA (1)...(19): siRNA sense strand
ggcaaaugauccuaauuac

SEQ ID NO: 1450138 - RNA, 19 nt, Homo sapiens
  misc_RNA (1)...(19): siRNA sense strand
guggaauucuuugaugaaa

SEQ ID NO: 1450139 - RNA, 19 nt, Homo sapiens
  misc_RNA (1)...(19): siRNA sense strand
uagcucaguuaaaggauga

SEQ ID NO: 1450140 - RNA, 19 nt, Homo sapiens
  misc_RNA (1)...(19): siRNA sense strand
ucuggaagcuuauuuugua

SEQ ID NO: 1450141 - RNA, 19 nt, Homo sapiens
  misc_RNA (1)...(19): siRNA sense strand
cuacagaaguuaggucaag

SEQ ID NO: 1450142 - RNA, 19 nt, Homo sapiens
  misc_RNA (1)...(19): siRNA sense strand
uagcaaauguucgcuucaa

SEQ ID NO: 1450143 - RNA, 19 nt, Homo sapiens
  misc_RNA (1)...(19): siRNA sense strand
caaaugcugcccaucguau

SEQ ID NO: 1450144 - RNA, 19 nt, Homo sapiens
  misc_RNA (1)...(19): siRNA sense strand
auuaugggauugucuacua

SEQ ID NO: 1450145 - RNA, 19 nt, Homo sapiens
  misc_RNA (1)...(19): siRNA sense strand
uuucuuagcucaguuaaag

SEQ ID NO: 1450146 - RNA, 19 nt, Homo sapiens
  misc_RNA (1)...(19): siRNA sense strand
ggccaaaucucuacaaaag

SEQ ID NO: 1450147 - RNA, 19 nt, Homo sapiens
  misc_RNA (1)...(19): siRNA sense strand
gagcagcugggaaauuuca

SEQ ID NO: 1450148 - RNA, 19 nt, Homo sapiens
  misc_RNA (1)...(19): siRNA sense strand
ugcauagaaugaccacuuu

SEQ ID NO: 1450149 - RNA, 19 nt, Homo sapiens
  misc_RNA (1)...(19): siRNA sense strand
gcaaaugauccuaauuacu

SEQ ID NO: 1450150 - RNA, 19 nt, Homo sapiens
  misc_RNA (1)...(19): siRNA sense strand
ggguggagauggagaugau

SEQ ID NO: 1450151 - RNA, 19 nt, Homo sapiens
  misc_RNA (1)...(19): siRNA sense strand
gcacuuggaguagaaagga

SEQ ID NO: 1450152 - RNA, 19 nt, Homo sapiens
  misc_RNA (1)...(19): siRNA sense strand
caaucaacaugucaaaucg

SEQ ID NO: 1450153 - RNA, 19 nt, Homo sapiens
  misc_RNA (1)...(19): siRNA sense strand
cgacaagcagcagaagaua

SEQ ID NO: 1450154 - RNA, 19 nt, Homo sapiens
  misc_RNA (1)...(19): siRNA sense strand
guguggaauucuuugauga

SEQ ID NO: 1450155 - RNA, 19 nt, Homo sapiens
  misc_RNA (1)...(19): siRNA sense strand
cauagaaugaccacuuuau

SEQ ID NO: 1450156 - RNA, 19 nt, Homo sapiens
  misc_RNA (1)...(19): siRNA sense strand
cuguugcucuggaagcuua

SEQ ID NO: 1450157 - RNA, 19 nt, Homo sapiens
  misc_RNA (1)...(19): siRNA sense strand
gaagugaagccaguacuac

SEQ ID NO: 1450158 - RNA, 19 nt, Homo sapiens
  misc_RNA (1)...(19): siRNA sense strand
gaaaauaccauugaacauc

SEQ ID NO: 1450159 - RNA, 19 nt, Homo sapiens
  misc_RNA (1)...(19): siRNA sense strand
ggugaugccuacacuucga

SEQ ID NO: 1450160 - RNA, 19 nt, Homo sapiens
  misc_RNA (1)...(19): siRNA sense strand
gaagcuugugucaguauug

SEQ ID NO: 1450161 - RNA, 19 nt, Homo sapiens
  misc_RNA (1)...(19): siRNA sense strand
gugaaauuguuccacuguu

SEQ ID NO: 1450162 - RNA, 19 nt, Homo sapiens
  misc_RNA (1)...(19): siRNA sense strand
caauguggccaaaucucua

SEQ ID NO: 1450163 - RNA, 19 nt, Homo sapiens
  misc_RNA (1)...(19): siRNA sense strand
agaaaggacccgaagugaa

SEQ ID NO: 1450164 - RNA, 19 nt, Homo sapiens
  misc_RNA (1)...(19): siRNA sense strand
guuugaauaucaucuccaa

SEQ ID NO: 1450165 - RNA, 19 nt, Homo sapiens
  misc_RNA (1)...(19): siRNA sense strand
uucagaaccuacuuaaaga

SEQ ID NO: 1450166 - RNA, 19 nt, Homo sapiens
  misc_RNA (1)...(19): siRNA sense strand
guucaccucucgcacaucu

SEQ ID NO: 1450167 - RNA, 19 nt, Homo sapiens
  misc_RNA (1)...(19): siRNA sense strand
caacaaccucaugaaacua

SEQ ID NO: 1450168 - RNA, 19 nt, Homo sapiens
  misc_RNA (1)...(19): siRNA sense strand
gcucguggaccauguauac

SEQ ID NO: 1450169 - RNA, 19 nt, Homo sapiens
  misc_RNA (1)...(19): siRNA sense strand
ccuagcacuuggaguagaa

SEQ ID NO: 1450170 - RNA, 19 nt, Homo sapiens
  misc_RNA (1)...(19): siRNA sense strand
gggauugucuacuauuuug

SEQ ID NO: 1450171 - RNA, 19 nt, Homo sapiens
  misc_RNA (1)...(19): siRNA sense strand
agauagagagaccauaauu

SEQ ID NO: 1450172 - RNA, 19 nt, Homo sapiens
  misc_RNA (1)...(19): siRNA sense strand
guacagaucuuguugcuaa

SEQ ID NO: 1450173 - RNA, 19 nt, Homo sapiens
  misc_RNA (1)...(19): siRNA sense strand
ggaggaaccugugaaauaa

SEQ ID NO: 1450174 - RNA, 19 nt, Homo sapiens
  misc_RNA (1)...(19): siRNA sense strand
ggagaacacuggacuguau

SEQ ID NO: 1450175 - RNA, 19 nt, Homo sapiens
  misc_RNA (1)...(19): siRNA sense strand
caaagugacuggcaucauu

SEQ ID NO: 1450176 - RNA, 19 nt, Homo sapiens
  misc_RNA (1)...(19): siRNA sense strand
gagaguuacuggugugauu

SEQ ID NO: 1450177 - RNA, 19 nt, Homo sapiens
  misc_RNA (1)...(19): siRNA sense strand
gaaaucaggacauauacaa

SEQ ID NO: 1450178 - RNA, 19 nt, Homo sapiens
  misc_RNA (1)...(19): siRNA sense strand
ggaaagacuugggcaaugu

SEQ ID NO: 1450179 - RNA, 19 nt, Homo sapiens
  misc_RNA (1)...(19): siRNA sense strand
caaacuggcuuacagcaau

SEQ ID NO: 1450180 - RNA, 19 nt, Homo sapiens
  misc_RNA (1)...(19): siRNA sense strand
ugaaauaagugaagcauac

SEQ ID NO: 1450181 - RNA, 19 nt, Homo sapiens
  misc_RNA (1)...(19): siRNA sense strand
ucagaacgcucaacaugga

SEQ ID NO: 1450182 - RNA, 19 nt, Homo sapiens
  misc_RNA (1)...(19): siRNA sense strand
guggaaacauugauaacaa

SEQ ID NO: 1450183 - RNA, 19 nt, Homo sapiens
  misc_RNA (1)...(19): siRNA sense strand
uggaggaaccugugaaaua

SEQ ID NO: 1450184 - RNA, 19 nt, Homo sapiens
  misc_RNA (1)...(19): siRNA sense strand
ggccguggauucagauaaa

SEQ ID NO: 1450185 - RNA, 19 nt, Homo sapiens
  misc_RNA (1)...(19): siRNA sense strand
cagauaaauuugcaaagga

SEQ ID NO: 1450186 - RNA, 19 nt, Homo sapiens
  misc_RNA (1)...(19): siRNA sense strand
caucgacccucccaucuau

SEQ ID NO: 1450187 - RNA, 19 nt, Homo sapiens
  misc_RNA (1)...(19): siRNA sense strand
gauaacaacacuccauaug

SEQ ID NO: 1450188 - RNA, 19 nt, Homo sapiens
  misc_RNA (1)...(19): siRNA sense strand
gaaagacuugggcaaugua

SEQ ID NO: 1450189 - RNA, 19 nt, Homo sapiens
  misc_RNA (1)...(19): siRNA sense strand
uaacaacacuccauaugcu

SEQ ID NO: 1450190 - RNA, 19 nt, Homo sapiens
  misc_RNA (1)...(19): siRNA sense strand
ccuaauccaugccauaaug

SEQ ID NO: 1450191 - RNA, 19 nt, Homo sapiens
  misc_RNA (1)...(19): siRNA sense strand
gaagguggaauuauaucaa

SEQ ID NO: 1450192 - RNA, 19 nt, Homo sapiens
  misc_RNA (1)...(19): siRNA sense strand
acaaggagcuaaagauuuu

SEQ ID NO: 1450193 - RNA, 19 nt, Homo sapiens
  misc_RNA (1)...(19): siRNA sense strand
uuacagcaaugauggagaa

SEQ ID NO: 1450194 - RNA, 19 nt, Homo sapiens
  misc_RNA (1)...(19): siRNA sense strand
uuaaugggauucacuguca

SEQ ID NO: 1450195 - RNA, 19 nt, Homo sapiens
  misc_RNA (1)...(19): siRNA sense strand
ucgaagacauugcacuuug

SEQ ID NO: 1450196 - RNA, 19 nt, Homo sapiens
  misc_RNA (1)...(19): siRNA sense strand
gacaugguguuucguggaa

SEQ ID NO: 1450197 - RNA, 19 nt, Homo sapiens
  misc_RNA (1)...(19): siRNA sense strand
gguggaauauguacagauc

SEQ ID NO: 1450198 - RNA, 19 nt, Homo sapiens
  misc_RNA (1)...(19): siRNA sense strand
ggaaagcucggcuggacaa

SEQ ID NO: 1450199 - RNA, 19 nt, Homo sapiens
  misc_RNA (1)...(19): siRNA sense strand
caaaggaaaaugagaguua

SEQ ID NO: 1450200 - RNA, 19 nt, Homo sapiens
  misc_RNA (1)...(19): siRNA sense strand
auacaagacuaucagauca

SEQ ID NO: 1450201 - RNA, 19 nt, Homo sapiens
  misc_RNA (1)...(19): siRNA sense strand
aaauggagguaucuguuug

SEQ ID NO: 1450202 - RNA, 19 nt, Homo sapiens
  misc_RNA (1)...(19): siRNA sense strand
ggacaagcaaggcaaagug

SEQ ID NO: 1450203 - RNA, 19 nt, Homo sapiens
  misc_RNA (1)...(19): siRNA sense strand
gcgaauuuaugggaagaaa

SEQ ID NO: 1450204 - RNA, 19 nt, Homo sapiens
  misc_RNA (1)...(19): siRNA sense strand
ggaagcccagaguauauaa

SEQ ID NO: 1450205 - RNA, 19 nt, Homo sapiens
  misc_RNA (1)...(19): siRNA sense strand
acaaugacacucacagaaa

SEQ ID NO: 1450206 - RNA, 19 nt, Homo sapiens
  misc_RNA (1)...(19): siRNA sense strand
aaagugacuggcaucauua

SEQ ID NO: 1450207 - RNA, 19 nt, Homo sapiens
  misc_RNA (1)...(19): siRNA sense strand
guucugagccucuggguau

SEQ ID NO: 1450208 - RNA, 19 nt, Homo sapiens
  misc_RNA (1)...(19): siRNA sense strand
ggauucagauaaauuugca

SEQ ID NO: 1450209 - RNA, 19 nt, Homo sapiens
  misc_RNA (1)...(19): siRNA sense strand
gacaaugacacucacagaa

SEQ ID NO: 1450210 - RNA, 19 nt, Homo sapiens
  misc_RNA (1)...(19): siRNA sense strand
gagaacacuggacuguaua

SEQ ID NO: 1450211 - RNA, 19 nt, Homo sapiens
  misc_RNA (1)...(19): siRNA sense strand
acagguggaucuucuuguu

SEQ ID NO: 1450212 - RNA, 19 nt, Homo sapiens
  misc_RNA (1)...(19): siRNA sense strand
caggacauauacaagacua

SEQ ID NO: 1450213 - RNA, 19 nt, Homo sapiens
  misc_RNA (1)...(19): siRNA sense strand
guaaugauggaaagacuug

SEQ ID NO: 1450214 - RNA, 19 nt, Homo sapiens
  misc_RNA (1)...(19): siRNA sense strand
gaaccugugaaauaaguga

SEQ ID NO: 1450215 - RNA, 19 nt, Homo sapiens
  misc_RNA (1)...(19): siRNA sense strand
acacaaggagcuaaagauu

SEQ ID NO: 1450216 - RNA, 19 nt, Homo sapiens
  misc_RNA (1)...(19): siRNA sense strand
ucagauaaauuugcaaagg

SEQ ID NO: 1450217 - RNA, 19 nt, Homo sapiens
  misc_RNA (1)...(19): siRNA sense strand
cacaaggagcuaaagauuu

SEQ ID NO: 1450218 - RNA, 19 nt, Homo sapiens
  misc_RNA (1)...(19): siRNA sense strand
ugacuggcaucauuacaca

SEQ ID NO: 1450219 - RNA, 19 nt, Homo sapiens
  misc_RNA (1)...(19): siRNA sense strand
gaaaggcaccaaugaagac

SEQ ID NO: 1450220 - RNA, 19 nt, Homo sapiens
  misc_RNA (1)...(19): siRNA sense strand
cagcacaacauaaaugaau

SEQ ID NO: 1450221 - RNA, 19 nt, Homo sapiens
  misc_RNA (1)...(19): siRNA sense strand
ggucauguacaguuuguug

SEQ ID NO: 1450222 - RNA, 19 nt, Homo sapiens
  misc_RNA (1)...(19): siRNA sense strand
ggaccucuggccacaauga

SEQ ID NO: 1450223 - RNA, 19 nt, Homo sapiens
  misc_RNA (1)...(19): siRNA sense strand
ugaaaggcaccaaugaaga

SEQ ID NO: 1450224 - RNA, 19 nt, Homo sapiens
  misc_RNA (1)...(19): siRNA sense strand
auaaaugaaugcgaaguug

SEQ ID NO: 1450225 - RNA, 19 nt, Homo sapiens
  misc_RNA (1)...(19): siRNA sense strand
uaaaugaaugcgaaguuga

SEQ ID NO: 1450226 - RNA, 19 nt, Homo sapiens
  misc_RNA (1)...(19): siRNA sense strand
caaugaagacaugguguuu

SEQ ID NO: 1450227 - RNA, 19 nt, Homo sapiens
  misc_RNA (1)...(19): siRNA sense strand
uggaauauguacagaucuu

SEQ ID NO: 1450228 - RNA, 19 nt, Homo sapiens
  misc_RNA (1)...(19): siRNA sense strand
caaugacacucacagaaaa

SEQ ID NO: 1450229 - RNA, 19 nt, Homo sapiens
  misc_RNA (1)...(19): siRNA sense strand
gcaaagaaaagauaagguu

SEQ ID NO: 1450230 - RNA, 19 nt, Homo sapiens
  misc_RNA (1)...(19): siRNA sense strand
gacaagcaaggcaaaguga

SEQ ID NO: 1450231 - RNA, 19 nt, Homo sapiens
  misc_RNA (1)...(19): siRNA sense strand
ccaaggagccaagaggauu

SEQ ID NO: 1450232 - RNA, 19 nt, Homo sapiens
  misc_RNA (1)...(19): siRNA sense strand
ugagugcccaggcgaauuu

SEQ ID NO: 1450233 - RNA, 19 nt, Homo sapiens
  misc_RNA (1)...(19): siRNA sense strand
cagaucuuguugcuaacua

SEQ ID NO: 1450234 - RNA, 19 nt, Homo sapiens
  misc_RNA (1)...(19): siRNA sense strand
gaauauguacagaucuugu

SEQ ID NO: 1450235 - RNA, 19 nt, Homo sapiens
  misc_RNA (1)...(19): siRNA sense strand
gaaaauggagguaucuguu

SEQ ID NO: 1450236 - RNA, 19 nt, Homo sapiens
  misc_RNA (1)...(19): siRNA sense strand
ggacauauacaagacuauc

SEQ ID NO: 1450237 - RNA, 19 nt, Homo sapiens
  misc_RNA (1)...(19): siRNA sense strand
acuaugcacgucuuaauaa

SEQ ID NO: 1450238 - RNA, 19 nt, Homo sapiens
  misc_RNA (1)...(19): siRNA sense strand
aaucacagcuuccucuacu

SEQ ID NO: 1450239 - RNA, 19 nt, Homo sapiens
  misc_RNA (1)...(19): siRNA sense strand
cauaaaugaaugcgaaguu

SEQ ID NO: 1450240 - RNA, 19 nt, Homo sapiens
  misc_RNA (1)...(19): siRNA sense strand
caaaucacagcuuccucua

SEQ ID NO: 1450241 - RNA, 19 nt, Homo sapiens
  misc_RNA (1)...(19): siRNA sense strand
cuacaguaaugauggaaag

SEQ ID NO: 1450242 - RNA, 19 nt, Homo sapiens
  misc_RNA (1)...(19): siRNA sense strand
aaaauugccuacaguaaug

SEQ ID NO: 1450243 - RNA, 19 nt, Homo sapiens
  misc_RNA (1)...(19): siRNA sense strand
gauuggaagcccagaguau

SEQ ID NO: 1450244 - RNA, 19 nt, Homo sapiens
  misc_RNA (1)...(19): siRNA sense strand
uggaaagacuugggcaaug

SEQ ID NO: 1450245 - RNA, 19 nt, Homo sapiens
  misc_RNA (1)...(19): siRNA sense strand
gaagcccagaguauauaaa

SEQ ID NO: 1450246 - RNA, 19 nt, Homo sapiens
  misc_RNA (1)...(19): siRNA sense strand
gcacgacacauaagaaucc

SEQ ID NO: 1450247 - RNA, 19 nt, Homo sapiens
  misc_RNA (1)...(19): siRNA sense strand
aaacuggcuuacagcaaug

SEQ ID NO: 1450248 - RNA, 19 nt, Homo sapiens
  misc_RNA (1)...(19): siRNA sense strand
caagcaaggcaaagugaau

SEQ ID NO: 1450249 - RNA, 19 nt, Homo sapiens
  misc_RNA (1)...(19): siRNA sense strand
cuccauaugcuaacucuuu

SEQ ID NO: 1450250 - RNA, 19 nt, Homo sapiens
  misc_RNA (1)...(19): siRNA sense strand
ggcaauguacaaagugaaa

SEQ ID NO: 1450251 - RNA, 19 nt, Homo sapiens
  misc_RNA (1)...(19): siRNA sense strand
guggacagcugcagaaaau

SEQ ID NO: 1450252 - RNA, 19 nt, Homo sapiens
  misc_RNA (1)...(19): siRNA sense strand
aaucaggacauauacaaga

SEQ ID NO: 1450253 - RNA, 19 nt, Homo sapiens
  misc_RNA (1)...(19): siRNA sense strand
ggaacuucuuggcugugaa

SEQ ID NO: 1450254 - RNA, 19 nt, Homo sapiens
  misc_RNA (1)...(19): siRNA sense strand
ggaaacauugauaacaaca

SEQ ID NO: 1450255 - RNA, 19 nt, Homo sapiens
  misc_RNA (1)...(19): siRNA sense strand
ccaaugaagacaugguguu

SEQ ID NO: 1450256 - RNA, 19 nt, Homo sapiens
  misc_RNA (1)...(19): siRNA sense strand
ggauuggaagcccagagua

SEQ ID NO: 1450257 - RNA, 19 nt, Homo sapiens
  misc_RNA (1)...(19): siRNA sense strand
ggacagcugcagaaaauga

SEQ ID NO: 1450258 - RNA, 19 nt, Homo sapiens
  misc_RNA (1)...(19): siRNA sense strand
gaucuuguugcuaacuauu

SEQ ID NO: 1450259 - RNA, 19 nt, Homo sapiens
  misc_RNA (1)...(19): siRNA sense strand
gcuccuacaaacuggcuua

SEQ ID NO: 1450260 - RNA, 19 nt, Homo sapiens
  misc_RNA (1)...(19): siRNA sense strand
gguuacagguggaucuucu

SEQ ID NO: 1450261 - RNA, 19 nt, Homo sapiens
  misc_RNA (1)...(19): siRNA sense strand
caaggagccaagaggauug

SEQ ID NO: 1450262 - RNA, 19 nt, Homo sapiens
  misc_RNA (1)...(19): siRNA sense strand
gaucccaauccaugugaaa

SEQ ID NO: 1450263 - RNA, 19 nt, Homo sapiens
  misc_RNA (1)...(19): siRNA sense strand
aaaaugguaucccuacuau

SEQ ID NO: 1450264 - RNA, 19 nt, Homo sapiens
  misc_RNA (1)...(19): siRNA sense strand
uaggcuauguuuguaaaug

SEQ ID NO: 1450265 - RNA, 19 nt, Homo sapiens
  misc_RNA (1)...(19): siRNA sense strand
ccuacaaacuggcuuacag

SEQ ID NO: 1450266 - RNA, 19 nt, Homo sapiens
  misc_RNA (1)...(19): siRNA sense strand
gugaaaggcaccaaugaag

SEQ ID NO: 1450267 - RNA, 19 nt, Homo sapiens
  misc_RNA (1)...(19): siRNA sense strand
uacuaugcacgucuuaaua

SEQ ID NO: 1450268 - RNA, 19 nt, Homo sapiens
  misc_RNA (1)...(19): siRNA sense strand
gaaguugagccuugcaaaa

SEQ ID NO: 1450269 - RNA, 19 nt, Homo sapiens
  misc_RNA (1)...(19): siRNA sense strand
ccgaggauuuaaugggauu

SEQ ID NO: 1450270 - RNA, 19 nt, Homo sapiens
  misc_RNA (1)...(19): siRNA sense strand
gugaaauaagugaagcaua

SEQ ID NO: 1450271 - RNA, 19 nt, Homo sapiens
  misc_RNA (1)...(19): siRNA sense strand
uauacaagacuaucagauc

SEQ ID NO: 1450272 - RNA, 19 nt, Homo sapiens
  misc_RNA (1)...(19): siRNA sense strand
gcagagagauaaagaguuu

SEQ ID NO: 1450273 - RNA, 19 nt, Homo sapiens
  misc_RNA (1)...(19): siRNA sense strand
gauaaagaguuucgacuaa

SEQ ID NO: 1450274 - RNA, 19 nt, Homo sapiens
  misc_RNA (1)...(19): siRNA sense strand
auaaugggcucucagaaua

SEQ ID NO: 1450275 - RNA, 19 nt, Homo sapiens
  misc_RNA (1)...(19): siRNA sense strand
gaaauugaccaguacagaa

SEQ ID NO: 1450276 - RNA, 19 nt, Homo sapiens
  misc_RNA (1)...(19): siRNA sense strand
cuacagagccaccaacuaa

SEQ ID NO: 1450277 - RNA, 19 nt, Homo sapiens
  misc_RNA (1)...(19): siRNA sense strand
gaacaaacacuagggaaga

SEQ ID NO: 1450278 - RNA, 19 nt, Homo sapiens
  misc_RNA (1)...(19): siRNA sense strand
gauaaugggcucucagaau

SEQ ID NO: 1450279 - RNA, 19 nt, Homo sapiens
  misc_RNA (1)...(19): siRNA sense strand
gggaagauacaagaacuua

SEQ ID NO: 1450280 - RNA, 19 nt, Homo sapiens
  misc_RNA (1)...(19): siRNA sense strand
ucucucagaugaaauagaa

SEQ ID NO: 1450281 - RNA, 19 nt, Homo sapiens
  misc_RNA (1)...(19): siRNA sense strand
ggaagcaaugguagaaauu

SEQ ID NO: 1450282 - RNA, 19 nt, Homo sapiens
  misc_RNA (1)...(19): siRNA sense strand
ggacacuacaauaaguaua

SEQ ID NO: 1450283 - RNA, 19 nt, Homo sapiens
  misc_RNA (1)...(19): siRNA sense strand
caaggaggaagcaauggua

SEQ ID NO: 1450284 - RNA, 19 nt, Homo sapiens
  misc_RNA (1)...(19): siRNA sense strand
ggaagauacaagaacuuaa

SEQ ID NO: 1450285 - RNA, 19 nt, Homo sapiens
  misc_RNA (1)...(19): siRNA sense strand
ggaggaagcaaugguagaa

SEQ ID NO: 1450286 - RNA, 19 nt, Homo sapiens
  misc_RNA (1)...(19): siRNA sense strand
gguagaaauugaccaguac

SEQ ID NO: 1450287 - RNA, 19 nt, Homo sapiens
  misc_RNA (1)...(19): siRNA sense strand
cagaugaaauagaagaaca

SEQ ID NO: 1450288 - RNA, 19 nt, Homo sapiens
  misc_RNA (1)...(19): siRNA sense strand
gaagcaagccaaggaggaa

SEQ ID NO: 1450289 - RNA, 19 nt, Homo sapiens
  misc_RNA (1)...(19): siRNA sense strand
gaaugcagagagauaaaga

SEQ ID NO: 1450290 - RNA, 19 nt, Homo sapiens
  misc_RNA (1)...(19): siRNA sense strand
gauacaagaacuuaaugga

SEQ ID NO: 1450291 - RNA, 19 nt, Homo sapiens
  misc_RNA (1)...(19): siRNA sense strand
gaacuuaauggacacuaca

SEQ ID NO: 1450292 - RNA, 19 nt, Homo sapiens
  misc_RNA (1)...(19): siRNA sense strand
cuuaauggacacuacaaua

SEQ ID NO: 1450293 - RNA, 19 nt, Homo sapiens
  misc_RNA (1)...(19): siRNA sense strand
cagaaauccaugugaacua

SEQ ID NO: 1450294 - RNA, 19 nt, Homo sapiens
  misc_RNA (1)...(19): siRNA sense strand
aaccagaaauccaugugaa

SEQ ID NO: 1450295 - RNA, 19 nt, Homo sapiens
  misc_RNA (1)...(19): siRNA sense strand
agauaaagaguuucgacua

SEQ ID NO: 1450296 - RNA, 19 nt, Homo sapiens
  misc_RNA (1)...(19): siRNA sense strand
uaaugggcucucagaauaa

SEQ ID NO: 1450297 - RNA, 19 nt, Homo sapiens
  misc_RNA (1)...(19): siRNA sense strand
gaaaccagaaauccaugug

SEQ ID NO: 1450298 - RNA, 19 nt, Homo sapiens
  misc_RNA (1)...(19): siRNA sense strand
gauugaagcaagccaagga

SEQ ID NO: 1450299 - RNA, 19 nt, Homo sapiens
  misc_RNA (1)...(19): siRNA sense strand
aggaagcaaugguagaaau

SEQ ID NO: 1450300 - RNA, 19 nt, Homo sapiens
  misc_RNA (1)...(19): siRNA sense strand
gugaugaaccagcucuuga

SEQ ID NO: 1450301 - RNA, 19 nt, Homo sapiens
  misc_RNA (1)...(19): siRNA sense strand
ugacaugaaaccagaaauc

SEQ ID NO: 1450302 - RNA, 19 nt, Homo sapiens
  misc_RNA (1)...(19): siRNA sense strand
uacagaaugcagagagaua

SEQ ID NO: 1450303 - RNA, 19 nt, Homo sapiens
  misc_RNA (1)...(19): siRNA sense strand
agaaauccaugugaacuac

SEQ ID NO: 1450304 - RNA, 19 nt, Homo sapiens
  misc_RNA (1)...(19): siRNA sense strand
aaauugaccaguacagaau

SEQ ID NO: 1450305 - RNA, 19 nt, Homo sapiens
  misc_RNA (1)...(19): siRNA sense strand
aauggacacuacaauaagu

SEQ ID NO: 1450306 - RNA, 19 nt, Homo sapiens
  misc_RNA (1)...(19): siRNA sense strand
caaggacaagcuagaggaa

SEQ ID NO: 1450307 - RNA, 19 nt, Homo sapiens
  misc_RNA (1)...(19): siRNA sense strand
acagaaugcagagagauaa

SEQ ID NO: 1450308 - RNA, 19 nt, Homo sapiens
  misc_RNA (1)...(19): siRNA sense strand
gaggaagcaaugguagaaa

SEQ ID NO: 1450309 - RNA, 19 nt, Homo sapiens
  misc_RNA (1)...(19): siRNA sense strand
cagaaugcagagagauaaa

SEQ ID NO: 1450310 - RNA, 19 nt, Homo sapiens
  misc_RNA (1)...(19): siRNA sense strand
uaauggacacuacaauaag

SEQ ID NO: 1450311 - RNA, 19 nt, Homo sapiens
  misc_RNA (1)...(19): siRNA sense strand
caugaaaccagaaauccau

SEQ ID NO: 1450312 - RNA, 19 nt, Homo sapiens
  misc_RNA (1)...(19): siRNA sense strand
gaaauagaagaacaaacac

SEQ ID NO: 1450313 - RNA, 19 nt, Homo sapiens
  misc_RNA (1)...(19): siRNA sense strand
aaaccagaaauccauguga

SEQ ID NO: 1450314 - RNA, 19 nt, Homo sapiens
  misc_RNA (1)...(19): siRNA sense strand
uggaaagugugaugaacca

SEQ ID NO: 1450315 - RNA, 19 nt, Homo sapiens
  misc_RNA (1)...(19): siRNA sense strand
guauauggaaagugugaug

SEQ ID NO: 1450316 - RNA, 19 nt, Homo sapiens
  misc_RNA (1)...(19): siRNA sense strand
uagggaagauacaagaacu

SEQ ID NO: 1450317 - RNA, 19 nt, Homo sapiens
  misc_RNA (1)...(19): siRNA sense strand
gaaauccaugugaacuaca

SEQ ID NO: 1450318 - RNA, 19 nt, Homo sapiens
  misc_RNA (1)...(19): siRNA sense strand
cgacuaaaacaaucuaaga

SEQ ID NO: 1450319 - RNA, 19 nt, Homo sapiens
  misc_RNA (1)...(19): siRNA sense strand
acaaacacuagggaagaua

SEQ ID NO: 1450320 - RNA, 19 nt, Homo sapiens
  misc_RNA (1)...(19): siRNA sense strand
aaugggcucucagaauaau

SEQ ID NO: 1450321 - RNA, 19 nt, Homo sapiens
  misc_RNA (1)...(19): siRNA sense strand
gggccaaggacaagcuaga

SEQ ID NO: 1450322 - RNA, 19 nt, Homo sapiens
  misc_RNA (1)...(19): siRNA sense strand
agaaauugaccaguacaga

SEQ ID NO: 1450323 - RNA, 19 nt, Homo sapiens
  misc_RNA (1)...(19): siRNA sense strand
cuaagauaaugggcucuca

SEQ ID NO: 1450324 - RNA, 19 nt, Homo sapiens
  misc_RNA (1)...(19): siRNA sense strand
ucuugagcauggucuguga

SEQ ID NO: 1450325 - RNA, 19 nt, Homo sapiens
  misc_RNA (1)...(19): siRNA sense strand
gcuagaggaagccaagaag

SEQ ID NO: 1450326 - RNA, 19 nt, Homo sapiens
  misc_RNA (1)...(19): siRNA sense strand
gaaaaggaaagcgauugaa

SEQ ID NO: 1450327 - RNA, 19 nt, Homo sapiens
  misc_RNA (1)...(19): siRNA sense strand
aaggaaagcgauugaagca

SEQ ID NO: 1450328 - RNA, 19 nt, Homo sapiens
  misc_RNA (1)...(19): siRNA sense strand
guacagaaugcagagagau

SEQ ID NO: 1450329 - RNA, 19 nt, Homo sapiens
  misc_RNA (1)...(19): siRNA sense strand
ucucagaugaaauagaaga

SEQ ID NO: 1450330 - RNA, 19 nt, Homo sapiens
  misc_RNA (1)...(19): siRNA sense strand
aagauaaugggcucucaga

SEQ ID NO: 1450331 - RNA, 19 nt, Homo sapiens
  misc_RNA (1)...(19): siRNA sense strand
caaacacuagggaagauac

SEQ ID NO: 1450332 - RNA, 19 nt, Homo sapiens
  misc_RNA (1)...(19): siRNA sense strand
aacaaacacuagggaagau

SEQ ID NO: 1450333 - RNA, 19 nt, Homo sapiens
  misc_RNA (1)...(19): siRNA sense strand
ggaagcaaugguagaaauu

SEQ ID NO: 1450334 - RNA, 19 nt, Homo sapiens
  misc_RNA (1)...(19): siRNA sense strand
caaggaggaagcaauggua

SEQ ID NO: 1450335 - RNA, 19 nt, Homo sapiens
  misc_RNA (1)...(19): siRNA sense strand
ggaggaagcaaugguagaa

SEQ ID NO: 1450336 - RNA, 19 nt, Homo sapiens
  misc_RNA (1)...(19): siRNA sense strand
gaagcaagccaaggaggaa

SEQ ID NO: 1450337 - RNA, 19 nt, Homo sapiens
  misc_RNA (1)...(19): siRNA sense strand
gauugaagcaagccaagga

SEQ ID NO: 1450338 - RNA, 19 nt, Homo sapiens
  misc_RNA (1)...(19): siRNA sense strand
aggaagcaaugguagaaau

SEQ ID NO: 1450339 - RNA, 19 nt, Homo sapiens
  misc_RNA (1)...(19): siRNA sense strand
caaggacaagcuagaggaa

SEQ ID NO: 1450340 - RNA, 19 nt, Homo sapiens
  misc_RNA (1)...(19): siRNA sense strand
gaggaagcaaugguagaaa

SEQ ID NO: 1450341 - RNA, 19 nt, Homo sapiens
  misc_RNA (1)...(19): siRNA sense strand
gggccaaggacaagcuaga

SEQ ID NO: 1450342 - RNA, 19 nt, Homo sapiens
  misc_RNA (1)...(19): siRNA sense strand
gcuagaggaagccaagaag

SEQ ID NO: 1450343 - RNA, 19 nt, Homo sapiens
  misc_RNA (1)...(19): siRNA sense strand
aaggaaagcgauugaagca

SEQ ID NO: 1450344 - RNA, 19 nt, Homo sapiens
  misc_RNA (1)...(19): siRNA sense strand
gaaaaggaaagcgauugaa

SEQ ID NO: 1450345 - RNA, 19 nt, Homo sapiens
  misc_RNA (1)...(19): siRNA sense strand
ggaaagagcucagagauga

SEQ ID NO: 1450346 - RNA, 19 nt, Homo sapiens
  misc_RNA (1)...(19): siRNA sense strand
ugaagaaucucaugaguuu

SEQ ID NO: 1450347 - RNA, 19 nt, Homo sapiens
  misc_RNA (1)...(19): siRNA sense strand
gagcagcgauggagaaauu

SEQ ID NO: 1450348 - RNA, 19 nt, Homo sapiens
  misc_RNA (1)...(19): siRNA sense strand
ggaaacaccugaugucaau

SEQ ID NO: 1450349 - RNA, 19 nt, Homo sapiens
  misc_RNA (1)...(19): siRNA sense strand
gauagacucugaagaagaa

SEQ ID NO: 1450350 - RNA, 19 nt, Homo sapiens
  misc_RNA (1)...(19): siRNA sense strand
ggaaaucgaaucagagaua

SEQ ID NO: 1450351 - RNA, 19 nt, Homo sapiens
  misc_RNA (1)...(19): siRNA sense strand
ugaagaagaucccuacuug

SEQ ID NO: 1450352 - RNA, 19 nt, Homo sapiens
  misc_RNA (1)...(19): siRNA sense strand
ccaaacaucugccgaaauc

SEQ ID NO: 1450353 - RNA, 19 nt, Homo sapiens
  misc_RNA (1)...(19): siRNA sense strand
ccaaaugacugugaaagaa

SEQ ID NO: 1450354 - RNA, 19 nt, Homo sapiens
  misc_RNA (1)...(19): siRNA sense strand
ggagcgagcuuguuaacug

SEQ ID NO: 1450355 - RNA, 19 nt, Homo sapiens
  misc_RNA (1)...(19): siRNA sense strand
gaaacuaauucccguguca

SEQ ID NO: 1450356 - RNA, 19 nt, Homo sapiens
  misc_RNA (1)...(19): siRNA sense strand
ucagaaagguggaagaaga

SEQ ID NO: 1450357 - RNA, 19 nt, Homo sapiens
  misc_RNA (1)...(19): siRNA sense strand
gagcucaccucauccagaa

SEQ ID NO: 1450358 - RNA, 19 nt, Homo sapiens
  misc_RNA (1)...(19): siRNA sense strand
gaggaguucuauagaguuu

SEQ ID NO: 1450359 - RNA, 19 nt, Homo sapiens
  misc_RNA (1)...(19): siRNA sense strand
gagaaaguguuugagauga

SEQ ID NO: 1450360 - RNA, 19 nt, Homo sapiens
  misc_RNA (1)...(19): siRNA sense strand
gaagugagagcuaugaaga

SEQ ID NO: 1450361 - RNA, 19 nt, Homo sapiens
  misc_RNA (1)...(19): siRNA sense strand
ugaaggaaaucgaaucaga

SEQ ID NO: 1450362 - RNA, 19 nt, Homo sapiens
  misc_RNA (1)...(19): siRNA sense strand
gauucgaucucuucuuuau

SEQ ID NO: 1450363 - RNA, 19 nt, Homo sapiens
  misc_RNA (1)...(19): siRNA sense strand
ugagaugagucaagauaaa

SEQ ID NO: 1450364 - RNA, 19 nt, Homo sapiens
  misc_RNA (1)...(19): siRNA sense strand
gcuaagagccaauuucuca

SEQ ID NO: 1450365 - RNA, 19 nt, Homo sapiens
  misc_RNA (1)...(19): siRNA sense strand
ccgauucgaucucuucuuu

SEQ ID NO: 1450366 - RNA, 19 nt, Homo sapiens
  misc_RNA (1)...(19): siRNA sense strand
ugccgaaucucuaaccuua

SEQ ID NO: 1450367 - RNA, 19 nt, Homo sapiens
  misc_RNA (1)...(19): siRNA sense strand
gaacugauucguccugaga

SEQ ID NO: 1450368 - RNA, 19 nt, Homo sapiens
  misc_RNA (1)...(19): siRNA sense strand
caaucuagaucaagaggaa

SEQ ID NO: 1450369 - RNA, 19 nt, Homo sapiens
  misc_RNA (1)...(19): siRNA sense strand
caacaggaggagauucuua

SEQ ID NO: 1450370 - RNA, 19 nt, Homo sapiens
  misc_RNA (1)...(19): siRNA sense strand
gaucagggauguagaacag

SEQ ID NO: 1450371 - RNA, 19 nt, Homo sapiens
  misc_RNA (1)...(19): siRNA sense strand
ucaagagucugcucccaaa

SEQ ID NO: 1450372 - RNA, 19 nt, Homo sapiens
  misc_RNA (1)...(19): siRNA sense strand
caauuuaaccagcaacuuu

SEQ ID NO: 1450373 - RNA, 19 nt, Homo sapiens
  misc_RNA (1)...(19): siRNA sense strand
uuagggaccuuucuuauag

SEQ ID NO: 1450374 - RNA, 19 nt, Homo sapiens
  misc_RNA (1)...(19): siRNA sense strand
gauguuggcugauaauggu

SEQ ID NO: 1450375 - RNA, 19 nt, Homo sapiens
  misc_RNA (1)...(19): siRNA sense strand
ggaugaauguaaugagguu

SEQ ID NO: 1450376 - RNA, 19 nt, Homo sapiens
  misc_RNA (1)...(19): siRNA sense strand
ucuauagaguuuacccuua

SEQ ID NO: 1450377 - RNA, 19 nt, Homo sapiens
  misc_RNA (1)...(19): siRNA sense strand
gaaaucgaaucagagauag

SEQ ID NO: 1450378 - RNA, 19 nt, Homo sapiens
  misc_RNA (1)...(19): siRNA sense strand
ccgaaucucuaaccuuauu

SEQ ID NO: 1450379 - RNA, 19 nt, Homo sapiens
  misc_RNA (1)...(19): siRNA sense strand
cauaguagauuugcauuca

SEQ ID NO: 1450380 - RNA, 19 nt, Homo sapiens
  misc_RNA (1)...(19): siRNA sense strand
gguuacagauuaugccauu

SEQ ID NO: 1450381 - RNA, 19 nt, Homo sapiens
  misc_RNA (1)...(19): siRNA sense strand
gauaaugguguguguugua

SEQ ID NO: 1450382 - RNA, 19 nt, Homo sapiens
  misc_RNA (1)...(19): siRNA sense strand
caagaggaguucuauagag

SEQ ID NO: 1450383 - RNA, 19 nt, Homo sapiens
  misc_RNA (1)...(19): siRNA sense strand
gaccauauccaucacuaaa

SEQ ID NO: 1450384 - RNA, 19 nt, Homo sapiens
  misc_RNA (1)...(19): siRNA sense strand
ggagaaaguguuugagaug

SEQ ID NO: 1450385 - RNA, 19 nt, Homo sapiens
  misc_RNA (1)...(19): siRNA sense strand
guuagggaccuuucuuaua

SEQ ID NO: 1450386 - RNA, 19 nt, Homo sapiens
  misc_RNA (1)...(19): siRNA sense strand
ucaaguugcuauucaugaa

SEQ ID NO: 1450387 - RNA, 19 nt, Homo sapiens
  misc_RNA (1)...(19): siRNA sense strand
gggagaaaguguuugagau

SEQ ID NO: 1450388 - RNA, 19 nt, Homo sapiens
  misc_RNA (1)...(19): siRNA sense strand
ucagugguguugauggaua

SEQ ID NO: 1450389 - RNA, 19 nt, Homo sapiens
  misc_RNA (1)...(19): siRNA sense strand
ccugacgucuccaagcuua

SEQ ID NO: 1450390 - RNA, 19 nt, Homo sapiens
  misc_RNA (1)...(19): siRNA sense strand
uggcuacaaugaagacaua

SEQ ID NO: 1450391 - RNA, 19 nt, Homo sapiens
  misc_RNA (1)...(19): siRNA sense strand
gcuuuccgguuacugaaua

SEQ ID NO: 1450392 - RNA, 19 nt, Homo sapiens
  misc_RNA (1)...(19): siRNA sense strand
gggaucaaguugcuauuca

SEQ ID NO: 1450393 - RNA, 19 nt, Homo sapiens
  misc_RNA (1)...(19): siRNA sense strand
gaucaauggcuacaaugaa

SEQ ID NO: 1450394 - RNA, 19 nt, Homo sapiens
  misc_RNA (1)...(19): siRNA sense strand
ggaacaauuuaaccagcaa

SEQ ID NO: 1450395 - RNA, 19 nt, Homo sapiens
  misc_RNA (1)...(19): siRNA sense strand
acacuaugaucauguucua

SEQ ID NO: 1450396 - RNA, 19 nt, Homo sapiens
  misc_RNA (1)...(19): siRNA sense strand
caauugaucgugucuauuc

SEQ ID NO: 1450397 - RNA, 19 nt, Homo sapiens
  misc_RNA (1)...(19): siRNA sense strand
gcaauuagcagaggaacug

SEQ ID NO: 1450398 - RNA, 19 nt, Homo sapiens
  misc_RNA (1)...(19): siRNA sense strand
gaaaguguuugagaugagu

SEQ ID NO: 1450399 - RNA, 19 nt, Homo sapiens
  misc_RNA (1)...(19): siRNA sense strand
gaaagaaugggagaaagug

SEQ ID NO: 1450400 - RNA, 19 nt, Homo sapiens
  misc_RNA (1)...(19): siRNA sense strand
ugagagcuaugaagaagau

SEQ ID NO: 1450401 - RNA, 19 nt, Homo sapiens
  misc_RNA (1)...(19): siRNA sense strand
gagauagacucugaagaag

SEQ ID NO: 1450402 - RNA, 19 nt, Homo sapiens
  misc_RNA (1)...(19): siRNA sense strand
ucuauucccucgaugauau

SEQ ID NO: 1450403 - RNA, 19 nt, Homo sapiens
  misc_RNA (1)...(19): siRNA sense strand
gcuuugauguuggcugaua

SEQ ID NO: 1450404 - RNA, 19 nt, Homo sapiens
  misc_RNA (1)...(19): siRNA sense strand
caaagaccguaaagagauc

SEQ ID NO: 1450405 - RNA, 19 nt, Homo sapiens
  misc_RNA (1)...(19): siRNA sense strand
aagaggagcgagcuuguua

SEQ ID NO: 1450406 - RNA, 19 nt, Homo sapiens
  misc_RNA (1)...(19): siRNA sense strand
ggacgagucagcauuaaag

SEQ ID NO: 1450407 - RNA, 19 nt, Homo sapiens
  misc_RNA (1)...(19): siRNA sense strand
gaggacgagucagcauuaa

SEQ ID NO: 1450408 - RNA, 19 nt, Homo sapiens
  misc_RNA (1)...(19): siRNA sense strand
gcacgugcagaaacuaauu

SEQ ID NO: 1450409 - RNA, 19 nt, Homo sapiens
  misc_RNA (1)...(19): siRNA sense strand
gaagcuuuccgguuacuga

SEQ ID NO: 1450410 - RNA, 19 nt, Homo sapiens
  misc_RNA (1)...(19): siRNA sense strand
acagacagcugagagcauu

SEQ ID NO: 1450411 - RNA, 19 nt, Homo sapiens
  misc_RNA (1)...(19): siRNA sense strand
ggaguucuauagaguuuac

SEQ ID NO: 1450412 - RNA, 19 nt, Homo sapiens
  misc_RNA (1)...(19): siRNA sense strand
gagcaugauucgucucucu

SEQ ID NO: 1450413 - RNA, 19 nt, Homo sapiens
  misc_RNA (1)...(19): siRNA sense strand
acauggcaaugaugaagua

SEQ ID NO: 1450414 - RNA, 19 nt, Homo sapiens
  misc_RNA (1)...(19): siRNA sense strand
cagcugagagcauuaagaa

SEQ ID NO: 1450415 - RNA, 19 nt, Homo sapiens
  misc_RNA (1)...(19): siRNA sense strand
gauucuuacuggauacaaa

SEQ ID NO: 1450416 - RNA, 19 nt, Homo sapiens
  misc_RNA (1)...(19): siRNA sense strand
ucaaagaccguaaagagau

SEQ ID NO: 1450417 - RNA, 19 nt, Homo sapiens
  misc_RNA (1)...(19): siRNA sense strand
gcgauggagaaauuaaaua

SEQ ID NO: 1450418 - RNA, 19 nt, Homo sapiens
  misc_RNA (1)...(19): siRNA sense strand
cuuguuaacugguacuuga

SEQ ID NO: 1450419 - RNA, 19 nt, Homo sapiens
  misc_RNA (1)...(19): siRNA sense strand
gguccaaccuaaacaugug

SEQ ID NO: 1450420 - RNA, 19 nt, Homo sapiens
  misc_RNA (1)...(19): siRNA sense strand
gaaccaaaugacugugaaa

SEQ ID NO: 1450421 - RNA, 19 nt, Homo sapiens
  misc_RNA (1)...(19): siRNA sense strand
cagcagaccauauccauca

SEQ ID NO: 1450422 - RNA, 19 nt, Homo sapiens
  misc_RNA (1)...(19): siRNA sense strand
ucaagcacguggaggaguu

SEQ ID NO: 1450423 - RNA, 19 nt, Homo sapiens
  misc_RNA (1)...(19): siRNA sense strand
ucaaauacacacagccaaa

SEQ ID NO: 1450424 - RNA, 19 nt, Homo sapiens
  misc_RNA (1)...(19): siRNA sense strand
gagaagugccagaaacugu

SEQ ID NO: 1450425 - RNA, 19 nt, Homo sapiens
  misc_RNA (1)...(19): siRNA sense strand
aacccaagauuuccaaaga

SEQ ID NO: 1450426 - RNA, 19 nt, Homo sapiens
  misc_RNA (1)...(19): siRNA sense strand
ggcuggagcuuugauguug

SEQ ID NO: 1450427 - RNA, 19 nt, Homo sapiens
  misc_RNA (1)...(19): siRNA sense strand
cauugaggcuggagcuuug

SEQ ID NO: 1450428 - RNA, 19 nt, Homo sapiens
  misc_RNA (1)...(19): siRNA sense strand
gagcacgugcagaaacuaa

SEQ ID NO: 1450429 - RNA, 19 nt, Homo sapiens
  misc_RNA (1)...(19): siRNA sense strand
ggacgugcgggaucaaguu

SEQ ID NO: 1450430 - RNA, 19 nt, Homo sapiens
  misc_RNA (1)...(19): siRNA sense strand
aaugguguguguuguauug

SEQ ID NO: 1450431 - RNA, 19 nt, Homo sapiens
  misc_RNA (1)...(19): siRNA sense strand
ggcugaagcuguggaauca

SEQ ID NO: 1450432 - RNA, 19 nt, Homo sapiens
  misc_RNA (1)...(19): siRNA sense strand
ggaucaauggcuacaauga

SEQ ID NO: 1450433 - RNA, 19 nt, Homo sapiens
  misc_RNA (1)...(19): siRNA sense strand
caccugaugucaaucuaga

SEQ ID NO: 1450434 - RNA, 19 nt, Homo sapiens
  misc_RNA (1)...(19): siRNA sense strand
cggaugcacugcugugaug

SEQ ID NO: 1450435 - RNA, 19 nt, Homo sapiens
  misc_RNA (1)...(19): siRNA sense strand
cagaccauauccaucacua

SEQ ID NO: 1450436 - RNA, 19 nt, Homo sapiens
  misc_RNA (1)...(19): siRNA sense strand
caaaugacugugaaagaau

SEQ ID NO: 1450437 - RNA, 19 nt, Homo sapiens
  misc_RNA (1)...(19): siRNA sense strand
aaaugacugugaaagaaug

SEQ ID NO: 1450438 - RNA, 19 nt, Homo sapiens
  misc_RNA (1)...(19): siRNA sense strand
gcagcgauggagaaauuaa

SEQ ID NO: 1450439 - RNA, 19 nt, Homo sapiens
  misc_RNA (1)...(19): siRNA sense strand
gcgagcuuguuaacuggua

SEQ ID NO: 1450440 - RNA, 19 nt, Homo sapiens
  misc_RNA (1)...(19): siRNA sense strand
gaaagguggaagaagaaga

SEQ ID NO: 1450441 - RNA, 19 nt, Homo sapiens
  misc_RNA (1)...(19): siRNA sense strand
ggacuucauuguggagcaa

SEQ ID NO: 1450442 - RNA, 19 nt, Homo sapiens
  misc_RNA (1)...(19): siRNA sense strand
ccaggcgcauaguagauuu

SEQ ID NO: 1450443 - RNA, 19 nt, Homo sapiens
  misc_RNA (1)...(19): siRNA sense strand
agaggacgagucagcauua

SEQ ID NO: 1450444 - RNA, 19 nt, Homo sapiens
  misc_RNA (1)...(19): siRNA sense strand
caguuuaaacccaagauuu

SEQ ID NO: 1450445 - RNA, 19 nt, Homo sapiens
  misc_RNA (1)...(19): siRNA sense strand
gugauuaucucuaugacua

SEQ ID NO: 1450446 - RNA, 19 nt, Homo sapiens
  misc_RNA (1)...(19): siRNA sense strand
gaauuguucuauuggcauu

SEQ ID NO: 1450447 - RNA, 19 nt, Homo sapiens
  misc_RNA (1)...(19): siRNA sense strand
guuuagaucugcuagguau

SEQ ID NO: 1450448 - RNA, 19 nt, Homo sapiens
  misc_RNA (1)...(19): siRNA sense strand
aauugaagcuaucugcaua

SEQ ID NO: 1450449 - RNA, 19 nt, Homo sapiens
  misc_RNA (1)...(19): siRNA sense strand
uaucaugagcucaaguuua

SEQ ID NO: 1450450 - RNA, 19 nt, Homo sapiens
  misc_RNA (1)...(19): siRNA sense strand
cacagugccuggaagaauu

SEQ ID NO: 1450451 - RNA, 19 nt, Homo sapiens
  misc_RNA (1)...(19): siRNA sense strand
uuacuugucuucauuugug

SEQ ID NO: 1450452 - RNA, 19 nt, Homo sapiens
  misc_RNA (1)...(19): siRNA sense strand
acaguuggcuauggagaua

SEQ ID NO: 1450453 - RNA, 19 nt, Homo sapiens
  misc_RNA (1)...(19): siRNA sense strand
aaacguugcuaccgagaga

SEQ ID NO: 1450454 - RNA, 19 nt, Homo sapiens
  misc_RNA (1)...(19): siRNA sense strand
gagcucaaguuuagaucug

SEQ ID NO: 1450455 - RNA, 19 nt, Homo sapiens
  misc_RNA (1)...(19): siRNA sense strand
ucaguggaauuguucuauu

SEQ ID NO: 1450456 - RNA, 19 nt, Homo sapiens
  misc_RNA (1)...(19): siRNA sense strand
gagguucauugucuccaaa

SEQ ID NO: 1450457 - RNA, 19 nt, Homo sapiens
  misc_RNA (1)...(19): siRNA sense strand
caguggaauuguucuauug

SEQ ID NO: 1450458 - RNA, 19 nt, Homo sapiens
  misc_RNA (1)...(19): siRNA sense strand
ggugggugauuaucucuau

SEQ ID NO: 1450459 - RNA, 19 nt, Homo sapiens
  misc_RNA (1)...(19): siRNA sense strand
cguauuacaucucuguguu

SEQ ID NO: 1450460 - RNA, 19 nt, Homo sapiens
  misc_RNA (1)...(19): siRNA sense strand
gaggguacuuagaaugaug

SEQ ID NO: 1450461 - RNA, 19 nt, Homo sapiens
  misc_RNA (1)...(19): siRNA sense strand
gagagaugguuauguuacu

SEQ ID NO: 1450462 - RNA, 19 nt, Homo sapiens
  misc_RNA (1)...(19): siRNA sense strand
ugugcgagcucuccuucua

SEQ ID NO: 1450463 - RNA, 19 nt, Homo sapiens
  misc_RNA (1)...(19): siRNA sense strand
gcaaucacgccguauuaca

SEQ ID NO: 1450464 - RNA, 19 nt, Homo sapiens
  misc_RNA (1)...(19): siRNA sense strand
caaggacuuuaccagcauu

SEQ ID NO: 1450465 - RNA, 19 nt, Homo sapiens
  misc_RNA (1)...(19): siRNA sense strand
gcgcaacgaguacuucuuc

SEQ ID NO: 1450466 - RNA, 19 nt, Homo sapiens
  misc_RNA (1)...(19): siRNA sense strand
ggaggaguuuguguuguca

SEQ ID NO: 1450467 - RNA, 19 nt, Homo sapiens
  misc_RNA (1)...(19): siRNA sense strand
uggcaaucacgccguauua

SEQ ID NO: 1450468 - RNA, 19 nt, Homo sapiens
  misc_RNA (1)...(19): siRNA sense strand
gggagcugcugaaggacuu

SEQ ID NO: 1450469 - RNA, 19 nt, Homo sapiens
  misc_RNA (1)...(19): siRNA sense strand
uggcauuaccuaucacuuu

SEQ ID NO: 1450470 - RNA, 19 nt, Homo sapiens
  misc_RNA (1)...(19): siRNA sense strand
cuauuggcauuaccuauca

SEQ ID NO: 1450471 - RNA, 19 nt, Homo sapiens
  misc_RNA (1)...(19): siRNA sense strand
uuucucagcuucuugaaca

SEQ ID NO: 1450472 - RNA, 19 nt, Homo sapiens
  misc_RNA (1)...(19): siRNA sense strand
gagaugguuauguuacuug

SEQ ID NO: 1450473 - RNA, 19 nt, Homo sapiens
  misc_RNA (1)...(19): siRNA sense strand
uauuacaucucuguguuga

SEQ ID NO: 1450474 - RNA, 19 nt, Homo sapiens
  misc_RNA (1)...(19): siRNA sense strand
gagccucuccacugaauuc

SEQ ID NO: 1450475 - RNA, 19 nt, Homo sapiens
  misc_RNA (1)...(19): siRNA sense strand
aucaugagcucaaguuuag

SEQ ID NO: 1450476 - RNA, 19 nt, Homo sapiens
  misc_RNA (1)...(19): siRNA sense strand
ggcauuaccuaucacuuuu

SEQ ID NO: 1450477 - RNA, 19 nt, Homo sapiens
  misc_RNA (1)...(19): siRNA sense strand
accgagagaugguuauguu

SEQ ID NO: 1450478 - RNA, 19 nt, Homo sapiens
  misc_RNA (1)...(19): siRNA sense strand
gacuacaguuggcuaugga

SEQ ID NO: 1450479 - RNA, 19 nt, Homo sapiens
  misc_RNA (1)...(19): siRNA sense strand
gaucugcuagguauaguag

SEQ ID NO: 1450480 - RNA, 19 nt, Homo sapiens
  misc_RNA (1)...(19): siRNA sense strand
ggcuggaccuggaaacauc

SEQ ID NO: 1450481 - RNA, 19 nt, Homo sapiens
  misc_RNA (1)...(19): siRNA sense strand
ccgagugcaucgugagguu

SEQ ID NO: 1450482 - RNA, 19 nt, Homo sapiens
  misc_RNA (1)...(19): siRNA sense strand
auagcuuugugcaguguua

SEQ ID NO: 1450483 - RNA, 19 nt, Homo sapiens
  misc_RNA (1)...(19): siRNA sense strand
ugacuacaguuggcuaugg

SEQ ID NO: 1450484 - RNA, 19 nt, Homo sapiens
  misc_RNA (1)...(19): siRNA sense strand
gauuaucucuaugacuaca

SEQ ID NO: 1450485 - RNA, 19 nt, Homo sapiens
  misc_RNA (1)...(19): siRNA sense strand
acacucgguuugacucuca

SEQ ID NO: 1450486 - RNA, 19 nt, Homo sapiens
  misc_RNA (1)...(19): siRNA sense strand
cuuagaaugaugaggauuu

SEQ ID NO: 1450487 - RNA, 19 nt, Homo sapiens
  misc_RNA (1)...(19): siRNA sense strand
gcaacgaguacuucuucga

SEQ ID NO: 1450488 - RNA, 19 nt, Homo sapiens
  misc_RNA (1)...(19): siRNA sense strand
gcuggugggugauuaucuc

SEQ ID NO: 1450489 - RNA, 19 nt, Homo sapiens
  misc_RNA (1)...(19): siRNA sense strand
acaaggacuuuaccagcau

SEQ ID NO: 1450490 - RNA, 19 nt, Homo sapiens
  misc_RNA (1)...(19): siRNA sense strand
aaacauccaacaaggacuu

SEQ ID NO: 1450491 - RNA, 19 nt, Homo sapiens
  misc_RNA (1)...(19): siRNA sense strand
caaucacgccguauuacau

SEQ ID NO: 1450492 - RNA, 19 nt, Homo sapiens
  misc_RNA (1)...(19): siRNA sense strand
ccgagagaugguuauguua

SEQ ID NO: 1450493 - RNA, 19 nt, Homo sapiens
  misc_RNA (1)...(19): siRNA sense strand
gcuugcccgucacuucauu

SEQ ID NO: 1450494 - RNA, 19 nt, Homo sapiens
  misc_RNA (1)...(19): siRNA sense strand
uaucuaccauagcuuugug

SEQ ID NO: 1450495 - RNA, 19 nt, Homo sapiens
  misc_RNA (1)...(19): siRNA sense strand
ucacagugccuggaagaau

SEQ ID NO: 1450496 - RNA, 19 nt, Homo sapiens
  misc_RNA (1)...(19): siRNA sense strand
gcacuuucucagcuucuug

SEQ ID NO: 1450497 - RNA, 19 nt, Homo sapiens
  misc_RNA (1)...(19): siRNA sense strand
ggcaaucuuuagugcacuu

SEQ ID NO: 1450498 - RNA, 19 nt, Homo sapiens
  misc_RNA (1)...(19): siRNA sense strand
guauuacaucucuguguug

SEQ ID NO: 1450499 - RNA, 19 nt, Homo sapiens
  misc_RNA (1)...(19): siRNA sense strand
uggaggaguuuguguuguc

SEQ ID NO: 1450500 - RNA, 19 nt, Homo sapiens
  misc_RNA (1)...(19): siRNA sense strand
agagaugguuauguuacuu

SEQ ID NO: 1450501 - RNA, 19 nt, Homo sapiens
  misc_RNA (1)...(19): siRNA sense strand
gggcuggagucaccuugag

SEQ ID NO: 1450502 - RNA, 19 nt, Homo sapiens
  misc_RNA (1)...(19): siRNA sense strand
ugagguucauugucuccaa

SEQ ID NO: 1450503 - RNA, 19 nt, Homo sapiens
  misc_RNA (1)...(19): siRNA sense strand
ucugcuagguauaguagga

SEQ ID NO: 1450504 - RNA, 19 nt, Homo sapiens
  misc_RNA (1)...(19): siRNA sense strand
guuaucaugagcucaaguu

SEQ ID NO: 1450505 - RNA, 19 nt, Homo sapiens
  misc_RNA (1)...(19): siRNA sense strand
uaagcuugcccgucacuuc

SEQ ID NO: 1450506 - RNA, 19 nt, Homo sapiens
  misc_RNA (1)...(19): siRNA sense strand
cgagagaugguuauguuac

SEQ ID NO: 1450507 - RNA, 19 nt, Homo sapiens
  misc_RNA (1)...(19): siRNA sense strand
uaauugaagcuaucugcau

SEQ ID NO: 1450508 - RNA, 19 nt, Homo sapiens
  misc_RNA (1)...(19): siRNA sense strand
uugaggguacuuagaauga

SEQ ID NO: 1450509 - RNA, 19 nt, Homo sapiens
  misc_RNA (1)...(19): siRNA sense strand
caugagcucaaguuuagau

SEQ ID NO: 1450510 - RNA, 19 nt, Homo sapiens
  misc_RNA (1)...(19): siRNA sense strand
cugcauagguugguucacu

SEQ ID NO: 1450511 - RNA, 19 nt, Homo sapiens
  misc_RNA (1)...(19): siRNA sense strand
uaucacagugccuggaaga

SEQ ID NO: 1450512 - RNA, 19 nt, Homo sapiens
  misc_RNA (1)...(19): siRNA sense strand
ugaggguacuuagaaugau

SEQ ID NO: 1450513 - RNA, 19 nt, Homo sapiens
  misc_RNA (1)...(19): siRNA sense strand
agugugaguuugucaagag

SEQ ID NO: 1450514 - RNA, 19 nt, Homo sapiens
  misc_RNA (1)...(19): siRNA sense strand
ccauagcuuugugcagugu

SEQ ID NO: 1450515 - RNA, 19 nt, Homo sapiens
  misc_RNA (1)...(19): siRNA sense strand
gugauuaucucuaugacua

SEQ ID NO: 1450516 - RNA, 19 nt, Homo sapiens
  misc_RNA (1)...(19): siRNA sense strand
gaauuguucuauuggcauu

SEQ ID NO: 1450517 - RNA, 19 nt, Homo sapiens
  misc_RNA (1)...(19): siRNA sense strand
guuuagaucugcuagguau

SEQ ID NO: 1450518 - RNA, 19 nt, Homo sapiens
  misc_RNA (1)...(19): siRNA sense strand
aauugaagcuaucugcaua

SEQ ID NO: 1450519 - RNA, 19 nt, Homo sapiens
  misc_RNA (1)...(19): siRNA sense strand
uaucaugagcucaaguuua

SEQ ID NO: 1450520 - RNA, 19 nt, Homo sapiens
  misc_RNA (1)...(19): siRNA sense strand
cacagugccuggaagaauu

SEQ ID NO: 1450521 - RNA, 19 nt, Homo sapiens
  misc_RNA (1)...(19): siRNA sense strand
uuacuugucuucauuugug

SEQ ID NO: 1450522 - RNA, 19 nt, Homo sapiens
  misc_RNA (1)...(19): siRNA sense strand
acaguuggcuauggagaua

SEQ ID NO: 1450523 - RNA, 19 nt, Homo sapiens
  misc_RNA (1)...(19): siRNA sense strand
aaacguugcuaccgagaga

SEQ ID NO: 1450524 - RNA, 19 nt, Homo sapiens
  misc_RNA (1)...(19): siRNA sense strand
gagcucaaguuuagaucug

SEQ ID NO: 1450525 - RNA, 19 nt, Homo sapiens
  misc_RNA (1)...(19): siRNA sense strand
ucaguggaauuguucuauu

SEQ ID NO: 1450526 - RNA, 19 nt, Homo sapiens
  misc_RNA (1)...(19): siRNA sense strand
gagguucauugucuccaaa

SEQ ID NO: 1450527 - RNA, 19 nt, Homo sapiens
  misc_RNA (1)...(19): siRNA sense strand
caguggaauuguucuauug

SEQ ID NO: 1450528 - RNA, 19 nt, Homo sapiens
  misc_RNA (1)...(19): siRNA sense strand
ggugggugauuaucucuau

SEQ ID NO: 1450529 - RNA, 19 nt, Homo sapiens
  misc_RNA (1)...(19): siRNA sense strand
cguauuacaucucuguguu

SEQ ID NO: 1450530 - RNA, 19 nt, Homo sapiens
  misc_RNA (1)...(19): siRNA sense strand
gaggguacuuagaaugaug

SEQ ID NO: 1450531 - RNA, 19 nt, Homo sapiens
  misc_RNA (1)...(19): siRNA sense strand
gagagaugguuauguuacu

SEQ ID NO: 1450532 - RNA, 19 nt, Homo sapiens
  misc_RNA (1)...(19): siRNA sense strand
ugugcgagcucuccuucua

SEQ ID NO: 1450533 - RNA, 19 nt, Homo sapiens
  misc_RNA (1)...(19): siRNA sense strand
gcaaucacgccguauuaca

SEQ ID NO: 1450534 - RNA, 19 nt, Homo sapiens
  misc_RNA (1)...(19): siRNA sense strand
caaggacuuuaccagcauu

SEQ ID NO: 1450535 - RNA, 19 nt, Homo sapiens
  misc_RNA (1)...(19): siRNA sense strand
gcgcaacgaguacuucuuc

SEQ ID NO: 1450536 - RNA, 19 nt, Homo sapiens
  misc_RNA (1)...(19): siRNA sense strand
ggaggaguuuguguuguca

SEQ ID NO: 1450537 - RNA, 19 nt, Homo sapiens
  misc_RNA (1)...(19): siRNA sense strand
uggcaaucacgccguauua

SEQ ID NO: 1450538 - RNA, 19 nt, Homo sapiens
  misc_RNA (1)...(19): siRNA sense strand
gggagcugcugaaggacuu

SEQ ID NO: 1450539 - RNA, 19 nt, Homo sapiens
  misc_RNA (1)...(19): siRNA sense strand
uggcauuaccuaucacuuu

SEQ ID NO: 1450540 - RNA, 19 nt, Homo sapiens
  misc_RNA (1)...(19): siRNA sense strand
cuauuggcauuaccuauca

SEQ ID NO: 1450541 - RNA, 19 nt, Homo sapiens
  misc_RNA (1)...(19): siRNA sense strand
uuucucagcuucuugaaca

SEQ ID NO: 1450542 - RNA, 19 nt, Homo sapiens
  misc_RNA (1)...(19): siRNA sense strand
gagaugguuauguuacuug

SEQ ID NO: 1450543 - RNA, 19 nt, Homo sapiens
  misc_RNA (1)...(19): siRNA sense strand
uauuacaucucuguguuga

SEQ ID NO: 1450544 - RNA, 19 nt, Homo sapiens
  misc_RNA (1)...(19): siRNA sense strand
gagccucuccacugaauuc

SEQ ID NO: 1450545 - RNA, 19 nt, Homo sapiens
  misc_RNA (1)...(19): siRNA sense strand
aucaugagcucaaguuuag

SEQ ID NO: 1450546 - RNA, 19 nt, Homo sapiens
  misc_RNA (1)...(19): siRNA sense strand
ggcauuaccuaucacuuuu

SEQ ID NO: 1450547 - RNA, 19 nt, Homo sapiens
  misc_RNA (1)...(19): siRNA sense strand
accgagagaugguuauguu

SEQ ID NO: 1450548 - RNA, 19 nt, Homo sapiens
  misc_RNA (1)...(19): siRNA sense strand
gacuacaguuggcuaugga

SEQ ID NO: 1450549 - RNA, 19 nt, Homo sapiens
  misc_RNA (1)...(19): siRNA sense strand
gaucugcuagguauaguag

SEQ ID NO: 1450550 - RNA, 19 nt, Homo sapiens
  misc_RNA (1)...(19): siRNA sense strand
ggcuggaccuggaaacauc

SEQ ID NO: 1450551 - RNA, 19 nt, Homo sapiens
  misc_RNA (1)...(19): siRNA sense strand
ccgagugcaucgugagguu

SEQ ID NO: 1450552 - RNA, 19 nt, Homo sapiens
  misc_RNA (1)...(19): siRNA sense strand
auagcuuugugcaguguua

SEQ ID NO: 1450553 - RNA, 19 nt, Homo sapiens
  misc_RNA (1)...(19): siRNA sense strand
ugacuacaguuggcuaugg

SEQ ID NO: 1450554 - RNA, 19 nt, Homo sapiens
  misc_RNA (1)...(19): siRNA sense strand
gauuaucucuaugacuaca

SEQ ID NO: 1450555 - RNA, 19 nt, Homo sapiens
  misc_RNA (1)...(19): siRNA sense strand
acacucgguuugacucuca

SEQ ID NO: 1450556 - RNA, 19 nt, Homo sapiens
  misc_RNA (1)...(19): siRNA sense strand
cuuagaaugaugaggauuu

SEQ ID NO: 1450557 - RNA, 19 nt, Homo sapiens
  misc_RNA (1)...(19): siRNA sense strand
gcaacgaguacuucuucga

SEQ ID NO: 1450558 - RNA, 19 nt, Homo sapiens
  misc_RNA (1)...(19): siRNA sense strand
gcuggugggugauuaucuc

SEQ ID NO: 1450559 - RNA, 19 nt, Homo sapiens
  misc_RNA (1)...(19): siRNA sense strand
acaaggacuuuaccagcau

SEQ ID NO: 1450560 - RNA, 19 nt, Homo sapiens
  misc_RNA (1)...(19): siRNA sense strand
aaacauccaacaaggacuu

SEQ ID NO: 1450561 - RNA, 19 nt, Homo sapiens
  misc_RNA (1)...(19): siRNA sense strand
caaucacgccguauuacau

SEQ ID NO: 1450562 - RNA, 19 nt, Homo sapiens
  misc_RNA (1)...(19): siRNA sense strand
ccgagagaugguuauguua

SEQ ID NO: 1450563 - RNA, 19 nt, Homo sapiens
  misc_RNA (1)...(19): siRNA sense strand
gcuugcccgucacuucauu

SEQ ID NO: 1450564 - RNA, 19 nt, Homo sapiens
  misc_RNA (1)...(19): siRNA sense strand
uaucuaccauagcuuugug

SEQ ID NO: 1450565 - RNA, 19 nt, Homo sapiens
  misc_RNA (1)...(19): siRNA sense strand
ucacagugccuggaagaau

SEQ ID NO: 1450566 - RNA, 19 nt, Homo sapiens
  misc_RNA (1)...(19): siRNA sense strand
gcacuuucucagcuucuug

SEQ ID NO: 1450567 - RNA, 19 nt, Homo sapiens
  misc_RNA (1)...(19): siRNA sense strand
ggcaaucuuuagugcacuu

SEQ ID NO: 1450568 - RNA, 19 nt, Homo sapiens
  misc_RNA (1)...(19): siRNA sense strand
guauuacaucucuguguug

SEQ ID NO: 1450569 - RNA, 19 nt, Homo sapiens
  misc_RNA (1)...(19): siRNA sense strand
uggaggaguuuguguuguc

SEQ ID NO: 1450570 - RNA, 19 nt, Homo sapiens
  misc_RNA (1)...(19): siRNA sense strand
agagaugguuauguuacuu

SEQ ID NO: 1450571 - RNA, 19 nt, Homo sapiens
  misc_RNA (1)...(19): siRNA sense strand
gggcuggagucaccuugag

SEQ ID NO: 1450572 - RNA, 19 nt, Homo sapiens
  misc_RNA (1)...(19): siRNA sense strand
ugagguucauugucuccaa

SEQ ID NO: 1450573 - RNA, 19 nt, Homo sapiens
  misc_RNA (1)...(19): siRNA sense strand
ucugcuagguauaguagga

SEQ ID NO: 1450574 - RNA, 19 nt, Homo sapiens
  misc_RNA (1)...(19): siRNA sense strand
guuaucaugagcucaaguu

SEQ ID NO: 1450575 - RNA, 19 nt, Homo sapiens
  misc_RNA (1)...(19): siRNA sense strand
uaagcuugcccgucacuuc

SEQ ID NO: 1450576 - RNA, 19 nt, Homo sapiens
  misc_RNA (1)...(19): siRNA sense strand
cgagagaugguuauguuac

SEQ ID NO: 1450577 - RNA, 19 nt, Homo sapiens
  misc_RNA (1)...(19): siRNA sense strand
uaauugaagcuaucugcau

SEQ ID NO: 1450578 - RNA, 19 nt, Homo sapiens
  misc_RNA (1)...(19): siRNA sense strand
uugaggguacuuagaauga

SEQ ID NO: 1450579 - RNA, 19 nt, Homo sapiens
  misc_RNA (1)...(19): siRNA sense strand
caugagcucaaguuuagau

SEQ ID NO: 1450580 - RNA, 19 nt, Homo sapiens
  misc_RNA (1)...(19): siRNA sense strand
cugcauagguugguucacu

SEQ ID NO: 1450581 - RNA, 19 nt, Homo sapiens
  misc_RNA (1)...(19): siRNA sense strand
uaucacagugccuggaaga

SEQ ID NO: 1450582 - RNA, 19 nt, Homo sapiens
  misc_RNA (1)...(19): siRNA sense strand
ugaggguacuuagaaugau

SEQ ID NO: 1450583 - RNA, 19 nt, Homo sapiens
  misc_RNA (1)...(19): siRNA sense strand
agugugaguuugucaagag

SEQ ID NO: 1450584 - RNA, 19 nt, Homo sapiens
  misc_RNA (1)...(19): siRNA sense strand
ccauagcuuugugcagugu

SEQ ID NO: 1450585 - RNA, 19 nt, Homo sapiens
  misc_RNA (1)...(19): siRNA sense strand
gcagauacgaugacaaaua

SEQ ID NO: 1450586 - RNA, 19 nt, Homo sapiens
  misc_RNA (1)...(19): siRNA sense strand
ggcaagaacuacaucauuu

SEQ ID NO: 1450587 - RNA, 19 nt, Homo sapiens
  misc_RNA (1)...(19): siRNA sense strand
gcaaguauuucauuucuca

SEQ ID NO: 1450588 - RNA, 19 nt, Homo sapiens
  misc_RNA (1)...(19): siRNA sense strand
uggaugcgcugaagaauaa

SEQ ID NO: 1450589 - RNA, 19 nt, Homo sapiens
  misc_RNA (1)...(19): siRNA sense strand
ucgagaagauccucaagua

SEQ ID NO: 1450590 - RNA, 19 nt, Homo sapiens
  misc_RNA (1)...(19): siRNA sense strand
gagagagacucgucagaga

SEQ ID NO: 1450591 - RNA, 19 nt, Homo sapiens
  misc_RNA (1)...(19): siRNA sense strand
ggucagaacuugagcacau

SEQ ID NO: 1450592 - RNA, 19 nt, Homo sapiens
  misc_RNA (1)...(19): siRNA sense strand
aaacccaggugcuacauga

SEQ ID NO: 1450593 - RNA, 19 nt, Homo sapiens
  misc_RNA (1)...(19): siRNA sense strand
cagauacgaugacaaauac

SEQ ID NO: 1450594 - RNA, 19 nt, Homo sapiens
  misc_RNA (1)...(19): siRNA sense strand
aaacauguaugccaagaag

SEQ ID NO: 1450595 - RNA, 19 nt, Homo sapiens
  misc_RNA (1)...(19): siRNA sense strand
gcacauccguggaaaauca

SEQ ID NO: 1450596 - RNA, 19 nt, Homo sapiens
  misc_RNA (1)...(19): siRNA sense strand
cagacaacguccucaagaa

SEQ ID NO: 1450597 - RNA, 19 nt, Homo sapiens
  misc_RNA (1)...(19): siRNA sense strand
cgaugaggauccuguauuc

SEQ ID NO: 1450598 - RNA, 19 nt, Homo sapiens
  misc_RNA (1)...(19): siRNA sense strand
gccaagcgauucauucaca

SEQ ID NO: 1450599 - RNA, 19 nt, Homo sapiens
  misc_RNA (1)...(19): siRNA sense strand
ugaggauccuguauucauu

SEQ ID NO: 1450600 - RNA, 19 nt, Homo sapiens
  misc_RNA (1)...(19): siRNA sense strand
gaaacucagugcagagcau

SEQ ID NO: 1450601 - RNA, 19 nt, Homo sapiens
  misc_RNA (1)...(19): siRNA sense strand
gcagggagucaucaucaaa

SEQ ID NO: 1450602 - RNA, 19 nt, Homo sapiens
  misc_RNA (1)...(19): siRNA sense strand
cagcaaguauuucauuucu

SEQ ID NO: 1450603 - RNA, 19 nt, Homo sapiens
  misc_RNA (1)...(19): siRNA sense strand
caucaacaaugccuacauc

SEQ ID NO: 1450604 - RNA, 19 nt, Homo sapiens
  misc_RNA (1)...(19): siRNA sense strand
gaccugagcugcaguugcu

SEQ ID NO: 1450605 - RNA, 19 nt, Homo sapiens
  misc_RNA (1)...(19): siRNA sense strand
gggaacauguccuugaucu

SEQ ID NO: 1450606 - RNA, 19 nt, Homo sapiens
  misc_RNA (1)...(19): siRNA sense strand
gaagcaaccacagagcuaa

SEQ ID NO: 1450607 - RNA, 19 nt, Homo sapiens
  misc_RNA (1)...(19): siRNA sense strand
gagaagauccucaaguacu

SEQ ID NO: 1450608 - RNA, 19 nt, Homo sapiens
  misc_RNA (1)...(19): siRNA sense strand
agaagauccucaaguacuu

SEQ ID NO: 1450609 - RNA, 19 nt, Homo sapiens
  misc_RNA (1)...(19): siRNA sense strand
gaugacaaauacagcaagu

SEQ ID NO: 1450610 - RNA, 19 nt, Homo sapiens
  misc_RNA (1)...(19): siRNA sense strand
ggcagcagguguucugguu

SEQ ID NO: 1450611 - RNA, 19 nt, Homo sapiens
  misc_RNA (1)...(19): siRNA sense strand
ggaggucccacccgaaaga

SEQ ID NO: 1450612 - RNA, 19 nt, Homo sapiens
  misc_RNA (1)...(19): siRNA sense strand
gaucugcugguacaacaaa

SEQ ID NO: 1450613 - RNA, 19 nt, Homo sapiens
  misc_RNA (1)...(19): siRNA sense strand
gccugacgcuguuugaaga

SEQ ID NO: 1450614 - RNA, 19 nt, Homo sapiens
  misc_RNA (1)...(19): siRNA sense strand
guacaacaaaggacacuuc

SEQ ID NO: 1450615 - RNA, 19 nt, Homo sapiens
  misc_RNA (1)...(19): siRNA sense strand
ggacuucuuccagcucuuu

SEQ ID NO: 1450616 - RNA, 19 nt, Homo sapiens
  misc_RNA (1)...(19): siRNA sense strand
gcuucaucauccagauuua

SEQ ID NO: 1450617 - RNA, 19 nt, Homo sapiens
  misc_RNA (1)...(19): siRNA sense strand
cagcaucgccaucaacaau

SEQ ID NO: 1450618 - RNA, 19 nt, Homo sapiens
  misc_RNA (1)...(19): siRNA sense strand
gagcgggagcugcgaaaga

SEQ ID NO: 1450619 - RNA, 19 nt, Homo sapiens
  misc_RNA (1)...(19): siRNA sense strand
ucucauaaaccaaacaaga

SEQ ID NO: 1450620 - RNA, 19 nt, Homo sapiens
  misc_RNA (1)...(19): siRNA sense strand
gacgcuguuugaagaguuu

SEQ ID NO: 1450621 - RNA, 19 nt, Homo sapiens
  misc_RNA (1)...(19): siRNA sense strand
gaucugcagccaagcgauu

SEQ ID NO: 1450622 - RNA, 19 nt, Homo sapiens
  misc_RNA (1)...(19): siRNA sense strand
ccagacaacguccucaaga

SEQ ID NO: 1450623 - RNA, 19 nt, Homo sapiens
  misc_RNA (1)...(19): siRNA sense strand
gcagaacagcuucgacucu

SEQ ID NO: 1450624 - RNA, 19 nt, Homo sapiens
  misc_RNA (1)...(19): siRNA sense strand
uugaagaguuugagaagca

SEQ ID NO: 1450625 - RNA, 19 nt, Homo sapiens
  misc_RNA (1)...(19): siRNA sense strand
cugcagauacgaugacaaa

SEQ ID NO: 1450626 - RNA, 19 nt, Homo sapiens
  misc_RNA (1)...(19): siRNA sense strand
gaacaugguggugcagaca

SEQ ID NO: 1450627 - RNA, 19 nt, Homo sapiens
  misc_RNA (1)...(19): siRNA sense strand
gcaagaacuacaucauuuu

SEQ ID NO: 1450628 - RNA, 19 nt, Homo sapiens
  misc_RNA (1)...(19): siRNA sense strand
gaacgcggcaggcaagaac

SEQ ID NO: 1450629 - RNA, 19 nt, Homo sapiens
  misc_RNA (1)...(19): siRNA sense strand
agauuuauguccaccugaa

SEQ ID NO: 1450630 - RNA, 19 nt, Homo sapiens
  misc_RNA (1)...(19): siRNA sense strand
gaggauccuguauucauug

SEQ ID NO: 1450631 - RNA, 19 nt, Homo sapiens
  misc_RNA (1)...(19): siRNA sense strand
ccagugccguggacuucuu

SEQ ID NO: 1450632 - RNA, 19 nt, Homo sapiens
  misc_RNA (1)...(19): siRNA sense strand
gaaguuccaggagcgguuu

SEQ ID NO: 1450633 - RNA, 19 nt, Homo sapiens
  misc_RNA (1)...(19): siRNA sense strand
acaaacauguaugccaaga

SEQ ID NO: 1450634 - RNA, 19 nt, Homo sapiens
  misc_RNA (1)...(19): siRNA sense strand
gacaacguccucaagaaca

SEQ ID NO: 1450635 - RNA, 19 nt, Homo sapiens
  misc_RNA (1)...(19): siRNA sense strand
cgagcucucuucgugcaaa

SEQ ID NO: 1450636 - RNA, 19 nt, Homo sapiens
  misc_RNA (1)...(19): siRNA sense strand
gcggaggcuucuacagcaa

SEQ ID NO: 1450637 - RNA, 19 nt, Homo sapiens
  misc_RNA (1)...(19): siRNA sense strand
gcucucuucgugcaaagua

SEQ ID NO: 1450638 - RNA, 19 nt, Homo sapiens
  misc_RNA (1)...(19): siRNA sense strand
cagcagggagucaucauca

SEQ ID NO: 1450639 - RNA, 19 nt, Homo sapiens
  misc_RNA (1)...(19): siRNA sense strand
gcagccaagcgauucauuc

SEQ ID NO: 1450640 - RNA, 19 nt, Homo sapiens
  misc_RNA (1)...(19): siRNA sense strand
ugacgcuguuugaagaguu

SEQ ID NO: 1450641 - RNA, 19 nt, Homo sapiens
  misc_RNA (1)...(19): siRNA sense strand
gagagcugcugggcuugga

SEQ ID NO: 1450642 - RNA, 19 nt, Homo sapiens
  misc_RNA (1)...(19): siRNA sense strand
agaagcaaccacagagcua

SEQ ID NO: 1450643 - RNA, 19 nt, Homo sapiens
  misc_RNA (1)...(19): siRNA sense strand
acaugguggugcagacaaa

SEQ ID NO: 1450644 - RNA, 19 nt, Homo sapiens
  misc_RNA (1)...(19): siRNA sense strand
acauguaugccaagaaguu

SEQ ID NO: 1450645 - RNA, 19 nt, Homo sapiens
  misc_RNA (1)...(19): siRNA sense strand
gcuccuugguguccagcuu

SEQ ID NO: 1450646 - RNA, 19 nt, Homo sapiens
  misc_RNA (1)...(19): siRNA sense strand
uugagaagcaagggauuua

SEQ ID NO: 1450647 - RNA, 19 nt, Homo sapiens
  misc_RNA (1)...(19): siRNA sense strand
cagccaagcgauucauuca

SEQ ID NO: 1450648 - RNA, 19 nt, Homo sapiens
  misc_RNA (1)...(19): siRNA sense strand
gcgaguccguccucagcau

SEQ ID NO: 1450649 - RNA, 19 nt, Homo sapiens
  misc_RNA (1)...(19): siRNA sense strand
caaacauguaugccaagaa

SEQ ID NO: 1450650 - RNA, 19 nt, Homo sapiens
  misc_RNA (1)...(19): siRNA sense strand
aaucagaagcaaccacaga

SEQ ID NO: 1450651 - RNA, 19 nt, Homo sapiens
  misc_RNA (1)...(19): siRNA sense strand
ugaagaguuugagaagcaa

SEQ ID NO: 1450652 - RNA, 19 nt, Homo sapiens
  misc_RNA (1)...(19): siRNA sense strand
aggcaagaacuacaucauu

SEQ ID NO: 1450653 - RNA, 19 nt, Homo sapiens
  misc_RNA (1)...(19): siRNA sense strand
cuggaugcgcugaagaaua

SEQ ID NO: 1450654 - RNA, 19 nt, Homo sapiens
  misc_RNA (1)...(19): siRNA sense strand
gccaguaccaaaucaagau

SEQ ID NO: 1450655 - RNA, 19 nt, Homo sapiens
  misc_RNA (1)...(19): siRNA sense strand
gagaagcaagggauuuacu

SEQ ID NO: 1450656 - RNA, 19 nt, Homo sapiens
  misc_RNA (1)...(19): siRNA sense strand
ggaacgcggcaggcaagaa

SEQ ID NO: 1450657 - RNA, 19 nt, Homo sapiens
  misc_RNA (1)...(19): siRNA sense strand
acaacguccucaagaacau

SEQ ID NO: 1450658 - RNA, 19 nt, Homo sapiens
  misc_RNA (1)...(19): siRNA sense strand
aguaccaaaucaagaugaa

SEQ ID NO: 1450659 - RNA, 19 nt, Homo sapiens
  misc_RNA (1)...(19): siRNA sense strand
gcaggcaagaacuacauca

SEQ ID NO: 1450660 - RNA, 19 nt, Homo sapiens
  misc_RNA (1)...(19): siRNA sense strand
ggcuucaucauccagauuu

SEQ ID NO: 1450661 - RNA, 19 nt, Homo sapiens
  misc_RNA (1)...(19): siRNA sense strand
ucgaugaggauccuguauu

SEQ ID NO: 1450662 - RNA, 19 nt, Homo sapiens
  misc_RNA (1)...(19): siRNA sense strand
gaacucgagcucucuucgu

SEQ ID NO: 1450663 - RNA, 19 nt, Homo sapiens
  misc_RNA (1)...(19): siRNA sense strand
ccacuggcuucaucaucca

SEQ ID NO: 1450664 - RNA, 19 nt, Homo sapiens
  misc_RNA (1)...(19): siRNA sense strand
gauacgaugacaaauacag

SEQ ID NO: 1450665 - RNA, 19 nt, Homo sapiens
  misc_RNA (1)...(19): siRNA sense strand
ggccaguaccaaaucaaga

SEQ ID NO: 1450666 - RNA, 19 nt, Homo sapiens
  misc_RNA (1)...(19): siRNA sense strand
gcagcagggagucaucauc

SEQ ID NO: 1450667 - RNA, 19 nt, Homo sapiens
  misc_RNA (1)...(19): siRNA sense strand
ccacgcacgggcucuacaa

SEQ ID NO: 1450668 - RNA, 19 nt, Homo sapiens
  misc_RNA (1)...(19): siRNA sense strand
ggagucaucaucaaaagga

SEQ ID NO: 1450669 - RNA, 19 nt, Homo sapiens
  misc_RNA (1)...(19): siRNA sense strand
gaugaggauccuguauuca

SEQ ID NO: 1450670 - RNA, 19 nt, Homo sapiens
  misc_RNA (1)...(19): siRNA sense strand
ggacuuccaucgauucuau

SEQ ID NO: 1450671 - RNA, 19 nt, Homo sapiens
  misc_RNA (1)...(19): siRNA sense strand
gaagagcgauggugugaag

SEQ ID NO: 1450672 - RNA, 19 nt, Homo sapiens
  misc_RNA (1)...(19): siRNA sense strand
ugacagagcagcugauuga

SEQ ID NO: 1450673 - RNA, 19 nt, Homo sapiens
  misc_RNA (1)...(19): siRNA sense strand
aauaagaugcugaccauua

SEQ ID NO: 1450674 - RNA, 19 nt, Homo sapiens
  misc_RNA (1)...(19): siRNA sense strand
auaagaugcugaccauuaa

SEQ ID NO: 1450675 - RNA, 19 nt, Homo sapiens
  misc_RNA (1)...(19): siRNA sense strand
ggaguaugcugccaagauc

SEQ ID NO: 1450676 - RNA, 19 nt, Homo sapiens
  misc_RNA (1)...(19): siRNA sense strand
gcggaaacaggaaauuaua

SEQ ID NO: 1450677 - RNA, 19 nt, Homo sapiens
  misc_RNA (1)...(19): siRNA sense strand
ccaagaucaucaacacaaa

SEQ ID NO: 1450678 - RNA, 19 nt, Homo sapiens
  misc_RNA (1)...(19): siRNA sense strand
ucaauaagaugcugaccau

SEQ ID NO: 1450679 - RNA, 19 nt, Homo sapiens
  misc_RNA (1)...(19): siRNA sense strand
ggacaccacuaccugaucu

SEQ ID NO: 1450680 - RNA, 19 nt, Homo sapiens
  misc_RNA (1)...(19): siRNA sense strand
gcagcugauugaagccaua

SEQ ID NO: 1450681 - RNA, 19 nt, Homo sapiens
  misc_RNA (1)...(19): siRNA sense strand
ggaacuguuugaagauauc

SEQ ID NO: 1450682 - RNA, 19 nt, Homo sapiens
  misc_RNA (1)...(19): siRNA sense strand
gggaacuguuugaagauau

SEQ ID NO: 1450683 - RNA, 19 nt, Homo sapiens
  misc_RNA (1)...(19): siRNA sense strand
cagugaagcuggcagacuu

SEQ ID NO: 1450684 - RNA, 19 nt, Homo sapiens
  misc_RNA (1)...(19): siRNA sense strand
cauaagcaauggagauuuu

SEQ ID NO: 1450685 - RNA, 19 nt, Homo sapiens
  misc_RNA (1)...(19): siRNA sense strand
gcacaccaccauccugaau

SEQ ID NO: 1450686 - RNA, 19 nt, Homo sapiens
  misc_RNA (1)...(19): siRNA sense strand
cagaagugcugcggaagga

SEQ ID NO: 1450687 - RNA, 19 nt, Homo sapiens
  misc_RNA (1)...(19): siRNA sense strand
ggaugaagacaccaaagug

SEQ ID NO: 1450688 - RNA, 19 nt, Homo sapiens
  misc_RNA (1)...(19): siRNA sense strand
caacaucguccgacuacau

SEQ ID NO: 1450689 - RNA, 19 nt, Homo sapiens
  misc_RNA (1)...(19): siRNA sense strand
gugcggaaacaggaaauua

SEQ ID NO: 1450690 - RNA, 19 nt, Homo sapiens
  misc_RNA (1)...(19): siRNA sense strand
gaaacugaagggagccauu

SEQ ID NO: 1450691 - RNA, 19 nt, Homo sapiens
  misc_RNA (1)...(19): siRNA sense strand
gccaagaucaucaacacaa

SEQ ID NO: 1450692 - RNA, 19 nt, Homo sapiens
  misc_RNA (1)...(19): siRNA sense strand
gcaggcaugguuuggguuu

SEQ ID NO: 1450693 - RNA, 19 nt, Homo sapiens
  misc_RNA (1)...(19): siRNA sense strand
gaucguccacuuccacaga

SEQ ID NO: 1450694 - RNA, 19 nt, Homo sapiens
  misc_RNA (1)...(19): siRNA sense strand
uggacugccugaagaaguu

SEQ ID NO: 1450695 - RNA, 19 nt, Homo sapiens
  misc_RNA (1)...(19): siRNA sense strand
cggaaacaggaaauuauaa

SEQ ID NO: 1450696 - RNA, 19 nt, Homo sapiens
  misc_RNA (1)...(19): siRNA sense strand
gagccauucucaccacgau

SEQ ID NO: 1450697 - RNA, 19 nt, Homo sapiens
  misc_RNA (1)...(19): siRNA sense strand
gaucaucaacacaaagaag

SEQ ID NO: 1450698 - RNA, 19 nt, Homo sapiens
  misc_RNA (1)...(19): siRNA sense strand
gugcgacccuggcaugaca

SEQ ID NO: 1450699 - RNA, 19 nt, Homo sapiens
  misc_RNA (1)...(19): siRNA sense strand
gagcagcaggcaugguuug

SEQ ID NO: 1450700 - RNA, 19 nt, Homo sapiens
  misc_RNA (1)...(19): siRNA sense strand
gggagcagcaggcaugguu

SEQ ID NO: 1450701 - RNA, 19 nt, Homo sapiens
  misc_RNA (1)...(19): siRNA sense strand
gcaccaacaccaccaucga

SEQ ID NO: 1450702 - RNA, 19 nt, Homo sapiens
  misc_RNA (1)...(19): siRNA sense strand
gaccauuaacccauccaaa

SEQ ID NO: 1450703 - RNA, 19 nt, Homo sapiens
  misc_RNA (1)...(19): siRNA sense strand
caacaccaccaucgaggau

SEQ ID NO: 1450704 - RNA, 19 nt, Homo sapiens
  misc_RNA (1)...(19): siRNA sense strand
ggggaacuguuugaagaua

SEQ ID NO: 1450705 - RNA, 19 nt, Homo sapiens
  misc_RNA (1)...(19): siRNA sense strand
ggauaucucuccccagaag

SEQ ID NO: 1450706 - RNA, 19 nt, Homo sapiens
  misc_RNA (1)...(19): siRNA sense strand
aagaagagcgaugguguga

SEQ ID NO: 1450707 - RNA, 19 nt, Homo sapiens
  misc_RNA (1)...(19): siRNA sense strand
caaagugcggaaacaggaa

SEQ ID NO: 1450708 - RNA, 19 nt, Homo sapiens
  misc_RNA (1)...(19): siRNA sense strand
ggaccugaagccugagaau

SEQ ID NO: 1450709 - RNA, 19 nt, Homo sapiens
  misc_RNA (1)...(19): siRNA sense strand
aauggcagaucguccacuu

SEQ ID NO: 1450710 - RNA, 19 nt, Homo sapiens
  misc_RNA (1)...(19): siRNA sense strand
acaccaaagugcggaaaca

SEQ ID NO: 1450711 - RNA, 19 nt, Homo sapiens
  misc_RNA (1)...(19): siRNA sense strand
ccagagaccaucagaagcu

SEQ ID NO: 1450712 - RNA, 19 nt, Homo sapiens
  misc_RNA (1)...(19): siRNA sense strand
ggagcagcaggcaugguuu

SEQ ID NO: 1450713 - RNA, 19 nt, Homo sapiens
  misc_RNA (1)...(19): siRNA sense strand
cagaggagggacaccacua

SEQ ID NO: 1450714 - RNA, 19 nt, Homo sapiens
  misc_RNA (1)...(19): siRNA sense strand
caagggugccgcagugaag

SEQ ID NO: 1450715 - RNA, 19 nt, Homo sapiens
  misc_RNA (1)...(19): siRNA sense strand
guggggaacuguuugaaga

SEQ ID NO: 1450716 - RNA, 19 nt, Homo sapiens
  misc_RNA (1)...(19): siRNA sense strand
cauccugcaugcacagaca

SEQ ID NO: 1450717 - RNA, 19 nt, Homo sapiens
  misc_RNA (1)...(19): siRNA sense strand
uaccagcucuucgaggaau

SEQ ID NO: 1450718 - RNA, 19 nt, Homo sapiens
  misc_RNA (1)...(19): siRNA sense strand
caacacaaagaagcuguca

SEQ ID NO: 1450719 - RNA, 19 nt, Homo sapiens
  misc_RNA (1)...(19): siRNA sense strand
aagaucaucaacacaaaga

SEQ ID NO: 1450720 - RNA, 19 nt, Homo sapiens
  misc_RNA (1)...(19): siRNA sense strand
ugauugaagccauaagcaa

SEQ ID NO: 1450721 - RNA, 19 nt, Homo sapiens
  misc_RNA (1)...(19): siRNA sense strand
gaccguggacugccugaag

SEQ ID NO: 1450722 - RNA, 19 nt, Homo sapiens
  misc_RNA (1)...(19): siRNA sense strand
caagaucaucaacacaaag

SEQ ID NO: 1450723 - RNA, 19 nt, Homo sapiens
  misc_RNA (1)...(19): siRNA sense strand
aaacugaagggagccauuc

SEQ ID NO: 1450724 - RNA, 19 nt, Homo sapiens
  misc_RNA (1)...(19): siRNA sense strand
uggcaugacagccuucgaa

SEQ ID NO: 1450725 - RNA, 19 nt, Homo sapiens
  misc_RNA (1)...(19): siRNA sense strand
guaccagcucuucgaggaa

SEQ ID NO: 1450726 - RNA, 19 nt, Homo sapiens
  misc_RNA (1)...(19): siRNA sense strand
ggacuuccaucgauucuau

SEQ ID NO: 1450727 - RNA, 19 nt, Homo sapiens
  misc_RNA (1)...(19): siRNA sense strand
gaagagcgauggugugaag

SEQ ID NO: 1450728 - RNA, 19 nt, Homo sapiens
  misc_RNA (1)...(19): siRNA sense strand
ugacagagcagcugauuga

SEQ ID NO: 1450729 - RNA, 19 nt, Homo sapiens
  misc_RNA (1)...(19): siRNA sense strand
aauaagaugcugaccauua

SEQ ID NO: 1450730 - RNA, 19 nt, Homo sapiens
  misc_RNA (1)...(19): siRNA sense strand
auaagaugcugaccauuaa

SEQ ID NO: 1450731 - RNA, 19 nt, Homo sapiens
  misc_RNA (1)...(19): siRNA sense strand
ggaguaugcugccaagauc

SEQ ID NO: 1450732 - RNA, 19 nt, Homo sapiens
  misc_RNA (1)...(19): siRNA sense strand
gcggaaacaggaaauuaua

SEQ ID NO: 1450733 - RNA, 19 nt, Homo sapiens
  misc_RNA (1)...(19): siRNA sense strand
ccaagaucaucaacacaaa

SEQ ID NO: 1450734 - RNA, 19 nt, Homo sapiens
  misc_RNA (1)...(19): siRNA sense strand
ucaauaagaugcugaccau

SEQ ID NO: 1450735 - RNA, 19 nt, Homo sapiens
  misc_RNA (1)...(19): siRNA sense strand
ggacaccacuaccugaucu

SEQ ID NO: 1450736 - RNA, 19 nt, Homo sapiens
  misc_RNA (1)...(19): siRNA sense strand
gcagcugauugaagccaua

SEQ ID NO: 1450737 - RNA, 19 nt, Homo sapiens
  misc_RNA (1)...(19): siRNA sense strand
ggaacuguuugaagauauc

SEQ ID NO: 1450738 - RNA, 19 nt, Homo sapiens
  misc_RNA (1)...(19): siRNA sense strand
gggaacuguuugaagauau

SEQ ID NO: 1450739 - RNA, 19 nt, Homo sapiens
  misc_RNA (1)...(19): siRNA sense strand
cagugaagcuggcagacuu

SEQ ID NO: 1450740 - RNA, 19 nt, Homo sapiens
  misc_RNA (1)...(19): siRNA sense strand
cauaagcaauggagauuuu

SEQ ID NO: 1450741 - RNA, 19 nt, Homo sapiens
  misc_RNA (1)...(19): siRNA sense strand
gcacaccaccauccugaau

SEQ ID NO: 1450742 - RNA, 19 nt, Homo sapiens
  misc_RNA (1)...(19): siRNA sense strand
cagaagugcugcggaagga

SEQ ID NO: 1450743 - RNA, 19 nt, Homo sapiens
  misc_RNA (1)...(19): siRNA sense strand
ggaugaagacaccaaagug

SEQ ID NO: 1450744 - RNA, 19 nt, Homo sapiens
  misc_RNA (1)...(19): siRNA sense strand
caacaucguccgacuacau

SEQ ID NO: 1450745 - RNA, 19 nt, Homo sapiens
  misc_RNA (1)...(19): siRNA sense strand
gugcggaaacaggaaauua

SEQ ID NO: 1450746 - RNA, 19 nt, Homo sapiens
  misc_RNA (1)...(19): siRNA sense strand
gaaacugaagggagccauu

SEQ ID NO: 1450747 - RNA, 19 nt, Homo sapiens
  misc_RNA (1)...(19): siRNA sense strand
gccaagaucaucaacacaa

SEQ ID NO: 1450748 - RNA, 19 nt, Homo sapiens
  misc_RNA (1)...(19): siRNA sense strand
gcaggcaugguuuggguuu

SEQ ID NO: 1450749 - RNA, 19 nt, Homo sapiens
  misc_RNA (1)...(19): siRNA sense strand
gaucguccacuuccacaga

SEQ ID NO: 1450750 - RNA, 19 nt, Homo sapiens
  misc_RNA (1)...(19): siRNA sense strand
uggacugccugaagaaguu

SEQ ID NO: 1450751 - RNA, 19 nt, Homo sapiens
  misc_RNA (1)...(19): siRNA sense strand
cggaaacaggaaauuauaa

SEQ ID NO: 1450752 - RNA, 19 nt, Homo sapiens
  misc_RNA (1)...(19): siRNA sense strand
gagccauucucaccacgau

SEQ ID NO: 1450753 - RNA, 19 nt, Homo sapiens
  misc_RNA (1)...(19): siRNA sense strand
gaucaucaacacaaagaag

SEQ ID NO: 1450754 - RNA, 19 nt, Homo sapiens
  misc_RNA (1)...(19): siRNA sense strand
gugcgacccuggcaugaca

SEQ ID NO: 1450755 - RNA, 19 nt, Homo sapiens
  misc_RNA (1)...(19): siRNA sense strand
gagcagcaggcaugguuug

SEQ ID NO: 1450756 - RNA, 19 nt, Homo sapiens
  misc_RNA (1)...(19): siRNA sense strand
gggagcagcaggcaugguu

SEQ ID NO: 1450757 - RNA, 19 nt, Homo sapiens
  misc_RNA (1)...(19): siRNA sense strand
gcaccaacaccaccaucga

SEQ ID NO: 1450758 - RNA, 19 nt, Homo sapiens
  misc_RNA (1)...(19): siRNA sense strand
gaccauuaacccauccaaa

SEQ ID NO: 1450759 - RNA, 19 nt, Homo sapiens
  misc_RNA (1)...(19): siRNA sense strand
caacaccaccaucgaggau

SEQ ID NO: 1450760 - RNA, 19 nt, Homo sapiens
  misc_RNA (1)...(19): siRNA sense strand
ggggaacuguuugaagaua

SEQ ID NO: 1450761 - RNA, 19 nt, Homo sapiens
  misc_RNA (1)...(19): siRNA sense strand
ggauaucucuccccagaag

SEQ ID NO: 1450762 - RNA, 19 nt, Homo sapiens
  misc_RNA (1)...(19): siRNA sense strand
aagaagagcgaugguguga

SEQ ID NO: 1450763 - RNA, 19 nt, Homo sapiens
  misc_RNA (1)...(19): siRNA sense strand
caaagugcggaaacaggaa

SEQ ID NO: 1450764 - RNA, 19 nt, Homo sapiens
  misc_RNA (1)...(19): siRNA sense strand
ggaccugaagccugagaau

SEQ ID NO: 1450765 - RNA, 19 nt, Homo sapiens
  misc_RNA (1)...(19): siRNA sense strand
aauggcagaucguccacuu

SEQ ID NO: 1450766 - RNA, 19 nt, Homo sapiens
  misc_RNA (1)...(19): siRNA sense strand
acaccaaagugcggaaaca

SEQ ID NO: 1450767 - RNA, 19 nt, Homo sapiens
  misc_RNA (1)...(19): siRNA sense strand
ccagagaccaucagaagcu

SEQ ID NO: 1450768 - RNA, 19 nt, Homo sapiens
  misc_RNA (1)...(19): siRNA sense strand
ggagcagcaggcaugguuu

SEQ ID NO: 1450769 - RNA, 19 nt, Homo sapiens
  misc_RNA (1)...(19): siRNA sense strand
cagaggagggacaccacua

SEQ ID NO: 1450770 - RNA, 19 nt, Homo sapiens
  misc_RNA (1)...(19): siRNA sense strand
caagggugccgcagugaag

SEQ ID NO: 1450771 - RNA, 19 nt, Homo sapiens
  misc_RNA (1)...(19): siRNA sense strand
guggggaacuguuugaaga

SEQ ID NO: 1450772 - RNA, 19 nt, Homo sapiens
  misc_RNA (1)...(19): siRNA sense strand
cauccugcaugcacagaca

SEQ ID NO: 1450773 - RNA, 19 nt, Homo sapiens
  misc_RNA (1)...(19): siRNA sense strand
uaccagcucuucgaggaau

SEQ ID NO: 1450774 - RNA, 19 nt, Homo sapiens
  misc_RNA (1)...(19): siRNA sense strand
caacacaaagaagcuguca

SEQ ID NO: 1450775 - RNA, 19 nt, Homo sapiens
  misc_RNA (1)...(19): siRNA sense strand
aagaucaucaacacaaaga

SEQ ID NO: 1450776 - RNA, 19 nt, Homo sapiens
  misc_RNA (1)...(19): siRNA sense strand
ugauugaagccauaagcaa

SEQ ID NO: 1450777 - RNA, 19 nt, Homo sapiens
  misc_RNA (1)...(19): siRNA sense strand
gaccguggacugccugaag

SEQ ID NO: 1450778 - RNA, 19 nt, Homo sapiens
  misc_RNA (1)...(19): siRNA sense strand
caagaucaucaacacaaag

SEQ ID NO: 1450779 - RNA, 19 nt, Homo sapiens
  misc_RNA (1)...(19): siRNA sense strand
aaacugaagggagccauuc

SEQ ID NO: 1450780 - RNA, 19 nt, Homo sapiens
  misc_RNA (1)...(19): siRNA sense strand
uggcaugacagccuucgaa

SEQ ID NO: 1450781 - RNA, 19 nt, Homo sapiens
  misc_RNA (1)...(19): siRNA sense strand
guaccagcucuucgaggaa

SEQ ID NO: 1450782 - RNA, 19 nt, Homo sapiens
  misc_RNA (1)...(19): siRNA sense strand
gaacgagggcuacuauuuc

SEQ ID NO: 1450783 - RNA, 19 nt, Homo sapiens
  misc_RNA (1)...(19): siRNA sense strand
gaagacguguuugcaaaug

SEQ ID NO: 1450784 - RNA, 19 nt, Homo sapiens
  misc_RNA (1)...(19): siRNA sense strand
gcaacuccaucauguacuu

SEQ ID NO: 1450785 - RNA, 19 nt, Homo sapiens
  misc_RNA (1)...(19): siRNA sense strand
ccgaagacguguuugcaaa

SEQ ID NO: 1450786 - RNA, 19 nt, Homo sapiens
  misc_RNA (1)...(19): siRNA sense strand
ggagacaagcccagccuuu

SEQ ID NO: 1450787 - RNA, 19 nt, Homo sapiens
  misc_RNA (1)...(19): siRNA sense strand
agaacgagggcuacuauuu

SEQ ID NO: 1450788 - RNA, 19 nt, Homo sapiens
  misc_RNA (1)...(19): siRNA sense strand
ggucaaaucgggagacaag

SEQ ID NO: 1450789 - RNA, 19 nt, Homo sapiens
  misc_RNA (1)...(19): siRNA sense strand
gcgagacaguggagcugaa

SEQ ID NO: 1450790 - RNA, 19 nt, Homo sapiens
  misc_RNA (1)...(19): siRNA sense strand
gagcaacuccaucauguac

SEQ ID NO: 1450791 - RNA, 19 nt, Homo sapiens
  misc_RNA (1)...(19): siRNA sense strand
gccaggugcugcuguccaa

SEQ ID NO: 1450792 - RNA, 19 nt, Homo sapiens
  misc_RNA (1)...(19): siRNA sense strand
gagagaacgagggcuacua

SEQ ID NO: 1450793 - RNA, 19 nt, Homo sapiens
  misc_RNA (1)...(19): siRNA sense strand
cugagcaacuccaucaugu

SEQ ID NO: 1450794 - RNA, 19 nt, Homo sapiens
  misc_RNA (1)...(19): siRNA sense strand
gagacaagcccagccuuuc

SEQ ID NO: 1450795 - RNA, 19 nt, Homo sapiens
  misc_RNA (1)...(19): siRNA sense strand
gagaacgagggcuacuauu

SEQ ID NO: 1450796 - RNA, 19 nt, Homo sapiens
  misc_RNA (1)...(19): siRNA sense strand
gaaccgaagacguguuugc

SEQ ID NO: 1450797 - RNA, 19 nt, Homo sapiens
  misc_RNA (1)...(19): siRNA sense strand
agagaacgagggcuacuau

SEQ ID NO: 1450798 - RNA, 19 nt, Homo sapiens
  misc_RNA (1)...(19): siRNA sense strand
cgaagacguguuugcaaau

SEQ ID NO: 1450799 - RNA, 19 nt, Homo sapiens
  misc_RNA (1)...(19): siRNA sense strand
gcccugagcaacuccauca

SEQ ID NO: 1450800 - RNA, 19 nt, Homo sapiens
  misc_RNA (1)...(19): siRNA sense strand
ugagcaacuccaucaugua

SEQ ID NO: 1450801 - RNA, 19 nt, Homo sapiens
  misc_RNA (1)...(19): siRNA sense strand
cagcgguucucgggcaaga

SEQ ID NO: 1450802 - RNA, 19 nt, Homo sapiens
  misc_RNA (1)...(19): siRNA sense strand
agacguguuugcaaauguc

SEQ ID NO: 1450803 - RNA, 19 nt, Homo sapiens
  misc_RNA (1)...(19): siRNA sense strand
aacgagggcuacuauuucu

SEQ ID NO: 1450804 - RNA, 19 nt, Homo sapiens
  misc_RNA (1)...(19): siRNA sense strand
agucccaccuuccuccuau

SEQ ID NO: 1450805 - RNA, 19 nt, Homo sapiens
  misc_RNA (1)...(19): siRNA sense strand
aagacguguuugcaaaugu

SEQ ID NO: 1450806 - RNA, 19 nt, Homo sapiens
  misc_RNA (1)...(19): siRNA sense strand
gucccaccuuccuccuaua

SEQ ID NO: 1450807 - RNA, 19 nt, Homo sapiens
  misc_RNA (1)...(19): siRNA sense strand
gaacgagggcuacuauuuc

SEQ ID NO: 1450808 - RNA, 19 nt, Homo sapiens
  misc_RNA (1)...(19): siRNA sense strand
gaagacguguuugcaaaug

SEQ ID NO: 1450809 - RNA, 19 nt, Homo sapiens
  misc_RNA (1)...(19): siRNA sense strand
gcaacuccaucauguacuu

SEQ ID NO: 1450810 - RNA, 19 nt, Homo sapiens
  misc_RNA (1)...(19): siRNA sense strand
ccgaagacguguuugcaaa

SEQ ID NO: 1450811 - RNA, 19 nt, Homo sapiens
  misc_RNA (1)...(19): siRNA sense strand
ggagacaagcccagccuuu

SEQ ID NO: 1450812 - RNA, 19 nt, Homo sapiens
  misc_RNA (1)...(19): siRNA sense strand
agaacgagggcuacuauuu

SEQ ID NO: 1450813 - RNA, 19 nt, Homo sapiens
  misc_RNA (1)...(19): siRNA sense strand
ggucaaaucgggagacaag

SEQ ID NO: 1450814 - RNA, 19 nt, Homo sapiens
  misc_RNA (1)...(19): siRNA sense strand
gcgagacaguggagcugaa

SEQ ID NO: 1450815 - RNA, 19 nt, Homo sapiens
  misc_RNA (1)...(19): siRNA sense strand
gagcaacuccaucauguac

SEQ ID NO: 1450816 - RNA, 19 nt, Homo sapiens
  misc_RNA (1)...(19): siRNA sense strand
gccaggugcugcuguccaa

SEQ ID NO: 1450817 - RNA, 19 nt, Homo sapiens
  misc_RNA (1)...(19): siRNA sense strand
gagagaacgagggcuacua

SEQ ID NO: 1450818 - RNA, 19 nt, Homo sapiens
  misc_RNA (1)...(19): siRNA sense strand
cugagcaacuccaucaugu

SEQ ID NO: 1450819 - RNA, 19 nt, Homo sapiens
  misc_RNA (1)...(19): siRNA sense strand
gagacaagcccagccuuuc

SEQ ID NO: 1450820 - RNA, 19 nt, Homo sapiens
  misc_RNA (1)...(19): siRNA sense strand
gagaacgagggcuacuauu

SEQ ID NO: 1450821 - RNA, 19 nt, Homo sapiens
  misc_RNA (1)...(19): siRNA sense strand
gaaccgaagacguguuugc

SEQ ID NO: 1450822 - RNA, 19 nt, Homo sapiens
  misc_RNA (1)...(19): siRNA sense strand
agagaacgagggcuacuau

SEQ ID NO: 1450823 - RNA, 19 nt, Homo sapiens
  misc_RNA (1)...(19): siRNA sense strand
cgaagacguguuugcaaau

SEQ ID NO: 1450824 - RNA, 19 nt, Homo sapiens
  misc_RNA (1)...(19): siRNA sense strand
gcccugagcaacuccauca

SEQ ID NO: 1450825 - RNA, 19 nt, Homo sapiens
  misc_RNA (1)...(19): siRNA sense strand
ugagcaacuccaucaugua

SEQ ID NO: 1450826 - RNA, 19 nt, Homo sapiens
  misc_RNA (1)...(19): siRNA sense strand
cagcgguucucgggcaaga

SEQ ID NO: 1450827 - RNA, 19 nt, Homo sapiens
  misc_RNA (1)...(19): siRNA sense strand
agacguguuugcaaauguc

SEQ ID NO: 1450828 - RNA, 19 nt, Homo sapiens
  misc_RNA (1)...(19): siRNA sense strand
aacgagggcuacuauuucu

SEQ ID NO: 1450829 - RNA, 19 nt, Homo sapiens
  misc_RNA (1)...(19): siRNA sense strand
agucccaccuuccuccuau

SEQ ID NO: 1450830 - RNA, 19 nt, Homo sapiens
  misc_RNA (1)...(19): siRNA sense strand
aagacguguuugcaaaugu

SEQ ID NO: 1450831 - RNA, 19 nt, Homo sapiens
  misc_RNA (1)...(19): siRNA sense strand
gucccaccuuccuccuaua

SEQ ID NO: 1450832 - RNA, 19 nt, Homo sapiens
  misc_RNA (1)...(19): siRNA sense strand
ggagggaucuggauucauu

SEQ ID NO: 1450833 - RNA, 19 nt, Homo sapiens
  misc_RNA (1)...(19): siRNA sense strand
gaagugcgcccauuauuuc

SEQ ID NO: 1450834 - RNA, 19 nt, Homo sapiens
  misc_RNA (1)...(19): siRNA sense strand
ucccaaaccugaagagaua

SEQ ID NO: 1450835 - RNA, 19 nt, Homo sapiens
  misc_RNA (1)...(19): siRNA sense strand
gagugacugugaucaauuu

SEQ ID NO: 1450836 - RNA, 19 nt, Homo sapiens
  misc_RNA (1)...(19): siRNA sense strand
ugaauucuaucacugcuuu

SEQ ID NO: 1450837 - RNA, 19 nt, Homo sapiens
  misc_RNA (1)...(19): siRNA sense strand
gcgcaaagcagaaaggauu

SEQ ID NO: 1450838 - RNA, 19 nt, Homo sapiens
  misc_RNA (1)...(19): siRNA sense strand
gaaguguccugucagaauc

SEQ ID NO: 1450839 - RNA, 19 nt, Homo sapiens
  misc_RNA (1)...(19): siRNA sense strand
gguggaaccuguacuaagu

SEQ ID NO: 1450840 - RNA, 19 nt, Homo sapiens
  misc_RNA (1)...(19): siRNA sense strand
gaccugaaagugacaauaa

SEQ ID NO: 1450841 - RNA, 19 nt, Homo sapiens
  misc_RNA (1)...(19): siRNA sense strand
ccacgccucugucuucuug

SEQ ID NO: 1450842 - RNA, 19 nt, Homo sapiens
  misc_RNA (1)...(19): siRNA sense strand
cauuagaccuuucuuccuu

SEQ ID NO: 1450843 - RNA, 19 nt, Homo sapiens
  misc_RNA (1)...(19): siRNA sense strand
ggauugagcucugaguauc

SEQ ID NO: 1450844 - RNA, 19 nt, Homo sapiens
  misc_RNA (1)...(19): siRNA sense strand
uuacacaaccauacuagua

SEQ ID NO: 1450845 - RNA, 19 nt, Homo sapiens
  misc_RNA (1)...(19): siRNA sense strand
gucagaaucaggaauauuu

SEQ ID NO: 1450846 - RNA, 19 nt, Homo sapiens
  misc_RNA (1)...(19): siRNA sense strand
gccauggccauuaauguua

SEQ ID NO: 1450847 - RNA, 19 nt, Homo sapiens
  misc_RNA (1)...(19): siRNA sense strand
ugaagugcgcccauuauuu

SEQ ID NO: 1450848 - RNA, 19 nt, Homo sapiens
  misc_RNA (1)...(19): siRNA sense strand
uaacaaaggcuggccgaaa

SEQ ID NO: 1450849 - RNA, 19 nt, Homo sapiens
  misc_RNA (1)...(19): siRNA sense strand
gaaagugacaauaacaaag

SEQ ID NO: 1450850 - RNA, 19 nt, Homo sapiens
  misc_RNA (1)...(19): siRNA sense strand
gcagaaaggauuggagaga

SEQ ID NO: 1450851 - RNA, 19 nt, Homo sapiens
  misc_RNA (1)...(19): siRNA sense strand
agaccaaucucuuguggau

SEQ ID NO: 1450852 - RNA, 19 nt, Homo sapiens
  misc_RNA (1)...(19): siRNA sense strand
uaugugccauggccauuaa

SEQ ID NO: 1450853 - RNA, 19 nt, Homo sapiens
  misc_RNA (1)...(19): siRNA sense strand
gauggacgccuuuaucaca

SEQ ID NO: 1450854 - RNA, 19 nt, Homo sapiens
  misc_RNA (1)...(19): siRNA sense strand
ggagugacugugaucaauu

SEQ ID NO: 1450855 - RNA, 19 nt, Homo sapiens
  misc_RNA (1)...(19): siRNA sense strand
ugaacccuuugacgaauuu

SEQ ID NO: 1450856 - RNA, 19 nt, Homo sapiens
  misc_RNA (1)...(19): siRNA sense strand
ggagggagaaguaccugaa

SEQ ID NO: 1450857 - RNA, 19 nt, Homo sapiens
  misc_RNA (1)...(19): siRNA sense strand
gaauggaaaggcagccaaa

SEQ ID NO: 1450858 - RNA, 19 nt, Homo sapiens
  misc_RNA (1)...(19): siRNA sense strand
ggaaaauauugaacccuuu

SEQ ID NO: 1450859 - RNA, 19 nt, Homo sapiens
  misc_RNA (1)...(19): siRNA sense strand
gcgcgcagaucuugucucu

SEQ ID NO: 1450860 - RNA, 19 nt, Homo sapiens
  misc_RNA (1)...(19): siRNA sense strand
ccagagcugugcgcguuaa

SEQ ID NO: 1450861 - RNA, 19 nt, Homo sapiens
  misc_RNA (1)...(19): siRNA sense strand
cuuaagugcugggcaguaa

SEQ ID NO: 1450862 - RNA, 19 nt, Homo sapiens
  misc_RNA (1)...(19): siRNA sense strand
gcucaugugcucaauggaa

SEQ ID NO: 1450863 - RNA, 19 nt, Homo sapiens
  misc_RNA (1)...(19): siRNA sense strand
gacauccagccucccauua

SEQ ID NO: 1450864 - RNA, 19 nt, Homo sapiens
  misc_RNA (1)...(19): siRNA sense strand
gugcgcccauuauuucauu

SEQ ID NO: 1450865 - RNA, 19 nt, Homo sapiens
  misc_RNA (1)...(19): siRNA sense strand
cagcucaugugcucaaugg

SEQ ID NO: 1450866 - RNA, 19 nt, Homo sapiens
  misc_RNA (1)...(19): siRNA sense strand
ccguggacaugaaugaauu

SEQ ID NO: 1450867 - RNA, 19 nt, Homo sapiens
  misc_RNA (1)...(19): siRNA sense strand
ggccauuaauguuacacaa

SEQ ID NO: 1450868 - RNA, 19 nt, Homo sapiens
  misc_RNA (1)...(19): siRNA sense strand
ucaggaauauuuguuugug

SEQ ID NO: 1450869 - RNA, 19 nt, Homo sapiens
  misc_RNA (1)...(19): siRNA sense strand
ggaccugaaagugacaaua

SEQ ID NO: 1450870 - RNA, 19 nt, Homo sapiens
  misc_RNA (1)...(19): siRNA sense strand
gggauggacgccuuuauca

SEQ ID NO: 1450871 - RNA, 19 nt, Homo sapiens
  misc_RNA (1)...(19): siRNA sense strand
caucugaagugcgcccauu

SEQ ID NO: 1450872 - RNA, 19 nt, Homo sapiens
  misc_RNA (1)...(19): siRNA sense strand
gugaggauaauaacacuga

SEQ ID NO: 1450873 - RNA, 19 nt, Homo sapiens
  misc_RNA (1)...(19): siRNA sense strand
cuacaggauugagcucuga

SEQ ID NO: 1450874 - RNA, 19 nt, Homo sapiens
  misc_RNA (1)...(19): siRNA sense strand
aacaaaggcuggccgaaag

SEQ ID NO: 1450875 - RNA, 19 nt, Homo sapiens
  misc_RNA (1)...(19): siRNA sense strand
gauugugacucugaaugga

SEQ ID NO: 1450876 - RNA, 19 nt, Homo sapiens
  misc_RNA (1)...(19): siRNA sense strand
gcggugccguggacaugaa

SEQ ID NO: 1450877 - RNA, 19 nt, Homo sapiens
  misc_RNA (1)...(19): siRNA sense strand
guacuaagugacuggcauu

SEQ ID NO: 1450878 - RNA, 19 nt, Homo sapiens
  misc_RNA (1)...(19): siRNA sense strand
gagauugugacucugaaug

SEQ ID NO: 1450879 - RNA, 19 nt, Homo sapiens
  misc_RNA (1)...(19): siRNA sense strand
gauauggccacgccucugu

SEQ ID NO: 1450880 - RNA, 19 nt, Homo sapiens
  misc_RNA (1)...(19): siRNA sense strand
uuagaccuuucuuccuuaa

SEQ ID NO: 1450881 - RNA, 19 nt, Homo sapiens
  misc_RNA (1)...(19): siRNA sense strand
uaacacugaggaccugaaa

SEQ ID NO: 1450882 - RNA, 19 nt, Homo sapiens
  misc_RNA (1)...(19): siRNA sense strand
uggaaaggcagccaaauag

SEQ ID NO: 1450883 - RNA, 19 nt, Homo sapiens
  misc_RNA (1)...(19): siRNA sense strand
agaccuuucuuccuuaagu

SEQ ID NO: 1450884 - RNA, 19 nt, Homo sapiens
  misc_RNA (1)...(19): siRNA sense strand
acagucacauuagaccuuu

SEQ ID NO: 1450885 - RNA, 19 nt, Homo sapiens
  misc_RNA (1)...(19): siRNA sense strand
cagauugacacaacauaug

SEQ ID NO: 1450886 - RNA, 19 nt, Homo sapiens
  misc_RNA (1)...(19): siRNA sense strand
ggauucauuccuccucauu

SEQ ID NO: 1450887 - RNA, 19 nt, Homo sapiens
  misc_RNA (1)...(19): siRNA sense strand
gaaccuguacuaagugacu

SEQ ID NO: 1450888 - RNA, 19 nt, Homo sapiens
  misc_RNA (1)...(19): siRNA sense strand
agaaguguccugucagaau

SEQ ID NO: 1450889 - RNA, 19 nt, Homo sapiens
  misc_RNA (1)...(19): siRNA sense strand
ugcauggccuggagcguuu

SEQ ID NO: 1450890 - RNA, 19 nt, Homo sapiens
  misc_RNA (1)...(19): siRNA sense strand
gaccuuucuuccuuaagug

SEQ ID NO: 1450891 - RNA, 19 nt, Homo sapiens
  misc_RNA (1)...(19): siRNA sense strand
gcucaauggaaagcuguua

SEQ ID NO: 1450892 - RNA, 19 nt, Homo sapiens
  misc_RNA (1)...(19): siRNA sense strand
gcagccaaauaggcaguug

SEQ ID NO: 1450893 - RNA, 19 nt, Homo sapiens
  misc_RNA (1)...(19): siRNA sense strand
cauccugggucuggacuug

SEQ ID NO: 1450894 - RNA, 19 nt, Homo sapiens
  misc_RNA (1)...(19): siRNA sense strand
auuagaccuuucuuccuua

SEQ ID NO: 1450895 - RNA, 19 nt, Homo sapiens
  misc_RNA (1)...(19): siRNA sense strand
cguccgcgcugugcuuuga

SEQ ID NO: 1450896 - RNA, 19 nt, Homo sapiens
  misc_RNA (1)...(19): siRNA sense strand
gauucauuccuccucauuu

SEQ ID NO: 1450897 - RNA, 19 nt, Homo sapiens
  misc_RNA (1)...(19): siRNA sense strand
ugacuggcauuuccuccau

SEQ ID NO: 1450898 - RNA, 19 nt, Homo sapiens
  misc_RNA (1)...(19): siRNA sense strand
ggaaaggcagccaaauagg

SEQ ID NO: 1450899 - RNA, 19 nt, Homo sapiens
  misc_RNA (1)...(19): siRNA sense strand
ucucagugcaggaggauuu

SEQ ID NO: 1450900 - RNA, 19 nt, Homo sapiens
  misc_RNA (1)...(19): siRNA sense strand
gaugauuccacuuuguguu

SEQ ID NO: 1450901 - RNA, 19 nt, Homo sapiens
  misc_RNA (1)...(19): siRNA sense strand
cccauacagucacauuaga

SEQ ID NO: 1450902 - RNA, 19 nt, Homo sapiens
  misc_RNA (1)...(19): siRNA sense strand
caggaauauuuguuugugu

SEQ ID NO: 1450903 - RNA, 19 nt, Homo sapiens
  misc_RNA (1)...(19): siRNA sense strand
gaaaauauugaacccuuug

SEQ ID NO: 1450904 - RNA, 19 nt, Homo sapiens
  misc_RNA (1)...(19): siRNA sense strand
auugaacucugugcucuuu

SEQ ID NO: 1450905 - RNA, 19 nt, Homo sapiens
  misc_RNA (1)...(19): siRNA sense strand
cuaagugacuggcauuucc

SEQ ID NO: 1450906 - RNA, 19 nt, Homo sapiens
  misc_RNA (1)...(19): siRNA sense strand
uggaaccuguacuaaguga

SEQ ID NO: 1450907 - RNA, 19 nt, Homo sapiens
  misc_RNA (1)...(19): siRNA sense strand
acacugaggaccugaaagu

SEQ ID NO: 1450908 - RNA, 19 nt, Homo sapiens
  misc_RNA (1)...(19): siRNA sense strand
auggaaaggcagccaaaua

SEQ ID NO: 1450909 - RNA, 19 nt, Homo sapiens
  misc_RNA (1)...(19): siRNA sense strand
uauugaacccuuugacgaa

SEQ ID NO: 1450910 - RNA, 19 nt, Homo sapiens
  misc_RNA (1)...(19): siRNA sense strand
caguuucacuugcucucaa

SEQ ID NO: 1450911 - RNA, 19 nt, Homo sapiens
  misc_RNA (1)...(19): siRNA sense strand
ucagauugacacaacauau

SEQ ID NO: 1450912 - RNA, 19 nt, Homo sapiens
  misc_RNA (1)...(19): siRNA sense strand
cucaugugcucaauggaaa

SEQ ID NO: 1450913 - RNA, 19 nt, Homo sapiens
  misc_RNA (1)...(19): siRNA sense strand
ugaacucugugcucuuucu

SEQ ID NO: 1450914 - RNA, 19 nt, Homo sapiens
  misc_RNA (1)...(19): siRNA sense strand
gcauucaacaacagaagug

SEQ ID NO: 1450915 - RNA, 19 nt, Homo sapiens
  misc_RNA (1)...(19): siRNA sense strand
gauuccacuuuguguuguu

SEQ ID NO: 1450916 - RNA, 19 nt, Homo sapiens
  misc_RNA (1)...(19): siRNA sense strand
uuugaggaguggcaucuga

SEQ ID NO: 1450917 - RNA, 19 nt, Homo sapiens
  misc_RNA (1)...(19): siRNA sense strand
gcuuugagagcgcagacua

SEQ ID NO: 1450918 - RNA, 19 nt, Homo sapiens
  misc_RNA (1)...(19): siRNA sense strand
uggagugacugugaucaau

SEQ ID NO: 1450919 - RNA, 19 nt, Homo sapiens
  misc_RNA (1)...(19): siRNA sense strand
caggauugagcucugagua

SEQ ID NO: 1450920 - RNA, 19 nt, Homo sapiens
  misc_RNA (1)...(19): siRNA sense strand
gcuucgacucgcucuauuu

SEQ ID NO: 1450921 - RNA, 19 nt, Homo sapiens
  misc_RNA (1)...(19): siRNA sense strand
gaacugcuuuuccuuuggu

SEQ ID NO: 1450922 - RNA, 19 nt, Homo sapiens
  misc_RNA (1)...(19): siRNA sense strand
auucauuccuccucauuuc

SEQ ID NO: 1450923 - RNA, 19 nt, Homo sapiens
  misc_RNA (1)...(19): siRNA sense strand
aaggaugauuccacuuugu

SEQ ID NO: 1450924 - RNA, 19 nt, Homo sapiens
  misc_RNA (1)...(19): siRNA sense strand
acugaggaccugaaaguga

SEQ ID NO: 1450925 - RNA, 19 nt, Homo sapiens
  misc_RNA (1)...(19): siRNA sense strand
ucagaaucaggaauauuug

SEQ ID NO: 1450926 - RNA, 19 nt, Homo sapiens
  misc_RNA (1)...(19): siRNA sense strand
aaagugacaauaacaaagg

SEQ ID NO: 1450927 - RNA, 19 nt, Homo sapiens
  misc_RNA (1)...(19): siRNA sense strand
gcccagcguuuuccuaaug

SEQ ID NO: 1450928 - RNA, 19 nt, Homo sapiens
  misc_RNA (1)...(19): siRNA sense strand
ccauggccauuaauguuac

SEQ ID NO: 1450929 - RNA, 19 nt, Homo sapiens
  misc_RNA (1)...(19): siRNA sense strand
aguucaugcugcaacauuu

SEQ ID NO: 1450930 - RNA, 19 nt, Homo sapiens
  misc_RNA (1)...(19): siRNA sense strand
aguaucagauugacacaac

SEQ ID NO: 1450931 - RNA, 19 nt, Homo sapiens
  misc_RNA (1)...(19): siRNA sense strand
ucacauuagaccuuucuuc

SEQ ID NO: 1450932 - RNA, 19 nt, Homo sapiens
  misc_RNA (1)...(19): siRNA sense strand
agaaagcucuccuacauua

SEQ ID NO: 1450933 - RNA, 19 nt, Homo sapiens
  misc_RNA (1)...(19): siRNA sense strand
ugaagaggcuguccagaua

SEQ ID NO: 1450934 - RNA, 19 nt, Homo sapiens
  misc_RNA (1)...(19): siRNA sense strand
caacagugcucuggacaua

SEQ ID NO: 1450935 - RNA, 19 nt, Homo sapiens
  misc_RNA (1)...(19): siRNA sense strand
ucagaaagcucuccuacau

SEQ ID NO: 1450936 - RNA, 19 nt, Homo sapiens
  misc_RNA (1)...(19): siRNA sense strand
gcacugccauccacacaga

SEQ ID NO: 1450937 - RNA, 19 nt, Homo sapiens
  misc_RNA (1)...(19): siRNA sense strand
caacaccuguccuuacugu

SEQ ID NO: 1450938 - RNA, 19 nt, Homo sapiens
  misc_RNA (1)...(19): siRNA sense strand
gaagaggcuguccagauaa

SEQ ID NO: 1450939 - RNA, 19 nt, Homo sapiens
  misc_RNA (1)...(19): siRNA sense strand
gagaugagguagguggaaa

SEQ ID NO: 1450940 - RNA, 19 nt, Homo sapiens
  misc_RNA (1)...(19): siRNA sense strand
caaaggaagagcagagaaa

SEQ ID NO: 1450941 - RNA, 19 nt, Homo sapiens
  misc_RNA (1)...(19): siRNA sense strand
acagugcucuggacauaaa

SEQ ID NO: 1450942 - RNA, 19 nt, Homo sapiens
  misc_RNA (1)...(19): siRNA sense strand
ggaagaagagagagacaga

SEQ ID NO: 1450943 - RNA, 19 nt, Homo sapiens
  misc_RNA (1)...(19): siRNA sense strand
gcacuguagucagagauga

SEQ ID NO: 1450944 - RNA, 19 nt, Homo sapiens
  misc_RNA (1)...(19): siRNA sense strand
gagacagacuacagugaug

SEQ ID NO: 1450945 - RNA, 19 nt, Homo sapiens
  misc_RNA (1)...(19): siRNA sense strand
gaagagagagacagacuac

SEQ ID NO: 1450946 - RNA, 19 nt, Homo sapiens
  misc_RNA (1)...(19): siRNA sense strand
aaagcucuccuacauuaua

SEQ ID NO: 1450947 - RNA, 19 nt, Homo sapiens
  misc_RNA (1)...(19): siRNA sense strand
ugagguagguggaaaagua

SEQ ID NO: 1450948 - RNA, 19 nt, Homo sapiens
  misc_RNA (1)...(19): siRNA sense strand
gcuagguggugcccugauu

SEQ ID NO: 1450949 - RNA, 19 nt, Homo sapiens
  misc_RNA (1)...(19): siRNA sense strand
ccaccaagauagaaaugau

SEQ ID NO: 1450950 - RNA, 19 nt, Homo sapiens
  misc_RNA (1)...(19): siRNA sense strand
uaacacaacaccuguccuu

SEQ ID NO: 1450951 - RNA, 19 nt, Homo sapiens
  misc_RNA (1)...(19): siRNA sense strand
gcaaaggaagagcagagaa

SEQ ID NO: 1450952 - RNA, 19 nt, Homo sapiens
  misc_RNA (1)...(19): siRNA sense strand
aagaggcuguccagauaaa

SEQ ID NO: 1450953 - RNA, 19 nt, Homo sapiens
  misc_RNA (1)...(19): siRNA sense strand
ggaaaaguaccuuauauag

SEQ ID NO: 1450954 - RNA, 19 nt, Homo sapiens
  misc_RNA (1)...(19): siRNA sense strand
gauggagacccacuagaug

SEQ ID NO: 1450955 - RNA, 19 nt, Homo sapiens
  misc_RNA (1)...(19): siRNA sense strand
ccuaagugccaccaagaua

SEQ ID NO: 1450956 - RNA, 19 nt, Homo sapiens
  misc_RNA (1)...(19): siRNA sense strand
aagcucuccuacauuauaa

SEQ ID NO: 1450957 - RNA, 19 nt, Homo sapiens
  misc_RNA (1)...(19): siRNA sense strand
uucaaacugugcauuauga

SEQ ID NO: 1450958 - RNA, 19 nt, Homo sapiens
  misc_RNA (1)...(19): siRNA sense strand
gagagacagacuacaguga

SEQ ID NO: 1450959 - RNA, 19 nt, Homo sapiens
  misc_RNA (1)...(19): siRNA sense strand
ggaacaaccauucuaaagc

SEQ ID NO: 1450960 - RNA, 19 nt, Homo sapiens
  misc_RNA (1)...(19): siRNA sense strand
auauagcacuguagucaga

SEQ ID NO: 1450961 - RNA, 19 nt, Homo sapiens
  misc_RNA (1)...(19): siRNA sense strand
gggcuucucaguccuaaug

SEQ ID NO: 1450962 - RNA, 19 nt, Homo sapiens
  misc_RNA (1)...(19): siRNA sense strand
gcucagcauucagagagaa

SEQ ID NO: 1450963 - RNA, 19 nt, Homo sapiens
  misc_RNA (1)...(19): siRNA sense strand
gcucggaacaaccauucua

SEQ ID NO: 1450964 - RNA, 19 nt, Homo sapiens
  misc_RNA (1)...(19): siRNA sense strand
gauaaaucccaagugcuuu

SEQ ID NO: 1450965 - RNA, 19 nt, Homo sapiens
  misc_RNA (1)...(19): siRNA sense strand
gguggugcccugauuguug

SEQ ID NO: 1450966 - RNA, 19 nt, Homo sapiens
  misc_RNA (1)...(19): siRNA sense strand
gaaagcucuccuacauuau

SEQ ID NO: 1450967 - RNA, 19 nt, Homo sapiens
  misc_RNA (1)...(19): siRNA sense strand
aaauauagcacuguaguca

SEQ ID NO: 1450968 - RNA, 19 nt, Homo sapiens
  misc_RNA (1)...(19): siRNA sense strand
cagaaagcucuccuacauu

SEQ ID NO: 1450969 - RNA, 19 nt, Homo sapiens
  misc_RNA (1)...(19): siRNA sense strand
cacaacaccuguccuuacu

SEQ ID NO: 1450970 - RNA, 19 nt, Homo sapiens
  misc_RNA (1)...(19): siRNA sense strand
agauaaaucccaagugcuu

SEQ ID NO: 1450971 - RNA, 19 nt, Homo sapiens
  misc_RNA (1)...(19): siRNA sense strand
gagagagacagacuacagu

SEQ ID NO: 1450972 - RNA, 19 nt, Homo sapiens
  misc_RNA (1)...(19): siRNA sense strand
uaagugccaccaagauaga

SEQ ID NO: 1450973 - RNA, 19 nt, Homo sapiens
  misc_RNA (1)...(19): siRNA sense strand
agaauucuucgaucacaaa

SEQ ID NO: 1450974 - RNA, 19 nt, Homo sapiens
  misc_RNA (1)...(19): siRNA sense strand
guggaaaaguaccuuauau

SEQ ID NO: 1450975 - RNA, 19 nt, Homo sapiens
  misc_RNA (1)...(19): siRNA sense strand
gaggaggagcaaaggaaga

SEQ ID NO: 1450976 - RNA, 19 nt, Homo sapiens
  misc_RNA (1)...(19): siRNA sense strand
guucaaacugugcauuaug

SEQ ID NO: 1450977 - RNA, 19 nt, Homo sapiens
  misc_RNA (1)...(19): siRNA sense strand
agucagagaugagguaggu

SEQ ID NO: 1450978 - RNA, 19 nt, Homo sapiens
  misc_RNA (1)...(19): siRNA sense strand
cggaacaaccauucuaaag

SEQ ID NO: 1450979 - RNA, 19 nt, Homo sapiens
  misc_RNA (1)...(19): siRNA sense strand
gcuucucaguccuaauguu

SEQ ID NO: 1450980 - RNA, 19 nt, Homo sapiens
  misc_RNA (1)...(19): siRNA sense strand
ugauggagacccacuagau

SEQ ID NO: 1450981 - RNA, 19 nt, Homo sapiens
  misc_RNA (1)...(19): siRNA sense strand
gaugggcuucucaguccua

SEQ ID NO: 1450982 - RNA, 19 nt, Homo sapiens
  misc_RNA (1)...(19): siRNA sense strand
cacuagaugugcacaagag

SEQ ID NO: 1450983 - RNA, 19 nt, Homo sapiens
  misc_RNA (1)...(19): siRNA sense strand
ucucaguccuaauguucuu

SEQ ID NO: 1450984 - RNA, 19 nt, Homo sapiens
  misc_RNA (1)...(19): siRNA sense strand
acacaacaccuguccuuac

SEQ ID NO: 1450985 - RNA, 19 nt, Homo sapiens
  misc_RNA (1)...(19): siRNA sense strand
uggcuaucuuccacuguuu

SEQ ID NO: 1450986 - RNA, 19 nt, Homo sapiens
  misc_RNA (1)...(19): siRNA sense strand
cuaagugccaccaagauag

SEQ ID NO: 1450987 - RNA, 19 nt, Homo sapiens
  misc_RNA (1)...(19): siRNA sense strand
ggcuaucuuccacuguuua

SEQ ID NO: 1450988 - RNA, 19 nt, Homo sapiens
  misc_RNA (1)...(19): siRNA sense strand
ccucagggaagaagagaga

SEQ ID NO: 1450989 - RNA, 19 nt, Homo sapiens
  misc_RNA (1)...(19): siRNA sense strand
gaggcuguccagauaaauc

SEQ ID NO: 1450990 - RNA, 19 nt, Homo sapiens
  misc_RNA (1)...(19): siRNA sense strand
auauagaacagcaucaguu

SEQ ID NO: 1450991 - RNA, 19 nt, Homo sapiens
  misc_RNA (1)...(19): siRNA sense strand
guuggcauggugagauuaa

SEQ ID NO: 1450992 - RNA, 19 nt, Homo sapiens
  misc_RNA (1)...(19): siRNA sense strand
aaaggaagagcagagaaau

SEQ ID NO: 1450993 - RNA, 19 nt, Homo sapiens
  misc_RNA (1)...(19): siRNA sense strand
cauccacacagauaucaug

SEQ ID NO: 1450994 - RNA, 19 nt, Homo sapiens
  misc_RNA (1)...(19): siRNA sense strand
caccaagauagaaaugauu

SEQ ID NO: 1450995 - RNA, 19 nt, Homo sapiens
  misc_RNA (1)...(19): siRNA sense strand
agaagagagagacagacua

SEQ ID NO: 1450996 - RNA, 19 nt, Homo sapiens
  misc_RNA (1)...(19): siRNA sense strand
ccacuagaugugcacaaga

SEQ ID NO: 1450997 - RNA, 19 nt, Homo sapiens
  misc_RNA (1)...(19): siRNA sense strand
gcuaucuuccacuguuuau

SEQ ID NO: 1450998 - RNA, 19 nt, Homo sapiens
  misc_RNA (1)...(19): siRNA sense strand
gguggaaaaguaccuuaua

SEQ ID NO: 1450999 - RNA, 19 nt, Homo sapiens
  misc_RNA (1)...(19): siRNA sense strand
agaaagcucuccuacauua

SEQ ID NO: 1451000 - RNA, 19 nt, Homo sapiens
  misc_RNA (1)...(19): siRNA sense strand
ugaagaggcuguccagaua

SEQ ID NO: 1451001 - RNA, 19 nt, Homo sapiens
  misc_RNA (1)...(19): siRNA sense strand
caacagugcucuggacaua

SEQ ID NO: 1451002 - RNA, 19 nt, Homo sapiens
  misc_RNA (1)...(19): siRNA sense strand
ucagaaagcucuccuacau

SEQ ID NO: 1451003 - RNA, 19 nt, Homo sapiens
  misc_RNA (1)...(19): siRNA sense strand
gcacugccauccacacaga

SEQ ID NO: 1451004 - RNA, 19 nt, Homo sapiens
  misc_RNA (1)...(19): siRNA sense strand
caacaccuguccuuacugu

SEQ ID NO: 1451005 - RNA, 19 nt, Homo sapiens
  misc_RNA (1)...(19): siRNA sense strand
gaagaggcuguccagauaa

SEQ ID NO: 1451006 - RNA, 19 nt, Homo sapiens
  misc_RNA (1)...(19): siRNA sense strand
gagaugagguagguggaaa

SEQ ID NO: 1451007 - RNA, 19 nt, Homo sapiens
  misc_RNA (1)...(19): siRNA sense strand
caaaggaagagcagagaaa

SEQ ID NO: 1451008 - RNA, 19 nt, Homo sapiens
  misc_RNA (1)...(19): siRNA sense strand
acagugcucuggacauaaa

SEQ ID NO: 1451009 - RNA, 19 nt, Homo sapiens
  misc_RNA (1)...(19): siRNA sense strand
ggaagaagagagagacaga

SEQ ID NO: 1451010 - RNA, 19 nt, Homo sapiens
  misc_RNA (1)...(19): siRNA sense strand
gcacuguagucagagauga

SEQ ID NO: 1451011 - RNA, 19 nt, Homo sapiens
  misc_RNA (1)...(19): siRNA sense strand
gagacagacuacagugaug

SEQ ID NO: 1451012 - RNA, 19 nt, Homo sapiens
  misc_RNA (1)...(19): siRNA sense strand
gaagagagagacagacuac

SEQ ID NO: 1451013 - RNA, 19 nt, Homo sapiens
  misc_RNA (1)...(19): siRNA sense strand
aaagcucuccuacauuaua

SEQ ID NO: 1451014 - RNA, 19 nt, Homo sapiens
  misc_RNA (1)...(19): siRNA sense strand
ugagguagguggaaaagua

SEQ ID NO: 1451015 - RNA, 19 nt, Homo sapiens
  misc_RNA (1)...(19): siRNA sense strand
gcuagguggugcccugauu

SEQ ID NO: 1451016 - RNA, 19 nt, Homo sapiens
  misc_RNA (1)...(19): siRNA sense strand
ccaccaagauagaaaugau

SEQ ID NO: 1451017 - RNA, 19 nt, Homo sapiens
  misc_RNA (1)...(19): siRNA sense strand
uaacacaacaccuguccuu

SEQ ID NO: 1451018 - RNA, 19 nt, Homo sapiens
  misc_RNA (1)...(19): siRNA sense strand
gcaaaggaagagcagagaa

SEQ ID NO: 1451019 - RNA, 19 nt, Homo sapiens
  misc_RNA (1)...(19): siRNA sense strand
aagaggcuguccagauaaa

SEQ ID NO: 1451020 - RNA, 19 nt, Homo sapiens
  misc_RNA (1)...(19): siRNA sense strand
ggaaaaguaccuuauauag

SEQ ID NO: 1451021 - RNA, 19 nt, Homo sapiens
  misc_RNA (1)...(19): siRNA sense strand
gauggagacccacuagaug

SEQ ID NO: 1451022 - RNA, 19 nt, Homo sapiens
  misc_RNA (1)...(19): siRNA sense strand
ccuaagugccaccaagaua

SEQ ID NO: 1451023 - RNA, 19 nt, Homo sapiens
  misc_RNA (1)...(19): siRNA sense strand
aagcucuccuacauuauaa

SEQ ID NO: 1451024 - RNA, 19 nt, Homo sapiens
  misc_RNA (1)...(19): siRNA sense strand
uucaaacugugcauuauga

SEQ ID NO: 1451025 - RNA, 19 nt, Homo sapiens
  misc_RNA (1)...(19): siRNA sense strand
gagagacagacuacaguga

SEQ ID NO: 1451026 - RNA, 19 nt, Homo sapiens
  misc_RNA (1)...(19): siRNA sense strand
ggaacaaccauucuaaagc

SEQ ID NO: 1451027 - RNA, 19 nt, Homo sapiens
  misc_RNA (1)...(19): siRNA sense strand
auauagcacuguagucaga

SEQ ID NO: 1451028 - RNA, 19 nt, Homo sapiens
  misc_RNA (1)...(19): siRNA sense strand
gggcuucucaguccuaaug

SEQ ID NO: 1451029 - RNA, 19 nt, Homo sapiens
  misc_RNA (1)...(19): siRNA sense strand
gcucagcauucagagagaa

SEQ ID NO: 1451030 - RNA, 19 nt, Homo sapiens
  misc_RNA (1)...(19): siRNA sense strand
gcucggaacaaccauucua

SEQ ID NO: 1451031 - RNA, 19 nt, Homo sapiens
  misc_RNA (1)...(19): siRNA sense strand
gauaaaucccaagugcuuu

SEQ ID NO: 1451032 - RNA, 19 nt, Homo sapiens
  misc_RNA (1)...(19): siRNA sense strand
gguggugcccugauuguug

SEQ ID NO: 1451033 - RNA, 19 nt, Homo sapiens
  misc_RNA (1)...(19): siRNA sense strand
gaaagcucuccuacauuau

SEQ ID NO: 1451034 - RNA, 19 nt, Homo sapiens
  misc_RNA (1)...(19): siRNA sense strand
aaauauagcacuguaguca

SEQ ID NO: 1451035 - RNA, 19 nt, Homo sapiens
  misc_RNA (1)...(19): siRNA sense strand
cagaaagcucuccuacauu

SEQ ID NO: 1451036 - RNA, 19 nt, Homo sapiens
  misc_RNA (1)...(19): siRNA sense strand
cacaacaccuguccuuacu

SEQ ID NO: 1451037 - RNA, 19 nt, Homo sapiens
  misc_RNA (1)...(19): siRNA sense strand
agauaaaucccaagugcuu

SEQ ID NO: 1451038 - RNA, 19 nt, Homo sapiens
  misc_RNA (1)...(19): siRNA sense strand
gagagagacagacuacagu

SEQ ID NO: 1451039 - RNA, 19 nt, Homo sapiens
  misc_RNA (1)...(19): siRNA sense strand
uaagugccaccaagauaga

SEQ ID NO: 1451040 - RNA, 19 nt, Homo sapiens
  misc_RNA (1)...(19): siRNA sense strand
agaauucuucgaucacaaa

SEQ ID NO: 1451041 - RNA, 19 nt, Homo sapiens
  misc_RNA (1)...(19): siRNA sense strand
guggaaaaguaccuuauau

SEQ ID NO: 1451042 - RNA, 19 nt, Homo sapiens
  misc_RNA (1)...(19): siRNA sense strand
gaggaggagcaaaggaaga

SEQ ID NO: 1451043 - RNA, 19 nt, Homo sapiens
  misc_RNA (1)...(19): siRNA sense strand
guucaaacugugcauuaug

SEQ ID NO: 1451044 - RNA, 19 nt, Homo sapiens
  misc_RNA (1)...(19): siRNA sense strand
agucagagaugagguaggu

SEQ ID NO: 1451045 - RNA, 19 nt, Homo sapiens
  misc_RNA (1)...(19): siRNA sense strand
cggaacaaccauucuaaag

SEQ ID NO: 1451046 - RNA, 19 nt, Homo sapiens
  misc_RNA (1)...(19): siRNA sense strand
gcuucucaguccuaauguu

SEQ ID NO: 1451047 - RNA, 19 nt, Homo sapiens
  misc_RNA (1)...(19): siRNA sense strand
ugauggagacccacuagau

SEQ ID NO: 1451048 - RNA, 19 nt, Homo sapiens
  misc_RNA (1)...(19): siRNA sense strand
gaugggcuucucaguccua

SEQ ID NO: 1451049 - RNA, 19 nt, Homo sapiens
  misc_RNA (1)...(19): siRNA sense strand
cacuagaugugcacaagag

SEQ ID NO: 1451050 - RNA, 19 nt, Homo sapiens
  misc_RNA (1)...(19): siRNA sense strand
ucucaguccuaauguucuu

SEQ ID NO: 1451051 - RNA, 19 nt, Homo sapiens
  misc_RNA (1)...(19): siRNA sense strand
acacaacaccuguccuuac

SEQ ID NO: 1451052 - RNA, 19 nt, Homo sapiens
  misc_RNA (1)...(19): siRNA sense strand
uggcuaucuuccacuguuu

SEQ ID NO: 1451053 - RNA, 19 nt, Homo sapiens
  misc_RNA (1)...(19): siRNA sense strand
cuaagugccaccaagauag

SEQ ID NO: 1451054 - RNA, 19 nt, Homo sapiens
  misc_RNA (1)...(19): siRNA sense strand
ggcuaucuuccacuguuua

SEQ ID NO: 1451055 - RNA, 19 nt, Homo sapiens
  misc_RNA (1)...(19): siRNA sense strand
ccucagggaagaagagaga

SEQ ID NO: 1451056 - RNA, 19 nt, Homo sapiens
  misc_RNA (1)...(19): siRNA sense strand
gaggcuguccagauaaauc

SEQ ID NO: 1451057 - RNA, 19 nt, Homo sapiens
  misc_RNA (1)...(19): siRNA sense strand
auauagaacagcaucaguu

SEQ ID NO: 1451058 - RNA, 19 nt, Homo sapiens
  misc_RNA (1)...(19): siRNA sense strand
guuggcauggugagauuaa

SEQ ID NO: 1451059 - RNA, 19 nt, Homo sapiens
  misc_RNA (1)...(19): siRNA sense strand
aaaggaagagcagagaaau

SEQ ID NO: 1451060 - RNA, 19 nt, Homo sapiens
  misc_RNA (1)...(19): siRNA sense strand
cauccacacagauaucaug

SEQ ID NO: 1451061 - RNA, 19 nt, Homo sapiens
  misc_RNA (1)...(19): siRNA sense strand
caccaagauagaaaugauu

SEQ ID NO: 1451062 - RNA, 19 nt, Homo sapiens
  misc_RNA (1)...(19): siRNA sense strand
agaagagagagacagacua

SEQ ID NO: 1451063 - RNA, 19 nt, Homo sapiens
  misc_RNA (1)...(19): siRNA sense strand
ccacuagaugugcacaaga

SEQ ID NO: 1451064 - RNA, 19 nt, Homo sapiens
  misc_RNA (1)...(19): siRNA sense strand
gcuaucuuccacuguuuau

SEQ ID NO: 1451065 - RNA, 19 nt, Homo sapiens
  misc_RNA (1)...(19): siRNA sense strand
gguggaaaaguaccuuaua

SEQ ID NO: 1451066 - RNA, 19 nt, Homo sapiens
  misc_RNA (1)...(19): siRNA sense strand
agaaagcucuccuacauua

SEQ ID NO: 1451067 - RNA, 19 nt, Homo sapiens
  misc_RNA (1)...(19): siRNA sense strand
ugaagaggcuguccagaua

SEQ ID NO: 1451068 - RNA, 19 nt, Homo sapiens
  misc_RNA (1)...(19): siRNA sense strand
caacagugcucuggacaua

SEQ ID NO: 1451069 - RNA, 19 nt, Homo sapiens
  misc_RNA (1)...(19): siRNA sense strand
ucagaaagcucuccuacau

SEQ ID NO: 1451070 - RNA, 19 nt, Homo sapiens
  misc_RNA (1)...(19): siRNA sense strand
gcacugccauccacacaga

SEQ ID NO: 1451071 - RNA, 19 nt, Homo sapiens
  misc_RNA (1)...(19): siRNA sense strand
caacaccuguccuuacugu

SEQ ID NO: 1451072 - RNA, 19 nt, Homo sapiens
  misc_RNA (1)...(19): siRNA sense strand
gaagaggcuguccagauaa

SEQ ID NO: 1451073 - RNA, 19 nt, Homo sapiens
  misc_RNA (1)...(19): siRNA sense strand
gagaugagguagguggaaa

SEQ ID NO: 1451074 - RNA, 19 nt, Homo sapiens
  misc_RNA (1)...(19): siRNA sense strand
caaaggaagagcagagaaa

SEQ ID NO: 1451075 - RNA, 19 nt, Homo sapiens
  misc_RNA (1)...(19): siRNA sense strand
acagugcucuggacauaaa

SEQ ID NO: 1451076 - RNA, 19 nt, Homo sapiens
  misc_RNA (1)...(19): siRNA sense strand
ggaagaagagagagacaga

SEQ ID NO: 1451077 - RNA, 19 nt, Homo sapiens
  misc_RNA (1)...(19): siRNA sense strand
gcacuguagucagagauga

SEQ ID NO: 1451078 - RNA, 19 nt, Homo sapiens
  misc_RNA (1)...(19): siRNA sense strand
gagacagacuacagugaug

SEQ ID NO: 1451079 - RNA, 19 nt, Homo sapiens
  misc_RNA (1)...(19): siRNA sense strand
gaagagagagacagacuac

SEQ ID NO: 1451080 - RNA, 19 nt, Homo sapiens
  misc_RNA (1)...(19): siRNA sense strand
aaagcucuccuacauuaua

SEQ ID NO: 1451081 - RNA, 19 nt, Homo sapiens
  misc_RNA (1)...(19): siRNA sense strand
ugagguagguggaaaagua

SEQ ID NO: 1451082 - RNA, 19 nt, Homo sapiens
  misc_RNA (1)...(19): siRNA sense strand
gcuagguggugcccugauu

SEQ ID NO: 1451083 - RNA, 19 nt, Homo sapiens
  misc_RNA (1)...(19): siRNA sense strand
ccaccaagauagaaaugau

SEQ ID NO: 1451084 - RNA, 19 nt, Homo sapiens
  misc_RNA (1)...(19): siRNA sense strand
uaacacaacaccuguccuu

SEQ ID NO: 1451085 - RNA, 19 nt, Homo sapiens
  misc_RNA (1)...(19): siRNA sense strand
gcaaaggaagagcagagaa

SEQ ID NO: 1451086 - RNA, 19 nt, Homo sapiens
  misc_RNA (1)...(19): siRNA sense strand
aagaggcuguccagauaaa

SEQ ID NO: 1451087 - RNA, 19 nt, Homo sapiens
  misc_RNA (1)...(19): siRNA sense strand
ggaaaaguaccuuauauag

SEQ ID NO: 1451088 - RNA, 19 nt, Homo sapiens
  misc_RNA (1)...(19): siRNA sense strand
gauggagacccacuagaug

SEQ ID NO: 1451089 - RNA, 19 nt, Homo sapiens
  misc_RNA (1)...(19): siRNA sense strand
ccuaagugccaccaagaua

SEQ ID NO: 1451090 - RNA, 19 nt, Homo sapiens
  misc_RNA (1)...(19): siRNA sense strand
aagcucuccuacauuauaa

SEQ ID NO: 1451091 - RNA, 19 nt, Homo sapiens
  misc_RNA (1)...(19): siRNA sense strand
uucaaacugugcauuauga

SEQ ID NO: 1451092 - RNA, 19 nt, Homo sapiens
  misc_RNA (1)...(19): siRNA sense strand
gagagacagacuacaguga

SEQ ID NO: 1451093 - RNA, 19 nt, Homo sapiens
  misc_RNA (1)...(19): siRNA sense strand
ggaacaaccauucuaaagc

SEQ ID NO: 1451094 - RNA, 19 nt, Homo sapiens
  misc_RNA (1)...(19): siRNA sense strand
auauagcacuguagucaga

SEQ ID NO: 1451095 - RNA, 19 nt, Homo sapiens
  misc_RNA (1)...(19): siRNA sense strand
gggcuucucaguccuaaug

SEQ ID NO: 1451096 - RNA, 19 nt, Homo sapiens
  misc_RNA (1)...(19): siRNA sense strand
gcucagcauucagagagaa

SEQ ID NO: 1451097 - RNA, 19 nt, Homo sapiens
  misc_RNA (1)...(19): siRNA sense strand
gcucggaacaaccauucua

SEQ ID NO: 1451098 - RNA, 19 nt, Homo sapiens
  misc_RNA (1)...(19): siRNA sense strand
gauaaaucccaagugcuuu

SEQ ID NO: 1451099 - RNA, 19 nt, Homo sapiens
  misc_RNA (1)...(19): siRNA sense strand
gguggugcccugauuguug

SEQ ID NO: 1451100 - RNA, 19 nt, Homo sapiens
  misc_RNA (1)...(19): siRNA sense strand
gaaagcucuccuacauuau

SEQ ID NO: 1451101 - RNA, 19 nt, Homo sapiens
  misc_RNA (1)...(19): siRNA sense strand
aaauauagcacuguaguca

SEQ ID NO: 1451102 - RNA, 19 nt, Homo sapiens
  misc_RNA (1)...(19): siRNA sense strand
cagaaagcucuccuacauu

SEQ ID NO: 1451103 - RNA, 19 nt, Homo sapiens
  misc_RNA (1)...(19): siRNA sense strand
cacaacaccuguccuuacu

SEQ ID NO: 1451104 - RNA, 19 nt, Homo sapiens
  misc_RNA (1)...(19): siRNA sense strand
agauaaaucccaagugcuu

SEQ ID NO: 1451105 - RNA, 19 nt, Homo sapiens
  misc_RNA (1)...(19): siRNA sense strand
gagagagacagacuacagu

SEQ ID NO: 1451106 - RNA, 19 nt, Homo sapiens
  misc_RNA (1)...(19): siRNA sense strand
uaagugccaccaagauaga

SEQ ID NO: 1451107 - RNA, 19 nt, Homo sapiens
  misc_RNA (1)...(19): siRNA sense strand
agaauucuucgaucacaaa

SEQ ID NO: 1451108 - RNA, 19 nt, Homo sapiens
  misc_RNA (1)...(19): siRNA sense strand
guggaaaaguaccuuauau

SEQ ID NO: 1451109 - RNA, 19 nt, Homo sapiens
  misc_RNA (1)...(19): siRNA sense strand
gaggaggagcaaaggaaga

SEQ ID NO: 1451110 - RNA, 19 nt, Homo sapiens
  misc_RNA (1)...(19): siRNA sense strand
guucaaacugugcauuaug

SEQ ID NO: 1451111 - RNA, 19 nt, Homo sapiens
  misc_RNA (1)...(19): siRNA sense strand
agucagagaugagguaggu

SEQ ID NO: 1451112 - RNA, 19 nt, Homo sapiens
  misc_RNA (1)...(19): siRNA sense strand
cggaacaaccauucuaaag

SEQ ID NO: 1451113 - RNA, 19 nt, Homo sapiens
  misc_RNA (1)...(19): siRNA sense strand
gcuucucaguccuaauguu

SEQ ID NO: 1451114 - RNA, 19 nt, Homo sapiens
  misc_RNA (1)...(19): siRNA sense strand
ugauggagacccacuagau

SEQ ID NO: 1451115 - RNA, 19 nt, Homo sapiens
  misc_RNA (1)...(19): siRNA sense strand
gaugggcuucucaguccua

SEQ ID NO: 1451116 - RNA, 19 nt, Homo sapiens
  misc_RNA (1)...(19): siRNA sense strand
cacuagaugugcacaagag

SEQ ID NO: 1451117 - RNA, 19 nt, Homo sapiens
  misc_RNA (1)...(19): siRNA sense strand
ucucaguccuaauguucuu

SEQ ID NO: 1451118 - RNA, 19 nt, Homo sapiens
  misc_RNA (1)...(19): siRNA sense strand
acacaacaccuguccuuac

SEQ ID NO: 1451119 - RNA, 19 nt, Homo sapiens
  misc_RNA (1)...(19): siRNA sense strand
uggcuaucuuccacuguuu

SEQ ID NO: 1451120 - RNA, 19 nt, Homo sapiens
  misc_RNA (1)...(19): siRNA sense strand
cuaagugccaccaagauag

SEQ ID NO: 1451121 - RNA, 19 nt, Homo sapiens
  misc_RNA (1)...(19): siRNA sense strand
ggcuaucuuccacuguuua

SEQ ID NO: 1451122 - RNA, 19 nt, Homo sapiens
  misc_RNA (1)...(19): siRNA sense strand
ccucagggaagaagagaga

SEQ ID NO: 1451123 - RNA, 19 nt, Homo sapiens
  misc_RNA (1)...(19): siRNA sense strand
gaggcuguccagauaaauc

SEQ ID NO: 1451124 - RNA, 19 nt, Homo sapiens
  misc_RNA (1)...(19): siRNA sense strand
auauagaacagcaucaguu

SEQ ID NO: 1451125 - RNA, 19 nt, Homo sapiens
  misc_RNA (1)...(19): siRNA sense strand
guuggcauggugagauuaa

SEQ ID NO: 1451126 - RNA, 19 nt, Homo sapiens
  misc_RNA (1)...(19): siRNA sense strand
aaaggaagagcagagaaau

SEQ ID NO: 1451127 - RNA, 19 nt, Homo sapiens
  misc_RNA (1)...(19): siRNA sense strand
cauccacacagauaucaug

SEQ ID NO: 1451128 - RNA, 19 nt, Homo sapiens
  misc_RNA (1)...(19): siRNA sense strand
caccaagauagaaaugauu

SEQ ID NO: 1451129 - RNA, 19 nt, Homo sapiens
  misc_RNA (1)...(19): siRNA sense strand
agaagagagagacagacua

SEQ ID NO: 1451130 - RNA, 19 nt, Homo sapiens
  misc_RNA (1)...(19): siRNA sense strand
ccacuagaugugcacaaga

SEQ ID NO: 1451131 - RNA, 19 nt, Homo sapiens
  misc_RNA (1)...(19): siRNA sense strand
gcuaucuuccacuguuuau

SEQ ID NO: 1451132 - RNA, 19 nt, Homo sapiens
  misc_RNA (1)...(19): siRNA sense strand
gguggaaaaguaccuuaua

SEQ ID NO: 1451133 - RNA, 19 nt, Homo sapiens
  misc_RNA (1)...(19): siRNA sense strand
agaaagcucuccuacauua

SEQ ID NO: 1451134 - RNA, 19 nt, Homo sapiens
  misc_RNA (1)...(19): siRNA sense strand
ugaagaggcuguccagaua

SEQ ID NO: 1451135 - RNA, 19 nt, Homo sapiens
  misc_RNA (1)...(19): siRNA sense strand
caacagugcucuggacaua

SEQ ID NO: 1451136 - RNA, 19 nt, Homo sapiens
  misc_RNA (1)...(19): siRNA sense strand
ucagaaagcucuccuacau

SEQ ID NO: 1451137 - RNA, 19 nt, Homo sapiens
  misc_RNA (1)...(19): siRNA sense strand
gcacugccauccacacaga

SEQ ID NO: 1451138 - RNA, 19 nt, Homo sapiens
  misc_RNA (1)...(19): siRNA sense strand
caacaccuguccuuacugu

SEQ ID NO: 1451139 - RNA, 19 nt, Homo sapiens
  misc_RNA (1)...(19): siRNA sense strand
gaagaggcuguccagauaa

SEQ ID NO: 1451140 - RNA, 19 nt, Homo sapiens
  misc_RNA (1)...(19): siRNA sense strand
gagaugagguagguggaaa

SEQ ID NO: 1451141 - RNA, 19 nt, Homo sapiens
  misc_RNA (1)...(19): siRNA sense strand
caaaggaagagcagagaaa

SEQ ID NO: 1451142 - RNA, 19 nt, Homo sapiens
  misc_RNA (1)...(19): siRNA sense strand
acagugcucuggacauaaa

SEQ ID NO: 1451143 - RNA, 19 nt, Homo sapiens
  misc_RNA (1)...(19): siRNA sense strand
ggaagaagagagagacaga

SEQ ID NO: 1451144 - RNA, 19 nt, Homo sapiens
  misc_RNA (1)...(19): siRNA sense strand
gcacuguagucagagauga

SEQ ID NO: 1451145 - RNA, 19 nt, Homo sapiens
  misc_RNA (1)...(19): siRNA sense strand
gagacagacuacagugaug

SEQ ID NO: 1451146 - RNA, 19 nt, Homo sapiens
  misc_RNA (1)...(19): siRNA sense strand
gaagagagagacagacuac

SEQ ID NO: 1451147 - RNA, 19 nt, Homo sapiens
  misc_RNA (1)...(19): siRNA sense strand
aaagcucuccuacauuaua

SEQ ID NO: 1451148 - RNA, 19 nt, Homo sapiens
  misc_RNA (1)...(19): siRNA sense strand
ugagguagguggaaaagua

SEQ ID NO: 1451149 - RNA, 19 nt, Homo sapiens
  misc_RNA (1)...(19): siRNA sense strand
gcuagguggugcccugauu

SEQ ID NO: 1451150 - RNA, 19 nt, Homo sapiens
  misc_RNA (1)...(19): siRNA sense strand
ccaccaagauagaaaugau

SEQ ID NO: 1451151 - RNA, 19 nt, Homo sapiens
  misc_RNA (1)...(19): siRNA sense strand
uaacacaacaccuguccuu

SEQ ID NO: 1451152 - RNA, 19 nt, Homo sapiens
  misc_RNA (1)...(19): siRNA sense strand
gcaaaggaagagcagagaa

SEQ ID NO: 1451153 - RNA, 19 nt, Homo sapiens
  misc_RNA (1)...(19): siRNA sense strand
aagaggcuguccagauaaa

SEQ ID NO: 1451154 - RNA, 19 nt, Homo sapiens
  misc_RNA (1)...(19): siRNA sense strand
ggaaaaguaccuuauauag

SEQ ID NO: 1451155 - RNA, 19 nt, Homo sapiens
  misc_RNA (1)...(19): siRNA sense strand
gauggagacccacuagaug

SEQ ID NO: 1451156 - RNA, 19 nt, Homo sapiens
  misc_RNA (1)...(19): siRNA sense strand
ccuaagugccaccaagaua

SEQ ID NO: 1451157 - RNA, 19 nt, Homo sapiens
  misc_RNA (1)...(19): siRNA sense strand
aagcucuccuacauuauaa

SEQ ID NO: 1451158 - RNA, 19 nt, Homo sapiens
  misc_RNA (1)...(19): siRNA sense strand
uucaaacugugcauuauga

SEQ ID NO: 1451159 - RNA, 19 nt, Homo sapiens
  misc_RNA (1)...(19): siRNA sense strand
gagagacagacuacaguga

SEQ ID NO: 1451160 - RNA, 19 nt, Homo sapiens
  misc_RNA (1)...(19): siRNA sense strand
ggaacaaccauucuaaagc

SEQ ID NO: 1451161 - RNA, 19 nt, Homo sapiens
  misc_RNA (1)...(19): siRNA sense strand
auauagcacuguagucaga

SEQ ID NO: 1451162 - RNA, 19 nt, Homo sapiens
  misc_RNA (1)...(19): siRNA sense strand
gggcuucucaguccuaaug

SEQ ID NO: 1451163 - RNA, 19 nt, Homo sapiens
  misc_RNA (1)...(19): siRNA sense strand
gcucagcauucagagagaa

SEQ ID NO: 1451164 - RNA, 19 nt, Homo sapiens
  misc_RNA (1)...(19): siRNA sense strand
gcucggaacaaccauucua

SEQ ID NO: 1451165 - RNA, 19 nt, Homo sapiens
  misc_RNA (1)...(19): siRNA sense strand
gauaaaucccaagugcuuu

SEQ ID NO: 1451166 - RNA, 19 nt, Homo sapiens
  misc_RNA (1)...(19): siRNA sense strand
gguggugcccugauuguug

SEQ ID NO: 1451167 - RNA, 19 nt, Homo sapiens
  misc_RNA (1)...(19): siRNA sense strand
gaaagcucuccuacauuau

SEQ ID NO: 1451168 - RNA, 19 nt, Homo sapiens
  misc_RNA (1)...(19): siRNA sense strand
aaauauagcacuguaguca

SEQ ID NO: 1451169 - RNA, 19 nt, Homo sapiens
  misc_RNA (1)...(19): siRNA sense strand
cagaaagcucuccuacauu

SEQ ID NO: 1451170 - RNA, 19 nt, Homo sapiens
  misc_RNA (1)...(19): siRNA sense strand
cacaacaccuguccuuacu

SEQ ID NO: 1451171 - RNA, 19 nt, Homo sapiens
  misc_RNA (1)...(19): siRNA sense strand
agauaaaucccaagugcuu

SEQ ID NO: 1451172 - RNA, 19 nt, Homo sapiens
  misc_RNA (1)...(19): siRNA sense strand
gagagagacagacuacagu

SEQ ID NO: 1451173 - RNA, 19 nt, Homo sapiens
  misc_RNA (1)...(19): siRNA sense strand
uaagugccaccaagauaga

SEQ ID NO: 1451174 - RNA, 19 nt, Homo sapiens
  misc_RNA (1)...(19): siRNA sense strand
agaauucuucgaucacaaa

SEQ ID NO: 1451175 - RNA, 19 nt, Homo sapiens
  misc_RNA (1)...(19): siRNA sense strand
guggaaaaguaccuuauau

SEQ ID NO: 1451176 - RNA, 19 nt, Homo sapiens
  misc_RNA (1)...(19): siRNA sense strand
gaggaggagcaaaggaaga

SEQ ID NO: 1451177 - RNA, 19 nt, Homo sapiens
  misc_RNA (1)...(19): siRNA sense strand
guucaaacugugcauuaug
